United States Patent Application Publication US 2020/0109395 A1 - sequence listing, part 3

SEQ ID NO: 10159 - DNA, 3453 bp, Nitrosococcus oceani
atgtccctgaaggaatggatcacgggccttgttggcgccaaggcgacgggttgcgcttggaattacgattccgagggcattaattttatcttcactgaaaaacaaggattgcaggttcgtagcggcggtgcaaatgacctgctgatacatcagtatattgccctaagcatgctagtcgaacaggggcaggcagaagagttgcctaacggtgtgctcgtcccttcggacgttgtggtacaactagacgaaaatacccgcctactgttggggctgcccgaccgatggaagggcgtcctcaatgcaaacatcaagggtaagacgggcagcgcatcttttcaggtagagctggccgctgcggatgcggggggcggatttacgcatggtttttcagtagaggggccagtcattcgcttttcggcggaaaaacattatgtgctgtctcctgctcatttactcatatttgaggcacataagaagcatacacattctgcgaagacggagtatgatgacctaagtctcgttctctcgttgcaaaaggctcaagagctgggcgcttcgatctctctgggccattttgaaaagctcaatattcgcacgccagcatcgattacggttgcagccgagctagacgaacacggtcgcctcgtgcttacgccacagatgggtcaggcggcgagtcatgaacgtattcaacgcgttcttgggcaattgagggtagagcaagcgacttctctccgtgtagacggcgaaattattctcttcgatgaagaaaaattggcggccgttcgggaaatccttcggaaccgtgtgataccgaaggataaagtgaatgcttttctcaaaaacccaactgcatttatcaatgccagcctcgtagagttagatcttggtttttcggctagagtgaagggagcgacgaaattcaggcatgcgtattttggtgagaccgatgaatccggcatcgattggttcggtaaaaaattctcgcctacggaggtattcgcgccagcaaagttagtggatgtcgtatcagatagagatcaattagacgacgttcggcagaaactagcgaatgtcgccgaaacaggcgctcaggagatggaatttgaaggccggatcttcgatgtttctaacccgaagctagtcaattccatcttggagaagcttgaacgtaaactgattgaaggcaatgtcaccatagaagaaagggaaaatgtttcggctgttgaagccgatagtgccagcaagaaagagcaagcggaacccacagttgtcgatattgggctcaacgatgtagatttagaaacgccttcagcttcacttgatagcgtgattaatgacgtccttatcgccgaagctgcgctcgactggggcactttcaagcgattgccatttcctcaccaggtgttgggtacgcgctggatcttggggctggcattagaccgcgacggacgcggtggaggtcttcttgcggatgacatgggactaggaaaaacattcatgtcccttgcagccatggagcatctatacaaatcgtatcgagaccgaaagcttgccgagaagccttgccttgtcgttgcacctttgggcctgttgcagaactggaaggatgaggtcggtcaaacttttaaggagtcgcctttcaacgatatcgttatcctgcagtcggatgggcggctttctgagttccgagcaggaggcgttgagacaaaaaaccagaatattactgaggatgaaaccgctcctatccggtattcactgaagatcggtagcggttttgcgcaggaacgacttgacctaccgaagcgcttggtgattaccacctaccaaatgttgcgagactatcaattctctctttgctcaatcgattgggggatagtggtattcgatgaagctcagaacataaaaaatccaaatgccttgcaaacacgggcggcaaagggagtcaaagcggatttcaggctgatcgctacgggaacgccggttgaaaatagccttacagatttttggtgcctaatggatacagcctgtcctggtctcttggatagctatcaagcgtttcgtagtgcttacatcacgccgatactgcgcgcggctggagatgaaattgaacatgtcagaggcgttgttggccggcggcttcgagaacatgttggaccttggatgctgcgccgcgtgaaagaggataatctggaaggtctgccggataagtccgttttcgtgggtatgaaggatgatatttgggcgtattctccagcgctgcattccacgctggaagagggccagcttgagtcctatgacacaattcttatgcgtgcctccagttcagatagcaatgtcgcattggctgcgttgcagaagctcagagatgtttctttgcatccacgactcgtatttggcggggggctagacacgccgcgccaattagcagattgggtaaatttgacagacgaatccgggaaaattcgtagtttgctgtctattttggatcaaattcgggatcggggcgaaaaatgcatcatttttgtaatcaataagaagctccaagcatttctcgcattggccttagcaaagatatatttgctgccccctgtttcagtcataaatggtgacgcgaaagcggtggcaaagagggcagcaagacccactcgacaaagcatgataagagcttttgaggataggggcggatttaatattatcatcatgtcgccgatagccgcgggcgttggacttactgtggtcggcgccaataacgttattcatctggaacgtcattggaacccggcgaaagaagctcaggcaaccgaccgtgtctaccgcatcggacaaaagcggaaggtaaatgtctttattcctttgattcaccatcctgaataccagtcttttgatgtcaatttgcatcaacttttgtcgagaaaagggcagttgaaagatgcagtagttactccagagcaggtaatgccttcacctgaaggtttacatcaggggaattggtctccaagtcagcgcatttcgtttaatgagttgagaaatctgagttggcaacaatttgaggcgctgtgcgcagaattgctgtacaaagaatatcaagtggataactgttggttgacacacagtggcgcggattttggtgctgatgttgttttaacgaaaaatggaattgggttattggttcagtgcaagcatacgagcggtagtgcttatgatggttacaaggctattctcgaagttcactctgccacagtcaaatacgaagcggaactcggtaagcggatcgattctttgatacttgctacgaatgccgtgtgtttgggatcagcgactcaaaagaccgcaacacagtactcggttgaaattttagatggaaagatgctctcccgtctgctacgcagacatgtggtgacatgcgcagatgtgcttaatcggctcgaaaaaaagcgtcttcgtgtgtaa

SEQ ID NO: 10160 - DNA, 1947 bp, Geobacillus stearothermophilus
ttgtataccgtttttgagacgttgttttccttgattaacaaaatcggaaatgaaggttttactgatttgtttctttattttcagtttagtttgtttttggtgatggctgtttggcagtttgtccgcattcatagggagattgcggtgatgaaccagttgaagccaaagcttttggaattaaaccgtcctttagatggaagcgtctacgagattgatcaggccattcacaatctttttgcccaagtgaaaaagtcgaaatataaagaactttgggagcgatattataatcgcgtatcgcagaaaaatgaggatgagcgcattaatgtagagccgttttttggatttgatgtgatgtaccatcatatgggctaccgaacattgatggacatgggggcgggcattcacgtcagtctcggtgttcttggcactttcgttggtctctcggtaggattggctcaattgcatgtcactgatacagaaatgttgcggtctggaattgatagtttaataaatgggatgaaagtcgccttttacacttctgtatggggcgtgttgctttctttaatatggacgatgttcgaccgatggatcagtggcgtgcttgagcgcaatatcgactggcattccgagcggcttgactttttgcttagcaccgatgatgaggagctgtttcttaaccgtttagaaaagttatcacgtcatcaggctgaccatctgaagacgctactgactgatgcgcttgaaagggcaatgcagccgatcgctctatcgcttcagcagtcgcacggcagcctgcagcaagtgttcggtcagcttcatgaccagtttgcccagctgcatgaagggatggagacgcaggcgaagctgcttgagtcgcaaattgagttgacaaaaagtacaagcgccgatgtgacgagtcggcttgttgatgagattacaggcgggacacaacagtcgattggaaagtttagagagtttgtccaacaatcgcaagtgcttcactcagaaatgatgaaaacgattgagtcattcacaagccgttttgcttatatggaagagcgacaggcgatgacgcttgagcggacggaaaaaatgtttgcgcagtttgaaaagatggctggagaacttgagctgatgaaggacagctatcaaaaaacggcaggcataatgaacggattaggagaaacgttttatcagttgcagcagctgacaaaagaccatctcccagtccaacaagaagtgatgcggagcaaccagttgctcgctcaaaaatacgacgatctggtggagcgttttacccactttaatgcgcaggtcgaaacgcattacagccagttgctcgaacagcttgttcatgctgcatcttccctttccgcgtcctttcaaacgatggcgaacaagtttgaggagtctctccgcattcaaaaagaatcgctgcatgattcgcagcagctgcttggcgatgtccagtcggctgtggcggcgctgtcgcctctcgttcccgaattgcgcgaaacgttcaattgcgttcgcgagctgaaggagcagttgcttaaaatgcaggaagcgcaaaaacagcttcttccagagcttgtgcagctgcgtgcgcagacaaatgaaacggtggaggaagcattacaaacgacgaaagtgtacatgcatgagatgacagagcaaatcgcgacgctgcagcaaaactgggcgatgacgaaagaacagttggcgaagattacagaagcccttcatctttcaatgaaagattttgcggagaacattgacagcggtctaagcaaaacgtatcaacactttgatgagacgttgacaaaagccgttcaggaagtgagcgggctcgtttatcagttcagtgaagttcagaacgatttcattgagaatatggaagacttagtcgatcatttagataaatggaaagcaggggcttcaacatga

SEQ ID NO: 10161 - DNA, 672 bp, Geobacillus stearothermophilus
atgaaataccggaaacggacagaagtgaactactggatgtcctatgcggatttaatgagcgccatgttgatggtgtttgccttgttgttgatgtctgtcatccttgactaccgtgaattgttagaagagaaagaaaaacaaattgaagaggttgtcagcgtcaaaacggagatcattcgggctttaacagaagcgtttaagaagtcgaatctagccattgagattgatcagcaaacaggagccatacgctttcccggcagcattttgtttgaatcgaactcggcggaaatctctccggaggggaaggcgtttttgcaacaatttattcctaagtatatggggattttattgcaggatcggtttaaagatgaaatttcaagtatcattatcgaaggacataccgaccgaaatgggacgtacatgtacaacatgtctttgtcacagcgacgggcatacgccgttttagagtatatttatagtaaagagtttcctaattttaaagagcgggagctgtcgaaaaagtacattaccgcaaatggccggagcttcagcaatccgctgacggatgaaaacggcaagtatgatcctgaccgatcacgccgggttgaatttttattccgtcttaaggacgatgaagcaattaaagccattgaaaagttggtgaacgaataa

SEQ ID NO: 10162 - DNA, 1281 bp, Geobacillus stearothermophilus
atgaagtatgagtatgaaccggtgttgctgaaacgatggctgcgggaaccgcgtcgtcctcttttgaaacaaacggttgactatagagctgagaaatatcagggggtgcttgaacggctgtccgatcggtttgccgaggtagccaatgcgccgatttcagtgtttcaagagtgggtacaacagctgtcgcggcgggagaaacttcttctcccgaacttgtacaaaaaagagcttcccgaagagctcaaaaaagccatgatcgagtccattcagcgccatatccagcatgagcgacgcctgttccgcgtgttggtcgatgttatgtatgaaacgtgcgatttggacgagatttggaagcttttgcgttacgcctatgctacccatatagagaaaatcgaaaagaggttggaaaaagagaaaagtgaaaaatggcggcgttatttgttaagcaaagatcccattgtgtatttggcaacaacggcgtatgaaagcgagaaaggaattttagacgaactggagacgttttatttaacgaaaaactttccgttgtttaaactcgtgttgatagagatttttcagctggccgatgaatcgttttttctcaaggaacaaaacttgtatcgggagctgtttgtttcctcaacaaatgaacagcaacaaaaaatggcgaatgcactgatcaaaaagtgcaagctcaatcacgtcaagccgcttgggaaactgatatttgaaaggctgcaaacgtatcaccgaaagccgatgttatggagatatgtcggtgaagaggaaaagcggcggttcgctcagtggattatgaagctgcaattgaaagacttttttggcggcgtgaacaaaaaccatgaacggtttcaatattgggaaaagtttattccaaagctagaggatgtcgttgtgacggatgaacgcacgacgttgattatgtattttcatgacgttgtcattatggaagtgctcggaactggggcggtttatatttaccgcgccgacgtattccggcgccattttcaacccaaaatcgaccggatgctcgccgaacgcgagcagtttgccaacaaggcgtggcgaaaagtgcgggaagtgaaacgaaccgagctgatggatagagatttgacaattccaggcggctggctgcgccataacggtgggtggcaatggaaatttgatgaatggcttcgccgcgaactcggctgggaggtaagaagggatgttcttcttcaaaaagaaacggaaaatgatgaaggcagttttgacgccgaatga

SEQ ID NO: 10163 - DNA, 2625 bp, Geobacillus stearothermophilus
atgttcttcttcaaaaagaaacggaaaatgatgaaggcagttttgacgccgaatgaggatgggattcatttttcgtttcagttgcatgacggcaaaaccgtcgccgaactgaagctgcctatggccaaagaagacatcgaaaaatattacaaagtgcaaggatttcagcagtatgtcgcttgggaggagctttacgactcgggcgttcttgtcgattcgactttgccgtatagcgagtattatgaattgctgaaagacgaaagcgccaaagaagtgctccaatatttagggcttcccgttgttgaggagcaagtgggcggaaagctctcacttcgttcgttgccgcatgaagcggacttagttttgcaactgtttgatgcaggcgggcgcaacttagatcgggttgggaaacaggccggggcgatttatgtgctgccagaccgtctcatgttgctcccggaacgcgtatatcggctgaaacaagcgcttttgggatcgtacgaatcaggatatgaaaaaatcggcatttgccaacagctggccaacgaagcaggaattgaacttgaaaactttttacaaaacgaaacgtatcacgtcgttgatgcgtacaatgtggacgttgctgtgcaccgccatgaccatatcgagcttgtcgttaaaggacgaaatgaggaggaaacccgccatcttcaacgactgcaacgggttagcagcataaaaaaaggccatgggcgcagccgtttcgtcagcacggagcaggttcatgctgatatgatgcatttgcagcaaaaacggcatattacgggagaagaagtgccgctgtttttggaaaatccagctgccgtcttgcctgagcatgattatttatttgatttggaccagttttcagaacgtgtccgcggccttatcccgattgaacgggttcgccctttttttcatgagcggaccggaatgcaatggtttgatgaggagagcgggcataccgttccgtacgatgagacgtttttgcgcgaactgatggaaaaatatccggatcagcaatatgtcgaatacaacggcaaatggatttacctagatcctttattgcgccggaagctgctgcagctgccgaaagacgccgatgaagcgttgaagcgccggtatattcttgatattaaagataacgaagaacaacttgaatacaagatagacagcgcccaagaggcatcatgccggcgctatccgattccatctgagctgcaagcggagttttttccgcatcaaatcgaaggctttgagtggctctgtcacttggcagagcaagaaaggggcggcctgcttgccgatgatatggggcttggaaaaaccattcaagtcattgcgtttttgctgcatcaaaaagcaaatgggcggttgaagccgacgttgatcgtcctgccgatagccctgattgagaactgggtggcggaaatcgaaaagtttgccccaagcttgttggacggtttatatattcataaaggaagaggacggctggcttcgtcgcagctcatttcacagtttgatatcgttttgacaagctatgacacgctcaaaatggaccagcttctgttggggaaaattgaatttcaagcgattatttgtgatgaggcgcaaaacattaaatctcatactagccagcgctcacgcgccattcgcgccatgcaaggacgtttccgtttagcgatgaccggcacgccggtcgaaaatagtttagacgaactttgggcgattatggactttgtccagcccggcgctttaggctctctaaaagaatttcgcttccgctatgtagaaacgtcggactatgatgcgttgcttgcggccctccaaccgtactatttgcgccgcacgaagcaacaaattctcgatgaccgtttgcctaaaaaacaccttgttccgccgatttatgttgaagcttcgcccatacagaaggagattgcccagtcaatgctggccacaaaagaagttggtcaggtcgccattttgaatatgattatgagactccgtcaactgtacggccatcccggtgcggtcattccgaaatatgaacagctctcttatcaagaagtgccgaagctgaaagaaacgatgcacatcattgaaacgattcggcaaaagggagagaaagtgctcatttttactgaatttcgcaaactgcactttcttttaaaacgaatctttatggagacatacggcatttctgttccagtgattgatggcgatgcgaaaaatcggcaattgattgttcgacgttttaatgaaatgcaaggctttggcattatgattttatccccaaaagcggccggcgttggcttgacgatcacaagtgccaaccatgtgattcattacacaagatggtggaatccagcggtcgaaaatcaagcaactgaccgtgcatatcgcatcggccagcaaaaggacgtgtatgtctaccatattattacgagggacagttcccactttccgcagggaacagtagaggaattgatgcatgaattgcttgaaagcaagcgccatttagccgaaaatgtcattattccgtttaatatgagcgagatccagcaagcggtcgctgagaaggtggtggggcgaagacagcttgtgtaa

SEQ ID NO: 10164 - DNA, 1947 bp, Geobacillus stearothermophilus; identical to SEQ ID NO: 10160

SEQ ID NO: 10165 - DNA, 672 bp, Geobacillus stearothermophilus; identical to SEQ ID NO: 10161

SEQ ID NO: 10166 - DNA, 1281 bp, Geobacillus stearothermophilus; identical to SEQ ID NO: 10162

SEQ ID NO: 10167 - DNA, 2625 bp, Geobacillus stearothermophilus; identical to SEQ ID NO: 10163

SEQ ID NO: 10168 - DNA, 1947 bp, Geobacillus stearothermophilus
ttgtataccgtttttgagacgttgttttccttgattaacaaaatcggaaatgaaggttttactgatttgtttctttattttcagtttagtttgtttttggtgatggctgtttggcagtttgtccgcattcatagggagattgcggtgatgaaccagttgaagccaaagcttttggaattaaaccgtcctttagatggaagcgtctacgagattgatcaggccattcacaatctttttgcccaagtgaaaaagtcgaaatataaagaactttgggagcggtattataatcgcgtatcgcagaaaaatgaggatgagcgcattaatgtagagccgttttttggatttgatgtgatgtaccatcatatgggctaccgaacattgatggacatgggggcgggcattcacgtcagtctcggtgttcttggcactttcgttggtctctcggtaggattggctcaattgcatgtcagtgatacagaaatgttgcggtctggaattgatagtttaataaatgggatgaaagtcgccttttacacttctgtatggggcgtgttgctttctttaatatggacgatgttcgaccgctggatcagtggcgtgcttgagcgcaatatcgactggcattccgagcggcttgactttttgcttagcaccgatgatgaggagctgtttcttaaccgtttagaaaagttatcacgccaccaggctgaccatctgaagacgctgctgactgatgcgcttgaaagggcgatgcagccgatcgctctatcgcttcagcagtcgcacggcagcctgcagcaagcgttcggtcagcttcatgaccagttcgcccagctgcatgaagggatggagacgcaggcgaagctgcttgagtcgcaaattgagttgacaaaaagtacaagcgccgatgtgacgagtcggcttgttgatgagattacaggcgggacacaacagtcgattggaaagtttagagagtttgtccaacaatcgcaagtgcttcactcagaaatgatgaaaacgattgagtcattcacaagccgttttgcttatacggaagagcgacaggcgatgacgcttgagcggacggaaaaaatgtttgcgcaatttgaaaagatggctggagaacttgagctgatgaaggacagctatcaaaaaacggcaggcataatgaacggattaggagaaacgttttatcagttgcagcagctgacaaaagaccatctcccagtccaacaagaagtgatgcggagcaaccagttgctcgctcaaaaatacgacgatctggtggatcgttttacccactttaatgcgcaggtcgaaacgcattacagccagttgctcgaacagcttgttcatgctgcatcttccctttccgcgtcctttcaaacgatggcgaacaagtttgaggagtctctccgcattcaaaaagaatcgctgcatgattcgcagcagctgctcggcgatgtccagtcggctgtggctgcgctgtccccgctcgtttccgaattgcgcgaaacgttcaatcgcgttcgcgagctgaaggagcagctgcttaaaatgcaggaagcgcaaaaacagcttcttccagagcttgtgcagctgcgtgcgcagacaaatgaaacggtggaggaagcattacaaacgacgaaagtgtacatgaatgagatgacagagcaaatcgcgacgctgcagcaaaactgggcgatgacgaaagaacagttggcgaagattacagaagcccttcatctttcaatgaaagattttgcggagaacattgacagcggtctaagcaaaacgtatcaacactttgatgagacgttgacaaaagccgttcaggaagtgagcgggctcgtttatcagttcagtgaggttcagaacgatttcattgagaatatggaagacttagtcgatcatctggataaatggaaagcaggggcttcaacatga

SEQ ID NO: 10169 - DNA, 672 bp, Geobacillus stearothermophilus
atgaaatatcggagacggacggaagttaattattggatgtcctatgcggatttaatgagcgccatgttgatggtgtttgccttgttgttgatgtttgtcatccttgactaccgtgaattgttagaagagaaagaaaaacaaattgaagaggttgtcagcgtcaaaacggagatcattcgggctttaacagaagcgtttaagaagtcgaatctagccattgagattgatcagcaaacaggagccatccgctttcccggcagcattttgtttgaatcgaactcggcggaaatttctccggaggggaaggcgtttttgcaacaatttattcctaagtatatggggattttattgcaggatcggtttaaagatgaaatttcaagtatcattatcgaaggacataccgaccgaaatgggacgtacatgtacaacatgtctttgtcacagcgacgggcatacgccgttttagagtatatttatagtaaagagtttcctaattttaaagagcgggagctgtcgaaaaagtacattactgcaaatggccggagcttcagcaatccgctgacggatgaaaacggcaagtatgatcctgaccgatcacgccgggttgaatttttattccgtcttaaggacgatgaagcaattaaagccattgaaaagttggtgaacgaatga

SEQ ID NO: 10170 - DNA, 1281 bp, Geobacillus stearothermophilus
atgaagtatgagtatgaaccggtattgctgaaacgatggctgcgcgaagtgcgtccgcctcttttggagaaaacaatggaaaacagcaatgagaaatatcgggggctgctcgaacggctgtccgaccagtttgcggggctagtcgatgcaccgtcttcggcattcgaacaatgggtcaaacagttgtcgaggcgggaaaagattcttttgccaaacttatataaaaaagagcttccggaagagatgaaaaaagcgatgattgatgtgatccagcaacacgttcgtcatgagcgccgcctttttcgtgtgttggtcgatgtgttgtatgaaacatgtgatttggatgaaatttggaagcttttacgctatgcttatgcctctcatatcgaaaaaattgaaaaaagaatggaaaaagaaaagagcgaaaaatggcggcgttatttgtcaagcaaagacccgattgtatatttggcgacgacggcgtatgaaagcgagaaaggcattttagaggaattggagacgttttatttaacgaaaaatttcccgttgtttaaactcgtgctgatggaaattttccagctggccgatgaatcgttttttctcaaagaacaagagttgtaccgggatatgtttgtttcttcgacaaatgagcagcaacaaaaaatggcgaacgcattgatcaaaaagtgcaaactgaatcacgtcaagccgctcggaagattgatatttgaaaagttgcaaacgtatcacagaaaaccaatgctatggagatatgtcggggaagaggaaaagcagcggtttgctcggtggattatgaggttggaattgaaagacttttttggcggcgtgaataaaaaccatgaacggtttcaatattgggaaaagtttattccaaagctagaggatgtcgttgtgacggatgaacgcacgacgttgattatgtattttcatgacgttgtcattatggaagtgctcggaactggggcggtttatatttaccgcgccgacgtattccggcgccattttcagcccaaaatcgaccggatgctcgccgaacgcgagcagtttgccaacaaggcgtggcgaaaagtgcgggaagtgaaacgaaccgagctgatggatagagatttgacaattccaggcggctggctgcgccataacggtgggtggcaatggaaatttgatgaatggcttcgccgagaactcggctgggaggtaagaagggatgttcttcttcaaaaagaaacggaaaatgatgaaggcagttttgacgccgaatga

SEQ ID NO: 10171 - DNA, 2583 bp, Geobacillus stearothermophilus
ttgacgccgaatgaggatgggattcatttttcgtttcagttgcatgacggcaaaaccgtcgccgaactgaagctgcctatggccaaagaagacatcgaaaaatattacaaagtgcaaggatttcagcagtatgtcgcttgggaggagctttacgactcgggcgttcttgtcgattcgactttgccgtatagcgagtattatgaattgctgaaagacgaaagcgccaaagaagtgctccaacatttagggcttcccgttgttgaggagcaagtgggcggaaagctctcacttcgttcgttgccgcatgaagcggacttagttttgcaactgtttgatgcaggcgggcgcaacttagatcgggttgggaagcaggctggggcgatttatgtgctgccagaccgtctcatgttgctcccggaacgcgtatatcggctgaaacaagcgcttttgggatcgtacgaatcaggatatgaaaaaatcggcatttgccaacagctggccaacgaagcaggaattgaacttgaaaactttttacaaaacgaaacgtatcacgtcgttgatgcgtacgatgtggacgttgctgtgcaccgccatgaccatatcgagcttgtcgttaaaggacgaaatgaggaggaaacccgccatcttcaacgactgcaacgggttagcagcataaaaaaaggccatgggcgcagccgtttcgtcagcacggagcaggttcatgctgatatgatgcatttgcagcaaaaacggcatattacgggagaagaagtgccgctgtttttggaaaatccggctgccgtcttgcctgagcatgattatttatttgatttggaccagttttcagaacgtgtccgcggccttatcccgattgaacgggttcgccctttttttcatgagcggaccggaatgcaatggtttgatgaggagagcgggcataccgttccgtacgatgagacgtttttgcgcgaactgatggaaaaatatccggatcagcaatatgtcgaatacaacggcaaatggatttacctagatcctttattgcgccggaagctgctgcagctgccgaaagacgccgatgaagcgttgaagcgccggtatattcttgatattaaagataacgaagaacaacttgaatacaagatagacagcgcccaagaggcatcatgccggcgctatccgattccatccgagctgcaagcggagctttttccgcatcaaatcgaaggctttgagtggctctgtcacttggcagagcaagaaaggggcggcctgcttgccgatgatatggggcttggaaaaaccattcaagtcattgcgtttttgctgcatcaaaaagcaaatgggcggttgaagccgacgttgatcgtcctgccgatagcccttattgagaactgggtggcggaaatcgaaaagtttgccccaagcttgttggacggtttatatattcataaaggaagaggacggttgtcttcgtcgcagctcatttcacagtttgatatcgttttgacaagctatgacacgctcaaaatggaccagcttctgttggggaaaattgaatttcaagcgattatttgtgatgaggcgcaaaacattaaatctcatactagccagcgctcacgcgccattcgcgccatgcaaggacgtttccgtttagcgatgaccggcacgccggtcgaaaatagtttagacgaactttgggcgattatggactttgtccagcccggcgctttaggctctctaaaagaatttcgcttccgctatgtagaaacgtcggactatgatgcgttgcttgcggccctccaaccgtactatttgcgccgcacgaagcaacaaattctcgatggccgtttgcctaaaaaacaccttgttccgccgatttatgttgaagcttcgcccatacagaaggagattgcccagtcaatgctggccacaaaagaagttggtcaggtcgccattttgaatatgattatgagactccgtcaactgtacggccatcccggtgcggtcattccgaaatatgaacagctctcttatcaagaagtgccgaagctgaaagaaacgatgcacatcattgaaacgattcggcaaaagggagagaaagtgctcatctttactgaatttcgcaaactacactttcttttaaaacgaatctttatggagacatacggcatttctgttccagtgattgatggcgatacgaaaaatcggcaattgattgttcgacgttttaatgaaatgcaaggctttggcattatgattttatccccaaaagcggccggcgtcggcttgacgatcacaagtgccaaccatgtgattcattacacaagatggtggaatccagcggtcgaaaatcaagcaactgaccgtgcatatcgcatcggccagcaaaaggacgtgtatgtctaccatattattacgagggacagttcccactttccgcagggaacagtagaggaattgatgcatgaattgcttgaaagcaagcgccatttagccgaaaatgtcattattccgtttaatatgagcgagatccagcaagcggtcgctgagaaggtggtggggcgaagacagcttgtgtaa

SEQ ID NO: 10172 - DNA, 1383 bp, Geobacillus kaustophilus GBlys
atgtggacgatgtttgaccggtggattagcggtgtgcttgagcacaatattgactggcattccgagcggcttgattttttgcttagcacggacgatgaggagctgtttttaaaccgcttggaaaagttatcgcgcaatcaagccgaccatttgaaaacgctgttgactgatgcgcttgagaaggcgatgcagccgatcgctctatcgcttcagcagtcgcacggcagcctgcagcaagcgtttggccagcttcatgatcagttcgcccagctacatgaaggaatggaaacgcaggcgaagctgcttgagtcgcaaattgagctgacgaaaaatacgagcgccgatgtaacgagccgtcttgttgatgagattacgggcggaacacaacaatcgatcgggcagtttagtgagttcgttcaacagtcacaagtattgcagacggaaatgatgaaaacgattgaggcgttcacgagccgttttgcttatacggaagagcggcaggcgatgacgctcgagcggacggaaaaaatgtttgcgcagtttgaaaagatggccgcagagcttgagttgatgaaggacagctatcaaaaaacggcaggcatgatgaacgggttaggcgaaacattccaccaactgcagcagctgacgaaagaccagcttccggttcaacaggaagtgatgcgaagcaaccagctgttggcccagaagtatgatgatttggccgatcagttcacccgctttaatgcacaagttgaagcgcagtatagccagctgctcgaacagcttgtccatgcatcgtcctcactttccgcctcgtttcaaacgatggcgaacaggtttgacgagtcgcttcgcgtccaaaaagaatcgttgcgtgattcgcagcagctgcttggcgacgtccagtcggctgttgtcgctctgtcgccgctcgtttccgagttgcgtgaaacgttcgatcgcgttcgagagctaaaggagcagctgcttgaaatgcaagaggcacaaaaacagcttcttccagagcttgtgcagttgcggacgaaaacgaaggaaacggttgaggaagcactgcagacgacgaaagtgtatatgcatgagatgacggagcaaatcgagacgttgcaacaaaactgggcgacgacgaaagaacagttgacgaagattaccgaagctcttcatctttcaatgaaagattttgctgaaaatattgacagtggtttaagtaaaacgtatcaacattttgatgagactttgaccaaagccgtgcaagaagtgagcgggctcgtttaccaattcagcgaagtgcaggcggattttattgagaatttggaagacttagtggatcatttggataaatggaaagcaggggcttcaacatga

SEQ ID NO: 10173 - DNA, 636 bp, Geobacillus kaustophilus GBlys
atgtcctatgcggatttaatgagcgccatgttgatggtgtttgccttgttgttgacgtttgtcatccttgattaccgcgaattgcttgaagagaaagaaaggaaaattgaggaggttgtcagcgtcaaaacggagatcatccgggctctgacggaagcgttcaagcaatcgaatatggccattgaaattgaccagcaaacaggggccatccgctttccaggcagcattttgtttgaatccaattcgacggaaatctctccggaggggaaggcgtttttgcaacaatttattcctaagtatatggggattttattgcaggatcggtttaaagatgaaatttcgagcatcattattgaagggcataccgaccggaatgggacgtacatgtacaatatgtctttatcgcagcgccgggcgtacgccgttttagagtatatttatagcaaagagtttcctaattttaaagagcgagagctgtcgaaaaagtacattaccgcgaatggccggagcttcagcagtccgctgacggatgcgacagggaagtatgcccccgaccgttcgcggcgagttgagtttttattccgccttaaggacgatgaagcgattaaagccattgaaaagttggtgaacgaataa

SEQ ID NO: 10174 - DNA, 1281 bp, Geobacillus kaustophilus GBlys
atgaagtatgagtatgaaccggtgttgctgaaacgatggctgcgggaaccgcgtcgtcctcttttgaaacaaacggttgactatagagctgagaaatatcagggggtgcttgaacggctgtccgatcggtttgccgaggtagccaatgcgccgatttcagtgtttcaagagtgggtacaacagctgtcgcggcgggagaaacttcttctcccgaacttgtacaaaaaagagcttcccgaagagctcaaaaaagccatgatcgagtccattcagcgccatatccagcatgagcgccgcctgttccgcgtgttggtcgatgttatgtatgaaacgtgcgatttggacgaaatttggaagcttttgcgttacgcctatgctacccatatagagaaaatcgaaaagaggttggaaaaagagaaaagtgaaaaatggcggcgttatttgttaagcaaagatcccattgtgtatttggcaacaacggcgtatgaaagcgagaaaggaattttagacgaactggagacgttttatttaacgaaaaactttccgttgtttaaactcgtgttgatagagatttttcagctggccgatgaatcgttttttctcaaggaacaaaacttgtatcgggagctgtttgtttcctcaacaaatgaacagcaacaaaaaatggcgaatgcactgatcaaaaagtgcaagctcaatcacgtcaagccgcttgggaaactgatatttgaaaggctgcaaacgtatcaccgaaagccgatgttatggagatatgtcggtgaagaggaaaagcggcggttcgctcagtggattatgaagctgcaattgaaagacttttttggcggcgtgaacaaaaaccatgaacggtttcaatattgggagaagtttgttccgaagcttgaagatgtcgtcgtgaccgatgaacgcacgacgttaattatgtatttccgtgacgttgtcattatggaagtgcttggcactggggcggtctacatttatcgcgccgatgttttccagcgccattttcagccgaagatcgaccggatgctcgccgagcgggagcgatttgcccatacagcttggcaaagagtgcgtgaagtgaagcggagtgaactgatggacagggatttaacgattccaggcggctggttgcgccatactggcggatggcaatggaagtttgatgaatggcttcggcgcgaactcggctgggaggtaagaagaaatgttcttcttcaaaaagaagcagaaaatgatgaaggcagttttgacgccgaatga

SEQ ID NO: 10175 - DNA, 2583 bp, Geobacillus kaustophilus GBlys
ttgacgccgaatgaggatgggattcatctttcgtttcagctgcatgacggcaaaactgtcatcgaactgaagctgcctatggccaaagaagatatcgaaaactattacaaagtgcaaggatttcaacagtacgtcgcttgggaggagctttacgactccggcgttcttgtcgattcgaccttgccgtacagcgagtattatgaactgcttaaagacgaaagcgccaaagaggtgcttgaatgtttagggctccctgttgttgaggaggaggtgagcgggaagctttcgcttcgttcgctgccgcatgaagcggatttggccctgcagctattggactcgagcgggcgtaacttagaccggatcgggaaaccggcgggggcggtttacgtcttgccggaccgtctcgtgctgctcccggaacgggtgtaccgtctgaaacgggcgcttttggaatcgtatgaatcagggtacgaaaaaatcggcatttgccaacaactggccaaagaagcaggcatccagcttgaaaattttttgcaaacggaaacgtaccatgttgttgatacgtatgatctcgacatcgctgtgcatcgccctgaccatatcgagctcgtcgtaaaagggagaactgaggaggagacgcgccatcttcaacagttgcggcgggtcagcagcataaagaaaggccatggacgaagccgctttgtcagcaccggacgggttcacgccgatattgtccatttgcagcaaaaacggcatattacgggggaagaggtgccgctatttttggaaaatccggctgccatcctgcctgagcacgattacttgtttgatttggaccagttttcagaacgtgtccgcggcctcatcccaatcgaacgggtgcgccctttttttcatgagcgaacgggaatgcaatggtttgatgaggaaagcggtcgtacagttccgtacgatgaggcgtttttgcgcgaactgatggaaaaatatccgaaccagcaatatgtcgagtataacggcaaatggatttacttagatcctttattgcgccggaagctactgcaactgccgaaagacgccgacgaagcgttgaaacggcgatatattcttgacattaaagataatgaggaagagcttgagtacaaaatggagagcgcccaagcggcgccgttccggcgttgtccagttccctctgaactgcaggaggagctttttccgcatcaaatcgaagggtttgaatggctttgccacttggcggagcaaggaagaggcggcttgctggccgatgatatggggctcgggaaaaccattcaagtgattgcgtttttgctgcatcaaaaggcccatgggcggctaaggccgacgttggtcgtcctgccgattgcgctgattgagaactggatagcggaaatcgaaaaatttgccccaagcctgctcgatagtttgtatatccataaaggaagcgggcggctggcttcgtcgcagctcatttcacagtttgatctcgttttgaccagctacgatacgctgaaaattgaccaacttttgttagggaagatcgaattccaagcgatcatttgcgacgaggcgcaaaacattaaatcccacgccagtcagcgatcgcgcgccatccgcgccatgcaagggcactttcgcttggcgatgaccggtacgccggttgaaaacagcctagacgaactttgggcgattatggactttgttcagcccggcgccttaggctcgttaaaagagtttcgatcccgctatgcggaaacatcagactatgatgtgctgcttaaagccatccgaccatactatttgcgccgtacaaagcagcaaattctcaatgatcacctgcctaaaaaacaccttgtttcgccgatttatgtcgaggcttcgccactgcagaaagagattgcccagtcgatgttggccacaaaagagagcggacaggtcgccattttgaatatgatcacgagattacggcagctgtacggccatccgggagcggtcatcgccggctatgaaaatctcccggccgcagaggtgccgaagttgagggaaacgatgcgcatcgtcgaaacgattcggcaaaaaggggagaaagtgctcatttttacggagttccgcaagttgcactttcttttgaaacgaatattcatggagaaatacggcatttctgttccggtgattgacggggatacgaaaaatcgccaatcggtcgtacaacgctttaatgaaacaaacggcttcggtatgatgattttatccccgaaagcggccggcgtcggtttgacgatcacaagcgccaaccatgtcatccattacacgcgctggtggaacccggcggttgaaaaccaggcgaccgaccgcgtgtaccgcattggtcagcaaaaagatgtatatgtgtaccatattatcaccacggatcgttcccatttcccgcaaggaacggtagaggaattaatgcatgaactgcttgaaagcaaacgccatttggctgaaaatgtcatcatcccgtttgatatgcgtgagatccagcaagccattgccgagaagatgatggaacaacgcccactcgtctag

SEQ ID NO: 10176 - DNA, 1623 bp, Thermoanaerobacter thermohydrosulfuricus WC1
ttgctttttaaagaaattacactttttataataagattgattccagattttaatgatattttttgcttcggtattattctcttagctggagttgttttctttttagcccaccgaaaacccaaacaatatactagacttatcgatttatatatagaaaaaatccacaacataccagataaagatatgttactaggggaactgattgagttgacagatgaaataatagaaaaagagaaaaatgacaaatacataactggattacttgaaaagtttaaaaacaggtgctatagtggcaatataaaaaatgctgtggatgttttggattatacggctttggttgagattccaggtaggcgaaagatatttgacatgatgccaggtgtatttacaggtcttggcattttaggtacttttgctgggcttgttttaggtttaagtgatcttaacttttcgggtagcactcaggcattggaagaaggaataaataacttaatatcaggaatcaatctggcttttcttacttcaattgctggtcttgtttcttctttgggatggtcttattttgacaggaaacggcttcattattatagagaaaagatcgattcttttcattcttcgtacaaaaaagtatttgtacaaaaggaaatagacgattatctcaaagacatcagagagattcaggaagagcaaaagacatatatgcaaaaatttgtatcggatttatccctggagcttagcaacgtgttgtcaaatatgctggaacaaagaatattccctgaatttgctaatattatacaccaacaggttacgtccaagatcgtggaatcctttgacaatacgattggagagattaagcagtctactgaaagctcaaaacaaatgattgagagatttgctaatctggcgtatgataatcagttagaaggagttcaaagaattgttaataagtttatagaaagtatggacctgtcattaaaagggaaatttgcggatttgggcgagtccatcggcgagatgataaaatggcagcaaatggttaaagaaggcatgaatgaacttatagaaagattgtcaaataacatactgaatttacaggaagtcaataaagctattgaaaacacaatcgtaaacttctctgattactttgataatgtcaatgcggctaataaccatctggttgagaacatatcaaagttagaatccgtctctttaaacataaatggacttattgaaggcatgtcaaaaatgataaaagatatcaacgagcaaaaggatttattgttaaaagataagacagaacatattcaaataatatctagatacatattggagattaacgaaaagttcagcttgcttgaaaagagttatgccaatataagtaaggacatcgatatcttaaacaatagcctcaaacaatctatggaagagtttgctaataaaacccatgaaggacttaagcgaagtttatctttgtttgatgaagagcttgccagtataacaagttatctaaattccacattaagcgaaattgaagaagctgtagatgaattaccgaaggtgattattgaatttaaaaagaccttaagaaacgatgagaaggagatgcagaccattgaaggatga

SEQ ID NO: 10177 - DNA, 693 bp, Thermoanaerobacter thermohydrosulfuricus WC1
ttgaaggatgaggacaaagtacacgattactggcagtcttattcagatttgatggctgcgttacttttgatgtttgcccttttgattgttattatgatttataaatatgccggcattgctgctgaactcaatttgcagaaggcaaaggttgatgacttgattggcgtgagggctcgtataatagaccagctttttaaggagtttagcaattcagatatgacgcttagtatagatccccaaactggggctataagctttagcgaaggtgtattctttgacaaggataagtttgagttaaaagaggaaggtaaaaggtatttgaatgagtttatcccgcggtacttatcgatactcatggatccacgctttaaaaagtacatatcgcagataattgtagagggccataccgatgataccggtgattatatgtacaatctggagctctctcagaagagggcgtttgaggttgtcagatatatattgcaatctaatataaaaggcattgactctaagacaaaagcagatttgatgtcgtatataacggccaatggtcgctcatacagccagctgatcattgagaacgggaaggtaaacaggcagaaatccaggagggtagaatttaaatttcgcttaaaagaagaagaaatgataatggagatgcaaaaaatcctcgggaaaggatctgtaaaatga

SEQ ID NO: 10178 - DNA, 2796 bp, Thermoanaerobacter thermohydrosulfuricus WC1
ttgataaagatttcaaaagacttatcagataggggtattaaaattgcttgtcatgttttaaaaaagagaaagcctgctgaaataaaaataccgctttttttaaacccagtagaatggctaaaggatatcttgcctgatgaaatggaggtattaaatgtacttgaaggcttgtggcaggaaggtattttgcaggaagaaaacaatttttatgtgataccttatgaatttttatacaatattgctgaagatcagaggcgtatactttgtcttcctgttgaagataattcgataaaagtccatataaaagcgaaaggaattcttggcagtagtgattttgcgttgatacctgacatatacataaaagatgagaagatggggcctctggataaaaggattaaaaatgtggtatcccacaacggttgcttttatttaataccattaaatctttacagccttttaaatgaaatagatgcgtataagcccactgctgaccctctattgcaggcgaagatcatcgcaaaagttaaatataaagctaagtcggctaatgtgacttttgataaatttttggaaagcgaagaagtgtactattctgaaaaactggatgtggatatagttaagcacagcgatgatcatatccaaattgtaccggtcttaggcaatgaaattgatagtttattaaaagatagcaaagataaggtcttaaaacagcataatactttgtatggtgaaggcataaagaggaaaagaatttttttggaagatagagtcgtacaaaattataataaaattcttagacaggggcatcttaaagggactcagatacccaggtttttgaccaacccatattctattttacctgaagatatagatttgtctaatttcagtaaaagggtaaaagaactcggacttaaggtctatagagctaatccatatattaatataaaaagagataaagattccgggtggtttgattttgaaataggtgggatcatacatgaagatacgggttttagccttgatgaagatggtgattacatacggaaaaacgaactgaaaaataatgttaagatcgatgtggaggagtataggcacctggttcaaaaagctgttgagagcggagaagattatgtaaattataaaggcaactgggtaaaaattgatagagagcaggctagcagatttttaaatatagttgataatgagcaattcaggaaaacacagaggatagatattacacgattgccttatgttttgaaaatatatgaaaacatagagaatttggagtataacgaaacggcgttaagcttgaaaaaacagcttacaggtgattttagcataagcgactttagatatcctatgtatttaaaaaattgccagctgtacgagcatcaaaaggaaggatttttatggtttaagggcctgtacgaaaatcacatgggtgggttgctcgctgatgatatgggtttgggaaaaactttacagataattagtttcttgtgttatctaaaagaatgtaatgaaattaaacctacgctaatcatagctccatatactttgttagatgtatgggagagcgaaatacgtaagttctctgaaattacttctgtatataggcatacaggttacaaaagatataaaacacctgagcttcttaaaaattatgaaatcacgttgaccacttacgagacgcttgttaaagatcaattgctgttagggcaaatagattggcaggcagttgtttgcgacgaagcacagaaaataaaaaacagcacaactttgactacaacggctgttaaggccttaaaagccagaatcaagatagctatgaccgggactcctgtggaaaacaatctaggtgagctatggtgtataatagattatgtgcaacctggtcttttatctagttattatgagtttagaaagacgtatcaaatacctatagaggatgctataagcaatagaagtgaagcatacgtagaagtaaagaacaaactattgaacacgataagacctgtgtacctgaggagagtaaaagatggcattttatcacttcctgcaaagaacgagttttttttagaagtagaacttacagcattgcaagagaagctctattgtcaattgatagaagattataaaaataaggggaaaagtgaatcgccccttggtgtattgcaaaagttgatggaattgtgcgcccatccacgccttgtacgagatgaaggtgaagtgaatacctttcaacttttaagtgagtcagggaaacttcaacgccttatagaacttttaaatgagataaaacgtagaggtgaaaaggcggttatatttacccattatataaaaatgcaggcgatattgagaaaagtcatcatggatgtttttggcataaattgtcctgtgataaatggctccattaaaggcgacagaatgaatgttattgacaaatttaaagaatcttccggttttggtgttattattctctctacaagagctgccggtgtaggtattactataactgaggccaataatgtgattcattacacaagggattggaatccagctgttgaaaagcaggctacagatagggtttatcgaataggacagacccgcgaagtaaatatatattaccctatatgcataagcagcagaggaaaaacagtggaagagcgtttaaatgaggtattgcagaaaaagcttcagcttcttaacgaagtgattgtaccatcgagatgtttgagcataacagaagaaaattatgactatttattgcaggatttttccgattggtccgcatga

SEQ ID NO: 10179 - DNA, 2232 bp, Acetonema longum DSM 6540
ttggtggtagtattgcaaatcctggttgacttactgcaaatgttatttccgatagcagtggttatagaaaagcccacgccggccaatatcagtatgctgctttttatggccctgatgttttggctgttgtacttctatggataccggcggttttacttgcagggaatccggcctctgctgcttattctcaacgacctgaaacaggttgccgtccgtccggcggaactgagccaaagagaacatctcttaaggctgcgcaatgccttccgttcttatccgatgctgctgcccctctggacagagtgggaatctgccttttaccgtgatgctgccgctgatcaaggcgtcacttacagctcggcggaagcggagtatgtgttcagtgagcagcgaatgctggccgctttagggtttaatctgcagttttaccaggctttgccgggatattttaccggtctgggcctgctgggcactttctggggtctcacgctggggttaagtcaaattaatctaagtacgcctgaacttgaagtcttaaaagaaggtattcgcaggctgctggatgggatgggcacagattttggctgttctctgtggggggtcatcctttctctgtcctggtcatggtatgaaaagcgcaagcgggcccaagtcagagaaaaactggccgagctgcaggatctgttgaatcagctcgtcacccggcgcacaccggaatcctggctgactgaaattttatcggagtgccgggtccagagccggacactgacagctatcaataatacgatggccgaaacaatggccaccgctctcgagaagcgtatgaccccggtctttctccagctggcctccgccattgacggcctgcggcaggccggaaccagccaaattgcccacgccatcggcgaaggcgccggccaacagttaaaatccctgggcgatatgctggttcaggtacagaggaccatggaaacgacggtgggccgctcggcggatgtccaggaacaaatgcgggagactatggctgtccagacgcagtctatggctgagaccttccgccaggtgctggacgcggccgccgtcagacagcaggaaatgaaccggcaaaccgattgcatgatccagagcgcgaccaccaggcaggctgaaatgaacgagcaaaccggccaaaggctgcaagacctgttggccgtgattgccgccagcctgcggcagcagcaggctgaggtggcaggaacgatcgagcgggcgggtacgctgcaggagcagatgaaccaacaggccggcgccaatgtggcctccatggttcaagccacccatcaggttcttgatctggctgccgccaggcagcaggccatggccgaacagactcaggccaagatgcagcagctcctggaattgatggccgcatctctcctgcagcagcagggacgcctggaaaacaccacggagaaagtcacggctgattttgccgcccgtatgggccagatgtcgcagcaaatggataaaagcctgcaggaaaccacccgtcaggcaggagatagcttccgggatcaaatgagcgaaatgtcccgggaaatgaaaggatcactgcaggcctttgaaatcagtgtgattgacaatgccagccgtatgcagcaggaaacccgggctgtggctgaaactctgcaccaggcctttgaaaatgtggccaaccgttatgaaaaagagcgggaccaggtaactgtcttactgggacaggtgcaagagaccatggaggcattccggcagagcgccgagcagaccggccgcactgccaaacaatttgagcaggccgcgcatcccctgtatgacagcgcccgtcagttacaaacggctctggaacagatgcagcaataccaggacgaattccgccgctatattcatgattcggaacagcgcttacgggataatcttggcgtttcgcaggcgtcggtggagaccattcaggaatcactgcggcagactcaaatctcctggcaggcttatgagagtaagttcggagtgttgcggaccgacctggagcagatattcgacagtatttccaaaggcctgagagaataccgggccatcaccgatgaaagcttgtcccagttcctgcaattgacacagaacagcctcggccagtgtgtgggccagctttccgcagtcatcaacgagttgagtgaaacggtagaggatctgtacccgatattagagaatcggccgaaatag

SEQ ID NO: 10180 - DNA, 699 bp, Acetonema longum DSM 6540
ttgtttaggaaaaaatattacccggaaaatccggaagctgttgacgatccgtttcaggcttcgatcagcgacctgatggccagcttattgagtatttttatcctggcctttatttactatattctcaacttccagcaggcaacggctcagctcagtgaaaatcagagcaagcggacggaaatattgctggcggtgcagcgggaactgaaacaaaaagatgtggatgctatcattgatatagagcatggtgtactgcggctgccggaaggggttctgttcgacaccggcgaagcccgtctgaaagagagcggcatcgccaccgccgggatactggggccgattttggaaaatgtgctgaaccggcctgaatttgccgattcggtggatactatttttatcgaaggacacactgatgatttacccatccataccgccctgttttcttctaactgggagctttccacccagcgggcgattaatacctttcacgccttaaccgatgcggccacggggctgaagcagtttaccaacagcaagcgggaaccggttttgtcctgcagcggttatgccgatacccgtccgctgcagcccaatactaccgagaagaaccgccgggaaaaccggcggattgatttccggttttccatgactcctcccactgaagatgacgccggcatcctgcgcccggccaaccgctaa

SEQ ID NO: 10181 - DNA, 1431 bp, Acetonema longum DSM 6540
atgaacagtttactgaccggcgagttgtcggacagcatcaaacaattgcaaaccgcccgggatttcggccggccccagcggctgaccgagcaggccgacgccattgtccggcagtttcaggccgtgtttacggctcctcatgaaaaagatgtggaagaatttctgctgaccctgcggcggcggtggattaaaggcggacaaaaaggaatcagctggctgcgggtaagggaaatcaagctgctgccctgggtaatttattcccaacagccgccccgggtaatagacgatgactattttcgcagcgatattttgcaggtgctccgggaaaactggcagatcagcctgcgggcgtttatcgctgcctatcttatgaagtttgagctgccggcggccggccaggaggcggtgcggcgggaactggaaaatctggtcagaggctatgccggcaaccgtaccagcctgagtaaatggcggcgccggtccgataccctgtttgtgaccgacgccttgccggtaaccgcccggctgctgggggaagggcccaagccggcggcggctgtcttagaacaactgggctttgatagtcgctttgccacctccggctttttacgtcaggccgtggtcagggcgctggaaactctggttaaatcctatcctcgctttctggaacgcctgccggctttggtgacccgtcaggatttaactggcaaggatgtggcccgctttgacgatattgccgtccaaacggcgggcacctttattgtcagggccggcccgcaggcgccggcgaaagtgcgggatttactttgctgtttatatttgcggattttaggggatccggatgcagccgccggacgattctactggcggaaagtcagccccaaggcagcggcggttatgaccggctggattatccggctggatctggaaatgtttttttccctgctggggcggctggaagagcgacggcgcgccaatatgtaccgttatgctttttggcaggcttttctcccttatatcagtcagacctggctggcgattagccccggcttgaagaacatgagccaagaggacgggaccggcgaatatttagccagccggcgcccggcccgtttggtgtcctcccagctgggtcaggccttgctcttgatccggctgggggattatgtgtttgcccagtggagtcaggaacagcggattatggtctggacagccgatgcactgcccttgggcagggaagcctacggcaaagaatggctgcgtactccgccgctggctgcctgggatatctccaagggcaccgaaacttacctgtggcagcggcagatcgaggtatggatttatcatcataccggccgcagccgcgttatatcctatcagatggaagatccggaccctgtcgaaaaaggatccgattcaaaaagaagatga

SEQ ID NO: 10182 - DNA, 1236 bp, Thermosipho africanus H17ap60334
atgccattgatgactttacaaaattttttaaacctgataattcattcaacatttacaaaaatttatttattggtagaaattgtaatttttgtatattttattatcagaagaaattcttatatctcaaaatttaaaaatcctattgatgaaatgcaaattgaagaaattttaaattttgctagcttttggccaaatttatttattactttaggaatattaggtacatttgcaggaatcattttaggaatttctaatttaaattttcaaaatgacacaacattaaagaatagcattaattccttgctttcttctatgggcacagcattttcttcatctattctggggattttattttctataatttctcaatggcttaacaaaaaattaatccttgaaattcccaaaaattcaagtaataaaatattagatgaattaattggaattagaaatgacataaaagaattaaacgaaattttctctagacctttagaaacaatttctgaaaacgctggtcaaactgttgaaaaatatacccaaaaaataagtgaaattaatgaatctttctcttcaaattttaataaaaatattaatattttcagtaatactgtttctaaaatttcagaagaaatttcaaaccaattagaatcaataagacaacaaagtgaacttattgaaaaaaaaggtgagcttattcaaaaacaaagtgaaaatcttcaaaacttttctgaaataattgaaaacagcaaaaatttatttaacgaaattttgaattctcaaaataatattgttaataaaatgaatgaattaattgatttaacaaattcaatcatttcaaatcaagagaattttgaaaagctaaataagaatgtatctaacttgattgaaaaacttgaagaatttactacttattttaataccaatattaataactttgtcaattcaatctcagagataaataataaagtacctaaccaaatgatattaaactataaaaaagcatttgaggaaattgaattattcacaaaagatttctttagtaaattaaaagatattacagtttatttggatgattcaatcgaaaattttgataattcattaaatgaattcaacgaaacacttttaaaagttaaaaatgaaatacataactctatagaattatttagcaatagtttaatatcatcacttgataatttttatactaataataacaataattttgataaactacaggagtga

SEQ ID NO: 10183 - DNA, 657 bp, Thermosipho africanus H17ap60334
ttgagcaaaaaatttaatccttggatttcttactccgatttattttctgctctaattttaatgtttgctttgcttttatctcttgtattactacaatatatatacacttttcaagaaaaagaaaatagacttattgaaattattggtatcaaagcaaaaatagttgaagatttagttaaagcatttaaagacttaaacttaaatattgatattgatccagattctggtgcaattataatgaataacgaaattttatttaattatgatgattacaacttgtctgaaaatgggaaagatatcttgttaagagttataaatacatatctaaaagtaatcttgaaaccagaatacgaatcttttattgcttcaatttatattgaagggcatactgttccaacaggttcttatgactacaacattgaactttctctaaaaagagcattagaagtatttaaatttttaaaaagcgtttcaaacaaaattccaaatcaagacatttttttcaaaaagttagttgtttctggtcagggttttaacagtcccataattgaaaatggtaaaataaattatcaaaaaagtcggagagttgaaatcaaatttactcttaaagatcaagatatgatgaatgagattaaaaaaattcttactggatattag

SEQ ID NO: 10184 - DNA, 2499 bp, Thermosipho africanus H17ap60334
atgaaattcgaaatttttgaagattcgattgaaattaaactgggttttagagatagaaatattaaaaagatttatcgaattatttttggtgaaagaatatctaaatataacattaaaaacgattttttagaaaatttgtataaagaagaccctgaaattctagaaaaactaggttttaatattaattttgaacaaatcaagttaaaaataaattatataaacaatataaatctaaataccattgaattttattataataactatcgactaaactttcagaatcgttttttaataaatcgtgaaaaaggaataattatttttttatttgaagaattatatgatttgataacttccttagattcaaaaataaaattgttggaaaaattgcagaagctaaatatattagaagaaaaatataaaataaaaatagaatctccaaaagaattcaaaaagctagattatagtttaaaagttgaaaaaagtgaaaatggtgttgctatcgattatacaatttatggattaccaaaaaagaaaagtgttttactaaatggaatatggtctacaaaaaatcatatttattttcttgaaaatgagaaaaaaacagatttggaattattggaaaagtatcgagaaagtaagggtggaaagatagtaattaacgaaaaaaatatagacagcttttatgaagattaccaattaactttttccgaagaatttgtaaaaaaactttctgatagagttaagtttttaacttttgtcccaaaaaatgtttcgattaaaaaaaatttaactacagaaatttcttctgaatttttggattacaacatcattcaattacaagatttagctgaaggtggcgttgataacattgaattaacagatgaactaaagaaattaattgatgatgctagaaaaaagaataaaagatttattttttacaatgattcatggattaagatagattcaatgccatattttgaaggaactgaaaatttaaaatcaaaaacagatttaacagaaagcaaagagataaacaatcaattatttgatatccaaataaaagaaaatcttgaagaattagaatattttaaagttaaagatgacagtagagaattaattgaaaaaagattggaacttaaatatttcgagggtgatttgaaagaatttcaaaaattaggtgttatgaaaattatagctgcctatttagaaggttttagaggctttctgctggccgatgatatggggcttggaaagacagcgcaggctatagcttttatggcttggttatatgaaaatagatccttatttcctgttttaatagctgtgcctaattcattaatttctaattggaaagatgaaattagtaagtttagcccggaattaagaaaatttattgatacaggggatttagaaataattaattatgaaaaactttttagaagaaaagattttttagttaaagactggaatcttattataactgacgaagctcagagatacaaaaattatcgttcaaagatatcaagaattataaaaggttataaatttaaatttcatctagctttaacaggtacacctgtagaaaacagtattgatgaattgtggaatataattgatgcaatcgttccaggttttttgggtaagttaaaagattttaatgatagatataacataataaatagtaaaccagattctgttcaagctgaagaaaaatctttagaaattttaaataatatagatccaatatttctgagaagaacaaaatttgatgaaagtgtcaatataaattttccagagaaaaaagaatttaagattgattgttttttcacagatatacaagaagaaatttatttagaaaaatatcaacaaaatcgatttataaatggcagaaaaaattttttgggacttgtaataaaactcttacaagtttgtgattttgccgttgaaggttttaatagtgattttctaaaatactcaggaaagttaaaaagattaaaagaaattcttttgaatatcaaaaatagaaaagaaaaggtattaattttcacaaaatttcttttgactcaaaagatattaaaaacttttatagaaagtgaaataggaatgaattgtgaaattcttaatggaacattatctagagaaatgcaaaatcaagtaataaattactttgatagagatttagtagatgttttgattataaatcctagggttggtggagtaggattgaatcttgtgaaagcaaatcatgttatacactttacaccagaatggaatcccgcagtcacttcccaagcaactgatagagcttatagaataggtcaaaataagaaagtctttgtttattatttttattcaaaatttaaaaattctaataaaaaaacagttgaagagtattttatgaaattgttagatagaaagaagcaaattaagaatattttattggataatattgcaataaataaagaatttgaaaatattaagaatgagttattaaattga

SEQ ID NO: 10185 - DNA, 2004 bp, Rubrivivax gelatinosus IL144
atgagtgaaactgcgaagctgctaggcggcatccacccgtctctgcagacccttcatgggctgccgctgtgggtcttcctgttggtcgtcctgctgaccagtattttccttctgggttacttgctcaagggaacgcaggtctggtggcaactgaggtcaactgtccgcgcggtgcggtcctttggggggcagaaggcgccgccagacccgaaggcggttggtcgggccttccagtcggagcccctgaagcacctatgggaagagtacgacgacaccttgcatgagctgcgcaaagcagcctctggagaggttgccctcgtcgaggtccgggcaactgtgccagccgaggcgatgttcacgagggatgtactcgtggacagccggctcttcgacgacttcacccgtcacctgcctggcgttctcactggcctaggcattatcggtacctttgcagggctgctcgctggcctgcaggacttcaagccatttcctattgaggaggcggtcaaggggctggggccgctgctgctcggggttcaacatgctttcgttgcctcgggcgtggccatcggctgcgccatggttgtcgtgttcgtcagccgattcacactggcgtacctgtatgggctcgtcgagcagctaacgcatggcatcgacagcctctactccaccggcgccggtgaggagtacttggcccggctcgtcaggtcctcggagcaaaacgcagccagtaccgcacagctcaaggacgcgcttgtggaagacctccacaagatgatgaccaacctggttgaccggcagattgccgctcaggaggcctcaacgctagcgctgggcaagcacatcggcgaagccatctcgaccgctgtcgcaggacccatggagcgaatgggcaacgccatggaggcgaccgcccgcggaaacggagagcaggtcaactcgatgcttgagaccttgctcaccggtttcatggccaagttggaagacaccttcggcgggcagatgaggggcatcaacgagcagatgcagcgctccatggactcgatggcggccgtgcaagcctcgctgcaagggttgctcgcagacatcaagcagaccaacgagcatgcggcaacacagatgtccggcactctcgaggaggccatgaaaagggcagcggacaaccagcagctgctgactgaccagatgcgggagttcgttcaggacttccggcgccttgtgaccgaggagcagaacaagtccaaggccgccatggacgaggccgtgatgaaggtgttaagagaagtcgccgtcgcgattgagggcctggaaggtgctcgcaaggcatcagctgccgaggaggcggggcgcaacgaccgcttggcctcgcaaaccaatcagctggttggggggctcaccgctcaggtcgaggcgcttctgggtgccgtctccgaccaagtagccaagactcagcgcaacattgacgcactgtcgcaagtctccctcagcgctatcgacggcatgaaccacggagcgctgacgatgagcagtgctgctcagcgatttgagaccgcgggcagcgcggtttcgacggtcttcgagcgctccacgaaggttgccgacacgcttgcctccgcgtcagctgcactccaggcggcatccacggcggtccagcgcgggttcgaacagtacgactcgaccaggcgaaccgtggactctcaagtcgcggtactgactggcctgattgaagcggccaagaaggaagctggcgtttcccaagagttggtcgcgagcatcaaggcaagcgctgattccatgcgcgcggccgaagcacagagccgggagcaccttgcgggcgtcaatgcggcactgctgaaggcttttgaggacttcgggattcagctggtaagtcgcatcaaggacgccatcgctgagacggaccgccatctagcccagggcacggggcacctgaacggagttgtgcaggaactcgccaatgcggttcagcgcatgaagagggcctga

SEQ ID NO: 10186 - DNA, 627 bp, Rubrivivax gelatinosus IL144
atgtcggccttgatggtgctgtttctggtcgtgatggcggtgacgctggttgcggtgacgcagagcattgatgcggcaacgcgcgcgtccatcgagcgtagccaggccatcagcaagctgatgtcgcttattgccgaggactcgaagaagagtggggtcggcgtagaccaaagcaacttccgcatcgacctgggcaaggacgtcaggttcgatagtggcagctacaccatcactcctgcggcgcgtcagttcctgcgaagctacgtcccggttctgctgaaggccaaggacacaccagaggggaagcgctggctgcgtagcgtggtcatcgaggggttcaccgacgaggacggcacgtacctctacaacctcctgttgagcctggaccgtagcagaagcgtcgtctgtgcgttgttcgagggtgccagcgggagcgagggcctacgtcgggaccagctccagaaggtgcaggagctgttcctcgtagggggctactccttcaactccatcaagaaggacaaggctgagagcaggcgggtggagttcaaggtggacttctggggcctcgaggagactccggtgccgcccagtgacgttctgaaggacaaggagtttgggaagtgctag

SEQ ID NO: 10187 - DNA, 1698 bp, Rubrivivax gelatinosus IL144
gtgctagccgctcaggccctccaggtcctcacccgtgaccttgcggcttgcatagcgaggatgggcctgggcggtggcaacttcggagtgcccggcctggtcgagaagcctgtacgggaagccgagcgaatcttccagggctatgccaaggcacagcccaggcaggaggactcgtacgcagcagcccgcgccttcttgcgaggtcaaaggctcgatgcttggcagcgcgaccttgtcgccagcgcagttgcccagcccatccgggaggctggcgacgagacagctctggggtcccagcggttcgacacgcttcttggcgagtaccaagcggaggctgaacgaggcgacctttggcgcctgacctggcacggcttgctttactcctacttccagtacgacatcagtgcggccggtggcactgctgcccaaactgggtgggaaaagctaagggcatttctcgagcggacctggccgctcatcgaccgacaggttggagctggtctcgtcccggactgggtgcatgtgcttcgcaaggaaggggctgtgctgtccagaagcccagtcgacaagtacgcgcgagggtaccttcgaggcgactccgcagcagtagaccaactggcggaggacctgggcatccctccgtcgtcttggttctggcacgcactcgtcctgggggctgtaaagcgggcgaccgccgactccgatgccgagttccaacgtctggtgccgcagctgattcaactcatcaagacaaggcccggcttccgggacgaggcgcttgagtacattcttgtgcggtatcacgcctgtagagccgcgccgcaggacgagctgcttcgcgacttcgtatgcgctccggccgtttggaggaacccgaagctcaaggcagcagggtatgccaccgcatggaaccgtgttcccgagcccgtttggcagatggtgctgggctgggtcaacgagcgcaatctcaaggacttcttcgacattcttgccgcgcgcaaccaagccgatgagggtcggctggcgttctggtcgcagtacctgaagcagattacctggacgaggctcgtcttcggcgctgacacgatggcgcttcagcgaagaagcccggaggtcaggaacctcatcgcacgcgaggagggtgcgtacgcgcggcttgacggcaaatcggaggttgacgctttcatgatgcagattgggtcctacctcatcgtcgagttcagcaagaagcccaacgcctgctacgcctacaaggttgatgagctgccgttcgagccctacgcgaagcactacgacggcggaaccaccgaccttgcgtatggctaccgcggagagaaggctgcccgaatcgtccacacgccgggttggcaagctcgtgctgcggaggaactccgacgactcggcattcggccggaccggcccgatgcgcagcgcgtcgtgggcggaggcgcagccactggctcggctacagcaggcgggtcaagaccggatagcgcttcgcctggtcccgacatgccggcgcttgaggcgttgatgaggcgattccgaggggccacgattgatgaccgacgcggtcctgggggcggccgactttgggtggaagacccattgcagagggtgcagcttggctctgagttgaaggctctgggctttaagtgggcgaatccccgccaggcttggtactacccggagagctga

SEQ ID NO: 10188 - DNA, 3864 bp, Rubrivivax gelatinosus IL144
atgggactctttgacttgttcaagcgcgcggtccgcgcgaagtctgatgagcctcagctccagacctcgtggacaccgggcggcgtgcgcatcgagttcgcttcacgccttgcgtcgcccacacctgacggactccttgaggctatccacgacgccgggccggatgaaacggtgttgggcgcgtacctcgcacagttggcggcagaggacaggtgtcttctgagcccggatggagcgttggtgcgatgggaggacgttttcgcccttcaagcgatggcggagcatgcgggagctttgcggctgcttggtctgccaccccagggtccgctcagaccggtcttggactgcacaggcggcctttcggatgccgactttgagctcgaagttgctgggtggaccgatggctcccagcaggtaaggccagactcaattgttggtgctgtagcgtctgttgccggcgaggagcagctgctgtctgcggctgcatgggccacgctcaccgaagttgagcgcttcagggcgcgcgatgcatcgggtcgcgcccagcatgagcaggagcttgcgtggggccgcattcgccggcttgccgacaaggccggcgccctctacgcgagcaccttccttgaaacgaccttggtgctcacgccggattcgcttcgtctgcccctgacaagggaggagacgccgttcggacgcgtcgtgacggtcggccccacctttgacggtgcgcccgacggctggctcaaggcgttcgatgggttcaactctgttcaacagcactatgacttgaccaagggcggcgggcgggtccgtgttgtcatctcggagcccgtgcgcaaggttctgagcgtcatcaagcgcgagatgcctggtcggaaggtgtcgggcgccaaggcagagaagttcatccacaacccgtttgcgttcctgggggacgtagctcacgaggttcttcgcgaggaagagttcgaagccgatagagctcaagctggtgcggtggcggcagtcttcagcattgttggccgctacgaaatagggcgtatcaactctgttgacctagtggttaccgagcacttcggagacgcccattcgcggacagacagcaagccatttgcctcgccggaagaactggagcagttcctgctggccctcaaggcggcgcttgagcaggagcgggaacggttcccctgggacgagtacgacttggacatcgacggggaaaccacgatccagttcgaggccgggctgcagcttgcccacgtctggcggacccagccagcccagcgcatcagctttgaagatgtgtacgagcttgagggctatagcggacgcatcgaaggaatcggtgctgccaaacccatctacgtaccggtgttccagagggacaagaaggagggcgaggacgggggctggttgccgtcagacttaacgcccatggtcaaggtgacgctccagggccacgaaggggatgtgctgataccgctgaccaaggagtgggtccaggcgttcgatgagcaggtcacccaagccgaaaaggacgggcgagctgaggtcaagaacgacagccttccgacagcggtgtcgacccagcaagcccgggcctttgccgacgcgttccagaacatggtcggagcgcaggaccgcatcaagcgcgatggtgggtccaagcagaaggaacgcaagggtccgcggcagaccttgctggtcaagacgaacttccacggtgtggactacctggaggaacgcagagcctcgctggcactaccggagggcgctgccgcagacttgccgcgctgcctgaggcccgacattgagctgaagaagcaccagctctatggtgtcgcctggttccagcatcttgtgggcaaaggcacttcgcagtgccgtggcgcgctcttggccgacgacatggggctgggcaagactctgcagctcctgtcgctgctggcttggtactacgagcgaaacccgaccagcgctccgtccgtcatttttgccccgaaaagcttgcttgagaactgggccaacgaatccaagaagtttttcactcagtcgtttcccgaggtcgtagtgctgtacggggatgcactgagctcgcgcaagcagccactgggccttatcgacagtcagttgcaggaaatgggcatcgtcgagctactcaagcccgactgggcgggtagctccaaggtcatcgttaccacctacgaggtgttgaccgcttacgagttctcgctggccaagcagcccttcgcgcttgtcatctgcgatgaggcgcagcgaatcaagacgcccggtaccttggtcacgctggctgccaagaagctcaaggctgacttccgcatcgcttgcaccggaacgccagtggagaactcgctggccgacctgtggtgtttgttcgacctggttcagcccggtctgctcggcgcgttggaggagtttggcaagacctaccgccgccccatcgaatgcgagagtgaagaccaagttgaggcgctcaagcgtctgcaggctgcgattgctcctcagacgctgcgaagaaccaaggccgacatcgccgcagacctgccgaagaagtacttcgccgccaagaagtcctcagaggcagcgctcgcgttcaaggactgcctcggtgaagaagagcgtcttgaagtgcagctcaccgagcaccagcgcatgctctacaagggtggcctcaagaagttgcaggacgcagcgcaagagtccaacggccgcaagcgtgcacagctttcctttggtgccttgcatctgatgagggcggtttgcgcagagccctactgcctgccgggaagcaagttcctggtcgacaaaggggggcgtgagactcatcttgcaaactcgccaaagcttgcctggttgctcgacaggctccaggaggtgcgaaacgccggcgagaaggctatcgtcttcaccgaactgcgcgaggtccaagctgccctgtactacttcctgaaggatgcctttggactgcgaccgttcatcatcaacggagactcgcagggccggcagggctacatcgaccgcttctctgcgacgtcgggcttcgatgtcatcattctttcaactctcgctgcgggcgccggcctgaacgtgacggcggccaaccacgtcttccacttcaccagagcgtggaacccgtccaaggaggcgcaggcgacagaccgtgccttccgcatcggtcaagagcgtgacgtctttgtgtactgcccgaccgtcgtggccgatgacttcacgactttcgaggttcgactggaccagttgctcaagcgcaaggccggtctggctggcgccacacttgacgacggcggactgacgtccatgctcaacggctcaggcaaggatgccagctatcgagagctcgtgggcgatggcgacggcggtgaggccgttcccaagaggttccttacgatagacgatgtcgaccgcatggacggggactcgttcgaggcgttctgctgcttgctgtgggccaagcaagggttcgatgcgacggtcacacccaagcggggcggtgatggaggcatcgacgtcgttgcgctcaagggcaccgaaggtgaccttctgcagtgcaagagttccaagtcggcggaggtgggctgggatgctgtcaaggaagtggttgccggtgcggcccgctaccaagctaggttcaaggggacgcgctttcgtcgcctggcggtgacgaaccagcacttcaaccggggagcaatcgagcaagccgaagccaaccgggtttcgctggtcactcgtcccaggcttgaggaactcctcggagctcatcctgtcagcaaccatgagttcgacgaagcgcttcacagcttcgtggagttcgctgccgaggcatga

SEQ ID NO: 10189 - DNA, 1911 bp, Legionella anisa
atgattaatccagaatatctatttaccctaataacaaaagactcaacagtttatttcttcgtcgcattcattttcgcaatcgctttaattccattttggcaagccacctatacaataggcaaagtaaatcgagctataaagaaagcaaatgaattaattaaatcattgggaaatgaatcatcctctaaattctataatgaatttgaaaacataaaagctcaattgaatggcattgattatttgaaaaatatttggggagaattcattggtagcacttattatttaacaaataataatactcaacaaattaactccaataaaatattcctatcacatcgtccctcctattattttaataaaaactctgtgcttggagcacagttgaatctaaatcagtttttttccttccctaattatttgattggcttaggcttagcttttacttttattggattagcagctgcattgcatatagcacaatcaggtctcgcaaatggcgaaggccaaacagcattaagtgaactacttaaagttgcttcggttaaattcttcagttctataacaggtatcggttgcagtttgattatatctttcatacaaaaaatacgtattaaaggatttcaaaataatttgaataatttctgtgggttgctagagaaatgtacagaatataaacctgctgagaaattgatctttgaaagtatacaagaagaaaaaactcacactttagcattgcaaagtatggcaaatgatatatctatcggaattggagatgtcctcaataatcaacttcccgctagtgtagcaaatgccttagctccattggctgatgaaataagagctcttgctcaaaaattttctggaagcaacgaaaatgctctggagaaggttcttaatgaatttcttgatcaactacgtaaaagttccggtgatgagatgcaagggctcattgacggtgtaaatactctaaaagactcccttcttcgactagttgaaaatatggaaactatgggtaaatcatttggatctaatacgaaagactctaccgaccggctaatggcctctcttgatgcatttacatcaactttcatgcctgtacaacaaggtattggaaaatttggacagtctcttgattctcttgaaaacatcgcaaaaagtattcaacaggcaagtggaaacattaccggtgctgctgatattagcaatcaaagcatgtctaacctcgcaggtacagtcactcaaattaccgaaaacttaactccaattcaagatctattgaatgtgattaatctttcattgaaaaaagtggatgaatcatcggaaaaccttcatggggctgggagaaccatagcatcagttgcagatggttttaaaaactctgcggaatctattgagcaagcaagtaatagatttgaccagaaaattaataaatttgaagttgtaatagatgggatctcaggaacagcaaatgttcttgaacgagcttcaaacaacgtgagtaatgccgttaaaccactatctgatacttcagaaggattaactaaagttattcatgcaattcaagaaaccgaatccagaatacatggaagtcaaaaacaactctctgatttattaattaatcttgaaaacttcactgagaaactaccctctctattatctcaatatgaagagcgcttcagcaaagtagatcaagatcttgcaaacgcctttggagagttagctaaaggaagcgacgaattcagaactagcataagtcaatttgtaatatcatttgatcaacaatttgacaaagcaatacgacaacttagcggtgttattcaagacttacaagaagagcgagaaaacgctgaactaacaacaaacaattaccataaagcagaatatgtagatgcagacaccagaatcgcatga

SEQ ID NO: 10190 - DNA, 705 bp, Legionella anisa
atgcagacaccagaatcgcatgatgaaagctattttgcatcattcacggatatgcttgttggaattattttcatatttattattttgctaatgattgtggcaaataactttcaaagtgcaacaaaaaaagtgactgaaattaacgaatcaagagacaaaattctaaaagaaatagaacaatctcttaaacaagaaggtgtttcagttactattgatattgagcaaggagtccttcgtttacctgaaagtattctttttggtgttgaccaatatcaagttaatgaagaaggtaaaatagcgctttcaaagttagcatctgttcttgaaaaatacttaccctgtatggcagtaactgaagaaaaattcaaatctcaatgtgaatctttaaatctgacaagtcgtgatgggctggatgcagttttcattgaaggacatactgattctacgggttcatccgaacacaattggtatttatcagctagaagagccatttcagtttttaatgagttaatcgacgctaaacctttacttaatgttggtcttaaaaatattaatggtatacccatattaaatgtgagcggatatgaagcaagaagaccaattgatcctaacaatttaagtgtgaaccgacgaattgaacttagatttattatgcgatctcctactccgcaagacataaagagattgaaacatgccattggataa

SEQ ID NO: 10191 - DNA, 1449 bp, Legionella anisa
atgccattggataatcttgcgaatacaaaagaacaattaaaacattttttcaaacttaacaaacttaatgtttctaagaatctactaaccttgcctacgattctacagacagtgaaagagctagaaaaaaaatttgcagttactgatcattcaccttcaatagttgagattgagaaaatttattttcgatttgctcaagcaatagaaaataaagaattaacttctatatcgaatcgcgaatggaggatgtcaccatatattttttggtatcaaaatggtgaaagtaagccacttggaagtaactatgattttattaatcaatatattaattggttaaaacgtaactcaacaccagggaattggagaaaattaattcatgtatttcttagagactacaatcaaagatcaaattataaattaatttttcagcaaatttcatgtgttatacgtgaagaattagatagttgtagccaaaaaaataacctcataagatggacagaaagagatcgacaaattaatttattctctcgggatttctgtttgaataaagccatcaactcatttattcaggatgcgaattgtgattgggatgagttcgcccttttaagtggtctgcatggagatctcggacaaactggttatgcagaatcaattggtaaagaactactaaacaaaattaataccctaccttccgaggaattgctaaacgcgacaataaattattattttaataatggccaaataagatttaatgatcatcgtgttaaattaattgaagctttactttctccatgggcgactaacacatataaaattagtagtgaacttaaaaaaagaattcatgatattttaatcgagaactttaaagatcctcgtattattgcacaccaaagaaatggctggcgctccgtaaatcaatcaagcctacaaattatgcttcgttggctcgttggagatagtatcgagcaattttttgatattgttgatcaaatggcacttgatcatcagtggaaatacagaaaagctttttggatggcatatttcgcacttggatatcttgatgaagcttggttcgcacttggtccagacgctcagtattatgcagaaactcacttcgggaataaattatctttcggcaaaatagttaaagaatgctcatcaaatcagagtgttctaattatcaaaattaaagacctggtttttgcagaatggagtcacaatggtaaatgtcgggcctggttaacaactgaccctggctgcccctctcattataaggataattattcaggctcaaacctcaaagccaaatcattaaaaatcgttccacattatcaaacagatggaattcaacaccaaggaagcgaaaactactcctggcaagaaaaattaaatgattttatttatcaacatactggaataaaggtataccattatgattttcggatttaa

SEQ ID NO: 10192 - DNA, 1725 bp, Legionella anisa
atgattttcggatttaagcgtaaagccaagattactaccaaatttctttgtcacgaacaactacaggacggtatatatcgatttatatttcaattagaaaataaaaacacaattgttcctattcaagaatggcgaaactcaaatcacccaggagcgatttggctgctagattatttacatgataatgatctcatacaagaggatttattgtataatctaacaataagccttcgctcagaacaactaattgagattttaaaaggccaagaatgttacctacaacatttactggaactacccccactgtttgatggaggactgcatattgaatgccaaggactactagccaaggatgattacactataaattattcatggatagacggaaactccagaccgattacacaggctgaaagaagaggcatttttttaatatttggaaataaaaaatatcttctatcatattttgcttggaaatttgctgaagatattgatgcaattcgagaaaagttacatttatctaactccatgcatgctcgattagaaattcttgaaaattttaaatcaattagagcattgctcccggaagaagaaagtcggaaattttctgatgatggcagcatatcaaatatcaagttatactttgctaacgcattccgaattgacgcaactccagaaggaaatagtttcaaaatccaacctgtccttctaaaaagacatgaaacacacaatcaagattgtgtgtttgaaaacatattaccccccatagaacaacaacggtatattgatcaatttagtaatagtactaaattacaaccttattacaccctaggaccaggaaaatacattctaattaatgatcaacttaataaagcgctaagtaccattcataaaattcagcactccaacgataccgaaaaattaaattttctaaaaaatcccaaagccactcttgcagatagtctggaaggaatgatcagtgatgaagaattaaatctaattttttctgatagagtaacaggaatcggtgaatggaacgcaaaagtaataccatggattcaattaccgcctggtgaatggattccagatggtaaattcccaaatagcccatttgggattgatatagcaggaaaaaaaatacagtttgaaaccatcagtgatctctctgtaacacttgataagattaaagaagccaaaaaatcaggggttctatttgtagatcatgaaggaatcaatattcctgttaacgataactctatatccgcattagaaaaatttatacctcgacaacccttgtataatgaagataataaacataatcaagctaattcactagaccaagataggatactacaaacgcctgtaatgcttgtaaaagaaaatcttgaatatgttgaatttcatgtagttcgcctaccaagaaaacgctaccctcaatcaatcaaactacccgagacaattagaacagaaccaaaacaacaccagatagaagcatataagtggttatgtgcacattatcaagcaggttctaggggagtacttttagctgatgacatggggcttggtaaaacttttcaatctctaatgtttcttgaatggctacgagaaggaatgattaaagaagatatctgtgataaacctcttttaataattgcgccaactggattgcttaaaaactgggaggccgtgtccttccggcaaggctgtgtgacagagtttaaatga

SEQ ID NO: 10193 - DNA, 2004 bp, Bacteroides ovatus SD CMC 3f
atgtctgatattataacattagcatctggtgcagtaattatattggttttcttactcttttgttttgaagaaagaaaactttatagcatcaaggaaattttagtaaaacttgttaatagtgagaatatcttggattcattaaacaattccaagatagcttcgcttggggaaaaatatgaaaaaactattatcgtaaatacaaaagacgggaaaaagtcaaatatacctgcatctgaatttatatatgacaacagcgtgtgtaaatgcaacaaggtaaatttacgtatgcttgatacagcatcaggtacgcttgtcggtttaggacttcttggcactttccttggcttaactttgggtattcaaggatttgacagtagtaacacagataaaatcaatgaaagtattcagggattattgaatggtatgggcacagcgttcctgacatctcttcttggtatgtttctgtctattgtatttacatttatagataaatcattaagacatagattgtataaaaacgtaaatggactgacagaaaagctagatgccctttattatattgatgacatagcattggccaatcttaatcagcagaatataattgaccgactttacaatgcactaaagtccgattttcaggtacaaaccaataccataaaagactcctttaatgagcttagtggaaaactatcatacacaaacgaatctggagttatcatacctgtggccaacgctgtacgagaaattctttctgagaacgcccagcaaacaaaagctctaaaatcattctctactgacctggctatagaacttaatcaaggatttgatgagactctctcacgacagatgcaacaaaaaattcttccgttaatggaaagtgtcgatgcaaccactaaaaccgttgttgaacatattgatcaaatggcgaaaactgtatcttctccggcaagcgacatgatgcagagagttgtggatgaactgaagcaaagcatgaaattacttatgaatgagtttagttcaggactttccggatcggctacaacagaattagaaaatttggctcatcagttaggctctgcaacccaagctatggccgattttccgaaaaacatggaaaatatttcagcaacattacaagttacaattgaagaagttaagcattccatttcggaaatatccaatacctctgccaatactaattctatggcaatgagacaaatgcaagaacaaattacatttgctactggtgctatcagtaatgccattaatgaagttaaagaagttatgtctggtatttcacaatcatcccaagagcaaagtaaccagatggtaagcaaactggcagatgctgcggacaagatgggcacattccttactggaactatcagtacattatcatcttctgtaacagaatccgtcaagtcaatcactgatgatgtaaatagtaaacaagccaacctaatcgcacttcaggaagatactacatcccagacaaaaagactgcttgacagtttcaatattggattggaacgtttggagaagatgaacgagtacatttcaggaactatgaatggcttcagacaggctcagggagaaataacgataagcacaagtaatctacgtacaatatctggtgacatgaaattagcgacagaactgttcaacaaaggacagaacgactatgctacaaggcttgcagaacttcaaaccatgagccaaaggggtattgatcaggtaactgaaatgttaagagactcaggtcagttatcagaggattatgtccaaaagtttgagattatcaaacaaggacttggaactatctttactcagttacagaacgggttatctgaatacagccgaacaataaaagaaagtactgacaaataccttgctcagtacactacgagcctaacccaaactacaggtgcgcttgcttcagctattgaacgacagaatgaagttacagaaatgttgaccgatacaattacacgtaataaacgataa

SEQ ID NO: 10194 - DNA, 696 bp, Bacteroides ovatus SD CMC 3f
atgaagaagaaacgtacagaatacgaaagtaaagatgagaatgcctttgcactctccacaggtgacttaatggccagtcttctgttcatctttatactgctgctgatgggagcgctccttcaagtgcaagaaaaggcagaacaagacgaggaaattgtgaaaagatacgaccaaatcaaaacacaactttacatcgatctgcagcaggagttcaaagatgatcttgcagtttggagggctacaatagactcgactttatgcattcgtttccaagaaccgtcaatgctttttgatgaaggacagtccttgctgaaacctaagtttaagaatattcttgatgactttttcccaagatatatagccgtacttagtcgtgatgaataccgagataatattgaagaaattcgtattgaaggccacaccaacagcaacggaggttattattcaaacatggaactttctcaggatagaacaagagccgtgttacaatattgctttagtcttatgtctgacgacttggaagagtggcttaaaggccttgtaacagcaaacggactttcttcaagccacctgatactgaaaatgaacggcgaggaagataaggatttatcacgacgtgtagagttcagagtaagaaccaatgctgaaaagcaattggaggatatagcaaataaacgttttatacataaacaataa

SEQ ID NO: 10195 - DNA, 1851 bp, Bacteroides ovatus SD CMC 3f
atggaagacatctatgcacttctaaatattaacaaagatcttctgcaagatttccacttgcttgcagaacgtactgttgaccatcagactgagttggccatcagtcgcaatatgcgtaccttgcaggaaatagaggtacgcatgatgaccgacagaactgttattgcttctcaacagactattgatgaaattatgcagaaagtcatagagaatgctaaaacagaaaataaagaaacaagtatttggagcattcatgaacttcgtattgtttcttattatttaataaaacttcaagggaatgaacaggcatacatgtatgcgcttcatattctagagactaactggagggacatgttctttaacggattatcattttattgtcttgactcatggaacatgattgacccggagcttcgctcattgacttgtgatctgctcagcaagcagctaaaacaatacaatggttcaaacaagaaatacatggtaatgaagaaccatgcaaatctatttgatgaagctggtcccctaagactatgcgctctattatctcaaaagaaacaggatgtaaagaatgcccctgcatattttagtaacaaactgtcaacaataagccaatcatattactctgatgtgattgttaattttatcagtagcaataaaatcatagactttgactatattgaatctgttttaaatgctcacaaatatgatagaaccaaaaaacttatttttgcagatttagttttacgcgtaaatgaaacaggtgatgatgtaaaacgtactcaactatgcaagtatgccaatcgaatcttaggcgatattacgcttggcgcaacatgggctccatttgcaggcgcaactgaaaaacaagcccaacagctcaaaaaggcaaaacaacatgtaaatctatggtttagtcaaaagataattgagacattttttgaagtttgtgtacaagacagggatagaaaggacttctggctaaaatatgtggaatatgtaagcagtttcaaaattgttggatctactacaacgaaaagaatcttacaaggagataaccgagtcagcggtattttcctgccacatttcattgagacagattcgttcgcatcacagacatcagctcttgtattgttcattaagaataagatgattgttgagttctctgataccggtgctttgtacgtttacaaccaggaccatgaaaaagttaagatggtgacagggaaaaaacggtatattccaagcactgcagatctgaagattacatctatgggaagtctgattgatataagtgattggtactacaatacatattacgaggaaggaagaatgacccataggggaaattggcaaggacgtttaagcggttggttgcaacaaaaagtcatttcatcaaataacattggcatatcttttcaggatgctgaagacaataatctttttaaggcaaccccaattcaaaaagaagagtttaaaccatcatccaattcagtcccgaggacttcgtctaataggccaatcaagaccgtgtatgaagccaatattcgtttctctttatcaagtaaatggatatcaaatggtaaatgccggattgtttgtggatataaaggtttctaccttaacttctccgctggaaatcaatttgttcatctacgtccactaattagcggagcaaccccaactggtagtgtatggataagaaaggcaagaaatgacaatggatggcaagaggttgtacactcaaactcaggacgagaaataagtgttggatatttgaaggaaacaaatggaactgttttatataagcagagatcagaacaaacagattatatgactattaaaatttaa

SEQ ID NO: 10196 - DNA, 666 bp, Bacteroides ovatus SD CMC 3f
atgttaactcaggtagtaaataaaataggaatactattcattgtaaatttcaatggacatgatcttcatttccaagaatggaaagcgacagacgatagtatatattatatgcctctttcaactttggttgacaatgggtatgcctatgcttcaaaagatggttgtcttgtcccttatgaaaatatctatctgttagatgaggaggataagttacttctaggtgtcccccaaccctataatatggccatgcgtctcattggaacaagcatgttaaatgcatctgattttgaatacaaggttgaatttcttagccacgtgccagatggagaattattatcatatgaacaatgcggaaatatacttatagtcaacaaaaagaaatatttattatcggaagcgcaatatgaattgataaatcgtattcatgagtttaattcttctccagaggaagaaaaaactacagactttaacctgcgtaattttggagagataaaagcattagcagaacaagccggatgcgaattagacagttatttagcaaacgagaatgtttacgttccagaacgcataaaaattgaagttggtcgtgatgaagatgggtttaccattgatcctgccattgacattgatgaaaataaaaatttcagcagtattttgatcgaatga

SEQ ID NO: 10197 - DNA, 2190 bp, Cronobacter sakazakii ATCC BAA-894
atgtcatggcttaattctttcttgctgacgcttacttcagttcaacctcataacgtaccaattactgttggcattcttgttggcgtggcctttggttgctttatttacttttatttgttcagagccataaaaattattaacggtctgaaaaaatatacacactcaattaatagcctcgaaaacaccgcgccagtcgagcagcttgatcatctgcgaaacttgttccagaagcctgaattcaggcatgcgtggaacgaattcgaagaatcgttgcaccctcaacgtgagctggaaaacggtgaagagacaattgttcgcgttcgggccacagcgccaagcgccagtttcttctctgagcagcagcttattgatattccgctgaacaccgaattttttaagcacttacccggtattctgaccggcataggtattatcggcaccttctatggcctgatgataggcctcaatcatttcgaccccagcactccagagcaagtctccagcagcgtcaataatctgctgcacgacgtgttatacgctttcctggggtcagccgccgccatttttgcttctattgtagtgacttggattgaaaagctatctatcgccaaatgctacaaatatctggaaaagtttactgcttcgctcgacaaactctatatcagcggtgtgggtgaggagtacctcgcctcgctggtgaaatcaagcaatgacagcgcgacacaagctcgtcatttaaaagaaagcctggtcaccgatctgcgcgatatgctgctgcatctcaccgagagtcaaaaggttgaaaacgaacgactggcgaatacgctaagtgctacctatcgtgaatccggcatgcagttcgccgatcaggtcagtggtgctatcgaaaatagcctgaagtctccacttgataaaattgcgggtgcagttcagaccgccagtggcgatcaaagcggtatggtgcagaacatgctgcaggatgtgttgacggcgtttatggcgaagctcgataccacatttggtcagcaatttacgaacctcaacgacatgatgggacaaaccgttggcgcgatccaaacgatgcaaagtggtttctctgctttgttacaggacatgcgtcaggtcagcgacgattcccgtcaggggagcgcgcagttaattgaacaattgttagctgaaatgaaatccggtcagcaagccatgcaggcaggcatgaacgatatgcttaccagcctgcaggcatcggtcgccagaatcggcgccgaaggcgaaggcgcaggtgagcgtatggctcgacagcttgaaaaaatgttcgctgacagtgaagcccgtgaaaaggctcaagctgaacatatggctgcctttatcgaagccattcagaattcagtgcagcaagggcaaagcgccacaatggaaaaaatggcgtcctccgttgaggcacttggcgaacagcttggcggtctgtttagtcagatggacaaaggccaacaacagatatctgcacatcagcaagcaaatcagcagtcgctgcacgaacagacacagcgcgtcatgggtgaggttgatgatcagattaaacagttgatcgacaccgtttcgcagcaacataagagcaccactgaaacgctgcgccagcttgcggaacaaaccaaccgacaaattcaggatatgcaacacggcgcagacaaaatgcgagtggcggctgaacgtttcgaagaggcaggtgatcgcgtatcgcaagccaaccacattaccgttgatgtcctgaataaagcgcaatcggcaggttcaaccctttccggcgctaccagcgagcttacttctgtcgtggcagattatcgtaacaatcgcgaagccattagcaaatctatcgccatgctcgagctgctcgctgccaatacacaatctgaacaaaccacccgtagtcagtttattgccgatcttaagcaacatggcgagcgtttacagagctataaccgggaagcgcagacctttatggataacgtcagtgatgtactcggcaaaggttttgaagacttcgctgaaggcgtatcacgtagtctggacaagacgcttggcaagctggacgttgaaatggcgaaagcttccactttgcttgcaggcgctgttgaacaagtcggagaaagcatcagcgagcttgatgatgtcctgtcccgcgttcgtgtctga

SEQ ID NO: 10198 - DNA, 741 bp, Cronobacter sakazakii ATCC BAA-894
atgtttggtaatacatggagcataaaaaaacggcgcggtgacgaagcggagaaacccttctggatttcgtatgctgatctgatgacggcaatgatggtgctatttctggttgtcatggttgcttcgctaagttcggttactcaacgcattcagaaagcagaacaaggcgaaaaaacacgtgggcaggatattacgcgattgtgcgagcgccttgaactccatgcccgtaatctaaacaaaaccattgtggtagattgtcacgataatcgtatcagttttggcgaggctggccgcttcgatcacaatcgttttttcctcaatgcagaaggacaaaaggcattgcaggatgtcgtccctctggtgcttgaagctgccgaaagtgaagaaggcaaaaagtggtttaagcaaattgttattgaaggattcaccgataccgacggttcatatctttataatttgcatctttctttacagcgttctgaatgggtaatgtgcagcctgctagatagccgcagccctctgcaaaaaaacattaccatcgagcaacagcttcaaatccgtaagcttttcctggcaggtggcgtttcctttaataatgctaaagagagtaaagaagccagccgtcgtgttgagttacgtatgcagttcttcgggcttaaagataaacgcgatggggatgagacggtggactttcctcctgtaataaataaagaagtttgtcagttggtaatgccgcaatga

SEQ ID NO: 10199 - DNA, 1689 bp, Cronobacter sakazakii ATCC BAA-894
atgacctcagcattgaattcgctttcacaacgtattactgcggctctctcagtcacccagcagagtgaaacttttttgcgaaatgactttgatgcattgacgtcagcaggaatagaaatggaaaaaaggtttgataaagccgataaaatccccgctccaccacatgaaattcgtctggaggcgctacgtcgtcttcgccttgcacaagaactcagcgggcgagactggcggatgatattttatgggcttgccgataatgatccgttatatcctaaccaaccgatactgctggaagacgacacgctctttccaaaagtagatagtaaaattaaaaaatgcatcgcatcaaataatcttaagcgcaaggattgggctgcactttgtgcaagctactttgcctaccagaatgaaactcctgaacaaaatccacactggtgcgtactacgtggtcatatagcacagggttacctcgttgtgaaatcggccataaggcgagaaaaaccctggatgaaaaccatagaattttatcacgatatttttaccccgcaggcaggcggcgttatctccagacagttacttgcaggtgagcataactcactctcatcgttggaaaagatcgctcaaattcatgacagcagctggttgtggaaacgtatttttaccgtgctcctggcacagcttgatactatggatgacccagaatatctggataaaatcagctggctgttagatctggcagcgcaatgggttcgctttcggaatgacattataagcgcaacccttactcgctattaccattcaacatatcgtgatcaggctcattccgcattgaaagtagctgcactagaatattgggataacccacagctaaaaagccagcagaataaatggtaccaatatgtttctgaacccgttgcaggcatggttcggagctggctggcaaaacaagatttgatgcatttcttcgagttgttgcgtggaaacggcgatgtagatcaagcccgcctcttttactggctcaggtttgcaaatcagatgggcttcacccgtatcgtgatgggaaccgatgcctggcgcgatcgcggaagcgactttgcgaaattccgcgaagaaaacaagggacggttaagttacctgcgaggcggacgtaatcttgataatgccatgattatgcagattaatgattacttatttgttgagttttcaggaacagggaatgcaatgtatgcctatcgagttggccaggcaccatttaacccagaatctgacactttcgacattaatcttcagttaaaagatcaaaatcaaaaacgttgcatactgaggatgcctcatatgccacgtgctgaaggatatagcaaagctcatatcacgggctggatgttgaaatatgatgatgagttacgcaaattaggtattcgctggctggccgaagaacctgttaaatttattgagaaacagaagtcttcttctatttctttctccaaagtaaaaattattaacccacagcgggatactgctatacagcgtcttgtagaaaatgtcccctgtatcgttagcgataaccggcaaaaaggtggagtgctgtccgtccagcttaatacccctgacgacgcattagaaagagagttgttacgattaggcttttcacctgtagccaaagaaccccgtcgttactggataaaataa

SEQ ID NO: 10200 - DNA, 3243 bp, Cronobacter sakazakii ATCC BAA-894
atgctgaaacgcctgttaagtaaactgacgggagaccgtcagcagatagagcgccaccttaaagataaatatcaggttgaggaaaacgggctcagcttttcactgtctctggttgatgattcgcagctctgggcactggcatcctggcttgagcaactggctgaagaagactatctgatatcgctgacagaccggtggctgttgagttggcaggcattatattgcctgctggaagatgaagatcatgccagtagcctgccacttatcggcgtacctgaggtactgccgttacgcgcaagcttgtgttcacgtggtgcgttaagcgatagcgattttcgcgtctggatttcgcaatgggctacggtcccaggccgcaagccaatccgttttagtcgtctcggtgccatactaacccatgataatcagcaatatctgttatcgagggaaaactgggcactcttacaggcaatagaacaactcagtgtgcagcaaattcagattcccggcgaaaccactaaccagctgggctgggccgctatacgcaaatgtgcgaaacaagctggcgcaaaatttgatgattatttagaaaaaacgcatgtcgtcaaaccgacttcattgtcattacgtctgcgtaaagcaaccgttgcggataccgcggttatcgaaattgaacctcatttcgaagaccagcccgctaactggctgagtaattttgacaagaactcgcaggttcacgatagctaccggattcccggagagaatggtgaactcagccatgtcatactcgctcccgaagtaaaagaggtcttgaattcaattcattcgattccaggtcggagagtagccggaagtgaagcgctttcttttgtccgcaatccttatgcatttttaggtgaagacgcagccagcgttattgcaccagaagagcatgaaaaagcattatttaacgccagaattttctttcatcatttcaggttaatacctcaatggaatccatataataaaattgcggatattacccttgtacttgagcctatatcacctgttccccagccagaaattacttttgtgttctccgccccctgggagctggaaaaattcgtacagcaactcggtattagtgtcgctgcacagatgcctgcaggttcatggcaagggtacgaactggagttaagtcagttcacagaacaacagtggcacgactgccaggctctcctggctcgctggcagcaagaaattgaagggaaagaatttagcgatgtgctggatattgcgaaatatggtgaccgggtaattggcatcggtgagtttgaaaaaatttcctcgccctggctgacgaaagcgcaaagtgaaaactggcttccagatgacatcgatttttccgtgtttgcagtcgaaacgctgactgattggcaacctgaaaatcttcaccatttcgatgaactacagaagagaattaatcaggctgaagctgctggtgaaacgcatattactgccccctggaatgacagcgaattaccgctggataccgcaaaaatctttagtaaaaaatggggaaaaaagcagagcgctgcgaatggatctgcgggcaatattgtagataaaccaacccgagccgtactaaaaattgagcaaaatattgaagaagctgcctacataaaacagcgccgtaatttacttctcagtgcgcgtaatgcagaacctgaaattccgctcagtctcaaagaacatatccgacttaaagatcatcaacgcgaaggtctcgcctggcttcagcaactattcatccgttcaccagaggaaaccgcaggttgccttcttgcggatgatatggggcttgggaaaacactacaaattttaagctttttggtatggttcattgaaaaattcccgcaagagccgccaagtcttattgttgcgcctgtctctcttcttgataactgggaacgtgagctggacaattttttctacacaacaggtgttccggttttgaagttgtatggcgagaccattaaagcattgaaatatcctaaacaagctattcctgctcatctgcaatctcaggggatcaagaacctgcttaaaccaggctggcaaggtgagtcgaaaatcgtactgacgacctatgaaacacttcgcgatcaagagttttctctggcacgccagtcctggtctattatggtatgcgacgaggcgcaaaagataaaaaatcctgcagcactaatcacacatgccgctaacgcggtacaagcgagatttaaagtggcttgtaccggcacaccggtcgaaaatacccttgttgacctgtggagcttgtttgattttgcccagccaggcttgttaggagcgctaaatgaatttggtaaacattatgtgcgttctatagagaacgaagctggacgagatactgaacggctggaaactttgcgcgcgctaatagaacctcagactttacgccgcactaaagaagaggttgctcgtgatttaccccggaaaattgaagtggaaagctgcaaacagttgatattctccggtgttcaaaaaaagctctacctttcgtctgttgcaaactggcaacagcaacaagcctttagcgaagagatgcaacaggccggaactggtatgttaggtttgttacacaagctgaaactcatttgcgcgcatcccgcagtcgttgatccagcccctcattttcgggacaactctcccaaacttaattggctgctaaaaaaacttgcggaaataaaagcaaccacaaaagacaaggttattatttttacagagcttcgtgatttacagcgtgaacttcaacatgcgatataccaaaaatttggtttccgaccggttattatcaatggtgataccagtactaaaagtcacagtcaaaacagccgccagcgcctgatagataatttccagtctcaaccagggtttggaataatcattctgtctacggttgccgtaggtttcggcgttaatgtacagaaagctaatcatgttattcatttcacgcgatgctggaatccagctaaagaagatcaggcaacggatcgggcgtaccgaattgggcaaactaaagatgtatatgtttattaccctacagtgagagatcctgaaatcaccacttttgaagtaacgcttgatgaacttcttaagcgtcgacgcgcgctggccaaagatatgctatgtgctgcaccagatttaagcagtacagactttgaggatatacttaaaggaacttag

SEQ ID NO: 10201 - DNA, 741 bp, Cronobacter sakazakii E899
atgtttggtaatacatggagcataaaaaaacggcgcggtgacgaagcggagaaacccttctggatttcgtatgctgatctgatgacggcaatgatggtgctatttctggttgtcatggttgcttcgctaagttcggttactcaacgcattcagaaagcagaacaaggcgaaaaaacacgtgggcaggatattacgcgattgtgcgagcgccttgaactccatgcccgtaatctaaacaaaaccattgtggtagattgtcacgataatcgtatcagttttggcgaggctggccgcttcgatcacaatcgttttttcctcaatgcagaaggacaaaaggcattgcaggatgtcgtccctctggtgcttgaagctgccgaaagtgaagaaggcaaaaagtggtttaagcaaattgttattgaaggattcaccgataccgacggttcatatctttataatttgcatctttctttacagcgttctgaatgggtaatgtgcagcctgctagatagccgcagccctctgcaaaaaaacattaccatcgagcaacagcttcaaatccgtaagcttttcttggcaggtggtgtttcctttaataatgctaaagagagtaaagaagccagccgtcgtgttgagttacgtatgcagttcttcgggcttaaagataaacgcgatggggatgagacggtggactttcctcctgtaataaataaagaagtttgtcagttggtaatgccgcaatga

SEQ ID NO: 10202 - DNA, 1572 bp, Cronobacter sakazakii E899
atggaaaaaaggtttgataaagccgataaaatccccgctccaccacatgaaattcgtctggaggcgctacgtcgtcttcgccttgcccaagaactcagcgggcgagactggcggatgatattttatgggcttgccgataatgatccgttatatcctaaccaaccgatactgctggaagacgacacgctctttccaaaagtagatagtaaaattaaaaaatgcatcgcatcaaataatcttaagcgcaaggattgggctgcactttgtgcaagctactttgcctaccagaatgaaactcctgaacaaaatccacactggtgcgtactacgtggtcatatagcacagggttacctcgttgtgaagtcggccataaggcgagaaaaaccctggatgaaaaccatagaattttatcacgatatttttaccccgcaggcaggcggcgttatctccagacagttacttgcaggtgagcataactcactctcatcgttggaaaagatcgctcaaattcatgacagcagctggttgtggaaacgtatttttaccgtgctcctggcacagcttgatactatggatgacccagaatatctggataaaatcagctggctgttagatctggcagcgcaatgggttcgctttcggaatgacattataagcgcaacccttactcgctattaccattcaacatatcgtgatcaggctcattccgcattgaaagtagctgcactagaatattgggataacccacagctaaaaagccagcagaataaatggtaccaatatgtttctgaacccgttgcaggcatggttcggagctggctggcaaaacaagatttgatgcatttcttcgagttgttgcgtggaaacggcgatgtagatcaagcccgcctcttttactggctcaggtttgcaaatcagatgggcttcacccgtatcgtgatgggaaccgatgcctggcgcgatcgcggaagcgactttgcgaaattccgcgaagaaaacaagggacggttaagttacctgcgaggcggacgtaatcttgataatgccatgattatgcagattaatgattacttatttgttgagttttcaggaacagggaatgcaatgtatgcctatcgagttggccaggcaccatttaacccagaatctgacactttcgacattaatcttcagttaaaagatcaaaatcaaaaacgttgcatactgaggatgcctcatatgccacgtgctgaaggatatagcaaagctcatatcacgggctggatgttgaaatatgatgatgagttacgcaaattaggtattcactggctggccgaagaacctgttaaatttattgagaaacagaagtcttcttctatttctttctccaaagtaaaaattattaacccacagcgggatactgctatagagcgtcttgtagaaaatgtcccctgtatcgttagcgataaccggcaaaaaggtggagtgctgtccgtccagcttaatacccctgacgacgcattagaaagagagttgttacgattaggcttttcacctgtagccaaagaaccccgtcgttactggataaaataa

SEQ ID NO: 10203 - DNA, 3243 bp, Cronobacter sakazakii E899
atgctgaaacgcctgttaagtaaactgacgggagaccgtcagcagatagagcgccaccttaaagataaatatcaggttgaggaaaacgggctcagcttttcactgtctctggttgatgattcgcagctctgggcactggcatcctggcttgagcaactggctgaagaagactatctgatatcgctgacagaccggtggctgttgagttgggaggcattatattgcctgctggaagatgaagatcatgccagtagcctgccacttatcggcgtacctgaggtactgccgttacgcgcaagcttgtgttcacgtggtgcgttaagcgatagcgattttcgcgtctggatttcgcaatgggctacggtcccaggccgcaagccaatccgttttagtcgtctcggtgccatactaacccatgataatcagcaatatctgttatcgagggaaaactgggcactcttacaggcaatagaacaactcagtgtgcagcaaattcagattcccggcgaaaccactaaccagctgggctgggccgctatacgcaaatgtgcgaaacaagctggcgcaaaatttgatgattatttagaaaaaacgcatgtcgtcaaaccgacttcattgtcattacgtctgcgtaaagcaaccgttgcggataccgcggttatcgaaattgaacctcatttcgaagaccagcccgctaactggctgagtaattttgacaagaactcgcaggttcacgatagctaccggattcccggagagaatggtgaactcagccatgtcatactcgctcccgaagtaaaagaggtcttgaattcaattcattcgattccaggtcggagagtagccggaagtgaagcgctttcttttgtccgcaatccttatgcatttttaggtgaagacgcagccagcgttattgcaccagaagagcatgaaaaagcattatttaacgccagaattttctttcatcatttcaggttaatacctcaatggaatccatataataaaattgcggatattacccttgtacttgagcctatatcacctgttccccagccagaaattacttttgtgttctccgccccctgggagctggaaaaattcgtacagcaactcggtattagtgtcgctgcacagatgcctgcaggttcatggcaagggtacgaactggagttaagtcagttcacagaacaacagtggcacgactgccaggctctcctggctcgctggcagcaagaaattgaagggaaagaatttagcgatgtgctggatattgcgaaatatggtgaccgggtaattggcatcggtgagtttgaaaaaatttcctcgccctggctgacgaaagcgcaaagtgaaaactggcttccagatgacatcgatttttccgtgtttgcagtcgaaacgctgactgattggcaacctgaaaatcttcaccatttcgatgaactacagaagagaattaatcaggctgaagctgctggtgaaacgcatattactgccccctggaatgacagcgaattaccgctgtataccgcaaaaatctttagtaaaaaatggggaaaaaagcagagcgctgcgaatggatctgcgggcaatattgtagataaaccaacccgagccgtactaaaaattgagcaaaatattgaagaagctgcctacataaaacagcgccgtaatttacttctcagtgcgcgtaatgcagaacctgaaattccgctcagtctcaaagaacatatccgacttaaagatcatcaacgcgaaggtctcgcctggcttcagcaactattcatccgttcaccagaggaaaccgcaggttgccttcttgcggatgatatggggcttgggaaaacactacaaattttaagctttttggtatggttcattgaaaaattcccgcaagagccgccaagtcttattgttgcgcctgtctctcttcttgataactgggaacgtgagctggacaattttttctacacaacaggtgttccggttttgaagttgtatggcgagaccattaaagcattgaaatatcctaaacaagctattcctgctcatctgcaatctcaggggatcaagaacctgcttaaaccaggctggcaaggtgagtcgaaaatcgtactgacgacctatgaaacacttcgcgatcaagagttttctctggcacgccagtcctggtctattatggtatgcgacgaggcgcaaaagataaaaaatcctgcagcactaatcacacatgccgctaacgcggtacaagcgagatttaaagtggcttgtaccggcacaccggtcgaaaatacccttgttgacctgtggagcttgtttgattttgcccagccaggcttgttaggagcgctaaatgaatttggtaaacattatgtgcgttctatagagaacgaagctggacgagatactgaacggctggaaactttgcgcgcgctaatagaacctcagactttacgccgcactaaagaagaggttgctcgtgatttaccccggaaaattgaagtggaaagctgcaagcagttgatattctccggtgttcaaaaaaagctctacctttcgtctgttgcaaactggcaacagcaacaagcctttagcgaagagatgcaacaggccggaactggtatgttaggtttgttacacaagctgaaactcatttgcgcgcatcccgcagtcgttgatccagcccctcattttcgggacaactctcccaaacttaattggctgctaaaaaaacttgcggaaataaaagcaaccacaaaagacaaggttattatttttacagagcttcgtgatttacagcgtgaacttcaacatgcgatataccaaaaatttggtttccgaccggttattatcaatggtgataccagtactaaaagtcacagtcaaaacagccgccagcgcctgatagataatttccagtctcaaccagggtttggaataatcattctgtctacggttgccgtaggtttcggcgttaatgtacagaaagctaatcatgttattcatttcacgcgatgctggaatccagctaaagaagatcaggcaacggatcgggcgtaccgaattgggcaaactaaagatgtatatgtttattaccctacagtgagagatcctgaaatcaccacttttgaagtaacgcttgatgaacttcttaagcgtcgacgcgcgctggccaaagatatgctatgtgctgcaccagatttaagcagtacagactttgaggatatacttaaaggaacttag

SEQ ID NO: 10204 - DNA, 780 bp, Cronobacter sakazakii 696
atggaaaaaatggcgtcctccgttgaggcacttggcgaacagcttggcggtctgtttagtcagatggacaaaggccaacaacagatatctgcacatcagcaagcaaatcagcagtcgctgcacgaacagacacagcgcgtcatgggtgaggttgatgatcagattaaacagttgatcgacaccgtttcgcagcaacataagagcaccactgaaacgctgcgccagcttgcggaacaaaccaaccgacaaattcaggatatgcaacacggcgcagacaaaatgcgagtggcggctgaacgtttcgaagaggcaggtgatcgcgtatcgcaagccaaccacattaccgttgaggtcctgaataaagcgcaatcggcaggttcaaccctttccggcgctaccagcgagcttacttctgtcgtggcagattatcgtaacaatcgcgaagccattagcaaatctatcgccatgctcgagctgctcgctgccaatacacaatctgaacaaaccacccgtagtcagtttattgccgatcttaagcaacatggcgagcgtttacagagctataaccgggaagcgcagacctttatggataacgtcagtgatgtactcggcaaaggttttgaagacttcgctgaaggcgtatcacgtagtctggacaagacgcttggcaagctggacgttgaaatggcgaaagcttccactttgcttgcaggcgctgttgaacaagtcggagaaagcatcagcgagcttgatgatgtcctgtcccgcgttcgtgtctga

SEQ ID NO: 10205 - DNA, 741 bp, Cronobacter sakazakii 696; identical to SEQ ID NO: 10201

SEQ ID NO: 10206 - DNA, 1689 bp, Cronobacter sakazakii 696
atgacctcagcattgaattcgctttcacaacgtattactgcggctctctcagtcacccagcagagtgaaacttttttgcgaaatgactttgatgcattgacgtcagcaggaatagaaatggaaaaaaggtttgataaagccgataaaatccccgctccaccacatgaaattcgtctggaggcgctacgtcgtcttcgccttgcccaagaactcagcgggcgagactggcggatgatattttatgggcttgccgataatgatccgttatatcctaaccaaccgatactgctggaagacgacacgctctttccaaaagtagatagtaaaattaaaaaatgcatcgcatcaaataatcttaagcgcaaggattgggctgcactttgtgcaagctactttgcctaccagaatgaaactcctgaacaaaatccacactggtgcgtactacgtggtcatatagcacagggttacctcgttgtgaagtcggccataaggcgagaaaaaccctggatgaaaaccatagaattttatcacgatatttttaccccgcaggcaggcggcgttatctccagacagttacttgcaggtgagcataactcactctcatcgttggaaaagatcgctcaaattcatgacagcagctggttgtggaaacgtatttttaccgtgctcctggcacagcttgatactatggatgacccagaatatctggataaaatcagctggctgttagatctggcagcgcaatgggttcgctttcggaatgacattataagcgcaacccttactcgctattaccattcaacatatcgtgatcaggctcattccgcattgaaagtagctgcactagaatattgggataacccacagctaaaaagccagcagaataaatggtaccaatatgtttctgaacccgttgcaggcatggttcggagctggctggcaaaacaagatttgatgcatttcttcgagttgttgcgtggaaacggcgatgtagatcaagcccgcctcttttactggctcaggtttgcaaatcagatgggcttcacccgtatcgtgatgggaaccgatgcctggcgcgatcgcggaagcgactttgcgaaattccgcgaagaaaacaagggacggttaagttacctgcgaggcggacgtaatcttgataatgccatgattatgcagattaatgattacttatttgttgagttttcaggaacagggaatgcaatgtatgcctatcgagttggccaggcaccatttaacccagaatctgacactttcgacattaatcttcagttaaaagatcaaaatcaaaaacgttgcatactgaggatgcctcatatgccacgtgctgaaggatatagcaaagctcatatcacgggctggatgttgaaatatgatgatgagttacgcaaattaggtattcactggctggccgaagaacctgttaaatttattgagaaacagaagtcttcttctatttctttctccaaagtaaaaattattaacccacagcgggatactgctatagagcgtcttgtagaaaatgtcccctgtatcgttagcgataaccggcaaaaaggtggagtgctgtccgtccagcttaatacccctgacgacgcattagaaagagagttgttacgattaggcttttcacctgtagccaaagaaccccgtcgttactggataaaataa

SEQ ID NO: 10207 - DNA, 1971 bp, Cronobacter sakazakii 701
ttgttccagaagcctgaattcaggcatgcgtggaacgaattcgaagaatcgttgcaccctcaacgtgagctggaaaacggtgaagagacaattgttcgcgttcgggccacagcgccaagcgccagtttcttctctgagcagcagcttattgatattccgctgaacaccgaattttttaagcacttacccggtattctgaccggcataggtattatcggcaccttctatggcctgatgataggcctcaatcatttcgaccccagcactccagagcaagtctccagcagcgtcaataatctgctgcacgacgtgttatacgctttcctggggtcagccgccgccatttttgcttctattgtagtgacttggattgaaaagctatctatcgccaaatgctacaaatatctggaaaagtttactgcttcgctcgacaaactctatatcagcggtgtgggtgaggagtacctcgcctcgctggtgaaatcaagcaatgacagcgcgacacaagctcgtcatttaaaagaaagcctggtcaccgatctgcgcgatatgctgctgcatctcaccgagagtcaaaaggttgaaaacgaacgactggcgaatacgctaagtgctacctatcgtgaatccggcatgcagttcgccgatcaggtcagtggtgctatcgaaaatagcctgaagtctccacttgataaaattgcgggtgcagttcagaccgccagtggcgatcaaagcggtatggtgcagaacatgctgcaggatgtgttgacggcgtttatggcgaagctcgataccacatttggtcagcaatttacgaacctcaacgacatgatgggacaaaccgttggcgcgatccaaacgatgcaaagtggtttctctgctttgttacaggacatgcgtcaggtcagcgacgattcccgtcaggggagcgcgcagttaattgaacaattgttagctgaaatgaaatccggtcagcaagccatgcaggcaggcatgaacgatatgcttaccagcctgcaggcatcggtcgccagaatcggcgccgaaggcgaaggcgcaggtgagcgtatggctcgacagcttgaaaaaatgttcgctgacagtgaagcccgtgaaaaggctcaagctgaacatatggctgcctttatcgaagccattcagaattcagtgcagcaagggcaaagcgccacaatggaaaaaatggcgtcctccgttgaggcacttggcgaacagcttggcggtctgtttagtcagatggacaaaggccaacaacagatatctgcacatcagcaagcaaatcagcagtcgctgcacgaacagacacagcgcgtcatgggtgaggttgatgatcagattaaacagttgatcgacaccgtttcgcagcaacataagagcaccactgaaacgctgcgccagcttgcggaacaaaccaaccgacaaattcaggatatgcaacacggcgcagacaaaatgcgagtggcggctgaacgtttcgaagaggcaggtgatcgcgtatcgcaagccaaccacattaccgttgaggtcctgaataaagcgcaatcggcaggttcaaccctttccggcgctaccagcgagcttacttctgtcgtggcagattatcgtaacaatcgcgaagccattagcaaatctatcgccatgctcgagctgctcgctgccaatacacaatctgaacaaaccacccgtagtcagtttattgccgatcttaagcaacatggcgagcgtttacagagctataaccgggaagcgcagacctttatggataacgtcagtgatgtactcggcaaaggttttgaagacttcgctgaaggcgtatcacgtagtctggacaagacgcttggcaagctggacgttgaaatggcgaaagcttccactttgcttgcaggcgctgttgaacaagtcggagaaagcatcagcgagcttgatgatgtcctgtcccgcgttcgtgtctga

SEQ ID NO: 10208 - DNA, 741 bp, Cronobacter sakazakii 701; identical to SEQ ID NO: 10201

SEQ ID NO: 10209 - DNA, 1572 bp, Cronobacter sakazakii 701; identical to SEQ ID NO: 10202

SEQ ID NO: 10210 - DNA, 3243 bp, Cronobacter sakazakii 701
atgctgaaacgcctgttaagtaaactgacgggagaccgtcagcagatagagcgccaccttaaagataaatatcaggttgaggaaaacgggctcagcttttcactgtctctggttgatgattcgcagctctgggcactggcatcctggcttgagcaactggctgaagaagactatctgatatcgctgacagaccggtggctgttgagttgggaggcattatattgcctgctggaagatgaagatcatgccagtagcctgccacttatcggcgtacctgaggtactgccgttacgcgcaagcttgtgttcacgtggtgcgttaagcgatagcgattttcgcgtctggatttcgcaatgggctacggtcccaggccgcaagccaatccgttttagtcgtctcggtgccatactaacccatgataatcagcaatatctgttatcgagggaaaactgggcactcttacaggcaatagaacaactcagtgtgcagcaaattcagattcccggcgaaaccactaaccagctgggctgggccgctatacgcaaatgtgcgaaacaagctggcgcaaaatttgatgattatttagaaaaaacgcatgtcgtcaaaccgacttcattgtcattacgtctgcgtaaagcaaccgttgcggataccgcggttatcgaaattgaacctcatttcgaagaccagcccgctaactggctgagtaattttgacaagaactcgcaggttcacgatagctaccggattcccggagagaatggtgaactcagccatgtcatactcgctcccgaagtaaaagaggtcttgaattcaattcattcgattccaggtcggagagtagccggaagtgaagcgctttcttttgtccgcaatccttatgcatttttaggtgaagacgcagccagcgttattgcaccagaagagcatgaaaaagcattatttaacgccagaattttctttcatcatttcaggttaatacctcaatggaatccatataataaaattgcggatattacccttgtacttgagcctatatcacctgttccccagccagaaattacttttgtgttctccgccccctgggagctggaaaaattcgtacagcaactcggtattagtgtcgctgcacagatgcctgcaggttcatggcaagggtacgaactggagttaagtcagttcacagaacaacagtggcacgactgccaggctctcctggctcgctggcagcaagaaattgaagggaaagaatttagcgatgtgctggatattgcgaaatatggtgaccgggtaattggcatcggtgagtttgaaaaaatttcctcgccctggctgacgaaagcgcaaagtgaaaactggcttccagatgacatcgatttttccgtgtttgcagtcgaaacgctgactgattggcaacctgaaaatcttcaccatttcgatgaactacagaagagaattaatcaggctgaagctgctggtgaaacgcatattactgccccctggaatgacagcgaattaccgctgtataccgcaaaaatctttagtaaaaaatggggaaaaaagcagagcgctgcgaatgaatctgcgggcaatattgtagataaaccaacccgagccgtactaaaaattgagcaaaatattgaagaagctgcctacataaaacagcgccgtaatttacttctcagtgcgcgtaatgcagaacctgaaattccgctcagtctcaaagaacatatccgacttaaagatcatcaacgcgaaggtctcgcctggcttcagcaactattcatccgttcaccagaggaaaccgcaggttgccttcttgcggatgatatggggcttgggaaaacactacaaattttaagctttttggtatggttcattgaaaaattcccgcaagagccgccaagtcttattgttgcgcctgtctctcttcttgataactgggaacgtgagctggacaattttttctacacaacaggtgttccggttttgaagttgtatggcgagaccattaaagcattgaaatatcctaaacaagctattcctgctcatctgcaatctcaggggatcaagaacctgcttaaaccaggctggcaaggtgagtcgaaaatcgtactgacgacctatgaaacacttcgcgatcaagagttttctctggcacgccagtcctggtctattatggtatgcgacgaggcgcaaaagataaaaaatcctgcagcactaatcacacatgccgctaacgcggtacaagcgagatttaaagtggcttgtaccggcacaccggtcgaaaatacccttgttgacctgtggagcttgtttgattttgcccagccaggcttgttaggagcgctaaatgaatttggtaaacattatgtgcgttctatagagaacgaagctggacgagatactgaacggctggaaacttttcgcgcgctaatagaacctcagactttacgccgcactaaagaagaggttgctcgtgatttaccccggaaaattgaagtggaaagctgcaaacagttgatattctccggtgttcaaaaaaagctctacctttcgtctgttgcaaactggcaacagcaacaagcctttagcgaagagatgcaacaggccggaactggtatgttaggtttgttacacaagctgaaactcatttgcgcgcatcccgcagtcgttgatccagcccctcattttcgggacaactctcccaaacttaattggctgctaaaaaaacttgcggaaataaaagcaaccacaaaagacaaggttattatttttacagagcttcgtgatttacagcgtgaacttcaacatgcgatataccaaaaatttggtttccgaccggttattatcaatggtgataccagtactaaaagtcacagtcaaaacagccgccagcgcctgatagataatttccagtctcaaccagggtttggaataatcattctgtctacggttgccgtaggtttcggcgttaatgtacagaaagctaatcatgttattcatttcacgcgatgctggaatccagctaaagaagatcaggcaacggatcgggcgtaccgaattgggcaaactaaagatgtatatgtttattaccctacagtgagagatcctgaaatcaccacttttgaagtaacgcttgatgaacttcttaagcgtcgacgcgcgctggccaaagatatgctatgtgctgcaccagatttaagcagtacagactttgaggatatacttaaaggaacttag

SEQ ID NO: 10211 - DNA, 2121 bp, Vibrio nigripulchritudo SOn1
atgaccaatagccttaatctttccagcttatggccagacttgagcagtctaaatgtaatgccacctcaaactcctgagcaattgagtgctttgtttgtggttattttatggggtgtagctctatttttcttgatttggtcaggtgccgcatttattcgcgcaagacaacgagtagtttggcttaacaaatctttaaatgatgcggagaggtcgactctgtcagatgttcgaaacgatttaatttctagagctgagcaaaaaaaagattcagtagggcacttatggctcgagtttgatgaaacactgctcgaagtaaaaggtgctgatgatgttgttcgattgcataacacatttgatgctgactacttctttaatagttcgagtttagctggtggtagcactgaaaaccgaatgattgcagcggttccaggctttttaacggccttgggggttattggtacctttgtcggtttacagctggggctttcagatctaaatattgcaggcaacgttgatgtcaatgagatgaagaacggtgttgctggagttataaatggtgcaaaaatcgcatttatgacatcggtatggggcgttttactcagtgtagcgttcaacttcattgagaaaatacttgagcaagtaattagaaagcaaattaagtctttgcaaaaccgaattgacaggatgttccctcgattaagtgcggaatatcaactgcaatctattgccaataacagccagcaatctcgagaaagcctacaaggacttgctgagaaaattggcgagaaaatgcaggagtcattggttcaagcaacacagggtattcaacaaggtcttgagagtagtctggaaaaaatcatggccccggctatcaataagcttgttgatgagacgtcagacggcaaccaaaaagcgcttgaaagcgttcttcaatctttcatggatggttttggccaacaaggcgaacagcaacgtgtcgcgatggactctgcatctcaaaatgtaaacaagacgctagaatcaatgagtacttcgatggctgctttcgtcaataaattggaagttcagcaaaatgcatcgtcggaaagagagaaagaactgatctcaactatttcagttcaagtttctgagctagttactcagggtaatgagcagaagcgagtcctaacagagttcgtagaaaaacaagtctccgagttaggtgaacagcttactaaaagagaatcagctgcttctgagcgtgaacagaaattggcttcctcaatggaaagcacgattaaagatttaatagaaaatgtttcagcacaaagccaagtgctgactaattttgttcagaatcaagttggtcaactgacccaaacgttctccgaacgtgatgggatggcaagccagatggaaaaagagcgtaatgatatatttgtgaatcaaacgcaggcaatgaaagctggaacggatgagcttctagctcaagtgaaagcggcgactgaatcgcaacaaaccacatcgaataatattattgagcaaggtaaacaattacaaaacagcattgattcatctgtttcggcatctgctcgagctactgagagtatgcagctgtcggcgaatgagttgcgagcggcggctgatagtatgaatgtgttcggttcaaatattaaagaggcgggcaacaaactatctggtgctgttactgaagcggtcaacagtacgaaggatttagctgaacaaaaccatctaggcgctgtgaaaattcacgcgttgagggagcagttgctggaagacacaagtaagtttagcgcgattgcagatcagataaataatatgctgaatagtgtagaacagtcgtttagcaagcttcgcacaaaccagaatgagttccttgcagaacaaaaaggtaacctgaacgaactcacttcagaaatgaaacgcaatgtaaaagagttgacagagcaaatggctcaactgcttgaagattacgcagaacaagccaacggacaaaccgccgagcacctcaaagtttgggctaacagtagtatacagtatgcggagagcatgaatacagcagttagagctatttctagtgttgtcgatgaaattcaagataaagtgagccaacatgcgtag

SEQ ID NO: 10212 - DNA, 735 bp, Vibrio nigripulchritudo SOn1
atgcgtagaggtattcgttcgcgtacacaaaactcagtagatgaagaaaatccctactgggtttcattttccgatcttatgtctgctttgctcgttatctttatacttgcagctgttgctttgattattgaattgactcaaaagactaatgatgtcgaagctggtatcgaagagcttaagcaagctgaattagcaagaaagaatataatttatgatgttcgagacgaactggctaaaagaaacgtcattgttgaaattgctgataatgatacggtaattcggatccctgaaagcacactgacttttgcatcaggtaaatcatcaattccgaacgatgcaactattcagcaagcagttaaggacataggtgttgttcttcattctgcaattcagaagaaagaccgctttgaatatctcgataccgtttttattgaggggcataccgatagtgatcgtatctattacagagggaaagggaactgggggttatctactgatagagcaatatctgtctggaatgtctggcaaaatgaactgagcttaacgcctaaactcggcgacttagaaaatgcatatcatgcaaagctgttctcggttagtggttacgcggcgacaagacgtgccaatctacaagagtctaatcagcaagaaaagagtcagaataggcgtattgatattcgatttacagttaagaaaccatctattgctgagctcgagaggattgttgcacagtga

SEQ ID NO: 10213 - DNA, 1449 bp, Vibrio nigripulchritudo SOn1
gtgagtttaaatataaaaaagctcaaagttagtttgccagctaatccttttggtcaagccatcaaggactttacacatctatcgaatcagctagagatgctgtctaagagtgcaggtattgagaacaataagttccgaacggcatatggagaagtatgtaacgcgcttgcctctaagaaaagagttgaagatgttttagatagtgccatacacgttcgcgccttagctttgctacatacggatgcgaagaaaaatgtcagctttacgcgtcgattgctgaataaaattacagaaatcgtaaaaacgccaagctctttagtcatagagtctttttatcagcatttcttatcagagtatgatcgactggcagacttggaagccacagcagaatggttgttggaggctaaaaggctgcgaagaagtgatgagcagtttgatgcgaacatattgtcatccaatggtcctaaatggcttgcggaaagggctattcaaaagaatatcgactttgaccatttaatttcggatatgaagctggaacgttatgctaatggccgctatctaactgctgctaagggtatttactatattgagcagttaaacacgataccattgggccaagatcatcctctcctagaggaggttcaaaaagcggctgtttttgattctcgatatgactctgaaagtttgttagggcatcaaattcttagaattttgattggccgatcgataggtgctcacatcagcgagccttggatgaatgtgatcttagcgattggcggtgacccacgagtaccaagttcaaatccaagatacattaagtggtggaagggtttagaaccaaatctgattcaagctgttcgcggatggttatcaaaactggatttgaagttgtttctggaagcgttggaagattactcatactcttcagctaattacgagctacagagaatgtacccatctaggaaaagtttcttagaggggatgtttgatgctggggttatttcaaatacccggctttatttgagtcaggatgctgcaaggtatttgaagagaaattatgaccctaagcacttgccaaatttctctacagttaaagacggtgataaatcgataatttatgtgcaaatgaatggtgcgcacatggtagagggtagtcacagctgctatttgtggctgtataagcatttagattcgtcagtatgcgtatttaattatgacattgttaggcctacgtattctcagctaaccagcgggatcaataatcaaatgacacgattatcgtcgggagccgtggcaaaaataacgcattctccaattggctattcatggcaacgaaaagcacttacagcacttagagggctaggtattaaattgacgcccaaagatgtgctttcaaatgaagattatattgattttaaacaacgttatggggtgcgagaatggagttaa

SEQ ID NO: 10214 - DNA, 3450 bp, Vibrio nigripulchritudo SOn1
atggagttaacctctttaatcagcaagttcttttctggtttagataagtcctctcaatttgagttagtctgtgatgatagccttgattttactacttccaagaagaacctagagaaaattaaaactggtaaagctgatgagtggataacggcgcagtatgttgcacttaaaatgcttgaagagcagggggatgtaagctcatttccagatggctttattatgcctgctgatacagctgtcaggctcgattctgagttgaggcgtttgtttagtttgcctccggtttggcaaggagtcattgacgctgatattcaaggaaaagctagtacgcccacctttaaaattgacctttcggtcacaaccaaacagggtcgcacaacgttaaattacactgtggatgggcctttcattcggtttagtcaaaacgagcagtacttgctaacacctgagcagcttatggtgtttaattcacataaagtacatggaaaatctgctaagtctgaatacgataacttactgtacttacactctttgcaagaggctcaaaagagtggttgtaagttgaatctaaagcactttgaaaagctaagaatactgacaccaaataaaatcacggtagaagctgaactgaattctcaaggtgagctggtattgacgccaaacatggggcaaagtgcgagccatgagtcgattcaaaaggttttggggcagttgcaaagcgacaacgccgttactctgaaagtaggtgatgaaatagtcttgttttctgaagaaaagctcatggctgtaaaagaagttattagcaacagagtaatacctcaaaaacaagttaaatcgttcttggagaaccctacagcatatattgatgcgagtttagtcgatcttgatttaggtttttctatcagggtccatggtgcgacagtctttaaacacgcctattttggagagacggacgagtcaggcattgattggtttggagcgccctcttcatctgatgtgatgaacccaatatccaagctgactgatagtattcgcgataaaacaactcttgaggacgtaactcagaagattgaagatgcccatcagaccggtgcaacggttttagattatgaaggaaaatcatacgatatcagtgagcccgttgctgttgagaaggttttaaaagaaataggtcacaagatatctaaccctgacacaaacctttctagtgaggtggaggcagaagataccgagactgaatcagaaagctcagaaatacatgttgttgatattgacctaaatgatgaagagctgtctgaaaattctcctaaaattgaacaactgatttctgatatttcatgggatggtgagttaaattgggaaaaccacaagcggacaccttttccacatcaggatattggtgttcgttggattttaggcgttgaacaaaaaagcttatcagactcgaaaattagtggagccttgctagctgatgacatggggctgggtaagacttttatggccctctctgcaatcgaacatatttatcaacgacaacaaattaatggtgaaacgaagaagcctgcgctgatagttgctcctttgagtttattggaaaactggaaggatgaggtagataaaacctttaaacgttcgccatttaacgatgtagttattttgcaatcagctgctgagctaaatgactatcgcgtgggtggtgtggagattcgaagtcaaagtgcatctgatgatagtttagaacccaaatattctctgaaagttgggaaacactttggcccagaccgtttagatctaccagagcgattggttattactacttatcaagccttgcgcgattaccagttctccatgtgtttgattgattggggtgtcgtggttttcgatgaagcccagaatattaaaaacccaaatgcacttcaaactcgtgcagctaagggtctaaaagctgatttcaaactcgtggctacggggacgcctgtagaaaacagcttagccgatttttggtgtttaatggatacagcttgcccaggtcatctgggaagctatcaagaatttcgtgctcgatatatctcaccaattcttaaagctgctggtgatgaagttgaagaaacaagagctaggcttggaagagaacttcgtatagcagtcggggcattgatgttgaggcgcattaaagaggacaaccttaaaggattgcctctaaaacatatgtatgctggcggtgaatttgaaaactggaagtatttagaagaacttaagtcgacaatggttggctaccagagagatgtttacgaagggactattagcaatcaactcgagaatgaagagagccacgcactcaccacgttgatgaggctaagagatagttcgctacatcctcgattaagtgatggaggccgccttgatattccaaaaaatgcaaaatcatctagggctttatacggagaatcaggaaagctagtttccttgcttgagactttagatcgagtacgaagtaaacatgagaagtgcattatttttgccgttaacaaacgactgcaaagcttcttaagcgtgactttggggcagatctataacctaggtccgctctcagtgattaatggtgatgcgaaagccgtagcaaagcgtaaatctgtcccaactcgaaaatcaatgattgcagactttgaaggtaaagaaggctttaatttaatcgtaatgtcgccagttgcggctggtgtcggtttaactgttgtcggtgcgaatcatgtggttcacttagagcggcactggaacccagctaaagaagctcaagctacggatagggtttaccgtatcggacaggaaaaagaggttcatatttacatcccgctgttgcatcaccctgaatttgaatcatttgatgtaaacctacataggctccttactcaaaaaactttgcttaaggatgctgttgttacaccggaagatgttgttccacagccagcaggtgttgggggagagatttctggtgaattgattgataaacgtattacagcggctgaacttgataagttaagttggcagcagtttgaagcgttatgtgtagaattgctggcaaagcttacggatagtgaaagcgcttggttgacgaacaatggtgctgatcatggtgctgatggtgtactacttaataacagtggcaatattttgcttcaggctaagtttacgcaacgacaatatgatggctataaagggatacaggagattcattctgctaaacctatttatgaatcagcaatgaaaagttcttttgagcgtttaatttttgctaccaattcaccttcgttagctaagagaactcatgaaactgctgccacatgtggtgtagatgttttgggcagaacacaattgttgaattaccttgaagaacatgaagttacggtaaaagaagttttgtatagattaggtaaagaacgactgaaggtataa

SEQ ID NO: 10215 - DNA, 1926 bp, Desulfobacula toluolica Tol2
atggtagataaaattgatctgacaaagttactgccaaattttaaatcggtgctaaatggattcccgcaaagcgcagaggatttaagcgcatggtttattttgatacttttgggtgtttttatttcattcttaattccatctatatggaaatcatttaaaacattcaggcaaattaaatggttaaaaaatcttttaaaagaacatacttcagaaacgatagcagaaagtagacaagattttatagataaggcccaaaaagtaaaacatgacgttggacacttatggttagaattcaatgagactctaattgagggtgatcgaaataataagatccgtctttataatacatatgatgcagcatatttttttaattcagcaacattggcaccagggattactggtagtcggcttattgctgctgttcctggttttctaaccgcaattggtgttgttgggacttttgttggacttcaacttggtcttgctcaacttaatatcgcgaatgatgtttctatagaagaaatgaaagcaggtgtggccggagttataaatggagcaaagctcgcttttataacttcggtttggggtgtaatactcagtgttctgttcaatatcattgaaaaaattatcgagcgggcaactaaaacaaagattacccaggtacagaaccttattgataaattatttaatcggattagtccggaagagcagcttcaacgcattgcaaatgacggtaaacaatctcgcgagagccttcaaggtcttgcggaaaagatcggattaaaaatgcaggaatctttaattcaagcgaccgagggaatccaatcaggattggaaacaagtttggagaagatcatggctccggctatcaataagttggtggatgagacatcagatggtaatcagaaagccttggaaaatctactggacaaattcatggagaaatttggtactgaaggagggcagcaaagacaggcaatggatgacgcctctgataaaatgaatgcatctttagcttctttcggaacatccatgcaggcctttcttgataaaatggaagtttctcaaaataacgttgcccaaaaagaagaagagttggttgaaaatatttcatctcaggtaaattggttggttgagaatacaagttctcagaataaagttcttacagaatttattgaaaatacatttggtgaactttcagataaactaaataatagagatgacgttgctgctaatagagaaagaatacggggtgaagaattcataaatcagacaaatgaaatgaaaaaaggtacgtcggatttattagagcgaattgatcagggtttaaaaactcaatttaaggaaacaagggaactactaaatcaaggacaatctctccaaagttcaataacggaatcagtctcagcaaatgccaaagccactaaacatatgaaggaaacatcctcagaattaaactcaacggtcagcaagttaaaaacttttggtgggtatattcatcaaacggggatgaaactatcagaaacaatcacagcagcggtagcaagcactgagacgcttgcaaaagaaaaccaggccagtacatcagagataaagaaaatattcgaacgaatcctggtaagctccaatgaattcaatactcttattcagaaaatgaaaaacttagtagatactgcggatactatgtttgaaaagatggatgatcaacaacactcttatctcgctcagttgaaacaaaatgtggaagagttagctgtgaaaatgagtaatttgcttaaagactacgcaagtcaagcaaatggtcagacagcacaacatcttagggtttgggctgaagggactacacaatatactaccagtatgaataatgcagctcaagctcttgcatctgttgtagatgatatagaagtaaagttgggacgttaa

SEQ ID NO: 10216 - DNA, 753 bp, Desulfobacula toluolica Tol2
atgcttagacgatttgttcaaagccaggctactgttgatgaagaaaatccatactggctatccttttctgatttgatgtcggctcttctcgtggtttttatcctagcggcggttgctttgattatagagttgacccaaactcaaaagattattcaacgggatattgaagaattaaggaatgctgaacaagccagaaaacagatattatatgaaattaaagatgagcttgcgtctaaaaacataaaagttgaagttgctgataatgacaccgtgttgagaattcctgaaaatacgctgacatttgattccggtcatgatgaaatccctgaggctgaagaggtacaaagggctgtcaccgcaattgggctggcattacatctggccattaataaaccttttagtgacacgaataataaaatgcggttcgaatatctcgatacagtatttatagaagggcatacagacagtgtgcctttcaaaaggataaaagggggaaattggaggctatcaacagatagagctatttccttatggaaattttgggaaaagcaccttgctcttactccaagcttcaatgaaatggagaatgcatacaaacaaaaattgttttcggtcagtggttatgctgcctcccggcgggtgcaaactattgaaaaaacacctgaacaacggcggcgtaaccgtagaattgatttgcgatttacagttaagcgaccatctattgctgaattagaggatattgctgatcgatga

SEQ ID NO: 10217 - DNA, 1458 bp, Desulfobacula toluolica Tol2
atgaagcctgctatattgtcagttcaaggattgaaatttataataccagatgatccttttgggcattatcttgctaagataaaaaggcttgaaaaccagttgtcttctctggctaaaaaggctggtactgaaaataaaaagtttaatgccgccttgaattctttagtagagagcgtgcgcaggaatagagatttagaaaccgaactggattctcctattaaagtcagggcgctggcagtatctttgaccaccagttgtgcagaacacattagtttaacacaaagaattctaaataaaattgatcagttaaggcccaagccgagtacgctgcttctccagagtatgtatcacttctatttgaaacgttatgacaaattgcatgatccgagagctgttgcaaaatggttgttaaaatcactgccaaaacgaaatcttaaaaagtcatttcatgatacattgttgagcccagatgggcctaaatggctcgcaaaagagtctattcgtaccaaccgggaatttcaaaatattgtgtcatatttaggattggaccggtatgcctcaggtagatttatgacaattgctaaaaacatctattatgtagaacaattgaaactgatcccattaaatcaacaccataatttattgttggaagttcaaaagagttcagtatatgaatctacttacgatgaatcatacctcgttggccataaggtcttggaaatcttaataagcagagctgccaatacgaaaattgatgacagttggcttaatgtgattatgtctattgccggtgatcccagagtccccaaggaccatcctttgtttcaaaaatggtggagcctgttagatcagcgcctttataatatagtaataggttggctctctaaattagaccttcgtttgtttttggaggcacttgaaaattattctaaccttccaggcaaagaagagttgcacagaatgtttccatcccggaagaaatttttagaagggttggatgataaaaagttgattgcacatactcgcctatatctttcaaaaagtgcagaacgatatctaaagagtaactataagcccgaacatttgccagcatactcaatggtgaatgatgggaccagatccttaatacatgtacagtttgttaacaatcaagcacatatggtagaggggagtcacagttgtttcttatggttatatagaaaattacattcttcagccgttgtatatgactatggagccaattttgtgttttatagcgagctgacatctggattgaatcaaaaaatgattgagaaaaattgtgaggctgttgctcagatcaaacacacgcctgtcaatttcaggtggcagaaaaatgcgattgaagctttaaggggacttggcgtatatatttcaccccaagatgtcttatcacttgaggattataggtcgtttaaacgaaaatttggggtaatataa

SEQ ID NO: 10218 - DNA, 3450 bp, Desulfobacula toluolica Tol2
atggatgtgataaaatggttcgataaactccggacgtcttctgagaatgaaaaatactctgttcaacctgatttcgagggtttgaatttcacaacaacatcaactatctctgtggcaattacaaaaggtcaggcagggggatggattactcatcaacatattgccttaacaatgttagcggaagaagggaacgccgaagttatccccaacgggtttatagtcccaacagaagtggcggttaattttgataaaagttcatgtgattcattaggtttacctccaagatgggatggaaaaattgatgcagagattaaaggtaataccggcaatagtagttttggtgtgggcctttctgttgaaacacctgatagtcggtttacaaggatctataaagtaataggtcctgtccttaaattttcagaagacaggcaatatttgttgtcacccgcccagcagatcatattcggtgctcatcaaactcatggtgaaactgaaaaaaatgaatacgacaatttaaaactgttatttgcgttacaaaagggtcaagaacttggagcgcaactaaatctcaaacattttaacaagctgaatatcaaagccccggaatcgattacgattgaagtcgaactggatgaaaacgggaatttaatactcaccccctatatgggtcaggaagcgagttccgagagagtcaacaaagttttaggtcagctccaggctgataattcaactgcattaagggtggatgatgaaatcattttgtttgatgatcagaaactgaaagcggtacatgagatccttgaaaatagaacgattccgaaaagcaaagtccaagagtttttaaaaactccaactgcttttattgatgcaagtctggtggatcttgatcttggtttctcagcaagggttaaaggggcgacagtttttaaacatgcctattttggtgagactgacggttccggtattgattggtttggacggtcctcctctgctggtgaaatcgtatcttttaataaattggaaagccaggttgaagataaagagacgcttgaacaattaaaggcgttagttgaggacgctcaaaaaacaggagctcatgagatagatttccaagggaaaatctatgatatctccactcctgatgcagtccttaaaacgcttgaaagaattgatcagaaaattaataaaagtggagattccctatatacatctctcttcgatgaatatgatgaggaccaagaaaatccagatgatatagaaccatctgtcacagtcgtagatatcgatctgaatgatgaaaatttggatcgatcatcaccaacagtagacaaagccattgatgaaatcctttttccggttgaaaaattgaagtgggataattatgcacggacgccatatcctcatcaaatgatcggaattcaatggattgttggattatcaagaaacagcgatggaggggtactggctgatgacatgggcctgggtaaaacattcatggctttatctgcaattgatcagatttataagctgaattttgaatcaaacttaacaaagaaacctgctctcattgttgcacctctaagtctcttagaggtctggaaagatgaagtagataaaactttcagctcttcaccatttaaatcaatcatcattctccaggccagtgcagatttaaaacaatatcggtctggtggcattgaaattcgtaatcaaacatcgtgcgatggtggtcaagaaggtatcaaatactctttgaagattggaaaacattttgatactgagcgtctcgatatgcccgaaaggttagttattaccacataccaaacgttgcgagattatcagttttctctgtgccagattgactggggaatggtggtatttgatgaagcacaaaacataaaaaatcctaatgcgctccaaacacgtgcctctaaggggttgaaggccgattttaaattgattgcaacaggaacaccagtggaaaatagtctggcagacttttggtgtctaatggatacagcttgccctggccatctcaacaactatcagttttttagagaacattacgtgacaccaattgtcagagccgcaggggatgagattgaagaagtcagaggcagagtcggccgagaactcaggatcaaagtcggctcactgatgttgcgtcgcctaaaggaggataatcttgaagggcttcctgaaaagaaaatttttgtgggtattgaagatcaagagtggctgtttctaaattcacttaaaaagattatgactggggaccagcttagcgcatataacgcaacattagattctcgggttaacgcagaacgaaacgaagttcttggtgcattgcaaagattaagggatatatcactccacccacgattggctgacaaaggacaattagagagtccaaacaaaaaaaaacagttacgttcactgtttgatgaatcggccaaaatgcgaagccttgttgaaatccttgaacaaattaaaaaacgaaaagaaaaatgtattatctttacggtaaacaaaaggcttcaacagtttttaagccaggctttgggagcttggtttggttttggacctctttcaattattaacggtgatgctaaagctgtcgccaaaagggcgtcagtgccaacccggaaaagtatgatattagattttgaggctgttgaaggttttaatataattatcatgtccccagttgctgccggagttggcttgactgttgtcggcgcaaataatgttgtccattttgaacgccactggaatcctgctaaagaagctcaagcgacagacagggtgtatcgaatcggtcaggagaaagacgtaaatatatatgtaccagtcttgcaccatccagagtttgagtcttttgatgtaaatcttcatcgtttgttaagcaagaaaacatctctcaaagatgcagttgtcactccggaacaggtcattcctaacccttcaggatttgatatgaagtcttttaccccaaatcaccaaattacatcagatgatctgcataagatttcatgggaacaatttgaagccctttgttgtctaattattgcaaaagattcaaacccctatgacaagtggctgacaaaatctggcgcagactatggggcagacgctgtggttgtcggtgatccaaattatctgattcagtgtaaacataaaaatacaaaaaatgctatttacgatggatacaaagctgtgctggaggttcaggccgcaagaataaaatatgaaaatgcccttggaagatcattctcacagctgttattcatgacgaacgcattaaagctttcaggcagaactcgaaaaacagcgcaagaatataatgtggagattatgggtcaaaaagaattaaagtcgttgctggaaacccatcccatatccataagggatgtctatgcttttatgaataaaaaaagactggctctctga

SEQ ID NO: 10219 - DNA, 2004 bp, Burkholderia pseudomallei
atgaacgccatttctgcggtgctgggaagcatctatccttcgctcagcactttgcacggctttccgctttatattttccttactgtcattatcctgaccggtgcgtttctgctcgggtacctgattcagggcacgagggtctggtggcagctcaagagcgtggtccgcgccattcagtcgcacgcgagcgaccagacccctcctctgccagcggacgttgctggagccttcaagtgggagccactcaagcatctctgggaggagtacgcggacacgcttcatgaattgcgaaaggccggctccggcgaaactgtcctggcagaggtccgcgccacggtgccagcagacacgatgttcacgcgagaggcgctggtcgacggtcggctcttcgacgacttcacccgtcacctccctggtgtgctcacggggctgggtatcattgggacgttctctgggcttctcagcggtctcagcaagttcaagcccacccccatcgaaaccgctgtcaacgggctaggcccgttgctgcaaggggttcagcacgccttcgttgcgtcaggcttcgcgattgcctgcgcgatgggcgtggtttttatcagccgtttcgtattggcctatttctatcggctcgttgaagagctgacccgaggtattgacagtttatataccaccggtgcgggtgaggaataccttgcgcgcctcgtcaagtcttcggagctgaactcggcaaacacagcccaactgaaagatgcccttgttgaggacctcaacaagatgatgacgaacctggtcgagagacaaattgctgcccaggaggcctcggtcgctgctcttggccagcacattggcgaaagtatttctacagcgattgccgagcctatgagacgtgtgggcgaagtgatggaaatgaccagcagaggaaacggtgagcaggtcaattcgatgcttgagacgctactcaccggctttatggcgaagctggaagatacattcggaggccagatgcggggtatcaacgaccagatgcaacggtcaatcgatgccatggcttcggttcagtcttcgctgcaggggctgctggccgatatcaagcagacgaacgaacatgccgcgaacagtatgagcggcacgctggaagaggcgatgaagaaggccgctgacaaccagcagctcctcaccgaccagatgcgtgagttcgttcaggatttccgccgccttgtgaccgaggagcagaacaagtccaaggcggcaatgcacgagaccgtaatgcaggtactcggagaggtcaccgctgcaatggacaacttagagggtctgcgcaaggcagcggccgccgacgaagccgggcgtacggacaagcttgcgaatcacaccaaccagctcgttggagggctgacgagtcaggtggagtcgcttcttggcgcagtttccgaccaggtatcaaaaactcaacagaatattgaagctttgggcctggtgtcgctgcgcgcaattgacggcatgaaccaaggggcgttgacgatgggcacggctgcccagcgattcgagaccgcaggaagcgcggtctcgaccgtgctcgagcggtcatccaaggttgccgaaacactaggtactgcttcgtccgccttgcaagcggcatctacggcagttcagcgagggttcgaacagtacgactctacacgcaggactgtcgatgcacacgtggcggcgctgactgctctaatacagtctgccaaaagggaagccggtgtttcccaggagctcgttgccagcatcaaggcaagcgccgaagccatgcgcaagtccgaatcggaaagtcgcgtgcacctggaccaggtcaatgccgccctcgttaaagcattcgccgatttcgggaacgcactcgttagtcaggtcaaatccaccattgcggagacggaccggcatctcgcgcaaggaaccggtcacctcaacggagtcgttcaagagcttgccagcgcggttcaacgcatgaagagggcgtga

SEQ ID NO: 10220 - DNA, 705 bp, Burkholderia pseudomallei
atgttatcccgcattgtcctcaagcggggggcgaagcatgaaggcgaaagtcctttctggatttcgttctccgacctcatgtccgcgcttatggtgctgttcttggtcgtgatggcggtcacgttggtggcagtcactcagagcattgatgcagcgactcgcgcgaacatcgaacgaagcgcggcgattagcaagataatggcgatgattgcggatgaccccaagagtgccggtgtaggcgtcgaccagcagaactatcgcattgacctcggcaaggaaattcgttttgacagtcgcagctataccattagcgtgccggctgcccagttcctgcgaagctatattcccgtgctcctgaatgccaaagatactcccgagggccagcgctggatgcgcgacgtagttgtcgaaggctttactgacgaggatggaacgtacctgtacaacctgcagttgagtttggaccggagccgcagtgtggtctgctcgcttttccaaaacacctcaggaagtgacgcgctgtcgcctgagcagctccacaaggtacaggaacttttcctagttggtggctattcgttcaactccatcaagaaggataaagcagagagccggcgcgtcgaattcaaaatcgacttttggggtcttgatgagaacaggccagcgcggaacgacgtgctgaatggaaaggagtttggcaagtgctag

SEQ ID NO: 10221 - DNA, 1722 bp, Burkholderia pseudomallei
gtgctagccgcgagagctttggaagtgctcggttgcgacctggctgccgccataggggccatgggcctgcacaccagcgaattcggcaaaccggaactggtagagaagccggttcgagaggccgagcgcatcttccaaggttacgccaaagcgacgcccagtaaagaagacgcgtatgacgccgcgagagcttttctgcgcgggcgtgaactcgactcttggcagcgcgacctcgtcgcctcggcactcgcagtccccgttcgcgagcagaacgaagccgtggtcctcgggtccggacggttcccagccctacttgccacttacgagcaggaggccaaacgtggcgacctgtggcgcctgacctggcatggcttgctttattcatacttcaatttcgacccgaccgtcacgaaagacgaggccacgcaaaacggttgggaggctcttcggtctttcctcgcgcgaacctggccacttgttgaccgcgacgcagacaacacagttgtgcccgactggattaacgtacttcggaaagagtccgatgtactgacggacaagccggtagcaaagtatgcgtcagcctatctgcggggagatacgactgcgaccgaccaaatctcagtcgacctaggtattccaccatccagctggttctggcacgcactggtgctcagtactgtcaagcttgcgattgagaatcgcaacgacgacgtgttccgagggcatatctcgatgctcctgcgtctaattgagagcaagccagcctttcgtgacgaggccctcgaagcgattctgattcgatatcacgcctgtaaggacgcccgacaggaggaccacttgcgtgattacgtctgtcagccgtcagtatggaagaatccgaagctcagagccgcaggccttgccaccgcatggaatcgtgtccctgacccggtgtgggaaatggtgcttaactgggtcaacgagcaaaacctcaaggatttcttcgatattctcgccgcgcgaaataacgcagacgagggccgactggcgttctggtcgaagtacctgaagcagattacttggactcggcttgtgtttggagccgaaacgatggccctcaagcataggaaccccgagattcgcgccctcatcgcccgcgaggaaggcgcttatgcgcagctgaccggaaagaaagaggtggacgccttcatgatgcaaattggctcctacgtcatcatcgagttcagtaagaaacccaacgcctgctacgtctacaaagttgacgcgctgccgttcgagcgctacgccaagtactaccacggcgggacgtcggacttaagcacgggctttcaccagcgctgcccagcccgcattgtgcatactcccggctgggagaagcgagcggatatcgaacttagcggcctaggtatacggcccgaccatcctggcgctcatcgaatgctatcggcagggggcacgcaccaaggttcggtgtcgaggcgttggacgggggcgcctgtgaatcagcgggcgggtagtcagcgcggccccgatatggtgacgctgcaaacactggtggagcgatttcagggtgcctcgattgatgacagacggaatggctcgggtgggggccgtctttgggttgaggacccgaagcagcggaccttgttggcggccgagctcagcgccatgggcttcaagtgggcaaacaataggcaagcctggtactttccggaggcctga

SEQ ID NO: 10222 - DNA, 2886 bp, Burkholderia pseudomallei
atggaccgtgcggaggcggggccagtcgcagccgaattcagccttgtgggacgcttcgaagatggcagggtgaccaaggtagacctcgttgtaacagaacactatgtcggcggtagcgcgagaacggacatcaaggcatttgccgagccggaacaactcgatgacttcctcgagagcctgaaacgtgcactcgagcaagaacgagagcttcttccgtgggatgaattcgacctgaccctggatgccaactcgacgtcgcaatttgaacagggcttgcagctatcccatctgtggcggtcacagcccgccgagcgcattgattttgacgacatctacgaactcgacggctatagcggtcgaatcgaaggcattggggccgcgaagcccatctatgtgccggtgtttcaaaaggacaagaaggaggcagaagaagacagcggatggctgccgtctgacctcacgcccatggtaaaggtgacgcttcaggggcatgacggtcaggtccttgttcctctgactaaagattgggcgcaggagtttgataaccaagtacgagaggctgagaccaacggacaggcggaggtaaagaacgccagcttgcccacagccatcgcgactccgcaagcacggacgctcgcagatagctttttgagcatggtcggtgcgcaggagcggattaaaggcgaaaagactagccttgccaaggaaacgaagagagcaaaacaaacgctgctggttaagacgaactttcacggcgtcgattatttcgagcagcggcgtgagtctttggccttgccggaagcttcgaagccacaacttccgcgttgcctgcgccccgaaatcgagctgaaaaagcatcagctgcacggggtcgcttggtttcagcatttggtgtcgaaggcaccaaccgaatgccgtggagccctgctggcggatgatatgggcctcggtaaaacgctacagctgctatcgcttttagcctggtactacgaatccaacccaaacgcggcaccttctctcatccttgcacccaagagcctgctggagaattgggcgaatgaggcgaataagttctttaccccatcgttcccggaactgctggtcctctacaacgaggaactggttactcgcaaacaaccgctcggtctcatcgacagtcagttgcaggaaaatggcatcgtcgaattgctcaagccgagctgggttggcactgcaaaggtcgtcgtaaccacatacgaggtgctgacttcctacgagttttcgctagccaagcaggccttcgcattcgttatttgtgacgaagcgcagcgcatcaagactcctggaacactggtcaccttggcggccaagaaattgaaggccgactttcgcatcgcgtgtactggaacgccggtcgaaaactcgttggcggacctgtggtgtctcttcgaccttgtgcaacctggcttgctgggcgcccttgaggagtttggcaagacttaccgacgcccgatagagtgcgataccgaagaacagaagctcgcgctgaagcgcttacaggatgtcatcgcacctcagacgctgcgccgtactaaggtcgacatcgccgctgagcttcctaagaagtatttcgccatcaagaagttcgaccagcaatcgctagagttcaagtccagcctggaagagcacgagcggctcgaaatcgcgattaccgaacatcagcgcatcctttacaaggggggacttaagaagctacaggatgctgtcaaggaatcgaacggtcgcaagcgagcgcaactctcgtttggagctctgcatttgatgaaggcagtttgtgccgagccgtactgtctaccagggacgaagtttctggtcgataaatcaggtcgtgacattcatctacataattcgcccaagctatcctggttgttgaagcgcctcgccgaggtaaggtcggcggacgaaaaggccatcgtcttcacggaactacgcgaggctcaagctgcgctctactactttctcaaggagaccttcggaattcgtccgttcattatcaatggcgactctcaggggcggcaaggctacatcgacaaattttccgcaaagccgggcttcgacgtcattatcctgtcaaccctggctgccggtgctggtctaaatgtcaccgctgcgaaccatgtctttcacttcacacgcgcgtggaatccgtccaaggagtctcaggcaactgaccgggcgttccgcatcggtcaagagcgagatgttttcgtgtactgcccaacagtaattgccgacgatttcagcaccttcgaagttcgcttggaccagctgctcaagcgcaaggctgacttggcgggcgctactttggacgacggcgggctgaccgccatgctcaacggaaccggcaaggatgcatcgtttgcagacttagtcggcgacggcgcggatggcgaggagcttccgaagcgctaccttactctcgacgacgtcgaccgcatggacggcgatggcttcgaagccttttgtcgcctcctatgggacaaacaaggattcctagctagtgttacgcccaagcgcggcggagacggaggtattgacattgtcgcgcttaaggggcgtgaggggatgcttctgcagtgtaaaagctcgaagtcagctgaggtcggctgggacgcaatcaaggaggtcactgccggctcggcaaggtatcaggctcggtttgcaggaacacgcttcagacgccttgccgtcacgaatcagaacttcacgagtggagctgtggcgcaggcggaagtgaaccacgtcgaactcgtaacccgattacgacttgaggagcttcttggtcaatacccggtgagcaatcacgagtttgatgcggccctgcaggaatggtttcaaatggcatga

SEQ ID NO: 10223 - DNA, 2013 bp, Burkholderia pseudomallei MSHR7500
atgccaagcatgaatctgagtgggcttgcagcggagtattggcacatcggcgcggtcgcgctggtcttggtctgtctatcgctggactttctagtcaggtttttcgtccggtcgcttaagctgaggcgcgatctcgatgacgccatcgaggcgttgcaggcgattcgtggcgagaagaacggggagcttgtcgaactctccgcggtcgagaccaaggcgatgaagtccgaagctttgtccaacccgtggaccgaatatgccaagacgcttcacaagcagcttggcgatgaagatgagctggggcagcaacgcatcaggtgttggcgctcgacagcgctggccgagacttttttcacggatcaggcaatcatcgacagtcgcttgaagacggacttcttcaagcatctccccggggtgctcacgggcctggggatcatcggaaccttcctcggcctcatcaagggactcgtgcatttcgatgtgagcgtcgacccggcggcggcccaagctcagctccaaggattggtgagttcggtgggacatgccttctatgtctcggcattcgccatcggcctagccatgttgattacttggatcgagaagacgatcgtcacggtttgttatggccaagtcgaggacattcgcgaactggtcgatagtatgttcaggggcggggcgggcgaggaatacctgcaacagctcgctaagtcgtcccaagacgcggcgacccaagctcagcagatgcgcgactcgctggtagtcgatctcaaagagatcctcacgacgttgaccgaacggcagattgcggcccaagcccagtacacaggccagatgtccgtcgatgtggccaaagtcatttcagaatcgctggccagtcccatgtccgcgatggccgaggctgtccagaaggtcagcggtagtcagggagacgctgtcaacaagctgttgaccgacgtgttggcgagcttctctgcgcaaatgcaggagatgtttggcggccagatgcgcggcatgagcgatctgttgcaaaaggccagtgaatcgatgcaggccacggcgattcaattcggacagctcgcggcgaacatggacgccgccggtaacaatacggtggactcgatgggcgagaagctcgcccaggcgctcgatgcgatggacgtccgacagtcggcgatgaacgctcggatgggagaattcatcgagcagattcgctcgttggtcgcgcagtctcagtctgagaccggtgaaaagctacgagaggcgttggcggcggtcgggactcaggtcgcgggcgtggtcgagacgctgcgaaagcaggccgaggaggccgctgagtcgcaaggccaacgcgcccggcggttcgaggagtcgactgaccaggcgatcaactcgctctccggccaagttgagcaactgctctcgcagtccgtggagaccaacaagtccttgcagacgtccgtgtcggctttggccggcgcgacagaccgggcgatggctagcctcaattcgggggtggaaaccctctatgtcgcagccagcgacttcgcgaaagccggttcaggagtgtccgaaacgatgcgctcggcctccacggccaccgattcgatcaagacggcctccgcgcagctctcgatggccaccgacaacgccaaggggatcttcgccgactacgcacgcacgcgcgacacattcgccacgatggtcgcggagctgcggcagaccttcgagtcggccaagaaggatgctgcaatgacttcggagctcgttggcaagatccaggcggcggcccgcgaactcgccgcggcccagcagcagtcagaggactatctcaaaggcgtcaccgaggtcctcgtgggtgcgcacgaatccttccgcgacaacattgacaggacactgggtgagggcaatcgcaagttccagtctgagctatcgaacgccgtcaacctactgtccggagcgatcaagaatttgggcgatgcggttgatgagattccggccagtcgagggcgataa

SEQ ID NO: 10224 - DNA, 726 bp, Burkholderia pseudomallei MSHR7500
atgtttggtccaaaatcatctaggcgacgcaatggcagggacgaaggggagaagcccttctggatttccttttccgatttgatgacggcacttatggtgctgttcctcgtgtcgatggcagtcgccctgatcgccatcacgcagaagcaaaaggtcattgacgacacgatcgaattgcgcaagaagaccatcgcgcaatgcctgaccgaagtcgaagatgttaccaagcgccccgagttcaagggggtgacggtgcacggcaactcgatcgacttcggcgcagtcgttctgttcgccgatcagcaccactcgtttgagaggtcggccgacgagcgctttattcgcagcttcgtccccgaggtgctgaaggtggctcgcgcaaagagttgcgaaacgtggcttaagcgtgttgtagtcgaaggcttcgcaagccgtaccggtaactatctctacaatctgaatctaagctacctgcgatctcagcgagtcttgtgcgcgttgctgaacacgcaagttcccgacgcgctctccgaagccgatcgaaggcagattcagacgctcttcttggtcggcggctcgtccttcaacactgcatccaacgatggtccggcacgcatgcgacgggtcgaggtcaggttagagttccgcgatttcggatcggcggctgagccggcgccagacattccacttgatccgggcaagtcttgtccgaacgacctgcgatga

SEQ ID NO: 10225 - DNA, 1641 bp, Burkholderia pseudomallei MSHR7500
atgaacgaagcgctggaattgctgcgatcaggcttggcccgctcgttcacgcaagcggcgaagaatcccgacctatggctagacgcgaaatcgatggagcacgcgaaggagcgcgtgattcgcgatcatggcggagcggcgatcaaggtggatagccggaccatttgggcttcgatcgaggacttccgacggcttggccatgccgtgaacttccgcgagctcaaatacgtttgcctaggtgtttccgctatggatgccaagggctggtgcatcctcgctgaggaaagattgcgtgagcaggtaggcaaacaggtggaggaacaggtggctatccatcgcaagctgcgctgttttcaagccttgctcgcctcttacttctcgtttgcgcttggagcgtccaatcttgacccaaaggcagtgaagggctggacgacacttcggacttggctccaacgtcagcggcagcaattggccattgcattggaccacgttccgccttggttcgaagctctggatcgacattctgaacttctgactgggcggccctgcgacaagttcgtccccgacttgatgcgcggcgatgcgtcctcgctcgaagaagcgatggacagcctaggcatcgatcgcgattcctgggtgatggaggcggccgtctttgcccagatggaggcagcggagaagcttgacgatgttcgtttcaaggcggcactacctgatctgctgcgcatcgcaatgggtgaggcgggcgcgaaggtcggcgaacggctgcggattcgcggcgtcgcgttactggtttcccgatatgcgcgttgctccgcaacgccagagcaccctgggctgcgcgacgcggcagttggcgtcattggtaacccttggttgcgcagagcgagttgggatgcgcacgtcgtagacgcggtaaagcagcccgacacgcgtgcgagagagatggtcttcggttggctcaaaggccggcttatccaggatttctttgagttgctcagcgccgaagatactggcgatacgcggcgcctcgtctattggctgcgtttcgcgcccttcgtcgacgatatgtggttcgctcttggccccacagcgcaataccgaagcgatcggctattcagggagtttcgcgagcgtgcgaaagggcggctcctggaccttgaaggcgcgtcgggcgacaacaacgcgttcgtgatgaggattggtgctcatgtcgccattgagtttggcgccacaggccacgcgttctatctgcttcgctgggacgccttgccgccagccgtatctagggcgctgacttcgggtaaagcgaaggactatgtggcgctcagccaactgaagccggaaccccacgaatggaagcagagtcaccgggatgcgcccgtcgctctcagaagctgggaacagaagtttgacgacgaactcttaccgcgattgggtgtggcgccgaaagagcggccggtatgcgtgcctgatctcgaaaagctgttggaagggcgtaatgtcaccgtgacggataacagggccaaggggggcgcgcttcggattgggccagatgacgaactggccggcgtagctcgtcagcttgcagccttggggatgcagcagccgcggcgcggccgtggttggatcaaggagtga

SEQ ID NO: 10226 - DNA, 3762 bp, Burkholderia pseudomallei MSHR7500
atgatccgattgttcggttcgaggcgagtcggtgagcaagccgaagtccgcccccgttcgaagatcaatgtgtcttgggggcgccacggcgtagcatttattccgggccctgctaatgaggcgtggcttgatgaacccagcgtgttcggcgccgactccgaactagtgctattgcttcggcagttagaggaggagggctacatcgaggtgcggccgtccggcgcgtcgatggactgggagtcctattatcgccttgaagcagtggaaggttactccgcttcgcttcatctgttgaagcttcccacaaagcgtggctggcgcccgatgttgtccagccgcggcggcctctcggatgcaactttcgccatcggaatctcgggctggcgcgacccggccggcgcgcagccgagcggcaacgtggagattcagggggcgatcgtctctgccgatggcgagcaatcgctgctctccgagtcggtatggcgagtggtccacgccattgccgagcggcgctcccgttctgcggagggatacagccccgaagacaacaaacgagattgggccagaatcagacggcatgccatcgacgcgaatgctgatcttgccgatttcctcgccaagacaatcgtactcacccccgaacggatcgacatccaaatgcgtaagggcggtgagggcgcgcaagacatggtggagatcatgcccggcttcgacggtgcaccgagtcgatggctggaagtcttcgatagattcgaagtagtcccggagcgctatgagataccgaacggctccggtctggtgcacgtcttgatgtcggaggacgcgcgcgcggtcctgtcggagattcggcggatgcctgggcgtcgggtggccggcgctcgcgcggaggccttcttgcgcaatccgtttgcgacgcttggcccctcggcagcagtcgcgatcgacccggaccagttcgagcgagcgcgcgaggatgcaggcatcgttttcgaacggttttccgcacgcgtcgtcgaggaccaatctggctatccgtgcgacgtgggcttgctcattgagcaggtcttcgagggcaagctggtggcggaggagtccaagttccagtccgccaccgaactcggatcgttcatcgcaaagatggaacagcgcttcgccactggagcgcagtgctgtcattggaagggattcgacctcgaaatcctgggtgactcgccagatcaagttgagaaactgcgttcggcgttggccaagctcaccttgccacgcaagatcacggcatccgacatctttgatctctcactgtattccgagcgcatagagggtttcggggtagagaagccctattactcgccctttatcgccaagaaaggcgacggcggttgggtgccggagaacgtcgaccttggtctatggttcaccgactcgaagggtgagacggtggcgataccgctcgatgggcgcaacctggacaagttccgcaaggaggttgagcaggctgagcaggaaaagcgagagagcttttcctttcctgggtgtccgagaccggtgccgacgggctgggccaaggaggctctcgaaaccctcggcaaggttaaggaagaagtcaaaggcggcaactacattcccggcaaggacaagtcggctggcaagatggtcgagcgcaagggcttggtggtcaagccaaacgtagatggacttgattacgaggagcggcgtggagatctgtcagtggataaggcgccacccgcgataccatcgagcctacgccccgatattgagctcaaagaccatcaacgagacggtttagcttggctacaaaatatgtggcgcaattcgccgtcggcatgccgtggcgcactcttggccgacgacatgggcttgggaaagacggttcagttgttggccttcatggcctcgctgattgagctcgagccccgcatcgatccattcttggtcgtcgcgcccgtttcgttgctggacaattggaaggccgaaatcgagaaatttttcgttgagggagcgatggatgtcctcacgctgtatggcccgaacctcgcggcaaagcgagcaccgaggtccgcgcttgatgacgggttgattgagtcgggttcgcccaagctcttagcatcggactggctcggttcggcaaacgtggtgctgacgacctatgagacattgcgcgacctggaattctccttagctgcgcagaagtggtcggtcatggtttgcgacgaggcccaaaagatcaagaaccccaacgcgatggtgacgcgggccgccaagaagcagaacgccagactaaagatcgcatgcactggcacgcccgtcgagaacacgttggctgatctgtggtgcctattcgattttgtgcagccaggcttgctaggttcgttgaaggacttcggcagcaaataccgcaggcctatcgaggtggagaccgacgacgagatggcgcgcattgaagaactgcgcggccttatcgagccacagaagctgcgtcgcaccaaagccgaggtcgcgaaggacctgcctaagaagattctgcatgagggctgtcgcaagctgccgctttccgctcgccagcgggcgctctacgcggatgcggtggctcagttcaaatcacgtgggcaagggcagggtagtgggctgcaatcgcctttgggcctgctgcaatacctgcgccgcctttgctctgatccgcggcctcccggtcatattgccaccagcgatgaatccgtcgagaccatcaagaaggcgtcgcccaagatggactggatgctacggcggctcagggaaatcgaggcgtcgggatccggcgacaaggtcatcgtcttctgcgagtcccgggacttacagcgcgtcattcaacgcgccatatctgaggtgttcggattcgtgccagacgtgatcaacggtgatacctcgaccgaatccggggccgcaagtagtcgccaaacccgtataacggcttatcagcaaaatcctggtttcggcgtgatcattctttcccctcttgcagtcggcttcggcgtcaacatccaggctgccaatcatgtcattcactacacgcgcacatggaaccccgcgaaggaagaccaagccactgaccgcgcgtatcgaattgggcagcaaaaggatgtgtacgtctactaccccgtcgtggttggcggcgacttcgtgactttcgatgagaagctggacgtgttgcttgaacgcaagcgcgcactgtcctatgacatgctcaatggggtcggtgatgtgaccccatctgacttcgctgacatcgaagcgccgggtggtggttcgccatttggcgaagatctctttaatcctgccgatgtcggttccttgggaccggatgcattcgagtccttctgcgcgttgctgtggagcaagcaaggttactcgcgaacaatcaagacgcccaagacgggagatggcggtgtggacatcgttgcaatcaacggcaatcgtggcgcgctcatccaatgcaagagctctggtgtcgaaggtaaggagatgggctgggaggctgtcaaggatgtcgcggccggttccgtggcctattccgcgcgctacccgggcgtcgagttcaaacttattgcggccaccaatcgccggttcaatcagtcggcccgacagcaagcgtcactgctgaacgtgacgttgatcgaagggagtgatctagtcgatttactttcgaagcacccgactaagcgaggggagctcgatcgcttcgcaatggctggctggtcgcagtga

SEQ ID NO: 10227 - DNA, 2004 bp, Burkholderia pseudomallei MSHR4303
atgggagacgttgatctctgggggctggccgaagagtattggcacatcgcgttggtggcgagctttctggtcgccctcgtggttgatttttcgattcgttttttcgttcgttcgattacgctttcggccgagcttaagcgatcattgaaggcgctgcgagattttcaggcgcagaacgaacagcctgtcgtcgacatcgctgacatcagcaaaaaggcgttctcttcgcctgtgctcagcggtccttggcgcgaatatcagaagacgctgcacccccagagtgaaagtgatggactcgggcaggtcaaaatcgcacgctatcgtgcgaccgcgcttgccgagaccttcttcaccgagcagctgattgtcgacagccgtctcaatacagactatttcaagcatctgcctggccttttcaccggtttgggcatcatcggcacttttgtgggactcatcagaggcctgacccatttcgacgtttcactggatcctggtcatgcgcaggagcaactccgtgggcttgtgaattcggtcggatatgcctttttcgtttcaggtgcagccatttccttagcgatggtggtcacgtggatagaaaaaacgctcgtcacttcacagtatcggaaagtcgaggaactgcgagagctgatcgacggcatgttcgctggcggcgcgggagaagagtatctcgaacgtttggccaattcgtccgaaatcgccgccacgcagttggctcagatgaaggactcgttggttgccgacctcaaagagatactgacaacgctcgccaaggagcaaatagcagcagccgagaagaacgtcggtcagatgtcggtcgacgtcggaaaagcgatcgccgacagccttagcgggccaatggacgcgatcaccaaagccgttcagggtgtcagctccaatcaaggtgaggcggtcaacagggtgttgactgacgtgctgtccaatttcgcgactcaaatgcgagaaatgttcggcggccagatggcgggcatgtctgagttgttggtcaaggcaagcgaatcgatgcaggcgacggcgtcgcagtttcagcagttggcggccagtatggacgcggctggcacaaatacggttgacgcgatgggcgatcggctgagcaaggcgctggatgctatggacgcgcgccaggcggcaatgaacgcgcaaatggcgacgttcgtggaacagattcgagcgctcgtatcggagtcgcaaaccgagtcttcgcagaagctgaaagagacgttgtccacggttggcgagcaggtcgccgctgtcgtcgatcaattgagaaaacaagcggagcaggcagcgagttcagatggcgagcggcaagccagatttgagcaagcgactggccaagtcatcggatcgctgtcggggcaggtggagcaactgcttgctcaatccatggacacgaacagatcgttgcaaaattcggtggcaagcctcgcgcaggccaccgataaagccatatccgggttgaattcaggggcggaaactctctatgtcgccgcgagcgatttcgccaaggccggccagggcgtgtccgaaaccatgcgcgcgtcaggcgtggcgacagaggcgatcaaggcggcatcgacgcaactggtcacgtccaccaacggcgcgcaagcgatcttcaccgactatgcgaagacgagggacgcgtttgccctcatggtgtccgatttgaagggcaccatcgaaaatgccaagcgcgacgcgtcaatgacatctgaaattgtcagtcgcatcgaagctgccgccgaaaagcttgccgtcgcgcagaagcagtcggaggaatatctgcagggcgtcagttcggtgttggccgaggcgcatgagaagttcggccaagaggtcgaacgcacgctgagagagagcaatcgccatttccaacacgaactggcgaatgccgttggtttgctttccacggcgatcaagaatcttggcgacgttgtcgacgacatgccagtccgggggtaa

SEQ ID NO: 10228 - DNA, 720 bp, Burkholderia pseudomallei MSHR4303
atgctcggattgaaggccgccaggcgacgcggctcacgcgaggaaggcgaaaaaccgttctggatttcgttctcggatctcatgactgccttgatggtgttgtttttggtggccatggctgtggcgttgatggcggtcacgcagggcttgcaacagatcaagaaggccacccaggagcgagaccaaaccatcgagagctgcgtcgccaacgtgaaggccctgaccaagctggatgagttcaagggcgtcacggtccgcggccactccatcgatttcggcacgcttgtccaattccaagacaacgcacacaagtttgaaaacccagaggacgagcattttgttcgcaggttcattccgcgcgtgctcgatgttgcgcgtgcgccgacctgcgacaagtggttgaagcgggtcgttgtcgagggcttcgcgagcaagactggcgactatctgttcaatctcaatttgagctatctgcggtcgcaacgggtgctttgcgcattgctcaacacgcaagcgtcggatgctctgtcggcggcagatcgatctcttatccaaacgcttttcttggccggcggctcctctttcaacacgactgccagccgcgcggcgcagatgcgccgagtcgagatcatgctggaattccgtgacttggattcaaccaaggaaccgccccccgacattccactggaccctgggcttcgatgcccgaatgaccgatga

SEQ ID NO: 10229 - DNA, 1365 bp, Burkholderia pseudomallei MSHR4303
gtgctggccgacgaactgcttcgggggaaggtggcgcgcacgattgagcagcaatccgccgcgcataggcgtctgcgttgtttccaggctcttctgttcgcctacttctctttcccggtcaacggaagcgacgccagcgaggaatcgaaaacaggatggcgcggactgcgtggttggctgcgcgttgagcgcgaccgattgattgagcttctcgactttaaaccgccgtggttcgaaacgcttttgcgccatgcggagctgttgaccaatcagccgtgcgaccagttcggggctgaccttctgcgcggcgacgcaacgagcttgaatgaggcccgcgaaggcttgtccattcccgagacgtcatgggtgatcgaagaggcggtgctggctcaaatgagggctgctgccgcgctcgaagacgccccattcaaaaccgtgttgcccgacatgctcgctatcgcgatggggcgtgtgggagtctcgatcagtgggatgttaaagacgcgatgtgtggcgcaattggtgtcgcgctacgcgcgctgcatcgatcgtccagagcagcccgcgctgcgggatgcttccacctccacaatcggcaatccgtggctcaggaaggatcgctgggacatgcatgtgcgcgtcggcaagcaagcggatgatcttgcgcgtgaaatggtgtcgttctggttgaaagagcgcttggtcgcggatttcttcgagttgctcagtgcggacgagatcaacgacaagaggcgggttgcttattggctgcgctttgttcctttcgtggaagacatgtggtttgcgctcggagcggcggctttggaaagccgggacattaaattctcagaattccgagcgcgagccaaaggtcgtctcctaagactggaaggcagcgcgcctgaaaacaatgcgtttgttatgcgtattggtggccacctcgctgtcgagtttggggagagcaaccatgcgttctatctgttccgttgggacgccctggccccgtcgcttctgcagtcccttcactccggtcgtgcgagcgctgaagtccacgtcaaagaactcaagcgagatgacaacgaggacaagatgtctcatcgcgattcgccggtggcgctgaagagctgggagcagaaattcgacgacaaattgatcaagttcatcggcaaaaagcctgagacccgtccggcatgtgtgccggatctagaagttctgttcgacaaagatcgagtgaaggtcagcgatcttcgagcggctggcggcgctctgtgggtttatgaagaggagcgttcgtcatatctcgctagacgactgcaatccaaggggttcgcgtatagagcgggacgcggttggttcaaggagtag

SEQ ID NO: 10230 - DNA, 3774 bp, Burkholderia pseudomallei MSHR4303
atggtttggtcgccattcaaatcgaaaaacagctctgccgcaggcggcaccgcggagcgcgcgcccatggtttccgtttcgtgggatcgcaatggggcgcatttccgtccagacccgatgatcggcgattggctgtcatcgccaatggagcacgaagccgcgtccgaactggttctcttgcttcgccagctcgaagaggaaggcttcgtggatctgcacaacgacgacgcttgcctctcgtggcccaactactatgcgttgctcgaatcgcccgagcatagcggcgcgctccgtctcttgggcctccccgaacaacaggcgtggaggccaagcctttcgagcaacggcacgctgaccgataccggttttgctgtcggcatacagggatggattgcccctgacgggcgtcgaccgagcggaaacattactcttgaaggcgccgttctgacgactggaggcaagacggcgatcatccccgaagcggcttggcgaatgatgcaggcgattgccgagcagcgcgccagaaagaccgatgaacgcacgccggatgtgaacaagcgagattgggcggccatccgaggacatgccgtccaggcgggtgccgacttgacggactttctacgaagaacggtggtgttgacgcccgagcgtttgcgcattgatcttcgcaagggcgatgttggcggcgatcaacttgtggaggtcatgccaagctttgacggcgcgccgccccgctggctcgaactgttcgaccgatttgcgagtgtgccggagcgctacgagattcctgacgggaatggcctggtgcatgtgctgttgtcggaggaggcgcggacggtcctgcgcgaaatcaggcgcctgcctggtcggcgcattgcgggagagcgagcggaggcattcgttcgaaatccgattgccacgctcgggccggacgcggccaaggttatagacccagagcagttcgagcgagcgcgcgaggacgcaggcatctcctttgcgcgcttcactgccacggtgttgcgggatgtcaaaggctatccctacgacgtctccttgaccgtggaagaggtgcttagaggagaaatccgcgccgaacagatgaagtttggcgaggcggcagaactggaacagtttctcaaaaagctcgatggcaagatggccgccgaggcgcaatgttgccattggaagggcttcgatcttgaaatcttgggtgacacgcctacgcaagcggccacgctgcgcggcgcgttaaaagattggctgcgacccggtcgcatcagtgcggcggagattttcgatctcaccaagtattctgagcgggtgggcggattcggggtcgagaagccgtactattcgccgttcatcgcaaaaaagagcgatgacgccggatggtttcccgagaatgtcgacgtgggtctttgctttgagaccgaaggcggcgaaacggtggccttggctcttgatggaaagggcttggatgccttccgaaaagaagtcgagaaagctcacgacgagaagcgtgagacattccagtttcccggctgccaagaacccgtccctgtcgagtgggctctcgacgcattgaaaaccttggggcaggcccgagaagatgtttcgaaggggacattcgatcctcgaaaaccggccaccaaagcgcgaacgtcggaacgcaaaggcttggtcgtgaagccgaacgtcgattcgttggattacgaggagcgacgcggcgcgctcgccgaacctatagaacctgccttcctgccgacggccttgctcagccacattcagctcaaagagcatcagcttcggggcgtggcatggcttcagcacgtatggcggcattcaccgagcttatgccggggcgccttgcttgcggacgacatggggctgggcaaaaccgttcagttgctgacctttgttgcatcggcgattgagcgcgacgcacagatcgatcccatcctcgtcgtggccccggtttctcttctcgaaaactggaatgaggagattgcaaaattcttcgcaccgggagcgatgcgggttttgactctgtatgggaagaatctcgccgccaaaagagcgtcgaaagcatcgctcgacgaagaactggttgaggctggctcgccgaagcttctgctgcccggctggctcggcgccgcaaacgtggtcctgacgacatatgagacgcttcgagatttggaattctcgttggcggcgcagcgctggtcagtaatgatttgcgacgaggcgcaaaagatcaaaaaccccaacgcgttggtcactcgcgcggccaagaagcaaaacgccaggctgaaaatcgcgtgcactggaacgccagtggagaacacgctcaccgatctttggtgtctgttcgatttcgtccaaccgggattgctcggcgcattgaaggattttggctcgaaataccgcaggccgatcgaatccgagacggaggaggagaaagcccgtcttgaggagttgaaggggttgatcgagccgcaaaagctgaggcgcacgaaggcggaggtggcgaaagacttgccgaagaagatcgagttcgagggttgccgtgcattgccgctgtcgcatcggcagcgcggcctctacgcggatgccgtcgcgcagtttcgagcgcggtccggatcgggaccggggatcggcatgcagtcgccgttgggcttgctgcaatatctgcggcggctctgctcggacccgagatcgccggggcatctctcgacggaatcggagccgctcgccgacgttgagcgcgattcacccaagatggcatggatgctggcgcgccttcgggagatcgagaagacgggcgaaaaggctatcgtgttttgcgagttcagggatttgcagcggaccttgcaacgagcagtgtccgaacgcttcgggtttatccccgacgtcatcaatggcgacacctctgccgactcggcccatgcgaacaaccgacaaaagcgaatcacggcatttcaagagcgcccgggtttcggggtaatcgtcctttcgccgctcgccgtgggatttggcgtcaacatccaggcggccaatcatgtgatccactacacgcgcacgtggaatccagccaaagaggatcaggccacagaccgcgcctatcgcattggtcaagagcgagacgtctacgtctactatcccgttgtggtggcgcacgattttctgacctttgacgcgaagctcgataggctgctgcacgagaagcgcgagctcgcgaccgaaatgctgaatggagcgggagatgtcggtccggcagactttggtgacttggaggggccggacggaggcaacgcgttcagcaacgagccactgacggccgaggacgtgggttcactggatggcgacgcgttcgaggcgttctgcgcactgttgtggacgaagatgggctacacccgaaccatcaagacgaagcgcgtcggcgatggaggtgtggacgtggtggccatcaagcgcaacgaaggcgcgttgattcaatgcaaaagctcgaccatagagggccgggagctcgggtgggaaggggtgaaagacgtctcagccggctgggcgggatattccgctcgctatccgggcgtggccttctcgaaactggctgtcaccaaccggcgcttcaatcaggcggccagacagcaagccgatgttttgaacgtcgagttgatcgaaggcaatgaactggcggacatgctcgctcgccatccgatgaagcgcggcgagctccaacgatttttgctcgccggatggagcactgtccgctga

SEQ ID NO: 10231 - DNA, 1668 bp, Burkholderia pseudomallei MSHR3709
gtgccagcagacacgatgttcacgcgggacgcactggtcgacagtcggctgtttgatgacttcacccgtcaccttcctggcgtgctcaccggactgggtatcattgggacgttctcggggctcctcagtggacttagcaagttcaagcccacacccatcgaaacggccgtcaacggcctcggcccgttgctgcaaggggtgcaacatgcgtttattgcgtcaggctttgcgattgcctgtgcgatgggcgtggtttttatcagccgtctcgtattggcctatttctatcggctcgttgaagagctgacccgggggattgacagtctgtataccaccggcgcgggcgaggaataccttgcgcgtctcgtcaagtcttcggagcagaactcggcaaacacagctcaactgaaagacgctcttgttgaggacctcaacaagatgatgacgaacttggtcgaaaggcagattgctgcccaggaggcctcggtcgctgcgcttggccagcacattggcgagagtatttctgcggcgattgccgaacccatgagacgtgtgggcgaggtgatggaaatgaccagcagaggaaacggggagcaggtcaactcgatgcttgagacgctgctcaccggctttatggcgaagctggaagatacctttggcggccagatgcggggtgtcaacgaccagatgcaacggtccatcgatgccatggcttcagttcagtcttcgctgcagggcctgctggccgatatcaaacagacgaacgaacaagccacgagcagtatgagcggcacgctggaagaggccatgaagaaggccgctgataaccagcagctcctcacggaccagatgcgcgagtttgttcaggatttccgtcgcctggtgacagaggagcagaacaagtccaaggaggcaatgcacgagaccgtggcacaggtacttggagaggttaccgctgcgatgaatagcctggaggggttgcgccgggcggcggcggtcgacgaggcggggcgaacggacaggcttgcgaatcagaccacccagctagtaggtggattgacgaaccaggtagagtcactcctcggagccgtttctgaccaggtatcacagacccagaagaacattgatgcgttgggccaagtgtcgttgcgcgcgattgaaggcatgaatcagggggcgttgaccatgggcagtgccgctcagcgattcgagacggcaggaggcgcggtgacctcagtgtttgaacgctcatcaaaggtcgttgaaacgcttggcgctgcatcttcggcgctgcaggctgcatccacggcagttcagcaagggtttgagcagtacgactcgactcgcaggaccgtcgatgcgcacgttgtggcgctaacggcccttatcgaatcagcaaagagggaagctggagtttcccaagagcttgttgccagcatcaaggcaagcgctgaagctatgcgcaagtcggaggcggagagtcgtgcgcatctggaccaggttaattccgcactcgttaaagcatttgccgatttcgggaacgcgcttgttagtcaggttaaatctaccatcgctgagacagaccgccacctggcgcagggcaccggtcacctcaacggggttgttcaagagcttgccagcgccgtccagcgcatgaagagggcttga

SEQ ID NO: 10232 - DNA, 705 bp, Burkholderia pseudomallei MSHR3709
atgttttctcgcatagtcctcaagcggggagggaaacatgagggcgagagtccattctggatatcgttctcggaccttatgtctgcgctcatggttctgttcctggtcgtgatggcggtcactttggtagcagtcactcagagcatcgacgcagcgactcgcgcgaacatcgaacgaagcgccgcaatcagcaagataatggccatgattgcagatgacccaaaaagtgttggcgtaggcgtcgaccaacagaactatcgtatcgaccttggaaaggaagttcgcttcgacagtggtagctactccatcagtgtgccggccgcgcagttcctgcgaagctatatccccgtgctgttgaaggccaaggatactcccgagggtcagcgctggatgcgtgacgtggtagtcgagggatttacagacgaggatggaacgtacctgtataacctcgaactgagtctggaccgcagtcgcagcgtggtctgctcgctttttcagaacagctcgggaactgacgccctttcgcccgaacagctccgcaaggttcaggaactcttcctagtgggtggctactcgttcaattctatcaagaaggacaaggcagagagccgacgcgtcgaattcaaaatcgacttctggggccttgatgagaatagaccggtgtcgaacgacgtcctgaatggcaaggagttcgggaaatgctag

SEQ ID NO: 10233 - DNA, 1437 bp, Burkholderia pseudomallei MSHR3709
ttgggctctagtcggtttccagcgctactagctacatacgagaatgaggcgcaacgtggcgagctttggcgcttgacgtggcatgggctgctctactcgtacttcaacttcgacccaagcattgcgacggacgaagcgacacgcagcggttggaaagcgcttcgctcgttcctggagcgaacttggccgcttatcgaccgccagactggcaacgccctagtgcccgactgggtgggggtgctacggaaagagtctgacgtcctgacggtcaaacccgtagccaaatacgcagcagcctacctaagtggagaaacggcggcgactgaccaactagctgccgatttaggtattccaccatccagctggttctggcatgcattggtgtttcgtgccgttaagcatgcgactgataacgcggatgacagtgaattccgtagacacattccgttgctcttacgtctaatcgggagcaagccaggcttccgcgatgaggcgttggaagccatcttgattcgataccacgcttgtaagggagcaccacagaatgagcgcctgcgtgactacgtgtgtggtcccagtgtgtggaagaatccaaagctcagggcagcaggtattgctaccgcatggacccgagtaccggacccagtatggcacatgatgctcagttgggttaacgagcgaaatctcaaagatttttttgacattttggcagcacgaaataaggccgacgaggggcgtctagctttctggtcgaagtacctaaagcaaattacgtggactcggcttgtttttggagccgataccatggcgctcaagcgcaccaatgccgggattcgcgacctcatcgcacgagaagaaggcgcgtatgcgcagctgaccgggaagaaagaggtggacgcgttcctgatgcaggtcggaccgtacatcattgtcgaatttagcaaaaagccgaacgcctgttacatctacaaggcggacgtactgccatttgagcgctatgccaagtactacaccgggggctcagaggacttgggggcgggctttcaccaacgctgcgcagctcgcattgtgcaccgcgaggggtgggaagcacgggcaggggaggaactcgtgaatctcggcatccggccagaccataccggggcacaacatacgggggtaacgggagcctctcacccgacatccgcgtcgaagcgttggaccggtgcccccgcgagtcagcgcgacggcgttcaacgcacaccgaatatggcggcgctgggagtcctgattgagcgcttccacggtgcttcgattgatgacagacgcaatgcctcgggtggcggccgcctttgggtcgaggacccaatgcagcgcatccagctcgcatcggagctcaaagcgatgggcttcaagtgggcaaatagcaggcaagcctggtactttccggaggcctga

SEQ ID NO: 10234 - DNA, 2646 bp, Burkholderia pseudomallei MSHR3709
gtgcagctggaacagggcctccagctatcccatctgtggcgggcacagcccgccgaacgcatcgattttgaggacgtctacgagctcggtggttatagcggccgaatcgaaggcattggggcggcaaagcccatttacgtgcctgtgtttcagaaggacaagaagcaggcggaaggggacagcggatggctcccgtcggacctcacccccatggtaaaggtgacgcttcagggccatgaaggtcaggtgttggttccactaacgaaagagtgggcgcaggagtttgataagcaggtaagagaggctgagaccagcggacaggcggaggtaaagaacgccgagctgccgacggccatcgcgacgccgcaagcgcggacgctcgcggacagcttcttaagcatggtgggtgcgcaagagcggattaagggtgaaaaggccagccatgccaaggaagcgaagagagcaaaacaaacgctgttggtcaagaccaactttcatggtgtcgactatttcgaggagcgacgtgcgtctttggcgttgccggaagactggagggcacaactgccgcgttgcttgagccccggaatcgagctgaaaaagcatcagctgtacggggtcgcctggttccagcatctcgtatcgaaggctcccactgaatgccgtggagccctgctggcggacgacatgggcctcggtaaaacactgcagctgctctcccttttgtcctggtactacgaagccaacccgaatgctttgccatccattgtctttgcgccgaagagcctccttgagaactgggagaatgagacgcggaagttctttacaccgtcgtttccagaggttctcgtcatgtacggggacaatctgcaggagcgcaaacaaccccgaacgcttattgacaatcagctacaggaagtcggtatcgttgaccttttgaagccgggttgggccggttcagcgaaagtcatcatcacgacgtatgaggtcctgacttcctacgaattctcgctggccaaacaagccttcgctctcgtcatttacgatgaggctcagcgaataaagacgccgggtgctttggtcactctggccgcaaagaagctgaaggctgatttccgtatcgcctgcacaggaacaccggtcgagaactcgcttgcggacctttggtgcctttttgaccttgtgcagcccggcctgcttggggcgctggaggagtttggcaagacctatcgccgccctatcgagtgtgataccgaagagcagaaagaggccctagcgcggctacaagctgctattgctccgcagacgctgcgtcggacgaaagctgacatcgccgctgagcttccgagtaaatattttgcgaccaagagggccgaccagcactcgctgaggttcgagccggtcctcgaagaaggtgagcgactcgaaatcgcaattagtgagcatcagcgtatcctgtataagggcggcctcaaaaagctaaaagatgcggctgcggagtctaacggccggcgacgggcgcagctttccttcggcgcgctgcatctgatgaaggctgtatgtgctgagccgtactgtctgccaggcacgaaattcttggtggataagtcggggcgcgacgttcacctaagcaattctcctaagttacgttggctccttgagcgccttgcagaggtcgagaaggcacaggaaaaggctatcgtcttcaccgagctgcgcgaagtgcaggcctcgctttactattttttgaaggaaggcttcggaattcgccctttcatcatcaatggagaatctcaggggcggcagggctacattaaccggttctcggaaagaccaggcttcgacgtgattatcttgtccactctggcagcgggagcgggcctgaatgtgaccgccgcgaatcatgtattccacttcacgcgagcctggaatccgtcgaaggagtctcaggccacggaccgtgcgttccgcattggccaggaccgaaacgtctttgtttactgccccacggttgtggcggacgacttttgcaccttcgaagtccgacttgaccagctgttgaaacaaaaagctaaccttgcgggctcaacgctcgatgatggcgcgttgacagccatgctcaatggcactggcaaagacgcatccttcgccgatttggtcggtgacggaggagcgggcgaggcgctcccaaagcgctatctgaccatggatgacgttgaccgtatagatggcgacggcttcgaagttttttgttgtctgctatggagtaagcagggattccaggcaagcgtaacacctaagcgagggggggatggcggaatagacgtcgtggcgctcaaaggacgtgagggcgcattccttcagtgcaagagctcaaagtctggtgaacttggatgggatgcaatcaaggaggtgactgcgggcgcggcgatatatcaggcgagattcccggggacacgctttaagaagattgctgtcaccaatcaggagttcacaagcggtgccgttacgcaggcacaggcaaatcacgtcgagcttgtgacaaggacgcatcttgaggagcttctcgctaaatatcctgtgagtaaccacgatttcgataacgcattgcaggaatggctcttgtcaaaaggagttccagcagcttag

SEQ ID NO: 10235 - DNA, 2004 bp, Burkholderia pseudomallei MSHR2138
atgaacggtattgctgaagtgctggggaacatctatccaccactcggtaccttgcgcggagttccgctttttatttttctgactgtcattgttctgaccgcagcgttcctgctcggatacctcgttcagggcaccaaggtctggtggcagcttaagtctgtcgtccgagctattcagtcgcgcgcgagcgataagacgcctcctccgccggcgcacgttggacaagcattcaagtgggagccactcaagcatctgtgggaggagtatgcagatactcttcatgagttacgtaaggccggctccggcgaagttgtcctaacagaggtgcgcgccacggtgccagcagacacgatgttcacgcgggacgcactggtcgacagtcggctgtttgatgacttcacccgtcaccttcctggcgtgctcaccggactgggtatcattgggacgttctcggggctcctcagtggacttagcaagttcaagcccacacccatcgaaacggccgtcaacggcctcggcccgttgctgcaaggggtgcaacatgcgtttattgcgtcaggctttgcgattgcctgtgcgatgggcgtggtttttatcagccgtctcgtattggcctatttctatcggctcgttgaagagctgacccgggggattgacagtctgtataccaccggcgcgggcgaggaataccttgcgcgtctcgtcaagtcttcggagcagaactcggcaaacacagctcaactgaaagacgctcttgttgaggacctcaacaagatgatgacgaacttggtcgaaaggcagattgctgcccaggaggcctcggtcgctgcgcttggccagcacattggcgagagtatttctgcggcgattgccgaacccatgagacgtgtgggcgaggtgatggaaatgaccagcagaggaaacggggagcaggtcaactcgatgcttgagacgctgctcaccggctttatggcgaagctggaagatacctttggcggccagatgcggggtgtcaacgaccagatgcaacggtccatcgatgccatggcttcagttcagtcttcgctgcagggcctgctggccgatatcaaacagacgaacgaacaagccacgagcagtatgagcggcacgctggaagaggccatgaagaaggccgctgataaccagcagctcctcacggaccagatgcgcgagtttgttcaggatttccgtcgcctggtgacagaggagcagaacaagtccaaggaggcaatgcacgagaccgtggcacaggtacttggagaggttaccgctgcgatgaatagcctggaggggttgcgccgggcggcggcggtcgacgaggcggggcgaacggacaggcttgcgaatcagaccacccagctagtaggtggattgacgaaccaggtagagtcactcctcggagccgtttctgaccaggtatcacagacccagaagaacattgatgcgttgggccaagtgtcgttgcgcgcgattgaaggcatgaatcagggggcgttgaccatgggcagtgccgctcagcgattcgagacggcaggaggcgcggtgacctcagtgtttgaacgctcatcaaaggtcgttgaaacgcttggcgctgcatcttcggcgctgcaggctgcatccacggcagttcagcaagggtttgagcagtacgactcgactcgcaggaccgtcgatgcgcacgttgtggcgctaacggcccttatcgaatcagcaaagagggaagctggagtttcccaagagcttgttgccagcatcaaggcaagcgctgaagctatgcgcaagtcggaggcggagagtcgtgcgcatctggaccaggttaattccgcactcgttaaagcatttgccgatttcgggaacgcgcttgttagtcaggttaaatctaccatcgctgagacagaccgccacctggcgcagggcaccggtcacctcaacggggttgttcaagagcttgccagcgccgtccagcgcatgaagagggcttga

SEQ ID NO: 10236 - DNA, 705 bp, Burkholderia pseudomallei MSHR2138; identical to SEQ ID NO: 10232

SEQ ID NO: 10237 - DNA, 1722 bp, Burkholderia pseudomallei MSHR2138
atgctagctgccagagctttagatgtcctcggtcgcgatttggctgccgtcatcggctccatggggctgcataccagcgagtttggcaagccgcagttgatagagaaaacagttcgagaagctgagcgcatctttcaagggtattccaaagcaacgccgagcaaagaagacgcgtatgaggcggcaagagccttcctacgagggagggaactggactcgtggcagcgcgacctcgttgcctcggctctggcagttcctgtccgcgaacagaacggagccatggctttgggctctagtcggtttccagcgctactagctacatacgagaatgaggcgcaacgtggcgagctttggcgcttgacgtggcatgggctgctctactcgtacttcaacttcgacccaagcattgcgacggacgaagcgacacgcagcggttggaaagcgcttcgctcgttcctggagcgaacttggccgcttatcgaccgccagactggcaacgccctagtgcccgactgggtgggggtgctacggaaagagtctgacgtcctgacggtcaaacccgtagccaaatacgcagcagcctacctaagtggagaaacggcggcgactgaccaactagctgccgatttaggtattccaccatccagctggttctggcatgcattggtgtttcgtgccgttaagcatgcgactgataacgcggatgacagtgaattccgtagacacattccgttgctcttacgtctaatcgggagcaagccaggcttccgcgatgaggcgttggaagccatcttgattcgataccacgcttgtaagggagcaccacagaatgagcgcctgcgtgactacgtgtgtggtcccagtgtgtggaagaatccaaagctcagggcagcaggtattgctaccgcatggacccgagtaccggacccagtatggcacatgatgctcagttgggttaacgagcgaaatctcaaagatttttttgacattttggcagcacgaaataaggccgacgaggggcgtctagctttctggtcgaagtacctaaagcaaattacgtggactcggcttgtttttggagccgataccatggcgctcaagcgcaccaatgccgggattcgcgacctcatcgcacgagaagaaggcgcgtatgcgcagctgaccgggaagaaagaggtggacgcgttcctgatgcaggtcggaccgtacatcattgtcgaatttagcaaaaagccgaacgcctgttacatctacaaggcggacgtactgccatttgagcgctatgccaagtactacaccgggggctcagaggacttgggggcgggctttcaccaacgctgcgcagctcgcattgtgcaccgcgaggggtgggaagcacgggcaggggaggaactcgtgaatctcggcatccggccagaccataccggggcacaacatacgggggtaacgggagcctctcacccgacatccgcgtcgaagcgttggaccggtgcccccgcgagtcagcgcgacggcgttcaacgcacaccgaatatggcggcgctgggagtcctgattgagcgcttccacggtgcttcgattgatgacagacgcaatgcctcgggtggcggccgcctttgggtcgaggacccaatgcagcgcatccagctcgcatcggagctcaaagcgatgggcttcaagtgggcaaatagcaggcaagcctggtactttccggaggcctga

SEQ ID NO: 10238 - DNA, 3873 bp, Burkholderia pseudomallei MSHR2138
atgggcttcttcgacttctttaaacgtgttgcatcagcgaaggcaaatgagcctacgctgaaaaccatatggacagccgaaggcgtgcgggttgagttcgcccgggatttggcagaaccgacggcggatggcttgctggaagccattcattcaacggggccggaggataccgtacttggagcctatctcgcgcagcttgtcaccgaagagcggtgtgagctcgacaacaagggagcgttgattccctggaaaaacgtgtatgagttgcagggggcggcggaacacgtcagcgcacttcgactactcgcgttgcctcctcaaggaccgctacggccgattctggattgctcggggtcgttgtcggggcctgagtttgagcttgtcattacaggctggacggatggagctcgccagattcaacccgaccgactggatggcgccatcgttacagtcgacggcgaatcgcagctgctctcagcaactgcgtgggcaacggcgagcgaggtggctatgtttcgaatgcgtggccaggacgagagaagtcagcattttcatgaactggcatgggggcggattcgccgcttggcggaccaagccggagcgttatacgccaacccatacctcgagacgacgtttgttctcactcccgagacgctccggctccctgtttcaaaggaggaaactccgttcggtcgcgtgcatacagtctctccgacattcgatggcgctcctgacggatggttgaccgcctttgacggtttcaattctgtccagccgcactacgacctcactcgcggcgcgggccgtgttcgggttgtcatctcggagcccgtccgcaaggtgcttgacgtcatcaagcgggagatgcctggccgcaaggtcgctggggccagagccgaaaggttcgtccacaatcctttcgctttcctcggagagagtgcctacgacgttcttcgggaggacgagtttgagatagaccgtgccgaggcggggccggccgcaaccgtgtttagtatcgtggggcgctttgaaaatggccgcgtaaccaaggtagacctcctcgtaacagaacactatggggatggcggagcgaaaacggacatcaaggcatttaccgcgcccgagcaactcgatgacttcctcgagagcctgaaacaggctctcgaacaggaacgcgagctctttccatgggatgaattcgacctgtcgttggatgcggagtcgacggtgcagctggaacagggcctccagctatcccatctgtggcgggcacagcccgccgaacgcatcgattttgaggacgtctacgagctcggtggttatagcggccgaatcgaaggcattggggcggcaaagcccatttacgtgcctgtgtttcagaaggacaagaagcaggcggaaggggacagcggatggctcccgtcggacctcacccccatggtaaaggtgacgcttcagggccatgaaggtcaggtgttggttccactaacgaaagagtgggcgcaggagtttgataagcaggtaagagaggctgagaccagcggacaggcggaggtaaagaacgccgagctgccgacggccatcgcgacgccgcaagcgcggacgctcgcggacagcttcttaagcatggtgggtgcgcaagagcggattaagggtgaaaaggccagccatgccaaggaagcgaagagagcaaaacaaacgctgttggtcaagaccaactttcatggtgtcgactatttcgaggagcgacgtgcgtctttggcgttgccggaagactggagggcacaactgccgcgttgcttgagccccggaatcgagctgaaaaagcatcagctgtacggggtcgcctggttccagcatctcgtatcgaaggctcccactgaatgccgtggagccctgctggcggacgacatgggcctcggtaaaacactgcagctgctctcccttttgtcctggtactacgaagccaacccgaatgctttgccatccattgtctttgcgccgaagagcctccttgagaactgggagaatgagacgcggaagttctttacaccgtcgtttccagaggttctcgtcatgtacggggacaatctgcaggagcgcaaacaaccccgaacgcttattgacaatcagctacaggaagtcggtatcgttgaccttttgaagccgggttgggccggttcagcgaaagtcatcatcacgacgtatgaggtcctgacttcctacgaattctcgctggccaaacaagccttcgctctcgtcatttacgatgaggctcagcgaataaagacgccgggtgctttggtcactctggccgcaaagaagctgaaggctgatttccgtatcgcctgcacaggaacaccggtcgagaactcgcttgcggacctttggtgcctttttgaccttgtgcagcccggcctgcttggggcgctggaggagtttggcaagacctatcgccgccctatcgagtgtgataccgaagagcagaaagaggccctagcgcggctacaagctgctattgctccgcagacgctgcgtcggacgaaagctgacatcgccgctgagcttccgagtaaatattttgcgaccaagagggccgaccagcactcgctgaggttcgagccggtcctcgaagaaggtgagcgactcgaaatcgcaattagtgagcatcagcgtatcctgtataagggcggcctcaaaaagctaaaagatgcggctgcggagtctaacggccggcgacgggcgcagctttccttcggcgcgctgcatctgatgaaggctgtatgtgctgagccgtactgtctgccaggcacgaaattcttggtggataagtcggggcgcgacgttcacctaagcaattctcctaagttacgttggctccttgagcgccttgcagaggtcgagaaggcacaggaaaaggctatcgtcttcaccgagctgcgcgaagtgcaggcctcgctttactattttttgaaggaaggcttcggaattcgccctttcatcatcaatggagaatctcaggggcggcagggctacattaaccggttctcggaaagaccaggcttcgacgtgattatcttgtccactctggcagcgggagcgggcctgaatgtgaccgccgcgaatcatgtattccacttcacgcgagcctggaatccgtcgaaggagtctcaggccacggaccgtgcgttccgcattggccaggaccgaaacgtctttgtttactgccccacggttgtggcggacgacttttgcaccttcgaagtccgacttgaccagctgttgaaacaaaaagctaaccttgcgggctcaacgctcgatgatggcgcgttgacagccatgctcaatggcactggcaaagacgcatccttcgccgatttggtcggtgacggaggagcgggcgaggcgctcccaaagcgctatctgaccatggatgacgttgaccgtatagatggcgacggcttcgaagttttttgttgtctgctatggagtaagcagggattccaggcaagcgtaacacctaagcgagggggggatggcggaatagacgtcgtggcgctcaaaggacgtgagggcgcattccttcagtgcaagagctcaaagtctggtgaacttggatgggatgcaatcaaggaggtgactgcgggcgcggcgatatatcaggcgagattcccggggacacgctttaagaagattgctgtcaccaatcaggagttcacaagcggtgccgttacgcaggcacaggcaaatcacgtcgagcttgtgacaaggacgcatcttgaggagcttctcgctaaatatcctgtgagtaaccacgatttcgataacgcattgcaggaatggctcttgtcaaaaggagttccagcagcttag

SEQ ID NO: 10239 - DNA, 2343 bp, Burkholderia pseudomallei
atgattgagaccatccttgaagcgcccctcgttgcgcaggtttgcgcgctcttcatccttttctttgtcggctggtttttagtccggttcgtcccgcgtgccacgggccgctggcgtgacctcaacagcatcattgcgggacttacccatctcaagggttccggtggcgacccaacgtcgctctttgcccgaaagccggacctggcgcacctgtggagtgagttccgcaagagcctctttgacccgaagtcgtttgattcggcaaccggtgaatacgtccctgaaacgtctcgacggacggtgcctgccgagcagattttcaatgcacaggtggtcgtcgacagccgcgtgggcgcggagtttttcaagcacctgccgggcatcctgacgggtatcgggattatcggcacgttcgccggactgatgcacggtctgtacgcgttcatcatctcggataacacccaggtggtccgggccagtctgagcgcgctgctgcatagcgttgccgaagcttttctcgtctcggcttctgcgattttcttcgcgatggtcatcacggtcatcgagaagtttttcatctcccggctttaccagaaaaccgaagaggtagcgtgtctcctcgacagcctctacaaggcgggcgcgggcgaggagatgctcgaagagctgcttcactcctcaaaagaatatgtttccaacagcaagacgctgaaggacgcccttgtccaggacctgaagggcatcctcacgtcgctgacggagagccagattcaggcgcagcagaaaatcatcgacgagcaaatcagggcgcataaccagacgagcgaagaactcggccggcagattggccagcacatcaccgaaggcctgaaggcggcgctcgaagaaccgatgaaggcagtgcagcaagccgtccagagtgcaacgggtgaccgtacgggcgccgttcacaccctgctcacggaagtagtacaggggctgaaccagagcctgaaggacctgtttggcgaccagattgccggcatcaacaccatgcagcagcagacgatttctgcgttgcaaaccgctgtggcccgcatggagcagatgtcttcatccctggaaaccgccggcacgcgcgctaccgacaccatggccgcgaaactgggcgaagccctcaccggcatggaggcgcgccaggaaatgatggcccgccagatggcgcagattgtcgaagacatgaaggcgaccgtcgccagctcccagaccgaaaccaacagccggttgcaggaaacgctggcaggggtgagcgccaccatcgaatctctcatctcgtcgctgtcgcagtccgtcgcgacgtcccaggacacgaccaacgaaaagcttcagggcgcgctcaatggcgtgacccaatcggttgagtcactcatcagctccctatcgcagcaagtagcgagctcccagtctgaagtgagcacgaagcttcaggacacgcttgctaacgtcagcaatgcggtcgagaacctggtgtcaggcctgtcgcagtctgtggcggcgtctcaggcgcaaagcaatgaccgcttgcagcagaccgtctcgagtgtgggcgagaccgtcaatacgctcgtctccgacctgacccagcaggcggcttcggcggatgctgagcatcgggagcggcaggcacagctcgttgcgcaggcagaagccgccgcttcgggtgtgaagagcgccgtggaggcgctgactgccgagatgcgtacgctcgtggcgggcacccgcagtgcggtcgataccatgcgtgcgagcgtcgactccatgcgtaccgtcacgaccgacgcggtgacccggatgaattctggtgcggagaccctctatgtggcctccagcgaattcggcaaggcgggcgcggcggtgagcggcgtgctccagcaggcgacgggcaccaccgacaagctggctgtcgccgcagcctccgtcagcacggccgcccagaccatgcagggcgttgtcacggactatcgggcaacgcgtgaccagcttgcgcagatgctcacggaactgacccgggtcgtggataacgcgcggaccaacgcatccctcaccagtgacgtgttgagccggattgaagcctccacccaggcgctgaatgtggcgcagcgcagcgctgaggaattcctcgagggcgtgggcgacgtcatgaccgaatccctgacttcgttccagcagcggctggcggactccatgaccgacgtgaaccgtcagctggtcgacaagacggcggccgtgacgagcctgctcaggcagaccattgcgaaccttgcgcaggccatcgagctggtcgtaccgaatccggaggcgtaa

SEQ ID NO: 10240 - DNA, 726 bp, Burkholderia pseudomallei
atgctgggtacacgcatcgtcatcaagcgtggcgcccggtcagaggcagaaaagcccttctggattagctacgccgacctgatgaccgccctcatggtgctcttcctggtgaccgtgtcggtcgcactgctcgccgtgaccaagcaggtcagtgaagccgagcgcctcaaggcgcaacgcgaccgggacatcagtgcactgatgcatcaggttgaagtggccgcgagcagatatccgggcgtgaaagtcgaccacgagcggaacgttattgattttggcgaaaaggcccatttcgacaagaacagatatgacttgaagccagaccagcagcgactgcttcgcgcgttcgtacctgaagtgctggctatcgcgcgcaactcgctcggcaagcagtggctcaagcagattgtggtggaggggttttccagccctgagggcgattacctctacaacctcaacctgagtcttgagcgcagccagcgcgttctctgtgtcctgctcaccaaaccgtatccggacgagcacgcgatgagtgacgacgaactggagcaggttcgggacctgttcctggttggcggatactcgttcaatgcggcgaaggcgtcgtacgaggacagccggcgcgttgagttgcggctcgagtttcttggcatcggcgagcagcgtccgtccgtgtctaacgcgccacggggcaatttcgggacctgcgcactgggagcttcgtga

SEQ ID NO: 10241 - DNA, 1818 bp, Burkholderia pseudomallei
atggacctccttgaagagatgcgccgtaagctcgcgcgcggtcccaagcccatagtcggggaatctccgctcactgagctggaccaccaggagcgagaacttgggaaggagatacgggaaaagcgtcccgtgccgcctccgatagacctggtcatcgaagccatcgagcttttccgtgaaacgcgacggcttgctaattcccggcaggctcggcttgtggcgctcggctgcgccgaaccggtcggcaggatgcgctaccgcctgattgaggacggggaatgctttggctacgtactcaagggcgttgaaagcttccgcaatcaccgtgtgacctttcgcaactgctatcagggcctcctggatgcgtaccttgactaccatccggataacaaggggagtctgccggaagggcgcccaaactgggagacgctgcgccgatggcttgaaggcaacatttcggatatccgcgagcgcaacggtgttgacgaatcctgggtgacggaagtggcagcgcacccggatgtcttctccgaatcacccgttgcacggtttggggaggaagcccttcgcggccatcaggaatcctttctgcttttcaggaaggcgctgggtatcaaggactcttcgtggattatcgaccagctcgtccttgagcaggtgcatgcagcggggcgctccagcagttccgaattccggcactacctgcctgggcttatccgcttgctgggaactgtcggcaccgataacaggacacttttcaacaaggcgctcgcgcagattctgacgtactaccacggccatcctccgcttgccgcgcacaaggctttgcaggatttcacggtgttgcattggggcaatccatggctcaagcggaataacagcggctgggtactcgtatcggagcccgtccgcaccatggtgtcgtcgtggctcaagcttcattacatccagcacttcttcagcgtcctcgcacaggagggcaagagtgaccctcgacgtctgaagttctgggaaaagtaccatgaggccgttggcccgctgacgtttgccttggggccccagacccgctggagtaccgacccggacatggtccacgcccgcaagctcatggacggcctgattgtcgacctcgtgggcaatggcgcctcgaacaacaacgcgttcatcatgcagttcggcgactgggtggtcgtggagttcggccagaagggtaacgcctgtttcttcttcaaggcgtcggaccttccgttcgagctgaatcgcgacgtgtctgttcaggccgtgaagaatcacatccagagcgattcagaccgccgatgggacgccgtccgacgcgagcaccgggaccgcaacagggcggactgggaaaccaccttcgagcgggtactgggcgcgcgcgacattttcccgggcaagccgacagtgccgagtcaaccggttgtgcggagttccgctactgacaccgtgcggcaggtcgagacgcgtccaggcaccacccggcatgacgtgaatcgcatccagcatgtggacacaagctcaacgcaacctcagcaggccgcgaatggtacgaatggtcaggcggacagcacgccccccgtatcgcggatgcgggcgcaccggctgacgccgcagcaggaagcgggcgtcaaggcgctatgcgggcggctcggcatcaagtgtgaggaccttcgtgacaaaaatggcaacctgtgggtatttcacgactggccgcgcgattcccgcatcacgcctcaactgaacgaatggggcttttcttaccgggctggcaaaggctggtggtacaaggacccagaataa

SEQ ID NO: 10242 - DNA, 3777 bp, Burkholderia pseudomallei
atgctgaaatggctgaaacgcgcaggcgctgcccgaaacgaggcgccgcccgccgaggtgtggcgccacctggatagccagggcctgctgcttggcaccttcgaatcggtcggtgctatccccggggcaacgccactggcatcgcccatgatgccggcaatgattacgcagctgcacgacgaaggctatgcggtcgccgaggaagccagtgcacgcctgtcatgggagtccctctacaacctgctggacgacccggcctacgctaaaagcctcgagctgctcgagcttccccctgcctgtgactacatcccggaactgaaaagtcatggcagtctgaccagcccggacttcgccataggcgtaccccgctggcgtgacggaagtgggcgcgttctggacagcgccacgcgagctggggcgcttatgcatgtcgctggacagtctcaccttctttcgcgtcgggtgtgggacacggtcgagcaggttgcccgctttcaaagccggccggaatctgagcgcaatgaagagtcgcagcgactgcgctgggggcagattcgccgtactgccatggccgccaaggcgcgcatggacgagttcctctacaaaagcgtcgtccttacgcctgacaccatcgatatccacctgcgcaagacggacgtcggcggtacgaaagtcgttgaaatcatgcccggattcgaaggggcgcctgaaaactggctggaagtcttcgattcgtaccggaacagcgtgcctcaacggtacgacgtcaacacggacaaaggcattgtccaggtgctcatcacgcccgaggtccgcacggtcctcgacaacatccgtcgtctgcccggacgcctggttgcgggctcccgggccgaggctttcctgctgaatccgtttgcgacgctgggcgaagatgccagcgcggtcattgacgaacagcagttcgagcgtgcccgtgtcgaagccaacatcttctttgaccacttcactgcgctcattgagcgggacgccctcggattccccgagaaggtggcgctcgccatcgagacacccggtccgaacgcggtggctgcggaggaacggttttttgcagatgacaccgagctggaagacttcatccggggcgcggagcgggcgctggcgtctgacaagcagttgtacggatggcagggttacgacttcgagctgctgggcgacagcgccgcacaggtcgagctgctcaaggtggcgctcgaggaacggcagcagccgcgcattctggtgcgctacgaggacgtctacgacctgagcgcctatacctcgcgcgtcaacgacatcggcatcgaacagccttactactcgccgtacatcgccaagaagggcgaggaatggtggccggagaatctggtcaacgtcatcgtctacacgccagaagatagtaccgagccggttgccgtgcctgtcaccgatgcggtgcgcgatgaattgcaggcaaaggtcgaacaggctcaggcaacggggcaaacgtccgtcgagttgccgggctttcccaagccgctaccggtgaccgaggcacgggatatcctcgacgcgttcgagcagttcggcaagagtgttcgtgacgggcatgacaagcctccgaagtcgcgcgacgacgagggagggcgcaacgcgcgacccaaggcgaagcagcttctcatcaagcccaatgtcaatgccgtcgactacgaggaaatccgtcacgacatcctgacgacgttctctccggtgcccgcgctgccggccggtttcctgcctacgacccaactgctgccacaccaagacgccggcgttgcctggttgcagcacctcttccgccacgcacccaatcattgtcggggagccgtggtcgctgacgatatggggctgggcaaaaccctgcaactgctgaccttcatggcgcgcgcgtttgaggacgacccggagcttccgcccgcgctcatcgtggcgcccgtgtcgctccttgagaactgggcggaagaaatcggcaagttcttcaagccgggcaccttccggccgctcatcgcatatggcgacaatctgtcttcgctgcgggtgcctcgcgccgccattgacgaagaactgcgcagcgagaacctgattcggttcctccacccggactgggtaggtgacgccaatatcgtactgaccacctacgagaccctgcgcgacctggagttttcgttcgccgcacagaagtggtccgtcatggcgtgcgacgaagcgcagaaaatcaagaatccgaacgcaatggtcacccgcgctgcgaagaagcagaacgttatgttcaagattgcctgcaccgggacgccagtcgaaaacacgctggtcgacctgtggtgcctgttcgaccttgtgcaggccgggtatctcggcgcgctcaacgaatttggaaagcggtatcgcaagccgattgaagcggagacggacgaagagaaggcgcgcgtggaagagttgcgccgtcttatcgagccgcagattctgcggcgaatgaagacggatgtcgcctcgctcccgcccaagcatcttgttcccgcattcgtgccgatatcgaaccttcagcgcagctactacaccaacgcagtcaacgtattcagggcaagcaaggacccggacagcaaggaatcgatagtctcgcccttcaagaaccatctcgggctgcttcagtacctgcgctctatctgtacgatgcctcacgcgccgggtatggggcgattcaagccgcaggcgcttgaacaggcgcgtaacgaagcgcccaagctcgcgtggctcatcgacacgctcgagcagattcgcgcgaagggcgagaaggccattgtgttcgcggagttccgcgaaacccagcagatgctggcgcattacatcaaggaggtgtttggattctccccggacatcatcaacggcgatgtgacggcagctgcaaaacacattgcgagtcgccagaagcgcatcaaggcgttccaggccaagcccggatttggggtcatcattctctcgcctgtcgccgtcggttttggagtgaacgttcaggaagccaaccacgttatccactacacgcgcaactggaaccctgcgaaggaagaccaggcgaccgaccgggcttaccgtattgggcagaagcgggaagtgtgggtctatctcccgattctcagtgcgtccgacttcaccacgttcgaagtgcgtcttaacgagctgctcgagaccaagcgcaaactcgcgagcgacatgctcaacggtacaggaacggttctgccgagcgactggaatcttcaggacatcattccaggaggagcgaatgaccctgtgttcagccgtgccctaacgctcgacgatgtgctgcgcatggagtgggactactttgaggccctggtggccgccatctggcagaagaagggctttcgcacggtgtatcgcacgccgcgtcaggacgagggcgtcgatgtggtcgcgttcacgggcaacaccggggacctcattcagtgcaagagctcaggcactgacgatgccgcccttgactcccagggggtcaaggacgtcgtgtcaggagaggccgaataccggctacgtcacccaggtgttaacttctcgaagtgggctgccaccaaccagtacttcaatgaaacggctgtggaccgcgcgcgcaagaacaaggtgacgctggtgaatcagaaggaccttgacagcctgctccgtcagcatccggtcacgcacggggacgtgcagcgattcctgcacgcatactgggacgaggctgcgtag

SEQ ID NO: 10243 - DNA, 2190 bp, Salmonella enterica
  subsp. enterica serovar Rubislaw str. SA20030553
atgtcctggcttaattccattttagtaacacttacatctgtagacccctataaggtacctgtcactgttatcgtcaccgttacctttgcctttgtctgctttattttcttttatttgctgagatccatcagaattatttatggattaaaaaaatacacgcgatcaattaatagcattgaaaaaagtgcgccagaggttcagcttgagcaccttaagagcctgtttcagcagcctgaactcaagcatgcgtggaatgagttcgaagaatcgttgcactcacaatatgaactggagaacggcgaagagaaaatcgtccgtattcgggctactgcaccgagcgccagcttcttctcggagcaacagctggtcgatattccgctgaacaccgaatttttcaaacacctgcccggtattctgaccggtatgggaattatcggtaccttctacggtctgatgattggcctcaaccacttcgatcctagcacaccagagcaggtctccagcagcgtcaacaatctactgcgtgatgtgctgtacgccttcctgggttctgcatttgctatttttgcttccattctggtcacctggcttgaaaaattatccatcgctaaaagctacaaatatctggaaaaattcaccgcagccctcgactccctgtatgacagcggcgttggtgaggagtaccttgcctcactggtgaagtccagtaatgaaagcgcgacccaggcacgccaactgaaagagagcctggttacagatttacgcgatatgttgctgcatctggccgaaaatcagaaagtcgaaaatgaacgcctcgcaaatacgttaagcgcaacttaccgcgaatcaggttcacaatttgccgaccaggtcagcggtgcgattgaaaacagcttgaagtcaccattggataaaattgccggtgcggttcagaccgccagcggtgatcaaagcggcatggtacaaaacatgctgcaggatgtactgaccgcgtttatggcgaaactcgacaccacctttggtcagcagtttacaaacctcaacgaaatgatgagacaaaccgttggtgcaattcagaccatgcaaaccggtttctccgcgttattacaggacatgcgtcaggtgagcgacgattcccgccagggcagcgcgcagctcatcgagcaactgttatcagagatgaaatctggtcagcaagctctacaagcaggcatgaatgatatgctcaccagccttcaagcctcagtggcgaaaattggcgcagaaggtgaaggggccggtgaacgtatagctcgccaactggaaaaaatgttcgctgatagcgaggcgcgagaaaaagctcaggcagaacatatggctgcctttgttgaagccattcagaattcagtgcaacagggacaaagcgccacaatggaaaaaatggcagcctctgtcggggcgcttggtgaacaactgggtagcctgtttggacagatcgataagggtcagcaacaaatttcagcgactcagcaagcgaatcagcagtccctgcacgaacagactcaacgggtaatgagtgaggtagacgatcagattaaacaattggtcgaaactgttgccagccagcatcagggaacaacagaaactcttcgtttgctcgcagaacaaactaaccggcagattcaggatatgcaagctggcgcggacaagatgcgtctggctgctgaacgttttgaacatgccggtgagcgggtgtcggaagcaaaccaccttaccgctgatgtgctgaataaagctcaatcggcaggttcatcactttcccttgccaccagcgagctcacctccgttgtggctgattatcgtaacaatcgggaagcggttagcaaatccattgccatgctggagttgctcgccgcaaatacgcagtcagaacaaaccacgcgcaaccaattcatcgcagatcttaagcagcacggtgagcgtctacagagctataaccgggaagcacaggtctttatggaaaatgtaagtgacgtgctcgggaaaggatttgaagacttctctgaaggtgtttcacgcagcctggataaaacgctgggtaaactggacgtcgaaatggcgaaagcctctaatctgctcgcgggatctgtcgaacagctcggagaaagcgtcagcgaacttgatgatgttctgtcacgcgtacgaacctaa

SEQ ID NO: 10244 - DNA, 741 bp, Salmonella enterica
  subsp. enterica serovar Rubislaw str. SA20030553
atgtttggaaacgcatttggcgttaaaaaacgccgcagcgatgaagcagaaaaaccattctggatctcctatgccgatctgatgactgcaatgatggtgttatttctggtcgtcatggttgcgtcactgagttccgttacacagcgtattcaacgtgcggagcaaggcgaaaaagcaagggggcaggatatttccagattgtgtgagcgcctggaactgcatgcccgcaatgtgaacaaaaacatcgtagtggattgtcacgataaccgtatcagctttggcgaagccggacgttttgaccataaccaatttttcctgaacgccgaggggcaaaaagcgttgcaggatgtagttcctcttgtactggaagcgtccaacagtgaagagggcaagaagtggtttaagcagatcgttattgaagggtttaccgacaccgacggttcgtacttatacaacctacatctctccctacaacgctctgaatgggtaatgtgtagtctgctcgatagccgcagccctctgcaaaaaaatatctccgcagaacagcagctccaaatccgtaaacttttcctcgcgggtggcgtctccttcaataatgctaaggaaagcaaggaagccagccgccgggtcgagttgcgcatgcagttcttcgggcttaaagataaacgtgataaggccgatgaggtggattttccccccgtcgttaataaagaagtttgccagttggttatgcccctatga

SEQ ID NO: 10245 - DNA, 1683 bp, Salmonella enterica
  subsp. enterica serovar Rubislaw str. SA20030553
atgacacccgccctgaattctctttctcaacgcattgcagcgaggctctcttccagccaaagggatgaccattatctgcataatgatttccacgcgttgaccgcggctactcttgacatggaaaagcggtttgatagggcagaaaaaatcccctcaccgccacaagaaatgcggctggaggctctacgtcgctttcgcctggcacaagaactcacggaacgagagtggcggatggtgttttatggcctcgccgataatgatccattatatcctgaccagccgatcctgctggaggatgatacatttttccccagagtaaacagtgcaatcaaaaaacgtattgaaaccaaaacgttgaaacgccgggattgggcagcactttgttcaagctattttgcctaccaacaccaatcacccgagacaaaccctcactggtgcgtactgcgggggcatatcgctcagggttacctggtagtgaaagccgctatacgacgagaaaaatcgtggatgaaaaccattgagttttatcacgacatttttaccccgcaagcgggaggagtgatctccaggcagttacttgcaggtgagaacaattcactctcatcattagagaaaatcgcgcaaatccctgatagcagttggttatggaagcgcattttcactgtgcttttagctcaactggacacgctcgacgatccccagtttctgagcaaaattagctggttgttaggcttagctgcgcagtgggtgcgtttccgtgatgacatcatgactgcaaccctgactcgctattaccattctggctatcgcgatcagtcacatccagcgttgaagcaggccgcgctggaatactgggataacccccagttgaaaagccagcagaataaatggcatcagtatgtctccgagtcggttgccgcaatggtccggggctggttggcaaaacaggacctgacacatttctttgaacttctgcgcggtaatggcgatgtcgatcaggctcgactgcactactggctgcgtttcgccaatcagatgggatttactcgtatcatcatggggtccgatgcctggcaagatcgtggtagcgattttgtgaaattccgcgaggagaataagggacgattgagttacttacgaggtgggcgtaactttgataacgccatgattatgcaaatcaacgattatctgtttgtcgagttttccgggacaggaaatgcgatgtatgcctatcaaataggtcacgcgccatttaaccctgaatcacgcacgcttgatatcaacattcatctaaaagatcaggggcgatgcgcactcagactcccccatgcacctcgtgctgaggggtataacaaagtccggataaccggctggatgttgaaatacgacgatgagctacgtaagttgggcattcggtggatggctgaagaacccgtcaggtttgtcgataagaaagtgccccctcccgtcgctatgtctgacatcaaaatcatcaacccgttgcgtgatacggctatacaacacctggttaaatgtagttcatgtatcgtcagcgataatcgacataaaggtggcatactgtccgtacaactcattacacctgacgacaccgtagaaagagagttgttacgactaggctttgcacctgtagctaaagaaccgcatcgttactggatcaaataa

SEQ ID NO: 10246 - DNA, 3243 bp, Salmonella enterica
  subsp. enterica serovar Rubislaw str. SA20030553
atgctgaaacgtctgttaagtaaactgacgggaaaccgtcagcagatagaacaccacctaaagaatcagtatcaggttgaggaaaacggtctcagctttccgctatcgctggttgatgattcacagctttgggcactggcatcctggcttgaacaacttgctgaagaagactatctgatatcacttacagatcggtggttattgagttgggaggcactatatcgcctgctggaggatgaggaacatgccagcagcctgcctcttatcggtgtacctgacatattgcccttacgcgcaagcctgagttcacgaggagcattaagcgatagcgattttcgcgtctggattgctgaatgggctacatttccagcccgcaaaccgatccgtttcagtcgtaccggtgccattttaacccatgaaaatcagcaatacctgttatcgcgggaaaactgggcgctcttacaggcaacagaacaactcagtgcacagcaaattcagactcccggcgaaaccactaaccagctgggatgggccgctatccgcaaatgtgcgaaactcgccgccgcaaaatttgatgattatttagaaaaaacgcacgtcatcaaaccaacttcattgtcattacgtctgcgtaaagcaacggttgccgatactgctgttatcgaaattgagccccatttcgaggaccagcctgctaactggctgggcagttttgacaagaacttacaggttcacgatagctaccgcatcccaggagagaatggcgaactcagtcacgtcatcatccctcccgaagtgaaagaagtcctgaattcaatacactcaatcccagggcgtcgagtggccggaagtgaagcactttcctttgttcgcaatccttataccttcctgggtgaggatgccgccagtgttattgcccctgaagaacatgaacaggcactgtttgatgccaggattttctttcatcatttcaggttgataccgcaactgaatgcggaaaataagatcgcagaagttacgctgatacttgagcctgtttcacctgttccccagccagaaatcacttttgtgttctcagcgccctgggagctggataaattcatacagcaactcggtattagcgtcgctgcacagatgcctgccggttcatggcaaggttacgagctggaattaagtcagttcaccgaacagcagtggcacgattgccaggcactgctaactcgctggcaacaagaaattgaaggaaaagaatttagcgatgtgctggatattgcgaagtatggcgatagagtgattggcattggtgaatatgaaaaaatatcctctccctggctgaccaaagcgcagagtgaaaactggcttcctgatgacatcgatttctccgcgttttcaatcgaaacactatctggctggcaacctgaaaatcctctccattttgatgaactacaggagataattactcaggcagaagccgctggtgaaacgtatatcaccacaccatggaatgacagccaattaccgttggatgccgctaaaaccttcagtaagaactgggaaaaacagcaaatcactgctaatgaatatcaaggcaacgttgcagataaaacggcccgagccgtactcaaaattgagcagaatattgaagaaacggcctacatcaaacagcgccgcaattcactcctcaatgcgcgtcatgccgaaccagaaattcctctgagccttaaagagcatatccgacttaaagaccatcaacgtgaaggcgtagcctggctccagcaactcttccttcgttcacctgaggaaacagcaggctgcctgctggcggatgatatggggcttggaaaaacgctgcaaattctgagcttcctggtatggttcattgaaaaattcccgcaagaaccgccaaatctcattgttgctcctgtctctcttttagataactgggaacgtgagctgaacaatttcttctataccgcaggaataccagtattgaaattgtatggcgagaccattaaagcggtgaaatatcccaaacaggccatccctgctcatctgcagtctaaggggatcaaaaacctgcttaaacctggctggcaaggtgaggcaaaaatcatcctgacgacctacgaaacgcttcgcgaccaggagttttctctggcacgccagccatggtccattatggtgtgcgacgaggcacaaaaaataaaaaacccagctgcgttaatcacacatgcagccaacgcggtacaagccaggtttaaagtggcatgcacaggaacgccagtcgaaaacacacttgtcgatctgtggagcttatttgattttgcccagccaggattgttaggggcactaaatgaatttggtaaacagtatgttcgccccatcgagaacgaagatggccgcgatacagaacggctggaaagcctgcgggcgctgatagaacctcagactttacgccgaaccaaagaagaggttgcacgtgatttacctcagaaaattgaagtagaaagctgcaagcaactgacgttgtctggcgtgcaaaaacagctctacctttcgtctgttgcaaattggcaacaacagcaagcactgcgcgaagggatgcagcaggccggaaccggtatgttaggtttgttacaccgactgaaactcatctgtgcacaccctgcaatagttaatccagagccacgttttcgtgataactcacccaagcttaactggctgctgaaaacactcgcagaaataaaacatacctcgaaagataaggtcattatttttacggagcttcgagatttacagcgcgagcttcaacatacaatccaccaaaattttggtttccgccctgtcattatcaatggtgataccagcactaaaagtcaaagccaaaacaaccgccagcgcctgattgatgattttcaggctcagcctgggtttggggtgattattctctctacggttgctgtcgggtttggcgttaacgtccagacagccaatcatgtgattcattttactcgctgctggaatccagccaaagaagatcaggctacggatcgggcgtatcgcattgggcaaactaaagatgtgtatgtctattacccaactgtgagagatactgaaatcacaacatttgaagaaactctggataacctcctacaacgccgacgagcattggccagagatatgctctgcgctactcccgatttgaactgtgcggattttgagaccattttgaagggagcctaa

SEQ ID NO: 10247 - DNA, 1623 bp, Thermoanaerobacterium xylanolyticum LX-11
ttgatttttacaaaatttgtactttttataataaaatcaatcccagattttactgatgttttttgttttggtattgtagttattgcttttattacttacttttggactcataggaaacctaaacgatatgttaaacttattgattcatacatagaaaaaattcaaaatacatcagataaaaatatgttgctagaagaacttattgaattgacagatgagataatagaaaaagaaaaaaatgacaaagatataactgagttgcttaaaaagtttaaaagtatgtgctatagtggcaatataaaaaatgctatagatgtgtttgattatactgccctggttgagattccaggcaagcgaaagatatttaacatgatgccgggtgtatttacaggccttggtattttaggtacttttgttggacttgttttaggtttaagtgatctaaatttttcaggtaatactcaagtactggagcaaggaataaataatttaatctcgggaatgtatcttgcttttcttacatcaattgctggtcttatttcttcattggtttggtcttgggttgataggaagctactcaattattatagaaaaaaaatagacacacttcattctttgtataaaaatatttttgatgagaaggggatagattattatcttaaggaaataagggacattcaagaggaacaaaaaacatacatgcaaaaatttgtatcagatttatctcttgagatcagcaatgtattttcaaatatactggagcagagaatatttcctgagtttgctaatatcgtaaatcaatatgtcacatctaaaattgtggaatcctttgataattcaattggtgagattaaacaatccagcgaaatatctaaacaaatgattgaaaaatttgctaatctagcgtacgaaaaccagctggaaggggttaataagattatcgataagtttattgaaggtatggatacgtcactaaaaggaaaatttacggatcttggtgagtcaattgacgagatgataaagtggcagcaaatggttaaagaaggcatgaatgaactcatggaaaaattgtcaaataacatactgaatttacaagatgttaataaggctattgaaaacgcaattacaaatttctctgattatttcgataaagtaaatgcagctaatgaacatcttgttgaaaacatatcgaagttggaatcggtctctttgaatgtaaatatgcttgttgaagatatgttaaaaatgatgaatgaaattaaccagcaaaaggatttattattaaaagacaaaacagaacatgttcaaattgtatctaattatatatcggaaattaatgaaaagtttgagttactgcagacgagttatgccaatataagtaagaatatcgatattttaaacaacagccttaaacaatcaatggacgagtttgctaataagacgcatgaagggcttaaacgaagtctatctctattcgatgaagagcttgccaatataataagttatctaaattcaacattgagtgaaattaaagaatctgtggatgaattgccgaaggttattatggaatttaagaggactttgagaagtgaagacaaggagatgaatacaattgaaggatga

SEQ ID NO: 10248 - DNA, 693 bp, Thermoanaerobacterium xylanolyticum LX-11
ttgaaggatgaagataatgtacatgattattggcagtcttattcggacttgatggcagcgctacttttaatgtttgcacttttaattgttattatgatttataaatatgctagtattgctgtcgagctaaatgcacaaaaggcaaaagttgatgaaataattggtgttagggctcgcatcataaatcagcttttaaatgaatttaaaaattcagatctttctcttagcatagatcctcaaacaggtgcaataagttttagcgaaggtatattttttgataaggataagtttgagctaaaagatgaaggtaaaagatatttaaatgaatttttccccaggtacatatcgatacttatggatccgaaatttaaaaaatacatttcccagataattgtcgaagggcatactgatgataccggtgactatgtgtacaacctggagctttctcagaagagggcttttgaagttgttaggtatatattgcaatctgatataaaaggtatcgattctaaggtaaaatcggatttgatgccgtatataacagctaatggtcgttcatacagccaattgattattgaaaatgggaaagtaaatagagaaaaatccagaagggtagaatttaagtttcgcttaaaagaagaagaaatgatactggagatgcaaaaagtcctagggaagggttctacaaagtga

SEQ ID NO: 10249 - DNA, 2793 bp, Thermoanaerobacterium xylanolyticum LX-11
ttgataaatatatctaattcgttaactgatgaaggcatcaaaatagtaagtaatgttcaacagagaaaaaatatatttgaaataaaaataccgctttttttaaatccagtagaatactttaaaaacatttcaactaaagaattggaaaaattaaatgtacttgaagacttatggcagcaaggtattttacaggataaagataactcatacattataccttatgaatttttatacaatattgatgaagaaaagaggcgtatacttagtcttcctattgaagataatgctattaaagttcatataaaggcgagaggtatttttgggagtaatgattttaagttgataccagaggtatacgtaaaagatgagaagatggggcctttggatagaagaattaataatataatattacacaaaggctgtatgtatttaataccattaaatctctatagccttttacaagaaatagacgcgtataagccgactgatgatcctatttcacaagcaaagatagttgcaaaggttaaatataaagctaagacagctaatgtgacttttgatagatttttagaaagcgaagaagtttattattctgaaaaattagatgtagatataattaagtatgatgatgatcaccttcagattgtacctgttttaggggatgaaattgatagcctattaaaggacagtaaagataaggtgttaaaacagtacaatactctatacggtgagggtataaaaaggaaaagaatttttttcgaagatgaggttcttaagaattataataaaatcgttaatcgaggacatcttagaggatctgagattcctaagtttctgattgatccatattcaattttgcctgaagatatagatttgtctaatttcagtaagcgagtgaaggaattaggtcttaaggtatacagggctaatccgtacataaatataaaaaaggataaagattccggatggtttgattttgaagtgggaggaatcatacatgaagatgtaggctcttttgatgaagatgttgataatgtacaggagtatggattaacaggtgatgataaaatagatgttcttgaatacagtcagttggtccaaaaggcaattgaaagtggagaagattatgtaaattataagggcaagtggataaagattgatatagagcaggcaaataggtttttaaatatagctaataatgaatcattttcaaaggtgcaaaaaatagatattaccagattgccttatgtcttaaaaatatacgaaaatttagatgatctggaatacaatgagactgcattaaacttgaaaaaacaatttataggtgattttagcacaagagattttacatatcctatgtatttgaagaattgtcatctgtatgaacatcaaaaagaaggatttttatggtttaagggcttatacgaaaatcacctcggtgggttgcttgctgatgatatgggcttaggcaaaactttacaagtaattagttttttatgttatctaaaagaatgtaatgaactaaaacctacattaatcatagctccatatactttgttaaatgtttgggaaaacgagatacgaaagttttctgaaattacttctatatataggcattctggctatcaaagatataaaacacctgagatacttaagaattatgaaattatattgacgacttatgagacgcttgtcagagatcagctgttgctggggcaaatagattggaaggctattgtttgcgatgaagcccaaagaataaaaaacagcacaactttgactacttcagctgtcaaagccttaaaggccaaaatcaaaatagccatgactggcactccagtagaaaataaccttggtgaactatggtgtataatggattatgttcaaccgggccttttatcaagttaccatgatttcagaagaacatatcagaaacctatagaggatgctataggcaataaaaatgaagaatatttagcaataaaaaacaagctattaaatacgataagacctgtgtaccttagaagaacaaaagatggcattttatcacttcctgctaagaatgagatttttcctgaagtagaacttacgacttttcaggagaaactatattgtcagttgatagaaaattacaaaaataacgagaaaaaggaatcgccccttggtgtcttgcaaaagttaatggagttgtgtgcgcatccacgccttatacaagatgacggagatggggatacctataagtttataaatgagtctggaaaacttcaacgcctaatagagattatgaatgaaataaaactaaaaggcgaaaaagcggtaatatttacccattatataaaaatgcagacgatattgagaaaagttatcatggatgttttcggaataaattgccttgtaataaatggtaacatcaaaggcgataggatgagcgttattgataagttcagaaaatctccgggatttaatattattatactttctacaagagctgctggcgtaggcattactataacagaagccaataatgttattcattatacgagggattggaatccagctgttgaaaaacaggccacagatagagtttatcgaataggccagactcgtgaggtaaacatatattaccctatatgtacaagcagcagaggaaaaacagtagaagaacgtttaaatgaggtgttgcaaaaaaagattcaacttcttaatgaagtgattataccatcgagatacgtgaatatagaagaagaaaattacgattatctgttgcaagatttttccgcttggtctatgtaa

SEQ ID NO: 10250 - DNA, 441 bp, Acinetobacter haemolyticus NIPH 261
gtggtctccgacaaacccggtacggttcataccacctctacgcatttgaccagcgcaagcagcaatttaatctctctattaaaagactataaagactcacaagagagtgttaaacaggcaatcagtactttagacggtttaattaaacaagctcaagccgaagttggtatgagtagtgaaatgctgaaagatatgaatcagatgacaactgcactcaatcaagtgaagaaagaaatgcaggattatcttgagcaagtcagtgatgtgttggtgaaaagctttgagagttttggttcctctgtagaaaccagcttaaatcattctttaggtgcttttgataatacacttgatcaagctgtaaaacgccttgcaacgggtgtagaaggcttgggtagttttgtagaagatctggaagatctcgtacaacaaaagaaaaactaa

SEQ ID NO: 10251 - DNA, 732 bp, Acinetobacter haemolyticus NIPH 261
atgttaggtaacaggtactctaagaaaccacgttctaaagatgaaggtgaaaaacctttttggatttcatttgctgatttaatgacagcattaatgaccttgtttttagtcgtaatggctgtgtcattaatggtcgtaacgaaaaaaatcaatgaagcaactcaagctgaaaatcaacgtagttcagagattatggatatttgtactagtattcaaaatgatgccgcgttgaaaaacaagattattgctgttgattgtaaggacaatcgtatcaactttggagaagctggtcggtttggccataatgactaccggttaaatgcagcaggtgtagaggcattaaatacgttagtaccaattgttttaaatgctgctaatagtgaaaatggaaaaaaatggtttaaacaaattgtgattgaagggttcaccgatacggatggttcatatctctataacttaaacttaagtttacgtcgttcagaatgggtcatgtgcagtttacttgatccaaaatttagtcatgggttaagtctgagtgatgcacaaaagaaccaagttaaacaactgtttttggccggtggggtctcttttaattcagctaaggatagtaaagaagcctcacgtcgtgttgagctacggatgcaattctatggtttaaaagaaaaagagaacgctgagccgcaaccccattttgtttcagcgcctgttgaaacatgccaattgacacggtga

SEQ ID NO: 10252 - DNA, 1425 bp, Acinetobacter haemolyticus NIPH 261
atgccaattgacacggtgatagtgatgagtattgcgaatctgaaacgtcgtcttgaagaaaaaataagtgtattttctgaaccaactcatatacagactaaatttgttagacctcagcgtttaatgaaaacattgtctattattgagcataaactcgatgatcttgaaaatgaacaaccattagaagaaaaaattatcaaagcagttctaaaacttgaacaacacgggtttgatgggctgactaaacgagattggaaaaatttggcttggtctctcagtaaaaaactgcccaattatgaagaaaaacttttattcacacctgtaggtgtaagattaattgattatttcaaccaattgggaattgaccaactccagtttgtttattttccattgttatatagctatttttcctttcaagcaaaggaattagaaaaacaacctgatagctgggttcagttaagaaatatattaaatacgaacaaatctttggtatttaaaaattcgactcgactaaaaaaatggatgacgactcttatagataattcagaggttttaaccacagaacctacgaaaaaatttgtacgtgaatttttacaagataatgatgaaaacagagttgctaatcaattagaaagtttaagaatagcttcgggtagttggttttgggatgatttgattcgatctgcaattaagtcgatcaagacaatgaaagaggatgagtattttcaaattatcccacgctttttagtattgcttgaaaaaaataaaatatatacgacggatattttagctgcgcttctagaacgttatgcaggtacttctcaacgtgagaaagtacatgaggtactaaaacatctagcattggatcagtggggaaatcctcaatatgaatcatcagctggatggaataacgtgaatgcagacaccaaaaaaatggtgatacagtggtttgttcgtgcggatctagaggctttctttagattgtttagccgtacagctgatgtagatcgtttcaattactggattaagtttattgataagatatcattttcccagatttttctaggaccagcagcatctagatctagtttaaacgaacatcgaaaatttagagaagccaatagagggagattaaaaaggcttgttggatctacccaaacaaataatgcctttatgttaaaaatagataatatatatgtgtttgatttttctgatactggtaatgcttgttatattttaaataaaattccctatgatcagagacttttagatattcatattcagacacttaaaccttgggggcagtcattgacactaattcacagacctggttggcaaagacgatttgatgagaaacttgctgaattgggcatcttctccagtcaagcaaataattctatttcaggatatagaaagcgatattaa

SEQ ID NO: 10253 - DNA, 3204 bp, Acinetobacter haemolyticus NIPH 261
atgaaattagcattctggaaaaagaaaaaaaatactgaatctgttgcggaagataacttagtggcgagtataaagcctttacaatatgatgaggtgggattgatttatccttatcaacagaatgctaaaaatgatgctgatttttattgggaaagtctagaagaagaagatatcgcgtatctcttggatgagcagtatatattgccatgggaggagatgtttcagcttcagcaagatcccgaacatagtaacgtacttaatttactcaacttacccagtccaacgaatttacatccagtgattcgtagtgagggaggattaagtgatcctgattttaaaatcattctagatggatggtgtgatcaaaataggattaagtctaaaggtctaattaaacgaataggtgccgtactgaatgttgatggtcaagaatatttactgaatgatacgacttggcagcttgtagaaaaagttaaagaatttgctcgtgtttcaaataaagataataagctgaatcaaaagtattgggctcaaatacgaagtttagctaatcgaagccaggcaaatttagatgagtttcttcgtaagaccgttgtacttgcacctgaaaaattacaattaaatctacgtaagaatttgattagtcaggaatcagttgtagaagtacagcccgactttgatgaggcaccgtcaaattggttgcaaacttttgatcactataatcaggtacaagatcaatatagcattagcctaccagatggtggagtcgctcatgtagtcattgatcctcaagtcaaaaatgtactgagtgaaattaaaaagatgccgaataggcgtgtatctggtgaacgcgctcaaacatttttgcataaccccttcgcgcaattaggagatgatgccacagaggtcatctctcctgaaggttttgaaaaatcaaagcaagatgcagaaatctttagttacagcttacagatagataaattttataatgagttaggacattatgtttctgctcaattaactctcaacgaaaattcgggccgtgaacaacaaccgattctgttagaactttctaatttagagcaaacaaaatattttattactgcctatgaaaagccatcaccaattttcatgtgggcgggttatacaattgataaaacaagttatttagatcatcaggttcaagaattaaaaagtgatctaacagaaatccaaaaatatgaagatgagttacaagcacagcaagttttagatctatccaattacagtgatcgggttattggtattggtgaggcacaaaaactaaactctgagtttattcaaagagacagtggtgaatcagagtggttgccacagcatctcattgagttggagcaacaattccaggatcgcttctccgatgaggcaatagaattgcttgaacagcgtatcaaacaggctgagcaagaaggtaaagatcaggttctaattcctaatgcaaatactgaagtctcagtagatgacgctaaaaaattattaaatagtctgagtgattcaaatagaaaagaacctattgaaacattagaagaatctacggttaatttacagaaaaaaaagaaagatacattactcattgcgaataacattgataaagctgagtttactaaacaacgagcagatcaattggtttttgatgagaagaaccatcccccagctagattgccttcaagtttcagaagtcaggaattcggtttaaaaccgcatcaggagtacggagttgcatggttgcagaatctacatcaatatgcaccggaacaggtaagtggctgccttttagcagacgatatgggattggggaagaccctgcaattgttgtgctttattggtgaatacttagaaaatgcaaaagataaaaaaccagttttagtggttgctccagtttcattgttagaaaattgggaggcagaagcaaatcggttcttcagtgctaaatttgctaagatcctaagtctatatggtgaaaatttaaaagatcgaaaaattcccaagcatttaatatctgctcaattaagagatgatcatggtattacgcatttgcttgaagaagattggcgaggtgatgcggatattgtcctcacaacctatgaaacgatgcgtgatctagagttttctttagcgcgagttgattgggggattatggtttgcgatgaagcacaaaaaattaaagtacctacggctatggtgacaaaagcggctaaagctcaaaaggcagactttaaaatagcatgtactggtactccagtggaaaattcactcactgacttatggtgcttatttgattttatacaagaaaatttgctaggttcattgaatgaatttggaaaaacttatcgtcgtcctatagaaaatattgagaatgtggataatgaagtattggaacaattacggaacttgattgcaccacaagttttaagacggatgaaacatgatgttgctgacttaccagaaaaaattgaagtagatcattgtaaaaatattacgatttcttcacttcaacgtcacttatatgccgatgtaattaatcgctacaggaggttgtcagaagaaggtaatcaaggtgcgatgttggcatcactgcacagtatgcgaatgatttgtgcacatccattccaattgcaaccgaatgcttcaattcatgaatcacctaaagtagattggttgattaaaacattagaagcaattaaggcaaagaatgaaaaagttattatttttactgaatttagagatattcaagtattcctgaaacggattcttctagaacggttcggcttaaatgttacaaccgttaatggggattcaaatacaagtagtaaaaaaggtttaacacggcaaaaccttattgatagattccaagcaactagtggttttaatgtaattattttatcaaccactgctgtcggttttggcgttaatatccaaaaagctaatcatgtcattcattatacgcgcagttggaatcctgccaaggaagatcaggcaactgaccgtgcgtatcgtataggacaagataaagaagtttttgtttactacccctcaatagcagcaaatgattttgatacttttgagataaaattagaccgacttttatcaagtaagcgggctctggcggatgatatgttgaaaccaaatactgatctaggtaaggaattgatccgcttaatttaa

SEQ ID NO: 10254 - DNA, 1881 bp, Geobacillus thermodenitrificans NG80-2
ttgtttctttattttcagctcgcactgtttttagctatggctatttggcaatttgtgcgtattcaaagggaaattgcggtgatgaatcaattaaagccgaagctgctggaactgaatcgttcggcaaatggaactgcctacgaaatcgatcaggccattaacgaactttttgttcaagtgaaaaagtcgaaatataaggaattgtgggagcggtattataatcgtgtttcgcaaaaaaatgaggatgaacgtattaatgtggaaccatttttcggctttgatgtgatgcatcatcatatggggtatcggacattgatggacatgggggctggcattcatgtcagccttggtgtcctcggcacctttgttggcctttcggttggactgtctgaattgcatattaacgatacagaagcgttgcggtcggggattggcagtttgctagacggaatgaaagtggcgttttatacgtctgtatggggtgtgttgctttcgcttatgtggacaatgtttgaccgatggattagcagtacgcttgaccgcaatatcgattggcactcggagcggcttgattttttgcttagcacggacgacgaggagttatttttaaatcgcttggaaaagttatctcgcaatcaggccgaccatttaaaaacgctgttgaccgatgcgcttgagaaggcgatgcagccgatcgccctttcacttcagcaatcgcacggcaacctgcagcaggcgtttagccagcttcatgaccagtttgcccagctgcacgaaggaatggaaacacaggcgaagctgcttgagtcgcaaattgagctgacgaaaaatacgagcgctgatgtaacgagtcggcttgttgacgagattacaggtggaacgcaacagtccatcggccgatttagcgaatttgttcaacagtcgcaagtgtggcaaacggaaatgataaaaacaatcgaagtgtttgtcagccgttttgcccatacggaagaacggcaggcgatgacgctcgagcgaacggaaaaaatgtttgcacaatttgagaagatggcggtagaacttgaactaatgaaggaaagctatcagaaaacgtcgggcatgatgaacagattaggggaaacgttccaacggttgcaagagttgacgaaagaccagctccctgttcaacaggaagtaatgcgaagcaaccagttgctcgctcaaaaatacgacgatttgtcggagcgttttacacgctttaatgcgcagatcgaaacgcagtacagccagttgctcgaacagcttgttcatgctacatcttccctctccgcatcgtttcaaacgatggccaaccggtttgatgaatcgcttcgcattcaaaaagaatcactgcatgattcacagcagctactcggcgatgtccagtcagccgttgcagcgctgtcgccgctcgtttctgaactgcgtgaaacgtttgatcacgttcgtgaattgaaggagcagctgcttgaaatgcaggaagcgcaaaaacagcttcttccggagcttgtgcaactacggacgcaaacgaaggaaagcgttgaggaaacgttgcggacgacgaaagtatatatgcaggagatgacggaacaaatcgggatgctgcaagaaaattggacgacgacgaaagagcagttgacgaaaattactgaagctctccatctctcaatgaaagatttcgctgaaaatattgacagcggcttaagcaaaacgtatcagcattttgatgagacgctgacaaaagccgttcaggaagtgagcggactcgtttatcagtttagtgaagtgcagtcagactttatcgacaacttggaagacctggtggatcatttcgataaatggaaagcaggggcttcgtcatga

SEQ ID NO: 10255 - DNA, 672 bp, Geobacillus thermodenitrificans NG80-2
atgaaataccggagacggacagaagtaaattattggatgtcctatgcggatttaatgagcgccatgttgatggtgtttgccttgctgttgacgtttgtcattctcgactaccgcgagttgcttgaagagaaagaaaagaaaatcgaacaagtcgtcagtgtcaaatcagaaattattcgagcgctgacagaggcgtttaaacagtcgaatatgacgattgaaattgaccagcaaacaggagccatccgttttcccggcagcattttatttgaatccgattcggcggaaatctctccggaagggaagaagtttttgcagcaattcatcccaaaatatatgggaattttattgcaggatcgctttcaaaacgaaatttcgagcatcattatcgaagggcataccgaccggaatggaacgtacatgtataatatgtcattatcacagcgccgggcgtatgcggtgttagaatatatttatagtaaagaattccctaactttaaagaacgggagttgtcgaaaaaatatattaccgcaaatggccggagcttcagtagtccgctgacagacgaaaatggcaagtatgatcctgaccgctcgcgacgagttgagttcctctttcgcctcaaggatgatgaggcaattaaggccattgaaaagttggtgaacgaatga

SEQ ID NO: 10256 - DNA, 1281 bp, Geobacillus thermodenitrificans NG80-2
atgaagtatgagtatgaaccggtattgttgaaaaggtggttgcgcgagccgcgcccacctcttttggagaaaacaatagaaaacagcaacgagaaatatcgaggtgtgctcgaacgactgtccgaccaatttgcagggttagtccatgcgccggcttcggcgttccagcaatgggtcaaacagttgtcgcggcgggaaaagcttctcttgccaaacttatataaaaaagagcttccggaagagattaaaaaagcgatgattgatgtgattcagcaacacgttcagcatgagcgccgcctttttcgtgtgttggtcgatgttatgtatgaaacgtgtgatttggatgaaatttggaagcttttacgctatgcttatgcctcccatatcgaaaaaattgaaaaaagaatggaaaaagaaaagagagaaaaatggcggcgttatttgttaagcaaagacccgattgtatatttggcgacggaggtgtatgaaagtgagaaaggcattttagaggaattggagacgttttatttaacgaaaaatttcccgctgtttaaacttgtgctgatggaaattttccagctggctgatgaatctttttttctcaaggaacaagatttatatcgggaaatgttcgtttcttccacaaatgaacagcaacaaaaaatggcgcatgaactaattaaaaagtgcaagctgaaccacgtcaaaccgctcgggagactgatattcgagaagctacaaacatatcggagaaagccgatgctatggaagtatgtcggggaagaggaaaagcgacggtttgcccagtggattatgaaactggaattgaaagaatttttcggcggtgtgaataaaaatcatgaacgtttccaatattgggagaagtttattccaaagttggaggatgtcgtcgtgacggatgaacgcacgacattaattatgtattttcgtgacgttgtcattatggaagtgcttggaactggagcggtttatatttaccccgccgacgtattccaacgccattttcagccgaaaattgaccggatgcttgccgaacgcgagcggtttgtcaacaaggcgtggctaaaagtgcgggaagtgaaacgaaccgagttgatggatagaaatttgacgattccgggcggctggctgcgccataatgtcgggtggcaatggaaatttgatgaatggcttcgccgcgaactgggctgggaggtaagaagggatgttcttcttcaaaaagaaacagaagatgatgaaagcagtcttgacgccgaatga

SEQ ID NO: 10257 - DNA, 2625 bp, Geobacillus thermodenitrificans NG80-2
atgttcttcttcaaaaagaaacagaagatgatgaaagcagtcttgacgccgaatgaagacggggttcatctttcgtttcaactgcatgatgggaagacagtcacagagttgcagctgccgatggccaaagaagagatcgaaaactactacaaacttcaagggtttccgcagtatatcgcatgggaagaactttacgattctggtgtgctcgtcgattccactttgccgtatcgcgagtattatgaactgcttaaggacgaaagtgccaaagaggtgctccaacatttagggcttcctaatgtcgaggagcaagtgagcggaaagctctcgctccgttcgttgccccatgaagcggacttagttttgcaactgtttgatgcaaacggacgcaacttagaccggattgggaagcaggctggggcgatttacgtgctgccagatcgtctcatgttgctcccggaacgcgtatatcggttgaaacaagcacttttggaatcatacgaatcaggatacgaaaaaatcggcatttgccaacagctagccaacgaagcggggattgaacttgagaactttttgcaaaacgaaacatatcacgtcgttgatacatacgatgtagacgtcgccgtacaccgccatgatcacatcgagctcgtcgtcaaaggacgagatgaggaagaaacacgccatcttcaacaactacaacgggtcagcagcgtaaaaaaaggtcatgggcgcagccgtttcgttagcacgaagcaggttcatgccgatatgatgcatttgcagcaaaaacggcatattacgggagaagaagtgccgctgtttttggaaaatccggccgccgtcctgcctgagcacgattatttatttgatttggatcagttttcagaacgggttcgcggtctcatcccgattgaacgggtgcgtcctttttttcatgagcggaccggaatgcaatggtttgatgaggagagcggccatgccgtcccatacgatgaggcgtttttacgggagctgatggaacaatatccggaccaacaatatgtagaatacaacggaaaatggatttatctggatccgttactgcgccgaaagttgctgcagctgccgaaagacgccgatgaagcgttgaagcggcggtatattcttgatattaaagataacgaagaacaacttgaatacaagatagacagcgtccgagagacatcatttcggcgctatccggttccatccgagctgcaagcggcgctttttccgcatcaaatggaaggctttgaatggctatgtcatttggcggagcaggaaagaggtggcctgcttgctgatgatatggggcttggaaaaacaattcaagtcattgcgtttttactgcatcaaaaagcaaatgggtcgttgaagccgacattgatcgtcttgccgattgcccttattgagaactgggtggcggaaatcgaaaagtttgctccaagcttgttggacagtttatatattcataaaggaagtgaacggctggcttcgtcgcaactcatttcacagtttgatatcattttgacaagctatgacacgctcaaaattgaccagctgttgttagggaaaattgaatttcaggcgattatttgtgatgaggcacaaaacattaaatcccacactagccagcgctcacgcgccattcgcgccatgcaggggcgttttcgtttagcgatgacgggcacgccggtcgaaaatagtttagacgaactttgggcgattatggactttgtccaacccggcgctttgggctctctaaaagaatttcgcttccgctatacagaaacgtcggactatgatgcgctgcttatggccatccaaccgtattacttgcgccgcacaaaacaacaaattctcgatggccgtttgcctaaaaaacaccttgttccaccaatttatgttgaggcttcaccaatacagaaagaaattgcccggtcaatgttggccacaaaagagagtggtcaggtcgccattttgaatatgattacaagacttcgccaactgtatggccatcccggcgcgatcattccgaaatatgaacagctctcttacaaagaagtgccgaagctgaaagaaacgatgcacatcattgaagcgattcggcaaaagggagagaaagcactcatctttactgaatttcgcaaactgcactttcttctaaaacgaatctttatggagacatatggtatttctgttccggtgattgatggcgacacgaaaaatcggcaattgattgtccaacactttaacgaaacgcaaggcttcggtattatgattttatccccaaaagcggccggcgtcggcttgacaatcacaagtgccaaccatgttatccattacacacggtggtggaatccagcggtcgaaaaccaagcaactgatcgtgcatatcgcatcggtcagcaaaaggacgtgtatgtctaccatattattacgagggacagttctcactttccgcagggaacagtagaggaattgatgcatgaattgcttgaaagcaaacgccatttggccgaaaatgtcattattccgtttaatataagcgagatccagcaggcagtcgctgagaaagtggtggagcaaaggcagcttgtgtaa

SEQ ID NO: 10258 - DNA, 2292 bp, Rhodospirillum centenum SW
atgttcaaggcgatctttgcagcccttgcgccggtcgtttcgaacgactgggtgatcggctcggttctggtcggactgtgtgcctgggcgatctggtcggggacgcggttcgtccgcgccacgctccgcttccgcaaggccctgtccggggcgcgggcaacggtcagacagtcctccgacgcggccgccttcgcagagcggtacggggagatcgacacggccctggccgaagatccggtcctgggcgagcgctggtgcgagttccgcaactccctgctgctgccacgccagcccggacagccggtccgcaccaccgtgcggccgaagacctggttcgatgtcggcctgctgcattcgatgcccggcggcgtcaacctgcgctaccacaccgccatgccgaacctgctggtcggggcgggacttctgttcaccttcctggggctggccgcagccctggggtcggccggcgggatcgtggccggaacggcggagatccggaacgaggcgctgcgcctgctgctgggcacggcctcggccaagttcgtcacctcgctggtcggcatgggcctgtcgatcacctatgccatcaccaccaaggtcctgctcaagcgcgtcgaggacgatctggccggtctcctctccgccctggaggcccgcattccgctgatcaccccggccgacctgcaacgggagacgaacgatctcctggaacggcagaccgaccggatgcaggcggtctcggccgacctggccgccggcctgggcagcgccttcgaccgtgccttcgacgcgcggctgggcgagcatgtcggtccgctgacccaggccatgcagcagctcgccctgggcctgggctcgcacaacgagcaggcgatggccgccatgctcgactccttcctccaggggctgcgcggcggcacgggcgagcacatgcagcaggtcgtggacagcctctccgggctgggcagccggctggaaggggtgcagcaggggctgggcgaggccgcggtgcggatgacccagtccgccgacacggtcgccaaccgactgggctccggcaccgaggcggccctggcccggatcaccgatcagatgggcgggctggccgagacgctgggccggatcgccgagcagagccggaccaccggcgcggaggccggggagcggatggcggcccggatcgaagcggccgccgccggcttcgaggagtcggcccgcaacgtcgccaccctgctggaacggacggccgcggccgtcgaaggcagcatgggccggcagacggaggagaccgccgcccgccttgccgagcgggtggaggcgatgacggcggagctgagcgccctggccgccagcagccgcaccgccgggatcgacgccttcgaccagctcgccacccgtgtcgcggaggccagcaccgccctggaacgcagcgtgggccggatcggcaccctgctggaacgctccgccagcgagggcggcgacgcgctcggccgcggggcggagaaggccgtgacccggatcagcgacgccaccgaaggcatgcgcgcggaaatccaggcgatgctggccgagctgcgggcctccgtcggcacggcgggcgaggcgctgcgcagcagcggtgccgaaggggccgcggccttccgcgacgggctgggcgacgccggcggctccatcgccgcggcggtccgggacgcggccgaccggctgggccgcgccgggaccgaggccgcggacgcgctgggccgcggcggggagacggccggcacggccatgcgcagcgccggcgggctgctgggcgacaaggtcggcaccctgacgcacgagatcgcggccctggccgccgccgccaacgccctggccacccgcagcgtggagttcgagcgtgccgccggcgcggccgccgggccgctgctccaggcctccacgaatctgagcacggcgggccagaccgtccggggcacgacggagtcgctgggaaccgtcgtgcaggccgtggggcgggccatcgagcaggtctccgaggcgtcgggccggctggacgcggccacctcggcggccggtcggctggccgacggtctggcgacagcggcgaagcggttcgaggggatcgacggcgatctcgcccggacgctcgccgcgttgcaggacggtctccagggcttcgcccgcgagatcaacggcttcgtcagccagaccgaccagaacctcgccaaggcggcgacccagatcgccgccctggtcaagggactggaagagacgctcgaagatttcagtgcggaccagaaccgctga

SEQ ID NO: 10259 - DNA, 945 bp, Rhodospirillum centenum SW
atggcgatggtcaccggcccggatgaggaaaccgaagaggggtacttcgcctccatcagcgacctcatgatcggcatcctgttcatattcctgctgatgctgaccgtgttcgccctgaatttccgcaatgcggaggagaaggtcgtcgatctgtcccgttacgaggaggtcgtgaacgaggcccgccgcctgacggaagaggcggcgaagcagaagcaggagaacgaggaactgcgccggctgctgacccaggcggtggcccagcttgagcgcgacatcgagagtcgccggagcatgcgcaaccagatgctgcagtccctggaggcgagcctggacaggcagggtgtacgggtgaccctcgatccggaatcgggtattctgcgtctgtcgggcgacctgctgttcgaaaccggcaaggccgtctaccgggaagaggcggaccggacggtcaaggtcatggccgacatcctgggaagcgtgcttccctgtttcgcggaaggtgcgtcggtggcgtgcccgggtgagaggatgccgatactggaagccgttctggtcgagggccatacggaccgccagccgttccgcaacgtgccgcccgcccagtcgcaggcgctgaacgaccggctgtccacggaacgcgccctggccgtcttccagagcctgcgcgagaccagcccggtgctggagacgctgcgcaacccgagcggccagccgcttctgggcgtttccggctacggcgagcgccgccccctgcccgaggcgcaggggacgacggaggaggattaccgccggaaccgccggatcgacctccgcttcgtcctgtcctcccgcacctccgacgagctggagcggctgcgcggtcgcatccatgacgttctcggcccggaccaggaaggtcagggccaggaccatcagggccaggatcatcaggggaagacgccatga

SEQ ID NO: 10260 - DNA, 1455 bp, Rhodospirillum centenum SW
atgagcctcatgcgtgaggccctgatctccttgcaggcgacggctggccggttgcctcactacgcgatgctgcccgatatgccggagagcggccggctggtcacggccctggccggcgccaacgccgccccggcgccgccgggcgacgacatgctggccgcggtgcgccggcgtctgctggaggcggcgcgcggccccggcggggtggcggcggcggcgccgcgggacctctgcgatgcgccctggctgatgtggggcggcctggacccgctggccgggctgaacggcctgctggaagccgtgctggacgtctgcaaccgccgcaaccgggcccgccgcaccctgatcgaggcgtggatccgcaacttctcctacgacatgccccggatcgcggaggccggcaacggcatccggcgcctgatcacggcggcccgccggccccggctggagccctggcgggacgcggacgcctggtgccggctgttcgacgcggcggacggcccccgcaccctggcgcgctggatcgtcctgaccgacgagccggtggacaccctgctgggccgcgcctgcctggacgatccgatgcgcgccagttccggctatgcgcggacgatccaggccgaggtgctgtccctggtccccgaccatctggccggccccgcgggcgcccagcgggtcgcccgggtggcggatttcctggcccccggcgacagcctgcgcttcgacgagccggagagccgcggccagatcgtccgcagcctgatggcaccctggctgaccgggcggtccgggctggaggagccgacccgtgcggcggtgcagaagttcctcctggcccggctcggcgatccgcgcacccgtcccggccagtgggtccgtgcgggcgaggatgccgtcgcgctgatggagacatggctgtcccgcgcggcgctgggcgccttcttcgatcttgtcggggaacagaaccacgatccggactggcgctaccgcgaagccttctggtcggcctgcatggaggccggcggcatcgacgacgcctggctggcgctgggccggaccgtccgccgctcggcccccgccctgcaccatctgaagggcgcctatggcgaactggtcggccctggctttcacggcgaccagacggtgctgctgctgcgcgtccgcgacaccgtcttctgcgaatggagccatgccgggaagctgcgggcctggccggccgagggggaggacgccccacggctgcaccgcgcgagctatacccgtcccgacctgacggcgccgtgcctgcccttcccgccgaacaagcgccactgggcacgcggcagttcggacggcaacggcctcagccatgtcggttcggaatccagccgctggcagggcagcgtcgcccggctgctggaggagcgggcgggcatcgcgctcaccgctgccgactggatgccgggccgggcctga

SEQ ID NO: 10261 - DNA, 2004 bp, Variovorax paradoxus S110
atgaacgagatcgtcatggtgcttggacgcattcatccttcgcttgcaaccttgcaggggatgccgctctatgtctttctgctggttggtttccttaccggtaccttcctactgggttacgcaatcaagggcactcaggtttggtggcagctttggtcggtcgcgcgaaaggttcgttcgttccgaaatgacacttcgcctccttcgccgcttgatgtagggcgggcattcaaatgggagccactgagacatctgtgggcggaatatgcggacacgctccacgagttccgtaaggctgggtcgagtgcgatgacgctcacggaagtgcgtgcaacagtgcctgcggaggcaatgttcacacgtgaggtgctggtggatggacggttgtttgatgatttcaccaggcatcttcccggcgttctgactggcctcggcatcatcggaacgttcgctggcctactcgatggccttcgagagttcaagccaacgcctattgaggcagcggtcaatggtcttgagccgttactgctcggtgtgcagcacgcctttgtcgcatctggcgcggctattgcctgcgcaatgggcgtcgtcttcctcagccgatttgtgctcgcgtatctttatcggttagtcgagcacttaacgcatggcatagacagcttgtattcaacgggagccggcgaagagtacctttccagactcgtcaagtcatcggagcagaacgctgccaccacagcgcagttgaaagacgctcttgttgaggatctcaacaagatgatgacgaatctggtggagcgtcaaattgcagctcaagaggcctcggctgttgcccttggaaagcatatcggagatagcatttcgcatgctatcgccgagccaatgaagcgcgtaggtgaagcaatggaagtcactgcgaagggcaatggtgaccaagtcaattccatgctcgagacgctgctcacgggattcatggccaagctggaggatacgttcggtgggcagatgcggggcatcaatgagcagatgcagcgatcgatggactcgatggctgctgtacaagcttcgctacagggtctgctcgcagacatcatgaagaccaacgagcaggctgcaagtcagatgagcgggacactagaggacgccatgagaaaggcagctgacaaccagcaattactgacagatcagatgagggaatttgttcaggatttccggcgccttgttacagaggagcagagcaagtcaaagcaagccatggatgaggcagtgatgaaggtcctgagtgaagtcgcaatgtccatgcaaagtctcgaaggcctgcgcaggactgcagcgacggaagagactggccgtaacgatcggttggctgcccagaccaaccagctggtcggcggactgacgactcaggtggagacattgctgggcaccgtttccgagcaggtcacaaagacccagcagaatatcgatgcgctcgggcaggtttcgcttcgggcgatcgatggaatgaaccaaggagcgctgacaatgggcaccgcagctcaacgcttcgagactgcgggtggtgcggtcacgacggtgttcgaccggtcctccaaggtcgccgacacattggttagtgcttcgacatcactccaagccgcctcgaccgctgttcaacgtgggttcgaacagtacgactccacgcgcaggactgtggatgcacaagtcgcctcgctgattggtctcatcgagtccgcaaagaaagaggcgggggtttctcaagagcttgtggcgaatatcaaggcgagcgcagacgcgatgcgcaaatctgaagcggagagtcgagagcatttggacagtgtgaatgccgccctcgtaaaggcgttcacggatttcggaaactcgctcgtcggccaggtcaagtccaccattgcggagacagatcggcatcttgcacagggaaccggccatctgaacggagtggtgcaggaacttgccaatgcggttcaacgcatgaagagggcttga

SEQ ID NO: 10262 - DNA, 705 bp, Variovorax paradoxus S110
gtgctcgcccgcattgttctcaagcgaggaggcaagcacgagggggaaagtccattctggatttcgttctccgacctcatgtctgcactgatggtgttgttcttggtggtgatggcggtaactctggtggcagtcacccagagcatcgactcggcgacccgcgccaccattgagcggagcgccgccatcaacaaagtgatggcgatgattgccaacgacccgaagagcactggcgttggcgttgatcagcagaactaccgcatcaacctcggcaaggaggttcgctttgatagcggtagattcaccatcagcgttccggccgctcagttccttcggagttacatcccagtgctgttgacagcgaaggacacgccagagggcatgcgctggatgcgcagcgtggtcgttgagggattcaccgacgaggacggtacttatctgtacaacttgcaattgagtcttgaccgcagccgaagtgtggtctgctcgctctttcagagtgccgctggcaacgatagtctctcggcggaacagcttcgaaaggtccaggagcttttccttgtcggcggctactccttcaattccatcaagaaagacaagtcggagagtcggagagtcgaattcaaggtcgacttctggggcctggaagaaaaaagaccggaggtcacggacgtacttcaaggtaaggagttcgggaaatgctag

SEQ ID NO: 10263 - DNA, 1725 bp, Variovorax paradoxus S110
atgctagccgctcgtggcctgcagactcttgcctacgacttggcggctgccatcggatcgatggggctacaggcgggtggattcggcaagccggaattggtagagatgccgactcgtgaggctgaacgcatcttccagggatatgcgaaggccaaacccagcaaggaggatgcttatgctgcggcgagggcgtttcttcgcgaccaagagttggactcgtggcagtacgacctcatcgcagctgcggtcgcggagcctgttcgagagcaagctggagcaatggttctcgggtccacgcggtttcccgcgctgatcgccggttacgaggaggaggcaggccgtggcgatctatggcgtcttacctggcacgggctgctctactcgtacttcaatttcgatccgagcgccacgaaagacgaagcctcgcgcagaggttgggaggcgctgcgggctttcttggagcgtacctggccgctgatcgaccggcaagccggcaatgttctggtgccagactgggtcagtgtccttcgcaaggaatccgaggtactgacaataaatcccgccaacaagtacgcccgagcgtatttgcgtggtgactcggcagcgacggagcaactggcggccgacctcggtattcctccgtcgagttggttctggcacgctctagtgctgggcgcagtccgacaagcgatctcagatagtgaggctgagttccggcgcctcgttccgcagctactgcagcttatccacggcaggccggcatttcgcgatgaggcgctcgaggccattcttgttcggtactacggatgcaagggtgcgccgcaggatgagcgccttagggactatgtttgtgagccgacggtatggaagaacccaaagctcaaggcggcgggtatagccacagcgtggaatcgtgtgcccgaccccgtgtggcacatggtcctcagctgggtcaatgagcgcaatctcaaggactttttcgatatcctcgctgcgcgcaacaaggcagatgaagggcggctggctttctggtcgaagtacctcaagcagatcacctggacgcggctcgtgttcggcgcggacacgatggcgctcaagcgtaccaaccaagggatccgcgagctcatcgcgcgggaagagggcgcgtacgcgcaactcacgggcaagagggaggtggacgctttcctgatgcaaatcggcagctatctgatcatcgagttcagcaagaagcccaatgcttgctacgtctaccaagctgaccaactgccgttcgagccttacgcccgtcactatgacgggggatccgatgatttggcggcaggctatcgtcaggatcaagagtgttcggcccgcatcgtgcaccgagagggttgggaggggcgggcggccgaggagttgaagcggctgggcattcggccggaccaacctgaggtgcagagggtgacgcccactcggactgcaggcacgtcgactgggtcggcccatacggtggacgcatcgacgaggcagcgaactactgcgcagcgtgaaccggacatggcgatccttcgtgctctgatcgggcgcttccgcaacgcatcgatcaacgacaagcgcgagggcgcaagcggtggacggctctgggtggacgacccgcttcagcgggcgtcgttggcgaccgagcttagagcgatgggcttcagatgggccaatagcaagcaagcatggtactttccggagacttaa

SEQ ID NO: 10264 - DNA, 3876 bp, Variovorax paradoxus S110
atgggcctttttgatcttttcaagcgtgcggtgggaacaaaggcggacgagccaacattgaagtccacctggacgagccaaggtgttcgcgttgaattcgctcaagacttgcaagagcccacgcctgaaggccttttggaagccatccacaacgctggtcctgacgactctgtccttggggtctaccttgcccaactctctcgcgaagggagatgcaacctggacctgaaaggtgcgctcatacgctggcaagacgtgtacgagcttcaaggatcagtggagcacattggcgcactccaactgctcggcctgcctccgcaggggccgttgcgtcctgtacttgactgctcggggacgctatccagtcaggacttcgaactggaggtagtcgcttggacggatggcatccagcagattcgcccagatcgtttggaaggcgccatcgccattgtgggtgatcggtcgcaaatgctctcgccggcaacgtgggcgacgatgttcgaagttgccgcttttggacttcgcagttcaagcgatcgtaaccagcactttcaagagcttgcctgggggcgaatccggcgccttgccgacaaggccggagcgctttacgcaacgccataccttgagacgacatttgtcgtgacacctgacaccctgagacttcccctctcgaggcaggaaactccgtttgggcgggtgctgacggtatcgcccaccttcgaaggggcccccgatggatggttgaccgcattcgatggcttcaactcagttcagccgcactacgacctgacgagaggggcgggaagggtccgcgttgtcatatcggagccggttcgcaaagtcctcaatgtcattaagcgtcagatgccgggccgtcgagtggccggttcgaaagccgagaaattcgtgcacaacccgtttgccttcctcggagaggctgcatacgaggtcctgcgagaagacgagttcgaggcagaccgcgccggggccggcgcggtcgcggccgttttcagcgtcattggccgctttgagcatggcagggtgaacacagtggacctactcgtgacggagcactacggcgacggcgcggctaggacggagaccgaagcattcattgcccccgagcaactggagcgttttcttgaaggtctcaaagcagcgctcgagcaagagcgcgagcgctttccgtggggggagtacgaccttagcctggatggcgagtcaacgacccagctggagcaaggtctgcagcttgccagcctgtggcgaactcaaccggccgagcgcatcaacttcgacgacatctatgaacttgatggctacagtggtcgcatcgaaggcattggcgtggttaagcccgtttacgtgcccgtctttcagcgggacaagaaagagggcgagagcgaggacggctgggttccctcggatctaacgccgatggttagggtgactctgcaaggtcacgagggtcaagtcctggtgccgctgaccaagcagtgggtcgaagagttcgatatagaggtcaaagaggcggaggacaatggccaggcggaggtgaagaaccctagtttgcccacggccattgccacaccgcaagctcgaacccttgtcgacagcttcaaaggcatggttggtgctcaggaacggctcaagggcgaaaagggaagcatgcccgctaaggagaagcgaccccgccagaccctcctggtaaagaccaactttcatgacgtcgactactttgaggcgcgccgtgccacgttggctctgccccaagattggagggctgagttgccgggttgcctgcgtgcgggcatcgagctgaaaaagcaccagatgtacggcgtggcctggtttcagcacctggtgtcgaaggggccggcggaatgccgtggcgctcttttggctgacgacatgggccttgggaagaccctccagctactttcggtgctggcttggtactacgaagccaacccgaacgccgctccgtcggtcatctttgcccctaagagcctgcttgaaaactgggcaaacgaagcggggaagttttttaccccctcgttcccggaagttttggtgctctatggcaacgaactgaaggctcgtaagcaaccgataaatctcattgacagtcaattgcaggacaggggtatcgtcgagcttctgaagccaaactggtcaggcgcggcgaaggtcattgtgacgacatacgaggtgctgacctcctacgagttctcgctcgccaaacaggccttcgccttcctcatctgcgacgaggcgcaacgcataaaaacaccgggcacgttggttacgctggcggcaaagaagctgaaggcagattttcgtatcgcctgtacgggcactccagtggagaactcgctagccgatctttggtgtcttttcgatctggtgcaaccgggcttgctaggcgcgcttgaggcattcggaaagacttaccgacgccccattgagtgcgagaccgaacagcagaaggaggcgttgacaggtttacagattgccattgcgccccagaccttgcgtcgtacgaaggcagatatcgccgacgagctgcctaagaagtatttcgcatggaagaaggttggtcttgggacgctgagcttcaagcacttgctggatgaagaggagagactcgaaattgcaatgaccgagcaccagcaaattctttacaagggcggactcaaaaaattgcaggacgcagccaacgaatcgaatgggcgcaagcgagcacagttgtcctttggggcactgcatttgatgaaggcggtgtgtgccgagccgtattgtttgccaggaacgaagttcttggttgacaggtcagggcgcgacgttcacctgcgcaactcaccaaaactccaatggctgcttgagcgactcgttgttgtcgaagcggcgcaggaaaaggccatcgttttcacagaactccgtgaaactcaggccgcgctctactatttcctcaaagagactttcggtatccgcccgttcatcatcaatggtgactcgcagggcaggcaaggctacatcgacaagttttcggcaaagagtggctttgacgtcatcatcctctcgacgttggcagctggcgctggcctgaatgtcacagccgcgaatcatgtcttccatttcacgcgtgcctggaacccatcaaaggaatcgcaggcaaccgaccgagcgttccgcattggccaggagcgagacgtctttgtctactgtccaacagtggtcgcagacaacttcaggacattcgaactccgccttgatcagttgctcaagcgcaaagcaggattggccggttcaacgttggacgacggaggtctggctgccatgttgaatggtacaggtagcgatgcaaccttaacggaactggttggcgaaggggtgaatggtgagtcgctccctaagcgctatctgaccatggacgatgtcgatcgcatggacggagatggcttcgaggttttttgctgtctgttgtggagcaagctgggttttcgctctacggtgacgaccaagcgcggcggagacgggggcatcgacgtggtggcgttaaacggtcgcgaaggagcactacttcaatgcaagagctccaagtcagccgcggtcggctgggatgccatcaaggaagtcacagcaggtgctgctaggtatcaggctcgattctcgggcacacgctttaggcggattgcggtgtcgaatcaaaacttcacgagcagtgccgtcgagcaagcggaggcgaaccacgtcgaccttgtcgccaggatgcaactcgaagagtttctggggcgacatccgatgaccaacctggagttcgatgaggcgctgctggagtggtcacctgggaacgcgaccgtgttggcgtattga

SEQ ID NO: 10265 - DNA, 1818 bp, Methylomicrobium album BG8
atgttagactccttgttcgcttttctcccccggcaattcgcccaatggctggatattcccatcagcggcaatccgcggatggtgatcaatgtggttgccgtgctgttgctgttatttttggtttggtacgtggggcaagcggttttttccctggtgcgcctccaatcggccatcggcgccttagcggctctccggcggcaaaaagccggcggtgaaaccgtcaccaaagacgaattggaccggatattccggcaccgtttctttgccggcgtttgggataccttccgagacaccctgcacgagcagtacgaggaccgaaacgcgcaaggacggatagtccgtatccgctcgaccgtttccgccgaagcgatcttcagcccccaattgctcgtcgatgcccgattgaacgtggagtttttcaaacacctgccgggcctgttgaccggaatcggcattatcggcacgttttacggattgattcacggcattcagcaattcgacccttcgctgctggccaaggcgagggccgacgccgcccagatggaaaagcttttcctcggtttgaaaagcttgttcaccgaagtccagggcgccttcatcgcctcctttttcgccatcggcgccgccatgacggtgacgtttttcgagaaggtattgctcaatctttgctatcggcggctggaagcgctgtgccgactgctggatacgttgtacgaaggcggcgtcggcgaagattacctggcttcgctcgtcaagtcgtcatccgaaaacgccgtccaaatgagccaactgaaagacagcctcgtcgacgaactgtccgccgtgctgcaaaatcagaccgtgcggcagatcgaacaatcgcagcggctgggcgatttgctgtcggcgagaatccgggaacatatcgaatcggggagggagcacggcgaccgggttaaccgcatactggagagaggcctggacgacatcggcaataaaatggcgcgtgtcggccgcgaacagggcgctacggtgaccaccaacctggagcaactggtccagtcgtttgccgacaaaatcgacagcgcctttgccgaccgcatgctggggctggtcgggatgatggacgactcggcccaatcgatgcgggacatgcaggcgggttttcacgaacttctgcacgaactgcgccggtcgggcaaagccgagcgcgaagagctcactacccacatggcgtccctggtggatgtcctcggcgcctcccagggaacgctggaagcgcagctggccgacacgagccggaccttcgccgcggctatcgaaaaaatgaacgatagcgcggcgcgcatttcggaagccacccaacgtttttcgctggccggcgacaaagtggccggtgtgctggagcgcgccgagcaggtctcgctgcagcttgcccaaagcggcggcctgttggaaaacgcctcgcattcggtcgcggccattttggagcagtctgccggaacgcgcgacgccctcgcccaaatggtcgccgaaatggcaagcatgctcgaaagggccaaacaggaggccggcatgaactggcaaatcgttcagcagatgcaggcgacggtggaagcgttcgaacaactgaatgccgaggcggataaatcggtggccgccatcgccgagaagctggcggaaaccctggcgaggtttcgggaagaaatggcaaggcacgatgccgagtttcacaagcatcacgccgacacgctcaaccaggtcgcctcggcctacgagccgctggcggcttccatcggcgggcttgccgacatgatgatgcggcgcggggaaatctga

SEQ ID NO: 10266 - DNA, 696 bp, Methylomicrobium album BG8
atgctgtcgcgcggcacacctctccccaggccgaaggaagaaggcgaaaagccgttctggatttcgtatgccgacctgatgacggcaatgatgatgctgtttctgatcgtcatgaccttttcgctggtcatcatcaccaatccggcgccggaattggagcatctcaagaaaatcggcctgctgtgcgaagaaatcaagcaggcggctcagggcgtcagcggcgtgacggtcgattgcgtcaacaaccgcatcgatttcggcagccaggcccagttcggcaacaacgattccaaactctccgagtccgccaggcggacgctgcggaagttcgtgcccatcgtgctgaatgtcgcgcgcaaggaccgggggaaattgctcaagcgggtcgtggtcgagggctatgcctctccgaccggttcctatctgctcaatctgcagctgagcatgcggcgggcggaaaccgtgctgtgcagcctgttcgaatcgccggcgcctgaagaaaccattttactcgacgacgacaagcgcatgatccgcgatctttttttggtgggcggctacagcttcaacaacggcgtgggaaaaacggaagccgaaatgcggcgggtcgaattcaaactggattttttggggttcgacgaaacgccgagtaccgtgaatacggtcgataccgccgatttcgggaaatgcctgtga

SEQ ID NO: 10267 - DNA, 1584 bp, Methylomicrobium album BG8
atgcctgtgaaatacgccgagcatttcagctgcgccttgctgaaattcgaagatatttaccgcattccgcctttcgcggcctccgtcaagcatatggaggcgacaaaaatcaggatcggggaaaccctgaaaaatgcggatatgggcaagcccaatccggaaatggtgcgccagacgctggagaagtttttccattgggtcaaggagccttcgaagacgccttctttcagttggctggaagtcgcattgctctgccgcggactgcataccgaaatcgccggccacggctcgctgatgcaatcggagagcgctgtccgcttcttgctgaccgaattcgccgcgcaatattccgggcggatgctgagcccttatccctggcagggcctgctcagcgcctacctgaattgcccgccgggcaacaacgcggccgaggttcggaatcgagaggcgctgcgggcttttctcgcgaactcgctggatgccgtagcgcgcagttcgagctttaagccgcgctggctggaagggattctaaagcacagcagggtcctggaaaaaaacgccacgcggacgctggccgaagacgcgctggaagggcgctccgaaatcgtggagcgcatcgcccgggaggtcgatattccgccgacctcctggttctggcccgaattggtgatggctcaggtcgatgcgatcgtcggctatccggacgaccgtttcaagcgggcgatcgatcccgtcctggcccaactgcggcaacgcagggaatgcatcgacaaaggcttggccagaatactcgaccggtattccctgtgcctggctgccgagcctcacgaggctttattgtcgctggccgtgttccgctggaagagcccttcgctggaaaggcaaaccgcctggctgcgggtgacgccgaaggccaaggccatggtccagcgatggctggtgccgcacgatctggaggcggttttcaggcaactcgtcgaagacagccgccggtatgagttctggttgcagtttgtcgaccggatcgaatttacccatatctggaccggcaattccgtaaaggagtccccgtcccgcctttcgcaggatagggaagaacggcgtcccgttttccgcgatccggaaaagccggacgacaatttgatcctgatgaaaatcggcggcctgttcattctcgaatccgcggtaaagaccggcggcaaatgctgggcgtaccgggaggaggatattaacccccagctcttgaagcacggcctccgttacggcgttttccgggataccacgaaaaatattttcacgaacagctacgggcacagcgacggcttgatccattccggttatgcctgggaaaaggccttcctgtcggaactggcgaaattcggtatttttccggaccgcatgactttcgaggcgctggccgcgcgctatcggctggtggtcgaatccttgcccgacggggccgaaaggatatgctgcaagcacggttccggggtactcggcgagtggctgggcaaacatggcttcattcgccgcgccgacgggttttatcggcaatcccgaaaggaagaagcggcagagttttga

SEQ ID NO: 10268 - DNA, 2061 bp, Acinetobacter radioresistens SK82; identical to SEQ ID NO: 8379

SEQ ID NO: 10269 - DNA, 732 bp, Acinetobacter radioresistens SK82; identical to SEQ ID NO: 8380

SEQ ID NO: 10270 - DNA, 1416 bp, Acinetobacter radioresistens SK82; identical to SEQ ID NO: 8381

SEQ ID NO: 10271 - DNA, 3204 bp, Acinetobacter radioresistens SK82; identical to SEQ ID NO: 8382

SEQ ID NO: 10272 - DNA, 903 bp, Acinetobacter sp. CIP-A165
atgattgaagatattcaacaaaaacaaaatgagatgtctgatcaaatgaatttaatggtggatcatttatctcaaggtgccgcaaaaattggagaacaaggtcaacatgcgattgagcagttaaatggcaaagtctcggagttgatggggaatctaggcggaacgatgtctgagttaatgtcagatgtcacgaaacagcgtatggaacaagatcgtgtaattctagaaaatcagcaaaaattgcacgaacaatcatctacattaattgataatttaggaactgaaattaaagatttgattgcacacagtcaaaatgcggtccaagtatataaagaaaatattcagaaattatctcaagtgacaacggatagtattacgggtatgaataacggtgctgaaaaaatgcgcttagcttctgaacagtttaatactgcgggcagttctttgattacagtgactgataagacatcacagttgattgcagaagtaagtaccacctctacacatttgaccagcgcaagcagcaatttaatcgctctattaaaagactataaagactcacaagagagtgtaaaacaggcaatcagtactttagatggtttgattaaacaagctcaatctgaagctggtatgagtaccaaaatgcttgaagatatgaatcacatgacaaatgcattaaatcaagtgaagaaagaaatgcaggattatcttgagcaagtcagtgatgtgctggtgaaaagttttgtcagttttgattcctctatggaaaccagcttaaatcattctttaagagattttgataatacacttgatcaagctgtaaaacgccttgttgatagtatagaaggcttgggtagttttgtagaagatctggaagatctagtacaacaaaagaaaaactaa

SEQ ID NO: 10273 - DNA, 732 bp, Acinetobacter sp. CIP-A165; identical to SEQ ID NO: 8343

SEQ ID NO: 10274 - DNA, 1371 bp, Acinetobacter sp. CIP-A165
atgagtattgcgaatctaaaacgtcgtcttgaagaaaaaataagtgtattttctgaaccaactcatatacagactaaatttgttagacctcagcgtttaatgaaaacattgtctattattgagcataaactcgatgttcttgaaaatgaacaaccattagaagaaaaaattatcaaatcagttctaaaacttgaacaacacgggtttgatgggctgactaaacgagattggaaaaatttggcttggtctctcagtaaaaaactgcccaattatgaagaaaaacttttattcacacctgtaggtgtaagattaattgattatttcaaccaattgggaattgaccaactccagtttgtttattttccattgttatatagctatttttcctttcaagcaaaggaattagaaaaacaacctgatagctgggttcagttaagaaatatattaaatacgaacaaatctttggtatttaaaaattcgactcgactaaaaaaatggatgacgactcttatagataattcagaggttttaaccacagaacctacgaaaaaatttgtacgtgaatttttacaagataatgatgaaaacagagttgctaatcaattagaaagtttaagaatagcttcgggtagttggttttgggatgatttgattcgatctgcaattaagtcgatcaagacaatgaaagaggatgagtattttcaaattatcccacgctttttagtattgcttgaaaaaaataaaatatatacaaccactattttggccgcacttctagaacggtacgctagtacttctcagagagagaaagtacatgaggtattaaaacatctagccttggatcaatggggtaatcctcagtatgaatcttcagcgggatggaataacgtaaatgctgataccaaaaaaatggtgattcagtggtttgttagagcagatttggaagctttctttaaattattcaatcagaatgcagatattcaaagatttaattattggatgcggtttattgatcaaattaacttttctcagatctttttgggttctaatgcattgaattctagacgcgatgaacatttgaaatttagaagattgaataggggtaggctgaaagaattagccggttctacaacgtctaccaataatgctttccttttgaaaatcgataatatttatattgttgatttttctgaaacaggtaatgcttgttatttttataaccgtcttccttacaaagactatgtcggaaaaattgaaattaagacactgagaaatcaggaaatttgtattgatcgtcaaacaaggaatggtaattggcaaccacgatttgataatgccttggctcgactcggtatcttttctaagagataa

SEQ ID NO: 10275 - DNA, 3204 bp, Acinetobacter sp. CIP-A165; identical to SEQ ID NO: 8351

SEQ ID NO: 10276 - DNA, 1971 bp, Nitrospira moscoviensis
gtgaaagtcctattgggtcatccccagcatgtttatgctgttggcgggttgctagtcctgtcagtgtgtctgtttttgactctgtttcttcttcccggtctgcggcaagccttgcgtctcaggcgactcattgcaggtctacacgcgctggagaacaagcatgctgccggattggattcattattccatgacgacaaagttctgaagcatctgtggagcgagtttaaggaaaccctgcacgcacaaaaagagctaaatccatgctcaggtcaattcgaagtcgtagctgagagatccactatccctgcacaggctttcttcagtactgaaacactagtagatacggtcatccgaactgagttctttaagcatcttcccggaattctgactggcctgggcataatcggcacctttttcgggctcattcatggtttaaaggcattcgaagtttccgacaatccagctatcgcgaagcaaagccttaatgccttactacaaggcgtacatgaagcgttcctggtctcggcagctgccatttgcctcgccatgctggtcacctttgtagaaaaatggcttatcacagcgttgcacaaacgtgtagaaacgatttgccaattgttagatggaatgtttcaagcaggtgctggtgaagaatatctttctcggcttgtacaggcttcagaggcgtcagcaaaggaggcgaagcagcttaaacaatctcttgtgggagatctgaaacaaattctcgaagacctaacggaaaaacagatcactgccaattcgcttaactccaaccagatagctgaccgcattgtttctggcgttaatgatagccttaaagagcccctgacgaatattagccaagcggtcaagcacgtcactggtagtcaaggcgaagccgttaacagattactgaccgacaccatggcagcccttacagcgcaactacgggacctgtttggccaacagatcaccggaattaatcagatgcagcagcaaacaatcgacgcgatggcatcggccgtaggtaagttagaacagctagttgctgacattgcgaccactggcgctcaaacaacgacgtcaatgacagacaagctaaatagtgcgattgctgcaattgaaggtcggcaggcggctatggatgctcaagttcagtcgttgattagccaaataactacccacgttgacctatcacagacggaaacaaatcataaattgcgcgaggctgtttcggcgatgagccaggagttggcttcgacagtagggaatctaagggagatggtgaacagtgcatcccaacaagatgcagagaggcaccgaatgctcgaacaaggcacgacaacagccgtgtcagcaatttcggcggaggttcggacgatcttggagcaatctgccgtatcagcgcaaacaatgcacaacgctgtggccgctatggagcgaataacgacagactctataaatcgaatgagccttagcgcagatcgtctatatggcgcgtcggaaaaatttgcgcaggccggtaacgcgacaactaatatacttgaccgtgcacaggccttactcaaacagatggccgacgcttcaggcgcgctgactggttcagcgacggttctgaatgcggcaatcaacgactataaagcaacgcgcgactccttggcgagcatgatcacggcgcttagtgagtctgtagaatctgcgaagcgagaggcctctttgacggcagacattgtttctcgtatcgaacgatctgctgcggtcttgcgagaggcggagggggaggctgagaagtatttagaagaggtgacaaaggtcttggttgaagctcacgcggcctttggctcccagatcacttcgactctggataaggtcaatggagactttcatgcccatgtgcaacgggcaacaggtgcattggcaggagctattgaggatcttgagggcgtgttcgataggttgcctgggaactaa

SEQ ID NO: 10277 - DNA, 723 bp, Nitrospira moscoviensis
atgaccgggactcggcttgttctgaagcgaaatggcaaagatgaaccggaaaagccattttggatttcattttcagacttgatgaccgcccttatggtgctctttctcgtcgcaatgagcgtcgcattgctcgctgtgacgaaaacggtgaccgagactgagagggctcgagctgagcgagaagcggctcttgatgcgcttcttgatgaggtggagaaggcggcgcaccaattcccgggagtgtctgtagaccgaaatcgcaatgtgatcgatttcggcgaacgagcgttgttcgatacgagaagccaccagctgaagtcgaaccaggccatacttctcagacagttcgtgccaaaggtcttggaaattgctaggagccagctcggtcggcaatggttaaaacgtattgtggtggaaggattcactgaccaacgcgggacgtacctttttaatttaaatctttccctgcagcgcagccagcgcgtcttgtgtgttctcttgaattcttcaagtgccggtgaaggggaactaagtcctgaagaccaggaacagataagagagttgtttcttgtcggtggatattcgtttaattcggccaaagcatcactcgaagagagccggcgcatagagttccggttggagtttttcgggataggagagacgcccctcctaaaggtcgatattccacgcgggaattttgggacttgctcgatgggaagttga

SEQ ID NO: 10278 - DNA, 1647 bp, Nitrospira moscoviensis
atggacgcgattgacatacttcgagctgagttaaaccgagtgaacctccaggtagggcaggggagttatggttcaacaaaggcaatggcgcagctcgctgtcgaggtagagcgccggtttgggaatggtgttgccccggcaaaggatcttgtagcggccgctatcagacgcttccatagcaccggccgagctgaatcttttcgagatataaagctcgtgtgctatggcgtctcaaccgaaatattgcccgatcatatccttctattccgtaatcgtgaacggataggcagactgctagggatagtggagggtttgcgttcggaaaggcgaaagtataggcgttgttttcaggcgctgatgactgcgtacttcgaatgtcgaccagcggtatcacaggaggaggtgcatcgttcttggcatgagatccggaactttctcaggacgggaatatcttcaatcggtcatgagccaatgcctgactgggcaaaggccatctttgagcaccaaaatttgttcgaggacgatccatgcgaaccatacgcgaaggaagttctaaacggcaatcttgctcctatacgcgccgccttctcgctaattggtgtgcccaaaaactcatgggttcaaactgatgtttttatggcggctatctgtgcgagctgtggctacgatgactaccagttccgacgctatctcgatgttctgctcactatcttaaaggacaatcctgggatagcacttcaggggctgaaacggatccttgatcgctacgccgtgatgcagttacatcccgaacatcctgcactccgtgcaattgcaacggaattgcttggaaaccctctccttgcctctaatgcacccagatgggaaggagtgtctcaggaagctcgatgcatggtatcgaactggatcaagcttaagctcatcgaacaatttttcgagctactcagtcacgatggttccactgataaacgaagagtcaaatactgggctgagtacgtcaccgttatcgaaaatgtgtggttcgccctcggatcaaacgcgagaaggagtctcaatccagattttaagaagttgcggttactgatgggcgatcaagcgctcaacctggaaggagccacctctgacaacaatgcgttcgttatgaaaataggagacttgttaatagtagagttcggtaggactggtaatgcggcctacctttttgaggcgaagaatcctccatttcgcctcgatggctctgtccatctgagagatgatctcaagcaccgccgcaacttaggtagcatggatcaccgtgacggaaatgaatcatgggaggacaaattccgtcgtgcgatcagtgaacatacgcctctgctccgtggaagaccggataggcaacacaatagcgatatagcagcggctcgccccaatagcgaaaataccaaggattcaccgaacggtgtaggtggtgtttttgcgccaaataacttcgaacatgtgttcagggcgttctgcgctgagcgaggtcttcggttcagtgatcgccgtgctttcggcggcaagctggtcgtatatgcgagcggggataatccaaagattagcgggacgctgggtcaatggggatttagatttgatcgtcagtccacaacttggattaaagagtga

SEQ ID NO: 10279 - DNA, 3735 bp, Nitrospira moscoviensis
atgagcctttttgaacgtttgcatgctgcggcgagagacagagaaagcgcaacacgcttgtgggtatcttatggtcgtgaggctgcttactatctcttcgcctctaacccacgagatgaggaagcgatagagataaaaaaccccttagcggcttactatttgaatcagcttatcatggatggccgggcaacaagagacagagaaggctacggtgtgtcgtgggatgtaatgtatcaactgctcgccgacaaggagcacgcccaagctatttgcgcattagagttgcctccattcggagatcttaagccggctcttcgcagtgaaaatactctggacgatgaagagtttgcagttgcaattgaaggctggttccttaacggcgcagtcctagggtctgtagagttatcaggccccgttgctagagaaggtccacatcgaacacttttgaggcaggaagtctttgccgtgctgcgggctgtccaagacttctatgctgacagggcgcgtactccccactcgaataggaagcattggggcaggatacgtcacttggccatgctagcaggggccaggatggatccgtttcttcatgacaccgttgtcgtgactcctgagaaattgcacatccgcctggctaaggtcaatgtcgtcggcaccggcgttgttgaggttgaaccatggtttgccggcgcgccagcgaattggctttcgaagtttgatgacaaacaggacgttccagagagatacgaaattgtctccgatgacaagctaatcgaagtaattcttagtgcgccggtacgatctgttcttcgagctataaagaagatgccgggacgtcgagtggcgggagcatttgctgaaaaattcctgagcaacccatttgcgaccttaggagaggacgcagatcatgtcatcgacgagggccaatttgatgaggctcgttccgaagcggggatcgtttttcagcaatttagggcacattggcaaatgcgaaacaacgaggtattggaggctgggttagcaatcagtaccgcagattcacatgccacatcgtcgcaattagagttgttcagtgacccagatgagttacgtaaattcgttgtgacggttgaatcaaaattgctgacgggctttgagctatgtgagtggcgagggtatagcctcggattggttggtgatacgcacgagcaactcgacattctcaaggctgtctatgcgaggtggacccgccctaagattgctatccgtgccgcggatgtgctcgatctaaagaggtactcagagcgagtaagaggaatcgggatccagcccggtattgtctcgccctacataccaagaacagatcaagatccatggtttccggatagcagagcagaaggcaaagatgcttcgcaagttgtgcacgttggtctagctgaaggtaaggaacttgagctagttgtagacaagaaggtgttccggacgctgaaggaatctctgcaacaagcacgcactaagggcgaaaaatatataacgataccagggctgggggagggtatcaccgttgaggtcgcggagaggctcgtcaatgagctcgcctcgcgatatgagagaagtgaatccaggtccacgtcaaacactgcaaagaagaacgaacgggaagaactgctcatacaaactaatatcggttctaccgattacctagaagagcgatcttcggagcttaagttcgataaccgcagccctgtcttgccgaccactctcaagggagacgcgagtctaaaggatcaccaaaagattggcgtggcttggcttcaacacttgctgtctaaagctccacagtactgtcgaggtgcggtgttggcggacgatatggggctcgggaagaccttgcagttattgacaatcatcgctgcggccttagagaacagtcctcaatcagggcccgttttgatcgtggcccctgtttctttgctagagaactggagagaagagtcagaaaagttctttcaaccaggaacatttccactccttaccttatatggcgactcaatcggtcgcttcagggcgaagagcaatgagattgaaaaagatctccttgatagaggattcacccgctttctcagggatgactggctaggcgcagctaaggtagtgcttacgacgtacgaaacgcttagggatttagagttttcgctggctgcagtccggtggtccatgatgatttgcgatgaggcgcaaaagattaagaatccggcagcgatggtcacccgcgcagctaaaaagcagaatgcggcgttcaaaatcgtctgcacgggtacccctgttgaaaactctcttaccgatatatggtgcctgttcgattttattcaacctggccttctcggggccttgaacgacttcgggaaagtgtaccgccgcccgatcgagtgcgagaccgatgagcatgctgcaaagctagaacaactgcgagccattatcgcgccacaggtgttaaggcggctaaaacgcgatattgcgaaagatcttccggaaaagatcattgtggaggcgcctcgcaaattggttttatctccataccaacgacagctgtacggagatgctatagaacggtatcgtttgcggcatatcgatgggcataacggcgtttttaagaatcagttggggttactacattacctccgaaaagtctgcagtgatccacgggagcatggacgaacgtttgataatgaggcggtggagacggcccgccaaaaaaatccgaagttggactggctgcttgatgcgctgaaggagattaaagggctagaagagaaggccattatcttctgtgaattccgagacatgcagttaatgttggcgcactacatttctcaaacgttcagcatccgacctgacattattaatggagatacctctgcagcggaggggtgtcacgacagcaggcaaaagcgcataaaagaattccaggccagatcgggatttggagtcattattctgtcgccagtggcagtgggctttggcctgaatatccaggcggcgaatcatgtcattcactttacacgaacgtggaatcctgccagggaggaccaagcgacagatcgtgcctaccgcattggccaggctagaccagtgtacgtgtactatcccgtcgtttgcgcagatgagttcatgacgtttgatgttctattggatcgacttttggaaaggaagcgagatctttccggtgacatgctcaacggcactggtaatgttcttccaaacgagttcgaagatgtggtgggggtcggaaaggatgcctttgataagcaactgtacattgaagatgcggactgtcttgaacctctccattttgaggcgatgattgcggcactgtgtaagaaacggggcttccgatcggttaagttgacttcggcaactggagatggaggcgtcgatgtcgtcgctaagacgaataacgaaggggagcttgtacaggtaaaacattgttcatcggaaacaggtgttctgggatgggacgcggttaaggaaattgtagccggggaaaggctctattcatttcagttccctggcgtgcggtttaaaaaagtcgctctgactaatagagagttcaattctaacgcagtttcccaagcccggatacttggtgttgagctgatcggtaggagcgagctggcgaatttgcttgataagcaccggattacgatgaccgaggtcgaaacctttctcgtgtcaccggagtatgtaatggtctaa

SEQ ID NO: 10280 - DNA, 1959 bp, Halobacteroides halobius DSM 5150
atgaagaaattaatctggacaatactttttagtattatatttattataacaacttggttttttgtggtatatcttgagtttccaccagatataattgtacaaagtatgtttgttatgattgtaggagttactttaattacaggaggaagattatatttcaatttacataagaaacaaaaacagattacagaagcaattaaatttttaaaagaatttaaggctgataaagataataattcaattacacataatgattttataaagcttgataattattttcaagataaagaagaattaaagaacacttgggaacaatataaagatactatcagaagaattaaggacgatgctattggagaacagaagaacaattattttgctactattgaagcagattattttttcgatgaggcatttataactaacaaaattaatatcaagttatttaattatattccacagttattaattgctttaggtatttttggaacattcttagggttagtacaaggattagaaggcttaaaaataggaaatgcttctcaaacacagaatagtattaaaaatttgattagtggagtaaatctatcttttttgactagtttatatggaattgcttattctattttagttactttctttcaaaaattatttattggtgatattgttacagaattaaactctttagctagtcaatttgatttaattttccctaaaaatactcaagaggatggagttaaagagctatataatgaactagaaaaacagactgcttcgatggaaagtatggcaacagattttgcagaagtagttgatcaaaaaataagtgctactttggaagaaaacttagggccaacattagaaaaactgggagagtcggcagaaagattggcagatatatctgaaaatactaatcaaaatgctattgagaaattagtagaaaatactggagaaataattagtgatgccacgcaagatgaaataagtaagttgactaactctttaagcgatgttactgcccaaaatgaagcattattcaataattttgctgcctcaatttctaaggtagaaatgatgatagataatcaacaacaagttattgaacagactaataattcagcaacaaatgtaaagaaaaccaatgaaaatgtgatgcatatagtaggtgaattagaaaaatcaatagaaaaaatgaataatttctctactactcaagaatcaacgattgagagttttgggcaaataatgactgatattaagggttatatagaacaccaaagcaaatctaatcaattaattgcagccactttagaagataattataaaatggctgaacaacaaaaagaattaaatagagatctcaatcaagcaactagtaacctaaaggtagtaagtaagactttaaatccaattttaaatagtttagaagataatatgactgagtttgatgaactatctaaaaatataaataatcgtttagtaaattctatttcagatctagaaaaccattatcaacatattaatacatcagttgctagtaccatagatgatttagatggtacggtagaacaattagaagataatgtacttggttatttagataatatcaatcaaaactatgaccatatttcaaagcaattaaatcagtttggtcagcaaagcaatcaattaattgaatcactgaagaacttctcctctactcaacagcaagctcatgatttatggaagtcatataaagatagctttgataatttaaatcaagaacttgaagaaggggttgtagagtatactagtaatgttcgaagtggagttaataacattttaggagactatgatagccatattgaaaatgttttagagaactttaatgctactattaatcaatttactgatacccttgaagaattaaatgatatgctttatgagttagagaaagttagtaaggagcgaactagataa

SEQ ID NO: 10281 - DNA, 687 bp, Halobacteroides halobius DSM 5150
atgtttaataagccgattaaaaaaaagaaaacaacaaaagatgaagaaattgattattggctatcatatagtgatttaatggctagtattttaattatatttattttattgtttacttataagatattagattataatcaaactctagaaaagaaagaaaataagataaaagaattaactaagttacgacaaatggtaattactaaactggttgaagagtttggtaatgagattcaaattgatcctaaaactggtgtaattaaattaaaaagtaatatattatttgattatgaccaaagtaatttaaaacctaaaggaaaagagtttttacaaaaatttgtgccacgttatctaaaagttttgttgggagataaacaaatcaaaaagaatatatctagaattgtaatagaaggtcatactgataatcaaggtagttatttatataatttagagttaagtcaagctcgagcctttaatgtagtcaagtatatttatagtgataatgttcagagtaaatataaggatgatttagaagattttgtagcagcaattggtagaagtgaaatggacttaataaaggataaagcaggcaatgttattaaggataaaagtcgtcgagtggaatttaaatttgaattaaaaaatgaaaaaatacttaaagaaattttacatgaagttaagaaataa

SEQ ID NO: 10282 - DNA, 1254 bp, Halobacteroides halobius DSM 5150
gtggctaaatcaaaatatacattgcctaaatttaaattctataaaccacagaagttagaacgtacagctaagagaatagaacaagaaactgataaacggttgacggcaacaggtgtttctaaaaatcgatatgagagaacattaggtcatctacgagaaaatcgcaatttgaggcaaagacactataaaattcttgcttattacttatccagtttaaaagaagattatccaaaattatataatctttttatttctaaagctcaagatttctttagtggtccaggaagatattattatcatttaaaagcattattgagtagttattatcaagaatttaaggataaagaattatataatttgattaatttagtaattaaaaataataacaaatggaaatcagagatggaatttgttaaaaatttattatataaatctaataatgctaatgagtttttctttaaaattgttagcaaagttaatgattgtcggtcattaactgatatagaagaattaaaatctaagttactaatgaataataacaataatttattaaagcaatctttatcttattattggttacagatattagataatggagtaagaaatattaataatgatttatgtattcaaataatcaaagattatataccattggaaaaaaagaagaaactctttgaaaaggtcttattagacaacaaagatattaataattttgatagtatcggcaatatatttgagagatggttaaagttaataggtaatactttaggtggaccttatgggagtaatagtgctaaatgggctaatattgaccaagaagctcgtgatttatttaaacgttggaaggcacataaaaatataattgtaacttttggtgaaatttctggagaccaacggagattagatttttggaaacagtactctgattatttttatcgagtagaatactttgagaaatatgaccaagcaatattgatggaatcaagtaatcatatctttattgaatttgctggtggtggagctttatatatgtataataaagattatttaaccattcaaaatttaatagataaagaatgtggttactctaatacgaagatggtaagtgaggtattaaaggatacacaagaagaagaatgtacagaaagattggaacatagggataattatcgtggatataagaaatgggagccaagattttttgatagattttcaacgcatggatatgtaaaaaagagttcccgtaagaaataa

SEQ ID NO: 10283 - DNA, 3519 bp, Halobacteroides halobius DSM 5150
atggctcttagagatataattcgtgactttcttaattttaattcagaagaaaaacaagaatttgtagtaaattattctgatgataagtgcataaaaatatttttgcatgaaaataatcaaaaaattgaaattgatcctgaaagtgataatatcttcactttacttagtatgactaatctagaattagctcaagataatagttatttaaaaattgattatgatcaaatatatgatttgtattttgctgatggagatcttatagatgattataaaatgttaggtttacctgatttatatcaaggttatattaaagttgataatgtaggtaattttattcaagatgaggaagtaaagtattctttttattttgaagatagtaaagccaattatgatatttgtatttataaaaataatatagtccagtataaccaagagtatagagtattacaaccagatatttatgagttgataactagcattagagattataataaaaaacaaaataattatggcgatatgatgaaacaatttgaagttttcggaaagattaaggactatgcagatgaaaataatattttattaaattctagactaagtaatgaagaaaaaccaattatagtagatgaaataactatagattttgataaaaaggaagatggattagaaatatatcctaaaattgaagataaagatgatagctttaatcaagacttagtcgataagtttgatagaggagatcaagttagaaatttttataatgtagatgatgatggaataaagagaaaagtaatctttaaaaataaggattcggcaaaaaagattaaggaaaaccgctctttatctggagaagatgaactaaaattttataagggtgagaatgaactatgggaagatgaaaatttagatttatctaactttggcccgcgagttagaggttttggttatctaaattatcgtgctaatgctatctctgatagacaggagagggatgatagttggtttgatgcagaagttgaaacagaaattccaaaggtatattctcagtctggagattcttttaaattaaaatataaagatagagagaagatggcagataagttaagaaaacttaaagaagattctcttgaggtaattgatgtagggtttactgataatgaaggaaaaaaatataatatggtattaaatgaggaccaattaaaagctgaaataaataagataaatcaagctacaatcaatatagataagattaaaaatattgaaactgtcaagaatattaaagaattagttaaagagcaagaagataaagaagtcataaaatttgatggtaggtttataaggttttttagtttagaatatttagaagatcacttaacaaaattagaaaaacgaaaacaaagaaaagaagagaaaaaaatcgatcaagaagatgaagacgataataaagaaatgactaccattattgaagataatctagaaaagaaagacattagtattaatcctaatattaaagatgaagaaaagaatttagaagttcctagtattttagaagcagatctatatccacatcagaaagttggtgttagaaagcttcaatttttgtataaaaatgataaagtgaatggattactattggctgatgacatgggtttgggaaagactctacagttattaacctttattgcttggattaaagaaaaggatgaattaaatagaagcctagtagtagctcctacaactttaattaatgattgggataataatagtactaacaacccaggtgaaatacaaaagttttttccaaatgacttttttaatacttataagattaggggaagaattgatgataaagaagtaaataaaataaaacaatcagatatagtatttacttcctataattcattaagaattaataatataaagttaggacagattcattggaatgtaatggtttgtgatgaagctcaaaaagtgaagaatgctacaactcaaactagtgttgctgtgaaagctcaaaatgctgattttaagattgcttgtactgctactcctattgagaataatctattagatctatggaatattatggattatgctgtgccaggaatcttaaatgctagaacagaatttaagagaaagtatgttaataaattatctaaattaggaaaagatgaaaacgagcaaagaaaaagattaaataatgaattaacagataaaattgatcagaattttctgagaagaaataagaaaggagaattagatgatttacctaaaaagaaaataaaagtgtatggtattccagctaaccagaatgaacttaataagattagggagttgaatcaactaaggcaacaaggtgaaaatcatctacctctaattcaaaaattagtagcactgtgtagtcatataagtcttatcgataaagatgttactgataatagtatttcagatttaatagaaatgtcatctaaattaaaaaagataaaagctattctcgatccaattaagaaaaagaatgaaaaagtgttaatttttactgtatttaagaagatgcagaaaatattgattgaaactataaactattggtatggttttgctcctagtgttttaaatggagatatagctcaaaataaaagacaaagagtactagataattttaggaagagtgaaggatttaatgtaataatattatctcctgaagttgctggagttggcattgatttagtagaagcaaatcatgttattcattatactagattatggaatccggctaaagaagaccaggctactgatagagcatatagaattggtcagaaaaaggatgtatctgtttattatcctattttaactctagatagagaatataattataaatttgagtcagaagttgagtatataaatagatgtttaacagagaatgttaaaggaaaaagtccagaagaaaagttgaataaattgttagtaaataaaaagaatctattacttaacttcttttttgctgctggtgattcaactattgattggaattcaatagctgatgaaaatgaaatggagcaagtagattatattaatattgggaatgtttctgagttagttggcccttatgaatttgaaattttagttgctaaattatatgagcataaaggatataaagtttatcctactatcagagttggagataacggtgttgatgtagtagctattaaaaataaaaaaataactttgattcaatgtaagcaactaaaaaagaataaactttcaggaaaagcaattaatgaagtatatggaggtagaaatctttattctaatagtttaaataaagaagtagaggagttagttgtagttacaactgcagatgatatcactagccaaggtgaaaatttagctaaacaaaataatgttaatgttatcttaaaacaagagttagctaataaattagtaaaggatcaggtttattattctgaaatagatatagcaagagaagagagatattcaattgaaaaattaaaaaggatattgtaa

SEQ ID NO: 10284 - DNA, 1389 bp, Roseobacter litoralis Och 149
gtggcctgtgtcattgtccttataatgtatctttccacagagcgtcagagacgcgctgtgctcaaacttactcgcatcgttactcagacaagtggagaacaagatttctcgaaaaactatgcttcaatgtgcgcgcgtattgaagcatggggaggaaccggacctcaaagacgccttgcggacatttgggccgagtttcgtgaaaccgtcgttgagccgagtgagagccatagtggtgtcatacaaaactcagcgagaccggatgagtttttcaacacctacagccttggatttggactaagccgttggcgcttttggcccggtgttttggtctcggttggcctgtttttgacatttcttgggctggttgctgcactagtccaaaccggtgatattttgaaaggcgccagcgatggcgccgactctgcagtgatgacagcagcgctcagccagctactcgcagtggcctctgcaaaattcatcatgtcgttgtcggggctgtttgcatcaattctggttgggctatccattcgggtgttgtccggccgcattgatggcccgttagcagcgctttcacacgcgattgagcggcgggttcaattcctgagccttgctgatattgcacaaaagcaattgggggaaacgcaagagctgcgttcacatctttccaagctgaacgctgagcttatttcagctctttcagagcctttgaaagaagcaagcaaccgcggaggcgaagcagctgcagatatgatgaaatcagttgcaacaggcgtttcggaaagtctgaataagacagtctctgatgcgggaaatcagatggaaaaagccgccgaggggatgcgggatacaactataggtcttgatgccgtatcccgccgaattgaggcagttgtgcaagatctgacgaaagctgcagaggctctcgaaaaaggggcgacccccttggctgaagcgatctcgggcacagccgaaacagccaaaattattggaacagccggagtcgatcttgttgaacgagcagaaatatctctgggacatcaaacaaccgctttgaccgccgctgctgaggcgatcaaggtgcaaattgaagcatttgaaagccgtgctaaagcttacgatggagatatggaaagtgcgttgaaggtttataaaaccaaccttgatgcagcgatgagcgaagtgcaggtgttttcaaatgacgttcacggacagtacgcagacgccttgcagcggttacgaaccgtaattgaaggcgcgcggtcattcacgcccgagccggaaccgatttcagagcctgcgccagaattggacgtcgagaatacagttgaagatgcgtcagctaatgcttctccaccgacaacaacaaaactgctgaattccgaatga

SEQ ID NO: 10285 - DNA, 972 bp, Roseobacter litoralis Och 149
atgacggatatgacggtcagcatcctctttatcgttctgatcctattggcgttcttcgcaagtcaacttcggcctgagcaaacagtaacggtaagtgagtatgaacgggtagttgcgcaattagatgagcgggaggcccaacttcgagttgcccaaagcgcgattgaagattggacggatgggactttagatgtcgcaacactgttacggcttcgagaagacgtcctgcgcctaactaccgaagtaaccaaccttcaggcgagggcggggcggtcagaggatctggagcaagatattgttgtgttgagggaagagttgaatcgtgcgcgtactcaactaagtctaatcgaagttaatcccctggagatgtacaacagttcggtagcccaggagagagaaaacttgctaacgtctctgcgagatcaaatcgcggaggagtttccggagcttggcgtgcgggtaagcgatggtaaagatgcattgcagtttcaaggtgaaggattgtttgcgtctgggagcccacgtttgtcagccggcagtcaaataaagatcgaacggattgcagacctcattcatgccgttttaccttgttatacaatgggcccacagtcagcgtatgacgcgcaatgcaatccgtcctttgcaatcgtagaagctctgcaaattgaaggacacacagacagtgacggttccgcgaacgccaacgtgtctttgagttcccagcgagcagctacgacctatggcgcgatgatttcccatcaacccggcttgaacatccaccagaactttacagatcaaccggtcctgtctgtagcgggttacggggaggaccgacctgtgacgctgaacagtagcccagaaggcaaaagcgccaaccggcggatcgatctaaggtttattatgctgcgcccggcaagtatcgaagacatagattcgattaaagacggtttcttgcggctggatgccccgtga

SEQ ID NO: 10286 - DNA, 1314 bp, Roseobacter litoralis Och 149
gtgaccgtccgcgcgctcatcccagcttttagcaggcctcaggctcgagactttgaagagccgatagccttggttgaaatgtgcaacgaaattgcagtggcgtatcaaagcaaatctactttggctgaacaggacattctgggcctcgcagcaacctacgacaagcggcgtgttgatggccgttgggatggcgcgaccgaggctgatgttgccatgctcttgcgtgctgcatgcgccggtcatttaacccaattttctgatttgcaggatttcctactacaacaagctgcacgaacaagccgtctaaatctgctgtcagcgatgtgcgaggggtacttcgaaggctggaaagaggatgatacactaaccgttgaagtctctcgaataatgcaagacagcgcgaagaagttacctgagaatttttcgcatctggtcgtgtcattgcccgacgtgcttaactccagttcgggtgccttgcagcttgcaacacgtatggctgggtatgatcgaccacatgagatgttgacctcttgtggtttttccgaccctcacgcacttggcttttgcgcaaaggtatcacgttacttcctcgcatcattgccgccaattcgaagccgtgccgacatggatcgcttaatggattggtgccgacctgatcgcgctctcggtttgcaggggccgcaaatgattgaagcaatcaatctatttttgcgcccgtgggtgcaaaccagtcccaacaaggctgacaaacagtatttgactgactttttggtaaaccactttgacgatccacggattgctggcgaacatgtttggatggatgtggaccctgactgccgtggcgttctgctgagatggttggcaggggacagcatcattgccttcatggatatcatatctgctgttgagcataaaaacccagaaacttggcggatgcggcgcgagttctggacccgcctttatgatgagggcactgtttcggaggcatgggtggcgcttcatccagttgcggtggatgaggcgcagcgccgatttgatcgaacgcaaaacctttctctaaaggcctatgcaaaacaatcagggaaaagacgtgatacgtctcttttgattatgcgcgctgggaacacggtcattgtcgagggatctcagaactatcgagttcacattttcaaggaaggagcattgcagcgcccggtgctttaccttgatgaatatgatgatgaaaatatcaccctggagcaaggtaatcctaacacccgaattcacgacattcatggccgctggcgcgagtgggtcagggggcggttgaaatga

SEQ ID NO: 10287 - DNA, 3177 bp, Roseobacter litoralis Och 149
atgatatcactcattctcagcgaggtcagacaagacgccatcgttcttgttccagtgcaggcagcaaaaggtatcttccgcaagttccagcgcagctcaagccccgatctaactgtcattcatcaggaagatcgggcgctcacttacgcattggcgcgcgtgcgttcactggacccggaaagaacacagagtgttgtgaagtcggatagtttgaccatttcccaccggcttgttgctcagattgaagacgcctttgccgcccctttgggcctgccacacttgataaatgggctatcatttgcggccaagatgcagggtaccataggcagttctgatgcccgtctagcgtggtggtgggaacgcaatggacggaaagagagtgtaccgcgtactggggcgatcttatttccagacatggcagagcgacgcatgcggatacccgatgcaatctatcaagcgattcggctttccgaagagttcgaacctgatgcccctattgagactcactggcgggcccttgcgacgtataagacattcttaggcaatgctgctgggactgtgcttgatccgtttctagaaggtctgaaaatcgtcagcgtggggcgcttgagtctcgaagttactgatccagatgattacaggttcgcccccacacctgtttcgactgcggaagacgactttctgctgtcgcattcaaacaaactgagttttcaggctgccgttaccaaccgaggtgagcagccaacgtatcgcctaaccgatggaacattcgcggtgattgatcgctccgcagcgccggttctcaaggtaattgcacaggccatgaacgaagacatagtaggccgtaaggccttcattgctgatgcttctcgccttattgcagaggcaattgaacaacatttccgcgagactggcgcgataaacgatgaaacacctccggaaatgtcagttgaactgatcgaacgcactgtcgacgaaggttggaccgaaacgacaggctggtctgaccgcgtcatcggggtcggcgtcgcggtgccaactccttcagagattgacgaagggagtggcctaccgtggctgccgccgaccatgtccccaaccgtgggtgaatgtcttggtgcgcttgcggacgaagaggtcgctgacacaatcttgatgttacaacgcgcattgctttctggggcaaaatttctggatttgcataccggaacagtgccagtcaccgctgaggtgatcgaagcgttaaaacgtcgtggggcattgctttcagaacctgcactgatagacgcagacgctgctgacgcttatcttcctatcgttcacgcgaaccttcatgatctggattattttgccgatgttcagcctcgcagtggttcagaaaccaaattgcctaagactgtgtcggcagatttgcgtggctatcagacaaactcgtttttctggcaggtcgaagcatggaaagttgggcttcccggcgttttgaacgcggatgagcaaggcttgggtaaaaccctgcaaacgttgtcatttctagcgtggttagatcaccaaattgagatgggtgaagttgaaccggccccagttctgatcgttgcgccaacctctcttttgcacaactggcaagcagagattaatttgcatctgacgcggaatgcacttggccctatccaccagctttatggaacggccctctctgcatggcgtaacgataaagcgcgtggaagagatattggcgacggcacagtgcatcttgacctgtcgccgcttcatggcaaacgcggtgtcattatcacgacctatcaaacgctggcgaattatgcggtcagctttgcaggtctgaaatgcgcaacggcggtgtttgatgagatgcagtttatcaagaacccgcgcacccaacgcgcgcaggcagccaaagctgtgcaggctgatttctggatcggattgacgggtacaccaattgaaaacaagacacaggatctgtggtcaattttggatattatatgccccggggcactgggatcgttggctgcgttcaaccgggtgtttgcgaagccgtctgcaaaccgattggcccaacttcaacgagcattgtttcaaaaaagcggtgcgcgcccagccttatgtcttcgacgtaccaagattgacgcggacccgacgataccgccaaaagttcggatcatgtatccacgccaaatgcctccggcacaagcgatccgttatgatgaagcgcgtgcaaaacatggtggcattcttcaggtcttacaacacattcgtcgagtatctgcccatccgggaatgatagaaggtgaattgatcaacgattttgtaggagcttcggctcggacaagtgctgtgatggatattttgcgcttcgtgaaatcaaaaggcgagcgtgcgctggtgtttgtcgaaaaccgagatatccaagcttggtttattgaaatcctcaaccttgaatttggcctgaacgtcatgttgatcaatggtgatacgtcaattgacgatcgccagtggattacaaaacaattccaacgagaacgcggtgatgacaacgaatttgatgtgctggttctggggccgcgtgccgctggtacgggcttaacgttaactgccgcgaaccatgttattcatctgacgcggtggtggaaccccgcggtagaagagcaatgcaacgatcggacccaccgcattggccagacgcgccctgtgacggttcaccttccaatggcggtgcatcccgaacttggccctgcctctttcgattgtctgctgcatcgattgatttcgcgcaagatgggcctcgcttccaacgtgttgcagcctttggatgttgatgaacatgatctaaagcaactgcatgattcatcagtttcaggccgtgttgttgacgagggaccacaggctttctcgcttgctgacggattgccgggtagaaccgatattcagatcacaagcttggcagatgacattatccgggtgtcttcaaaaaattggccgaatagacttgttgttgctgctcacaaagatgccggaataatttgcgaatttgttgatgagtccacagatcatgtggtttcagttttgcctcctgatgatagcgccaaatttggaggatacgttcccatttccataatcaaggatagccgtttgtggcctgattttcttgtaccttattga

SEQ ID NO: 10288 - DNA, 1965 bp, Halanaerobium saccharolyticum subsp. saccharolyticum DSM 6643
gtggtttttattaattttaatgaactgagtactagtgcacatgatctaatatttaatttgaaaccaaatgaaataatagtaattttattcgttatcctaatattttattttacaatttctcaatgggttaaaaatctatcacctgctaaaaatatagaaaatgaattaatgaatatcagaaatgaattaaataaaaatttaaataataattctttaaaaaatatattaaaaatagaatcgataattaaagaaaaaaagtacattataaatgatttattagaggattatattattatgattaaaaataataataattctaatgtcattgatccagaatattatatcaataaagaaagtattttttctaattatcttaataaaaaaatatctgataatattccaggtatattaattgcaataggaatctttggtactttcgttgggctagttgttggattacattctttagatcttaataatattcaagaaagtattactccattaattacttcaatgtacatatcttttggttcatcattagcagcaataatgagctcaataatttataattattggaataaaaaaattaatggcagtattgaaaaagaaattaataagttgaataatagtttgcgaaaatatctaccagttagaattgaaagtaacttaattgataatattgtagaaaatcaagaaaagcagctgcgtgcaactcaagaattctatactgatactcttattcctgaattagttaatggtgtaaaagaagcagtagatcaaagtttaaaaccttctatgaatagcattaataataatttgaataattttgtagagacttctaaagaaaatcaaaaagatatgattaatggtgtagaaaaaattgtttctgagaatattgctccacaaattgaggaaatgcataatgttatggacaatttagctaatttatcaattgataaacagagtgagagtatagataagatggttgataaatttatgaaaacatttaatgagagttttgatgatcaatttacagccttaagagttactttagaagatatgattcgttggcagaaagaaagtaaaaaagaaatggagagtttggtttatactttagaacagggagcagttaagcaaaatgatatgcttgattataccgaaaagttattaaataatgttcatcaatatgtaaaacagtttgatgatttaaatgctaatttaaataataatataatacagttaaatacactgggagaaaagcttagcggcttagaagaaaaaactaatgataaattagaaatattgattgagcagcaggaaaaatttgatcagaagaaaaattcacatattgatgagatggaaatacagctagataatatagaacaatactgggacaatgtacagtcaagctttacaaaattaaataataatttcaatggggctgtagaacaatttgcagatagtactcatgatagtttagaaaaaacattcacaagttttgataagaatttaagtgaaatttctgatagattagcagttacaattagggaagttaataattcattagaagaaatacctaattcatttaaacaattaaaaaatcttttagatgaatttaaaatagatcgacaagaaatcttagaagttctaaataatcaggatgcacttttaagtgataaatttaaagatatgtctgatattatgcaggaagagaataaaagggttgagcaggttctagaaagaaataataaaaaatttaaaaaagatattagaaaagaagttaaaaatactttagaaagaaatattacaccgattaatgatgaattagaaaaagaaagagaaaaacaaaaagaaataattgatcaactatattatattaaaaataaaattgatgaagatgaaagtgaaacaaaagataaagaagataaatctaactttttctccaggcttaggggtgataattag

SEQ ID NO: 10289 - DNA, 789 bp, Halanaerobium saccharolyticum subsp. saccharolyticum DSM 6643
gtgcttaatttttttcgtaagaacaaaactgatagtgaggatgaaaaaactaacttctggatttcatatgcagatgttttagcagcattattactgatgtttatactattattatctgttgttatgttggatgttaaaaatactgagattaaagctctaaaagatcaacaagaagctaaaaatttaaaaaaacaattagatataaaagaagaaaaaattgaaaaacaaaaaaacgaaatagaagcaaaaacgcaagagatagataagttattaggggtcagagaagaaattattattgccctacagcagaaatttgctgacacagatttaagcctagaaattgattctcaaacaggggcaattcgcctgccgggaggagtattttttgatacagatagcactgaaataacagatgagggtattaaatttttagaaagttttatccctcaatatgtcggaatattattgggtcctgattttaaagaatatgtagctcagattattattgaaggtcacactgacgatgtgggcagctatatgtataatttagaattatcacaaaatagagcctttgaagttgttactcaaatttatgatggaagttttactgattttgaatataaaaacagattaagagattatttaactgctaatggtcgttcatatagtcagccaattaaaaatcaaaatggagaaattaatagagaacgatctcgcagggtagaatttaaatttagacttaaagatactgaaatgataaatgatattaaaaatacattgggagaatga

SEQ ID NO: 10290 - DNA, 1197 bp, Halanaerobium saccharolyticum subsp. saccharolyticum DSM 6643
atgaaatttaatagctttttttttcagccatctaaattaattgcagtgaaaaatgaaatcaaaaaaacatttcctaccaaatcagatatttataaaattaaatctcaaaaagcaaaagaagtagacttagaggagttattaaagaaaataagagaattcagtttagatagaattatatatctagcagattcattaaaagctgaagaaataatagccttagcaattaactatagtgagattcctaatgagttgtataaaaaaataaataagattatattacataaaaaaaataaatttctaattaaaattttatggaataattttgctgaggattataaaaatgaagatttaaacagattgcttggtaatttattagcttcattttctaaattaaatgaccaggaaaaagttttatataatatttttaaagactcttcacccctaattaatatgagaaagcagattgaaaataataaaatcactttatttgattttttagaagagctagatttgatatttgaaaataagatttctaaaagattagcagcagatttatttagcaaaagttctaagctgttttttattagagaagaaaaggataatttaattaaaattttcaaagaattagaaatcaataatttaaaagaagttgttgaaaattatttatttgtttttaaagataaggaatatcaagaagaactgatgtataaaataaaagatcgtttaggtgatccaagagaagattacagtactgcctggaataatattgctcataaagccaaagaaaaggctgcagcttggtttaactataaaaaactaaaagagttttttgacagcataaccactgatcaagaagaagctcaaaaacggttttcttattgggaaaagcatgttgatataatggaaaaagttgattatgttaaaaaatatctgcagttatttttaacttttgataattttgttgtagttgaatttggtgatttaggcaatgcagtttatttttataaaaaagatttcttcaaagaaaatttagctcagtatacaagcaaatataatgctgtaaataataaatcactaaaatatacttatgaagcaagaaataatagaaataaatatgtttataaagttgatcatagaaatgattggcagcataaagtcaatagaatgcttaaagagcttagattagggaggaaatag

SEQ ID NO: 10291 - DNA, 2820 bp, Halanaerobium saccharolyticum subsp. saccharolyticum DSM 6643
atgttcaacttcttcaaaaatagcttcaaaacaaacacatcagagcctgagatagaaataaagcggactcttatagaaaatggaattgagtttgaaattaataaaattgataatggtcaagtagaacagttaagctttccaattatttatggcaaatattttgatttaagaaatttaatcaataaagatttttatctttctcttcaaattcttgaaggagcttggcacagtgaagaattaatagaaaaagatgatggaagttattttcttcatattgatacaatatatcagtatcaaaattctgctgaagatgaagagagtttaggagaaggtaacagaaaattaaatgaactgctcggacttaaacctgatgagagcttagaaattactattgataacagcggtgttatcggtagcagcaactttaaattagaatatataattaaagatgagcaggaaggttatataagtaagtttcatcaaagagttggcccattttttcctctaaataataatcaggcctatgttttaaataagaaactaaccgaagtccttgatttaatagataattctccaaaagaaagaaaagatcaatttgaatattttgctaaggttaaatctaaagcaaaaaaattagatattaaatttaacccatatttagaaggcgaagaatattactttcctgaagatttagatatagatattgaattagaatctattgatcatttaaaacttaatcctagatttgatgatttagatgatcagttaaatcaggacactgaaaaagcaataaataatgatgataattatacagttaataaaactggcggcaaaaaccaaagagtttttattgggcctgaaagtaaagaaagttataaacagacatcagcaaacagagaattaaccggatcccaggtgcctgactttattgaaaatcctatgaagtatctaccagataacatagatttagaaaagtttagtgaaagagtaaaaggacttaaagaaagagtttacagagctcagccatttgttagttcttccaaaactgatcagattgactggtttgatatcgatgttggagttaatattaaaaatgaaagtgatgaagctgaagaagaacaaattgagctcagtgaatttgaaaggctggtaaacgaagctagagaaaatggtgaagactatgttctctataatgataactgggttaaagttccgaaagaaagtgaagattttatagcaggagcaaaagaagtagataaaatcaagcaaaacggcagggttaataaagaaaatcttaattatatttttgatatttatgaaaatattgaccttcttgaatataatgagcagatgatagattttagaagtcagctgcaggaagatggtgttatttatcaagcaccaagcttatttaagggagaattaagaccttatcaaaaaagaggctatatatggttacataaattaaaagattcaaaattaggtggtttattagctgatgacatgggtttaggaaaaacaatacaggttattgctttgatggccagtttaaaagcagaaaataaattatctccctccttgatagtcgctccaaagtctcttttagaaaactggcagcatgaaataaagaaattttcaccagaaattaacaaagtatatatccatctaggtggttcacgtaataaaaacagcagagttattaagcagtctgatgtggttttaactacctacagcactttagttagtgatcaggttctgttgggagaaatagattggaccatattagtctgtgatgaagttcaggctattaggaatcaaagcactttaaaggatcatgctgttaaagctcaaaaggcaaagctgaggttggggttatccggcacacctgttcaaaatactgtggcagatctctggtctatttatgattttgtccagcctggacttttagacagttttaaagaatttaagaataattttgtaaaacccattgagagttctaatactccagaagagtatgaaaagtatgaaggtatgctgaaagaaaaaattcaacccgtatttttgagaaggacaaaagaaggtgagcttaaagatgaactgcctgagaaaaaagatattaccaaaacaattgaaatgagtcagagacaaaaagaaagatataaagaaatcatagaaaaagaaaaaaattctaaaggtagaactcatttagggacactgcagtctttacttcagttatcttctcatccggctcttttggataaggattggaatctaaaaagtgcagaagaattattaaatgagggtccaaagctgaaatctgttattaaaatattaagagaagtcgaaaagaataacgaaaaggctctaatttttactacttttaaaattatgcagctgatcttacagagagtaattagggaaaaattcggactgcaggagattccaataattaatggtgattcaaaacagcgtttagcttcagtggataggtttaatgaaagtgatggttttggatgcatgatattatctcctagagcagctggaacagggctaaatattaccggagcaaatcatgtgatccattatacccgctggtggaatccagctgtagaacagcaggcaactgatcgtgtctatagaattggccaagaaagggaagttaatgtatattatccgatcatgactgcagctagagaaacagttgaagaaaagctgcaccgtcttttagaggaaaagaaaagattagctaaaaatattattgtacctaataatcctattcagggagaattgatgaaagaaatggatgaggaaatgttttaa

SEQ ID NO: 10292 - DNA, 2076 bp, Pseudoalteromonas citrea DSM 8771
atggaaaaattagattggttagtccctgactttttaagttttagtacactgaattttgagtcgcaattgagtgctatttttgtagcattccttttggggataacatttttctttcttgccaaatcaggtaattcgttcagaaaggctaaaaaaaggataaaggtcttaaatgaggctctgaaaggtatttcaacagaaaatatttcatctaaaagaagagacttgattagctttatcaccgaaaaagataaagagaaaagtcagcctgtaagacatatctggaaagaatttgatgaaacactaatagaagttaaggctattggtaatgttcatctacataatacgtttgatgcttcacattttttcaatactcacactctggcaaaaggtgttacagataacagactaattgctgctgtaccgggttttttaaccgctgttggtgttataggtacttttgttggtcttcaaattggtctttcggagatgaacatttcttctgatgtctcagttgaagaaatgaaagcaggtgtttctgcggtgattggtggtgctaaagttgccttcatgacatctgtttggggtgtattgttaagtgttttatttaattttattgagaaatcattagagcaaagcattagaaaaagaataagcatactccaagataaaattgacgatatttttccgcgtttaagtcctgaatctcaacttcaaattattgctcataatagcattgaatctagggagagtttacaaggtttagctgagcaaataggcattaaaatgcaggaatcaatgctaactgcaactcgaggaatcagtgaagcattagagacaacgctaaatgaaataatggcgcctgctattaataaactcgtggacgaaacttcagaagggaatcaaaaggcgttagaggatttgttaacgaaatttatggatggttttggcgctcaaggtaatcaacaaagagtcgcaatggaaaatgcttcagaaaaagttaacgaatcaatttctggtatgaatagcacgatggaagcgtttatttctaagattgaagcgtctcagcaagcatcaggggaaagggaaaaagaacttatctcttctatttcattgcaagtttctcaattagttgaacaaagcaatgagcaaggtcgtaagatgactgagttgatggaaactcaaattggcagtttaaatgatgcttttgatagcagccaagctcgtgcaaaagaaagagagcaagagtttacgaacaacattgaacaacaaattaagtcgctaacagaaggtatcgcgtctcaaagttcggtgttaactgagtttgttcagtcacagatgtcctcattaaatgaatcatttaccaagcgtgacgagcagagtgctgcaatatctgagcaaaggaatgctgccttagaacagcaaacacaagcaatttcaaagtcaacacaagaattagtttctcaaatagaatcaagcatacagaaccacaaaacgagttcagagcagattattgaacaaggcaaatcacttcaacaaagtgttgagtcatctgtattagcaagtgctaaagcaactgatagtatgcgtgagtctgcgacagaacttaaatcagcggcagaaaaaatgagtatatttggttctcatgtcagagatgccggaaataaactatctggtgccgttactgaggctattgaatcaacgaaagatttagctagccaaaatcaaactacttctgagcgaatggagaatttacgagagcaattgattgcagatacagggcgtttcagagatttagctgatcaaataaatagcatgatcgttaatgcaggcaatacttttgatagcttgaagtcatctcagaaagaatatttgtcacaattacagaaaaatgtaaatgaactggcaactcaaatgaccaacttgctttcagactatgctgaacaagccaatgctcagactaaagatcatctgactatatgggctgattcttcaactcaatatgcaaccactatgaataatgctgcaagagcattagcgggtgttgttgaggatattcaagacaaagtaggtgcataa

SEQ ID NO: 10293 - DNA, 744 bp, Pseudoalteromonas citrea DSM 8771
atgaaatttgcatcacgtacacatgtaaaagtagatgaagagaacccatactggatctctttttctgatctaatgtcggcattgcttgtcatttttattttagctgctgtggcactgatcattgaacttactcaacgaacacaagatattgatgcaggcattgaagagcttaaaaaagcagaacaagcaagacaagatattttgaatgaggtcagggaagagttggcaaagcaaaatattaaggtggaaattgctgataatgagacggtgattcgtattccagaagaaaccctctcttttaagtcaggtgacgatcaaattcctgaagatatggtggaatcagttaaaagtatcggtgcagttcttcattctgcagtaatgaaaaatgatcgattcacttatttagatacagtatttgttgaaggccatacagacagtgttcctattaagttcggtaaatattggactaaaggaaactggggtttaagtgctgatagagcgataacagtttggaagctatggagtgaagaattagttttagaaccaagcttaaatgaattattgaatcattctgaagaaaatttattttcagtaagtggttacgctgcgactagacgagttgagttagatgagtcaacaccagaacttagagcaaagaatagacgcattgatattaggtttactgtaaaaagaccttcgatcgaagatcttgaaaagataaaacctaattacaacaaaaaataa

SEQ ID NO: 10294 - DNA, 1443 bp, Pseudoalteromonas citrea DSM 8771
atgagaataaatttaaaaaagctcagatttacaatacctgaaaacccttttgggaaaaatactagcttgatgttggacctggtgaatggactcaaacaaatttcaaaaaaggcaggtacagataatgacagttttaaggctgcttggagaaaagtttataatgctgtgcaggcgaacaaaaaccttgagaatgtaattgaaaataaattggatattcgtgcacttggtttcgctcttaattcaaaagttggacaacaaatccagcttacaacttctatcttagataaaattgactttttaaccgaaaaaccaagttcgttatttttggagagtttttaccaatattatttgagtcgttatagtagcttaattaatgttgcgtatacgtcagaatggttgattaacgctagaaaaaaacgtaagcagtcaaaatggtttgatgaaaatttactttctcaagatgggcctaaatggttagcacaacaagctatagataaaaatagagatttcgattttatcgttaaagaattcgaacttgatcagtttcagtctggtcagtttatggagctagctcaacgaatttactttgtagaacaactcaaaaacattccagttaataaacctcacgaccttcttacagaggttcaaaaaaaagaggtctatgaatctagctttgatagctccgagttattgggccataaaattttgaagatactaatagaaagagcaccttcgcacgatatccatgagtcttggcttaatacaattatgtcaattgcgggtgacccaagagtacctgttagccatccaagatacagaaagtggtggagtcatgtttcaaaagacatgtctgctaaagtaaaaggctggttatctgggcttgatttaagactttttttagaagcattggaggacttttcttattcttcttatgatcctgatatggaacgaatgtttccaactagaaaaaagtttttggaaggtctttacgataagaaattaattaaaaacaccaagctatatatgtgtaaaagcatggctcgttttttaaaaactaaatacaaagaagagcacctaccagacttttccatagttgatgatggtgaaaaatctattatttatgtggacttaggtagtgcccatatgattgaaggtagccaccaatgtaaattgtggatatatcgctctttgcatgaatctgcaccagtacttcaatatgataaacagcgcaaatcctataggagcctaacaaaagggcttcatgaggctatgagtaactatggccacggcgcatatgactactttactcactctccagcaaactttagctggcagcgcagagctgtagagtcattaagggatttaagggtgccagtaacaataaaagatgttttaaccgcagatgattatcgtgtttatattcgaagatttggagcagattag

SEQ ID NO: 10295 - DNA, 3459 bp, Pseudoalteromonas citrea DSM 8771
gtggcactttcgaacttaattaataaattttttaaaaatgcagatcggtctgtttcgtttaattttattcctgatgaactcgatggcgcctacttttctttagacaaaaaagagtttgaaaaagttagaaatggcactgctaacgagtggcttatacaacaatatgtcactttaaaaatgctagaagagcaagaagaggctgagagcatacctaatggcttcattgtgcctgctaatgtactgtgtcgattagatgattacgttcgagaatctttatcattacctccactttgggatggtgtaatttattctgatataagagggaatacgagtagatctaattttaaggttgagcttgcggtatcagaccctgatggcaggactactcatagttattctatcgaaggtccaataattaaatttggagagacttcgcaatacttactaactcaggctcaactcatagcatttgagtcaaaaaagaaacatgagaattctgctaaaactgaattcgataacttaaccttgcttcataacttgcaattgagtcagaagcaaaatgccaaattacaacttcaacatttcgaaaaattaaaaatacatactccagaaaaaatagcggttgaggcggagttagattcttttggtaatttgatacttacaccttttatggggcaagaatcaagtcacgaagatatacagaaagtgctgggacaaatagttgcaccaaatgccaatactataaaagtaggtgatgaaatcattctatttacggaagaaaaaattaaagccgtaaaagaagtgttggacaacagggttgtacctaagagtaaagtaaaagactttctgcaaaacccaaccgctttcattgatgcgtcgttggtagatttagaccttgggttttcgttgcgtgtacatggggcgacaacttttaaacacgcctattttggtgaaactgatgattcaggagttgattggtttgggaaatcagcttcttctgagcaagtgcttccaatctcaaaactccttcctttagtaagtgattcatcatcatttgaagacgttaaaaaagtaattgatgatgctgtgaatacaggggccaatgaaatcgagtttgaaggtaaattttttgatatttctgactctgacaatgtaagcaaaactctcgatgagattgagatgaaattacgctctggtaatgatgaagaagaggttgatacaggtcttgattcagatagcgaagaagaggcaacagaaacagaagaaacaatagtagtagatatcgaccttaatgatgaagaactatccgaaaattcaccgattgtttcagagaagataaatgatgtatgccgaatgggggacttagattggggcaattacttaagaactccatataagcatcaagatattggagttcgatggattctagggctattggatcaaagccacgaaaatagcgatatcagtggctctttgcttgctgatgacatggggttagggaaaacgttcatggcactttctgctgtggaacatcattatcgtgaagtaagtcaaattaatgaaactcagaaaccgacattgattgttgctcctctgagcttgcttgaaaactggaaagatgaagtagaaaaaacctttaaaacatctccatttagagacattgttattcttcaaactgatggtgagttaaatcgatttaaaaatggtggtgttgaaatcagaacaaacacttcagatggtgacgaatttgaacctcgctattcgttaaacattggtaaagactgcgtcgatagacttgatatgccgggtcgattggttataacaacatatcaaacctttagagattatcaattctctctttgtcttatagattggggtttagtcatttttgatgaagcacaaaatatcaaaaaccctaacgccttagcaaccagagcagctaaagggcttaaagcccaattcaaattagttgccactggtactcctgttgaaaatagcttagcggatttctggtgcctaatggatactgcctgtcctaaatatttaggaagttatcaggattttagagccaaatacatttcaccaatattacaagctgcaagcgatgaagttgaagatattagaaatagagttggtcgggagttaagggttaaagttggggctataatgcttcgcagggttaaggaagacaatcttgacgggctacctgaaaagttcatgtatgttggaattgaaaatacagattggaaatacctgccagaactagggaagacaatgacaggttatcaattaaaggtttatgatggtgctatagagtcgattgaagagtcagattctaatcatgtactgagcacactacaaaggctcagaaatagttcattacatccgcgattagcggatgggggtagtttaaattgcccccaatctaataaagaactagacgaaatattatttgaatcagagaagttaaaaagtttactacagctactagatttaattaaaaccaaaaatgaaaagtgtattattttcgcggtaaacaaacgtcttcaaacttttcttagtattgcattaggaaggaaatacgggctaggccctctttcaataattaatggtgatgcaaaggcagtttcaaaaaaagtatctacacctactcgtaaaacaatgattgctgactttgaagcaaaagaaggatttaatattattgttatgtcccctgtagcagcaggtgttggattgactgtagttggagcaaataatgtggttcatttcgagcgccactggaatcctgctaaagaagcccaagctaccgatcgcgtatacagaattgggcagacaaaagacgttaacatttacgttccattacttcttcatcctgagatggagtctttcgatgttaatcttcataagttactcacaaagaaaactcaactaaaagatgcggttgttacacctgaagaagtgatcccaatgcccggaggtattgctggtgctaaaggattcagtgatgaacaagtaataaatgctgatgatataaaaaaattaagctggcagcagtttgaagcattaacagttgaggtaatgaataaagagcttagtgcagacagtgcttggctggcaagcaatggtgctgataaaggctctgatggggttttgatagtaaataatgaaatggtactgattcaagcaaagcacactattagaggccgctatgatggttataaagctgtgcaagaaatttttgcagccaaaccaatttacgagcatcaaataggtaaaacttgtgcaaagttacttttcattactaatgcgacaatgctttcatcaaggactagagaagttgcaaagcaatgtggcgtcgaggttattaatggaagtgagttggctcagttagttaagaagcatcagattacctttaaacaaatattaatgcgtttagataagaaaagaatgaaagtatga

SEQ ID NO: 10296 - DNA, 2067 bp, Psychrobacter urativorans
atggattggttcaaaatagctcaatttgtgcaagaactttatatatttcctttagtaattgtagcttttgttgcttacgttggtgttcgatttgtcttgaattatataaatcccgcgaaactactaaataataaactagcacaattagctagtgatttagaaaatatgaatggggattttaattttgacaaagagctattggatataaagtttgaaggtaatacttcattaaaacaggcatggttaaattataaaaaaacgtttcatgatattcatgaagtgagagatggtgaaagtgttatagattactcacgagcaactgtgccaagtgaaatgtttttcacggaatccatcgtggtagacattccattaaaagtagatttttataagcacttgcccggtatgatcactggtgttggtattattgtgacatttgcaggtctgttgattggattgttagcttttgaccctgcaggaaaccctgacaatgttcaagacagcttgacattattgctaaaaggcgtaggagaggcctttatggcttctggattggctattctcacagccatgcttattacgttttttgaaaagtcatggttaagaaaatgttatgagcaattacaacgtttaaatactgctattgataatgcctttacttttgatgaaagtggggaggagtatctggctaagttacttaagtcttctcaagccaatgaagcgaatgcacgacagcttaaagatagtctggttaatgatttaaaaaccatgatgactaacttggtcgaagagaataaaagaaatcaagctgcctttgcttcacagctcagtgagtcttatgctcaagtaggcatatcaacggcaactcagattggtgaatctattgaaagcacgttgaaagagcctttagataaaattgcttcaagcgtgcagcaagttagtggtgaccaagggtcggcagtacaggatcttatgactgatgtgttaactgcttttatgagtaagctggaaacgacatttggtggtcaaatgacaggtatgagcgagatgatgacacagtctgtcacagctatgcgtgagatgcagtcaggcttttctcaattaattacagatatgcaaactaatagtgaagtgtcgaccaaaacgttagagacccaaatggaaaaaatgatggaagatattcatcaaaagcaaaatgagatgtctacccaaatgaacgaaatggtagaaaatctatctgcaggttcagctaaaattggtgatcaagggttatatgctgttgagcaattaaatagtaaggtttcagagcttgtctcaggtttaggtacatcaatgtcagacctgctgtcaaatgttgcagagcaacgtatcgagcaagatcgccagatatcagataatcaacaaaaattgcacgaacagtcgtctgtattgattgatgatttgggcagtgaaattaaagagctcattacgcatagcaaagaagccgttcaaactcataaagaaaacatccaaaaactatctcaggtgactaccgatagtatcactggtatgaatagtggtgcagaaagaatgcgcttggctgctgagcaatttactactgctggtagttcgctaagcacagtgactggtaagacatcagaacttattgcacaggttaatacgacttcagctaacatgacaagtgcaagcaataaccttattgaattgataagagattataagaattctcaaaacagcgttaaccttgcaattgaaacactggaaagtctcattcagcagtcaaagtctgaagctggcatgtctagtcaaatgcttaatgatatgcagaatatgacgacagctttaagccaagtgaagatggagatgcaagagtatttagcagaagttagtgatgttctagtgaagagttttgatagctttggtacttccgttgaaagtagtttaaatcaatcgttggtgtcttttgacaacacacttaaccaagccgttcaacgtcttgcaactggtgttgaaggcttaggtaatgtggttgaagaccttgaagatcttacccaaagaactagaagctaa

SEQ ID NO: 10297 - DNA, 732 bp, Psychrobacter urativorans
atgattggtaataggtacgctaaaaaacctcgttcaaaggatgagggtgagaaacctttttggatctcatttgctgacttaatgacagcactaatgacattgtttttggtagtgatggcagtatctttaatggtagtcactaagaaaattaacgaagcaacacaagcagagaaagagcgaagttcagagatcttggatatttgtactagtattaaagacgaccccactttaaagaatcagctcatcaccgtagactgtaaagagaaccgtataaattttggtgaggcaggtcgctttgggcataatgattaccgattgaattcagagggtataaaggctttaagtgctttagtacctgttgtcttggaagctgccaatagtgaaaacggcaaaaaatggtttaaacagattgtgattgaaggttttacggatactgatggatcatacttatataacctgaatttaagtttgcgtcgttcggagtgggtaatgtgtagtttattggatcccacatttaatcaagagcttaccttaactgacgcgcaaaaaaatcaaatcaaacagctgtttttagctggaggtgtatcgtttaattcagcaaaagacagtaaagaagcttcgcgccgtgtagaactaagaatgcagttttatggtttaaaagaaaaagacagtgctgaggcgcagcctattttcgtttctgctcctatagaaacctgtcagctggcaaggtga

SEQ ID NO: 10298 - DNA, 1374 bp, Psychrobacter urativorans
atgagtatagctattttaaagcagaggctgaatcaaagtattgataatttctctgaacccgcccaaatacataataggtttgtcaggccgagtaaattaatcaagacattagagcttattgaacgtaagtttgatgagatggagagtattcagcctatcgaagaaaaaattgttaactcaattttaaaattagaaaagcagggtaaagactatctgacaaaacgtgattggaagaatctagcttggtcactgagtaagaagttactagattatgaggataaaatactttttactttcaaaggtagcgagcttattgagcaatttagtaaaatggatcctgagttactaaaggttgtttatttccctctgctttatagttattttgcggtagaacaagctgaaataaataaacggcccaataactggattcagctgagaaatatcttaaataccaatcgctctacgttgtttcgagccactcttaggcctaaaaaatggcttaccacgttaacggaccatcctgaagtactctcactagatccttccaaaagatttattcgtgactttttacacaatagcgatgacagcagagtgagtagtcagttagaaagcttaagtatcgctcctaatagctggttctgggatagcttggtaaactcatctatcaagtcagtcaagacaatgaatgaagatgactactttaaagtgataccacgtttcttacttcttctcgaaaagaatccaatttatacgacagatattttaacggctttacttgaacgttatgcttctacttcaaaacgtacgcttgtacacgaagctttaaaaaacgcttgtttgacgcaatggggcaatccgcaatatgactcagcagcaggttggcggaatgtaaacccagatactagaaaaatggtggttcaatggtttgtaagagcagatttagaggctttcttcaccgtttttggtattagtgctgatgtccgaaggtttaattactggatgagatttcttaaacaagtaacgctctcagaagtattcttaaacgatcaagcaatgcgttatccaacagcgcaacaagcagagtttaagaaaaataatgcggggagatttaaaaagattgtcggtaaaagtaatgcttcaaacgcttttatgataaaaataggtgggttctatatagtagaattctctgagatgaataatgcgacctacttttatcgaaagcttccataccctccttttcaggaaaaaacaggtaaggtagagattactagcttaaagtcaacttctaaggctcaattttacttatcacatcaaggagcttgggagaaatctttcgatcgtagactacaagaattaggaatattcccagattaa

SEQ ID NO: 10299 - DNA, 3228 bp, Psychrobacter urativorans
atgaaactagcattttggaaaagaaataaaaacaagcagaccgcaatatcagaaaccatagtcaatagtgtcgagcctgcgccattgcaatatgatgacattggcttaaaacatagctacacatcagcagccaaaactgatgcagatttctactgggagagtttagccgatgaagaggttgcttatcagctagatgatagctatatattgccatgggaagagttatttcatattaaacaagaccctgatcatagcgatgtcattaatttgctcaacttgccgctatcaaatgatttatatccgataattcgtagtgagaatgggctaagtgattctgattttcaaattattctggatggttggtgtgataaaaataagattaagtttaaaggctcagtcaagcgaacaggcgcaattattagttttactggtaaagaatgtttattgaatgaaagtacttggaagttattagagaaaattaaagagttctctcgtattactgataaagataaatcaatcaatcaaaaatattgggcgcaaatacgtggtttagcaaataaaagtgaggcgaacttagatgagttcctacgtaaaacaatcgtactggccccagatgagctccaacttaaccttcgtaaaaacttagttagtacagagtcagtggtagaggtgcagcctgattttaaagactcgccttcaaactggctacaaacctttgataagtataatgaagtgcaggatgaatatacaattagcttaccagaaggtggtttggcacacgttatcatcgagccgcaagttaaaagtgtactaaatgaaattaagaagatgccaaatcgtcggataactggtgagcgtgcacagacttttttacataatccttttgctcagttaggggaggatgcgctagaggttatatctccagagggcttcgagcaatccaaagaagaggcagaaatatatagctaccgtttgctagtagataaagcctatgatgaagcatcgcattttagttcagctcagttaacgttgcatgaaaactcaagtagagcacaaaaccctgttcttttagagctttcaaatctagagcaagctcaacactttattgctacttatgagcgatcatcacctgtgttcctatgggcaggttacagtatagatagaacaaactacctagataaccagatagaagaacttaaaagcgatctagaaaaaattcaacagtatgatgatgaattgcaagctagtactgtattagatttagagaattatagtcctagagtaatagggattggtgaagctgaaaaattgagctctgaagccattcaaaaagatagtggtgaatccgaatggttaccacagaattttatagatgggtcagccgacttatctcaatttacttctgataatactgatgccactactgagctacttgagcaacgtatccagcatgcagaggcagaaggcgagagctttgttctacatccgaacagcaacgtctctattccattagatgatgcaaaaaaattacttaatgatctgcgtgattcaaagagtgatgacctagcggaaaacgacatagagcaagagcagccaaaacctgataaaacaaagaaaaaatctaccttattgattgccaataatatcgatgaggctgactttactaagaagcgagctgagattctgacttttgatgaaagtaatcgccctcaggccagattgccatcaagttttagaagccaagaatttagtctgaaaaagcatcaagagtatggtatcgcttggctacaaaacctatatcactatgcaccaactcaagtaagcggctgcttgttagcggatgatatgggattagggaaaactttgcagttactttgcttcattggtgaatatctagaaaccgcagaagataaaaaacctgcattagtagtagcgccagtttctttattagagaactgggaggctgaaatcaataggttttttagtgcaaaattcggaaaagtgttaagtttatatggcgataacttaaaacagcgaaaaatacccaaacacctaatatctcctcaattaagaaacgattacggaataacaaacctacttgaagataattggttaggtggggcagatatcgtgctgactacttatgaaaccatgcgagaccttgagttttctttagggagggtggattggagtatcatgatatgtgatgaagcccaaaaaataaaagtgcctactgcaatggttactaaagctgctaaagcccaaaaagcagactttaagattgcttgtacaggcacgcctgtagaaaactcactggttgatctatggtgcttgtttgatttcattcaagaaaatctgatgggctcacttagtgaatttaataaagagtatcgacgtcctattgaaaagaaagacgatgaagataacgcgataatagattaccttcgtaagttgattgagccacaagtattaagacgtatgaagcacgatgtcgctgagttgccagcaaaacacgaaattaatgattgtaaaaatattgaaatatcaacgttgcaacgcacactatataaacaagtatcaaatgattatagaagtttatctgagcaaggccacaaaggcgttatgttaaaagcactacatgacatgcgaatgatttgtgctcatcccctgaatttgcaagaacaagcgactatccaagattcacctaaagccgaatggttaataaagactttagatagtataaaacaaaaagatgagaaggttatcatttttactgagtttagggctattcaagtgttcttaaaacgccttctccttgagcgatttggattaaacgttactacagtgaatggagattcaaatactaacagtagagtaggcttaactcggcagggaattattgataagttccaagaggtgaatgggtttaatgtgattatcttatccacggtggcagtgggttttggggtgaatatccaaaaagcgaatcatgtaatccattatacacgtagttggaaccccgctaaggaagaccaggcaaccgatagagcttaccgaattgggcaagataaagaggtttttgtttattacccatctattgcagcagatgattttgaaacctttgaaatcaaactggataagctattatcaagtaagcgtagtcttgctgatgatatgttgaaaccaaacgtagagcttactcaagagctgattcagtcgatttattga

SEQ ID NO: 10300 - DNA, 1623 bp, Thermoanaerobacter wiegelii Rt8.B1
ttgatttttaaagaaattacactttttataataagattaatcccagattttaatgatattttttgcttcggtattattctcttagctgtatttgttttctttttagcccaccgaaaacctaaacaatatactagacttgtcgatttatatatagaaaaaatccacaacataccagataaagatatcttactaagggaactgattgagctgacagatgaaataatagaaaaagagaaaaatgacaaatacataactggattacttgaaaagtttaaaaacaggtgctatagtggcaatataaaaaatgctgtggatgttttggattatacggctttggttgaaattcctggtaagcgaaaggtatttgacatgatgccaggtgtatttacaggtcttggtattttaggtacttttgctggacttgttttgggtttaagtgatcttaacttttcgggtagtactcaggcattggagcaagggataaacaacttaatatcaggaatgtatctggcttttcttacatcaatagcaggccttgtttcttctttgggatggtcttattttgacaggaaacggcttcataattatagagaaaagatccattcttttcattcctcgtacaaaaaagtgtttgcacaagaggaaatagacgattatctcaaagacataagagagattcaggaagagcaaaagacatatatgcaaaaatttgtatccgatttatccctggagcttagcaatatgttgtcgaatatactggaacaaaggatattccctgagttcgccaatattataaatcaacaggttacatctaagatcgtggaatcctttgacaatacgattggagagattaggcagtccactgagagctcaaaacagatgattgagagatttgctaatctggcatacgataaccagttagaaggagttcaaagaattgttaataagtttatagaaagtatggatctgtcattaaaagggaaatttgcggatttgggcgagtccattggcgagatgataaagtggcagcaaatggttaaagaaggtatgaatgaacttatagaaaaattgtcgaataacatactgaatttacaggatgttaataaagctattgaaaacacaattataaatttctctgattactttgataatgtcaatgcggctaataaccatctggttgagaatatatcaaagttagaatccgtctctttaaacataaatggacttattgaagacatgtcaaaaatgataaaagatatcaacgagcaaaaggatttattgttaaaagataagacagaacatattcaaataatatctagatacatattggagatcaacgaaaaattcagcttgcttgaaaagagttatgccaatataagtaaggatattgatatcttaaacaacagcctcaaacaatctatggaagagtttgctaataaaactcatgaagggcttaagcggagcttatctttatttgatgaagagcttgccagcataacaagctatctaaattcgacattaagcgaaattgaagaagctgtagatgaattaccgaaggtgattattgaatttaagaataccttgagaagcgaagagaaggagatgcagaccattgaaggatga

SEQ ID NO: 10301 - DNA, 693 bp, Thermoanaerobacter wiegelii Rt8.B1
ttgaaggatgagaacaaagtacacgattactggcagtcttattcagatttgatggctgcattgcttttgatgtttgcccttttaattgtcattatgatttataaatatgccgccattgctgctgaactcagtttgcagaaggcaaaggttgatgacttaattggcgtgagggctcgtataatagatcagcttttaaaggagtttagcaattcagatatgacgcttaacatagatcctcaaacgggagctataagctttagcgaaggtgtattctttgataaggataagtttgagttaaaagaggaaggcaaaaggtatttaaatgaatttatccccaggtacttatcgatactcatggatcctcggtttaaaaagtacatatcacagataattgtagagggccataccgatgatactggtgattatatgtacaatctggagctctctcagaagagggcgtttgaggttgtcagatatatattgcaatctaatataaaaggcattgattctaaaacaaaagcagatttgatgtcatatataacggccaatggccgttcgtacagccagctgatcattgaaaacgggaaagtaaacaggcagaaatccagaagggtagaatttaaatttcgcttaaaagaagaggaaatgataatggagatgcaaaaaatcctcaggaagggatctgtaaagtga

SEQ ID NO: 10302 - DNA, 2795 bp, Thermoanaerobacter wiegelii Rt8.B1
ttgataaagatttcaaaagacttatcagataggggtattaaaattgcttgtcatgttttaaaaaagagaaagcctgttgaaataaaaataccgctttttttaaacccagtagaatggctaaaggatatcttgcctgatgaaatggaggcattaaatgtacttgaaggcttgtggcaggaaggtattttgcaggaagaaaacaatttttatgtgataccttatgaatttttatacaatatcgctgaagatcagaggtgtatactttgccttcctgttgaagataattcgataaaagtccatataaaagcgaaaggaatccttggcagtagtgattttgcgttgatacctgacatatacataaaagatgagaagatggggcctctggatagaagaattaaaaatgtagtgtcccacaacggcagcctttatttaataccattaaatctttacagccttttaaatgaaatagatgcgtataagcccactgctgaccctctattgcaggcgaagattatcgcaaaagttaaatataaagctaagtcggctaatgtgacttttgataaatttttggaaagcgaagaagtgtactattctgaaaaactggatgtggatatagttaagcacagcgacgatcatatccaaattgtaccggttttaggcaatgaaattgatagtttattaaaagatagcaaagataaggtcttaaaacagcataatactttgtatggtgaaggtataaagaggaaaagaatttttttggaagatagagtcgtacaaaattataataaaattcttagacaggggcatcttaaagggactcagatacccaggtttttgaccgacccatattctattttacctgaaaatatagatttgtctaatttcagtaaaagggtaaaagaactcggacttaaggtctatagggctaatccgtatattaatataaaaagagataaaaattccgggtggtttgattttgagataggtgggatcatacatgaagataccggttttggtcttgatgaagatggtgattatacacggaaaaacgaactgaaagataatgctaagatcgatgtggaggagtataggcacctggttcaaaaagctgttgagagcggagaagattatgtaaattataaaggcaactggataaaaattgatagagagcaggctagcagatttttaaatatagttgataatgagcaattcaggaaaacacagaggatagatattacacgattgccttatgttttgaaaatatatgaaaacatagagaatctggagtataacgaaacggcgttaagcttgaaaaaacagcttacaggtaattttagcataagcgactttagatatcctatgtatttaaaaaattgccagctgtacgagcatcaaaaggaaggatttttatggtttaagggcctgtacgaaaatcacatgggtgggctgctcgctgatgatatgggtttgggaaaaactttacagataattagtttcttgtgttatctaaaagaatgtaatgaaattaaacctacgctaatcatagctccatatactttgttagatgtatgggagagcgaaatacgtaagttctctgaaattacttctgtatataggcatacaggttacaaaaggtataaaacacccgagcttcttaaaaattatgaaatcacgttgaccacttacgagacgcttgttagagatcaattgctgttagggcaaatagattggcaggcagttgtttgcgatgaggcacagaaaataaaaaacagcacaactttgactacatcggctgttaaggccttaaaagccagaatcaagatagctatgaccgggactcctgtggaaaacaatctaggtgagctatggtgtataatagattatgtgcaacctggtcttttatctagttatcatgagtttagaaagacgtatcaaatacctatagaggatgctataagcaatagaagtgaagcatacgtagaagtaaagaacaaactattgaacacgataagacctgtgtacctgaggagagtaaaagatggcattttatcacttcctgcaaagaacgagtttttttagaagtagaacttacagcattgcaagaaaaagtctattgtcaattgatagaagattataaaaataaggggaaaagtgaatcaccccttggtgtattgcaaaagttgatggaattgtgcgcccatccacgccttgtacgagatgaaggtgaagtgaatacctttcaacttttaagtgagtcagggaaacttcaacgccttatagaacttttaaatgagataaagcgtagaggtgaaaaggcggttatatttacccattatataaaaatgcaggcgatattgagaaaagtcatcatggatgtttttggcataaattgtcctgtgataaatggcaacattaaaggcgacaggatgagcattattgacaggttcaaagaatcttccggctttggcgttattattctctctacaagagctgctggcgtgggtgttaccataactgaagccaataatgtgattcattatacaagggattggaatccagctgttgaaaagcaggctacagatagggtttatcgaataggacagacccgcgaagtaaatatatattaccctatatgcataagcagcagaggaaaaacagtggaagagcgtttaaatgaggtattacagaaaaagcttcagcttcttaacgaagtgattgtaccatcgagatgtttgagcataacagaagaaaattatgactatttattgcaggatttttccgattggtccgcatga

SEQ ID NO: 10303 - DNA, 2073 bp, Lautropia mirabilis ATCC 51599
atgaacgtgccgcttgaaagacttatgtcctttcctactcccctgctggtggtcgggggtgttcttcttttccttgtcgctacttttcttgtcttctttctggttcgtggaggatttgtctggtggcgcctgtttcagcttcagcgtgcgttcgccaggcttaagtctgggggaggttcttctacgggccccgattcgtgcagggccgtgtccgaactggacaaggcctttgccagggataggcatctgcttcatctctggaaggagtaccgcgagtccctgcatgagcagagggctgtgcaggatggccaggatgtggttacggcgcttcgagcgacgatgctggcagagatgtacttcaatggccagtccgtggtcgatggtcgtcttcgcacagagttcttcaagcatctgcccgggctcctgacaggtatcgggatcattggtaccttcactggcctcatcgggggtcttgagagctttcatgtcagcgaggatgccgatacggtacgtggcagcctcagtgggctgatgaatgaggtgggagaggcgtttctcgtatcggcgtcggccattggcgctgcgatgctggtgacgttccttgaaaaactgcttctgtcatcgctctatcgtcggatagagaagattgctcaggacattgatgcttgctttgtggccggtgcgggtgaagagtatctttctcgcctggttcgggcctcggaagactctgccagtcagtccaagatcctgaaggatgcgctggtcaacgaactgggcactctcctgcgagagctgaccaagcaacagattgagtcctcccagcagcagcagcagcgtcttctggaggacatgaaggcctctgccagggagaacaaccaggcgttgggtgacgccatcaacggtgtcttccgggagcccctggagaagatcgcgggtgctgtacaggtcgccagtggtgagcaaagcgcgatgaccaccaccatgctgcaggatgtgatgagtcagttcagcgcgcggctcaatgagctgttcggtggccagatttcgggtttgaacgagctgaaccagcagacggcacgcagcatgcaggaggcagtctccacacttcaggcgctggtgcagaacatcgaagcgaccagtggccgagccagtgatgacatggcgaagcgctttgccgaggccattgcccagatggaaaagcgccagcaggccatgaacgagcagtcggaagcctttatcgggcagatacgtgcgcttgtgtcccagtcgacggctgagacgaacgaaaagcttcgcgaaaccttggcggccattggcacgacgatgcgcgaagtaatgaactccctcagcgaaagtcaggaccaggtggcagagagcgtcagaaagcgggaagagacgatggtctctcgcaccgaatcggcggtcagaagcctctccgattcggtggattctgtcattcagaagatggcagagatcagtacccagatagcgcagagtatcaataaactggaaggggtcacaactacatccattggcaagatggagagcagcgccgggttgcttgcggctgcatcgttggattttgccaaggcggggagcggtgtggcaggtgttctggaaaaggcaaccacggcaagctctgggctgacggaggcgtcctccgctttccaggacagcgcggcttcggtcaagagcgcactgcaggactaccggctgcagcgtgatgccatggctgcaatgacgaccgaattgaaagccacggtggaggctgctcggcgagaagcgtctctgaccacggatatcgtttcgcgcatcgagcaatcagcgcaagggctgggcagagcgcaactggcggcgaacgagtacctcaatggcctcaacgaggtgctgggcggagcgcaaggggcctttgccgcttccattcggaagacgttggacaccgccaatgtggactttcacaagaagctttccgatgccgtcaacctgctgagtgccgcggtgagtgagctggaggcgtcattggcgtccgttggggcgtccacgccccccggcaaatcggttggacggagttga

SEQ ID NO: 10304 - DNA, 711 bp, Lautropia mirabilis ATCC 51599
atgctgggggcgcgtctggttatgaaccgttcacggcgtgacgaggccgagaaaccgttctggatctccttcgccgacatgatgacggcgttgatggtgctgtttctggtggtaatgagcgttgcactgctggcagttaccaagaaggtcagcgagcaggagcgggcagagacggagcaccggcaggatatcgccgagatcatgagacgcttcgagcaggcagccgaccgttatgaaggcatccggattgatctgtcccgtgccgtcattgactttggcgaccgtgcccggtttgcctttggaaaatggaacctttcaccagagcaggaaagcgtgttgcgccagttcgtaccggatatccttacgctggccaatgatgagctgggacgccgcgtcatgaagcgcatcgtggtggaaggttataccgacaggacaggttcctatctcagcaatctgaacctgagcctgctgcgcagccagcgggtgttgtgcgccatgttcgcgcgctctggtgctcatctgttgacggaagaccagaaagccgatgtccgcaatctgttcctggttggggggtattccttcaatgcctcgcgcgagagtgcggaggaaagccgtcgggtggagatgcgcattgagttcctgggcattggggagcgtcgggcggacccggtacctctttccaatgattttggcgagtgtgctttgcgatga

SEQ ID NO: 10305 - DNA, 1698 bp, Lautropia mirabilis ATCC 51599
atgaatgcccttcagcagctggaacaccggctggcgcgatccacccaggatgcctttgcccacagcccccagttgcctgaccggggggcgtgggagccgatacttgatgcagtcatcaaacggatcagagaatcaaatccgggcctgaaacccggcaaccttccggaagatcggatgcaggatgcgctgggcaggttctgggagggcatggaggtcagggactttcgtgatgcctacctgctttcgcatgccctgagtaccccgtatcgggggacaaacacctgcgccatggatgatgccggacgattcgacaggatcctggcgggggcagactcctgggtcgggcggccgaacctgtaccggaggtgctaccgagggctggtgcataactacttcagctatggttcgtttcccgatcgtgtcagcgagacgggcaggaagaactggagtgccttgcgccagtacctgtacgacaggaatggtgtcatccaggctgagcgtttcaacccgccgtgggtgcaggtggcattggacaatcgtcagctgttcacggcagatccggttggcccctatgttgccaaggtcatgcaaggggactacgccacgatagacagcctgaaggagcaccttggcatcgaacagtcttcctggttcttcagacagctcattctgtcgcagatcaggcaggcggtgggctatgaagatcagcggttccggaacagccttgacagcatgttgcagctgatccgtggcaacctgatcctgagaaatgaggcgctggccatgttgctggagcgctacaaggaaataaaggggcatcccatccatatcggcctgcgagaccattccgtgacgtggtgggagaacccatggctaccctccaacaagacggcctggcagagggtgtccgaagatgcacgccagatggtctcgaactggctgaaaggggagttcatcgaggcgttcttcacgaaacttgcgcaggacggaaccagcgatcggcgtcgtgtcaatttctggaagcgctacgtgaaggccatcgaccatgtggatttcgctctggggcctacagcgcgcaactcaagggatccggacttcaaggtgttgaaggagaagatgaagggtctactctggtaccttgatgcctccggcaacaacaatgccttcatcatgagaatgggcaaactggttgtcgttgagttcagcgacatggggaatgccttgtacgcttatcgtgatgaccaagggctgccgtttgatctgacaaagccattggccttgccagtaaacgctcggaactccctgaagaattcggccaggcgtaacaagctgactcacaaagacgggatatacggctacagtgagtgggaagaccactttgagaactggctgcgcagtgagggcgtgtcgccggaaggccggggtgatggtgcgcccgctcgacctggccggcagggagaaggtcgttccacggaacatgttccggagcggccttcaccaccgccgggacagcccgtttactacccaccgctgtacaacgttcttgatatcgccagaaggcatggtctgaagacaagtgatcttcggaagcaaggtggatacttctgggtcttgacggatgactctgatccgcagattggtaacgctctgagcatgcaggggttgcgctataggcccggtaaaggttggtacacatag

SEQ ID NO: 10306 - DNA, 3330 bp, Lautropia mirabilis ATCC 51599
gtgttcaatctgcgcaaggctttccgggcaaagcagactgcatgctggtaccgtcgtctggatgctgttggcatccgaatctcgcgggatgcgtcttcaggcgggatgcccattgagtctcccctgctgggaggctatctggagcagctgctggatgacggctggctgaccgagacgagtgatggcggtttcctggagtgggagggtttttatggcagcctttccacggccatggccgagatgcgctcgatggatgatcttgctggggcgttacagcttcccgaggagacatcggcccaaatcgtcctgcgcagtgaagggacgctgatcgacgcaggcttctcgatcatcattgcaggctggcgttatcctgatggcatcgttcgaagcgctcgtctggagggagcgatcctgcagctggatgatgttatggagcgtctgaccgttgagcaatggcagttggtccaggccatacgggcattcagccgcaggccagacgcggagcgcgatgatctgtccaaccggagggcgtggggccatatccgttctctggccttggcagcccatgccaatctggacgatttcctgacacgttccgtcgttgtgacgccggagcacatgctgctggcgtttcgccgctctgccatcgtgtccgatggcccggtcgtcgagatcattcccgggtttgatggcgtgccggatgtctggctggctgccttcgatcggaactccactgttctgccacggtatgacctttctatgccggaagggataattcaggtgctgatcacgcctcaggttcgtaccgtactggagtcgatcaagcggatgccagggcggcgtgtggctggcgcaagggcagaggccatcctccggaatcccatggcggctctgggagaggatgcccaggaggtgcttgatccgaaacagattgaagaggtcttggccggtgccggcgtgctctttgagcgcttcaccccccgagtcgtatgggatgcagagggaaggttgctgcacatcggcttgcttattgaaccagagggtgcagaggggcttcagtcatccgagattcattggctgtctgacgagcaggtcgagaatttcatcgaacgggtggagcgtgccattcaggcgcagcgccagctggttgcctggaatggacacgatctggcgatcaggggtgaaacacctgaacatcttcatgtcttgcgtgaagcgctcagagccaagcatgcgcagatggaaggcattggctatgagagggtccatgacctgggcatctatagcgaacgtatcgcaggcattgggcaggacacggtcctgcatgtgtcggcggtggggcgggataaggaaggtgacgtctggtttccagagcagattcctgaattcatcgtctatacccctgaggggcgggagctaccagtccggattccgaccgatcctgaaaatttggccaagcttgaaaagagcgcatgggaggcaaagtccaggggagagacggatgttcaggtcccggggacatctgacaagctgcccgtggatgaggtgcttcgcctggtcgggcgcctgaaggtaccgatgggtgaggcgggtaaccccaagagccccgactccggtcttgagaaacccaaggacaaagagcgcgatagcacgcctcggcagtcgggttccaagaccctgatactgctggacaacatcgatcaggtcgactacgaggagaagagaaggatagctttgagcggagagaggacggcagcccgggtacccgcatgtatcaggtctgggctttcattgctccctcatcaacgggagggggtggcatggttgcagcacctttatggcctgagatcggatttccaggttcggggggccattctggcggatgatatggggctgggaaagaccttccagctgctggccttcatggcatcactcatcgaagagaatccctccatcgagccgatgctggtggttgctccagtgtctctgctggagaactgggcggaagaggcggacaagttcttcgtccccggcgtgctgaccctgctgacggcctatggggatgcacttgcgccattgcgcgttcccaggcatctcattgatgaacgtctgaggaacgaggatgggctggtgaggttcctgaagccgggctggatcggcaatgcccgggtggtgctgacaacctacgagacgttgcgggatttcgagttctcttttgccgccgagaagtggtcagtgatggtgtgtgacgaagcacaacggatcaagaacccggctgcgatggtgacacgtgctgccaagaagcagcaggccggtttccgggttgcctgcaccgggacgcctgtcgagaacaatctggcggatatctggtgtctgttcgattacatccagcctggtctactgggggcgctcagtgatttcaccaggcgctatcggaagccgatcgaggcatgtaccgatcaggagaggcagcgggttggggagctgcgcgcacgcattcagccgcaggtactgcggcggctgaagcaggatgtggcgaaggacctgccccaaaagatcgtcgatgagggctgccgccgccttccattgtccccttttcagcgcagcctctattcccagactctggagggatacagagcgtccagggagggccttgggaagtctccgttcaaaaaccagcttggggtgctgcattacctgcggttgctctgtaccgacccccaggagttcaacatgaagggtagccagcgcgaccggttggatgtctaccgagcaaaggcacccaagatggactggctgctgacgcagctgaaacgcatccagcgctggaacgagaaagtcatcgtcttctgcgagttccgcgaggtgcagcggctgttgcagtcctgtatcgaggtagagcttggctattcggcgaccatcatcaatggagacaccagtgcttcatcccggaacgtcgatagtcggcagaagcgcatccgggcatttcaggagaagccgggtttcggtgtgctgattctttcgccagtcgcggtagggtttggggtcaacatccaggcggccaatcacgttgtgcactatatgcgaacctggaatcccgccaaggaggatcaggcaaccgaccgtgcctatcgcattggtcagacgaaggatgtccacgtttactatcccaccgtggccgccgatgatttcgtgacctttgatgtcaggctggaccagctgctgaccaagaagcgggagctggccggcgacatgctgaatggctccggggacatcagtggcgctgaattcgacaccatgctcaatgaacaggtgggagcggcctcatga

SEQ ID NO: 10307 - DNA, 2067 bp, Acinetobacter pittii; identical to SEQ ID NO: 8399

SEQ ID NO: 10308 - DNA, 732 bp, Acinetobacter pittii; identical to SEQ ID NO: 8400

SEQ ID NO: 10309 - DNA, 1374 bp, Acinetobacter pittii; identical to SEQ ID NO: 8401

SEQ ID NO: 10310 - DNA, 3207 bp, Acinetobacter pittii; identical to SEQ ID NO: 8402

SEQ ID NO: 10311 - DNA, 1944 bp, Sulfobacillus acidophilus TPY
gtgggtaatcccggaaactggatttattatgcgatttcctgggtcggtagcatcaatcggttcggggccttatatctttggctttttttattcctgaccagcggcgtcctggtctggcggattcgcgtggaaggcggcattcggtccgaaatgcgccaattgaccgcttatctgaaagaacacggtacctccctgccgaccgttgatcaatggtttcacgatcacccgaacgccaaactccgtccgctctggcaacaatatgtggacgccgttcagcaccaccaagacggggatcctgtccatcccgacattggacggtttttctccgaagacgccattttattaggcatcgccaatcgccggattaccgaggcggttcccagcctattgaccatggccggaattttagggacttttctcggtttggtggcaggattacacggactgaaccccaatgccccgaatggattgggggcggggattggccagttggtgggcggactgagcttgaaatttacctcctccgtttacgggatctttttggccttagtctggatggtggccgaccggttttggtaccgatcgttgtatgaggcggtcgttgccttgcaagaggcgctaatcgcgggattttccgctccgccggaggaattgtcccttcaacagatcaaaaatatcttggaggatcaacggcagaccctttatacgttgacgacagatactttaattccccaattaatcgaaggattttctcaggcattgcaaacccagctatttcctccgctcgacgaactaattcggcagcaacatcaaacgaccgcatcattggataatttcggccaacagatgaccctcatggcagaaaggaccgcgaccgcccaagttgacggacttgaacggattgcccatgaatttatcaaccaaatgagtgctcagacggtcgaagtggccgaacgactgcatgaatccctgcaacaaacggtcaccgtacaagaacgtatcgcaacgttggcgactgatctcttacagcatgcggaaccattattggctcggttccaggaaacccaacagctgcagaaacaactatgggaacaaggacaccaggtccataccgttctcctcgaaggggcccaatattggagtacgttccataccgaaatacggggaacgctcgaaacgaccgaacatcgattagaggcgttcttcagtgccgtggaattacgcacaggaactctccttaaggatcttcaggcgttggaagaaacctttattgccgagtctcgctcggtggtacaccacatacagtccctcaacaatcaatgggaagaacatctccgactgctgaccgaccgccaagcggccctgggtgagtggcaaaaaacctatgaagaacaaattagccgggcattaggcgacttcccccggttagtgcaagaccttcgggaatcgtcgctccaagtcagtcgagaaaccgaacgggctttgacccaatggcaagaccgggtcgccggtgatttggaaaaccttacggccctttggacccggcaatcccgcgaattcaccgaactggcccaaacgttgcaaacccaattccaaaccgagttgcagcaaacggtcgcccaatttcaggatgtcgggcaagccttgggcaaggccgcccatcaattacggaaagaagcgggagaagcactggaacaactgcaaaccaatttaactgcgggactgcaatataccttctcgcaatttgacaaagagcttggacaggccgtcacccacctgtccggcggtgtccatgtattggaacaagcgattaaatcgctaagccaaccggtgaatcacctgaaaacgcagggcgaagccctgacacacgaggtaaccgggatcaatcgacacctgaaagtcttgaataccgcattggataagcgaaacgaggtggccgaatga

SEQ ID NO: 10312 - DNA, 633 bp, Sulfobacillus acidophilus TPY
atgtattccgatctgatggccggcctcttattgatgtttatcctgtttttggccgtcagcgtcatgacctatcaccgtctcctgcaagaaaaagaggcccgcatcaaccagttgctcggggtccaggcatccatcgtgcactccctggaacatcagtttcatgcgtcccacttaagcatgacgctggatccgaaaaccggtaatatccagtttgccagtgacgtattgttttcttttaattcctatcaattgtcgccggccggggaggcccgactcaaagcctttattccccaatatatctcggtgttgcttagcccacggtaccgaaacgacatttcgaccatcgtggtcaaagggtatacggatcgccagggaacgtatctgtataacctgaacctgtcgcaggagcgggccctatcggtcgtcgacgccattttcagcccacagttcggtaactttccctaccggaatctcttaaagcagtacattactgccgaaggtcgatcgtacaacgacccggtctatatcgacggccggtatagcgcccgcgcctcgcggcgggtggtgttctcctttgtactgaaaaacacccagatcatgcaggcgattcaatcgacggtgaaaaccccatga

SEQ ID NO: 10313 - DNA, 1197 bp, Sulfobacillus acidophilus TPY
atgagccgcccgcacggatttcgttttgaaccggtcggcctgcgggcggtgcgagaaacgttggaacaggaatacaccaccgaccgaaccaaaggccaacggctgggaatgctgttccaatcccggctggacactttgctccgaatgctgggcccattggacacggttgtacagattcggcaatgggccgaaggattagaacccgtcgacgtctatgtgcttttggtgcatttcccccaactgcccgaaccggtccgccctaaaatcctggcggtggcattggtccatccggatccggtagccgcctgggtcgcttgggatcatttcgtcaaatggccacgcgatccggaactcgtcaaattagtgtccgtctacgtcaaccagcaccgcgtgaccccgtggtgggacgcggttcaggacggtaatttccggatggacctgatgaaggccttttctcggtcggcccccctcggtccattggcgaagattctcgatgaccacggcatcgggtcgggtactccgctgatggggctccattggggtgaccccttaagcgatgaactcatcacgcaaattctcacgagtagtgcgttgccggaatgggaacgccatctggccgactcggagtttccctggtcggaatggctctgggaattggatcaacgggcgcgggaacgcgctcaggccgtcttgtcgcaatatctgacggtgttttcctggatgaattttgacgggaccttgctacgccgtttcatccaacggtggggcaacccggaaaccacctccggaccgtggacgggcctgtcggccgaggcacgccggaagctgattcactgggttcaccaagcaaagctgcagcaattttttcaccaagataatgcgcgctttcagttttggcgcggatacctcgagcgatgcctgcatgtcaccgttctggaaaaggataccccgagggcggcggtggttctggatttcggtgatgtggtggcggtggagtttgcccaaaccggcaatgcctgttacgtatatcaaaaatccgattacgaacggatccgtcaacgcatggtcaagagtaccgacttgaaagattccaaccaagccttgttacggctgatccattccggctattggcaaggaacgttcagctatgacttggcgcaatatattcaaattcccaaaaatcgaggtgcccgatga

SEQ ID NO: 10314 - DNA, 2727 bp, Sulfobacillus acidophilus TPY
atgaaaaagccggtcaccggttcagtaataaccataaattttgtgcccctcttagaagggctgtcctggcaaatcacctatcagggagaagcgctcgagtttccttggaccgaaggttcgatatccccgcgcgccttattaacggacccccggtggccgcaactggaggcgttataccaacggtgggcagacgacgaattgacccgcacgggccccggtgaatatttgctgtcctgggagcggtttttggctagtccggaatcgtttttggccctatttcagttgccctctccgaaagctccggacatccgtctcaaggcccgcggcgctataaccgaacctcggtttcacatcgaggcgctggtgaccctaccgccctatgcgggaaacttgttgcaatggggacggcgcatcggtccttggcttgaaaccgcgcgggggccggtgactttgaccggcgcgtcggctcgcctccttgaccgcctcttgaccgcacccggcccggacatcgacggccgcacgctatttctcgcagaggttaaacagctggccaaggacgccggcgcccgcctggatccctatttagaacgggaagagtatattttggtcgaccaagtcaccgtcgacccggtgttggataacggaaccattcgtttgagggcccgctatgaccatcccgacctgccgtcggaggctttacgtgaaggcacgctgtcccgaccgtcgaccggtctcggccgaaaacgctggattgccaggccggaggcgcgccggcaattccggcgcctcgatgccttgccgccgataaccggacaggatgtccctaagttcgttaaaaatcccgaggctttcttaccggaagatgttactctcgatttgacggcattttccgaacgagtcaaaggccttaaaatccgagtctaccgcgcgcaaccgtttttgcatgcaaccgaaaccgaacgcggctggttcacactcgacgcgggtgtccggctggagtcccccgaagacgagccccccgccgaaccggtgctcacaccggacgaattgttgtccgccattcaacacgtcgggccggacgaatccctgattccgctcggcaacgactggatcgaagtaccgccggccgctcggacggcattgcaacaactgtctgcccttcggaaccggtcgacagaaccggtgtcacgggagcggttaccatacgtcctggacatcttcaccaatcttgaacaggtcgaattcaatccgccgtttcatccgtggatttggaccgaccccaacgaggacgtagagcctcccgcctggtttcaggcgtcattgcatccccatcagcgggacggagttcggttcctttggcatcgggcggcccaccggcggggcgtcttgctggccgatgagatgggcctcggcaaaaccgtccaggtcattgcctggttcgcgatactccatgagcggagccgtctccggccgagcctggtagtggctccggtcgccttattgtccaattggcaggaagaactgaccaaattcgcccccaagatttcctgggcagcccattacggtccgcaccgggcgcgccagatcgatcacctaccggatgccgatgtcattctcacctcctatgaaacggtctcacgggatcagctcatactcggacaggttgactggaacgccattgtcctcgatgaagcccaactgatcaaaaacgtctccacgggacgcgccgaagccgtcaaagccctcaaaaacacatatcgtgtagccctaaccggcaccccggtggaaaatagcctcagtgacctgtggtctatagtggacttcgtgcaacccggattgttagggagtctacgagagttccgccaaacctacgaaaccgccacgaaaaaccccgatccggatatccaaggagcccttacccgcgcgatatcgccgatctaccgccgacggactaagaaggaatccggtttggccttgccgcccaaaacggcttatcgttttcacgtcccgttcggcccggaacaacagcaccgttaccaagaggtgctcaaagcagtcaaagcacgacaggtggccccacttccggcgcttcgacaattacaaaacattttggggcatcctttggccgttgaggggcggtcggcgccatggaaccggattccggtgtcgtctatccccaaactggccaagacgttggaaattttgcacaccattcacggacagtcggaaaaagccctgatctttaccccgtcacggacgttgcaagcgatgctacagttttggatcatgcgggaatttaacctgactccctatgtgatcaacggggatgtgacggcgcggcagcagctggtccatcatttcaaccaggcttccgggtttcaggtgatgatcttgaccccgcaagccggcggcgtcggtttgaccctgaccggcgccaaccacgtgattcattattcccggtggtggaacccggcagtggaaaaccaagcgaccgaccgtgtgcaccgcatcgggcaaacccgtccggtttcggtctactacccgctagtagttgatcaagacccgcgcattaccgcccagggcacggttgacgagattttggaccgcttgttggaagacaagcaggggctggccaacgccgtcgtgatcccgtcccggcatctcgaccttcaacaagaactgttggaacgggccctgggacggggaccgtccgatccggtcatttag

SEQ ID NO: 10315 - DNA, 1944 bp, Sulfobacillus acidophilus DSM 10332; identical to SEQ ID NO: 10311

SEQ ID NO: 10316 - DNA, 690 bp, Sulfobacillus acidophilus DSM 10332
atgaaccgcgcaccggcacgtagttatggccagcgggccccattcgatcaatggataatgtattccgatctgatggccggcctcttattgatgtttatcctgtttttggccgtcagcgtcatgacctatcaccgtctcctgcaagaaaaagaggcccgcatcaaccagttgctcggggtccaggcatccatcgtgcactccctggaacatcagtttcatgcgtcccacttaagcatgacgctggatccgaaaaccggtaatatccagtttgccagtgacgtattgttttcttttaattcctatcaattgtcgccggccggggaggcccgactcaaagcctttattccccaatatatctcggtgttgcttagcccacggtaccgaaacgacatttcgaccatcgtggtcaaagggtatacggatcgccagggaacgtatctgtataacctgaacctgtcgcaggagcgggccctatcggtcgtcgacgccattttcagcccacagttcggtaactttccctaccggaatctcttaaagcagtacattactgccgaaggtcgatcgtacaacgacccggtctatatcgacggccggtatagcgcccgcgcctcgcggcgggtggtgttctcctttgtactgaaaaacacccagatcatgcaggcgattcaatcgacggtgaaaaccccatga

SEQ ID NO: 10317 - DNA, 1197 bp, Sulfobacillus acidophilus DSM 10332; identical to SEQ ID NO: 10313

SEQ ID NO: 10318 - DNA, 2727 bp, Sulfobacillus acidophilus DSM 10332; identical to SEQ ID NO: 10314

SEQ ID NO: 10319 - DNA, 2190 bp, Pectobacterium betavasculorum
atgtcctggcttaattccctcttagtgacacttacgtctgtggagccccacaaggtgcctgtcactgttatcggtctcgttagctttgcagtcgtttgctttattttcttttatttgatcagagccattagaattgtgaatggccttaaaaaatacacacaatcaattatcagcgttgaaaacaatgctccagaggcccagcttgaacatcttaagaacctgtttcagcggcctggactcaggcacgcgtggaatgagttcgaagagtcgttgcatccgcagcatgaactgagtaacggggaagaaaaaattctccgtattcgcgccactgcaccgagtgccagtttcttctcggagcaacaattgatcgatattcctttaaacaccgaattcttcaaacacctgcccggaattctgaccggtgtggggattatcggcaccttctatggtctgatgattggtctcaaccacttcgatcccagcacaccagaacaagtcaccagtagcgtcaataatctactgcacgatgtgttgtatgctttcctggggtctgcgttcgctatttttgcctccattcttgtcacctggttggaaaagctatccatcgccaaatgctacaaatatctggaaaaattcactgctgctctggactctctttatgacagcggcgttggtgaggagtaccttgcctcattggtaaaatccagtaatgaaagcgcgactcaggcacgtcatctgaaagagagcctggttaccgatctccgtgatatgttgctgcaactgaccgaaaaccagaaagtcgaaaatgaacgtctggccaatacattaagcaccacttaccgcgaatcaggcgcacaatttgccgagcaagtcagtggtgcgattgaaaacagtctgaagtcgcctctggataaaattgccggtgccgtgcagacggccagtggcgatcaaagcggtatggtgcagaacatgctccaggatgtgctgacggcatttatggcgaaactcgacaccacctttggccagcagttcactaatcttaatgaaatgatggggcaaactgttggcgcgattcagacaatgcaaaacggtttcgccacgttattacaggacatgcgtcaggtgagcgatgattcccgccagggcagtgcacaacttatcgagcaactgctatcagaaatgaaatctggtcagcaagctatgcaggctggcatgaatgacatgctcaccagccttcaggcttcagtggctaagattggcgcagaaggtgaaggggccggtgagcgtatggctcatcaactggagaaaatgttcgccgatagcgaagcgcgagaaaaagcacaggcagagcatatggccgcctttattgaagccatccaaaactcggtgcagcagggacagagtgccacaatggaaaaaatggcggcctctgtcgaggcgcttggtgaacagttgggtagcttgtttgggcagatcgataagggtcagcagcagatttcagcgaatcagcaagcgaatcaacagtccttgcacgaacagacacagcgagtgatgagtgaagtagacgatcagattaaacaactgatcgaaactgttgccagtcaacatcagggaacgactgaaacacttcgcctgcttgcggaacaaaccaaccgacagattcaggatatgcaaaatggcgcggacaaaatgcgttttgcagctgaacgctttgaacacgcaggcgatcgggtatcggaagcaaatcacctcactgctgatgtactgaataaagcgcaatcggcgggttcatcgctctctcttgccaccagcgaactcacctctgtagtggccgattatcgtaacaatcgggaagcagttagcaaatccattgccatgctggaattactcgccgctaatacgcagtctgaacaaaccacacgtaaccaatttatcgccgatcttaaacagcacggtgaacgcttgcagggctataaccgggaagcacaggcttttatggaaaatgtcagtgacgtgcttgggaaagggtttgaagacttctctgaaggtgtttcacgtagtctggataaaacactgggtaaacttgatgtagaaatggcgaaagcgtccaatctgctcgccggttctgttgaacagattggagaaagcgtcagcgagcttgacgatgttctgtcacgcgtgcgtgcgtga

SEQ ID NO: 10320 - DNA, 738 bp, Pectobacterium betavasculorum
atgtttggaaacgcatttggcgttaaaaaacgccgcagcgatgaggcggagaaaccattctggatttcctatgccgacctgatgacggcgatgatggtgttatttctagtcgttatggtggcgtcgctgagctctgttacacagcgcattcaacgtgtggagcagggggaaaaaacaagggggcaggatatatccaaattgtgtgagcgcttggaattacatgcccgcaacgtgaataaaactatcgttgtagattgccacgataaccgtatcagttttggcgaagccgggcgtttcgatcacaaccgttttttcctgaacgctgaagggcaaaaagcactgcaggatgttgttccgctggtgctggaagctgccgacagtgaagagggcaaaaagtggtttaagcaaatcgtcattgaagggtttaccgacactgatggctcatatctgtataacttacatctctccctacagcgctctgaatgggtgatgtgtagtctgcttgatagccgcagcccactgcaaaaaggtctttctgcagaacaacagatccaaatccgtaagcttttccttgcgggtggcgtctccttcaataatgccaaggaaagcaaagaagctagtcgtcgcgtcgagttacgtatgcagttcttcgggcttaaagataaacgtaatggggctgatgaggtagatttcccgcttgtggttaataaagaagtttgccagttggtaatgccctaa

SEQ ID NO: 10321 - DNA, 1683 bp, Pectobacterium betavasculorum
atgacgccggcactcaattctctttctcaacgtattgccgctaggctttcttccagtcaacgggatgaccattatctacgtaatgatttccatacgttagcttccgttgcccacgatatggaaaaacggtttgataaggcagaaagcattcccttaccgccacaagaaatgcgtctggcggctctgcgtcgccttcgtcttgcggaagaactcacggaacgagagtggcgaatggtattttatggtcttgccgataacgatccgtcatatcctgaccagccaatcctgctggaggatgatgtattttttcctgaggtcgacaacgctatcaagaagcggttggaatctaaagcgttaaaacgcaaggattgggcggcactttgttcaagctattttgcttaccagcatgaatcacccgagacaaacctgcactggtgcgtattgcgtgggcatatcgcccaagggtacttcgtggtgaaagccgcgatacgacgagaaaaatcatggatgaaaaccattgagttttatcatgacatttttaccccacaagctggaggcgtgatatccaggcagttacttgcgggtgaaagcaattcactttcagcattagagaaaattgcgcaaatccccgatagcagctggttgtggaagcgcattttcacggtgcttttagcacaattggatactcttgacgatcctcagtttctggaaaaaattagctggttattgggtttggctgcacagtgggtgcgttttcgtgatgacatcatggctgcgaccctgactcgctattatcattccatttatcgtgatcaggcacattcagcgctgaagcaggctgcattggcatgctgggataatccccaactgaaaagccagcaaaataagtggcaccagtatgtcgccgagccggtcgctgcgatggtgcgaggatggctggcaaaacaagacctgacacatttctttgaactcttgcgcggtaatgacgatgtcgatcaagcacgattgcactactggctccgtttcgccaatcagatgggatttactcgtatcgtcatggggactgatgcccgacaagatcgtggtagcgactttgtgaaattccgcgacgagaataagggacgactgagctacttacgaggtggacgtagctttgataacgccatgattatgcagatcaacgattatctgttcgttgagttttccgggacaggaaatgcgatgtacgcctatagaataggtcacgcgccatttaatcccgaatcacgcacactggatattaacattcatctaaaagaccaagggcgctgcgtactcagaatgcctcatgcacctcgtgctgaggggtataacaaagtacggataacgggttggatgttgaaatacgacgacgagctgcgtaagttgggtattcggtggatggcggaagaccccgttaagtttgtcgataagaaaacagactctcctgcctctctgtctgccattaaaatcatcaatccgttgcgtgatacggccattcagcgcctggttgaagggacttcatgtgtcgtcagcgataatcgacaaaaaggtggcgtactgtccgtacaactcaatacacctgacgacaccctagaaagagagttgttacgactaggctttgcgcctgtggctaaagaaccgcatcgttactggatcaaataa

SEQ ID NO: 10322 - DNA, 3243 bp, Pectobacterium betavasculorum
atgctgaaacgcctgctaagtaaactgacgggaaaccgtcagcagatagaacgccacctaaagaataaataccagattgaagaaaacggactcaactttccgctatcgctggttgatgattcgcagctttgggcattggcgtcctggcttgaacaactggctgaagaagactatctgatatcacttacagaccggtggttgttgagttgggatgcattgtatcgcctgctggaggatgaggaacatgccagcagtctgcctcttatcggtatacctgagatactgcctttacgcgcaagcctgagttcacgtggtgcattaagtgaccgtgattttcgtgtctggattgctgaatgggtcacgcttccagctcgcaagccgatccgtttcagtcgtactggtgccattttaacccatgaaaaccagcaacatttggtatcgcgggaaaattgggcactcttacaggcaactgaacaactcagcgcacagcaagatcagaccccaggagaaaccactaaccaactgggatgggccgctatccgcaaatgtgcaaaacaagccgcagcaaaatttgatgattatttagaaaaaacacatgtcgtcaaaccaacttcattgtcattacgtctgcgtaaatcaacggttgctgatactgctgttatcgaaattgagccccatttcgaggaccagccagctaactggctaggcagttttgacaagaattcgcaggttcatgatagctatcgtatccctggtgagaatggcgaacttagccacgtcatcatccctcccgaagtgaaagaagtcctaaactcaatacattcgattcctggtcgtcgagtggccggaagcgaagcgctttcttttgttcgcaatccctatacatttttgggcgaagatgctgccaatgttattgcccccgaagaacatgagcaggcgttgtttgatgccaggattttcttccatcatttcaggttgataccccaacagaatgctgagaataagatcgaggaagtgacgctggtacttgaaccagtatcacctgttccccagccagaggtcacttttgtgttctcagcgccctgggaacttgaaaaatttatacagcaactcggtattagcgttgcagcacagatgccagcaggctcctggcaaggttacgaactggagttgagccagttcactgaacaacagtggcacgattgtcagactctgcttacacgctggcagcaagaaattgaaggaaaagaatttagcgatgtgctggatattgggaagtatggcgatcgggtgattggcattggtgaatttgaaaaaatctcctctccctggcttaccaaggcgcaaagtgaaaactggcttccagatgacatcgatttctccgcattttcagtcgaaatactggctggctggcaacctgaaaatcttcaccatttcggtgaacttcaggagagcattgttcaggcagaagctgcaggtgaaacacatatcaccacaccatggaatgacagcgaattaccgctggatgcagctaaaaccttcagtaagaactgggaaaaacagcagagcgctgaaaatgaatctcaagataaagttgtcgataaagcggcccgagctgtactcaaaattgagcagaatattgaagaagcggcctacatcaaacagcgccgcgattcactcctcaatgcgcgtcatgcagaacctgaaattcctttgagtctgaaagaacatatccgactcaaagatcatcaacgtgaaggcgttgcctggctccagcaacttttccttagttcacctgagaaaactgcgggttgcctgttggcggatgatatggggctggggaaaacgctgcaaatattgagcttcttggtctggtttattgaaaaatttccgcaggaaccgccaagtcttattgttgcccctgtctctcttttagataactgggaacgtgagctggacaacttcttctacactgcgggtattccagtgttgaaattgtatggtgagacgattaaagcggtgaaataccccaaacaggctattcctgctcatctgcagtttcaggggatcaaaaatctgcttaaacctggctggcaaggtgaggcgaaaatcattctgacgacttacgaaacacttcgcgatcaagagttttctctggcacgccagccatggtccattatggtgtgcgatgaggcacaaaaaataaaaaatccagcagcgttaatcacacatgctgccaacgcggtacaagcaaggtttaaagtggcgtgtaccggtacgcccgtcgaaaacacacttgttgacctgtggagcttatttgattttgcccagcctggattattaggggcactaaatgaatttggtaaacattatgttcgtcctattgagaacgacgctggccgcgatacggaacgactggaacgtttgcgggcgctgatagaaccccagactttacgtcgaaccaaagaagaggttgcgcgggatttgcctcagaaaattgaagtggaaaactgcagacaattgacgttgtccggcgtgcaaaaacagctctacctttcgtctgttgcaaattggcaacagcagcaagcattgagcgaaggaatgcagcaggtcggagcaggtatgttaggtttgttacaccgactgaaactcatttgcgcacaccctgcagtagttaatccagagccacgttttcgtgataactcacctaagcttaactggctgttgaaaatactcgaagaaataaagcataccacggaagataaggtcattatttttactgaacttcgagacttacagcgtgaacttcaacacgcgatctatcagaagtttggtttccgtccagtcattattaacggcgataccagcactaaaagtagtagccagaatagtcgtcagcggctgatcgatgattttcagtctcagtcaggttttggagtgattattctttctacggttgcagttggattcggtgttaacgtccagaaagccaatcatgttattcatttcactcgttgctggaacccagccaaagaagatcaggcaacagaccgggcgtaccgaattggacaaactaaagacgtgtatgtctattatccgacggtgagagacactgaaataaccacatttgaggaaactctggatgaccttctgcagcgtcgacgtgcattggccagagatatgctctgcgctactcctgacttgagtggtgcagattttgaagtccttttgaaaggggcgtag

SEQ ID NO: 10323 - DNA, 1926 bp, Sphingobium chungbukense
gtgggaattaccgaatggctcggtcatgggctaatatttttctttactcaagttccgctcatcggcgatgcgatggcggcattcttggcagtagttctcattgggacagcctttgcgatcgcccatcgctataagcgggagcatcaccagcccctagcttccgcaattgaagcgcgcgtacgcctgatcgatgaggtaaccggcggcagtatggcggatgccgatgccgcacggctcgcctttgcacgacgttttaatgatatcgatgagcagatgatggatgcggctcatccggaggtgcttccgcttcgccgaacttgggaagaataccgcgaaactattgtcgatcctggtgcagacgtgttgaaaaatgcggggcgccccgaacatttttttgttaatatcggcgagcatcatcgcggacttaattggtttgcgaatatttttattgcgatcggtttgctcattacctttttgggcatcattgcagctctttcgaccctagatttcagcggcggggttgatgccatgcaggagcggctcaacgagctgatgaaagtggctggggccaaattctgggcgtcggtgggcggtatcgtcgcttcaattgtattgcgctcgtacgattaccgttttggcaagcgcatcaacgatggtctttcggcgctgtgtgatgggctggagcacgggatggcctatttgccccctcagcgcatcgcggccgatcaactcgagcagcttaaggagcagacgccggcgcttcggacattttccgaacaattagcagcggccctcgacggcgcgcttgaaaagcagatggcgcccatgatcagccatctgggatcgattcaacagggcatcgacaagatcaccggcggcggtggtgacgctgtccgggatgccattgtttcgggcgctggcgctgagatggcgggcctggccgaagcaattggcgtaatgaccgcctcgatggcgacgatggcagaccgtttcgaaaagcaaaccggtgaagcggataaacagatcgaagaagctgtgcgccgctttggccaagcctctgaagagatgagggcggccttcggtgacctcaataagaatttcggcgtcatcgcagaccgtatgcgcgaagaaaacgagcaaaccagtgccatggcccgccagcgcatggacgagctgctctccaatctgggtgccacgttggacgaaatgaaagcaggcttggccgcagcggcaggcaaaatgggcgaagcctcggccgacgcggcgaacaacgctgcgcgcatcggtcaagaagcgctggaaacctcgttctcgaactttgtcgaaaagttcaacgccactggcgcgccgctcgtagcgagcatgaagggagcgggcgatgcgatcgcctcgtcggccgacaggctagcgagcgcacagggcgctataggcgaccacgcgcgcgcgatagagcaagtcgctacgcgttcgaatgatttggctaccgctttcgggactgtcgccaatgatgtcgaggcggccagcgcacctgtacgccagtcagcgcttgcaatcgccgaagcggtcaaatcggtcgagacggtagtatcgaaaaacgcgcaatcgtcggaaagcgcacgcgaggaaatgcgccagctcgctacttcgctcaatcagaccgcgtcggcagcctcgtcggcctggtctgaatatcgggcacggttcgaggaagtggaccgtgcgcttggcgatgcgattcagaagatttctgacgctgcgggcaatcatgcctcgaacctcaatgagcgggttggccagatcgacaaggcgcttggcgaaggtgtcgctcagcttgccggtgcgctcgaaccgttgacgaccttgcgcgacacggttgaggagctcgccggaatcctagcgaaccaaagccgggaagctactgaataa

SEQ ID NO: 10324 - DNA, 729 bp, Sphingobium chungbukense
atggacggtgtcgttcgccggaggcacgccgacgaaggtgaaagctacttcatgtccatgaccgacatgatggttggcttgctcctgatctttatcattctcttggcctacttcgcgcttcagcttcaatcgaaaaccgccgagctgacaggggccaaccagacccgggctgagattctcaacgatctccaacagtcactcaaggacaaggggctgcaagtcgagatcgacaccaagacgggagtgttgcgactgcccgacgacgttctttttgacaaaggccagtgggaactgaccgataggggccaggccgcgattagcaaggtcgcgagcgccatggtcgaagtattgccgtgctttaccacatcgaacctctgcaaaggggctcgctcgtcgcatctcatcgatgccgttttcgtcgagggccacactgattccgacgccatggtgggcgcaatgaacaactatggcctttcggtgcgcagggccgaaacaactttcagcatgttgcaacgcaatcagccagatttgcaggaattccgcaacaagcccgaaggtgaggcccgatcggctccgattctggggctcagcggttacggtcccgaccggccgattgcttcaggtcacagcgaagtggccaagaaacgcaatcggcgaatcgatttgcgtttcctaatgactacgccgagcacgggcctcgatcaggatattctgaggcaaaaaaaatga

SEQ ID NO: 10325 - DNA, 1281 bp, Sphingobium chungbukense
atcggcgaaacagagccgatcatccagctaaagccatttttgcgcgaagcggcgcacaccggcgccaatcagcttccgcggtatcagcttaatcgggtgctgcggggagcttggtgcgatccggaatttgatgaattgggatccgctgccattgaccgcgtggttggagagccgaggcgcagttcggaccaggccgtaattgacggctatctgacttatttcccttatgatcgccctatcatgggcaaactcgcaagtgttgcttcaagtgcggcgcggcggcatgactgggcgtggcgcgacagggctagacgctgggatatgttcgctccccagcaaggcccgtcgaacgtggccgtcgattttgtgtcatgcgacacggacggaatggcgcaaatcatgagagaaacgggtctgggggtaaaccttgctgccagcaggtttgggcaagcgacttttgcaaaaacttgcatcgcgaccgccgccttgtcgcctagccaagcgcttggcgctcagcgcaatttgctcgcgctcttcgaccgcgatgcgctcgccgggcaactcgaattggtcgtgcgtgcgttgctggaaccttgggtcagcgccaaacctgacccacagcatcgcaaggcaatctcggcctttctcctggaccaggtcggtgatccgcgtattcagcgcacccgctgggaccggatcgtgcgctcgttatccgaggccatcggtgaagcgcgtgcccgcgagattgcccaagtcttcaagcgctggctcactgaagtggccatgcgcgagtttttccgcgccatagccaagacaacagaccgcccggatcaatgggcacagcgtgaaaaattctggatggcctatctcgatgagggtcttgttaccgacgcttggccggcattgggcatccgcgcgcgcaatcagatcgagcatctcatccgccaaagcggtgaacgccccgaattcggaattatccaagggggaccagcgtcatcttcgtcgatcatcatgcaaatcggtgatctcaggatttcagagtggagcgacaatggctcatgccggttttggcgagatgatgatcctgatgcaccggcgctttacgcaaaagtctacgacggcggcaaactgcggacgaccagtgggcgggccgatttcgaattcgaatcgcatgtgccggcaagccctggttgggaaaacaagttcgctggactgatccaccgccgtgccgccatcgcccacccccgcttcggcaggggacggacccgaaacgggaattga

SEQ ID NO: 10326 - DNA, 3825 bp, Sphingobium chungbukense
attgtgaccaccaagttcatcgcgacacaagcagctgacggcagcgaaacaataacactgctccgcgacctgccgggagggctgttccggcgcgcttccagtgaaaatgtgccgctatcggactggctcaaggccgcccctcaagcgggtcaggccgccttggccctcgcgcgctctttcgacagcgaaggacaaatccgcgaggaagccgatggcatagttcttcccgcaaatattgtcgcgcggttggatgaagctgatgccttcgcgctcggcttgccaccggctaccgcgctgacattgcagctcaattcgagcggctcgctcgcagcgggctcgatccaggtcaacgtcaagtgggttcgccgcggaggcttaccggtccgcccggatataacaggtgcacgcgtgcgcgagggcggccgggtcgggcggattcccgagccgattttctcggtcttcgaagcggcgctggccgtcaatgcgacggccgatcccgatgaacgccgggccgcattcgcgcagcttcgtgcacagctcggtgacgaattcggcagcggcatcgaggctgacggttttctcgagcgcgtacggatagcctatgcggccaatttctcgctcaacgccaagaccgatcacgggcgctttgactttgacccggtgctcttttccagaaatgccgctgaaaccctggatggtgatcttgtcgatgaagaggcggcatcgctgctgacgcctgaggattctcagcgctttcaacgcaagttcaaaggtcaggaaggtggacggcgcagctatcttctttcggacggtacactccttttccttgaccctatgctgggcaaggctctcgatgtggtacgttccaagcaagctagctcctcgcaggaaaagcgcgagtttttgcgctcgccacaacgtattttacgcgaagagctgaaactagacgcgggcgatgatgatgaggcggccgatcgcctctttgtcgagacacagcagttttcagagcgggtcagcggcatcgaagtttggcagaagcccgtcctgccctggatcaagccgaagccgaacagctggctgccggaagggttcggcctgcggatcggcgatccgccaaatgcgcgccacatcgaattggcagccggtgaggccgaaagcctggccgagaccgtcgaaaaggcgattgatgcgggcagcgaaacggttgcctggcggggggaggacattcccgccacgcctgctacgcttcagtcggcgcgcgccctggccgatcttgagaagcaggttgccgcaaatgtggggcattcatctgccgacgagaccgatcgtgaagcgctcgaaacctatttcctccaggtcggcgagaacttcgagcaactcgactatgcccgcctgccccggtcgcaagcggcttctgagccgtttaccgtccccgggctaccgcaaggcttgaagtcgcagcccaagccccaccagcgcgaggcctttgcctggcttaccgaagcctgggaacgcaagttgccgggcgttctcctcgccgacgatatggggctcggcaagacgttccaggcgctgatgttcttgctgtggttgcagcgcaaatcggagcatcccaagcccgtactgatcgttgccccgaccggtctcttaagaaactggcaggccgaaattgcacagcatatcgaacccggccttttggggcaggtggtggaagccttcggagcaaatctgcgcaacatccggctcgagccggggagcgacatccgcggcggaacctcgcggctggacgtgagcgagtgggagcgcgcgggtattgtcctcaccacctacgagaccatgcgcgactatcatatgagctttgcgcgccttccctttgcggccattgtctacgacgagatccagaagctcaaaaatccagccagtcagatgacacgggcggccaaggcgctgaacgggcgccttcagatcgcgatgacgggcactccggtggaaaacaggctccaggacctctggtcgatagccgacaccgtttatccaggctttctgggatcgagccgcgaatttgagaacagttatcccgccagcgatttggagcggctcggggacctgcagcaacggctaatcgagcgtgacgacgaactgcctcccttcatgcttaggcgcatgaaagacgaaattctgacgggcctaccggaaaagagtgcacgcaaatacgccgtcgagatgccgccggcacaagctcaggcctacgatctggtcctggcccgcgcgcgggcgctgcgcgaaagcggcgagcagggcgctatgctcaaggtgctgcatatgctgcgcggcacgtcgctccatcccctcccgccgcgcggcattaccgatatcgatgcctacatcgcgcagtccgcacgtctccaaaagacgttcgaaattcttgagggcgtcaagcaacgcggcgagaaggcgctgctcttctgcgaagacctcgaaatgcaggcctttctggccatggcggtacaagaacgcttcgatcttaggcgcaggcccatgtgtatcagcggttcggtcgcgggtcacaagcgtcaggaaatggtgagcgctttccagacctcatccgccgcattcgatgttctcattctctcgcccaaagcgggcggcgtcggtctgacgatcacggctgccaacaatgtgatccacttgtcacgatggtggaacccggcggtcgaagaccaggcgaccgaccgcgcctatcgcatcggccagacgcgcccggtgacgatccacattccgatggcgatccatccggacgaggccatcggcccttcaagctttgaccaacgcctcgatgcgctgatggatcgcaagcgttcgctgagccgtggcctgctcatgccgccggaaagcgagcgcgacgtcgaggatcttttgtccgatgtgctcgacgggcgtcatgcccagccggaggcaagggaaatcaatgccgctgcgtcaagcacagacgcagcgtctcgggaagatcggcgcagcgtaagcgtgcgtgacatctcttcgggcgacgagacgccggatgaagacgatctatcgttctcggcggacgtggcctcgtcagaggctccgatcgccgagaaacgcgacaatccggaacctgaaatcctggcaaatgagccgcaaaggtcgatgccccccgaggctttgccggaagaacagacagtatctcttgccgaaagtgcaaacgtagaaaagccggaggccgtatcgcgcgagcctgcgcgacccatgaggcgccccattctgtcagcgcgcaccccgattgaggccgccgaagcgcgcacgccgttcgttcagcgcgtggtcttcgagcaatatggtccacgcgactggaccatttttgagcaatatgcgcgtaacgctgcgattgcgcggctcgaagtccaggatccttattgctgcgcggacgaacaggcgcgtagccgtcttatcaatttcatcagccggtttgagcagctctcctcgcaaatcgacgctgtccacattgtgacctttgacgcggattcggttcaaacccgggatccagaaagcacccatgagcagcgaaaggatctcgaagagcgctggcagcgtattatggcttcagtgcccttgcaccttgtccagaagtcgcggcgatcgggcggcgacctgcacgaccgctttgtcaaagcccggcttgagaacggcgatagcgtgatttgggatctggggcgcgggatcgatggcgtcatgaacgcgcgctggtcgtgcgtggtcaacgcctttcatgagcgtccggcggcggcgtcatctcgagtgcactag

SEQ ID NO: 10327 - DNA, 2172 bp, Shewanella frigidimarina
atgttggattttttaccatcgcattggttgatacctcaatcactgttaggggtatcgttttggcttgcgctattgatagtgttttttattgcgctgatgactattatttcacgaacgcttaaaagtaaaagcagagtagagcaagtcaggcagattattaaaggtgaaaccgtcaccacgctttatgataatagcctgagcattactgaacgcgccagcgcatcaaaagataaaatagtgcatagcttgtggcatgaatttagcgaaagcttagtacaagatgatcgtacacagcgtgtttataataccctggatgcagagcacttttttaatcataaaaccctttctgcagggttaacctctaacaggttattagctgcaaccccttcatttttgaccgcaattggtgtgttaggtacctttatgggcctaactatgggcctgcgtgatattcatattgaaagtaacgacattgaagtattaaaagccggtattgctagcatgatgagcggagcagcatttgcgtttgttacctctgtttggggggtgggtttaagcttgctgcttaactttattgagaaaatagccgagcggagcattttaagtaatattgtcaaggtacagcaaaatattgattttctttatcctcgcttaccagctgaaaagtcgttagttgatatctctaaaaacaccggtgaaagcagccaggcattgcaagagttgcatgaacgtattggcgaccgtttgcaagagacgatttctggcgtcagtgacagcatgcaagaagctttcactaatgcattaaataatgtcatggcaccagcaatgcaatcattagtgagtaatgccagccagcaaaccagcggtgtattagagcagcttattggtaattttaccgaaagcatgcaagctgcgggcagaggtcagggcgaactaatgcagaagtctactgagcgaatgcatgaggctgtgagcagcttaagcgagcaaatgaatgctgtacttgagcaaagtagcaaacaagcaaacctgatggccgagcaacaaacaggggcatcggcgcaatttaatcaacaactggagtcaatgctcagcaaaagcgagcagcgccaacaggcgatggaacaaaagttgtttactgcgcttgaatcacagcaacagtcgcaagctgagagagaagcaagccatgtcgacagcttacaatctgtgctcggtggttggttaactgagcagtcgcaaactctgacgaagttatcagactcaatgagccaagttcaaagtgcaatgagcgagtcaaacagtagttatgttgaccaactcactaaccaaaatgaaaagagcactgcccagcaagaagcatttaccagcggattagagaccagcttgcaaagctttatgcaaaactcatcacagcgccaacaaaagctagaagaaaactttagtgcattattacaaaatcaacaggttgaggcatccaaacgtgatgatctgtaccgcgatcaacttcaaacccagttaagccaatggttaacgcagcaagataaaatgctgacttcgatgacagatgcggtaaaacggactcaaacccatatggattcggttattgcacaacataaagaggtggtaagcgaacttaaaacagttgctgagtcttcggcgacaagtagccaaaatttaagtaatagttcaaaccaaattgccatgttatcgactaatttaatgaaggcaacggagctgtttgatacgcgcttagctaacatgactgacaccattataggcatatctactcaaaatgatgcattagcgaaccatgtcattgagcaagcaaaactgctaacagggcttgaaacatcacttgttgctacaacagaacaatttagcgaaacagcaaaattagctcaacacggctttagcgacatgaaaacccatcaaacagagtttatacagggtgttgagtcatcatttgaaagtttaagcaatacgttagctaaacaggtatcggatattgaaaagcaaaccaatgagtggctacgcagttattcatctgaagtgaatacccaagttaaagaacgtatggaaacttggaatacaacaacacttgagtttagcgatcaaatgcgcagaacagtgagttcaatttctgacctagtggatgaattggagcgtaattaa

SEQ ID NO: 10328 - DNA, 759 bp, Shewanella frigidimarina
atgcgtatatttagaactgacgaagcgagtgttgatgaagaaaacccatattggatgtcgttttctgacattttgtcaggtttgctgattttatttattttagcgtcagttgtgttaatggttgagctaattgaagcgaaacaagagctcgaaaataaaaaagatgcctttactcaagagttagcaatgctgcacatggctgaaggtgtacgtaaaactattttacatgaagcggctgatttactgaggcagcgtggcatacaagtcagtgtgagcgaaaatgaaacagtgttaagtattccgaacgacattttagggttcgatagcgcggcttttaatattaatcctcaatttgaagaaaccgcccttgaaatcggtgaagtactttcaatggtgattaataaagataggcgtgagcaatttcttgataccatttttattgaaggtcataccgacggtagaaacttcaatggcgtattgggtaaaggaaattggggcttatccacgtttagagctatttctctttgggagctttggagccaatccttacctagcgacctgaatttagcaggcatcaataataaagatggtaacccgcttttttcagtcagtggttatgctgcgacgcgcagaatggttgttgatgaactaacagatgaagattttggtgcaaatagacgtattgatatccgctttactattcgtcgtccttctagtgaagaatatgaatcagtaagaagccgtttggagatgccgtaa

SEQ ID NO: 10329 - DNA, 1698 bp, Shewanella frigidimarina
atgttgtttttacctcctatacctgaactgtcccagtttaactgggagcgtattacaaagcagtggaacagtcttacattacaaacaaaaaccattgctgatggtgccgggcaaggcgaagagtttaaggcacttgagcaacatgttagccgatttgtaatgagcggtgatgttgcacaattaaataacactttgcttaaacgcaaaggggttagggtgttaactcagctgtggattgataaacaagaaataagaaatggttcattaaatgaagagaccattgattacattcaagctaagcaccctaagcttggcatgtcgtctttaatgaatttaatttcgctggtttatcgttattttgatgccttagttgatggtaatatttttcataaattaaccgcatggattaagcagcaaatagcgcagcgcgtggatgagcgtaaaaacagcagtgataccattttatctgtactaaatagtgcgaaatggttgttcgatttaacagcaccaatggcattggtgaatcttgctaaacagaaccatttagatcttaatgagcagttaaagaaacttcgtttaaacgagttaccacaagggcgttttttagatatttgccatgcgcaatattacctcgatacgctaagagaaatccccgttggtgagcagaacgatatactccatgaattattaaagcatgatgttgccactatgccttttgaagatggtaagcgaattggacatattgctcttgagattataattgaccgttctgcgggcgccccaagtgaagtgtggcaaaactttgtactgaatatggcaggtgatccccgtattgcaaatacggctaaaaattaccgcgaatggtggaaacccattggtgagcatagagtaaaagctgttacaagttggcttgctaaggaagacctaaggttatttttgggcgcgattgaagaatacgccaacagtactggtgatgaatcactaaaccgaatgtttccggcacgtaaacgatttttagaagggctttacgaacatggttttgtgcgtaatgctcgtttaatgcttggttatcaagctgcatcggcagtaaagaaagtgttagggaccagcctaaccacaagttatatccaactaaaatcgatgcctcagacatctattatttatttagattgtggtgattttcatattgttgaaggctcgcacaattttaaattatggatttatatgggcttaccaagtgaaagagtaacaaattactcgttaaccgagttaactcataacgaccttaccgtgcgctttccaaatgaatttagaaaaaacttacctaatggtaagaaattggctattcagcactcacctacatcttggcaaaaaaatgccatcgattttttgactgaaaatggtgttgagcttgatttagaaaaattgtttgataaagctaactatagaaggtatgtcagtcgttatggattaccggttgtgaggattaatactcaggagaaaaatctatttgaggttaacttattaaacgctttacaggtttaccaaccgattaaggctaaagagttagttgggattttagaaaaagaatttaatatggtgatagatagccaagccgttaacgctaaactttattcaatgttactaggaaagcaagttatcgtagacgatagttattattggcatctcgctgactaa

SEQ ID NO: 10330 - DNA, 3024 bp, Shewanella frigidimarina
atgtcactggttagtttgataaaagggcttttgcctaataataaaaatagtcatttagcaggcgataaatattccttagtgtatgactcatatggcgttaactttgtcactgacgaggcttcttaccattgtctaaacaaaggtgagggcggtggcagtcaactcattgctcatgttgtactaaaaatgctgcaagaaagggacattgcacaaactattcctaatggatttagagttgatagcgagcaagcttgtttactcgacccagaagatgccgatgtacttgggttgccacctttttttagtcaccattttgatattgatattcaaggccgaacaactaaaagtagttttacattgcagttgtttgcaatgcttggccatcaaaaataccccgtaaaaagaaaaggccccatactcacttttagtgagcaaacccagtttttaatgacacctgagcagcttaatgctgttttggctgtagaagaacattcatctcttacaccagatgaccacaacgaacttaataatgtgctagctatcgctaggttgcagcaagctgttaaagatggtttaaaacttgatttaaagcagtttgataaatttgatttagttcaacctgaacatattactgtcacggcgaaccagaaagcagatggtagcttagagctaagtccaagttttggtgatggctcatcatcagaagatttacaaaatcgatttgctcagttacaaggtgaagggcaggtaatgcgagtaaaagatcgcattgtgttgttgtcagatgataaaaaacaagccattaaagaagtactacaaaatcggaccattccagcacacaaagttgcagaatttattaaaacaccctcggcttttttagatgcatcgattctgaatcttgatttaggtttttctattcgggtttatggtattgggaagatggttcatattccctttgggcaagataatgatggcagtaacggttggttttcaactaatgcggcgagtgagcctccagagcgtttagttaggctgcttgaatgtgaagaagatattacctcttttgaagaacgtttcgagcaggctaaaggacaaaacgccgacagtgtcattgtagctgatgaaatcattgatattcgtgatgagcagcgtgtcaatgaagcgcttgcagaggtaagagataatttatcaaatttagcgaatcgtcctgacgagcttgaaacggatgaacttgccgaacgtaaacaacaaatgtctttattactcaaagatgctgatgatcataatcaagatattgtaaataaggtcgcacaattagatcgaacaattaacttcgatcgaactaacttagcccgtacacctttccctcatcaagagtctggaattagttggatgttgtcattgttgcaatctgcacaattagatgaccatgacgatatgtaccgtgttcagggcgctctattagccgatgatatgggattaggtaaaacctatatgacgctagtcatgttagccgaatatttatcaatccaaaaacaaaataataagtctcaaaaaccgatcttaatcgttgctccgcttagtctactcgaaaactgggaacaagaagttgcggttacttttaatcaatcaccctttagagatattaaagtacttcagtcagcaagggacttaagggagttcaaagtacaaggtgctgaccgtgagtctatgcagctaacgtctgtgatgaatgagactcaagcggatcataaatcgattcgttatgccttgcatgttggggctgatgctgcaacaaagcgcttggatatggacagacgggttgttattaccacataccagacgctacgtgattaccagttttctttatgcgtgattgattggggtattgttgtgtttgatgaagcccaaaatattaaaaatccgaatacccaagcgactcgtgctgcaaaggcgctaaaagccgattttaaactactggcgacaggcacacctgttgaaaatagcttaagcgagttttggtgtttaatggatacagcacaaccgggattattaggtgattggggatattttagagaacgttggataaagccaattaataatgccaacgatgaagaaaaagcggaagtacgcttagatgttggtcatgatttacgttcgtccgttgggcagtttatgttacgccgaaccaaggaagatgaattaacaggaatgccaaagaaaacgataaaaacaggtatccataaagatctggctgacaatatgttatttgcaccagaacttgcacgtaatatgagcggcgggcagttacttggctataaccaaattgttgaagattacagaaagttgaaagcaaaggaagtgggcggtgtacatgctctagccgtgctacagcagttaagatcggtgagtttacacccacggctgaatgaagtttttaaagagccaccaaatacggctaaagaagctctgcagaaaatgcaagaatctgaaaagttaatgatgttgttagataccctcgcagacataaaaaccagacaagaaaaggtcattatttttgcgacaactaaaaagcttcaagcagtgcttaagatatgtttagataaaatttatggcttacatattcatgtgattaatggtgatagcaaagcgatggcaacaaaaaaagatcagctatcgcgcaaaggtatgatcactgactttgaatcaaaggaagggtttaacatcataatcatgtcacctgtagctgctggtgttggtttgaccgttgttggtgccaatcatgtggtgcatttagagcgtcattggaaccctgcaaaagaagcccaagcaacggaccgggtttaccgtattggccagaaaaaacctgtatttattcatttaccatgcctattacatccagaatatgactcgtttgatgtcaatttagataaattattggcaaagaagactatgcttagtgatgcggtagtaacgcctgaagcagtgagtgaacatgaactgatgtcttcaatgggcttgtag

SEQ ID NO: 10331 - DNA, 2556 bp, Enterobacter asburiae
atgttttcgctgacctcgttcctcgacacgttaacctctgttaatccagaaaatgtgccgaaatatgttgctcttgttgttgcggtgctgctggtgtgcttcattgcccgctatgccattccttcttttgtgatttcagcccgctttaaacagaaagcgagggcgattcaactgattgccaaagataaaccggcccagcaactggaaaaactggatgcattattttccgggaagttttttgcacatccctggagcgagtttaaagagtcgctgcatcgtcagtttgagttagatgaagacagcgggcagaaacggatccatagcattcgttctaccgccccagcttccgcctggttctctgaacctttactggtggaaattccactctatacggaagcctttaagcatttgcctggtatcctgactgggattgggataatcgggaccttctcaggcctaatgatcggtttgcaccactttgaccccagcacgccagaacaagtgagcgccagcgtagctaaccttttgcgtgatgtcctttacgcgtttttaggttccgcctttgccattgctttctccatcctggtcaccatgtttgaaaaatggcggctggcgagatgctataaaaatcttgagtcgttgacagccagcatcgaccagctttttgaaggtggcgtcggcgaagattacctttcgcagctcctctccagtaccaaagaaaacaccactcatgccaaacaactgaaagatggtttggtcagtgatttaagagagatgctacagaacctggtggacagtcaggtgcgagaaaatcagaaactggcagagacgttgtcttccacctatcgggaatcaggccagcagattgcggagcaggttagcggcgctattgaaaccagtctgaaaagcccgttggacaaaattgcgggcgtggtgcaaaccgcctccggcgatcagagccatcgagtgcagtcgatgcttgagaacgtccttactgcttttatgaacaaaatggataacacgtttggtcagcagttcaccacgatgcaggagatgatgggccgttccgtggaagcgatccagagcatgcaaagcggtttctctaccctgctgcaggatatgcgtcaggctggggatgattcacgtcagggcagcgcccaactgatctctcagttactcagcgaaatgaaaagcggccagcaagagatgcaggcaggtatgaatgacatgctacgaagcctgcaggaatctgtagcccgcattggcgcagaaggtgaaggcgctggcgaacgcatggcccaacagctggaaaaaatctttgccgacagtgaagcgcgtgaaaaagcgatggcggaacagatgcgtgcctttattgaagccattcagtccagtgttcaacagggacaaaatgaaactatggagaaaatggcggcctctgtggatacgcttggcagccatatggcaaccttgttcgcacaactggaaaatggtcagcaacaacttaatcagcagcaaaatcaggcacaaaatctgttgatgagcaatatgagcaaaggtgttgaagatctgactcaaaacctggcaggtgtatttagtcagcttgagtccggacaaaaacagatgagccagacccaggaacaaggtcagcgtgctctgtatgaagagacccaacaactattagcccgtagtgaagctcgcgaacaggcggccgccgagcaacagcaagattttatggctgctctgcaacatactatgcactccggccaggatgccctacgtgagaaaatgaccagcggtatcgatcaattaggtagccaattgggcaccctgtttgggcaactggaagaaggtcagaaatcccttagccagcaacagcaatcggctcagaatgctctgcaacaggaagctcagcgaatcattggccagcttgagagtcaggttcaggcgttaatgcagatgctgcgtgagcagcaatccgcatcaggtgatttactgcaacggatggcgcaaaacacgacgcgtcacctggaagaaattcagactggtgccgataaaatgcgggtggctgccgatcgctttgaaacagcggggaatcgtgtcgccgaagctaatcatctgactgcagaagttctgaatggcactcagcaggcaggtagaactctttccagtgccagctctgagctgggcgcattgatcgctgactaccgcaatacccgcgaggtggtggcgaatgccattagcgcactggaaacactcatcaatagcagccatgacgagcaaacatcccgcagccggtttgtggaagatctgaagtcgtattccgaacgtctgcagcaatacaaccgtgaagcccaagagtttctccacaacgtcgctgaggtgatgggcaccagctttgagtccttcaccaccggggtagaaagcggtctgaaccgttcgctccaggagatggatacacaactgacaaaagcggctggcgccttaagttcttctgttgaaatcatcggtgaaagcgtggatacgctggaaactgtgctccgtagtcgtcgcgcgtaa

SEQ ID NO: 10332 - DNA, 738 bp, Enterobacter asburiae
atgtttaaccgggcattcaatagcaggcagcgtcgtagtgatgaagcggaaaaaccattctggatttcctatgccgacctgatgaccgccatgatggtgctatttttagtcgtcatggtggcatcgcttagctccgtcacgcagaggatccagcaggctgaagcaggggaaaagtcccgagggcatgatatcgcccgtctgtgtgaacgacttgagctgcaggcaaagaatctgaataaaacgatacatgtcgattgccacgataaccgtattagttttggcgaagcagggcgttttgaacataaccgcttttcgctcacctcagaagggcagcaggctttgcaggatgtggtgccgttggtcctggatgcggcaaatagcgacgaaggtaagaaatggtttaaacagatcgttattgaagggtttactgacacggatggttcgtatctctacaacctgcatctctctcttcagcgctcggaatgggtgatgtgcagtctgctggatagcagaagtgcgctgcagcaaagaattactgcagatcagcaaatccagattcgaaaattatttttggcgggtggcgtgtcgttcaacaacgcgaaagagagtaaagaagccagccgtcgtgtcgagttgcgtatgcagttctttggcctgaaagataaaaaacaggacgagagtatggatgtcgtccccggtattagtcaggaaacctgccaactgggtgcagtgcaatga

SEQ ID NO: 10333 - DNA, 1794 bp, Enterobacter asburiae
atgacgtccgcaatagagaagctaaaatcacgccttcttccttaccgggaaaagagtgtagatccggttgtgggtcactcgtttatctatctacaacgcaccatcgaccaacttgaaagaaaggtagatgctcgcgcagtacagatggtgccccctacggagaaacgcaggcaggcaatttcccgattgcgttcgggagacacgccacagccatctgagtggaagatgatcttttttggcctcaatgacgtggcagagggagacctgtttgataccgcactcattgatgatgcggtaaactttgccaaaatatcggctgaaattcagagcaaaattgcacaacaacgattaacgcgtagggagtggttggcgctgtgtaccagctactttggacatgtcagcgatactcccgaagaaaatccgcagtggcttcagttacgcaagcagattgctgctgggtttaaactgttaaaagagagttcgcctcgcccgttgtcatggatgacggtaatcgacacttatggcgatatttttaccgacaatgcgggttttcttcttgggcaacagctcggccgtggggaaataaccgatatatccgtgctggaaaaagtggcacagatcccccagaccagttggctatggcgcaaaattgttaaccatctggtgagcgagatttttcgtcagactgacgatgagtttgaacaaaaaattaatgaactgatcgcgttgagccgtcagctttctcgttttaaagataatatcctggcagctgcacttacccgttattaccagtcaatatttaaacaccggactcaccttgaacttaagctgttagccctggagtattggggaaaccctcagttaactagccgcaataaaggctggcaggttcatgtcgataacgcggtgctgcttatggtacaggggtggttcgctaaagatgacctgaaactgttctttgagttgcttaaaggtaaccgggatgtcgatcaggcacgtctgttctactggctacgatatgctaatcagatgagttatacgcgaattgtattgggtgaagatgctcagcgttcgaaagataccgattatgttgagtttcgggcaaaaaatgcgggtcggttaagccgtctacaaggccccggttctcgcgacaacaatgccatgatcatgaggattgggaattatctttttgtcgagttttcgaaagtaggagccatgtactcttatcatatcgataatgcaccatttaatccggaaactggtattctcgacattgattatgatcttaaagataagcgtaataaccggcgtaaagtgcgtctgcgtttaccgcatttatctccagtaacgcactattcgcttaaccgtattgaagggtggatgagccgctatgatgaagaacttcgtagactaggcattagctacgttgcggaagattccaatctgccatcagctactatcgatatctcccgttttaatgcagctcaaagcggaggcaggtctttatcttctccggctaaatcagaagccaatgaatcaaggtcaaacagagaagaacagattaaaattattgcagcttctttaaaagctaaaaaagtagaccaaaattttacgactcgagaacagcaaatcagggaagtgattcggtctgtcgattgtaaagtgatggataaacgtggtatggggggagcaattcatatccagttcaacgaaccagatcatgaggctgccaaaaaattgttaagcctcggatttaaacctgtgctgggtaaatttacttactggagcaaatag

SEQ ID NO: 10334 - DNA, 3240 bp, Enterobacter asburiae
gtgttcaaaaaattgttaggtaaatttattaatgataataaagcagttactgcttcacttgtgccgctttatgcaattaaggcggagggcttcgttttcccctttagtcttgccgacactcaggataactggcttatcacttcatgcctggaacaactccatgaagaggattatgtatcacactggtcggattgctggtttatcagttgggatgacttctatcgtattctgaataatgaagattatgccagcagtctggcaattttcagcttccctcaacagcgtaatctgaccgcccatcttgctgcgacagggagcatcagtgatgacacttttcgcgttttcattgataaatggaccctgcctgacgattatcgtcccgtagagatcactagccagggggcaagtttttcctccccggaaggcacatttgtgcttagcgaagagaactggcagcttctggactcactgcaacaactcagattacaacagcgacagacaccgggtgagacggtcaaccaaaccgggtgggcaaaaatacgtcgacaggcaaaaaaggcaggagcaaaactggatgattacctggctaaaacgatagttatcaggcccgagtcactgcagttaaagttgcggaaatcactcgtggcggatacccgggttctggaaattgagccggtttttgacgaacagcctgcaaagtggctgcagagtttcgatcgcacgcaacaggtacaagatcggtatcgcgttttgggtgatgacggtgaattaagccacgtcattctttcacctgaagtcaaagatgtgcttacctctgtacatgccatcaccggccgtcgagtcgctggcgatgatgcgctctcgtttgttcgcaatccgtatacctggattggcgaagacgccagccaggtacttgatcccgatgtatatgagcagaatctacaggatgcagggatctatttttatgatttccgtctggagcctcgggttgaagaaaacatgcaggttgagtctgtttcgctgatcctgatccccaggactgaacagcctgtgccagatgaaacatacgtgtttaaccgaccaattgaattggcagcgttgattactgagctggaacaaaagttagcggcgcatcttcctgctggtgtctggcagggctatgacctcgagctgtccagattcactcaggatgaattgcaagagtatcaggcattgctggaaggctggcagcaacaggctgcgggattgaatttttctcacgtactcgatctcaacaagtacagcgacagagttatagggataggagagttcgagaaaatcagttcaccgtatctggtcaaaagtgaaagtgaaaattggcttccagacaacctcgttaaggagatgtatgaagccatgttctcgggctgggacctggataatcatcagcattttcatgagttagatacgcgtctggaagaagcaaaagcctctgatgctcctgaagtcgctatgccctggaacgataaccttctaccacgagaagtagcagaggttttccacgaaaagtggaaaaagaaaatcgatgctgaaacaagtattaccgcgaatactgagccggtgagtcgcgctgtcctgctgatcgaacagaatattgagcaggcactgtatgtcaaacagcggcgaacctccttgctagaagcacacttggctgaagccgagcttccaatgattcttaaggactctattcagctacgtgagcatcaatgtaaaggcgttgcctggctccagcagttgtaccttaaatccccaacagagacgacgggatgcctgctggcagacgatatggggctggggaaaacgttacagattttaaccttcctcatctggcatcgtgagcgtttcccggatgctccgccctctctgattgttgccccggtgtcgctactcgacaactgggagcgtgaggtcggtaattttttcctgcgcgagcaggtttcgattttaaagctttacggcaatgaactcagagagaaaaagtgcgctaaggagagcattcctttcgaactaaagagtaaggggattaaaaacctgctgcaaaatgactgggttggagaggctcagatagtactgaccacatacgaaacattacgcgatcaggaattttcattggctcgccaaccttggtccatcatggtttgcgatgaggcacagaaaattaaaaatccagcagcccttattacccagtcagctaaggcaatccaggcacaattcaaagttgcctgtactggaacccctgttgaaaatacgcttgtcgatctatggtgcttgtttgactttgttcaaccaggtctcctgggagctctgaataatttcggcaaagatttcctgcggccgatcgagcagcagagtgatgataaagtacttgaatcattaagaaaattgattgaaccgcagactttgcgtcgaacaaaggaagaggtggcgaaagatcttcctgaaaaaattgaagataagtcctgtaagcaccttagtatgttgccgttgcagcgggacctctatactcactcggtagtgagttggcagaaccaacaggaaatcagcgaaggtctggctcaacgtggggcaggtatgcttggactactccaccgcctgaaactgatttgtgcatggccttattccgtgagtgctgatttacgcttacgtaacgatgccccgaaagtgaaatggcttttggatacattaaataatattcgccagtcatcagatgataaggtcattatctttactgaactgcgagatattcaacgcgaattgcagcatctggtctcgcagcattttggattcaagccttttatcattaatggtgataccagcacgaaatccggaagtgaccaaaaccgtcagagtttgatcgataactttcagtcatcgccgggttttaacgttatcatcctatcgacgatagccgttgggtttggcgtcaatgtacaaaaagcaaatcatgtcatccattttactcgctgttggaaccctgccaaagaagatcaggcaactgaccgggcttaccgcatagggcagcaaaaagatgtctacgtttactatccaactgtgcgtgatagtcagttaatgactttcgaagagaccctggatgaattactgaaccggcgcagagctctggcaagagatatgctcaaagcttcaaccgatctcactgctgctgattttgaagcggtacttacccgagctaatacaaattaa

SEQ ID NO: 10335 - DNA, 2190 bp, Enterobacter asburiae
atgtcctggcttaattcatttttagtgacgcttacatctgtggagccccataatgtgcccttcagcgtaatcagcatcgtgagcctggccgttgcctgctttattttcttttatttatttcgggccattaaaattgttaacagcctgaaaaaatacacccaatcaattaatagcattgaaagtagttccccagaggaacagcttgcccatcttcaaaatctgtttaagcgccctgaactcaagcacgcgtggaatgagtttgaagagtcgttacacccgcagagtgagctggaaggtggggaagaaaaaatcgtccgcattcgtgccacggcgccaagctcgagctacttctctgagcagcagttagtcgatattccactcaatacggaattcttcaaacacctgcccggtattctgaccggtgtggggattatcggtacgttttacggcctgatgattggcctcaaccacttcgaccccagcactccagagcaggttaccagcagcgtcaataatttgctgcacgatgtgttgtacgcattcctgggctctgccgtggctattgccgcctctattttcgtcacctggctggaaaaactgtccatcgccaagtgctataagtatctcgaaaaatttaccgccgctatcgacaagctctacgttagcggcgtgggagaggaatacctcgcctcactggtgaaatccagcaacgaaagcgctacccaggcgcgtcacctgaaagagagcctggttaccgatcttcgtgacatgctgctgcatctcgccgaaagccagaaagttgaaaatgaacgcctcgcgaatacgttaagcaacacctaccgcgagtcaggcgcacagtttgctgatcaggtaagcggcgcaatcgaaaatagcctgaagtcaccgctggataaaattgcgggtgcggttcagaccgccagcggcgatcaaagcggtatggtacagaacatgctgcaggatgtgctgaccgcatttatggcgaagctcgataccacttttggccagcagtttacgaatctcaacgaaatgatggggcaaaccgttggggctatccagacgatgcaaagcggattctccgctctgctgcaagatatgcgtcaggtcagcgacgattcccgccagggtagcgcgcagttaattgaacaactcctctctgaaatgaaatcgggccagcaggccatgcaggcaggcatgaatgacatgctgaccaatttacaagcctctgttgcgaaaattggcgctgagggtgaaggtgcaggtgagcgcatggcacgacagcttgagaaaatgtttgccgatagcgaagcacgggaaaaagctcaggcagaacatatgtccgcctttattgaagccattcagaattcagtacagcagggacaaagcgcaaccatggaaaaaatggcggcctctgtcgaagcactcggggagcagttgggcagtctgtttggccagatagataagggtcagcaacagatatcagcgaaccagcaggcaaaccagcagtctctgcacgaacagacccagcgtgtgatgagtgaagtagacgatcagatcaaacagctgattgaaaccgttgctagtcagcatcagggaaccaccgaaacgctgaacaaactcgcagaacagaccaaccgacagattcaggatatgcaaaacggcgcggataaaatgcgtgttgccgccgagcgttttgaacacgcaggcgataaggtgtcggaggcgaatcacctgacggcggacgtactgaataaagcgcaatcggcgggttcatcgctctcccttgccaccagtgaactcacttcagtagtgagcgattatcgtaacaatcgagaagccgtcagcaaatccattgccatgctcgaattgctcgcagcaaatacccagtcagaacaaaccacccgtagtcagttcatcaccgatcttaagcagcacgcagagcgcttacagagctataaccgtgaagcgcagacctttatggaaaatgtcagcgatgtgcttgggaaaggctttgaagacttctcagaaggtgtttcacgcagtctcgataagacgctgggcaaactggatgtcgaaatggcgaaagcctctaatctgcttgcgggctctgttgaacagatcggtgaaagcgtcagcgagcttgatgatgtactgtctcgcgtgcgtgcatga

SEQ ID NO: 10336 - DNA, 741 bp, Enterobacter asburiae
atgtttggtaatgcatttggtgttaaaaaacgtcgcagtgatgaagctgagaagcccttctggatttcttacgccgatctgatgaccgccatgatggtgttattcctggtggtgatggtcgcgtcgctaagctccgttacacagcgaattcaacgcgcagagcaaggggaaaaagtcagggggcaggacatcgccagattatgtgagcgcctggagctgcatgcccgcagtgtaaacaaaaccatcgtggtggattgccacgataaccgcatcagctttggtgaagcgggtcgtttcgaccacaaccgttttttccttaatgctgaagggcaaaaagcattacaggatgtcgttccgctggtgctggaggcatccgacagtgacgaaggcaaaaagtggtttaagcaaatcgtcattgaagggtttaccgataccgacggctcgtatctttacaacctgcatctctccctgcagcgctctgagtgggtgatgtgcagtttgctcgatagccgtagccctctgcaaaaaagcatttctgcagaacagcagatccaaatccgtaagcttttccttgcggggggcgtctcatttaataacgcgaaagagagcaaagaagccagtcgccgcgttgagttgcgtatgcagttcttcgggctgaaagataagcatgatgccgaagacgaggtggatttcccgcccgttgtgaataaagaagtttgccagctggtaatgccgcaatga

SEQ ID NO: 10337 - DNA, 1683 bp, Enterobacter asburiae
atgacgcccgcgttgaattctctatcgcagcgcatcgcagcgaagctctcttccagccagcaggaggagcattatctgcgcaatgatttccacgcgctggcttctgctggccgtgagatggaaaaacgatttgataaagcagagaaaatccccacgcccccacatgaaatgcggctggcagcgctgcgtcgttttcgtcttgcggaagaactgagtgaacgtgaatggcggatggtgttttatggcctcgccgatagtgacccacaacatccaggccaaccggtattactcgaagatgatgcgttcttccccgaaataaacagtgcaatagaaaaaagaatagaaaccaagacgctgaaacgtcgggactgggcagcgctctgttcaagctattttgcctacaggcatgagtctcctgaaacaaacccgcactggtgtgtgctacgcgggcatattgccaaaggctacttcgtggtgaaagccgctatccgcagagaaaaatcgtggatgaaaaccattgagttttatcacgacatttttacgcctcaggctggcggtgtgatatcccaacagttgctttccggtgaaagtaactctttatcatcattagaaaaaatagcgcaaatccccgatagcagctggttgtggaaacgtattttcaccgtattgttggcgcagcttgatactctggacgatcctcattttctggaaaaaatcagttggctattaggcctggcggcacagtgggtgcgttttcgtgatgacattataacggcgacactgacccgctattaccattcaacctatcgcgatcaagcgcattccgccctgaaacaggccgccctcgaatactgggataacccgcagttgaaaagccaacagaataagtggcatcaatatgtttctgaacccgtcgctgcgatggtgcggggatggctggcaaaacaagatctgatgcacttctttgaactgcttcgcggaaacggcgatgttgaccaggcgcgactgcactactggctgcgctttgcgaatcagatgggattcacccgtatagtgatggggccagatgcttggcaagatcgtggaagcgattttgtgaaattccgcgaggaaaacaaaggacggttgagccagttacgaggcggacgtaatctggataacgccatgatcatgcaaatcaatgactatttgttcgttgagttttccggaaccggtaatgcaatgtatgcctacaggatcggccatgccccctttaacccggaatcacgaaccttggacatcaacatacatctaaaagatcagggacgctgtgcactccgaatgccacatatgccacgagctgaaggctataacaaaatccgcatcactggctggatgctgaaatatgacgatgaattacgtaagctaggtatccgctggatggctgaagagcctgtcaaatatgtagataaaaaagcgctctcacccgcctcggtatctgacatcaaaatcatcaatccattgcgggatacagcaatacagcgcctggttgaaaatacctcatgcatcgtcagtgataaccgacaaaaaggtggcgtgctctccgtccagctcaaagcacctgacgatataacagaaagagagttgcttcgacttgggttcacccctgtgactaaagaaccgcatcgctattggattaaataa

SEQ ID NO: 10338 - DNA, 3243 bp, Enterobacter asburiae
atgctgaaacgtctgttaagtaaactgacgggaaaccgtcagcagatagaacgccacctgaagaatcagtaccaggctgaagaaaacgggctcagttttccgcaatcgttggttgatgacccagagctttgggctctggcatcctggcttgagcaactggctgaagaagactatctgatatcactaacagaccgatggttgttgagctgggaatctctgtatcgcctgctggaagatgaagaacatgccagcagtctgcctttgattggcgtgcctgaggtcttgcccctacgtgcaagtttgagttcgcaaggagccttaagcgataatgatttccgcgtctggattgctgaatgggctacgtttcccatgcgtcaatcgctccgccttagccgcaccggggctatttttactcatgaaaaccagcagtatctgttatcacaggaaaactgggcgctcttgcaggcaaccgagcagctaagcatgcagcaaactcaggctcccggcgagaccaccaaccaactgggatgggctgcaattcgcaaatgcgcgaaacaggccgctgcaaaatttgatgattatttagaaaaaacgcacgtcatcaaacccacttcattgtcgttacgcctgcgtaaggcgacagtcgctgataccgccgttatcgagattgagccacacttcgaagaccaacccgctaactggctcggtagctttgacaaaaactctcaggtccacgatagctatcgtattcccggagagaacggcgagctcagccatgtcatcatcccacctgaagtaaaagaagtcctgaattcaatacactcaattcccggtcgccgggttgccggaagtgaagcgctttcctttgttcgcaatccctatactttcctgggcgaagatgccgccagtgttattgcccccgaggaacacgaacaggcgttggttgatgcccatattttctttcatcacttcagacttcaaccccagatcaattatgagaataagatagagagtattacgctggtgctggagcctgtctcaccgttgccgcaaccggaggtgtcattcctgttctcggctccatgggaactggaaaaatttgttcaggccgtagggataagtgttgccgcgcaaatgccagcaggttcctggcagggttacgagctggaactgagccaattcaccgaacagcaattgcatgattgccagttgctgttgtcgcgctggcaacaggaagtcgaaggtaaagaatttaaggatgttctggatctgggtaaatatggcgatcgcgtcattggcatcggtgagtttgaaaaaatatcctctccctggctgaccaaggcgcaaagtgaaaactggctccctgatggcattgacttctccgaattttcggtagaaacgctggatggttggcaacctgataacctgcagcatttcgatgaactgcaggagagaatcacccaggcagaagcaactggcgaaacgcatatcatctccccctggaatgagactgaactgccgctggatgcagctaaaactttcagtaaaaactgggaaaaacagcaaaattcagcacatgaatcagagggcaatgttgttgaaaaaacggcccgggcagtgctcaaaattgaacagaatattgaagaagctgtttacattaaaaagcgccgagactcactcctcaatgcacgccatgctgaacctgaaattccgctgagccttaaagagcatatccgacttaaagaccaccagcgtgaaggcgtggcctggctccagcagctctttcttcgttcaccccaggaaaccgcaggttgcttgctggcagatgacatggggctggggaaaacgctacaaatcctgagcttcctggtctggttcattgaaaaattccgtgatgagccaccaagccttatcgttgcccccgtttctcttttggataactgggaacgtgaactggaaaatttcttctataccgccggcgttccggtgttgaaattgtatggcgacaccatcaaagcggtgaaatacccgaaacaggctattcctgctcatctgcagtctcaggggatcaaaaacctgctcaaacccggctggcagggtgaggcgaaaatcattctgacaacctacgaaacgcttcgcgatcaggagttttcactggcgcgtcagccatggtccattatggtgtgcgacgaggcgcaaaaaataaagaacccggcggcactgatcactcatgctgccaatgccatacaagccaggtttaaagtggcatgcaccggcacacccgtcgaaaacacgcttgtagacatctggagcctctttgatttcgcccagccgggcctgttaggggcactcaatgaattcggcaaacactatgttcgccctatcgagaacgacgcaggtcgcgatacagggcggcttgaaagtttacgcgcgttgattgaaccccagacattacgccgaactaaagaagaagttgcgcgtgatttgccgcaaaaaatcgaagtcaccagctgtaaacaactgccgctttctggccctcaaaagcaactgtatctttcctcgatagcaaactggcaacaacagcaggcacttagtgaaggaatgcagcaagcaggctcagggatgttggggctattacatcgtcttaaactcatctgtgcacacccggcagtcgttaaccctgagcctcgttatcaggaagggtcgcccaagataaactggttgttgataacactggatgaaattaagcattccagcaaagacaaagtgattatctttactgagctacgcgatctccagcgagaaattcagcgtgctgttcagcagcgattcggtttccgtccggtcatcatcaatggcgataccagcactaaaagtcagagccaaaatagccgtcagcgattgattgatgatttccagtcccaacccggctttggcgtgattattctctccaccgtcgcagttggatttggggttaacgtgcagaaagcaaaccacgttattcatttcacccgctgctggaatccggccaaagaagatcaggcaactgaccgcgcttaccgtatcggccagacaaaggatgtgtatgtctattatccgacggtaatggactctgaaatcacgacgtttgaagaaacgctagacgaactccttcagcgtcgccggacattggccagagatatgttgtgctctacaccggatctaagcagcgctgattttgagaacatattaaaagggacataa

SEQ ID NO: 10339 - DNA, 2190 bp, Enterobacter asburiae
atgtcctggcttaattcatttttagtgacgcttacatctgtggagccccataatgtgcccttcagcgtaatctgcatcgtgagcctggccgttgcctgctttattttcttttatttattccgggccattaacattgttaacagcctgaaaaaatacacccaatcaattaatagcattgaaagcaattccccagaggaacagctcgcccatcttcaaaatctctttaagcgccctgaactcaaacacgcgtggaatgagtttgaagagtcgttacacccgcagagtgagctggaaggtggggaagaaaaaatcgtccgcattcgtgccacggcgccaagctcgagctacttctctgagcagcagttagtcgatattccactcaatacggaattcttcaaacacctgcccggtattctgaccggtgtggggattatcggtacgttttacggcctgatgattggcctcaaccacttcgaccccagcacgccggagcaggttaccagcagtgtcaataatttactgcacgatgtgttatacgcattccttggctctgctttcgcgatcggattctcaatcatcatcacctggatagaaaaattttatctggcgaaatgctacaaatgccttgaacaattcactgctgctcttgattccctctatgacagcggcgtgggggaggaatacctcgcctcgctggtgaaatccagcaacgaaagtgctacccaggcgcgtcacctgaaagagagcctggttaccgatcttcgtgacatgctgctgcatctcgccgaaagccagaaagttgaaaatgaacgcctcgcgaatacattaagcaacacctaccgagaatctggcgcacagtttgctgatcaggtgagtggcgcaatcgaaaatagcctgaagtcaccgctggataaaattgcgggtgcggttcagaccgccagcggcgatcaaagcggcatggtacagaacatgctacaggatgtgctgaccgcatttatggcgaagcttgatactacctttggtcagcagtttaccaaccttaacgaaatgatgggacaaaccgtcggggctatccagacgatgcaaagcggcttctccgctctgctgcaggatatgcgtcaggtcagcgacgattcccgccagggtagcgcgcagttaattgaacaactcctctctgaaatgaaatcgggccagcaggccatgcaggcaggcatgaatgacatgctgaccagtttacaagcctctgttgcgaaaataggcgctgagggtgaaggtgccggtgagcgcatggcacgacagcttgagaaaatgtttgccgatagcgaagcacgggaaaaagcccaggcagaacatatgtccgcctttattgaagctattcagaattcagtgcagcagggacaaagcgcaaccatggaaaaaatggcggcctctgtcgaagcactcggggagcagttgggcagtctgtttggccagatagataagggtcagcaacagatatcagcgaaccagcaggctaaccagcagtctctgcacgaacagacgcagcgtgtgatgagtgaagtagacgatcagatcaaacagctgattgaaaccgttgctagtcagcatcagggaaccaccgaaacgctgaacaaactcgcagaacagaccaaccgacagattcaggatatgcaaagtggcgcggataaaatgcgtattgccgccgagcgttttgaacacgcaggcgataaggtgtcggaagcgaaccacctgacggctgacgtactgaataaagcgcaatcggcgggttcatcgctctcccttgccaccagcgaactcacttcagtagtgagcgattatcgtaacaatcgagaagccgtcagcaaatccattgccatgctcgaattgctcgcagcaaatacccagtctgaacaaaccacccgtagtcagttcatcaccgatcttaagcagcacgcagagcgcttgcagagctataaccgtgaagcccagacctttatggaaaatgtcagcgatgtgcttgggaaaggttttgaagacttctcagaaggtgtttcacgcagtctcgataagacgctgggcaaactggatgtcgaaatggcgaaagcctctaatctgcttgcgggctctgttgaacagatcggtgaaagcgtcagcgagcttgatgatgtactgtctcgcgtgcgtgcatga

SEQ ID NO: 10340 - DNA, 741 bp, Enterobacter asburiae
atgtttggtaatgcatttggtgttaaaaaacgtcgcagtgatgaagctgagaagcctttctggatttcttacgccgatctgatgaccgccatgatggtgttattcctggtggtgatggtcgcgtcgctaagctccgttacacaacgaattcaacgcgcggagcaaggggaaaaagtcagggggcaggacatcgccagattatgtgagcgcctggaactgcatgcccgcagtgtaaacaaaaccatcgtggtggattgccacgataaccgcatcagctttggtgaagctgggcgtttcgaccacaaccgttttttccttaatgctgaagggcaaaaagcattacaggatgtcgttccacttgtgctggaggcatccgacagtgacgaaggcaaaaagtggtttaagcagatcgtcattgaagggtttaccgataccgacggctcgtatctttacaacctgcatctctccctgcagcgctctgagtgggtgatgtgcagtttgctcgatagccgcagtcctctgcaaaaaagcatttctgcagaacagcagatccaaatccgtaagcttttccttgcggggggcgtctcatttaataacgcgaaagagagcaaagaagccagtcgccgcgttgagttgcgtatgcagttcttcgggctgaaagataagcatgatgccgcagacgaggtggatttcccgcccgttgtgaataaagaagtttgccagctggtaatgccgcaatga

SEQ ID NO: 10341 - DNA, 1683 bp, Enterobacter asburiae
atgacgcccgcgttgaattctctatcgcagcgcatcgcagcgaagctatcttccagccagcaggaggagcattatttgcgcaatgatttccacgcgctggcttctgctggccgcgagatggaaaaacgatttgataaagcagagaaaatccccacgcccccacatgaaatgcggctggcagcgctgcgtcgttttcgtcttgcggaagaactgagtgaacgtgaatggcggatggtgttttatggcctcgccgatagtgacccacaacatccaggccaaccggtattactcgaagatgatgcgttcttccccgaaataaacagtgcaatagaaaaaagaatagaaaccaagacgctgaaacgtcgggactgggcagcactctgttcaagctattttgcctacaggcatgagtctcctgaaacaaacccgcactggtgtgtgctacgcgggcatattgccaaaggctacttcgtggtgaaagcggctatccgcagagaaaaatcgtggatgaaaaccatcgagttttatcacgacatttttacgcctcaggctggcggtgtgatatcccaacagttgctttccggtgaaagtaattctttatcatcattagaaaaaatagcgcaaatccccgatagcagctggttgtggaaacgtattttcaccgtattgctggcgcagcttgatactctggacgatcctcattttctggaaaaaatcagttggctattaggcctggcggcgcaatgggtgcgttttcgtgatgacattatgacggcgacactgacccgctattaccattcaacctatcgcgatcaagcgcattccgccctgaaacaggccgccctcgaatactgggataaccctcagctcaagagtcagcagaacaagtggcatcagtatgtttctgagcctgtcgctgcaatggtgcgtggctggttagcaaaacaggatctgatgcacttctttgaactgcttcgcggaaacggcgatgttgaccaggcgcgactgcactactggctgcgctttgcgaatcagatgggattcacccgtatcgtgatggggccagatgcctggcaagatcgtggaagcgattttgtgaaattccgcgaggaaaacaaaggacggttgagccagttacgaggcggacgtaatctggataacgctatgatcatgcaaatcaatgactatttgttcgttgagttttccggaaccggtaatgcaatgtatgcctacaggatcggccatgccccctttaacccggaatcacgaaccttggacatcaacatacatctaaaagatcagggacgctgtgcactccgaatgccacatatgccacgagctgaaggttataacaaagtccgcataaccggctggatgctgaaatacgatgatgagctgcgcaagctgggtatccgctggatggctgaagaacccgtcaaatttatagataaaaaagcgccctcacccgcctcggtatctgacatcaaaatcatcaatccattgcgggatacagcaatacagcgcctggttgaaaatacctcatgcatcgtcagtgataaccgacaaaaaggcggcgtgctgtccgtccagctcaaagcacctgacgatataacagaaagagagttgcttcgacttgggttcacccctgtgactaaagaaccgcatcgctactggattaaataa

SEQ ID NO: 10342 - DNA, 3240 bp, Enterobacter asburiae
atgctgaaacgtctgttaagtaaactgacgggaaaccgtcagcagatagaacgccacctgaagaatcagtaccagactgaagaaaacgggctcagttttccgcaatcgttggttgatgacccagagctttgggctctggcatcctggcttgagcaactggctgaagaagactatctgatatcactaacagaccgatggttgttgagctgggaatcgctgtatcgcctgctggaagatgaagaacatgccagcagcctgcctttgattggcgtgcctgaggttttgcccctacgtgcaagtttgagttcgcgaggagctttaagcgataatgacttccgcgtctggattgctgaatgggctacgtttcccatgcgtcaatcgctccgccttagccgcaccggggctatttttactcatgaaaaccagcagtatctgttatcacgggaaaactgggcgctcttgcaggcaaccgagcagctaagtatgcagcaaactcaggctcccggcgagaccaccaaccagctgggatgggctgcaattcgcaaatgcgcgaaacaggccgctgcaaaatttgataattatttagaaaaaacgcacgtcatcaaacccacttcattgtcgttacgcctgcgtaaggcgacagttgctgacactgccgttatcgagattgaaccccactttgaggaccaacccgctaactggctcggcagctttgacaagaactcacaggtccacgatagctatcgtattcccggagagaacggcgagctcagccatgtcatcatcccacctgaagtaaaagaagtcctgaattcaatacactccattcccggtcgccgggttgctggtagtgaagcgctttcctttgttcgcaatccctatactttcctgggtgaagatgccgccagtgttattgcccccgaggaacacgaacaggcattggttgatgcccatattttctttcatcacttcagacttcaaccccagatcaatgatgagaataagatagagagtattacgctggtgctggagccggtctcccccttgccgcaacctgaggtgtcattcctgttctcggctccatgggaactggaaaaatttgttcaggccgtagggataagtgttgccgcgcaaatgccagcaggttcctggcagggttacgagctggaactgagccaattcactgaacagcaatggcatgattgccagtcgctgttgtcgcgctggcagcaggaagtcgaaggtaaagaatttaatgatgttctggatcttggtaaatatggcgatcgcgtcattggcatcggtgagtttgaaaaaatatcctctccctggctgaccaaggcgcaaagtgaaaactggctccctgatggcgacttctccgaattttcggtagaaacgcttgatggttggcaacctgataatctgcagcatttcgatgaactgcaggaaagaatcacccaggcagaagcaactggcgaaacgcatatcatctccccatggaatgagactgaactgccgctggatgcagctaaaaccttcagtaagaactgggaaaaacagcaaaatgcagcacatgagtcagagggcaatgttgttgaaaaaacggcccgggcagtgctcaaaattgaacagaatattgaagaagctgtttacattaaaaagcgccgagactcactcctcaatgcacgccatgctgaacctgaaattccactgagcctgaaagagcacatccggcttaaagaccatcagcgcgaaggcgtggcctggcttcagcagcttttccttcgttcacctcaggaaaccgcaggttgcctgttagcggatgatatggggctggggaaaacgctgcagatcctgagcttcctggtttggttcattgaaaaattccctgacgagccaccaagcctcatcgttgcccccgtttcacttttagataactgggaacgtgaactggacaatttcttctatacagccggaattcctgtgatgaaattgtatggtgacaccattaaagctgtgaaatacccgaaacaggctattcctgctcatctgcagtcccaggggatcaaaaatttgctaaaacccggctggcagggtgaggcgaaaatcattctgacaacctacgaaacgcttcgcgatcaggagttttcactggcgcgccagccatggtccatcatggtctgcgacgaggctcaaaaaataaagaacccggcagcattaatcactcatgcagccaatgcgattcaagcaagattcaaagtggcatgcaccggcacgcctgtcgaaaacacgcttgtagacctgtggagcctctttgatttcgctcagccgggcctgttaggtgcccttaatgaatttggcaaacattatgttcgccctatcgagaacgaagcgggtcgtgatacagggcggcttgaaagtttacgcgcgttgattgaaccccagacattacgccgaactaaagaagaggttgcgcgtgatttaccgcaaaaaatcgaagtcgtcagctgtaagcagctgccgctttctggtcctcaaaagcaactatatctctcttcgatagcaaactggcaacaacagcaggcacttagtgaaggactgaagcaagcaggctcagggatgttggggctattacatcgtcttaaactcatctgtgcacacccggcagtcgttaaccctgagcctcgttatcaggaagggtcacctaagctaaactggatgttgaaaacactggatgaaattaagcattccagcaaagacaaagtaattatctttactgagctgcgcgatctccaacgagaaattcagcgtgctgttcagcagcgattcggtttccgtccggtcatcatcaatggcgataccagcactaaaagtcagagccaaaataaccgtcaacgattgattgatgatttccagtcccaacccggatttggcgtgattattctctccaccgtcgcggttgggtttggagttaacgtgcagaaagccaaccatgttattcacttcacccgctgctggaatccggccaaagaagatcaggcaactgaccgcgcttaccgtatcggccagacaaaggatgtgtatgtttattatccaacggtaatggactctgaaatcacgacgtttgaagaaacactagacgagctccttcagcgtcgtcggacattggccagagatatgttgtgttctacaccggatctaagcagcgctgattttgagaatattttaaaagggacataa

SEQ ID NO: 10343 - DNA, 2190 bp, Enterobacter asburiae; identical to SEQ ID NO: 10335

SEQ ID NO: 10344 - DNA, 741 bp, Enterobacter asburiae; identical to SEQ ID NO: 10336

SEQ ID NO: 10345 - DNA, 1683 bp, Enterobacter asburiae; identical to SEQ ID NO: 10337

SEQ ID NO: 10346 - DNA, 3243 bp, Enterobacter asburiae; identical to SEQ ID NO: 10338

SEQ ID NO: 10347 - DNA, 2556 bp, Enterobacter asburiae
atgttttcgctgacctcgttcctcgacacgttaacctctgttaatccagaaaatgtgccgaaatatgttgctcttgttgttgcggtgctgctggtgtgcttcattgcccgctatgccattccttcttttgtgatttcagcccgctttaaacagaaagcgagggcgattcaactgattgccaaagataaaccggcccagcaactggaaaaactggatgcattattttccgggaagttttttgcacatccctggagcgagtttaaagagtcgctgcatcgtcagtttgagttagatgaagacagcgggcagaaacggatccatagcattcgttctaccgccccagcttccgcctggttctctgaacctttactggtggaaattccactctatacggaagcctttaagcatttgcctggtatcctgactgggattgggataatcgggaccttctcaggcctaatgatcggtttgcaccactttgaccccagcacgccagaacaagtgagcgccagcgtagctaaccttttgcgtgatgtcctttacgcgtttttaggttccgcctttgccattgctttctccatcctggtcaccatgtttgaaaaatggcggctggcgagatgctataaaaatcttgagtcgttgacagccagcatcgaccagctttttgaaggtggcgtcggcgaagattacctttcgcagctcctctccagtaccaaagaaaacaccactcatgccaaacaactgaaagatggtttggtcagtgatttaagagagatgctacagaacctggtggacagtcaggtgcgagaaaatcagaaactggcagagacgttgtcttccacctatcgggaatcaggccagcagattgcggagcaggttagcggcgctattgaaaccagtctgaaaagcccgttggacaaaattgcgggcgtggtgcaaaccgcctccggcgatcagagccatcgagtgcagtcgatgcttgagaacgtccttactgcttttatgaacaaaatggataacacgtttggtcagcagttcaccacgatgcaggagatgatgggccgttccgtggaagcgatccagagcatgcaaagcggtttctctaccctgctgcaggatatgcgtcaggctggggatgattcacgtcagggcagcgcccaactgatctctcaattactcagcgaaatgaaaagcggccagcaagagatgcaggcaggtatgaatgacatgctacgaagcctgcaggaatctgtagcccgcattggcgcagaaggtgaaggcgctggcgaacgcatggcccaacagctggaaaaaatctttgccgacagtgaagcgcgtgaaaaagcgatggcggaacagatgcgtgcctttattgaagccattcagtccagtgttcaacagggacaaaatgaaactatggagaaaatggcggcctctgtggatacgcttggcagccatatggcaaccttgttcgcacaactggaaaatggtcagcaacaacttaatcagcagcaaaatcaggcacaaaatctgttgatgagcaatatgagcaaaggtgttgaagatctgactcaaaacctggcaggtgtatttagtcagcttgagtccggacaaaaacagatgagccagacccaggaacaaggtcagcgtgctctgtatgaagagacccaacaactattagcccgtagtgaagctcgcgaacaggcggccgccgagcaacagcaagattttatcgctgctctgcaacatactatgcactccggccaggatgccctacgtgagaaaatgaccagcggtatcgatcaattaggtagccaattgggcaccctgtttgggcaactggaagaaggtcagaaatcccttagccagcaacagcaatcggctcagaatgctctgcaaaaggaagctcagcgaatcattggccagcttgagagtcaggttcaggcgttaatgcagatgctgcgtgagcagcaatccgcatcaggtgatttactgcaacggatggcgcaaaacacgacgcgtcacctggaagaaattcagactggtgccgataaaatgcgggtggctgccgatcgctttgaaacagcggggaatcgtgtcgccgaagctaatcatctgactgcagaagttctgaatggcactcagcaggcaggtagaactctttccagtgccagctctgagctgggcgcattgatcgctgactaccgcaatacccgcgaggtggtggcgaatgccattagcgcactggaaacactcatcaatagcagccatgacgagcaaacatcccgcagccggtttgtggaagatctgaagtcgtattccgaacgtctgcagcaatacaaccgtgaagcccaagagtttctccacaacgtcgctgaggtgatgggcaccagctttgagtccttcaccaccggggtagaaagcggtctgaaccgttcgctccaggagatggatacacaactgacaaaagcggctggcgccttaagttcttctgttgaaatcatcggtgaaagcgtggatacgctggaaactgtgctccgtagtcgtcgcgcgtaa

SEQ ID NO: 10348 - DNA, 738 bp, Enterobacter asburiae
atgtttaaccggtcattcaatagcaggcagcgtcgtagtgatgaagcggaaaaaccattctggatttcctatgccgacctgatgaccgccatgatggtgctatttttagtcgtcatggtggcatcgcttagctccgtcacgcagaggatccagcaggctgaagcaggggaaaagtcccgagggcatgatatcgcccgtctgtgtgaacgacttgagctgcaggcaaagaatctgaataaaacgatacatgtcgattgccacgataaccgtattagttttggcgaagcagggcgttttgaacataaccgcttttcgctcacctcagaagggcagcaggctttgcaggatgtggtgccgttggtcctggatgcggcaaatagcgacgaaggtaagaaatggtttaaacagatcgttattgaagggtttactgacacggatggttcgtatctctacaacctgcatctctctcttcagcgctcggaatgggtgatgtgcagtctgctggatagcagaagtgcgctgcagcaaagaattactgcagatcagcaaatccagattcgaaaattatttttggcgggtggcgtgtcgttcaacaacgcgaaagagagtaaagaagccagccgtcgtgtcgagttgcgtatgcagttctttggcctgaaagataaaaaacaggacgagagtatggatgtcgtccccggtattagtcaggaaacctgccaactgggtgcagtgcaatga

SEQ ID NO: 10349 - DNA, 1794 bp, Enterobacter asburiae
atgacgtccgcaatagagaagctaaaatcacgccttcttccttaccgggaaaagagtgtagatccggttgtgggtcactcgtttatctatctacaacgcaccatcgaccaacttgaaagaaaggtagatgctcgcgcagtacagatggtgccccctacggagaaacgcaggcaggcaatttcccgattgcgttcgggagacacgccacagccatctgagtggaagatgatcttttttggcctcaatgacgtggcagagggagacctgtttgataccgcactcattgatgatgcggtaaactttgccaaaatatcggctgaaattcagagcaaaattgcacaacaacgattaacgcgtagggagtggttggcgctgtgtaccagctactttggacatgtcagcgatactcccgaagaaaatccgcagtggcttcagttacgcaagcagattgctgctgggtttaaactgttaaaagagagttcgcctcgcccgttgtcatggatgacggtaatcgacacttatggcgatatttttaccgacaatgcgggttttcttcttgggcaacagctcggccgtggggaaataaccgatatatccgtgctggaaaaagtggcacagatcccccagaccagttggctatggcgcaaaattgttaaccatctggtgagcgagatttttcgtcagactgacgatgagtttgaacaaaaaattaatgaactgatcgcgttgagccgtcagctttctcgttttaaagataatatcctggcagctgcacttacccgttattaccagtcaatatttaaacaccggactcaccttgaacttaagctgttagccctggagtattggggaaaccctcagttaactagccgcaataaaggctggcaggttcatgtcgataacgcggtgctgcttatggtacaggggtggttcgctaaagatgacctgaaactgttctttgagttgcttaaaggtaaccgggatgtcgatcaggcacgtctgttctactggctacgatatgctaatcagatgagttatacgcgaattgtattgggtgaagatgctcagcgttcgaaagataccgattatgttgagtttcgggcaaaaaatgcgggtcggttaagccgtctacaaggccccggttctcgcgacaacaatgccatgatcatgaggattgggaattatctttttgtcgagttttcgaaagtaggagccatgtactcttatcatatcgataatgcaccatttaatccggaaactggtattctcgacattgattatgatcttaaagataagcgtaataaccggcgtaaagtgcgtctgcgtttaccgcatttatctccagtaacgcactattcgcttaaccgtattgaagggtggatgagccgctatgatgaagaacttcgtagactaggcattagctacgttgcggaagattccaatcagccatcagctactatcgatatctcccgttttaatgcagatcaaagcggaggcaggtctttatcttctccggctaaatcagaagccaatgaatcaaggtcaaacagagaagaacagattaaaattattgcagcttctttaaaagctaaaaaagtagaccaaaattttacgactcgagaacagcaaatcagggaagtgattcggtctgtcgattgtaaagtgatggataaacgtggtatggggggagcaattcatatccagttcaacgaaccagatcatgaggctgccaaaaaattgttaagcctcggatttaaacctgtgctgggtaaatttacttactggagcaaatag

SEQ ID NO: 10350 - DNA, 3240 bp, Enterobacter asburiae
gtgttcaaaaaattgttaggtaaatttattaatgataataaagcagttactgcttcacttgtgccgctttatgcaattaaggcggagggcttcgttttcccctttagtcttgccgacactcaggataactggcttatcacttcatgcctggaacaactccatgaagaggattatgtatcacactggtcggattgctggtttatcagttgggatgacttctatcgtattctgaataatgaagattatgccagcagtctggcaattttcagcttccctcaacagcgtaatctgaccgcccatcttgctgcgacagggagcatcagtgatgacacttttcgcgttttcattgataaatggaccctgcctgacgattatcgtcccgtagagatcactagccagggggcaagtttttcctccccggaaggcacatttgtgcttagcgaagagaactggcagcttctggactcactgcaacaactcagattacaacagcgacagacaccgggtgagacggtcaaccaaaccgggtgggcaaaaatacgtcgacaggcaaaaaaggcaggagcaaaactggatgattacctggctaaaacgatagttatcaggcccgagtcactgcagttaaagttgcggaaatcactcgtggcggatacccgggttctggaaattgagccggtttttgacgaacagcctgcaaagtggctgcagagtttcgatcgcacgcaacaggtacaagatcggtatcgcgttttgggtgatgacggtgaattaagccacgtcattctttcacctgaagtcaaagatgtgcttacctctgtacatgccatcaccggccgtcgagtcgctggcgatgatgcgctctcgtttgttcgcaatccgtatacctggattggcgaagacgccagccaggtacttgatcccgaagtatatgagcagaatctacaggatgcagggatctatttttatgatttccgtctggagcctcgggttgaagaaaacatgcaggttgagtctgtttcgctgatcctgatccccaggactgaacagcctgtgccagatgaaacatacgtgtttaaccgaccaattgaattggcagcgttgattactgagctggaacaaaagttagcggcgcatcttcctgctggtgtctggcagggctatgacctcgagctgtccagattcactcaggatgaattgcaagagtatcaggcattgctggaaggctggcagcaacaggctgcgggattgaatttttctcacgtactcgatctcaacaagtacagcgacagagttatagggataggagagttcgagaaaatcagttcaccgtatctggtcaaaagtgaaagtgaaaattggcttccagacaacctcgttaaggagatgtatgaagccatgttctcgggctgggacctggataatcatcagcattttcatgagttagatacgcgtctggaagaagcaaaagcctctgatgctcctgaagtcgctatgccctggaacgataaccttctaccacgagaagtagcagaggttttccacgaaaagtggaaaaagaaaatcgatgctgaaacaagtattaccgcgaatactgagccggtgagtcgcgctgtcctgctgatcgaacagaatattgagcaggcactgtatgtcaaacagcggcgaacctccttgctagaagcacacttggctgaagccgagcttccaatgattcttaaggactctattcagctacgtgagcatcaatgtaaaggcgttgcctggctccagcagttgtaccttaaatccccaacagagacgacgggatgcctgctggcagacgatatggggctggggaaaacgttacagattttaaccttcctcatctggcatcgtgagcgtttcccggatgctccgccctctctgattgttgccccggtgtcgctactcgacaactgggagcgtgaggtcggtaattttttcctgcgcgagcaggtttcgattttaaagctttacggcaatgaactcagagagaaaaagtgcgctaaggagagcattcctttcgaactaaagagtaaggggattaaaaacctgctgcaaaatgaatgggttggagaggctcagatagtactgaccacatacgaaacattacgcgatcaggaattttcattggctcgccaaccttggtccatcatggtttgcgatgaggcacagaaaattaaaaatccagcagcccttattacccagtcagctaaggcaatccaggcacaattcaaagttgcctgtactggaacccctgttgaaaatacgcttgtcgatctatggtgcttgtttgactttgttcaaccaggtctcctgggagctctgaataatttcggcaaagatttcctgcggccgatcgagcagcagagtgatgataaagtacttgaatcattaagaaaattgattgaaccgcagactttgcgtcgaacaaaggaagaggtggcgaaagatcttcctgaaaaaattgaagataagtcctgtaagcaccttagtatgttgccgttgcagcgggacctctatactcactcggtagtgagttggcagaaccaacaggaaatcagcgaaggtctggctcaacgtggggcaggtatgcttggactactccaccgcctgaaactgatttgtgcatggccttattccgtgagtgctgatttacgcttacgtaacgatgccccgaaagtgaaatggcttttggatacattaaataatattcgccagtcatcagatgataaggtcattatctttactgaactgcgagatattcaacgcgaattgcagcatctggtctcgcagcattttggattcaagccttttatcattaatggtgataccagcacgaaatccggaagtgaccaaaaccgtcagagtttgatcgataactttcagtcatcgccgggttttaacgttatcatcctatcgacgatagccgttgggtttggcgtcaatgtacaaaaagcaaatcatgtcatccattttactcgctgttggaaccctgccaaagaagatcaggcaactgaccgggcttaccgcatagggcagcaaaaagatgtctacgtttactatccaactgtgcgtgatagtcagttaatgactttcgaagagaccctggatgaattactgaaccggcgcagagctctggcaagagatatgctcaaagcttcaaccgatctcactgctgctgattttgaagcggtacttacccgagctaatacaaattaa

SEQ ID NO: 10351 - DNA, 2190 bp, Enterobacter asburiae
atgtcctggcttaattcatttttagtgacgcttacatctgtggagccccataatgtgcccttcagcgtaatctgcatcgtgagcctggccgttgcctgctttattttcttttatttattccgggccattaacattgttaacagcctgaaaaaatacacccaatcaattaatagcattgaaagcaattccccagaggaacagctcgcccatcttcaaaatctctttaagcgccctgaactcaaacacgcgtggaatgagtttgaagagtcgttacacccgcagagtgagctggaaggtggggaagaaaaaatcgtccgcattcgtgccacggcgccaagctcgagctacttctctgagcagcagttagtcgatattccactcaatacggaattcttcaaacacctgcccggtattctgaccggtgtggggattatcggtacgttttacggcctgatgattggcctcaaccacttcgaccccagcacgccggagcaggttaccagcagtgtcaataatttgctgcacgatgtgttgtacgcattccttggctctgccgtggctattgccgcctctattttcgtcacctggctggaaaaactgtccatcgccaagtgttataagtatctcgaaaaatttaccgccgctatcgacaagctctacgttagcggcgtgggggaggaatacctcgcctcgctggtgaaatccagcaacgaaagtgctacccaggcgcgtcacctgaaagagagcctggttaccgatcttcgtgacatgctgctgcatctcgccgaaagccagaaagttgaaaatgaacgcctcgcgaatacattaagcaacacctaccgagaatctggcgcacagtttgctgatcaggtgagtggcgcaatcgaaaatagcctgaagtcaccgctggataaaattgcgggtgcggttcagaccgccagcggcgatcaaagcggtatggtacagaacatgatgcaggatgtgctgaccgcatttatggcgaagctcgataccacctttggccagcagtttacgaatctcaacgaaatgatggggcaaaccgtcggggctatccagacgatgcaaagcggcttctccgctctgctgcaggatatgcgtcaggtcagcgacgattcccgccagggtagcgcgcagttaattgaacaactcctctctgaaatgaaatcgggccagcaggccatgcaggcaggcatgaatgacatgctgaccaatttacaagcctctgttgcgaaaataggcgctgagggtgaaggtgccggtgagcgcatggcacgacagcttgagaaaatgtttgccgatagcgaagcacgggaaaaagcccaggcagaacatatgtccgcctttattgaagctattcagaattcagtgcagcagggacaaagcgcaaccatggaaaaaatggcggcctctgtcgaagcactcggggagcagttgggcaatctgtttggccagatagataagggtcagcaacagatatcagcgaaccagcaggctaaccagcagtctctgcacgaacagacgcagcgtgtgatgagtgaagtagacgatcagatcaaacagctgattgaaaccgttgctagtcagcatcagggaaccaccgaaacgctgaacaaactcgcagaacagaccaaccgacagattcaggatatgcaaaatggcgcggataaaatgcgtgttgccgccgagcgttttgaacacgcaggcgataaggtgtcggaagcgaatcacctgacggctgacgtactgaataaagcgcaatcggcgggttcatcgctctcccttgccaccagcgaactcacttcagtagtgagcgattatcgtaacaatcgagaagccgtcagcaaatccattgccatgctcgaattgctcgcagcaaatacccagtctgaacaaaccacccgtagtcagttcatcaccgatcttaagcagcacgcagagcgcttgcagagctataaccgtgaagcccagacctttatggaaaatgtcagcgatgtgcttgggaaaggttttgaagacttctcagaaggtgtttcacgcagtctcgataagacgctgggcaaactggatgtcgaaatggcgaaagcctctaatctgcttgcgggctctgttgaacagatcggtgaaagcgtcagcgagcttgatgatgtactgtctcgcgtgcgtgcatga

SEQ ID NO: 10352 - DNA, 741 bp, Enterobacter asburiae
atgtttggtaatgcatttggtgttaaaaaacgtcgcagtgatgaagctgagaagcccttctggatttcttacgccgatctgatgaccgccatgatggtgttattcctggtggtgatggtcgcgtcgctaagctccgttacacaacgaattcaacgcgcggagcaaggggaaaaagtcagagggcaggacatcgccagattatgtgagcgcctggaactgcatgcccgcagtgtaaacaaaaccatcgtggtggattgccacgataaccgcatcagctttggtgaagctggtcgtttcgaccacaaccgttttttccttaatgctgaagggcaaaaagcattacaggatgtcgttccgctggtgctggaggcatccgacagtgacgaaggcaaaaagtggtttaagcaaatcgtcattgaagggtttaccgataccgatggctcgtatctttacaacctgcatctctccctgcagcgctctgagtgggtgatgtgcagtttgctcgatagccgtagccctctgcaaaaaagcatttctgcagaacagcagatccaaatccgtaagcttttccttgcggggggtgtctcatttaataacgcgaaagagagcaaagaagccagtcgccgcgttgagttgcgtatgcagttcttcgggctgaaagataagcatgatgccgcagacgaggtggatttcccgcccgttgtgaataaagaagtttgccagctggtaatgccgcaatga

SEQ ID NO: 10353 - DNA, 1683 bp, Enterobacter asburiae
atgacgcccgcgttgaattctctatcgcagcgcatcgcagcaaagctctcttccagccagcaggaggagcattatctgcgcaatgatttccacgcgctggcctctgctggccgcgagatggaaaaacgatttgataaagcagagaaaatccccacgcccccacatgaaatgcggctggcagcgctgcgtcgttttcgtcttgcggaagaactgagtgaacgtgaatggcggatggtgttttatggcctcgccgatagtgacccacaacatccaggccaaccggtattactcgaagatgatgcgttcttccccgaaataaacagtgcaatagaaaaaagaatagaaaccaagacgctgaaacgtcgggactgggcagcactctgttcaagctattttgcctacaggcatgagtctcctgaaacaaacccgcactggtgtgtgctacgcgggcatattgccaaaggctacttcgtggtgaaagcggctatccgcagagaaaaatcgtggatgaaaaccatcgagttttatcacgacatttttacgcctcaggctggcggtgtaatatcccaacagttgctttccggtgaaagtaactctttatcatcattagaaaaaatagcgcaaatccccgatagcagctggttgtggaaacgtattttcaccgtattgctggcgcagcttgatactctggacgatcctcattttctggaaaaaatcagttggatattaggcctggcggcgcaatgggtgcgttttcgtgatgacattatgacggcgacactgacccgctattaccattcaacctatcgcgatcaagcgcattccgccctgaaacaggccgccctcgaatactgggataaccctcagctcaagagtcagcagaataagtggcatcagtatgtttctgagcctgtcgctgcaatggtgcgtggctggttagcaaaacaggatctgatgcacttctttgaactgcttcgcggaaacggcgatgttgaccaggcgcgactgcactactggctgcgctttgcgaatcagatgggattcacccgtatcgtgatggggccagatgcctggcatgatcgtggaagcgattttgtgaaattccgcgaggaaaacaaaggacggttgagccagttacgaggcggacgtaatctggataacgccatgatcatgcaaatcaatgactatttgttcgttgagttttccggaaccggtaatgcaatgtatgcctacaggatcggccatgccccctttaacccggaatcacgaaccttggacatcaacatacatctaaaagatcagggacgctgtgcactccgaatgccacatatgccacgagccgaaggttataacaaagtccgcataaccggctggatgctgaaatacgatgatgagctgcgcaagctgggtatccgctggatggctgaagaacccgtcaaatttatagataaaaaagcgccctcacccgcctcggtatctgacatcaaaatcatcaatccattgcgggatacagcaatacagcgcctggttgaaaataccccatgcatcgtcagtgataaccgacaaaaaggcggcgtgctgtccgtccagctcaaagcacctgacgatataacagaaagagagttgcttcgacttgggttcacccctgtgactaaagaaccgcatcgctactggattaaataa

SEQ ID NO: 10354 - DNA, 3240 bp, Enterobacter asburiae
atgctgaaacgtctgttaagtaaactgacgggaaaccgtcagcagatagaacgccacctgaagcatcagtaccagactgaagaaaacgggctcagttttccgcaatcgttggttgatgacccagagctttgggctctggcatcctggcttgagcaactggctgaagaagactatctgatatcactaacagaccgatggttgttgagctgggaatctctgtatcgcctgctggaagatgaagaacatgccagcagtctgcctttgattggcgtgcctgaggttttgcccctacgtgcaagtttgagttcgcgaggagctttaagcgataataatttccgcgtctggattgctgaatgggctacgtttcccatgcgtcaatcgctccgccttagccgcaccggggctatttttattcatgaaaaccagcagtatctgttatcacgggaaaactgggcgctcttgcaggcaaccgagcagctaagcatgcagcaaactcaggctcccggcgagaccaccaaccaactgggatgggctgcaattcgcaaatgcgcgaaacaggctgctgcaaaatttgatgattatttagaaaaaacgcacgtcatcaaacccacttcattgtcgttacgcctgcgtaaggcgacggttgctgatactgccgttatcgagattgaaccccactttgaggaccaacccgctaactggctcggcagctttgacaagaactcacaggtccacgatagctatcgtattcccggagagaacggcgagctcagccatgtcatcatcccacctgaagtaaaagaagtcctgaattcaatacactccattcccggtcgccgggttgccggtagtgaagcgctttcctttgtacgcaatccctatactttcctgggtgaagatgccgccagtgttattgcccccgaggaacacgaacaggcattggttgatgcccatattttctttcatcacttccagcttcaaccccagattaatgatgagaataagatagagaatattacgctggtgctggagccggtctcacccctgccgcaaccggaggtatcattcctgttctcggctccatgggaactggaaaaatttgttcaggccgtagggataagtgttgccgcgcaaatgccagcaggttcctggcagggttacgagctggaactgagccaattcactgaacagcaatggcatgattgccagtcgctgttgtcgcgctggcagcaggaagtcgaaggtaaagaatttaatgatgttctggatctgggtaaatatggcgatcgcgtcattggcatcggtgagtttgaaaaaatatcctctccctggctgaccaaggcgcaaagtgaaaactggatccctgatggcgacttctccgaattttcggtagaaatgcttgatggttggcaacctgataacctgcagcatttcgatgaactgcaggaaagaatcacccaggcagaagcaactggcgaaacgcacatcatctccccatggaatgagactgaactgccgctggatgcagctaaaaccttcagtaagaactgggaaaaacagcaaaatgcagcacatgagtcagagggcaatgttgttgaaaaaacagcccgggcagtgctcaaaattgaacagaatattgaagaagctgtttacattaaaaagcgaagagactcacttctcaatgcacgccatgctgaacctgaaattccactgagcctgaaagagcacatccggcttaaagaccatcagcgcgaaggcgtggcctggcttcagcagcttttccttcgttcacctcaggaaaccgcaggttgcctgttagcggatgatatggggctggggaaaacgctgcaaatcctgagcttcctggtttggttcattgaaaaattccctgacgagccaccaagcctcatcgttgcccccgtttcacttttggataactgggaacgtgaactggacaatttcttctatacagccggaattcctgtgatgaaattgtatggtgacaccattaaagcggtgaaatacccgaaacaggctattcctgctcatctgcagtcccaggggatcaaaaatttgctaaaacccggctggcagggtgaggcgaaaatcattctgacaacctatgaaacgcttcgcgatcaggagttttcactggcgcgccagccatggtccatcatggtctgcgacgaggctcaaaaaataaagaacccggcagcattaatcactcatgcagctaatgcgattcaagcaagattcaaagtggcatgcaccggcacgcctgtcgaaaacacgcttgtagacctgtggagcctctttgatttcgcccagccgggcctgttaggtgcccttaatgaatttggcaaacattatgttcgccctatcgagaacgaggcgggtcgggatacagggcagcttgaaagtttacgcgcgttgattgaaccacagacattacgtcgaaccaaagaagaggtcgcgcgtgatttacctcaaaaaatcgaagtcgttagctgtaagcagctgccgctttctggtcctcaaaagcaactatatctctcttcgatagcaaactggcaacaacagcaggcacttagtgaaggaatgcagcaagcaggctcagggatgttggggctattacatcgtcttaaactcatctgtgcacacccggcagtcgttaaccctgagcctcgttatcaggaagggtcacctaagctaaactggatgttgaaaacactggatgaaattaagcattccagcaaagacaaagtgattatctttactgagctacgcgatctccagcgagaaattcagcgtgctgttcagcagcgattcggtttccgtccggtcatcatcaatggcgataccagcactaaaagtcagagccaaaaaagccgtcagcgattgattgatgatttccagtcccaacccggctttggcgtgattattctctccaccgtcgcagttggatttggggttaacgtgcagaaagcaaaccacgttattcatttcacccgctgctggaatccggccaaagaagatcaggcaactgaccgcgcttaccgtatcggccagacaaaggatgtgtatgtttattatccaacggtaatggactctgaaatcacgacgtttgaagaaacactagacgagctccttcagcgtcgtcggacattggccagagatatgttgtgttctacaccggatctaaccagcgctgattttgagaatattttaaaagggacataa

SEQ ID NO: 10355 - DNA, 2556 bp, Enterobacter asburiae; identical to SEQ ID NO: 10331

SEQ ID NO: 10356 - DNA, 738 bp, Enterobacter asburiae; identical to SEQ ID NO: 10332

SEQ ID NO: 10357 - DNA, 1794 bp, Enterobacter asburiae
atgacgtccgcaatagagaagctaaaatcacgccttcttccttaccgggaaaagagtgtagatccggttgtgggtcactcgtttatctatctacaacgcaccatcgaccaacttgaaagaaaggtagatgctcgcgcagtacagatggtgccccctacggagaaacgcaggcaggcaatttcccgattgcgttcgggagacacgccacagccatctgagtggaagatgatcttttttggcctcaatgacgtggcagagggagacctgtttgataccgcactcattgatgatgcggtaaactttgccaaaatatcggctgaaattcagagcaaaattgcacaacaacgattaacgcgtagggagtggttggcgctgtgtaccagctactttggacatgtcagcgatactcccgaagaaaatccgcagtggcttcagttacgcaagcagattgctgctgggtttaaactgttaaaagagagttcgcctcgcccgttgtcatggatgacggtaatcgacacttatggcgatatttttaccgacaatgcgggttttcttcttgggcaacagctcggccgtggggaaataaccgatatatccgtgctggaaaaagtggcacagatcccccagaccagttggctatggcgcaaaattgttaaccatctggtgagcgagatttttcgtcagactgacgatgagtttgaacaaaaaattaatgaactgatcgcgttgagccgtcagctttctcgttttaaagataatatcctggcagctgcacttacccgttattaccagtcaatatttaaacaccggactcaccttgaacttaagctgttagccctggagtattggggaaaccctcagttaactagccgcaataaaggctggcaggttcatgtcgataacgcggtgctgcttatggtacaggggtggttcgctaaagatgacctgaaactgttctttgagttgcttaaaggtaaccgggatgtcgatcaggcacgtctgttctactggctacgatatgctaatcagatgagttatacgcgaattgtattgggtgaagatgctcagcgttcgaaagataccgattatgttgagtttcgggcaaaaaatgcgggtcggttaagccgtctacaaggccccggttctcgcgacaacaatgccatgatcatgaggattgggaattatctttttgtcgagttttcgaaagtaggagccatgtactcttatcatatcgataatgcaccatttaatccggaaactggtattctcgacattgattatgatcttaaagataagcgtaataaccggcgtaaagtgcgtctgcgtttaccgcatttatctccagtaacgcactattcgcttaaccgtattgaagggtggatgagccgctatgatgaagaacttcgtagactaggcattagctacgttgcggaagattccaatcagccatcagctactatcgatatctcccgttttaatgcagctcaaagcggaggcaggtctttatcttctccggctaaatcagaagccaatgaatcaaggtcaaacagagaagaacagattaaaattattgcagcttctttaaaagctaaaaaagtagaccaaaattttacgactcgagaacagcaaatcagggaagtgattcggtctgtcgattgtaaagtgatggataaacgtggtatggggggagcaattcatatccagttcaacgaaccagatcatgaggctgccaaaaaattgttaagcctcggatttaaacctgtgctgggtaaatttacttactggagcaaatag

SEQ ID NO: 10358 - DNA, 3240 bp, Enterobacter asburiae; identical to SEQ ID NO: 10334

SEQ ID NO: 10359 - DNA, 2190 bp, Kluyvera intermedia
atgtcctggcttaattcctttttagtgacgcttacatctgtcgagcctcataatgtgcccttcactgtaatcagcatcgtgagtctggccgttgcctgctttattttcttttatttatttcgggccattaaaattgttaacagcctgaaaaaatacactcaatcaattaatagcattgaaagcaattctccagaggaacagcttgctcatctgcaaaatatgtttaaacgtccagaactcaaacacgcgtggaatgagtttgaagagtcgttacacccgcagagtgagctggaaggtggggaagaaaaaatcgtccgcattcgtgcaactgcgccaagctcgagctacttctctgagcaacagttagtcgatattccactcaatactgaattcttcaaacacctgcccggtattctgaccggcgtggggattatcggtacgttttacggtctgatgattggccttaaccacttcgaccccagtactccagagcaggtcaccagcagcgttaataatttgctgcacgatgtgttgtacgcattccttggctctgccgtggctattgccgcctctattttcgtcacctggctggaaaaactgtccatcgccaagtgctataagtatctggaaaaatttaccgccgctatcgacaaactctacgttagcggcgtaggcgaggaatacctcgcctcgctggtcaaatccagcaatgaaagcgcaacccaggcacgccaccttaaagagagcctggtgactgaccttcgcgatatgttgctgcatcttgccgaaagccagaaagttgaaaatgaacgcctcgcgaatacgttaagtaacacctaccgtgaatcaggcgcacagtttgccgatcaggtgagtggcgcaatcgaaaatagcctgaagtcaccgctggataaaattgcgggtgcggttcagaccgccagcggcgatcaaagcggcatggtacagaatatgctgcaggatgtgctgaccgcatttatggcgaagctcgataccacttttggccagcggtttacgaaccttaatgacatgatgggacaaaccgttggggcgatccagacgatgcaaagcgggttctccgctctgctacaggatatgcgtcaggtcagcgatgactcccggcagggcagcgtacagctgattgaacagctgctctctgaaatgaagtcgggccagcaggccatgcaggcgggcatgaatgacatgcttaacagcttacaggcctctgtcgccaaaattggtgctgagggtgaaggcgctggtgagcgtatggcacgtcagctcgagaaaatgttcgccgacagcgaagcgcgggaaaaagcccaggcagaacatatgtccgcctttattgaagccattcagaattcagtacagcagggccaaaatgccacgatggaaaaaatggcaacgtctgttgaagcactcggggagcagttaggtagtctgtttggtcagattgataagggccagcaacagatatcagcgaaccagcaagctaaccagcagtccctgcacgaacagacgcaacgagtgatgagtgaagtagacgatcagatcaaacagctgatcgaaaccgttgccagtcagcatcagggtacgacggaaacccttaacaaactcgcagaacagaccaaccgacagattcaggatatgcaaaacggtgcggacaaaatgcgtgtcgccgccgagcgttttgaacacgcgggcgatcgtgtgtccgaagcgaatcacctcacggctgacgtattgaataaagcgcagtcggcgggatcctcgctctcccttgcaaccagcgaactcagttcagtagtggccgattatcggaacaatcgcgaagctgtcagcaaatccattgccatgctggagttgctcgccgctaatacccagtctgaacaaattactcgcagtcagttcatcaccgatcttaagcagcatggagagcgcttgcagagctataaccgtgaagcacagacctttatggaaaatgtcagcgatgtgcttgggaaaggctttgaagacttctcagaaggtgtttcacgcagtctcgataagacgctgggcaaactggacgtcgaaatggcgaaagcctctaatctgcttgcgggctctgtcgagcagatcggtgaaagcgtcagcgagcttgatgatgtactgtctcgcgtgcgtgcctga

SEQ ID NO: 10360 - DNA, 741 bp, Kluyvera intermedia
atgtttgggaatgcatttggcgttaaaaagcgccgcagtgatgaagctgagaagcccttctggatttcttacgccgatctgatgaccgccatgatggtgttatttctggtggtgatggtcgcgtcgctaagctccgttacacaacgaattcaacgcgcggagcaaggggaaaaagtcagggggcaggacatcgccagattatgtgaacgcctggagctgcatgcccgcagtgtaaacaaaaccatcgtggtggattgccacgataaccgcatcagctttggtgaagcgggtcgtttcgaccacaaccgttttttccttaatgctgaagggcaaaaagcattacaggatgtcgtaccgcttgtacttgaagcctcagatagcgaagaaggtaaaaagtggtttaagcagatcgtgattgaagggtttaccgataccgacggctcctacctctacaatttacacctctctctgcaacgttccgagtgggtcatgtgcagtttgctcgatagccgtagtcctttgcaaaacagcatctccgcggagcagcagatccaaattcgaaaacttttcctggctggtggggtttcgtttaataacgcgaaagagagcaaagaagccagtcgccgcgttgagttgcgcatgcagttctttgggctcaaggataaacgtgatggggccgaagaggtggatttccctacggtcgttaataaagaagtttgccagctggtaatgccgcaatga

SEQ ID NO: 10361 - DNA, 1683 bp, Kluyvera intermedia
atgacgcccgcgctgagttctctctcacagcgtattgcagctaagctctcttccagccagcaggaggaccattatctgcgcaatgatttccacgcgctggcttctgctggccgtgagatggaaaaacgatttgataaagcagagaaaatccccacgcctccacatgaaatgcggctggcagcactgcgtcgttttcgtcttgcggaagaactgagtgaacgtgaatggcggatggtgttttatggcctagccgataccgatccgctctatcctgacaggccagtattactggaggatgatacatacttcccccatgtcgacagtgctatcaaaaaacagattgaatctaagtcactgaagcgcaaggactgggcagcactctgttcaagttattttgcctacaaacacgaatcgccagaaataaacccgcactggtgtgtgctgcgtggtcatatcgcccgggggtaccccgtggtaaaagccgctatccgcagagaaaagtcgtggatgaaaaccattgagttttatcacgacatttttacgcctcaggctggcggtgtgatatcccagcagctcctttccggtgagagcaattccttatcatcattagaaaaaatagcgcaaatccccgatagcagctggttgtggaagcgtattttcacggtgttgctggcgcagcttgatactctggacgatcctcaatatctggacaaaatcagttggctattaggcctggcggcgcagtgggttcgttttcgcgatgacattatgacagcgacactgacccgctattatcattctacctatcgcgatcaagcgcattccgccctgaaacaggccgccctggaatactgggataacccgcagctgaaaagccagcagaacaagtggcatcagtatgtttctgaacccgtagccgcgatggtacgcggctggttagcaaaacaggatctgatgcatttctttgagctgttacgcggcaatggcgacgttgatcaggcaaggctgcactattggctacgtttcgcgaatcagatgggattcacccgtatcgtgatgggaccagatgcctggcaagatcgtggcagcgactttgtgaaattccgtgaggagaatcgtgggaggctgagccatctgcgaggtgggcgtagtttcgataacgccatgatcatgcagattaacgactacattttcgttgaattttccggaacggggaacgcgatgtatgcctaccgggtgggtcaggctccatttaacccagagtcacactcattggatattaatatccaattaaaagacaaataccgtaatgttcttcgccttccacataccccacgagccgaaggatacaacaagacccgcatcactggctggatgctgaaatacgatgatgaactgcgccaactgggtatccgctggatggctgaagaacccgtcaagtttgtcgacaagaaggtgacttcctcagctgtacaagttgacatcaaaatcatcaatccattgcgggatacagcaatacagcgcctggttgaaaacacctcgtgcatcgtcagtgataaccgacaaaaaggtggagtgctgtccgttcagctcaaagcacctgatgactcaacagaaagagagttgcttcgactcggtttcacccccgtgactaaagaacctcatcgctactggatcaaataa

SEQ ID NO: 10362 - DNA, 3243 bp, Kluyvera intermedia
atgctgaaacgtctgttaagtaaactgacgggaagccgtcagcagatagaacgccacctgaagaatcagtacctggttgaggaaaaaggactcagttttcaacaatctttggttgatgactcagatctctgggcgctggcatcctggcttgagcaactagctgaagaagactatctgatatcactaacagaccgatggttattgagctgggatgccttgtatcgcctactggaagacgaagaacattccagcagtctgcctcttattggcgtcccagaggtattaccattacgtgcacacctgagttcacgcggagcattaagcgatagtgattttcgcgtttgggttgcgcaatggacttcatttcctgcccaccagccgctccgtttcaatcgtaccggtgctatttttacttatgaaaatcaacaacacctgttatcgcaggaaaactgggcactcttacaggcaatagagcagcttggtacccagcaaactcagacgcctggcgaaaccactaatcagctgggatgggctgctattcgtaaatgcgcgaaacaagccgccgtaaaatttgatgactacttagaaaagacgcacgttatcaaaccgacatcgttgtcattacgcctgcgtaaagcaacggttgctgataccgccgttatcgagattgagccacacttcgaagaccagcccgctaactggctcggcagttttgacaagaactcacaggttcacgatagctaccgtattcccggagagaacggcgaactcagccatgtcatcatccctcccgaagtaaaagaagtcctgaattcaattcactcaatcccaggccgtcgggtggccggtagtgaagcgctatcctttgttcgcaacccctatactttcctgggtgaagatgccgccagtgttattgcccctgaggaacacgaacaggcactgtttgatgcccatattttctttcatcactttaggcttcaaccccaaatcaatgatgagaataagatagagagtattacgctggtgctggagcctgtctcaccgctgccgcaaccggaggtgtcattcctcttctctgcgccatgggaactggaaaaatttgttcaggccgtagggatcagcgttgccgcgcaaatgccagcaggttcctggcagggttacgagctggaactgagccaattcactgaacagcaatggcatgattgccagtcgctgttgttgcgctggcaacaggaagtcgagggtaaagaatttagtgatgttctggatctcggtaaatatagcgatcgcgtcatcggcattggtgagtttaaaaaaatatcctctccctggttgaccaagtcgcaaagtgaaaactggctccctgatgacatcgacttctccgcattttcggtggagacgctaacgggctgggaacctgaaaacctgcaacacttcgatgaactgcaggagagaatcacccaggcagaagcgactggcgaaacacatatcatctcaccctggaatgataacgaactgcctctggataccgcgaaaaccttcagtaagaactgggaaaaacagcaaaatgcagcacaggaatcagaggacagtgctgttgataaaaccacccgggctgtactcaaaattgaacagaacattgaagaagcggtctatatcaaacaacgccgcgattcactcctcactgcacgccatgccgaacctgaaattccgctgagcctgaaagagcacatccggctcaaagaccatcagcgcgaaggcgtagcctggcttcagcagcttttccttcgttcacctcaggaaactgcaggttgcctgctagcggatgatatggggctcgggaaaacactgcagatcctgagcttcctggtctggttcattgaaaaattccctgacgagccaccaagcctcatcgttgcccccgtctctcttttggataactgggagcgtgaactcgacaatttcttctacacctccgggatttcggtgatgaaattgtatggcgacaccatcaaagcggtgaaatacccgaaacaggctattcctgcccatctgcagtctcagggcatcaaaaacctgctcaaacccggctggcagggtgaggcgaaaatcattctgacaacctacgaaacgctccgcgatcaggagttttcactggcgcgtcagccatggtccattatggtgtgcgacgaggcgcaaaaaataaagaacccggcggcactgatcactcatgctgccaatgcgatacaagccaggtttaaagtggcatgtaccggcacacccgtcgaaaacacgcttgtagacctctggagcctctttgattttgtccagccgggcctgttaggggcactcaatgaattcggcaaacactatgttcgccctatcgagaacgaagcaggtcgcgatacagggcggcttgaaagtttacgcgcgttgattgaaccccagacattacgccgaacgaaagaagaagttgcgcgtgatttgccgcaaaaaatcgaagtcaccagctgtaaacaactgccgctttctggccctcaaaagcaactgtatctttcttcgatagcgaactggcaacaacagcaggcacttagtgaaggaatgcagcaagcaggtgcggggatgttagggttattatatcgcctcaaactcatttgcgcgcacccggctattgttaaccctgagcctcgctatcgtgaagggtcgccaaagctgaactggatgctcaaaacgctggatgaaattaaacacaccagcaaagacaaggtaatcatctttaccgagctgcgcgatctccagcgcgagatccagcatgctgttcagcagcgttttggtttccgtccggtgattatcaacggtgacacaagcaccaaaagtcagagccagaacagccgtcagcgattgattgatgattttcagtctcaacccggctttggcgtgattattctctccaccgtcgcggttggatttggggtgaacgtccagaaagcaaaccacgttattcatttcacccgctgctggaatccggcaaaagaagatcaggcaactgaccgcgcttaccgtatcggccagacaaaggatgtgtatgtctattatccgacggtaatggactctgaaatcacgacgtttgaagaaacgctagacgaactccttcagcgtcgacgggcattggcgagggatatgttgtgctctgcaccggatctaagcagcgctgattttgagaacattttaaaagggacgtaa

SEQ ID NO: 10363 - DNA, 2241 bp, Halothece sp. PCC 7418
atgttgagcgcgatcgaaacaaataacttattttttatcaacactgtgaggatcattttcataattggattttttattgaaatctctcttttattgagctattacaggcaaactggcaaaaaagcaaaccaaattagtaaaaatcgtgacctttctatttttaataaaggaaatattcgcagtccattacattttgttcccactttactaaccgcgatcggaattttaggaactttttgggggatttctcaaggcttacaaggcattgctttagaaaatatcaacaatactgatgcacttctaaacaatagcactgaacttttagcaggaatgaaaactgcttttacgacttctctttggggcttaggtggcgcaagtttatttatttttattcttgctgctagcgaaaccttaaaacgaatacgccgtaattctctcatgccgaaaattcgcgagcaaaataatcgtaatcaacctccagatcccattgaacaattaggcaaaattgctaaaaaagtggaagggctagtaactctcaacgctcaaaatattggggaagaagttgcgaacgctttaaaaccgagtttccaagaggtcagaacagatcttaaaactcaaaacgaaacgttgcaggagttaagtcatctgaaacctgaaataattggcgaggaagttgcaaccgctttaaaaccaacttttgaagaaattagaacaattagaacggatctcaacctacaacgccaaaccattgaaaaccagcgtcaagaacttctaaaaactttaattgcagaactgaaaacagaagttattgaacctgtaatgactcgtcttgatgaaagcgcagcaatgactcaagaggcttccagtgcagttaaagaactgaaagaagaattaggaggaatttctgaaagtttggcgacatctattcaaacgattcaacaattccaacaacaaactattggacaacttgaagcctttgctcaaaacctacaacaaattttagagcagtttaaaaccgatactcaaggtgtaatgcaacaagtagcgacaaatattaatcatgcagttgatcaaagtatttcaggaatggaagcccaacgaacagcttttgctgaaagtgctgaacaagcctctacgactttccgaggaatacgagaagacttagaacaagcactcactactcaagcacaacagcaaagaaccatgcttgaagaagtccaaacttctactcaaggtattttacaggaagcgaataacgcttttgtagaacaatcaaatacgctgactcgcgttgggaatgaagcctctgacatgatgagtaacgccagcgagaacttacaaaccagtattactcaagcaatcaatgagagtatttcaggtttagaaactcaacgccacgcttttgctgaaagtgcggaagaaacagcaaatacgttccaacaaatacgagaagaattacaaactactctcagaactcaagcacaacagcaaagaacaatgctcgaagaagtgcaaacttctactcaagatattttacaagaagcgaataacgcttttgtagaacaatccaataccctgactcgcgttggtcatgaagcctcgcaaatgatgagtaatgctagtaataacttgaatggaacattaactaatattgattcaatgttgcaaaatacccgtcaaaccgtacagcaagaattagaaaacttccgcattacctatcaaaactcactcaatcagttttttgaacaacaaaataatctcctagaagaaacattaggaagacagcgagaaggcttagaggaagtggttaaagaattacaaagagttttccaagaagacgctaaaaatatggctgaacaagttattgaaagtatggagaaaattcaaataaccacaaaagctgttagtgatttagccaatacaacaggcttaacgtctgctgaccgtttagcgcaaattcaagacatagcgagaactctaggaagtgaatcaaggaaaattaatcaagcctatgaaaacctgattcataactttaatcgaggcttagaaacttggaatgataatttaaccgaatactttgaacaagctaatgaaacttatcaacaaggaagacaagaatcagaacaagcagcagcagaagtttgcaatcaactcaatcaaacctctcaaggattaatgggtgttgctaactatttagtttcagcagccaatgatctaaatgatgctaatagtaagcattag

SEQ ID NO: 10364 - DNA, 711 bp, Halothece sp. PCC 7418
atgacaaattttgacccacttaattctaatctcgaacttgatttagaggatgacgacgaacaaaatcaagaatcgggcgtttggctttcaattagtgatttaatgtcaggcttacttttatttttcgccctcttatttatcgccactcaaattcagttgcagaaatatcaagaacttattgataagttacctatagctgttgtcgaagcaatagaaaaagagatcggtaatgaagccttacaagttgatcccaaaacaggtgatgtgagcttagatgatcaaattttattcactgaaggctcttcacaattaaagtttgaaggaaaacaatttctgaatgaatttattccaatttatagcggagttatcctttctaatgaagactttgatcagttagttgtacgaattataattgaaggacatactagttctaaaggttcagaaatagcgaatcgcgctttaagtttagaacgagctttggctgtaacaaattacattttttccgatgaactccaattcccaaacaagaagcgttttgaaaagaaaattttaattagtggtcgcggagaaattgaggcaaatcaaaatattgatgatccaattgatcggaaggtaacattccgctttcaattacgtcgtcctgattttactggtgggactgatcaagaggaagcaaaaattaaagaatcgattgatcaagaaagcaaataa

SEQ ID NO: 10365 - DNA, 1524 bp, Halothece sp. PCC 7418
atgaaatttaaaactattcaaccgcttccacaatttcagttacaaccaacagcattgacaaagttagctgctgaaattggaacgaatcataaattctcttccccagaacttccccctgaagtaaaccaatatcaaactcgtcctcctcgttctttagatgacatttttatgaatttagaacaaggaaacgccgacaatgttagtttattggagtgggtttactgtatttattataagaaagactgggatcaaaaacattcaaaagaccaacaattatcaacgtctcgcttgatttgggaaggtgcaattaataatgatgctataaaacagcgtttgtgttggcgtttagcttattattatgatggacatagaaatagtttagcaccctctttggtagaaactttttctactttgtcagatattcatgatgatgatttagctgttcaagttctatgtactctacaaaagcgcgatccagttttacctatagctaaactatcacttcgtaaagagttaacacctcaagacttatttaagactgctcaactacctactaatttaagcattatttatgatgctttagaatatgttgttactgctttttctaaccaatcaaaccccacacaaaaagaagcaagttggttactgaactgttttgaaataatgactgttgaacaagaaattagtgcagtcgaaaccttgctaaaaaaagttagtgcagaagttggggggcagtttaataatttagtccagtggctacaaaaccattatagtccactggtaacagcatctcaatggagtcggctttctactgaggcaaaaagtgcgttaagacaatggtttggtgcagctaactatcgagatttccaaaggttagttgatattatttctgctcgattcaatgaaagcaacgatcaggaaaaagctaataaaaatcaactgctcagcagaaaatatttttgggagcaatattcagatcagtttgagcgcattcggattttacttccgcagtcttcggtcaatgttgtaggaaatcaaatccaacaagatatagatattatcaaagatgatgggagtgaggaaacagaagtttgtatttttgattttggcaactggtttgttgttgaatttttccgtggaagtggaagtgaaactcgcatttttaagcgtgatcagtatccgaacattgaacaagaattgtttgcgtcttctcagttatcagtaaagcggttacgggcttttggtggagaagttcatgatcataagtatctttggcaaattgattgtgaaaaatggttgcgagaacggggaattttacctaatgctggaacaactcatttcaaacgtcggaataaaaataatcccaatcaaccttatcgcgatcactataatcctaatataggacttccacttcatgatcctaatggtgataaacgaagaacacgagaaagagatttaatgagatggcgcagagatattgagcaattagaacgagaagcaaaaaggaggtttccctcttattga

SEQ ID NO: 10366 - DNA, 1371 bp, Cyanothece sp. PCC 7424
atgaacaatttattgacgacatctaaagggattataccaatctttccctcagaccctctttctgtagtctgtgtgtgggttatcattgtcgcagcagttgtcttaggggttatagaatgtctagctatttttaactacaaaaaggaatgtaaatcaactaaagaagctattgactatttattaaaatcaaaaaaaaatgaaaaaatattaaaacctgaaggagaaatattattatggctatttaaacatcttgatggtcaggttcaaaataatagttttatacctaagatagaacaaaaccatttcgttttactttcctatcctagtgttttaagtaaaccggttccccgcagtcctgtctattatgccccaactttactaactgctcttggtgttttgggaacgttcttaggaatttttatagggttgcaaggggttgatttaaacaatatgagggatgcaggctctttattgagggctagtaccgagctactttctgggatgaagttagcttttgtcacgtccttatggggtatgtctacctctattcttttcatgttttgtttagctatgggaggaaatattcggcaaaaccatcgtaataatttacggaaggatttgagtaatgtagctttcttaaatacttctgagcggcttttatctcgtatgaaccctaggactaatgatgaagccaccaaagacaaaagcgcttcagaaaaatctcaactcacaccagaagcgatcgccgaagcatttaaaccttatttaactcccgttactgaggacataaaagctattcgagaactccaaaaagttcaaggttcaacggtagaattattagttcaacaactacggactgaattaatcgatccggttgtcactcaattagatcaaagtgcccaattgaccgcacaagcctcggatgcagttcgagaacttaaagatgaattaggagaaatagctcaaagtctagccggtgcggtccagacaattcaaacctttcagcaggataccctcattcaacttcaacaatttgccacgaatttacaatcgattctcgctcaattccgtaccgatacccaaggcgtgatggagcaagtggctgtagaaattaaacaggcagtagataccagcatagaaggaatggaagcccaacgaacggcttttaaagagagtgctactcaagcggcgagtaccttccgaggaattcgtgaggacttacaacaagcactcgatacccaagcccaacaacaagaaaaaatgcttgacaaagttcatgcttctaccgagggaattttaaccaaagctcaagaagctttccataatcaatctgaaacattattaacggttgggaaagagcttctagtctga

SEQ ID NO: 10367 - DNA, 669 bp, Cyanothece sp. PCC 7424
atggctaactttcctgattatgaaatcgatgcagaagagttagaggaacaagactctggagtttggttatctattggggatttgatgtctagtttattgatgttttttgccctattatttattacggctcaagttcaattactgcataagcaagacgaactacaaaaatacaaagaagcaattgatcaattaccggttaaaattattaaagccttaaatgagacaattcccaatagtgggataattgtacatcccgaaacaggagatgtcagtctcgataaccgaattctctttgatgaaggaagtgcttcattaaaacccgaaggtaaacagtttcttcaacaattcatccctatctatagtcaacatatcttttcaaatacattattggatcaacaaattattagagttattattgaggggcacaccagttctaaaggatcagattcagataatatggaactcagtttaaggagagctttatctgtatcagattatattttttctgatgagataaattttcctactaaggaaaaatttcaaaagaaactcctcgcatcgggtcggggtgagattgatgccgaacaacaaacagataatccgagcgatcgcaaagttatgttccgctttgaatttcgacgagaaaatttgacggaattattgaaataa

SEQ ID NO: 10368 - DNA, 1506 bp, Cyanothece sp. PCC 7424
atgaaaggtttctatccaagttttaatttacctgaagtttttcaaattcaagcaacagagttattaaaagttcacaatatcagcagttgtaaagctaatcttaatgccgaattacctaaggatatcttatctaactcagagctttcatttcgtactattcatgaaattgttttagacatagaaaacggtcaagcagaacaaattagtgccctagagtggatctattgcatttacattaaagaaagttgggataagcaatatcctcataaaagtcaaacaacttctgagatgatttggcgaatagctcaacaaaactcttggctaaaacatcgcctattttggcgattagctttgttttacagtgatcagacccaaaactgtttagcttcctcattagttaatagtttttctagtttccagacacaggatgaagaagataaaatagccttaaaaattctcagttttattaggcaaaactcacctaaagatatcgctcatttaagttggcagcatttactttctccagatcagcttttagccaggtatcaactcttccctcaacttcctctcgtcggacaagctttaagctatgttaccgttcagtttatttcaaatattcagtctgttcaaaaagaacaagttgattggctgctgacttgttttgataaaatgaccaagagtcagcaaaaggaagaagtggagaaactactatctaaagtttcttcaaaagtaggaggtaaatatcctaatctgatagcttggttatctaaaaattatggttcaactactacgaattctagatggtctgaactttcatctgaggctaaagctgccttacgcaagtggatcggagcagttaattaccaagattttaaaaagttaattaatttacttatatcacgtcttcctctagaaacatgggaacaaaaccagctaaaaaaaagaaagggtttttgggctaattacagcgatcgctttcaacgccttcgtattcttctgagtccatcttcagcagaagttttaaaaaatgaatttcaccatgaagatgtcagtattttagttcaagataacagcgaacctactgaaatttgtatttttgactttggagatagatatatagttgaattttttcgaggttcgggaagtgaaacacgcttatttgaagctaatgataaaattgagaaagaactttttcagtcttctcagttatctgtcaagcgtttacgatcgttgcaaggaggagaaactcatgatcatgtattttgctggcaacgttattgtgaagaatggctaaggaaaaacgggatctatcctaatgaaggaattacttattttcaaggtctatctcgctcacataatcaatataactctaacagaggacttccttttccttcagaaaaagaccagaaaaaacggcaatatcagatgataggatggtggcaaaaaatcgctaagttagaacaagaagcgaggcagtattgtaacgctcaaaattctgaattttaa

SEQ ID NO: 10369 - DNA, 2004 bp, Cupriavidus basilensis
atgaacggaataacaaaaacattgggggcacttcatccagcgcttggcagcctccatggtgtaccgctatacgtgttcctctttgtcgctctcctgacggtagcattcctggctggctacgcgtacaagggaacccaagtctggtggcagatttggtcgacgttgcgggcaattcgcgcgctccgcagggaccaaggcgctcccgaccccgccgaagttggtcgtgcgtttcggtgggagccactcaagcacctctggactgaatatgccgacacactgcatgagctgcgtgtggcaggctcaggcggcgccgccctcactgaagtccgtgcgaccgtgcccgccgaggcgatgtttactcgcgaggtgctggttgatgggcgcctattcgacgacttcacgcggcatcttccgggtgtgctgaccgggttgggcatcattggcaccttcgcgggacttttggatggccttcaacagttcaagcctacccccattgaggacgctgtaaacggtctgggcccactgctgcttggtgttcagcatgccttcgtcgcttcggggacagctattgcttgcgcgatgctggtggtcttcatcagtcgtctcgtgttggcctatttttatcggctggttgagcaccttactcatgccatcgacagcctctactcgacgggcgcgggcgaggagtacctggcccgattggtcaagtcgtcggagcaaaacgctaccagcaccgctcaattgaaggacgcacttgtggaggacctccacaagatgatgaccaacctggttgaccgccagattgcagcccaggaggcgtcgaccttggcgctcggcaagcacattggagagtccatttcctccgccattgcagagccaatgaggcgtgtcggggaggctatggaggtcacggcccgcggcaatggcgagcaggtcaattcgatgcttgagaccctgctcaccgggttcatggccaaactggaagataccttcggggggcaaatgcgcggcatcaacgaacagatgcagcggtcgatggattcgatgtcggctgttcagtcgtcgctccagggactccttgccgacatcaagcagactaacgagcaggccgcgaatcagatgagcggcacgcttgaggacgccatgaggaaggctgcagacaaccagcaactcctcacggaccaaatgcgggagtttgttcaggacttccgacgactggtgaccgaagagcagaacaagtccaagcaggcgatggacgaggctgtgatgaaggttctcggcgaagtggctgtcgccatggatagactagaaggtacgcgcaaggcggcagccgcggaggaagctggaagaaatgaccggctggctaaccagaccaatcagttggttggtggcttgacgacacaggtggagactctgatgagcgtggtttcggagcaggtcgcgaagactcaacaaaacgtcgatgcacttggagtcgtatcgctacgggcaatcgatggcatgaatcaaggggcgttgaccatgggctccgcggctcagcgcttcgagaccgctggtggcgcggtgtcagccgtattcgaacgttcgacaaaagtcgcagacacgctgtcttccgctgctgcttcgttgcaggcggcatcgaccgcggtgcagcgtgggttcgagcagtacgattcgacaaggaagaccgttgacactcaagtagctgcccttatgggtctcatcgagacggtcaaaagggaggccggcgtgtcccaggagcttatttccagcatcaaggcgagtgccgaagcgatgcggaaatcggagcaagaggctcgcctgcacttggaccaagtcaacgccgcgttggtcaaggcattctccgattttggtaattccctggtcagccaagtgaagtcaacgattgcagagaccgaccgccatctcgcgcagggcactgggcatcttaacggggtcgtgcaggaacttgcgaatgccgtacagcgcatgaagagggtctga

SEQ ID NO: 10370 - DNA, 162 bp, Cupriavidus basilensis
gtgcaggagctttttctggttggcggctattccttcaactctattaagaaagacaaggcagagagccggcgagttgaattcaaggtggatttttgggggctggacgaaaagcagccagaggccagcgacgtgctcaaaggcaaggagttcggaaagtgctag

SEQ ID NO: 10371 - DNA, 1671 bp, Cupriavidus basilensis
atggggttgcattccggtgagtttggcaaacctgagctcgttgagaagccaacccgagaagcagaacgcatcttccaaggttttgcagcggccaagcccaggaaagaagatgcgtacgctgctgcgctgagctttctcaggggcaaggagctggactcatggcaacgagacctggtggcctctgccattggcgagcctatccgcgagcaggatggcgcgatggtgcttggggccaggcggtttccggcgcttctgggcttgtacgaatccgaggctaagcgaggagacctttggcgacttacttggcacggactgctgtactcgtacttcaatttcgacccgaatcttgcgaacgatgatgcgacgcgctccggctgggaggcgcttcggtcattcctagagaggacttggccgctgattgacaaacaggctggaaaaaaccaggttccagattgggtcaacgtccttcgcaaggaatcagaggtactttcagagaaccccgtcgacaagtattcgcactcatatcttcgaggcgaaaccgggccaaccgaccggctcgccgaggatttgggtatcccgccgtcgagctggttctggcacgccctggttcttggagtggtgcgtcgcgcgacggcggagagcgatgcggagttcagaagactcattcctcaactagtcaagctaatccaaggaaagccaggcttccgcgatgaggcgttggaagtccttctcattcggtaccacgcctgcaagggtgccccgcatgacgaacggctgcgggactacgtgtgtcagcccacggtgtggaagaatccgaagctgaaagccgcagggatagccacagcctggaacagagtccctgacccggtatggcagatggtgctcagttgggtaaatgagcgaaatcttaaggacttcttcgacatattggctgccagaaacaacgcggatgaaggtcgacttgccttctggtcaaagtatctcaagcaaatcgcttggacgaggttggtgtttggtgtcgacacaatggcgctcaagcgtagcaaccccgggattcgggagctgattgctcgagaggagggcgcatatgcgcagctaacgagcaaacctgaggtggatgccttcatgatgcagattggctcctatctcattatcgagttcagcaagaagccgaatgcatgttacgtctatcaggctgaccagctaccgttcgagccctatgaccgacactacgagggaggtacagctgacctggccgccggctaccgccaagacgtcggttgcgctcttcgaatcgtccatcgagaagggtggggtgatagagcagaagtcgaacttcgtcagttggggattcggcctgaccgccctgaggcgcaaagagtcgcgaccgccggggctgccaccacttcaacggcaggaaatcgtactgcgagttccggaacggcatcgggacgggcgaccgccaagttcgcaggcccagacatggcagcgctgcgggcactcgtaactcgattccgtggcgcatcgatagatgacaggcggagcaacgccagcggcggcaggctttgggttgaggacccactgcagaggacgacgctcggcacggagctaaaggcgctgggcttcaagtgggcaaacaacaggcaggcttggtacttcccggagaactga

SEQ ID NO: 10372 - DNA, 3867 bp, Cupriavidus basilensis
atggggctgttcgatttttttaagcgggcggccgcgcccaaggccgataagtcgactctggtgacctcgtggactcaggaaggggtacgtattgagttcgcacgtgaattgactgagtccacggccgacggcttacttgaggccatacatgatgccggtcctgatgacgttgtcttgggggcatatctggcgcagcttgcagcagaagaccgctgtcggttagaccggaaggccgcactcattccatggggtgacctctatgacctgcagggttctgcagaacacgtcggcgcacttaagctactaggccttcctccccagggaccattgcggccagtgcttgacagctccggaacgctgtccggtcgggacttcgaccttacggtgacaggttggaccgatggtgccaagaaagttcacctggaacgcttggatggtgcggtggcgacagttagtggcgaatcgcagatgctgtcggccgctgcatgggctacggcagcagaagtgtccgcattccgccgccgcgacgatagcgataggacgcaacacgcccaagagctagcctgggggcgaattcgccgaattgctgaccgggccggagcgctctatgcgagcccctacctcgagacgacccttgttctgacacccgacacgctgcggctccctctttcaaagcacgacacaccattcgggcgggtactgaccgtatctccaatctttgagggagctcccgacggttggttgactgccttcgacgggttcaactcggttcagccacattacgacctcacgcggggctcggggcgcatacgagtcgttatctccgagccagttcggaaggtgctcaacgttatcaaacgtgagatgcctaaccgccatgtagccggggcgaaagctgagaagtttgtccacaatccgttcgcattccttggtgacgcagcacacgaagtactaaagacggatgagttcgaggcagaccgtgcggaggccggcgcggtggcggcagtattcaacattgtcgctaggaccgagcacggacggctaaatgcggtcgaactcgtggtcacggagcactttggggacggttcggctagaactgattgcaaagcgtgtaagactgttgacgaactggatgcgttcctcctggcgctcaaggaagcgctggagcgggaccgggaacggtttccctgggacgagtatgacctgaccctcgatgcagagtcgaccgtgcagcttgagcagggacttcagctggcccacctctggcgtacacagccagccgagcgaatcagcttcgacgacgtctatgagctagacggctatagtggacgtgtcgaggggattggcgcagccaagcccatctatgttcccgttttccagaaggagaagaaggaagagggggatagcggttggctgccattggacctgacaccgatggtcaaggtgaccctgcaagggcacgaaggccaggtgctggtgcctctcacgaaggagtgggtgcgggacttcgacaagcaggtgcaggaggcagaggaaaaggggcttccagacgtcaaaaattccagtctgccgactccgattgccaccgctcaagcgcggacgctcgctgatagcttcaaaagtatggtcgaagctcaagagagcgttgaagaagaacattcctctcaggcgaagaaggagaagaagacccgtcaaacgcttttggtcaagaccaatttccatgacgttgactatttcgaggagcgcaggacatcgctggcgctgccggacgaccggcaagctcagttgcccaagtgtctgcgacctggcattgagctcaagcaccaccagcactacggtgtggcttggtttcagcacttggtttcgaaggctcccgccgggtgccgcggtgccttgttggcggacgacatggggttggggaagacactgcaactgctgtcgctactcgcttggtactatgagggcaaccccaatgccgctccctcggtcatcttcgcacccaagagccttctcgagaactgggccaacgaatccaagaaatttttcaatgactccttccctgaagtcttggttctctacggcgatgaactgaaggaacgcaagcaaccgcctagccttatcgacaaccagctgcgagacaagggcattgaagacctgctgaagccgagctgggtcggaccggcaaaggttatcatcaccacatatgaggtactgacctcatatgagttctcgctggccaagcaaccttttgcatttctcatttgcgatgaggctcagcgcatcaagactccagggacgctggtcacgctcgctgcgaaaaagctgaaggcagatttccgcattgcgtgtacgggtacaccggtcgagaattctctggccgacctttggtgtctatttgacctggtccagccgggcttgctgggtgccctggaggaatttggcaagacctatcggcgcccgattgaatgtgagaccgaggaacagaaggaagcactccagcgtctccagactgccatcgcaccccagacattgcgtcgcacgaaggcagacattgcggccgacctgccgatgaagtactttgcgctgaagaccgtcgcgcagaccaagctggagttcaagccagcacttggcactgaggagcgtctggaaatccctctcacagagcaccagcgcatcctctacaaggggggcttgaaaaaacttcaggacgccgccaaggagtcaaatgggcgaaagcgcgcgcagttgtcgtttggtgcgttacatctcatgaaggcagtttgcgccgagccttactgtctgccgggcacgaagttcctcgtcgacaggtctggacgagaagcgcatcttgccaactcgccaaaattggattggcttcttgagcaactcgatgaggtcaaagcggcaggtgaaaaggccattgtgttcacggaacttcgcgaggctcaggcagcgctgtactacttcctcaaagagaccttcggtatccgcccgtacatcatcaacggcgattctcagggccgtcagggatacatagataagttttcgtcaaagccgggattcgacgtcatcatcctgtctacccttgccgccggcgctggattgaacgtcaccgcggcaaatcacgtcttccacttcacccgtgcctggaacccttccaaggaggctcaagcaaccgaccgtgcgtttcgcattgggcaggagcgggatgttttcgtgtattgcccgaccgtagttgctgacgacttcaacacctttgaggtcagattggaccagcttctcaagcgcaaggcaggtctggcgggaacaaccctcgatgatggagggttgacggctatgctgaatggtgccggtaaggatgcaagcttcagggacctcgttgacgagggcggcactggtgaggccatcccgaagcgataccttacgattgatgatatcgaccgcatggatggtgaggcatttgaggttttctgctgcctcttgtggaacaagcaagggttccaggcgaccgtgacgcccaagagggggggggatggaggaatcgatgtgattgctttgaagggccgggaaggagagctacttcagtgtaagagttcgaagtcggccgaggttggctgggacgccgtcaaggaggtaactgcaggcgctgcccgctatcaagcgcgcttcaggggcactaaattccgtaggcttgctgtgacaaaccaatcctttacgcgtggcgcagtgacacaggctgaggcgaaccaggtagagcttgtgactaggtcacgtctcgaagagcttataggtgctcacccggtttctaatcatgagtttgatgaagtcttgcaggacctcactcagttctccgcggacgtgatctag

SEQ ID NO: 10373 - DNA, 1971 bp, Nodularia spumigena CCY9414
ttggcaattgctgttgtgttcgtcgtcgcaactattattgaagttcgcagagtatcgcagtatttggataaaactaaagccgcgattaattttttgagtcataaaaagggtgaatatgtaaaagttagcccctggttacacgaacatttagatcccgaagatataaacatagttcgtcaaaaaggagacaaaaactgcaaattcatatttataaagtatccatcggatttagcccgtccagttcctcgaacttccttgcgttttgtcaccactttatgtaccgctatcggtgttttagggacattttatggtatacaacagggacttcaaggaatcaatttatctacagaagatagtaaacaactgatgactgctagtacagagttattagcaggaatgaaaacagctttctctacttccttgatggggcttggttctggtagcttgtttactttagttttgtttgggagtgatttggtacggcagaaacggcgtgatagtttgcgtcataaattgaaggcgatcgcaactttaaaaaccacagagaatgataaccttgaagttgctcaagcacttacgctggtagcacaaaatttgactgggttcaaacagctaaaagcggaagatattggtcaagctgtaggtaagagtatagcagaacaattcgcaggtttaaatcagttgtcaccccaatctattggagaatccgtcaagcagcaaatttcaccacttttgagaaatatattcaatgaacagagaagacttcgagaactccaagaaaatcagggacagagagttttagaagaacttattaatgatttgcgaattcaggtactagaaccgattgcagagcgactagataaaagtgccgagttaacccagcaagcttccacagccgtgctgaatctacatcaagatctcggcggaatctctgaaagtttggcaaattccatcctgacaattcagaattttcaacaagaaactttggtacaactccaaggatttgctcacaatttgggagacactttaaatgattttaaaacagatacaagagatgttttacaacaaacatctcaagaaattcatcacgctgtagatcagagtattgagggaatgacagcccaacgcagtgcttttgaagccagtgcagttcaagctgctgatactttccgaggaattcgagaagaactgcaaacagcattacaagaacgcgccacagttgaacaagaaatgcttcaagctactcaaactggaattatccaaattctcacccaagcaaatagaacctttcatgagcaaactaatactctaaaaacagtaggtgaagaagcctctggattgatgaatgatgctaaggataatcttttggctactttaggaaatattgacgaaagactcacagccactcgccaaacagtagaagatgatttgacaaggtttaggaaagaatatcaacggaatttacagatgttttttgaagagcaaaatactttacttgaggatacactaggcaaacaacaggaaggattatctggagttgtgaaccatcttgatcaagtattccgagatgaatgtcaaagacgtagtgaattgactcaagaagtagatgcaagtatgactaaaattcaggaatctgtcgcacaaattcacaaattagtcattgcggctggattgaacgatggacaacgactcatgcaactagaaaatctagctcgtagtattggcgagcaattacagatagttgataattcatacagcaatttgaatcaaaagtttgatcatagcctggatgcttggcaaagtcatcttgaacgttctatgcaaaggactgttgacttacaggtgaattttttccaacaagcagatacttctatggctagagtttgtggagatttactcagaacggcagaagttttagttgctgcaaatgatcaccaccaatctggtaagggtgcaagcaatcatggataa

SEQ ID NO: 10374 - DNA, 651 bp, Nodularia spumigena CCY9414
atggataattttattagagatgaaattgatgcagagatgatagaggatgatgactctagcatctatctgtctattggcgatttgatgtctggtttgctgatgttttttgctttgctatttatcactgcattactccaacttgcacaaaaggatgtaccaaaacggttaataattggtaatgtggtgggcgagatgaaaagtaacaatattaatgtcaaagttaatcctgaaactggagatatcagcattcaggagtcaattctgtttgctcagggaagtaacgaactaaaaccagaaggtaaagcttttctcagccgttttattcctgtttacagtggggtaattttttcaaaggaagaatttgaaaacgaaattagccgtgtagttatagaaggtcatactagctcggaaggagatgaaaaaataaatctggaactgagtttaatgcggtctttgtcagtttataaatatattttttctgacattaatttccctacaaaaacggctttgagccagaaaatactagctgctggtcgtggagaagttgaagctgatcacagtcgggataatccaggcgatcgcaaagtggttttccgctttcagtttcgtaatgatgagttaaaaaaagatatcgctgaaacctcactttaa

SEQ ID NO: 10375 - DNA, 1395 bp, Nodularia spumigena CCY9414
ttgaattttgaattttctcttccttccctacctgaacctccaaaatgtattcctaatcaactgattcagcttacaagtaacttaccagagccaaaaatctcaacaccaagtgttgataaagtattagcagctattgaacagggtaaagctgatcaagtaagtcaattagactggatttactgcatccatgctaaagcacagtgggataaacaaaatactgaccgttctcataaaacatcagcagccatttggaaggtagcaatttctaactcatggttacaacatcagctattgtggcgtttagctctttattctcatcatcagcaagaacaggtattagccaagtctttagctgattcttttgatatctttgctaattctaacttagttagtcacctgctaccagttcaaattgtgcgggcactttgcagtcaacaaccagggagagaattagccaaaattgctgatgaacagcgtgtcaatcaaactgaattagttaacataattctaagagatttaccagtttggattccatcattcagccaattcatagaagagataacaccatattttgtaaaaatgatttctccaaatcagcagcaagtaacctggttgttaagttgcttgaatgaaatgtcaaatactcagcaaataaacgctgttgattatttactaacccgtgtttataatgatgtagtaaaaaattattctttcttagttgattggttgcgaaataactacagaaatggggaaaattggtataaactttccgaaccagctaggcgaagacttcgacagtggattggcggcattaattatggtgatttccaaaggttagtagatgtaatattgagccggatagctttagaatccttcgagtcaaataggctacgtagtcgcagagaattttgggctaactacagtaaccgctttgaacggcttcgcattttgttacccagcacatcacaaattgccataggatatcaaattcaaggtgatgtcgatttactaaaggatgatggtagtgatcctacagaggtttgtatattcgattttggtgacttgtttgtagtcgaattttttcgtggaagaggtagtgaaacgcgcctgtttcctaataattcccaaactcagcaaatcctttttggtgaatcaaggctttcagttaaacaaattcgctgtttgggtggcgataagcacgatcatgtatttctttggcaggtattttcgccaatctggctggccaataatggcattttacctaatcgaaatactcccccttccagaaacccgacaacaggtgaattacgagagagagaataccgacttgaacaatggagcagagaaattaagtatctagaaagggaagctaaactctactgtaatgttcagtaa

SEQ ID NO: 10376 - DNA, 1908 bp, Nodularia spumigena CCY9414
ttggataaaactaaagccgcgattaattttttgagtcataaaaagggtgaatatgtaaaagttagcccctggttacacgaacatttagatcccgaagatataaacatagttcgtcaaaaaggagacaaaaactgcaaattcatatttataaagtatccatcggatttagcccgtccagttcctcgaacttccttgcgttttgtcaccactttatgtaccgctatcggtgttttagggacattttatggtatacaacagggacttcaaggaatcaatttatctacagaagatagtaaacaactgatgactgctagtacagagttattagcaggaatgaaaacagctttctctacttccttgatggggcttggttctggtagcttgtttactttagttttgtttgggagtgatttggtacggcagaaacggcgtgatagtttgcgtcataaattgaaggcgatcgcaactttaaaaaccacagagaatgataaccttgaagttgctcaagcacttacgctggtagcacaaaatttgactgggttcaaacagctaaaagcggaagatattggtcaagctgtaggtaagagtatagcagaacaattcgcaggtttaaatcagttgtcaccccaatctattggagaatccgtcaagcagcaaatttcaccacttttgagaaatatattcaatgaacagagaagacttcgagaactccaagaaaatcagggacagagagttttagaagaacttattaatgatttgcgaattcaggtactagaaccgattgcagagcgactagataaaagtgccgagttaacccagcaagcttccacagccgtgctgaatctacatcaagatctcggcggaatctctgaaagtttggcaaattccatcctgacaattcagaattttcaacaagaaactttggtacaactccaaggatttgctcacaatttgggagacactttaaatgattttaaaacagatacaagagatgttttacaacaaacatctcaagaaattcatcacgctgtagatcagagtattgagggaatgacagcccaacgcagtgcttttgaagccagtgcagttcaagctgctgatactttccgaggaattcgagaagaactgcaaacagcattacaagaacgcgccacagttgaacaagaaatgcttcaagctactcaaactggaattatccaaattctcacccaagcaaatagaacctttcatgagcaaactaatactctaaaaacagtaggtgaagaagcctctggattgatgaatgatgctaaggataatcttttggctactttaggaaatattgacgaaagactcacagccactcgccaaacagtagaagatgatttgacaaggtttaggaaagaatatcaacggaatttacagatgttttttgaagagcaaaatactttacttgaggatacactaggcaaacaacaggaaggattatctggagttgtgaaccatcttgatcaagtattccgagatgaatgtcaaagacgtagtgaattgactcaagaagtagatgcaagtatgactaaaattcaggaatctgtcgcacaaattcacaaattagtcattgcggctggattgaacgatggacaacgactcatgcaactagaaaatctagctcgtagtattggcgagcaattacagatagttgataattcatacagcaatttgaatcaaaagtttgatcatagcctggatgcttggcaaagtcatcttgaacgttctatgcaaaggactgttgacttacaggtgaattttttccaacaagcagatacttctatggctagagtttgtggagatttactcagaacggcagaagttttagttgctgcaaatgatcaccaccaatctggtaagggtgcaagcaatcatggataa

SEQ ID NO: 10377 - DNA, 651 bp, Nodularia spumigena CCY9414; identical to SEQ ID NO: 10374

SEQ ID NO: 10378 - DNA, 1395 bp, Nodularia spumigena CCY9414; identical to SEQ ID NO: 10375

SEQ ID NO: 10379 - DNA, 2196 bp, Pseudomonas balearica DSM 6083
atggactattcgaagtggttggacctttgggataaggcaacacctgagcaactgattgctcctgtgtttgtgtttagccttgtgacggtgctgtgcctttggtacttgctgcgttacttcttgcgctcgtttgcgttgagccggcgcttgaagaagctcgcacggcaagtgcgtgaactcaagaagttgcagccagccaagcgccgtagcgaactggagcagttgttccatgagcatacgctggggcatgcctggcaggagtatgccgagacgctgcatgaccagttcgaggtgcatgagggcgagcggcgcttgttgtgctcccgcgcaactgccggcgcggggcatttctttaccgcccaaacggtggtggagacgccactaggcaccgagttttacaagcacttgccgggcatcctgacggggatcggcattgtcggcaccttcttcggcttgatgttgggcctgcagcacttcgaccccagcacacccgagcaggtcagctccagcgtcgatcaattgctcaaggacgtgctatttgccttcctcggctccttcttctcgatcttcgcttctattggcgtgacgctgaccgaaaagtggcgcctaggccgctgctacaagcatctggaatccctgactgagagtatcgacgggctgttcgacagcggcgtgggcgaggagtacctggcggagctggtgaagtcgagcaacgagagttcgatccagacccgtcagctcaaggacagcctggttaccgatctgcgtgagatgctgcagaacctggtagatacccaggtgcgtgagaacctcaagttggccgattctctttcggcaagttaccgcgactctggtcaggtgttggccgagcagattggcggcgccatcgagagcagcctcaagtctcccctggaggccatcgccggagctgtgaataccgccagcggcgaccagagcaaccaggtgcagagcctgctcaccgatgtgctcacagcctttatgagtaagctggaaagtacctttggccagcagttcaacggtctgcatgagatgctggggcagtcggtcgcggccatgcagtccatgcagcagggcttcaatgagctggtcggcgacatgcgctcggcgagcgaggcttcatctcagaacagcgcgaagatgatcgcgcagctgctggccgacatgcaggctgggcaaaacagcatgcaggccgggatgaacgagatgctggccagtctgcagacgtccatcgcgcgtatcggcagtgaaggggagggggctggtgagcggatggccaagcagttggagaagctgtttgccgatagcgaggcacgccagcaagccatggcggagaatctgcagatctttgtcgaatccctgcagcagagcattggccagggccagcaggaaaccatggcgaagatcgccggctcggtggatgtgctgggcgagcagttgggcgggttgttcaagcagcttgagcaaaaccgtacgcagatggaacaggccagcaagaccgcccaagtcgaactgcaccgtggtacacgcgaggtggttggcggtctggaagagcaggtgaaaaccctgctggatgccgtcgccgatcagcaaggcgcgatgcaggacagcctcaagctactcggtgcgcaaaccgagcaacacttgcagagcatgcaacaaggtgccgagaagatgcgcctggcagccgagcgcttcgacagcgccgggcagagcgtgagtaaagccggggaggcgactgcgagcgtactgggtgcgctgcagggcaccagcggcgatctggttggcgcttcccgcgaactgaccagtgtggtggccgactatcgcaataaccgcgaagcgctaaatcagacgcttgcggtcattcagggggtggttgccactactcaggtggagtccgctgggcgcagccaatacctgcaggatctgaagctgcaaggcgagcggctgcagacgctcaatcgtgaagtgaacgactacctagagcagatcagtgccgtgctgggcaagggcttcaacgagtttagtgagggggtagatcgtagcctgcggctgacgctgggtagcctggatgccgagctgcataaggcgatgaccagcctggccggtggtgtcgaaggggtcaaggaaagcctggaagacttcagtgacatcatggagcgcgttcagcgccgctaa

SEQ ID NO: 10380 - DNA, 738 bp, Pseudomonas balearica DSM 6083
atgttcggcaaatcagccgctcccgctcgggcgcgtgacgagggcgagaagcctttctggatttcattcgccgaccttatgacggcgatgatgatcttgtttctggtggtgatggtggcctcgctgagctcggtgacgcagcgtattcagcaggctgagcaaggtgagaaacagcgcggtaaggacattgctaagctttgccaggatctcaaactgagggcgggagggcttaactccaccatcgtggtggactgccgggataaccgcattagcttcggtgaggctgggcgctttggccacaatcaatactttctcaacagccaggggcagcaggccctgcaggatgttgtgccgttgatcttggatgccgctgacagcgaagagggacgcaagtggctcaagcaggtggtgattgagggcttcaccgatacggacggctcttacctgtacaacctgcacctctcgctgcagcgctcggagtgggtgatgtgcagtctgctcgatagccgcagcccggtgcagaaagggctttcagctgaacgtcagcagcagattcgctccatgttcctggctggtggtgtgtcgttcaacaatgccaaggagagcaaggaggagagtcggcgggtggagctgcgcatgcagttcttcgggcttaaggaccaggagcatgaaggtcaggaaccggcgcttgagtttgcttatgcggcaaacgaaaagtgccagttggagatgcgctag

SEQ ID NO: 10381 - DNA, 1677 bp, Pseudomonas balearica DSM 6083
atgagccgggctctgtcgtctctgttggcggccatcacttctggcttgcagcgccagaatgagcgcagcggcgatgccgggtttagtagcatggtggcgctgaaacgcgtcaacactgagctttctcggcgttttgaccaggtcgaaaaagccctggcaccgccccgcgagaaacgcttgctggctcttggcaagttcaagcgtgagcaggcgctgacttcatcggagtggcgcctggtttttgccgggctggctgatgacgatgaagtcagtgttccggtgctggaggacgatcacctgttcgaccgtgttcatcgggaggtggctggccgtatcgagcaacggacacttagccgccgcgactggctggcgctgtgtttcagctactttgcctacgatgagcacaaacctgacgacaacgcgaactggcgggtgctgcgtgacgatatcgatcgcggcttcgatgctgtcaggcagcgtatcggtcgtgaaaaagagtggatgcgcattgttgccgagcatcgcgaactgttcggcgctcaggctggaacccgtctggcagaggagatattcgagggcagggcgcgtgatctttcctcactacaggccattgcccaggtgccggatggtagttggttgtggcagcggatttttgcggttctgctttcgcgcattttcctgctggatgacgaaaccttcctgaagcgcctaccggagttggtagctctggggcagctgaatacgcgctatctcaatcaggtgctaagtgcctgcctgactcgttatcaccgttcgcggtatcgcgagcagtcgtcctcgctactcaagcaggctgcgttggagcactggggcagcccacagatgcgttccaagcagaacgcatggttgcagtatgtggagcaacctgtttgcgcgatggtggttgcctggtttgccaaggaggatctggagcacttcttcaccttgctcaagggcgaggcggaggtcgaccagtcgcgcctgttttactggttacgctttgccaatcagatgagctacacgcggattgtgatgggaggtgatgcgtggcatgaccggggtagtgatttcgtggcttttcgtgagaagaacaaaggccgcttaagtcagctcgcgggagggcctagtcacaacaatgccgtggtgatgcagatcggcaattacttctttgtggagttttctggtaccggcaatgcttgctacgtctatcgtgccgatgccgcaccatttaatcctgataaaccggtgctggggctggcaactgagctgaagcagcaaggacgggcgctgaagcgtatgtcccactctccagccccgcggcgacccaacgtagtcgaagggtggctggagaagtttgatgatgagctccggacgctgggaatcgtcgcacagcgtccagcgtcatttacgcaaccccgcctttccggtgacaaacccgctgttcatacggctgcgtctgcacctggcacgggtgattcgctggacgtgcaggttaggtcgatgttgggcagtgtgccctataagaccttcgaccaccgatcgaaaagtggggtctaccaggttttgcttgccagggatgatgcggctgccaaaacagcgctgctgcgcctcggcttcaaggctgtgaaaaacaatgcactcatgttctggaggctttga

SEQ ID NO: 10382 - DNA, 3252 bp, Pseudomonas balearica DSM 6083
atgctcggccgatttttttccgggaaggatcgttctcaatctgccaagggggcagcgcctggtgcttaccagattgaggaacaaggtatttgttatgccttgagtctggccgatgacgatacaagctggcccgttgctgcctacctggaccagctcttcgaagaagactatgccagccagctgagtgatcgctggctgttgccttgggagtcaatctatcagctcttggatgatccggcgcacgctagcagccttcctttgcttggcttgcccgcgattgccaagctgcaaccgcagttggccagtaccgggggattgtcgggtccggatttcaaggtgtttgtccagtcctggcgcaattcggagacgggcagcccggttactttcgagcgtgttggcgccatggcgcgccatgctgcaaccactgagttgttgccgccagcggtctgggagctgttaaaggccattcgggatttgcatgccgctcagcagcaggctccgggagaggtcaccaaccaaatcggctgggccaatatccgtaagttggccaaacgcgctggtgcggtattggacggatttctcgacaagaccgtggtggttaggcctgagcacttgaagctcagaccacgcaaggccgtagtatccggtacgccgattatcgagttagatgtcgcgtttgacgggcagcctgacaattggttggccagtttcgatggttacaagcaggtgcaggataagtaccgggtgccgggcgccgatggttcggtgacgcacgtactcattgagccggatgtaaaggcggtgcttgagtctgtacgcgcattaccgggtcggcgtgtggccggtgatgaagcgctgtcactggtgcgcaacccctacagcgtgatcggggatgcagccgagaaggttgttgatgcggacgaatatgaggagcagctggccgatgcgggcatctacttccatcgttttcgcctggaaccttgtctaggtgaggacggcaagcatgttcggtcgattggtctgttccttgaacctatctcggccaagccgctacctgaagttgagctgcgcttcgattttgcccacgagttcgcgccatttgtgaatgagctgcaagtgaagttggcggctggtatgcccgcgggattctggcagggctatgagctggagctgagtgacttcgatctcgcgcagttggcaggggtcaatgagcttttgcgccactggcagcgccaggaggccgggcagacgtttgaggaagtgctggatttggcctcgtatggtgatcgcgttgtcggcataggtgaggcggagcgcattacatctccatttttggtgaaagaggcaacggaaaactggttgccggtcgatgtgaaagagctcgggatggatggcgatctgctcagtcagtgggatcctgctagccgtgaagattttgaagagtttgagcaccgcatcgaccaggcgcgtgtggcgggtgatgaacaagtatgtctaccgggtactgaaaccccgctacctttccaggtcgcggagcagctttatgaggcctggtcgaagaagcttaatccggtcgagcctaaatcacctgttgtgactgagcccgtcgctggccgtgcggtgctgcatatcgagcacaacattgaggaagcgacctatgcccagcgccgtgaggcggctctgttggcggggcggcatgccaatgcggatattccagagctgcttcgccccgaagttcagctgcgcgatcatcaaatgaaaggtgtggcatggatgcagcacctgtttggcttgtcaccggatcatgtcgcaggttgcttgcttgccgatgacatgggcttgggtaagaccattcaactgctgaccttcgttgtttggtatttggagcagaaccctcagggtaaaccggtcctgattgttgcccccgtttccctgttggataactgggagcgtgagctgcagcgattcttctatgcggatgtattgccggtattgaagctttatggtggagcgctcagcgctgttaagttcaagagggacgagattccggaggatctgcaggccaagggaataaaaaatcttctccggccgggttggatgggcgatgctcgaatcgtgctgaccacctatgaaaccttgcgagatcaggaactctccttggcacggcagcagtgggccatcgtgatctgcgacgaggcgcagaagatcaaaaacccggcggcgctgatcacgcaagcggcgaaagcaatcccctctcgattccgtatcgcctgcacgggtacgccggttgagaacacgctgatcgatttgtggtgtcttttcgactttattcagccgggcttcctgggggggctaaatcagttcggtcgggagtatcaacgccccattgaagcaggcttggagcgcgatacagcagcgcttgaacgcctgcgtgggcttatcgagccccagacattacggcgtaccaagcaggatgtggcgaaggatctcccggccaaaattgaggaccaggggtgccgcaagctgctgatgcacacgttacagcgcaatctctatttgtccgaggttgctcagtacacacagaagcagcagatgcaggaacaattggagcagcgagagagcggcatgctcggtttgctgcacaagctcaagttggtgtgcgcgcacccattcagcgtgcagcctgatccacgcttgagggaacactcgccgaagctgcaatggcttttaagcacactggataatattgcgcgttcgggaagcggcgataaggtcatccttttcaccgagttgcgggacgtccaacgtgaattgcaacatgcgattcaggaacgcttcggcttcaaacccacggtgatcaacggcgataccagcaccagcagtcagagtgcacagagccggcagcgacttatcgatcattttcaagagcagcctggcttttcggtgatcatcctctccactgttgcggttggatttggtgtgaacgtgcaggcagccaaccacgttatccatttcactcgctgctggaatccagccaaagaggatcaggccaccgatcgcgcgtaccggattggtcaggaaaaggacgtgtacgtctattacccgactgtgcgtgatgcgaggatacctacatttgaggcgacgctggatgagctgctacagaagcgacgcgcgttggcgcgggacatgctgcagggggcatctgagcttcaggcatctgagtttggggaactgttaagggcgcaaggatga

SEQ ID NO: 10383 - DNA, 1884 bp, Chrysosporum ovalisporum
ttgaaagaaaacaaaccgagtgatgaaacttcaaaagttttaagtctaactttaagaaattcagatgataaagtatcccggtggctcgaaaagcatttagttaggattcgtgagaataatgatggtaatttccacgcccaagttgaggggggaagatttgtattattacaatatccaactgttttcacccgttctattcctagtagtttttggcgttttgtacctactattctcattgccattggtgttttagggactttttatggtattcaagaaggactatcgaaaatagatatcagcaatattgagcaaaatagttctaacttattagaagctagcgttcagctactacgaggtatgaaaactgctttttctacctcattgatgggattaggctctagcagtatattcactattgtattagcaattgcagaagaacgaaaacgccaacgtattaaggaagtacgccatgaactagataaaattgcttttgtccaaagtcctgcaagagttttatctcggttaaaatttgatgctattgatggagcagcaaaaagtctggaggaaactgctggaactatcacaacttcatttacaaaattaattgaagcacaaggtaaactaagtcctgatgctattggtagagcaataggacaagagatgtatcccatttttgagggtattaaagaagaactatcactattaaaagacattaaacatgaccaaggtggagaaattttaaagaatttaattagagaacaaagagaacaattaattgaacccctgatagctgaactaaacagaagcgcaaaactcactcaggaagcttctcaagctgtccatgaactcaaaaaagaactcggtggaatttctcaaagtctcagccaatctgtaaatactatccaaagattccaagaggatactttagtaaaattgcaagattttgctggtaatttacagtttattttaaacgaatttcgttctgatactcaaggagtaatggagcgcgtttctacagaaattcagtcagcagttaatgctagtgttcaggctatagatgctcaaaaaattgcttttgaaagtagcgccagtcaagcagctaatacttttagaggtattcgcgaagacttacaagcagcattacatacccaagctgaaatagaacgccaaatgcttcaggagtttcaagatagaactgtagctattatcactacacaaactgaaagcattactacagttggaaatgaagcatctcgattaatggatgcagctagagaaaatttaatatctaccctctccaatattgatacaatgctgcaaaacactcgcatcactgtacaggaagagttacaacaatttcgtctgaactatcaagaagctttacaaaatttcttcactagccaacatgagttattagaagaaactttaggtgagcaacgtcaagggctagctcaggtagtcaatgatttacagacggcttttaacgatgaatacgaaagacgcttaaggttatccgcagggatagaggaaaccatgacaagaattcaggaaacggttcgtattatgaataactttgccaatgctgtaggtttacactcaggagaaagactagagcaaattatagaaatttctcgattgctgggttcagaagctactaggattgagaaagtttatgcaggtatgattgaacaattgaatcaagctttagccatgagtaatcaacatttagttacttacttagaacaagcatctgcatctgaaagagtctttttcactcaagctgatgaagccaccgctaggatttctcaccaattactccaagctgctaattacttagtagctgcggaagctaatcgtcgtgatcaaaacaatcataatagttaa

SEQ ID NO: 10384 - DNA, 645 bp, Chrysosporum ovalisporum
atgaatgattttactgactgggaacaagaatctcaaacagaagaagataattccagtgttttactctccattggagatatgatgtctggattattaatgatatttgctttattgttcattactgtttcgttacagttgagtcaaagagaaaaacctaagcaagatgtgattgcagaagtgatttctgctttaaactccaatgatgtcaatgtagaagttaatgccaaaaacggagaggtcactcttgcagaaagtatactttttgcagaaaatagtgcagaattaactcctaggggtcaaaattttctacagaagtttatccctgtttatagcaatgtaattttttccaagcctgtatatgaggatgtaatcacgcgggtagtgattgaaggacacactagttctaagggtaattacaacgcaaatttacaactgagtttgttaaggtctttttcagtcgctgaatatatcttctctcccaagatgcaatttaaaagtaaatcaaagctgagtgaaaaaatcatttcctctggaaggggagaaattgaagctcgtcaagagattgactaccccaaagatagaaaagtaacttttcaattgcaatttaaaggagaggatttgtctgatatttttcaacgaaaataa

SEQ ID NO: 10385 - DNA, 1380 bp, Chrysosporum ovalisporum
ctgcaaaatctccgcgaagcagaaatagatagttggcgttcgttagatgacattattcaaacgttgcaagagggaaatagtgaccaaattaaacgtattgaatgggtatattgtctctacaacaaagccgaatgggatcaagaacacccggaaagcagtcaggaaacttcagagttgatttggacagtagcaatgaataatttatggctgaaacaaagtttgttatggctgttagtgcttcattacagccagtcatcatcaattattagtgattctttagtgaaaacttttgtatcttttgtcaagcaagggggaaaaaatgacattcaaatagtcattatagaaacaattaggcaaaacaattatcaacaactagctctagttgcaaaagaaaacaatcttacacctaaagaattactcaaaaatgccaattttccatctagcattcctgcggttagtcaggctttaaattatgtagtcacaatatttgttaatgacaatcagccacaatggttactgcgttgttttcagcaaatgtcccgagaacaacaacatcagcaagtcaataagttactaaccacagtaaatgcggaaacaggaagttgtttcttatcaatagttgaatggttacgtcaaaattatgggcctcgtaccattaattctcaatggcgtgaactatcatcacaagctcagtcagcactccgtcaatggattggtgctgctacttggggagattttgataaactcctcacagccctaattcgtcacttggagtcacgtttacaattattatccccagggagtagagaatatcaagaagtaaagtatcagaaaaatcaactggacagacgcaagggtttctggtcaaattatagcgatcgctttgaacggctgcgtattttggtaccaaagtcaactagttggatcagtgatgaattaacacgagatattgatattcttgtagatgacggcagtaatgaaacagaagtttgtatctttgattttggtgattggtttatagtggaattctttcgtggaaatggaagtgaaattctgctctttaaccgcgatcgctctaccaggtttgaagaaaaattatttcaatctcaaaatttgtctatctcagatattcgccgtctgcgtcgtttgggaggagaaattcatgatcatgtctacctttggcaatattatgctgaacaatggttgagaggacaacacggaatttatcctaatgacgggataattagttttcaaggacttgatcacccttttaatatatatagtcggataacagggttacccgttccttcagtggataaacagagcgatcgcgaaagagcattagtacattggcgcagggacatagaaagaatatactaa

SEQ ID NO: 10386 - DNA, 1530 bp, Myroides odoratimimus CCUG 10230
atgacatctgaaattatagctggaattattattatatctgcatttgcaatctgggcaggtttatacattagcaaaagaacgagggaaaacaacaatgagcatttatttgattttattcctaatctattcccgactttaggaattctttttacttttgtcggaattgccatgggtttatggaattttgatagtaataatatcgaaaaaagtattccagaattaatgaatggactaaaaacagcctttctcgtttccatttttggagtttttcttttagtcgttttctcctttattacaaatataaaaaagaaaaagttggaagaaggtatcttaagcgacgaaacacaagcaatcaataatttaattgaagtgattaaggaattaagaaatgatttcgcttcgacagatgaaaacggaaatagcatcaaacctggtaatgtgtttcgagatatttacaaggaatctcaaaaacaatcaaatgctttacagacattttcttctgatttagctttgacagtttcagcgggttttgagcaaattttgaataatccaacagaaggtgtcgtagctgaattgaagcttgtaaaaacagaaattgaaaacttaggaaacaaattgaaagatcctgcaacagatatgacccaaaatattgtaaaggaattacaggaatcaatgggcaaaatgatggaagaatttaaaacttcaatgagtggagatactaaaaatgaaatggaaagattggcaagattacttggacaagcaggtggttcattaacagaattccctactaaattgcagaatatgaccgataacctcaatgaaaattttagaggactacaagaagtggttcagcaaatctctaaacaaacactttcgcaatcagaagaatctaccagtcaaatgaaacaacaggttgaggatatgagcgaaattctacgaagtaaagttggtgatttgcaatcggggcaacagaccttaattacagaacaatctaaaaaccttcaagtttccgaaaatcttttgagtgcttttaatacaagcattgaaaaaatgaatggactttctatcgaagtaaacagcagtatttcaaaacttcatcaagctcaaacagaattagagaaagttactttcgtatttagaaatgtttcacaggaaataaatacttcatcaagtcgatttggagaatctcaaaacgaattttcaaagtactcaaatcaattccttgaaaataattcaaatacaatcatcgaaattcaaaaatctttagaatcagcgaaagacgtttctgcagattatgctcaaaaattcgaaattatagaaaaaggattgcaggatatttttggaaaaataacaataggtctgaaagactatcaagctactgtaagcggaagtcttgaaacttatttaggtaaatataccgatgctttgacaaaaacagctgaatcacttgctggtgcatcatcaaagcaagaagatattttggaagaactaactgaacaacttagcaaattaaacgaaagaagaaattaa

SEQ ID NO: 10387 - DNA, 717 bp, Myroides odoratimimus CCUG 10230
atgtcaggaacaaaaaaggatagtcactggattccattagcagacttaatgacggttcttatggtaatttttctgtttatgtccatttcttatatggcattgatagaaaaaagacaaaaggaacaaaatcaaattttcaaagattatgaagaatcaaaagtttctttatataatgaattgaatgaaacttttaaaaaagattttgcaaaatgggatttgaaacttgacaacgatttatcaataaaattcaccaatccacaagtgcttttcccaacaggtaaatcagacataacacaacactttcaagtcatattaagtgattttcttccaaaatatctttctgttgtattgcaagaaaaatataaagacaaaattgcagaaatcagaattgaaggtcatacagacactaaaccaattggattgacaaacgatccttatattgacaatatgaaattgtctcaagatagaggaagaaatgtattggcatttttacgttcccagagcttttttatgaatttactaccaactgagaaagaaagattacaattttggttgactgctaatggtctctcctatggaaggacagttgataaaaattataaactagtttttgaaagtaatcagtcaattgatgatgataagtcaagacgagttgagtttagaatagtaaccactagtgaagcaattattaatgaagcacttaaaaatatcgaataa

SEQ ID NO: 10388 - DNA, 1428 bp, Myroides odoratimimus CCUG 10230
atggcgacaacccaagacatattacaatttcatttttcaccaaccacatttcagcagttggcacagaatattattcctatttcgcttgtatcattgaacgatcatagaattgataaacttcataaaataacagaagatgttggtgcgagctctttttcattttcaggagataatcttattccacaagtttttagagaatttaaaaaatctatcaacaataacgatgtgggttttgaacggagagaattaaggactcttacctattctctaaattattcagagcaaaacttgacttctgttttcattaatgaagatgagttgaaatatgctttgacattattagaatcaaattggcgtgattcatttttagttggattgatagattgttttttgaagaattgggaaacaaaatattcgaaatcattagaacaattgggaacgtttatccaccagaaattagacaactattcaggtaatagaagtacattaatatctttcaaaaaaaataaacgttacttcaatacaaaaaatggagatttgattttaggcgataccatctcaaaacttaacaaaccaattcaagaagctacaaaaatattgggtgtacctgaatcatggttcgattatgcctacttctctaaagttattgtaacctattatgaaagaaacaaaagtaaaatatctgacgaaatcgacaatttgaatgaagctcttctaaagcacaacaattcggttacgaataaaagacttattagcaaaatcattattcaagtcaacaagtctgaattttttacagtacaagatagtgtgaaaaaaatagctttcactcaaataggagatccaagcaatgcttcaaattggacagcgtttgacaacgcaacagaagtggaacgtagagagattattgaagcaagaaatattttagatgaatggattgcaaaacaatttattgatattttctttagagtgtgtattaatgatgaaaggagaaaacgcttttggcttaaagttgcatcaaaaaacagggtctcttttaaagtttatggaccaattcacacaaaaaacattctcaaacgagatgatagaataattgaatatttagacggcagattccaaacagttcctagcaacagagatatatcagcatttatcctttatattggtaattatatgttaattgagtttagcgatgcgggatatgctttctatgcttacaaaattagcgaaacaaataaaccaaatttaaactatcgattagaaagtgttgatgaattaagggatggttcaatgcctatgctagtttatcgttctggatatagtattaacacaaccaacacagaaggtcgattaacgcataatgatggtgacttgagttgggagcaagtatttgaatactggtttaaaaatatagcaggaataaatgtttag

SEQ ID NO: 10389 - DNA, 3270 bp, Myroides odoratimimus CCUG 10230
atgtttagatatacacaaaaaaacaacaaattttcattttacttccttaataattcaggaaataaaacatctgtttcagattgggaaaaactgcaatcagaatttttatcacagattgcaattctaacagagctacatgataacggattagcagactatacagaaaactcttgcgaagttgaatgtattgatattctaaagctaaacgacattgataagctaattttagaattaccaaacggttatccttatgagattttagtcgaatcagacggaactttaacacataactcttttaagttcaaatatgggtttttcgattttgcaccaaatggaacaaggttaaaaacaaaccgaaacagtgcaataattaaaattgaagaaacagagtacttactttcagaaaatcaatatttgctttgtgaagcaattgaagaatttaacaatttacctgaaactgaaaaagggaatgtaaccaacttaaaaaaactatctgaattaaaaacgctatccaaagaaagcggattgactttagagcagttcttaagcaatcaggaattatttattcctgaaaaaataaaattggatattgattttaataacggtctttttgaaatcatcccaacaatagaaattgacaatacaattggcttcaccaatacttttgataggttgccaatagtgcgtgacgtttatccggtatcatcaaataatggagaaactacaagagtagttatatcgaaaaatcagaaagctgaacttcaaaaaataaaaacgcatagaaaaatttcagaccgtgaaagaatacaagagattattgagcaccctgaattggtttttgatgatgaggtaattgattttactgttttttacagcgatagagtaaaagaaattggggtttacagtccgaagttctacccatttgcaagtccatataaatcacaatggattccgggaattgtaataaaagataaagttgatggagaaaaaaaaatatatttcaaaacgctagaaaaactcaatgactttattgagcaaaaagaaaaagctataaaagaaaacaaacaaaacgttgaatgggaaaacgccgaaattcctattgaacatgctgaaaagtttatcaaaactgcaaaaaagcaatttgaatccccaaacaaacccataaagcaagagaagaaaacagaccacgaagttctgattatcaaagaaaatgcagaactaaccgagttttcaaaaggggatgaactacctaaaaacctaaaacatagtttttacgaaatccccaatttgaatatcggtattagtttaaaagaacatcaaaaagagggggtttcttggttgcaatctttattcaaaggaaactttgcaggcggattgctcgcggatgatatgggattgggtaagaccttacagcttttgtatttcatagaatggcatagccaaacatacgatgacaataaaccttatttaattgttgcacctgttagtttactcgaaaattgggaaaacgaatatgagaaattttttagtccacagaatttacaattatgtaaattgtatggcggtgtttcattaacaaaagaaaacaacccaattcaaaaccaacaagatgcaaaaaggctgcaattcaaacaaattattctaacaaactatgaaacgttacgttcatatcaaattagtttaggtttagttaattttgcaattattgcattagacgaagcacaaaaaattaagacccctggaacactaataactaatgcaagtaaagctctaaaagccgattttaaaattgcaatgacaggaacgccagtagaaaacactttggttgatatttggtgtttaatggattatgcagttcctggccttctgggtaatgccaaagattttgcaaaagaatatcaaaaacccttaagcgatgagaatacagatattaaagtattaacggaacaacttcgtaacaacattggtgtatttatcaaaagaagattaaaaagcgatgttgcaaaagatttacctaaaaaacacgataatcaaaattcaagaatcaaaaaagtaatgccatctgttcaattagaccgatacaaaaatgaaattgcaatagcaaatgattcagaattggaaggagttgaaagaagaaatcaaaaactaaaatcgctttgggctgttagagacatatctgaccatccttatttattagaaaatcaaatattaaattttacaagtgatgacctaataaaaagctcgtccaaattgcaaacaacagtagggattttaacagacatacaatataagaaagaaaaagttatcgtatttgcagacagaagagaaacccaaaaaatgttgcagaaaatagtttatgacatttttggaatatttgcaagcattatcaacggagatactccaacgaccaagaagttagaaggtaaatcaaaattaagccgacagcaaactattgatagatttcagtcagaagatggattcaatgtaattattatgtcgccaatagcagcaggtgttggattgaatgttacaaaagccaatcacattattcattatacaagacattggaatcctgcgaaagaagaacaagcaacagatagagcatacagaatcgggcaacaaaaggatgtgtttgtatattatcctatggcaattttccctgaggagatgaaaggtgaagatggtagtaggttaaagtctttcgatgaaattcttgatacattattgaataacaaaaaagcattggcaagtaatacgttattcccaacagaacaagcagaaattacacctgatgaactttttggaaatatttttggaacgaaaacagagtgcaagcctaaaccgctttcaatgactgaaattgataaactttatccaaatctttttgaagcaagtatagcatcgctttataaatgtcaaggttttgaagtttatcttacaccttattccaatgacaaaggtgtagatgttgtagctttaaggaacggggaaaattacctcatacaggccaagcaaacaaaatcattagttgggaatgatgcaatacaagaaatttgtactgcgaagaaatattacgaggacagatttaaggagcagttcaaattacttacgataactaataataattacagctcatcagctacgcttttagcaaagtctaatgatattagtttattaaaccgagatcatcttgaaaatttagtaattcaaaacaatataacgatacaagatattaataaaattgaatctcaacgaatggcacgaatatag

SEQ ID NO: 10390 - DNA, 2190 bp, Erwinia pyrifoliae DSM 12163
atgtcctggtttgattctttcttagcggcgctgacttcagtgcagccttataaggttccgctgacggttattggtttggtcatccttgcggggatattatttatcgtcttttatctggcgcgtgcggtgattgtcgttaaagaccttaaaagacacactcaggcggtcaagagtttgcgcggccagacgatcgaagagcactccgttcagctggactcgctgtttcagaaaccgcagctgaaacacgcctggagtgagtttaaagattcactgcatcctcagtttgaggtggtcgacggcgagcagaaaaccgcccgaatacgcgccacggccccgagtgccagctacttttctgagcagcagctggttgatatcccgcttaatactgaattgttcaaacatctgccgggcattcttaccggcgtggggattatcggtaccttttatggtttgatgattggcctgcatcactttgaccccagcactcctgaacaggtgagcagcagcgttaatcgcctgctgcatgatgtgctgtatgcttttctcggttcggcttttgccattttcgcttcgatcctgattacctcgctggagaagttttatttagccaagtgctataagcatctggagaaatttaccgcagccattgaccagcggtatgtcagcggggtcggcgaggagtatctggcggacctggtgaagtccggtaaggagagttcaacccaggcgcgccagctgaaagagagcctggtgggtgatttgcgcaacatgctgttggagctgaccgccagccaaaaaaaagagagtgaaaatttagcgcaaacgctgaccaccacttatcgtgaaacgggccagcactttgccgaacaggtgagcggagcgattgaaaacagcctgaaatcgccgctggataaaattgccggtgcggtgcaaaccgccagcggcgatcagagtggcatggtgcaaaacatgctaaaggatgttctgaccgcttttatgtcgaagctggacagtaccttcgggcaacagtttacccgcctcaatgaaatgatggggcaaacggttggggctattgaggggatgcaaaccggcttctcaaccctgctacaggatatgcgccaggcaagcgatgagtcccgccagggcagcgcgcagcttatcgggcaactgctggcagagatgaagtctggccagcaggcgatgcaatccgctatgaacgagatgctgaccagcctgcaagcttcggtggcaaaaattggcgcagagggcgaaggggccggtgaacgtatggcgcgccagctggagaaaatgttcgccgaaagtgcagcgcgtgaaaaagcgatggctgaacagatgaccgcctttattgacgccattaagcgctcggtgcagcaggggcaaagtgaaactatggagaaaatggccgactccgttagcgcactgggtgggcaactgagttcgctatttacccagcttgaacaggggcagcagcaaatatctccgggccagcaggcttcacagcttgaattacaccagcaaacgcaaagcgtaatgagtgagtttgacgggcaggttaagcagctgatcgatacggttgcgcagcagcaggaagcgactcatgccaccttgcgtcagcttgccgacagcgccaaccatcagattgacaatatgcagcagggcgcagagaaaatgcgccttgctgcagaacgctttgagcatgccggggagcgggtcagcgaggctaatcacgtcactgctgaggtgctgaataaaacgcaaacggccggttcatcactggcgatggcggccagtgaactgacaacggtggtcgctgattatcgtcataaccgcgaagcggtggctaagtcgatagccatgctggaggcggtggccgccaatacgcaggcagagcagaccacgcgtagccagtttattgctgaccttaagtcgcatgccgaacgcttgcagggttataaccgagaggcgcaaggctttatggacaaggtcggcgaggtgctgggccagagctttgacgacttctctggcggcgttacgcgcagcctggatcagacgctgggcaagctggatgtcgagatggcaaaagcctcgacgctgcttgccggcgcggtggagaacatgagtgaaagcatcaacgatctcgacgatcttctgtcgcgtacgcgtcgctaa

SEQ ID NO: 10391 - DNA, 738 bp, Erwinia pyrifoliae DSM 12163
atgttcggtaacgcatttggtgcgaaaaagcgccgtagcgacgaggctgaaaagccattctggatctcctatgcggacctgatgacggcgatgatggtgctgtttctggtggtgatggtggcttcgctgagctcagtcacgcaacgtatacagcgggctgaagcgggggaaaagcggcgtgggcaggacatcacccgattgtgtcaacgtctggaattacgcgcacgcgagctgaataaaaccatcgtggtggactgccacgacaaccgcatcagctttggtgaagccgggcgcttcgaccacaaccgttttttcctcaatcccggcgggcaaaaagcgttgcaggatgtggtgccgttagtgctggaagcggctgacagtgaagaaggaaaaaagtggtttaagcagattgttattgaagggtttaccgataccgacggctcttatctgtataacctgcatttatccttgcaacgttctgaatgggtgatgtgtagcctgctggacagccgcagcccgctgcagcagcatatcaacccgcaccagcaggtacagatccgcaaactgtttctggccggtggcgtatcgtttaataacgccagagagagtaaagaagccagccgcagggtagagctgcgtatgcaattctacggtctcaaagacaagcgcgctgacgatatccatgatttcccggcggtgatcgataaagaagtctgtcagctggttatgccgctatga

SEQ ID NO: 10392 - DNA, 1701 bp, Erwinia pyrifoliae DSM 12163
atgagtcaggcgcttaataaactgtcacgacgtattgctgattcactcagcaggcggtttagcggtgagcaatggctgcatcatgattttgcccaactgagcctggccgggcatgccattgaacaacagtttgaaaaggcagaaaaactgccgctgccgccgcaggaaaaaaggctggaagcattgcgccgttttcgtctggcaaaagagttaacggcgctggaatggcgaatggttttttatggccttgcggacaacgatccgcaggcaccgcatcggccaatactgctggaagatgacgaaagtttcccccgggttgagcgcaaaatctgcgaactgattgaagataagacgcttaaacgccgggagtgggcggcattgtgctcaagctattttgcttatcaaaatgacgccccggatctcaaccgccactggtgcgtgctgcgcagtcatatttcgcgcgggtatcaggtggtgaaagcctccgtccggcgagaaaaatcatggatgcgtgttgttgagcattatcacgatatttttaccgcgcaggcgggaacgctgattgcgcagcagatggtaaaccgtgagaaaaccgcttcagacacgctggagaagatcgcccaaattccggagagcagctggctgtggaaacgtatttttaccgtgttgctggcacagatatatcaagacagcgacgacgttttccttgataaaatcagctggctgctggagcaggcggtgggctgggcgcgtttccgcgatgacattatgtccgcctgtttaacgcgctattatcagtcccgatatcgcgagcagccccacagccagctaaagcaagcggcacttgattactggcaaagcccgcagctcaaaagccagcagaataagtggcatcaatatgtggatgaaaatgttgcggcgatggtgcgatcctggctggccaaacaggatttgacccacttctttgaattgctgcgcggtaagggtgatgttgatcaggcgcgtctgttttactggctacgttttgccaaccagatgggcttcacccgcatcgtaatggggcaggatgcccggcaggatcgcagcggcgattttgttcagttccgcgccgataacaaaggccgtcttagccagctgcgcggcgggcgtgctttagacaacgccatgattatgcagattaacgattatctgtttgtcgagttttctggcgttggcaatgcgatgtatgcctatcggattggtcaggcgccttttaatccggaagcggaccagcttgatattaccactcagctgaaagacagaccccacgaattatcctacattctgcgccttccccatcgtccgcgtgcagaagactataacaacgggcggatcaccggctggatgaaaaaatacgatgatgaactccgccgtctggggataacctgtattgccgaacaaacccttgctgctgcggttaaacccagcccgataacgcgtaatccgcttcagcggcatcatattgcgttgctgaacccggttcgcgatcgggccattcaaaatctgattaataccatgtcttgtgaggttgttgataaccgtcagcgtggcggggtactttcggtgattgttgaaaaaaaccaacccgctatcgtgatgcaattgctcaagctgggctttactgcaaccaataaaaacccccgtcgttactggattaaataa

SEQ ID NO: 10393 - DNA, 3246 bp, Erwinia pyrifoliae DSM 12163
atgctaaaacgtctgcttagtcagttcactggccatcgccaacaggttgaatcccgtctgcgtcatcagtatcaaatggaagatagcggactcagtttttcgtttgagcgggtgacggacgaacagttatgggcgctgaaggcctggcttgaacagctggcggatgaagattatctgatcgaactcgccgatcgctggctactgacctgggatgaactttatcgtttactggaggatgaagaacatgccagcagcctggctttgttgggcgtacccgccattttgccgctacgggccagcctgagttctggcggcgcgctcagcgatgaagatttccagctttatctgggtgaatggcaagccagcgacagcggtcgcacggttactgttagccttgtcagaccgatatttaaccatgacggccatccccgtctgctgacaaaggctgactggcagttgattcagggattaaaacaatttcacgcccggcaacgctctgcccccggagagttaaccaatcagattggttgggcaaatgtgcgcaagttagcaaaacaggccggagcgcagtttgatgattacctggcgaaaaccgtggtggtaaaaccggcctccctgaaactcaaactgcgtaaagccaccattgccgatacggcggtgattgaaattgagccgtcctttgaggatcagccggaaaattggttggcgagttttgatcgcaatgcgcaggtaaatgacacttatcgcgtgcccgggccggacggtgagttaagccatgttatttttacgcctgaagttaaggaagtgctgtcttctgttcatgccattcccggtcggcgcgtggcaggcggtgaggcactgtcttttgtgcgtaacccctatacgtttttgggtgagcaagctgctgctgttattgcacctgaagatcatgagcaggcgctttatgatgcgcatattttcttccaccattttcgtctgctgccgcgcgtgagcgaaaagaatgctatcgaagatgtcacgctactgttagagccgatttctactgtaccgcagccagaaacgtctttcgttttctcatcaccctgggaattagagagatttatcaacgagctgggtatcagcgtggcttctcaaatgccggcggggcagtggcagggctatgaactcgaactcagccaattcggtgaggcgcagtggctgaactgtaaggcattgctgacccggtggcaggaggaatcggcgggaaaagagttttctgacgttctggatatcaataaatacggtgaccgggttattggcatcggtgaatttgaaaaaatggcttcgccgtggttaaccaacgcacaaggtgagaactggctacccgatgatattgatttccctaccgtttcagcggaggtatttaacggttggcagcaggataatccgcagcatttgagcagtctcaagcagcgaatagctgatgccgaagcaagcggcgcatcaactgtcatcgcgccgtggaatgacagggagatcccgcttggttcagcgcaagcactgcttaaagcctggcagaagcagagccagagtaagaatggtgataaggattttgcaaaggaaaacgttgcgcgggcagtgctgaagattgagcagaatattgatgagccgatgtatatcaggcagcggcgtatttcattgcttgaagctcatcaaacggggccagagatccctcttcacctgaaagaagatattcagcttaaggcgcatcagaaaaaagggattgcctggctgcaacagttatttcttaaatcgccttacgagaccacaggctgcctgctggcagatgatatgggattaggtaaaacgctgcagatactggccttgctggtatggaatattgagcaaaatccggacggcgagccgggtttgatcgtcgctcccgtctccttgctggataactggcagcgcgagctggacaattttttctataccactggaataccggtgctgaaattgtacggagacacgatcggcgcgatgaaatatcgtcaacaggatatcccggtacatttaaaagcgcagggcattaaaagtttattgcaacctggctggcggggagaggccaaaatcgtgctcacgacctacgaaacattgcgcgatcaggagttttcgctggcgcggcagccctggtcaattatggtatgtgatgaagcgcaaaaaataaaaaaccccgcagcacttattacacaggcagctaatgccgtgcaggcacgatttaaagtcgcctgtaccggaacgccagtagaaaatacattagtcgatttgtggagcctgttcgacttcgtgcagccaggcctgctgggggcgctaaatgaatttggcaaacgctatgtccgaacgatagaaaatgaagatggccgtcatcatcgggcattagagcaacttcggcgactgattgaaccacaaacgttaaggcgaactaaagaagaagtcgcgggcgatttgccacaaaaaattgaggtggctgagtgtaaggcattaatgatgtcaggcattcagcgccagctttacctctcatccattggtgcctggcagcagcagcaagatgtagcggaaggtatgcaggaggcaggtacgggaatgcttgggttgctgcataaattgaagctaatttgcgcacatccttttagcgtcaacccggaaccaggttatcgcgagcattcacccaagcttaactggatgttgcacacgctggatgggataaagcgtagtggggaagataaggtgattgttttcaccgaattaagagacctgcaacgtgagcttcagcacgccatttatcagcgttttggttttcggccggttatcattaatggtgataccagtaccaaaagtaatagccagaatagcaggcaaaagctgattgatgacttccagtcacagcccggttttgacgtcattatcctttctaccgttgctgtcggatttggtgtaaatgtgcaaaaagctaaccatgttatccatttcacgcgctgctggaacccggcgaaagaggatcaggctaccgatcgtgcttatcgtattgggcaaactaaagatgtttacgtctattatccaacggtgagagacagtgaagtgacgacatttgaagaaacgctggacgaacttctcaacagacgtcgatctcttgccagggatatgcttagtacgtcgtctgatttatcaggtgctgatttcgacgtcgtactgcaagatatcatttaa

SEQ ID NO: 10394 - DNA, 2190 bp, Erwinia pyrifoliae Ep1/96; identical to SEQ ID NO: 10390

SEQ ID NO: 10395 - DNA, 738 bp, Erwinia pyrifoliae Ep1/96; identical to SEQ ID NO: 10391

SEQ ID NO: 10396 - DNA, 1701 bp, Erwinia pyrifoliae Ep1/96; identical to SEQ ID NO: 10392

SEQ ID NO: 10397 - DNA, 3246 bp, Erwinia pyrifoliae Ep1/96; identical to SEQ ID NO: 10393

SEQ ID NO: 10398 - DNA, 1761 bp, Thioflavicoccus mobilis 8321
atggaatggctggcggtcttcgacgggagctggctggaggcgatcgcgcagttcatcacctccccagcagggatttggttggcctgccttgtgatcgtgacggcggcactcgggtggtactggctcggcttcaagcgccgcatcaagcctttgctcagagatctgaggagcgccggtagggcgatcgagcaggcgtctggacccgaagagttcgccgcggtgtttcacggtatcgatgaagagatcctgaagatcgctctgcttcgcgacagctggcgggagttcaaagctactctcttgtatccggagcctgaagacgaggcatcggttgtcagcgctgtgcagccgcccgattactacttccatcgcgacgccctgctcggacgcaagctcaacctgcgcctgtacaacgcgatcccgaacctcttaaccggcgccggcatcctcggcacctttgtcggtctggtcgcggggatctacctcgcgagcggagggctggcctccgaagacatcgccgaggccaagcaggcgatgcagaccctgctgaacggcgcatccctcgctttcatcacctccatcgtcgggctggtgtcctcgatcgcattctcgatccgcgaaaagcactgggtccaccaattcgacgggctactggggaactggatctctgcgctggaatcgcggctgcgacgcgtgacgcccgagggtatggtccgcgaacagctattgcagacgcgccagcagacgcaggtgctcgaagggttcaccgatcagcttgccttccaaattgccgaggcgttcgatcaacgcctccaagcgcatgtgaccgattccatcgcaccggcccttggcaagctcgtcgacggtatcgacgcgctgcgcgaggaccgccagaagacggacgaggcagttctggaaaagctgctgtcgaccttcaccggggagttgaagggtgcggccgggactgagatggactcgctggcggaaaccctccaatcgctgaacgacaacctgaagtcccagaccgaggatgcggaaaagcgacaccgggaaaaccaagatgccaaccgccaatccgccgagcggctgtcggagcttttcaaccaaggcaccacgacatttcaagatgccgtcagagcgtcggtggacaagatgtcgagaagcgtcgaggcgatcgtcgagaagctcgcggagcagcagaagcaggctacggccgacaacacagtccggctcaaggcgctcagcgacaccttcaccaaggcagtccagggatttgacgaaacactgacgaagatgaaggaggtcgccgcccagaacgatgaggccgcggccaaggtcgccgagttggtggaggtgttagaggcggcggcgcaggacatgaggggcctgagcgacccgatccaagcagccgcgaaggccttcaagagcaccggtgacaatgtggcgacgcaggtgcagaccctgcagacggcggcggcgacggtggtcaatgccacccaacagttggaggccagcaacgcacggacgcagcagtcttgggaggcctacgagaagcgcttcaaacgcatcgacgaagacctcggcaaggcgttctctgtgctgtctgacggtgtgcaggcctacacgacgcaagtcaacgacatgcttaagcagctcgacaagcatacgggcgagatcagcgcacagctcgcgggcgcaaacgaggacctgcgtgcacgggtcgaggaactggccgatgcgattggacgggtgaaacggtcatga

SEQ ID NO: 10399 - DNA, 852 bp, Thioflavicoccus mobilis 8321
atgacgcggcgccaggcatcggctacggtcagcgatgacgatggatcagggtatctcatctcagtcagcgatctgatggcggggttgctgtttgtgttcctcatcacgctcgttgctttcgtcatcaacttccgcatcgccaccgacgagcagcgtgccgcgcgagaggacgccctgacacagaaggagcgagccgaggccgaacgggacgccgcgcggaccgagaaggcaagactggaggccgtccgcgacgacctgaccaacgcacggcagatgcgtgatcaaatgctggaggacatccgtcagcgtctcgaagagcgcggcatccgtgtcgagattgatcacgaccacggtgtactccgactaagcgagaacgccatctctttcgagtcgtcccgcgccacgttgcgcaaggcggaacaacgcaagctgaggcagatcggcgcggttctaatggaggttctgccctgctatgcagcggccggcgatggcatctgcggagaacggacacgcggcaagctcgaggccgtcttcatcgagggtcacactgacaacgtccctttgcagggtgggcgcttcgatgacaactgggatctgtctgcgcaacgtgcgatgtatacctatcggcttcttgcggaatgggaaccggggctggcgacgctgcgcaaccttttggggcaaccgttgttcagtgtgagcggatatggtgacggtcggccggtgatcgaccatgagcaaccgacggccgactccttgaatcgccgcatcgatctgcggtttatcatggccccgcctcaggcggggcgagagccagcgccggttcgcgacctgcgcgagcgtggggtgcgctga

SEQ ID NO: 10400 - DNA, 1278 bp, Thioflavicoccus mobilis 8321
atgcctcggccgccggacagggatctcttgcgagcggtctacacgcgcttggaaaggatcgcggcggcgggcggcaggggcatggaagaattgtcatcggctgatctgagaaaggcgccatgggtcctgttccaaccttttggcgaccagcccggtgccgcgcctctagcggctcgacggggctttctggccagctatctgaccgagctgcagagccgtggacaggcatctgcgcttgctacactcatttattgcttcgtgctgttctacccgcatgccttggcgggattcaatcagcttcgcgagttcatcgtgtctcatctgaagttaggagcaaccagccttcgtattcagcgttggcaagtatgcggcgacaaatgtgggctgttcgcggctgatgcgccactccgtctcgcgggacaacttgcgtattccgatcaatcgccggaggcagtcctcgacgattgttgtctccgcggtctgctcgcgacgggcggcttggtccttgctgcctaccgggagttggtcgtcgcggtgcgtcagcagcttgggcagaacagcgtgccgtccgccaccgtcgaacgtctactcagcctgtctcgtgcaaacgacgacccgcagtcgctccgattcaaaaccgaacgggtagccctgatcgatggcttgcttctgccgttcgcggaaggccaacccaaccccgctctcgccgagcgaatcaaggattctctgcttgacctgtttggcgacccccgtctcactggtaggcagcggtggaatggtgtcgatccacgagcacgtcaggtcatgctcggttggctggtcactgagaccctggaggacttcttccgccttctagaatacgcggctcaaagcgatccgatagcccgccgacattggcaagcacgcaagattttctggactcgccacctcaatgctggggcgattgccgacgcctgggtcgccctcgggccgcttgcgcggtttgaggctcggggaatgcttgccggatcggatgcgagctatgccacgctgagcggcgtgcagaacaaccattccgcgataatcatgcgtatcggagaactgcttatcacggagtggagccattccgggagttttcgggcgtggacgcccaatgccaagaaatccccgaagctctacaaggccgactattcccgcccggaattggtggacggcgcggaatacgtgattgaacatcgaggcaactggcaagcccgcgtgaagcacctcatttacgaccaaacaggcatatcggcatga

SEQ ID NO: 10401 - DNA, 2901 bp, Thioflavicoccus mobilis 8321
atgaatgccaaactcacctggcatgcggaagagcaaggcttgcggttccgtgtatcggacggcgcaggacgagcgattccagaatctgcctggggggcgacacaggtacggcatgctgcggggccggcgtcgatcgcaccactgctgacgctgctggacgatgccgggctgacagttgacccggacgggtccctgctggtgccgcacgcgctagtggctgcctgggacaagcaccaaatcgctcagctcggactgccaccagttgcgccgtttcatctcaatatccgcgggcaaggcgtcctgtccagtcccgcctttcggttccgccaccaactgcagtcccgcggcggtgtgcccgtgatgggcgctaaccgtcaaggcgtcatcttgagggtcggcgcggcgttgtactcgttgcccgaccccctgttctcgctgatcgagggcatggaacgctacaacgcgacgccggaaagcgacatggatgcgcgctttgcggcctggggcgagttacaggcgctgctgccggaagacgccgtcgtcgatcagcagttgcgctccatgaacatcgcgcgggcggatgcgctgaccttggacgtggggggcggcgacgactttgacccagtacttctggagcagccagaactagaccaggccgcacgcgagcggggcgagacgagcgtaccgcgcgatctccttccgcccgccgcgcagcgcaacttcgggcagcggtttcgggcatttcctgatgcgcggcgacgttatgcgctgtcaggcaactggttcgtcatggtgcctgagccgttacgtgcggtgctcaacgtggttcgccaaatgcaggacgcaccgccggagcgccgccgcgcctttattgcgaacccttacgcgggcatcaaggagcagcttgcggaccaaatcgaccccgagcgaatcgagggtctattccaggagacaccggcattcctgagtgagcgggtcgagaaactcggcgagtggcaccccaagctgcaggctttcgtgccgcaagggatgatggactggttcccggcagacgagaggacggagccatccggcggagacgacggcagcagaggtggtggcgctggcggggacggcgaagagccgacggttggcgtgccgaccagcgcgggcgttgtcaacgtgaagccttgggaggttcccgatctcgtcaaaggcattcgaaaagcacgccaaggcggcgaggcgatcttcgactggaacgggcagttggttccggccgacgaagaaaccgagcaggcattcgagcggattcagcaagcaaagcccgagccggcccgacccgtggtgccgatcatcaaggacaatctggacgaggtcgggttcaagtcggcgaggcgtctcagacctggcacgccgggtggactgcccagagtcttgaagagcaacctgttccagcaccaacacaccggacttgattggcttcagcaacactgggtagccggcaccagcggtgccttgctcgccgacgacatggggctcggcaagacgattcagacgctcgccttcctgagttgggtcgatgagcagacagcagataacgacacccacaagccgcacctaatcgttgcgccgacgggactgctcaagaattgggaggcggaggcagagcaacaccttgccgaacctggactgggagatctgtttcgggcctacggggccgacctgcgtcagcttcgcgagatgtccggtcatgagcggcggcgctacctacgggaccgcgcgcactgggtgctcaccacctacgagacgctgcgagacaagatcagcttgttcgtcgacgtcccctggcgcgtcgtggtttttgacgaggcccaacggatcaagaaccccggtgcccgcgtgaccgacatggctaagtcactcgacgcggagttgacgctggccgtgacgggcaccccggtcgagaactcgctgacggatctgtggtgcatcgtcgacgcggtacagcctggtctgctgggagcacatagcgattttaagtcgacctacgcggtgcaggccgacgccgacccgaatgtgttgcagcccctgcagtccaaactggaacgcgacaccaggcccccagccctgcttcggcgtatgaaacaggatcatttggaaggcttgcctgaaaagtatgttcatcgggcagaacgcgagatgcctgcggatcaggttactgcctatgacgccatcgttgccgccgcccggacatcagctggacaggcaggcgcggtgctcggggcgctgcaagggcttcggcgagtttcgctgctgccagatgatacagaggacgatggcctcaccgacgccacagttcagcgatccgcgagactccaggctttaatcgacgtgctggacgaggttgccgaaaaaagtgaaaaagcattggtattcctggagtttctaaaagtccaggagatgctcgttccttacctacgacaacgctaccgactgcctcgcgatccgctgcggatccatggcggtacactcggcgcggtgcgcaagaagcacgtcgatgagttccagaacggcaagaagggcgagttcgacgtaatgattctctcaccgaaggccgccggtgtaggcctcacgctcaccgcggcgaaccatgtcgtgcatctgtctcgctggtggaatcccgcggtcgaggaccagtgcacggaccgcgtctaccggatcgggcagcaaagcgaagtgcacgttcatcttcccctggcgatccatccgagattcagagaacaaagcttcgatctgaacctggatcgcctgctcgaacgaaaacgaagtctctgcacaagcctgttcgcgccgcccgcagcatccgaggaagatctcagccggctggcagaagagagtcttgggagtcgctcggcgtga

SEQ ID NO: 10402 - DNA, 2046 bp, Ruegeria atlantica
gtggaagagatcacagctgttggtagaacgatcaaagacctgatcctcacaatcgcggaatatctgacagaagactggacgccgggtttcgtcgcaggtgtgttgctcgcgtccatggtcgtttttttggccgcatggtcgtttcgcgtcgtacgtcgtacccgtgcagtttctcagttccagcgcatcttcctgggtcaaaaaaacgctgatgatggagccgtgaacttcgaggagctgtcggctcagatagaaagaaactcgaaggggcgggcttccagatcgcttgcaacggcatggggcgagtacggcgaaacgatcattcaatacaaaggcctggccagaaactctgtacgtccctcatactttttcaatgtagacgatttggcgttcggaccagggttcttccgaattctaccgaacctctttgtcacgattggtttattcttcacgttcttaggcttgattgcggcattgaatacgatgaccgggaaagcaattgacgatgctgcaatcagtggattgctgtcggttgcgtccgcgaaattcataatgtctctcacagggctattgtgttcgatcgttttcacggtggctttgcgcgtaggcaacggaaagatcgaaggggcagttcatgcattgagcggcctcattgaagacaacctgagtttcgtgagccaggaagagcttgccgttcgacaactcaatatcgcggaggaacagcgcgacaacttgagaaccgtcgggatggaactcgtcagcgaacttacagcgcaattgaaggacggtatctctggcccgatcgtcgagtcgataaacgacaagatggatgaaatcgtgacgcgcttgcaagatgggttgcccaaagcactcgccgaggaaatagcaggtaaacttgaaggtatcagtaaggatatcggccgagccggtagcgatggcctaaccgacgtcgttgaaggtttgtcgaagactttgaccagcaacgtgacgggcgctttgcaagactcaggacggcatctttcagaagcggcattgaagattggtgagctggcagatcggctggatgatagttccggaaaaatgggctctggcatggagagcgcgattggacaaatgacttcggccgtccaagatcttcggaactcagcagtgtcgtctgcagatacgacgaaagaagctctgaaccagggggccgacgcactcctgagcaggatgaatgactcgcttgatcggatcagtgacaataccaaagaaggcgctgcggcgatgctgtcagcggccaacgagatgaaatcagccgcagagcaattcggagcagaactcaaaacagcgacggaaacgggcgccgcaactgcagaagccacgatcaacgaagcaagcgcagacgccgcgtcgaaaattcaggctgcgggagcgagtgtcaccgaattggtggaagaagggcgcgacgaggttcttgctccgctgaacgaaatggtgaattcgctcaagacgatgactgaagagttgggcagcggtgcgcaaaagatgcagcatatgtccgatagtgtcggtagaggtgccggcgccgtttctgaagcttctgacagcttcaaagcggcttccaacggtcttctggccgctgcagcaccgatcgaagtttcgacatccaagatcgaaacggcgacagcgaacctagatcgcaacgtcgatgcgactgctcaaaccgttttgaaagccgccaaacagactgccgagatcgccaatgagacaatggaacgtgctcgtgacgtcctagatggaaagcgtcgtggcatcgaagatgctctggaaggtgtccaagccgtcgtacgagaaatgacgggacagggcgaacgcttggatgacgtcgacgagaaactgggacgcgctttcgaggtgtacaaccagaaagttgaagaggcgctcggatcgatcaagacctatgtaagtgaagtccagggaaaattcggcgaaggtatcgatcagcttcaggccgtcgtcgatcaagctgaagacttcgctccgcaaacgcggagggcgtcatga

SEQ ID NO: 10403 - DNA, 1119 bp, Ruegeria atlantica
atgaagcacgctcaaatcaggcgatccgtagcggaagaggaagagtcggccttcgtatccatgaccgacatgacggtcagcgtcttgttcatcgtgatcatcctgctcgcgtttttcgcccgcttctacggcaatcaagaacctgatgcggttcctcgatcgacatatgagatcgtaaaagacgaaagagataccgcactctcttcgttggaacgcgttcaagcagaactggaactcgtgacaatcgagaaggatcgcatcgcagcggagctctcagacgtttcgagagagcgcgatgaattgagagcagaggtcgatcgcctcagcgaaaagctcttacgccaggacgctttgatccgagagctgcgagacacgctcagagaaaagggccaaagaatctccgatctggagacgaaattggctgatgcattggcaagaattgccaaacttgagacacagcttgagatgcttcggcgtcaaatgcgggatccattagagaattacatcgcgcaagctgacgcgacgcggatcaaggttctcaaagagattgaagcgcgcctcaaagtggacttccccgagctcgaagtgaaagtgaacgaaagaaacggtgctttgcagttcaaaggagagggcctttttggaaagggagcccgagagcttctacccgcaaaaagagccgtcatgcagcgtgtgggaacgatgttgaacgaaattctgccttgctacacatttggcgacaacagctcctggcaggaagggtgcaatcctgccttcgccgttatagaggctatccagatcgaagggcacacggatagcgagggcggcgagctatacaacttgcggctttcaaacgatcgggcggtttcggcattttcgacgatgacctcggaagcgccggggttgatctcacatctcaatcttcgagagcagccggtgatctcagttgctggatacggtgaatatagaccgattgcttcgaaccagacccgcgctggagaggacgaaaaccgacgaattgatcttcggatcataatgttctcacccgcgagcacggaacaaatcgatgacttgaaatccagacttcattctgctgcgggaggcggggatgagactcagtga

SEQ ID NO: 10404 - DNA, 1350 bp, Ruegeria atlantica
atgagactcagtgagatattcgcgcagagagtcgaaccgacttctgtcgttctcccagctccgaagcgattggaaactgccgtagatcgtgtgctgaagcgatggccagatgtatttgctgagccctccgagaacgaccgcgaaaccttggtcgcagaattgaagcgtagactggatgattggtcgtggagcggggcaaagatttcgttcgtgaaccaagcagccgtagcgctctttgatcgtgagcggaggtctcgggcggatctcgagcatgttcgaaagttttactatgaagaagccgccacgaaccgcagtcggacgtttttgggaaacgcggtgcaagtctacattggaagcttcgtcaaaggagcagttcacacacgtcgactgtctgaagctcttaccaaccaaattccgcatctcagtggacgttccaggaaactgttgaagagttttccagcattcttcgactccaatagaattgctatggaagttgcgtctcgcatgaaggatgcagagcgtcctttccaagaattgaagagcttaggcttcaacaaaccacatgcgccggggttgcttgaccacgcgcatctagaatttctcgagaaattggatctcagaactcataccgatatcgagaaactattccattggctgcatccggatggccagttggcgaaacaaagtggggcgtcagaagcaatcgaagcattgttggcgccttggctcgatgaagagccccaagaagacgtcaaaaggttcctgatcgaccacctaaccgaaagctacggcgacatccggatcaatcctggaagcgcttggataaacgtaagcgaacaagcaaagcaagtactgctccgttggttgaccggcgagagtatgcggtttctcttcgatgtcctcacagacacgcaagatagccatatgtggagcgaaagaaggcgtttctggatggatcaatacgacaggggaaatatctctgctgcctgggtggcttttgatcccaggggacacaagctcgctcgcaagaaccttggccgtgaaaaaaatcttccgtttggacgccaggtgtctcacgcgagcgacgacgggaacaagtctttgctcatcatgaaggtaggccaaaggatcatcgtcgaaggaacttacaatttcaaagtccacatctatgcaaaaaacgatcctgaagcaccgaagttgtatcagcccaaatacgattgtgcggacatacgacacgatagaagaaaacgagtcagttctggatttgtcaaaatcggcccagaggagcgaaaaatgcacctcggtgattggcaaggttacttgcgtagccggtatccggagatgttttga

SEQ ID NO: 10405 - DNA, 3129 bp, Ruegeria atlantica
atggagttcgagttttcccatgatgatgcaaaagtcattttgcgtcccaagtctcaacgcactggatttctttctttgttcggaaagaatgcgccagtctcactgaaccatctcgacccaaaagagcggcaggtcgcctttgctataggtgacttgagggccatagaggctgaatatcccggctcaattgtgatccatgacgatcgtgtggagttgacacatgacggagcggcgcaagtcggtgccaagtctggtcaaatcttgggacttccaccgcttgtagatcttgagctccacaccgacgcagaagggatcgtggggtccgagcattttcggcttcactacgaatggcaataccaggggagaacagtcgaacctaaacgaactggcgcattcctgaatacggctcgaggaattcaacgagttcccagttggatgcttggagcaatccgtatcgctgactgcttcgaccccaatgaggacgaggtcgatcactggacggctcttgcacgtttcaggaaagctctcgttccagaggaggaaatcggggcgaacacggagatgtccaactttctttctggactaaaagtgagtctggctgacagtttttcgatttccccgattgagaaaggtgagtacttggacttcgcgcctgtgcctttcgcaactgatactctatcgcaaagtgaaggcgatgaagtgatcgaagaagctgcgtctgagcttgatgaaagagagctgtccgtttttcaggatcgtttccaaagatcaggcgcccttccttcctacaaaacgggtgacaagagttacctggtcgtcgatccttcagccaaagtgacgctcgaagtgatggaagagaagaaaagagcaactccctttgagagggcggagttcgtcaaaaaccccaagccagcgatcaccgcggcgattcaggaagacctcgaaaagcgaggggcattggcggggttgaatgatgcgcaagttcaagaggcaatcgaaaccgcgacgggtgcgactttcgtggagacgcgtgagtattcagagcgtgtgatcggcatcggcaagtggaagcgaccggagctcggggatgactggtcgaatggcactgaatggatgccggagggactgtctcggagtgtcgtggaccgtattctggaaaaaaacctgaagcagacagaatccgttctcgaagagatgaaagcagctgcagccaggggagacgcaaagatagacgtcgacgggcaagcggttccagttaactcgtcgacgatcaagtcgatcgaaagcagggtggagcagcttcgcaaagaacaagagaagacagacggatcaggtgaggatgagggaaaccgcgaccaaatcacgtcagccactgaccgcgatccaatcgtcgttcaaaccaagcacaatttcgagaatatcgaatggcgcccagataggaacaaacgtggcgcctttgtagagaaacgcgttcctgacctcatatccacaccattgaaagagcatcagacgaagagtttcgaatggtctctggaggcttggagtgaaggtcttccaggtattctgaatgccgatgaacaagggttgggaaaaacgcttcaaacgctttcatttctaacttggctcaagactaacatggcgcaccgggacaacaaggcgcgtctgcccattttggtggttgcgccaacgtcacttctggaaaactgggaagaagaggtttccaagcatatcggtggtgatgggctcggtttcatttacagactttacggcaattccatcgctgggtttaagaggaaatcaggctctggaaaagacaccgacaaggggcaggacactctcaatttcgatgccctccatgaagccatagaggatggtagaggcgacagagtatggattctgacgacctacacgacgatgacgaactatcagcactctttggcgaagataccgttctcgtgcgccgtattcgatgaaatccagaatatcaaaaaccccggcaccttggccgccgcatcagcgcgcgcaattcgcgcggattttcggatcggattgactgggacaccgatcgaaaacgtgagtggagacctgtggtcaatcatggatcagctcgttccaggtgccttgggtagtcttcgcgaattcaacgatgtctttggctctccaaacgaagaaaacatgagccaacttcatcaactggtgttcaagcagcaggacgatggcaatggggcgccggttccaccgatggcgatacgcagggtcaaggaagaagcggcaaaggatttgccgagcaaaactcggatgctccacccacgtctgatgccggagcttcaggcaacagtctacgatgccgctcgtttgaacctcgcgaaaggtggactcggagccaggctcgcaatgatacatcacatacggaccgtatcggtgcatcccaatatcgaaggcaacgaaacaggagagagttttgtaaattcttcggcgagactggaggcaacttttgagatcctggatcggcttgcatcgaaaggtgaacgagcattggttttcatcgaaaacatcaagatgcagtatcgtttcgtcgaactgatcaaacaaaggtatcagctgccccgcgtagatatcatcaacggaaaaacgccgatcaagcaacgccaggtcatcgtaaatcgttttcaacgccatctcgtcgacgacaaaggcttcgacttgttggtattggggccaaaggcggcaggaaccggcctgactttgaccgcggctacgcatgtcattcatttgtcgcgttggtggaaccctgctgtagaagagcaatgcaacgacagagttcacaggatcgggcaaaccaaaccagttgagatccatgtggccatggcaatccatccgggctaccgagaaggctcattcgactgcctcttgcatagtctcatgcaacgaaagcgaaagctggcgagttccgccctttggccgcttgcggatagtagaggcgatgcggctttgcttcaaagcgggttgaccgagatcgagatcaatactggcggtgagcctttggagagtgctatggctgcgatgttcgaaagagacggagcttcactccctcaagcaaagcccgatgggtctttagtgttttcttga

SEQ ID NO: 10406 - DNA, 2190 bp, Obesumbacterium proteus
atggattggcttaattcactattggtcattttgacttctgtacaacccgccaaagtacctttcgttgttattgtatgtgtaactatagcattagttttttttgccatattttatgtttttcgcgcgataaaaattgtcagtaaactaaaaagtaaggcaaaaaaaatcagtgtatgggaaacggaaagcccagcagaaaaattgcacaaactgagtgagctctttgcgcagtcgtctatgaagcattcatggagcgagtttgaagaatcattgcatcagcaaaaaaatcttgtcgagggtgaactaaagctgcaaaaggttcgagcgacggcccccagcgctgtatattttactgagcaacaactgattgatattcctcttaatactgaatttttcaaacatctcccaggaattcttactggtatagggattatcggtacattttatggattgatgattggtctattccactttgacccgagcactcctgagcaggtaactagcagcgttgcgtctttgctacgtgatgtgctctatgcttttctcggttcttttaccgcaatcgcggcatctattgcagtcacctggctagaaaaattttctctcgctaaatgttacaaatatcttgagcaattaacagcagctatcgaccagttatttgaaagtggtgttggtgaagagtatttagctgaactagtaaaatccagcaatgagagcgcgactcaggctaaacagcttaaagatagcttagttactgatctgcgcgatatgctgcaaaacttagttgcaagtcagatccaggaaaatgaaaaactagcccaatcgctttcctctacatatcgagatagcggccagcagtttgcggagcaggtcagcaatgctattgaaagtagccttaaatccccactggataaaatagcaggggcagtgcaaaccgctagcggtgatcaaagtggccaagttcataacatgctagaagatgttctaaccgtatttatgtccaagcttgataacacttttggcaagcaattcgacaatatgcaccaaatgatggggcaatccgttggagccattgagtcgatgcaaacagggttctcagccctgttacaagatatgcgtagcgctagcgaagaaagcaagcaaggtagtgcagagctgatggctcaattgcttaccgaaatgaaaaccggccaacaagccatgcagtcaggtatgaacgatatgctgacaagcttgcaatcctcagtggcaaaaattggtactgaaggtgaaaatgcgggcgagcgtatggcacaacagttagagaaagtatttgccgataacgaagctcgcgaaaaagcaatggcagatcaaatgaaagaatttatcgccactattcagcaaacatctcagcagggccagcacgaaaccatgcaaaaaatggctgcatcagtagagcaagtaggagaacaattaagttcattatttactcaacttgagcaggggcagaaacagttaacgactcatcaacaggatacacaagcatccctccatcaagaaacacagcagattgtttctggatttgatgaacaagttaaatcgttgcttaatgcgttacatgcacaacaagaagcgaccgaaaatgcgcttcgcagaatggctgaacagactactgcgcacttacaagatatgcatactggcgcagataaaatgcgtgttgctgccgagcattttgagtctgctggcgacaaggttaaagaagcgaatcatcttactgcagatgtactcaataaaactcaaagtgcaggcaatgagttaagtcaggcaagccgagagttgagctctgtcgtcgctgattatcgcaataaccgagattctgtcgcgaaatcaatcacgttgcttgaaggcattgtggctaacgcgcaggcggaattagcaactcgtagtcaattccttaaagagctaaaacagcataatgaaggcttacacgattacaaccgcgaagccaaagagttcttagaacattccggccaagtgctggcaaatggctttaaccaatttgccgatggtatgaaaacaagcttagacacaacgttaggtgctttagattcaaatctggatagcgcagttaaacggttaggaagcggcattgaagaacttggcgaaagtattgagagccttgaagaaatgttgtctaaagtgtcagtttaa

SEQ ID NO: 10407 - DNA, 744 bp, Obesumbacterium proteus
atgtttggtcaatattctcgcgctagaggccgccgctcagatgaagctgagaaaccattttggatttcatatgcagacctgatgaccgcgatgatggtgctatttctggtagtgatggttgcatccctcagctcagtgactcaacgtattcagcgtgtcgagcagggagaaaaactgcgcgggcaagatatttcacgcttatgccaacgtttagaattacacgcaaagagtttgaataaaacgatagtggtagattgccgggataatcgtattagttttggtgaagcagggcgctttgatcataatcgtttttttcttaatgcagatggccagaaggcattacaagatgctgttcctctcgttctagacgcggctaatagcgatgaagggaagaaatggtttaagcagattgttattgaaggttttactgataccgatggttcatatctttataacttgcatctatccttgcagcgttctgaatgggtgatgtgcagtttgctagatagtcgaagtcgtcttcaacagcaaataactccgctgcagcaagagcaaatccgtaaactatttttggccggtggcgtttcgtttaataatgcgaaagaaagtaaagaagctagccgtcgcgttgaattgcgtatgcaattctttggtttgaaagatgagcatgaaaagccagctgttgatgtagaagattcagttgtgccaagtatagaaagatgccagttggagatgcctatatga

SEQ ID NO: 10408 - DNA, 1692 bp, Obesumbacterium proteus
atgatatcggctttgtctcagttgtctgctgatattgctgccacggttaaacgacacgtttctacgtctgataataagatctttggtgacttccctaaactgaaagctgctgagcagtatttagctgcgaaaatggagaaaagcgaacggacaatagttcctcctcttgataaaaggctgcgggcaattgcagcgttacgccagttaaaagcgcttacgagatatgattggcagcttatattcgcaggactatcggataaagatcctgatgcagcatttcctattttgcttgaagatgacactctttatagtcgtgtggagcaagagatacagcaacgtattgacagaaaaaatcttaagcgccgagaatggaagtttttatgtagtagttattttgggtatcattcgaaaaaaccaggcgaaaataataactggtgctctctacgcgatctgcttcgtattggctacggtgtagttaaaagtcaggcacgtaaagaaaaaagctggatgaaaataattgatcactacggtgatttgtttactcctgaagcaggttcactcattgcagataaaatgattttggggaagtttgtcgatttctctgctttagagaatgttgtacaagtacctgataatagctggctctggtatcgtgcatttgttgttctcctatctaaagtcttagagcttgatgacgaagagtttaagcttcggcttccgcatcttttagagcttgcacgacaacgagagcgatataaaaatataattttacgcgcttgtttaacccaatattaccggtcttcatatcgaaatattccgcaccctgagcttaagcaaatggctttagatagttggggaagccctcagttgcgtagcaaacagaatctttggttaaatcatttaaaagaccccaatacaagcgaaaaaatttgtgggatggttcgtagctggttggcgaaagaagatctgacacatttcttccaattactgaaaggtaatggtgatgttgatcaggctagattgttctactggctacgttttgccaatcaaatgggttttacacgaatagtgatgggacaggatgcacgcaacgatatgcactctgactttgttgctttcaggcaaaaaaacaaaggacgcttgagccatttattgggtggggcaagtgctgacaatgctgtaatcatgcaagttggagattatctttttgttgagttttctcggactgggaatgcgctttatgtgtataagtcttcggaaactccatttgatcctgaaaagaacgaactgcatctcaatgatgaattaaaatgtggtggtttaaaattccgtcatgccccaacggcggttggatacagtgataaacatcttacaggttggatggtggcgtatgaagatatgctacgccaacggggtattaaatatattcctacagatatgcaagccacgtctcatccggcacagaattttaaatacagcagcgcaccaactcaaaaaaactcaaaaacagagcgtgaacaagatatacaacagtttcttcgagggttgaaagcatctattagcgataaacgtgccttaggaggtgctctacatgttcgtttatctgagcgagacccaaaggcgatagctaagctgacgcagcttggtttcaaacccaaacacggtgacccactggttttctggagcaactaa

SEQ ID NO: 10409 - DNA, 3249 bp, Obesumbacterium proteus
atgctgaagcgtctactcaataagtttatgagtaatcatctatcgtccgaaaaagcaatgagccatcagtaccagatagaagaattaggcctctcatttcctttcagtttggctaatgatgacgctttatggccattaattgcttatatggatcaactctcggaagaaggctatgtcacagagctttctgaccgctggatgctaacctgggatgaattatatcgattatcggaagacgtagagcatcatactagtctgcctttattgggtgttccggctgtaatgcaactgaaggcaagcttagctggacgagggggactaagtgacgcagatttcaatatttatattcaggagtggcaagagatagcgtcggggagaactattatttttaagcgcactggtgcggtaattgattgccctcacggacagtttctgctgagtaaagaaaactggttgctattatctgctttggaacattttcgttgtgaacagaaggagaaagccggtgaggtcacaaatcaacttggatgggcaaaaataaggcgcttagccaagaatgcgcatgctgaacttgataactatctgacaaaaactattgttgttaagcccgaatcattgaaaataaaagtcaggaaagcaacaattcacgatacatcagttattgaaattgaacccacgttcgaagatcaaccagaacaatggctgagtagttttgataataataagcaggtgcctgatcaataccgtatattaagtagcgatggttcactcagtcatgtaattatttcacccgaagttaaagatgtcttatcttcagtccattctattcctggacgacgagtggctggcgacgatgccatttcatttgtacgtaacccgtatacattcattggtgagagtgctgcatctgtcgtcccccctgagcagcatgagcaagcgttgcaagatgcacacatattctttcaccatttcaatatcgagccgctactggatacagagagtaatatgatcgactcggtattgctgactctcgaacctatcgctgctatcccccagccctctattcgattttcgctgtctaagcctcacgagtttgaacaatttatccaagaactttcaattaaactggcatctggattaccagcaggtatatggaagggatatgaattagagcttagccaatttacgttggaacagttacaaaactaccaagtcttgttgttacgttggcagaatgagtctgctggtgttgaatttgatgatgtcctagatctcagtaagtatggcgatcgagtcattgggataggtgagcttgaaaaggttacctctccctttttggttaaaaatgaaagtgaaaactggttacctaaagaactgggcgagactttattttcagaagatttctttgacgagtttgatcaacgtagtgctgaactactctctgagcttgatgagcgaattaagctggctgaacaacaacaagaactatcagtaaacatgccgtggaatgagcaatctcttcctattgatgatgctaagtcatttttaaaagattggcgtaagaaggttgaatctgaattatctagtgatgacaaagaaacgaatctccaagataaacgtgctgttttacaaatagagcagaatatagaatatgctagctacattaaacataggcgtgaagcattgctgaatgtccgcggagcggaacctgtattaccagtattattgaagaaacatatccagttacgcgagcatcagcggcaaggggttgcgtggctacagcagctttatcttaaatcaccggatgaaacatcgggctgcttattagctgatgatatggggctaggaaagacgctgcaaattcttacgttcttgatgtggtatattgagaagaatccagcaggactaccaacaatgattgttgcccctgtctctttattagataactgggaaagagaattagataatttcttttacgttgccggagtagaagtccttaaactttatggtgatacagttaaatcctttaaatttcataaggatgaaattccgccagagctaaaggctcaaggcattaaaaacctttttcgccctggatgggtgggtaatgcacaaatagttttaacgacttatgaaacgctgcgcgatcaggagttttctattgctcggcaaaaatggtcgattatggtttgtgatgaggctcagaaaataaaaaatcctgcggcattaataacccatgcagctaacgcagttcaggctcaatttaaagttgcttgtacaggaactcccgtcgaaaataccttagtagatctttggagcctttttgattttgtacaaccaggcctacttggcgcattgaatgattttgggcaacgttttttacgaccaatcgaaggtgctaaagaacgagataatgcagctcttgaattgctccgccaacttattgaacctcagaccttgcggcgaaccaaagacgatgttgcaaaagatttaccccaaaagttagaggacttggcttgcaagaatcttactatgatcccgttgcaacgtgatttatatatttcttcgatcgtgtcttatcaaagtaagcagcaaatgcaagatgaactcgaggtggcaggaatgggaatgcttggccttttgcatcggcttaaattaatttgtgctcatccttacagtgtgaaaccagatagcccgctgcgtaattattcgccgaagctgaaatggatgatgcagaaactagaagatatccaaaagaacagtgatgacaaagtcattatatttactgaactgagggatattcaacgtgaattacaacatgccatccaacaacgatttggatttaaaccgtacgttataaatggcgatacgagtactaaaagctcaagtgcaaatagcaggcaaaaactgattgatctctttcaagaacaacagggatttggcgtaattattctatcgacggttgcggttggattcggcgttaatgtgcagaaagcaaaccatgtgattcatttcactcgatgctggaatccagccaaagaggatcaagcgacagatcgcgtttatcgtattggacaaacaaaagatgtttacgtttattatccaacggtcagagattcggcaatgccaacgtttgaagagactctggatgaattactacaaaaacggcggatgcttgctagagatatgttatgtgctaaaggtgaacttcaatctgaagattttaaccaaattctaagcccaaattag

SEQ ID NO: 10410 - DNA, 1719 bp, Serratia plymuthica S13
gtgatcgacgatcaagacggtactctggtcgtgcgcaatgctgtgcgccccagtcaattctttaatctggatgacttgcacttcacacaaggcttttggcgcattgtgccggggctatttgtgactgttggtctgtctctaacctttctcggcctaatttctgcgcttaattcgatgagtagttcattagatgatggtggcagtgcggcattagaaggtttgctgaccatcgcctccgcgaaattcatcatgtcactgactggcctatgttgctcaattgttttcaccgtctcgcttcgtcgcgggacatcgcggctggaaaaagctgttcatagcctcaacagtttgattgaaaaacgcctgacattcattagcttggaggatttatccattcgccagctcaaagcaacgattgaaagtcgtgagcattttcgcaagctggggctggagatggtggctgagattggtcgtccacttcgtgaggaccttccaagagccattgccgaatcgatcagcacagctattacaccggttatcgaacaggtcagccgtttgggcaatgatggcgtcggcgaaatggtgcaaaacctctcatcacgcttttctgaagatgttggccgagctttagcgcaagctagtgaacgcatttcactagcaggcgaccagattaaatttctggcggagcgcatggatcaaagctcagggaaaatgggcaatgagatggaaagcgcaattgggcgtttaggccaggcggtggaaatgctgcgtgatggcatgcagcaaacggcagatatggcaacatctgcacttaatgagggggccgaaaacctgctggcaactatgaattcaaccttgcagggtatcaaggacaataccggtgaaggtgcgcgggcgatgggcgaagccgctgcagatatgaaagccgccgcgttgggtattcgtaccgaactggaaactgcagcgaaacagggtgctgaagcggcgcaggcgcgcatgtctgaatcagcgtcacaggccagcgacgctattggccaggctgcaacacaagtattgggtgcttttggcaatactgtaggagaaatcaccaaagccacagaagcaatgactcagaaaaccagcagcgaattgctttcccctctttccgccattgcagaaaaattggaaggcgtgatgggcatgctgacagaaaccagcactgtactgcgccgcgcctctgaagggattaaagaaggagccgttgcctcggaaaatgcatcgggaagcttccgcacatctgcgcaatcactgaccagtgctgccgatccgattcgggcgatgatggagcgcattgaagtcagcacgcgtcaattgcgtgagagcagtgaaaacagcctatcagctatcgcccatgccgccaaaaccaatgcggaacaatccgcaatgacgctttcagctgcacaagagacgttgggtgggcagcatcgtgcggttgaatcgacgctgactaatctacagtctttgattgcggctttacacggtcagggcgaacgtctggatggtattgatgaaaagcttggcaaggcgtttgatagttatcagcagcaagtagctacgtcggttgaaacgctcttcgatcatgtcaaaaccatgcaaaaggaactcatgccagcgctggacacaatgcagaatattgtcgaccaagctgaaaacttcgcaccgaaacaagggcgaatgtcatga

SEQ ID NO: 10411 - DNA, 792 bp, Serratia plymuthica S13
atgacggtcagctttcttttcattgtcatggtgctgctcgctttttttgccagccgctacaacgataagaacactgtcccgcgtgatgagtatgaacaggcggtacaaacacgcgataaaaccatcgttgatttgcgcgctgagattgcattgttaaagcaagttgatccgctggaacagtatatgtcgcaggctgctgatgcccggctcaacttactctatcaactacgcaatcatctgaagaagtcgtttcctgaattgccggttgatgtcattcctgaagaaggcacgctgcgctttcagggtgaaggcttgtttaccagcaacagctatacgctaagtgaagataaaagaaggattgttgaagcactggcgaaaacgctcgattccttactgccctgctataccttcagccaaaacgtcggatggaataaaagctgcaatccttcatttgccattattgaagcagtgcagattgaggggcacacggactccaaaggcgaagatgtttataacctgaatctttcgactaaccgagctatcacaacattcaccagcatgcttaccgcagcgccagacctggccgcacatttcaatatgcgccgccaatctgttctttctgtggcgggctacggcaaaatgcgaccggttaaacccaatgatacgccacagaatatggctatgaaccgccgtatcgatcttcgtatcatcatgcatacaccggccaatgcagcggaaattgaagacatccgcaagcgactgatcgagcccctgaagaagagtgcgctatga

SEQ ID NO: 10412 - DNA, 1332 bp, Serratia plymuthica S13
atgaaattgagcgatgtttttcagaagtctgtggccctcttcaagccagtaatagcgatatcaaaaagtttaacggtaaagatccaggccattcatgagcgctggcctgatgtcgtcaaagagattgccgagcgcgatcgtgaaaaggtattacgcaagctccttggttatgtagaactctgggaatgggatgatgtaaagatgtcctttatctgttcaggcgcaccgattgtttttgataaagagttcagaactcaggacgactttgctccgctgcaggagttctatctgcgggaaaccattgttacggattcatcgtcctttatttccgcgatggtttcggcctatatccgcagttacgaaccgggttctgtgcacacaaccaaaattaaaaactgtcttgatatcgccagcgagcacatgagcgataagtggaaagatgttgttgaacaattgcccgaattctttgacgctaaccaggcacatcaagcgctggcagagaaaatggtggcgatggattcaccatggaaagagctcaaacggtttggcatcacacgcccacacgatccgggtttaatgtcacatgctcaccaagcgtatatcacgttgcttacacctcaattgcatgaaagagccgccattgagaggctgtttgcctggttgaagccgaatggtagaaacagcgcattaatgaatggtgctgccgaagccattaacgcgctgttatcacactggctgcataagcaacccgacgaagaactttcacgttacttgaccgaaacgctggtggctttttacgaagatccacgtctaagtcgtggtggcgtatggggtagcgtagatgaagcctgccgaaatctgataataaattggcttacacgcgagaacattctgttctttttggatgtggtatcaaaagtggaagacagccacatgtgggagccacggcgtaaattttggttagggctttataacgaagggaaaattacagcagcttgggttgcttttagtgacatggcatctcgaaaagcaaaagaaataaaaagctctatgagagactcttcgacactaaacttcggtaaccaaactgctggaggttatcgagataatacctcattgctcattctgaaaattggtaaatgcatcgttatcgaaggctcccatagttataaagttcatattttccgaagcgacgataaaaaagcacctacattatttcaggaaaaatacaatgcagggttaattagaaccattcctgacgtggcccgcattgcacacctcggctatagctggactgacaaagtgcgtgaacaaattgagtatctgtcatga

SEQ ID NO: 10413 - DNA, 3129 bp, Serratia plymuthica S13
atgacatttaccttcaatcatgatgaagaagcgattgtcctcaatattgctgaagagaaacagagcttcattcatcgcctgtttaagaggcagcaatctgcgacgatctctgggctaacggttgacgatcgtgccttaactttcgccatcgccgatttaaaagcactagcagaagaatttgcagaacccttgcacatcaatgataacactatagctatgagtcatcagttggccggccgactggactccaagactgcacagatactgggtctacctcctctcgtcgatttgacattgaaaaccgatattgaaggctcactcggaagcgatacctttcgtctacagcatgaatggctacgcaacggtgttcgccaaataccacgccgaaccgggtcaattttagccacatctcaagggccacgccggttgccattgtggatgatggaggctgttgaaattgccgaaaactttacaccaggcggcggagaagcatcggactgggaatcgctagcgcgcttccgtcaggcccttgatcctggcatccagatgggccatgaaatcaatgctgttcgtgtctcgctgaccgactttatgcaaggtttagaagtccacattgccgatcgtttttctatttccaccagctcaaatggtgctgatgatttcgaaatcattcctttttccggtaagaacgtggaagaactggaaaacagcggagaagcggttagcgaggctgcaggtgagctaagtgaacaaacgttacatcgcttccaacagcgtctcagaactcaaggggggctttccgcttatcgtgttggcgaaggcaattatctggtcattgaccgaagcgctcgtcccattcttgatgtcatggtggagaagcaaaagtcttcaccagaagaacgacgcgcttttatcgaaaatccacgacctgcgattaccagtgctgttgaaaaatatctgagacaatcgggcaagctggatgggctcgacgatgtgggtgaagaagaagcaattgaagccgcagcaggtcccgcatttgtcgaaaccgttgaatattccgagcgtgttaaagggattttgcattaccgaaaaggtgtagtttccacgaccatgaccggagaaacggtctggttgcctgaggtaatccctgatgccctgaccaaaattatcgatgcgatggatagccaagcgctggcaagcgtctgcgatcagatgcgtaatgccatagatgcatctcaggatgaagttgaggtcacgtctcatcctgttaaagccacagaagacacattgcgcgcgcttgaaaagcgtttggctgatctaaaagagatagaaggttcaaaggaaacaacagaaattgaagatacgtctgcggttaatgatctacctcccgcaacagtgatcctggataccaaagacaactttgaggagctgttctggcagcctgtccttaaagaacgtcccatatttattgatgagcaacttcccgcgggcgttaaaacagcattgcgaccacatcagttggatagctttagcttgcagctttcatcatggaaatcaggtatgcccggcattttgaacgcggatgagcaaggattaggtaagacacttcaaaccatcgcatttctacgctggttaaaagaaaacaataacgtcagcactgccagcaataaaaatcgcgggccaatacttattgttgcccctacctcattgctagaaaactggaatgccgaggtcaggcaacacactgatagtgaagggcttggtcatttactgcgcctgtatggttcatcgctaagccaatataaagatttcgatgctaaaggtgttgaaacaaaagatggcaataccctactgaattttcggcaattgcataaggcaatcatggaagggaaaggccatcgtttctggatattaacgacctacacaacgcttactaattaccagcactcttttgcaaagctccatttctcggccgtggtctttgatgaaatacaggcggtcaaaaatcccgactcgctacgagctcgcgctgcccgcgccgtcaatgctgactatcgaattggcctgacaggcacaccgattgaaaataccacgaccgacctatgggcagtaatggatcaattagcccccggctctttggatacgttgcgtaatttcaatagcctgtatagcgaacctgatgagcagaatatgcttcagttgtatcagcaagtctttgaacctcgcaatcagctgccacctttagcgttccgccgtttaaaagaagatgctgcgaaagagctgcctgcaaaaacacgctttcttcacccgcgcctgatgcctgaaggacaagctattgcctacgaaacagcccggttaaaactctctcagggtgggcctggcgctgcacttaaaatgctgcagcatatacgcggcgtttcagtacacccagccatggaaatgagcggcgacagtcagagttttatcgatgcatctgctcgtctgaatgcatgttttgagattctgcatcgtatcagagcaaaaggtgagcgtgttttggttttcatcgaacaccgcaagatgcagttccgatttatggaactggttcgccagaaattcggccttgagcatattaatcatattaacggcgatacacccattcagaagcgtcaggccattgtgcgccgattccagcaccatcttgagcaagatggtggctttgacttgctggtactcggccctaaagcggcaggaacaggtttaacattaactgccgcaacacatgtcattcacctttctcgctggtggaaccctgctgttgaagagcaatgtaatgaccgtgtacatcgtatcggtcaacagcacccagtccaaatccatatgccaatggccatacatgctggctatcaggagcactccttcgactgtttactccaggggcttatgtcacgcaaacgaaacctggcccgagcggcgctctggccaatgggtgacagtgccggtgacatctcacaactacaagctgccttaagaaaagataagtcagaagctagcggcgatattttggatgcgagcatccgaatgatgtttgaaagagatgctgaagctgatggttcaaaaatggacgatgggtcatatcgaatcagttaa

SEQ ID NO: 10414 - DNA, 2043 bp, Sulfitobacter mediterraneus KCTC 32188
gtggagttttttgcggatatcggaacgagtatgtcccggttcattttctggggatcatcgttcctgaccaaagaacaggcgcctggtttggtttcgatcgggatcctgatttggctcctgttatccgttttggttgtggggatcagtgctcacagaaaactgatgtccctccgttggctagaaggtcaagtacgggctgctaaagacgaattcgatttcgccactcaagtaaacaagatcagtcaggaagtgaaaaaggtccgggctcggacaggctacacccatatcacagctgcctgggacgaatttcgtgaaaccatgatcgaggataagagcgctggtcagccggtcctgcgaaacagcgtgcgcccctcaagtttcttcaaccttgaggatctgcatttcggcccgggattttcccgctacatgccgggccttttcgtgactgtcggtctcttcctcacttttctcggtctcatctcggcacttcaacaaatcactgggctaagcgacgcctctcccgaagaaatgcgcgcatccctcgacggccttctcggcgcagcctccgccaagttcatcatgtccctgaccggactgctggcctcgatcattttcacgatcgtcctgcgttcgctcacggggcgggtggagcgacgaattcacacgctatgcgcagagttggaaagccgactaagcttcattagcctcgaaggggtcgcgatggagcaactcgagatcgcgcgcggccagaaggacagcttcctagagatcggtaccacactggtggccgagctcggcagttcacttaagaaagagatcccagaatccatttcaagctcgatcagcacggccatggccccgctgctggacaaggtcggtaaggccggcgccgacggggtcggacagatggtgaccgatctctcatcccggttttcggacgatgtggggcgggcgctttccgacgccagcgcgcagctttccgccgcgggggacaagattgcgagcctatccgaccggatggaccggagctccggacagatgggagaggagatggagacctccgtggctaagctcgccagagcggcagaagacctgtcagccggacttgcgtcagctgctcaaacgacggacggaactctgaatgccggcgcagagaagctcctcgggatcatgaacgagacgctggaaggaatccggcgaaacaccgccgagggggcggacgcgcttaaagaggcggctgcggatatgcgcgccgccgccggaacgttccgcgaggaactcgacgccgccgccgccagcggatccgaggcggtccgttcccgaatggaaacggctggcgtggaggtcgaaggggcgatctccgaggcgggtcgcggcatggtggatttagtcacgcgcagcgggcatgatctcctgtccgcctcgggcgaattccgagagagtatccaggccgatcttctggagccgatcaccctggtggtggggcaactcgacgagatggcggaccggctgaaagatgggtctgttcagatcgcaaccgcggctggtcacatcaagtccggcggagacgcgacccgatctgcggccgaaactctcacaaccgcctcgcgggacctgcaagtggcggccgggccggtcagaagcagtgtggagcggatcgaaaccgcaaccactgggcttgcgaagagtacggcgaacgcggcagagaccgttaccaggtcttctagggagaccgcagagaacgcggcgcgagttctggacgctgcaaaagccgcgctgagtgcggagcagaaactgatcgaaacgtccctcacgaagttgggggaggggctagaccatatggagcgacagcgtgaacagatcgacgacatggatgacaaactcggcgcggcgtttaatcagtttgcctctcatgtcaggacgtcgctcgacacgtttgccgagcatgtccgcaagatgaacggcgagctggcgcccgcgctggatacaatgcgtgagatcgttgatcaggcggagaagtttcgtcctgagcagaggcgctga

SEQ ID NO: 10415 - DNA, 1104 bp, Sulfitobacter mediterraneus KCTC 32188
atgcgccggctggagcgaaaccggacgcgcgctgaggaggaggagtccgtctttgtcacgatgacggacatgacgatcagcttccttctgatcatcatgatcctgctcgccttcttcgcgacccagctcaacgatgacgagtcggtccccttgaccgcatatgagagggtccgtcaggagcgcgacgaactgcgtgtcgagaaccaggacctgcgcgcctctgttaaggccctcgaggccgaacttgcccgcgtcacgtccgagttggagacggttaccgccgagcgagaccggctgctcagcgaactcgaccagctgcgagacgaaaatgaggcgctccgggcccgggttgctgaactggaggaggagaacgagcacctgcgttcccggatcgaccagcttgtcgaagagatcgagcgtttgcgggaggagatcaagcgtttgcgggataagatcgaacggctccaggtggtcaacccgctcgaggcctacctctcccaggccattgaccagcgaagggagatcctcgttgaacttcgcgaccggctcctgatcgagtttccggagcttcaggtcgtgatcagcccggaacaggacgcgctccggttccagggggaaggccttttccgcagcggatctccccagctcgagccgcgtcaacgcgcgatcgtggagaccatgggtcgtcttctggatgagatcctcgtctgctttaccctcggggagagggcggagcgagggccggattgtgagagcggaaacgccctgatcgaggcggtccagatcgagggacacacggacagtgatcgaggacgtatcgacaacgttacactgtcaacacgaagagctaacgagacatttttcgcaatacgagaagaagtagcaggcattttggctcatagaaaccttcgcgaccagccggtcatgtccgtctcaggctacggggagatgcgaccgattgaaaccaacgagacgaccgaggggaaggccgcgaaccggcggatcgatcttcggatcatcatgtacgcgccaagtaccgtcgaggaggtggaagaagtcggacgcagacttgacgcgctgcgcgccgcagggggatcggaatga

SEQ ID NO: 10416 - DNA, 2217 bp, Sulfitobacter mediterraneus KCTC 32188
atggatgcgcttgaaaaggcagggcagctctcagccctgtccgttccggagcttcgatacctgcaagcggccgctgaccgggtgcgggaacgctggcccgacgttcaggtggccagaacagagaaggagcgcgaggcgctggcgcaaaagctccgggatcgtgttgaacgtagcgattgggaggaaacccgcctctccttcgtggtagccgcggcttcggccgttttcgacgcggaacggcgggagcgccctgacctagcccggacgcgagacttcctctacgccgagattgacttatcaacatccgagaccttcctgtccgggctgctgcgcgcttatctcgacagctacgtccccaagggtacgcacacgaccgcactcgcgaccgcactcggcacggcggctcggcggatgagcacaaccggacgtctccttctggaggctatcccggaactcatggatcccgtgtcaggtccggaacggctcgcggcccggatgtcgaagatgtctgccccctacacagaactcctcggtctcggggttcgcaacccacatggcggcgggttcatggatttcgcccaccggtccctaacctctattgtccagccacatctgtccgagcgggacctgattgactggtatatcagatggctacgcccaccgggcaaggacgtgggccgcaacacaggagctgagctggcgatcgaagcccttatctatccatggctagaaaaaactccggaggacaaactcagatcctacctcgtggaaaccctgatcgagctctacggggatccgcggatcaaatctggtggggtatggggcggcattgacgagcgctacatggcgatcgtgcaccgctggctgacacgggaagatatgcgctttttcaccggggtcgttgacgctacccagaaagacgcaatgtggccgccgcgccgggatttttggcttaagctttacgatgagggaaagatagatgcggcttgggcggctttgtcctcgcaggcattcgagtatgcacgccaacacctcatgcgtcaggatgcgaagaacgcccacacccgggtcgggtatcagcaggcgcgccagaacacatccctcctaatcatgaagatcgggaacaagattatggtggacgggtgtcacagctaccggacgcacgtgttcgacatcgccgaccccatggcaccgaagctgttcgaggaggggtataattgtgatcagatcatgcgcgcgtcggaccggagggcttcgggcgcctccaaatcacacagcagcattccatcttggagccgctgggtcagggacatgatcaacgctgatgtgccatggtcgcaacaaacgcggccctacacaaaagtgttcaggccgcgtacaccgacacgtagaaccacgccatcacggcacacctcaacgccgcgccacactgatcttcagccttctcggcgcgaaattggcgcttcaacatccggtcaagacattttcagttcaacaggtgccacgcgaccatcttccgctacgggactctccaaccccaccagtcgacccgccgcacctcccgcaagagttgcagccgcacagcgcgttcagcctgagacctcgcagccggtacaaaccgattccggcgatgcggcctccttgaaacaggtccggttccccagtctcacggaccggatgatagcttacggtcctgcggcggccgcagcggttctcgcgtatctggaggcacccgagaaaggtagaacccgaccagccctgtcgccgaaatccagagaagggttggcatgggttcgggccgtaaagggcgaacctccgcttcgtttgagaaacgcgctggagcatctgcttctcaacctgaaaacgagcggtgtggatctggatgacctgttcgtatcattcgctgcgccgcctccgatatcgagtcagcccacccggtccaagaccgttccgaaaaaagaagtcgcggaatctggaggccagaagttcccgcagctcccggataacgccaaggggcgccttgatctccttcgcgcgcatgcggacgcgcttgaagatctcgggatgtggaagcgcacattcgatcagcgcaagcctctcgcggtcgcggtgcggaagctgagagagggaagtccggaccttcgtccgaaagaggtcgcggagcttcaaatgctctatgaggagctgcgccggggcggaaagggcggacaaaaatga

SEQ ID NO: 10417 - DNA, 3099 bp, Sulfitobacter mediterraneus KCTC 32188
atgatccagcttacctatgatcaggactgggtcaccctcgagttcaggtcgcgccagtccctgctggaccggctcctctcacgtgggacggtgccagatttcgatcacgacaagcggctgagcttcgcgttggccgatctacgagccaccgcagaggaggccggcgatcaggtggagatcgggagtgaccgtattcagctctctcacagaacgctgagcgcgctctcctcggagacggcggacgcgcttggtcttccccccttggtggacctcaccctgcgcacagacgtcatgggccagatcggcagccccgatttccgcctgacccatgactgggtccgggcgggccgaaaggagatcgcccatcggaccggtgcgatcctggagaccgcgggcgacggggccgacgggcttcgccgcctcccgagatggatgctggacgcgcttgaggtagcggaccgattccgggccggctctgacctcgaggagcactgggaggcgcttgcccgttttcggcgcgcccttgagcccggggtccggatgtaccgggccgatgcggaagcgcgcctcgggatgaccgatttcctctctgggctcgaagtgaccctgacggaccggttctcgatcagcccgcagggcgaggaccagttcgcgatcatcccatttctcggcgagagggtcgaggccgcggaacgtgacggggagcagatcagcgaggcggaggcggagctgcaggagggttggcttcgcgcttttcaggacaaggccttcgcgcggggcgcccgccccgcttacaagcttggcgggcagagttatctggtcgtggaccccgccgccaccccggtcctcaagattatgacagacatgcaacgagcggatccggtcacccgagccgcgttcgtccgcaatccacgtcagaaggtcaccgaggcgatcacggaccatctgcgctcgaaaggcaaactggacgggctgtcgccggcccaggagcaggagctgattgagcaaacggcagagcccgcttttgtagagacacgggaatactccgaacgggtgatcgggctcaccgtctacgagaaaccggcgctcgagatcactgggtccgggacaacatggctgcctgaggcgttcaccggagcggcagccgaaataatcgaggcgatggccccggaccaggtcgagcggctcatccagcaggtggatgcagcaatcgcgaacggacagccgtcggtgaacgtcgacggcgccgagatccccgcgacccagacaagtcgcgccgcgctcgagcagcgtctcgaagccatccggaagcgggaagagccagaaaataaaccagtgatcggggaggaaatcgatccgcggatcgggcctatcatcctcgacaccgccgacaacctcgaggacctcacctgggctgcaaagatcagcccgcgcacccggctcgcctcggacgcgctcccggaagtggtgaaatcagccctcaaaggacaccagacggagagttttctctggaagctggaggcttgggctgcaggactgccagggatcttgaacgcggacgagcaagggctaggaaaaacccttcaggcgatcgcatttctcgcttggatgaaggagaacatgtcccgctcggaagccgggcgcgccgggccagtcctcgtagtggcgcccacctcgctgctcgtgaactgggaggaagaggtcgacaaacacttgcgggcgcccggactcggcaatgtggtccggctctacggatcagccctcggaggcaagaagcggcctggccagcagggcatcgaaaccgattgcggaagcacgctgctggacctccgcgatctggaggaggcgatcgatgaggggcgtgggcatcgttactgggtgctgaccacctacacgacgctgacgaactaccaacattcgctagcgaaaattcccttctcgaccgccgtattcgacgaaatacaggcggtgaagaaccccgtgagcttgcgcgccaaagcggcgctcgcggtcaatgcggattttcgggtcgggctgaccggcaccccgatcgagaacagcacggttgacctgtgggcgatcatggagcagctcaccccgggccgtttcggctcactgaaggcgttccgggagaagtttggggagcccgcggagggaaacatgcgcgagctctattcgctaatgttcgagccgcagagcggccttcctccggttgcgctgcgtcgtctgaaagaggatgtcgcccgcgaccttccagaaaaatcgcgccgtctgcacccgcggctcatgccggaagcgcaggccgccgcttacgagacggcgcgtggaaagcttgcctccggcacccgaggcggcgcactcaagatgctccatcatatccggtccgtctccgtacaccctgacgcatcgtcaccgacggaagacgaaacctatatcagcatgtctgcccgtctcttggcgacgatggacatcctgcgcggggtgcaggaccggggcgagcgcgcgctggtcttcatcgagcacgtaaagatgcaacaccggttcatcgagctcacgaaacgagagttcggtcttccccgtgtcgatttgatcaacgggagtaccccaatcccgcgtcggcaagagatcgtgaaccggtttcaacggcacctagcccgcgacgagggctttgatcttctggttctcggtcctaaggcggcggggaccgggctgacgctgacggcagccacgcacgtgatccacctgtcacgttggtggaacccggccgtggaggagcagtgcaacgatcgtgtccatcgcatcgggcagtccaagcccgtcaccgtgcacgtcccgatggcgatccaccctgggtaccagcacaactccttcgactgcctcctgcatagtctgatggcccgaaaacggcgccttgccacttccgccctttggccgatgggagacactgaggaagacgcgagccggttgcagcagatgctctcggacggtggtgcaacgcgggttgaggatcccgtcaccgccgcgatggcgatgatgttcaaacgagacgatacaccaatgggccccaagaacttggacgggtcgatctcgtatctttaa

SEQ ID NO: 10418 - DNA, 1956 bp, Aminobacter aminovorans
atgcgcgagctcttgatcacgacggcacgattcgtgttgttctgggcgatacccgtcgcttttgtttttgccaccgagcttctgcttccgcaggtgaactacgggcttgcctacgacaccattgttgccgctgtcggcgggaacatcgaaggtgtcagccagccagaattcgcctatgcattggcgggaatactcttcatcttcgccatcggcttggcggcggccttcctcctgctccacgtcttgccggtcatcctcgcgctttcgcgggcgcaacgtttggtccgcgccgcaggcggcaacagccggaaccgcggagaagtccgcaagacgtttgcttcgggattcgagctgctgcgccagcgcctggcgcgcaggtggttgattggacacgcctggatcgagttcgaggagaccctcttcgacatcgacagcccaaatgccatcggcaacacagtgcgaccgcaggttttcttcaacgccagcgtggcgcgcgagaggctgagtgggctgaagatgatgaatgccgtgccgggctacttcgtcggcgtcggtctgctgctgacattcgttgggttggtccttgccctttacaaggcaggcaccgccgccgccgccggcgacgccaacgtcatggctgccgaaatgggcaagctgctgcagatcgcaacgttcaagttctcgacgtcaatcgccggtcttggcgcgtcgatcatcctgtcgatcgtctttcgctggttcttcgtgcttatcgagagcgcatttgatcgcctcaacgcggcgctcgaacgtggcctgctctatcacgcgccccagtcgatcgcgatggagatgaaccgcaccatgcaggaccagctagtgcagttgaaggacatcacgcagggcgacttctttgcacgaatgggcaatgagattgcaccgcgtctcaacgcggccatcagcgaagcgatggagccggtcaccgaacgcattggtagcgcggtcgacagcctctcgaagactagccagtccggcgttgaaacgatgatgggctcgttcgtcagctcgctacaaaacggcgccggcacggagatgcgagaactcgccgcgacgctaaagcagctacagttggccatggccgagatgcagtccaacgtccgcggcagcggcgatgatttcgccgccaagctttccgaggcggccgacaatctcaatcgaatggtcgaacgctccggtcagagtttcgagacgagctccgcgcagagccgggacgcactggcttcggtcgtcgagacgctgcgccagaccatggaaaaggcgaacgccgacatggacgcagcgcttggccaggctgccagcggagcctcggcgaagctggaggcggccatgggcaacgtgatgggcaagctcgacgagcagatcatcggcgtcggcgcaagtttcgcagcgctgtcaaaatcgatgaccgcgatcgagggcgcgctggccagccagcggctcgcgctggaaggcgcttccgacgaggcgcgcaaaactgcgcacgcctttgccgaaagcgccggcagcgtgcgtacagcaactgcgcccctcaccaaagcgggcgagaagttcgccaatgccaccgagcaactggccacaagcgtcgctaccacgctggagacgctcaacgccgccaaagacgagatcgcgacgcttgccgaaaacctcgatgcgaccaacaccacaaccaacgaattctggagtggtttctcgcacaagttcgacgaagtcgacacggcgctcgcacatgcggtcaaaacgctgtccgaatctgtatcggatcaggaacagcgcttgcgtgaccacgttcgtcaggtcgatcagggattgaccgaggccatccagaagatgtcgccaatgctttcgagcatttcagacagcgcagagtccatcgccgacagtcttgaaaaaactaggacgatggaagccgcggaataa

SEQ ID NO: 10419 - DNA, 909 bp, Aminobacter aminovorans
atgatcgcagccgaaaccgacgagagtgccggtagtcatgccgaggaagacgagaattatttcgtctcgatgaccgacatgatggtcggcatcctctttattttcattatcatgctgatggtgtttgcgctgaacttccaaaagcaaaccgaccagaccgagacgctgaccaaacagcagcgcgaacagattgagaaggcgcaagaactggcgcgacagatcgcagtgctgcaggttcgcattgatgctgccgtgagcgaaattcgcaggaccgacaacgctcgaaacgaattgttggaggaaatccaggaccggcttgaagcggctggtttgaaggtgaccattgaccaaaacacaggggtgctgcgtttggacgaggacgccgtgcgcttcaagtctgacagttccgcactcgatgcgatagctgccacaaatgtcgacaaggtctcgcaggtacttctcgatgttcttcctgcgtacaccgcatgccgtagagagagaggctgtacgctgccttcgagcggctaccggctagagacggttttcatcgagggccacaccgacaagaatggtggacccgaattgaactggccactatcgaccgcgcgcgccgttaacacttatcgaaggatggtcgacgtctcttctgacctgcgtaccttgatgaactcccacaagcgtgaggtcctgtccgtctcgggctacgccgatacccgcccagccacagatcgcgatgacgataaccgccgcatcgaccttcgcttcgtcatggaagccgatcgagaagaacgcctttccgaggttgcgaatctgctgaaccagatgaagggtcaggttgaggcgttgcaagactctgcccgcgcgggattgcctgatccagaaaaaccaaccccgaacggtgctccgtga

SEQ ID NO: 10420 - DNA, 1386 bp, Aminobacter aminovorans
gtgagcgcgcttctcaaggaggccatcaatgagcttgtgatccggcacggcccgtcgacgacaccggtcatcgaacccgccatagtgcggcttgcacgcaaacttcccgagggcaagggtgaccttcgcggtgctaagaactatgaggagattgcggtccggctcaagattgcgctcggtcgtggcgaacgcctcagcaaggcgcaggcgcgcgatggcgcatggtgtctttgggagaccaaggttgcgatcgcggcggaacccgatctgctcgatccgtttctcgcccagctgcgggcgctcaagcacaaagcgtcgtcgcgcgcgttggcattctcctatctgataagcttccatgcaggcggacctggtttcgctgccgtcgctgaggccctgcgagacctagcttccgtgatgggtgaaccgttcgaggagttgcatcgcacgctgcaaatcttcaacgaagatcaagggccacaccttataggtgatgcggccttcgccgaacggaaatctcctgctgtgatcctagaagagcacggcctgcgtctgcagcaggttctcgccggtggctatgttgaaccttgtgcccgccgcgtcctgcaacgcgctgcggaagatcaacgattgccggcactggagcggctggaattcatccagctcgtcgcggtgaaaagcggcactcaaaagctaaactttcccacccacaaggatctcgtggcaaacgcgctgctccgtccgcacagcggacgcgaggtcaacaaaacgatcaaagaccgtacccttgatttccttattgctctggatgggctcggcgatccacggaccaagagcggcaactgggtcaacattcccgaagcgcgcgatgtcgccatcagctggctaaccgagcaagcgttgcgtcagttcctcgacgtcgtcgaggaggtgaaccccaacgtcaattggcgctaccgacgcaaattctgggaggctatgcacgcacgaggcattatctccggcgcctgggtcgtactcgatggcaacggcatcaacgaagcgtaccgccggttcggcaggaacgtacggtttggccgcttctcatcgagcagtagcggtgtgcaggccggccacgccgtgctgctgttgaggataggtgcgggcctctgcgtcgagtggagcttcagcggcaagtgccgcttctgggcggacgcgcagcgctcgggggcccctcagctttacgagcaatattatgatgcaggtgaactcaagaccggcgaacgctatgcgccgatcgaggaaattatccacttgccacatacagggctcaatgcttggcagcataaggcggcgcgccgcattgcgtcgatgaccgccgagcgattcaactcccgggactacatgtga

SEQ ID NO: 10421 - DNA, 3003 bp, Aminobacter aminovorans
gtgaaagcgtccttcacgcatgaggtgcagcccgacggtgtgcttctaaagctgcagcggcggcgactgctcggttggcaggccgtgccggttaaggattggcacttgataggcggcaagcagggcgcggctgcgcgcttcctgcttccgggcgttgaagctggtgaaagcctcgagcaggccggcggcgtcctgctaccccattcgctggtcgcgtcgctgccggctaccgttgccgaggccgccggcctgccgccgctaagcacgctgtctatcacactcgccttcgaacgcattatgacggacgcaaacgcgcgcatccgcgctagctggtacgaccaggacgaaaacaggatccgtatcgaacgaacgggcgctctgacgagatggggcgccctcgacggccgcctctcgaggcccctgtacgagcttgccgaggctatcgatggctacaaccggaccgaggggagggacgccgaggctcggatcgctgcatgggggttcgtccaggcggcgcttaaacgcaccaccaacgacgactttcgcagtggcgacgactatctcaccagcctgaccgtctatcaggctggtgccgtggcgctggatgttgtcgaaacggccggcgggcccgacttctttccggtagtcatgggtcgcgaaaaggcgcctaccctggaagatgacgctgcagcgcccggcgaagatagcgaagcgccgccagcacagcgtgatctcgtctcggacgcgctgctgccgcggcccatgcagcagcgattctcgcgcgagctgttcgctggcgagctaaagagccgcgacgcatatgtgctcgaccgcaacgtctttctggtgctcgatccgtcgctaaagactgcgctcgacgtcattcgtcgcaaacgagccgcgcccaaggcggagcgcatcgcattcctgaagaacccgcgcgccgagatcgcccaggcactcggcgacgagagtggcgagacggctttgtcgttgttggtcgagacatggcagtattccgagcgcgtgttgggcctcggtgtgtgggagccgccagcgataccgtggctgaagaccaagtccggccagtggcttcccgagcgttttccttgccggatcggaaacgaagtagtcgagctcgaccacgcgtcattccagaaacttaagacggaggttgcccgcgccacagccaacaatgagacgcagatcactgtcgagggccagcagttcagcattgccgacgtgcaagccgcttttgtgcagctcggcctcgacccgtcaggcaatggcatagacgagcctccgacgccgggataccaagcggagcctgctcaagccgagcctgacccagtcccgcagccaagcgggagtgtcgacgaccgcctggtcattaggcaaaacatagacggcaaggatttcaccgtctcctattcgccgcgcgctattgccatcgacccaacttttccatcagcgccgcttgtcaccacccagccgaagccgcaccagatcatcggcttcgaatggctcgtcgcctcctatagagccggctggcccggcgtcctactcgcggacgacatggggctgggcaaaaccttccaggcgctagccttcctggcgtgggtacgaaggaaccgccataaggccggactcgaccggggcgctcaaaacaagccggtgcttatcgtcgcgcccacagccctgctgcgcaattggatcgatgaggccgaacggcatctcgggcctggtgcgcttggcgagcgcgtggatgctttcggttcggcgctgcgccatctgaagggtacgaaggacgagcactggacgccggagacggcgatccatgtggacgagctgcggaaggcggactgggtgctgaccacctacgaaacgctggccgataatcatcgtgcctttgcgcgtgtcaccttcagcgtcgctgtcttcgacgaggcgcagaagatcaagtccccgggcgccatcaatacccagtcagcaaagtcgatgaacgcagagttcgtgctcggcctcaccggcacgccaatagagaaccggcttgccgatctgtggtgcattatggatcgggtcgtgcctggctacctcggcgacctccaagagttcgtctcaacctacgaactaggcggcaatgaagagcttcagcagctgaaggcgaagctggacaagcctccggaagaatgcagcgcaccgccggtgctgctgcgacgtatgaagacggagattctcgagggcctacccactcgccagttcaaaaccaagcgcgtcgagatgcctgtcgagcaagcccaagcgtacagcgccgcggtgcaccaggcgcaggccggcggcgcaacgacgggcgatatgctgcgagcaatccacacttttcgcggtgtatcgctgcatcccggcggcgcgcgcaactgcgatcctctcgacaaggcctcggtcgggcgctggtttgcgcagtcagcgcggatgctccatgccgtcgagacgctcgaagggctaaacaggttaagggagaaggccttggtcttcattgaggacctagagatccaagcgctatttgcctcggctatatcaacgcatctcgacctggagcgacagcccgccatcatcaatggtggagtgccgggcgaaaggcggctggagatcgtcgagcgcttccagagctcgcaggcaccgttcgaccttctcgtgctgtcgcccaaagcagcgggcgtaggcctgaccatcaccgcagccaaccacgtcatccatctatcgcgttggtggaacccggcagttgaagaccagtgcaacgaccgatgttaccgcatcggccagcagaagcccgtgacggtgcatgtgccgatcgctgtgcatccgcactttggcgacgcatctttcgacgtgaggctggacgcactcttggagcataaacgccagctgtcgcgccacatgctgatgccgccagtcgctgatggcgatgtccagcagctcttcggccagacggtcaaaagcgcctag

SEQ ID NO: 10422 - DNA, 2091 bp, Shewanella sp. ANA-3
atggcaacagaaagacaaattgaactttcttggcttttaccagatttttctcatctaagttttcatcctcaaactggaacggctttaagcagtttatttgtcgcaataaccttgaccgtaacattacttttcatagcttacctgctctacaaaagcattgatgttgtattaaaaatcaattggttgcagaaagcgttagagcctttagagagaaaggatgttgctcaaaagaaggaggtgctctatcagttagcaaagtcaaagagtaaagggaaaagtaaaggaattggctttttatggatggaatttgatgaaactcttgtcgaagttcgaaagggcgatcaaattgaaattcgcaatactttagatgcaggacattttttcaatacttacactctagctaatagcgtaacagaaaatcgtctaatcgcagcagtgcccggttttcttacagcactaggggtcataggcacgtttatgggcctacaactaggcttggcagatcttaaactcggtgcaggtgttgatgtaaccacaatgcaagatggcgttgctggtgttgtaaatggggctaaaatcgcatttttgacatcagtttggggggttgcattaagtgtattttttaacttctttgagaaattatgtgaacaattcatccgctcaaaaattcgagaattagaggataaagtcgatttcctctttcctagagtccgcccagaagaacaacttcaaataatctctgaaaatagctctgaatcacgtaatgtccttcaaggactggccgaaaaaattggtgaaaagatgcaggaagccatggttacggctacccaaggaatccaatcaagtctcgaaagtagtttgagcaagataatggcccctgcgattaataagctggttgatgagacatctcaaggtaatcaaaaagcactagaaggacttctagaaagttttatggaccgctttggtcaagctggtaacctacagagaagtgcgcttgatgatgtctcaaacaaagtcaatcaatctgtagaagcaatgcagctaacaatgagcaactttgtagaacaattacaaaaatcacaagcggaatcgggtgatagagagaaggctctcattgccgatatttcacatcaagttagtaagttgtcttcccaatcagaagacatccatcagaaactaacatcctatgttgaaaatcaaataggcaagatatcttctcaaatgcaaatcagagaagaggcttcggcaaaacgtgactcagaattagtcaacgtgattggacaacaggtcaatgagctagttaataactccagaaggcagggtgaactgcttaccagttttgtcgaaactcaacttaacaacctaactaagtcatttgacgaacgagataagcggtcaactgaactcgaaactacgcgtaacaataaaattgagaagcaaaccgaagcgattgtaaaaatatctaatgaattaataagcactgtagagaaatccgtttcagagcaacttgctgcagtaaaacatctcgtatcgcaaggagaaacccttcaaaacagtgttaatgcctccgttgaagccgctgctcaagcaactcaagcaatgaaagaatcatcaattgaacttagagtatcagctgatcatatgagagttctgagttcccacgtaaatgacgctggcaataagctatctggagccatcaagtcagctgtagacagcacagctgacttggcgaatcaaaatcaaatttcagcacaacggatagagaatgcccgtgaatcacttatgaaagatgtttcacgttttagtgaactttcagaccaaattaaagcattgattacaagtgcaagcagtacattcactgaattaaaatcaacacaaagagactttatcggcaacttaaaagaggaagttgagagcctaagtcgaaaaatgacagatatgctagaggagtattctcaacaagcaaatggacaaacagcagaacacttaaaaatctggtcccaatcagtgacagattattcaacacaaatgaacagtgcagttaaggcattgtctagtgtcgtggacgaaatgcaagtgaaactggggtag

SEQ ID NO: 10423 - DNA, 732 bp, Shewanella sp. ANA-3
atggatagattatttacgcgaggaagcacaaaagttgatgaagaaaacccatattggatgtccttctctgacttgatgtctgggctattagtgatttttatattagcagccgtagccttaattattgaattaactcagaagtctgaacagattgatgccagtatcgaagagttgaaaaaggcagaggaagcaagaagaaatatcttaattgatatcaaagaggaattagccaaacagaatattcatgttgaaatcgttgaaaacgatacagtacttcgtataccggaaagtacattgtcttttgaatccggcaaagataccttgcctgaaaatacgactgtaaaaaatgaagttcgattgattggcatcgcactacataaagcaataacaacaaatgaaagatggaaatatctcgatacggtattcgttgaaggacataccgatagcaatggcatatggtaccgaggcaaagggaattggggtctttcaacggatagagctgtgtcaatttggaagttgtggcaaacagagattaatgtagctcccaaattaagtgttctaacaaactataatggtcagcttttattttctgtaagtggatatgcagatactcgacgagttgatttacaagagacaacagaagaacaaagagcaagaaacaggcgaatagatataagattcaccgtcaaaaaacctaagattgaagattacgaaaaagcgaagaatgtttaa

SEQ ID NO: 10424 - DNA, 1428 bp, Shewanella sp. ANA-3
atgaaatttttcctaagcgatgaagcttataaaaaaaatataaaaattatggatagcctgacgcttgagcaaaaatctatagctagaaaagcaggtacaggtaatcctctctttgaagctgcgtggaaaaagctacatacacttctgcaacaaaatcgttttaaagacttcaatattgaagatagattcgatattagagctctctccgttgcactaactggagatatgaaactacgccatggaatagatataagtagtgctctgctcatcaaagtttcaaagataattcctcatggcagcaacctattcatagaatctctcctccagtttttccttagcgactttaacttaataaaagacccaaatgctgttggagcttggctatctcaggagcgtcagagaaaagggttaaataaaggtctagaagttaagattttttgtagtgatggccccacctttttcgcacagcaagcgattaagagaaacataaactttgaagcgcaggtacatagttgggggctggacgcatacgcatcaggtgattttataaagcaggcaaaatcaatttattttgttgaacaattacaaaaaatccctgtgaatgaacctcataaattattggaagaggtcagcaagcaagtcattgctgaaggtcgttacgatgcagatgatcttgtaggacatgtcgcgctaagaattttgatagatagagcccctagcaaaaatgtacatgacagttggagggatgctgttattgccatagcaggagatcccagagtaccaagatcacatgcacgctatataaagtggtggagccagcttacctctcagcagataaaaaaagtccaaggatggttatccaaactggatcttaagctctttttagaagctctcgaggactattcgataagttctcgagatgatgccatgatgcgtatgtttccatctcgcaaacactttttagaaggactgcatgaatctggtgctattgttcatacaaaattatatttatcaaaaaaagcattattctacgtaaaacgacactataaagctgaacatataccagaatattctattgttgaagatggtgatatttccgttatctatgcagagctttcaaacggtcacatggtcgagggaagccataactgtcaaatttggttctataaaaagctacatgagtctgctcctgtcttacaatttgataagcagaaaaagacctaccgctcattgactcttggtcttaacgagcaaatgtatcgatatggctgtgaagcatccgaccacttctctcactcgccagctaatttcagctggcaacgacgcgccttagaagccttaaacaaaatgggattaaagatcagagcgtctgatgtattaagtggaactgactataaccaatataaaaggctctacggagtaagttaa

SEQ ID NO: 10425 - DNA, 3447 bp, Shewanella sp. ANA-3
atgaaaaactggatttcatccttatttagcagccgcaatactaagttcaaattttcttatgacatcactaaaaacagcattgatttctattgcccagaaaagcagtttcaagacataaagaaaggcgatgctgatgattttctaacagcacaatacattgctttgcaaatgttggctgaagagggaagcgctgaaagtattccaaacggcttcatagttaaacatcaagtcattgcagcactagatgaagatgtccatcagctattgaacttacccgaaatatggaacggacaagcgaatgtcgatatcagaggtacgacattcgaaggttccttcgacgtaacaatacacgttgatgcaccatcaggacgaatgacctcagcttaccaagtagatgggagtattatttctttcggtaacgctcaattcaccttaaaaaaagtgatgtttgatgtgttctccgcattaaaatttcataaagagtcatcgaaaaatgagtcagagaaccttctgttgttgcacacgtttcagcaagctcagcgcgctggggcgaagttatcgttaaaccacttcaacaagttagatattcacgtccccgataaaatcacagttgaagcagaacttgatagtgttggtaatttaatccttacgccccaaatggggcaaaaagcagatcacgactcgctacaacgtgttttaggccaaattcagtcagagagagggcgaactctcaaagtgggcaatgaaataattctcttcaatgaaaaaacggctaaagccgcaaaagagattatcagtaatagaacaattccaaaatctcaggttaagaactttttagaggctcccggtgcataccttgacgcatctttaatcgacttagatgttggtttttccttacgagtgaaaggtgctactcgtttcaaacacgcatattttggggaaacagacgagtcagggattgattggtttggacagagtcaagcttcctctcagatcttgcctataagctcagtcatcaaggagataaaaactgacgatgaccgattacaacttactaaaattcttaatgatgctaaagcaactggggccactgaggttaaatttgaagggaaaaactacgacattggaagcgacagcgaagtatatgaagtactaaaaaaaatagaacaaaaacttatacagcaagaaaatacggaaaccgatgagggaagagacaatactgaggctcccggacctcaagagagcgatgacagccctatagtcatcgacattgcccttaatgatgaggagttagatagcccgtctaagttagttgaagaagagcttaataacgtactttatagccaaggaattagctgggataactatagaagagaaccatttcctcatcaaataatcggagttaagtggatactcggcttagaggaaatcgcacgaagcaaagaactggttaatggcgccctactagccgacgatatggggttaggcaaaacctttatgtctctagcagccattgaacaatattactgtatatgtgaagagaacggtgatgtatgccgtcctacgctgatcgttgcaccactcagtttgctagaaaactggaaggatgaagtcgcagaaacatttcacaagtcccctttcaaagacattgtcatcttacaatcggacggagagctcaatagctttcgagatggcgggatagagaccaaagcgtcgaatattgatgatgagtcatttaagcctagatactctcttaaattcggtgagcagcatggggctgctcgtttagatttgccctgccgtctagtcataactacctatcaaacacttagggactatcaattctcgctgtctcaaatagattgggggatcgtcgtgtttgatgaggctcaaaacatcaaaaaccctaacgcattgcaaactcgagcagctaaaggtttaaaagctcggttcaagttattagcaacaggtacacctgttgaaaatagtctagctgacttttggtgtctaatggatacagcctgtcccggctttctcgactcctatcaatctttcagacacacctatatatctccaatccttcaagcggctggcgatgaaatagagtcggtcagagcaagtttgggcaggaagttacgtgaaaaagtaggcgccttaatgcttcgtcgcgttaaagaagacaacttagaaaggcttcccaaaaagaatatgtttgtagggctggaacctaccgaatggcagtacgagcctaaactgcattcgattatggattcctatcagcaaaaggtttatgaaggttctattgaatcccaactagaaaatgaagaaagtcatgttcttacaacactaatgcgtatgagagatacttctctccacccacgtttggctgatggtggacgcttagatgcaccaagttcaaaaaatgatttaaaacagatatttgcagaatcagccaaacttaaaaaaatgatcgaggtgttaacagatattcaatcaagacgtgaaaagtgtattatttttgcgataaataaaagactacagcgttttctgagtatcgccttgggcaattactttggactaggtcctttgcatgtaattaacggtgacaccaaggccgtagtaaaaaataagaatacagcgaaccgtaaatcaatgattgctgagtttgaagcgaaagaaggattcaacctcatcattttctcaccggtagcagctggcgttggcttaacagtagttggagccaataacgtagttcactttgagcgccactggaatccagcaaaagaagctcaagcaaccgatcgtgtttatagaatcggtcagacgaaagatgtgaatgtctatgtgcctattctccatcacccaactatcgaatcctttgatgtgaatttacaccgattactatcccaaaaatccatgttgaaagatgccgttgtaactcagggcgaagttatgcccaaccctgctggtgcagacaaacatcaacttacagccgatagtattatcaattcagaagatataccgcgtttgagctggaaacagtttgaagctttttgtgtggaacttctttccaaggaattcaacgctgacagtgcttggcttacgaaagaaggaccagattttggtgcagatggcttgctgattagtggccaagaagccattttattacaagcaaaacataagcagggttcttacaaagggcataatgccgttcaagagatctctaacgctaaagcgatgtatggtaaacatctcggacggcctataggtaaacaaatattcataaccaatgctacgcagttagctaagtcaacgagagaaattgcccaagagttatcagtgataattattgatggcaatgatctatcagacctttgccaatgtcaccgaataagctttgctcaagttcttaaccgcctatccaaacaacgatatgtagttcgttag

SEQ ID NO: 10426 - DNA, 2043 bp, Bordetella petrii
atgactgaaggcctattggcctacttgaaccaggtcgggggctggacaattgcaagcctgcggctgttcgctgcctatatgcctcacgttctaggggcgttagctcttctctccatccttttcttcctgcgaggcctgtggtaccgggctcgcctaggtggcgtgctgaggaaactgcggaaggtggacgccaaagctaaccgcgaagcgattcagcacatcttccccactaaacgacttcgtcacctatggcaagaatacgatcaaaccctacatgctcaatatgaagagcgagacggtcagctccagataggcgtcatacgctccaccattcccgccgagatgtactttaacgaccaatacgtcgttgacagtcacttaagaaccgagttcttcaaacacttgccgggcatcttcacggggcttggcattgtggccaccttcgggggcatcattgacggcctgaagcaattccaagtcagcgaagacaccgctgtggtccgcaatagtcttgaaatcctcatgcagtcggtgggccacgctttccttgtttcagcatgcgccattgcgttggcgatgctctacaccctactggaaaagctccttctcgcgtcactctatagaaaaaccgaagacatctcccaaactatcgacgcgcacttcaaatctggcgctggcgaagaatacctgtccaggttggtggatgcctctgaagcttcggctagccaagcaaagattctgaaggactccttggtgagcgacttgaagcaggtgcttcaagagctcacccaatctcagattgaagccgggatggcactgcacacgcaacaactcgctgccgccaaggaaggtaacaagaccttgggcgaggtaattgcttcaagcattgaccaaagcctgaaaacgcctttggatgaaatcgcctcctctgttaaaagcgcgtctggagaccagagcaaagctgccatcgatatgctcaacgatgtcatggttcacttcagtcaacgactgaacgacctttttggcggacaaattagcggtatcaacgaactgaataaggaaacggcgcaaagtatgcaagacgctgtgaccgcgctcaataccctacttggaaaggtcgaagatagcggaaaacgtgctacggaagaaatggcgttgaagatggcctcctcgattcaggcgatggaggaaaggcaagctagcatcaatgcgcagacacaagactttgttgatcaaattcgcaagctggtcgaaagctcgcaatcagaaacgcaacaaaagcttcaaggtaccctggaatctgtcgggcaacagatgacaaccatcttagagacgctcaatacgtcccaggcccaagtgttcgcccagaatcaggcccgagagcaagcgatggccgaccgtgcctcccacactgtcagccagatgtcgggcagcgttgaggctgctatccaagaaatcagcgccgcatcgaaagccatgactgaaagtgtctccgcgctttcctctgcaacaagcacgtcggtcgagaagatgaacgcaggcgcggaacgcctcgggatagcggcttcgtcgttcgctaacgcaggcgagcgcgtcgccgaggtcataactcaaaccacctcgattggaaataagctgacggaagtgtcgagctcgctttctacgagctcgacctcgctgcatgaggcgcttggcgactacagagtacaacgagaagcccttgcgcatgtcttggctgaggtcagagagatgattgggcttgccggcaaggaagctaatatcactgcagatgctctacaacgcattgaggtttcgacaactaagctcggcttagctcaaaaagcggcagacgagtatttggatggggtcagcctggttctggaacaatcttcggattctttcagggacgccgtggtaaacacgctatcaaaggtgaactacgaattccatgaaaaactgagttctgccgttggcctacttgcgaccgctgttcaagagctcgaaggtagccttggcacgattgcggctcccgataggcgataa

SEQ ID NO: 10427 - DNA, 714 bp, Bordetella petrii
atgattggggcaaaaatcatcgtaaagcgaggggggcgggaagaagcggaaaaacctttctggatttcgttcgctgacctcatgagcgctctggtggttctgttcttagtggtcatgggcgttgccctactgtcggtgacgcaaaccgtcaccgacattcagaccgacgaagagattcacagcaacaatattcaagccatactcgaccgttttgaatctgccgcttcatcctacgaggggattaccatccacagggaccgccatgccatcgactttggtcaacgggcacaattcgcattcggcacatggcgactcaatgctcagcaagagtctgtgctacggcagtttgtcccggaaattctcaccatcgcaaatgatgagttaggaaaaaacattctaaaacgggtggtcatcgagggctataccgataaaacgggctcctacctcacgaacctgaacctcagtctgcagcgaagtcaaaaggtgctgtgctccatgtttgcaacctctgggccaaacttgcttgatgactcccagaaagccgatgtgcgaaacttgttttttgttgggggctactcattcaacgctgcgaaggaaagcgacgacgaaagccgacgcgtcgaaatgcgccttgagtttcggggactgaaggaggagcctcgtcctacggcaatcaatatcgatgacaactttggggagtgtgctctgcgatga

SEQ ID NO: 10428 - DNA, 1677 bp, Bordetella petrii
atgagagagggtggtcttgataaacacttggctacgctacagcagcacgtcaaagccggctcaagcccatacgagccagaagaccttcaagccaaagcggtacgtcgtttttgggaaacgactcgacttgacacgcttaaagaagccagactcgtatccttcggcatgtgtttacccagccatccgaacggtccctgtcttctggaggattccaagcggtttgatgcagcgcttagcagcgacaccggcgttgaccagtgggtcaaaaaacctcaatggtttcgccgctgttaccagggcttagtccgcagctacttcagctatgacgaccgtaaggggaaagtggcgccagatgagggccgcaaaaactggaagaaactgcgtgagtatctgcacgataggtcttcaaatatcatcgacccggaacgaatcaaccccgactgggccatcactgccgttgaaaataaaggcttattttcagagaacccctgtttgccttatgccaagacggcgctatcgggggacatgtcctccattaaccgtatccgagagcagttgggaattacagacgactcctggttcaccaatgagctcgtactctcccaagtccgtcacgcggtggcttcgccgtatgaggaatttaaggtacaagtccccaatctactgacgatgctggcgagtctagctcgacacggaaccaaggtgcgcaatcgaggcttatcgctcatccttgacgcctatgctcagggcagcacccctgccatcttcgagcaactgcgagacgtatccgtagactggtggggaaatccatggcttccttctaccgcggcccagtggggcggtgtatcgccgcaagccagagaaatggtttcggaatggcttcgaggcgaattcattgagacattcttcaccaaacttgcccaggatggcatcggcgaccgtaggcgcgctaacttctggctgcgatacgtaaagtccatgacgaatgtgcaatttgcccttggacctcgcgctctgaattcgcccagtcgagacttcgcagtgttgttggaaaaaatgaagggcttgtacacagagttaaaagactctggcagtgcgaacaacgcattcattatgacgctgggaaatctagtcgctgtcgagtttagtgccacgggacacgctctttatgggtatcagaaaggagtcttgccatttgtctttgactcatccgagccgttgcgcctttctggtagagcggttaacacgctaaaagacagaaaccaaacggttatttggctgctgcacaaagacaatatccacggatggaacagatgggaggacatgtacgaagcgaccctcagggaaagcttcggcattcttccagatgatgccttaccgcgcgcgcctcgcgcgacttcgcccacccgggcagcctccgatacctcccgttcggaacccaattcacgcatctccttacccacagagccttcgccaaattcgctcatctccaaatatggcagttttgccggacacaaactcaaggccctatcgaagtacagaggattcgatatcgcagaccttcgaaccaagggcggcaatatttgggcgtatacgcaaagcaatgaccctgaattaatccagctctttcaatcttgggggttccagtacaaggccggaaagggctggtggaagtaa

SEQ ID NO: 10429 - DNA, 3741 bp, Bordetella petrii
atggtattcaagctctttaagaaaaagaattcctcctcgatagcttggcagcgcaccctctctgcgaacggcgtcgtcgtccatcaatccctgggtgcaatgcgcttggattctgcgctacttgccggctacctggcgcaactcgttgatgatggccttgccctagaatcagagcaggaggtgacgattccttgggatggtatctttacggcgctccaacgcccggactatgaagacttaatcagcgtattagcgctcccttctctgaccaccatgcgtccggtcctgcaaagtcgcaacgccctcacggacgagaatttttccattctgctagcgggctggcaggacgaaagcgggcgcaccgtcgatagcaagctggttggcccgcttttgtcgagcccggggacggatgagctcgtgcgccccgagcattggccgctcctcaaggaggttttcgccttctctaagcgcccgcctgaggctcgccacgacctagagcaccgacaagcctgggggagaattcgagcgctcgcgctcgaagccaatgcgcgcctggatgactttcttcgccgcacggtggtgctcactcctgagcgattggatatcggtcttcgaaaaatcgccatcgcagaggaccaggtcattgaaatcaccccatccttcgaaggggcacccgaaggatggctcgaacgctttgatgcgctgcggagcattcctgaccgctacgatattccaacacctgacggcatcgtccaagttctaattgtccctcaagtcaaaagcgttcttcaggaggtcaagcggttaccgtatcgacgtatcgcagggtcgcgagcccaagccttttcgttgaacccctttgccacccttggggaggacgctaaggcggtcattgacgaagaacaatttgagcaagccagagaagcggcaggcattcaatttgaccggttcacccccgtcatcgagcgagacgcgggtggctacccccggaaaattagcctattaattgaatcggcgaacgcctccggactgagtttctcagaaagcatcgagctcgatgacaccgaacttgctgagtttattgctaggttggaaaccgcatttaataagagttttcaattgctcggctggcgaggcttcgacctagagctgcttggcgaaacgccggactatcttgctgaattaaaagtagctttggcgcaacgccagcaggacaatgctcttgttaggtacgaacaggtacatgacctgagtgcttactcctctcgtatcgaaggtattgggttcgaagagccctactactcccccttcatcgccaagaaagacagtggcgattgggttcccgagaacgtccaggttctcatcgcctcgaacgctaaggggccacagggtgctttggaggggattcctgttaccaaggaagtccttgaaacacttcgtgaggctgtggcgcaagctcaagctgaagggaggccttccgttaaagttggtgggctttccaacgatattcctctcgaccaggctcaggacatcgtcgactccattgacagcgcgctaagggatgtccagcaaggtaaagacccgacctcccgcgaaaaaacttcaaccccgacagcaccgccccgtaaaacactcattcttcgccctaacatcgaaaccgttgactacgaagaaagccggcgagaagccctgctcgccctgccatcggcggcagatatcccaaacgctctcaaccgggaattttcgttactgccgcaccaggagcaagggctggcatggcttcaacatctgcataagtcgcgagtcgagcgtgaagtaagaggagccatcctggccgatgacatggggctcgggaaaacgttccagctgctatcgctgatggcgtggctggttgaacgcgacccaagcgtcgctcctatgctcgttgtggctcccgtatcgctactggaaaactgggcagaagaagccggaaagttcattcgtcctggagtcttgccccttctgaccgcctacggtgatgcgctggccggtctgcgcgtaccgcgagcagacattgaagagcgactcaaaacagaagatgggcttgttcggtttctcaaaccaggctggattggttctgccaaagtggtcttgaccacctatgaaaccctccgtgatttagagttttcatttgctgcggaacattggtccgtgatggtctgtgatgaagcgcaacgcatcaagaatcccgctgccatggtgacgcgggctgcgaaaaagcagaacgtggacttcaaaattgcttgtaccggtacgcccgtcgaaaatagcttggtcgatttgtggtgtctttttgactttgtgcaacctgggctgctcggcgcgctcaatgacttcggtacccgctacagcaagcccatcgaagccaagactgacgaagaacgggctcgtgttgaagagcttaggctccgaattaagccgcaaatcctacgccgaacgaaagccgaagtcgcaaaagatctccctcaaaaaatcatcgtcgaggcgtgtcgtcacctggcgctgtcttctgagcaacgcaagctctacgcctcagccatcgaaagctttaaagcaaggaaggaccctggcgccatctcccctttcaagaacatgctggggctgttgcactacctgaggctaatctgcacggaccctcgtcgacacggattaaccgcgccgaacccagaacctttgaagcaataccgagaaaaatctccaaaactggattggctgctcgagcagctgaaactcattcagaaaaaagacgaaaaagtcatcattttctgcgaatttcgtaatatccagcggttgctgaggcattacatcgaagagcagttcaacatttttccgcccataataaatggtgacacgagcgcgaccgccggtcatgcggatagccgccaacgtcagattaagaaatttcaggaggcggccggatttggggccatcattctgtcgcctgtcgccgtaggctttggcgtgaacatacaagcagcgaatcacgttatccactacacccgcacgtggaaccccgctaaggaggaccaagcaacggaccgagcctaccgcattgggcaaaagaaagacgtctatgtctactacccagtcgttaaggcagatgactttgcaacgttcgacgtcaaactagaccaactcctgacacgcaaacgtgaactcgcgggcgacatgctcaatggctcgggagacgttcgaccgggggacttcaacatggaggacgtagtcccgcccgcggacagggactccttcaacgagcgcatcaccctaagccatacgcttagcatggagcctcgtcactttgaagggctcgtcgccgtcctttgggggaaacaaggctatgcgtgctattgcacacctcagtccagagaccaaggcgtagacgtcgtgggcacacacgccgaaaaaggggtactcattcaagccaaaacgtcgagttccgacggtaagcgactgggctgggacgccgttaaagaagtcgttgctggtgctgccttctatcaacggaagcaccaaaatgttgacttccaaaaggtctgcatcaccaaccaattcttcaacagccaagcgcaagaacaagccgcgttcaacgaggttgtccttatagaccaaacgggtttagccgacttgcttctacaatatcctgcgacgatgctagagcttgaccaattcctatatacagagtggagctcattatcgcattag

SEQ ID NO: 10430 - DNA, 2013 bp, Burkholderia cenocepacia BC7; identical to SEQ ID NO: 7801

SEQ ID NO: 10431 - DNA, 726 bp, Burkholderia cenocepacia BC7
atgtttggtccgaaatcatctaggcggcgcaatggcagggacgaaggggagaagcccttctggatttccttttccgatttgatgacggcacttatggtgctgttcctcgtgtcgatggcagtcgccctgatcgccatcacgcagaagcaaaaggtcattgacgacacgatcgaattgcgcaagaagaccatcgcgcaatgcctgaccgaagtcgaagatgttaccaagcgccctgagttcaagggggtgacggtgcacggcaactcgatcgacttcggcgcagtcgttctgttcgccgatcagcaccactcgttcgagaggtcggccgacgagcgctttattcgcagcttcgtccccgaggtgttgaaggtggctcgcgcaaagagctgcgaaacatggcttaagcgtgttgtagtcgaaggcttcgccagccgtaccggtaactatctctacaatctgaatctaagctacctgcgatctcagcgagtcttgtgcgcgttgctaaacacacaagttcccgacgcgctctccgaagccgatcgaaggcagattcagacgctcttcttggtcggcggctcgtccttcaacactgcatccaacgatggtccggcacgcatgcgacgggtcgaggtcaggttagagttccgcgatttcggatcggcggctgagccgacgccagacattccacttgatccgggcaagtcttgtccgaacgacctgcgatga

SEQ ID NO: 10432 - DNA, 1641 bp, Burkholderia cenocepacia BC7
atgaacgaagcgctggaattgctgcgatcaggcttggcccgctcgttcacgcaagcggcgaagaatcccgacctatggctagacgcgaaatcgatggagcacgcgaaggagcgcgtgattcgcgatcatggcggagcggcgatcaaggtggatagccggaccatttgggcttcgatcgaggacttccgacggcttggccatgccgcgaacttccgcgagctcaaatacgtttgcctaggtgtttccgctatggatgccaagggctggtgcatcctcgctgaggaaagattgcgtgagcaggtaggcaaacaggtcgaggaacaggtggctatccatcgcaagctgcgctgttttcaagcattgcttgcctcttacttctcgtttgcgcttggagcgtccaatcttgacccaaaggcggtgaagggctggacgacacttcggacttggctccaacgtcagcggcagcaattggccattgccttggaccacgttccgccttggttcgaagctctggatcgacattctgaatttctgactgggcggccctgtgacaagttcgtccctgacttgatgcgtggcgatgcgtcctcgctcgaagaagcgatggacagcctaggcatcgatcgcgattcctgggtgatggaggcggccgtctttgcgcagatggaggcagcggagaagcttgacgatgttcgtttcaaggcggcactgcctgatctgctgcgcatcgcaatgggtgaggcgggcgcgaaggtcggcgaacggctgcggattcgcggcatcgcgttactggtttcccgatatgcgcgttgctctgcaacgccagagcaccctgggctgcgcgacgcggcagtcggcgtcattggtaacccttggttgcgcagagcgagttgggatgcgcacgtcgtagacgcggtaaagcagcccgacacgcgtgcgagagagatggttttcgggtggctcaaaggccggctcatccaggatttctttgagttgctcagcgccgaagatactggcgatacgcggcgcctcgtctattggctgcgtttcgcgcccttcgtcgacgatatgtggttcgctcttggccccacggcgcaataccgaagcgattggctattcagggagtttcgtgagcgtgcgaaagggcggctcctagaccttgaaggcgcgtcgggcgacaacaacgcgttcgtgatgaggattggtgctcatgtcgccattgagtttggcgccacaggccacgcgttctatctgcttcgctgggacgccttgccgccagccgtatctagggcgctgacttcgggtaaagcgaaggactatgtggtgctcagccaactgaagccggaactccacgaatggaagcagagtcaccgggatgcgcctgtcgctctcagaagttgggaacagaagtttgacgacgaactcttaccgcgattgggtgtggcgccgaaagagcggccggtatgcgtacctgatctcgaaaagctgttggaagggcgtaatgtcaccgtgacggataacagggccaaggggggcgcgcttcggattgggccagatgacgaactggccggcgtagctcgtcagcttgcagccttgggtatgcagcagccgcggcgcggccgtggttggatcaaggagtga

SEQ ID NO: 10433 - DNA, 1506 bp, Burkholderia cenocepacia BC7
atgatccgattgttcggttcgaggcgagtcggcgagcaagccgaagttcacccccgttcgaagatcaatgtgtcttgggggcgccatggcgtagtaattattccggaccctgctgatgaggcgtggcttgatgaacccagcgtgttcggcgccgactccgaactagtgctattgcttcggcagttagaggaggagggctacatcgaggtgcggccgtccggcgcgtcgatggactgggagtcctattatcgccttgaagcagtggaaggttactccgcttcgcttcatctgttgaagctccccgcaaagcgcggctggcgcccgatgttgtccagccgcggcgggctctcggatgcaactttcgccatcggaatctcgggctggcgcgacccggccggcgcgcagccgagcggcaacgtggagattcagggggcgatcgtctctgccgatggcgagcaatcgctgctctccgagtcggtatggcgagtggtccacgccattgccgagcggcgctctcgttctgcggagggatacagccccgaagacaacaaacgagattgggccagaatcagacggcatgccatcgacgcgaatgctgatcttgccgatttcctcgccaagacaatcgtactcactcccgaacggatcgacatccaaatgcgtaagggcggtaagggcgcacaagacatggtggagatcatgcccggcttcgacggtgctccgagtcgatggctagaagtcttcgatagattcgaagtagtcccggagcgctacgagataccgaacggctccggtctggtgcacgtcttgatgtcggaggacgcgcgcgcggtcctgtcggagattcggcggatgcctgggcgtcgggtggccggcgctcgcgcggaggccttcttgcgcaacccgtttgcgacgcttggcccctcggccgcagtcgcgatcgacccggaccagttcgagcgagcgcgagaggatgcaggcatcgttttcgaacggttttccgcacgcgtcgtcgcggaccaatctggctatccgtgcgacgtcggcttgctcattgagcaggtcttcgagggcaagctggtggcggaggagtccaagttcgagtccgccaccgaactcggatcgttcatcgcaaagatggaacagcgcttcgccactggagcgcagtgctgtcattggaagggattcgacctcgaaatcctgggtgactcgccagatcaagttgagaaactgcgttcggcgttggccaagctcgccttgccgcgcaagatcacggtatccgacatctttgatctctcactgtattccgagcgcatagagggtttcggggtagagaagccctattactcgccctttatcgccaagaaaggcgacggcggttgggtgccggagaacgtcgaccttggtctatggttcaccgactcgaagggcgagacggtggcgataccgctcgatgggcgcaacctggacaagttccgcaaggaggttgagcaggctgagcagtga

SEQ ID NO: 10434 - DNA, 2013 bp, Burkholderia cenocepacia K56-2Valvano; identical to SEQ ID NO: 7801

SEQ ID NO: 10435 - DNA, 726 bp, Burkholderia cenocepacia K56-2Valvano; identical to SEQ ID NO: 10431

SEQ ID NO: 10436 - DNA, 1641 bp, Burkholderia cenocepacia K56-2Valvano; identical to SEQ ID NO: 10432

SEQ ID NO: 10437 - DNA, 3762 bp, Burkholderia cenocepacia K56-2Valvano
atgatccgattgttcggttcgaggcgagtcggcgagcaagccgaagttcacccccgttcgaagatcaatgtgtcttgggggcgccatggcgtagtaattattccggaccctgctgatgaggcgtggcttgatgaacccagcgtgttcggcgccgactccgaactagtgctattgcttcggcagttagaggaggagggctacatcgaggtgcggccgtccggcgcgtcgatggactgggagtcctattatcgccttgaagcagtggaaggttactccgcttcgcttcatctgttgaagctccccgcaaagcgcggctggcgcccgatgttgtccagccgcggcgggctctcggatgcaactttcgccatcggaatctcgggctggcgcgacccggccggcgcgcagccgagcggcaacgtggagattcagggggcgatcgtctctgccgatggcgagcaatcgctgctctccgagtcggtatggcgagtggtccacgccattgccgagcggcgctctcgttctgcggagggatacagccccgaagacaacaaacgagattgggccagaatcagacggcatgccatcgacgcgaatgctgatcttgccgatttcctcgccaagacaatcgtactcactcccgaacggatcgacatccaaatgcgtaagggcggtaagggcgcacaagacatggtggagatcatgcccggcttcgacggtgctccgagtcgatggctagaagtcttcgatagattcgaagtagtcccggagcgctacgagataccgaacggctccggtctggtgcacgtcttgatgtcggaggacgcgcgcgcggtcctgtcggagattcggcggatgcctgggcgtcgggtggccggcgctcgcgcggaggccttcttgcgcaacccgtttgcgacgcttggcccctcggccgcagtcgcgatcgacccggaccagttcgagcgagcgcgagaggatgcaggcatcgttttcgaacggttttccgcacgcgtcgtcgcggaccaatctggctatccgtgcgacgtcggcttgctcattgagcaggtcttcgagggcaagctggtggcggaggagtccaagttcgagtccgccaccgaactcggatcgttcatcgcaaagatggaacagcgcttcgccactggagcgcagtgctgtcattggaagggattcgacctcgaaatcctgggtgactcgccagatcaagttgagaaactgcgttcggcgttggccaagctcgccttgccgcgcaagatcacggtatccgacatctttgatctctcactgtattccgagcgcatagagggtttcggggtagagaagccctattactcgccctttatcgccaagaaaggcgacggcggttgggtgccggagaacgtcgaccttggtctatggttcaccgactcgaagggcgagacggtggcgataccgctcgatgggcgcaacctggacaagttccgcaaggaggttgagcaggctgagcaggaaaagcgagagagcttttcctttcctgggtgtccgagaccggtgccgacgggctgggccaaggaggctctcgaaaccctcggcaaggttaaggaagaagtcaaaggcggcaactacattcccggcaaggacaagtcggctcgcaagatggtcgagcgcaagggcttggtggtcaagcccaatgtagatggacttgattacgaggagcggcgtggagatctgtcagcggataaggcgccacccgcgataccatcgagcctacgccccgatattgagctcaaagaccatcaacgagacggtttagcttggctacaaaatatgtggcgcaattcgccgtcggtatgccgtggcgcactcttggccgacgacatgggtttgggaaagaccgttcagttgttggccttcatggcctcgctgattgagatcgagccccgcatcgatccattcttggtcgtcgcgcccgtttcgttgctggacaattggaaggccgaaatcgagaaatttttcgttgagggagcgatggatgtcctcacgctgtatggcccgaacgtcgcggcaaagcgagcgccgaggtccgcgcttgatgacgggttgattgagtcgggttcgcccaagctcttagcatcggactggctcggttcggcaaacgtggtgctgacgacctatgagacattgcgcgacctggaattctccttagctgcgcagaagtggtcggtcatggtttgcgacgaggcccaaaagatcaagaaccccaacgcgatggtgacgcgggccgccaagaagcagaacgccagactgaagatcgcatgcaccggcacgcccgtcgagaacacgttggctgatctgtggtgcctattcgattttgtgcagcctggcttgctaggttcgttgaaggacttcggcagcaaataccgcaggcccatcgaggtggagaccgacgacgagaaggcgcgcattgaagagctgcgcggccttatcgagccacagaagctgcgtcgcaccaaagccgaggtcgcgaaggacctgcctaagaagatcttgcatgagggctgtcgcaagctgccgctttccgctcgccagcgggcgctctacgcggatgcggtggctcagttcaaatcacgtgggcaagggcagggtagtgggctgcaatcgcctttaggtctgctgcaatacctgcgccgcctttgctctgatccgcggcctcccggtcatattgccaccagcgatgaatccgtcgagaccatcaagaaggcgtcgcccaagatggactggatgctgcggcggctcagggaaatcgaggcgtcgggatctggcgacaaggtcatcgtcttctgcgagttccgggacttacagcgcgtcattcaacgcgccatatctgaggtgttcggattcgtgccagacgtgatcaacggtgatacctcgaccgaatccggggccgcaagtagtcgccaaacccgtataacggcttatcagcaaaatcctggtttcggcgtgatcattctttcccctcttgcagtcggcttcggagtcaacatccaggctgccaatcatgtcattcactacacgcgcacatggaaccccgcgaaggaagaccaagccactgaccgcgcgtatcgaattgggcagcaaaaggatgtgtacgtctactaccccgttgtggttggcggcgacttcgtgactttcgacgagaagctggacgtgttgcttgaacggaagcgcgcgctgtcctatgacatgctgaatggggtcggcgatgtgaccccatctgacttcgctgacatcgaagcgccgggtggtggttcgccatttggcgaagatctctttaatcctgtcgatgtcggttccttgggaccggatgcattcgagtccttttgcgcgttgctgtggagcaagcaaggttactcgcgaacaatcaagacgccgaagacgggggatggcggtgtggacatcgttgcaatcaaaggcaatcgtggcgcgctcatccaatgcaagagctctggtgtcgagggtaaggagatgggctgggaggctgtcaaggatgtcgcggccggttccgtggcctattccgcgcgctacccgggcgtcgagttccaactcattgcagccaccaatcgccggttcaatcaatcggcccgacagcaagcgtcactgctgaacgtgacgttgatcgaagggagtgatctagtcgatttactttcgaagcacccgactaagagaggtgaattcgatcgcttcgcaatggctggctggtcgcagtga

SEQ ID NO: 10438 - DNA, 2013 bp, Burkholderia cenocepacia; identical to SEQ ID NO: 7801

SEQ ID NO: 10439 - DNA, 726 bp, Burkholderia cenocepacia; identical to SEQ ID NO: 10431

SEQ ID NO: 10440 - DNA, 1641 bp, Burkholderia cenocepacia; identical to SEQ ID NO: 10432

SEQ ID NO: 10441 - DNA, 3666 bp, Burkholderia cenocepacia
attattccggaccctgctgatgaggcgtggcttgatgaacccagcgtgttcggcgccgactccgaactagtgctattgcttcggcagttagaggaggagggctacatcgaggtgcggccgtccggcgcgtcgatggactgggagtcctattatcgccttgaagcagtggaaggttactccgcttcgcttcatctgttgaagctccccgcaaagcgcggctggcgcccgatgttgtccagccgcggcgggctctcggatgcaactttcgccatcggaatctcgggctggcgcgacccggccggcgcgcagccgagcggcaacgtggagattcagggggcgatcgtctctgccgatggcgagcaatcgctgctctccgagtcggtatggcgagtggtccacgccattgccgagcggcgctctcgttctgcggagggatacagccccgaagacaacaaacgagattgggccagaatcagacggcatgccatcgacgcgaatgctgatcttgccgatttcctcgccaagacaatcgtactcactcccgaacggatcgacatccaaatgcgtaagggcggtaagggcgcacaagacatggtggagatcatgcccggcttcgacggtgctccgagtcgatggctagaagtcttcgatagattcgaagtagtcccggagcgctacgagataccgaacggctccggtctggtgcacgtcttgatgtcggaggacgcgcgcgcggtcctgtcggagattcggcggatgcctgggcgtcgggtggccggcgctcgcgcggaggccttcttgcgcaacccgtttgcgacgcttggcccctcggccgcagtcgcgatcgacccggaccagttcgagcgagcgcgagaggatgcaggcatcgttttcgaacggttttccgcacgcgtcgtcgcggaccaatctggctatccgtgcgacgtcggcttgctcattgagcaggtcttcgagggcaagctggtggcggaggagtccaagttcgagtccgccaccgaactcggatcgttcatcgcaaagatggaacagcgcttcgccactggagcgcagtgctgtcattggaagggattcgacctcgaaatcctgggtgactcgccagatcaagttgagaaactgcgttcggcgttggccaagctcgccttgccgcgcaagatcacggtatccgacatctttgatctctcactgtattccgagcgcatagagggtttcggggtagagaagccctattactcgccctttatcgccaagaaaggcgacggcggttgggtgccggagaacgtcgaccttggtctatggttcaccgactcgaagggcgagacggtggcgataccgctcgatgggcgcaacctggacaagttccgcaaggaggttgagcaggctgagcaggaaaagcgagagagcttttcctttcctgggtgtccgagaccggtgccgacgggctgggccaaggaggctctcgaaaccctcggcaaggttaaggaagaagtcaaaggcggcaactacattcccggcaaggacaagtcggctcgcaagatggtcgagcgcaagggcttggtggtcaagcccaatgtagatggacttgattacgaggagcggcgtggagatctgtcagcggataaggcgccacccgcgataccatcgagcctacgccccgatattgagctcaaagaccatcaacgagacggtttagcttggctacaaaatatgtggcgcaattcgccgtcggtatgccgtggcgcactcttggccgacgacatgggtttgggaaagaccgttcagttgttggccttcatggcctcgctgattgagatcgagccccgcatcgatccattcttggtcgtcgcgcccgtttcgttgctggacaattggaaggccgaaatcgagaaatttttcgttgagggagcgatggatgtcctcacgctgtatggcccgaacgtcgcggcaaagcgagcgccgaggtccgcgcttgatgacgggttgattgagtcgggttcgcccaagctcttagcatcggactggctcggttcggcaaacgtggtgctgacgacctatgagacattgcgcgacctggaattctccttagctgcgcagaagtggtcggtcatggtttgcgacgaggcccaaaagatcaagaaccccaacgcgatggtgacgcgggccgccaagaagcagaacgccagactgaagatcgcatgcaccggcacgcccgtcgagaacacgttggctgatctgtggtgcctattcgattttgtgcagcctggcttgctaggttcgttgaaggacttcggcagcaaataccgcaggcccatcgaggtggagaccgacgacgagaaggcgcgcattgaagagctgcgcggccttatcgagccacagaagctgcgtcgcaccaaagccgaggtcgcgaaggacctgcctaagaagatcttgcatgagggctgtcgcaagctgccgctttccgctcgccagcgggcgctctacgcggatgcggtggctcagttcaaatcacgtgggcaagggcagggtagtgggctgcaatcgcctttaggtctgctgcaatacctgcgccgcctttgctctgatccgcggcctcccggtcatattgccaccagcgatgaatccgtcgagaccatcaagaaggcgtcgcccaagatggactggatgctgcggcggctcagggaaatcgaggcgtcgggatctggcgacaaggtcatcgtcttctgcgagttccgggacttacagcgcgtcattcaacgcgccatatctgaggtgttcggattcgtgccagacgtgatcaacggtgatacctcgaccgaatccggggccgcaagtagtcgccaaacccgtataacggcttatcagcaaaatcctggtttcggcgtgatcattctttcccctcttgcagtcggcttcggagtcaacatccaggctgccaatcatgtcattcactacacgcgcacatggaaccccgcgaaggaagaccaagccactgaccgcgcgtatcgaattgggcagcaaaaggatgtgtacgtctactaccccgttgtggttggcggcgacttcgtgactttcgacgagaagctggacgtgttgcttgaacggaagcgcgcgctgtcctatgacatgctgaatggggtcggcgatgtgaccccatctgacttcgctgacatcgaagcgccgggtggtggttcgccatttggcgaagatctctttaatcctgtcgatgtcggttccttgggaccggatgcattcgagtccttttgcgcgttgctgtggagcaagcaaggttactcgcgaacaatcaagacgccgaagacgggggatggcggtgtggacatcgttgcaatcaaaggcaatcgtggcgcgctcatccaatgcaagagctctggtgtcgagggtaaggagatgggctgggaggctgtcaaggatgtcgcggccggttccgtggcctattccgcgcgctacccgggcgtcgagttccaactcattgcagccaccaatcgccggttcaatcaatcggcccgacagcaagcgtcactgctgaacgtgacgttgatcgaagggagtgatctagtcgatttactttcgaagcacccgactaagagaggtgaattcgatcgcttcgcaatggctggctggtcgcagtga

SEQ ID NO: 10442 - DNA, 2025 bp, Burkholderia ubonensis
gtgaatttccaggcattcgtggttgcagtacctactccggtgctggtcaccagcgcggtactcgccgcactcgtcatagttttcatcggtgtttttctcgtgccggccgcgagtcactggttccgcctgaggaatgtccagaagcgcatcgcaaagttcgaaaccacaaactatccgtcccagttcaaggcagtgtttgccagtgaccggagactggcgcacctctggaaagagtatgacgaatcattgcatcgccagcgcgaggagcgagaggggcaaatggtcgtccaggccgttcgcgccaccgtacccgccgagctttatttcaaccaccaggtagtagtcgacagccgcctgcgtacggagttcttcaagcatgtcccagggattttcacaggcatcggcattatcggcaccttcagtgggctgattgagggtctccgtgcgtttcaggtaagtgagaacgcagcaaccgtgagaggcagtctcgagtcgcttatgcattcggtcggcgaggcgttcctcgtttcggcatccgcgattgctgctgcgatggttgtcacgtttgttgagaagctcctcctcgcatcgctctaccggcggaccgaggagattgcgcacgcgattgacgcatgcttcgaagccggggcgggcgaggaatacctctcacggctggtcaaggcgtcggaagagtcggcgagccagtcgaaaatcctgaaggacgcgctcgtcaaggaactgggtgaactgctgcgagaactgaccggcgcacagatagccgcaggcagagagcaacagacgctggcagcggaggtggcccgccagaacaacgtcgcgttgggcaacgcgattgccgaaagtatccagcagggtctcaagggaccgctcgaagaaatcgccgccaccgtgaaaagcgccagtggtgaccagagtgagagcgccgtgcgcatgctgcaggatgtgatggcgagcttcagtcagcggctgaatgacctgtttggaggacagatttctggtctcaacgaactcaaccagcagaccgcgcatagcattcaggaggccgtgggcacattgcacacgctggttgcaaatatcgaggcttcgagtcagcgttcgacggacacaatggcacagcggatggcggaggccattgagaagatggaatcgcggcaggaagcgataaacgcccagtcggccgcatttgttgagcagattcgcgagctcgttgcgacttcccagtcggagacaagtcagaagctgcagacgacgctggaaacactcggcacccaggtcagcgagatgctggcgacgctcagcggggcgcagaaggaagtatttgagaacaaccgggcgcgggagagtgccatggccgaacgcgccacgggtgcggtcgcaacgatgtccgagtcggtcgactcggttgtcagggagctcggcgccgcgactacccagatggcccagagtgttgccgccctaacgcaggccacgacatcatcggtggaccgaatgaacgcaggcgccgaggtactcggtacggcatcgcgcaattttgcggcagcaggcgagcgtgtctcgggtgtcatgggccaggcagccagcgtgtcagcaaagctggccgagacgtctggcagcctcacgagtggagctggggcaatccaggaactgttgagagattaccgtgcgcaccgcgacgctatcagtcacctggttactgagttgcgagcaacggtcgacgccgcgcgcaaggaagcgacgctgaccggcgacattctcaatcgtatcgagacttcagcgagccgtcttggaacggcgcagaagcaggccgatgagtatcttgccggtgtaagccgggtgctcggggaggcgcatacctcctttgcgacagaggtcaagcgcacgcttgataaggcaaataccgagttccataccaaactcacttcggcggtcggactgctttcggccgccgtgggtgaacttgagttgaccctcgcgtcaatggggacgctcgcgccggtgaggaagtaa

SEQ ID NO: 10443 - DNA, 711 bp, Burkholderia ubonensis
atgcttggagctcggatagtcgtcaagcgcggtggccgcgacgaggcggaaaagccgttctggatatcatttgcggacctgatgaccgcattgatggtgctctttctcgtcgtcatgggcgtagcgttgcttgctgtgacgaagaatgtgaccgagaaggaaaagcgcgaagagcaacacagaaaggacattgaacttattctggaccgatttcaaagcgccgcgaagcggtataacggtatcaaggtcgaccgcgaccgtcacgttatcgactttggtgaccgcgcacgcttcgcgttcgggaaatccaatctggcacccgagcaggaagaagtgctgcgccagtttgtccccgaaatcctgacgctggcgaatggtgacctcggcaagcgcgtcctgaagcgggtggttgttgaaggctacacggacaggacaggcacgtatctcagcaacctgaacctcagcctgcagcgaagcgaacgggtgttgtgcagcatgttcgcaacagccggagggagcctgctcaacgaggaccagaaggagaacgtgcgaaacctgtttctggtcggcggctactcgttcaacgactctaaagacacggacgaggagagccgccgggtcgagatgcgtctcgagttccttggtctcggtgagcagcgcccaccggtaccggtgcaaacgggcaacttcggcgactgcgcactaagatga

SEQ ID NO: 10444 - DNA, 786 bp, Burkholderia ubonensis
atggtggctgaatggctgaagctcgaattcatcgagacgtttttcaccaagctcgcggaagacgggcttggcgacccgcgccggatgaacttctggaagcggtacgtcaaagccattgaccacattgagttcgcattgggctcgtttgcacgcaactcgagagagccggacttcatcacgctgcgtaggaaaatgacaggtcttacccgcgagctcgatgcgtccggcgcaaacaatgccttcattatgacgatggggaatctggtcgcggtcgagttcagcggtcttggaaatgcgctctacggctacgatgctgggcgttcgataccgttcgacacgacccgcactctcgggctttcggtcggcggaaacaattcgttgaagcagaagggcaggtccatcctttggctcagccaccaggacggtattcacggttgggccaaatgggaagaaatgttcgatgcgacgttgcgcaaggagtttggcattgttccatcgactccggcaccacgtagcaatgatagaacttcgcaaccttcgcagtctttgtcttccggaaagcgtggagttggagactccccatcaaatcggagcaggacgacaaccgaatcctattcgaacgtcgcgctccgacgcttcgctgcgatacatggactggaagtcgacgacaagacatccatgggaggcaacctttgggtccgcggcgctagtagcgacgaaatggtcaatcaggtgctgacgcgctggggcttccgcgctaagccgggcaaaggatggtggagatag

SEQ ID NO: 10445 - DNA, 3762 bp, Burkholderia ubonensis
gtgttcaagctattcaagaaagcaaaagagcgtgacctcgcgtcatggagacgatactggttgtccgccggattagtcctgacccgtcatccgagaccagacggcgagactgttgacggtagtctggtcgaaggctatctcactcaactgaccgatgatggcctcgccgggcaaactgaagacggattcctgctggactgggattcgctgtacgcggcgattgagctgtcggactacgcgccattgcgcgacattcttaaacttccctcattctctgcgacccgtcctgttcttcgaagcagtcattcgttggcggaccgtgactttgctattgcactggatggatggtatgccgatgataggggccaatttcgcggtgtgctcaccggcccggtcatggtggacggaaccacggaggcgctcatgcgccctgcccagtgggagctgttcaaggccgtggttgcgttctcacggcgtggagcagacgaacgtaccgatgtggccaatcgccagggctggggacgaatccgcaagcttgcacttgcagcgggtgcgcgccttgatgatttcctttacaggtcggtggtgctgagcccggagaaacttcatatcgggctaaggcgctcggacagcgtatccgatgaccacgtggttgaaattgagccgggtttcgaaggggctcctccgggctggctcgacacgttcgaccgggcgcgtgagattcgtgaccggtatgacatcgtcaccccagagggtatcgttcaggttctggtcacccccaaagtgcgaacggtgctccgcgaaattaagcggctgcccgggcggcgcgtggccggttcgcgagcccaggcgtttctgctgaacccctatgcggcactaggcgcggacgccatcgacgtcatcgaagagtcgcagtttgagcgggcccgtgaagatgctggtctcgactacgagcgtttcgtgccggtattcgagcgcgacgctgcgggctatccggtgcgggttggtgtactcatcgaaatagcggtagcaagcggtccgacttcctcggaaagccattggctcaacgacgacgagctatccgctttcgtcaaggcactctcaagggcgctggggctcggtcatcaactcctcgcgtggcagggctacgacctcgttgtgcagggggatgccgagcagcatttaaaggacctgacggcggcacttgcgcagcgtcagacgccgccgacgcttgtgtcctacgcccaggtacatgacctgagtggttattcagctcgcatcgagtccatcggtgttgaaaagccttatcactcagcgtatatcgcgaagaagagcgaggaggaggggtggtttcctgacaatgtactgccggtcgtggtctaccaaccgaaagatgggggtgagccggtcgcggttcctaccagcaaaccagcgattgaaaagctcaggaatgacctgcaggtcgctgaggcaaagggcgcaagcgagcttgatgtctcatggctgaaggactcgatttcgctatccgacgcgaaggaaatagttacgacgttcgagaacgtcttttcctcactggattctgataagccattcgacccggagcgtagccaacgcgaacgacgcgaggaacgcgggtcaaagaaacagcttgtattgcgggccaatatccaggcgctcgagtatgaggagatgcgccgcgaggcactgcaggccgtgcccgcgcaaccgaagctccccagtagcatccgtccggagttcgccctgctgccgcaccagcaagcgggcctcgcgtggatgcagcatttgttcagtctgcagaccgactaccaggtgcggggagcaatcctcgcagacgatatggggttgggcaagacgttccagctgcttgcgcttatggcgtggctactggagctggagcccgacatggcccccatgctggttgtcgctcctgtctcactgctcgaaaactgggccgaggaggcgaacaagttttttgaacccgattcgctgccgctcctgacggcccacggcgagggcctcaccgggcttcgggtaccacgcggtcagattgaacagcgtctgcaaaccgaggatggtctcgtcaagtttctgaaaccggattgggttggcgacgccaaggtggtcctgacaacgtatgaaacgctgcgcgaccttgaattctcattcgctgcgcaaaagtggtcgttgatggtgtgtgacgaagcccagcgcatcaagaatcctgccgccatggtgacgcgcgctgccaagaaacagaacgtcgcattcaagattgcctgtacgggaacgccggtcgaaaacacgctggctgacatgtggtgcctgttcgattatgttcaacccggtctgctcggtgccctcaacgatttcggacagcggtacagaaaaccgattgaagccaagaccgacgaggaaaaggcacgcgtcgaagaattgcgggcgcgcatctcgccgcagattctccggcgtctcaagacggaagtggatacaggactgccacccaaaatcgtcgtggaagactgtcggcaactgccgatttcgagtgtccagcgcaatctgtacgccaaagcggtagagagttttgcgaagcgcaacgaaccgaaccatacaacaccgttcaagaatcatctcggactgctgcactacctgaggctgctatgtacggacccacgaccttatggtttgggtgtgttcaagccagaacccttgagcgaatatcgcgcgaagtcacccaagctcgactggcttctcaagcagcttcatgaaattaaagacaagggcgaaaaaaccatcgtcttttgcgaatttcgcgagattcagcgcctcctgcagcactatatcgaggcggagttcggattacgcccagacatcatcaatggagatacgagcgcgtcgtcgagccacgtcgcgagccgccagaagagaatcaagtcattccaggacgcgcccggctttggtgtcttggtgctttcgcccgttgctgttgggtttggcgtcaatatccaggcggcaaaccatgtcatccattactcgcgcacctggaacccggccaaggaagaccaggccactgaccgcgcgtaccgcatcaatcagaagaagccggtctacgtctactatcccgttatttatgcgcccgacttcacgacgttcgacgtcaaactggaccggttgctggtctataaacgtgggctggcagaagatatgctgaacggcgcgggcgatgtggtgcccgcggacttcaacattgtggatatcgtcccagacgcacagagtgccaatattgacgaacgcatcactctcgatatggcgcttcgtatgggctggcaacacttcgaatgtcttgtgggagcgctttggagcaagcgtggctacgtttgctatcgcacgcccggaacaaatgacaacggcgtcgacgttgttgctattgacggtaaccgaggacagcttattcaggctaagacgagcggaacagatggaacaaggttaggatgggaggcagtcaaggaagttgtggccggggaggcgttctaccgccgtaggcatcccggcgtgaccttcgaaaaggtctgtgtgacgaatcagtacttcaaccggcagtcgcatgagaacgcggcattaaacgttgtggaactgttagaccaaaagcatctcgcggacctgcttgagcgacatgtcgtgaccatgcttgaggtggagcggatgttgttcgcagaatggcagacaacagaatcagtagtgtga

SEQ ID NO: 10446 - DNA, 2004 bp, Burkholderia ubonensis
atgaacggaataacaagaacattgggggcacttcatccatcgcttgcaagcctccatggtgtaccgctatacgtgttcctcgttgtcgctctgctgacggtagcatttctggttggctacgcatacaagggaacccaagtctggtggcagatttggtcggcgttgcgggcaattcgcgcgctccgcaaggaccgaggcgctcccgaccccgccgaagtcggtcgtgcgtttcggtgggagccacttaggcacctctggaccgaatatgccgacaccctgcatgagttgcgtgtggcaggctctggcggcgccgccctcactgaagtccgtgcgaccgtgcccgccgagtcgatgtttactcgcgaggtgctggttgatgggcgtctgttcgacgacttcactcgacaccttcccggtgttctgaccgggctgggcatcattgggaccttcgcgggtcttctggatggccttcaacagttcaagccgacccccatcgaagatgcagtaaacggcctgggtccattgctgcttggtgttcaacatgccttcgttgcttcagggacggctattgcttgcgcgatgctggtggttttcattagtcgccttgtgttggcatgcctttatcgcctggttgagcacctcactcatgccatcgacagcctctactcgacgggcgcgggcgaggagtacctggcccggttggtcaagtcgtcggagcaaaatgctaccagcaccgctcaattgaaggacgctcttgtggaggacctccacaagatgatgaccaacttggttgaccgccagattgcggcccaggaggcgtcgtccttggcgctcggtaagcacattggagagtccatctcctcggccattgcagagccaatgaagcgcgtcggagaggctatggaggttacggcccgcggcaatggcgagcaggtcaactcgatgcttgagaccctcctcaccgggttcatggccaagctggaagataccttcggggggcaaatgcgcggcatcaacgaacagatgcagcggtcgatggattcgatgtcggctgttcagtcgtcgctccaggcactccttgccgacatcaagcagactaacgagcaggccgcgaatcagatgagcggcacactcgaggacgccatgaggaaggctgcggacaaccagcaactcctcacggaccaaatgcgggagttcgtccaggacttccgacggctagtgaccgaggagcagaacaagtccaaacaggccatggacgaggctgtgatgaaggttctcggcgaagtggcggtcgccatggataggctagaaggtacgcgcaaggcggcagctgcggaggaggccggaagaaatgaccgactggctaaccagaccaatcagttggttggcggcttgacgacacaggtggagaccctgctgggcgcggtttcggagcaggtcacgaagactcaacaaaatgtcgacgcacttggagccgtatcgctacgggcaatcgatggcatgaatcaaggggcgttgactatgggctcagcggcgcagcgcttcgagaccgcaggtggcgcggtgtcggccgtgttcgagcgttcgaccaaagtcgcagacacgctgtcttccgctgctgcttccttgcaggcggcatcgaccgcggtacaacgtgggttcgagcagtacgattcgaccaggaagaccgtcgacactcaggtagctgccctgatggggctcatcgagacggtcaagagggaggctggcgtgtcccaggagctcgtttccagcatcaaggcgagcgccgaagcgatgcggaagtcggagcaggaagcccgcctgcacttggaccaagtcaacgcggcgttggtgaaggcattttccgactttggtagttccttggtcagccaagtgaagtccacgattgctgagaccgaccgccatcttgcgcagggcacagggcatcttaatggggtcgtgcaggaacttgcgaatgccgtacagcggatgaagagggcctga

SEQ ID NO: 10447 - DNA, 705 bp, Burkholderia ubonensis
atgttcgctcgaatcttcctcaagcgagggagcaaacatgaaggggagagtccattctggatttccttctcggacctcatgtccgcactgatggtacttttcctcgtggtgatggctgtgacgctggtcgcagtaacacagagcattgatgcagcgacacgtgcgaccatcgagcgagctgccgctatcaacaaagtcatggcaatgattgccaatgacccgaagagccgtggcgtgggcgttgaccaacagaactaccgtatcgacctgggcaaagaggttcgctttgatagcggaagttacaccataagcgttccagccggtcagttcttgcgtagctacattccagtcttgctgaaggcgaaagacacgcccgaaggcaaacgctggatgcgaagtgtcgtggttgagggcttcacggacgaggacgggacatacctctataacctgcagttgagcctagaccgaagtcgcagcgtggtctgcgctctgtttcagagtacttcatctggtgaggcactgacttcggagcaactcagaaaggttcaggaactgttcctggttggaggctactccttcaactccattaagaaagacaagggagagagccggcgcgttgaattcaaggtggatttttgggggctggacgaaaagcagccagaggctagcgacgtgctcaaaggcaaggagttcggaaagtgctag

SEQ ID NO: 10448 - DNA, 1731 bp, Burkholderia ubonensis
gtgctagccgccgccgcactgcaacagctcaatcgggagctcgtcgctgccatcgagtcgatggggttgctttccggtgagtttggcaaacctgagctcgttgagaagccaacccgcgaagcggaacgcatcttccaagattttgcagcggcgaagcccaggaaggaagatgcgtacgctgcagcgctgagctttctcagagggaaggagctcgactcatggcaacgcgacctggtggcctctgccattggcgagcctatccgcgagcaggatggcgcgatggtgcttgggggcaggcggttcccggcgcttctgagcctgtacgaatccgaggccaagcgaggagacctttggcggcttacttggcacggcctgctgtactcgtacttcaatttcgacccgaatcttgcgaaagatgatgcgactcggtccggctgggaggcccttcggtcattcctcgagaggacttggccgctgattgacaaacaggctggaaaaagccaggtcccggattgggtcaacgtccttcgcaaggaatcagaggtactttcagcgaagcccgtcgacaagtattcgggcttatatcttcgaggcgaaaccgggccaaccgaccggctcgctgaggatttgggtatcccgccgtcgagttggttctggcacgccctggttcttggggtggtgcagcgcgcgacggctgagagcgatgcggagttcagaagactcattccccaactactcaagctaatccaaggtaagcctggctttcgcgatgaggcgctggaagtccttctcattcggtatcacgcctgcaagggtgccccgcaagacgaacggctgcgggactacgtgtgtcaggccacggtatggaagaacccgaagctgaaagccgcagggatagccacagcctggaacagagtccctgacccggtatggaagatggtcctcagttgggtaaatgagcgaaatctgaaggacttcttcgacatattggctgccagaaacaacgcggacgaaggtcgacttgctttctggtcaaagtatctcaagcaaatcacgtggacgaggttggtgtttggtgccgacacgatggcactcaagcgtagcaaccctgggattcgggacctgatagctcgagaggagggcgcatacgcgcagctaacgagcaaacctgaggtggatgcctttatgatgcagattggctcctatctcattatcgaattcagcaagaagccgaatgcctgctatgtctacgaggccgaccagcttccgttcgagccatatgaccgccactacgagggaggtaccgctgacctggccgccggctaccgccaagaagttggttgcgctcttcgaatcgtgcatcgagaaggctggggtgaccgagctgaggtcgaacttcgtcagttgggaattcggcctgaccgctctgaggcgcatagggtcgcgacagctggggctgctaccacttcaacggcaggaaatcgtattacgagttccggaatagcatcgggacgggcgaccgcaaaattcgcaggcccagatatggcagcgctgcgggcactggtcgctcggttccgtggtgcatcaatagatgacaggcggagcaacgcaagcggcggcaggctttgggtcgaggacccacaacagagggcgacactcggctcggagctaaaggcgctgggcttcaagtgggccaacagcaggcaggcctggtattttccggagagctga

SEQ ID NO: 10449 - DNA, 3867 bp, Burkholderia ubonensis
atggggctgttcgacttctttaagcgggtggccgcaggcaaggccgataagccgactctgatgacctcctggacacaggagggggtgcgtattgaattcgcacgggaattggccgagtctacggccgacggcttactcgatgccatacacgaagccggtccagatgactctgtcttgggggcatatctggtgcagcttgcagcagaagaccgctgtcggttagaccgtaatggcgcactcattccatgggctgacctctatgacctgcagggttctgcagaacacgtcggcgcacttaagctactaggccttcctccgcaggggccattgcggccagtgcttgacagctcaggaacgctgtccggtcaagatttcgaccttacggtgacaggttggaccgatggcaccaagcaagttcacctggaacgcttggatggtgcggtggcgacggttggtggcgaatcgcagatgctgtcggccgctgcatgggctacggcggcagaggtatccgcatttcgtaatcgcgatgatagggagaggacgcaacatgcacaggagctagcctgggggcgaattcgccgaattgctgaccgggccggagccctctatgcgagcccctacctcgagacgacccttgttctgacacccgatacgctgcggctccctctttcaaagcacgacacaccattcgggcgggtactgaccgtttctccaacttttgagggggcgcccgacggttggctgactgccttcgacgggttcaactcggttcagccccattacgacctcacgcggggctcggggcgcatacgagtcgtcatctccgagccagttcggaaggtgctcaacgttatcaaacgtgagatgcctaaccgccgtgtagccggggcgaaggctgagaagtttgtccataatccgttcgcattccttggtgacgccgcacacgaagtactgaagacggatgaattcgaggcagaccgtgcggaggccggcgcggtggcggcagtattcaacattgtcgctaggaccgagcgcggacggctaaatgcggtcgaactcgtggtcacggagcattttggggacggttcggctagaactgattgcaaagcgtgcaagactgttgacgaactggatgcgttcctcctggcgctcaaggaagcgctggagcaggacctggaacggtttccctgggacgagtacgacctgaccctcgatgcagaatcgaccgtgcagcttgagcagggacttcagttggctcacctctggcgtacacagccagccgagcgaatcagcttcgacgacgtctatgagttagacggctatagtggacgtgtcgaggggattggcgcagttaagcccatctacgttcccgttttccagaaggagaagaaggacgaaggcgatagcggctggctgccatcggacttgacgccaatggtcaaggtgaccctgcaagggcacgaaggccaggtgctggtgcctctcacgaaggagtgggtgcgggacttcgacaagcaggtgcaggaggccgaggaaaaggggcttccagacgtcaaaaattccagtctgccgactccgattgccaccgcacacgcgcggacgctcgctgatagtttcaagagtatggtcgaagcccaagagagagttgaagaagaacatacctctcaggcgaagaaggagatgaagacccgtcaaacgctcttggttaagaccaatttccatgacgttgactatttcgaggagcgcaggacatcgctggcgctgccggacgactggcaagctcagttgcccaagtgtctgcgacctggcattgagctcaagaagcaccagcactacggcgtggcttggtttcagcacctggtttcgaaggcccccaccgagtgccgtggagcattgttggcggacgacatggggttggggaagacacttcagctgctgtcagtactcgcttggtactacgagggcaatcccaatgccgctccctcggtcatcttcgcgcccaagagccttctcgaaaactgggccaacgaatccaagaaatttttcaacgactccttcccggaagtcttggttctttacggagatgaactgaaggaacgcaagcaaccgcctagcctcattgacagccagctccgggacaagggcattgaagacctgttgaagccgagctgggtcggaacggcgaaggtcatcatcaccacgtatgaggtactcacctcatacgagttctcgttggccaagcaaccttttgcgtttctcatgtgcgacgaggcacagcgcatcaagaccccagggacgttggtcacgctcgcagcaaaaaagctgaaggccgatttccgcatcgcgtgtacgggtacaccggtcgagaattctctggccgacctgtggtgtctgtttgacctggttcagccgggcttgctaggtgctctggaggactttggcaaaacgtatcggcgcccgattgaatgtgagaccgaggaacagaaggaagcccttaagcgtctacagactgccatcgcaccccagacactgcgtcgcacgaaggctagtattgcggctgacctgccgaagaagtactttgcgctgaagaaggtcgagcagaccgggttggaatacaaggctgcacttgacaccgaagagcgtctggaaattgctctctcagagcatcagcgcatcctctacaagggtggcttgaagaagctgcaggacgccgcgaaggagtcaaacgggcgcaagcgtgcgcagttgtcgtttggtgcgttgcatcttatgaaggctgtttgcgctgagccctactgtcttcccggtactaagttcctcatcgacaagtctggacgagatgcgcatcttgccaactcgccaaaacttggttggcttcttgaacatctcgctgaggtcaaagcggcaggtgaaaaggccattgtgttcacggagcttcgcgaggctcaggcagcgctgtactacttcctcaaagagactttcggtatccgcccgtacatcatcaacggcgattctcagggccgtcagggatacatagacaagttttcgtcaaagccgggattcgacgtcatcatcctatctacccttgccgccggcgctggattgaacgttaccgcggccaaccacgttttccacttcacccgtgcctggaacccttccaaggaggctcaagcgaccgaccgggcgtttcgcattgggcaggaacgggatgtcttcgtgtattgcccgaccatagttgccaacgacttcaacacctttgaggtcagattggacgagcttctcaagcgcaaagcaggcctcgcgggagcagccctcgatgacggagggttgacggctatgctgaatggcgccggtaacgatgcaagctttaaggagctcgtcgaggagggtggcgctgccgaggccatcccgaagaggtatctcacgatggatgatgtcgaccgaatggatggcgaggcgtttgaggtcttctgctgtctgttgtggaacaagcaaggattccaggccaccgtgacgcccaagaggggtggggatggaggaatcgacgtggttgctctgaagggccgggaaggagagctgctccagtgcaagagctcgaaatcggatgaggttggatgggacgccataaaggaggtaaccgctggcgctgctcgctatcaagcgcgcttcaggggcaccaagttccgtagggtcgcagtgacaaaccaagcctttacccgcgccgcggtgactcaggccgaggcgaaccaggtctcgcttgtgactaggtcgcgtctcgaagagcttataggtgctcacccggtttccaatcatgagtttgatgaagttttgcaggacctcactcagttctcggctgacgtggtctag

SEQ ID NO: 10450 - DNA, 2004 bp, Burkholderia ubonensis
atgaacggaataacaagaacattgggggcacttcatccatcgcttgcaagcctccatggtgtaccgctatacgtgttcctcgttgtcgctctgctgacggtagcatttctggttggctacgcatacaagggaacccaagtctggtggcagatttggtcggcgttgcgggcaattcgcgcgctccgcaaggaccgaggcgctcccgaccccgccgaagtcggtcgtgcgtttcggtgggagccacttaggcacctctggaccgaatatgccgacaccctgcatgagttgcgtgtggcaggctctggcggcgccgccctcactgaagtccgtgcgaccgtgcccgccgagtcgatgtttactcgcgaggtgctggttgatgggcgtctgttcgacgacttcactcgacaccttcccggtgttctgaccgggctgggcatcattgggaccttcgcgggtcttctggatggccttcaacagttcaagccgacccccatcgaagatgcagtaaacggcctgggtccattgctgcttggtgttcaacatgccttcgttgcttcagggacggctattgcttgcgcgatgctggtggttttcattagtcgccttgtgttggcatgcctttatcgcctggttgagcacctcactcatgccatcgacagcctctactcgacgggcgcgggcgaggagtacctggcccggttggtcaagtcgtcggagcaaaatgctaccagcaccgctcaattgaaggacgctcttgtggaggacctccacaagatgatgaccaacttggttgaccgccagattgcggcccaggaggcgtcgtccttggcgctcggcaagcacattggagagtccatctcctcggccattgcagagccaatgaagcgcgtcggagaggctatggaggttacggcccgcggcaatggcgagcaggtcaactcgatgcttgagaccctcctcaccgggttcatggccaagctggaagataccttcggggggcaaatgcgcggcatcaacgaacagatgcagcggtcgatggattcgatgtcggctgttcagtcgtcgctccaggcactccttgccgacatcaagcagactaacgagcaggccgcgaatcagatgagcggcacactcgaggacgccatgaggaaggctgcggacaaccagcaactcctcacggaccaaatgcgggagttcgtccaggacttccgacggctagtgaccgaggagcagaacaagtccaaacaggccatggacgaggctgtgatgaaggttctcggcgaagtggcggtcgccatggataggctagaaggtacgcgcaaggcggcagctgcggaggaggccggaagaaatgaccgactggctaaccagaccaatcagttggttggcggcttgacgacacaggtggagaccctgctgggcgcggtttcggagcaggtcacgaagactcaacaaaatgtcgacgcacttggagccgtatcgctacgggcaatcgatggcatgaatcaaggggcgttgactatgggctcagcggcgcagcgcttcgagaccgcaggtggcgcggtgtcggccgtgttcgagcgttcgaccaaagtcgcagacacgctgtcttccgctgctgcttccttgcaggcggcatcgaccgcggtacaacgtgggttcgagcagtacgattcgaccaggaagaccgtcgacactcaggtagctgccctgatggggctcatcgagacggtcaagagggaggctggcgtgtcccaggagctcgtttccagcatcaaggcgagcgccgaagcgatgcggaagtcggagcaggaagcccgcctgcacttggaccaagtcaacgcggcgttggtgaaggcattttccgactttggtagttccttggtcagccaagtgaagtccacgattgctgagaccgaccgccatcttgcgcagggcacagggcatcttaatggggtcgtgcaggaacttgcgaatgccgtacagcggatgaagagggcctga

SEQ ID NO: 10451 - DNA, 705 bp, Burkholderia ubonensis; identical to SEQ ID NO: 10447

SEQ ID NO: 10452 - DNA, 1731 bp, Burkholderia ubonensis
gtgctagccgccgccgcactgcaacagctcaatcgggagctcgtcgctgccatcgagtcgatggggttgctttccggtgagtttggcaaacctgagctcgttgagaagccaacccgcgaagcggaacgcatcttccaagattttgcagcggcgaagcccaggaaggaagatgcgtacgctgcagcgctgagctttctcagagggaaggagctcgactcatggcaacgcgacctggtggcctctgccattggcgagcctatccgcgagcaggatggcgcgatggtgcttgggggcaggcggttcccggcgcttctgagcctgtacgaatccgaggccaagcgaggagacctttggcggcttacttggcacggcctgctgtactcgtacttcaatttcgacccgaatcttgcgaaagatgatgcgactcggtccggctgggaggcccttcggtcattcctcgagaggacttggccgctgattgacaaacaggctggaaaaagccaggtcccggattgggtcaacgtccttcgcaaggaatcagaggtactttcagcgaagcccgtcgacaagtattcgcacttatatcttcgaggcgaaaccgggccaaccgaccggctcgctgaggatttgggtatcccgccgtcgagttggttctggcacgccctggttcttggggtggtgcagcgcgcgacggctgagagcgatgcggagttcagaagactcattccccaactactcaagctaatccaaggtaagcctggctttcgcgatgaggcgctggaagtccttctcattcggtatcacgcctgcaagggtgccccgcaagacgaacggctgcgggactacgtgtgtcaggccacggtatggaagaacccgaagctgaaagccgcagggatagccacagcctggaacagagtccctgacccggtatggaagatggtcctcagttgggtaaatgagcgaaatctgaaggacttcttcgacatattggctgccagaaacaacgcggacgaaggtcgacttgctttctggtcaaagtatctcaagcaaatcacgtggacgaggttggtgtttggtgccgacacgatggcactcaagcgtagcaaccctgggattcgggacctgatagctcgagaggagggcgcatacgcgcagctaacgagcaaacctgaggtggatgcctttatgatgcagattggctcctatctcattatcgaattcagcaagaagccgaatgcctgctatgtctacgaggccgaccagcttccgttcgagccatatgaccgccactacgagggaggtaccgctgacctggccgccggctaccgccaagaagttggttgcgctcttcgaatcgtgcatcgagaaggctggggtgaccgagctgaggtcgaacttcgtcagttgggaattcggcctgaccgctctgaggcgcatagggtcgcgacagctggggctgctaccacttcaacggcaggaaatcgtattacgagttccggaatagcatcgggacgggcgaccgcaaaattcgcaggcccagatatggcagcgctgcgggcactggtcgctcggttccgtggtgcatcaatagatgacaggcggagcaacgcaagcggcggcaggctttgggtcgaggacccacaacagagggcgacactcggctcggagctaaaggcgctgggcttcaagtgggccaacagcaggcaggcctggtattttccggagagctga

SEQ ID NO: 10453 - DNA, 3867 bp, Burkholderia ubonensis
atggggctgttcgacttctttaagcgggtggccgcaggcaaggccgataagccgactctgatgacctcctggacacaggagggggtgcgtattgaattcgcacgggaattggccgagtctacggccgacggcttactcgatgccatacacgaagccggtccagatgactctgtcttgggggcatatctggtgcagcttgcagcagaagaccgctgtcggttagaccgtaatggcgcactcattccatgggctgacctctatgacctgcagggttctgcagaacacgtcggcgcacttaagctactaggccttcctccgcaggggccattgcggccagtgcttgacagctcaggaacgctgtccggtcaagatttcgaccttacggtgacaggttggaccgatggcaccaagcaagttcacctggaacgcttggatggtgcggtggcgacggttggtggcgaatcgcagatgctgtcggccgctgcatgggctacggcggcagaggtatccgcatttcgtaatcgcgatgatagggagaggacgcaacatgcacaggagctagcctgggggcgaattcgccgaattgctgaccgggccggagccctctatgcgagcccctacctcgagacgacccttgttctgacacccgatacgctgcggctccctctttcaaagcacgacacaccattcgggcgggtactgaccgtttctccaacttttgagggggcgcccgacggttggctgactgccttcgacgggttcaactcggttcagccccattacgacctcacgcggggctcggggcgcatacgagtcgtcatctccgagccagttcggaaggtgctcaacgttatcaaacgtgagatgcctaaccgccgtgtagccggggcgaaggctgagaagtttgtccataatccgttcgcattccttggtgacgccgcacacgaagtactgaagacggatgaattcgaggcagaccgtgcggaggccggcgcggtggcggcagtattcaacattgtcgctaggaccgagcgcggacggctaaatgcggtcgaactcgtggtcacggagcattttggggacggttcggctagaactgattgcaaagcgtgcaagactgttgacgaactggatgcgttcctcctggcgctcaaggaagcgctggagcaggacctggaacggtttccctgggacgagtacgacctgaccctcgatgcagaatcgaccgtgcagcttgagcagggacttcagttggctcacctctggcgtacacagccagccgagcgaatcagcttcgacgacgtctatgagttagacggctatagtggacgtgtcgaggggattggcgcagttaagcccatctacgttcccgttttccagaaggagaagaaggacgaaggcgatagcggctggctgccatcggacttgacgccaatggtcaaggtgaccctgcaagggcacgaaggccaggtgctggtgcctctcacgaaggagtgggtgcgggacttcgacaagcaggtgcaggaggccgaggaaaaggggcttccagacgtcaaaaattccagtctgccgactccgattgccaccgcacacgcgcggacgctcgctgatagtttcaagagtatggtcgaagcccaagagagagttgaagaagaacatacctctcaggcgaagaaggagatgaagacccgtcaaacgctcttggttaagaccaatttccatgacgttgactatttcgaggagcgcaggacatcgctggcgctgccggacgactggcaagctcagttgcccaagtgtctgcgacctggcattgagctcaagaagcaccagcactacggcgtggcttggtttcagcacctggtttcgaaggcccccaccgagtgccgtggagcattgttggcggacgacatggggttggggaagacacttcagctgctgtcagtactcgcttggtactacgagggcaatcccaatgccgctccctcggtcatcttcgcgcccaagagccttctcgaaaactgggccaacgaatccaagaaatttttcaacgactccttcccggaagtcttggttctttacggagatgaactgaaggaacgcaagcaaccgcctagcctcattgacagccagctccgggacaagggcattgaagacctgttgaagccgagctgggtcggaacggcgaaggtcatcatcaccacgtatgaggtactcacctcatacgagttctcgttggccaagcaaccttttgcgtttctcatttgcgacgaggcacagcgcatcaagaccccagggacgttggtcacgctcgcagcaaaaaagctgaaggccgatttccgcatcgcgtgtacgggtacaccggtcgagaattctctggccgacctgtggtgtctgtttgacctggttcagccgggcttgctaggtgctctggaggactttggcaaaacgtatcggcgcccgattgaatgtgagaccgaggaacagaaggaagcccttaagcgtctacagactgccatcgcaccccagacactgcgtcgcacgaaggctagtattgcggctgacctgccgaagaagtactttgcgctgaagaaggtcgagcagaccgggttggaatacaaggctgcacttgacaccgaagagcgtctggaaattgctctctcagagcatcagcgcatcctctacaagggtggcttgaagaagctgcaggacgccgcgaaggagtcaaacgggcgcaagcgtgcgcagttgtcgtttggtgcgttgcatcttatgaaggctgtttgcgctgagccctactgtcttcccggtactaagttcctcatcgacaagtctggacgagatgcgcatcttgccaactcgccaaaacttggttggcttcttgaacatctcgctgaggtcaaagcggcaggtgaaaaggccattgtgttcacggagcttcgcgaggctcaggcagcgctgtactacttcctcaaagagactttcggtatccgcccgtacatcatcaacggcgattctcagggccgtcagggatacatagacaagttttcgtcaaagccgggattcgacgtcatcatcctatctacccttgccgccggcgctggattgaacgttaccgcggccaaccacgttttccacttcacccgtgcctggaacccttccaaggaggctcaagcgaccgaccgggcgtttcgcattgggcaggaacgggatgtcttcgtgtattgcccgaccatagttgccaacgacttcaacacctttgaggtcagattggacgagcttctcaagcgcaaagcaggcctcgcgggagcagccctcgatgacggagggttgacggctatgctgaatggcgccggtaacgatgcaagctttaaggagctcgtcgaggagggtggcgctgccgaggccatcccgaagaggtatctcacgatggatgatgtcgaccgaatggatggcgaggcgtttgaggtcttctgctgtctgttgtggaacaagcaaggattccaggccaccgtgacgcccaagaggggtggggatggaggaatcgacgtggttgctctgaagggccgggaaggagagctgctccagtgcaagagctcgaaatcggatgaggttggatgggacgccataaaggaggtaaccgctggcgctgctcgctatcaagcgcgcttcaggggcaccaagttccgtagggtcgcagtgacaaaccaagcctttacccgcgccgcggtgactcaggccgaggcgaaccaggtctcgcttgtgactaggtcgcgtctcgaagagcttataggtgctcacccggtttccaatcatgagtttgatgaagttttgcaggacctcactcagttctcggctgacgtggtctag

SEQ ID NO: 10454 - DNA, 2346 bp, Stanieria cyanosphaera PCC 7437
atggtacttttgctcaataacttactactcaacgtagtttttgttgcttttatttttgccgtcgcaatttgggctatatggacagagataaaatctgttaatgattataaaaaagagttgaaattaactgaagaagcaaccgaatgtcttaaaaaaaatcaattaaaacaagaaataccacatcaagaagtaggagaagaaattagaaaatggttatttaatcatgttgatggtcaacttgaaagctcaaaatttattccaagaaaagaagataatcgttttgtcttgttatcttatccaactattttaagtaaaccagtacctcgtagcacggtttattttgtacctacattactgacaactttgggtatttttggaactttttttggtatttctgttggtatttcgggagtaaatcttggagagttaaatgatgcttcgtcactattaactacaagtactcaattgctttcgggtatgaaaactgctttctttacttctttagcaggactttctggagcaatacccttaatgtttattattgctcgtcagaccaaacaaaaagaaagaaatcgtaatcaactgcgaaaatatttaagcgaggttgctttcttagaaacttccgaacgtcttctttcccgtttcgatcatacctctagtcgggatgctgctaaaacactagaagaggttgcaaaaaatcttaaaggtttaagtcaatttcatcccgatgcgattggcaatgctgtaaaacaggcacttgcttcagaagacagtcttttagttcagcagttaaaagaaattcagaaattacaaaaaatacagaacgaacaatttaatccagactcaattgctcaagcaattaatcaagagcttaagttattaattaatcctattagtcataaattagaaaaaatcgatcatttagtaaaaaatactactaatttacctcaattaaccccagaagcgatcgcaattaaaacaaaacaacaactcgaacctcatctaactaagttactagcgaatactactaatttacctcaattaaccccagaagcgatcgcaattaaaacagcagaacaatttcggttaattatcacaccgatttctcaagatttaggcaaaattagggaaatacaagaaactcaaaaacaaactgttgaattattagttcaacaactccgcaatgaattaattgaaccagttgttgagcggttagatcaaagtgctaacttaactcaagaagcttctgaagctgttagagaactgaaaaatgaattaggcggtattactcaaagtttagcaggagcagtcgaaacgattcaaatcttccaaaaagacactcttactgaacttcaacaatttgctactagcttacacattattctcaaagattttcgtgaagaaactaaaggtgttctagagcaagtgggttcagaaattaatcaagcagttgctcaaagtgtagctggtatggaagcacagagacaagcttttgctgaaagtgccaataaagcagctaaaaccttccgaggcatcagggaagacttggaatcagcattgtctactcaagcggaacaacaaaaagcaatgctagaaggagttgagtctcagactagacagattttattggaaacaaccgcagctttccaagatcaatcaaatactttaaaaacagttggacaagaagcttctagtttaatgaatcaagcaaaagataatctgcttggtactttaagcaatatcgatctaatgctgcaaaatactcgtcaaactgtacaacaagagttagaaagattccgcctcgactatcaagctgcactgtcagaattttttactcaacaaaataacttactcaacgatactctaggtcaacagcgtgaaggattagctcaagtagttgtcaatttacaacatactttcgatgaagaaattcagaaacgccaagaaatgagcgaacaagtcaatcaaagtttagtaaaaatcaaacatacagtagaaacggttagtaatcttgccaatacctttggattaacttctggtgaacgtttaggtcaattaacggaattggcacgaactattggaaatgaagcacatcgggtagaaagagcttatcaaaacatgaccaatcaattcaacgaagctcttacaaaaggaaataaagagctatttgaatatcttcagcaagctaaggaatcttatagtaacaatcttacagaattagacctagctgctgctcaagtctgtcaaaaacttgaccaaaattctcacggtttgatgagtgtagcgcaatatttagtagctgctgctaatgaactgaaaaacggtcaagggagcattgaatcatga

SEQ ID NO: 10455 - DNA, 795 bp, Stanieria cyanosphaera PCC 7437
atgaataatttccctgactatgaaatagaaacggaatcagaagaacaggattctggagtctatctatctattagcgatttaatgtccagtgtattgatgatttttgttcttttatttattactgtacaaattcaacttcaagcaaaagttaatcaagtaaagcaactagaaatacaacttcaggcagaaattgacaaaacaaaaaaattagaaatacaactccaagcagaaattgacaaggcaaaacagttagaaatacaactaaaaaaatataaaaaagcagttgatgaactaccaattagaattcttaacgctttagaaggaaaaataggaggaaaaggtttatttacagtcgatccaaccacaggagatgttagtataggcgatcgcattttgtttgatgagggaagtgctgaacttaaaccagaaggtaaaaagtttcttcagcaatttatcccgacttacagcaacatcattttttctgatagtatgtttgatcgtcaaattactcgtgtggtaattgaaggacataccagttccaaaggttctgataaagagaatatggaattaagcttgcgtagagctttagctgtttctgattatattttgtctaatcaattcaagttttctactaaagaacgtttcaaaaagaaaatattagcatctggtcgtggtgaaattgatgctaaccaaaaaatcgatcactcaagcgatcgcaaagttgtttttcgttttcaatttcgcagagaaaattttgaacaatttcttcagtcaaacaatactaacaaaaaataa

SEQ ID NO: 10456 - DNA, 1509 bp, Stanieria cyanosphaera PCC 7437
atgaattttcatttttctcaattaaatttacctcctctaactcaagttcgttgcgaagaattaattaaattagcaggaaataacattaataataattttcctcaaccactacaaattccatcttgtattactcaaagtttcataactcaacctcgtagcatagacgaaattatttcggacattcaacatggtcaaattgaccaaataactttactggagtggatttattgcctttatctcaaacagaaatgggatctacaaaatccagaacaagcagaaaacacttctgaagcaatttggcaagcagcaaatgataatgcttggttaaagcatcgtttattttgggatttaatacttaattataatgaagagaatcaaacgctagcttcttctttaattaacagctttagtatttttattcctaaaactaattcagaaaaagtatcagtacaaattattgatgttttatctaaaccattccctgctcccgaactagctaaaataagctggcaaaatttacttaccccacgacaacttttaaacaattatcaacttcctgataaaattgatgctgtcaaagaggctttcaactatgttgctatccaatttacaaaagctaaaaatcctagcaaacaacaaattgaatggttgttgaattgtttaaaacaaatgtctagcgaacaagaattaaaaacagtagattatttacttattaatacttctccagaaataacccactctcacccagaattagctacttggatatctcaaaattatggttcaggtgtgattaattcccgttggaatgaactttcttcaactgccaaaaatgctcttaaaaaatggattggtgcagttaattatcgagattttcaaaaattagttgatgttatcttaaaaaaattatatttacaagaatacgaagctaagcgactgagaaatagaaaagaattttgggctaattatagcgatcgctttgaacgaattcggattttattacctcaatcttctgttaaagttttaggaaataattttgccgatcaagatatcagtattttagttgaagatggtagcagtccaaccgaagtttgtatttttgattttggtgaatggtttattgtagaattttttcgaggtaatggtagcgaaactcgtttgtttaaaaatgattctattgtagaaaaaaaactttttcattctcatgaattatctgtcaaaagattgcgctgcctgggtggagaaattcacgatcacgaatttatatggcaatattattgtgaacaatggttaagaaaaaataatattcgtccaaatcaaggtacacactattttattggtttacctgatagatatagcaagtatcattctcaaacaggactaccagaaccttcttttgaaaataagcaaaaacgaagctacaaattagaatattggcaaagagaaattaatagattagaacaagaagctaaacgattttgccaagacaatcaaatttttcaatcagtttaa

SEQ ID NO: 10457 - DNA, 1623 bp, Thermoanaerobacter italicus Ab9
ttgctttttaaagaaattacactttttataataagattgattccagattttaatgatattttttgcttcggtattattctcttagctggagttgttttctttttagcccaccgaaaacccaaagaatatattagacttattgaattatataaagaaaaaatccacaatacatcagataaagatatgttactaagggaactcgtcgaattgacagatgaaataatagaaaaagaaaaaaatgacaaatacataactaagttacttgaagagtttaagaacagttgttatagcggcaatataaaaaatgctgtggatgttttggattatacggctttggttgagattccaggtaggcgaaagatatttgacatgatgccaggtgtatttacaggtcttggcattttaggtacttttgctgggcttgttttaggtttaagtgatcttaacttttcgggtagcactcaggcattggaagaaggaataaataacttaatatcaggaatcaatctggcttttcttacttcaattgctggtcttgtttcttctttgggatggtcttattttgacaggaaacggcttcattattatagagaaaagatcgattcttttcattcttcgtacaaaaaagtatttgtacaaaaggaaatagacgattatctcaaagacatcagagagattcaggaagagcaaaagacatatatgcaaaaatttgtatccgatttatccctggagcttagcaacgtgttgtcaaatatgctggaacaaagaatattccctgaatttgctaatattatacaccaacaggttacgtccaagatcgtggaatcctttgacaatacgattggagagattaagcagtctactgaaagctcaaaacaaatgattgagagatttgctaatctggcgtatgataatcagttagaaggagttcaaagaattgttaataagtttatagaaagtatggacctgtcattaaaagggaaatttgcggatttgggcgagtccatcggcgagatgataaaatggcagcaaatggttaaagaaggcatgaatgaacttatagaaagattgtcaaataacatactgaatttacaggaagtcaataaagctattgaaaacacaatcgtaaacttctctgattactttgataatgtcaatgcggctaataaccatctggttgagaacatatcaaagttagaatccgtctctttaaacataaatggacttattgaaggcatgtcaaaaatgataaaagatataaacgagcaaaaggatttattgttaaaagataagacagaacatattcaaataatatctagatacatattggagattaacgaaaagttcagcttgcttgaaaagagttatgccaatataagtaaggacatcgatatcttaaacaacagcctcaaacaatctatggaagagtttgctaataaaacccatgaaggacttaagcgaagtttatctttgtttgatgaagagcttgccagtataacaagttatctaaattccacattaagcgaaattgaagaagctgtagatgaattaccgaaggtgattattgaatttaaaaagaccttaagaaacgatgagaaggagatgcagaccattgaaggatga

SEQ ID NO: 10458 - DNA, 693 bp, Thermoanaerobacter italicus Ab9
ttgaaggatgaggacaaagtacacgattactggcagtcttattcagatttgatggctgcgttacttttgatgtttgcccttttgattgtcattatgatttataaatatgccggcattgctgctgaactcagtttgcagaaggcaaaggttgatgacttgattggcgtgagggctcgtataatagaccagctttttaaggagtttagcaattcagatatgacgcttagtatagatccccaaactggggctataagctttagcgaaggtgtattctttgacaaggataagtttgagttaaaagaggaaggtaaaaggtatttgaatgagtttatcccgcggtacttatcgatactcatggatccacgctttaaaaagtacatatcgcagataattgtagagggccataccgatgataccggtgattatatgtacaatctggagctctctcagaagagggcgtttgaggttgtcagatatatattgcaatctaatataaaaggcattgactctaagacaaaagcagatttgatgtcgtatataacggccaatggtcgctcatacagccagctgatcattgagaacgggaaggtaaacaggcagaaatccaggagggtagaatttaaatttcgcttaaaagaagaagaaatgataatggagatgcaaaaaatcctcgggaaaggatctgtaaaatga

SEQ ID NO: 10459 - DNA, 2796 bp, Thermoanaerobacter italicus Ab9
ttgataaagatttcaaaagacttatcagataggggtattaaaattgcttgtcatgttttaaaaaagagaaagcctgctgaaataaaaataccgctttttttaaacccagtagaatggctaaaggatatcttgcctgatgaaatggaggtattaaatgtacttgaaggcttgtggcaggagggtattttgcaggaagaaaacaatttttatgtgataccttatgaatttttatacaatattgctgaagatcagaggcgtatactttgtcttcctgttgaagataattcgataaaagtctatataaaagcgaaaggaattcttggcagtagtgattttgcgttgatacctgacatatacataaaagatgagaagatggggcctctggataaaaggattaaaaatgtggtatcccacaacggttgcttttatttaataccattaaatctttacagccttttaaatgaaatagatgcgtataagcccactgctgaccctctattgcaggcgaagatcatcgcaaaagttaaatataaagctaagtcggctaatgtaacttttgataaatttttggaaagcgaagaagtgtactattctgaaaaactggatgtggatatagttaagcacagcgatgatcatatccaaattgtaccggtcttaggcaatgaaattgatagtttattaaaagatagcaaagataaggtcttaaaacagcataatactttgtatggtgaaggcataaagaggaaaagaatttttttggaagatagagtcgtacaaaattataataaaattcttagacaggggcatcttaaagggactcagatacccaggtttttgaccaacccatattctattttacctgaagatatagatttgtctaatttcagtaaaagggtaaaagaactcggacttaaggtctatagagctaatccatatattaatataaaaagagataaagattccgggtggtttgattttgagataggtggaatcatacatgaagatacgggttttagccttgatgaagatggtgattacatacggaaaaacgaactgaaaaataatgctaagatcgatgtggaggagtataggcacctggttcaaaaagctgttgagagcggagaagattatgtaaattataaaggcaactgggtaaaaattgatagagagcaggctagcagatttttaaatatagttgataatgagcaattcaggaaaacacagagaatagatataacacgattgccttatgttttgaaaatatatgaaaacatagagaatttggagtataacgaaacggcgttaagcttgaaaaaacagcttacaggtgattttagcataagcgactttggatatcctatgtatttaaaaaattgccagctgtacgagcatcaaaaggaaggatttttatggtttaagggcctgtacgaaaatcacatgggtgggttgctcgctgatgatatgggtttgggaaaaactttacagataattagtttcttgtgttatctaaaagaatgtaatgaaattaaacctacgctaatcatagctccatatactttgttagatgtatgggagagcgaaatacgtaagttctctgaaattacttctgtatataggcatacaggttacaaaagatataaaacacctaagcttcttaaaaattatgaaatcacgttgaccacttacgagacgcttgttagagatcaattgctgttagggcaaatagattggcaggcagttgtttgcgacgaagcacagaaaataaaaaacagcacaactttgactacaacggctgttaaggccttaaaagccagaatcaagatagctatgaccgggactcctgtggaaaacaatctaggtgagctatggtgtataatagattatgtgcaacctggtcttttatctagttatcatgagtttagaaagacgtatcaaatacctatagaggatgctataagcaatggaagtgaagcatacgtagaagtaaagaacaaactattgaacacgataagacctgtgtacctgaggagagtaaaagatggcattttatcacttcctgcaaagaacgagttttttttagaagtagaacttacagcattgcaagagaagctctattgtcaattgatagaagattataaaaataaggggaaaagtgaatcaccacttggtgtattgcaaaagttgatggaattgtgcgcccatccacgccttgtacgagatgaaggtgaagtgaatacctttcaacttttaagtgagtcagggaaacttcaacgccttatagaacttttaaatgagataaaacgtagaggtgaaaaggcggttatatttacccattatataaaaatgcaggcgatattgagaaaagtcatcatggatgtttttggcataaattgtcctgtgataaatggctccattaaaggcgacagaatgaatgttattgacaaatttaaagaatcttccggttttggtgttattattctctctacaagagctgccggtgtaggtattactataactgaggccaataatgtgattcattacacaagggattggaatccagctgttgaaaagcaggctacagatagggtttatcgaataggacagacccgcgaagtaaatatatattaccctatatgcataagcagcagaggaaaaacagtggaagagcgtttaaatgaggtattacagaaaaagcttcagcttcttaacgaagtgattgtaccatcgagatgtttgagcataacagaagaaaattatgactatttattgcaggatttttccgattggtccgcatga

SEQ ID NO: 10460 - DNA, 1626 bp, Isoptericola variabilis 225
atggagactctcgtgagcaacaccactctcacccttgcaatcgtgttctgcatcgtcatcggcagcgctgcggtcctgacgtgggtctggaccgtacggttcgcacgcttggcccgcgcgcgcgtcgacggcgtgcgagccgtcctcgccaacgtgccgcgaccggtgaccgcccagcaccgcacgcacctcctcgccgccgcacaggagcgcggcggcgaggtctctcacctctggtccgagtacgacgagacgctcgtcgcagaccgccacggccggctcctcaacacgctcgacgcggactactacttccgcaccgagaccctcgcgcccgagctcctccacaaccgggtcctcgccatcatgccgtcgttgctcaccgtgacgggcgtgctcgggacgttcctcggcctgaccctcggtctgcagggcatcgacttcgacggcaccaccgacgagctcaccgcgggtgtccgcgagctcatcagcggcgcctccctcgcgttcatcacctcggtggcgggcgtgctggcgagcctcatcacgcagatcgtcgccaagatgcacgaccggtcggtggagaaggtgatccaccgcctccaggtcgagctggacgagatcttcgagaagcagacctccgaggcgtcgctcgtcagcatcatgaactcgtcgagcgccagcgaggagtacctggccggcctgggcgagcagatcggccggagcctccaggaggccgtcgcccccgcgatgcagcgcatggccgagcaggcggcacagcagtcggagcaggtgttcgagcacctcgtcgaccgcttctcgtcgggcttcgaggagctcggcaggactctcgccgaacgcctcgacgcgtcgtcggcgacgttgagccagacgatcgagtacctcggcgacaagctcgcgcagcaggcggacgagcacaacgagcgcatggaagagctgcgcgctgccacggcgcggcaggtggagctgctcgacgagcgcctgccccgggtggtcgaggcgctcgaggaggcgaccgcgcggctcgacgccgtgtcggagcacctcgccccgtcggccgagaacctgcgggtgacggccgagtcgttcgaagccacgagcacggccttccgtgacgtcctggccgacagcgtcgaggcgttcgaggagatcagcgccaagcacaacggtgcggcgaactcgatcgccgcgctcaccgagcggctcgacactctcgcagagacgacggtgtcggccagcgacatgctcaaggacgcgtcgggtgtcctccacgacgggctcggcggtctgcgcgagcaccaggagaaggtgctcgccgggatgaaggagcagcagtcgtccttcctcgacgggctgcggtcccaccagaccgagaccctcgagaagctgagcaacgaggtcgacggcttccgctcggcactcgcgtcctggttcgtcgagtactcgaaggccgtccaggagcagacgaacgcccggatgaacgcgtggaacgagcagacgcacgcgtacacgtcctcgatgctcgacgccgcgcgtgcgctctcggccgcggtcgaggagatcgacgatgccctcagccgtcgcgccgaccagaaggcggcggcatga

SEQ ID NO: 10461 - DNA, 834 bp, Isoptericola variabilis 225
atgaggcgtccggttcgtcgaggacggcccgggagcacgaacgacgactcgtactggatctcgttctccgacctgatgtcggcgctcctgctcgtcttcctcctcgcagtcgtgcttctcgtcgtctcgctgacgaacaaggaacaggagctggtggcccagcaggagcaggccgccgaggcggaggctgcgttcgccgcgcagcgcgagagcctggagtcgcaggtcgcgactctcagcgaccgggaggagacgcgcgcccagctcgtcaacgagatcgcggaacagctccgcgatcgcggcatccgggtcgaggtgagcgaggacagctcggtgctgcacatcccgacgtcggcgctcggcttcgactccggctcttacgacatccgaccggcgcaccaaccggtcgcgctcacgatcggcacggtcctggccgacgcgctccgcaaggacgagcgctacgcgatcctcgacacggtgttcgtcgaggggcacacggacaacgctgccttcggcggcctggaagggaccggcaactggggactgtccacgttccgcgcgatctccctgtggcgactctgggacgccgcgcttccccaggagaagcagctcgacgcactgcgacgcgacgacgggacgccgatcttctccgtctccggatacgccgagtcgcggccggtcgagccggctcagctgaccgaggagcagcgcgcggccaaccgtcgcatcgacctccggttcaccgtcaagggcccgaccgccgacgagctcgcgacgatcgtggccgacgtgtcggaaggggcgaccgcgggcgcggccggagccggctcatga

SEQ ID NO: 10462 - DNA, 1545 bp, Isoptericola variabilis 225
atgagcctcaccctgccgtcgccgcgcgtcgctctcgcgtcgtggccggaagacatgccggagaagtggcagcgcgtcgccgccgaggcgaagcacatcgcgcggaacgcgggaagcggccgccgggcggaggcgctccacggcccggtgcgccgacttctcgaggagcgccggacggacgagctcttgacgcggatgggcgatcgcgtcttcgcgcgcgtggtcgtcgcactgtgggccgaggaaccgcgcttggcccagcggtccatgacgcccgagctcgtgagggcggtggtggagcgccccgagggacggccggtcggccacccgacggcgatcacgctcgcctcgctgttcctcgagcactacgaccggctcgacgactggcacgccggcctgttcgaggccgtggcctcgaccgtggacgtcgccgcgcaccggacccacccgcgagcgcaccgcgatctggtcgaggtcctccgcgacctccgccggtacgtggtcgagcgcgacggcccacgcgcgttcgcgcgtcacctgatcacctcgggcgccacgccggagaaggaccgtgacgcccgggcgctgtgcggggacaactccggcaggtacgcccaggtgctgcgcaacacgttctacctggagctcatcgctggcgccgaccacagcgccgaagggcactcgttcctcgccgacgccacggcgcgagcgaccgcgctccgtcgcgacgaggacgaccggcggttcggcatcgcggtgctgagcgcactgtgcgacaagagcgacaccgccgtcccgagcaccgagtgggtcgacgccgtgctcgcgatcggtggagacccgcgccacgagcagagcagcacctggcgtgactggtgggcccacgtcgacgagcccttgcgcgcccgtgccgtccggtggatgtccggtgccgacctgcgcgcgttcctccgagccgtgcgcgtgtacggggacgagacccagaacgagagcctgcagcggatgttcccgcggcgcgagcgcttcctcatgggtctctacgagaccggacgtgtccaggccacccgcctgatcctcggcaacgacgtccgccgcacgatgcgacgtgtcacgaacatcaacctcgtcgacgccccgcgcttcgacgacatgaacaccgacacggccatcgtgttcgtggactgcggcgacttccacctcgtcgagggctcccacaagttcaagctgcacctctacctgggccgccccggccctaagctcaccgacccccggcgccgtgcgtacacgcgcgacgagctcatccacgtgatccctgacgcgcacaagcgtcgccatccgctcggcgagcgggctcacgacgcgtggacgcacgaccagggcggcgcgtggctgcgcaaggcgctcgacttcctgcgagagggcgggatcgcgatcgacgaggcggccctggtggacacgcacgacatggaagacctgctgcggcgacggtccgggctcgcgcctcggcggcggtccccgagccgggcggcgtggaggcgacggtga

SEQ ID NO: 10463 - DNA, 3018 bp, Isoptericola variabilis 225
gtgaagctccgagacctgctccgcaagacgccgatgcgcccggacgtcgccggcgagcctccgcggctcttcgacgtcgcgcacggcgagaccaccacgttcacgacgacgcccgagaccttcgccgagctgctcgcgggaaccgggaccaggagcatccaggagcagttcctggtgctcgagaccctggcggacgaaggtcgggcccggccggccgaggacggtttcgaggtcaccgcggaggagctcgctcggctctcggacgacgaggcgcagctgctccgcctcccaggtcgtttcaccggccacctcgaggcggcgttccgttcgacgacgacccggccggacttcgccgtggatctctcgctgcgcacgggacgctacccggaacccttccgacgaaccggagcggtcgtgaccctcggtctcgcgcagcatgccgagacctaccgcctcagtccgccggccttgcgggcgctccgcgcggtcgaggcgcaccagcgcctctcccccgccgctcgcaccgaggcgcgcaacatgcgtgtcgtcgccgagctccaggcggcccagcggatggcggcgtcgcaggacccctcgaccaacgatccgcacttcgacctcgaccttcgccacttcgagcagttcacgacgcgagttcctgagcgcgtcggtgtggtggtcgagccgcaggacgacgggtcgctcgcgatcatgcccgacgtcggcgtggcgcccgcggatcttcgtcagcgctggcatcagctgccggtggacgaggatgccgacgggggtgtcctgcgcgtcggcaaggagctggtccttctcgaccgcgagcgcctcgcgggcgtacgcgaggtccggcgtcggccccgcatcccgaaggagcaggtgcgcgagttcctcggtgcacccggcgcgttcttcgaccccgacctcgtcgacgtcgagctgaggttcagctggctcgtcgcaggcctcggtcggctcgccccggtgacgttcgcccaggcggccgacgccgggccggagtggatctcgaaggagcacggcctcactgctcccgaggtgctggccgagcggccgcggacggtctcggagcacgaggagatcgagcacacggtcgcggaggcgtgggagcgcggcgaggacgtgatcccgctcggcgaggacatcgtcgacatctccaaccgcagccgcgtcgaggaggcgctcgcggtctcgcgcgaacgagtcacgaggctggggttggaggacgccgaggacgacgtcaccgacctggtgagcgcggaggagccgtccggcccgcaggtgcgtgtcggctggatgctcgacgatgccgaggacctgtccgagcgcctgaggcaggcggccgacaacgcggcgctccagcgtcctgtcgactacgcatccctctgccgcacgccgtacccgcaccaggtcgagggcatcgagtggatggcccggctcatgcaggcgtcgctcgacggggccgacgacgatcctgcgcgtgtccgcggtgctctcctcgccgacgacatgggcctcggcaagacgttcatgacgctcgccgccctggcggaggcgcagcgcgccgaacgcgcacggaccggctcggcccgtcccacgctcgccgtgatgccggtggcgctcctcgagaactggctcgacgagctcgaagccaccttcgggtcgttcaccggacccttcgacgacgtcgtcgtcctgcaaggtgagggcctcgcccactaccgcaccggccggggccgggagacggcggtcaacgaggaccacctcgaccacgacgggatggtgcggcgggacgtgctcccggacctgatgcgtctccgggtcggtgagcggttcggggacgcacgcctcgaccgccccgggaccctcgtgctcacgacgtacgacacgatcggccgctaccaggtctcgctggcgcaggtcgactggggcacggtggtgttcgacgaggcgcaggcactgaagaacccggacatcctgcggacgcgggcggcgaaggcgctgcgggcacggttcaagctcctggcgaccgggacacccgtggagaactcgctgcgcgacttctggtcgttgctcgacgccgcgcagcccgggctgctcgggtcgtgggcgcagttccgcgagcgatgggacgcgccgatgcgcgaggcgaccggcgaacggcacgctgagctcggacgcgcgctgcgcgccgccgtcggcccgttcatgctgcgccgcgtcaaggaggaccacctcgacgacctgccgccgaagatcctccacacgggcgagcacgcccggatgatgcccccagcgcaggtgcaggcgtacgacgacgagatcgcacgctaccgagccaaggcggggacgaatggcgccatgctgggcgcgctccagcggctcgctcaggtcagcctccacccgggcctcgtgcaggacgaggtgctcgccgacggtgtgggagccgtggacctgtccgcgcgcacgaaggtcaccgtccgcgagatcctcgacggcgtccgcgccgcaggcgagaaggcgatcgtgttcgccagcacgaagcgtatgcagcgggcgctggcgctctggctccgcgacctgtacgacgttcccgtcgacatcgtgaacggtgacaccccggcgaccggctccgaggactcccgcgttcgtcgcatccggcggttcgagcagcgaccagggttcggcgtcatcatcatgtcgccgctcgcggtgggcgtcggcctgacggtcgtcggtgccaaccacgcgatccacctcgaacgccactggaatcccgcaaaggaggcgcaggccaccgaccgcgtctaccgcatcggccagacccgaccggtgcacgtctaccacccgatggcgatccacccggacaccggctccttcgacgtgaacctcgaccggctcttgcggagcaagatcgcgctcaaggacgccgtcgtcgtaccggaggccgtcaccgaggacgaggtcgcccgggcgatgggtctggcctga

SEQ ID NO: 10464 - DNA, 2121 bp, Vibrio antiquarius
atgaccaatagccttaacctttctagtttatggccggacttaagcagtctaaatgtcgtgccacctcaaactccagagcaattgagtgctttgtttgtagttattttatggggcgtagctctatttttcttaatttggtcaggtgtggcgtttattcgggcaagacaacgtgttgtttggcttaacaaatctttggatgatgcggagaaatcgaccccgtcagatattcgaaatgatttgatttctagagctgaaaaaaagaaaaattccgtagggcatttatggctagagtttgacgaaacactgctcgaagtaaaaggtgctgatgacgttgttcgattgcataacacatttgatgccgactacttctttaatagttctagtttagctggtggtagcactgaaaaccgaatgattgcggcggttccaggttttttaacggctctgggtgttattggcacctttgtcggtttacagctaggactttcagatctaaatattgcgggcaacgttgatgtcaatgagatgaaaaacggcgttgctggagttataaatggtgcaaaaatcgcatttatgacatcggtttggggcgtcttactcagtgttgcattcaacttcattgagaaaattcttgagcaagtaattagaaagagaattaagtctttgcaaaaccgtattgacaggatgttccctcgattaagtgcggaatatcaactgcaatctattgcaaataacagccagcaatctcgagaaagcctacagggacttgctgagaaaattggcgagaaaatgcaggagtcattagttcaagcaacgcagggtattcaacaaggtctcgagagtagtctggaaaaaatcatggctccagctatcaataagcttgttgatgagacgtcagatggtaaccaaaaagcgcttgaaagcgttcttcaatctttcatggacggttttggtcaacaaggcgagcaacaacgtgtcgcgatggactctgcgtctcaaaacgtaaataagacgctagaatcaatgagcacttcgatggctgctttcgtcaataagttggaagttcagcaaaacgcatcttcagaaagagagaaagaacttatctcaactatttcagttcaagtttctgagctagttactcagggtaatgagcagaagcgtgttctaacagagtttgtagaaaaacaagtctctgagttaggtgagcagcttactaaaagagaatcagctgcttctgaacgtgaacagaaattggcttcctcaatggaaagtacgattaaagatttagtagaaaatgtttcagcacaaagccaagtgttgaccgattttgttcagaatcaagttggccaacttacccaaacgttctctgaacgagatgggatggcaagtcagatggaaaaagagcgtaatgatatatttgtgaatcaaacgcaggcgatgaaagctggaacggatgagcttcttgctcaagtgaaagcggcgactgaatcacaacaaatcacatctaataatattattgagcaaggtaaacaattacaaaatagtatcgattcatctgtttcggcatctgctcgagctactgagagtatgcagcagtcggcgagtgagttacgagttgccgctgatagtatgaatgtgttcggttccaacattaaagaggcgggcaacaaactatctggtgctgttactgaagcggttaacagcacgaaggatttagcggagcaaaaccagctaggcgcagtgaaaattcaagcgttgagggagcagttgctggaagatacaagtaagtttagcgcgattacagatcagataaacaatatgctgattagtgcagagcagtcgtttagcacgcttcgcactacccaaaatgagttccttgcagaacaaaaaggtaatctaaacgaactcacttcagaaatgaagcgtaatgtaaaagagttgacggagcaaatggctcaactgcttgaagattatgcagagcaagccaacggacaaaccgccgagcacctcaaagtttgggccaatagtagtacacagtatgcagagagcatgaatacagcagttagagctatttctagtgttgtcgatgaaattcaagataaagtgagccaacatgcgtag

SEQ ID NO: 10465 - DNA, 735 bp, Vibrio antiquarius
atgcgtagaggtattcgttcgcatacacaaaactcagtagatgaagaaaatccctactgggtttcattttccgatctaatgtctgctttgcttgttatatttatacttgcagctgttgctctgattattgaattaactcaaaagaccaatgatgtcgaagctggtatcgaagagcttaagcaagctgagttagcaagaaagaatataatttatgatgttcgagacgaactggctaaaagaaacgtaattgttgaaattgctgataacgatacggtaattcggatcccagaaagcacacttacgtttgcatcaggtaaatcatcaattccgaacgatgcaaccatacagcaagcagttaaggacataggtgttgttcttcattctgcaattcagaagaaagaccgttttcaatatctcgataccgtttttattgaggggcataccgatagcgatagtatccattacagaggaaaagggaactgggggttatctactgatcgagcaatatctgtatggaatgtctggcaaaatgaactgagcttaacgcctaaactcggtgacttagaaaacgcttatcatgcaaagctgttctctgttagtggttatgcagcgacaagacgtgccaatctacaagagtcgaatcagcaagaaaagagccagaataggcgtattgatattcgatttacagttaagaaaccatctattgctgagctcgagaggattgttgcacagtga

SEQ ID NO: 10466 - DNA, 1452 bp, Vibrio antiquarius
gtgagtttaaatataaaaaagctcaaagttagtttgccagccaatccttttggtcaagccatcaaggactttgcacatctatcgaatcagctagaggtgctttctaagagtgccggtattgaaaacaataagttccgaactgcgtatggagaagtatgtaatgcgcttgcctctaagaaaagagttgaggacgttatagatagctctgtacacgttcgcgccttagctctctcgctacatacggatgcgaagaaaaatgtcagctttacgcgtagattgcttaataaaattacagaaattgtaaaaaaaccaagctctttagtcatagagtcgttttatcagcatttcttatcagagtatgaccgactggcagacttggaagctacagcagactggttgttggaggctaaaaggctgcgaggcaatgatgagcagtttgatgaaaatatattgtcaaccaatggccccaagtggcttgcggaaagggcgattcaaaataatgtcgattttgatcatttacttgcggagatgaagctggaacgttatgcaaatggcagatatttaacggcggctaaaggcatctactatattgagcagttaaacactataccattaggccaagatcatcctctcctagaggaggttcaaaaaacggcggtttttgattctcgatatgactctgaaagtttgttagggcatcaaattcttagaattttgattggccgatcgataggttctcacatcagtgagacttggatgaatgtgatcttagcgattggcggtgacccacgagtaccaagttcaaatccaagatacattaagtggtggaagggtttagaaccaattctgattcaagctgttcgcggatggttatcaaaactggatttgaagttgtttctggaagcgttggaagattattcctactcttcagctaattacgagctacagagaatgtacccatctaggaaatgtttcttagaggggatgttcgatgcgggggttatttcaaatacacgactttatttgagtcaggatgctgcaaggtatttgaagagaaattatgaccctaagcacttgcccaatttctcgactgttaaagatggtgataaatccataatttatgtgcaaatgaatggtgcgcacatggtagagggaagccacagttgttacttgtggctgtacaagcatttagattcgtcagtatgcgtatttaattatgacattgttaggccaacgtattctcagctaaccagtgggatcaataatcagatgacacgattatcatcgggagccgtagcaaaaataacgcattcaccaattggctactcatggcagcgaaaagcacttacagcacttagaggtctgggagttaaattgacgcctaaagatgtgctttcaaatgaagattatattgactttaaacaacgttatggggtgagagagtggagttaa

SEQ ID NO: 10467 - DNA, 3450 bp, Vibrio antiquarius
gtggagttaacctctttaatcagtaagttcttttctggtctagataagacgtctcaatttgagttagtctgtgatgatagtcttgatttcacaacctccaagaaaaccctagagaaaattaaagctggtaaagctgatgagtggataacggcgcagtatgttgcacttagaatgcttgaagaacagggggatgtaagctcatttccagatggctttattatgcctgccgatacagcggtaaggctcgactctgatttgagaatcttgtttggttttccttcggtttggcaaggaactattgatgcagatattcaaggaaaagctagcacacctacctttaaagttgacctttcggtaacaaccaaacagggtcgaacaacgctaaattacactgtggatggacctttcattcggtttagtcaaaatgagcagtacctgttaacgcccgagcagtttatggcctttaacgcacataaagcccatggaaattctgctcggtctgaatacgataacttactttacctacactctttacaagaggctcaacagagtggttgtaagttgaatctaaagcactttgaaaagctaagaattctgacaccaaataaaattacagtagaagcagaactgaattctcaaggcgagctgatattgacgccaaacatggggcaaagtgcgagccatgagtcgattcaaaaggttttggggcagttgcaaagcgacaacgcagttactctgaaagtgggtgatgaaatagtcttgttttctgaagaaaagctaatggctgtaaaagaagttattagcaacagggtaattccccaacagcaagttaaagcgttcttggaaaaccctacagcctatattgatgcgagcttagtcgatcttgatttaggtttttctatcagagttcatggtgcgacagtttttaaacacgcttattttggagaaacggacgagtcaggcatagattggttcggagcctcctcttcatctgatgtgattaatccaatatctaagctggctgatagaattcgcgataaaacaactcttgaggacgtaactaagaagattgaagatgctcaacaaaccggagcaacggttttagattatgaaggaaaatcatacgatatcagtgagcctgtagctgtcgagaaagttctaaaagaaataggtcacaagatatctaaccctgatacagatctttctagccacggagaggaagaagacgccgagactgaatcagaaagcgcagaaatacatgttgtcgatattgatctaaatgatgaagagttgtctgaaaattctcctaaagttgaacaactgatttctgatatttcctgggatggtgagttaaattgggaaaaccacaagcggacaccttttccacatcaggatattggtgttcgttggattttaggcgttgagcaaaaaaccttatcagactcgaaaattagtggagctttgcttgctgatgacatggggttaggtaagacttttatggccctctctgcgatcgaacatatttatcaacgacagaaaattagtggtgaaacgaagaaacctgcgctgatagtcgctcctttgagtttattggaaaactggaaggatgaggtagataaaacctttaaacactcaccattcaaagatgtggttattttgcaatcagccgctgagttaaatgactatcgcatgggtggcgtggagattcgaagccagagcacatctgatgattgtttagaacccaagtattctttgaaagtagggaaacactttggtccaggccgtttagatctaccagagcgattggttatcactacttatcaaaccttgcgcgattaccagttctccatgtgtttgattgattgggggattgtggttttcgatgaagcccagaatgttaaaaacccaaatgcacttcaaactcgtgcagcgaagggtctaaaagctgatttcaaactagtggctacggggacgcctgtagaaaacagcttagccgatttttggtgtttaatggatacagcttgcccaggccatctgggtagctatcaagagtttcgtgctcggtatatctcaccaattcttaaagctgccggtgatgaagttgaagaaataagagctaggcttggaagagaacttcgcatagcggtcggggcattgatgttgagacgcgttaaagaggacaaccttaaagggttacctataaaacatatgtatgctggcggagattttgaaaactggaagtacttagaagaacttaagtcgataatggttggctaccagagagatgtttacgaagggactattagtaatcaactcgagaataaagagagccacgcacttaccactttgatgaggctaagagatagttcgttacatcctaggttaagtgatggaggtcgccttgatattccaaaaaatgcaaaatcagctagggctttatacggagaatcaggaaaaatagtttccttacttgagactttagatcgagtacgaagtaaacatgaaaagtgcattatttttgcggttaacaaacgactgcaaagcttcttaagcgtgactttgggacagatctataacttaggtccgctttcagtaattaatggtgatgcgaaagccgtagcaaagcgtaaatctgccccaactcgaaaatcaatgatttcagactttgaagcaaaagaaggctttaatttaattgtaatgtctccagtcgcggctggtgtcggtttaactgtggtcggtgcgaatcatgtggttcatttagagcggcactggaacccggctaaagaagctcaagcgacggatagggtttatcgtatcgggcaagaaaaagatgtacatatctatatcccgcttttacatcatcccgaatttgaatcgtttgacgtaaatctacataggctacttacccaaaaaacgttgctgaaggatgctgttgttacaccagaagatgtggttccacagccagcaggtgttgggggagtagtttctggtgatttgattgataaacgtattacagcggcagaacttgataagttaagttggcagcaatttgaagcgttatgtgtagaattgctggcaaagattacggatagtgaaagtgcgtggcttacgaatagtggtgctgatcatggtgctgacggtgtgttactcagtaatcgtggcaacattctagtgcaagctaagtttacgcaacgacaatatgatggctataaaggaattcaggagattcactctgcgaaacctatttatgaagcagcaatgagaagttcttttgagcgtttgatttttgttaccaattcaccttcgttagctaagcgaactcatgaaattgctgccacatgtggtgttgaaattttgggcagaacacaattgttgacttaccttgaagaatatgaaattactctgaaagaaatattatcgagactgggcaaagaaagactgaaagtttag

SEQ ID NO: 10468 - DNA, 2121 bp, Vibrio antiquarius; identical to SEQ ID NO: 10464

SEQ ID NO: 10469 - DNA, 735 bp, Vibrio antiquarius; identical to SEQ ID NO: 10465

SEQ ID NO: 10470 - DNA, 1452 bp, Vibrio antiquarius; identical to SEQ ID NO: 10466

SEQ ID NO: 10471 - DNA, 3450 bp, Vibrio antiquarius; identical to SEQ ID NO: 10467

SEQ ID NO: 10472 - DNA, 2193 bp, Pseudomonas cremoricolorata
atggatttttcgacgttgttgcacctgtggggtgcagcaagctctgagcagctgatcgcacccaaaatggttgttggtctcgttttcattctttgcgcttggtacttcgtccgttacttctgtaggtcattcaagcttagtgcccagctgaaacgtttgactgttagcttgcagaacgtgaaaactctcgatccatctctccggcgttctaagctggagcgactgttcagtggcagcagactggagcattcctggcgcgagtatgctgaaacgctgcacgatcagttcgagctcaaggagggcgaacaggttcttctccgatcacgagccactgccggtgctgcacatttcttctcacctcaaagtgtggttgataccccgctggggaccgagttctacaagcacctaccgggtattttgaccggtatcgggatcgtcggaaccttcttcggcttgatgctaggtcttcagcactttgacccaagcacgcctgaacaggttaacgccagcgtcgataagctgttgaaagacgtgctgttcgctttcatcggctcattcatttcaatcatggcctctatcgccgtcacgcttactgaaaagtggcgcttgggacactgctacaagctgcttgaggcattcaatgaaaccatcgacgggctttttgacagcggtgtcggcgaggaatacctggccgagctggtgcgctccagtgctgaaagctcggtgcaaacccgtcagctgaaggacagcctcgttactgatttgcgggaaatgctacagaacctggttgatacccaggtccgtgaaagcctcaaattggcagataccttgtcgacgacctaccgtgactctgggcaactgctagccgaccaggtgagcggggcaattgaaaatagcctcaagtcgccgcttgaagccatcgcgggtgccgtgcaggccgccagtggcgatcagtccgggcaggttcagaacctgctccaggatgttctggttgcattcatgaacaagctggaaggaacgttcgggcaacagttcaatggcctccacgagttgatgggccagtcggttgccgccatgcagtcgatgcagcagggcttctcgacgctgatccaggatatgcgctcggctagcgagtcctcgaatcaaagcagttcgaccatgattgcccagctactggccgatatgcaggccggacaaaacgccatgcaagcggggatgaacgagatgctcgccaatcttcaggcttcggttgcccgtatcggcaacgaaggggagggggctggcgctcgaatggccgagcaaatggagaagctgtttgctcaaagcgaggctcgccaacaggcaatggctgagaatctccaggcttttgtcgagtcgatcaagcagagcatcggccaaggccagcaggaaaccatggccaagattgcaggctccgttgaggtgctgggtgagcagctctctgcagtcttcaagcaactggaacagggccagcagcagatggatcaatccacccgcgcagcccaagcagacctgcaccaaggtacccgcgacctggtgggtggcctcgacgagcaggtcaaggcattgctgcagacggtttccgagcaacagaaatctgcccaggacactgtcaatgcattgagcgcccagacagagcagcatctgcacagcatgcagctaggtgcggacaagatgcgggcggcggctgagcgatttgaaactgccgggcaaagcgttgtgcgagccagtgaatcgactgcagggttgatgggtacagtccagggcgcaggggctgaacttgcacaggcttcgcgagagctcaataccgttgtcgcggactaccggaacaatcgtgaagcgctcgcgaaaacgctcgctgtcatcgaaggggtagttgccagtgcacaaggggaagccagcgggcgcagccaatatctccaggacctgaaggttcaaagcgagcggatgcagtcgctcaaccgtgaagtgtatgaatacctcgaaaacatcagtggtgtgctgagtaacggcttcaaggaattcggtgaaggtatggaccgggcgttgagacaaaccctgggcagccttgacaccgagctcgataaagcagtcaaaagcctcgccggcggtgtggaaggggtcaaggaaagtctcgaagatttcggcgacatcatggaacgtatcaggcggtaa

SEQ ID NO: 10473 - DNA, 744 bp, Pseudomonas cremoricolorata
atgtttggtaagcaaatgccttcggctgcccgttcaaaggacgagggagagaagcctttctggatttccttcgctgatttgatgaccgcgatgatgattctgtttctcgtggtcatggtggcggctttgagttctgtgacgcagcggatcaaccaggcggaacagggggagaagcagcgtagcaaggacatcagccagatctgcgagcacctgagcctcaaggcgaagactgccagcaagaccatcattgtggactgtaaggacaaccgaatcagcttcgacgatgctggccgttttgggcataaccagtacgcgctgagcaacgatggccaatcggcacttcaggaggtcgtgccgatgattttggacgcggctaacagtgaagaggggcgcaagtggttcaaacaggttgtgatcgagggatcgaccgacaccgatggttcctacctttataacttgcacttgtcactgcagcgttcggagtgggtgatgtgcagcctgctcgatagtcgtagcccgcttcaggtcggattgtcgccggagcaccaacagcagatcagatcgatgtttctggcgggcggcgtgtcgttcaacaatgcaaaggacaccaaggaagaaagccggagagtggagttgcgcatgcagttttttggcttgaaggagaaggagagcagtctcaagcctgatgtgccggtgttcactaacactgacgtggaaaaatgtcagttggcgatgaaccgatga

SEQ ID NO: 10474 - DNA, 1629 bp, Pseudomonas cremoricolorata
atgaccagttcaatcgcgaggctttccgccgccattagccaaagcctgtcagctcatcgcacggtgcaggccccagaaccgttggagcgatttccccgtctggctgctgcgggagtcgatctttacgagcgattcgagcgcgctgaaaaggccttgccgccacccgaagaaaagcgccgtgctgcgataagcaagtttcgcaatgtactaccactcaacgcctcggaatggcgcttggtattcgccggcctttccgacaagagtgagcgcgtcgggccgatactggacgatgaccagctttatgcccgggtgcacgaagaagtacatcagcgtatcgaaaagcgaagactgaaccgccgggattggttggcgctgtgcttcagctactttggctacgacgccgccaagcctgcgcagaacgccaattggtgtctgttgcgcgaagatgttcagctcggtttcgaatgtgtcagagaccagcaaacgcgtgtgaaggaatgggtgcagatcgttcagcagcatcaggagcttttttccgagcaggcaggtgccaccctgggtgaccagatgttcaagggcgagatcagcgacctttctgccctgcagacgattgcgcagatcccggacaacagctggctgtggcgcaggatttttaccgtgctgatttctcgcattttcatgctggatgacgccgagttttctcagcgcttggccgacctgatcgacatcggccggcagcacccgcggtacatgaacgacattctgagtgcatgcctgtcgcgttaccacttggcagcttatcgggagaagccatcgtcgctgctcaaacagcttgcgctcgacaattggggtagtccgcagatccgctccagacaaaacagctggctgcagtatgtcgataatgatgtgtgcgcgatggttgtggcgtggtttgcgaaggaggatctggagcacttcttcaacctgctgaaaggggaagcagaagtcgatcaatctcgtctgcattattggctgcgttttgccaaccaaatgagttatacccggattgtcatggggtcggatgcttggcacgacagcgggcgagatttcgtccacttccgagggaagaacaaagggcgcctcagccgactggtaggcggccccggtcataacaacgccgtcatcatgcagatcgggaactactttttcgtcgagttctccggtaccggtaatgcctgctatgtgtatcaagcagacaagtcaccattcaatccagacaagttgcagctcgaattggcgagcgagctgaagcagcctaatcgtgcactggaccgaatgcggcattcacctgcacccagtcgcccggaccgcatagagggttggctcagcaaattcgattatgccctcgagcaatggggtattcgtgtacagagtcagatcgcagcggcaggttcagccaagccgttgccttttgaagaccaggtccgtgacgctctaaagtcggtcaaacacaaggtctatgatcagcgcgagcgcggcggtgcatttcaggtccagcttgatgatcatgacccggccgcagtaactgcactgcagcgcctgggcttcaggcccgtcaataaccagccactccggttctggagacagtaa

SEQ ID NO: 10475 - DNA, 3249 bp, Pseudomonas cremoricolorata
atgctcaagcgtttcctcaaaggcattggcctgcagccgaactcggcagcagaaaattctgagccggttttttccattgaagagcagggcatctgttatcccctgagcttggcggagagcacggagtcctggtcgctggcgagttatcttgatcagctggaagaagaggagttcgtttcccaattgagcgatcgctggctcttgacgtgggatgagctctaccggctgctggatgagccagagcacgaaacaagcctgccactattggggttgccgccgcagaaagccctcatccctcaattgagcagccagggcagccttgcctccgacgatttcaaggtctccatcagtggctggcgtgatccgcagtccaatgccagcgtgcaggtgcagcgaacggggggcatcgttcaacatcagggagccaaagaaatgctgcctgaggcgtcctggaaactgatcggtgctgtacgacagctttatctggcacaacaaaatgagcccggtgaagtaaccaaccagatcggctgggccagcatcagaaagctggcgcgcaaggctggcgctggtatggatggcttcttggataagaccgtcgttatcaaacccgagaaactgcggctcaacccacgaaagtcgacgcttggcgacataccagttatcgagttgcaaccgagctttgatggccagccggccaactggcttgagagctttgacggtgccaagcaggttcaggatcggtaccggataacgggtgacgatggctcgctgactcatgttctgattgagcctgaagtcaaatcggtactggactacgtgcgttcgttacccgggcgtcgggttgctggtgacgatgccctttcattcgtccgtaacccttacagctcactcggcgaaagtgccgcacacgtgctggatgccgaagcctatgaagacgagctcgctgaggccggtattttctttcatcgcttccatctggaacccaaactggatgaagcgggccagcgtattgagcaggtaacactgacgctcgagccgatttctccaaccccgcaggcgcctatcgaaattgagttcaaagcggcccatgaattcgcgccgcttgtgcatgaactgcagctgaagttggccgccggtatgcctgcgggcttctggcagggctatgagctggagctcagcgattttgatttgcgccagttggcaggcatcaatgacctgcttaaacgttggcaaaacgaggcggccggtatcgagtttgactcggtcctggacctttccctctacggcgaccgcgtgacgggcattggggaagcggaaagaattacttcgcctttcctggtcaaagaggcgaccgagaactggttgccgaaggatgtggcagcgctgggcatcgacgcaggaatcctcggtcggtgggacccttccgaccgcgctcaatttgaagcgtttgggcagcggttggatgaagcgcgtgctgccggcgatgacacggtgtgtttgcaagagtctgaaataccactctcgattgccgcagcagaacaactgttggatgcctggtcgaagaagattgcacctgtcgagaccggccaggttgagcaacgggagaaagttggccgcgccgtactgcaaatcggccacaacattgacgagccgacttacgtacaggtacgtcaagcagcgttaagcgccgctttgggtgcaacgccagagttgcctggtttgctcaagcctgaagtcgttctgcgtgaccatcagttgcaaggcgtggcgtggttgcagcatttgttccgcttgtctcccacggacgtatcgggttgcttgctcgctgatgacatggggcttgggaaaacgatccagttgctcaccttcctggtctggtacctggaacagtacccaaaagatcagccaacgctgatcgtcgctccggtttcgttgctcgataactgggagcgagagcttcactgtttcttctttgctgacgcgctgcctgtattgaagctgtacggctcagccttgagtgcagtgaagttcaagaaagatgaaatcccagcggacttgaaagccaaaggcatcaagaacctgctgcgtccaggttggatgggcgatgcccgaatcgtcctgacgacttacgagacactgcgcgatcaggaattttccctagcgcgccagcaatggtccatcgtcgtgtgtgacgaagctcagaagctgaagaacccggcggcactggtgactcaagcgatcaaagctatccctgcacgcttccgagtggcgtgtactggtacaccagtcgaaaataccttgatcgatctctggtgtctgttcgacttcattcagccaggatttctgggcggcttgaaccagttcggtcgcgactatcagcgccccatcgaagccgcactggagcgtgatacggatgcgctggaacgcctgcgtgggcttatcgaaccgcagactttgcggcggaccaagcaggacatcgccaaggacctgccggctaaaatcgaagacgcagcatgccgttcacttggcatgcataccctgcagcgtaacctgtatctgtccgaaatttccgcatacagccagaagcagcagatcgaagagcagctcgatcaaaagacctccggcatgctcggcttgctgcataagctcaagctgatttgcgcccatccttatagcgttcagccagacacgcggttgcgcgacaactcgccgaaactgcaatggttgatgaaaactctcgagtcgataaaaagggacggtaacggtgacaaggtcatcgtctttaccgaactgcgtgatattcagcgtgaattgcagcacgcaattcagaagcatttcgggtttcgggcgacggtcatcaacggtgacaccagtaccagcagtcagagtgccaatagccgacagaggctgatcgatcaattccaggagttgccgggtttcgccgtcatcatcctgtccactatcgccgtcggattcggagtgaacgtgcaggccgccaaccacgtcattcacttcacgcgctgctggaacccggccaaggaagatcaggcgaccgatcgggcctatcggattgggcagcagaaggatgtgtatgtgtactacccgacggttcgggatgcggcgatgccgacatttgaggcgacgttggatgagctgctgagcaagcggcgggcgttggcgcgagatatgttgagtggggcttcggagcttcaggcttcagattttgaggagttgctgggtgcgcggtaa

SEQ ID NO: 10476 - DNA, 2001 bp, Hahella chejuensis KCTC 2396
atgaaaaatgctgaatataatttgggaaacttatggccagagtttggccgaattctccagtgggatataacttcaccagaaggcttaagcgcactggttgtcttagcgttaattatcattgccctctctctcggagtctggtctttaataaactacgatagagctattcggcgcctccggttttataagagattacttacaggcatagcgccagaagaactgcttgagaagcagcgcgagatcctcagtcatgctttgaaaagtaccaagtacggaaagctttggcgcgagtttgacgagtctcttgtccacatccctcagaaacggcgtttatgtaatacattagatgccgctcactttttcaatactcatacgctggcaagcggcctaactgaaaaccgactcatcgcggcagtaccaggctttctaactgcgattggcgtaattggaaccttcgcagggctccaaatgggattggctgaattaaatgtcacgtctgaagatttcaatgagcttaaaacaggaattgccggactgattggaggtgcgtccatcgccttcatgacttctgtttggggcgtattaaccagtgtgatttttaatatttatgagaagtcacttgaacgcagcattcgaggaaaaataagtcagtttcaaaatgaagttgattatttgtatccccgtataacagcagaacaaagtctttccaatatcgaagattcttcccgacagagccttgaaaagcttgctgagctggacgaaaaaattggtcacaaaatgcaagaagcaatgcgggaagcatcaggggcgatcagtgaaagcgttgcgcaaagcttaaacagcattcttgccccagcaatcaccagattggttgatagcgcccactctgggtcggagaaggcgcttgaatcattgctagagcgattccttactggtattggttccgccggagaaagccaaagagccatgatggagcaagccgctcgggaaatatccagcgcgtctggcggtatgactcaaggtctaagtcggttcaccgagaatcttgagcaacaagtaaaaagcctgattacccagagcgcaacggtaacaggggacatagaagcccaactctcacaccaactatcgcaacagcgagaacttgatgcttctcgccagcagcaattgcaacaagagttcggcggctttcttgtttcaatggaagaacaaatgcggaatctcgcgcatcaaagtacgcaaatgctcgaaaacgttcaaacaaccttaggccgacaaagtgaagagcaacagaagagagagatcgccagacaaagggttttgcatgaacagttcactagctttaataacagccaggtttctttaactgagtctgtagagaaacttttggcgcgccaggagcaacaacacacttcgcttcagagcgcattatcgaccttactggatgacttcaaggatctctccaaaagtcatagagaagccactcatgggatgcttcaagccggcgcagatatgaaagcttcatcaaatcaacttgggctactttccgtaaatatcaaaagcgctactgacgctatgaccgacaaaatacagaatgccgtgtcgctttccgcatccatctctgaacagtcgcaagctcttctccaagcttataaagatctttctgacaagctccagcttaccaatatgcagatggaagacacggcgaccaacttggataaagctgctcaaaccgcaagccaaggcatgtctattgttgggtcgcattttgatcagttgtcaacatcactaaaagctcatattggagacttagaaaaacagattgctgaattgctgtctgactactcagaccgcgttcaagcgcaaaccgcagagcgcttaaacgtctggaatgagcaaactaacagttatctaggagtcatgacagatgcagttcgcacactaagtgaggtagtagatgaagtagataataaagtcagtatccgcacaggaagccacggatga

SEQ ID NO: 10477 - DNA, 792 bp, Hahella chejuensis KCTC 2396
atgagaacagttagcaagcgctatcccagcgcacaagtagatgaagagaatccttactggatttccttctctgacatcatggctggcttgttagtaatctttgttctggcggcggtcgctttgattctcgagctaactcaaaaaagtgaacaatgggacgacgcgataaaagagatcgctaaagctgaacaagtcagaaaggatattctcagagagattgaacaagaattaaatgaaaagaatatccccgtcaaaatcagcgacaacgataccgtcctgcgaattcctgaggatgttcttacatttcgccaaggtcgtttcgatatccccaaggaccagttacatcaagatattgcactggaaattggcaaagtcctgttccatacaattagcaaaaatagtcgttggcaatatttggatactatttttgttgaagggcacaccgataaagttccttaccgaaactcatcaattaaaggcaactggggcctgtcaacatttcgtgcaatttcagtctggaacttctggaataccatgctggaagaaaacgagcgccttggatcacttaaaaaccatatggggaaaacactattttccgttagcggctatgccgatactcgaccagtcccttgcacaaacgccgacccgaatgtaacgctcaaagagctatgtccggttggtgtattagaagagtctgagtcccaacagaaaaacaggcgcatagacattcgcttcactgtccgccgtccagcgcttgaagattatcacgcagtcaaacaggctctaaagtga

SEQ ID NO: 10478 - DNA, 1482 bp, Hahella chejuensis KCTC 2396
gtgacgctaaagctccggtcaattgaattttctttacccgattggccagacaaggcttttaatggcattcgtgaggcagagaaaaggctagcggatatagctggtagcgcagggaaaggatcgacgagattccaagatacttgcagcagaataggacgggctgccagccaaggtgagtcagctattttagccaatataaatgacccaatcgaaattcgggcattgacttatcttctctcagtcccggctgaaaaccatgcgcccattatgctaacagagagaataattaagcgcatggaagaaataaaaagcccaatgagccgactttctctcatgcaattagtccgggctttcttttttcgtttcgataacctggtctcccctcttggcctacaaacactcattgcgctaataaaggaccaactcagaacgcttaatagaggcgcacaagggggactgtccacttatgcaagctcctcctctcttttattttccgaaacaggtccagctaagctagcggaaaaagcacaaagagaagctatcgatctagatgttctttttaagcgcctctctctcactggacttggtgaaagtcgatacctcacccttgcccgctgtcaatactatcttcgaaccctggaaaccatcccaatcaaccagagtcattcaatcctgtctgagatctgtaaaaaggaagtctttacgactcccttggacgaaagccggctagttggacatggtgttttggagatcatcattgaccggtctaaaggaagtgtaattcatacagattggcgcaacgccatattagcgattgccggagatccacgtgtaccgaaaagcgcagaaaactatcaacgatggtggtcgttactgggagaagaaagggttgcactaatgcggggttggctgagtcgcttcgacctcaagctgtttcttagcattctggaacaaagtgcaaaagacagcggagaaagagatatggaacgcatgttcgcgccccgtaaaaaattcatggaaggtttactggaagaaggcgttatagtcgagtctcgtttatttttgagtacttacgctacacgatatttaaagcagcggtataagaaggaagaccttccagcatatgcgagagttcgttcctctagaacttcaatgatttacctaaatatcaaaaacaaagtctatttagttgaaggtagccacagctttcctattaagattttcaacaaattagctccggaaagccgtttgcctaactataatattgatgaggtcactgacgaacaattacgaaatggcgaaatggaacgctttcacagaacttacggactcaacggttgcctaagtcagacacatcgagacttaatttggcaaaacagtgtacttcaatttatgaagagtaatggtgtcttaattagagcagccaaagtaatacgacaagagtcttatcgtgcttataaagaaaagtttggtagcaactaa

SEQ ID NO: 10479 - DNA, 3012 bp, Hahella chejuensis KCTC 2396
atgagtatacgagacttaattaataggcttaccaactccagtcatgacatcgatatctcctggaaagtagatccagttgaagggctggatttcatttttagacccgaagcactcgctgatattgaaagtcgcgctatcaacaacccaatgtttggcatccaatacgcctatcttaaaggactgcatgaagaaggagtggcaaggaataatgctaacggatatacgattccagcacattttgtcgcggagcttgatgatgacttctgtgaattatttcaattgccgcgcccttacccaggtctgtatcgatgcagaataaaaggaaataccgggcaggccgcattccatgtatctatggatgccgagcttcctgatggctgcgttataaacgatattgcactgtttggcccatttttgaaatttactgacgaagaactctaccggctatcacctccagaatggcaagccttaaatgctctaaaaaggcatattgatttacctgcggatagtaaaaacgaatacgaaaataactggcttatatttcagctgcagttagcaaaaaaagctggcgttccgcttaatttagcgcacttcaataagttagagatctcacttccaacttccattggtattgctgtagatgagcttcctaacggggacttatccctaacaccaacattcggggcggacatcgctatagacgatatcaagacccgcttggaccagctaccaacgaacggcgatcactgtatattgcgaatcaaaaataggtttgtattactagatagcaaaagacttgaagccgcccgtgaaattctaacaagcaggcatattccgaaagagcaagtcgccacatttctaagatccccgacagcttaccttaatgcagcccttatcgacctggatactggcttttcattacgcgtgcatggcgcagagaagttttctcaccgttacttcggtgatgttgagaagtctggtattgattggtttgccgtagataaatcaataccagaaccatttgaaaggataaaagacctggtagtctctgaggacaatttagcagagcttaatgaactcatctcagatgcaaaaaatggtggcgcagagctcattgagtacgccgataaaaaatttgatatatcagatacagaaaatgtcagtcagacaatagatcgcatacgagaagccctagccagcagcgatttggataaagctcctcccgcactgacagatgaaaaagaatcagatacaacgataaaagagcaagccgttgtatcaattgacagcaacgatgaaaaagaagagtttgtaagcaatattcctcttggcggcatcaacgcaacgatccagagcttcgcaaccgacaacttgaagcgctctccttatccacatcaaagtgaaggcattaaatggctacttgctcatatggatattgccatagagcatgatgcgcctaaaggagctttgctggctgatgacatgggcctaggtaagacttatatggctctagttgctatttcagaatggcttcgacgccaaaagcctgaagggaagtacgataagccggtgttgatcgtagcgccattgagcctcttggaaaactggcaggcggaggtaaatgaaaccttcataaaatcaccatttagtgacatcgttatacttcaatctgggagcgagttatcgcgctttaagataaaaggagctagtcgcgagacacagcaagtattcgaagacaaagacattattgaagactatgaacagattcgttattccctaaaagtgggaggactatacggatcagatcgcctggacatgcctcgtcgccttgttcttacgacttaccaaacactgcgtgactatcagttttcattgagcagagtagactggagcgcaattgtctttgacgaagctcaaaacataaaaaacccaaatgctctggctactagggctgccaaaggactaaaggcggattttaaactattagctactggcactccggtggaaaatactttgaaggacttttggtgccttatggacaccgcagttccagggttattgggggcatggcagacttttcgggaagaatatataagcccaatcacctccgcagatccggatagcataaacaatgagaaattgagaattggcaaagcgctccgagatagagttggcgactttatgttgcgtagaacaaaagaagaaaaactgcctggaatgccagagaaaaccatctactctggagacccaaacgacctcacggatagctacctccctacattaagcggcatgatgagcggcgctcaacttaagtattacgacgaggtaattgccagcgtacatggcagaaaaattgaagataaaagaaggatagttctacctagcttactgaaacttaaaatagcatgtattcatcatgatattggctcaggctacactccatcaaattcacctaaagagtttctgagacatgcagaaaactctataaaaatacaagcaatgctagatgtcctaaaagacatagagaagcggcaagagaaggtgctagttttcgccacttcgaaagccgtacaggcttataccagtgcattaattacaactttgttcaagattcaagcgccaatcgtcaacggtgataccaaagccgtagcaacacccaaagatgacctgaccagaaaggctatcatagaccgctttcaatcagagaaaggattccgtgtcttaattatgtctccaatcgcagcaggcgttgggttgactgtagtaggggccaacaatgtaatccaccttgagcgtcactggaatcccgccaaggaagcccaagcaactgatcgcgtatatagaattggccaaaaaaagaacgttaatgtttacctgcctatggcgcttcacccaaacttaagttcattcgacattcagcttaataccctgttaaacaataaggttactctaagcgacgcagttgttgcgccaactagcgttcaaccagaagacttttcaatttttaaataa

SEQ ID NO: 10480 - DNA, 2190 bp, Cedecea neteri
atgtcctggcttaattctattttagctgtgcttacctcggtggaaccccacaaggtgccagtcaccgttattggcttggtgagttttgcagtcatttgcttttttttcttttatttaattagagtctttaaaattatatttggcttaagacgctatacgcaatccattatcaccatcaaagaaaaccagccagaatctcagcttgagcatttaaaaaacctgtttcagcagcctgaactgaaacatgcctggagtgagtttgaagaatcgttacacccgcagcgtgaactggagaacggggacgaaaaaatcgttcgtgttcgtgctacagccccaagcgctagctttttctctgaacaacaactggttgatattccacttaacacggaattcttcaaacaccttcctggtatcctgactggcgtaggaattattggcaccttttatggcctaatgatcggcctcagtcactttgatcctagcactccagaacaagtcactagtagcgtaaataatcttctgcacgatgtgttgtacgcttttctgggatctgctatcgctatttttgcctccattctggttacctggctagagaagctgtccatcgctaaatgctacaaatatttggaaaaattcacggctgctctggattccctgtatgagagcggcgttggtgaggagtatttagcctcactggtgaaatccagtaatgaaagtgcgacccaggcgcgccatctgaaagagagcctggtcaccgatttacgcgatatgttgcttcagctggccgaaagtcagaaagtagagaatgagcgactggcggccacccttagcacgacctatcgtgaatcaggacaacaatttgctgaacaagtcagtggcgcgattgaaaatagcttgaagtcgccgctggataaaattgccggtgctgtgcagaccgccagcggcgatcaaagcggcatggtgcaaaacatgctgcaggatgtgctgaccgcgtttatggcgaaactcgataccaccttcggtcagcaatttacaagtctcaacgacatgatggggcaaactgttggcgcgattcagacaatgcaaaccggttttgccgcgttgttacaggacatgcgtcaggtgagcgatgattcccgacagggtagcgctcaactcattgaacaactgctgtctgaaatgaagtcgggccagcaagctttgcaggcaggcatgaatgacatgcttactagccttcagacctcagtggctaaaattggcgcagaaggtgaaggggccggtgaacgtatggcccgtcagttggagaaaatgttcgccgatagtgaagcgcgagaaaaggcacaatccgaacatatggctgcctttattgaagccattcagaactctgtccagcaggggcaaagcgccacaatggaaaaaatggcagcctctgtcgagtcgcttggtgaacaactgggtagcctgtttgggcagattgataagggtcagcaacagatttcagcgactcagcaagcgaatcagcagtcactgcacgaacagacacagcgagtgatgagtgaggtagacgatcagattaaacaactgatcgacactgttgccagccagcatcagggaacgacagaaacacttcgcttgctcgcagaacaaaccaaccgacagattcaggatatgcaaaacggcgcggacaaaatgcgtctggctgccgaacgctttgaacatgcaggtgatcgggtgtcggaagcaaatcaccttaccgctgacttgctgaataaagcgcaatcagcaggttcatcactatcccttgccaccagcgaactcacttccgttgtggctgattatcgtaacaatcgggaagctgttagcaaatccattgccatgctggagctgctcgccgcaaatacgcagtctgaacaaaccacacgcagccaattcatcgccgatcttcagctacatggtgagcgtcttcagggctacaaccgtgaagcacaggcttttatggaaaatgtcagtgacgtgctcgggaaagggttcgaagacttctctgaaggtgttttacgcagcctggataaaacgctgggcaaactggacgtcgaaatggcgaaggcctctactctgctcgcgggttctgttgaacagattggagagagcgtcagcgagcttgatgatgtcctgtcacgcgttcgtgcctaa

SEQ ID NO: 10481 - DNA, 738 bp, Cedecea neteri
atgtttggaaacgcatttggcgttaaaaaacgccgcagcgatgaagcagagaaaccattctggatctcttatgccgatctgatggcggccatgatggtgttatttctggtcgtcatggttgcttcgttgagctccgttacacaacgtatccaacgtgcagagcagggtgaaaaaacaagaggtcaggatatatccagattgtgtgagcgactggaaatacatgcccgtaacgtgaacaaaactatcgtggtggattgccacgataatcgcatcagttttggtgaagccgggcgtttcgatcacaaccggtttttccttaacgctgaagggcaaaaagcgttgcaggatgtcgtccccctggtgctggacgcagctgatagtgaagaaggcaagaagtggtttaagcagatcgttattgaagggtttaccgacactgacggttcgtacttatacaatctacatctctccttgcaacgttctgagtgggtaatgtgtagtctgctcgatagccgcagcccgctgcaaaaaagcataactgcagaacagcagatccaaatccgtaaacttttcctcgcgggtggcgtctccttcaataatgccaaggaaagcaaggaagccagccgtcgtgtcgaattacgtatgcaattcttcggacttaaagataaacgtgatggggctgatgaggtggatttccccgcagtcgtcaataaagaagtctgtcagttggtaatgccctaa

SEQ ID NO: 10482 - DNA, 1683 bp, Cedecea neteri
atgacgccagccctgaattctctttctcagcgtattgctgcgagactctcttccaatcaaagggaagacaattatctgcataatgatttccatacgttggcttccgctgccttcgatatggaaaaaaggtttgataaagcagaaaaaatcccatcaccgccacaagaaatgcggctggaggctctacgtcgccttcgtcttgcaaaagaactcaccgagcgagaatggcggatggtattttatggtctagccgataacgacccgttatatccagaccgaccaatcttgcttgaggatgatgtattttttcctgaggtcgacaacgctatcatgaagcggcttgaatctaaggaattgaaacgaaaggattgggcagcgctttgttcaagttattttgcatatcagcatgaatctcctgaggaaaatccacattggtgcgtactacgtgggcacatcgcccaaggctactctgtggtgaaagccgctatccgcagagaaaagtcgtggatgaaaaccattgagttttatcacgatatttttacgccgcaagcgggcggcgtgatatcccaacagctactttccggtgagaataactctctatcatcactggaaaaaatcgcgcaaatccccgatggcagctggttgtggaagcgtattttcatggtgctgttggcacaactcgatacgcttgacgatccacaattcttggaaaaaattagctggttattaggtctggctgcgcagtggctacgttttcgcgacgacattatgacggcaacgctgacgcgttattaccattccacttatcgcgatcaggctcatacagcactgaaacaggccgcgctggaatactgggataacccgcagctaaaaagccagcagaataagtggaatcaatatgttcctgagcccgttgcggctatggtgcggggttggctggcaaaacaagacctgatgcacttctttgaactgctccgcggcaatggcgatgttgaccaggcaaggttgcactattggctgcgtttcgccaatcagatgggattcactcgtatcgtgatggggcctgatgcctggcacgatcgtggtaacgactttatgaaattccgtgaggagaatcgtggacggctgagtcatttgcgtggtggacgtagctttgataacgccatgattatgcagattaacgattacattttcgtggagttttccgggacagggaacgcaatgtacgcttaccgagtaggtcaggcaccgttcaatccagagacaggttcattagatattaatatccatttaaaagataaataccgtaatgttcttcgactgccgcatacccctcgggctgagggctataacaaggtccgtatcaccggctggatgttgaaatacgacgatgagctgcgcaagctaggcatccgttggatggctgaagaacccatcaagtttgtagacaagaaagctccctctcccgtctcggtatctgatgttaagatcatcaacccattgagagatacggccatacagcgtctggttgaaaacacctcatgtgtcgtcagcgataaccggcaaaaaggtggtgtgctgtctgtgcagctcaaatcaccggatgagacaacggaacgagagttgctccgactcggtttcgcccccgtgactaaagaaccacatcgctactggatcaaataa

SEQ ID NO: 10483 - DNA, 3252 bp, Cedecea neteri
atgctcaaacgcctgttaagtaaactgacgggaaaccgtcagcagatagaacgccacctaaagaatcaataccaggttgaggataacggactcagctttccgctatcgctggttgatgtgccggagctttgggctctggcatcctggcttgaacaactggctgaagaagactatctgatatcacttacagaccggtggttgttgagctgggatgcattgtaccgtctgttggaagatgaagagcatgccagtagcctgcctctgattggcgtccctgaggttttgccattacgcgcaagtttaaattcgcgaggggcattaagcgacagtgattttcgcgtttggattgctgaatgggccacgctgccagcgcgtaagccgatccgtttcagtcgtaccggtgccattttaacccacgaaaatcagcaatacctgttatcgcgggaaaactgggcactcatacaggcaacagaacaactcagtgcacagcagagtcagactcctggtgaaaccactaatcagttgggatgggccgctatccgcaaatgtgcaaagcaagcagcggcaaaatttgatgattatttagaaaaaacgcatgtcgtcaaaccaacttcattgtcattacgtctgcgtaaagcaacggttgccgatactgcggttatcgaaattgagccccatttcgaggaccagcctgctaactggctgggcagttttgacaagaattcgcaggttcacgatagctatcgaatccccggcgaaaatggcgaactcagccacgtcatcattcctcccgaagtgaaagaagtcctgaatttaatacactccattccaggccgccgagtagccggaagtgaagctctgtcatttgttcgcaacccctacacattcctgggtgaagatgccgctagcgtgattgcccctgaagagcatgaacaggcactctttgatgcccatattttcttccatcactttagactccagccccgtctaaatgatgagaacaagatagaggatattacgttggttctggagcccgtttcgccagtaccacaaccggaagtcaccttcctcttttccgccccttgggagctggataaatttgttcaggcattgggaatcagtgttgcggcacaaatgcctgcaggctcctggcagggttacgagctggaactgagccaattcaccgaacagcaatggcattattgccagtcactattatctcgctggcaacaggaaatcgaaggtaaagaattcgatgatgttctcgatatcgataaatatggcgatcgtgttatcggtattggcgagttcgaaaaaatatcatctccctggctgaccaaagcgcaaagtgaaaattggctccccgatgacatcgatttctctacattttcggtcgaaacactggatggctggcagcctgaaaacctgcaccatctcgatgaactgcaggaaagaatcattcaggcagaagcagctggtgaaacgcatatcatctccccttggaatgatgctgaattaccactggatgcggctaaaaccttcagtaagaattgggaaaaacagcaaaatacggcaaatgaatcacagggcaatgttgatgttaaagcggctcgggccgtccttaaaattgaacagaatattgaagaagcggcctacatcaaacagcgccgggattcgctcctcaatgcgcgtcatgccgagcctgaaattcccctaagtctgaaagaacatatccagctcaaagatcatcagcggaagggtgttgcgtggctccagcaactctttcttctctcaccacaggaaacggcaggttgcttactggcggatgatatgggtctggggaaaacgctgcaaatcctgagtttcctggtctggttcattgaaaaattcccacaagaaccgccaagtctcattgttgctcctgtctctcttttagataactgggaacgtgagctggacaatttcttctataccgcaggaattccggtattgaaattgtatggcgagaccattaaagcggtgaaataccccaaacaggctatacctgctcatctgcagtctcaggggatcaaaaacctgcttaaacctggctggcagggcgaggcgaaaatcatactgacaacctacgaaacgcttcgcgaccaggagttttctctggcacgccagccgtggtccattatggtgtgcgacgaggcacaaaaaataaaaaacccagctgcattaattacacatgcggccaacgcggtacaagccagattcaaagtggcatgcacaggaacgcctgtcgaaaacacacttgtcgacctgtggagcttatttgattttgcccagcctggattgttaggtgcactaaatgaatttggtaaacattatgttcgccccatcgaaaacgaagatggtcgcgatacggaacggctggaaagcctgcgggcgctgatagacccccagactttacgccgcactaaagaagaggttgcgcgtgatttacctcagaaaattgaagtggaaagctgcaagcaattgacgttgtctggcgtgcaaaaacagctctacctttcgtctgttgcaaactggcaacagcagcaagccctgagtgaagggatgcagcaggccggaaccggtatgttaggtttgttacaccgactgaaactcatctgtgcacaccctgcagtagttaatccagagccacgttttcgtgataactcacccaagctgaattggctgctgaaaatactcgcagaaataaaacacaccacgaaagataaagtcattatttttacggagcttcgagatttacagcgcgaacttcaacatgctatccaccaaaagtttggtttccgccctgtcattatcaatggtgataccagtactaaaagtcaaagccaaaacagccgacagcgcctgattgatgattttcaggctcagcccgggtttggggtaattattctctctacggttgctgtcgggttcggcgttaacgtccagaaagccaatcatgttattcatttcactcgctgctggaatccagccaaagaagatcaggcaacggaccgggcgtaccgaattgggcaaactaaagacgtatatgtctattacccgacggtaagggactctgaaatcattacttttgaagaaactctggatgacctactgcagcgccgacgtgcattggccagggatatgctgtgtgcaacccctgatttgagtggtgctgattttgaggctgttgttgccagaaaaccttcgatttaa

SEQ ID NO: 10484 - DNA, 1926 bp, Erythrobacter sp. SD-21
atggaaattaccgaatggcttggccatgggctgatctacttcttcacggaaatcccgctcatcggcgatgcgatggcggcatttctggcgatcgtgctgatcggaacagcattcgcaatcgcgtaccgttacaagcggcaatatcatgccccccttgctgatgcgatcgacgcccgcgttcgcctgctcgacgagataaccggcggcagcaccgccgatgtcgatcaggcgcgcctcgagttcgcgcgccgcttcaatgatatcgacgcccagatgatggaggcgaatgacgctgaagcgcttccgcttcgcagaacctgggaggaatatcgcgaaacgatcgtcgatccctcggccgatgtcctccagaactccgctcgtcccgaacacttcttcgtcaatcttggcgaccgtcatcgcgggctgaactggtttgcgaatattttcatcgccatcggcctgttgatcaccttcctggggatcatcgcagctctctcgacactcgacttcagcggcggtgtcgatgcgatgcaggagcggctcaatgatctcatgaaggtagcgggagcgaagttctgggcctctgtggggggcatcgtggcttccatcgtgcttcgctcttacgactaccgcttcggcaagcgcatcaatgatgggctgtccatgctgtgtgacaaactcgagcatggaatggcctatctgccgccgcaacggatcgcgagcgatcagctggcacagctcaaagagcagactccggcactccgcaccttttccgaacagcttgctgccgccctcgacggggccttggaaaagcagatggcgcccatgatcacgcatctggggtcgatccagcaaggcatcgacaagatcagcggtggcgggggtgaagccgtccgcgacgcgatcgcttcaagtgccggtgcagagatggcgggcctcgcagatgccattggcgcaatgaccgtctcgatggccacgatgtccgaacgtatcgaaaaacagaccggcgaagctgaccgccagatcgaggaagctgtcaggcgctttggccaggcttcggaagaaatgcggtcagcatttggcgagctcaaccgcaatttcggcgtcgtagcggaccgcatgcgcgaagaaaacgagcaggcaagcgagcttgccagacagcggatggacgagttgttgagcaatcttggcaatacgctcgacgatatgaaatccggactcgcctcggcggccagtcagatgggtgaagcctcggcacgcgcggcgaatgacgcggcccggatcggccaggaggcaatggaaaagtcattttccgagttcgttgaacggttcaaccagacaggcggcccgctggtaggcagcatgaaagacgcgggcgatgccatttccacgtctgcggaccgtctctcgaccgcacaaagtgctatcggagatcacgcgcgagcgatcgagcaagtcgccgctcgttcgagcgatctggcgacggcgttcggaacggtggccaacgacgttgaggcggcaaccgcgcctgtacgccagtcggcagtctcgatagccgaagcagtcaaatcggttgagaccatcgtttcccgaaatgcgcagtcatccgagagcgctcgcgacgaaatgcgccagcttgcggcagcgctaagcgagaccgcgagtgcggcctcctccgcatggtcggaatatcgtgctcgcttcgaagatgtggaccgcgctcttggtgacgcaatcgagaagatctcggatgctgccggcaaccatgcgtcgaacctcaacgaacgggtcggccagatcgacaaggctctgggcgatggtgtggcgcagctcgccggcgcactcgaaccgctcacgaccctgcgggataccgtcgaggaacttgccggcatccttgcaaaccagaacagggaagccgctgaataa

SEQ ID NO: 10485 - DNA, 729 bp, Erythrobacter sp. SD-21
atggaaggcgtggttcgccggaagccgcctgaggagggcgaaagctatttcatgtccatgacggacatgatggtcggcctgcttcttattttcatcatcctgttagcctactttgcccttaatctgcagaccaagaccgaagagctgaccggcgcaaacaggacccgcgccgagatcctcaacgatctgcagcagtccttgaaagaccgagggctccaggtagaaatcgacacaaagaccggagttctgaggctccccgacgatgtcctgttcgacaaaggccaatgggaactgacggagagggggcaggccgccatcagcaaagttgccagcgccatggttgaggtcctgccgtgttataccgcctccgatctttgcgaaggcgaacgctcgccgcatttgatcgatgctgtctttgtcgaggggcacacggactccgacgtcatgtctggtggcatgaacaactatggactttcggtgcgccgggcagagacgaccttcaccatgctccagcgcaaccaacccgccctgcgcggttttctcaataggccggcgggagaggacggttcggcaccgatcctaagtctgagcggctacggtcccgaccgtcccgtcgatcgtggagactccgaagaagccaagaagcgtaatcgtcggatcgacttgcgcttcctgatgacgacgccaagcgccggcctcgaccgcgatattttgaggcaggagcaatga

SEQ ID NO: 10486 - DNA, 1290 bp, Erythrobacter sp. SD-21
gtgggcgaagcagagcccgtcattgagcttaagccattcctgcgaggagcggccgataccggtgcaaacgggttaccgcggtttcagctcaacagggtcctgcgcggcgcatggtgcgacccggagttcgatgagctgggcgtggcggcgctcgaacgggccgatgtcgatcatcggcgcagttccgaccaggccgtgatcgatggctaccttacctatttcccgacaggccgctcgatcatgccaatgctagcagaagctgcatcccgagctgccgttcggcatgactgggcatggcgcgagcgcggcgcacggtgggatctgttcaagccgcagatgggaccagccaaagtggcgcgcgattttgttacgcgcgatgcagacggcatttcccatttgatgcgcgagacaggtcttggcgcaaaccttgcggcgagcgggtttggtcaggcaactttcgccgagacctgcaaggcaaccgcagagcttcagcctgcagaagcagtcggcccgcagcgcagtatcctgcgcatgtttgatacagaagcgcaggcgggtcagttggaactggttgtccgcgccctgctagaaccctggatcaggaccaaacccgaacccgagcatcgaaaggcaatttccgagtttctgctcgatcaggtgggtgatccgcgtctccagcgtacccggtgggacaggatcgtgcgatcgctcgccgagtcgatcggtgaagaacgtgcgcacgaggtcactcaggtgttcaagcgctggcttaccgaagtcgccatgcgcgagttcttccgtgccatcgcaaagaccacggatcggcctgatcagtgggcacagcgcgagaacttctggatggcctacctcgatgaaggtctcgtcagcgatgcctggcccgctttgggcatccgggcgcgcaacaggatcgaggatctcattcgtcaaagtggtgaacgccctgaatatggcatgatccggggcggtcctgcctcgtcttcatccatcatcatgcagataggcgacctgcgcatatcagagtggagcgataacggatcctgccgcttctggagtgacaccgatcccggagctccgaaactctacgcaaaggtctacgacggcgggaagctgcgaaccaccaacggacggtcggatttcgagtatgagtctcatgtccctgcgagtcctgggtgggaaggcaagttcgccggtatcatccatcgccggacatcaatcgcgcatccccgtttcgggagaggccggggccgcaactggaatgatcgatggtaa

SEQ ID NO: 10487 - DNA, 3813 bp, Erythrobacter sp. SD-21
atggtaacgaccaagttcattgccacacagaacgagggcggcggtgagacgattgcgcttctccgcgaacagccaggcgggcttttccggcgagcatcaagcgaaattgtgccggtctcggagtggcctagagtagcccccgaagctggacaggccgctctggcgctggctcgagctctcgatgatggtcaaatcagcgaagaggcggaaggcatagcccttccaccgcagatcgttgcacggcttgatgaggccgacgccttcgccctcggccttccgccggccacgtcgatgacccttcagctcaactcgggaggttcgctcgctgaaggaacaatcaaagtcgatatgagatgggtccgccgcggtggtctgccggttcgagccgacatcgctggcgcgcgtctgcgagagggcgggcgtgtgggacgaattcctgagccgatctactcggccttccaggccgcacttgcagtcaacgcggctgatgatcctgatcagcgccgcgcagcctttgccgagcttcgttcgacgctcggagacgacatcggcaccggcatcgaggcggatggctttctcgagcgtgtccggattgcctatgccgccaatttttcactcaacgcaaagaccgaccatggacgtttcgacttcgaccccgtcctcttctcgagaaacgtaagcgagagcgctgagggtgacctggtcgacgaagaagaagcgtcgctgcttaccccgcaggacaatcagcattttcagcgccggttccggggtcaggacggcgggcggcgaagctatctgctttccgacggaacgctccttttcctcgacccgatgctgggcaaagccctcgacatcgtgcgcgcaaagcaggtgggcacctcccaagaaaaacgcgaatttctgcgttcgccgcaacgtgtcctgcgtgaagagctcaagctagacgcggcagacgatgacgaggccgctgatcgcctcttcatcgagacacagcagttttccgagcgggtcagcgggatcgaggtctggcaaaagccggtcttaccctggatcaaacccaagccgaacagctggctgcccgaagggtttggattgcggatcggggatccgcccgacgcgcgtcatgttgagttggctccaggtgaagctgaaacgatcgcaagcgaagtcgagacagcgattgacgcaggcaaggaaacgatcgcctggcgcgacgaaagcatccccgcgacgcctgcaaccctgcaggccgcgcgagcaattgcagaccttgaacgtgagatcgctgatgaggtcgagggacgcgcctcggacagaaccgaacgcgagagcgtcgatatcttcttccttcaggtcggagagaatttcgagcatctggactacgcgcggctgcctcgtcctgacgccgaagtgcaggatttcgatgctcccgggctccccaaaggactgaaatcagaacccaagcctcaccaggtgcaggcgttcgcatggtttgccgaggcctgggagcgccgcatgccgggcgtcttgctcgccgacgatatggggctcggaaagaccttccaggcgctcatgttcctgctgtggctgcgcagcaaaacgcctcacccgaagcccgtcttgattgtcgcgcccacaggtcttctgcggaattggcaagccgagctttcgcagcacatcgaggcagagctcatggggcctgttgtcgaggcgttcggcgccaacctgcgcaatttccgtctcgaggctgggagcgacattcgcgggggaacctcgcgtctcgacgtgtccgaatggaatgaggccgggatcgtcctgacgacctacgaaacaatgcgcgattatcacatgagcttcgcgcgcattccgttcgctgcaatcgtctacgatgaaatccagaagctcaagaatcctgccagccagatgactcgtgccgccaaggcgctgaacggcacaatccagatcgctatgacgggcacaccggtcgagaaccggctgcaggacctgtggtcgattgccgatacggtctatcctggtttccttggctcgagtcgggaattcgagagcagtttcccggcaaacgatctcgagcgccttggtgatctccagcaccgtctgatcgagcgcgacaaggaacttccgcctttcatgctgcgccggatgaaggacgaaatcctgaccgggctgcctgagaagaaggcccgcaaatatccggtcgagatgccgaccgcgcaagcgcaggcctacgacctcgtgctggccagagcgcgagcgctacgggaaagcggcgaacagggtgcgatgctcaaagtgctgcatatgctgcgcggtacatcgctccacccgtcaccgccgcgcggaatctcgaacatcgacgagtacatcgggcaatctgcacggctgcagaagaccttcgaaatccttgaggaggtcaagcagcgcggcgaaaaggctctgctattctgcgaagatctcgagatgcagaccttcctcgcgatggcaattcaggagcgcttcgcgctcgagcgccgcccgatgtgcatcagcgggaaggttgcgggccataagcgccaggagatggtgactgcctttcagagttcgccggcctcattcgacgttctcatcctgtcgcccaaggctggcggcgtggggctcacgatcaccgcagcaaacaatgtgatccatctgtcccgctggtggaatccggccgttgaagatcaggcgacggaccgcgcctaccggatcggtcagaccaggccagtgaccattcacatcccgatggctgtccatccggacgaagcgatcggaccttcaagctttgaccagcgtctcgacgccctcatggagcgtaagcgttcgctaagcaggggtctgctcatgccgccggagagcgatcgcgatgtagaagacctgctttccgatgtgctcgacgggcgccctgcagagaaccgtgatcgaagtagtgcgtatgccgccgcagggcaggcgccagtggaccttcaagacactaattacagcgcgagtattcgacaggcggaaccgcctgccccaccagtcggacagccggaaatcgaagagccgacgagagacgaggagagtgctagctcgcgcggacccgcgagcgacaacacaacgagttccgcaaaccttgatccggctgcggagcacgcggcagaaccaggattagaagaagcggcgcgcctgcatcctcactctgatcctggcgagacagcatcgagcaatgccgagcgcaaaaaccggcgccccattctctctgtgcgtactcccgtcgaggcggctgaagcgcgcgttcccttcgttcagcgggtcgtgtttgaacaatatggacaacgcgactggacgattttcgagcagtacgcgcgcgacgcacgaattgaacggctcgaaatccaggacccctattgttgcgctgacgagcaggctcgcgggcgcctcatcaatttcatcggtcgctttgaacagctcgcttcgggaatcgcggccgtgcaaatcgtgacgttcgacgccgattctgtgcagactcgtgaccctgaaagcacgcgtgaccagcgccaggaccttgaagatcggtggaagcgtatgctggcctcggttccccttcacctcgcacagaagtcacggcggtcgggcggcgacctgcacgatcgtttcgtgaaggctaaactggagaatggcgataccatcatctgggatcttggacggggtatcgacggtgtcatgaacgcgcgctggtcttgcgttgtgaatgctcatcgggaaagatctgcggggcgagacccagcggttcattga

SEQ ID NO: 10488 - DNA, 1992 bp, Cupriavidus taiwanensis LMG 19424
atgacgaccgatttttttgccctgctttccgatgtgcttcactggggcatcggcggactgctgctgctggcgcttgccggcttcgtcatgcaatttctccggccagccttgcggacgcgccgtgaattggggcatgccttggagcgactggagcaactgaaggctcagggcccggtactggatctggatcgcgtggcgagcgacgcgatgctgagccccaccctgcgccactgctggaacgagtaccgcgacaccctgcacgggcaaaagcaagccacggccaccggcatgatggaagtggcgcgttggcgcgccaccgcgatggcgaatggcttcttcacggaacaggcgctggtcgagtcgccgctgcgctcggagttctacaagcaccttcccggtatcctgaccggcctgggcatcatcggcacgttctccgggctcatccttggcctgcagaatttccatgtctcggacgatgccgccgccgtgcgcggcagcctggaatcgctgatctacagcgtcggcggcgcctttatggtttccggggtcgctatctttctcgccatggcggtcacgaccgtggagaagatgatgctgaacggccgctacacgcaagtcgaagcgctatgcggcctgatcgatagcttgttcgactccggcgccggagaggaatacctgcaacgtctggtcgaggcgtccgaaacatccgccacgcaggcgatgcagatgaaggagtcgctcgtcacggacctgaagcaggtgctcagcgaactgacgcagcagcagattgcgaccattacctcgaccagcgcccagctggggcaatcgattacgcacagtctgtcggagggccttgccgagccgctgcagcgcatctcccatgcggtggaatcggtgggcaacagtcagggcgaaggtgtcagcaagctgctgatggacgtattggcaaatttcacggcgcagatggagggcatgttcggcacgcagatgcgcggcatgaatgacatgctcgtgcagaccgccaacaccatccagacggcctcgctgcgcttcgagcgcctggccgagcagatccaggacgccggcaccggcgcggccgacgccatggccaagcgcatggacgaggcgctgcagcagatgcaggcccggcaggccgaggccaacgaccagatgcgggccttcgtcgaagagctcaggcgaaacgtggccaacggccaaagcgagtccgccgagctcacgcgcagcatgatgcgggacctcagcgaaagcaccggcgccctcgtcaggagcttgcaggaccaagcgcacgcggcatatcaggcgcacgcacagcgtcaggccgacatggaagcgcagaacggcagactggtcgcgcaacaggccgagcagcttgccggcctgaccacggcggtcaacgagagtagcgaagcgatgcgccagaccgtggcgcgcctcgaagcggccacgaacgcgaacgtcgagcgcatgggtctgggcgcggagcgcctgcagctggcggcgaatcgtctcggcgacaacctcgacgcgatgcgcgcggccagcgaaggcatggtcggtgccaccggcaagctcgaccagtccgcgcgtacgctcgataccgcactactcgccacccagcaggcgctgggcgagcaaaaggcagtgcgcgatgccgtgaccgccatggtcagcgccttgcgcgacaccgtcgagaatgcgaagcgggaagccggcctgacctcggaactggtcggcaagctggaagccgcttcccggcaacttgcgcaagcccaggatgatgcggccaactaccttgaggaagtcaacgatgtgctgacgggagcacatggtgcgttcgcgcagcaggtcgaggcaacgctgcgccatggcaacaaggtcttccacgaagaactggcgcaggccacatcgctgctcaagggcgcgattcaggacctcgccgacgtgctcgacaccgttccgaccccggcatga

SEQ ID NO: 10489 - DNA, 759 bp, Cupriavidus taiwanensis LMG 19424
atgcttggcgtaaaaatggcgccccgccggcgggggcgggaggaaggcgaaaagcccttctggatctcgttctccgacctgatgacggccctgatggtactcttcctcgtggcgctcagcgtggcgctgctcgccgtgaccaaaaagatctccgatgacgaacgcgaggagaaagcacgcgctgagcagatcagcggactgatgaccgaggtcaggaaggtggccgagcagttcccgggcgtgcgggtgatcgaccgcaccatcgacttcggcccgcggggacggttcgagcgcgagggacagaacacactctccgcgcaacagcgggcgctggtgcgcgacttcacgcccaggctgctggagcagttgcggaccaccgaggctggccgccactggttcaagcgtgccgtggtcgagggctatgccagccagaccggcaagtacctgttcaacctgaacctgagcctggagcgcagctcgcgcgtgatctgcgaactgctgcgcgagccgcccgccggcgacacgcgactgtccgatgccgaccgccagctggtcgccacgcgcttcttcgtgggtggcgcatcgttcaattccctgcgcgcgaccgccgaggacagccgccgcatcgagttcaagctcgagttcaagacccgccaggaacggcaggaggaacttgcccagccggcgcccgccgcagacacagccgccctgttgctggcgctcgacccgaaagaacgatgccctatcgccgaccgatag

SEQ ID NO: 10490 - DNA, 1665 bp, Cupriavidus taiwanensis LMG 19424
atgccctatcgccgaccgatagacgcgctgcaggcccgcctcgcagaagccatgtccgaggcgcaagtgtttcgtgcgctcgaatggggccacccgcgcgccatgacgcaggcgctgcgtgagctccgccatggcctggtcgacgtcggcgaggtcgccccgtcaaaggatcaggtccaggcatcgctgcggcgcttcggcgcgactcagcgcgtggagaacttcacggaactgaagtacgtgtgccacggcatcacggtgcccgttggcgacgagcgctggcgagtgatcgacaatgggccgctcttcaaccggcttctcaccctggtggacgagcagcaggggcggccgaagcaataccggcgctgctatcagggcctgttgcatggatttttcgggtttgaccgccgcgccagtgccgcctcgccagcccaggtcaactggaccacgctgcgcggctttctcgacagccggctggaccgcctggtgcagagcgcgaaccggcgcgggctctgccccacctggctgggcgccctcgtcgaccatcgcaatctgctgacggacaacccgtgccgccgctatgccgacgcgctgatacagggcaacaccgacgaactgcgcaaggtctgcgccgaccttgggatcgccaatagttcctgggtgtgggacgaagcgctcatggcctacgtgcggacggtctgcgaggccgaggaccgcgcgttccacgatcgcttgtcgggggtgctgcaactggtcaacggccgcttggatctgaaactccccgagacgctggcgaagcgggcaacggcaatgaccgtggtgcgctacgcgcgctgtggcgagcggcccgagcaccaatccctgcgcgatacctgccttgcgcggatcggcaatccctggatgcagcgcgtagcctgggatgccgccgtgggcgacgagcctgcacgcaagatggtcgaaggctggatcaagcgccgcctgatccgcgatttcttcgaacatctggcggccgatggcacggccgatcgccgacgcctcgaatactggctgaagtgggagccgcagatctcgcagatgtggttcgtgctcgggcgggatgcctggcgcgaccgcagtgccacgttccaggccctgcgcaagcgcatggaaggccaggcgcgggagttggtcgacagtgacgacggcaataacgccttcatcatgcaaatcggcgatctgattgccatcgagttcggcaagaccaacaatgcatgctttgtctaccatgctgccaatttcaaggcggacctcgacgcaccgcgctttgacaccaaccgggacctcaagcaacgcctgaatggcgagcgcctgactcacaacggcgcctgggaatggaaattcgacgagtccctgaaatcgatgctgcgatctactccatctccacaacggcagcaaccggccaccgacatccgatccggcgcgtccccctcccttagcgccgccgacttccgcgaaatcgccaagctgtgcgcggacaacagtgtcggctgggaggataaccggcgccacggcggcgccctctggattctgctcaccgagcccaagcgggtgcctcgcctttcggtcatgctgcgcagcctcggctttaactacaaggaaggcaggggtttctggatcaagggataa

SEQ ID NO: 10491 - DNA, 3294 bp, Cupriavidus taiwanensis LMG 19424
atgtttggcgcactctttggcaagaccagaccaacgccggcgccggcgacccatcgcaccccagctgtcagcacgactgccgagggcctgcgttacccgtcgcccgtcgactcggccgaagcctggctggcaaacccgttcgctgtagccgagcaccaggaccttggtgctcggctggcccagctgcaccaggaagggttgggccggtgcgaaggggcggcgtttctgctgccctggcacgacgtctatgcgctgcttcgccaccccgacctgtccagttaccgcaatccgctcgggattcccgcggacacgaacgcacgcccgcgcctgagcagtcgtggcgcaattgcggacgccggcttttcgatcctgctggacgaatgggtggacccgcaggggcggccacttcagccctcgcccaagctgatcgggcgtagcctgcacgccggcgcgaccgtgtcgctgctgccgccgcccgtagccgccctactcgaccagatcgagggcttccatgccacgccggcggccgagcgcacgcagccgttcaaggagcgggcattcggcaacgtgcgccggctcgccacggcaatcggctgtcccgtttccgactacgtcgcgcgcacggtcatcctaacgcccgaacgtctgcagctcgcgctcgcgcgacgcggcgagggcgaggcgagcgtcacggaagtcgtccccggcttcgacgacgcgccgccccagtggctcgccgcgttcgaccgcctgccgctgcaggacagctacgacgttcccgacggtccctcgctggtgcgcgtggtgctgacacccgacgtgaaggccgtgctcgccgaggtcaagcgcatgcccggccgtcgcgtcgcaggccgtcgcgctgaggcattcgtgcgcaatccgtttgccctgctcggtgaacactcccacgccgtactcgatgccgaccagttcgagcaaagcctgagcgcggcgggcattcgcttcaagcggttcacgccgcacgccgtacgggcggagtcgggccagctgacggcggtcatgctgctgatcgaggaaattggcgaggcggcgtcgccggccagtgacgcgctcaccctgacgttcgccacgcctgacgaactggcccgcttcaccggcaagctgggccgctgcctcgacgatggctcgcaatgtgtgacttgggggccgcaagaactggagatcctgggcgacacccctgccgacctggccacgctcgagacctggctacgcgaatggcaccagcccgcgctgtggacggcggcggaagtgctggatctgagccactattcggagcgcatcgaggacatcggcacggaaaagcccgtggtggttccggtcattgccaggcaggacgaagacggcggctggttcgaagacaatgccgccgcggggcttcggatcgatacgggggaggatcgcacgccgaccttcgtgccggtggcgttcagcgagattccgtcgctgcaggcggccgtcgaagccgccgaggcggcgggcgcgaccgacctgcaactgccgggcctcgccgacccggtccctgtcatcgaagcccgccgcgccgtcgacgcgctgctggccgcgcaggccgcgctcaggcgtgccgaatttgatccgtccggcggcggctccggcggtagcgccaagaagcgcctgctaatcaagcacaacttcgaggcactcgactacaccgaagcgcgcgccgaccggctgcagatgcccgacggccaggcaccggacctgccgcaatcgctgaggccggaggtcgcgctgaaggcccatcagcacgtcggcatcgcgtggctgcagcatctttgggatgcctcgccgcatcactgccgcggtgccgtgctggcggacgacatggggctcggcaagacgctgcaactgctgacattcatggccgcctgcttcgaacgcgacccgtcgctgccacccgcgctggtggtggcgccggtcgcccttctggaaaactggcgcagcgaactgagccgcttctttgcgcccgagattccggcgctgaccctgtacggcgatgcgctgcgcgcgctgcgcgtgagccggcacgagctggacgaggaactgcaggcgcagggcgtgacccggctgctcaagcgcaactggattggtgacgcccggctggtcctgacgacctatgagacgatgcgggacctcgaattcgccctggcgagccagcagtggtcgatcatggtctgcgatgaggcgcagaagatcaagaatcctgccgccctggtgacgcgctcggccaagaagcagaaggtccgcttccggatcgcctgcaccggcacgcccgtggagaacacgctggcggacctctggtgcctgttcgactttgtgcaaccgggcatgctcggcgcattgagccacttttcccgcacctatcgccagccgatcgaagccaagaccgacgcgcagaaggccaaggtggaggaactgcgggcgctgatccagccgcagatcctgcatcgcaagaagaccgacgtcgccaaggacctgcccgccccggtggagcacaccccgtgcaagcagctgccgatgtccggctaccagcaccgcctttacgaaggcgccctggcgacgctgcgcgagcagcgcgacaccaacccgtcggcgcagttgcaagcgctgcacgccatccggcagatctgctccgacccgcacgggtttgccgaagccggcacgcgcgacctggcgatcgagcggctggtcaacgaatcgccgaagatgggctggctgatcgagcggctgaaggcgctggcggccgaacgctcgggcaaccacaaggtcatcgtcttctgcgagtttcgggaactgcaactgctgctgcagcgcgtgatcgcggccttcttcggcttcgcgccggatatcgtcaatggggatacgtcggccgacccgcgcgtggcgcacagtcgccagcgactgatcgaccgcttccaggaccagcccggcttccacgcgatcatcctgtcgccgcttgcggtcggcttcggcgtgaacatccaggccgctaaccacgtcgtccatttcacgcgcacttggaacccggccaaggaggaccaggccacggcgcgcgcctatcgcatcggccagacccgcacggtcacggtgtactacccgggcgtgatcagtgcgcagtttccgagcttcgatgtacggctggatgcgctgctcgggcgcaaacgggaactggcagccgacatgctcaacgggtgcagcgatctgaaagcggcggacttcgcggacttcggttga

SEQ ID NO: 10492 - DNA, 2010 bp, Gemmatimonas aurantiaca T-27
atgattgagttcatgcttccgttcctccaggcggtctcaggcactggacgcccgatcggcgaatttctcgcagggattccagttgaaatccaattcttctgctatctgatcgcggtagtactggtcgcatcctccgcatatggcatcatcggagcccgtcgggttcacgccgctgctatggcagtgaagggtgcactgcagcagctcggcccacttgacgatgacacgcgactcctggggcgttcgttaggcagtatcgacggatggcgcgccgcggcaagtaggctcgctcccgctcaccacccgcttgcggaagaaatcgagcgcgaactagtgacttcactggatgtcgatggtagacgtcgattcaggctgagaaatcgcgaaggcggactatggacactcgagcgcctgaccgaacgttatgtcaatctcgactatctcgacgcagtaccaggaattcttacagcgattggactcattggcacattcctcgctatcgctttgggactctcgggcctgagatccgaaaataatgtcgtgattggtgtggacgccctcttgggcagcctcggtggaaagttcgtgtcatcgatcgcggcgctcctggccgcactcgtgtttcagttgttggatctgtgggggctccgcctcgcctacaaaaaaacccatcaatcgctcatcgatgcagtcgctgacggatttcccggactctcgccaacccaacagatcaccgatctcctcgaatccgcacaccggcaggagcaagctctttcaaacatctctagtgatgtcgtcaatcgattctccgatgtgttcgcatcaaatctgctaccagatcttggggcgctgcttgccaagagcgtgcagaccgagatgggccccgtccttcaacaggtagcaacaggtatctccgcactagaggacggcatccgacgcctagagtcaggcaagcaagagtcgatcggagccgagctgcgatcgctgacggaaaacctcgagacctccattcgccgtgcactcgagcagatgggggcacagttccgggattccctctcgggaaacacaaacgatgaattcaaacgcgctgctgaggccatgcagggaagtgcctcggtgctctccggaatgaacaactcctttgcagacatgcaggcttcgatgcaacgcatgttcgaggaagcggagaagcgtggcagtgaggctttcgctgagggcgagggacgcacacgggcactgaacgacctggtggagcgcctggtggcacaactcggcgatagtgcgagcgcaaatgccaaccaggtgcagcagctccttgtagaagcggtctcgaacatgggtggcaagcttgccgaggtcaccggcgaattggaacgtcgcactctcgaagcaaacgaacagaatcagcgcaccagtgaagcgctgctgcacaaagtgaccggagctgccgagcgaacgacttctgaaactgaacggttgctggccgtcattggcgagcgagcaggagactttgtcgccgccgccgatcaacttgctgaactacgggcagcggttcagtcggtgttggcggagacgggacagcgtgtgcgggagatgcagggtgcagccgactcgttccgttcagtggcgacggaagccggcgcaatgactcgcacgcttcgggaagcgcaggccagtcatctgaaagcggccgaaaccgtaagtggtctcgtacacaggaccggggaggttgtcgagcgacaagcggtggtagtgcagctctcccaagacacctacagcgaagccgcccgcgttctctccgggctcgatgaacaattggccagtgcgctgcagacgatctccacgcacatgcaggactacaatcgccaagtggagaaaaacttccagatcatcatgaattcggtgaactcgaagatgccggaactgtttgaacgactcggaggactgctgcagcaagtcacggattctgttgaagagctcggggatgttctgaagcggcagaaccggtag

SEQ ID NO: 10493 - DNA, 693 bp, Gemmatimonas aurantiaca T-27
atgcagaaaggatctggtgcggcatcgtcatctctgacggacatactcgcgtcactggtcgcggtgttcgtattgctgttcgttgcggctcaaaacaaccgcggtgcgggggtggtcacggctcgcgatgtgctcatcaagcaactcaggggagaactggttaccgcaggtctggacagtgcggcgatcgactccattccgaacgatccaagtacagtgctcgtgattctcccggacagcgtgctgtttgaacggggcgatagccgcatgtctgcggcagggcagaatgtcgtgcgaatcgcgacaccgttgctggcaggtgtcatttgcgctgatagtatccgccaaacgctcgatcaggttgtcgtagaaggtcacaccgacaacacgattccgttcggaatgaggccagaggctggccgcatgttcaatctcgaattgagccagcggcgatccatgaactttgttgcgacgagtacggccacgctagctgaacgcgacaccttgctcgagtgctacctcggcctagtctccgcaactggccgcggtcaggaaaatccccttcctcgcattccggccgactcatcacctcagcgtcgagtggtgctgcgcatccgcctcaagaccgagatccgggactccgtacgcattgtccaggatgtcataggagggggcggtgcagaaaatccttga

SEQ ID NO: 10494 - DNA, 1380 bp, Gemmatimonas aurantiaca T-27
gtgcagaaaatccttgactcgctgcgccgcgtgatcgccgtcgcggccatcaatgtggaatcccgactcgcactgactctcgatccagcgcaggagttgggaccattggagctggctctgacgcgcttgcgatcccagggaccgattgacggagcggggcgtccctccggaatcgatcctgatgcactctgggcgcgctggacaatgtcgacacagagttcagaagaattcagtcttcgggaactgcgggctctttgctgggatagccgggccgtcgaggatctgcgttttctggagttgctagaatctgatgggcatattccaaagcgaggcgccttccttagaggcttgtggcactgccaccagcatcattggcgcctgcgctcagccagtcgtctcgagtcgtacttcttgttggctacaacacaggctgaacaccggacgcgttggctagaacaactcaatgagttgccggagatgctcacagacaatgcagcgcgatcagttggccgcgcactgtttgcccgacttgacgccgttgggtcgaccatcgacaacctccgtctgacagccccgggccagttggcacaactggccttgcgggcctgtcgatccgaatggctggatgcattgaagctctacgcggagcagaacgacccacgggtaatttccgtactgcaccagggccttggcgggctattgcacagcgacctcacaagcaaggaggactttccgaaggtcgtagagtggttgttggaactgttggaccgatccggtgacgcataccgaaaggcattggcagattggattgtgtccgaccggagactcggacaccctcgcagaatcggcacgagtgcgaactggatgggcgtctctgaaaaggcgcgcctcgcagcactgcgcttgtttgccgccaaagacatcggtcgattctttgacatactgattggtcgccagttcgatactcagagtcgccgtcctttttgggagcagtacatcaattcgcctcagtttgtcgactatgcaatcgcttgtgatccagaggatcgaaagcggttgatcgcgaattggacagacggagtgcccgatgtcgcgcgattggacggagcaccagacaggcacagcgcattcatcatgagatttcgcacaatccactacgatctgattgtcgtggagatgagtcgcgcgaacaacgcaatgtacctattcgacacaagcgacttcgaagacgaagttggtaccttggagaaatccagatttcgattctccgcgctcaagaatcgtagcgtggcggcgagaacctggtctcatagccattcctggcagtttcgcttcgccggcaatctgagggagttcggaatcgtgagaggtccacagtga

SEQ ID NO: 10495 - DNA, 3453 bp, Gemmatimonas aurantiaca T-27
gtgaaggaagctcaggccaactcggaacccaatacatattggctctcggcggcgccaggagggttgatcgtcgggaagggtcaacctgcaggatctgtatcatctccgaacttgttgctgggggcaaataccgatggtgaactctcaaccgatattgcgattcttcgagaacagggcctcgcgaccgaccacgaggatgggtggagagtctcatggccagactggcccctcgcgctggatctcggcgcaagaagtctgattgcccattccaccctttgtcatctcgtgctccagattgacagacggagtgagttggggcgttcagactttcgctacatagttcgctggcgcgaaggggcgcatgaggtggaggtcacccggttcggtgcctatgtgcggcatgaagcgacaaaccgcgtcatgcatcttgacaagagattgctggagatcgcggaagcgatcgatcacttcaacgcactgacgcctgccgaacgaagcagccgcaagaacgtttggggcacactggcgtccattgccggaaatgcccgagaactgggagcgagattggatcgacaccttgattccaatctcgtgatcgtgccgccgaccattggactcctcattcgtggcgatgagaatgggaacgtcagcttccttcccagacttcccggcgaaggggatagtgaggccttccggttggagttcgagcgcgcgctggacattcaggacgtcatgtcggtcacacttcccgatcgtcgcgtggctcgagttctgctgtcggagcctcaacgagaagtgctgcgacgtatgcgcaaagtccgccacctgccggtagcggatgttggagagttactggatgatccgtcgccaatatttgacggggtcttcgacgctatcgacctggcggatatctctcgtgagtacggcattcgtgtgataggaatcggtagtctgaccttgccaacggacgttcggcccgtcgggggcccttcggtcttcgatcgaatgcagttgtcggaattagttcccactccacagctgccgctcgccccccccgcttctgaatccgccggcacgggcacccaacgctccgtagtgtccattgatgtgttggaagcagagactggatcggttcacacggtacgactttcaggggatgaggcggtacgtcggcttcagggccaggtgagagcgtgcctcgctgacggcgctgagcatttcctgcatgaaggagttgccatcaaggctgaacctgaactggtggcagctctggatcgccacatcagtgggcccgtgccggggagagaagacgatgtcgggtcggtcgggcgttccggtcacctgtatctgctaatcaacgaacacgaagattccctgacgcccgggctcgaggttgttccgctaccggatggagatgtggtggaagcacctcggtcacttcctctggcgcttcacgattcaatcaaactcaagagtcaccagctcgacggtgttcagtggttgtccacatgtcgaggcatgccaggtcgtcgaggtgcggtacttgcggacgacatggggcttgggaagaccctgcaagttctggttcacatagcattgctactcgagtcgggaacggcgctggatggtctgggatcagaccggaatggcccatggagacctgtattgatcgtggcaccgctgctgcttgtggagtcaggtgtctggaccgaggaaatgcggtctcggtttgcgaactcgggtcgtgtgttcgagccgtatgttgttctgcgcgacgagggaattcggaaggtcatgcacaactctggtgagcgcgactatctcggcaagcctgttctcgatccggcgaagctcatggcgcacaaggtcgtgatcacgacctacgaaaccatgatggcatatcagcacagcctcgcgcagctcgtcggtgggcgaccgatgtggtcgttggtggtattcgatgaggcgcaggaggtgaagtccccgaagacgaagcagagtattgcggcgaaagcgcttgatgcccggttcaaactggcggccacgggtaccccggtggagactcgactccgggacctctggaacattcttgatacggttgagcctggccggcttggtacacagagggcattcgtcacggcatacgagcgaccggcgatgaagccgaatagagggtctgagcgtcaggcggcactggatgcgctgcgagtggctatccgctacgaaagaccgggtgcgttgttgatccgacgggacaagcgcattttgtccgatctgccagagcggattgagcatcgcgtcaaatgcaccatgacccctgtggaggaagaaatcatggggcggattcgcgcggaccttgggtccacggctggtcgacgccagcctctcgctgcacttcaacggctgcatctttgcacccagcatcccgttctggcgggtgcggcaaccggacatgatgtcgacgcgctgatcgccacgtcagcgcgactcgctcagcttctcaaattgttgcgcgaaatccaagtgcagagtgagaaggtgctgatctttgcgcgaagcgtcgactcacaaagactgctggcgcgggtgattgcgcagtccctcggtacgcaggtcgatatcgtcaacggtcagaccggggtcacgggaggtcgtgcgacaagtggaactgttcgacgtgagattctcagtcgatttcgtgccacaccaggtttcgctgccatcgtcctgtctccattcgttgcaggtgttggtctgacgctgactgaggccaaccacgtcgtgcactatggccgatggtggaatcctgccatcgagaatcaagctacggatcgagcccatcgcattggtcagaccaagccggttcatgtgtactaccttctcggaacttatcgagcgcctgagcaacgatccttcgacgaggcgctcgatgaccttctgcgtgagcgcagagatctcgctcacgacttcctgtcgcccgtcacagaagacgccaatgcggagctgctcatccagcggcttggctcgtcggcacggccgatcagcctggtcgcacgaatggagcctaccacggtgagtgaggcggcggcgatgctcctatcactagccaggtctcgcgatgagtctgccgtttggcttgacgcggagggtatgtatggggcgcacgctctggtcgccagacaaggcgttgtgctagttgcgaggatcgtccaggtggactcagttgaagagcagcaacttctattgtcggcgcagagggcctggcaggatgcgctcggtgtgaggacagaaggattgatgctcgcatgtcatggctctgtggacatcaataccaagacttggaaggccctccgcctcgagctggatagccaaagctcggtggaccccgactacttgttgacgccgtaccgtagcgtccacgatgtgcgagaacgtttattgcgacatatatag

SEQ ID NO: 10496 - DNA, 2193 bp, Pseudomonas mediterranea CFBP 5447
atggattcatcaacgttggtgcacctatgggatgcagcaagctatgagcagctgattgcacccgtaatggttgttggtttcgttttcattctttgcgcttgttatgttgttcgttacctctggaagtcattcaaacttagcgcccagctgaaacggttgactattagcttgcagagcgtgaaaactctcgcgccaccctttcggcgcgctgagctggagcggctgttcagtagcggcagacttgagcattcttggcgcgagtatgctgaaacgctgcacgatcagttcgagttccaagaaggcgaacaggttcttatccggtcgcgatccaccaccggagctgcacattttttctcagctcaaagtgttgttgatactccgctgggtaccgaattttataaacacctacctggtatcttgaccggcatcggtattgttggaacattctttggattgatgctgggccttcagcactttgatccgagcactcctgaacaggttaatgcaagcgtcgataaactgttgaaagacgtgctgttcgctttcatcggctccttcatttcaatcttggcttctatcgccgtcacccttactgaaaagttgcgcttggggcactgctacaagctgcttgaggcattcaacgaaacaatcgatggccttttcgacagcggagtcggtgaggaatacctggctgagctggtgcgctccagtgctgaaagctcggtgcaaacccgtcagttgaaggacagcctcgttacagatctgcgggaaatgttacagaacctcgttgatacccaggttcgtgaaagtctcaaattggcagataccttatcgacgacctaccgtgactctgggcagttgctggccgaccaggtgagcggagcaattgaaaatagcctcaagtcgccacttgaagccatcgcgggtgcagtgcaggccgccagtggcgatcaatccgggcaggtacagaacctgcttcaggatgttctagtggctttcatgaacaagctggaaggtacgttcggccagcagttcaatggcctgcacgagttgatgggccagtcagttgctgccatgcagtcgatgcagcaaggcttctcgacgctgatccaggatatgcgttcggctagcgagtcctccaatcaaagcagttcgactatgattgcccagctactggccgatatgcaggccggacaaaacgccatgcaagcggggatgaacgagatgctcgccaatcttcaggcttcggttgcccgtatcggcaacgaaggagagggggctggcgctcgaatggccgagcaactggagaagctgttcgctcaaagcgaggctcgccagcaggcaatggctgagaatctccaggcttttgtcgagtcaatcaagcaggccatcggccaaggccaacaggaaaccatggccaagattgcaggctctgtcgaggtgctgggtgagcagctctcggccgtcttcaagcaactggagcatggtcggcagcagatggatcaatccacccgtgcagcccaggctgacttgcaccaaggtacccgcgacctggtgggtggcctcgacgagcaggtcaaggctttgctgcagacggtttccgagcaacagaagtctgcccaggacaccgtcaatgcattgagtgcccagactgagcagcatctgcaaagtatgcagttgggggctgataagatgcgggcggcggctgagcggtttgaaaccgccgggcaaagcgttgcgcgagccagtgagtccactgcggggctgatgggtacagtgcagggcgcgggtactgagcttgcacaggcttcgcgtgagctgaataccgttgtcgcggactaccggaacaatcgtgaagcgttagcgaaaacgctcgcggtcatcgaaggggtagttgccagtgcgcaaggggaagccagcggtcgcagccagtatctccaggacctgaagattcaaagcgagcggatgcaggcgctcaatcgcgaagtgtatgaatacctcgaaaacatcagtggtgtgctgggtaacggcttcaaggaattcggtgaaggcatggatcgggcgttgagacaaaccctgggcagccttgacaccgagctcgataaagcagtcaagagcctcgctggcggtgtggaaggggtcaaggaaagtctcgaagatttcggcgacatcatggaacgtatcaggcggtaa

SEQ ID NO: 10497 - DNA, 744 bp, Pseudomonas mediterranea CFBP 5447
atgtttggtaagcaaatgccttcggctgcccgttcaaaggatgagggagagaagcctttctggatttccttcgctgatttgatgaccgcgatgatgattctattcctcgtggtcatggtggcggctttgagttctgtgacgcagcggatcaaccaggcggaacagggggagaagcagcgtagcaaggacatcagccagatctgcgagcacctgagcctcaaggcgaagactgccagcaagaccatcattgtggactgcaaggacaaccgaatcagcttcggcgatgctggccgctttgggcataaccagtacgcgttgagcaacgatggccaatcagcacttcaggaggtcgtgccgatgattctggacgcggccaacagtgaagaggggcgcaagtggttcaagcaggtcgtgatcgaggggtctaccgatacggacggttcctacctttataacctgcacctgtcactgcagcgttcggagtgggtgatgtgcagcctgctcgatagtcgcagcccgctccaggtcggattgtcgccggagcatcagcagcaaatcagatcgatgtttctggcgggtggcgtgtccttcaacaatgcaaaggacaccaaggaagaaagcaggcgagtggagttgcgcatgcagttctttggcttgaaggagaaggagggcaatctcaagcctgatgtgccggtgttcactaatactgatgtggaaaaatgtcagttggcgatgaaccgatga

SEQ ID NO: 10498 - DNA, 1629 bp, Pseudomonas mediterranea CFBP 5447
atgaccagctcgatcgcgaggctttcagccgccattagccaaagcctgtcagctcatcgcacggtgcaggccccagaaccgttggaatctttcccccgtctggctgctgcgggagtcgagctttacgagcggttcgagcgcgctgaaaaggccttgccgccacccgaaaaaaagcgccgtgctgcgataagcaagtttcgcaatgtgctgccactcaacgcttcggagtggcgcttggtgttcgccggcctctcagacaagagtgagcgcgtggggccgatactggaagatgaccagctttacgcccgggtgcatgaagaagtgcatcagcgtatcgaaaggcggaggctgagccgccgggattggttggcgctgtgcttcagctactttggctacgacgccgccaagcctgcgcagaacgccaattggtgcctgttacgcgaggatgttcagctcggtttcgaatgtgtcagagatcagcacacgcgtgtgaaggaatggacgcagatcgttcagcagcatcaggagcttttttccgagcaggcaggtgccacgctgggtgaccagatgttcaaaggtgaaatcagcgacctttcggcattgcagacgattgcgcagatcccggacaacagctggctgtggcgcaggatttttaccgtgctgatttctcgcattttcatgctggatgacgccgagttctctcggcgtttggccgacctgctcgacatcggccggcagcacccgcggtacatgaacgacattctgagtgcatgtctgtcgcgttaccacttggcagcttatcgggagaagccgtcgtcgctgctcaaacagctcgcgctcgacaattggggtagtccgcagatccgctccagacaaaacaggtggctgcagtatgtcgataaagatgtctgtgcgatggttgtggcgtggtttgcgaaggaggatctggagcacttcttcaacctgctcaaaggggaagcagaagtcgatcaatctcgtctgcattattggctgcgttttgccaaccagatgagttacacccggattgtcatgggttcggatgcctggcatgacagcgggcgagacttcgtccacttccgagagaagaacaaggggcgtctcagccgactggtaggcgggcccggccataacaacgccgtcatcatgcagatcgggaactactttttcgtggagttctccggtaccggtaatgcctgctatgtgtatcaagcagacaagtcaccattcaatccagacaagttgcagctcgaattggcgagcgagctgaagcagcctaatcgtgcactggatcgaatgcggcattcacctgcacccagccgcccggaccgcatagagggttggctcagcaaattcgattatgccctcgaacaatggggtattcgtgtacagagtcaggccgcagctgcaggttcagtcaagccgttgccttttgaagaccaggtccgtgacgctctaaagtcggtcaaacacaaggtttatgatcagcgcgagcgcggcggtgcatttcaggtccagcttgatgatcatgacccggccgcagtaactgcactgcagcgcctgggcttcaggcccgtcaataaccagccactccggttctggagacagtaa

SEQ ID NO: 10499 - DNA, 3249 bp, Pseudomonas mediterranea CFBP 5447
atgctcaaacgtttcctcaaaggcattggcctgcagccgaactcggcagcagaaaatactgagccggttttttccattgaagagcagggcatctgttatcccctgagcttggcggagagcacggagtcatggtcgctggcgagttatcttgatcagctggaagaagaggagttcgtctcccagttgagcgatcgctggctcttgacgtgggatgagctctaccggctgctggatgagccagagcacgaaacaagcctgccactattggggttgccgccgcagacagccctcatccctcaattgagcagccagggcagccttgcctccgacgatttcaaggtctccatcagtggttggcgtgatccgcagtccaatgccaacgtgcaggtgctgcgaacgggggccattgttcagtatcagggcgctacagaaatgctgccagaggcatcctggaaactgaccggtgcggtacggcagctttatctggcacaacaaaatgagcccggtgaagtaaccaaccagatcggctgggccagcatcagaaagctggcgcgcaaggctggcgctggtatggatggctttctggacaagaccgtcgttatcaaacccgagaaactgcggctcaacccacgaaagtcgacattaggcgacacaccggttatcgagctgcaaccgagcttcgaaggccagccggccaactggcttgagagttttgacggtgccaagcaggttcaggatcgataccgggtaacgggtgacgatggctcgttaactcatgttctgattgagcctgaagtcaaatcggtactggactacgtgcgctcgttgcctgggcgcagggtagctggtgacgatgccctttcattcgtccgtaacccttacagcacactcggcgaaggtgcctcacacgtgctggatgccgacgcctatgaagacgagctcgccgaggccggtattttctttcatcgcttccatctggaacccaaactggatgaagcgggccagcgtatcgagcaggtaacactgacgctcgaaccgatttctccaaccccgcaagcaccgatcgaaattgagttcaaagcggcccatgaattcgcgccgctggtgcatgagctgcacctgaagttggccgccggcatgcctgcggggttctggcagggctatgagctggagctcagcgattttgatttgcgccagttggcgggcatcaatgacctgctcaaacgttggcaaaacgaagcggccggtgtcgagtttgactcggttctggacctgtctctctacggcgaccgtgtgaccggcattggggaagcggaaagaattacttcgcccttcctggtaaaagatgcgaccgagaactggttgccgaaggatgtggtagcgctgggcatcgatgcagaaatctttagtcggtgggattcttccgacctcgctcaatttgaagcgtttgagcagcggctggacgaagcgcgcgcggccggtgatgaaacggtctgtttgccaaagtccgaaacgccgctctcgattaccgctgccgagaaactgtttgatgcttggtcgaagaagattgcacctgtcgagaccggccaggttgagcaacgggaaaaagtaggccgcgccgtactgcaaatcggccacaacattgacgagccaacctatgttcaggtgcgtcaagcagccttacgctcagctttggacgcaacgccagagttgcctgacttgctcaagcctgaagttgtcctgcgcgagcatcagcttcaaggtgtggcgtggttgcagcatttgttccgcttgtcccccacggacgtgtcgggttgcttgctcgctgatgacatggggcttgggaaaacgatccagttgctcaccttcctggtctggtacctggaacagtatccaaaagatcagccaacactgatcgtcgctccggtttcgttgctcgacaactgggagcgagagcttcaccggttcttctttgctgacgcactgcccgtgttgaagctgtatggctcagccttgagtgcattgaagttcaagaaggatgaaatccctgcggacttgaaagccaaaggcatcaagaaccttttgcgcccaggttggatgggcgatgcccgaatcgtcctgacgacttacgagacactgcgtgatcaggagttttccctggcgcgccagcaatggtccatcgtcgtgtgtgacgaagctcagaaactgaagaatccagcagcactggtgactcaagcgatcaaagccgtccccgcacggttccgagtggcgtgtaccggtacgccggtcgagaacacactgatcgatctctggtgcctgttcgactttattcagccagggttcctgggtagtttgaaccagtttggtcgcgactatcagcgccccatcgaggccgcgctggagcgtgatacaggtgcgttggaacgcctgcgtgggcttatcgaaccgcagacgttgcggcggaccaagcaggacatcgccaaggacttgccggccaaaatcgaagacgcagcatgtcgttcgcttggcatgcatgccctgcagcgtaacctgtatctgtccgaaatttccgcatacagccagaagcagcagatcgaagagcagctcgatcagaagacctccggcatgctgggcttgctgcacaagctcaagctgatttgtgcccatccttacagcgttcagccagacacgcggttgcgcgacaactcgccgaagcttcagtggcttgtgcagacgctcgagtcgatcaaaagggccggcgacggcgacaaggtcatagtctttaccgagttgcgagatattcagcgtgaattgcagcacgcgatccaggagcattttggctttagagcgacggtcatcaacggcgataccagtaccagcagtcagagcgccaatagccgacagaagttgattgaccaattccaggaactaccgggcttcgccgtcatcatcctgtcgaccatcgccgtcgggtttggggtaaacgtgcaggcggccaaccacgtcattcacttcacccgttgctggaacccggcaaaggaagatcaggcgacggatcgggcctatcggattgggcagcaaaaagatgtgtatgtgtactaccccacggttcgggatgcggcgatgccgacctttgaagcgacgctggatgagctgctgagtaagcggcgagcgttggcgcgagatatgttgagtggggcttcggagcttcaggcttctgattttgaggtgctgcttaatgcacagtga

SEQ ID NO: 10500 - DNA, 1935 bp, Corallococcus coralloides DSM 2259
atgttcgacctgtcggtcttgcaggatgagtccctgcggatcccgctgctgatcatcgtgtcattgacgctcgtgtcgctcggctccgtggcatggcgccggaaacgactggcgcaggccgtccaggacgtggaggtccacctggaggacctgctggccggacggcgtgaagagccaggcacgcgggacgaggggcgcgcgctgtggagggccgtccgcgagcagctcgtttttcctccggggaagcaggaggttccaggtcccatcctcatgcgctcgtcaccctcgcgcgagctgcgcgagacctgtcgcgccttgttccggcactccatggggcatgggattgggaggaacctgacgggcatcgcgctggtcatgaccttcgggttgctgggcgtcgtgctggtgggaccggtccaggcggccctgacgagcacgggcgcgggaggcgcttcgcaggcggatttgctctcgcaagccattggcaagatgggcgccaagttcttcatctccgctgcgggcctgctgggaacgctcttcttccaggcgttcgctttctcatccgagcggcggctcctgatgcggctggatgcgatgcgcgcgagcttcgagcgcatcacgctcaccctggacgcgcacgagatctccctggctgctgcacgcagggacgcgctgggcgcgttgaagaccgaaatcgtccagacccgcagggacctctcagatcgcctgtcccatcttgagagtgtggaggtgtctctccaggacatcgggaccgaggtccagaagaacttcgggacgatgatgaaggagcaggttggggacgtcatcacgcggcaactgggctccgtcgagaaggcggtgcgtgacatcgcggcggacctccagcgctccatctcgatgggtttcacggcggccctgcaactggagatggccggcgttcgcgcgcatctggacgccatccagcaggcgctcgcgggacagcaggaacatgacctggggcggatcctcgaacagcttcgcgacaccgtgtccggtggcttccatacccagtcccaggacatggcccgccagatggcggggctcgtggaggtcctgccccggctggaacaacagttcgaggtgatgacacagaccctgggcagccatgcgcggcagtggggcagcgagaaccaacgcgccgtcgaggcgctgggcgaaaaggtgtccgagttggtggggagcttcgacggcgtccgggacaggctggagggcagcggttccaacatcgcgagcagtttcaaggacgtgctcaccggcctgcgggaaagctccagcgagatggttcgcctcgcggctcaggcttccctgaacatgcagtcgaactccgtgcagcagtccggcgtccttcgcaatcagatggaggaactccgcgtccggtccgaatcggacatggggcagttccaggcccagtcgcaggagttcgtcaaggtcatgagggagacgcaggacggacttcgcaccgtgacgaagcagatgagcgacaccgcggacaagctggctgccgcctcccgaggcgtgggggagtcccatcacaaggcgggcgcggtctccgcgaagatggatgaagtggctcagcggttgatggatacggccaatgccttccagcggctgtcccaggagcgctcgaacgtggtgcggcaggagcagacgctcctcaatgcccaacgtgaggccgtggaccgggtgggcccggtgctcaatgccttgaccaagacctatgaggactccgtcagccggcaggcccagatcctgagcagccagtggacggaggtcatgcaccggctcgactccgtggtggatcgctcctcaggagagctcgtccagggcgtggatgacctcaccgagacagtgcagcagctcaaggagaccttgaggcagcaggtggcgcggcgatga

SEQ ID NO: 10501 - DNA, 1395 bp, Corallococcus coralloides DSM 2259
atgggactggacgactggctcgatgagatgggcgaacggcagaaggtcgtcctggccgggctcgggacgttccagcagcaggtggaagaggggatgcagcagctcttcctccgcgtggagacggcccagcagcgtgcggatgaccgtgagcccgaccgccttgccaggatgcggcagacgctggacgtcgcggcggtgctcaagaagctgcatgcgcgggacttcgccagcctgacgcgacgggagcgacgcgcggtgccaggcctgtggcgtgaggtgggcccgaaagacatggcctggttcctcaccctgagcccggacagcctgcctcggttggtgcggcagcggctccgagactggagctcatccgaggacgccgcttctcaacgcgagtgggcgaagctggtgggacagcggcccctggagaagagcgcggtgcggtgggcgcttcccatgtccgtcgaagaggcattgggccctgatgggcctggcacgttggcgaagcattggctggcccatcccctggtggatgtggtcgagatgctcaagaactccggtctcaagcccggaaactcctacgcggggcacgtcatcgcgaggtacctgctgcggcggcttcaatcccgtcaggacgtggcggagggattgaagttcctggtggatgagcccctggggcggtcgtggatgccgcacaacaacacggatgatgtcgcggtttcggctccgctggaggcccgtgtcgcggtagtcgccgccaccttggcgtgctgggggaatggccaggttgcgtccgacgtccggggccggatcgaggaacggctgatcgccagggacagtgtcttcggggatcccaggctgacgaccttgagcaaggcgtggcaggccgtgcgtgtgttgggggaggcggcgttcgatgagttcctggctgcgctcatccagcaggatctggagttcttcttcgagcgcgcgatgcacgaacaggaccggcggaagttctggttgaactacctgggcgccatccgccggacgacctgctggctggactccgtgacgtatgacgtcctgcactcgaagttcgcgacgctgcccgtagaacagcaagccgcgttccgacgggccaagcggcttccgcagggcgatgtcagtgcgttcgagttgtccttcgaaagatatgtggtggtggagttctcaaggactggaaacgccacctacatctacgagcacggagaatcgacgcaggttctgaagcgcgcggtcgttgaacacgcaagccatttcaagcacaggggcgcgacacggctgatccacacgcctgggtggcagctccgcttcgagcaggcgctgctggatctgggaatcgcgaaggaccgccgtgtgaaacgcaacatgcgctga

SEQ ID NO: 10502 - DNA, 2577 bp, Corallococcus coralloides DSM 2259
atggacctgcttggacttgagacgcagtccattcgctgggatgtcgtgggcattcccggtggggcaagggctcagtacaaggtccgggtcgacgatgagcctgtcctcgtggcggggagcgtcttcccctgggtgatgacgcctcaggagggagcgcccctccctctgactcctaccgccgcatgggcttgctccgaagcgcgcatcgcgacccatgcatccgcgcaggagcaactggcggtagtcatccggctgcgaggcctgctggaggacgtcaccgggctgctcggaggccggatccaattcagtccctccggctttctcaagaccttcgagcctcgtccggtgacccgattgggattgcgctgggaagccgatcccgaggccacggaactcgtctccttacagcccttcgcggtcttcgaggatggaacccaggcaccgtttcctctctcctcggtgcgccctggaggaatcgcggggaacgacagccggcggcccttgttgcttcccgagggcaccgatgaggtcctggcgcggacccggtcgctgcaaaagcgattgtccgtcgacgtgacgcaggagatgcacgacccctcgctcctgattccggaaggacggaacctcgattccagcctggacctctcgcagtactcaccccgggtcgcgggattcgaagtcctgcgcgggcgacagcccggagaagggcgtgaagcgaccgggctggtctgggtcgagccctccacggcgactgaaggcttcgcgctgaccctccatgtcgatgagggggctctgcggatccagttgaactcgcgcgaagaggcactggacgtcctccagaagaacgatgccgctctggtggagacgagtccaaccccgctgacgatagggggacagcaactggtgccaagcgaagcactgggccgccagcttcggatcgcgctcaacctgtcggagccatcctcggaggagggcgacggcacggaggtggctgttggcgcgcttcggcccggaggcaaggttggcgccattgttcgggacgtggcgactcccgccagcgacgggcaacagtcacccgagccgccttccgttccctgggcgcagttgcgcggggccttccagaatggagtggccctcaagccgcatcaggaagagggcctggcgtggctgtggcggcacgcccaggtgggttcccctggcgtcctgctcgcggacgacatgggattgggcaagaccctgcaggtcgcgtgcttcatgaccttgaggttgctcacggcggggggagtggagcggccccacctcgtggtctgtccgaccatcctgctcgacaactggaagcaggaactcgcccgcttcttccaggaagacctctggcggacgcccttcattctgcacggggcggagcttcgggccgtcaagcgtggggacggactcaataccgagttcctcgcgcagcagcggttgatcatcaccaactacgaaacgctgggggcctaccagcgctctttattgaaggtggatttcgacgttgtcgtcttcgacgaggcgcacaacctcaagaacccggacacgttgcgttctcgcgccgccagggcgctcaagcgctccttcgccatcgcgctcacgggtacgccggtcgagaacgaattgttcgatgtctgggccatctacgatgcgatccagagccgtgcgccaagggtcttcggcccgcgcacctccttccgtgaggaacacggcggtgaacaagggcccgcgacactccgaagccggctgcgatatccgtccaacgacagcaccctcatgcgccgcgagaaggcggatgccctcaaggaccttccggagaagcgctaccagcgtcacgcagtcgagatgacggcgcttcaggaagagcaggagcggctcatcgcccggcaggcttcgaagcgcggagcattctgggctctcgcggcgctccagaagctctaccagcaccctgcgctgttgacggacgcgcgagggatgaacgcggggaccgcgctccgggagagcccgaagacgcgcctctgcctggagctgctggaacaggtggaggggcgggcgaacggagggagcgcggagaaggccctcgtgttcgttctctcccgcgccatgcaggaactcttgtcgggactcatcaaggagaggtttcggctggcgtccgtccccatcatcaatggagagcccgaaaaccgccgcgtggcgctggagtccatccagacgttctcgcaagccagggggttccaggtccttctgctgagccctctcgccgcgggcgcggggctcaacatcgtcgcagcgaaccacgtcattcactacgggcgttggtggaaccccgcgaaggaggaccaggccacggaccgggcccatcgcatcggtcaggtccggcccgtccatgtctactatccgctgctgcaccggcagggtcgcgcggaggcggggttcgacatgcggctccacgagctcgtcgagcgcaagcgctcgctggcccgcgacttcctggcgcccgttcccgaagaggcgcagcagttcgcaggcgtgtttcaagagggggagggctga

SEQ ID NO: 10503 - DNA, 1926 bp, Novosphingobium pentaromativorans US6-1
atggaaattaccgaatggcttggccatgggctgatctacttcttcacggaaatcccgctcatcggcgatgcgatggcggcatttctggcgatcgtgctgatcggaacagcatttgcaatcgcgtaccgttacaagcggcaatatcatgcccctcttgctgatgcgatcgacgcccgcgtttgcctgctcgacgagataaccggcggcagcaccgccgatgtcgatcaggcgcgcctcgagttcgcgcgccgcttcaatgatatcgacgcccagatgatggaggcgaatgacgctgaggcgcttccccttcgcagaacctgggaggaataccgtgaaacgatcgtcgatccctcggccgatgttctccagaactccgctcgtcccgaacacttcttcgtcaatcttggcgaccgtcatcgcgggctgaactggtttgcgaatatttttatcgccatcggcctgttgatcaccttcctgggcatcatcgcagctctctcgacactcgacttcagcggcggtgtcgatgcgatgcaggagcggctcaatgatctcatgaaggtagcgggagcgaagttctgggcctctgtggggggcatcgtggcttccatcgtccttcgatcctatgactaccgcttcggcaagcgcatcaatgatgggctgtccatgctgtgtgacaaactcgagcatggaatggcctatctgccgccgcaacggatcgcgagcgatcagctggcacagctcaaagagcagactccggcactccgcaccttttccgaacagcttgctgccgccctcgacggggccttggaaaagcagatggcgcccatgatcacgcatctggggtcgatccagcaaggcatcgacaagatcagcggtggcgggggtgaagccgtccgcgacgcgatcgcttcaagtgccggtgcagagatggcgggcctcgcagatgccattggcgcaatgaccgtctcgatggccacgatgtccgaacgtatcgaaaaacagaccggcgaagctgaccgccagatcgaggaagctgtcaggcgctttggccaggcttcggaagaaatgcggtcagcatttggcgagctcaaccgcaatttcggcgtcgtagcggaccgcatgcgcgaagaaaacgagcaggcaagcgagcttgccagacagcggatggacgagttgttgagcaatcttggcaatacgctcgacgatatgaaatccggactcgcctcggcggccagtcagatgggtgaagcctcggcacgcgcggcgaatgacgcggcccggatcggccaggaggcaatggaaaagtcattttccgagttcgttgaacggttcaaccagacaggcggcccgctggtaggcagcatgaaagacgcgggcgatgccatttccacgtctgcggaccgtctctcgaccgcacaaagtgctatcggagatcacgcgcgagcgatcgagcaagtcgccgctcgctcgagcgatctggcgacggcgttcggaacggtggccaacgacgttgaggcggcaaccgcgcctgtacgccagtcggcagtctcgatagccgaagcagtcaaatcggttgagaccatcgtttcccgaaatgcgcagtcatccgagagcgctcgcgacgaaatgcgccagcttgcggcagcgctaagcgagaccgcgagtgcggcctcctccgcatggtcggaatatcgtgctcgcttcgaagatgtggaccgcgctcttggtgacgcaatcgagaagatctcggatgctgccggcaaccatgcgtcgaacctcaacgaacgggtcggccagatcgacaaggctctgggcgatggtgtggcgcagctcgccggcgcactcgaaccgctcacgaccctgcgggataccgtcgaggaacttgccggcatccttgcaaaccagaacagggaagccgctgaataa

SEQ ID NO: 10504 - DNA, 729 bp, Novosphingobium pentaromativorans US6-1
atggaaggcgtggttcgccggaagccgcctgaggagggcgaaagctatttcatgtccatgacggacatgatggtcggcctgcttcttattttcatcatcctgttagcctactttgcccttaatctgcagaccaagaccgaagagctgaccggcgcaaacaggacccgcgccgagatcctcaacgatctgcagcagtccttgaaagaccgagggctccaggtagaaatcgacacaaagaccggagttctgaggctccccgacgatgtcctgttcgacaaaggccaatgggaactgacggagagggggcaggccgccatcagcaaagttgccagcgccatggttgaggtcctgccgtgttataccgcctccgatctttgcgaaggcgaacgctcgccgcatttgatcgatgctgtctttgtcgaggggcacacggactccgacgtcatgtctggtggcatgaacaactatggactttcggtgcgccgggcagagacgaccttcaccatgctccagcgcaaccaaccggccctgcgcggttttctcaatagaccggcgggagaagacggctcggcaccgatcctaagtctgagcggctacggtcccgaccgtcccgtcgatcgtggagactccgaagaagccaagaagcgtaatcgtcggatcgacttgcgcttcctgatgacgacgccaagcgccggcctcgaccgcgatattttgaggcaggagcaatga

SEQ ID NO: 10505 - DNA, 1377 bp, Novosphingobium pentaromativorans US6-1
atggaggccctggcatcggctggactggctaaacctccgacgacacagcctgagttgcagcgacaattggcaaagctcgatgcatgtgtgggcgaagcagagcccgtcattgagcttaagccattcctgcgaggagcggccgataccggcgcaaacgggttaccgcggtttcagctcaacagggtcctgcgcggcgcatggtgcgacccggagttcgatgagctgggcgtggcggcgctcgaacgggccgatgtcgatcatcggcgcagttccgaccaggccgtgatcgatggctaccttacctatttcccgacaggccgctcgatcatgccaatgctagcagaagctgcatcccgcgctgccgttcggcatgactgggcatggcgcgagcgcggcgcacggtgggatctgttcaagccgcagatgggaccagccaaagtggcgcgcgattttgttacgcgcgatgcagacggcatttcccatttgatgcgcgagacaggtcttggcgcaaaccttgcggcgagcgggtttggtcaggcaactttcgccgagacctgcaaggcaaccgcacagcttcagcctgcagaagcagtcggcccgcagcgcagtatcctgcgtatgtttgatacagaagcgcaggcgggtcagttggaactggttgtccgcgccctgctagaaccctggatcaggaccaaacccgaacccgagcatcgaaaggcaatttccgagtttctgctcgatcaggtgggtgatccgcgtctccagcgtacccggtgggacaggatcgtacgatcgctcgccgagtcgatcggtgaagagcgtgcgtgcgaggtcactcaggtgttcaagcgctggcttaccgaagtcgccatgcgcgagttcttccgcgccatcgcgaagaccacggatcggcctgatcagtggaagcaacgcgaagcgttttggattgcataccttgatgaaggattggtcaccgacgcatggcccgcgctgggatcacgcgcgaaacatcaaatcgattctcttattcgccagagtggcgaacgaccagaatacggtcaaattcgaggaggtccctcccagtcttcatccatcatcatgcagataggcgatctgcgcatatcggaatggagcgataacggatcctgccgcttctggagtgacaccgatcccggagctccgaaactctacgcaaaagtctacgacggcgggaagctgcggaccaccagcggacggtcggatttcgagtatgagtcccatgtcccagcgagtcctggttgggaaggcaagttcgccggtatcatccatcgccggacatcaatcgcgcatccccgtttcgggcgaggccggggccgcaactggaatgatcgatggtaa

SEQ ID NO: 10506 - DNA, 3816 bp, Novosphingobium pentaromativorans US6-1
atggtaacgaccaagttcattgccacacagatcgagggcggcggtgagacgattgcgcttctccgcgaacagccaggtgggctcttccggcgagcatcaagcggaattgtgccggtctcggagtggcccagagcagcccctgaagctggtcaggccgctctggcgctggcccgagctctcgatgatgatggtcagatcagcgaggaggcggaaggcatagtccttccaccgcagatcgttgcccggctcgatgaggccgacgcattcgccctcggccttcctccggctacatccataacccttcagctcaactcgggaggttcgctcgctgaaggaacaatcaaagtcgatacgaaatgggtccgccgcggtggtctgccggttcgagccgacatcgctggcgcgcgtctgcgagagggcgggcgtgtgggacgaattcccgagccgatctattcggccttccaggccgcacttgcagtcaatgcggctgatgatcccgatcagcgccgtgctgcctttgccgagctacgttcgacgctcggagatgacatcggcaccggcatcgaggcggatggctttctcgagcgtgtccggattgcctatgccgccaatttttcactcaacgcaaagaccgatcatggacgtttcgacttcgaccccgtcctcttctcgagaaacgtaagcgagagcgctgagggtgacctggtcgacgaagaagaagcgtcgctgcttaccccgcaggacaatcagcattttcagcgcaggttccggggtcaggacggcgggcggcgaagctatctgctttccgacggaacgctcctttttcttgacccgatgctgggcaaggccctcgacatcgtgcgcgcaaagcaggtgggcacctcacaggaaaagcgcgaattcctgcgttcgccgcaacgtatcctgcgtgaggagctcaagcttgacgcggcaggcgatgacgaggcagctgatcgtctcttcatcgagacacagcagttttccgagcgggtcagcgggatcgaggtctggcaaaagccggttttgccctggatcaaacccaagccgaacagctggctgcccgaagggtttggattgcggatcggggatccgcccgacgcgcgtcatgtcgagttggctccaggtgaagctgaaacgatcgcaagcgaagtcgagacagcgattgatgcaggcaaggaaacgatcgcctggcgcgacgaaagcatccccgcgacgcctgcaaccctgcaggctgcgcgagcaattgcagaccttgaacgtgagatcgctgatgaggtcgagggacgcgcctcggacagaaccgaacgcgagagcgtcgatatcttcttccttcaggtcggagagaatttcgagcagctggactatgcgcggctgcctcgtcccgacgccgaagtgcaggatttcgatgttcccgagctccccaagggactgagatcggaacccaagcctcaccaggtgcaggcgttcgcatggtttgccgaggcctgggagcgccgcatgccgggcgtcttgctcgccgacgatatggggctcggaaagaccttccaggcgctcatgttcctgctgtggctgcgcagcaaaacgcctcacccgaagcccgtcttgattgtcgcgcccacaggtcttctgaggaattggcaagacgagctttcgcagcacatcgaggcagagctcatggggcctgttgtcgaggcgttcggcgccaacctgcgcaatttccgtctcgaggctgggagcgacattcgcgggggaacctcgcgtctcgacgtgtccgaatggaatgacgccgggatcgtcctgacgacctacgaaacaatgcgcgattatcacatgagcttcgcgcgcattccgttcgctgcaatcgtctacgatgaaatacagaagctcaagaatcctgccagccagatgacccgcgccgcaaaggcgctgaacggcacaatccagatcgctatgacgggcacaccggtcgagaaccggttgcaggacctgtggtcgattgccgatacggtctatccaggttttcttggctcgagccgggaattcgaaagcagcttccctgcgaacgatctcgagcgccttggcgatctccagcaccgtctgatcgagcgtgacaaagaacttccgcctttcatgctgcgccggatgaaggacgaaatcctgaccgggttgccggagaagaaggcccgcaaatatccggtcgagatgccaaccgcgcaagcgcaggcctacgacctcgtgctggccagagcgcgagcgctacgggaaagtggcgaacagggtgcgatgctcaaagtgctgcatatgctgcgcggtacatcgctccacccgtcaccgccgcgcggaatttcgaacatcgacgagtacatcgggcaatctgcacggctgaagaagaccttcgaaatccttgaggaggtcaggcagcgcggcgaaaaggccctgctattctgcgaagatctcgagatgcaggccttcctcgcgatggcaattcaggagcgcttcgcgctcgagcgccgcccgatgtgcatcagcgggaaggttgcgggccataagcgccaggagatggtcactgcctttcagagttcgccagcctcattcgacgttctcatcctgtctcccaaggctgggggcgtgggactcacgatcaccgctgcaaacaatgtgatccatctgtcccgctggtggaatccggccgttgaagatcaggcgacggaccgcgcctaccggatcggtcagaccaggccggtgaccattcacatcccgatggctgtccatccggacgaagcaatcggaccttcaagcttcgaccagcgtctcgacgccctcatggagcgcaagcgttcgctgagccggggtctcctcatgccgccggagagcgatcgcgatgtagaagacctgctttccgatgtgctcgacgggcgccctgcagagaaccgtgatcgaagtagtgcgtatgccgccgcagggcaggcgccaatggaccttcaagacactgattacagcgcgagtattcgacattcggaaccgcctgccccgccagtcgcgcagccggaaatcgaagagccgacgggagacgaggagagtgctcgctcccgcggacccgcgagcgacaacacagcgagttccgcaaaccttgatccggctgcggagcacgcggcagaaccaggattagaagaagcggcgcgctcgcagtctcactttgatcctggtgagacagcatcgagcaatgccgagcgcaaaaaccggcgccccattctctccgtgcgtactcccgtcgaggcggcagaagcgcgcgttcctttcgttcagcgggtcgtgtttgaacaatatggacaacgcgactggacaattttcgagcagtacgcacgcgacgcgcgagtagaacggctcgaaatccaggacccctattgttgcgctgacgagcaggctcgcgggcgcctcatcaatttcatcggtcgctttgaacagctcgcttcggaaatcgcggccgtgcaaatcgtgacattcgacgccgattccgtgcagactcgtgaccctgaaagtacgcgtgaccagcgccaggaccttgaagatcggtggaaccgtatgctggcctcggttcccctccacctcgcacagaagtcacggcggtcgggcggcgacctgcacgatcgtttcgtgagggctaaactggagaatggcgataccgtcatctgggatcttggacggggtatcgacggtgtcatgaacgcgcgctggtcttgcgttgtgaatgcattttacgagggctcgatttcgacctctcgggcaatgcactga

SEQ ID NO: 10507 - DNA, 1926 bp, Novosphingobium pentaromativorans US6-1; identical to SEQ ID NO: 10503

SEQ ID NO: 10508 - DNA, 729 bp, Novosphingobium pentaromativorans US6-1; identical to SEQ ID NO: 10504

SEQ ID NO: 10509 - DNA, 1290 bp, Novosphingobium pentaromativorans US6-1
gtgggcgaagcagagcccgtcattgagcttaagccattcctgcgaggagcggccgataccggcgcaaacgggttaccgcggtttcagctcaacagggtcctgcgcggcgcatggtgcgacccggagttcgatgagctgggcgtggcggcgctcgaacgggccgatgtcgatcatcggcgcagttccgaccaggccgtgatcgatggctaccttacctatttcccgacaggccgctcgatcatgccaatgctagcagaagctgcatcccgcgctgccgttcggcatgactgggcatggcgcgagcgcggcgcacggtgggatctgttcaagccgcagatgggaccagccaaagtggcgcgcgattttgttacgcgcgatgcagacggcatttcccatttgatgcgcgagacaggtcttggcgcaaaccttgcggcgagcgggtttggtcaggcaactttcgccgagacctgcaaggcaaccgcacagcttcagcctgcagaagcagtcggcccgcagcgcagtatcctgcgtatgtttgatacagaagcgcaggcgggtcagttggaactggttgtccgcgccctgctagaaccctggatcaggaccaaacccgaacccgagcatcgaaaggcaatttccgagtttctgctcgatcaggtgggtgatccgcgtctccagcgtacccggtgggacaggatcgtacgatcgctcgccgagtcgatcggtgaagagcgtgcgtgcgaggtcactcaggtgttcaagcgctggcttaccgaagtcgccatgcgcgagttcttccgcgccatcgcgaagaccacggatcggcctgatcagtggaagcaacgcgaagcgttttggattgcataccttgatgaaggattggtcaccgacgcatggcccgcgctgggatcacgcgcgaaacatcaaatcgattctcttattcgccagagtggcgaacgaccagaatacggtcaaattcgaggaggtccctcccagtcttcatccatcatcatgcagataggcgatctgcgcatatcggaatggagcgataacggatcctgccgcttctggagtgacaccgatcccggagctccgaaactctacgcaaaagtctacgacggcgggaagctgcggaccaccagcggacggtcggatttcgagtatgagtcccatgtcccagcgagtcctggttgggaaggcaagttcgccggtatcatccatcgccggacatcaatcgcgcatccccgtttcgggcgaggccggggccgcaactggaatgatcgatggtaa

SEQ ID NO: 10510 - DNA, 3816 bp, Novosphingobium pentaromativorans US6-1; identical to SEQ ID NO: 10506

SEQ ID NO: 10511 - DNA, 2067 bp, Vibrio tasmaniensis LGP32
atgctagatagagtcgccataatatcgggtgatggggtaacagatattatcatcatcacaacgttagctttgttcttctttttcgcagtgcgtgaagtaaaggctacctggaatgcaatctcgcagcttaaaacaatcgcaggccttaaaagcaatcattcttcagacctagtagagcctgaaagcttatcagagcctcaacttaaatggttggctgagcacctaatttatacgcctaccgaaaatggtctgaaagttgagagcaaagaagggctttggttaacgaagtcacctctgtctcatatgcttccaccttgtgattcgacccgctataagttggttccagcactcttaactagtatcggtattactggcacgtttctagggatcacgcttgggttgagtcaattcagcatggctggtgactccaaagcattattgaactctgctgctgagcttctggaaggtatgaaaaccgctttttacacctctctagctggtttgagtagctcggcggtgtttatggcattgatgaaagtgtcttcaagccgcctttcaaaagctcaagagacattcctgaaagcaatttcaaatcagtatttcgaggcgagcccagtctactatttgaagaatatgtcgaatgaaggacagcaggaagttgttgctgcacaactacgctcagctacagccatagaaaatatgagccaacagtttagggagacggcagcttcgctgagtaagctcggggattcattcaatggtgatgctattgctgacaaagtatcagaggctgttaagggctcaataaaagaccaactaactccagccgtgcaagccattacgggggagctttcggcgctaagagatatcaaagagcagtcgcaaaaagagttagtcgaattacttgtcgataagatgaaatcagagttgattgaccctgtatcggaagagcttaagaaaacgagtgatgcagtgtctcaaagcaacgaagtctctgctcagctcaatgctaatgttgagaaagttgtaaccagtactgcgcaaaccgttgagacaatcaacgagttccagaaagatacaatggacaagttgcaacagtttgcggaatcattaaaacaaattcttgcgagttttaaagacgatacccaaggagcgatgtctaccatcgcgaaagaagtccaaacgttgcttgatggagcttcgaaaggtttagaagaacaaagggatgcatttgagctaagtgcggggagagcgtcggcagcctttgaaggaatcaaaacttcaatggatggagcgctaaacgaaaggcaacaaaaagagcaagtgctattcgatggtgtggagactcgaatcaatgcgctaatcgaaggttcaagtgctgcatttaagcagcaaacggatgtgttagaggctgtaggcgaacaggcaagcagtttgatgacttcagcaaagcaagagctagagtcgggcttaggtgatattgatgaaaaagttaagtcaatgtcgacaaccgttcagaaagagctagaaactttccggttgcagtatcaacagaatctaactgcttacttcgagcagcaaaattcatcactggaagacagcttgagcaaacagcgtaacggtctaaatgaggttgtagagaacttccgtaaagtctttgagagtgaataccaagctcgccacaatctacttcaagagctaacggctcagtatgaaaaactagaagcttctgctcaaacggttgagcgtgtagctaaagctatcgggttaaatgaagtgtcaagaatggcagaactacaagatgctgcgcaaacaatgggaagacagatagctctgttgaagaaagagtatgcaacggcgtcagcgtcgtttaccgatgtgactgagaaccttcctaaagcaatggacgaatatttctcgcgggcgaatgagagctttgaaactttcttcaatgacttcgaccaatcagcaagtacgattcacaacaaattgtcgcaagcagctggttatctgattaacgctcaagttcaaaatcgagaatttgaagcagatagagtggaggtttga

SEQ ID NO: 10512 - DNA, 657 bp, Vibrio tasmaniensis LGP32
atgaggagcttatcccactccccaagaaccgctgatgcggaagagtctggtgtatggctctccgtcggagatttgatgtcagtcctactgatgatcttcgcgttgctgctcatcagcgccttagttcaaatatctgaggtatatgaagagagccaaaatacacgaatcgtgatcattaaaggtatcaacgataagttaaacgctgagggaattggtgttcaagccgatcctgaaacaggtgatatctctattacagattcaatcttatttgaccttaacgactataagttaaaagcctcagggcaagagtttttggaaaagttcattccaatatactctgatgctatttttcagtctcaagctaccgctgacgaagttagcagagttgtaattgaggggcactccagttctgaaggcgcgtttgacagaaatatggaattgagtgttttacgcgctaacagtgttatcgctttcgttaactctatggaatttagtaataaacagcgtttcttcgacaaggcggtaatttctggacgaggtcctattgaagctcgacaagatgtagctgacgctgctgaccgtaaggttaaattccgcttccagttcaaagacgaagagtttcttggcaatttctcagaggtgaagaaagttgagtag

SEQ ID NO: 10513 - DNA, 1878 bp, Vibrio tasmaniensis LGP32
gtggatctcgtctctacgcaaaggtcagacgaagttcatgttttcgaatggttagaagctattgaaaacgacatccagtggagcaacttaaatgagcaagaacgagaacgcgcttgtattgcggtttggacaggtgttggtagtcaattggttctcggagatattgcgctgttcaagatgggattggcattagatggaaagccaacgagtgttgtatctgatcttgttgaatccatagatgtagcgagaacagtgcctatttggagtgagatagatcaagccaaattggattggctgttggcgctaaaagtaaaaaattttgatgaaatggcatcgctttgctaccaggggaagcaaaccttaagtggctacattaaatttttgaggctacctcaatccaacagttataaagctgagctgtcgaaccgtttgctaagccctatatcggatggagacctgtcagattatgatgacgtttggctcgccgataacttttacgcattggaaaccactcatcaaagggttaatttttgcgagggctttatcggtaagcttgaacaattcgattatggtgaacagtgtgccgaaattatcgagcaacactgttttcctttaaagaaaaacagctactggcctcagcttggtggcgtatcaaaagcaatattaaaaaagaaatttggtttaacaagctactttgatctacatgcaatttctgcagctctttactcagaagaagcagcgattcagctagattttaacgactaccaaacccggcagattagaagtcgttcaaaattctggtctaattatagtagtcgatttgaacgtgtcagagttttacttccaagcgaaagctataaatgggtcgagtcccaaaatggggcgctctcagagtttgtgcatctcttgccaagctccacaaatactgacagcgaaatttacatctttgaactagatgacctgcttgtagttgagtttcttcgtggaaccattgcagaaacgcggttctacaaaaagagtgattggaatgctcaaaagttgtttgacagtgagtctctgactagcgaaaaaattcgcacaatgactcaactcgaagtgcatgaccacctcgatttttggcagcactattgtgaaaagctacttagaactaagtttaaagttcttccaaataatggtacgaaatcctttaaaggtttgtcgaaagcactaggacagtacaccgagagcagaggtctacctaaaccagatgaagcgatggttcagaaacgtaaggcaagtttagaaacgtggattgaaagattctgggaagcagaagttaaaaccggtaagtttggtgagttacgtggtttggctcaaaaaagtactttgtatctatctaaggcgatcatggctaagcaactcgggaaccaagctgactatgagcttttcataaagaaagcggccaaccaaggaaacccagaagctatgtggcagcttggaaaaaatatgctgctaggcacaaatagtgatgctagaacacgaaagtatggggaagattgggtatccaaagcagcttcttgcgggcatcaagaggcaatggagacagctaatcgtttcaggatatctttcttgggggatacgaaagattcttcgagagaaaagaacgcgttcattaatggcgctcgagataaagcagagtggagtgaaatgaaccgtgagcgaagtcgttacttaaaaagtaaacatcaaaatgaaaaaatcaattatcacgaaactgtagatgtcattaaagaggactataagccgtcgtggattaatcgagataaagaagaatggagttctattaatcgagctagggccaagcgacttagagaaaagttcaaagtaaacgagagttaa

SEQ ID NO: 10514 - DNA, 2190 bp, Erwinia sp. Ejp617
atgtcctggtttgattctttcttagcggcgctgacttccgtccagccgtataaggttccactgacggtcattggtttggtcattcttgcggggatattatttgtcgtcttttatctggcgcgtgcggtgattgtcgtcaaagaccttaaaagacatactcaggcggtcaagagtttgagcggccagacgcccgaagagcactcagatcggcttgactcgctgtttcagaaaccgcagctgaaacatgcctggagtgagtttaaagattcactgcatcctcagtttgaggtggtcgacggcgagcagaaaaccgccagaattcgcgccacggccccgagtgccagctacttttctgagcagcagctggttgatatcccgcttaatactgaattgttcaaacatctgccgggcattcttaccggcgtggggattatcggtaccttttatggtttgatgattggcctgcatcattttgatcccagcacccctgaacaggtaagcagcagcgttaatcgcctgctgcatgatgtgctgtatgcttttctcggttcggcgttcgccattttcgcttcgatcctgattacctcgctggagaagttttatttagcgaagtgctataagcatctggagaaatttaccgcagccattgaccagcgctatgtcagcggggtcggcgaagagtatctggcggatctggtgaagtccggtaaagagagttcaacccaggcgcgccagctgaaagagagcctggtgggtgatttgcgcaacatgctgttggaactgaccgccagccaaaaaaaagagagtgaaaatttagcgcaaacgctgaccaccacttaccgtgaaacgggccagcactttgccgaacaggtgagcggagcaattgaaaacagcctgaaatcgccgctggataaaattgccggtgcggtgcaaaccgccagcggcgatcagagcggcatggtgcaaaacatgctaaaggatgttctgactgcttttatgtcgaagctggacagtaccttcgggcaacagtttacccgcctcaatgaaatgatgggtcaaacggttggggctatcgaggggatgcaaaccggcttctcaaccctgctacaggatatgcgccaggccagcgatgagtcccgccagggcagcgcgcagcttatcgggcaactgctggcagagatgaagtctggccagcaggcgatgcaatccgcgatgaacgagatgctgaccagcctgcaagcttcagtggcgaaaattggcgcagagggcgaaggcgccggtgaacgcatggcgcgtcagctggagaaaatgttcgccgaaagtgcagcgcgtgaaaaagcgatggctgaacagatgatcgcctttattgacgccattaagcactcggtgcagcaggggcagagcgaaactatggagaaaatggccgactccgttagcgcactgggtgggcaactgagttcgctatttacccagcttgaacaggggcagcagcaaatatccgcaggccagcaggcttcacagcttgaattacaccagcaaacgcaaagcgtaatgagtgagtttgacgggcaggttaagcagctgatcgatacggttgcgcagcagcaggaagcgactcacgccgccttgcgtcagcttgccgacagcgccaaccatcagattgacaatatgcagcagggcgcagagaaaatgcgccttgctgcagaacgctttgagcatgccggggagcgggtcagcgaggctaatcacgtcactgctgaggtgctgaataaaacgcaaacggccggttcatcactggcgatggcggccagtgaactgacgacggtggtcgctgattatcgtcaaaaccgtgaagcggtggctaagtcgatagccattctggaggcggtggccgccaatacgcaggcagagcaaaccacgcgtagccagtttattgccgatcttaagtcgcatgccgaacgcttgcagggttataaccgagaggcgcaaggctttatggacaaggtcggcgaggtactgggccagagctttgaggacttctctggcggcgttacgcgcagcctggatcagacgctgggcaagctggatgtcgagatggcgaaagcctcgacgctgcttgccggcgcggtggagaacatgggtgaaagcatcaacgatctcgacgatcttctgtcgcgtacgcgtcgctaa

SEQ ID NO: 10515 - DNA, 738 bp, Erwinia sp. Ejp617
atgttcggtaacgcatttggtgcgaaaaagcgccgtagcgacgaggctgaaaagccattctggatctcctatgcggacctgatgacggcgatgatggtgctgtttctggtggtgatggtggcttcgctgagttcagtcacgcaacgcatacagcgggctgaagcgggggaaaagcggcgtgggcaggatatcacccgattgtgtcaacgtctggaattacgcgcacgcgagctgaataaaaccatcgtggtggactgccatgaaaaccgcatcagctttggtgaagccgggcgcttcgaccacaaccgttttttcctcaatcccggcgggcaaaaagcgttgcaggatgtggtgccgttagtgctggaagcggctgacagtgaagaaggaaaaaagtggtttaagcagattgttattgaagggtttaccgataccgacggctcttatctgtataacctgcatttatccttgcaacgttctgaatgggtgatgtgtagcctgctggacagccgtagcccgctgcagcagcatatcaacccgcaccagcaggtacagatccgtaaactgtttctggccggtggcgtatcgtttaataacgccagggagagcaaagaggccagccgcagggtagagctgcgtatgcaattctacggcctcaaagacaagcgcgctgacgatatccatgatttcccggcggtgatcgataaagaagtctgtcagctggttatgccgctatga

SEQ ID NO: 10516 - DNA, 1701 bp, Erwinia sp. Ejp617
atgagtcaggcgctcaataaactgtcacgacgtattgctgattcactcaccaggcggtttagcggtgagcaatggctgcatcatgattttgcccaactgagccaggccggtcatgccattgaacaacagtttgaaaaggcagaaaaactgccgctgccgccgcaggaaaaaaggctggaagcgttacgccgttttcgcctggcaaaagagctaacggcgctggagtggcgaatggttttttatggccttgcggacaacgatccgcaggcaccgcatcggccaatactgctggaagatgacgaaagcttcccccgggttgagcgcaaaatctgcgaactgattgaaggtaaaacgcttaaacgccgggagtgggcggcattgtgctcaagctattttgcttatcaaaatgacgccccggatctcaaccgccactggtgcgtgctgcgcagtcatatttcgcgcgggtatcaggtggtgaaagcctccgtccggcgagaaaaatcatggatgcgtgttgttgagcattatcacgatatttttaccgcacaggcgggaacgctgattgcgcagcagatggtcaaccgtgagaaaaccgcttcagacacgcttgagaagatcgcccaaattcccgagagcagctggttgtggaaacgtattttcaccgtgttgctggcacagatatatgaagacagcgacgacgttttctttgataaaatcagctggctgctggagcaggcggtgggttgggcacgtttccgcgatgacattatttccgcctgtttaacccgttattatcagtcccgatatcgcgagcagccccacaacccgctaaagcaggcagcacttgattactggcaaagcccgcagctcaaaagccagcagaataagtggcatcaatatgtggatgaaaatgttgcggcgatggtgcgatcctggctggccaaacaggatttgacccacttctttgaattgctgcgcggtaagggtgatgttgatcaggcgcgtctgttttactggctacgttttgccaaccagatgggttttacccgcatcgtaatggggcaggatgccaggcaggatcgcagcggcgattttgttcagttccgcgccgataacaaaggccgtcttagccagctgcgcggcgggcgtgctttagacaacgccatgattatgcagattaacgattatctgtttgtcgagttttctggcgttggcaatgcgatgtatgcctatcggattggtcaggcgccttttaatccggaagcggaccagcttgatattaccactcagctgaaagacagaccccacgaattatcctacattctgcgccttccccatcgtccgcgtgcagaagactatagtaacgggcggatcaccggctggatgaaaaaatacgatgatgaactccgccgtctggggataacctgtattgccgaacaaacccctgctgctgcggttaaacccagcccgataacgcgtaatccgcttcagcggcatcatattgctttgctgaacccggttcgcgatcgggccattcaaaatctgattaataccatgtcttgtgaggttgttgataaccgtcagcgtggcggggtactttcggtgattgttgaaaaaaatcaacctgctatcgtgatgcagttgctcaagctgggctttactgcaacaaacaaaaacccccgtcgttactggattaaataa

SEQ ID NO: 10517 - DNA, 3246 bp, Erwinia sp. Ejp617
atgctaaaacgtctgcttagtcagttcactggccatcgccaacaggttgaatcccgtctgcgtcatcagtatcaaatggaagatagcggactcagtttttcgtttgagcgggtgacggacgaacagttatgggcgctgaaggcctggcttgaacagctggcggatgaagattatctgatcgaactcgccgatcgctggctactgacctgggatgaactttatcgtttactggaggatgaagaacatgccagcagcctggctttgttgggcgtacccgccattttgccgttacgggccagcctgagttctggcggtgcgctcagcgatgaagatttccagctttatctgggtgaatggcaagccagcaacagcggtcgcacggttactgttagccttgtcagaccgatatttaaccatgacggccatccccgtctgctgacaaaggctgactggcagttgattcagggattaaaacaatttcacgcccggcaacgctctgcccccggagagttaaccaatcagattggttgggcaaatgtgcgcaagttagcaaaacaggccggagcgcagtttgatgattacctggcgaaaaccgtggtggtaaaaccggcctccctgaaactcaaactgcgtaaagccaccgttgccgatacggcggtgattgaaattgagccgtcctttgaggatcagccggaaaattggttggcgagttttgatcgcaatgcgcaggtaaatgacacttatcgcgtgcccgggccggacggtgagttaagccatgttatttttacgcctgaagttaaggaagtgctgtcttctgttcatactattcccggtcggcgcgtggcaggcggtgaggcactgtcttttgtgcgtaacccctatacgtttttgggtgagcaagctgctgctgttattgcacctgaagatcatgagcaggcgctttatgatgcgcatattttcttccaccattttcgtctgctgccgcgcgtgagcgaaaaaaatgctatcgaagatgtcacgctactgttagagccgatttctcctgtaccgcagccagaaacgtctttcgttttctcatcaccctgggaattagagagatttatcaacgagctgggtatcagcgtggcttctcaaatgccggcggggcagtggcagggctatgaactcgaactcagccaattcggtgaggcgcagtggctgaactgtaaggcattgctgacccggtggcaggaggaatcggcgggaaaagagttttctgacgttctggatatcaataagtacggcgatcgggttattggcatcggtgaatttgaaaaaatggcttcgccgtggttaaccaaggcacaaggtgagaactggctacccgatgatattgatttccctaccgtttcagcggaggtatttaacggctggcagcaggataatccgcagcatttgagcagtctcaagcagcgaatagctgatgccgaagcaagcggcgcagcaactgtcatcgcgccgtggaatgacagggagatcccgctcgattcagcgcaagcactgcttaaagcctggcagaagcagggccagagtaaggatggtgataaggattttgcaaaggaaaacgttgcgcgggcagtgctgaagattgagcagaatattgatgagccgatgtatatcaggcagcggcgtatttcattgcttgaagctcatcaaacggagccagagatccctctccacctgaaagaagatattcagcttaaggcgcatcagaaaaaagggattgcctggctgcaacagttatttcttaaatcgcctcacgagaccacaggctgcctgctggcagatgatatgggattaggtaagacgctgcagatactggctttcctggtatggaatattgagcaaaatccggacggcgagccgggtttgatcgtcgctcccgtctccttgctggataactggcagcgtgagctggacaattttttctgtaccgctggaataccggtgctgaaattgtacggggagacaatcggcgcggtgaaatatcgccaacaggatatccccgcacacttaaaagcgcaggggattaaaaatttattgcaacctggctggcggggagaggccaaaatcgtgctcacaacctacgaaacattgcgtgaccaggagttttcgctggcgcggcagccctggtcaattatggtatgtgatgaagcgcaaaaaattaaaaaccccgcagcacttattacacaggcagctaatgccgtgcaggcacgatttaaagtcgcctgtaccggaacgccagtagaaaatacattagtcgatttgtggagcctgttcgacttcgtgcagccaggcctgctgggggcgctaaatgaatttggcaaacgctatgtccgaacgatagaaaatgaagatggccgtcatcatcgggcattagagcaacttcggcaactgattaagccacaaacgttaaggcgaactaaagaagaagtcgcgggcgatttgccacaaaaaattgaggtggctgagtgtaaggcattgatgatgtccggcattcagcgccagctttacctctcatccattggtgcctggcagcagcagcaagatttcgctgaaggtatgcagcaggcaggtacgggaatgcttgggttgttgcataaattgaagctaatttgcgcacatccttttagcgtcaacccggaaccaggttatcgcgagcattcacccaagcttaactggatgttgcacacgctggatgggataaagcgtagtggggaagataaggtgattgttttcaccgaattaagagacctgcaacgtgagcttcagcacgccatttatcaacgttttggttttcggccggttatcattaatggtgataccagtaccaaaagtaatagccagaatagcaggcaaaagctgattgatgacttccagtcacagcccggttttgacgtcattatcctttctaccgttgctgtcggatttggtgtaaatgtgcaaaaagctaaccatgttatccattttacgcgctgctggaatccggcgaaagaggatcaggctaccgatcgtgcctatcgtattgggcaaactaaagatgtttatgtctattatccaacggtgagagacagtgaagtgacgacatttgaagaaacgctggacgaacttctcaacagacgtcgatctcttgccagggatatgcttagtacgtcgtctgatttatcaggtgctgatttcgaagtcgtattacaagatatcatttaa

SEQ ID NO: 10518 - DNA, 2451 bp, Polaromonas naphthalenivorans CJ2
atgccctccattgcgccgcaccttttgatttcaggcgcattagtgctcctgctggcactgtccttcgtcatctactttctcgttcccgccttcaagcatgggagaagactgtctgagttactgcggaccttgcgaagccctgccctcaaggacgagcgcaatcccgaccagctgtcgcaggtgttcgagaaagacgctcacttggcgcacctctggaatgaataccgcaagacgctgtacgacgccatgcccacatcgggcggcgtggtggcgccgcagtggcgctccacggtggcggccgagaatttctggaacgggcaactggtggtggaatcccgggtgcacgccgagtttttcaagcacgtgccgggcatctttacgggcctggggatcatcgggacatttcttggcctgatcgagggcctgcgcaacttcaaggtgagtgccttgacgcaaggcggagatgccgccacccaggactcggtcgcgcaaacagcgcaaaaaagccttgaatcgctcatgcactctgtgggcgatgcatttctcatctcggcagcggccatcagcttggccatgctggcgacctttcttgaaaagctgctgctcaactccctttacgccaaggtcgactacattgcccagttgcttgacgataagtttgcagccgcttccgcggaaaaattcctggagcagaccgcgtcctacaccgaggaatcggccacccaactcaagcagctcaagggcgaattaatcaaggacctcacgcccatccttcacgagttgagcgacaaacagtccaagatgctcgagcggctggcgggctcctttcaggagcggatgagcgaagcatcgcacaaccagattgaagcctcgcgggacaacaccacggccatggccgacacgatctcaggcgccatcaccaatggactgtccgggccccttgaagaaatcaaggcggccgtcaagcaggcatcgggcgatcagtcggcgactgccatcaagatgctccaggacgtgatggtgagcttcagccagaagctcaacgacctcttcggcggtcagatcaatggcatcaacgaactcaaccataaaacggccgagaccatgcaaaatgccgtcaccaagctcaacgagctggtcgccaacctgcaggaagccggccgcagttcgagcgcttcgatgggcgaacaaatggccagggccttgagcgacatggaagccaggcaagcggccatcacgcagtcgacccagcaactggtggctgaactcaagctggccatcgagcaaagccatacggcgacatctgccggcgtgcagaactccagcgacgagatggcccgtcgaatggccgaatcaatcgaaaaaatggagcagcgccaagacagcatcaacgagcgcacgcgcgaattcgtcgagcaaatcaaggcagtggtttcaagttcccaaaacgagaccggtaccaaggtgcaaagcacgctccaggccatcggagaccaggtgggcgacatgctcaaccagttccaggcggcgcagcaggccgctctggccaccggccagcaacgcgaggcagacaatgccagcaagaccgagtcggccgtggccgcgcttgctgcgcgcagccagacattcgttgacgaggtgggccagctgctctccaggagccaggccgctaccgacgccggcgttcgatccaccatgcaggcccttggcgggcaggtaggaagcatgctgcaggagtttcagggcgcccaacaatctgcattggagtccggacgccagcgagaagagcaaaacgcccaaaaaacccaggaactcgtcagcgccatggtgggctcggtggaaagtctcgtccagcagatcgcccaggcttccgcccggatgcaggagagcgtggccgcactgaccacgacgacgacttcggccatttcccgactcagcgatggcgccgaccaggtcaactcggccgcgcgaaactttgccgcggccagtgacaaggccgccggcaccatccaccaggtgtccagcgttaccggacagctgtcggacctgacaacacatctgacggcctcctccacggcgctgcaacaaggcatccaggactaccgatcgcaccgcgaagcggtcgccgcgatggtggcagaactcaatggtttggtgaacaacgccaagtcagacgtcagcatcacgtcgaacgttctgcagcgcattgagcaggccagcgacaagcttgcctcggctcattttgagactgaaaaattcatgatgggcgtcgcgaccgtgctggccaaggcccatgaggagtttcgcgtttccgtcaccaccagcctgggcaaagctaaccatgagttccagcagaagctctcggccgctgtcggcatgctcggcagctccatcaaggagctcgatgacgtgctggtgaccgcaacgcccaagaagaaagccatcgcatga

SEQ ID NO: 10519 - DNA, 708 bp, Polaromonas naphthalenivorans CJ2
atgatcggctcacgcgctcgcacccggcgaggctcgcagggcgaagccgaaaaacccttctggatttcctttgccgacctgatgacggcactgatggtgttgttcctggtggtgatggccgtggcgctgctggcggtgacccgtaccgtttctgcgcgggaagcgctcgaggctcagcacaagaaagacgtggacaattgcatggcgcaggctgtcaccgcggccgagcggcacaagggggtgaaggttgatctcgaccgccgcgtaatcgacttcggcgaccgggcgcgcttcgcttttggcagctcggtgctggcgccggagcaggaggcggtcttgcgccgcttcgttcccgaactgctttcgatggcgcagacaccgagctgcaaacgcgtactcaagcgcgttgtcgtcgaaggctacacggaccgtgccggcacctacctgggcaatctcaacctcagcctgatgcgcagccagcgtgtcctgtgcgccatgttcaccaccagcggcgctgatgcgttgactgaggctcagaaagatgccgtgcgcgatgtgttcctggtgggcggctttgccttcaattcctccaaggacacggcagaggaaagccggcgcgtcgaaatgcgtctggaattccttggcgtcgaggaaaaaccgattgcgtctcctgccacctcaggcaacttcggggcatgcgccatctga

SEQ ID NO: 10520 - DNA, 1809 bp, Polaromonas naphthalenivorans CJ2
atggacctgctcaacctcttttcctcgatgctgaaccaagcggcgctcaactcgccggtggatgtgcgtgccagcgacgacattgacaaggtgctcctggcattggaaaagcaggtcaagtccggaggacgaaacgacgaacccaaggacctgcagatcgaggcggttcgccgcttctggaagacaggacacgtcgaaaccttgcgcgaggcccgcctggtggcctttggcctggcggtgacaccctgggatgaccggcgcagcctgatggaagacaagcgcctgttcggatccgcgcttgatgccgtcgatgcctggcagggtgcgccgagacagtaccgaaaatgttttcaaggactggtgcgcagctacttcgactacgacggcatgggccggagcacgcccgacgttggaaaggtgaactggcgccagctgcgtgattatttgaacagcaacgcagccagcattcgcgatgccagcctgaatccggactgggtgagctgtaccttgtcgaacacgggcctcttcaccgaggagccctgcgctgcttatggcccagacttgctggcaggcaacagcgaccttgtcggtgacatccgcaagctgctgggcatcagcgacggctcgtggttcacgcgcgagctcatcatcgcgcagatccgtcaagcaacgcaactgggcgatcaggcattccatgctgccgtgagcggattgttgcgcctgctcggcggcaatgaggttttgcgcgaccgtggcctgcaaatccttcttgaccgttatgccctgattccacagcccccccaacacccgtccctaagggactatgcggtcacctgttggggcaacccctggttgccttccaaccaggaccgctggggcggcgtgcaaacggctgcgcgccagatggtgtcgaactggctcaagctggagttcattgaactgtttttcaccaagctcgcccaggatgggctgagcgatacccgacgcgtgaaattctgggccaaatacgtgcctgccattgaggaaatccacttcgcactgggtcctcacgcgatgtactcacgggagcgcgactttgtcgagctcagggacaagctcaagggactgatcgtccccttacaagacaacatcgccgccaacaacgcgttcatcatgacgatgggcgatttggtcgcagtggagttcagcggggcgtcgaatgccttttacggctacaacgtgaaaaaccgcatgccgtttgatctgacgcagccggtacgcacgcctgtcaatggtcaaaattccttaaaaaacagctccagagcactttatctgcgtcatcaggacaatgttttaggcttcaatggctgggaaggtcgcttccaggacgagttgaggacgaagttcaacatccgccccggggtgacatcgccgcagcgggtcgtggttgaacgtcaatggaatgatgcgccagcgccgccgcatcccaaatcaccgcagacaccgctcttcgccgcacgcaccttggctcctgctgcctcaacgcggcccatgccacgcaccttcacaacaccagctccagttccaaaatcgacggctccggccttcgccactgatcagtctgccccttttgcccccgatctgcctttcaccatggacaacctgcgtgaagtctgcatgcgaatcggggcctcggtgcaggaccgctccgacagaggtggcgccctctgggtgatggcgccggcccacataccgcatatccgggagctgctgacgaactggggtttcaaattcaccatcggcaagggctggtggaaaaaaatcgaatga

SEQ ID NO: 10521 - DNA, 3780 bp, Polaromonas naphthalenivorans CJ2
atgaatatcctgtcactcttcaagaaggcgcctgccccacaggcagctcaagcgcccggttggctgcgcagcctggatgcctcgggcattcatgtccatcgggacaagcgtgctggcgatcattccttgtctttccccacgctgactggcttgatgacccagctttcggatgacggactgacccaggaggatgagcacggccgctatttcctggcctgggactcgctttacgaggcgatggacctgcccggctatgcggagttgtcgcaagccctcgatttaccggcgaccaccggcctgcgtccgaccctgagcagccgccatgcgttgaccgacagcgatttttcgatctcgctgggtgcctggcgggatgccagtggcaaggcggtgtcgccccatcatgtcggccccgtgctgcaactcaatggcaaggcagagctgatgagtgcgccgcagtgggatctgttcaagcgcgtggtggcgttcgccgagcgctttcctgaagaccacaccgatcatcggcagcgtcaggcctggggccaaatccgcagatcagcgctggctgcgagcgctcacatgagcgacttcctggtcaagaccgtcgtgctgacgccagagcggctgaaaatggcctttcgcaagtccgacgccacgggcaaagacaccgtggtcgaagtgatccccggattcgaaggggctccgcccaactggctggagcagttcgaccggtttgacaccaccctggaccgctacgacctgcccatggacgacggcggcctggtgcagatcgttctctccccgcaggtcaagacggtcctgcagcagatcaaacggtttccggcgcgccgcgtggccggctcccgtgcacaggcctttttgctcaatccgttcgcaacccttggtgaagcggccagcgaggtcatcgacgaagcgcaattcgagcaggcccgcgaagatgcggggctcgaattcgagcgcttcacccctgtcatcgagcgtgatggtgcaggctttgcgcagaaggtcggcatcctcatcgagtcggcgtcctccagtggtcccaccggctcgaacacgcagtatctggacgacgcagaactgagggccttcatcgccagcgtggagcaggcgatcagccgcggccttcagctggcattctggcaaggcagcgaactcgaaatcctgggcgacacgcccgaccacctccatgcgctcaagcaggccctggcgcaacgcaccgagccccgcctgctggtgacccatgcacaggtgcatgacctgtcccattattcctctcgtgtcgaaggcattggcgtcgagccaccctactactcgccctacattgccaagaaaaaggaagaggacagctggttcccagagaacgtctttccggtcatcgccttcacccctgaaggcgagcatgaagcagtgacggttcccgtgaacaaccatgccctggaagaactgcgagaccagacgcaaaaagcccaagccgcaggcaagagcgcggtggagctgccctggcttcccaaaccaatgccactggcagaagcccagagaatcacccaaaccttcgatgaagttctggaagacgtcaaaaaaggaaaattcgacccggaccgcaaaggggcgaccaagccgtccgcacgcaagaccttgatgctgcgcgccaacatcgagacggtcgattacgaggaaaaacggcggcaggccatgatcgtcgcgctgggcgaacccacgatttcgaactccctgagcaaggaccaccgtctgctcgggcaccaggaagaaggcgtggccaagctgcagcacctctacagcttgcggcacacatttcaggttcgaggcatggtgctggccgatgacatgggactgggaaagacgctgcagcttttatcgctgatggtgtccatcgtagaaagcgattccaatgcagcgcccatgctggtgatcgcaccggtttccttgctggagaactggctcgaagaagcccacaagttctttcctggagccctgcgcatcctgaccgcctatggcgatgcgctctcaccccttcgcgtaccgcgggaaagcattgaggagcggctcaggaacgaagacggcctggtccgcttcctcaagcccgactgggtgggcaatgcccaactggtactgaccacctacgaaaccttgcgcgacctggaattctcgttcgctacgcagcactggtcgctgatggtttgcgacgaggcccagcgcatcaagaacccggccgccatggtcacgcgcgctgccaagaagcaaaatgcccagttcaagattgcatgcaccggcacgccggtcgagaacacgctggctgatttgtggtgtctctttgattttgtacaacctggcctgctcggtgcgctcaacgactttggtcgcaagtaccggcgtcccatcgagatcgatgcacgtgacaaggaaggccagacacgcatcgaggagttgcgcagcctgatcgagccgcagatcctgcggcgcaccaagctggaggtggccaagaacctgcccaggaaaatcgtggtcgacacttgcaggcgcttgccgctttcatccacgcagaggaacttgtacgccaaggcgattggcgacttcaagaaacgggccgatccctcgtttcgcacaccctttaagaatcaccttgggctgctgcactacctgcggctggtctgcactgacccgaggcgtcatggcttgagtatcttcaagcccgagcccatctcgcaataccgtgcctcagcgcccaagctcgactggctgctcaatcagctcggactgattcagtctcagggcgaaaaagccatcatcttttgcgagtttcgcaacatccagcgcttgctgcagcactatatcgaagaggtgttcgccttgcaggccgacatcatcaacggcgatacctcggcgtctgccagccactcggcaagtcgtcaaaagcgcatcaaggcctttcaggcaaagccgggcttcggcgtcatcatcttgtcaccggttgcggtcggctttggcgtgaacatccaggccgccaaccatgtggtccattacacacgcacctggaacccggccaaagaagaccaggcatccgaccgggcctggcgcatcggccagaccagggacgtctacgtctactgcccggtggtcgcggctcaggacttcaccacctttgacgtcaagctcgaccagttgctcgagagaaagcgctcgctcgccggcgacatgctcaacggctcgccggacatctcgctggcggagttcaagatcgaggacgttattccggatgcggacgtcggctcgatcgatgagcgcgtgaccctggacctggccttgcgcatggactggcgccatttcgagggcctggctgccgctttgctgtgtaaacgcggcttcgaaaccgtctattgcacgcctggatcgagcgacaacggcgtggatgtggtgggcatccgcgggaacctgggcgaactggttcagaccaagacctcagctgcggacgatcgaagtttgaactgggacacggtcaaggaagtggtggccggcgaagctttttaccgccgccgccatccaggcgtcaccttcaagaaagtcggcttgacgaaccagcatttcaacgtccaggcgcatgaaagcgccgtactcaacggggtcgatctgatggaaaggcgccatctgggtgaaatgctggaaaagtacccggtgacgatgcttgatgtcgagcgtttgctctataccgaatggtccgatgccgaccttcatgcgttttaa

SEQ ID NO: 10522 - DNA, 1896 bp, Rhodanobacter fulvus Jip2
atgaacaaccttttccatttggtcatggcggactggctgcaccaacttctgggtagtgccatcctccttctcgtgctgttcttcttttggcacgtcctgatcaagggcttgattctcgtcgttcgcctgggccgcctacgcaagaagctcagcgcgcttggcggcgaaccgcccgctcgtgtcaaggcctcgctggcccgcattttcgaacacacgccatggaaggacgcctggcgggaatacgaagaaacgttgcacgaacagacggatccgaccaagtcggagccaacggtgctcggcgttcgtgccacggtgcaagcggaggcgttcttccatacggaagcgttggtcgatgatccattgcacgtagagttttacaaacacctgcccggcatcctgaccggtattggcatcatcgcaacgtttaccgggcttatcaccggcctgcagcacttcgatgcctcagcgaccgagcctgaagcgctcaagcagagccttggcagcctcttcagctacgtgcgtaacgcgttcatgttttcggccgtggccattggcttggcgatgctgctgacggttgtggaaaaggtgatctataacctgtgcgtccataacgcctcaggtgtcgcggcagaattggatgccctgttccggtctggagttggcgaggaatacctctcccgcttggtcaagtcctcagaagatggtgccacccagaccaagcaactgaaggagagcctggttcaggacctcaaagcgttgctcaccaatctcgccgaacagcagatccaggcgacccgacagctttcgatcgatatcggccagagcctgcaagccagcttgcaggagccgctgcagcacattgcggaaaccgttcgcgccgccagcggcgatcagtccgcaagctcagcgcggatgctcgagaacctgatgagtgccttcatggcgcagatgaaggaaaccgtcggcggccagctgggagacctcagcggcttgatgcaacaaaccacgcaggccgtggcgcaagtggaattgacgctgcgtggtctggttgctgacatggagcgcagctcccaggcgtcgtcgagcggtatgcaggcagcggtcaagggtttgatgcagtcgtttgccgatcatcaaagccaactggccgacagcgcatccatacaacagtcgcaggcgctggcgcacatgcaggatgtgctgcagcgcatggccgaggctcaggaaacctcgacacgtcggactcaggaagagtccagtgctgcaagtgagcagcttggcaaggtgactgcgcagtcgatcagcgccagccagcaagccacggaagccgcacagacgttgttgtctggcgtgcagcaggtatcgatggatgctatcggagggctggagaagggggccgcgcgcatcaatgcgtcgatagctgcgatggacacggtggccgagcggctggctcgcgcaggccagtcgctcagcgggctccaagagcagtcgatggaggcggcggcaaaacttgaacgcgcctcgaccacgctgggaacgggcgcacagacgatctcccagacgatgggcgtacttggccagacctccacccgactggaaggtgtgtccgaactgatggtcagcgagtcgcaggcgcgtgagtcggccctgcgcgagattcaacaggtgctggtcaagagtcgggaagcctcagagctgttcggccagctgaccagcgaggtcgaaaagcatctggtcgatggcgttgatcgttttggtgaagccacctccaaggtgctgaataacgtgctcaagcagtacgacgacgcattgggatcgacggtttctatgctgaaggaaacaatggaagagctacgtgagagggccgaagacctcgccgacttggcggagcgataa

SEQ ID NO: 10523 - DNA, 711 bp, Rhodanobacter fulvus Jip2
atgttcggtcgcgcttccccaacacgtcgccgcggcaaggctgatggcgaaaagccgttctggatcagctatgccgatctgatgacagcaatgatggtgctcttcctcagcgcgatggcggtcaccatcgccgccgttactcgcaaggtgacggggccggaggaacagcgccgcggggaaatcgtcgagatctgctcaagcatccagcagcagttggctggcgttggaaacctcaacattgattgcgtcaacaaccggatctcctttggagatgcgggccgttttgccacgaacaactatcgcctccccacagaggctaatgccgccttggccagacttgtgcctgtggtgctgcaagtcgctgatggtccgctgggtaaaaagtggatgaagcaagttgtcgtcgaaggttctaccgatacggtaggaggctatctctacaacttgcatctcagcctgcaacgttccgaatggatgctgtgtctgttgatggaccctcgcaagaacgccgagcttcagctcacgccacagcaactgcagcgtgttcggcaactctttctggccggtggcgtgtcgttcaacaaccagcgtgccactgcggatgagagccgccgggtcgagctcaggcttcagttctatggcctgaacgatgagcacaaggatcttgagccactgtcaggaagcaccccgacggatacctgccagctatga

SEQ ID NO: 10524 - DNA, 1680 bp, Rhodanobacter fulvus Jip2
atgactacgcttgccatgcgtttgcagcaaagcctcgaccgcagcctgcagcaactgcagcgacgcagtcagagctggtcgccgagggtgcttgagcaagcgcgcaaggagatctgcggcgcaagcgatcagctgatatttgacccgcacgcaaccaaccgtctcgacgcggcgatggaccgactgcttgcgggtggcgccgaacgcattggccagcgcgaccatgtggtgttggcctacaacctggccgaggtgcatgccaatctggaaggcaacagtctgctgaacacgctgtccgaattgacgccactgcttgaatactggcgcaagcaacttgcggcacgcggctcggctcggcagatctggcggggggcgttgcttagcctatttcgtggagcgcctgccgatatgggatttgagtcaacgcgccggtttctagccgatacgctgggtatcctccgcgccgcgaaatttcgtccgagctggttggtagctttggaaaggcatccacggttgctggccgagtgtcccgtggatccctatgccctggcatgggtcgaaggtcaccgggagggcattgatgaactcagagagctggtcgatctgccgccgagaagctggttctggagcagcctgatcgaagcgatactggaggcttgttgcagcatgacgaaggattcgctgttcgacgagcgctggccaatcgctctgaagctcatcgacgatcatcctcattgccgcgatcttgtgctgagccgcatcctcgcacgctacgcccagaagcaggtcgtcattcgccaggatgatctgttgcaagtttcactggaagcgtggggaagccctcagctcggcgccgatgcagtcgggcgctggtctgatacctctgatgaagcacgcaacatggtgtgcggctggctggcggaggaggatctggaagactttgccgcgttctgcaagggcgatgactccgtcgatgcccgacgattggcttattggctgcgcttcaagaaacagatcagcttcagccggatcgtgcttggctcggcgattcataaggcgcaagacaaggaaagcagagagttcatcgcacgcaaaaaaggacgccttgcgtatttgaatgggccgccgaacaacaatgccatcatgcttcgtattgctgattggtggttcgtcgaattcagtgaaaagggcaatgcttgctacccgtacggcaaagaccaccttcctttcaatccaggtgcgatgcacctgaggttgtggattgatctgaagatgaaggctgccgtcataagcagtcaagccgaaacattgacgcatcagccgcctgcaagttgggaagaaaaattcgatcgctttctctccgagcgcggaatttggccagacggaacgggcagaggcgcagcgcgcaaggccgccggttcctcggctactaatgaggatcctttcccgccgaaggcgccagagaaaccggcccctcgcgagagtgggttgccagctttggggctgggacaaccgttgctcgatgagctgaaatccttctcgcctctcttggtcgacaaccgatcgaaggggggcgcgctgtggatcgagatcacacgaacaccagattcagcgctgctacgggctatggaacgccgtggattccgctatgcgagaccgagaggcttttacaagaaatga

SEQ ID NO: 10525 - DNA, 3243 bp, Rhodanobacter fulvus Jip2
atgaaatgggattggttgagccgcaagaagcagaatgacatccagcagaattctcagccgtcggcatcgaccgaaggctggactctgggagattcggagtccctcgcaggttcaggtttgggtgcctacgcgaatcagctgatcgaagagcaatacgccgcgcagcatgacggtcactatctgatttcatgggactcgctctatcgccttttggacaacgatgaacatgcgaccagcgttgcgttgctcgcgttgccgccacggtcagtgctggttccccaccttgtcagtgatggctcgcccgctgatgtcgatttcaggatacgtctggatcactggctggctccggcgggaccgctgccgcagtcggctgtactccggatcggcgccgtagtccgctggcaggccggtgaggaactgctcccgtcatcggcatacctgctgcttggcgcgatgcgagagttgagtaccgagggctgccactggactccagaggaacgtttgctcgccacgggtcgtatccagtcactcgcacgcgtctgtcgtgcatcgaccgatgactacctttcccaaacggatgttgtggtgccggagcgactggacatcgaattagtatccgagcaggccgcgggggtgccagtgatcgaactcatcccgcgtcccgaggggtccccgcccgagtggctcagcaccttcgatgcccatgatcgcgttcgtgcccgctatgacgtggttcgcccggaagggggcatgacgcatgtggcattgcccgaagccatgcaggccgtgcttgagcacgtaaaggatgctccgggacgccgttacgcttcgcgcgaagcagacgcatttctccataacccttatccgttcctcggcgacgatgccgaggcgatattgcgccccgagcagttcgaggccgctcgacaacgcgcaggcatcgttgagcgcgaattggacgcgctgccgtcagacgacggcctggaaatgctgctgctggataccgcaggcgtcgcgaccgatgtttgcgagcccatgacggacatcgcagcagccaaggccttgctcgccgccgcaacggttgccagacaggccgctctcccgttgtttcgctggcgaacgcatcgggtggtgttttccggaacgacgccctcggcattgcgccaattgggcgaatggatcgccgcctccgccgccacgcccgaaacactgggcgtcgatgaggtgttcgatcttcaggcttatagcgatcgcgtagtcggcttcgatggcaagcccatccatgtgccgttcctcggcaaaaaggacgcctcccgtgactgggttccggacaacattcagcggcatgtctcgtctaccgatccggccaccggtcaaaacaccagtacagcgttggatgaggatcagttgtcagaactggagcaggccacgaaccaggccgaacgcgacggatcggcagcggtgcgagtgcccggcacaaccatggagatccagacggacgaagcacgaagatggttgtccagctttagcgaagggataaaaaaacagccaattgcaccctcgatcccgaaaaatccgcagcctggtcgcgctaccagcttgcgtatcctgcacaacatcgaggcgctggagtacggagccgctgtcgcgttgtccccgcccaatgacatcgccgcaacccttccagcggcactgcgtcccgacgtccagctgaaacagcaccaacaatacggagtggcttggcttcagcaccgttatggccagtgcgtgcaaggtatccgaggcaccttgcttgcagatgacatgggtcttggcaagacacttcaatgtttgtgtctgatggcttggtaccgcgaatgccgccccagtcccaagccatgcctggtcgtcgcgccggtctcgctgctggaaaactggaaggccgaaatagacaaatttctggacggcagccagggttccaccatgttgttgtatgggcaggaactagcgcgccatcgcctgccctccgcgcagttgggcgacgagttcaccaacttgggtctgaagaagttgttgcgccccgggttcgcgcgaggtgccacgttcgtcctgaccacctatgaaaccctgcgcgactacgagctctccttcggtcgagagcgatggggcattctggtctgcgacgaagcgcaaaaaatcaagactccaggcgccttggtcactcgctcagccaaggccatgcaggctgatttcaagatcgcatgcaccggtacgccggtggaaaattcactagctgatctatggtgtctgttcgacttcttccagcccggcttgctcggctccctcagtgagttcacccgggtctttagaaagaccattgaactgagggaggacggtcacgaagcgcagattgagcgattacgtaaatccattgagccttgggtattgcgtcgcatgaagtcggaggtcgccgagttgccacccaagatcgacgaattccatgatgagtctgatcctggcgtccgggctatcccgatgtcagcacttcagcgcaagctctacagcgaggctgtcattggctacaagcgcgcaaaggagaaagctgaagaggaggaagtccaggccggcacgcttactctggctttgctgcataggctcaggatgatttgttccaatcctttggcggctgcccaggagggcgcagaacttctctctataacggaaaacgtcctgcattctcccaaattgcgctggcttttggatcagctggagcaaatcaaaagacgtggggaaaaggtcatcgtctttaccgaataccgcgacattcagcgattggtgcaaagggccattggcgaaagattcggtgttggagtgagcattgtcaacggatcgacaacagttgactctctcaacgacatgtctaggcaaaaaattattgaccgcttccaggcccagccaggtttcggtgcaatcgtgctgtcaacgacagccgtgggcttcggggtaaacatccagaaagccaatcacgtgatccacttcactcgtccttggaatccggccaaggaagaccaagcgacagatcgtgcatatcggatcggccaggaaaaacccgtatgggtttattgtcccacgatcgcaggtgacggctacgaaagttttgagcagcggctcgctgagcggctatcccgtaagcgggcgctatcccaggatttgctagcgccagaaagtacggttagctggtccgattttgaggatctcatcgcttag

SEQ ID NO: 10526 - DNA, 2079 bp, Paraglaciecola polaris LMG 21857
atggcaagtgaaaagcaaatcgaactttcatggttactcccagacctaacgcaactgaacttccctccagaaacagggctagaattaagtagcttgtttgttattagcttatgggccattactctcttcgcaacaatcgtttttttaatcaaatattttcgcacacgaagccgtctgaattggcttttcaaattattgaaaaaccttgaacgtgaaaatgtagcaaataaacgtatagatcttcttaaagaagcaaaaacacgagataaagatataggttttttatggatggagtttgacgaaacattagtcgaagttcaacgaggcgaaaccgtagaacttagaaatactcttgatgctggccatttctttaattctttcacattggcaagtggtgtaactgaaaatagactggttgcagccgttccggggtttctcacagctcttggtgtaataggaacttttgtagggcttcagttaggtttagggaagcttgaactcggtgcaggagtggacgttaaagatatgcaaaatggtgtcgccggagttgttgaaggtgcaaaggttgcatttttaacctcagtttggggcgttgctttaagtgtgtttttcaacttcggtgaaaaatggttagagcagaaaactcgcagtaaaataagaaaaattgaaaataaagtcgactggttatttccacgtattcggccagaagaacaactgcaaattatctcggacaatagctcagagtcgagggaagtactgcaagggttagcggagcaaattggtgagaagatgcaagaagctatgattacagccactcaaggtattcaatccagtctcgaaactagcctttctgaaatcatggctcctgccattaacaagcttgtagatgagacctctgaaggtaatcaaaaagcactggaagggctactagaaagctttatggatggctttggtcaggcaggaaatcagcaacgtgcagcacttgacgatgtatctgccaaagttaatcagtcagtagaagccatgcaaaccaccatgacaggctttgttgagcagctacaaaaatcacaggccgaatctggtgatagagaaaaagccttgattgcagatatttcaaatcaggttagcagtttgtctacccagtctgagtccattcaccaaaaactaactttatttgtagaaaatcaaattggtgatatgtcatcggatttacaaaaacgcgaagaggcatcagccaagcgtgatgcagaacttgttattactatcaaatctcaagtcgatgagttagtagacaattcgcgcaaacaaggcgaaacactcactaatttcgtgacagctcagcttcagggattaacagaatcctttgatgagcgagagaagcgaagcgttgatttagaaacatcccgaaatgataggattgaaaaacaaactgaagctatttcaaccttatcaaatgaaatattgaggtctgttgaaaagtcagtagctgaccaagttagttccgttcaacaacttataaatcaagggcaaacactacaaaacagcattaattcctcagtagaagcaagcgctcaggcttctcaggcaatgaaagaatcgtcaacagagttaaaagtatccgcagacagtatgaagatacttagctcgcatgttaatgaggctggaaacaaactatctggggctattaaatcagcggtagagagtacagctgatttagcacaacaaaatcaactttctgcccaaaaaatggaaaacttgcgtgataacttgttggatgatgtgtcccgttttggtgaccttaccacgcaacttagtgagctaattgaaagcgcagcgacaacgtttaatggtctaaaaattacacaaaaagaatttatcggtgaattaaaagatgaagttgatgaccttggacaaaaaatgacgaatatgcttaacgagtattcgcagcaagctaacggccagacggctaagcatcttggggtttggtcgcaatcagtgactgattataatgttcaaatgaatagcgccattaaagcactttctagtgtagtggatgaaatgcaagtaaagttggggtaa

SEQ ID NO: 10527 - DNA, 732 bp, Paraglaciecola polaris LMG 21857
atggataggttcctttcacgtggcagtgcaaaagtagatgaagaaaatccctactggatgtcgttctcagacttaatgtcagggttgttggtaatttttatacttgccgctgtagcactgattattgagttaactcaaaagtctcagaacattgacgctagtattgccgaatttaagaaagccgaagaagctcgtagcagtatcctatttgatattaaggaagaattagctaaacagaatattcacgtcgagattgtggaaaatgataccgtactgcggataccagagggtacactttcatttgaatccgcaaaagataccttgccacaagatgagactactcagcttgaagtgcgtgcaataggtatggctcttcataaagctataacaaccaatgaacgatggaagtaccttgatacagtatttgtagaaggtcatacagacagtgtggggatctggtatagaggtaaaggaaactggggcctttcagcagaccgagctgtttctatttggaagctctggcaaacagagatcccggttgaacccaaattaattgagcttaaaaacttcaatgatcagttacttttttctgttagtggttatgccgatacaagacgagttgatttaactgaagaaacagaagagcaaagagctaaaaatcgccgaattgatatccgcttcacggtgaaaaaacccaagatagaagactacgaaaaagctaaagatgtttaa

SEQ ID NO: 10528 - DNA, 1428 bp, Paraglaciecola polaris LMG 21857
atgacttttttcttaagtgattctgtatatagaaataatatattaatcatggaacagctgactaaagagcaaaaaagtattgctaaaaaagctggtacagataatccaaaattcgaagctgcgtggagtaaactgtttaacctattatcgcgagattgttttgacctattttcaatcgaggacaggtttgatgtcagagcgttatcaatcgcgttaaccgcgaatagtcaattacgaagtgccatcaaaattaataaaaccttactcaataaagtgtccgaagtcctaccgtcaggtagcaatttatttatggaatctctatttcaatactttcttagcaattttaattctataaatgaccccaacgaaataggtgattggctttgtaaagaacgtaaacgcaaaggactatttcacagcgcagaagaaaaaattctctgtagtgaagggccaacatttttggccaaacaagctataaagctagaaactaatttcgaacagcaagttaaaaattggcagttggatctttatgcttcaggagactttgtcaaacaatcacaatcaatctattttgttgaacagctacaaaacatacctgttaatcaaccccacgacttgctcgaagaagttagcaaaaaaagcgtagcaaacagtcgttatgatgcatccgatcttataggtcatgttgcactgaggatactaattgatcgcgcgccctctcagaatgttgatgagagttggcagaatgcagtgatcgcaattgcaggtgacccacgtgtgcctaaaagtcatccaagatatagtaagtggtggagtcaattaaccaaaatacagagtaaaaaagttcaaggatggttgtccaaactggatctcaaattattcttagaggcgctggaagattactcgaaaagttcacgtgacaatgacatgatgcgaatgtttccttcaagaaagcatttcttagaggggatgcatgaagctggcacaatagtacatacgaagctttatctatccaaaaaagctgacaagtacatacgtaaaaactacaaacctgaacatataccagactattccattgttgaagatggtgaccgttctatcatttacgctgaattgaccaatggtcatatgatcgagggcagtcataattgtcaaatatggttctacaggaatttacatgagtcagcgcctgtcgttaagttcggtcgccaaagagaacggtatcgctctttaactgttggtcttaatgaaactatgtataagtacggttgcgaagcatacgataattttactcattcaccttctaactttagttggcagcggcgttctattgaagtgctacaggccataggtgttcaaattaaagcgtcagatgttctaagtacaagtgattacaataagtacaaacgcttttacggagtaggctaa

SEQ ID NO: 10529 - DNA, 3471 bp, Paraglaciecola polaris LMG 21857
atgaaaaactggatttcatctttgttcaacttgaaagagtcagacgcgaagtttgattttgaatttaatcctgaaagtgttgacttttactgccctgaatataaattcaatcagattaagagtggtcaagcagatgagtacttaactgctcaatttgttaccttacaaatgctagctgaagaaggaaacgctgaaactataccgaacggttttattttgccccatgaggttgttgcttcattagatgaggacgtacatcagttattaaacttacctagtagatggaaaggtaaggcagttgcagatatcaaaggaactacatctggtaagtcctttcagctaaagataaaagtagaatctccctcaggaaaaatgactgctgcttatcatgttgatggcagtattattgcttttggtgacaccaaatatactttaaaactagacatgtttagcattttcgatgccttgcaacactatttaacatcggcaaaaagtgaatcagataacttgctgttattgcacgtcctacaaaatgcccagaaattgggtactcaaatcaccttaggtcaattcaacaaattagatatacatgtacccgataaaattgcagttgaagctgaattagatcattcaggtaacctgatacttaccccaagtatggggcagaaagccgaacacgataagttacaaagggttttgggacaactccagtcagaatcaggtcgcaccctaaaagtgggtaaggaaataatactctttaatgaaaaaaccgctcaagcagccaaagaaataataaccaacagaactattcctaagtcccaagttgaacagtttttaaaggctccgggggcgtttttagacgcatcattggtagatttagatgtgggttttgccttgcgcgtgaaaggtgcaactagattcaaacatgcttacttcggtgaaactgacgaatcgggaattgactggtttggtcaaaatcacgcatctggacaaattctgccaatttcggctgtgggcaaagtagttaaaacccaagaagacttagagcaacttgcccaattagttagcgatgcaaaggttactggtgcaacagaaattcagtttgaaggcaaaagttacgacattggtagtctgtcagaggtttcagataccttatctcaactagaacaaaaaattaaaagaccagaagaagctggggaagagcctttgccacaggatcggcctgagaacgaaaatattgatgacatcgatgataccccaatcgtaattgatatagcacttaatgatgatgaattagacaacccatcaaaattggttcaagaagcactaaacgatgtgctttatagagaaaagctagattggagtaaccataaacgcaccccatttccacatcaaataacgggggttaagtggatattgggcttagaagaaatggcacggcacaaagagttagtaaatggagctttgctggctgacgatatggggttgggtaaaacctttatgtcactatcggcgattgaacattactatcgattgtgtgaagacagcgatgaaacatgtcggccaaccctaattgtggctccgcttagtctgttagaaaattggaaagacgaagtaaccgaaacatttaacgagtcgccttttagggatattgttattcttcaatctgacggagatctaaagcagtttcgtgacggtagcacggagacaaaagcatccaatatcgatgatgagactttagagccaaggtattccttaaaatttggcgaaaaacatgggccaaatcgtctcgatttacctcgtcgcatggtcatcactacttatcaaacgctacgggactaccagttttcactatcgcaaattgactggggcatcgctgtttttgatgaagcgcaaaatattaaaaaccccaatgcactgcaaactcgtgcagctaaagggttgaaggcaaaatttaaattgctcgcaacaggtactcctgtagaaaacagtttggcagatttttggtgcttaatggacacggcctgtcccggctacctcgattcatatcaaacattcagacaaagctacatcactcccattttgcaagccgcaggcgatgaaattgctcaagtgcgagcaacgctagggcgacaacttcgcgaaaaagttggtgcattaatgttgcgtcgaattaaagaggacaatctagaaggactgccacaaaaaaatatctttgtagggatcgagtcttccgactggcaatatgagccaaagctacacgcgatcatgacgccatatcaacaaaaagtgtatgaaggctcaattgaagcccaactagaggacgaaaatagtcacgtactcaccacattaatgcgtttgcgagactgttctttacatccaagattgactgatggtggcaggttagacgcaccaacttcaaaactcgaattaaaaacgttatttgatgagtccgctaagttagaaaaagctgtcgaggctttaaatgatattcagaatcgacaagagaagtgcatcatttttgccgttaataaacgcttacaacgttttttgagtatagccttaggaagttactttggtttagggccattgcatgtaattaatggtgatgcaaaagccgtcgtgaagaaaaaaggcacattaagtcgcaaaactatgattgcagactttgagtctaaagaaggttttaatattattattatgtcacccgttgcagctggggttggcctgactgtagtgggtgcgaacaatgtgattcattttgagcgccactggaacccagcaaaagaagcgcaggccactgacagagtattccgaataggccaagtcaaagacgtcaatatatacgtgcctattttgcatcatcccgaatttgagtcttttgatgtaaacttgcatcgactgctatcgcaaaaatctatgctcaaagacgccgtcgtcacgcccggagaggtcatgccaaatccagcgggcgctgacaagtatcagctaagcgcagaaagtattatcacttttgacgatatgcgccgcttaagctggaaacaatttgaagcattaacagttgaattattattctgtgaatatcaggcagatagtgcatggttaacaaaagaaggttctgatttcggagctgacggtgtgataacagctggcagccaagctatattgattcaagctaaacataaacagggagcgtataaggggcataaagctgtgcaagaggtggctaatgcaaaaactatatatggcaataaccttgggagggaaatcaccaaacaggtgtttattactaatgctactcaattggccaagaatacacgaaatatagccaatcaactcgacgtcgccattattgatggaaccgagttgggtgagctttgtgaacgccactcaattacatttgggcaagtaatcacacgtttatcgaaagaacgttacgtaatccacgtgaataacgataagcaaaaatga

SEQ ID NO: 10530 - DNA, 2181 bp, Crinalium epipsammum PCC 9333
atgattactaatttaatatttattggactaactctattaattggtttgttttttttaggtttagaaataaaatttacttgcgattacaaaaaatattattctcaagaaagcaaagatacccaggatacaattaaatatttaaacgatcaactggttaatcaagaaaaaattgttaatggagtattagagttaaaaaaatttcctaattggaattggataaaagagcatctagagggcaattatagaatacaagatggagtttttaacgcccagataaaggatagccgctttgtattaaaaaaatatcctgctgctcttacttggtcaataccgcgtagttacttcaaatttatacctggtattctcacagcaatcggaattttgggaacattttggggtatccaaatcgggcttcaaaatattaatttaaatagtacagaaaacttttcgcagttattaccttctatccaacaattgctggatgggatgagaactgcttttttaacttctttgtttggattgggttctgctagcgtctttacgctaatcttagctgggtctgaatgggctagaacaaaaactcggaatgatttaagaaaaaaattagataaaattgcctggttgaaaactgatgctgatttagaatcaaatcaattaactgctgaagcgattgggaaagctacggggacacaggtacgggataagatcgctcccttaattaacccaattaaagaagagttaagagaaattagagctatccaagctgctcaaaatcaacttaccccacaagagataagtcaacaagttgcattagcatttgctcccttaattaaccctatttcggaacatttaagagaaattagatctacccaatttgctcaaaagcagcttacctcagaagcgatcggtcaacaagttgcattagctttagcgcctggatttacagaaatacgcaatgatttattagcacaacgccaaactattgaacagcaaaggcaagaacttttaaccacattaattcaagagttgcgaacagaggtagttgaacctgttgttttgcggttagacgagagcgcaagattaacaagggaagcttcccaagcggtgagagaactcaaggacgcattaggtgaaatcactcaaagtttagccgaatcaatccaaacaattcagaggtttcaagaaaatacactcggtcaactacaacaatttgcagtagatttacgacaaattttaagccaatttcaaacagaaactcaaggtgttcttcaacaagtagctacagaaattcaacgagcagtatctaccagtatcgagggtttagctacccaacggcaagcttttattgctagtgctagacaagcagctacgttttttcaagggattcaagaaaatttgcaagaagctttaaaaactcaagcccaacaacaaaaagaaatgttggcgggtgttgagtcgcagacaataaacatattagctgaggctaatcaagcgtttttaactcaatctcgaacaattgaaactgttggggtacaagcttcaagtgtaatggatacagctagaacaaatttagaggcgacattaaataatattgacgaaaatctccaaaacactcggaatacagtacagcaggagttagaaaatttcaggattaattatcaatcagctttagtaacattttttaatgaacaaaataatttgctgaatgatactttagggcaacagcgtgatggattagccggagttgttgcagatttacaaagagttttcgtagaagaagcggaacagcgtaaggagttagccgcgcaagtaaacgatagcatggcaagaattaatgggactgttcaaagagttagtgaactagctaatgtagtaggtttaagttctagtgaacgtttagcacagttaatagaattatctagaactattagcggtgaggcgcagcgtgtagaaagagcttatcaaaatatgggtaatcaatttaatcaagctttagataactggaatcaacagattatcacttatttagaccaagctacgaactcacagacaactttctttaatcaggcagataatagcatggcaaaagtttgtaacggtttaaatgagacagctaatggtttattggatgtatctcagtatttagtatcggcagctaatgaagccagaatgaggaaataa

SEQ ID NO: 10531 - DNA, 720 bp, Crinalium epipsammum PCC 9333
gtgagtaatttttctcagttcgatgtagaaccagaagttgaagaacaagacgactctagctttttattatcaattggcgatttaatgtccggcttgctgatgctgtttgcattgttatttatcattgtgcagatgcagcttagtgagcgaattcaagaagtaaaaagactagaaactgaattagcggcatataaaaaagctattgatgagttgccgattagaatccttaatgctattaatggcaatgtaggaggaaagggagtatttatagttgatccaaaaacgggtgatgttagtattgcggagcgtttgttatttgatgagggaagcgcggaactaaaaccggaaggaaaaaagtttttgcaagaatttatccctgtttatagtcaggtaattttttctaataataaatttgatgaacagattactagaattgtaattgaaggtcatactagctctgaaggttcagataaagttaatctagaattgagtttacgacgatccttatctgtttctgattacattttttctaatcagctaaattttaagactaaagggcaattgagaaataagatattagcagcaggaagaggtgagattgatgctaatcaaaaaattgataatccaagcgatcgcaaagtagttttccgctttcagtttaaacgcgaagattttagtaaatggtttccaaaaacgcgatcgccagtgagtcaaccatga

SEQ ID NO: 10532 - DNA, 1425 bp, Crinalium epipsammum PCC 9333
atgaatgttcggtttcgtcaactacatcttaatccctcacaacctcctagttatcagccaacagaattacttaaactatctaaaggtctaaaaactaatagttatttaaaaaatcttgcaaatattccgagacttttcagaactaaatttcgctctctgacagaaattctctcagatattcaaagcaatcaaattgagcaagtaagtgtattagagtgggtttattgtctttatcataaaaatacttgggatgctaaaaatccagatttacggatagcttcatctcaagctatttggaaagcagctaacaaaaattcttggcttttacaaaagttactttggcgtgtcgtactttattatagcggtcagcgagaaacagcaattgcttcttctttagttgataccttcccaagcaatattaaatctaatagtctggctatccaaataattaatattattaaacagcctcacgcagctaaaaaattagctcaattatgctatacaaatttactgctaccacagcaacttttagaacaatctcatttacctacttggatacccgtagctacagaagcattgaatcatgttgctgaagtgttttctgatccatcgaatattaattacaagcatacagattggttgctacgttgcctaaatcaaatgtcagcagatcagcagcttttagcagtggactctttacttaataaaatttcgccagaattaggggcaaatttaacacaactggtaacgtggctagaagaaaattatagtcctagagtcacaaattctcgctggaatcagctttctttatttgctaagtcagctttgcgtaagtggataggggcagttaactatcgagattttgctaatttaattgatcagttgttagaaacacttgatcagaacagccttgattttaaacaactgaaatcacgccgaaaattttgggctgattatagcgatcgctttcagcgtctccgcattctttttcctcaaaattcagtcaatattttaggtagctatctacatgggcaagatgtcagtattttaatagacgatggcagcgaacccacagaagtttgtatatttgattttggagattggtttgtgatcgaattttttcgagggtggagtagcgaaattcgcctaatagctaacaatcctgaaactgaggcaattctttttggagataatctatcagttaagcgtttgcgttgtctgggtggtaaacgtcacgatcacagatatctctggcaattttcttgtgaagagtggctgaatcaaaatcaaattccccctaactcaggaacaaaaccttaccctaatccaacttcccaacaactgcaagatcgtaatcatcaactgatagagtggaatcgcgtaattcaaaaacttgaaaaagaagcacaggaatattgcttctaa

SEQ ID NO: 10533 - DNA, 2190 bp, Klebsiella variicola
atgtcctggcttaattcctttttagttactcttacatctgtggagccccataatgtgcccttcaccgtaatcagcatcgtaagcttggccgttgcttgctttcttttcttttatttattccgagctattaaaattgttaacagcctgaaaaaatacacccgatcaattactagcattgaaagcagttctccagaggaacagcttgcacatctgcaaaatctgtttaagcgccctgagctcaaacacgcgtggaatgagtttgaagagtcgttacatcctcaacgcgagctagaaggtggggaagaaaaaattgtccgtattcgtgccacggcgccaagctctagctacttctccgaacaacagttagtcgatatcccactcaatacggaattcttcaagcacctgcccggtattctgaccggtgtgggtattatcggtacattttacggcctgatgattggcctcaaccacttcgatcccagcactccagagcaggttaccagcagcgtcaataatttgctgcacgatgtgttgtatgctttccttggctctgccgtggctattgctgcctctattttcatcacctggctggaaaaactatccatcgccaagtgctataagtatctcgaaaaatttaccgccgctatcgacaagctctacgttagcggcgtaggtgaggaatacctcgcctcgctggtgaaatccagcaacgaaagcgcaacccaggcgcgtcatctgaaagagagcctagttaccgatcttcgtgacatgctgcttcatctcgccgaaagccagaaagttgaaaatgaacgcctcgcgaatacgttaagcaacacctaccgtgaatcaggcgcacagtttgccgatcaggtgagcggggcaattgaaaatagcctgaagtcaccgctggataaaattgcgggtgcggttcagactgccagcggcgatcaaagcggcatggtacagaacatgctgcaggatgtgctcaccgcatttatggcgaagctcgacaccacctttggccaacagtttacgaaccttaatgaaatgatggggcaaaccgtaggcgccatccagaccatgcagagcggcttctccgcactgttgcaggatatgcgtcaggtcagcgatgactcccgccagggcagcgcacagttgatggagcagctgttatccgaaatgaaatcgggccagcaggcaatgcaggctggaatgaacgatatgctcagtagccttcaggcatccgtcgccaaaatcggtgctgaaggggaaggcgccggtgaacgaatggcacgtcagttggaaaaaatgttcgctgacagcgaggcgcgagaaaaagcgcaggccgagcacatgtccgcatttattgaagccattcagaattcagtgcaacagggacaaagtgccacgatggaaaaaatggcgacctctgttgaagcgcttggtgaacagttaggtagcctgtttggtcagatcgataaaggccaacagcagatttccgcaaaccaacaggtaaatcagcaatcactgcatgagcagacacagcgagtaatgagtgaagtggacgatcaaatcaaacagctgatcgagaccgttgccaaccagcatcagggaacgaccgaaacactgaacaaactcgcagaacaaaccagccgacagattcaggatatgcaaaacggcgcagacaaaatgcgcgttgccgccgagcgatttgaacatgcaggagatcgggtatcagaggccaaccacctcaccgcagatgttctgaacaaagcacaatcagccggttcatcgctttcacttgccactagcgaactcacgtctgtggtggcggattaccgtaataatcgggaagccgttagcaaatccatcgccatgctggagctacttgctgccaatacccagtcagaacaaaccactcgcagccagttcatcaccgatcttaagcagcatggcgagcgcctgcaaagttataaccgtgaagcgcagacctttatggaaaatgttagcgacgtgcttggcaaagggtttgaagacttctcagagggcgtttcacgtagcctggataaaacactgggcaaactggatgtcgaaatggcaaaagcctctaacttgctcgctggctctgtcgaacagatcggagaaagcgtcagcgaacttgatgatgttctgtctcgcgtacgtgcctga

SEQ ID NO: 10534 - DNA, 741 bp, Klebsiella variicola
atgtttgcgaatgcatttggcgttaaaaagcgccatagtgatgaagctgaaaaacccttctggatttcttacgccgatctaatgaccgctatgatggtgttatttttggtcgtcatggtagcgtcattgagttcagtgacccaacgtattcagcgtgcagaacaaggtgaaaaaacgaggggacaggatatctccagattatgtgaacgcctggaattgcatgctcgcagcgtgaataaaacgattgtggttgattgccacgataaccgcatcagcttcggtgaagcaggccggttcgaccacaaccgatttttcctgaatgccgaagggcaaaaagcattacaggatgtagtgccgcttgtacttgaagcctccgacagcgaagaaggtaaaaagtggtttaagcaaatcgtcattgaaggttttactgacaccgatggctcgtatctttacaacctgcatctatccttacagcgttctgaatgggtaatgtgtagcttgctcgatagccgcagccctctgcaaaagagcatctccgcagaacaacaaatccagattcgtaagcttttccttgcgggtggcgtctcctttaacaacgctaaagagagcaaagaagccagccgtcgcgtcgagctacgcatgcagttctttgggctcaaagataaacgcgatggcactgaagaggtggattttccgcctgttgtgaataaagaagtttgccagttggtaatgccacaatga

SEQ ID NO: 10535 - DNA, 1683 bp, Klebsiella variicola
atgacgcacgcactgagttcactttcgcgacgtattgcagcgaagctgtcttcaagccatcaggatgaaaattacctgcataatgatttcaatgcgttgagctcagcagcgaatgatatggaaaaacgttttgataacgcagagaaaattcccactcctccacatgaaatgcggttagcagccctgcgtcgtttccgccttgcggaagaactgactgaacgtgagtggcggatggtgttttatggcctcgccgatagtgacccactacatccagaccaaccggtattacttgaagatgatgctctctttcccgaaataaacagtgcaattgaaaaaagaatagaaaccaaaacactgagacgtcgggactgggcagcactctgttcaagctattttacctacagacatgagtctcctgaaacaaacccacactggtgtgtgctacgcggacatattgccaaaggttacttcgtggtgaaagctgctatccgcagagaaaagtcgtggatgaaaactattgagttttatcacgacatttttacgcctcaggcaggcggtgtgatatcccagcagctcctttccggtgagagcaactctttatcatcattagaaagaatagcgcaaatccccgacagtagctggttgtggaagcgtattttcacggtgctgctggcgcagcttgatactctggacgaccctcagtacttggacaaaatcagttggcttttgggcctggccgcgcaatgggtacgttttcgtgatgacatcatgacggcgactttaacccgttactatcattcaacctaccgcgatcaagcgcatcccgccctgaaacaggctgcactggaatactgggataacccgcaactgaaaagccaacagaacaaatggcatcagtatgtatctgaacctgtcgcagcgatggttcggagctggctggcaaaacaagatctgatgcacttctttgagctattgcgcggcaatggtgacgttgatcaggcacgacttttttactggctgcgttttgcgaaccagatgggattcactcgtatcgtgatggggcaggatgcctggaccgatcgtgacagcgattttgtgaaattccgggaggagaatcgtgggaggctgagccatctgcgcggtggccgtagttttgataacgcgatgatcatgcagataaacgattacatcttcgttgaattttcaggaacggggaacgcgatgtacgcttaccgcatcggcgaggctccgttcaatcccgagtctggctctctggagattaatgtgcacttaaaaagccaggggcgctgcatcctgcgattaccgcatgctcctcgggcttatggatacagcaacgttcgcatcaccggctggatgctgaaatacgatgatgaactgcacaagctgggcattcgctggatggctgaagaacccattaagtttgttgataaaaaagagtcctcccccacttcgctctctgatgtcaaaatcattaatccgctgcgggatacggccatacagcgcctgctggaaaatatttcctgcatcgtcagcgataatcggcaaaaaggtggcgtgttgtctgtacagctcaaaacaccggatgacacaacggaaagagaattactcagactcggtttcacccccgtggccaaagaaccgcaccgttactggatcaaataa

SEQ ID NO: 10536 - DNA, 3243 bp, Klebsiella variicola
atgctaaaacgtctgttaagtaaactgacgggagaccgtcagcagatagaacgccacctgaagaatcagtaccgggctgaagaaaacgggctcagcttccctcaatctttggtggatgatcccgagctttgggcgctggcatcctggcttgagcaactggctgaagaagactatctaatatcactcacagaccgatggttgctgagctgggaggcgttgtatcacctgctggaagatgaagagcatgccagtagcctgcctctaattggcatacctgaagtattgcctttacgtgcaagcatgagttcacgaggagcgctaagcgataaggatttccgcgtctggattgctgaatggactacgcttccctcacgtcaaactatccgtttcagccgcaccggggctatttttactcatgaaaaccagcagcatctgttatcacgagaaaactgggcgctcttgcaggcaaccgagcagctaagcatccagcaaactcaggcccccggcgaaaccactaaccagctgggatgggccacaattcgcaaatgcgcgaaacaggccgctgcaaaatttgatgattatttagaaaaaacgcatgtcattaaacccacttcattgtcgttacgcctccgtaaggcgacagttgctgatactgccgttatcgagattgaaccccactttgaggaccaacccgcaaactggcttggcagttttgacaagaactcacaggttcacgatagctatcgcattcccggggagaacggcgagcttagccacgtcatcatcccacctgaagtaaaagaagttctgaattctatacactcaattcccggtcgccgtgttgccggaagtgaagctctttcctttgttcgcaatccctatactttcctgggtgaagatgccgccagtgttattgcccctgaggaacacgaacaagcactgtttgatgcccatattttctttcatcactttaggcttcaaccccaaattaatgatgagaataagatagagagtattacgctagtgctggagcctgtctcaccggtgccgcaacccgaggtgtcattcctcttctctgctccatgggagttagataaatttattcaggccttagggataagtgttgccgcacaaatgcctgcaggttcctggcagggttacgaactggaactgagtcaattcactgaacagcaatggcatgattgccagtcgctactgttacgttggcaacaggaagtcgaaggtaaagaatttaacgatgtcctggatcttggtaaatatggcgatcgggtcattggcattggtgagttcgaaaaaatatcatctccctggctaaccaaggcgcaaagtgaaagctggcttcctgatggcatcgacttctccgaattttcggtagaaacactggatggttggcaacctgataacctgcagcatttcgatgaactgcaggagagaatcatccaggcagaagcgactggcgaaacgcatatcatctccccctggaatgattccgaactgatgctagacgccgcgaaaaccttcagtaagacttgggaaaaacagcaaaaggcagcacagaaatcagagaacattgctgttgaaaaagctgcccgggctgtactcaaaattgaacagaacattgaagaagcggcctatatcaaacaacgccgagattcactactcaatgcacgtcatgctgaacctgaaattcctctcagccttaaagaacatattcgactcaaagaccatcagcgtgaaggcgtggcctggcttcaacagctactccttcgttcacctcaggaaaccgcaggttgcctgttagcggatgatatggggttggggaaaacgctgcagattctgaccttcctggtgtggttcattgaaaaattccctgacgagccaccaagtctcatcgttgcccccgtctctcttttggataactgggagcgtgaactcgacaatttcttctacacctctgggatttcggtgatgaaattgtatggcgacactatcaaagcggtgaaatacccgaaacaggcgattcctgctcatctccaaagtcaggggattaaaaatttgctcaaacccggctggcagggtgaagcgaaaatcattctgacaacctacgagacgcttcgcgatcaggagttctccctggcgcgccagcgatggtccatcatggtctgcgacgaggcacaaaaaataaagaacccggcggcattaatcactcatgcagccaatgcgatacaagcaagattcaaagtggcatgtaccggtacgcctgtcgaaaacacgcttgtagacctgtggagcctttttgatttcgctcagccgggactgctaggggcactcaatgattttggcaaacactatgttcgccctatcgagaacgaagcgggtcgagatacagggcggcttgaaagcttacgagcactgattgaaccccagacattacgccgaaccaaagaagaggttgcgcgtgatttgccgcaaaaaatcgaagtcgtcagttgtaaacagttgccactttcagaccctcaaaagcaactgtatctttcttcgatagcgaactggcaacaacagcaggcacttagtgaaggaatgcagcaggcgggggcggggatgctggggttattacatcgtcttaaacttatttgtgcacacccggcagtcgttaaccctgagcctcgatatagggaagggtcgccaaagctaaactggatgttgaaaacgctagatgaaattaagcacaccagcaaagacaaagtaatcatctttactgagctgcgcgatctccagcgcgagatacagcatgctattcaacagcgattcggtttccgtccggtgatcatcaacggcgacaccagtactaagaatcatagccagaatagccgccagcgattgattgatgatttccagtcccaatccggctttggcgtgattattctctccaccgtcgcagttggatttggggttaacgtgcagaaagcaaaccacgttattcatttcacccgctgttggaatccggcaaaagaagatcaggcaactgaccgcgcttaccgtatcggccagacaaaagatgtatatgtgtattatccgacggtaatggactctgaaatcacgacgtttgaagaaacattagatgaactccttcagcgtcgccgtgcattggccagagatatgttatgttctacacctgagctgagcagtgccgattttgagaatattttaaaagggacataa

SEQ ID NO: 10537 - DNA, 2115 bp, Vibrio crassostreae
atgaaagatagccttaacctctccagtttatggcccgacttgaacagtctaaacgtaattccaccacaaacagcagatcagttgagtgccttgtttgtggtggttttgtggtttgtagcggcatttttcttactgtggtctatatctgctttcattcgagctactcgtcgtgtgaagtggttaaatcatctgctcaatgatgctgagaaggcaaaccctgcagatagtagacatgacttaattgccaaagcagaactaaagaaaaattcagtagggcatttgtggctagaatttgatgaaacgctgttggaagtcagaggatctgacgaggtgttacggttacataatacatttgatgctgactatttcttcaatagttccactctggctggtggtagcactgagaatagaatgatagctgcagtacctggtttcttaacggccttaggggtaatcggtacttttgtgggtttgcaactcggtctttctgacttaaacattgcaggtaatgtggatgtaaatgaaatgaaagatggggtggcgggagttatcaatggagcaaaaattgcctttatgacatcagtctggggtgtcctattgagcgtagctttcaatttcattgaaaaaatacttgaacagattattaggaaaaagattaaggttctgcaaaatagaattgacagattattccctcgattgagcgctgaaaaccaattgcaatctattgcgaacaatagccagcagtcacgtgaaagtctacaagggctagctgagaaaattggcgagaaaatgcaagagtctttagtacaggctactcagggcattcaacaaggcctggagagcagcttagaaaaaattatggccccagctattaataagctcgttgatgaaacctctgacggtaatcagaaagcactagagagtgttcttcaatcattcatggatggtttcgggcagcagggtgaacagcagcgtgttgctatggatagtgcctccaaaggagtgaatgaaactttagaatctatgagcacatctttggcagcatttgttaataagcttgaagctcagcagagcgcatcaacggagagagagaaagagctgatttcttcgatttctgtacaggtatctgagttagtaacacaaggcaatgagcaaaagagaatgatgaccgagtttgtggagaaacaggtctcagaaatgggtgagcaacttagccagagagagagtgcagcttcggaaagagaacaaaagctggcttcttctatggaaacgacaattaaagaacttgtcgataatgtgtcggagcaaagccaagttttaacagaatttgttaataaccaagtaggtgaacttacacaaacgttctctaagcgtgatgagcagtcaagcctgatggaaaaagagcgcaatgacatgtttgtttctcaaacaaatgcaatgaaatcgggaactgatgagctactagcacaagttaaatcaagtgttgatatgcagcaatctgcgtctcatcaggttttagaacaaggtaagcatcttcaaaatagtattgaaacttctgtatctgcatctgcgagagcgacagagagtatgcagctatcagcggtagagttgagaaatgcagctgacagtatgagcgtctttcgctcgaatattaaagatgcgggtaataagctttcaggagcagtaactgaagctgtaagcagtactaaagatttggctgaattgaatcagttaagcgtagagaaaatccactccttgagagagcaacttgttgaggatacgagtaaatttggtgaacttgctgataagattaatggcatgttagatagcgcagaatcgtcgttcaatcaattacgttctactcaaaatgagtttttgacagagcaaaagagtaacctgaccgaactaacttcagaaatgaaaaataacgtgaaggaactgagcgagcaaatgtcgaccctactggaagagtatgctgatgaggcaaatagccaaaccaatgaacacctaaaaatttggtcaacgactagtactcaatacgcagcgcagatggttaatgccgtcaatgcaatttcaagtgtcgtagatgaaatccaagacaaagtgagtcactaa

SEQ ID NO: 10538 - DNA, 732 bp, Vibrio crassostreae
atgcgtagaggttcgcgataccaatcaaacggttcagttgacgaagaaaacccgtattgggtttccttttctgaccttatgtcagcgcttcttgttatcttcatactggccgctgtagcgttaattattgaacttactcaaaagacaaatgatgttgaagcaggaatagaagaactaaaaaaagctgaacaggcgagaaaagacataatctatgacgttagagatgaattagctaaacgaaatgttatcgttgagatcgccgataatgacactgtaatacgtatacctgagagcactctaacgtttgcttcaggtaaggattccatcccaaagagccctgaagtccagcaggcagtaaaagatattggtgctgtgcttcatatggctgttcgaaagaacgaaagattcaagtatctagatacagtgtttgtagaagggcacactgatagtgatgggatccattatcgagggaaggggaactggggtttatctgtagatagagctatatcagtctggaacgtttggcaagctgaagtagaacttacacctaaattgggtgaattagaaaatgcatttggacagcgacttttttctgtaagcggttatgcagaaacacggagagcgaatctacaagaagctaaccaacaagataaaagtcagaaccgaagaatcgatattcgctttacggtcaagaaaccatctattgctgacttagaaaggattgttaattag

SEQ ID NO: 10539 - DNA, 1452 bp, Vibrio crassostreae
gtgcgccttcgtattaaaaagctaccggtaactttacgtcatgatcctttggctaagtcaatagaggagctgtctcagctcactcagaaacttggagtactgtccaagaacgctggtattgaaaatactaaatttaagtcagcatacggtgatgtctacaaagcactgatagctaacaaggctgtagaagatgtagtagatacttctgttcatgtgcgagcgttggcaatctctttgcaaactgacgtaaaaaataaagtcagctttactcgtcgtcttctcaataagatcacagaaatcgtggggaagcctagtgcacttgttattgaatcattttatcagcatttcctatcagagtatgaccagctaacggattgtgatgcgaccgctgaatggttattagaagcgaagcaaaagagaggctacgagggagagtttgatgagcaactcctgtcaagcaatggacctcagtggctcgctaagcaagcaatcgaaagaaatattgattttgaccattggattaatgagcttgatttacaacattacgctaatggtcgctatttgacgacagctaaagggatctattacgtagaacagcttgaaacgattccgatcggtatcgatcatccattgttatctgaggttcagaaaaaggcagtttttgaagctcaatatgattcagaggacttgttaggacacaagattctgcgaattttaattggtcgttctattggttctcatatgagtgaatcatggatgaatgtagtgcttgctgtggctggagatcctcgagtgccaagctccaatccacggtacataaagtggtggagaaatattgatgctcggttgactcaagcggttagggggtggttgtctaaattagaccttaagctgttcttagaggctttggaggattattcgtattcctcatccaactatgaactacaaagaatgtacccatctaggaagcattttttagaaggaatgtttgatgcaggtgttattactaatacacgactatatctgagtcgagatgccgctcaatatttgaaacgaaactatgacgctaaacacttgccaaacttttcgatagtgaaagatggggataagtctatcatctatgttcagatggaaggcgcacacatgattgagggaagccatagttgttacttgtggctttacagacacttagagccttcagcttgtgtgttcaattataatattactagtccaacttattcgcagttgaccagtggattaaattaccaaatgactaatttgtccggtggggcgacagcaaagattacgcattctccttcaagttattcttggcagcgacgcgcattgactgagctcagagacttaggggttcaattgacagctaaagatattctttctagtgatgattatgtcgactttaaacaacgtttcggagtaagagaatggagctaa

SEQ ID NO: 10540 - DNA, 3447 bp, Vibrio crassostreae
atggagctaacttctttaatcagtagatttttttctggtttagataaaacatccaaatttgatttggtatgtgatggtagccttgacttcactgcttcgaagtctaacttagaaaaaatacgaagcggtcgagcaaatgagtggttcaccgctcaatttgttgctcttaaaatgcttgaagaacaaggagaggtaacatcgtttcccgatgggtttatgatgcctgcatcgactgctgttcgcttagatgcagagttgatgactcttttaggccttcctgaactttggggaggagtaattgatgctgacataaagggaaaggcaagcaatcccgactttaaaattgacttggcagtgactacgcaacaaggtcgttcaacgcttaattattcaattagtggtccttttattaggtttggaaaagaggcagagtatttgttaacaccatcacagttgatggtgtttgaggcacaaaatcttcatcaaaagtccgaaaagtctgagtacgataatttgctttttcttcatgctcttcaagaagcgcaataccaaggctgtcggttaaagttaaaacattttgataaattaagaattttaacgcctagctcagtgacagtagatgtggagcttaacgctaatggggaccttatattaacacctaatatggggcaacatgctagccatgaagctatccagagggtgctaggtcaattacaaagtgatagttcggtttctcttaaagtaggtgatgagataatacttttttctgaggaaaaactgaaagctgtcaaagaagttatcagcaatagggttgtaccaaaaagccaggttaaagcatttttggaaaatcccactgcatttattgacgcgagcttagttgacctagatttggggttttctttaagggttcgtggtgcaacgacatttaagcatgcctattttggggagacggatgaatccggtattgattggtttggtacctcattaacaacagagaccatttatccaatatcaaagctcattgatgcaattgatgacaggcccgctttattagaagtaagcaaaaaactcgatgacgctcaacataccggagctacagtttttgattacgaagggaagtcgtatgacattggtgatcgtgaggctgtgagtaaaacacttgtagcaatcgaagacaaaatttctaaaccagctggtggtacttctgaagatgaacctggagagttggagaaggactctagtgaaaaagagatccatgttgttgatatcgatctaaatgatgaggagttgtcagaaaactccccgcaggttgataaattgatcgcagatatggcgtgggaaggtgagttaaattgggacaatcacaaacgaaaaccattcccgcatcaagaggtaggcgttaggtggattctgggggtagaacagaagattcttactgaaccaagtatcagcggagctttactagctgacgatatgggtttagggaaaacctacatggctctctccgctatagagcatatgtaccaacgtatgacgattgacgctaagactaagaaaccgacattaatcgttgctccgttaagtctgcttgaaaactggaaagatgaagtagataaaacatttgaagcgtctccttttaaagacatagtcattttgcaatcggctgccgatctaaacagatacaagatgggtggcgttgaaatccgaaatcaaaagaattcggatgaagagcttgaacctaaatactctttaaaagtaggaaagaactttggttccgaacgtctagaccaaccacaacgacttgttattactacttatcaaacgttacgggattatcagttttcattgtgcttaattgattggggtgttgttgttttcgatgaagctcagaacactaaaaatcctaatgccctgcaaaccagggcagctaaaggactgaaagcggattttaaattggtcgctacaggtacgccggtggagaatagcttggcagatttttggtgcttaatggacactgcctctcccgggtatttagggacttatcaggagttccgttctcactacatttcacctattctcaaatctgccggagatgaagttgaagaggtcagagctagactagggagagagttgcgtatcgcggtgggtgctttgatgcttagacgagttaaagaagataacctgaagggcctaccggctaagaatatgtatgctggtggacactttgatgggtgggggtacctgaaagaattagaatctacgatggtcgggtatcagcgcgatgtctatgaaggaacgataagtaatcaaattgaaaatgaagatagtcatgcattaactacattaatgagattacgagacagttcattacatccgagattaagtgacggtggacgactagaacttcctagaagcagtaaagtggctcgtgaattatatctagagtcggggaaattaagttcattgcttgagactcttgatagaattaagagccgacaagaaaaatgcatcatttttgccgtaaataagcgtctacagagctttttaagcatcaccctcggtcaaatctatggtttagggccactgtcggtaataaatggtgatgccaaagctgtagctaaaagaaagtcagttccaactcgtaaatccatgataacggacttcgaagctaaagaaggctttaatttgattgttatgtcaccagtggcggcgggtgttggtttaactgtcgttggcgctaatcatgtcgtccatctggagaggcactggaacccagctaaagaagctcaagcaaccgatcgggtgtatcgaattgggcaaacaaaagatgttcatatttacatccctttgttacatcatcctgagtttgagtcgtttgatgtcaaccttcataggctactaacgcagaaaactttattgaaagacgctgtagtcactccagaggatgttgtaccacagccatctggtgtcggagggagcattactgaggatctcattaataaacgtataacacctgacgagttggacaaattgagttggcagcaatttgaggctctgtgtttgacgctcctgtccaagcattatgatagtgaaagcgcgtggttaacgaatgctggtgctgaccatggtgccgatggtgtaatcctgactcagtcgggcaatattctaatgcaagctaaatatacgcaacgaagatacgatggatataaaggtatacaagagattcactctgctaagccgatttatgaatctgagatgcagaaaactttcggccgtttagtatttataactaactcaccatcgttagctaagcgaactgatgatatagctaaaacatgcggggttgaggttatcgatagagctaagctgctaacatatctagatgagaatgaagtgacttacaaagatgttctaactcgtcttgagaagcgtaggcttaaggtgtaa

SEQ ID NO: 10541 - DNA, 2115 bp, Vibrio crassostreae; identical to SEQ ID NO: 10537

SEQ ID NO: 10542 - DNA, 732 bp, Vibrio crassostreae; identical to SEQ ID NO: 10538

SEQ ID NO: 10543 - DNA, 1452 bp, Vibrio crassostreae; identical to SEQ ID NO: 10539

SEQ ID NO: 10544 - DNA, 3447 bp, Vibrio crassostreae; identical to SEQ ID NO: 10540

SEQ ID NO: 10545 - DNA, 2019 bp, Gluconobacter thailandicus
atgctttctctgcttttccaagtcggtctttccatccgcaatcttgtcttgggcttcgctcagattttggtgtcagaatcaagtccgggcctcgtagttcttattctttttaccctgttgataatcgcttcgtttcgggttgtgcgtctttatgcctcccggcttgcagccataagaaaattgcgtgggaaaatagaaacagatcttcctaaaaaccgcgagagtatttccgatcggactgaagaggcaaaagagaacagtgctgaccggtcgatttgggaagcatggcgcgagtttgatgagacgctggtgcttgacacgaaagagccgcctaatctgcgcaattcagtaagaccttcgttattttttaatgtcgaggatcttcactttggaagtggcttttttcggatttgccctggtctcttcgtttctgttggccttgcctgcacgtttctggggttaattgccgcccttcaaaatatggcccagtcgaatgcgatcactgatcagacgatgcagcgtcttttgcagatcgcctcggcaaaattcatcatgtcactcatgggacttgcctgttctatcgtttttacaatcattctgaggcgtctcacggtcaagcttgacaaagaattgtgtggtttgtgcgtgacaattgagcaaaggcttacatttgttagtgtcgagcagataggttttgatcaactgaaggctatgcaagaggcgcgtgaacataaccgcgccctgacgaccgaactagtggctgagatcggacgccccctgcgtacggaattaccagaagcgatatcgaactccatcagtgccgccatgcagccgctgcttgataaggtgggtcagcagggctcggagaatctgtccgaactagcttcagatctctcgtcccaattgtcttcaagtgtggggactgcattatcgcaggctagtgatcgactcgcgacggcggctgacagaattggacagcttgttgcgcaaatggataactcttccggacggatggggtccgagatggagcaagcgattgctcgcatgggacaggctgtagatgatcttcgcggcacgatgtcggagacggcgcggcttacttccggtgcgctaaatcagggagcagaacaactgctttcagtcatgaatcgcacgttggaaggcatccgcgataatacatcagaaggagcgcgagcgatgtcggttgctgcgcaggagttacgcgaggcggccggtgccatgcgttcagaaatggagggagcagcccatgcaggcgcagaggctgcacggctgaggatggaagaagccggggatgcagcaaacgtttcgattgcagcggccgggcaatcggttctctcggcatttggccagactggaagtgacatagcccgtatggccggtgaggtttcagcaagagcgaatagcgacctgatagcgccgattactgcaatttcggaacgtctaagtaatttcgtggaggtgttggatcaaggagctggcgcgatgcgtcgttccgttgatgctgtgcgtgatggcgctttggcaggcgctgaagcagctgtcgcttttcggagctcctctcaggatctggttgcggctgccgctcccgttcgggccacgaccgagagaatggagagctccctacggcaaatgaccgaaggaacgcacaatgcggtctcgattgtcacgcgaagtgcgcaaagcacggcagaaagcgctgcgcacgttcttgcgaccgcgagtgagacgcttacagccgaacgacgtggtattgaaaccacgcttgaagctgtcagtcagatgcttgaacgcatgcggggacagggagagagactggatacgatcgacaagaaactgggggcggcctttgacctctatgcgacacaggtcgagcagtcgatgcagtcgatgcgcacgcatgttattaatatgtctaaagacctgaatgttgctctttccacactgcaaagtgttattgaacaacaacaggaattttccccacagcagggacattcctga

SEQ ID NO: 10546 - DNA, 864 bp, Gluconobacter thailandicus
atgcgagggttgcagcgtcgtagggaaaatcaggagatcgaggaagagacggcgttcgtctcaatgacggatctgacggtcagcttcctgttcatcgtcatcttgctgttggcctacttttccagcaagtataatccacagaaaagtgtttcgctgccggtttacgagcaggttgtggccggaaaggatgcggcggagaagaagatacatgagctcgaaacggagatcgccagactgaagcagccgaacccgttagaacgttacatcgatcaggccatggcggaacgtaaacatattctggaaaaactgcgtgatcagttaaacatcgaattccctgatctcaaggtaacattgagcgaacaatctgatgccctgcatttccagggagacggacttttcgcctccggttctgcgagtttgcgaccggagcgcgtcaatatcgtccagtccgtcggcattcgtcttcagcagcttctgccatgttatacgctcggagcacagtcagcatggcagccagaatgcaacccggattttgccgtgatcgaagccgtgcaaatcgagggacatactgactccgacggcgatgatcagagcaatcttgttctttccactaaccgcgcggatgagacctttcgtgtaatggttgctagggagccgctattgacgtcgcatctgagctatcagaaacagccagttctctctgtagccggttacggaaaaatgcgccctatcgcatccaatgataatgttgcgggcaaggctgcaaatcgtcggattgatttgcggctcatcatgtacgttccggcccgctcggaagaaatcgagcacctccgtgcttcccttgtgggcacatcacatgggtag

SEQ ID NO: 10547 - DNA, 1278 bp, Gluconobacter thailandicus
ctggctcctttgcggcctctaccgcctccgaacttcgagaatatcgagcgtacaatccgccgcgtgctggatcgtttcgatgcgccgccgattgcctcagaccgcagtccagaggatatcctgcacaagattctggatcatatccggaataatgactggcgaggtgttcctctgagttttgttattcaaagtgcgggattcgcattttcatctgacttcaggaacacgcctgcattcgagcttattcgttcttttctactaaaggaagttgatgcctctactcgcagtggtttcatcaaccccatggtgcgcgtttacatggagagttttgatccggccgcccaccataccctcgatctggctgcaactcttcaacgtaatcgggaacagatcgggcctcgatggcaggatcttatttttcatatcccggatcttttcgatcctcactcagtgttggagacgattgctgaacgaatggatgcgatggacgatccgtggcatgagttgcgggccattggcctgcgccagccgcatgcgccaggcctaatggactttgcccatctcgcttttatccggcggattgctccacgtctcaatcagaagcaggagatagagcgtctgcttggctggctcaggcctgatggccagaccctgcaacagacgggagcgggcgctgccatcaatgcgttgctggcaccatggcgtcagcaatcgccatccagagatatctcgtctctcctgactgatcgtcttaccgagttctatggtcaccctaaagtccatcgccatccggcatggaatgaggtcgaccccgaattggaaaagatgttcctccgctggttgatgagggcggatttccgttttcttttccggattctggatgaggttgagcgtggtcatatgtggtcagatcgcgaacaattctgggaaacgatgcttgagcaggggctcgtggatgaactctgggtggccttcaatgaggagggatatcgcgtcgctcaggaaaaactgcctgccaacacgagggaaacgaccttacgttttgggcatcagaccggagaaaaagataaatctcttctactgatgagaattggcaagaagatcgttgttgagggtacatataatttcaagctgcatatttttgatgcggatgcgtcaggggtgcctgaattatacaagtcacaatatgatgtagccagaataagacgaagccgctgtctggatagttttgcgcatcttggagactggcagacacgtgcacgccggagcattctctga

SEQ ID NO: 10548 - DNA, 3087 bp, Gluconobacter thailandicus
atgaattttagttttacttattcctctgaggcagttgttcttgatgtcctccccgaacgtcgtggaatgctggcacgcatgtttgcgacatcctcttcaggatctgatctggagaatctctctgagcaagagcacagacttgtattcgcgctgggtgatctgcgcgccttgtccgacgagatggacgagaggctggagatcacgagaagccgtatcattataggacatcgcctcgtagcggcacttgatgccgaaacagcggcgacactcggtttaccttctctgaccgatcttatgctttgtacagatgccgagggggtaataggaagtcctgattttcgtctgtcctatcattgggaacggaatggccagcgtcggactccccgacgtaccggtgccattctcgatatcgcgggaggtcagcgtatccctctgtggatgctcgacgcactggatgttgcggatggttttgtccgcactcacgatgacgcacgtcattgggaggctcttgcccgttttcggcgagctcttgacccgggtatcgaaatggctggagaaagtccaaccgctcgactgtcaatgactgattttctgcaaggattgaaaatctcgctttctgactgtctttcgatttctcccaacaaagatggaacggatttcgaagtcgtcccattttcttcaagacggtccgatacagaaggaatgtcttctgagacggatggtgaactggaatattctgatcttggtcgattccagaataaatttcgtgaacgtggtgtgctcaaggcctacagccttgcgcgtggtcattaccttgtcatggacccaagtattgctccggtcctgaaggtaatgagcgagatgcagcatgcctcgccgcaggagcgtcatgcatttatccgtaatcctcgtatatgcatcacggaagcagtagaaagtgatctgcgtgccaagggagaattaaccgatctttctcccgaagagcaggaggaacttattgaatccgttgctgttccggcttttgtcgaaacgaaggagtattccgatcgagtcattggtgttgaagtttatcgtggcaatctgatcggacgggacggccccagcggaacaacgtggctgccggaagccttctctccggaagtctctgcgctcaccggtgacatgtctgtctccgaattgcgcgctttgcgtgaaaaggtggaggcaggccttactgccggagaaaatgtcgttccagtcgccggtggcattctccccgtgacgccacaaacgcttgcgttcctggactcgcaactcgcagcacgggaagaagcttctggggaggtagcgcaggaggaagctgaggatgcgccaaaatctggccctgttattctaaaaaccttagaaaacactgacaatctttcgtggaatattcctttgcgtccccgtcgcagcgatatgggcgagaccgttcctccagggatttttacacgtctcaaagaccatcaggttgactgcttgcagtggcagatacgtgcatggaaggctggtttgccaggaattctcaacgccgacgagcaagggcttggaaagacccttcagacgatatcctttctcgtctggttgaacgaacatatgaaacgggtcggaccacgcaggccaattcttgttgtcgccccaacgtcacttcttaaaaactgggaacaggaagtcgagcggcatgttgagaaacctggtcttggtttcctagtacggctttatggctcttctatcagtgcgcgcaagctgccggggcgacaggggacggacaaggaaacaggagaagaaaaacttgatttctctgatatccacaacgcaatcgagcgggatagtggacacctgacctggattctgacgacctacgcgacattgacgaattatcaacattccttggcacgcatccctttttctgtaacagtatttgatgaaatacagaatataaaaactccgggaacactttcctttcttgcggctcacacgctggataccgattttcggatcggcctgactggaacgccaatagagaactcaaccagagatatctgggcaatcatggatacgctggcaccgggagcgctaggttctttgcaggattttagggagcgctatggcaaggctgaggaggggaatatggaagagcttcatcagcgcctcttctcgtcttttcagacgaggccgcctcttgctatcaggcgtctaaaggaaaccgtcgcgcgtgacctgcctgctaaatcccgttttctgtatccacaagcgatgccatcactacaggcacagaaatacgaagaagcgagaataaaacttcagaaggggggagccggtgcggcattgaaaatgctgcatcacattcgtagcgtgtcggttcatcctgctattgatactgatctggacacggaagattttatcgggatgtcagcgcgactttcgacaacgtttgatattctcaggcgtattcgcactgcaggagagcgtgctctgattttcattgagcaccgtcgtatgcagcatcgatttatcgaacttgcaaaagtgaaattgggactgaagaagattggcctgatcaacggcgatacgcccatcaggaagcgtcaggaaattgtcaataatttccagaaaaaccttgatgaaggagcaggcttcgatcttttggttcttggaccgaaagctgctgggaccggcttgacgcttacggccgccacacacgtcatccatctctcacgttggtggaatcctgcagtggaagagcaatgtaacgatcgtgttcatcgactgggacagacacggccggtcacgattcatgtgcccctggcaatccacccgaattaccgtgaacagtcttttgatctgcttttgcagagtcttatgcaacgcaaacgtcagttggccacatcggcactgtggccaatgggagattctgacaccgatgtcgctttcctcgctgaaaagctgaaagaaggcgattccgtctccaagggggatgtgatctgccattccatggaaaaactttatgcgcgcgatggtctggaaattcctgaatcgaatcaacatggaggatggtattttaaataa

SEQ ID NO: 10549 - DNA, 1524 bp, delta proteobacterium MLMS-1
atggagtcaattcaccaggccgccgtctttataacgtcaggctggggtgttgccgctatttgcttccttattgccggcggggcgctatacgttggcgtaaggtttagagccgatataacccgttgcctggctcaggtgcgccaagcttgtgagttgctcgaacgatcagataacgatgtcgaatttgctgcccaaatcgaggaaattgatgaactgctccggcaaaatgaactgctctgccaccaatggaaagagtttcgcaaatccctgatcgatcctgacatcgcagatcaggagcaagtcttgtatgctacccacaatgttaaccaaattttctcccacaacacccttcttgctcaacgaatcaatttaaggctttacaatgccatgccaaacctgctcaccggggcgggtattctcggcaccttcctgggattggtggcggggatatttctggctggcggcaatctggcagatcccgagcatgcctctaaagctctggaagacttattgggtggggcatcgctggcttttctcacctccattgtaggcctgtctctatctatcttgttttcatggcgggaaaaatatcgcctccacgaatttgaaaaataccgtaagcggtgggtcgaaggactcgacaaccgactgcggacaattactccagagaaaataagtcgggacaccttggttgaagcccgccgccaaacaagagtacttgccgattttaccgatcagttggcttttcaacttaccgaagctttggagcgcacggttcccaaagccttggcggaacaagtcaccacaccactggctcagtcactggaaaaattacaggctgccgtggaagaaatggccagcaagcagacacaaaacaatgaagaaatgctacgggaagtagtggcacaattcaccgaggccatcagtggtgctgctggcaaggagatgaaagaatttgccaataccattagttcaatgagcgagcagatgcaaacccaggttaccgcccttggcgagcgccaggaggaatttgatcgccactcacgtgaatcaacaacaaaccttgccaaaatacttgagcagggcgctgaaggcatgagcaagcaattgagcgcacaaatggaagaaatcggcaaacaacatgaagaagccaatcaacaggctaggcagtacatccgagagttggctaataccttccaggaaggagccgaagtgttacgtcggcagatggctgagtcagtaagcgaaattgtcaacgccattagccgtagcgtccaggaaatggcgaccctgttggactcaaccgcagccagaatggcagcccagcttgaccagacagcggaggcatttgctcttaccgcaaatgaactgaacagttctgttgtcgaaataaaagccatgctggaaggttctcgtagccttgttgtatccaacaataaagtaaaaaccaccgccttcaattttcgtgattttggcaccggtgaaacgcttggacggtggcgtaatgtgccctacgcttcgtag

SEQ ID NO: 10550 - DNA, 819 bp, delta proteobacterium MLMS-1
gtgagcaccggccagacgccacagcaaacggcctgggaagacgatggcgccggttacctgattgccgtcagcgatttaatggccggcctgttgttcattttcatcatcaccctaatggcctttgttctcaattttcaacaaaaaagcaagcaggctgagattgaaaggcaagaactattacgtgagcaaaaacgttacagcctcatcgttgacgacctgactaacatagggcatgtaagggattctctgctcgaggacattggttcaaaattacgacaacttggggtgcaagtagaaacagatcttgagcacggcattgtccatcttaccgagcaggcgatcaacttcccaagcggccaagcgattttacccgaggaagagttggccaaacttgccaaagtcggcgatgtactggtcgacaccttgccctgctataccgctgatccacctgcatatctgaactgctcgccagaacatgccggtaaattggaatcagtgttcatcgagggtcacaccgacaatgttcccctgcgtgatggatccagaaaatttcaggacaactgggatctttctgcgcaaagagccatttttgcctaccgcagcatggttatcggggaacaaccccttctggggcaactaaccaacacggccggttttccaattttcagcgtgagcggctacggagagggccggcctcgtaatcgttatgaggctcccacggcagatgccgccaaccgccgaatcgatttacgattcatcatgaccccgccttctgacaaaaatattccgatgctcgaaaagctggagggcgcattatga

SEQ ID NO: 10551 - DNA, 1461 bp, delta proteobacterium MLMS-1
atgagcaccctgcaacacgcgatcagtagctggaaaacttctttcccaaatcccgacgatgttctattaccgataaagactcgacacgcgttggtagagattgatcgtgttctggccggggctgtggccaaaaaaccggcctctattgatttgaaaagaagctaccttgaactgaaagccgaatttgccagggttggtaatctggataccttgaataggcgcgttatccgtcacataccatggattatatttgagccatgggaagaagaccctcccctggtagaggaccacaggtttgtcaaagcctacgttaaaagaataattgacctggcccatgggcggctggtaaccggctttgttatcggcttgctgttttactacccttcacagcttccccatttctcacttcttgccaaggtggcagataaactgctcgctacctgtgaacgcccccgttgccgccaactaagagaagatgtcgataattacggcctgctggctgaagatgggccaaaactcttctggcattttttgtctgggcagatcggctcactgtcagaacgattggcaagaaccaactgtttttctggaatgttgctgaaatccgcttttcttgagatgactcttaacgaggctttgcgattggccagaaaaagccttggcaccgatggttttcggctggattttatcaactcactttttgccctggccttggaaagagaacagggcaaagtgagcctgagatttgatactccatcgcagcgcaaacaatttgccgaagcccttctcttaccatttctagatcgccctattgaccaaaatatccagcaggtgatagcaaaagatgtattagggctatacggtgaccctcgctttgatcgaaggcgctggcagggagtggacgaaaaagccatcagggtcgttctggactggctaatcaaggataccctggaggattttttccgtttactggcctatttcgctcgtggcaacgaagaagcgacccggcactggcgttaccgtcgggcgttctggggtgcctacctgaagaaaggggttattgaggcggcttgggttgctcttgcccccaaactaggtaaacaagcggcccaaatcctgagcaaggaggacgccacctttgccaccattgaacgtggcccaggtgtattggccaatcatagcgcactgatcatggagatcggagatctgatcatcacagaatggagccataacgggaaatgccgggcctggtctcatcactttgtggagattggagttggacccaaaatgtatcaaaagagttacaaccgtccccagttgatcgattatccaggcatggaaactgcccaccaccactcggaaaaaggatcttggcagagaaaacttaaggattacatttacgagcacaccggcataaccgtaagatatatggactacatgccaggagcgaacagcttatga

SEQ ID NO: 10552 - DNA, 2859 bp, delta proteobacterium MLMS-1
atgactgccattttgcaacacacggttaccaaacagggggttacctttaggcttgttgattccgcctcagaacctatcccgctggacaactggggcagttttactgttaccaccggacatggtcaagggtcggtggggtgtctgcttggcttaatggtcgacgaaaaaacccatagcagcgacaacgtttcgattcaggtggcgcacggcgagattgccgcccttgatcctgtgaggctgacgcaactcggattacccgccgccgctccccatcgcctggaactgcgagggagtggcctgctctcggcccctggttttagtttcgagtatcgcctgattacaccatccggccgacccgccataggggtacaacgtaccggggtacagttaaaggccggcaacaacctgtatactcttcttgatcccctttactccctgctcacggaccttgaatccttcaacaacacccctccggaaaacctggatcaacgctttatgatctgggccgagttaaaaaaactgctgccagccgacgcggtggtggatgatcatttacgcaacatgcatattgtccgggccgattcattcaccattgattttgacgacaaagagcaggtaaacccggtcctactggccacggcagatcacagcgaacccagcgtacactcttctgattggacgaccagggaaattttgacccctatcgcccagcgcagcatgttttcacgttttgctgcactgtcggatgttcaagctcgctacgttctggaaggtggatggtatgtggtattgtccaaaccgatccgccaagcgctggaggtggtaaaagagtaccaaggcagaaaagttgaagaacgccgggcactgctggacaatcccgtcggcattcttaaagaacggctggtcggccagttgaccgatgagcaaatagaggccatctttgaggaaactccggcgtttttgagcgccagggttcaagggctgggagaatggaaccccaaactgtgcgcctacatgcttcctggcacacaaaagtggctgcctccagagtccgccctcttaaaccttcccctgcaagaccaggttttttccataccatctcatgagttgccggaattagctaaaaagatgcacacagctctggccgctggtgattcggaaatcacttttgcagatcagacttttccggtcaccccagagtcatgtgacaccatcactacactcgtccacaaagccgagaaattaactaaaacccacacacccgaagatgacaaatctcgcacgttggatttagtcccgcaaatcatcgacaacctggataatctcggcttttctgtagaaccgcggcccaccaggggcagtatcggcggtttgccggcaaacctggaaagttccctttacaaacaccaacgggtcggcctgcaatggctgcaagaacactgggttaaagggaacagcggggcattgctggccgatgacatgggcctgggcaaaaccctacaagctttagccttcatggcctgggtacaagaacagaaagagaaagagcctttaacccctaagccatttctgatcgtcgctccaaccggtttgctaaaaaactgggaagatgaagccatgcagcattttgccgctcccggccttggtgaattgactcgtgcttatgggggaggtttgcgggatctgatggcagaaacccagcgcgaacagatcaaaaaaattaaccacactgattgggtgttgaccacctacgagaccctacgcgatcggataaagttatttatcggggtggactggggtctagtcgtctttgatgaggcgcagaaaataaaaaatcccacggccagagttgcggaaatggcaaaatcactgcaagctgacttcactttggccttgaccggcacccctgttgagaaccgactttcggatctatggtccatagtcgacaccaccaaccccggtttgctgggagcgcttaaaaaatttcatgacgattttgaaaaaccggcacaaagtgatcctacagcggcagcccctcttgcacacaaaatcatggaggagcaaaagccgtcgattatgttgcgacgactaaaggaggatcatcttgagggattacccgttaaaaagcagtggcttttgactgaggaaatgccaccgcaacaagcacaggcttacgaggagatcgttgcgagcgccgcaacagcggacatgagcaaaggggcaatgttggaaattctccatgccctacgcaaggtttccgtattagctgtcccccttggcgcagccgggatgaccgatgagatagtatacagttcggcccgcttgcgcgccatgatcaacgtaatggatgaattgtttgctaaaaacgagaagctactggtttttgtggagtttttggatttacaagagagccttatcccctacctgcagcagcgctacctgttgcccaagccaccccttaggatcagcggaaaagtgagtggtgccaaacgtaaaagcctagtcgactcctttcagcaatcacgctcgaatctctttgatgtgatgcttttgtctcccaaagctgggggagttggactgacccttaccgccgccaataacgtaatccacctgactcggtggtggaatccggccgttgaagaccaatgcactgatcgagtttatcgcatcggtcaaaataaaccggttaacgtctatctacccctggctattcatcctcgattcaatgaacatagttttgaccaaaacctgcacttgctccttgaaagaaaaagaaagctgagccgtagcgttctgacgcctccagcaatggatgactccgatctggcaggactgttcagccattcggttggtaagtga

SEQ ID NO: 10553 - DNA, 2040 bp, Methylobacterium aquaticum
atgaccgagttggttctcgccttcggaatcgccgcccgcgacgccgtcctcgccgcggcgggattgctgaagagcgaggccatcccggggctcatcgccgtcgcgctcgtgctcgccctggcgctcctcaccctcctctacggccggggcatcgccgtccgcgtggcggcgatccgcaagctgcgcctcgtggtgcgccgggccgccgacgaggcctcgttcgggcgctccatcgcggatttcgacgccgagatcgagcgctcgggaagcaggggcgcacgcaagcaggtcgccaccgcctgggacaagtaccgcgagacgctggtcgagcatgacgaggacggcgcgatcatcctgcgcaactcggtgcggccggcggtcttcttcaatgccgacgatctcggcttcggcgccgggttctggcgggcggtgccgggcctgttcgtgacgatcggcctgttcctgaccttcctcggcctgatctcggcactcggcgcgatggatctctcgacgccggacaaggtccagagctcactgcgcgaattgctgctgatcgcctcggcgaagttcatcatgtcgctgaccgggctcctgtgctcgatcgtgttcacgatcgtgctgcgctggggcatcggcagcatcgagggcgcgctgcacacgctctgcgccgagatcgaaaagcgcctgagcttcatcagcctggagaatctcgccgccgagcagctgcgggcgacccgcgagcagcgggagcatttccggctgatcggcctcgaacttgtggcggagctcggccggccgcttcgcgaagacatcccggcggcgatctccagctcgatcaacgcgacgatcggcccgctgatgcagcaggtcggccagctcggcaccgatcacatgggcagcatggtcaaggacctctcggcccgcttctccgacgatgtcggccgcgctctggcgcaggcgagcgagcggctggtgcaggcgggcgaccgtatcggcgagctgtcgacgcgcatggaccagagttccggccggatgggctcggagatggacgccgccgtgacccggctcgctcaggccgtcgacgacttgcgggcctcgatgggcgccaccgcggccacgacgaacaatgccttcaccgatggggcggaccgtctcctcggcgccatgaaccagaccctccaggagatccgcgacaacacccgcgccggggccgaggcgatgggcgccgcggcggccgacatgcgcgcggcggcggaagggttccgcaccgaactggaagcggcgacccgcacgggggcggccgatgccaccgcccggatgcaggcggccgggcaggatgcgagcgcccggatcggcgccgccggttcgaccgtcgccgaggccttcagccggacggcgagcgacatcgccgaggcgacgaaggaggtcggcgccaaggcggcccgggacctgctcgcgccattggacagcatcgccgcgcgcctgcgcgagacggccgacggcgtcaccgccgccgcgggcagcaccggtcgcctcggcgacggcgtgcgcgcgagcgcggaagccgccgagcgcgcggccggccagttccgcggcgcctccgaggccctggtcgcggccgcaatccccttgcgcgccacgacggagcggatcgagaccggcatccgccagctggccgaggcgacgcagcacgtcgccggcacggtcagccaatccgccgagcagaccgcgcgcagcgccgccgacgccctggccgccgcacagaccgcgctcggcgggcaggcgcgcgcgatcgaggcgtcgctcgccggcgccggcgagctggtcaatcgcctcaagggccagggcgcgcagctcgacagcctcgacgagaagctcggaaccgccttcgacctctacacgatgaaggtcgcggcggccgtggacaccctgtccgactacgtgcggcggatgcaggccgaactcgcgccggccctcgatacgctgcgcgcggtcgtcgagcaggccgagcagttcgtccccgagagccggaggcgctga

SEQ ID NO: 10554 - DNA, 933 bp, Methylobacterium aquaticum
atgcgcggggccatccgtcgccatgcgcatgacgaggaggaggaatcagcgttcgtctcgatgacggacctcacggtgagcttcttgttcatcgtcatcatcctgctcgccttcttcgcgtcccagctgaaggacgaccagacggtcccggtagcggagtaccagcgggtcttcgacgagcggaacgcattgcgcacgagcaaggaggcgctggagcgcgagcgtgaccggctggcggccgagaacgcggagcttcggcgcgaggtggcgcgcctggaggaggaactgcgcaaggagcgcacgaaccgcctccaaacctacctggccgccgtctcgaacgagcgcgaccggatcctgcggacgttgcgcgaccgactgctggcggatttccccgacctcaaggagatcgtcagcatcgaggccgacgcactgcgcttcaagggcgacgggttgttcgccagcggcgcgagccggctcgccgaggacaagcgccgggtcgtcgcggcgatcgcagcccggctgaacgaactcctgccgtgctacaccttcggcaaagcggcgcggtggcaggcggagtgcaacgccgccggagcggtgatcgaggcggttcagatcgaggggcacaccgatgcttccggccaggaccgatcgaacttcagcctctcgaccgaacgggcgatcgagaccctgttcgccatgagcggccgcgagcccgccctgctcgacgacctcaacagcgccggccagccggtcctctccgtctcgggctacggccgcctccgccccgtcgccgacaacgcatccgagcgcggcaaggccacgaaccggcgcatcgacctgcggatcatcatgtacacgccgcagaacgtcgaggaggtcgagcggatcaaggacaacctcaggcgcggcctcaccgggacggcgctgcaatga

SEQ ID NO: 10555 - DNA, 1317 bp, Methylobacterium aquaticum
atgagcctggacgacatcctcgcgcggctgcgcatcccggaacctcccgccctgccgaacctcaaggtcctgaccgcgaccgccgagcgggtcctgcaacgctggccggacgtggtggccgatccgctcgagagcgaccgcgacgcgctggtgcggcgcatgcagatccatctcgctgaggaccgatgggacgacgtaacgatgtcgttcgtcgggcaggtggcgcgggcagccttcgatgagcggcggcgtcgacggccggacctggcggacctgcgccgcttctacctcgacgagatccgggcctcgcagcggacgacgttcctgggggcgatggcctccgtctatctcgagagcttcgagccgggcgccccgcatacacgcgacctcgcgcaggccttgagcgaggtccgcgatcgcctgggtgcgcgctggcgcaacctcctcgcggcgatcccggaggtatttcgtccggatgcggcgcccgaggccgtggcgagggcgatgatggcgatgcagtccccgtgggtgggcctcaaggctctgggccttcgttcgccgcacgcgcccggcctgatggattttgcccacctcgcctatgtcgcgcggctcgaaccgagcctggcgacacgggacggactcgagcggctcttcgcctggctgaagcccgaggggcaggccaccgcacggtcatcgggggcgagcgaggcgatcgaggcggtgctcggccactggacgacgggtgacccgccggagacggacctcagcttcatcacccagtccctcgtcggtttctacggcgatccgcgcgtgcagcagggcggggcctgggccggcgtcgcaccggatcgcctcgcggtgatcatacgctggctcacgggcgagaacatccggttcttcatggatgtcgtctcggccgttgaggacagccatatgtgggagcccaggcggcgcttctggctcaagctgcacgccgagcgccggatcgatgcggcctgggtcgccttttcgccaagcggcaccgagtatgcccggcgcatgctcgctgcccgcgggacccggggcgtgctcaacttcggtcagcagagtgcaggcggctcgcgggccaacacctcgctcctcatcctgaaatgcggcaccaagatcgtcgtcgagggatcgcacagctacaaggtgcatatcttccgcgatggggatccgcgtgcaccgaccctctacagaccagtctacgattgcgagcgcatccggctgacgctcggcgccgaggcgagatcgcatctcggtaaatggcaggactgggtcgaggagaggatctga

SEQ ID NO: 10556 - DNA, 3102 bp, Methylobacterium aquaticum
atgtcgcccgccctcgccttcgcgttcgatcccgactccatcacgctctcgctgccgaagaccggcggcctcctcgggcggttggggctccggcgggatcgccgcgaactcgatcgtctgccgccggaggagcgcacgctcctcctcgccatcgccgacctgcgcgcgctggccgccgaaaaacccaccgaactcttcgaggtcgcggccgaccgcgtccgcctctcgcaccgcctggcttcggccctcgacgccaagacggccgaggcgatcggcctgccgccgatcgtcgacctggcgcttcgcacggacgccgaaggcgtgctcggatccccctcgttccgcctgcgccacgaatggttcaagaacggccagcgccagaccgtgcagcgcgtgggcgccatcctgaagacctcggcgggcgaacggcggctgccggaatggctcatggacgcggtcgcggtctcggaagggttcgagcccggtcgcgacgaggccctgcactggaacgccctggcccggttccggcagctgctcgaccccggcgtacgcgtcgcggattcgacgccggcggcccgcgtctcgatgaccgatttcctggccgggctcgaagtccggatcgcggaccgcttcgccctctcgcccaaggatggagatgattttgacgtcgtcccgttctcgggactgaacctcgccaagtcggggtatgacgaggcgaccggcatcccagaagaggcgggagagctcgcagggccgctcctgcgcggcttccaggaccgagtgcgtgtgcgaggcgcgctttctgcctaccggctcgggcccggcaacttcctcgtcgtcgatcccgctgccgcaccggccctgtccttgatggcccggatgcagcacgcccccgcgtcggagcgagaagcgttcctgcgcaacccgcggccccttatcacggaggcggtcgaggccgccttgcgcagcgagggccggctcgacggtctcgattccatcggcgaggaggaggcgatcgaaacggccgccctcccgctgctcgtcgagacccaggaatacgccgaccgggtgaccgggatcggcgtctttcgcaagcccgacctgcagatcgggttggatagcggcacgacctggctgccggaagccttcgcggcgcagctcgtccgcgccctcgaagccctggcgccggcggaggtcgatgctctgcatcaccgcgtctccgacgcgatggcggccggcgagacgaccgtcccattcgccgagctcgacctcccggcgcgtcccgaggccctcgccctcatcgagcactatcgcgggagtgacgccgcgccagaggacgttcatgggatggacccggggccgtccggccccgtcgtcctcgagacgctcgtcaatttcgacgagcttaaatggacggcgcaggtcaagccgcgggtcgcggcgggtcccgacacgctgccgtcaatcgtgcgcacgccgctcaaagaccatcagcgcgagagcttcgcctggcaggtcgccgcctggaaggccggcctgccaggcatcctcaacgcggatgagcaaggcctcggcaagaccctgcagacgatcgctttcctggcctggctgaagcagcacgcggccgatccgcgggcgactcaccgtgggccggtactcgtcgtcgcaccgacctcgcttctcgagaactgggagcaggaggtcgccagacacaccgcggagccgggcctcgggcacctcatccgcctctacggctccgggatcggtgtgcgaaagcgggccgacacgtccgggcgcgatatcgagactggagagagcaagctcgatctcgccttcctgcgcgaagccttggatgagggacgagcacaccggtactggatcctcacgacctacacgacgctggtcaactaccagcacagctttcgccagatcccgttcagtgcagtcgttttcgacgagatccaggcgctcaagaaccccgcgagcctgcgcgccgccgcggcccggtcggtcaagtcggattttcgcatcgggttgacggggaccccgatcgagaatgcttcggtcgatctatgggcgatcatggatcagctcgcgccgggttcgctcgacagcctgcccgagtttcgcggtcggtacggcacgcccgacgcgaccaatatggccgagcttcatcggcgggtcttcgcttccgatgcaacgctaccgcctctggcgctgcgccgtgtcaaggacgtcgtcgcgcgggatttgccagagaaagtgcggcgcttacatccgaggccaatgccggaccgtcaagctgccgcctacgaagatgctcacttcaagctcgcgcagggcggggccggtgccgcgctcaagatgctgcaccacattcgcaccgtctcggttcatccgtgcctcgacgataccgaggacgactccgccttcatcgagtcatcggcacggctgactgcggtgttcgacatcctccaatcgatctccgaggccggcgaacgtgcgctcgtcttcgtcgagcatcggcgcatgcagtaccggctgatcgagctcgcccgcgcgcgattcggtctgtcccggatcgatctgatcaacggcgagacgccgatcactcaacgccaagcgatcgtcaaccggtttcagcggcgatctgcgggagagcaggctttcgatctcctcgtgctcggcccgaaagcggccggcacggggctgacgctgaccgccgcgacgcacgtcatccacttgtcgcgttggtggaaccccgcggtcgaagagcaatgcaacgaccgtgttcatcggctcggccagacccgtccggtcaccatccatgtgccgatggcgattcacccggggtatcgtgaggattccttcgactgcctgctacatggtctgatgcatcgcaagcggaggctggcccagtcggcgctctggccggcgggcgacacgcaggacgatgtcgcggaattgaggcgcctcctcaatgctgctgccaagcaggtagggtcggaccctgtccgaaccgctatagctgcgatgtgctctcgtattgagatgaaagcaccggtatggacgaacgatggatctgttgtatttgacatctaa

SEQ ID NO: 10557 - DNA, 1929 bp, Methylomicrobium alcaliphilum 20Z
atgaataaaaccacttttgatttatcgagtttactgcccaaattttcattcctttttaacggtggtatgactgaaggtgaaggtttaagtgctttttttgtgctgttacttttgattattgcgggtttgttttttggatatgcggtttatggctatttttccgcagctaaaaagattcggttctataaagacttgttggcaaatgtcgatcaaaatgagttggcaggtaagcaaagagatatacgcaataaagcattggaacatgaggggtatggtcgactatggcgtgagtttgatgagtctctggttaaatcaagcgatggtaaacgccttttcaatacactggatgcggctcatttttttaatgtatcgactttggcgggtaggcttacgcaaaatcgattattggccgccgttccaggatttttgacggctatcggcgtagtgggcacttttgtcggcttgcagttggcgttatcgcagttacaactacaacaaaatgccggtgtcgaggagcttcgcgatggcatcggcagtttgatcaatggcgcttcaattgcttttatgacttcgatctgggggataggaaccagtttattgtttaattttggtgaaaaacttttggaaagaggcgtacggaaagatatttatcaattgcaaaaccagatcgactatttatttccaagaatcaatgcagaacaatcgttggtagcgatagccgatcacagtcgttcatcagacgaaactttacaggggttagccgaaaaaattggcgaccgtttgcaagaggctttgattcaaacgacgtcgtctattcaagtcggtttggaaaatagtttgaatcagatcatggcgccggcgattcaatcgttagtggataatgccaataagggatctgaacaggcattggaaagcctgttgaccaagttcatagacggtgtcggcgaagcaggtaagtctcaaaaagatatgatggaagaggcatcgaaaagcgtcggtagtgccgtaaacgagatgggaagccaaatgcagaattttgtcgggcaattggaacaacatcagaaaaatagtcaacagttggccagtgctcaggttgagcagattaaaacgcaacttcaacagattaccgatgcgagtcaacagaccttggcccagactgcggaaaatacgcaggatatttttctgggtttgcaacaacggctccagcaacaatacgatgagcaacaaaagaccgatcgacagcggcaagaggttttcgaacagggggtggagaattccaaacaaaatcagcaacaaatcatggatagaattgagcaaatgcttaccgtgcaaaatgccgcttcagctcaaatccatgagcaactggaattattgttggcatcattcaaacaagtcacttccgaaaattcggcggcaagtaaaagtctgatgcaatcgagccagcaaatgaccagtgtctcgaatcaattaggcctgctttcaaccaatgtcaaacaagcggccgaggctatttcggaacctgttttacaattgctggaagccaatcgacaagtcagcgccgaaaataaagcggtattggagcaaagccaagttatatttgccgatttaagtcgtttaaatgtgcagttcgacgaggtcggcaagaccctattgcaagccagtaagcatgcggaaaccggattcaacgcattggatcagcatttggaagcgtttaaaaatggactaaaaacgcatatccaggatttggaagatgaattgtcaaaattgcttaatagttattccgagcaggttcaagatcaaacttatgctcgcttgaatcaatggaacgagcaaacccgggaatatgccaccaccatgaaagatgtcgttgagtccatagcttctgttgtggatgaaattgaaaccaaagcatcaggaaactatgcatga

SEQ ID NO: 10558 - DNA, 759 bp, Methylomicrobium alcaliphilum 20Z
atgaaactaggagcgcgttctcattccgaaaatgtcgatgaagaaaatccttactggatttctttttccgatattatggccggccttttggttatttttatcatggcgtctttggcgttgattctggaattgattcaggttcaggaaaaactgaaacaaacacaaattgaagtcacggaggcgataaaagagattgcgaaagcggaacaagtcaggcgggatattctttatgagatcaaagaggaattgatgcaaaaaaatattctggtagaggttagcgacaacgatagtgtgctgaggattccggatcaacagctcagctttaaaaccaatgaatacacgattccgccggaaaaatcatcgcaattgatcgtaaaagcgatcggcaatgctttgcatcgttccattaccaaggaaagcagatttcaatatttggatacggtttttgtcgagggccataccgacagtcggcgatctccaagacatatgggcaattggggactttcgacattccgggccatttcaatctggaatttctggaatgaacaactcgatcatgaagatccgctcgccggtttgaaaaatcatgatggcaaaccgttgttttcggtgagcggttatgccgagacgcgtccggtcaatttgctggaaagaaccgaagccgagttgcaacaaaatcgccgaatcgatatccgttttaccgtcaaacggcctacgatccatcaatatgaacaagtcaatgcgttgatggccgaatga

SEQ ID NO: 10559 - DNA, 1497 bp, Methylomicrobium alcaliphilum 20Z
atgttaaaactgcctgcaatgaattttagcttgcctgaatgggagcctaagcgcgatttcgctccgtatgaaagcctgacggaatcattgatgcagatgagccgaaagacgggatttcaatcaaaagcgtttttaaagagttgcaatgctatttttacaaaagcaaagcagggaaaagtatcggaaatccccgggttgatccgaaaaccattggatgtcagagcgttgacgacgttgtggttatcggagctatttttcgagatgtgtccggtaactcaagaattgatcaatgccctgtatcatccaagaccgtttttgagcaaattagttatccagcaactattgcgtttattttttcagcgcttcgagcaagccggtgatctaaatgcgttgcttcattgtttacatcaggagctcggtcgcagtgccaaacaattaaaatcaagcagtttagggaagctcatcaaacataaaactaaaataatcaacgttgaagggccttcctgggtggctaaaactgccatttccaaaaagacggatctcgatatttttatcgaatcgatcggcttaaaaagttttgccgaatcccgtttttattcgctttgccaaaatcattattaccttgagcaattacgaaagctcgaaccttggcaccccgatcctttattacaggaaattatcaaaccatctgtgtatgaatctccctataatcaaaccgaaatgctggggcatgaaattttaaggatattgattgatcgatcgccgaaagaaaaggttgatgagcaatggcaaggcattattttgacgattgcaggcgatcccagaatgtcaaaaagttcaccacgctatcaacgttggtggactgcgttaagtacacagcaaatacagaaagtcaggggctggttgtcacggtttgatctgctgttgtttttaaaggttctggaagattacgctgatatgaatggaaaagaagacatgaaccggatgtttccagccagaaaaaaatttttggaagggttgtttgatttgggattggtagaagatagtcgattatttatcaataagaatgccgagtactatttgaagaaaaattataaaaaagatgaattaccttattactcaattgttgccgaccctaataggtcaatgatttacctaaaagttaaaggcaagcatatgattgaagggacgcataattttaagctatggatttatgaagatcttccgcctgatagccaaatatttaatcttgaggaaaaatattttgcaccgaaagaattgactacaaagcttgagtctaatttttacaaatactttaatggtttaagtataaagtcacctgtatcaataactcataatggtgattggcaatataaggcaattgacgcttttgaatctttcggtgtaagaattaaccctgaaaaagttctcactgaaaaaatgtatttacaatataaaagaaaagtcggattacagagtaatttcagaatgttgtga

SEQ ID NO: 10560 - DNA, 3012 bp, Methylomicrobium alcaliphilum 20Z
atgagtttaaaaaatctaataaaaaaagttctaatcaatggctcgactacctcattttcggttttgcctgacagtgaaggcctcaatctttttatcgaatacgagctatttaaagactgtgcagtaggaaacgcggatttactgcttttgaatcaatatgcctgcttgcaaatgctggttgaagaaggattggcggagtcgattcgaaatggttttgtgatacccagtgaaaatgcagtatgtttggatgagggtgtcagatatttactgaaacttcctcccgtatttgaaggcagagtgtctacacgagtagaaggccaatcttctcaggccgcttttgctgtgcgtttggttttgaactatttaggcgaagatatctatcagtatgaattagtcggaccgtgtttaaaactgagtgaaaaagaaatttttttattgaatcaggcgcaatggtcggcattcaagtgcgtggcgatgcatcagcaactgtcaacggccgataaaagcgaacaacaaaatctgttattgattcatcgattacaacaagctcaaaaggcgggcctcgatatcgatttatcgcatttcaacaagctgtatattctgcacccggaacaagtcggtgtggcagccgagcaagatgataatggtgatttgattctgacgcccactttcggcgcaggtatagatccgcgcgatacctccattcgtttaggacaattaaaaggcgcaaatgatgtcgcttctttgcgcattcgtgatgatatcgtcttgcttgatgaagatagatttaaagctacgcaggaaatattgaccaaccggcgcattgcaaaagatcaagtgaaacattttttggcaacgccttccgcatttttgaatgccgccttggtggatttggataccggcttttcattacgggttaagggggcgacggcatttcatcatggctattttggagataccgacgaatcggggattgattggttcggatccttggccgaaaaaaccattcatgcgccactcgccgatcaattgcatgatcttgaagaagtcgaggcgttcgagaaaaagtttcatgacgcgaaggctcatggtgcggattcaatggtttttaacggacaaaacattgatatttccaatccgcaagcgatcgaacaacagattagacagttgaaaaaggaatttagccggacaactcggcagcacgaaagtccagcccccatcgaaactgaagcgccaatggaaagagcggtcgtcgatattgtaactaatgatgagattttggagtttggcggtctggcgctgctgaaccgggccgaacaatcgatatttaccgaaaaaattgattttactgtttaccgtcgtcaaccttatccacatcaagaagacggggttcgttggctattggggttgatgcaatgtgccttgaaaccatccggttctaaaattgaaggcgctttattggctgacgacatgggtttaggtaaaacctatatgtcgttagtggctttgtctgagttttataggttaaccgagtcatcaggagacacaagaagaccggtattgattgttgcccctctcagtttggttgagaactggatcgatgaaacggataagaccttcatgaaaagcccattcaaggatgtcgttgtgttgcagtcgggcaaagaccttaaaaaatacaaaatacaaggagcttcaaccgaaaccaagcaggccgttactgacgattcgtcattggattccgaaagtatcagatattcattgaaagtcggtaagtattatggaaacgatcgccttgatctaccgcaacgtttggttgtgacaacttatcaaacactcagagattaccagttttctttgtgccgtatcgattggcaactggtgatattcgatgaggcgcaaaacatcaaaaatccgaatgccttgcaaacccgtgctggcaagggcctaaaagcacgatttaaattattggcgacagggacgccggtggagaattcgctttctgacttttggtgtcttatggatacggctcaaccgggtcttttgggttcttaccaagaattcagaacgcagtttatcaagccgattaatcaagtcggtgacaatgaagacgcggccagggtcaggctggaagtcggcaaaaaactgaggcagcaagtgggcacttttatgttgaggcgaatgaaggaggatcaattagacggcttgcctgaaaagagaatattcgttggtgccggcaataacaatcaatcgggttggcaatacgagccccgtttggcttcagttatgaagaatggacagttaaatgcttatgaccaagtgcttgccgatattcaatcgatcaagagtaatggcggggacgcccgaggcgcaattctgcaagcgttacaggagttacgggcaatttctcttcaccctgtattgatgcaaaagtctgaacatccgaatgatcttgaaccgaaaaagttttcttctcaatcggaaaagattttgtgcgctctgcaagtcttaaatgaaattcaaaagaggcaagaaaaggtcattatttttatcatcaacaaaaatctgcagcgcttactcaagctttgtttgtcccagttgtatcgcgttcccgtcaatgtcatcaatggcgataccaaggcggttgttagtaccaaaggcgccgaaaccagaaaacaattgattgaacagttcgaggctcaaaaaggatttggtattattatcatgtcccccattgcagccggcgtcggtttaacggtcgtaggcgcaaataatgtcattcatcttgaaagacattggaatccggcaaaagaggctcaggcaaccgatcgtgtttatcgaatcgggcagcaaaagaacgtcaatatttacattccagttttgttgcatcctaagcatacttccttcgatctaaatttaaatagcctattgcagaataaaatcgacctgaaagatgcagtcgttacgcctcaggtagtcacgccggatgagatgttcagtgtttttcaataa

SEQ ID NO: 10561 - DNA, 2346 bp, Pseudomonas xanthomarina
atgatggatttgctgcaacacctgatccccgatttcgcccatatgttcagcgccaaccctaacggcatcagtgcctggttctggttggtcaccgcactgatcttcgggttttcgctgttcttcctgatgctgcatttccggcatttcaaagcgcgcatgcgagcactgcgctcgctgctggacgggcagagcaaggacaccctagctgccagccggagagaaacgctacacaaggcgcaggagctgcaggcatccaatgtcggcatgctctggcgcgagttcgatgaaagtctcgtgcagtcgtccgaccagcaaaagctgttcaacacactggatgccgagcatttcttcaatgcgcgcacgctggcgagcggtctgactgccagccgcctgttggccgcggcgcctagcttcctcgtggcggtcggtgtgttgggtaccttcgttggtttgaccgtcgggcttgaggggctggtgggcacgtccgacgaaatcgaagcgctaaagggcggcatcaacaagctgatctccggcgctgctgtggcgttcatgacatctgtgtggggcgttgccttcagcctgctgctgaacatcatcgagaagatgttcgagcgtagtgcgctgaatgatattcagcggctgcagcacgatatcgactttctctacccgcgcattcccgccgagcaatcgctggtgcatatcgcggaatacgggaaggagagcaaggaagcgctgcaggaattgcacgagcgcattggcgatcggctgcaggaaaccctcaatggcatgaatgaggccatgcagacagcgctgaccgatgcactgaacaacatcatggctcccgctattcagacgttggtcagcactaccagccagcaatctacccaggtgctggaaaccctggttggaagcttcatggacggtatgacgtcggttggccgggagcagggcagccagatgcaacaggccgctgccgacgtgaacgcggctgtaagcggcatgagtgagcgcctgaaccagctgttcaccagtttgagcgagcaacagggacggcagatggaggttgcgcagcagcagagcagccagttcgaagctcaattgcaacgcattgctggctctgcagatcagcggcaggaacagctggagcagcgtttcagcgagctgatggccggactgtcgagccagttgcaggggcagttgggctctgcgcagcgccgcgatgaagagcggcaggcgatgttcgagcgtttgctgagtgagtccagtgccaatcaggcggcgcttctggagaagttctccagttctactcaggaccagatgcgagtgatggccgaggcgggcaatgagcggcataacaacctggagaaggtgttctcccggttgatgatgaacctgaacacgcagctcgatacgcagatgggagccgccgagcagcgtgagcaggccagggcacagcgccacgaggagcagcaagcggcggtactggcgcaacagcagcagctgatcggcaatctgggccagaccagccaacagcagattggcgccattgccgaagccgctgcgacgcaacagcgcaatctcgaggaaacggtcagcaagctgctcggcagtttcaatgagcaggtcagcgggtacggcgtgcaggcggagcagcgtgaacagagccgccagcagcgctttaacgaacaattggaaaacatggctgcgcagcagcgggagttgctggcaggtatcgcgtccgccgttcaggttacccagcagcagagcaggcaaatggctgagcagcatcagcagctgatgacgcgcctgcaacaggctactgaagcggccgcgaccagcagcaagcacatggatagcagcgccaatcagttgggcctgctttctgccaaccttcgccaggccgctgatgcgctgggtcagcgcctggaggcagtaacccagggcgtggaagctgcgagcacacagaatgccgcgttggctgcacaactgcagggccaggcaagttcgctgtcgcagctgcaggcagcactactcgaaggcgcgcagcgcttcgagcaggccgcaagtgaagcacgcaatggctttggtgacatgaaacagacgcagcaggaattcctgtccggcgtaaggcatgaatttacaacgctgggtgagacgctgcgtgcccaggtagaggcaattgaaaagcaggctgaagagtggctgcgtagctacgcctccgaagtgcgtacgcagactgaggaccgcatgaacaagtggaacgaggtctcgcttgcctatgccgatcagatgcatcgcaacgtccaggcggtgagcgggattctggatgagctggaggcacgctga

SEQ ID NO: 10562 - DNA, 765 bp, Pseudomonas xanthomarina
atgcgctttcgcaagtcgcatgacgtggccgtcgatgaggaaaacccgtactggatgtccttctcggacattatgtcggcgctgctggtgatcttcattctggcctcggtgatcctgatcctgcagctgatggacattcagcagaagctggaggagcggcaggtccagttcgaacaggaaatcgaagagctgaaaaaggcggagcaagtgcgccgcactatcctcgatgaggcagttgaggcactgcgcaggcgcggcatcaaggtggaggtcagcgagaatcacacggtgctgagtattcccaacgatcttcttggcttcgataccggtgcctatgaaatccattcggcctatcaggcgcgagcgcttgagatcggcaaggtcatcaatgaggtgatctcgcgtgatgaccgggtggaattcctggacacgatttttatcgagggccacacggataatcgcccgttgcagggattcatgggcaaaggcaactgggggctttccacctttcgtgctatttcgctctggcagttctggggggacgccttggcgcgcgaggagcagttgtcgcgcctgaacaacaaggacggaaaaccgctgttctcggtcagcgggtatggcgaaacgcgtccggccgtggccgatcaggtcacggaggaagacttcaaacgtaatcgccgaatcgacattcgttttaccatccgtcgtccggatagcgcgcagtacgagcaagtcaaggagcggctgggggaggccaagccatga

SEQ ID NO: 10563 - DNA, 2265 bp, Pseudomonas xanthomarina
atgaggctgcctccagtagagtttcctgcggccagctggggcgctcagatgctcgagcgctggactgtactgacaaaaaaggctgccgctatggagacggaggccggaaacaatgatgcgtttgagcgcatgctcgcagtgctgcgtggcatggccagctcgggtcgattcgatggcctgccggcgctgctgaggcggcgtattacggctcgggcgttgagctggctgtggctcaatgacgaggtgatcggcagccgcctgctaaatacgcgcttgttagctgccttgctggatgcccagcagccacgtctaacgcgtatgacgctgcagcagatggcacagctgtatttccggcgattcgatcggctggatgaaaaggaaggggtgcgcgagcttctggagcgaagcctgttacagcagcttgacctgataccgccgtcgaagatccagacatcgcgagccgatccgttagttacgctcaagcgtgaggggcattggttgctaagcctcgatggtccacgttatctcgctgaacgagtacgtcaaggcggacgtgagcttggcgagacactcatggagctcggtctgcacggctttgatgatggccgttatggtgatatctgcagggcgcacttttatctcgaaacgttacgacacttgccccttggcgagtccgatccggtgctggatgagttgcttaagcctacagtggccaaggcgccctttgaaggcacacggcgaatcggccatgttgcgcttgagattctgatcgaccgtgctggccaggaacccggcgaagtctggcagaacttcattcttaacttggctggcgatcctcgtatctctagcacgaacgaaaggtttgtagagtggtggcgcccgctcggtgaagagcggattcaaaaggtacggggctggctatccaaagaggacttgcggttgttcctgcaggccgttgagcaatacgggcttgaaacagccaatacggaaatgcagcggatgttccccgcccgcaagcgattcctcgaagggctcttcaagctgaagctgattcgtaacactcgcctcctactgggcggcaaggctcaacagtcggtcaagcggatcctgggtaaggacgttaagaccagcttcgcgcggatggatgggccgatgaatgacaaggccgtgatctatctggactgcggtgacttccatctggttgagggctcacatagtttcaagatctgggtctacctggcagcgcctggcgaaaccctcagaacttatgagcgcaataccttcagtcatcaagacctgaccaccacggtccccgggacttacaagaaactctaccccgggttgccttacgatgcttttgtgcacaccccacacgcctggcagaacaaggtcttcacctttctagccgagaatggcattgctcttgatgtcgagcagcttctgagcgctgaggactatcgccttcagcttcgtaaattcgggatccctgccgtaagtgccaagcgcacggtggttcctgctccggcgaaagaaggggccaaagcggtagcgcgagcgccgacggctgctcaacaaggaactgaacacgctgcggcgccgatgttacgcaacgccgacgtgccaaccccagcacggcgttcagccgatgttgaatcagtggctgcaaatagtgcgatgagatcaagcaccattgcctccgggcgggacaacccggttccgcaacaaacgaagctgccgcccttcagctcgctccagctggcggccctgcgttatctcgagactcattcacgttgcggtttctatgcgttgctggaagcagtaagcaatcagggcggcaatgcgttgaacgtgaaaacgatgttggagagcagcctctctcagtacgtccagcaggacggagaggggcattggctgctttcgacccatggtgagcagttagtagccgagctggccaggtcggagccatcggatgcaagtcagagcgtgccgagtgcggcaaatatgaacgcaaacgaaaacgcaggctcgagggtcgctaggctagagccgtttgcgcttgccgtattgcgttatttcgccgccaacccaggcgataaagttcgttatgcggcgaatgttttggaggtcgacgcgaggctggtgaaccaagctttatacgggccattgaaagggatctgtacgcaggatgataagtacggatggcagctcacaggcgcggctcaacgggagctggaaacgttcgacgcacagggggaggagtcgtaa

SEQ ID NO: 10564 - DNA, 3039 bp, Pseudomonas xanthomarina
atgcgccttagagatcttttgatgtctttgattggcgagcgcggtgtgccggtcggtagtcaggaggggttcgcgtcgagcgcagactccaacggagtcaatttttaccttccggtccagacgtttaaggcgttgcaggacggcaaaggcgacgcactgcagaaaattcagctgattgtcctgaacatgctcgccgagcaaggcatagctgagcacacggccaacggcttccatatcggcgctgaagatattgccggtatggacagtgagcaggccgatattctgcggctgccacggcggttcacggggcgctttcagacttccatcagcgggcgcacaggtaacagcggctttcgcgttgggcttgccgttgaagtggctgaaggcctcacacctttctcgcgcaaaggcccgtatttgtgtctgacgagtaccgagcgctactggcttacgccagctgagctgatggggctgatggcttgggaaaagcatgagtctctcgagcctgcacagcgaggggaggcggctaaccttcgtttgatggccgagctacagacagctgcccgaagcggtatgcgcatcgatctgagtcatttcgatcggcttgatgttgtcgttccggaaaatgttggcgttattgcgacccgactgccagacggcagcctgatgctgtgcccgagcctgggggatggatcgacgcccgatcagctggagaagcgctggtcgcagctcgacatgagcgctgacgggggtgtgctgcgaatcgacaatcgtgtggtgttgctcgatcaggccaagatggacggcattcgcaatgtgctggccaacaaacgaatcccgccagataaggtcgccgagttcatcgcctcgcctacggcctttctggatgcggcactggtaaatctcgaggtcggtttctcggtccgcgtagctggtattggcaagctgcagcacatggactttggcgcgttggatgcgaccaagaatgactggtttgccctggataagcgccccgcgccagcagagatcatcccgaagttggttcagacgccggaggagctggagcgttttgaggaggtgctgcggtccgcgatagagcagggtgcaacgagtctcagttttgctggtgaggtcatcgacatttcagacgcgccgcttgtggctcgtcaattggatcaggtgaaagagacgctcgagaggcccgagctgccggagcagtcggccgcagccgaagacgactttgatgagcccaaggagaaggttgccgtcatccttaaagatgccggcgaaatcaactcaacactgctggcaaaagccagcaacgctcgcttactggatgcgccagactggtccgcttatgcacggcagccattcccgcatcaggtcgaaggtattgagtggatgctcaggctgatgagcgccgcgttatctgacgatcatgatgacctctatcgcctacaaggcagcctacttgccgacgatatggggctgggcaagacatacatgtcgttggtcgcaatcggtgaatacctggcggcccagcgccgtagcgaaaagccgcaaaaaccagttttggtagttgcaccacttagtctgttggaaaactgggaagacgaagtaggtaagactttcctcagcattccgttccgcgatctggtggtgcttcaatctgggcgagacctgaaccgctaccgcgtcaagggcgccgagcgggagtcggttcaacttgctgccctggccgacgatgacggcatgatggatgcccagaccattcgttatgcgttgaccattgggccagaggcgggtgctcagcgcctggatatggatcgtcgtttggttttaacaacgtaccagacgctgcgtgactaccagttttcgctgtgcaggatcgactggggcatggtcattttcgacgaggcgcagaacatcaagaaccctaacgcactgcaaacccgtgcggcaaaggggttaaaggctgacttcaaattgttggccacaggcacgcccgtggagaacagcctcggcgacttctggtgtttgatggatacggctcagccagggttgtttggcagctgggaaaactaccgagacacttggatcaagccgattctctcggccggcgaggaggagcgcgacgaggtccgtgttcgtctgggtgagcaactgcgcaaggctgtcgggccgttcatgctgcgtcgcgtgaaggaagaccagctcaaaggcctgcccagcaaaactatccgtagtggggtagagcaggtcgatcgaggcattcagcgttacgcgcctgagttgggtgtctcaatgcgcgggattcaactgcaggtgtatgacgatgtgctagatggataccgtgctcgacgcgccagcgcagatgacatgcgtggctcggctctagcggcgcttacgcagttgcgctcggtatcgttgcaccctcgtttggatgatgaaccatcgctctacagtcgggatggccaccatgcgcggcagttgatgtccgagtccggcaagctagccgtgatgctcaaactgctggacgagattcgggataagggcgaaaaggtcatcctgttcatgatgaccaagcgcctgcaaagggttttgaaactgtggcttgatcagatctacggcctggacattgccgttatcaacggagatacaaaagcggtagctaccaaagcggaagaaatgacccgtaagaagctcatttcagcattcgaagcgaagtcaggattcaacctcttgatcatgtctccggtcgcagcgggtgtaggtttgaccgttgtcggagctaaccacgttgttcacctggaacggcactggaacccagcaaaagaggcgcaggcctctgaccgtgtctatcgcatcgggcagcagaaggaggtgtttattcatctgcccgcagtaacgcatccgcaattcgattctttcgatgtgcatctggatcggctgctgcgcggcaagttgatgctcaaggatgctgtggtgacaccagaagcggttagtgagagcgagatgatttactcaatggggctttag

SEQ ID NO: 10565 - DNA, 2190 bp, Kosakonia radicincitans DSM 16656
atggaatggcttaactcgtttttaactatattgacttccgtgcaacctgaaaaggttccgctggtcgttattattgtcgttgctattgcgctggcattttttgctgctttgtatgtttatcgggcaattaaaattgtcaataaactgaagaagcagtcagggatcatttcagactggaagaatgagacaacggcagtaaaactacagaagctgagcgagttatttaccgggacgccactggcccactcctggagtgagtttgcagagtcactccatcaacaaaaaacgcttgtcgatggcgaactgaaattaaaagatgttcgggcaacggctcccgcagcggcatttttcaccgagcagcaattaatcgatattccgcttaacactgagttttttaaacatcttcccgggattctgacaggggtcggcattatcggtacgttttatgggctgatgattggtttaaatcatttcgaccccagtacgcccgagcaagttaccagcagcgtggcttctctcctgcgggatgtgctttatgcttttttagggtcgtttaccgccatcgcagcgtccatcttcgtaacgtggctggaaaagctgtcgatagcgaagtgttataaatatcttgaacagtttactgccgctgttgatcagctatttgaaaccggtgtgggtgaggaataccttgccgaactggtgaaatcgagcaacgaaagtgctacccaggctaagcagcttaaagacagcctggtgaccgatctccgcgatatgctacagaatctggtggcaagccaggtcgctgaaaatgaaaagttagcgcacaccttatcttccacttatcgcgataccggccagcagtttgccgagcaggtgagtggagccatcgaaaatagcctgaaatccccgttagataaaattgctggtgcggtacagaccgccagcggcgatcagtcgggtcaggtacagaatatgttgcaggatgtcctgacggcatttatgtccaaactcgacaataccttcggcaagcagttcgaaaatatgcaccagatgatggggcaatctgtgggggccattgaggcaatgcaatcaggttttgccggtttgttgcaggatatgcgtaacgccagcgaggatactcgtcagggcagtgctgagctgatgtcacagttgctcagtgagatgaaatccggacaggtcgcgatgcaagccgggatgaatgatatgctggccagcctgcaatcgtccgtcgccaaaattggtgccgaaggtgaaggcgcaggtgagcggatggcacagcagctggaaaaaatgtttgccgatagcgaagcgcgtgaaaaagcgatggctgaacagatgaaagcgtttatcgactctatccagcaaacgtcccagcaaggccaaagtgaaaccatgaagcaaatggcggcgtccgttgaggcgctgggcgagaaactggggtcgctgtttacgcaacttgaacagggacaacagcaactggccagtcatcaacaggatactcagacatctctccatcaggaaacgcagcagatcattgctggtttcgacgagcaggtccgcttgctgctgaatgcattgaatgaacagcagggggcgacggaaagcacgctacgcagactggcagagcagacttccgcccatttacaggatatgcacaccggtgctgacaaaatgcgcctggctgccgaacgttttgaaacggcaggagacaaagttaaagaagcaaatcttcttaccgctgatgtacttactaaagcgcaaggtgcaggcaatacgttgagccaggccagccaggagctgagttccgtggtggcggattatcgtaataaccgcgaagcggtggcgaaatccattacgctgctggaaggtgtcattgccaatgcgcaatctgagctggaagcgcgtagccaattcctcaaagagctgaaacagcacaatgaaggattgcatgactataatcgcgaagcaaaagagttcctcgaaaacgcaggacaagtgctggctaatgggttcaaccaattctcagacagcatgaaaacaagcctcgacgccacgttaggggcgctggacgcgaatttagacagcgcggttaaacgtctgggaagcggtattgacgagcttagtgaaagtattgaaaaccttgaagaagtgctttctaaagtgccggcgtaa

SEQ ID NO: 10566 - DNA, 744 bp, Kosakonia radicincitans DSM 16656
atgttcggtcaaacatttcgtattaagccccggcgttcggatgaggcagagaaacccttctggatttcctatgcggacctgatgacggccatgatggtgctgtttctggtcgttatggtggcttcattaagctcagtaacacaacggatccagcgggtagaacaaggtgagaaactgcgtggacaagatattacccgtctgtgtgagcgtttagagctgcacgcccgcaatctcaataaaaccattgtcgttgattgccgtgataaccgcatcagttttggagaagcgggccgcttcgaccacaatcgctttttcctgaatgctgacggacagaaagcgctacaggatgttgtgccgctggtgctggaagcggcaaacagcgaggaagggcaaaaatggtttaaacagattgtcattgaaggttttaccgataccgacggttcctatctgtataacctgcatctttcgttgcagcgctcagaatgggtaatgtgtagcctgctcgacagccgtagccgcctgcaacagcagataacgcccttgcagcaggagcagatccgtaagctcttccttgcgggcggtgtttcgtttaacaacgctaaagagagtaaagaggccagccgtcgcgttgaattgcgcatgcagttctttggtctgaaagatgaacatgataaggcggcagttgatgtgggtagcgttaccgtacctacaaccgaaaaatgtcagttggagatgccgttatga

SEQ ID NO: 10567 - DNA, 1704 bp, Kosakonia radicincitans DSM 16656
atgatctccgcgttatctcgcttatcgtcagatattgctgccaccgttaaacggcatattgacacggaagcggctgcttttggcgatttccctaagctcagggctgcagagcaatatctgtccgtcaaaatggagaaaagcgagcgcacgacagtccctccgctgacaaaacgacttaaagcgatcactgcgcttcgccagttgaaagtgctaacgaggtacgactggcaactgatatttgcgggcctggctgatagcgatcccgatgcggcatttccggttctgctggaggatgattcgctttataaccgggttgaacaagagattcagcagcgtattgatagcaaaaaactcaaacggcgcgaatggaagtttttatgtagcagttattttggctatcacgcgaaaaagcccgacgagaataacaattggtgttcgttacgcgatcaacttcgtattggttatggcgtgattaagggtcaggtgcgtcgagaaaaacgctggatggcggtaatagatgaatatcaggatctgttcacgccagatgccgggaacttattggcaaataaaatgagtgctggcgagctggtcgatttttcagcgctggagaccgtggctcaggttcccgataatagctggctttggtaccgggcctttgttgttctgctggcaaagatcttagagctggatgatgacgcatttaaagaacatctgcccaacctgctggaactcgctcgccagcgcgaaaggtataaaaatctcatcttacgtgcgtgtttaatgcagtattaccgctcttctttcagaaatactccgcatccacagcttaagcaaatggcactggaaaactggggaagcccgcaattacacagtaaacaaaacctctggcttactcatttgaaagatcctgataccagcgagaaaatttgcggcatggtacgcagctggctggcgaaagaggatttaacgcatttcttccagttgctgaaggggaaagatgatgtggatcaggcccgtttgttctattggttacggtttgccaatcagatgggattcacacggatagtaatagggcaggatgcccgtcagaatatgcattccgattttgttgcattcaggcaaaaaaataagggacggttaagcactctgtctggaggaaatagtgcagataatgccgtaattatgcagatcggtaattatctttttgttgagttttctcgtacaggcaatgcgttatatgtttatgagttgtcttctgcaccgtttaacccggaaaaaagcgacctgcatttaaattatgaattaaaagcgggagcgataaagcatcgtcatgcaccaacagcttatggctatagcgataatcatctcaccggatggatggttaactatgaggatgagcttcgccgattaggtatccgataccagccttcggatatagttgtatcgccatcgccatcgccatcgccatcgccaatatcgacaaacatggtaaatccgccgcccgctgatgcaatgcaaggctcccgtgagcaagcgattcgcagcttgcttaaacagctcgatgccactgtgagtgacaaacgtaatattggcggtgccctgcatgttcggctttcctcacgtaatgcagaagtcgttgaaaagcttgtccgcttaggttttaaacaaaaaaatggcgatccactgaccttctggagtaaataa

SEQ ID NO: 10568 - DNA, 1173 bp, Kosakonia radicincitans DSM 16656
atgctcaaccgtctgctcagcaaattcaaaggtaacaatatatcttcagaaaaacgggtaagtcatcgttatcaggttgaagagtcagggctatcgtttttgtttaagcttgctgatgaagatgcattgtggcctttggtcgcctatatggagcagcttgcagaagaagaatatgttgttgagttatccgatcgctggttgctcacctgggatgaactgtatcgtctggcaacagatgaggatcatcaaaccagcctgtcattactggggatccctgagattaagccgctgaaggtttgtctcgcaggcagcggaagcctgagcgatgctgattttaacatttatatccgtgactggaaggaaagcgcgactggccgatctgttcagatcgaaagaacaggagcgatatttcgcaactctgaggggcaatttttacagacccacgagaactggctgctcctctctgctttgcagcaatttcgtgatgagcagcagcacagagcgggagaaaataccaatcagcttggctgggcgaaaatacggcgcttaacaaaaaaggcgcaggcagaattagataactatctggcgaagacgattgtggttaagcccgaatcgttaagactcaagctacgcaaagcaaccattcacaacacaccggtcatcgaaattgaaccttctttcgatgatcaaccaacgcaatggctcaatagtttcgataacagtaagttagttcaggatcaataccgtgttctgggtgatgatggatccctcagccatgtgatcatttccccggaagtgaaagaagtcctctcttctgtgcattcaattactggcaggcgtatagcgggtgatgatgccgtctcttttattcgcaatccctacaccttcattggtgaggatgcagccagtgttatcccgcctgaacaacatgaagaagcgttgcaggatgcgcatatttttttccaccgtttctctgttacacctgtgcttgatgatgaagcaaaaagaatctcatccgtatctcttgtcttagaacctattgccgccaggccgcaacccgctatcactttttctctgaccaaaccctatgagtttgaagaatttattcaggaactggcagttaaactggcgtcgggcctgcctgcgggaatatggctgaatcgccacggataa

SEQ ID NO: 10569 - DNA, 2190 bp, Kosakonia radicincitans UMEnt01/12
atggaatggcttaactcgtttttaactatattgacttccgtgcaacctgaaaaggttccgctggtcgttattattgtcgttgctattgcgctggcattttttgctgctttgtatgtttatcgggcaattaaaattgtcaataaactgaagaagcagtcagggatcatttcagactggaagaatgagacaacggcagtaaaactacagaagctgagcgagttatttaccgggacgccactggcccactcctggagtgagtttgcagagtcactccatcaacaaaaaacgcttgtcgatggcgaactgaaattaaaagatgttcgggcaacggctcccgcagcggcatttttcaccgagcagcaattaatcgatattccgcttaacactgagttttttaaacatcttcccgggattctgacaggggtcggcattatcggtacgttttatgggctgatgattggtttaaatcatttcgaccccagtacgcccgagcaagttaccagcagcgtggcttctctcctgcgggatgtgctttatgcttttttagggtcgtttaccgccatcgcagcgtccatcttcgttacgtggctggaaaagctgtcgatagcgaagtgttataaatatcttgaacagtttactgccgctgttgatcagctatttgaaaccggtgtgggtgaggaataccttgccgaactggtgaaatcgagcaacgaaagtgctacccaggctaagcagcttaaagacagcctggtgaccgatctccgcgatatgctacagaatctggtggcaagccaggtcgctgaaaatgaaaagttagcgcacaccttatcttccacttatcgcgataccggccagcagtttgccgagcaggtgagtggagccatcgaaaatagcctgaaatccccgttagataaaattgctggtgcggtacagaccgccagcggcgatcagtcgggtcaggtacagaatatgttgcaggatgtcctgacggcatttatgtccaaactcgacaataccttcggcaagcagttcgaaaatatgcaccagatgatggggcaatctgtgggggccattgaggcaatgcaatcaggttttgccggtttgttgcaggatatgcgtaacgccagcgaggatactcgtcagggcagtgctgagctgatgtcacagttgctcagtgagatgaaatccggacaggtcgcgatgcaagccgggatgaatgatatgctggccagcctgcaatcgtccgtcgccaaaattggtgcagaaggtgaaggcgcaggtgagcggatggcacagcagctggaaaaaatgtttgccgatagcgaagcgcgtgaaaaagcgatggttgaacagatgaaagcgtttatcgactctatccagcaaacgtcccagcaaggccaaagtgaaaccatgaagcaaatggcggcgtccgttgaggcgctgggcgagaaactggggtcgctgtttacgcaacttgaacagggacaacagcaactggccagtcatcaacaggatactcagacatctctccatcaggaaacgcagcagatcattgctggtttcgacgagcaggtccgcttgctgctgaatgcattgaatgaacagcagggggcgacggaaagcacgctgcgcagactggcagagcagacttccgcccatttacaggatatgcacaccggtgctgacaaaatgcgcctggctgccgagcgttttgaaacggcaggagacaaagttaaagaagcaaatcttcttaccgctgatgcacttactaaagcgcaaggtgcaggcaatacgttaagccaggccagccaggcgctgagttccgtggtggcggattatcgtaataaccgcgaagcggtggcgaaatccattacgctactggaaggtgtcattgccaatgcgcaatctgagctggaagcgcgtagccaattcctcaaagagctgaaacagcacaatgaaggattgcatgactataatcgcgaagcaaaagagttcctcgaaaacgcaggacaagtgctggctaatgggttcaaccaattctcagacagcatgaaaacaagcctcgacgccacgttaggggcgctggacgcgaatttagacagcgcggttaaacgtctgggaagcggtattgacgagcttagtgaaagtattgaaaaccttgaagaagtgctttctaaagtgccggcgtaa

SEQ ID NO: 10570 - DNA, 744 bp, Kosakonia radicincitans UMEnt01/12; identical to SEQ ID NO: 10566

SEQ ID NO: 10571 - DNA, 1710 bp, Kosakonia radicincitans UMEnt01/12
atgatctccgcgttatctcgcttatcgtcagatattgctgccaccgttaaacggcatattgacacggaagcggctgcttttggcgatttccctaagctcagggctgcagagcaatatctgtccgtcaaaatggagaaaagcgagcgcacgacagtccctccgctgacaaaacgacttaaagcgatcactgcgcttcgccagttgaaagtgctaacgaggtacgactggcaactgatatttgcgggcctggctgatagcgatcccgatgcggcatttccggttctgctggaggatgattcgctttataaccgggttgaacaagagattcagcagcgtattgatagcaaaaaactcaaacggcgcgaatggaagtttttatgtagcagttattttggctatcacgcgaaaaagcccgacgagaataacaattggtgttcgttacgcgatcaacttcgtattggttatggcgtgattaagggtcaggtgcgtcgagaaaaacgctggatggcggtaatagatgaatatcaggatctgttcacgccagatgccgggaacttattggcaaataaaatgagtgctggcgagctggtcgatttttcagcgctggagaccgtggctcaggttcccgataatagctggctttggtaccgggcctttgttgttctgctggcaaagatcttagagctggatgatgacgcatttaaagaacatctgcccaacctgctggaactcgctcgccagcgcgaaaggtataaaaatctcatcttacgtgcgtgtttaatgcagtattaccgctcttctttcagaaatactccgcatccacagcttaagcaaatggcactggaaaactggggaagcccgcaattacacagtaaacaaaacctctggcttactcatttgaaagatcctgataccagcgagaaaatttgcggcatggtacgcagctggctggcgaaagaggatttaacgcatttcttccagttgctgaaggggaaagatgatgtggatcaggcccgtttgttctattggttacggtttgccaatcagatgggattcacacggatagtaatagggcaggatgcccgtcagaatatgcattccgattttgttgcattcaggcaaaaaaataagggacggttaagcactctgtctggaggaaatagtgcagataatgccgtaattatgcagatcggtaattatctttttgttgagttttctcgtacaggcaatgcgttatatgtttatgagttgtcttctgcaccgtttaacccggaaaaaagcgacctgcatttaaattatgaattaaaagcgggagcgataaagcatcgtcatgcaccaacagcttatggctatagcgataatcatctcaccggatggatggttaactatgaggatgagcttcgccgattaggtatccgataccagccttcggatatagttgtatcgccatcgccatcgccatcgccatcgccatcgccaatatcgacaaacatggtaaatccgccgcccgctgatgcaatgcaaggctcccgtgagcaagcgattcgcagcttgcttaaacagctcgatgccactgtgagtgacaaacgtaatattggcggtgccctgcatgttcggctttcctcacgtaatgcagaagtcgttgaaaagcttgtccgcttaggttttaaacaaaaaaatggcgatccactgaccttctggagtaaataa

SEQ ID NO: 10572 - DNA, 3246 bp, Kosakonia radicincitans UMEnt01/12
atgctcaaccgtctgctcagcaaattcaaaggtaacaatatatcttcagaaaaacgggtaagtcatcgttatcaggttgaagagtcagggctatcgtttttgtttaagcttgctgatgaagatgcattgtggcctttggtcgcctatatggagcagcttgcagaagaagaatatgttgttgagttatccgatcgctggttgctcacctgggatgaactgtatcgtctggcaacagatgaggatcatcaaaccagcctgtcattactggggatccctgagattaagccgctgaaggtttgtctcgcaggcagcggaagcctgagcgatgctgattttaacatttatatccgtgactggaaggaaagcgcgactggccgatctgttcagatcgaaagaacaggagcgatatttcgcaactctgaggggcaatttttacagacccacgagaactggctgctcctctctgctttgcagcaatttcgtgatgagcagcagcacagagcgggagaaaataccaatcagcttggctgggcgaaaatacggcgcttaacaaaaaaggcgcaggcagaattagataactatctggcgaagacgattgtggttaagcccgaatcgttaagactcaagctacgcaaagcaaccattcacaacacaccggtcatcgaaattgaaccttctttcgatgatcaaccaacgcaatggctcaatagtttcgataacagtaagttagttcaggatcaataccgtgttctgggtgatgatggatccctcagccatgtgatcatttccccggaagtgaaagaagtcctctcttctgtgcattcaattactggcaggcgtatagcgggtgatgatgccgtctcttttattcgcaatccctacaccttcattggtgaggatgcagccagtgttatcccgcctgaacaacatgaagaagcgttgcaggatgcgcatatttttttccaccgtttctctgttacacctgtgcttgatgatgaagcaaaaagaatctcatccgtatctcttgtcttagaacctattgccgccaggccgcaacccgctatcactttttctctgaccaaaccctatgagtttgaagagtttattcaggaactggcagttaaactggcgtcgggcctacctgcgggaatatggcaaggttatgaattagagttgagccaattaacgttagaacaacttgaacactaccaatcactcctgcttcgttggcagcaagagattgccggtatcgaatttgatgaagttttagatctgaataaatatggcgatcgtgtcattggcattggtgagtttgaaaagatttcctctccctttttaataaagggtgaaagtgaagactggttgccagagacgttaggtgaagcattactggcgagtgatttttttgagggctgggagccgcagagccaggaacaattatcggaccttgaagaacgcattgaatcagcggcgtctttacaagaaacaaccgtctccatgccgtggaatgagcaatcattgccgattgacgatgctaaatcattattgaaaaactggcagaagaaaattgagactctggagagcgacacagataaagacatcgccgagccagaaaaaagagctgttctgcagatagagcaaaacattgaacatgcagcgtatataaaacagcgacgtgaggcattgttgagcgcgaaagatgcagaacctgcattacctgttttgcttaaagaacatattcatcttcgtgaacatcaacgacagggcttagcgtggttgcagcagttgtttcttaagtcgccggaagaaatctcaggttgtttattggctgatgatatggggttaggtaagacgctgcaaatactggcctttattgtatggtatatcgaaaaaaatcctgatggtttaccaacaatgatcgttgcacccgtatcgttattagataattgggagcgcgaactggataatttctttcataccgcaaaccttgaggtgcttaaactttatggtaatgccgtaaaagcggtgaagttccataaggatgaaatcccagtagaactgagagcgcagggcattaaaaacctgctgcgtccgggctgggttggtggtgcaaaaatcgtgttaaccacttacgaaaccttgcgcgatcaagagttttctctcgcacgccaaaaatggtcgattatggtttgcgatgaagctcaaaaaataaagaatccagcggcattaattacccatgcggcgaatgctatccaggcgcaatttaaagtggcctgcaccggaacacctgttgaaaatacgctggtggatctatggagtttgtttgattttgcccagccaggtttgcttggcgcgctcaacgacttcggtaagcagtatttgcggccaattgaaggtgcgacggaaaggaataatctcgtacttgagtcactacgacgtattatcgaattgcagacgctgcggcgcaccaaagaggaagtcgcgaaagatttgccatcaaaaattgaggacatctcctgcaaacagctgacaatggctcctttacagcgcgatttgtatgtttcgtcgattgcctcctatcagaatcgacaaaaaatgcaggatgaactggagcaacctggggcgggaatgcttggtttattgcaccgtctgaagctcatttgcgcacatccctacagcgtaaaaccggataaccgcttaaggaatcactcacccaaactggagtggatgatgcgtaaactcgaagacatttcgaaaaagggtgatgataaagttattatatttaccgagctgagagatattcagcgcgaattgcagtatgccattcatcagcgatttggtttcaaaccttatgtaatcaatggtgataccagcacccgaagtgagagcgcgaacagccgtcaaaaacttatcgatatttttcaggagcagcccggatttggaattattattctttcaaccgtggcagtcgggtttggtgtaaatgtacaaaaagccaatcatgttattcatttcacccgttgctggaacccagcaaaagaggatcaggccacagatcgcgcttaccgcattgggcaaacaaaagatgtgtatgtttattatccaacgataacggatgagagcatacccacttttgaagaaacactggatgctctgctacaaaaacggcgggctcttgcgcgagatatgctctgtacgaaaggcgatttagtctctgaagactttaatcagcttcttcgttcctga

SEQ ID NO: 10573 - DNA, 1446 bp, Dactylococcopsis salina PCC 8305
atgcttaacgctattgaaatcaataactggtttttcatcaacattgtaaggatcatctttattttgggattatcgatcgaaatcgtactgatcgtaaactattatagagaaacaggaaaaaaggcaaaacaaaaaaacgaaaatcgtgatctttctattttcagcaaaggaaacattcgtagtccattacactttattccgacattattgaccgcaattggaattttaggaacattttggggcatttctcaggggttaaaaggaattgctttagaaaacatcaatgataccgatgcacttcttaacaacagcaccgaacttttagcaggaatgaaaaccgccttccaaacctccctctgggggttaggtggcgcaagtttatttatttttattcttgctatcagtgaaactttaaagcgaattcgccgtaataatttaattccaaaaattcgtcaaaatagtgatcaaaacaccactcaagccctgattaatcaattagggaatgttgtcgaaaaaatggaagggttagccacactcaacgccaaaaatatcggagaggaagtcgcaacagccttaaaacccatttttggagagattcaaaatgatctaaacccgcaacgccaaaccattgaaaaccaacgccaagaacttctaaaaaccctcattggagaactcaaaaacgaagtcatcgaaccagtcgtcacccgcctcgatgaaagtgcagaaatgacaagagaggcttctcatgcagttaaagaactcagagaacaattagcaggaatggaagcccaacgcaccgcagcctctgacatgatgggtaacgccagcgataacctcaacggaacactcaccaatattgattccatgttgcaaaatacgcgccaaaccgcacagcaagaattagaaaacttccgtctcaactatcaagaatcactcaatcagttttttgaacaacaaaataacctcctcgaagaaacattaggaaaacaacgagaaggcttagaagaagtggtcaaagaattacaacgagtcttccaagaagatgctaaaaacatgaccgaacaagtcattgaaagcatgaacacaattcaaacaacaacaaaagctgttagcgacttagccaatacaacgggtttaacttctgccgaacgtttagcccaaattcaagaaatagcacgaacattaggaaatgaatcaaaacaaatcaatcaggcttatcaaaacctgatttataacttcaatcaaggcttagaaacttggaatgaaaatctaacccaatactttgaacaagccaacgaaacctatcaacaagggcgacaagaatcagaacaagcagcagcagaagtgtgtaaccaactcaatcaaacttctcaaggattaatgagtgttgctaactatttagtggcaacagccgaggatttaaataattctaacagtaatcgttaa

SEQ ID NO: 10574 - DNA, 723 bp, Dactylococcopsis salina PCC 8305
atgctaaatttagacaaacttaattccaattccgaactagacttagaagacgaacaagatcaagaatctggcgtttggctatcaattagcgatttaatgtcaggattgctgttattttttgctttactatttatcgccactcaaattcagctacagaaaaaaatagaagagttaagaaagtatgaggaagcactaaaaaaccttcccttagtcgttcaaactgcaattgaagaaggcgttggtggtgatgcagtagaagttgatccagaaacaggagatgtaagtctagatgacaaaatattgtttgcagaaggagagtctgaactgaagcctgaaggaaaagcatttcttaacaaatttattccgatttatagcgatgttattttttctgatgaacaatttgacaaggaaattgcaagggtagtaattgaaggacacaccagttctcaaggttcagatgaagtgaatcgcgctttaagtttagaacgggctttatcggttactaattatatcttttctgagcaattgaacttttccaatgaagaacgttttgaagagaaaattttaattagtggacgaggggaaattgatgctaatcaaagcctagataatgctaaagatcgaaaagtaacttttcgtttccaattacgtcgccctgattttagcgattttgttaaccaagaaggagaaaaggttaaagagtctattgataaccaacgttaa

SEQ ID NO: 10575 - DNA, 1506 bp, Dactylococcopsis salina PCC 8305
atgaaaaattttaagtccattgtttctattgaaccgttacaattaaaacccacagcactccaaagattagcgtataatctagaaaataataatgaatattatcccccagatttaccaccagaagtggctcaatataagaattatactccgcgttctctagataaaattctgatggatttagaggatggaaatatagatcatattacttttttagagtggatttactgtatttatgcaaaacaagaatgggatcgtgaacattcatcagaacagcgattggctacttctcgattagtttgggaaaatgcaattgggaacgatatgctaaagcaacgtttatgttcccgattggcttattattatgatggaaataaaaaggttttagcgccctcttttgtcgaaacgttttcgactttatctgatgtggttggggatgatgatctaaccgttagcgttttacttcaattcagaaaacgtgatccacttttacctttagcacagctgtctctcgctgaagaattaacaccgaaaaatttatttattacggctcaattgcctagtaatttaagcatcattaatgatgttttagagtatgtggtgacggctttttctcagtcaaaacttcaacaaaaccacgctgcctggttagttcaatgtttggaagatatgaccgttgaacaggaaattagtgcggtggaaacattactaaaaaatgttagtgctgagattggcggacagtttactaacttagtcacatggttacagaataattatggctcaagaactactgcttctaagtggaatcggttatctagtgaaggaaaaagtgcgttaagacaatggtttggttctgctaattatcgagattttcaaaggttagttgatttagtcgcttctcagcttccagataaggatgaagaagaacaccctgaaaagaatcaactgatcagcagaaagtatttttgggaacaatattctaatcagtttaagcgcattcgtgttttacttcctcagtcttccgttaatgttgtaggtaaccaattcgtccaaaatattgatattcttcaagatgatggcagtgaagaaacagaaatttgtatttttgattttggagattgttttgttgtggagtttttccgaggaagtggaagcgagactcgcatttttaaccgttttcaatatccgaatattgaacaagaattgtttgagtcttctcagttatcggtgaagcgtttacgggctttggggggaaaggttcatgatcataaatatctgtggcaaatttattgtgagagatggttgcgagaacgaagaattgtccctaaccctggaacaacttactttaaacgtagaaataaacataatccaaatcaaccctatcgtgatccttatgatcctcagaagggacttcgtgaacctgatgctgataaacaatcgaaacggaaagaagttttaagacgatggcaaagagaaattgaacgcttggaacgagaagcaaaatattaa

SEQ ID NO: 10576 - DNA, 1890 bp, Bacillus boroniphilus JCM 21738
atgtttgctctatttgagagtatttataactggattaataatataggtttaaatagttttacaaatgggtttcttctatttcaagttatttttttcggaacgtatttagcattgcattattatatggaaaaagaaaatatcaaagctatgaaatatattagaactgaattaaataatctggattcatctttaaatatcaaagaactaaataaggaaataaataagatttttggaaagttaaaagagaataatccttatcgagtgcagtgggagcgatatttcagtcgagtgaaaaaagaaaactcggttgatgagaaaattcgagtagaaccattttttggttatgatgtaatgcacgatactcttggtaaaagaaatattttagataatggtagtggaattcatgtttcattaggggtacttggaacctttattggactggcgattggactttctggtttaaatatggcaaaccctgatctattgagagagggtgtttctggcctaataggtggaatgaagacagctttctacacatctgttttaggtgtggttttatccattgtttggattctattagatagcatgattactcgtaaaagaaatgaagatattgagtggcatatcaataagcttcattattttcttaatgctgacgatgaggaaattttcttgaatcgtcttgagaaaattcaacagcagcaaactgaacagatgaaaacgttattaacggatgccttggaaaaagcgatggtaccttttgtccgaactattgaaaaagggaatcaagaaatttcacagcaaatgaaagagcaacatgaaacatcccttgagcatctgcatcttatgaaaaatcaaagtgaggacatggctaaccgaataatggatggagtaagtgagtcaatgaatgaatcgattcatgagttctctcaagtacttcgtttagctcaagaaaatcagggtcgaatgaattcattattagaaaatacagtagaacaatttaatcaagctgccgaatcaaattcaaacatgatccataaaacagaaaacatggtttccacatttactaatctttcagaacaaatggacgaaacacagcgtaattatgcatctgctcaagaaaacttattaaatgctgtcaatgacataggaaatatacaatcaatgatggttgaacatacagcgacgcaaaaggaaatgatttctcatcagcagagctttatgtctaaatcagatgaactggtgaatcagttcgtggcttttggagaccgcatggcagaagtccaaaattcaatgattgagactttagttgaaaaaaccgacctggtttcaaaacgattcgaagatctatcaaacgagcttgttgaagcttccaataatcaaaaagaagcttcgaaagattcagctgaatttatggagagagcaaaagttgcaattgccgagcttgtcccattgagcgaatctctaacgactacaatcaatggtttaagtgaattagcagaatcaattgtggaaatgaaggatatgcaagaagaaatgattccgaagctagactcttggaatacagcattagttgaagatatgcgtagatttatgacagtaacttctgatcacttaaatggagttacacagcagacacgatactcgagagaacagtgggaatctgctgccaagcattttgaatccatcaaagatgaacttaattctaccatgatcagctttaaagataatatgaatcaaggtgtaagcgagacttttaaattatttgatgaagaattacgtgaggcggttgttcatttcaaattaatgggtgaacaatatagaaactcggtagaacatttaacggagtatgtcaatcagattgaagagaaggttgagcaaggcgtatga

SEQ ID NO: 10577 - DNA, 672 bp, Bacillus boroniphilus JCM 21738
atgagaagaaggcggaaagaaacaaattactggatgagttacgcagatttaatgagcgcgatgttgatggtatttgttttgttactatctgtgattattcttgattataaaagtgatatggatgaaaagcagcgtcagatagatgcggtaacaaatgtgaaaaataatataattgcagatttaactgaggaatttaaagggtctaacatgaatattgaagttgaccctcagacgggagctataagatttccagggaatatcttatatgaagtcaattcttctgaactttcaccagaaggaatcaagtttttaagagaattcgtgcctaagtacttcggaatcattttacaggacaaatttagcgaggatatatcctccattattgttgaagggcatacagataaagctggaagttacttatataatttggatttatcacaagctcgggctttttctgttgtccaagaaatttatgacgaaaactttgtggactttcctgaaaaggatctttctaaagactacttaacttcaaatggtcgatcgtttatggtacctatcaataatcctgacggtacttataaccctgataaatcaagacgagtggaattcttatttcgtttaaaagaagatgaacgaattgaagagcttcaaaagttggtgagtgaagattga

SEQ ID NO: 10578 - DNA, 2433 bp, Bacillus boroniphilus JCM 21738
ttgactgtccagtcctactttgatattttacatgatcgcgtaacaattcaagatgatctagagcaagagatttttgctggagacgaactagatttaaaagaagatctttctgctttaggtctcccaatagttgaagagcacctgcaggtttttattcaaatgactgggttatcaggtaagcagcctgaattcaaagtgacaatgaaagacacaaaaggtgagaatgttgaattcgaatgggatattgaaggccctttcttaagaaaagaagatgaagttaaattgctttcagagggaatatggcaattatatcaagtcattcattctgaaatagaagatccgtatgaaaaaattgctcgcgtccagcacctggcaaagaaatatcattttatactagatgactttctaacaagagaaaaatatacctttgttgaagaaatcgaacttgaacccaaactattagatgacgatacgctaaagcttgagattaaaacagatgatgccattgcagatcaattagtcgagcaaaatcagttaaatgctagtatcaaaaagggtgatacaaggcaacgtgtaaggtttgcgcctaaagtagttgaggatataagaaaaatcaagcaaaaacaagttttaagaggggaagaaatcgctcaatttgctgaaaatccacacgccttctatggaggcgatacgttcacatttaatcttgaagacttttctgagcgagtaaagggctatatagtcattcaacgggtgcgctattcagtagtaaatggaaaacgtgtttggtttaatacagagtcaggtgagccggttgaaatggatgaaggtgaaatgcgtgatcaggttacccgcgaaccggataaactcttttacaaacaaaacaatacatacttttatttagacaaaaaagcaaagcaagaactagggtttgtggaccaggaggaaaaacaaaccaaagagaagattgctctggagattctaaaaaatgaagatgaattggaatatagcaaagctggaactggtgaaagacggtacaaatcctatccaataccagagggattaaaagccaatttgtttgactatcaaaaagaagggttcttttggatggctagtcttgctgaagcagggagcaatggattattggcagatgacatggggttaggaaagacgatgcaagtaatcactttcttacttcatagggagaatcaggatcaacttgcacctaccttaatcgtattgcctaaagcacttatcaataactggaagaatgagattgcaaagtttgctccatcgctatctccatttgtgtatatccatagtggaccatcacgccatcggacgaaagcagagctagaaaaagagaatatcatattaactacatatgacacattaaagggtgatcagttcgtttttggacaagtagattttcagaacctaataacggatgaagctcagaatgcaaagaactatggctctgctcgatcattagcgttacgtgccatgaaagcacagttcagactcgccatgactgggactccggtagaaaactcactcgaagaactttgggctatcatggactttgtggaacctggtgcattttcttcgctggcagatttcagaaagcaatatgtgaaagaggtgaatacagagaagttacgtgcattgttgcagccatattatcttcgaagaaccaaaagtgaggtccttgcagacaagttaccaacaaagcacattaaggagccgtactatcttagcgcctcacgtatacaacagcaattagctgcatccattgtttctgccagaagcggtaaccaagcaaatatgttaacggccttaatgaatttaagacaagcatatggacatccatcagcagttaatgatgatatagaaccattagtaaagcactctcccaaacttgagaaagtattagaactactgggaacgatccagaaacagcaggaaaaagtattgatatttacggagttccgaaagctacaatctattttgaaagtggaaatcactaggaaatttaaaatccatgttcctattattgatgggagtacagataatagggcgggcgtggtagaagaatttaataaattagaaggtttccaagtaatgattttgtctcctaaagcagcaggtgttggactcaccattacaagtgctaaccacgtaattcactttacacgatggtggaatccagctgttgaaaatcaagcgactgaccgggcttatcgaattggccaagagagagatgtatatgtatatcatttaattacacaagatccaggaaactttccgaatggaacagtagaggaaatcatgcatcagattctgattgataagtcagagttggcagaggatgttatagtgccatttaatacgaagaagatgcagagtgaagtttgggagagtgttaggaagtaa

SEQ ID NO: 10579 - DNA, 2043 bp, Roseobacter sp. MED193
gtggagtttattgcggatatcggaacgagtatgtcccggttcattttctggggatcatcgttcctgaccaaagaacaggcgcctggtttggtttcgatcgggatcctgatttggctcctgttatccgttttggttgtggggatcagtgctcacagaaaactgacgtccctccgttggctagaaggtcaagtacgggctgctaaggacgaattcgatttcgccactcaagtgaacaagatcagtcaggaagtgaaaaaggtccgggctcggaaaggctacacccatatcacagctgcctgggacgagtttcgtgaaaccatgatcgaggataagagcgctggtcagccagtcctgcgaaacagcgtgcgcccctcaagtttcttcaaccttgaggatctgcatttcggcccgggattttcccgctacatgccgggccttttcgtgactgtcggtctcttcctcacttttctcggtctcatctcggcacttcaacaaatcactgggctaagcgacgcctctcccgaagaaatgcgcgcatccctcgacggccttctcggcgcagcctccgccaagttcatcatgtctctgaccggactgctggcctcgatcattttcacgatcgtcctgcgttcgctcacggggcgggtggagcgacgaattcacacgctatgcgcagagttggaaagccgactaagcttcattagcctcgaaggggtcgcgatggagcaactcgagatcgcgcgcggccagaaggacagcttcctagagatcggtaccacactggtggccgagctcggcagttcacttaagaaagagatcccagaatccatttcaagctcgatcagcacggccatggccccgctgctggacaaggtcggaaaggccggcgccgacggggtcggacagatggtgaccgatctctcatcccggttttcggacgatgtggggcgggcgctttccgacgccagcgcgcagctttccgccgcgggggacaagattgcgagcctatccgaccggatggaccggagctccggacagatgggagaggagatggagacctccgtggctaagctcgccagagcggcagaagacctgtcagccggacttgcgtcagctgctcaaacgacggacggaactctgaatgccggcgcagagaagctcctcgggatcatgaacgagacgctggaaggaatccggcgaaacaccgccgagggggcggacgcgcttaaagaggcggctgcggatatgcgcgcctccgccggaacgttccgcgaggaactcgacgccgccgccgccagcggatccgacgcggtccgttcccgaatggaaacggctggcgtggaggtcgaaggggcgatctccgaggcgggtcgcggcatggtggatttagtcacgcgcagcgggcatgatctcctgtccgcctcgggcgaattccgagagagtatccaggccgatcttctggagccgatcaccctggtggtggggcaactcgacgagatggcggaccggctgaaagatgggtctgttcagatcgcaaccgcggctggtcacatcaagtccggcggagacgcgacccgatctgcggccgaaactctcacaaccgcctcgcgggacctgcaagtggcggccgggccggtcagaagcagtgtggagcggatcgaaaccgcaaccactgggcttgcgaagagtacggcgaacgcggcagagaccgttaccaggtcttccagggagaccgcagagaacgcggcgcgagttctggacgctgcaaaagccgcgctgagtgcggagcagaaactgatcgaaacgtccctcacgaagttgggggaggggctagaccatatggagcgacagcgtgaacagatcgacgacatggatgacaaactcggcgcggcgtttaatcagtttgcctctcatgtccggacgtcgctcgacacgtttgccgagcatgtccgcaagatgaacggcgagctggcgcccgcgctggatacaatgcgtgagatcgttgatcaggcggagaagtttcgtcctgagcagaggcactga

SEQ ID NO: 10580 - DNA, 1104 bp, Roseobacter sp. MED193
atgcgccggctggagcgaaaccggacgcgcgctgaggaggaggagtccgtctttgtcacgatgacggacatgacgatcagcttccttctgatcatcatgatcctgctcgccttcttcgcgacccagctcaacgatgacgagtcggtccccttgaccgcatatgagagggtccgtcaggagcgcgacgaactgcgtgtcgagaaccaggacctgcgcgcctctgttaaggccctcgaggccgaacttgcccgcgtcacgtccgagttggagacggttaccgccgagcgagaccggctgctcagcgaactcgaccagctgcgagacgaaaatgaggcgctccgggcccgggttgctgaactggaggaggagaacgagcacctgcgttcccggatcgaccagcttgtcgaagagatcgagcgtttgcgggaggagatcaagcgtttgcgggataagatcgaacggctccaggtggtcaacccgctcgaggcctacctctcccaggccattgaccagcgaagggagatcctcgttgaacttcgcgaccggctcctgatcgagtttccggagcttcaggtcgtgatcagcccggaacaggacgcgctccggttccagggggaaggccttttccgcagcggatcaccccagctcgagaggcgtcaacgcgcgatcgtggagaccatgggtcgtcttctggatgagatcctcgtctgctttaccctcggggagagggcggagcgagggccggattgtgagagcggaaacgccctgatcgaggcggtccagatcgagggacacacggacagtgatcgaggacgtatcgacaacgttacactgtcaacacgaagagctaacgagacatttttcgcaatacgagaagaagtagcaggcattttggctcatagaaaccttcgcgaccagccggtcatgtccgtctcaggctacggggagatgcgaccgattgaaaccaacgagacgaccgaggggaaggccgcgaaccggcggatcgatcttcggatcatcatgtacgcgccaagtaccgtcgaggaggtggaagaagtcggacgccgacttgaggcgctgcgcgccgcagggggatcggaatga

SEQ ID NO: 10581 - DNA, 2226 bp, Roseobacter sp. MED193
atgagcctcatggatgcgcttgaaaaggcagggcagctctcagccctgtccgttccggagcttcgatacctgcaagcggccgctgaccgggtgcgggaacgctggcccgacgttcaggtggccagaacagagaaggagcgcgaggcgctggcgcaaaagctccgggatcgtgttgaacgtagcgattgggaggaaacccgcctctccttcgtggtagccgcggcttcggccgttttcgacgcggaacggcgggagcgccctgacctagcccggacgcgagacttcctctacgccgagattgacttatcaacatccgagaccttcctgtccgggctgctgcgcgcttatctcgacagctacgtccccaagggtacgcacacgaccgcactcgcgaccgcactcggcacggcggctcggcggatgagcacaaccggacgtctccttctggaggctatcccggaactcatggatcccgtgtcaggtccggaacggctcgcggcccggatgtcgaagatgtctgccccctacacagaactcctcggtctcggggttcgcaacccacatggcggcgggttcatggatttcgcccaccggtccctaacctctattgtccagccacatctgtccgagcgggacctgattgactggtatatcagatggctacgcccaccgggcaaggacgtgggccgcaacacaggagctgagctggcgatcgaagcccttatctatccatggctagaaaaaactccggaggacaaactcagatcctacctcgtggaaaccctgatcgagctctacggggatccgcggatcaaatctggtggggtatggggcggtattgacgagcgctacatggcgatcgtgcaccgctggctgacacgggaagatatgcgctttttcaccggggtcgttgacgctacccagaaagacgcaatgtggccgccgcgccgggatttttggcttaagctttacgatgagggaaagatagatgcggcttgggcggctttgtcctcgcaggcattcgagtatgcacgccaacacctcatgcgtcaggatgcgaagaacgcccacacccgggtcgggtatcagcaggcgcgccagaacacatccctcctaatcatgaagatcgggaacaagattatggtggacgggtgtcacagctaccggacgcacgtgttcgacatcgccgaccccatggcaccgaagctgttcgaggaggggtataattgtgatcagatcatgcgcgcgtcggaccggagggcttcgggcgcctccaaatcacacagcagcattccatcttggagccgctgggtcagggacatgatcaacgctgatgtgccatggtcgcaacaaacgcggccctacacaaaagtgttcaggccgcgtacaccgacacgtagaaccactccatcacggcacaccccaacgccgcgccacactgatcttcagccttctcggcgcgaaattggcgcttcaacatccggtcaagacattttcagttcaacaggtgccatgcgaccatcttccgctacgggactctccaaccccaccagtcgacccgccgcacctcccgcaagagttgcagccgcacagcgcgttcagcctgagacctcgcagccggtacaaaccgattccggcgatgcggcctccttgaaacaggtccggttccccagtctcacggaccggatgatagcttacggtcctgcggcggccgcagcggttctcgcgtatctggaggcacccgagaaaggtagaacccgaccagctctgtcgccgaaatccagagaagggttggcatgggttcgggcggtaaagggcgaacctccgcttcgtttgagaaacgcgctggagcatctgcttctcaacctgaaaacgagcggtgtggatctggatgacctgttcgtatcattcgctgcgccgcctccgatatcgagtcagcccacccggtccaagaccgttccgaaaaaagaagtcgcggaatctggaggccagaagttcccgcagctcccggataacgccaaggggcgccttgatctccttcgcgcgcatgcggacgcgcttgaagatctcgggatgtggaagcgcacattcgatcagcgcaagcctctcgcggtcgcggtgcggaagctgagagagggaagtccggaccttcgtccgaaagaggtcgcggagcttcaaatgctctatgaggagctgcgccggggcggaaagggcggacaaaaatga

SEQ ID NO: 10582 - DNA, 3099 bp, Roseobacter sp. MED193
atgatccagcttacctatgatcaggactgggtcaccctcgagttcaggtctcgccagtccctgctggaccggctcctctcacgtgggacggtgccagatttcgatcacgacaagcggctgagcttcgcgttggccgatctacgagccaccgcagaggaggcaggcgatcaggtggagatcgggagtgaccgtattcagctctctcacagaacgctgagcgcgctctcctcggagacggcggacgcgcttggtcttccccccttggtggacctcaccctgcgcacagacgtcatgggccagatcggcagccccgatttccgcctgacccatgactgggtccgggcgggccgaaaggagatcgcccatcggaccggtgcgatcctggagaccgcgggcgacggggccgacgggcttcgccgcctcccgagatggatgctggacgcgcttgaggtagcggaccgattccgggccggctctgacctcgaggagcactgggaggcgcttgcccgttttcggcgcgcccttgagcccggggtccggatgtaccgggccgatgcggaagcgcgcctcgggatgaccgatttcctctctgggctcgaagtgaccctgacggaccggttctcgatcagcccccagggcgaggaccagttcgcgatcatcccatttctcggcgagagggtcgaggccgcggaacgtgacggggagcagatcagcgaggcggaggcggagctgcaggagggttggcttcgcgcttttcaggacaaggccttcgcgcggggcgcccgccccgcttacaagcttggcgggcagagttatctggtcgtggaccccgccgccaccccggtcctcaagattatgacagacatgcaacgagcggatccggtcacccgagccgcgttcgtccgcaatccacgtcagaaggtcaccgaggcgatcacggaccatctgcgctcgaaaggcaaactggacgggctgtcgccggcccaggagcaggagctgattgagcaaacggcagagcccgcttttgtagagacacgggaatactccgatcgggtgatcgggctcaccgtctacgagaaaccggcgctcgagatcactgggtccgggacaacatggctgcctgaggcgttcaccggagcggcagccgaaataatcgaggcgatggccccggaccaggtcgagcggctcatccagcaggtggatgcagcaatcgcgaacggacagccgtcggtgaacgtcgacggcgccgagatccccgcgacccagacaagtcgcgccgcgctcgagcagcgtctcgaagccatccggaagcgggaagagccagaaaataaaccagtgatcggggaggaaatcgatccgcggatcgggcctatcatcctcgacaccgccgacaacctcgaggacctcacctgggctgcaaagatcagcccgcgcacccggctcgcctcggacgcgctcccggaagtggtgaaatcagccctcaaaggacaccagacggagagttttctctggaagctggaggcttgggctgcaggactgccagggatcttgaacgcggacgagcaagggctaggaaaaacccttcaggcgatcgcatttctcgcttggatgaaggagaacatgtcccgctcggaagccgggcgcgccgggccagtcctcgtagtggcgcccacctcgctgctcgtgaactgggaggaagaggtcgacaaacacttgcgggcgcccggactcggcaatgtggtccggctctacggatcagccctcggaggcaagaagcggcctggccagcagggcatcgaaaccgattgcggaaacacgctgctggacctccgcgatctggaggaggcgatcgatgaggggcgtgggcatcgttactgggtgctgaccacctacacgacgctgacgaactaccaacattcgctagcgaaaattcccttctcgaccgccgtattcgacgaaatacaggcggtgaagaaccccgtgagcttgcgcgccaaagcggcgctcgcggtcaatgcggattttcggatcgggctgaccggcaccccgatcgagaacagcacggttgacctgtgggcgatcatggagcagctcaccccgggccgtttcggctcactgaaggcgttccgggagaagtttggggagcccgcggaaggaaacatgcgcgagctctattcgctaatgttcgagccgcagagcggccttcctccggttgcgctgcgtcgtctgaaagaggatgtcgcccgcgaccttccagaaaaatcgcgccgtctgcacccgcggctcatgccggaagcgcaggccgccgcttacgagacggcgcgtggaaagcttgcctccggcacccgaggcggcgcactcaagatgctccatcatatccggtccgtctccgtacaccctgacgcatcgtcaccgacggaagacgaaacctatatcagcatgtctgcccgtctcttggcgacgatggacatcctgcgcggggtgcaggaccggggcgagcgcgcgctggtcttcatcgagcacgtaaagatgcaacaccggttcatcgagctcacgaaacgagagttcggtcttccccgtgtcgatttgatcaacggaagtaccccaatcccgcgtcggcaagagatcgtgaaccggtttcaacggcacctcgcccgcgacgagggctttgatcttctggttctcggtcctaaggcggcggggaccgggctgacgctgacggcagccacgcacgtgatccacctgtcacgttggtggaacccggccgtggaggagcagtgcaacgatcgtgtccatcgcatcgggcagtccaagcccgtcaccgtgcacgtcccgatggcgatccaccctgggtaccagcacaactccttcgactgcctcctgcatagtctgatggcccgaaaacggcgccttgccacttccgccctttggccgatgggagacactgaggaagacgcgagccggttgcagcagatgctctcggacggtggtgcaacgcgggttgaggatcccgtcaccgccgcgatggcgatggtgttcaaacgagacgatacaccaatgggccccaagaacttggacgggtcgatctcgtatctttaa

SEQ ID NO: 10583 - DNA, 2121 bp, Vibrio sp. AND4
atgaccaatagccttaatctctcaagtttatggccagacttgagcagtctaaatgtaatgccacctcaaactcctgagcaattgagtgctttgtttgtggttattttatggggggtagctctatttttcttaatttgctcggtggttgcatttattcgggcaatactacgagtagtttggcttaacaagtccctggattacgcggagaagtcgactccgtcagatgctcgaaacgatttgatttctagagctgaaaaaaagaaaaattccgtagggcatttatggctagagtttgacgaaacactgctcgaagtaaaagatgctgatgacgttgttcgattgcataacacatttgatgccgactatttctttaacagttctagtttagctggtggtagtactgaaaaccgaatgattgcggcggttcctggttttttaacggctctgggtgttattggcacctttgtcggcttacagctcggactttcagatctaaatattgcgggcaacgttgatgtcaatgagatgaaaaacggcgttgctggagttataaatggcgcaaaaatcgcatttatgacatcggtttggggtgttttactcagtgttgcattcaacttcattgagaaaattctcgagcaagtaattagaaagaaaattaagtctttgcaaaaccgtattgacaggatgttccctcgattaagtgcggaatatcagctgcaatctattgcaaataacagccagcaatctcgagaaagcctacaagggcttgctgagaaaattggcgagaaaatgcaggagtcattagttcaagcaacgcagggtattcaacaaggtctcgagagtagtcttgaaaaaatcatggccccggctatcaataagcttgttgatgagacgtcagacggtaaccaaaaagcgcttgaaagtgttcttcaatctttcatggacggttttggtcaacaaggcgagcaacaacgtgtcgcgatggactctgcgtctcaaaacgtaaataagactttagaatcaatgagtacttcgatggctgctttcgtcaataagttagaagttcagcaaaccacatcttcagaaagagaaaaagaactgatctcaacgatctcagttcaagtttctgagctagttactcagggtaatgagcagaagcgtgttctaacagagtttgtagaaaaacaagtctctgaattaggtgagcagcttactaaaagagaatcagctgcttctgaacgtgagcagaaattggcttcctcaatggaaagaacgattaaagatttagtagaaaatgtttcagcacaaagccaagtgttgaccgattttgttcagaatcaagttggccaactaacccaaacgttctccgaacgtgatgggatggtaagtcagatggaaaaagagcgtaatgatatatttgtgaatcaaacgcaggcgatgaaagctggaacggatgagcttctagctcaagtgaaagcggcgactgaatcgcagcaaaccacatctaataatattattgagcaaggtaaacaattacaaagcagcattgattcatctgtttcggcatctgctcgagccactgagagtatgcagctttctgcgaatgagttacgagctgcggctgatagtatgaatgtgtttggttcaaatattaaagaagcgggcaacaaactatctggagctgttactgaagcagttaacagtacgaaggatttagcggaacaaaaccagttaggcgttgtgaaaattcatacgctaagagagcaattactggaagatacaagtaagtttagcgcaattgcagagcagataaataatatgttgaatagtgcagaacaatcgtttagcacgcttcgaacaaaccaaaatgagttccttgtggaacaaaaagataatcttaacgagctcacttcagaaatgaagcgcaatgtaaaagagttaacggaacaaatggctcaactgcttgaagaatatgcagaacaggctaatggacaaactgccgagcacctcaaagtttgggcgaatagtagtacacagtatgcagagagcatgaatacagctgttcgagctatttctagtgttgtcgatgaaattcaagataaagtgagccaacatgcgtag

SEQ ID NO: 10584 - DNA, 735 bp, Vibrio sp. AND4
atgcgtagaggtattcgttcgcataccccaaactcagtagatgaagaaaatccatactgggtttcattttctgatctaatgtctgctttgctcgttatttttatacttgcagctgttgctctgataattgaattaactcaaaagaccaatgatgtcgaagctggtattgaagagcttaagcaagctgagttagcaagaaagaatataatttatgatgttcgagacgaacttgctaaaagaaacgtcattgttgaaattgctgataatgatacggtaattcggatccccgaaagtacactgacttttgcatcaggtaaatcatcaattccgaacgatgcaaccatacagcaagcacttaaagacataggtgttgttcttcattcagcaattcagaagaaagaccgatttcaatatctcgataccgtatttattgaaggtcatactgatagcgatggtatccattacagaggaaaagggaactggggcttatcaactgatcgagcaatatctgtctggaatgtctggcaaaatgaactcagtttaacgcctaaacttggtgatttagaaaacgcatatcatgcaaagctattttcggttagtggttatgcggctacaagacgagccaatttacaagagtctaatcagcaagaaaagagtcagaataggcgtattgatattcgatttacagttaagaaaccatcgattgctgagctcgagaggattgttggacagtga

SEQ ID NO: 10585 - DNA, 1452 bp, Vibrio sp. AND4
gtgagtttaaatataaaaaagctcaaggttagtttgccagctaatccttttggtctagccatcaaggattttgcacgtctatcgaatcaactagaggtgctttctaagagtgccggtattgaaaacaataagttccgaactgcatatggagaagtatgtaatgcgcttgcctctaagaaaagagttgaggacgttatagatagctctgtacacgttcgcgccttagctctctcgctacatacggatgcgaagaaaaatgtcagcattacgcgtcgattacttaataagattacagaaattgtaaaaaaaccaagctctttagtcatagagtcgttttatcagcatttcttatctgagtatgaccgactggcagacttggaagctacagcagactggttgttggaggctaaaaggctgcgaggcaatgatgagcagtttgatgaaaatatcttgtcaaccaatggcccccagtggcttgcggaaagagctattcaaaataatatcgattttgatcatttaattgtggagatgaagctggaacgttatgcaaatggcagatatttaacggcggctaaaggcatctactatattaagcagttaaacaccataccattaggccaagatcatcctctcctaaatgaggttcaaaaaacggcggtttttgattctcgatatgactctgaaagtttgttagggcatcaaattcttagaattttgattgcccgttcgataggtgctcacatcagtgagccttggatgaatgtgatcttagcgattggcggtgatccacgagtaccaagttcaaatccaagatacattaagtggtggaagggtttagaaccaaatctgattcaagctgttcgcggatggttatcaaaactagatttgaagttgtttttggaagcgttggaggattattcatactcttcagctaattacgagttacagagaatgtacccatctaggaaaagtttcttagaggggatgtttgatgcagggattatttcaaatactcggctttatttgagtcaggatgctgcaaggtatttgaagagaaactatgaccctaagcacttacccaatttctcgactgttaaagatggtgataaatctataatttatgtgcaaatgaatggtgcgcacatggtagagggaagccacagttgttacttgtggttgtacaagcatttagattcgtcagtatgcgtatttaattatgacattgttaggccaacgtattctcagctaaccagtgggatcaataatcagatgacacgattatcatcgggagctgtagcaaaaataacgcactcgccaattggctactcatggcagcgaaaagcacttaccgcacttaaagggctgggaattaaattgacgcctaaagatgtgctttcaaatgaagattatattgactttaaacaacgttatggggtgcgagagtggagttaa

SEQ ID NO: 10586 - DNA, 3450 bp, Vibrio sp. AND4
gtggagttaacttctttaatcagtaagttcttttctggtctagataagacgtctcaatttgagttggtctgtgatgatagtcttgatttcactacctccaagaaaaccttagagaaaattaaagctggtaaagctgatgagtggataacagcacaatatgttgctcttaaaatgcttgaagagcagggggatgtaagctcatttccagatggctttattatgccacctgaaacagcggtaaggctcgactctgatttgagaattttgcttggttttccttcggtttggcaaggagctattgatgctgacattcaaggaaaagctagtacacctacctttaaaattgacctttcggtaacaaccaaacagggtcgaacaacgttaaattacactgtggatggacctttcattcggtttagtcaaagtgagcagtatctgttaacgcccgagcagcttatggtttttaacgcacataaagcccatggaaagtccgctcagtctgaatacgataacttactttacctacactctttacaagaggctcaaaagagtggttgtaagttgaatctaaagcactttgaaaagctaagaatactaacaccaaataaaatcacggtagaagcagaactgaattctcaaggtgagctgatattgactcccaacatggggcaaagtgcgagccatgaggcgattcaaaaggttctgggacagttgcaaagcgacaacgccgttacgctgaaagtgggtgatgaaatagtcttgttttctgaagaaaagctcatggctgtaaaagaagttcttagcaatagagtcatacctcaaaaacaagttaaagcgttcttggagaaccctactgcatatattgatgcgagcttagtcgatcttgatttaggcttttctatcagggttcatggtgcgacagtctttaaacacgcctattttggagaaacggacgagtcaggcattgattggtttggagcttccttttcatctgacgtgattaatccaatatctaagctggctgatagagtttgcgataaaacaactcttgaggacgtaactaagaagattgaagatgcccaacaaaccggagcaactgttttagattatgaaggaaaatcatacgatatcagtgagcctgtagctgttgagaaagttctaaaagaaataggtcacaagatatctaaccctgaaacagacctttctagtgaggtggaggcagaagataccgagactgaatcagaaagatcagaaatacatgttgttgatattgacctaaatgatgaagagctgtctgaaaattctcctaaaattgaacaactgatttctgatatttcatgggatggtgagttaaattgggaaaaccacaagcgtacaccttttccacatcaggatattggtgttcgttggattttaggcgttgaacaaaaaagctcatcagactcgaaaattagtggagccttgctagctgatgatatggggctgggtaagacttttatggctctctctgcaatcgaacatatttatcaacgacaacaaattagtggtgaaacgaagaaacctgtgctgatagttgctcctttaagtttattggaaaactggaaggatgaggtagataaaacctttaaacgctcgccattcaacgatgtagttattttgcaatcagctgctgagctaaatgactatcgcgtgggtggtgtagagattcgaagccaaagtgcatctgatgatagtttagaacccaagtattctttgaaagtagggaaacactttggtccaggccgattagatctaccagagcgattggttatcactacttatcaaaccttgcgcgattaccagttctccatgtgtttgattgattggggtatcgtagttttcgatgaagcccaaaacattaaaaacccaaatgcacttcaaactcgtgcagctaaggggctaaaagctgatttcaaactagtggctacgggtacgcctgtagaaaacagcttagccgatttttggtgtttgatggatacagcttgccctagccatctgggtagctatcaagaatttcgtgctcggtatatttcaccaattcttaaagctgctggtgatgaagttgaagaaacaagagctaggcttggcagagaacttcgtatagcggtcggggcattgatgttgagacgcattaaagaggacaaccttaaagggttacctctaaaacatatgtatgctggcggagaatttgaaaactggaaatatttagaagaacttaagtcgacaatggttggctaccagagagatgtttacgaagggactattagtaaccaacttgagaatgaagagagccacgcacttaccacgttgatgaggctaagagatagttcgctacatcctcgcttaagtgatggaggtcgccttgatattccaaaaaatgcaaaatcagctagggttttatacggagaatcaggaaaactagcttccttgcttgagactttagatcgagtacgaagtaaacatgagaagtgtattatttttgcggttaacaaacgactacaaagtttcttaagcgtgactttgggacagatctataacctaggtccgctctcagtgattaatggtgatgctaaagccgtagcaaagcgtaaatctgtcccaactcgaaaatcaatgattgcagactttgaagccaaagaaggttttaacttaattgtaatgtcgccagttgcggctggtgtcggtttaactgtagtcggtgcgaatcatgttgttcatttagagcggcactggaacccagctaaagaagctcaagctacggatagggtttatcgtatcggacaggaaaaagaggttcatatttacattccgctgttacatcaccctgaatttgaatcatttgatgtaaatctacataggctccttactctaaaaactttgctgaaggacgctgttgtcacaccggaagatgttgttccacaaccagcaggtgttggaggagcggtttctggtgaattgattgataaacgtattacagcggctgaacttgataagttaagttggcagcagtttgaagcgttatgtgtagaattgctggcaaagattaccggtagtcaaagcacgtggcttacgaataatggagctgaccatggtgctgatggtgtgttactcagtcgtagcggtaacattctagtgcaggctaagtttacgcaaagacaatatgatggctataaagggatacaggagattcattctgctaaacctatttatgaatccgcgatgagaagtacttttgagcgcttgatcttcgtcaccaactcaccatcgttagctaaaagaactcacgaaatagcgaccacatgtggtgttgaaattttggggagagcgcagctgttaaattaccttgaagactacgaggttacacttaaagaggtactcactagattgggtaaagagcgactcaaagcatag

SEQ ID NO: 10587 - DNA, 1461 bp, Shimia marina
atggattttgaaagcgtaggcgtctgggttcgggactttatcctgtcggcggccaacatgatcgttgacgagcactggcccggcatcatcagcgcgggtctttttgcagctatgatgctattcgtcatttggatctccctcatttcgttgtcgcgcaggcaagcgcttgctgccgcgctgagagacgcagaacgcgcttccgacagttcgggtcatggcttggatgcagaagccctgagagcggcactcaaacgtcggaagggcgcagccgaccgtgcattgtcgaccggattttcggaatattgtgaaacgcttacagttgtcggcaggggcgacgaggcgcgggttcacaactcaatacgcccatcagcattcttgaacgtggatgatcttggattttctttgaagtctttgcgatgggttccgggagtcttcgtttcccttggtctgttgttgaccttccttggtttggtggcagtgcttcaacagacccaaggtttgttgaatagcgacaacgccgcgacagtaggtgcgttgcgtgaacttctggggcaggcttcagccaaattcactatgtctttgagtgggctggcctgttccatcataatcaatttttgtctgcggtactggtcgaccaaggttgaaaagggggccgattcctttgccgctgtacttgagaaaaatatggcgttcatcagcttggaggatctcgcagggaagcagctgagggcaatcgaggaccaaacagtacaacaggctgaactgaatacacatttggttgcgaagctgagcgagccattgaacagggtggtggaacagtcggtgcagaatgtaggcaccatggtcgatcaactgggaaaagacattacctcggggattggcggttcgttggactctgtatcagagaggatggaagctgctgcaaatgccttgtcttcaatcggagacgacctgaacctggcgggtaaacaatttgatgaggctctttcttcttccacgaagtccctgatttccgcactctcgcgtcttgaggaagtgtccgaaaagttgacaagcgcaagcggaatggttggcgacttggccccaacggtcatggaaaccgtcaaagaaggaaatgcggcgaacttgcgggtagccgaaggcgcaaccgaaatggttcacgccgccaagactgcgatttcggaggagaaacaggtcgttttggaggcgatgctgtctatcaaaggcctgattgaagccttcgagagccgagcagccgcctatgatgggcagcttgagaaagcctttcagacctaccaggtcgaagtgagtaagacgatcgacaagctcgaagatcacggaaacggcatacaggagaggttcgccgatgcgttgtcaactctccaggcggtcattgaaaacgcgaaggcgttcgagccggagagccagcccaagccgtcggttgaggcgattgcagaatga

SEQ ID NO: 10588 - DNA, 1077 bp, Shimia marina
atgaggcatgcgtttcgccagaggttgtcggaagaggaggaagaatccgtcttcgtgtcgatgacggacatgacagtgagctttttgttcatcgtcatgattttgctcgccttcttcgccacccagattacgccaggggaaacagttccgaaacatatgctcgatgaagcagaaagcatcatcgagcagcgggatcttcaggtcagacagctccttgcggagttggaaagctatcgttcaggagacccaggcatcatccccaagttgcaggctgaaaaagcgcagcttgaggccagagtgcgtgcgctggaagaagatatcgacgcaattcatgcagagttggaactggcggatggggacaccgccgtggcacgtatttcactgctccgaaacgaactgcaacgcttgcatgcgctcttagctgccagttcagacgagaacttgatcgaaagatacaataccgttgtctctttgcagcgagccaagatccttcacgttttgcgagagaggatcgttgcggctgatccctcaatcgatgtcagcatttcgcgcaaccaggatgcactacaattccgaggtgatgggctttttgcgtcaaattcaacgacaccatcgcgccaaggacgggccaaaatgcggctcattgctggtatcctccaggatgtcatagcttgtttcgctctgggagaaccatcgacgctcggaagtacttgcaacgaagatattgctgtaatcgacgcgctgcagattgaaggtcacgcggacagtgttggaagtgataatcacaacatggacctgagtgcccgtcgtggtgcagcaatctatggcgaaatgatcgcggctaacccgcagctgctggggtttattaacctgcgtgcacagcctgtgctttccgtgtcaggctacggagaaggccgaccaattgcggatgaagccttaccaggtggccgggatgcaaaccggcgtatcgacattcgtttcataatgttctcgccggtggatgaagcttcgataccgtccggtttggatgatctggcgcgcattcaaaaacttctccagggaggagagttcgaatga

SEQ ID NO: 10589 - DNA, 1311 bp, Shimia marina
atgagcctggccgatcgacttgtcctcaaacctgacttcagtgttcgcgtcaaaggtggagccctggataaggccgcagaacggatcgcagaaacttttcctgggctcgagaaacgcgcgccagagggtgtcccaatcattcttcgtaaagtcgagggggcatatagggcgggacactggcaaggagtgacgtctggcgacgttggtatcgcggtttatgagcatcttcgagaaaagattgaactcccacaggagttgcgccttttcctggatcaggaaatgaaggttacaacgaatccgaccctgatcgatgccatgtgccggggatactttgtgagttggtcaaaacgagcggccaaaacacgtgctctttcaaacctattgcttgaaaaggcctccgtactgccgacgcgttggaagagaatgttcgcaaagcacccggcctttcttgatattgaagatggcgcagagaagatggctgcacgaatggtcgaagcctcgacgccttaccagtggctcaagtctgaaggtttacctgcccctcacgaagaaggcttgatgagagaaacccatctcgcatttctcaggcaaacccccatgccacagactgagatggccgtggacaagcttctgggatgggtaacgccgccaaaccgtccgaaactttttgacccttgggctgctgagactgtcgaaaaaattctatccccctgggtttccgccgactgccctcagaagctgcgcgatttcaacctggaaaggctggtgaataggtttggcgaccctcggactgatcgcccagctttttggtccatggtcgggcagccatatcgtcggatcctgctgaaatggttggctcgcaagagcatggaggcgattttcgatattgtgaccagggcagaaggaggatcggaacaggggcaccaatgggcaaatcgaaaacggttctggatgggggtctatgacaagggccgtattgaggaagcgtgggtcgcactcggcagcaaagccgtgccccatgcaaaggaactttatgctcgtacgggtgatccatcctacatgagctttggccaccaaggcactcgaagtgatacctgtctgctcatgatgaagatcggatcgaagacggttgtcgaaggctcgcatagttttcgggtgcatgtttttccgacaccatctcgagcaactcctgagctttatctcagcaactacgatcttgacgatatcttgctgccagtgggccaccaggatgcaagaaggcatgatccacccgggcattggatggagtgggtgcaaaggcgggttttgtaa

SEQ ID NO: 10590 - DNA, 3216 bp, Shimia marina
atgcatgagtttcagttcgatattgaagaaaatggccttcgagttcgaatttcacaccaaaagacaggattgtttgcacgctttcggaaacgggaacctgtagatctcaaaacacttgcaggcgctgaaagaacacttgcaattgccctttcgaggatccgtgctttggatcgtgactccgatcaccatgaactttcggctgattacttgtggctggatcattggatggtgtcacggctggatgacatgtcagcttctgtgcttgggataccccagaaactctcaggtgtagtgtttcatgcggaaatgcgcggatctcttgggagcgagagctttgctctgcagtggtggtgggagcgtgacaagcggcaaattcggctcaatcgtacgggtgcgatagtagaatctggcggcgttttcatgcgattgcctgcgcagatctatgacgcaatcatcttgtctgaagccttcgacagcggcagacctctgccagaacattggcgcgctctttcggagtttcgtgcggcattgggtggtcttgaagatgacggattaacgcggccagaacgttatctggaaaaggtggaaatcgtcgcgtgtgataaggtggggttggctgtcgaacccgaggaaccattgggatttgcgcccttaccctttgtatctcaacaaatccggcaaggagaaatggcgtccgaggtttccgccgcgctccagggcgatgagctttctgccttcaaagaagattccaaccgccgaggcgctcaaccagcatatcgggtaggagagaacaggttcctgatcctggacaagtctgttgtgcccgtcgtcgacgtgatttcgcgtcacgcgagaggaacagaccaggaaaagaggaatttcctcgaaaatgcagatcgcttagttgcagaggcgattgagcaagctttgatagatgagggtcggctgaacgaactgatgccgtctgccgatctggtagatgtggttgaaacagagttcgaaaaagcttgggctgaaacgcgggagtggactgatcgcgttatcgagatcaggaagtggactaagcccgaaatcgaaattcttgaaggatctggcacgtcgtggttgcctgatgacattgacgctgtcgttggtgagatcctgggtaccattccagaagaggatctggataccgtgttgaagacactccttgctgcgcaggagaatggggatctggaggtcctgcttgaacaaggagttcttcctgtcacggagttggttatccaggcagtgagacggcgtctggagttgtatctcaatcgaaccagccaggatcaggcagaagaaggcgaggtcacggccattttgccggtgacgcatgacaatttctgggaactcgaattccgcgaaaggttgcacgacaggccatcagcaacggagcaagagttgcccagttcgctaaagacatctttgcacgcgcatcagagaaacgcctttgattggcaagtatcggcatgggaggccggtctccctggaatcctgaatgccgatgaacaaggccttggaaagaccgttcaaacgctttctttcctggcttggttgaatgagaggatgacgaaaggtgagttgcccaccaaaccgtttctcattgtcgctcccacttccttgctaaggaattgggaagatgaaaccaggaagcaccttataccgggtattttcgatgagccggttcgcctctatggccgcgaactcaaggcgtggcgcgttcagggtgaacggggaagggacattcaggatggtcgcgcgaaacttgacctctccagtcttattgattgctccgagccgcgactcgtaattaccacttaccaaactctggcaaattacgcggtgacctttgcccaaactcccttcgcagtcgccgtgtttgatgaaatccagaatctcaagaacccatcaacgttgcgttcgaatgcggcgaaggctgtcaacgctgactttcgaattggtttgacaggaactcccgttgagaatgctacccgcgacatttgggctatcatggatcagctgtttcccggggctctgggtgcgctcaacgattttcgtatcgcctttgacattccaaagaagggtaacatgcaagagttgcaccgtgccgtgttctcgtcgatcaacgggtacccggcattgggcattcgacgcacaaaagagaaagccgcatcggatctgccacccaaagtgagggtgctgcatccacgcatcatgccagagatccaagcgctcagatatgatgaggctcgtaaacccgggcaatccctgtttggcctcctgcaccacatcaggagaacatccttgcatccgggtttgttggaaggtgaagcgcctgaaacttttatccacgcttcagcccgtattgaggctgccatggatgttcttcgagcaatccgcgtaaagggggaaaaggcgctcgtgtttgtcgagaatagggatgttcaagcctggtttgctgaactggtcaaaatcgaattcggcttgccacgcgtcgaaatcatcaatggatcaacaccggtgtcgcatcgaaaggaaatcacagaccattttcaacgccatatgcagcatgatgaaggtttcgatgtcctggtattggggccgcgtgcggcaggtacggggttgaccctgacagcggcaaaccacgtgatccatttgactcgctggtggaatcccgcggtcgaagaacaatgcaacgaccgaactcaccgcattggacagacccgcccggttactgtgcatatccccttggctatacacccgcgcctccagcgcggttcttttgattgcctgttgcagaacttgatgaagaacaaaagatccctggcagacagcgttctatggcctcctgaaagtgatgagagcgaggtccgcgcgctttacgatgcaatcgtttccgctgaggaggaggatggtctcgccacagatgaggggcttgttctctcaggccgcccggacttggaaacgcaggagcttggcgagaacatacttcgggtgtgcctgaaggggggaggagcctcggtcgtagtagccctggatggcttaaatcttaagccggaagttttgaggccagagactgatgctgcagcgattgttctttcggatttcaacaattttcctgagggtacacatgtgcccatgtctgttctgggtgggtctttgctctggccagattttgtattgccggattga

SEQ ID NO: 10591 - DNA, 2535 bp, Paraburkholderia telluris
atgtaccagaccttcgttcacgcgccggtcatcgcgaagctgtgcgcgctctccatccttgtgctcttcggctatttcctgttttggttcgtgccgagagctgtgattcgcggtctcgcactcaagcgagtcattgccggactcgcgcgcctcaaagagggcgaggacccggggccgctcttcgccaaaaataaagatttggctcacctttggagcgaatacgacgagacgctctttaaacaggaacgctttgattctggtgagcgcggttatgtcttcgacaaaaaccgctcgacggttccggccgagatgtttttcaacacgcagacgaccgtggactcatatgtcggcgcggaattctttaagcacgttcccggcatcctgacgggtatcgggattatcggaaccttctttggaattcttcacggactggatgcattcaatgtgagcgccgatgccgcccaggttcgcgacagtctgaaaggactgctcggctccgtgtccgaagcgttcgcggtttccgccggcgccatcctgtgcgcgatgattatcacgttgttcgaaaagttgcttctcgccagcctttacaagaaaagcgaagcgctcgccatcgaaatcgacaaactctacaaggccggtgcgggcgaagaaatgctccaggacttggtccaatcgtcggccgactatctgtctaacagcaagacgctaaaagacgcgctcgtcaatgacctcaaggccatcctggagtccgtcgcgtcgacacagattagcgagcataagcgcattatcgatgaccagatgacggcgcaggctgcgagcaccagagacctggggttgcaaatcgggcaggaaattagcgcggggttgcaaacggcgctagcggaacccatgaaagctatcggagaggctgtaaaagttgtcggcggggagcgcgaaggcgcggtccacaagctcctttcggaggtaatcaaagagctcaatcagagcttgcgcgacctctttggcgaccagattgcgggcatcaacacgatgcagcagcagaccatcgccgcgcttcaatccgccgtcgacaaaattgagcacttgtccaagacgctgactaccgccgggacagatgcgacgggcaagatgggcgaacagctggctgaagccatcaaaaatatggaagccagccagacgcgcatgaccactgaaatggcgcaagccgtggccgagatgaaaaatcttgttgccaactcacagacggcaaccaatgaaggcatgctcgccgcacttgagcgggtcagcaacaacgtcgaggcgctggtcaagcaactgacggaaaaggtcgaaacatcccagagcgcaaccagtgaggcgttgacgaaggcgctcgccgaggtgaccgagcgcgtgggcggcctcgtcacgtccctgacagccgatgtaacaacatcccagacgacgactaatgacgcactcaccaacgcgttggctgatgttgctgaccgcgtcggaagcttggtctcgtcgctgacgactgacgtaaaaacgtcgcaaacctcgaccaacgaagcgctcactaaagcgttgtctgacgtcactgagcgcgtcagcggccttgtctcgtcgctgacaagcgatgtgacaacctcgcagagcgcgaccaacgaacagttgcagaagtcagtgtcggacgtcagcgcgacggtcgctaatctggtgcaaggcctcacgcagtccgtgaccagtacccaagaagaaagcagcaagcagctgacacagtcggtcgcaaccgtcggagattccgttaaatcgctcgtcgacgacctcaagcaacaagccgagggtgctgacgtcgttcacgagaagcggcagcaacagttcgcagccgaagcgcaagccgccgccgctggaatcaagtcggcagtagacgttcttactgcggaagtcagccgacttgtgtccggcaccgggttcgcggtcgacaaaatgcgtgagagcgtggatacgatgcgccgggtgaccggcgacacggttacccagatgaaccagggggcaagcacgctgcatgcggcctcgaccgagtttggcaaggccggcacggcggtaaccggctcgctgcaacaagcgacgcagctgaccgacaagctcgctgcggcggcgggcaacgtgggcgcggcgtccgagacgatgcagcgtgtcgttaatgactatagcgcccggagcggcgagttccagtcgatgctgttgcaccttaagaccatcgtcgagttggcagaagggtcgttgagccatgacgtgctcgctcaaattcaggaatcgaacaaggcgctgacggtcgcgcaactgaaggtggacgagttcatgaacggagtgaccgatgtgctccaggactccagcgacaagtttcaaaccaacctcaccgatgcgatggagcgcgccgcatccaagctggtcgagacgaccggccgagtcacaggcctgttgaacggtctcatcgagaatcttgcaatggcactccgtccggtcgtgatggacgaggagcgtgcttaa

SEQ ID NO: 10592 - DNA, 723 bp, Paraburkholderia telluris
atgttgagctctcgcatcgttctgaagcggggcggcaagggcgaggcggagaagcctttctggattagctacgcggacctgatgaccgcgctcatggtcctctttcttgtcacgatgtccgtgaccttgcttgccgtcacaaaacaagtgagcgaggccgagcgccaaaaagcagagcgcgaccgcgaaatcgcggagttgcttcaccgcgtacaagtcgccgcgaaaaacgcgggcatttcggtcgatatggaccggaacgtcatcgactttggcgacaaggcgcatttcgacaagaacagctccggactcaagcccgagcagcaaaaactgcttcgtgcgtttgtgcctcaggtgcttgccatcgcgcgcgacccgctcggccaaaagtggcttaagcagattgtggtggaggggttctcgagcccggagggagattacctctacaacctgaacctcagcctccagcgcagccaacgggtgctgtgtgttctactcgccaagccgccggtaggtgagagcgcgatgagcaatgacgaactggagcaagtgcgcgacctgtttcttgtcggtggctactcgttcaacgccgccaaggcatcctacgaggacagccggcgcgtggagttgcgccttgaattcctggggattggcgagcatcgcccgtcgaccaacggtccgccacgcggcaacttcggcacctgcgctttaggagcagcctaa

SEQ ID NO: 10593 - DNA, 1977 bp, Paraburkholderia telluris
atgagttatctcgacgatttgcgcaagggactcactcgcctgcaaaaccagccgctctttttgcagacgccgatgggcgagctcgaagaacaactcgagaagctgaccgagaaacttgtaggccgcaccgcaaaagcgccggaagaggccgttgttaaagctgtggagcgattccaacaggagccgcgctttcggcattcccatgatgcgctactcgtgagccttggttgtgaccggcccattggaaaaatgcgctaccgcctcatcgaggaccgcgtacggtttccggccgttctctcgggtgtggaccgcttccgcaagcatcgacccatcttccgcgactgctacaaggggctcttggacacgtacctccgctaccatcctgaaatgaagggtgcggcaaagacagggcggcccaattgggagctgcttcggtcatggctggacagtggcgccaataccctccgccgcccggatggcctggaggagacctgggtgtctgaactagtgtcgcaccccgagcttttctcaaatgctcccgtcgatgcgtttgctcggcagatgcttcggggcgacgatagtgctttttttgagtttcagcaggcgcttcatatcgagcgcacctcgtggcttatggagcaggtggtcctcgcacaggtccgcgcggccgcgaaggccggcatcacgccgtacatccctaaattgttgccgctgctcgagcaactcgcgacccaaaaccccgtcgttttcaatcaaggcctggctgaggtgctgagcgcatattgcgaccatacgggcggcccgctgcacggagcgttacgcgatttttccttgcacttctggggcaacccgcttttcctgcgcaaggaaaacagcaccggctgggtcgccgtgccccgcgaacctagggacatggtcaaaaagtggttcaagctgcatgtcattcagcagttcttcaacgttctggccaagcaggaccagcgtgaacaggacgacgtccgactcaagcgcgagcggcgacgagacttttgggagaagtacgcggatgtcgtgggcgacgttaagttcgcactggggcccaacgctcgaaacagcgatgacacgaggatgctcgaagtcgtcaagctgatggaagggatgacgcttgacctctatggcgcaggagacgggcagaacaacgccttcatcatgcgattcggcgactgggtcgtagccgaattcgggcacgagaataacgcttgcttcgtgtatcccgcatcggacgtgccatttgagcacggcgacaccagcatctctgcgcaggccattcggcatcacattcaggcgtcggaccaactgggtgccgaaagccttccgcatcgagatagaaggcgagtcgggccggtcaaattgcaccaccgagacaaaggcggtcggttctgggaagatattttcgaggacgcattgagtggccggggcatcaccaggccggttgccgcgcgtgcgagcaagaactcggcaactacctggaagcccgaggtaccggcgcaggcagccaagcaaactccggctcgcgccgccgcatcttctgccgcgagccgcccgtcgaccacgcctagtatcgaccggcctccagaagcagcgaggcctgcgccacgccaagctcaagagcagcctgtaagttcgagtgcatggcgcaatccgtcgctttttcggccggcatctggtggcgcgagcactccgccgaccaaagcatccacgtccggagcggacaccccgtcgagcggaccgattgtttctctgccgtttggtgcaaagcaagagaaagagctccttaccatgtgccgcaaactcgacatctacgttcgggacatgcgtgaacggcagggcaatctatggattgcgttggacagcccggcggacaaccgtctgacgccgttgctccagtcgtacggcttcaaataccggcccggtcgcggctggtggtatcaggaataa

SEQ ID NO: 10594 - DNA, 3771 bp, Paraburkholderia telluris
atgctgaagtggctcaaaaagatgacgggtgccgagccgtcgcagcggcaaatcgccgccgtgtggcgcgcctttggagctgaagggctcgacttgggaacgttcgagtccgtgggcgcgcgcccaggtgcgacgccgcttgcgacacccacggtgcccgcgctcatcacgcaactgtacgatgaaggctatgccgtcggtgcagacgagagcgcccacttgtcgtgggagagcctgtacaacctgctggaagaaccggctttcgcacgcagcctcgaccaactggaactcccgcccatcggcgggctcacgccagagctccaaagccgcaactcgcttattgaccgcgactttacgattcgcgtctccggttggcgggatgaggaccggcgcccacttgaggcggtcacgcgcagcggcgcgcttgtctcgaccaacggccgacagcttttgctgtcgcggcaggcgtgggagaccgtggagcaggttgcacgttttcaggcgcgaccagaggacgagcgcaccgagaccgctcagcgcatgcgttgggggcagattcgacgcgccgcgcttgcggcgaacgcgagcctcgaccagttcctgtacaagagcattgtcgtcacgcccgacactatcgatatcatcccgcgaaagacgggcgccggcacgacacgaatggtcgaaatcattccgaccttcgaaggcgcccccgaaaactggctcgacgttttcgactcgtatcaggcggtccccaagcactatgacatcagcacgcccgaaggtatcgtgcacgtgctcgtcacgccagaggtgaacacggtgctttccagcatccgaaagatgccgggccgactcatcagcggaagccgggccgaagcgttcctgttgaacccgttcgccacgctcggtgaggacgcaaaagcggcaatcgacgaagagcagttcgagcgcgccaaagttgaagctggcattttcttcgaccacttcacctcgatagtccgccgcgacgcactgggattcccggagacggtcgggcttgctatcgaaacggcgctcgcggaccgggtgtctgcggaggagcggctcttttcagacgactcggagctggaacacttcgtccgaggcgccgaacgcgccatcgccgccgaacgtcagctctatgcatgggagggctacgacttcgagcttcttggcaacagcgaagagcatctggttctgctcaaggccgccctcgatgagcgcagcaagccgcgcattttggttcgacacactgacgtctacgacctgagcgcgtacacctcgcgcgtcaacggtatcggcctcgaacagccgtattactcgccgtacatcgcgaagaaaggcgacgagtggtggcccgagcacctggtcaacgtcatcgtgtacacgcgggacggcagcaccgacccggttgccgtgcccatcacggatgacgtcaaagacgaattgagcgccaaactcaaagaggcggaaacctccggcaagcccacgattgaattgccgggtttcccgcaacccattcccgttaccgaagcgcgcgacatcctcgacgcgttcatcaactttgggaatgatgtccgggaggggtacgacaagcccccgaaatccgtcgactcgaaggacaaggccgctcgtcagaaggcaaaacaactgttgctgaaaccgaatgttgatgcagtggactacgaggatgtgcgcaaggagattctgaccgccttcacgccctcgccggcgctgccgtcgggctttagactggagacgaagctactgccccaccaggaaaagggcgtcgcgtggcttcagcatctctttcagcacgcaccaaaccactgtcgcggctgcgtcatcgcagacgacatgggcctaggcaagacgctgcagttgctgacattcatggcgcgcgcattcgaggacaatccggaacttccaccggcactcatcgtcgcgcccgtctccctgctcgaaaactgggcagaggagatggacaagttcttcaaggaaagcacgttccggccgctcatcgcatacggcgacaacctggcttcgcttcgggtgccgcgttcggccattgatgaagagcttcgaaaggaaaaccttgtcaaattcctgcaaccgggatgggtcggcgacgcgaacattgtgctgacgacctatgagacgcttcgcgacctcgagttctcttttgccgccgtcaaatggtcgattatggcctgcgacgaagcgcagaaaatcaaaaacccgaactcgatggtcacgcgttctgccaaaaaacagaatgtgatgttcgcggtcgcctgcaccggaacgcctgtcgagaatacactcgtcgacctgtggtgtctgttcgacttggttcaggcgggattgcttggcgcgctcaatgagttcggacggtgctatcgcaagccaattgaagccgagacggaggaagagaaggtgcgcgtcgaggaattgcgcgggctgattgagccgcagatactgcgccgcatgaagagcgatgtcgcccagttgccgcccaagcgcatcatgccggtgctcatcccgatgtccaacctgcagcgcacgtactacacgagcgctatcaacctcttcaaaggcctcaagaagggcgacaaagaggccgcgtcgtctccgttcaagaatcacctcggggtgctgcaatatttgcgctccatctgtacagccccgcacgcacccggcctgggtcgtttcgcgccgcagccgctcgcgcaggcacgctccgaagcgcccaaactcggatggctgctggacacgctacgcgagattgaaggcaagggagagaaggccatcgtctttgctgagtttcgcgaggcgcagcagatgctcgcgtactacatcaaagagacgttcggcttcgagccgcgcatcatcaatggcgacgtcacggcctcagcgaaacatgtcgcgagccgtcagaaacagattcgcgcgttccaagagaagcctggatttggcgtcatcatcctctcgccagttgccgtcggttacggggtgaacgtgcaggaggccaatcacgtcatccactacacgcgaaactggaatcccgcgaaggaagaccaggcgaccgaccgcgcgtaccgcatcggccagaaacgagaggtctgcgtctacctaccaatcgtgcgcgccgaagatttcaagaccttcgaggtgcggcttgacgaactgttgaaagagaagcgaaagcttgctggcgacatgctcaacggcacgggaacggtgatgccgaccgactggaacatccaggacatcgttccagacggtgcgaaagacccggcgtttacgcgtgcccttacgctagacgacgtgttgcgtatggagtgggacttcttcgaagcgtatgtcgcggcggtttggcagaagaaggggttcaagaccgtgtatcgcacaccagcacgcgatggtggcgtggacgtggttgcgttcactggcaacaagggcgacctcgttcagtgcaagagctcgggggtggtcaatgccagcctgaacgacgaaggtgttaaggacgtggtgtcggccgaagcggaataccggcttcgccaccccggtgtaaatttctcgaagtgggtggctaccaaccagttcttcaacgagacagctagagaaaaggcgcgccgcaacaacgttaccctcgccacgcagaaggaggttgacgcatggctcgaacaatatccggtcacgaacgctgacgtgcagcgatttctgcacctctactgggagcaggccgcttga

SEQ ID NO: 10595 - DNA, 2067 bp, Psychrobacter cryohalolentis K5
atggattggctaaaagtagcgcagttttcgcaaggctattatgtttttcctgcaataattttcatctttattgcttacatcagtttgcggtttttcttaaactatttaagtcctgctaaggaactaaacaataaaatatcacaactagctgatgaattagacaagcttaatgacaactctaatcttgataaagacccattagatgtaaagtttgatggcaacccttctttgaagcaagcttggacaagttataaaaaaaccttccatgatacttatgaaacagtggatggcgaagctaaggtagcttattcacgggcaactgtaccaagtgaggtgttttttacggaatccattgttgtcgatataccgttgaaagtagatttttataagcatctaccaggcattattactggtgtcggtattatcgtgacatttcttggtttgctaattgggttattagcgtttgaccctgctggcaatcctgataaagtccaagacagtttggcattattgctaacaggtgtcgcagaagcgtttatggcctctggcttagctatcgcagctgccatggttattacttggcgtgaaaaatcatggcttagacagtgctacgcacaattacaacggttgaatacagccattgataacgcctttactgctgatgaaagtggtgaggagtatctagccaagttactcaagtcatcccaagccaatgaagtcaatgccaggcaacttaaagatagtctggttaatgatttaaaaaccatgatgactaacttggtcgaagagaataaaagaaatcaagctgcttttgcttcacagctaagtgactcttatgcgcaaacaagccagtctatggcaacccaaattggcgattcgattaaagatagccttcaagatcctttagataaaattgcatcgagcgtgcagcaagtcagcggtgaccaaggttcggctgtgcaagaccttatgactgatgtgttaactgcttttatgagtaagctagaaacgacatttggcggtcaaatgacaggtatgagcgagatgatgacacaatctgtcactgctatgcgtgagatgcagttaggtttttctcaattgattactgatatgcaaactaacagtgaagtctcaactaaaacgttagagacccaaatggctaaaatgatggaagatattcatctaaagcagaatgagatgtctatccaaatgaacgaaatggtagagaatctatctgcgggttcggctaagattggtgatcaagggttatatgctgttgagcagttaaatagtaaggtttcagagcttgtctcaggtctaggtaactcaatgtcaggtttactgtcaaatgttgcagagcaacgtatcgagcaggatcgccaaatatcagataatcaacagaaattgcacgagcagtcgtctgtattgattgatagcttaggcagtgaaattaaagagcttattacgcatagcaaagaagcagttcaaactcataaagaaaacatccaaaaactgtctcaagtaaccaccgatagtatcactggtatgaatagtggtgcagaaagaatgggcttggctgctgagcagtttactacggctggtagttcgctaagcacagtgactggtaaaacatcagagcttattgcacaggttaatacgacttcaaccaacatgaccagtgcaagcagtaatcttattgagttgataagagattataagaactctaaaaatagcgttaatcttgccattgaaacactagaaactctcattcaacagtcaaaatctgaagctggtatgactagtcaaatgcttgatgatatgcagaatatgacgacagctttaagccaagttaagaaggaaatgcaagaatatttggcagaagttagtgatgttctagtgaagagctttgatagctttggtacttccgttgaaagtagtttaaatcaatcgttagtgtcttttgacaacacacttgatcaagctgtcaaacgtctcgcaactggtgttgaaggcttaggtaatgtggttgaagaccttgaagatcttacccaaagaactagacgctaa

SEQ ID NO: 10596 - DNA, 732 bp, Psychrobacter cryohalolentis K5
atgattggtaataggtacgctaaaaaaactcgttcgaaggatgagggtgagaagcctttttggatctcatttgctgacttaatgacagcactaatgacgctctttttagtagtgatggcagtatctttaatggtcgtcactaaaaaaatcaacgaagcaacgcaagctgaaaaagaacgtagttcagagatcttggatatttgtactggtattaaagacgaccctactttaaagaatcagctcattaccgtagattgtaaagagaaccgtattaactttggtgaagcaggtcgctttgggcataacgattaccggttgaatgcagagggtataaaggctttaagtgctttagttcctgttgtcttggaagcggctaatagtgaaaacggcaaaaaatggtttaaacagattgtgattgaaggctttacagataccgatggatcatatttatataacctgaatttaagcttgcgtcgttcggagtgggtgatgtgtagcttattggatcccacatttaatcaagagctcactttaactgacgcgcaaaaaaaccaaatcaaacagctgtttctagctggaggtgtatcgtttaattcagcaaaagacagtaaagaagcttcgcgccgtgtagaactaagaatgcagttttatggcttaaaagaaaaagacagtgctgaggcgcagcctatttttgtttctgcccctattgaaacctgtcagctggcaaggtaa

SEQ ID NO: 10597 - DNA, 1422 bp, Psychrobacter cryohalolentis K5
atgagtatcgctatattaaagcagaggctgaatcagagtgtcaataatttctctgaccctgcccaaatacataataaatttgccaaaccgaccaaattaattaagacgttagcaatcattgaacgtaagtttgatgagatggagagtattcagcctatcgaagaaaaaattgttaactcaattttaaaactagaaaagcatggtaccgactatctaacaaaacgtgattggaagaacctatcgtggtcactcagtaaaaagctgctaagttatgaagataaaatactcttcaccttcaaaggtagcgagttcattgaacaatttagcaaaattgatcctgagttactaaaggttgtttatttccctttgctttatagttattttgcggtagaacaagctgaaataaataaacggcccaataactggattcagctcaggaatatcttaaataccaatcggtctacgttatttcaagccactcttaagcctaaaaaatggcttactacgttaacggagcatcctgaagtgctctcgctagatccttctaaaagatttattcgtgactttttatacaatagcgatgacagtagagtcagtagtcaattagaaagcttaagcattgctcctaatagctggttttgggatagcttgataagctcatctatcaagtcagtcaagacaatgaaggaagatgactactttaaagtgataccacgtttgttacttcttctagaaaagaatccaatttataccaccgctattttaacggctctacttgaacgttatgcttctacctcaaaacgtacacttgtacatgaagctttaaagcacgtctgtttgacgcaatggggtaacccgcaatatgactcagcagcaggttggcggaatgtaaacccagatactagaaaaatggtggttcaatggtttgtaagagcagatttagaagctttctttaaattgttcagccatacagctgatgtcgatcgttttaactattggataaagtttattgacaaaatttctttttctcagatatttttaggcccagctgccgtacaatctagacatgctgagcatagaaagttcagagagcttaaccgtggcagactgaaaaaccttgtaggttctactgctagtaataatgcctttctacttaaaatcgataacatctatattgttgatttttcagatacaggaaatgcttgttatggatatagtacttttccttttgacattaataagaaaaacataggtgtttatgagttaaagaacaagccgcagtccatctttaaaagcgagtacggtctaggaatgagtttgagtcattcaggaaattgggaagctagattcgataaaaaactcgctgagttgggcattttttccaatcaatccaatagtccaaaatacaaaaaacgttattaa

SEQ ID NO: 10598 - DNA, 3228 bp, Psychrobacter cryohalolentis K5
atgaaattagcattctggaaaagaaataaatcggttgagcatgcttctgcagaaaattcagtagaaagtattgctcttttaccgctgcaatatgatgacatgggtttaaagcacggctatacagctgtggctaaaactgatgcggatttctattgggaaagcttaactgatgaagaggttgcctatcagctagatgatagctatatattgccatgggaagagttgttccagattaaacaagatcctgatcatagcgatgtcattaatttgctcaacttgccgttatcaaatgatttatatccgataattcgtagtgaaaatgggctaagtgattcgaatttccaaattattctggatggttggtgtgataaaaataaggtcaagtttaaaggctcagtcaaacgaacaggcgcaattattagtattaccggtaaagaatgtttattgaatgaaagcacttggaagctattagagaaaattaaagaattctcccgtgttacagataaaaataaatcattaaatcaaaaatattgggcgcaaatacgcagtttggcgaataaaagcgaggcgaacttagatgagttcttgcgtaaaacgatcgtacttgccccagaagagctgcaacttaaccttcgtaaaaacttagttagtacagagtcagtggtagaggtgcagcctgattttaaagactcaccctcaaattggctacaaacttttgataaatataatcaagtacaagatgaatatacaatcagcttaccagaaggtggtctggctcacgttattatcgagccgcaagttaagagtgtactcaatgaaattaaaaagatgccaaatcgtcggatagctggcgagcgtgcacagacctttttacacaatccttttgctcagttaggggaggatgccatagaggttatatctccagagggctttgagcaatccaaagaagaggcagagatctatagctatcgtttgctcatagataaaaattatgatgaattatcacattttagttccgctcaattaacgttgcatgaaatttcaagtagagcacaagaccctattctgttagaactttcaaatctagagcaagctcaacactttattgctacttatgagcgatcatcacctgtgttcctatgggcaggttatagtatagatagaagcaactacttagataatcaagtagacgagctgaaaagcgatctagaaaaaattcaacagtatgatgatgaattgcaagctagaacagtgctagatttaagcaattacagcgatagagtgatagggattggtgaagctgaaaaactgagctctgacgccattcaaaaagatagtggtgaatccgaatggttaccacagaatcttatagatgggtcagctgacttatctcaatttacttctgataatactgatgccactactgaactacttgagcaacgtatccagcatgcagaggaagaaggcgagagctttgttctacatccggacagcaacgtctccattccattagatgatgcaaaaaaactacttgatgatctgcgtgattcaaagactggggatccagttgaaaacgacatagagcaagagcagccaaaagctgatgaaacaaagaaaaaatctaccttattgattgccaataatatcgatgaggctgactttactaagaagcgagccgagactctgacttttgatgaaagcaaccgccctcaggccagattgccatcaagttttagaagccaagaatttagtctaaaaacgcatcaagaatatggtatcgcttggctacagaacctatatcagtatgcaccaaatcaggtaagcggctgcttgttagcagatgatatgggtttagggaaaactttgcagttactttgcttcattggtgaatatctagaaaccgcagaagataaaaaacctgcattagtcgtagcgccagtttctttattggagaactgggaggctgaaatcaataggttttttagtgcaaagttcggaaaagtgttaagtttatatggcgataacttaaaacagcgaaaaatacccaagcacctaatatcttctcaattaagaaatgattatgggataacaaatctacttgaagataattggttaggtggtgcagatatcgtactgactacttatgagaccatgcgagaccttgagttttctttagggagggtagattggagtatcatgatatgtgatgaagcccaaaaaataaaagtgcccactgcaatggttactaaagctgctaaagcccaaaaagcagactttaagatcgcttgtacaggcacgcctgtagagaattcacttgttgatctatggtgcttatttgatttcattcaagaaaatctgatgggttcacttagtgaatttaataaagagtatcgacgtcctattgaaaagaaagacgatgaagacaacgcgataatagatgagcttcgtcaattgattgagccacaagtattaagacgtatgaagcatgatgtcgctgagttgccagcaaaacacgaaattaatgattgtaaaaatattgaaatatcaacgctgcaacgcacactttataaacaagtatcaaatgattatagaagtttatctgagcaaggccacaaaggcgttatgttaaaagcactacatgacatgcgaatgatttgtgctcaccccctgaattttcaagaacaagcgactatcaatgattcgcctaaagccgaatggttaataaacactttagagaccataaaacaaaaaaatgagaaggttatcatttttactgagttcagggctattcaagtgtttttaaagcggcttctccttgagcggtttggattaaacgttactacagtgaatggggattcaaatactaatagtagagtaggcttaacgcggcagggcattattgataagttccaagaaacgaatggtttcaatgtgattatcttatccactgtggcagttggctttggtgtgaatatccaaaaagcaaaccatgttatccactatacacgcagttggaacccagctaaggaagaccaagcgactgatagagcctaccgtattggtcaagataaagaggtttacgtgtattatccgtctatcgcagcagatgattttgagacgtttgaaatcaaactggataagctattatctagtaagcgcagtcttgctgatgatatgttgaaaccaaacgtagagcttactcaagaattgattcagtcgatctattga

SEQ ID NO: 10599 - DNA, 1650 bp, Sphingobium japonicum BiD32
atggaggtaggtcaccccgaggcgctcccactgcggcggacctgggaggagtttcgagaaacaatcgtcgatccgtctgcggatgtcctccagaattcggcccgccctgagcacttcttcgtaaatctcggagacagtcaccgcgggctcaactggtttgcgaacatctttatcgccatcggcctgctgatcacgttccttggcatcattgctgccctgtcgaccctggatttcagcggtggggtcgatgcgatgcaggagcgcctcaatgaactgatgaaggtcgccggcgcaaagttttgggcctcagtgggcggcatcgtggcgtccatcgtcctgcgttcttacgattaccggttcggtaagcggatcaatgacggcctctccatgctctgcgacaagcttgagcatggcatggcctatctgccgccgcagcgtattgcgagcgatcagctggagcagctgaaggaacaaacccccgccctcaggactttctccgagcagctggctgcagcgcttgatggcgctctcgaaaagcaaatggccccgatgatcacccatctaggctcgatccagcaaggcatcgacaagatcagtggtggcggcggagaagctgtccgtgatgccatcgcttcgagcgccggcgccgagatggcgggccttgccgatgcgatcggggcaatgaccgtgtcgatggccaccatgtctgagcggcttgagaaacagacaggagaagcggaccgacagatcgaggaggcggtgcgtcggtttgggcaagcctccgaagagatgcgcactgcgttcggtgaccttaatcgcaactttggcgtgatcgccgaccggatgcgcgaggaaaatgaacaagcgagcgcacttgcccgccagagaatggatgaactgctctccagcctcggcacaacgctggacgatatgaaagttggcttggcgaccgcggcctcgcagctcggggaagcctcctccaacgctgcaaataatgcggcaaggatcggccaggaagcgatggagaagtccttctccgaattcgtggagcgcttcaatggagcaggcactccgcttgtagccagcatgaaagatgccggaagtgcgatctctgtttcagctgatcggctatcttcggcccagacggcgattggtgaccatgcacgggccatcgagcaggtcgccgcccgttcaggcgatctggcaacggcattcggcacggtcgccaatgatgtcgaggcagctgccgctcctgtccgtcagtctgccctgtcaatcgccgaagctgtcaaatcggtcgaggctgtcgtcgccaagaacgcgcagtcttccgagagcgcccgggatgaaatgcgcgagctcgccgcatcgctgaatcagacggcaacagcagcctcgtcggcctggtctgaataccgggcccgctttgaggaggtcgatcgctcactcggagcggcgctcgaaaaaatcactgatgcagcgggcagccacgctacgaacctcaatgaacgtgttggccaaatcgatcgcacactgggcgaaggtgttgcccagcttgcaggtgcacttgagccactgacgaccctgcgcgacacggtcgaggaactggccggaattcttgcgaaccaaaatcgggaagctgctgaataa

SEQ ID NO: 10600 - DNA, 1407 bp, Sphingobium japonicum BiD32
atgagcgtcctgcgcgcggcaatcgatcgtatggacgcacttgcgtccgccgggcttgccaagcctccgacaacgcaacccgaattacagcgacaactcgccaaacttgatgcgagcatcggtgaggcggagccagttgtcgaattgaagccttttttgcgcagtgcggccgagaatggcgccgaggcgctcccgcgtttccaactcaaccgggttctgcgcggtgcatggtgcgatccagagttcgacgagttgggatatactgctctcgaccgtgctgtcgaggaacagcggcgcagttccgatcaagcaatgatcgatggctacctcacctattttccggtggaccggcctatcatgggcaagcttgcagaggctgcctcgagtgctgccctgcgacatgagtgggcatggcgagagagggcccagcactgggagttatttgcgccctcgcaaggccctacacgggtggcacaggatttactcgcgcgcgacgatgaccaggtcttccagctgatgcgggaagttgggttgggagcaaatctagcggcgagcggctttgggcaggcaacgttcgccagattttgcgtagcgacagcagagttgccgccgagcaaggcagtcccggcgcagcgcagcctgctgaggctctttgatagggaggccctggcaggccagattgagctcgtcgtgcgcgcgctgctggaaccttgggtcaaggagaagcccgagcctgagcatcgtaaggcgatttccgaatttctccttgatcaggtcggtgatccccgtcttcagcggccccgctgggacaggatcgttcggtctctggccgagagcattggcgaagaacgcgcaattacagtcacacaggtcttcaaacgctggcttaccgaagtcgcaatgcgcgaattcttccgggctatcgccaagactaccgatcggcccgatcaatgggcgcaacgtgaaaagttctggatggcctacctcgacgacggccttgtcagtgatgcatggcctgccttgggtgtccgggcccgcaaccaaatcgagtatctcatcagacaaagcggcgaacgcccggaatatggaattattcgaggcggcccagcctcatcttcctcaatcatcatgcagattggcgatctcaggatttccgagtggagcgacaacgggtcatgccgcttttggagtgatagcgatccgaatgctccgaagctttacgcaaagatatatgacggcggaaaactgcggaccacggccggtcggacagacttcgagtatgaatctcacgtgcctgcaagcccgggttgggaaggcaagtttgcggggataattaatcgccggacatcaatcttgcacccgcggtttgggaaaggccgtgggcggaactggaacgatcgatggtaa

SEQ ID NO: 10601 - DNA, 3756 bp, Sphingobium japonicum BiD32
atggtaagcaccaaattcgtcgcaacccaacagagcgatggcagcgaggcgatcacactgttgcgtgagcggccgggcgggctgttcaaacgggcgtcaagcgaaacggtgccatactcggaatggcccaaggttgctcccgaagcagggcaagcagccttggcgctcgcacgctcgttcgatcaggaagggcaaattgttgaagaggacggaggggttgtccttccccctcacattgccgcccaactcgacgaggccgatgcttttgccctcggcttgccgcccgccacgcctctgacactacagctgaactcgagcggatcgctcgccgaaggatccatcacggtcaatccgaagtggatgcgccgcggcggcgcgccggtccgtgctgatattcttggcgttcgtgtgcgagaaggaggccgcgtcagccgcattccagagcccgtattttccgtcttcctggctgcacaagcggtgaaggcagccagtgacgccgacgaacgaagagcagcctttgccgagcttcgtgaactactgggcgataagctcggggccggcatcgaagccgacgggtttctggaacgcattcgcattgcctacgctgcaaacttctcgttgaatgcaaagaccgatcatggtcgcttcgactttgacccggtcctcttttcaagacatgtgggcgaaacgacggagggtgacctcgtcgatgaaaatgaagcctccttgctgaccccgcaggataccctgcatttccagcgcagatttcggagccaggaaggggggcggcgtagttacctcctttccgacggaacgctgctgttcctcgaccccttgctgggtaaggccctcgacatcgttcggaccaagcaggccggcagttcgcaggaaaagcgcgagttccttcgctctccccagcgggttttgcgcgaagagctgaaactcgatgctaccggcgatgacgaagcggccgaccggctttttatcgagacgcaacagttttccgaacgtgttagcgggatcgaggtctggcaaaaaccggtcctgccttggatcaagccgaagtccaacagctggctgcccgaaagcttcggcctgaggattggtgatcctcccgatgcacgacacattgccttggctcccggtgacgctgagattctcgctggcgatcttgagactgcgatcaaggcgggagacgaaaccgtcgcttggcgcgacgaaagcatccccgccaccccagctacccttcaggcaacacgcggaattgccgatcttgagcgacaaatcgcagcggagacaggagaccaatcgcgatctgaggatgaacgtgaaccggtcgacatcttctttctgcaggtcggggagaatttcgagcaactcgattatgcgcgtctgcctcggccgaagtccgctccagaggcatttcaggttccggcccttccgcaaggtctgaaatccgagccaaagcctcaccaacgcgaagcgtttgcctggctgactgaagcatgggagcgcaggttgcctggcgtcctcctcgccgacgatatgggcctgggcaagacattccaggcgctcatgttcctgctctggctaagatccaactcggcccaccccaaaccagtgctgatcgttgcgccaaccggcctgcttaagaattggcaagcagaactggctcaacacgtagaggctggcctgatcgggcccgtgattgaagcctttgggacaaacttgcgcagctaccggctggaggctggaagcgacattcgcgggggcacctcacggctggatgccggcgagtgggaagacgcaggaatcgttctcacgacgtacgaaacgatgcgcgactatcacatgagctttgcgcgcattccgtttgatgcgatcgtatacgacgagatccagaagcttaagaacccggccagccaaatgacccgggcagccaaggcgctcaatggtcgcctgcaaattgccatgaccggcacgccagtcgagaaccgacttcaggatctctggtcgattgccgatacggtctaccctgggttcctcggatcgagccgggagttcgaaagcagctatccggcgaacgatctggcaggccttgaagacctgcagcaacgcttggtcgagcgtgacgacgagttcccacccttcatgctcaggcgcatgaaagacgagatcctcaccggtctgcccgagaaaacagcgcgcaaatacgcggtcgaaatgccacctgcccaggcgcaggcctatgatctcgtgctcgctagagcgcgcgcgcttcgtgaaagcggcgagcaaggcgcgatgctcaaagtactgcacatgctgcgcgggacatcgctccatccgttggcgccgcgcggcgtcacggatattgacgcctacgtttcccagtcggcgcgcttgaagaagacgttcgagattctcgaggacgttaaacagcgcggcgagaaggcactgctgttttgcgaagatctggaaatgcaggcctttttggccatggctatccaggagcgcttcgacctcaagcacaggccgatgtgcatcagcggcaaggtggcaggtcataagcgccaggagatggtgaacgcattccagagctcagcgtccgcctttgacgtactaattctgtctcccaaggcagggggtgttggactcaccatcaccgccgccaacaatgtgatccatctctcgcgctggtggaacccagctgtcgaggaccaagccaccgaccgcgcctaccgtatcggtcagacacgtccggtcacgatccacattccgatggctatccatcccgatgaggcgatcggtccgtcgagcttcgatcagcgtctcgatgccctcatggagcgcaagcgctcactgagccgtggcctgctgatgccgcccgagagcgagcgggatgttgaggacttgcttgcagacgtgctcgacgggaagcgggccgagcgacaagatcaatccgccataacgcccgaaacggagccccaaactgcccgggagcaggctagttacagcattgaacgcctcgctgcgacagagccccaggtcagtgatgagacgcccaaattcgcagcgagcgaatccttgccgcccgcgcctgaggaagcggcaacgcctggtccgactgaggacagaagcgcgccatcagaggacacagccgacgaggtcgtctcagcgccgttggacggcccgctggttcgtcgcccgattctctcggtgcgaactcccgttgaagcggcagaagcacgggcttcccacgttcagcgcgtggtcttcgaacaatatgggcagagagactggaccatttttgagcagcacgtccgggatgcgaaaatcgcactgcttgagattcaggatccgtactgctgcgctgatgggcaagcgcggggacgactcatcagcttcatcagtcgctttggtcagctcgcttcacaaatcgccgccgtacatgttgtgaccttcgatgcggactcggttcagacgcgggaacccgaaagcactaacgatcaacgcaaagatctcgaagatcgatggaaccgcatgctggcatcggtgcagttgcacctggcgcaaaagtcacgccgatccgtcggagacctgcacgatcgtttcgttaaagcccggctcgccaacggggactctgtcatctgggatttggggcgaggtatcgacggggtcatgagcgcccgctggtcctgtgtagtcaatgctttttacgatagagcttcaccaagttcgtctctgatgcactga

SEQ ID NO: 10602 - DNA, 1365 bp, Psychromonas ingrahamii 37
atgctagagacaacgatcaatatattttcagacgcaataaacaatagattaactttatgcattgtcgctctcatcatattattatttattggaactctatttctagagtataaatattacaaaaaatcaagtttagacttaagtaatgttgtatcagattttgaattagttgcggataaaataaataataacgagagtttaacagagaaagaaagcggtataaaagcccagtatttctctacgttaaaagcagaagatacacgtactttattatctaattacccagaaaaacttctaataaaaccagcatcaagtggttacagttttatggcaagtgtgttaacaacgataggtgtaataggaacatttttaggaatagttattggactttcaggtattcaggaaaaattaaatgctagctctacagagatgttcgaaggcgtaaaaaccttgctgggaggaatggatacagcatttgttacatcactagctggcttattattctcaattcttttggcgtggggatcacgacattacaataaaaaaaatgttggacatttttttggtattagagatgattttaataaattattccgtgcagaaagcattgctgattttttacaaaaaatgtctggaggcgctcaagacaaagtcgttgaaaaacagcttcaagctgctgagaaaagtgcccaggcttcagaagcattattgcagatgggaagctcattggaaaaagccgctgataattttgatgctgacaaaattggtcaacacctttctacaagcttagacaaaatattcactactgaaatggtgccggttttcactgagataagttcagagttaaaatctttgcgtgaaataaaagaagataatagtgaaaagataatacaagccataatgactgagttaagggctgaagtaattgaaccattatctaatcaaatatcagagacgtcatcacttgtaaaagattcaacatcagctgttactaagttgcatgatgaattaggtggaattgcaacaaagcttgcgatggctgtggcaactattcagactttccagaaagagactcttgaagagttaaaagaattttcaagcgatttgcgtgttattttgggcggatttcaaaatgataccaaggttattttggagggtgttgccgagcaattagagggggcagttaaatcaagtgtagatgtaatgaataaacagaaagttgcattcaaagaaagtgcagaccaagctgctactacttttagtgggattcgagaggagttagagcagtctttagatactcagggtaaagtgcaaaaagagatgttagatcagactgctgagcgtgtacacactattatgttataa

SEQ ID NO: 10603 - DNA, 663 bp, Psychromonas ingrahamii 37
atgaatttaaagcaaccatttgtaatatatagggaaaatgaaaataatacagaaggaactgactggttattgataagtgacttaatgtcgggcttattaatgatttttgctttattagtggtagtaactttattccaattaaaaatcactcaggagcagatacaaaacaaaagggtgattgttattcaggcattacaggagcaatttaacgcaaatggaatcagtgctgaaataaaccctgaaactggagatataacactccttgattccgtgctatttgattttaataagaaacaattaaagcaagaaggaaaagattttttaataaaatttattcctgtttatagtggtgtgattttttctgaagatggcatcagcgatgaaattaaccgtgtcattatcgaagggcatacaagctcagatggttctctaggttataacatgcaattgagtctggggcgtgctaacagtgtttttcagtatattcactctatgccacatgaaagcaacaaagaggcgtttttacaaaaaatccaagttgcaggaaggggacctatggatgctaattcacaccactctgagctggaagatagaaaagtgatatttagaatgcaattcaaatcagaagatgctttcagtaaagtattaaagttgaaaaagtaa

SEQ ID NO: 10604 - DNA, 1626 bp, Psychromonas ingrahamii 37
atgggggaattatttaaaataaaccagccaaagcgtattaaaccagtcgctatgatggaggcagctttttctatagataattgtagtaatgaaagtatttttgaaaatttagttttacctcaagtcccccccagagacgtaaaacaattaatacaattggtcatgtcttctcaatcagaaaaaatatcattattagaatggtttagtatttttgataatgaaaattattttaagcaactttccggagaagctttaattaatactcaaaaagcactttggaagtgtattctcgaaatcccaaaggttacaaatattgctttatggcgtatgtgtttatattttgataagcaatatcatatgatgccattattgataatggatgcatttcagaagcatgatcgacaaatcaggttattagataagcaaagaggcttagtcttaaaggctttaagtgagcaaaaagcaagtaaaatcgcatattttagcttgcagattggcaataaacccgaggatttcttagcttgcttaggcttaccaaaccaaatctcattggttgtaaaagctcaggaagagttagaaaatgttttagttgaggtttggaaaccagagttatgtgacaactatgtaaagattattaagcaatactcttatttgcaagcagacactgctgttacaaagctcttatcgctaaataaggaaaaggctttaaatgagtcacctgtacttctagatcatttaaaagaaaaatatgggccttcaagtgcgagctctcgttgggggatgttatcattacaggcacaacatcaattaagggccgtaattggtgctgggtggtttgcggagtttaaattatttattttccagcttacctctcaagagttagccaaggcactatctctgtctcctaaagatattaaccagctgcaaaagagagtcactttctggtctaattatcaaagtcgattccatagctttagagtgtttttgccattaaaaacagcgacaatcataaaaaatagcagtttaagcctacctgagcacacattaattgaaagcggttgggatttaaaagaaactgaattgtgtttcttagaatttgataatcatattgttgttgaatatttaagaggaaatgcaagtggcctcaaactttatgataaatcagaaatatccatttcaaaattattaacaaatgaaaaacttaaagtctccaaattagcagagattgaattcaagaaagagcatgaccatctgttttgttggcaaaactcttgtgagaatatgttgagaaccgaatttgagatactgcctgatgatgaaattactagttttttaatcggtgggaaatcagatgttagacaaaactatgatcatgtaacagggttgcccagattaagtagagaagatagatcggaacggcagaggtgtttaggtcggtctaaggggaagcgacatgaaaataaagctcgggaattctccactgaggttcaattaaattcaaaagggctcgataataattggatcgaactagaatactcagaaggaaaaaacactattcgtgctggcgctaagtttcccaataagaaaaaaccaatactctcactaagaaaaactaaagcttggtaa

SEQ ID NO: 10605 - DNA, 2184 bp, Acidovorax sp. KKS102
atgacgcctgagacctctgccctgatctcgtccgccctgcactggggcgtcggcgccctactcgccatcgccgtcgcgttcttcttcatccagtttctgctgcccgggtggcgtgtgggccgcgagctgcgcgacgcgcgccagcagctggagcggctgaaagccactggcccggtgctggacctggaccgcgtgcgggacgaagccatggtgagcgaggcgctgcgccactgctgggacgaataccgcgacacgctgcacggccagaagcaggccaacggcatgggtgtgatggaggtgagccgctggcgtgccaccagcatggccaacgccttcttcaccgaccagggcctgatcgaagcgccgctgcgcaccgagttctacaagcacttgcccggcatcctgaccggactgggcatcatcggcaccttctcgggcctgattgtgggtctgcaggcttttggtcaagttgacctaggggctgctgatgcggcgagggatggactccgcgctcttcttgagaccgtgggcagcgcgttcaaagtttcaggtgtcgccatctttttggcgatgttgatcaccacgtttgagaagcaagtcatcaatcggcgatataccgaacgtgaagaactcgccagcctgatcgacagcctgttcgacacgggtgctggtgaggaatacctgcagcgcctggtggaagcgtccgagacctcggccacccaggcgatgcagatgaaagagtcgctggtcacagacctcaagcaggtgctgtcggagctgacgcagcagcagatcgcgaccatgacggcgaccagccaacagctggggcagtcgatcacaacaagcctgaccgagggcctggccgatccgctgacgcgcatctcgcacgcggtgcagcaggtgggcaacagccagggcgaggcggtgaacaagctgctgaccgatgtgctgggcaacttcaccgagcagatgcagagcatgttcggctcgcagatgcggggtatgagcgacatgctggtgcagacagcgaacacgatccaggcagcgtcacagcagtttgagcaactggctgggcagattcagcaggccgggtcgggtgctgcggacgccatggcccagcgcatggatcaggccctgcagcagatgcaggcgcggcagacagaagccaacgaccagatgcgcctgttcatcgaccagctcaaagacagtgtggccaagggccagagtgagtcagccgaactgaccatgggcatgatgcgcgagctgagcgacagcaccagtgccctggtgcagggcctgcgctaccaggcccacaccgcacaacaggagcacagcagccagcaggcggccaccacggagcgtctgcacagcttcttggagcagatgcaggcggccgcgtcccggaaccagtccgagtccgccgaggctacccagcgcctgatagggcagctgagcgaatcggccagcggcatggtgcgaagcctgcaggagcaggcccagaaggcgaaggaagaacacacgagccgtcagtcagagctgaccgccaagtccggcgcgttgatggaggagcagtccgcacagatcgcccgcctgaccgaggcggtgcagcgggccagtgcgtcgatgcagcagaccgtggagcaactgcagacgcgggcgcaggccagcatcgacagcatgggccagggggccgagaagctgtatggtgcgtcagcccgcctgggagacaacctggaccgaatgaagaccaatagcgatggcctgaacgacatggcggacaagctgatcggatcggccaccacgctgggcaccgcgctgacagccacgcagcaagtgttgggcgaccagcgcagcgtgcgcgatgcgctcgcctctttggtcagcgatctgcgcgagaccattgagctggccaagcgtgaggcgtccatgtcgtccggtctggtggacaacctgcaggcagccagcctgcgactgaccgaggcacagcgcaccacagaaacctaccttcagggcgtgaccgacgtcctgggtgaagcccatggtgccttcgcgcagcagatgatgaccacgatgcgcgaggggaacaaggccttccacgaagagctggcccacgcgactggcctgctcaaaggggccatccaggacttgggcgacgtgctcgacaacctgccttcggcagcctga

SEQ ID NO: 10606 - DNA, 768 bp, Acidovorax sp. KKS102
atgctgggtggtgtgcgcatgtctgcgcccaaacgcgggcgcgaagaaggtgaaaaacccttctggatttccttttcagacctgatgtccgcgctaatggtgcttttcctggtggccatgagcgtggcactgctggcggtgaccaagaaggtgtcacaagatgagcaggaagaccgcgaacgtaaagaggcgatcgcccacctgatgcagcaggtgagcaaggtcgtttcgcagaaagagttcgagggtgtgcgtgtgatcgggaacactatcgacttcgggccacgcgggcgatttgaacgtgagggccagaacaccctgtccgttccgcagcgggcactggtgcgtcagttcacgcccaaactgctgtcggaactgcgtgattcggatgccggcaaacactggttcaagcgcgctgtggtggaaggttacgcgagccagaccggcaaatacctgttcaacctcaacctcagtctggagcgcagcgagcgcgtgatctgcgagctgctgcgtgcaccagagcccggcgaggccgccatgtcggacgaagaccggaagctgatcgcaaccaagttctttgtgggtggtgcgtcattcaactctttgcgggcgacggccgatgacagccggcgcatcgagttcaagctggagttcaaaacgcggcaggaacgccgcgaggaacttgagaacccggcctcccttgtagatgaggcagccctcgcccaggcactggacccgaacgaacgatgccccatattcagccgctga

SEQ ID NO: 10607 - DNA, 1941 bp, Acidovorax sp. KKS102
atgccccatattcagccgctgaacgcacttgaccatctgcgcgaccgtctgcgcagcgagctcgacgtccatcgcgcggtccacgcgatcgagtggggcaacccgcgcgtgatgacggaggccctcaaacgcatcaggcacgaccttggcggtgagggcaatgaccaaccggctgcggaccaactgcaggctgcgctgctgcgtttcgctagaagccgtcaggtggcttcgtttaccgagctcaaatatgtgtgctacggctcgactgtgccggtgggacacgaccggtggcgcgtgatcgaccggcggccgctgttcgaggccatgttggagcttgttaaccagcacaaccagcaaccaaagcagtttcgtcgctgctatcaaggcctgctatcaggctatttcggtttcgagcgcaatctggaaaagccgggagaggcagacgagcgctggatcgggctgcgcaactacctggctgatcagctggccccattgcagtctgcctcttcaaaacgagggactatgcccgagtggctgaacaccctgagcgagcatcggaatttactcacttcggacccctgcagccgctacgctgatgcactagcgcgcgacgaccataccgagctgcgcaaggtgtgcaccgggctaggcattgccagcaactcctgggtctgggaagaggcactcatggcctacgtgaagcgtgtgtgtcagtgcgatgacgccgaactcaaaaagcgcatgcaatcggtactagatttagttcatggcaagacttcgctgacactgccaccgatcttggccgtgagagccgttgcgctggtggtggcgcgctatgcacaatgcgctgatcaccccgagcacccggcgctgcgtgatacctgtttggagtggattggcaatccatggctgaagcgaacagcctgggatgcggccgtgaaccatgagcctgctcgcctgatggtcaacagctggctcaagcagcggcttattaaggatttcttcgggctactggcagcggatggtgctgcagatctacggcgcttggaatactggttgaagtgggagccccagatctcggatatgtggtttgtgctgggcagcgatgcccaagctaatcgaactcctgagtttctggacttgcgaaaacgcatgtccggccgagaccggaaacttgtcgacggcaaccaccagaataatgccttcgtaatgcggatcggacagctcttggtgattgagttcggtgtgacgggcaacgcgtgttatgtgtttgcggcttcggattttcagacgagtctggacacagctgttctgaatttgtatcagctcaagcagaaggcctatgccaagcgcctttctcacacggcccaatgggaattcaaattcgactacgagctcaaaaagctgcttcagtccgtgcctatgagcaaaggcgagctcaaagagctaaaagagttcaaccctgcaagcaacaccacaaatgcggtcgtgcattggcgagcgcaatcgacacaagtgacagcacccagaccagtcgcgcctgtcacttctcaccagccaaactccctgctgccaccagccatcaaggcggatgaatacacgggcttcgattcgaagcccgcgtggccgagcgttcctccacgagcgctgcaagcgagcatgtcagcgaacggtgcccagaacaccgacaccgttaggcaaaagccgtcggtggcgcagctctcagggcaaaagaagcgcctgacggatgtcgaattctcgcaactccagggcttgtttatgaagcatggcgtcgaatgggaagataaccgtcacaaggggggcgccttgtgggcactgatacctgaaaagaaccagaatccaagtgtcgctatggttcttgagctctttcggttccgctttactgaaggcaaaggctactggctcaaggacgaggattaa

SEQ ID NO: 10608 - DNA, 3282 bp, Acidovorax sp. KKS102
atgtttgacgcgctgtttgcaaagaaaccagccccaccccaagcccgcaaaggtcctgccgtcgctttcgattccgtcggcattcgctacgcgtcgccggcacctactacccgtgaatggctggccctccccttttcgtataccgaagcggcagacctgggtgcccggttggcgcagatctttatggaaggctttggcgaccggcaggaaaccgagttcctgctgccgtggaaggacgtttatgcgctgctgcggcatcccgagctgagcgcctaccgagaagctttgcttatcccgccagaagcggctgctcgtccgcggctgacgagcaagggggccctaatggacccggactttgcagtgttgttggacgagtgggtggactgtcagggcagacgtttacaaccggtgccgcagctggtggggcgtgtgcttcaggcacccagcggtgcaacgctgttgtccgagcctttgcaccaactgctagaggagttggcccgcttccacgggacaccgccgtcggaacgcagccagtctttcaaggagcaggcctttgggcgcatgcgcaaactggccacgtctaccggttgtccggtgtcggactatgtcgcccgcaccatcgtgctcacgccggaccgattgcgactggcgatggagcgtcgcggtgaggacgatggcaaggtggtggaggtcatccccggttttgacgaggcgcctgcgcattggctgaaccagttcgaccgtttgccactgcaggacagctacgacgtgcccgatgggccctcgctggttcgggttgtggtgactcctgaagtgaaagcggtacttgcggagatcaagcgcatgccgggtcgcagagctactggcccaagggctgaagcattcgtccgcaaccctttcgcagtgctgggtgaatcggcagagcaggtcatcgatcctgaacagttcgagaaggcccgcgaagaagcgggcatccggttcgagcagttcacaccgcacgtcgagcgaggtgagtttggtgaggttcaccgggtcggtctgctggtcgaagagcttggcaacgagagccaggcctccgaagtgctgtggttcgccaaccctgatgatttacagcgtttcaccagcaagctaggacgagcgttcaccgatggctcgcaatgcgtgacctggcaacggcgtgagctggagatcgtgggtgacaccgagcgccacatggtcgatctggagcaatggggccgggagtgggcctgcccacagctttggaccgcagccgaggtgctggacttgagtcactactcggaccgcgtggaagagatcggtgtcgagaagccttttgtgaccccggtcatagcccgaaacgaccatggcagcggctggtttgaagggaacgtcagcgtcggcgttcgtgtagaaaatccgtccggcggtagtgcgacttatgtgcccttgaccttcgacgacgtgcctacgttgcagcaagcggtcaagtccgctgagcaggcagggcagtcctcggtcaacctgccaggtttgcgtactgcggtgccaatcgttgatgcccgacgggcggtggacgccttagccaaagcacaacagcagttgcgtgaccacaattttcagccgtcgggagatcgccccgcagccgagccaaagaagcgcctggtcatcaaacgcaaccttgaagacgttgactacaccgaggcgcgtgcagagtccttgcaaatgcccccgggccgggagccgttgcttccgcagaccctgcgccctgaaatcgaactcaagccgcaccagcgggtcggcgtggcatggctgcagcatttgtgggaggcatcaccggaacactgtcgcggcacagtgctggcggatgacatgggactgggcaagacccttcagttgctcactttcatcaccagttgtttcgagacggatccgactctgccaccagctcttgttgtagcgcctgtcgcgctccttgagaactggcgcaacgagctggatcggttcttccagccaggtaccctgccactgctgatgctctatggcagcacgctcaaatcgatgcgcgtgggtaagcacgaactcgatgctgacctcaaggcacagggtgtcacccggcttttgaagaagggctgggttggcgatgcacgcctagtgctcaccacctacgaaacgatgcgcgacctggaattcgcgttggcgagccagcagtggtctgtgatgatctgcgacgaagcccagaagataaagacgcctgccgcgctagtcacacggtcggccaagaagcagaaggtgcgctttcgcatcgcttgcacgggaacgccggtggagaatacgctggccgatctgtggtgcctgtttgatttcgtgcagcctggcatgttgggcgcacttagccacttctcacgtacctatcgccagccaatcgaggccaagacgccagagcagatcgccaaggtggaggagttgcgcgccttgatccagccgcagatcctgcaccggcgcaagacagaagttgctacggagttgcctaagcctgtcgaggacaaattatgcaagcagctcccgatgtccccatttcagcaaggtctgtatgagggtgcgctcaagaccctcaaggagcagagggtcagcaatccgtcggctcagctgcaggcgttgcaggcgattcgcaagatctgctcggacccgcacggttatgctgctaaggacagtcacaaggcgccgatcgacaaaattgtgaacgagtcaccgaagatgggctggctcgtggaccggctcaaggcactggccgctgatcgcgctggcaaccacaaagtgatcatcttctgtgagttccgggagctgcagttgcagctgcaacgtgtgatcgcggccttcttcggcatcgctgccagcatcgtgaatggcgacacgtcagcagacccccgtacggcggataaccggcagcagctgatcgacgccttccagcaagcccagggcttcaacgttatcatcctttcacctctggccgtgggcttcggtgtgaacattcaggcggccaaccatgtcgtccacttcacccgcacatggaaccctgcaaaggaggatcaggctacggcgcgtgcttaccggatcggccagacccgcgtcgtcaatgtctactaccccggcgtggttagcgacaagttcccgagcttcgacgtcaagctggacgccctgctgggcagcaaacgtgcgctagccacagatatcctcaacggttgcagcgatctcaaggcctccgacttcgccgacttcggctga

SEQ ID NO: 10609 - DNA, 2193 bp, Pseudomonas extremaustralis 14-3 substr. 14-3b
atggatttttcgacgctgttgcatctatggggtgcagcaagctccgagcagctgatcgcaccaaaaatggtagtcggcttcgttttcgttttatgcgcctggtactttgtccgatatttttttaggtcttttaggcttagccgccagctgaaacgcctgactaaaagcttgcagagcgtgaaagttctcgctccacctctccggcgctctgaactggagcgtctgttcaatggcagcaaactggaacattcctggcacgagtacgctgaaacgctgcacgaccagtttgagtttcaggaaggcgagcagattcttgtccggtcgcgagccaccgccggagccgcgcattttttctcacctcaaagcgtggttgataccccgctgggcaccgagttttacaaacacctgcctgggattttgaccggtatcggtattgtcggaaccttctttggcttaatgcttggcctgcagcattttgatccaagcacacctgagcaggttaacgccagcgtcgataagctgctgaaagatgtgttgtttgctttcatcggctcttttatttcaatcatggcatctatagccgtcacgattacagagaagtggcgtctggggcagtgctataggctccttgaggcgttcaacgaaacaatcgacggacttttcgacagcggcgtcggagaggagtatctggcagaacttgttcgctcaagcgctgaaagctccgtgcaaacccgtcagctcaaggacagcctggtaaccgatctgcgggaaatgctgcagaacctcgttgatacccaagtccgcgaaagcctcaaattagcggataccttgtcaacgacttaccgtgactctgggcagttgttggccgatcaggtaagcagtgcgattgagaacagtctcaaatcaccgcttgaagctatcgcgggtgcggttcaggccgccagtggcgatcagtcagggcaagtacagaaccttcttcaggatgttctagttgccttcatgaacaagttggaaggtacgttcggccaacagttcaacggtctacacgaactgatggggcagtccgtcgccgccatgcagtcgatgcagcagggcttttcgacgctgatccaggatatgcgttcggctagcgagtcctcgacccaaaacagctcgaccatgatcgctcagttactctccgatatgcaggccggacagaacgccatgcaagcggggatgaacgagatgctcgtcaatctccaggcttcagttgcccgtatcggtaacgaaggggagggggcaggtgctcgaatggccgagcaattggagaagttgtttgctcagagcgaggctcgccaacaggcaatggctgagaatctccaggcgtttgttgaatcgatcaaacagaatatcggccagggtcaacaggaaaccatggcgaaaattgcgggctccgttgaggtgctgggtgagcagctctcggcagtcttcaagcagctggaaaatggtcagcaacagatggatcaagccacccgtgccgcgcaggctgacctgcatcaaggtacccgcgacctggtgggcggccttgacgaacaggtcaaggcgttgctgcaaacggtatctgagcaacagaagtctgcccaggacaccgtcaaggcattgagtgctcaaacagagcagcatttgcagagtatgcagctaggcgcagacaagatgcgggctgctgcggagcggtttgaaatggccggacaaagcgttgcgcgagccagtgagtcgacttcggggctgatgggcactgtccagggcgcaggtactgagcttgcacaggcgtcacgtgagctgaataccgttgttgcggactaccgaaacaatcgtgaagcgctagcgaaaacgctcgctgtcatcgaaggggtagttgcgagtgcacaaggggaggccagcggccgtagccagtaccttcaggatctgagggtgcaaagcgagcggatgcaggcgcttaaccgtgaagtgtatgaatacctggaaaacatcagtggtgtactggggaatggcttcaaagagttcggtgatggaatggatcgaacgttgagacaaaccctgggtagcctggatgccgagctcgataaagcagtcaagagcctcgctggcggtgttgaaggggtcaaggaaagtctcgaagacttcggcgacatcatggaacgaatcaggcagtaa

SEQ ID NO: 10610 - DNA, 744 bp, Pseudomonas extremaustralis 14-3 substr. 14-3b
atgtttggtaagcaaatgccttcggctgcccgttcaaaggacgagggagaaaagcctttctggatctccttcgctgatttgatgaccgccatgatgattctgtttctcgtggtcatggtggcggccttgagttctgtgacgcagcgtattaaccaggcggagcagggggagaagcagcgcaacaaggacatcagtcagatctgcgagcacttgagtcttaaggcgaagactgccagtaagaccatcttggtggattgcaaagacaaccggattagctttggcgacgctggccgctttgggcataaccagtacgcgctgagcaacgatggtcagtcggcacttcaagaggttgtgccgatgattctggaggcggccaacagtgaagtaggtcgtaaatggttcaaacaggtggtgatcgagggatcgacagacaccgacggttcctatctttataacctgcacctttcattgcagcgttcagagtgggtgatgtgcagcctgctcgatagtcgcagcccgctccaggtcggattgtcgtcggagcaccaacagcaaatcagatcgatgttcctggcgggtggcgtgtccttcaacaatgcaaaggacaccaaggaagaaagccggcgagtggagttgcgcatgcagttctttggcttgaaggaaaaggaagaaaacctcaagccagatgtgccggtgttcaataacaccgatatggaaaagtgtcagttggcgatgaaccgatga

SEQ ID NO: 10611 - DNA, 1629 bp, Pseudomonas extremaustralis 14-3 substr. 14-3b
atgactagcccaatcgcgaggctttccgccgctattaacctgagtctttccacgcatcgaacggggccggcgccagaaccgttggcgcgattcccccgtctgggtgctgcgggaattgatctttacgagcgattcgagcgcgctgaaaaggccttgccgccacctcaggaaaagcgccgtgcggcgataagcaaattccgcaatgtattgacgcttaacgcctctgaatggcgtttggttttcgctggtctctcggacaagagtgaacgaatcgggccgatactggacgatgaccagctctttgaccgcgtgcacaaggaaatccatcaccgtatcgaaaagcgaaagcttagccggcgcgattggttggctctgtgctttagctactttgggtacgaggctgccacgcctgatcagaacgccaattggtgtgtgttgcgggcagacgttcagcttggcttcgagtgcgtcagaggtcagcaaaaacgcgagaaagagtggataaatatcgtccagcagcatcaggagcttttttccgagcaggcaggtgccaggctgggtgaccagatgttcaagggtgaaatcagcgacctttcggcattgcagacgattgcgcagatccctgacagcagttggctgtggcgaaggatctttaacgtactcatatcccgtatcttcatgttggacgatgccgagttctcccagcgcttagctgaccttgtcgatatcggccggcagcatccgcgctacatgaacgacattctgagtgcatgcctgtcgcgttatcacggtgcagcctatcgagaaaaaccatcgtctttgctcaagcaggttacgctggacaattggggcagccctcagatccgctccaggcaaaacagctggctgcagtatgttgaaaaagacgtctgcgcgatggttgtggcgtggttcgcgaaggaagatctggagcacttcttcaacctgttgaagggagacgccgaggttgatcagtcgcgactgtattactggctaagatttgccaatcaaatgagctacacccggatcgtcatgggcgtcgacgcctggcatgaccgcgggcaggactttgttcatttccgtgagaagaacaaaggccgcttgagcaagctggtaggcggtcccgggcacaataatgccgtagtcatgcagattggggactactttttcgtggagttttcgggaacggggaatgcctgctttgtgtataaagcggacgattcgccgtttaacccagacaagacccagcttgaactcaccaaagaactcaagcagcgccatcgaacgatagagtggatgactcattcacctgcgcccggtcgcccggaccgcatcgagggttggctgagcaagttcgacgacaagctcggaaaactgggcattcgtgtgcagagtaaggccgcagcgtcaggagcaaccaaaccgatcgcttttgaagaccaggtccgtgacgccttgaagtcggtcaagcacaaggtctatgaccagcgcgcgcgtggtggcgcgcttcaggttcagctcgatgacaatgatcaggctgccgttgcagcacttcaacgtctgggcttcaaacccgtcaatcagcaaccgctcaggttctggagccattaa

SEQ ID NO: 10612 - DNA, 3249 bp, Pseudomonas extremaustralis 14-3 substr. 14-3b
atgttcaagcgtttgcttaaaggtatcggccgtcagacgaatgcggcagcggaaaataccgagcctgttttttccatagaagagcagggcatttgctaccccctgagcttggcggagactaccgattcctggccgctggcaagttatctggatcagttggaagaagaggaattcgtctcccaactcagcgatcgctggctgctgacgtgggatgaactctatcggcttcttgttgagccagagcacttaacaagcctgccgctattggggttgccaccaaagactgcactcattcctcaactgagcagccaaggcagtcttgcctccgacgatttcaaagtctccgtcagtggatggcgtgatccgcaatccaacgccaatgtgcaggtacagcgtacgggcgccatcctccagtaccacggaaaaacggagattttgcctgagtcgtgctggaagctggccggtgcggtacggcaactttacctggcccaacaaaatgagccgggtgaagtaaccaaccagatcggctgggccagcatcaggaagttggcacgcaaggcgggtgccggtatggatggcttcctggataagaccgtcgttatcaaacctgaaagcctgcggctcaacccgcgaaagtcgacagtcggtaatacgccggtcatcgagctgcaacccagcttcgaaggccagccggcgaactggctcgagagtttcgatggtgccaatcaggttcaggatcgataccgggtgaccagcgatgatggatcgttgacccacgtcctgattgagcctgaagtcaaatctgtactggactatgtgcgctctttgcccgggcgtcgggtcgctggggacgatgcactttccttcgtccgcaacccttacagcgcactcggcgaaagcgccgcgcaagtattggatgccgagacctatgaagatgaactggccgaggctgggattttctttcaccgctttcatctggagcccaaactggatgaagcgggacaaaacattgagcaggtaaacctgacactcgaaccaatctcgccaaccccgcaagcgcccatcgaagttgaattcaaagcggcctatgacctcgcgccgttcgtgcatgagttgcagctgaaactggccgctggcatgccggctggtttctggcagggctatgagctggaactcagcgattttgattcgcggcagatggcaggtatcagcgacctgctcaagcgttggcagaacgaagcggccggtattgagttcgactcagtcctggacctgtctctatacggcgaccgtgtgactggcatcggggatgcggaaaaaattacttcgcctttcctcgtcaaagaggcgaccgagaactggttgccgaaggatgtggcggcgctgggtatcgacgcagaaatcctcggacgttgggatccctccgaccgcgctcaatttgaagcgtttgaacagcggctggacgaagctcgcgctgccggtgatgaaacggtctgtttgccagagtccgaaacaccgctcacgattgccgccgccgagcaactgtttgatgcctggtccaagaagatcgcacctgtcgagaccggcctggtccagcaacaggaaaagattggtcgcgccgtactgcaaatcggccacaacattgacgaaccgacctatgttcaaattcgtcaggcagccttacgcgcggctttagacgcaacgcctgagttgcccaacctgcttaagcctgaagtcgtcttgcgtgagcaccagcttcaaggcgttgcgtggttgcagcatttatttcgcttgtccccctcggacgtgtcaggttgcttgctcgctgatgatatggggcttggaaaaacgatccagttgctcaccttcctggtctggtacctggaacagtatccagaggacaagccgacactgatcgtcgccccggtttcgttgcttgataactgggagcgtgaacttcatcggttcttcttcgctgacgcgctgccagtgctaaagctgtatggctcagccttgagcgcggtgaagttcaagaaagaagaaatccctgccgacttgaaagccaagggcatcaagaatcttttgcgcccaggttggatgggcggcgccagaatcgtcctgacgacttacgagacgcttcgcgatcaagagttttccctggcgcgccagcagtggtcgatcgtcgtgtgcgatgaagcgcaaaaactgaagaaccccgcggcactggtaactcaggcgatcaaagccattcctgcgagatttcgagtggcgtgtaccggtacgcccgtcgagaacactttgatcgatctctggtgtctgttcgacttcattcagccgggttttctggggggattgaaccagttcggccgcgagtatcagcgcccaatcgaagccgcgctggagcgtgataccgttgccctggagcgcctgcgtgggcttatcgatccgcagactttgcgccgaaccaagcaagacattgccaaggacctgccggccaagatcgaagacacagcatgtcgttcacttggcatgcatgccttgcagcgcaatctgtacctttccgaaatatccgcgtacagccagaaacagcagatcgaagaacagctcgatcaaaaaacctccggcatgctcgggttgctgcacaagctcaagctcatttgtgctcacccgtacagcgttcaacctgatacgcgactgcgcgacaactcaccgaagctgcagtggttaatgcagacgcttgagtcgatcaaaaaagctgggaacggtgacaaggttatcgtctttaccgaattgcgtgatattcagcgggagttgcagcactcgatccaggagcacttcgggtttcgggcgacggtcatcaatggcgataccagtaccagcagtcagagcgccaatagtcggcagaagctgatcgaccagttccaggagcagcctagttttgcagtgatcattctgtcgaccatcgccgtcgggtttggggtgaacgtgcaggcagcaaaccacgttattcacttcacgcgttgctggaacccggccaaggaagatcaagcgacagatcgggcttatcggattgggcaggagaaggatgtgtacgtttactacccaacggttcgggatgccgcgatgccgacgtttgaggcgacgctggatgaattgctgagcaagcgaagggcgttggcgcgggacatgttgagtggggcttcggagattcaggcttcggattttgaggcgttgctgaaagcacgctga

SEQ ID NO: 10613 - DNA, 1947 bp, Gallionella capsiferriformans ES-2
atgacattcaccgcgcttccccagcatatttatatttttgccgccatacttggtgtgctgctgatttcattcgtgtttttttccatgcttcccgcttttatcgtttcgcgacgcttgtccggagtcattaaaaagctgcgcgagttagatggcaaacctgatggtagcctggagaaaatatttcaaaaaacgggggtgcttgagcatttgtggcacgagtattcagattcattgcatcagcagctcgatgaaaaacagccgcaggcgatacgttttcgttccacgttgcccgcaagcgttgtgttcagaccggatattgttgtggatataccgttgcgttcggattttttcaagcatttgccggggttgttcaccggggtcggaatcatcgggactttttacggtctgttgatcggcatgcagtccttcgtggtttccgaaaatccggttgtggtgcgcgctagtttgacgcgcctgttgcatggcgtctccgaagcatttttggtttccgcatcggccattacgctggccatgatggtcacctttgttgaaaaattagtggtgtcgagcctgaatgcgaaagtcgaaaaactgatccagttgctcgatggattattcgaagggggggctggcgaagaatatcttgcgcgccttgtgcgcgcctctgaagcttccgctgcgcaatcggcaggattgctcaagggcgatctcaaagagatgctcactgaactcagtgaaaagcaaatcgcggcaaacaacgcaggtgttgcggcattgggcgagcggatttctcatagcattgaggtgggtttgaagggccccttgtctgaaattgcccttgcgctaaaagcgacgcgcgaggatgagggcccctcgctgcagacgatgctcagtggcatgtttgataattttaacctgcaaatgaagacgttattcagcgctcaggccaatgatatgaacagcttgcaaaagcagacgctagaagcactgggcgcaacggttgcaagactggaggtgatggcggcggaaacgggggctgcaggtcaacgcagcatggaggcgattgccgagcaacttggacgatcgaacgccgccgctgaatcacgtcaggctttgatgaatgaaaagttggctgagtttatcggacaaatgcgcgaggctaccagccagacgcagtcagaatctcaggggcaattgcagcagtcattgaacgagctgtcagtgcgtatgggtgcgttgatagacgggttgggtacgcaggtgcgctcagcaaccgatgtcagtcgtcagaaccagcttgagatggagcagcagggcaagcagatggtcagtcagttcggcgggcaaatcgaagcggtggttgagggtgttgccgaggccgttgccgaaatgaagtcggccgtgacggcgatgcaggcgacgacgaaagatgccatgacggcgctgggtagcagcgcggataccctttatttggcgagtcaggattttgcccgtgcgggtcagttggtgaacgcaacgatggaaaaatcagcctctgtggcgaatcagctgcttcaggccgcaggcacggtgtcgggcgccgccagcggcttgggggatttatttaccgattacaagacgtcgcgcgacgcgatgattgcgcagatgaacgccttgcaattgctggcagagcaggtgcgacgcgatgctgctatgtcaggcgaggtgtttgagaagattgagctggccacaggtaaactggtggcggcgcaaatggatgcggaccaatacctgtcgaggatatcggacgtgatcggcgtcgctcatcagtcattcagcgatgggatgacccgtgcggtcggtgaggcgaaccgtgagtttcatcaggctttgtcagactcagtcaagttgttgcgtgaggggattcatgagttggagagtacgctcgatgcggccaccaatgtttaa

SEQ ID NO: 10614 - DNA, 717 bp, Gallionella capsiferriformans ES-2
atgatcaataaatacctgcttttggggcgacgcaacaaggaagagggcgaaaaaccgttctggatttcattcgctgatctgatgacggcgctgatggtgatgtttttgctggtcatgagcgtcgcgctgttggctgtcaccgatcaggtttcctcggctgatcgcaataaaattcagcgtgagcaggaaattgatcagctgctggggaaaattgccaaagcggctgaaaaatatcctggaatttttgtcgataaaaatcgcgcggtgatcgattttggcgaccgcgcccgctttgataccggtagttcaaccttgtcggctgaacaggcgcagtatctgagtctttttgtatccgagatgctggtcgtggccaaggatgagctaggccgcaaatggctcaagcgcattattgccgagggctatgccgatcagcggggcgattatctattgaacctgaatttaagtttgcagcgcagccagcgcgtgctgtgcgcactgctgtcaccacccgttaatcagacattcatactgaccgctgaggaaaaagagcgtgtgcgcgattattttctggtgggtggctattcattcaattcggccaaaaaatccttggaggagagtcgtcgtattgaattacgtctggagttcttcggtcaggatgaggaacatcccgctatgaacgatattacccgcgggaatttcggtagttgcagaatctaa

SEQ ID NO: 10615 - DNA, 1584 bp, Gallionella capsiferriformans ES-2
atggatgcgcttgagaaattgcagggcaagctgctggcgataaataccacttcgctgtcacggctgcgtccaggcgattcgttgcaaatgcagcatgaattgtcgatgatgaaagactgggttaaaggcgcgtcgcggcgtgaggaggtgcctctggcgacgatagaggcggctttgcttttctatcaaaagaacagttatttaaaggggttgcgtcaggccagattgatttgttacggctgtacccagcggctcaattcatattgtctgattgaagagcgcgatgcgttcaataaattgctcacttatgtcgacggttacaagtcgcgccggcgcacctttcgcaagctgtatcgcggtctgctgagcagttatttttcctacgatcccgattcggctgatatgcgaggtggcgtcagccgggacgcgttgagcctctttttaagcgatcatctggcaacgtttgtgattggggattttacgccggactggcttgccgcgctggccaagtatcctgatttgctcggggaaaatccgggtcaggcggttgagtcgtccttgctgcaaggcgattactcaatgctcgaagaaattcgcgagcggctaggtgtggatgggggttcatggctggtgcggcgactggtgatgtcgccgtttgttgccattggacgtatgccggatgctgagtttaaggatcatctggcgagcctgttgctgttgctgaatgattatccgttgtatgccagtgccgcacttccgctgttgctcgagcgttatgtgcagtgcaaggacaggccgatgcatgcacagatgagagattatgccgtcggactttggggtaatccgtggcgggcgcagcagcagtggttatgcagcgacaaggcccgcgtgatgctcgcgcactggcttaagcggcagttgctcagtgaatttttcagtttgctgtcgaacgatgataaagcgttgtcgcgacgttttaatttttgggatctgtatagcgaagatttgacgggcatgtatttcgcgctgggcaaagatgcttatgtgcaggggaatatgcgactttataaattcaggcatctggcaaaagggctgatcgctaagctcactgaagagaagcacggtgtgcatacttgcatcatgcagttctcacatcatcacgtggttgaattcaatcgcgaaaaaaatatcgcgtatttttatgatgttcgtcagggtacgccttcgttctactttgctaagggatgggtcgatatcggtgcaatcagcgtcacggctatcgaaaaaggggcggatattgcccggacatccaaaccgttgcggcatgaagatactaaactttcgacttgggaggcgtgtttcgccgcggagttgggagagaccgagaatgcactgcgggcgttctgtatcaagtatcagtgtgagtatgaggacaggcgcggcactgagggcagtcagtgtatccgtcccgcggattgtgagcggtatggtattgaggtgtggtcagtgttgaaggggtgggggtatgacttctcggcagaacaaaagatgtggtatcgactgacctatcctaagctcggttga

SEQ ID NO: 10616 - DNA, 2079 bp, Pseudoalteromonas sp. BSi20480
atggcaaatgaaaagcagattgagcttacttggttaatccccgatttttctcaattcaccttaaatccacagacaggaacagagttaagtactcttttcgttgcgcttttaataagtgttaccgtagtgtttgctcttttctttgtctacaaatgtttagtgacgggagctaagcttaactggctatcaaaaatgctaaaaccgcttgaacgtgacgatgttgcaagcaaacgagattcactttatcaacaggctaagcaaaaagacaaaggcattggctttttgtggatggagttcgatgaaacactcgttgagattcaaaacggtgagcaggttgaacttcgaaacacacttgacgcaggtcacttttttaattcttataccttggctcgaagcgttactgaaaaccgcttgattgctgccgtgccaggtttcctgacagcacttggtgttatcggtacatttatggggcttcagttaggtcttgctgatttaaagctgggggctggtgttgatgtaaatgaaatgcaggaaggtgtagccggagttgtaaacggtgccaaaattgcatttttaacttcggtatggggcgttgctctaagcgtaattttcaacttttttgaaaaattctgtgaacagctcatacgtcgcaaaatcagagtaatagaagaccgtgttgattggcttttccccagaattcgtcctgaagagcaactacagaaaatttcagaaaatagctctgaatcgagagaagttctgcaaggcttagctgagcaaattggtgagaaaatgcaggaggctatgcttactgcaacacagggaattcaatctagcttagaaaacagtctctccgaaattatggctccggctattaataaactggtagatgaaacttccgaaggaaaccaaaaagctctggaaggtttacttgaaagctttatggatggcttcgggcaagcaggtaaccaacagcgccaggcacttgatgatgtctcatcaaaagttagccagtctgttgatgctatgcaaaccactatgaatagctttgttgagcaattacagaagacgcaggctgactcaggcgaacgtgaaaaagccctgattgctgatatttcaaatcaggtaagcagcctgtcgtctcagtcagaagcgattcatcataaactatcgtctttcgtagagaatcaaatcggtgaaatgtctacacagatgaaatctcgcgaagaggcttcggcaagacgagatgaagaattggtaaccacaatcaaatctcaggtaaatgagcttgttgagaactcgagaaaacagggtgaaacgttgagtaactttgtagagtctcagcttagtggcctgactaagtcatttgatgaaagggagcaacgttcttcgcagctggaaactgagcgaaatgctaagattgaacaacaaacccaagctatttctacactttctaatgaaatccttcagtcagtagaaaagtcggtaggcgatcaggttgctaccgttaaacaattaattgcccaagggcaaacattacaaaacagcataaattcatcagtcgatgccagtgcgcaggctacacaagctatgcgtgaatcttcaacagaactgcgtgtttcagcagataatatgcgtgttttaagctctcatgttaacgacgcaggtaataagttgtctggtgcaattaaagaagcggtggaaagcacggctgatttggcaaaccagaatcagatgtctgctcaaagaatggaaaacctacgtgaagagttaatgaaggatgtttcgaggtttagtgaattgactacacagcttaatagtttgattgaaagtgctggttcaacattctctgaactcaaagcaactcaaaaagagtttatcggcgatctgagaggcgaagtagaacaactcagcagcaacatgactcagatgctcgaagattatgcgacacaagctaacggtcaaacggccgaacatttaagaatttggtctcaatccgttacggattattcaacgcaaatgaataatgcgattaaagcgctttccagtgttgttgatgaaatgcaggttaaattggggtaa

SEQ ID NO: 10617 - DNA, 732 bp, Pseudoalteromonas sp. BSi20480
atggataggttatttaactgcagaggctcaaaggtcgatgaagaaaatccatactggatgtccttttctgatttgatgtcaggcttgttagtgatttttattctggcggcggtagcgctaattattgagcttacccaaaagtcagagaaaatagatgccagtatcgtagagcttaaaaaagcagaagaagctcgaagaaacattcttatcgatattcaggaagaattggctgaacaaaacattcacgttgaaattgttgagaacgatacggttcttcggatccctgaaagtacgctttcttttgagtctgcgaaagatacgctaccagaagatgaacaaacacaggaagaagttagggcaattggcatcgcgctgcataaagcgattactaccaacgagcgttggaaatatctggataccgtgtttgtggaagggcataccgacagcgttggtatatggtaccgaggaaaaggtaactggggtttatctgccgacagggcggtatcgatttggaagctatggcaaaccgagatcctggtagagcccaagctgaatgaactccaaaacttcaatggccagttactcttttctgtgagtggttatgcagatacacgacgagtcgatttaactgaagaaacagaagagcaaagagctcgaaatcgccgcatcgatatccgttttacggttaagaagcccaagcttgaagattatgaaaaagctaaagatgtctaa

SEQ ID NO: 10618 - DNA, 1431 bp, Pseudoalteromonas sp. BSi20480
atgaagttcttcttaagtgatgaatattatcgtaaaaatatgaaagtgcttaagggcttaacggctgagcaaagagcgattgccaaaaaagcagggacagataaccctaaattcgaagcagcttggtcaaagctttttaatctattatcaagaaaccgtttcgacctatttcgcattgataatcgatttgatgtaagagcactatcaattgctttaacggcaaatcaaaagattcgcagcgcaattaatatcgatcgagaactcctcagtgatattttggttgttatccctaatggcagtaacctgtttattgaatcactctttcagcattttttaagtgattttgatgccatatcagaacctgatgacattggtgactggttgtgtacagagcgcaagcgaaaagggttggccaaaggtatggaggaacaagtgctatgtgctgatggtccaacattcttggcgaaacaagcaattaagcgcgaatcaaccttcgagcaacatgtcaagcattggggactcgatcaatatgcttcaggtgactttgttaaacgggcccagtcagtctattttgtggagcagcttcagaatattccggtaaatcaaccgcacgagttgcttgaagaaatcagtagagaaactgttgctaatagccgttatgattcagaggatcttattggtcacgtggcattgcgcattttaatcgacagagcgccaacacaaaatgtgcacgagagctggcaaaatgccgtaatcgccattgcaggcgatcctcgcgtacccaaaaatcaccctcgttacattaaatggtggagccagctaaacccgcaacaaagtaaaaaggtacagagttggttatccaaactggatctcaaactattcctcgaagcgctggaagattactctaaaagtacccgtgacgatgacatgatgcgcatgttcccatctcgcaaacactttttggaggggatgcatgaggctggcacgattgtacatactaaactttatctctccaaaaaggcggataaatatattcgcgataattatcggccggaacacgtacctgattactcgatcgttgaagatggtgatcgctctattatttatgcagaactaaccagagggcacatgatagagggaagccataactgccagatttggttttataaaaacctacatgaaacggctcctgtcttacagtttggtaaacaacgattaagatacgacgatttaacggggcgcatgagccgtcagatgtacgctcgcggatgcagtgtatttgaccattttgcacatgtttcttcagacacttttaaatggcaacaaaagtccgtggatgcattgaaaaagatgggtgttcaaataaaagcttccgatgtgcttagcgaagaagactataaaaaatataagcggatgtacggagtaggataa

SEQ ID NO: 10619 - DNA, 3456 bp, Pseudoalteromonas sp. BSi20480
atgaaaaactggatttcatctttgtttagcgtaaaagaatcaagcgccaagtttgactttgaaatcagcaatgaaagcgtcgatttttactgccctgaataccaatttaacaaaatcaaatctggtggggcagatgaatatctcactgcacagttcgttgctctgcaaatgctcaccgaagaaggtaatgccgaagttatccctaatggttttatagtgccacatcacgttatttctgcgttagatgaagatgttttccagctattaaatttaccaacaagatggaatggtaaagccgctgtagatattaagggaactacctcaggcgagtcctttaaagtcattgtaaatgtagagtcaccttccggccgcatgacggcagcttataaacaaaatgggagtattctctcttttggtgacacgcaatttacgttaactaaagcaatgttcgaggttttcacggcacttactgaacattcgaagtcagccaaaagtgaatcggataatcttttgctattgcatagcttgcagcaagctcaacaggcgggggcgaaactctctttaagccacttcgataaactcgaaatacatgtaccagacaagattgcagtagaagctgagcttgatcctcaaggtaatctcattcttaccccaagtatgggccaaaagaccgatcacgataaacttcaacgtgtactagggcagttacaagccaaaaatggccgtaccctaaaagtgggtaatgagattattctctttaacgagaaaactgccaaagccgccaaagaaatcatcgggcacagggccattccgcgctctcaggtacaacagtttttaaaagcccctggggcgtttttggatgcttcacttgttgatctggatgtcggctttgcgcttcgggtaaaaggtgccactcgctttaaacacgcttactttggtgaaaccgacgagtcgggaatcgattggtttggtcaaaaccatgcagccggaaagattttgccaattagtgcagttaccaaagaagttaaaacacaggaagatctttttcaattacagcaagttattaacgatgctaaagcaacaggcgcgacagaaattgtctttgagggcaaaaactacgatatcggtagtgaagccgacataacgcaaaccctctccaagctgcaagataaaattaacaaccagccagaagatgacggcgaaaaagagccgaactctcccgatgcaccaaatgatgatgagaatgttgatatcgacgatggaccaatcgttatcgatattgccctcaatgatgacgaattagacagcccctctaagctggttgaagaagcgcttaatgatgtgttgtacagcgaagaacttgactggtcgaatcataagcgcacaccattcccgcatcagctagtgggcgttaaatggatcctcggactggaagaaatggctcgccagaaagagctggttaatggtgcattgttggcagacgacatggggctgggtaaaacctttatgtcgctttctggcatagaccattactatcggttgtgcgaagaggcgggcgaaacttgtcgtccaacactcattgtggcaccacttagtctactagaaaactggaaggacgaagtcatagaaaccttcaatgaatcgccctttagagacatcgttattttacagtcagacggcgacttaaacagtttccgagatggcagtgccgaaactaaagcttctaatatcgatgaagaatcattcgagcctcgctattcccttaaattcggcgaaaaatatgggccggatcgcttggatttaccacgccggttggtgatcaccacctatcaaacactgcgtgattaccagttttccctgtcacaaattgactgggggttggcagtattcgatgaagcgcaaaacattaaaaatcccaatgcgttgcaaacccgggcagccaaaggcttaaaagccaagtttaagctactagccaccggtacaccggtagaaaacagcctagctgatttttggtgtttaatggataccgcttgtcccggctatttggattcttatcaaacgttcaggcaaacctatatcacgcctatcctgcaagcagctggggatgaagtggatagagttagggcaacccttgggcgccagctacgggaaaaggtaggggcattaatgctgcgtcgcgtaaaagaagataacctcgaaggtttaccgcaaaagcatatgctggtagggatagagtcaagtgattggcaatacgaacttaagctacatgccattatgaccgcctatcagcaaaaagtgtacgatggctctatagaagcgcagttagaagatgaaaacagccatgtgctaacaactttaatgcgcttacgtgatagctcgctgcatccacgcttggcagacggcggtcgcttagacgcgccgacatcaaggcgtgaaattaaaaccctgttcgatgaatccgccaaaatggccaaaaccatcgaagtacttaacgatatcaagtccagaaacgaaaagtgtattatctttgcggtaaacaagcgcctgcaacgttttttaagtattgcgttgggcagctactttggacttgggccactgcacgttatcaatggcgatgccaaagcggtagttaaaaaagccggcgccttaagccgtaaatccatgatcactgactttgaggccaaagaaggctttaatatcattattatgtcgccagtagcggccggtgttggcttaacagttgttggggctaacaacgttatccactttgagcgtcactggaatccggcaaaagaagcacaagccaccgatagggtatttcgtatcggtcagaaaaaagacgtaaacatttacgtgcccattctgcatcatccctcgtttgagtcttttgacgttaacctgcatagcctgttatcacaaaaatcgatgcttaaagacgcagtggttacaccgggtgaagtaatgcctaatccaaccggttccgataagcatagccttggagccgatagcattattacatttgaagatatgcaacgcttaagctggaaacagttcgaagcactgacattagagttactttctcgtgaatatcaggccgacagtgcatggctaacaaaagacggttcagactttggtgccgatggcgtgttaactttcgcgagcgaagccatactcattcaggctaaacataagcaaggggcttataagggtcataacgctgtgcaggaaatatccaacgctaatgcaatctatggccagcacttgggccgggaaattaccaagcaggtatttattaccaatgctacccagttggctaaatcaaccagggaaatcgccggtaaactcaacgtcaccattatagacggcaacgaattaggcgagctctgtgagcgccatctaatcacgtttgggaaagttctcactcgtttgtcaaaagaacgctacgtgatccaataa

SEQ ID NO: 10620 - DNA, 1983 bp, Sphingobium sp. MI1205
atggacgaaatggtgttgttcggaattccggtcataccggtgcttgtttttgcggttctcgttagccttgcatacgcgttcgtccgctacttcttcattcccgcgaagcggctggatgcaagcctaaagcagatcatcgagaacgtggaggcagcgcgggcgaacgggcttcgcgacctctcgaagtgcttcgaacccgaccgtgcgatcgccgccatcttcaacgagtatcgcgagacgctccacgttcagaaggatctcgacacccagacgggcgagatggtcgagagggctgtccgctcgacggtgccggctgagatgtttctctcgccacacgctgtggtggacaatcgcgtccatgccgagttcttcaagcatctgcccggcattttcaccggcatcggcatcatcgggacattcaccggccttctgacgggcttgagctccttccagatctcggacgattccggtgtagtccggaacagtctgaccgcgttgctgcatggcgtgagcgaggcgttcgtcgtttcggccttcgcaatcatccttgcgatgctcacgaccggactggagaaattccggctcaacagcctctaccgcaaggtaacgcagctcgctcacgagatcgacgcgacctatgaggccggtgcaggcgaggagtatctagctcgcctcgtgacttcttcggaggacgccgccagtcagaccaagatcctgaaggatgcgctcgtcgcagatttgcgggagatactcaccgaccttgccgatcggcagatcaacgcgacggtgcagcgctccaacgaactcggcacgactatcgcaggtgcgctgaccgacgcactcaagggaccgctcgaccagatcgccggcgcggtgggccaagtcagccaggatcagtcgtccgccgtgacgaagctgctgaccgacgtgctcgcgagcttcagcgaccgcttggagaacatgttcggcacgcagctctccggcatcggcgacatgcagcagcgcacgattgacgcgatgcagactgcggtcttgaaattgcaggacctgaccgacaacgtcgaggctgccgggacgcgagcttctgacgcgatgtcgaccaagcttctcgaggttgttcaggcggtcgaggccaagcaggccgcgatgtcggaggagctccgcactgtgatcgaagagatccgctcatcgacgggcgagatgcaggaggcgacccagacccgcgtccaggacatgctgactgcgcttggtgaggggatggcgcaggcgatctccgccattgagagacaggcggctgaacgctccaggcttcaggccgaggaagacggcaggcgtgctgaggcggcggctggccacgtcgggcagatgcggcaatccgttgatgcgatctcctccaacgtcgatggtctcgtggcggcgatccgcgaaatgaccgcgggcgtccaaagcgcgacgcgggatgcgttcgttcgtctcaacgggggggcggactccctgctggccgccgctaacaagctcgagaattcagggcgcgaggtcgttggcgggttcgaccgcatcgcgaatgtcaccactggcctttcggaggccgcaggcagcgttgccggggcggctaggggcctcgactctgtcgtctccgattaccgatcagcccgcgacgcggttgccaccatgatccaggatctccgcgctaccgtcgaaaatgcctcccgcgaggcaagcctgaccgcggatgtcctcagtcggatcgagggcgcaacgcaaaaactggcgtcggcgcagtacgaggcggacggcttcctggacgaggttgctgacgttatcggcaagtcgcacgagaagtttgcggaaggcatgcgaggcacggtcatcgaggcgaaccgggtgtttcactcccagctgtccagcgccaccggtttgctcaaggaggcgatccaggaactcgaggcctccttaccttcgaccggtcggcaggcggcgtga

SEQ ID NO: 10621 - DNA, 711 bp, Sphingobium sp. MI1205
atgttccagcgcgttactatggggcatcgtggtcgcgaggagggcgagaaacccttctggatctcgttcgccgaccttatgactgccctgatggtgctcttcctgctcgtcatgagcgtggcgctccttgccgtgacgcgcacgatttcggagcgcgagcagcttgaggccgagaggcaggcggagattgtcaagctcctcgaccgcatcgacaaggctgcaaagaagcagggcatccgcgtcgatcacaaccgtgccgtcatcgacttcggagatcgtgcccgcttcgattcggcgagcaatgccctcagtcccgaacaggagcgattgctgcggtcgtttgtcccggaggtgctcgcgatagcgcgggacaagggcgggcagcgatggctgaagcggattgtggtcgagggctttactgaccggagggggagctatctctacaacctgaacctcagcctccagcgtagccagcgcgttctgtgcgcgctgatggcgcggccgcaggcgggcgaacggcccatggatcgacgcgagctagaggagatacggcggctcttcctcgtcggcggctactcctcaaattccgcgaaggcgtcgctcgacgcaagtcgacgcattgagctgcgcctggaattcttcggcgttgatgaaccggcggctgcacctgtcgacgcgtttgaaggcgaattcggtacatgcgccctctga

SEQ ID NO: 10622 - DNA, 1683 bp, Sphingobium sp. MI1205
atgcgccctctgagcccgagaatgacgaagctgcagcagcggctggccgacgttggcgctgcggcgttccgcgacatgccggagcccgacctccgaatcttgaaagggcatgtgcagtcacttcaggccatgctcagcggggcaggcgcgggtgcgggcgcttcgaacgaccggatccagacggagatactgaggtttcgcgagaccggcaggctccatgatgttcggtcggcacgcttggtgagctggggaacgcgcctcaggtctgtaggccagccagcgctaatagaggacggtgaacggttcgatccgctgctgagtgagattgatgccttccgatcgatgccccggccatacaggcggtgctggcggggcctgctcgatggctacgtgaactacgatccccgaaatgctcgtggtgccggtgatcggaactggcgggtcctgcgggaatatctgaacgacaatcttccacagctcgaacgctccgggcaggcaccggactggctcgccgcgatcgacgaccatgctaacctgctgactgaggatccatgcacgcgctacggggccgagcttctcaccggggaggggaatcccctcgaggttcttcgtcacgatctctccgcgggtgacacttcgtggatcggccagcgcatattcgaggcgcagatcgaggcagcggtaaggttcgatgaccggaagttccgtgatgttctcccgcgcgtcatcggtttgatcctggagcatgatgtgctcgcggatcacggcctgtcccgtgttctagatcgctactccgaatgttcctcgatcgaggtcgatccggcgctgtgtgagacctccgtcggtcgatggggcaatccgtggctcgagcgcaacgacacactttggacactggtccgtccggacacgcgacggatggtttcctcgtggcacaaactccggctgatcgaggacttcttcaacctcctctcggccgatggcatcaacgaccagcgtcgcatcaacttctggaaacgccacgttgatcagatcagcgacatgcatttcgcgcttggcgacgccgcctatcgcgatccgcgtccgagcttcaagaccctgcggcagatgatgaagggccgcatgctcaaccttacaaacggaggcgtttccagcaacaatgccttcatcatgcgcatcgccggccacgtctacgtggagttcggagaggagggcaacgctatgttcgccttcgatgctgccaagctgccgttcgatctctcgaagttgcaggtggcgggaaacaagaccgcgctcaagcacccgagcaacgtcgcgcgtatcatccacaaggacggcgtgggtgaacggtgggagcgtaaggccgatcggctcatcgcctccctgtcagccgcacgaagtggctcccaggttagtcatacgacgccgtcctacggcgcgcgcccatcagcgccgccgccccctatcaccatatcctccaacccctcaccagccccgcgacccgcgagcgccgactccgaactgttcgcgttcttcgccaagcatgggatcaagacagcggattcgcgagataagggaggttcgctatgggcctacgcgccgcgcttcggtcctgcgacgaacgaactcacccgtaggaacttcgcttgggcggagcgtcgcggggcttggtatctgcgctcatga

SEQ ID NO: 10623 - DNA, 3225 bp, Sphingobium sp. MI1205
atgatctggggtaggaaggcggccaagacggaagtgcgccaggtggccccgcgatcgcccgtcgttgaggatggtggcattctcctgccgagcggtggcgagccgacccccaaatcgaaggcagcgacggcgcttctcgaccaattggcggatgaggggctggccgagcgggtggaggatggtcaccgcttgaattggtcccagctcttcgtgctgttggaggacgcggaggctgcggaagagctggcgatactcgatcttccatcatccactgctgcggtcccgaagattgtcagccggaagtctctgaccgatagagacttctcggtcgcaatagacggatggttcgataccgaccgtcgaccaatgtccggcgtcaggctcaagggcggtgccctcgaagccgacggtggcgttcagctcgtcgctccaggcgtctggaaccttatcgagcgaatccggcggtttgcgcgccgtccggaaggggaacggaacgaagctgaccagcgccgggcgtggggagagattcgtcagttggcagtagccgctggcgcctcgctcgacgacttcctctatcgaaccgtggttctcactccggaccgactgcagatggcgctccgtcgatcggatggacttggcctcgtggagatcgaaccgtggttcgagggggcacccgccgactggctcgaggcgtttgataagtcgggtcaggtgcgtgacagatacgacctaccaacgccgcacgggatcatccaggtcatgatctcgccggaggtcggcaccgtgctgcgggaggtcaaacgcatgcccggtcggcgcgtggctggcgagcgggcgcaggcgttcctcctcaatcccattgcggcgctcggaccggacgcggcagctgtcgtcgacgaggaccagttcgaggaggcaaagcagcaggcgggcatcgtgttcgaacggttcgccgcggtgacacctgaaaccaatggagaaggtgctttggggctgctcatcacgagcgggtcaggcgacgctattgagacgcgcgagatcatgctcgaggaagccgacgtactcgagttcatcgagggcgtagagcggaaccttgatcgtggcctccagctgtttgcttgggacgaatacgagttcgagcttgacggcgatagcaggctacactgcgaagcgcttcgccgggcgctcggccatcgcgaggatggggtcatcacgcacggccagatttacgacctctccggctattcggagcgcgtcgagggaatcggccaagaaaagtccttctactcaccgcacattgccaagcgcgacgatggtgagggctggttccccgagaatctagttccgatgatcggatggactgatccgaacaccgaacagccgtgcgttctgccgctgaccgacaagctatcggccgaactccgcaaggggttggagatggccaaggcgaaaggagccacttccgtatccttgaccgggtgccccactcccatacccgtccgcgaggcggaggcgatagtttctacgttcggacaggtgcaggatcaggcggcaaagggcaccttcaagccagagtctcctgtccgtcgcggcaaaaagcctacgttgatcctcaagagcaatatcggacaggtcgactaccaggaggagcggctcgcggcgctagccgaaaagccggctcccgcccgccttccttccagtcttcgtcccggcgtcgcgctgaagcaccaccagcttgaaggtcttgcatggatgcaacaccttctcgcactggccccggataagtgccggggcgcactgctggcggacgacatgggacttgggaagacgcttcagatcctgagcctcgtcgcgagggcaagggaagaggatcccggtacgccgccagcgctggtggttgcgccgctttctctcttggagaactggaaggaggaggcagagaagttcctcgagtctggaacgctgaagatcctcatggcttacggcgagggcctcgctggtctccgcgtcgatcggtcctcggtcgacgagcagcttcgccgggagggtctggtgcgcttcctccggccggactggcggggtgatgccgacctcgtccttacgacctatgagacgctgcgcgacctggagttctcgttcgcgcgcgagaagtggtcggtcatggtctgcgacgaggcgcagaagatcaagaaccccaacgcggcgatgacccgggctgccaagaagcagcaggcgaagttccgtatcgcctgcaccgggacgcccgtcgaaaacagcctagtcgatctgtggtgcctgttcgacttcgtgcagcccggtttgctcggcgcgctcaacgagttcgggtcgacctaccgccgaccgatcgaggcgaagagcgacgatgatcgggtgaaggtggagcagcttcggggtatcatcacgcctcagttgctccgccggatgaaagcagatgtcgcgaccgacctgaaggcgaaggtcgtggacgaggaaagccgcagtttggatatgagccctttccaacgcggcctctacgtcggagccatcgacaccttccggcgatcgggggcggcaccggggagccaccttgcacttctccacaagctcaggctcctttgttccgatccggatgaaaacgcgggtagcgcatatgatccggttgagagctaccgagcacggtcaccgaagctggattggctaatagaagtgcttgaggtaatccgcgatcgcggagagaaggccatcgtcttctgcgagttcaaggcgatccagcgcttgattcgacactatgtgcgcgaggcctttgatgttcccgtcgacatcatcaacggcgatacgaccgccgtggcgagcagcatcgatagccggcagaagaggattagggccttccaggaacagcctggcttcggcgtgatcgtcctatcgcccgtggccgtcgggttcggggtgaacatgcaggcggctaaccacgtgattcatttcacccggacctggaatcccgcgaaggaagatcaggcaaccgaccgggcctatcgcatcggacagacgaaggacgtgttcgtctactatccgaccgtgtctgctggcgacttcaagacgtttgatgttaagctggacgagcttcttgagcggaagcgctccttggcgagcgacatgctgaacggcagcggcgagatcggtctacgcgatttcgacgtagacgagctaaggccggtcgatccctga

SEQ ID NO: 10624 - DNA, 1620 bp, Caldicellulosiruptor hydrothermalis 108
atggatacttcacaaatgatattcgatataatcttgagtttgtttttttctatttctactgatacatggtgcttttttataattgttgtagctactgggttgtttgttgtttcaaactttatttttacatacaaagtggaatcacacaaatggataaaagtaaatttcgtttgtaaaaaactaaaggaaattactaacaagataacagttaatgcaaataacgcagaactatcgttagatgacgttgacaaaataatagattcatgtaacgaggacataataatttctctctggaaaaaatatagagaaaattccaaattcagcccagaagaaaagattgataagcactttaacaaagcaaatttaatcgatgctcttacaaacagaaggttagccgaagcaacacctggattgctaacaggtcttggtattttaggaacatttgttggacttggaaaaggattaagtgatattaacattgcaaccggtgaggctatgaaaagcagtatagaaaatctaatgattggtttgaaactagctttttatacatcaattgtaggcatatttttctctctagtctggacgttagcagatagaatacttttaacctcacgagtcaggatcatacaccaatttcagcaggtaatcaaagatatagtcggagaagaaaataagagttacataaaagaaatacatgatttgttggaaactcaaacatcattattgaaaacgatagcaactgatatatcaacagagctttcgaaggtattaacagataagataaacaatgaaattctacctcagcttttttcttacaatgatgaactctataaatcaatcattgagcctgcgataaataatattgcaagcgtgattgaaaacttctcaaacgtggcgtctcaaactcaagttgaaggaatttccaaaattgttgataaatttgtaaatgagatgtctggtgctttgagttataaatttcaagaacttgccgccacaattgataatatttgcacctggcagcttactctaaaacagtctttagatgacttcataaagtctgtcattgaaacgacacaaaatcaagtaaaaatcagcacagtttttacagatattctgaatagtttaacttcgaatcttaaggtaattgaagaggtaaacaacaaagcctcagaaaatctcgattttatagtaaaagtccaagatacttttgaaaagcaactagaaatgctcagtatagaattagagaagatcaaagaagagtattacaaacttgttgaaaagattgaaaatacagatgaagaaatcagtatgaaaatatcaaacttcctggactctgtaaacaaagtagaaaatacaataaaagacataagcgcctcattgacatatataagcgacgcaataaccgcatcatctcaagattttatgcaaagagtaaatgatggattaaaaacgggactaaattatatcgattcggaattagaaaatattacaaattatctgtttcgcctattaagttctatgcatgatatggtcgaggatttagataggtcactgaaaaacttctacgatagtttcaacaagacgttagtagctatagaaacactttcaaaaaagaattaa

SEQ ID NO: 10625 - DNA, 726 bp, Caldicellulosiruptor hydrothermalis 108
atgcaggattttgaagaccatgaaaaacctcatgattattggatgtcatactcagatatgatggctgccttgattttgatgttcatcctgttactcatgctcttgatattttcctattcagaaatactgcaagccaaaataaaagaaagggaaaaattaactgaaaatctcaaaaaaacagaacaaaaattagaatcaattgtgggaataagaaaaaaaattgtagaggatttaattaaggaattcaaaaattctaaactctcgctaaaaatagaccctcaaacaggcgcaattacattttccgaaagtgtgctatttgaatataacagctacaaccttacacaaaatggaaagaaattcttgcagcagttcattcccaaatatattggaattttattatcaccacaaaataaagacaatatatcgcaaattataattgaaggtcacacagataacagaggtgattacctatataaccttgaattatcgcaaaaaagagcttttgaagtagtgagatacattctaagtaaccagtttcctgattttccccagaaacagttgctcaaaaaatacataacatcaaatggtcgttcattcagccaattgatatataaaaacggcaaggtcgatcaagatgcttcaagacgtgttgagttcaaattcagactcaaagaggaagaaatggtcagacaaatggaacaaatcctaaagggtgcatcaaaatga

SEQ ID NO: 10626 - DNA, 2820 bp, Caldicellulosiruptor hydrothermalis 108
atgtttttctttaatcttttcaaaaagtctatctctactgagatagattattgtaaagatggtattatcacaactattttcttaaattttacaaacaagaaaagacaaaatatttcactaccttttgacaaaaaccatattataacgaaatatctgaagaaactaacaagtgattcataccagaaattgataattctgcaacaattatggaacgatgaaataattcagccacataaagaaaatgcatatatcatctcatatgatagcttgtataaaatagagaatcaggatagaatactgaccaacttaccaagagacatcaaaaatttaaaaataaagatacgtactgaaggtattttcacttctgttgattttaggcttaaatatgatttatatctttccagtggtaagaaaattgacaaatatcatattatagaaaatgttttgttttttgataacaaggcatatctaatggaaaagcatgtgtatgatttgatttctattgtaaacaaaatcaatcaagaaaaatcaaaggaaatgttggcagaatatataagtctactgcagtccaaagcaaagtctgaaaatgttattctcgaagattacttaaaaaacgaggaatacttgtatgtagatgaagttgattatgtaatcaaaacaccgaataaagacgaaattgcaattgaacctgttattattcaccaaagtgaaaaaacacaagaaattaatcacatttttcatagcaaagatgaatatcttgaaaaagtcaaaacaattccaattgggtatcgaagaattagaatcttttccagtaacaatgctgtggaaaaattcaataccataaaaaggcttcccaaattcaaaggacccgaaattccaaaactgattgaaaccccccatttgtttttgcccgactggatagatatagacgaattcagtaaaagggttaaagaaattggtataaaagtttatcatataaagccaattataaagctaaataaagacacaaaaacaggtttattcgacttagtaggagaaattaagtttgaatcatctgacaaccaatattccgaagatgttcagattgacgaaatcttacctattttagagttatcaaatgatgaatacgtaaaaataggcgataaatgggttagaaataattacaatgatattaaaaatttcaaaacaaaaattgaggaaataaaaagcgtatatgaagaaacaggttttaaaataccagaaagtgaaattaaattcgtattagagatatttgataatatagctcatcttgaatacagtgaaacagttatcaattttaaactccaactcacaaaagaagaagtagaattcatcagaccaaaattcatcagtgaaaatattgagattaaagaatttcaaaaggaaggtatcaattggcttaaaacactgtacaaaaactctattggcgggatacttgctgacgaaatgggcttaggaaaaacgtttcaagtcattgcttttttggcatatttaaaggaaattgaagaattgaaaccatcgctaatcattgtacccaatacattaataaaaaactggtctgacgaaatagagaaatttgctccgttgctgaaaaacaatctttacattcaccacaataataatagaattagaaaaccagaagaaattgcaaaaaacgacattgttataacaacgtatgacacgcttgtgaaagaccagatcattcttggtaagatagattggaaagttgttgtgtgcgatgaagctcaatacataaaaaatcctgacgcttacagaacaaaagccacaaaagcactcaaagcaaaaacaagagtagctttgacaggcacaccacttgaaaatggactaagcgagttttggtgcattatggatttcgttcaaccaggtttattgggctgttatcataatttcaaagagagatttgaagatccaattgttaattcagatagtaatgattctgaaaagttaatagagggacttttatcaataattaaaccttattatctcaggcgaacaaaggataaaaatcttcatggacttccgaaaaaattcgtaatttctcaccgtatcgaaatgacagactatcaaaagatgctatacagtaaaattatagctgatttcaaaaaatccgaaaataaaaagcaaattcttcttgatactcttcataagctaatatacgtatgtgattttccagaaatatcaaacgacgatatacacaagaagaatatcaacaaagtggtcaaagagtgcgcaaaggtgaaaaaactaattgaaatacttgatgaaataaagcaaaaagatgaaaaagctttgattttcacaaagtttaaacctgtccaagcaatgctttcatctataatccaacaaagatatggcttgtttgtcaacatcttgaatggtgaaatacgggatagctctcgccgcaaacaaataattgacaattttaatcaatcagcagaatttaatgttttaatcctcaacacacaggttggtggcatagggctcaatattacctccgcaaaccatgtgatacactatactcgggaatggaatcctgcaaaggaagaccaagcaacagacagagtttacagaattggtcagcaaaaagatgtcaacgtttactacttaattacaactgctcctgacttggtcaaaaagacaatcgacgagcacatacatgacctacttcaagctaaaaaagaattgttcaaagaagtaattgttccaaacaaatttgaaatatcacttgaagaattagaagaagtattagatttggatagttttgttgaggctaagtgttaa

SEQ ID NO: 10627 - DNA, 1383 bp, Prevotella amnii CRIS 21A-A
ttggtaggcttgggattgttaggaacattcttaggcttgacattaggtatactgggattccattctgactcaagcgaagctattcaaggtagtattcaatcacttttaggaggtatgggtactgctttcttgacatcgttatttggaatgggattttcctgctattacatttttcaagaaaagcgattgatgaatacttttgaaaaatatcttgacaacatatgctatattcttaacaagaaatactatttgtccgaaaatgatttcttggctgcttatctttcatttaaagatgagcaaggaaataatgtatatctcagcaatgcagtgcgagatatgtatgcagagacacacaagcaaacaggttttatgggaactctagttgatgacttgtctgatgcattggacgaaaagttatctgataacattaatgagaaggttattcctataatagagaaatttgtcacgacattaagcgacaaattggatatgcttaaaacttccatacagtctcctgctgaggatatgacccacactattgttgatgaattgaaagccagcatgaatgatctgatggagaagtttggtacagaattgtctggctccgcaacttcaaacttgacatcattaaccgagaaccttgccaaagcaagtgattcattgtttgatttacctgcgcaaatgaaaaatatgtcagagcaattggcagtggcttttggcggtattcatactacaatagaagacttggagtcggccgttaaaaagatagtagaacaatctgccaactcgaataaagatttggttgagagggctgcttctcaatatagtcgaatggaggaatcacatcagcaaatttcgtcacaaacggatgttctaatagctaactttaatgacatggttgacactttgaatacaaccgttaaggaagtacaaggttctatggttcagataaaagagactaagaatgctcttgtttctcttgttgtaagtctgcaaggagtgaccaataatatggataaagcttcaactcgcataaagaattctcaggaaagctatgttagtggtttgaaagaagttcaagaaaagtcatctacgactgttactaatataaccagtgctttacaattatcaaagaatacattggaagattattctaacaagttcggtataattcagcaaggattgtctggcatatttgcccatattaaaactgggcttgaccaatatagcacaaccgtgagccagagtgccaggacggtactgaacggatattcatcagctttaactgacggcatcaacaaattgcagcaagcaacgagtcatttgggtgatttagtaagtgagattaacgacactatagaatatataaagaaagaaaagtag

SEQ ID NO: 10628 - DNA, 693 bp, Prevotella amnii CRIS 21A-A
atgaggaaaattaagcttgctaaaagtgatgaaaacgacagtaatccattcagccaatctacaggtgacttaatggcttcgctgctttttatctttattttgctactttcttctttgatgctgcaagtcaagaagcaggaagacagtgaccgtgcactaacgaagaactatgcaaaaataaagacccagctatatatagacttggagcatgagtttaaagatagtttgaaagtttggaacgccgttattgactctacagaattggcagttcgttttcaagaaccatccacgctatttgactataataagactgatttgaaacctcgttttgctgcaattctgcatgatttctttccaagatatatggctttgctgtcgaaacctcagtacaaagacaatattgaagagataagaatagaaggacatacggacagttcgggtggttacatatataatatggaattgtcacaagacagaacgaggagtgttcttgctttttgtctaaatcaaataacaagaaaagattttgagtgggccaagtatgccattacggctaatggtttgtcttcaagtcatccaattataggaaaagacggtaaagaggatgccgaccgatctcgtcgtgtggagtttaaaattaggacaaatgccgaaaagcaacttgaagaaatagcaataaaaagagaaaaatag

SEQ ID NO: 10629 - DNA, 1380 bp, Prevotella amnii CRIS 21A-A
atggacaatatcaatgatttgttagacttccatttcaaggctgatacattcgccaaaatgggtatgaatgtcatcaatacaaatttgatagatagagttgaaaatgaaatttctaaactcaaaaaaatatcaaataaaattgatgcaatagggagtgatgtggataaatctattgacataaatcctattttggcatatattaataaaaaagaatctctgccagagctttcaatgaagaatgaaaagaaggttctgcgagctttgtgctattatctttcagagataaaaagtaataatgcgatagcatatatattgcagtcgttagaccgaaagtggcagaacagcttttattggggattgatagattatattttccagttttggaatcctgtatctcaaaatttctgtaaaattaggactttcttaaggaacaaacttaatagctataacggtacgaatccaaaatacatattcatcagagacaatatcaaatattttgaaaacaatggaccaataatgttgggtgtgaagctgaaatctgacaagaagccaattctttcgtgtacagaagttttgggtatgtccgagcaaaaaattacttacaggtatttttctgatgtgatatactcatattacaaatacaaatttgatgaatgtattagttatgacgaattagataaagtcctgaatttacacaacaattcgctaacagataaatctgtcatacctttgttcatagcaagaaagaaaaatctcacaacttcctggaaagaagcattagaatccttgtcgaaacagagaatcggtgattgtgaaaacgatgccaaatggtcgcttcctgttgaagtggaaacagagcgacacgacttgttgaaagaagcacagaatttgattcgtatttggacaaatgaaaaatatatcagtatatattttgagaagtgcgtatatgacccacgtcgtaaaatattttggctaaaatatataaaagatattgagaaaatcagaatagcaggttctcgtgtaacaaaacaaactatgagtacagatatgcgtttgatgcaattgctacatggaaagtttatattgggaacaaacaacacaaagagtgatacatcggcaattataatgcaaataagaggtaaaatatatatagaattttcagaaaaaggaaatgctttatatgtttaccaagaacataacttgcctataattaaactgttttcttgttttgccattcaaagtataaatagtcttaaaaagacgaatatgaatcaattgattgacacatcctattggactggatacgacaacgactatgggcgtatggttcatattggagaatgggagtatcgattgtcaaattatatatccagacattaa

SEQ ID NO: 10630 - DNA, 3273 bp, Prevotella amnii CRIS 21A-A
atgggagtatcgattgtcaaattatatatccagacattaaaagcaacgaatatgtatagttttgatgaggcaaggcaaatagtaagattttttaatgagcaaaatgtagcaatcaaagactgggatattcttcaaaagagtgtccttatggaattgtgcgacaatgggttggctacatatacggagaactcagtagaagttactcccgaaaatatctatcaattggatgaaatagagagaaaaatattagggttgcctaatgaatacccttatgatatgtatgtagaagcaaatggttctactcttacacaaggtgattttaattataaaatttctttctatagttttttcccaggaggttgtatattgccttacgaagttaaaggatgttttgttgttgttgatggggctacttatttattaagtaaagaacaatttgccttatacaatgcgatccataaatttaattcgctagatataagcgaaaaggacaaaagcaacaactttatccgctttttcaatataaaaggtttgtctaaattggcggcagctaagttagacagctatctcactgacactgatgtttgtgtgcctaacaaaataaaggttcttttggactataataataatgaaatgcatttgtcagcatccattgactcggaagattcctatcagtttacagaacgcttcaacaaaaaagagcaagtaaaaggaacctatcaattaaagaaaataggaggaaaacgtgtttatgtagtatttgatcatgataaagttgttcaattggaaacaataaaaaaatatgaaaagacagcagatcgtgacacaataaataaaattatggaatctcctgagagtttctttgacactaatttagttgacatacatgagttttacagtgatagagtcattgaaaaaggactttatcagcctaaatattactcttttatttgtccgtataagagtgagtgggtgccaggaattaaggttaatgacaatgttaatggatcgaagaatctatttttccctaaaaaggaagatattgaaaagtttgagtcaaaagtccaagaagctctgaaagagggtaaaatgagtgtcgaatgggagaatactcttttaaatgtcaatgaagtcttgccgcaaattacaaagctaaaagagaattgctacaatcaaaaggacacagcaaagtttaactctcccaaaggcacgaagaaaatatcagaaaatgaagtacttataattgaggagaatgcagaagagttaggatatagtgaacaaagtgtaaatatgccctgtactgttgaacattataattttcacgaatgcacaaacttaaattcattcgtcaaattaaagcagcatcaaatagaaggtgttgcatggttacaatttttatatttgaataaatataaaggttgcttgttagctgatgatatgggcttaggaaagactttgcagattttgtattttatagaatggcataggatgcaaaatgttggaaatattcataaaccatacctaattgtggctcctatatccttgcttgaaaattggcaaagagaataccaaaagttttttgtaggtactctcatgcaagtttctatagttatgtcaaatgacttgaaaaaaaaatttgctcccaaggacgtatcatggttgcaatcattggatttgatacttacaaattatgaatctgtaagaaatcgacaattcaacttctgtgcagtagactatgcttttgttgtgcttgacgaggcacagaaagcgaagacacctgggtccttggttacaaattctatgaaagcattgaaagctgattttaaaatagcaatgacaggaacacccgttgagaatacgcttgttgatttatggtgcatcatggatttctctattcctggtttattgggaaatgccagagagtttgctaaattgtatcaaaatccattaaaggacaaagatacagacattgagcaattaggtaaaaagttgcgctctaagttaggacgctttttcgaacgtcgtttaaaatcagatgttgcaaaggatttgcctcccaagcatacatacaaaaagaagcaggaaatgtctgacttgcagaaacggctatatcgcgatgaattaaatgctgttgttgccacacgtcagagtagaaaaactccacaaggaatgatgtttaaggtaatcacagcttttagacaaatatgcgacagtccttacctttctgtagtggattattctcaaattgatatagacaaattgataaatagctcatcaaaattatcggtaactatcaatatattagataaaataagaaaaaacaacgaaaaagttataatattcaccgaccacaaagatacacagaggttgttgcgaaatgttgtttttcgcagatatgacttggatatcagtattattaatggagaaactcctgcaacagcaaaggttcaatcgcagaaattaagtcgtcagcaaactgttgataatttccaaaacgcggaaggcttcaatattattattatgtctcctttggctgcaggcatggggctgaatataacaggtgctaataatgtaatacattatagtcgcttttggaatccagcaaaagagcagcaggcaacagatagggcatatcgaatcggtcagaagaaagatgtaaatgtatattatccgatgtctgtttcaaaagatttcaggacttttgatgttatcatagatgccttattggcaaagaaagccgaacttgccgatgccacactctttccaacagtgagaactgagataaagcaacaggaactctatgaaagtttgatcggagaatctgcagaaaagtcccaaaacaactatttggaagcagaaagtgttgatataatgaacgactataggttcgaggctttcattgctgccttatacaagaaaatgggctataagaccatattgacatcggaatgtggagacaaaggcattgatgtgttagcattaaatggaaacacaaattatgcgattcaagtaaaacattcaaagaatcctattggcattcaaggtgttcaagaggcaaaaagtggatgtgaatactattcaaataaatatggcttccaatttattccaatgctgctgtccaattcttctttcactaccagtgccatagatttagcgaatggaacaggagtaaaacttattggacgagatgtcctatttgatatgttattaagtaacaaagttgcaaatgaagatattatatcatgtgaattacatcgattagatagagcatag

SEQ ID NO: 10631 - DNA, 693 bp, Prevotella amnii
atgaagaaaattaagcttgctaaaagtgatgaaaacgacagtaatccattcagccaatctactggtgacttgatggcttcgctgctttttatctttattttgctactttcttctttgatgctgcaagtcaagaagcaggaagacagtgaccgtgcactaacgaagaactatgcaaaaataaagacccagctatatatagacttggagcatgagtttaaagatagtttgaaagtttggaacgccgttattgactctacagaattggcagttcgttttcaagaaccatccacgctatttgactataataagactgatttgaaacctcgttttgctgcaattctgcatgatttctttccaagatatatggctttgctgtcgaaacctcagtacaaagacaatattgaagagataagaatagaaggacatacggacagttcgggtggttacatatataatatggaattgtcacaagacagaacgaggagtgttcttgctttttgtctaaatcaaataacaagaaaagattttgagtgggccaagtatgccattacggctaatggtttgtcttcaagtcatccaattataggaaaagacggtaaagaggatgccgaccgatctcgtcgtgtggagtttaaaattaggacaaatgccgaaaagcaacttgaagaaatagcaataaaaagagaaaaatag

SEQ ID NO: 10632 - DNA, 1380 bp, Prevotella amnii
atggacaatatcaatgatttgttggacttccatttcaaggctgatacattcgccaaaatgggtatgaatgtcatcaatacaaatttgatagatagagttgaaaatgaaatttctaaactcaaaaaaatatcaaataaaattgatgcaatagggagtgatgtggataaatctattgacataaatcctattttggcatatattaataaaaaagaatctctgccagagctttcaatgaagaatgaaaagaaggttctgcgagctttgtgctattatctttcagagataaaaagtaataatgcgatagcatatatattgcagtcgttagaccgaaagtggcagaacagcttttattggggattgatagattatattttccagttttggaatcctgtatctcaaaatttctgtaaaattaggactttcttaaggaacaaacttaatagctataacggtacgaatccaaaatacatattcatcagagacaatatcaaatattttgaaaacaatggaccaataatgttgggtgtgaagctgaaatctgacaagaagccaattctttcgtgtacagaagttttgggtatgtccgagcaaaaaattacttacaggtatttttctgatgtgatatactcatattacaaatacaaatttgatgaatgtattagttatgacgaattagataaagtcctgaatttacacaacaattcgctaacagataaatctgtcatacctttgttcatagcaagaaagaaaaatctcacaacttcctggaaagaagcattagaatccttgtcgaaacagagaatcggtgattgtgaaaacgatgccaaatggtcgcttcctgttgaagtggaaacagagcgacacgacttgttgaaagaagcacagaatttgattcgtatttggacaaatgaaaaatatatcagtatatattttgagaagtgcgtatatgacccacgtcgtaaaatattttggctaaaatatataaaagatattgagaaaatcagaatagcaggttctcgtgtaacaaaacaaactatgagtacagatatgcgtttgatgcaattgctacatggaaagtttatattgggaacaaacaacacaaagagtgatacatcggcaattataatgcaaataagaggtaaaatatatatagaattttcagaaaaaggaaatgctttatatgtttaccaagaacataacttgcctataagtaaactgttttcttgttttgccattcaaagtataaatagtcttaaaaagacgaatatgaatcaattgattgacacatcctattggactggatacgacaacgaatatgggcgtatggttcatattggagaatgggagtatcgattgtcaaattatatatccagacattaa

SEQ ID NO: 10633 - DNA, 768 bp, Prevotella amnii
atgggagtatcgattgtcaaattatatatccagacattaaaagcaacgaatatgtatagttttgatgaggcaaggcaaatagtaagattttttaatgagcaaaatgtagcaatcaaatactgggatattcttcaaaagagtgtccttatggaattgtgcgacaatgggttggctacatatacagagaactcagtagaagttagtcccgaaaatatctatcaattggacgaaatagagagaaaaatattagggttgcctaatgaatacccttatgatatgtatgtagaagcaaatggttctactcttacacaaggtgattttaattataaaatttctttctatagttttttcccaggaggttgtatattgccttacgaagttaaaggatgttttgttgttgttgatggggctacttatttattaagtaaagaacaatttgccttatacaatgcaatccataaatttaattcgctagatataagcgaaaagtacaaaagcaacaactttatccgctttttcaatataaaaggtttgtctaaattggcggcagctaagttggacagctatctcactgacactgatgtttgtgtgcctaacaaaataaaggttcttttggactataataataatgaaatgcatttgtcagcatccattgactcggaagattcctatcagtttacagaacgcttcaacaaaaaagagcaagtaaaaggaacctatcaattaaagaaaataggaggaaaacgtgtttatgtagtccacccttaa

SEQ ID NO: 10634 - DNA, 2010 bp, Sphingobium chinhatense IP26
atgtccggcagccattcgcgagcgtggcatgcctcgactgtgcataagtgggagcccgaattgtgcgggcacgagggggactgcgtggaaattaccgaatggctcggccacgggctaatattcttctttacccaaattccgctcatcggcgatgcgatggcggcattcttggctgtggctctcattggtacggcctttgcgatttcctatcgctataagcgcgaacaccaccagcccctagccgccgcgattgaggcgcgcgtgcgcctgatcgacgaggtgaccggcggcagcatggcggacgccgatgccgcgctgatcgcctttgcgcgtcgattcaacgatgtcgacgagcaaatgatggaggcgaaccacccggaagtgcttccgcttcgccggacctgggaagaataccgcgaaacgatcgtcgatccgggcgcggacgtgttacagaataccgggcgccccgagcatttttttgtcaatattggcgagcaccatcgcgggcttaactggtttgcgaatatttttattgcgatcggcctgctcattacttttttgggcatcatcgcagcgctttcgactctcgatttcagcggcggggtcgacgcgatgcaggagcggctcaacgagctgatgaaagtggccggggccaagttctgggcatcggtaggcggtatcgtcgcttcgatcatcttgcgctcgtatgattaccgctttggcaagcgtatcaccgacggcctttcagcgctgtgcgacgcgctggaacacgggatggcctatcttcctccgcagcgcattgcggccgatcaactcgagcagctcaaggagcagaccccggcgcttcggacattttccgaacaattggcagcagccctcgacggcgcgctcgaaaagcagatggctccgatgatcagccatctggggtcgattcagcagggcatcgacaagatcagcggcggcggcggtgacgctgtccgggatgctattgtttcgggcgccggcgccgagatggcgggcctggccgaagccattggcgcgatgaccgcctcgatggcgacaatggcagaccgtttcgaaaagcaaaccggtgaagcggataaacagatcgaagaggcggtgcgccgctttggccaggcttctgaagaaatgcgggcggccttcggtgacctcaacaagaattttggcgtcgtcgcagaccgcatgcgcgaagaaaacgagcaaaccagtgccatggcccgccagcgcatggacgagctgctctccaatctggccaccgcgctggacgaaatgaaagcaggcttggccgcagcggcaggcaaaatgggcgaagcctcgaccgacgcggcgaacaaagctgcgcgcatcgggcaagaagtgctggaaacctccttctcgaactttgtcgaaaaattcaacgccactggcgcgccgctcgtagcgagcatgaagggagcgggcgatgcgatcgcctcgtcggccgacaggctggcgagcgcacagggtgcgataggcgaccacgcgcgcgccatagagcaagtcgccgcgcgctcgagcgatttggctaccgctttcgggactgtcgccaacgatgtcgaggcggccagtgcgcccgtgcgccagtcagcactcgcgatcgccgaagcggtcaaatcggttgagacggtggtggtgaaaaacgcgcaatcatccgaaagcgcacgcgaggaaatgcgcaagctcgcggcttcgctcaatcagactgcgtccgcagcctcgtcggcctggtctgaatatcgggcacggtttgaggaagtcgaccgtgcgcttggcgatgcgattcagaaaatttctgacgctgcgggcaatcatgcctcgaacctcaatgaccgggtcggccagatcgacaaggcgcttggcgaaggtgtcgctcagcttgccggcgctctcgaaccgctgacgaccttgcgcgacacggttgaggagctcgccggaattctcgcgaaccaaagccgggaagctgctgaataa

SEQ ID NO: 10635 - DNA, 729 bp, Sphingobium chinhatense IP26
atggacggtgtcgttcgccggaagcacgccgaagagggtgaaagctactttatgtcgatgaccgacatgatggttggcttgctcctgatctttatcatcctcctggcctacttcgcgcttcagcttcaatcgaaaaccgccgagctgaccggggccaacctgacccgggctgagatcctcaacgatctccaacagtctctcaaggacaaggggctgcaagtcgagatcgacaccaagacgggcgtgttgcggctgcccgacgacgttctgtttgacaaaggccagtgggaactgaccgacaggggacaggcagcgattagcaaggtggcgagcgccatggttgaagtcctaccgtgctttaccacgtcgaacctctgcaaaggggctcgctcgccgcatctcattgatgccgtttttgtcgagggccataccgattccgacgccatggtgggcgcgatgaacaattacggcctttcggtgcgcagggcggaaacaaccttcagcatgttgcagcgccatcagccggacttgcaggaattccgcaacaagcccgacggtgagcccgggtcggcgccgatcctggggctcagcggttacggtccggaccgcccgattgccccgggtgacagcgaagcggccaagaagcgcaatcggcggatcgatttgcgtttcctgatgaccacgccaagcgttggccttgatcaggatattctgaggcaaaagaaatga

SEQ ID NO: 10636 - DNA, 1401 bp, Sphingobium chinhatense IP26
atgagctttttgcgcactgcgatcgcccgcatggaagcgcttgcagccgcgggtctggcgaagccgccaacgacacagcccgcgttgcagcggcagtttgccaaactcggggcagcggggatcggcgaatcggagccgatcatcgagctcaagccgttcctgcgcgaagcggcgcatactggcgccaaacagcttccgcgctaccagctcaaccgggtgctgcgtggggcgtggtgcgatccggaatttgatgttttgggatccgccgccatcgatcgcgtggtcggagaaccgcggcgcagttcggaccaggccgtgatcgacggctatcttacctactttccctatgatcgccctattatgggcaaactcgcaagtgccgcgtcgagcgcggcgcagcggcatgactgggcgtggcgcgacagggccagacggtgggatatgttcgctccccagcagggcccgtcgaaaatggccttcgattttgtgtcttgcgacgccggcggaatggggcagctcatgcgggaaaccggtctgggggccaaccttgcggctagcgggtttggccaggcgacatttgcacaaacctgcgtcgcaaccgccaccttgccgcctaaccaggcgctcggctctcagcgcaatctgctcgcactcttcgaccgcgatgcgctcgccgggcaactggaactggttgtgcgtgcattgctggaaccgtgggtcagcgccaagcccgagccacagcaccgcaaggcgatctcggcctttctcctcgaccaggtcggtgatccgcgtctgcaacgcacccgctgggaccggatcgtgcgcgcgttgtccgagtcaatcggcgaagcgcgtgcccgcgaggttgcccaagtcttcaagcgctggctcaccgaagtggccatgcgcgagtttttccgcgccatagccaagacaacggaccgcccggatcaatgggcacagcgcgaaaaattctggatggcctatctcgatgaaggccttgtcagcgatgcttggcccgctttgggcatccgcgcccgcaaccagatcgagcatctcatccgccagagcggtgaacgccccgaattcgggatcatccaaggcggtccagcggcctcgtcctccatcatcatgcagatcggtgatctccgcatttcggagtggagtgacaatggctcatgccggttttggcgggacgatgatcctggcgcccctgcactgtacgcaaaggtctatgatggcggcaaactacggacgacgaggggccgaaccgattttgaatacgaatcccatgtgccggcaagcccaggttgggaaaacaagtttgccggcctgatccaccgccgcaccgccattgctcatccccgcttcggcaggggtcggacccgcgactggaattga

SEQ ID NO: 10637 - DNA, 1323 bp, Sphingobium chinhatense IP26
ttggccctcgcgcgttccttcgacagcgaagggcaaatccgcgaggaagccgatggcatagtccttcccgcgcatattgtcgcgcggttggacgaggccgatgccttcgccctcggcttgccgccagccacgcctttgacacttcaactgaattcgagcggctcactcgcggcgggctcgatccaggtcaacgccaagtgggttcgccgcggcggcttgcccgtccgggcggatattgctggcgcgcgtgtgcgcgaaggcggccgggtcgggcgtattccggagccaattttttcggtcttccaggcagcgatcgccgttaatgcgacgaccgatcccgatgaacgccgtgcgacatttgcgcagcttcgcgcacagctcggtgacgaaatcggcagcggcatcgaggcggacggttttctcgagcgggttcggattgcctatgcggctaatttctcgctcaacgccaggactgatcatggtcgcttcgacttcgacccggtgctgttttccagaaacgccgctgaaaccttggatggcgatcttgtcgatgaagaggcggcatcgctgctgacgcctgatgattgtcagcactttcatcgcaaatttaaaggtcaggaaggtgggcggcgcagctatcttctctcggacggaaccctcctgttcctcgacccaatgctgggtaaggctctcgatgttgtccgtaccaagcaagccagctcgtcgcaggaaaagcgcgagtttctgcgctcgcctcaacgaattttgcgcgaagagctgaaactagacgcgggcgatgatgatgaggcggcagaccgcctctttgtcgagacacagcagttttcagagcgggtcagcggcatcgaagtttggcagaagcccgtcctgccctggatcaagccgaagccgaacagctggcttccggaagggttcggcctgcggatcggcgatccgccgaatgcgcgccatctcgaactggctgccggtgaagccgaaaacctggccgacaccgtcgaaaaggcgatcgacgcgggtaccgaaacggttgcctggcggggcgaggacattcccgccacacccgccacgcttcagtcggcgcgcgcccttgccgatcttgagaagcaggttgccgcaaatgcggggcatcccccggcagacgagactgttcccgaagcgctcgaaacctatttcctccaggtcggcgagaatttcgagcaactcgactatgcccgcttgccccggtcgcaagcagcttctgagccctttagcgttcccgggacgccgcaaggcctgaaatcggagcccaagccccaccagcgcgag

SEQ ID NO: 10638 - DNA, 2724 bp, Methylobacterium platani JCM 14648
atgtccctagtatatggcagttggtgggtcctctcccgcgttactccgttctcggatgtccacgtcctgcggtcagtcgtccaggacgcactcgcaggatcgtatgatcggctgagcagccgggacttcgccttcgcactcgcctctctcgtcgtgcaagccgcgggcgcgctcgccgttgccttcctaattgcgcatgttgtcctagtacgtctcgcgatcgccgtcgcgcgtcgtcaagtccgtcgcttgcgcggcgtcagtgactttgcggtcggctattccgacctgacacggatgctcgagcgaaacgccgtcatcgggcacgcctggggcgagttcgccgagacgctcgttccggacgaacgtgcggtccgcaacacggtccggccccagagcttcatcaacatcggggccgcccgcgagcagttcgccggcctgaagatgatgaacgcgatcccgggctacttcgtcggcctgggcctgctgtttaccttcatcggtctcgtcttcgccctcaacaaagctgcggcgagcacgggcgcaggctcagccgaggcgatgacgcactctctcaacgaactgctctcggcggccactttcaagttcggcacctcgattgcaggtctcggctcctccctggtcctctctctgctgttcaaggtctacacgatcaccatcgaggccggctttgatggcctgtgccgggacctcgaagcgaggctcgtcttctacccgccgcaggcgatcgcggccgagacgaaggtcattctggagacccagcgcgatcagctcaaggagatcaacagcgagcggttcttctcgcggctcggcgagagcgtcgcaccgggcatccagtcggcgatgacgacggcgttccagccgatggccgagcagctctccgaggcggtcgggcagctgtcgcagaccagccaaaccggcatggacgacatgcttcagcgcttccagaacgggctgcaggacggcgcaggtgccgagctgcggcagctcgcggggacgctcggtgccatgcagggcgcactcgagggcgtccagcgcaacctcgccggatcaggcgagcacttctccaagcagctctccgatgcggcccacaacctcgagcgcctagtggcgcaggcgggtgccaatctcggtgcctcggcagacagcacccgcacggtgctggaggaggtagcccagcagctgagggccacgttcgagatggcgaaccggcaagtcggcgagaccctggcacattccgcaagcggcgctgcaggcctcgtcgaggacgcgatggccaaggtactgacgcggctcgaggcccagaccacggccttcggcgacacgatcgcggctctgcaccaagcgacagcctcgcaagctgaaggacaggcgcgcacgacgcgcgaagccggcgagatggctgccgctgcggccagccaagccgcccgggacgcagcccagaccatgcacgggaccattggggccgtagcgtcctcggtgaccggcgcggccgcccaggccgagacggccatggtccagatggcgacacggctcgacacccagatgagcacgatcgtgggcgccctcgccggcctgcagcagagcatggcctcccaggctcaggagagttcgcgcgtcgcgcgggatgccggtgaggccgccgcaaccagcgcctcgcgggccgctcgggacgccgcggaggccatgcagagtacgatcggcagtgtcacgggatccgtttccggtgcagcgtcccgggccgaggaggtcatggcgcagatgacggcgcagcttggcgcgcagatggcgtcgttcggggaagcggccggcgttcttcagcgcaacctcgccgagcaggccgagagttccgcaaaggccacgcgcgaggcgacagccggtgctgcggcgagcgcgtctcaggcggcacagcaggcggccgcgcaggccggggaggccatggatcgcgtgaccggccggctcgacgcccaggtcgcgaccttcgcgaccgccctcgaggcgatgcagcgcagcgtcgcggcgcaggcggaggacagcattcgggccgcgcgcgaggcaggcagcgccgcgaccgcgagcacggtgcaggcggcgcaacaggccgccgaggcgatgcgcaccaccatcgcggccatgacggccgagatgcgtggcgccatcgatgccttctcgggctccctgcggaccgtcgagacggccttcgccggccagacccggcaggtcgaggccgtcagcctccgctcccgcgagacggcggaggtgttcgggcaggtggcgcgcaccatccaggtggcgagccagcctctcctgcaaacgtccgagcgcattgccgccgccaccgagacgatggcaggctcggtgcgggactcggccggtgccctgcaggccggccagtcggcggcctctggtcttgccgatcgcctcgatgctctcctgcagcaggcgcgcgactccgtcgtcgcctacgagcagcgcttcgcgaatgtcgacgctgagctgggccgcgcgatggagcggttcggcgagcaggtccgccagcagcaggatcgggtcggtaacttcgtggtcgacgtggacaagcaactgagcgtgacgctcgaccggctcgagcgggtgatgaccgatctgagtgcgagcaacgaagagcttggtgctgcccttacccgctccctgcagaccggccggctcgaggccgcagaatga

SEQ ID NO: 10639 - DNA, 783 bp, Methylobacterium platani JCM 14648
atgatggtgggggtgctgttcatcttcatcatcatgctgatggccttcgctctcaattttcagaagcagaccgaccggcaggaggacaaaatcctggtggccgaggaggtcgggcgccggctcgacgagctggagacccaggtgaccaaccggctgggcgagatccgcgctgcgagcaccgcccggaacgcgctcctgcgcgacctgcgcgaccagctccgccaggaagggctcgtcgtgcaggtcgacgaggcgaacggcgtcctgcgcctgtccgaggatgcgatccgcttccccgtcaacggagccgacttgatcggccgggcgcgggagaatgtcggcaaggtcggccgcgtgctggggcgggttctgccggcctacgcggcctgcccggcgggtgccgccgcgtgcggcaccgacgggcgggccttcctcgaaacggtgttcatcgaggggcacaccgacagcaccgggatcgaggacaggaactggggcctctcgaccgagcgggcggtcaacacgttccgggagctcaaggcgacggcgcccgacctgcggcgcgtgctgaaccggcgcggcgaggaagtgctctccgtgtccggttacgcctcgacgcgccagatcgaccccgaccggagtgcggcggcctatgagaagaaccgccgcatcgacctgcgcttcgtcatggaggtcgataccggcgcgggcctgcgcgagatccaaggcctcgtctccggcatgaaagcggagatcggcaagctcgtgacaccgaaaggccgatga

SEQ ID NO: 10640 - DNA, 1398 bp, Methylobacterium platani JCM 14648
atgagcagttttcggtccgccctccattccctcaccctcggtgcccccaggccgcttccggcggagccgcggctgacggccctcgcccgccgcggcgacgcagcgggtgcccaagccgtgcgtcgtccggccgtcgacctcgacgaggtcgccgcccggctgatcgcggccctcgatgccggcgaggaaccctcgcccctcgactggcggcacgccccctggtgcctgtggcgggccgagccgccgctcgcgacccacgaccgggcgctcacgcggctcctctccgagatcatgcggtccgagcggcgcgggccctatcgccggctcgcctcggtctacctgattgactacgcccccgagcgcccgcgcatcggcgagatcggtcgcgcgctggcggcccgcgccgcggcggcgggcgcgccctggcacgacctgcagcgcgactaccggctgttcgagggcccggagggcgtgcgcggcctcacggaagcggcgctcgccgggcgagagacggtcccagccctgctcggccggcgcggcctgacggcgatcatggccgggtcgggcctcgccgaggcgagccatctcgatggcctgagtctgctcgccgggcgcccagcggcgagcgcgaccttgcatctcgatcaagtccgcggctggtgtctcgcagccgacaacagccttctctaccaagcgcacagggccgcgatggtgaacgcgctggtcatgccgttccgcggcatgatgccatcggcggccgaccgcgacgcactcggcgggttcctgctcgcccgcttcggggatccgcgggtcaagcccggcaactggatcggcatggacgaggccgccgcgatcctgaaacgctggctgaccgagcagtccctgcgccagttcttcgacgtggtcgacaggatcgcgccggacggcatgtggaagtaccgccgctccttctggagcgcctatcacgcccgcgacctgatcctgaatgcctgggtggtgttcggacaggacggcgcttctgaggcgcgacgggccttcggccgcgacatccaattcggcaaattcgcgaagggtggtcggaagccggtcatggccggccatgccgtgctgctgctggaccttggacgctgcatcgtcgcggattggagccataatggctactgcaacatctggtccgccgacgaccctgagcggccgcgtttcatgaacgctctgtcttacacgaccgatgacgttcgccgggaaattccctctgagagaacggaagcagtgctacgcaagcataacatctttgcgcattccgggtctgataactacgtctggcaaagccgcgttgcagcttgcatctatgcaatgaccggccatcgcctgtctcttggcgaattcacggtgcgctga

SEQ ID NO: 10641 - DNA, 2907 bp, Methylobacterium platani JCM 14648
atgctcggccgaacgcgcacagtgccgctggccgaggggagccgagtcccggagatccggtccgccctgcgggtcctgaacgggctcgtcgccgaggaccgtgcgcagcgcgagggcgaggtgatccgcctgagccacgccgaggcggccgctctaccaccggacgtcctgaagggaatcggcctgcccgagctggcgcgggtgagcctggatctcgccttcgaggatcgggtggattccgagaagggctggcttcgcctgcgctggcgcaacgagcgccaggcggaaatccgtccggagcgtgtcggcctcgtcctccgggcccagggactggagggacgcctctcgcccgcgctcctcgccctggtcgaggcggcggagggctacaatgccagccgcgggcagccgctcgaggcgcgggttgccgcttggatgccggtgcagcaggcgctgcgggatgcgctcggcccggaggtcggcgccgacgcttatacccgcaacctcaccttctaccaggccggtgccttcgccctcgacgtgcgcgaggcgccgcacggcgtcgacttcacgcccgtgctgatggcccgggagcaggcagcctcgcgcgaggacgatgctccggatccgatcgtcgaagagggcgaggccgatcccctgctgccgcctgaggatcatcgcacctttctgagcaaggccctgaacagcccgacgcgtgatgcctacgtggtcgggccgaaccgcttcgtgctgatcgacccgcatctgaagccgctccttgaggtcgtgcgggccaagcgccgcgcgagccctgaagtgcgccgtgccttcattcgcaatccccgcgccgcgctcgcggatggcttgggcgacaccatcgaggacgggcgcacgagcctgttcgtcgagaccgcgcattactcggaccgggtcatcgcactgggcatctgggagcggccgaaactgccctggctgacgaagcgcgcccatacctggctgcccgagagcgggtggaccgacgcgcgcggcgaggcggtcgccgcgcccgatctctccgagcccgagcggcaggatctcgcggtggcgatcgctcaagcgcgcgatgccggtgccgccgaggtcaccatcaagggcgtcgtggttcctctggccgctgccgaggcgttcttgcacgcaagcggtgtcccggagcccgagcgagcgccgtccggagaggaaacccaccctgaaactgaggatgctcaggaagaccagcgggaggatcccccaccggacgaccagcacgtcctcctgatcaagaccaactacgaggacattgagtacgagcagaccttgcagccgcgcaaggccttgatcgcgcccgcgccgcccgcggaccggatgggggcgagccggttcaaggagcatcaggagaagggcttcggctggctcgtcgccgggtggcgggccggctggcccggcatgctgctcgcggacgatatgggccttggaaaaaccttccaggccctggccttcatggcctggatccgcagcaatcaggaggaggctaagcggactcgcgaccgggcggtggagcgcggcccgatcctcgtcgtggccccgaccgcgctcctcaagaattgggagcaggaatgcagccggcatctctcgccgatcggcctcggcgagcgcgtcgacgcctatggcgcggccctgcggcacctgaagcgcccgcccgaccagcgcaccgacccgggcgagaccctcgacgtcggccgcctgcgcgccgccgactggatcctgaccacctacgagacactcaccgaccacgagcaggccttcgcgcggatccgctacgccctggtgctgttcgatgaaatgcagaaagtgaaggcgcctgacacgctcaacacaaaggcggccaaggcgctgaacgccgatttcgtcctcggcctcaccggcacgccgatcgagaaccggctcgaggacctgtggtgcatcatggaccggctcaccccgggctatctcggcgacctcaagggcttctcaggcgtctacggcgaggaggatcccgaccggctgcgcgatctcaagcgcaagcttgacgagccggtcggacctgcgcccgcaatcatgctgcgtcgcatgaagagcgacgtgctcgagggtttgccgaccaagacggaggagcgctacgaggtgccgatgccgcgcgcccaggccgaggcctacgggcggatcgtgatggcggcccatcaggcggacggcacgcgcaagcccggggacatgctccgcatcatccacgagctgcgcggcgtctcgctgcatccggacgatccggagtcggtgcggctcggtgatgcacgcgccttcgaggcctatgcggcgcgctccgcccggctccatcagtcggtcgagatcctgcggaagattcgcgccaaaggcgagaaggcgatcctgttcatcgagagcctcgccatgcagcgagcagtggcagcgggccttaccgagttgttcgatctccctgcgccccccggcatcatcaacggcggcacgcccggcgagcagcgacagcgaatcgtcgatgcgttccaggcgagcccgcccgggttcggcctgctcgtgctctcgcccaaggcagccggcatcggcctgaccattacggccgccaaccacgtgatccatctcagccgctggtggaaccccgccgtcgaggatcagtgcaacgaccgcgcctaccgcatcgggcaggtgcggccggtcacgattcacctgccgatggcgatcttccccgaccaccgggactcgtcgttcgacctgaccctggacgggctgctgcggaacaaacggcagctgtcgcgggagatgctggccgcgccggtgagcgcgcgcgacacccaggcgatcttcgagcagacgatcggggcgtga

SEQ ID NO: 10642 - DNA, 1926 bp, Sphingobium lucknowense F2
gtggaaattaccgaatggctcggccacgggctaatattcttctttacccaaattccgctcatcggcgatgcgatggcggcattcttggctgtggctctcattggtacggcctttgcgatttcctatcgctataagcgcgaacaccaccagcccctagccgccgcgattgaggcgcgcgtgcgcctgatcgacgaggtgaccggcggcagcatggcggacgccgatgccgcgctgatcgcctttgcgcgtcgattcaacgatgtcgacgagcaaatgatggaggcgaaccacccggaagtgcttccgcttcgccggacctgggaagaataccgcgaaacgatcgtcgatccgggcgcggacgtgttacagaataccgggcgccccgagcatttttttgtcaatattggcgagcaccatcgcgggcttaactggtttgcgaatatttttattgcgatcggcctgctcattacttttttgggcatcatcgcagcgctttcgactctcgatttcagcggcggggtcgacgcgatgcaggagcggctcaacgagctgatgaaagtggccggggccaagttctgggcatcggtaggcggtatcgtcgcttcgatcatcttgcgctcgtatgattaccgctttggcaagcgtatcaccgacggcctttcagcgctgtgcgacgcgctggaacacgggatggcctatcttcctccgcagcgcattgcggccgatcaactcgagcagctcaaggagcagaccccggcgcttcggacattttccgaacaattggcagcagccctcgacggcgcgctcgaaaagcagatggctccgatgatcagccatctggggtcgattcagcagggcatcgacaagatcagcggcggcggcggtgacgctgtccgggatgctattgtttcgggcgccggcgccgagatggcgggcctggccgaagccattggcgcgatgaccgcctcgatggcgacaatggcagaccgtttcgaaaagcaaaccggtgaagcggataaacagatcgaagaggcggtgcgccgctttggccaggcttctgaagaaatgcgggcggccttcggtgacctcaacaagaattttggcgtcgtcgcagaccgcatgcgcgaagaaaacgagcaaaccagtgccatggcccgccagcgcatggacgagctgctctccaatctggccaccgcgctggacgaaatgaaagcaggcttggccgcagcggcaggcaaaatgggcgaagcctcgaccgacgcggcgaacaaagctgcgcgcatcgggcaagaagtgctggaaacctccttctcgaactttgtcgaaaaattcaacgccactggcgcgccgctcgtagcgagcatgaagggagcgggcgatgcgatcgcctcgtcggccgacaggctggcgagcgcacagggtgcgataggcgaccacgcgcgcgccatagagcaagtcgccgcgcgctcgagcgatttggctaccgctttcgggactgtcgccaacgatgtcgaggcggccagtgcgcccgtgcgccagtcagcactcgcgatcgccgaagcggtcaaatcggttgagacggtggtggtgaaaaacgcgcaatcatccgaaagcgcacgcgaggaaatgcgcaagctcgcggcttcgctcaatcagactgcgtccgcagcctcgtcggcctggtctgaatatcgggcacggtttgaggaagtcgaccgtgcgcttggcgatgcgattcagaaaatttctgacgctgcgggcaatcatgcctcgaacctcaatgaccgggtcggccagatcgacaaggcgcttggcgaaggtgtcgctcagcttgccggcgctctcgaaccgctgacgaccttgcgcgacacggttgaggagctcgccggaattctcgcgaaccaaagccgggaagctgctgaataa

SEQ ID NO: 10643 - DNA, 729 bp, Sphingobium lucknowense F2; identical to SEQ ID NO: 10635

SEQ ID NO: 10644 - DNA, 1401 bp, Sphingobium lucknowense F2; identical to SEQ ID NO: 10636

SEQ ID NO: 10645 - DNA, 2001 bp, Geobacter sp. M21
atggatgttttagccttttgtagccactacctgccgccgattgcgtgtggtggtaccctctgctggcttgcctggaaatctaacaaggaattcattcaaccatccaagattcttaaacgagaactgactgaagccatcaaaaacctgaaggaattgcgacatggtgccagtggccagccggtcaccgatcttgccgttatagcggataaggtcatgacaggagaagtgcttcgccatctctggagcgagtaccaagagacgctgcacccgcaaaaagggatagataccgacggtttcgagcgcattgtccgctaccgctcgaccgccctctctgagacttttttcaccgaccaggcactagtagacacaccgctaaagactgcttttttcaaacatctaccgggtatcctgactggaattggcatcatagggacgttctttggacttatcactgggctaaaaagctttgaggtttccgccaacgccgatcttgtcagaaagagccttagcggtcttttgtccagcgtaggcgatgccttcacagtttcactgatggcgatcgcatccgccatgattttcacttttatcgagaaaacagcggttactcaatgctatggacacgttgaggagcttacccagctcatcgacagcttgtttgacgcgggagccggcgaggagtacctttcccgcttggtggcggcctccgaaacatctgccacgcaagcgacccaactgaaagacgcgctagtgtcagagttcaagcagatcatggctgaagtcaccgagttgcaggtctccgcagccgctaaacacagctcggccatgtcctccgccatcgtcgagagcttcaccgaaagtatatccgagccaatggagaggatctcgcgggcggtggataacgtcgggaccaaccaaggggatgcggtcaacaggcttctaaccgacgtgcttgctaacttcagttcccagatggagggtatttttggggggcaactgcgcgggataaacgagctcctgatccaaactaccgagacgatgcagggtgtgtcgtcgagattcgaaacggtcgccgctggggtgcaaactgcgggggagagcgccgcagacgccatggcggaaaaactctcccaagccataagctccattgaggcaagacaagagatcatgaatgcccagatgggcgaatttgtggtgcagatcaaaaatcttgtccatgagtcgcaaaccgagacttcccagaagatgcaggggattctggccgatttgggagaaaaggtgtccgggatggtgacgcagttggaggagcagtcccgcgagagtaccaagttgcaccagaccagccagatccagtttgcagagacgacgaacgcaacggtcgacgggatcggcggcatggtacaagcactcgccgaggaggtgcagtcagctagcgatgccatgcggcagagtgtgtccagcctgtcccagtcaagccgggagtcgattgacaagctcaacagcggtgccgaggtactctatatggcctccagcgaattcgctaaggcaggcaaaggggtaacggacacggtccgggaaagcggccgagcggtcgagacgattaccggggcgacaaacctgctaggggcaattgtgaaggacgtccggagcatcctgagtgaaaacgaaagggcgaaggatactttcggcgcgatggtgaacgacctcaggagcctggtggaaaacgcaaaacgcgaggcctcaatgtctgaggaggtgatcgcctccatcaggcacgccgccgagcagctgagttccgcaggacagcaggccgaagattacctgcggggagtcaccgaagtcttgggcaatgcccacgtggagttcgcccgcaacatcgagcgtaccctgaaccatggcaatactacgttccaaaaggagctctccatgggggttggcttgctcaacatcgcaatcaaagaactgggagacaccatcgacgagttccccaggggtaacgcgtga

SEQ ID NO: 10646 - DNA, 720 bp, Geobacter sp. M21
gtgatcggactacgcactcccggaggcaagaaggcatccgacgaggcagaaaagcccttctggatctcctactcagacatgatgaccgccctgatggtgctcttcctggttgtcatgacggtggcgatccttgcggtcaccaacgaggcatccgagactgacaagcagaagacccagcgggaaagcgagatcgcccagttactggcggagatcaaggcctccacgaaggacttccctggaattattgtacacgggaacaccatcgacttcggagagctggtccggttcgagactgacagccatcagctaactagggagcaggagatcatgctccgcaggtacatccccggagtgttgaacgcagcccgaagccctcttggcgagaaatgggtgaggagggttgttgtggagggcttcgccgaccgcaggggaacgtacctgcacaaccttaacctgagcttgcaacgctcccagcgggtgctttgtaccttactcgcaaagtccacccccgacgaaaagccgctgaccagcgacgaccgacttctgatccgcaacatttttctggttggtgggtcctccttcaactcacttaaggaaagcctggaggagagtcggcgcattgaggtgaaactcgagttcctcgatataggggagaaaaggcctaaatcacccaatcataaaatggatgaggtgcaggcctgcccactggactgcgaatga

SEQ ID NO: 10647 - DNA, 1671 bp, Geobacter sp. M21
atgatacaacttctgcgcgataggatcaccgccacggtagctatttcctttcaacagggctccctcgggagcaccgaccatatgtccaagactctggccgccgtacgccgcaatttcgacaatctcggaggcccgccggtacaggggcgtaccatagccgatgcggtctccagctttcgcgccaccgggaaactactttccttcagcaacgccaaatatgtctgcatcggcgtcagtcacgaattaccagatggttggcgcctgattgaagacgagggtattttctctacacttatcgatgaagttcgcctgacggccctccgcccacgactatttttaagatgctatcaagggcttctttataattatttcaacgtgtacactaagagctcttccgagtcttgcgccggcaactggctcgcgctaaacaacttcctcaagacagaccttaagcaggtacaacagacagctattcccccgacttggttgaaaatgctcacggccaacgagaacctcctggaagataatccctgccgcaagtacggtaacatactggcggagggcggacagaaggagtttaggggcatctgcgaggcagtcggtattttatctggttcctggcttctggaggaggcagtcttctcacaggtcgaggcgatctgcacctatgatgattcccccttcgctgaaaagctcgacgaaatgttgcttctcttagtcgggcaagggaacgtgagctactcgaaaaggctgatcgtcaggtgcctcgctgcgctggccatcagatattcacgatgccgggaacatccggaccacagcattctccgagataccctgattaagcacatcggcaatccttggctggacaagaccgcttgggatgtctcggtaaacgatgagcctgcccggatcatggtggacagttggctcaaacgccacttgatccacgcgtttttcactctcctgtcagaggacggggcaacggatcagcggcgcctggattactggctacggtattatgagagaataaacgacctctggttcgtgttgggcagggacgccaggaaaaacagtagctccgacttcgttaagatccgcgccctggcgagggatcacctgttgtatctggatgggggcggtgcctccaataacgccttcatcatgaaaatcggggataaatatgcggtagagttcgggctgacgggaaacgcctgctacatcttcaatgaagaccggctgcctttcgatccaacacgcatgcagcggacctacaacgtaacagatcttaaatctaagtcccacggaaaacaaatgattcacagcgatgggcaccagaggtgggagagcatcttcgacgattatctgagccccagaatcggctggcgaccgggtacgcctgtgcaacagccctcgcacaccagggcccacgcatcctacgaccgcctcagtaatcagcacgtccagccgccaaaggtaaatgggccgctctccgcagagggttaccgggaggtttggcagatggcggcggaccgcttttacgggatgacagacaaacgaagtagtggtggagggctatgggtggacgcacccaataacatcgccttcgttagctccattctgacgaagcacgggttcaacttcagacaggataaaggctggtatagggagtaa

SEQ ID NO: 10648 - DNA, 3747 bp, Geobacter sp. M21
atgggtttttttccatctaacaggaagatggcgcctagggagcccaccaccgctgccccgcaagacctatccgtatctttcgatggcgagggtgcgtgctatcactttcgggcgcagggctctgaatggcaggacctgcacggcctgtccagcatcggccaggatacggtggcgctcctttcccagatagtagaagaaggatttgccgcaagcagcgacaccggcgttatcctcccatggccaaagctctaccagttgctcgcctcggactgttacgaggggtgtggcccgctcctgaggctccccccgatccttgctactcgcccggtccttaaaagtcaaaacagccttaccgaccgctgtttctccgtaaacctcgccggttggatcgacacttccagcaaccccctgcccgacaatttccggttgaacggagcgatcatctctttcgggttggggagccatttgctgccgcaggcggcgtgggaactgaccattgccctacgtgacttcttccagcgttcagaagagcttagggatttcgccggcaacactcagggatggtcccgtattcgtgagtgcgccgtgcgcgcccgggccagcatgtctgatttcctccagaagaccatcgtggtcactccgcaaatgcttgatctgcagttgcgcagcatagcttttggcgatagccggaccgtcgaggtgcttcctagttttcagggagcaccggagcgctggatcgagacctttgacaagctgcccattgctgatcactacagggtctcagaaggagaactgctcacccacgtaattgtcaccgatgaggtaagggcggtcctcacggaaattaagcgtatgccggggcgccgagtctcctgcgaacgtgccgaggcatttattaggaacccgttcagcgtactcggcccggaggcgaccagggtcatagacccggaaaagttcgaccaggcacgggaggatgcgggcttgcacttctcgcgcttcacggcccgggtccagacggattcaataggctttccgtcggaggtggcgctctttgtcgaggagatggtccatgaagagatccggagtgaggaggtccgctttcaggatgacgccgacttggagcgattcatctgcaagctggagggccgcattgaaaggggtgcgcagtgttgcctgtggaaaggctttgagcttgagctcctgggcgatgtcggcgaccagcttgatatcctcaaggccgcattacgggcacggcgttgcgaagacaaattttcttcggccgagctatttgacctcgccctttactccgaccgcatcgaagccatcggggtggaaaagccgtactactcccccttcattgcacgaaagtcggtaggcgacccttgggtaccggaaaacacggattttggaatctgcttcattccggagggggagaccgagccagtcgccctctcgctcgacaaagagcgacaaaaacagttcagagatgcaattgacctagccaagacggaaggtgccgcgacagtcaaagttccatggctcccaagggaactcacagtcgacctggccgaggatctgattggcaccatcgaggccgcccagggagacgtcgccaagggagaattcaaagaagatcggatcacgaacagggtggctgtgccccgcaaagggcttgttgttaaaccaaatatcgagacgctttcctatctccaacagcgcggcctcctggagatgccccctaaagcaaaacccgtgctccccgcaggcctcaagcctaaaacgaacctcaaggagcaccaggaatacggagtggcatggctgcagaatctctggcaactggccccttgccactgcaggggagcactgctcgccgatgatatggggctgggcaaaacgctacagcttttgaccttcatcgcgtcctgcttcgaggccgaccctgagctcgccccggtgctcgtagtggcccctctcaccctgttggaaaactggcaggaggagactgacaagtttttccagcctggtacctttccacttttaaccctctacggcccagctctaactgccaagcgcacctcccgggccgacattggggccgatcttctggccgatggcatcacccggctccttaaacgcgattggatcgggaacgctaagatggtcctcacgacctacgagaccatgcgcgactttgagctgtcgctgtcggcccagaaatggtccatcatggtcatggacgaagcgcagaaggctaagaaccccaacgccatgatgacgcgggctgcgaagaagcagaacgtaaagttcaaaatagcatgcacagggaccccggtagagaacaccctcaccgacctctggtgcctctttgacttcatccaaccagggctcctaggtgccctcaacgaatttggcgggaactaccgcaagcccattgaggcggagaccgatgaggagaaacagaaagttgaggagcttcgtggcatcatcgcccctcagattctgcgccgtgagaagaaggatgtcgcaagggacctgccgagaaaggtctttgtggaggaatgcaagacgctgccgctatcttccctgcagcgccaactctacggtcaagcggtagcgaattacaaggcggggaaaagtggggaccccggagcgacgaagatgaaccacctagggcttctgcagtacatccgccaggtctgcacagatcctcgccccctggggcaggctacttccgagcacgaatcgtttgaggtggctgcctctaggtcccctaagctcgcatggctgtacggcgtattgaaggaaatccaaggtaaaggcgagaaggccatcgtttttaccgagcttcgcgggctgcaacgcatgctcaaaatttatatcgcagagcgcttgggagtggtccccgaaatcatcaacggggacaccagcaccgcaaccgccaatgctcaatcccgccagaaaaaaatcaaggagtatcaggagagacctgggttcggggtgatcattctctcacctttagcggttggatttggggtaaacatccaggcggcgaaccacgtcatccattacacacggatgtggaaccccgccaaagaggaccaagccaccgaccgtgcctacaggatcggacagaccaaggatgtctatgtctacactcctgtggtggtctccccggagttcacaacgtttgatgcgaagctggatgcccttttggagtggaagagggggatttcagccgacatgttgaacggtgcaggcgatatcggatccgccgcattcggagatatcgaggacgtcgatgggagccatgccttcgaacacgcgctcatcacgatggacgacgtgctgtctatgcagcctgcggctttcgagtccttctgcacccttttgtgggccaaacaaggtttctcaaagacctaccgcaccagtctctccggtgacggcggggttgatgttgtggccatcaaaggacggactggagcactcttgcaatgcaagacttcggggacagacgggatacgcctagggtggcaagcggtcaaggaggtcaccgctggaacagcggcctatacagcacggcacccgcatgtggagtttcggagagttgccattactaaccagtattttaatgacgcggccaagtatcaggcgaaggttaatgacgtcgacttggtcgaacgggacaacctggaggcactggttactcagtatccggttaagcagatcgagttagaacaaatcctatag

SEQ ID NO: 10649 - DNA, 2004 bp, Parabacteroides sp. 2_1_7; identical to SEQ ID NO: 10193

SEQ ID NO: 10650 - DNA, 696 bp, Parabacteroides sp. 2_1_7
atgaagaagaaacgtacagaatacgaaagtaaagatgagaatgcctttgcactctccacaggtgacttaatggccagtcttctgttcatctttatactgctgctgatgggagcgctccttcaagtgcaagaaaaggcagaacaagacgaggaaattgtgaaaagatacgaccaaatcaaaacacaactttacatcgatctgcagcaggagttcaaagatgatcttgcagtttggagggctacaatagactcgactttatgcattcgtttccaagaaccgtcaatgctttttgatgaaggacagtccttgctgaaacctaagtttaagaatattcttgatgactttttcccaagatatatagccgtacttagtcgtgatgaataccgagataatattgaagaaattcgtattgaaggccacaccaacagcaacggaggctattattcaaacatggaactttctcaggatagaacaagagccgtgttacaatattgctttagtcttatgtctgacgacttggaagagtggcttaaaggccttgtaacagcaaacggactttcttcaagccacctgatactgaaaatgaacggcgaggaagataaggatttatcacgacgtgtagagttcagagtaagaaccaatgctgaaaagcaattggaggatatagcaaataaacgttttatacataaacaataa

SEQ ID NO: 10651 - DNA, 1851 bp, Parabacteroides sp. 2_1_7; identical to SEQ ID NO: 10195

SEQ ID NO: 10652 - DNA, 2751 bp, Parabacteroides sp. 2_1_7
atgttaactcaggtagtaaataaaataggaatactattcattgtaaatttcaatggacatgatcttcatttccaagaatggaaagcgacagacgatagtatatattatatgcctctttcaactttggttgacaatgggtatgcctatgcttcaaaagatggttgtcttgtcccttatgaaaatatctatctgttagatgaggaggataagttacttctaggtgtcccccaaccctataatatggccatgcgtctcattggaacaagcatgttaaatgcatctgattttgaatacaaggttgaatttcttagccacgtgccagatggagaattattatcatatgaacaatgcggaaatatacttatagtcaacaaaaagaaatatttattatcggaagcgcaatatgaattgataaatcgtattcatgagtttaattcttctccagaggaagaaaaaactacagactttaacctgcgtaattttggagagataaaagcattagcagaacaagccggatgcgaattagacagttatttagcaaacgagaatgtttacgttccagaacgcataaaaattgaagttggtcgtgatgaagatgggtttaccattgatcctgccattgacattgatgaaaataaaaaatttcagcagtattttgatcgaatgagaaaagtacagggacagtaccctattcaaagagaaaatggcgaacgtgttcgcgttgtactcaatgaagagcaaaaggaaaatctacgacatcttaaaagtcaaggcggaagacacaaaacgcgcgaagaaattcaaaaaattatagaagaacctactgagttttttgaccctgatgcttttgatttatcggaactatatagtgaccgcgtaattgagattggtgtttataagcccaaattctatccatttatttgtccctacaaatcatgctggattgctggtgctacaattgaaagtcctcaaaatggaacaagccaagtgacaatttcaagtgagacagaattggaaaatctcagaaaagaaattaataaagcaaaagagaatggcaaatctattattgagtataaaaatgcccaaatagacatggaagatgctttgtttcttgcagattgtgcggcacagcagttaaaggcaccatctaagccatttaatgcagaatctgttgataacaaaaaagtgcttattatagaagaaaatgcagaagaacttggttttgctgtaaaagaaagagttatcgaaagaggcgaaaaatatacccttttcaccaatccatatcttcaagaatgctattcactaaaagaacatcaaaaagaaggtgttgcatggctacagcatttatataaaagtaaagcaagtgggtgtctaatggcagacgacatgggacttggaaaaactttacagatactttattttattgattggcattcaaggaaatatgctgatcacaaaccgtatcttatagtagctcctgtttcactgttagaaaattggaaaaatgaatatgaaagattcttcaagcaaccaagaatgactattaatatgcttacctctaaggatgtgccaagaaagtttgacaaagatattgtaaatagaatacaaaagatggacatagtcttaactaactatgaatctcttcgtatatcacagttaaatttctgcgcggtggagtttgacatcgtggcattagatgaagcacaaaagattaagtctcccggtacgcttgttaccaacgcagccaaggcattgaaatgcaatttcagaattgctatgactggtacacctgttgagaatacacttcttgatttatggtgtatcatggatttctgtgttcctggtttattaggtaatgcgaaagcatttgctgctcaatatcaatcaccgttaaaaaaagatgacactgacattgtcgctcttggtaatgaaattcatgaaaagcttggaatatattttatgcgcagattaaagaaagatgctgcaaaagatcttcctttaaaacatgaactcaaagagaaaattgccatgccaagtgtacaaaaaaagacatatacatcagtcattaatgcctatatgaatggtattcaacccaatatgcttgttacaataatgaacttgcgggaggtttcagaacatccttacctctacgactcggcattaacgactcatgacataaacgagctggttagtacaagtgcaagattacaggctactatcaaatttctcgattcaatcaaagaaaaggaagaaaaagtcatcatatttgttgaacgtaaggagactcagaaaatgcttcaaaagctttccaatgaaagatatggcataatatgtaaaatcattaatggggatactccgtctattattaaaagacactcatttgacaggcaaactcgacaagcgagcataaatgagtttcaagctgttgatggatttaacgtaattataatgtcacccgttgctgcaggaatgggactgaatgtgactgccgcaaatcatgttatccactacagtaggcagtggaatccagctaaggaaagccaggctacagaccgtgcttatcgtatcggacaaacaaaggatgtgtatgtatattatcctatggcagttacatctgacattaaaacattcgatgagatattggacgatttgctatcaagaaaaacctcactggcaacttctacaatcttcccttcagagagaatagaggtaaagcaagaagagttcggacaaatattatttggaatttaa

SEQ ID NO: 10653 - DNA, 969 bp, Pannonibacter indicus
atgcgcgcctcgtcccgccgcactcaccaggaagaggaagaggaaagcgcctttgtgtccatgacggacatgacggtgagctttctcttcatcgtcatcctgctgctcgccttctttgccagccagtacagcaacacggataaagtcccccgctccgagcttgttgcggagcgggagcttcggcaggcggcagaacgcacggctgaagatcttcgtcagcagattgagcaaaaagacgcaaggatccgcgaactcgaggagactgtagaagcccagacgcaggaaatcgccgaaatgaaagcggaactggagcgcctgcgaaagaatttcgaagtcaagaacccgcttgaagcctatctcgccgacgctgcgcttgagaggcgccgcattctcgagcgcctgcgcgaacaggtgaagatggactttcccgacctgaaggtcgaggtcagcgagcaatcggatgcactccggtttcagggtgacggcctcttcgatacgaattcctccgagctgcgccccaaccggcgccccatcgtcaccagcgttgcgcggcgccttggcgagcttctgccgtgttataccctcggcccaagcacccgctggaccagcacctgcaatccgggcggtgttgtcatagaggctcttcagatcgaagggcacacggacagcacaggcaattccaacagcaacctgacgctttcaacgaaccgggcaaactcgaccttcaccgtaatgacggaaagcgttccgggcctgatggatttccagaacctgcgcgggcaaccggtgctatctgttgccggctatggccagatgcggcccgtagctgacaattccaccaaagcaggccgtgatacgaaccgccgtgtcgatcttcgcatcatcatgtacacgccaagccgttccgaggagatcggccggatacgcaagtctcttgaagcgggcagccgcaacggaggcaacccatga

SEQ ID NO: 10654 - DNA, 1314 bp, Pannonibacter indicus
atgagcctcgaacaaaagctctcccggcccctgcgtctggcaaccgcagcgctgcctgccctgaaccgactggtttccacgacgagccgcatcatcgaaagatggcctgatggagctggagacccgccggagaaggacagggaaaagctggtgcaggagatgcgggcccgcgtagagaccggcaactgggagggaacgaagctctttctggtaacctctgcagcccgagcgcttttcgatatggaacgcaggagccgtccggatctggagccgctgcggaacttctatttcgacgaaatcaaagcctcgacacggccgggtttcctgagcgccatgttctcggtctacatgacgagttatgagccaggagcggctcatacacgcaggcttgctgaagcactcacgtcagccggaggcaggatcggcgcccgctggtacaggctgctgatgacggaacctcgtgtgctcgaccctgataacgcgcacgagcacatcagcactctcatgcgcccgatgacgagcccctggattggcctcaaggaactgggatttcacaagccgcatgacaccgggctgatggcccatgcacatcttgcctatgtgaagaaggtcaagtccgagcttcagactcgcaacggtatggaacgcatgatcggctggttgaagcccgaccggcaggaagcgaagatcttgggcgcaagcgaagccataacggccctgcttgagcactggacaaacagcagcccggcagaagatgaccggagctatctgacgcaaagtctggttctcctttacggggacccacgcctcaacaagggcggagcatggagtggcgtgccggacaatctcatggccgtccttttccgttggctgaccggagagaacatccgcttcttcctcgacgtggtttcagccgttgaggacagccccatgtgggagccacggcggaaattctggctcggcctctttcgcgccggtcagattgatgccgcctgggtcgctttcagcgaaaagggtgccgaggaagcacgcaggcgcattgcaggcaatcacgtggaagggaaaccgggatatggccgtcaaatagcaggtggcgggcgcaacaatacgtctctgctgattcttcagattggccgcaggatcgtggtggaagggtcgcacagttacaaggttcacatcttccagagttcagatgctcgcagccccaaactctatcagccaagttacgattgcgaagaaatccgcctgacaccgggagcaaatgcaaaatctcaccacagcggctgggaagactgggtgctccgcaacatctga

SEQ ID NO: 10655 - DNA, 3099 bp, Pannonibacter indicus
gtgaagttcaaatactcgtttgatgaccgcgaagtcgtggtgagtgccgaacccgaagcagccggccttctggcgcggttgcgcggcaaaggcaatactccagacctgcaggcgctgaagccggaagagctggatctggcctttgcgcttgccgatctcagggcgctagccgccacgctccggcttgaactttctgtttcaagcaacgaaatccgcttgccacaccggcttgttgccagcctggacagttcgacggctgccgtcctcggccttccccgcctcacggatctgcttctgcggaccgacgcggaaggacttctcggttcgtctgggttcaagcttcggtacgaatggtttcgtcagggacagcgtgtcttcccgaatcgatccggctcgatcctgtccatgggcgggcaacactaccgtatcccgctctggatgatggaagcgctggatgtggcagacggctttcaaccgggtctgggcgatgcgcacgactgggaagcgctggccagattccggcaggcactggaacctggcgtctccatggcccatggcgaggtatccgcacgatcgtcaatgacggactttctgtcggggcttgaagtacggctggcggacagtttttccatctcaacttccggaactgacgactttgaagtggttccgttctccagacaacggatccggggagacgatggcgaacttgaagcgggatctgtcagcgaggatcagagcgaactcgcgggtcaggaactccagcgcttccaatcccaggttcgcagccggggagcgcttgcagcctaccgtctttctccgggcaactatcttgtcatcgacagggcggcagcacctgccctcgacgtgatggcgcgcatgcagaaggccgacctttcggagagacgtgctttcatccagaatccccaacgtctgatcagcgaggcaattgagcgtcaattgcgtgaaagcggtaaactggatggtttatcggattcagggcagcaagaggccattgaggctgcggctggcccgctcttcatcgagacagcagagttctcggaacgtgtcacggggatcattgcatatcagaagccggatcaggagataaccggcagcggcacgacttggctacctgaagagtttgtccaaatactcaaggaggccatagctccacttgggcacaaggaactgaccagtctgcgggatcaggtcatcgaagggattgccacaggtgagaaacatgtaaactttgatgctatcgagctgcccgcccgtccggaaacggttgcgctgctgaatggcaagattgctgaaaaggaattggcgggcagtgaagatttggagcaactcccgccttccaagggcgcccctctggtgcttgacacaaaggacaattttgaggacctgaaatggcaaactggcttgaagccgaggcaatccgtcatttcgtccacagtacctccggcaatcctgaccccgttgaaggagcatcagagagcaagtttcgaatggcaagctgaagcatggcgcgcaggattgcccggggtcctcaatgctgatgaacagggcctcggcaagaccctgcagaccatcacattcctcgcctggctaaaggacaacatgacacaatcacaggccatgcccagagggccgctactgatcgtggcgccaacctctctgctggaaaactggcagatggaagttcgcaaccacatgcaggagcctggccttggtcatgtcatccggctcttcggcagcggaatttccagccagaagaaatcaggctattcgggaaaagacacggacgacggcattgcgaagctggacctgagtgccctgcacgaagccattgaggacaaccgtgcgcaccggtactgggtgctgacaacatatactaccctgaccaactaccagcactcattgggacgcatcaggtttgcagcaacggtgtttgacgagatccaggccttgaaaaacccgttcagcctgcgggcaaaggccgcacgctccgtaaataccgatttctgtattggcttgacgggtacaccaatcgaaaacaccacagtcgacctttgggccatcatggacagaattgctcccggagcattgggaactctcaaggacttcagagaacagtacgctgacccgactcctgaaagcatgcgggaactctatcagagaaccttcgaaccttcagggggaaagcccgcacttgcgatccggcgcatcaaggacatggtggcgagggatcttccggagaagaccagacgccttcacccccgcctaatgccaaccgtacaggcaaccgcatatgatgatgccaagctgaaactcgcaagtggtggattgggagcacaactcaagatgctgcaccacatccggagtgtttcagttcaccccaacatgggtgcggtgaccgacaatacaacctttattacggagtccgcacgccttagcgccgtgatgagcattttgcgctccattgcggagaaacgcgaaagagctctcgtattcattgagcatcgtcagatgcagtataggtttgttgaacttgtcaagactgaattcggcctgaagcatattgaccttataaatggtgacacgccaatccagaaaaggcaggccatcgtcaaccgctttcagcgtcaccttgaggtggatggaggctttgatcttcttgtccttggccccaaggcagcgggtaccggccttacgctgaccgccgccacgcatgtaattcatctgtcaagatggtggaatcctgcggttgaggaacaatgcaatgatcgcgtgcaccgtcttggtcaaacgcggcccgtttcagttcatctgccaatggccatacatccggaataccgggaacagaccttcgactgtcttctccaaagtctcatgaaccggaaacgccgtctggccgccgccgcgttgtggccgatgggtgatacgcagtccgatatcagcgagcttcagcgcttgctgagcgatggttcaaccaggcaggccggtgatgccatcgcaggttccatgcatgcaatgtttgaacgcgatggactgccacctcccgacatgcagccggacggatccatccggctgccctag

SEQ ID NO: 10656 - DNA, 2103 bp, Nitrosococcus watsonii C-113
atgaatccagaagaagaaaagttcaattgggcgggactcttaccggactttagaacgctaggttatcctgataccccggagaaactgagcgcgctattcgtggcagttctgttcgcggtagtatttttatttctctgcttttcagggtacaggctattcaaagcgtggtaccgaaccagccgcattagcaagtttctgaagaacgaaacgtcaaagtccgtcctaatgaataggcaggatttgagggagaaagccagcagggtaaatgatgaagttgagcatctatggaaggagtttgatgaaactctcgtcgagacgagagtaggagatgacgttcatctccacagcatttacgaagccagtcatttcttcaacggctcgacattggcgcggggtatcaccgagagccgcatgcttgcagccgttccagggtttttgacggcgctcggcgttattggaacgtttatgggacttcaattggggctgtcggaactaaatatcggcaacgaagcagccgtaaaagatatgaaggcgggcttagctcacgtaattagtggagcaaagattgccttcttgacctcggtttggggggtgatgctaagtgtctttttcaattttgtagaaaaattgctcgagtgctgggctctatcaggtattcatcggcttcaagtccgtattgatcaattatttcctcgcttcagcgctgaagttcagcttcagaagattgcggatgatggctctcaggcgcgagagtcgttgcagggaatggcggagcggatcggcgacaaaatgcaggaatcgttgcttgaggcgacttcggggatacaacaagggctagaagcaagccttgagaagatcatggctccggctatcaataagctggtcaacgaaaccaccgatggaagccagaaggcgctggagaaactcgtcgaaggattcttggacaggtttggcgagcagggagagatacagcgacaagcgatggataccgcgtcaaaaggggtggaggatgcgttggccgccatgaaccagacgttagaagggtttattcgaggactcgatcagaaccaagtggccgcggcagatcgcgagcagcggcttattaaacatatttctgatcaagtagacgaactggttgaaaagaatactgagcatggacagcggcttgctactgccgctgagcagcagatcgggaaaatcgccgaaaccctgcagcattcccagcaagcgcaggaagagagggagatacggctcggggagaagctcagcgaagttgctgccggtatggaccaaaccatagcgcagttgattaagcatatttctgagcgcgtagatgaactggtcgaaaagaatgctgagcatggacagcggcttgctactgccgctgagcagcagatcgggaaaatcgccgaaaccctgcagcattcccagcaagcgcaggaagagagggaaatacagctcgggaagaagttcagcagggttgttgcggatatggaccagaccatagcgcagtacacgactgcctccaacgctttaatggagcagggtaaacagcttcaacagcaggtggcagctagtcagtcgaacttcgagagggtggcccacggtattaacgcgggggcagccgaattgcgctcggcggcgagtcagctcaaggattacggtgaaggggttaaacagtcgtctatacaacttagtggcgcgctcaacgaggcggctaggtcaacagcgaaactggcggacgagaacaagaagtcttcagttaccgtcggccaggtacatcaggagatgtcgcacagtattgaaaaattacaagcggtggccgcgcaactggaatctgttgtccaggcggctgattcgacatttaagtatatggaagtgcaccagaagagctatttggattcactgaaacggaatgtgcaggaattgtcggaacagggcgctaaactgttgagcgattacgccgggcaagctaatgcgcaaacaaaagaacatctgaatatatgggcggggcatacgactaattatgcagaacagatgaatggcgcggcgagagcattgtcgtccgtagttgatgaaatcgaagataagttgagtcactaa

SEQ ID NO: 10657 - DNA, 753 bp, Nitrosococcus watsonii C-113
atgcatgcgcttattcgaccaaaaccaagaagagtggacgaggagaatccttactggatttctttctcggatttaatgtcggcgttgctggtgatcttcattctagctgcggtggcgctgatcattgagttaactcaaacacagaaaaaaattgaacaagacattgaccagctcaagaatgcggagcaggcaaggagggatatcctccacgaaatacgagatgagttggcgaagcgaaatatcaaaatcttaattgctgacaacgacaccgtgttgcgcattccagagagtacattggcgtttgcttctaatagctatgcgttgcctgctgacgaaaaggtacgttcatccgtggtagctatcggccaagtcttgcatgcggcgattaaccgatctttcaagcctggtgtctctgaaaagaggcggtttgactacctagatacggtgtttattgaaggccatactgatagtagacctacgaagcgtattaaagggaactggggactttcgacgttcagggctatttcgctctgggagtactgggacgatgtgctcgatgtttctccagtgctcacggatatgtcaaatgcttttggcgataagctattttcggtgagtggctatgccgctaccagaagagtgaatgaggcagaaataacccgtgaggacaggagagagaatcgaaggatcgatattcgctttaccgttaagcggccccgtatttctgaactggaggatatcgtcgagcaatga

SEQ ID NO: 10658 - DNA, 1434 bp, Nitrosococcus watsonii C-113
atgagattacctcttaacaagctccatttcagtttatctgacgagtctcttttgtcatacaaggagcgtatcgacgccgcggcgcaggagattaagcagctagcacgtgggtcgggaacaggaagcgctgcgtttaagcaagcgtatgaacgtgtgctgaaagcgttaagcgaagatcgagacttgaacgaggttttgcggacgccgactgatttgcgggcttttgcagtgtcttttaatacagggtgggtgtccaaaatcaggttaacagagcccgtgctacaaaaaatcaaccaaatccgtcaaaagcctacggctttattggtcgatgccatttatgctcactatttgactgattacgacgcccttccagacagggtagctgtagaaagctggttgcgtgttgctaagggaagaaggggaagactgagcgaagaggtttcagcgattctaggtggtaatggcccaaagtggttggcggaagatgcccgccggcaaggcgtggactttgatgagcaggtggggcgcgttgggcttgatcgttttcgctcgggtcgatttatgacggttgcgaagaatatttattatctggacgtactgcgcaagcttgagcccaatcaggatcacccgttgctggatgagatgcaaaagcggccagtttataactcccggtacgacgagcggcatcttttgggtcatcaaatacttggcatattgattgagaaggctcctgtcaatgctgtgggggaggcttggttgaatgcagtcctggcgattgggggagatccgagggtgcctacttgccaccccaatcaccagaagtggtggtctcaactcgatcctcaactgaaaaataaggtacaaggttggctctcgaaactggatcttcgacttttcctggagagcttggaagatttctcatgtcagccaggcaaggaagacctaaagcgaatgtatcccgcgcgtaagcgcttcatagagggcttgttgaatgaacaactggtaacgggtacgcgtttgtatttgtcgccaagcgccgaatcgtatttgaaaaaggcgtatagggcagagcatctaccccattattccgttgttacggatcatggaggtaggtctttaatccatattcaattagggggcattcatttgattgaaggcagccacaattgtcagctatggatctatgagactctcgattcctccgccatcgtgttcgattactctaaaaaccgagttacctaccattccttgacccaaggacttagtctcataatgcggaaaaagggtttgccccccaaggccaatatttctcattgcactggttggcaacataaggcgattgttgctctgaaagagatggaggttccgattgaggcgaaagacgttcttacgccagaagattatcgccaatacaagcggttgtatggagcgtag

SEQ ID NO: 10659 - DNA, 3438 bp, Nitrosococcus watsonii C-113
atgtccctgaaggaatggatcacgggccttgttggcgccaaggcgacgggttgcgcttggaattacgattccgagggcattaattttatcttcactgaaaaacaagaagcgcaaattcatggtggtggcgcaagcgatctgctgatacatcaatatattgccctaagcatgctagtcgaacaggggcgggcagaagagttgcctaacggtgtgctcgtcccttcggacgttgtggtacaactagatgaaaatacccgcctactgttggggctgcccgaccgatggaagggcgtcctcaatgcaaacatcaagggtaagacgggcagcgcatcttttcaggtagagctggccgctgcggatgcggggggcggatttacgcatggctttgcagtagaggggccagtcattcgcttttcggcggaaaaacgttatgtgctgtctcctgctcatttgctcatatttgaggcatatgagaagcatgcacattccgcgaagatggagtatgacgacttacgtctcgttctctcgttgcaaaaggctcaagagctaggcgcttcgatctctctgggccattttggaaagcttaatattcgcgcgccagcatcaattacggttgcagccgagctagacgagcacggccgcctcgtgcttacgccacggatgggtcaggcggcgagtcatgaacgtattcaacgtgttcttgggcaattgagggcagaacacgcgacttctctccgcgtagacggcgaaattattcttttcgatgaagaaaaattagcggccgttcgggaaattcttcggaatcgcgtgataccgaaggataaagtgagcgcttttctcaaaaacccaactgcatttatcaatgccagcttcgtagacttagaccttggtttttcggctagagtgaagggagcgacgaaattcaggcatgcgtattttggtgagaccgatgaatctggcatcgattggttcggtaaaaaattctctcctacggaggtatttgcgccggcaaagttagtggatgtcatatcagatggagatcaattagacgacgttcggcagaagctagcgaatgtcgcggaaacaggcgctcaggagatggaatttgggggccggatcttcgatgtttctaacccaaagctggtcaattccatcttggagaagcttgaacgtaaactgattgaagaaaaaagggaaaatgtttcggctgttgaagccgatagcgccagcaagaaagagcaagcggaacccaccgtggtcgatattgggctcaacgatgtagatttagaaacgccttcagcttcacttaatagagcgattaatgacgtcctcatcgccgagtctgcgctcgactggggcactttcaagcgattgccgtttcctcaccaggtattgggtacgcgctggatcttggggttggcattagatcgcgacggacgcggtggaggtcttcttgcggatgacatgggactaggaaaaacattcatgtcccttgcagctatggagcatctatacaaatcgtatcgagaccgaaagcttaccgagaagccctgccttgtcgttgcacccttgagcctgttgcagaactggaaagatgaggtcggtcaaacttttaaggagtcgcctttcaacgatatcgttatcctgcagtcggatgggcggctttccgagttccgagcaggaggcgtcgagacgaaaaaccagaatattactgaggatgaaaccgctcctatccggtattcgctgaagatcggtagcggttttgcgcaggagcgacttgacctaccgaagcgcttggtgattaccacctaccaaatgctgcgagactatcaattctctctttgctcaattgactgggggatagcggtattcgatgaagctcagaacataaaaaatccaaatgccctgcaaacacgggcagcaaagggagtcaaagcagatttcaggctgattgccacgggaacgccggttgaaaacagccttacagatttttggtgcctaatggatacagcctgtcctgggctcttggatagctatcaagcgtttcgtagtgcttacatcacgccgatactgcgtgcggctggagatgaaattgaacatgttaggggcattgttggccggcggctccgagaacatgttggaccttggatgttgcgccgtgtgaaagaggataatctggaaggtctgccggataagtccgttttcgtgggtatgaaggatgatgtttgggcgtattgcccagcgctgcattccaccctggaagggggtcagtttgaatcctataacacaattcttatgcgtgcctccagttcagatagcaatgccgcattggctgcgttgcagaagctcagagatgtttctttgcatccacgactcgtatttggcggggggctagacacgccgcgcccattagcagatttggtaaatttgacagacgaatccgggaaaattcgtagtttactgcctattttggatcaaattcgggatcggggcgaaaaatgcatcatttttgtaatcaataagaagctccaagcatttctcgcattgaccttagcaaagatatatttgctgccccctgtttcagtcataaatggtgatgcgaaagcggtggcaaagagggcagcaagccccactcgacaaagcatgataagagcttttgaggagagggacggatttaatgttatcatcatgtcgccgatagccgcgggcgttggacttaccgtggtcggcgccaataacgttattcatctggaacgccattggaacccagcgaaagaggctcaggcaaccgaccgtgtttaccgcatcggacagaagcggaaggtaaatgtgtttattcctttgattcaccatcctgaataccagtcttttgatgtcaatttgcatcaacttctgtcgagaaaagggcagttgaaagacgcagtagttactcccgtgcaggtaatgccttcaccggaaggtttacctcaggagagcaggtcttcaagtcagcgcatttcgttcgatgagttgagaaatttgagttggcaacaatttgaggcgctgtgcgcagaattgctgtacaaagaatatcaagcggataactgttggttgacacacagtggcgcggattttggtgctgatgttgttttgacgaaagatggaattgggttattgattcagtgcaagcatacgagcggtagtgcttatgatggttataaggctattcttgaagttcactctgccacagtcaaatacgaagcggaactcggtaagcggatcgattcttggatacttgctacgaatgccgtgtgtttaggatcagcaactcaaaaggccgcaaaacagtactcggttgaaattttagatggaaagacgctctcccgtctgctaggcagacacgcggtgacatacgcagatgtgcttaatcggctcgaaaaaaagcgtcttcgtgtgtaa

SEQ ID NO: 10660 - DNA, 711 bp, Sphingobium sp. YBL2; identical to SEQ ID NO: 10621

SEQ ID NO: 10661 - DNA, 1683 bp, Sphingobium sp. YBL2; identical to SEQ ID NO: 10622

SEQ ID NO: 10662 - DNA, 3225 bp, Sphingobium sp. YBL2; identical to SEQ ID NO: 10623

SEQ ID NO: 10663 - DNA, 1974 bp, Sphingobium sp. YBL2
atgacgttgttcggaattccggtgataccggtgcttgtgtttgtggttctcgttgctctggcgatcgcattcttccggtatttcttcatccctgcgaatcggctcgatgcgaacctcaagcagatcatcgcgaacgtggaggcggcgcgggcaaagggcctgaacgacctctccaagtgctttgaacctgaccgcgcgatcgcggcgatcttcaacgagtatcgagaaacgctccatgtccagaaggacttggacgtccagacgggcgagatggtcgagcgcgccattcgctcgacggtccccgcggagatgttcctctctccccacgccgtggtggacaatcgcgtccacgccgagttcttcaagcatctccccggcattttcaccggcatcggcatcatcgggaccttcaccggccttctgaccggcttgagctccttccagatctcggacgactccggcgtggtccggaacagcctgaccgccctgctgcatggcgtcagcgaggccttcatcgtctcggccttcgcgatcatcctcgcgatgttcaccaccggcctcgagaagtttcgtctgaacagcctctatcggaaggtcacccagctcgcccacgagatcgacgcgacctacgaggccggcgccggcgaggagtatctggctcggctggtgacctcctcggaggactcggccagtcagaccaagatcctgaaggacgcgctcgtcgccgacctgagggaaatccttaccgaactctcggaccggcagatcaacgcgaccgtccagcgctccaacgaactcgggacgaccatcgcgggtgccctgaccgatgcgctcaaggggccgctcgaccagatcgccggcgcggtcggccaagtcagccaggatcagtcgtccgcggtgacgaagctcctcacggacgtgctcgccagcttcagcgatcgcctcgagaacatgttcggcacccagctgtcgggcatcggtgacatgcagcagcgcacgatcgacgccatgcagaccgcggtttcgaagctgcaggacctcaccgacaacgtggaggcggccgggacgcgcgcctccgatgcgatgtccaccaagctgctcgaggtcgtgcaggcggtggaggcgaagcaggccgcgatgtcggaggagctccgcaccgtgatcgacgagatccgatcatcgactggcgagatgcaggaggctacccaaacccgcgtccagggcatgctgaccgccctcggcgaaggcatggcgcaggcaatctcggcgatcgagaggcaggctgccgaacgctccaggcttcaggcggaggaggacggcaagcgggccgaggctgcggctggccatgtcggacagatgcgtgaatccgtaggcgcgatctcctcgaacgtcgatggcctcgtcgaggctatccgggagatgacggctggcgtccaaaccgcgacccgagatgcattcgtgcggctcaacggcggggccgacacactccttgcggccgccaacaagctggagaactcgggtcgagaggttgtcgggggcttcgaccggatcgccaacgttacgacgggtctttcggaggcagcgggcagcgtcgccggagctgcgaggggtctagattccgtcatttcggactaccgctcggcgcgggacgccgtcgccacgatggtccaggatctccgcggtacggtggagaatgcgtcccgagaggcgagcctcacggcggatgtcctcggtcggatagaaggcgccacgcagaagctggtcgcggcgcagtcggaagcggacggcttcctcgacgaggtcgccgatgtcatcggccagtcgcacgagaagttctcggaaggtatgcgcggcgtcgtggtcgaggcgaaccgcgagttccacacccagctctcgcgcgccaccggcatgctcaaggaggcgatccaggagctggaggcctccctcccgtccaccggtcggcaggcggcgtga

SEQ ID NO: 10664 - DNA, 711 bp, Sphingobium sp. YBL2
atgttccagcgcgttactatggggcatcgaggtcgcgaggagggcgagaagcccttctggatctcgttcgccgatctcatgaccgccctgatggtgctgttcctgctggtgatgagcgtggcgctcctcgcggtcacccgcacgatctcggagcgcgagcagctcgaggccgaaaggcaggcggagatcgtcaagctcctcgaccgcatcgacagggctgcgaagaagcagggcatccgcgtcgataggaacagggccgtcatcgactttggtgaccgggcccgctttgactcggcaagcaacgcactcagccttgagcaggaacagctcctgcggtccttcgtccccgaggtcctcgcgatcgcccgggacaagggtgggcagcgttggctgaagaggatcgtcgtcgagggcttcaccgaccggagaggtagctatctctacaacctgaacctcagccttcagcgcagccagcgggtcctttgcgcccttatggcccggccgcaggcaggcgagcggcccatggatcgtcgtgagctagaggagatacggcggctattcctcgtcggcggctattcatcaaactccgcgaaggcgtcactggacgcaagtcgacgcatcgagcttcgtttggagttcttcggggttgatgagcccgcagctactccggtggacgcgttcgaaggcgagttcggcacatgcgccctctga

SEQ ID NO: 10665 - DNA, 1674 bp, Sphingobium sp. YBL2
atgcgccctctgagccctaggatggcgaggctgcagcagcggctgaccgatgtcggcgctgcggctttcagggacatgccagaaccggacctccgtgctttgaaggggcatgttcagtcgcttcaggcgatgctcagcggagcaggggcgggcgctggcgcgtcgaacgaccgtatccagacggagctcgtcagatttcgcgagacggggaagctccatgatgttcggtctgcacgcctggtgagctggggcacccgcctccggtcggtgggtcaacccgccctgatcgaggacggtgagcggttcgatccgctcctgagcgagatagactcattccgatcgatgccccgtccatacaggcgatgctggcgcgggcttctggacggctatgtgaactacgaccccggcagtgcgcgtggggcaggcgatcggaactggcgtgtcctgcgggaatatctgaacgacaaccttccgcagctggagcgctccgggcaggcgcctgactggctcgcagcgatagacgaccatgcgaaccttctgacggaagacccgtgcacccgctacggcgccgagatcctgactggtgagggggatcctctcgagatccttcgccgcgatctttcagccggcgacacgtcttggatcggacagcggatattcgaggcgcagatcgaggctgcggtgaggttcgacgaccgtagattccgtgatgttctcccacgcgtcatcggactgatcgaggagcacgacgtgctcgccgacgagggcctgtcccgcgtgctcgaccgctacgcggaatgcgcgtcgatcgaggtcgatccggcgctgtgtgagacctccgtcacccggtggggcaatccgtggctagagcggaacgacacgctctggacgctggtccgtccggacacgcgaaggatggtgtcgtcctggcacaagctccgtctgatcgaggacttcttcaacctgctttctgccgacggaataaacgaccagcgtcgcatcaagttctggaagcgccatgtcgatcagatcagcgacatgcacttcgcgctcggcgacgccgcgtatcgggatccgcgaccgagcttcaaggcccttcgccagatgatgaagggacgtatgatgagtctgacgagcggaggcgtctcgagcaacaacgccttcattatgcgcatcgcgggccacgtctatgtggagttcggggaggagggcaacgccatgttcgcgttcgacgccgcgaagctaccgttcgaccttacgaaaatgcaggttgccggcaacaagacggctttgaaacacccgagccatgtcgcccgcatcgtccacaataacggtgcgggagagcgatgggagcgtagggccgaccgtctcatcgcttccctctcaaccgcaagagggggcccccaggtcagtcatacgacgccgtcttacggcgcacgtccgtccgcatcaccgccgcctagtgcaaggtcatcatcgaccggttcaagcgttggcaaagatgctgagctcttcgcgtttctcgccaagcatgggatcaagaccgcggattcgcgtgataagggaggttcgctctgggcttacgcaccgcgttccggtccagcggcgaacgaactcacccgtaggaacttcgcctgggcggagcgccgcggcgcctggtatcttcgctcatga

SEQ ID NO: 10666 - DNA, 3222 bp, Sphingobium sp. YBL2
atgatctggggtaggaagaaggccaagccggaagtccgtcaagcgaccacgccatcgctagtcgtcgaggagggaggcattctcctgcctgccggcagcgagccgaccccccggtcaaaggccgcggcggcgcttctcgaccagctggccgacgaggggctcgcggagcgggtcgacggtggccaccttttgcagtggacgcagctattcgttctccttgaggacgaggaggcagcggcggagcttgaaatactccaactcccaccgtccacaatggcggttccgaagatcgtgagccgaaattcgctgacggatcgcgacttctcggtcgcgatcgacggttggttcaacgctgaccgcggccccgtatccggggcgaggcttaggggcggcgcgctcgaagcggacgccggcctccagcttgtttctccgcgcgtttggagcttgctggaacgcgtccggagatttgcacgtcgtccagaggaagagcgcaacgaagccgaccagcgtcgcgcctggggagagatccgtcagttggcggttgcggctggcgcctcgcttgatgacttcctctaccggacggtggtgctcacgccggagcgattgcagatggcactgcgtcgttcggaaggattggggctggttgaggtcgagccatggtttgagggcgcgccagccgactggcttgaagcgttcgacaggtcgggtcaggtgcgtgaccgatacgatctgccgacgccggacggaatcattcaggtgatgatctcgcccgaggtgagcacagtgctgcgcgaggtcaagcgcatgcctggtcgtcgtgtcgccggcgagcgtgccgaggcttttctcctcaatccgatcgcagcgctgggaccggacgcggctgcggtcgtcgacgaagagcagttcgaggaagcgaagcagcaggcgggcatcgtgttcgaacggtttgccgccgtgacgccggaaactcatggtgaaggtgccctcggcctgctcatcaccagtggggcaggcgaggccatcgagacacgtgaggtcatgctcgaggaggccgacgtcatcgagttcgtcgccggcgtcgagcgcaatcttgatcgcggccttcagctgttcgcctgggacgaatatgagttcgaactagatggcgacagccggctgcactgcgaagcacttcgtcgggcgcttggccatagtgaggacggcgtcatcacgcacggtcaggtctacgacctctcaggctactcggaacgcgtggagggcatcggccaggagaagtccttctattccccccacatcgccaagcgcgacgacggggagggctggttccctgaaaatctcgtcccgatgatcggatggacggatccggaaaccgaccaaccctgtatcctgccgctaacagacgagttgtcggccgagctgcgtgaggggctggagaccgcgaaagcgaccggagcaacgtcagtccctctgacagggtgcccgacgcccatcccggtccgtgaggccgaggcgatcgtatccaccttcggacaggtcagggatcaagccgcgaagggaacgttcaagcccgaaactcctgcgcgtcgcgggaagaagcccacactgatcctcaagagcaacataggacaggtggactacagggaggagcggcttgcggcgctcgcggagaagccggctcctgccaggcttccctccaatctccgtcctggcgtcgcgctgaagcaccaccagctcgaaggacttgcctggatgcagcatcttctagcgctggcgcccgacaagtgccggggcgctctgctggccgacgacatgggtcttgggaagacgcttcagatactcagcctcgtagcgcgggcgcgggaggagaatcccgaaaccccgccggcgttggttgttgccccgctctcacttctggagaactggaaggaggagtcggagaagttcctcgagcccgggacgctgaagatcctgacggcttatggcgaaggcctcactggtctgcgcgtcgatcgggcctcggtcgatgagcagctccgcagggaagggctggtgcggtttcttcgcccggactggcgcggcgatgcagacctcgtcctcacgacctatgagacgctccgcgatcttgagttctcgttcgcgcgcgagaagtggtctgtgatggtctgcgacgaagcgcagaagatcaagaacccgaacgccgcgatgacccgggccgccaagaagcagcaggcgcagttccgtattgcctgcacggggaccccggtcgagaacagcctggtcgatctttggtgtctgtttgacttcgtgcagcctggtctgctcggtgcgctcaacgagttcggtgcgacataccgtcgcccgattgaggcaaagagcgacgacgacagagcgaaggtcgaggagctgcggggtgtcatcacgccccagctgctccgacgcatgaaggcagaagtcgctaccgacctgaaggcgaaggtcgtggacgagtccagccgcagtcttgatatgagcccgttccagcgcggcctttacgtcggcgcgatcgacgccttcaggcgggccggggcggcgccgggaagccatctggcactcctccacaagctcaggctgctgtgttcggacccggatgagagcgctggcagcgcctatgatccagtggatagctatcgggcacggtctccgaagctcgactggctgatcgaggttctcaaggcgatccgtgatcgaggagagaaggcgatcgtcttctgcgagttcaaggcgatccagcgcctgatcaagcattacgtgcaggaggagttcggcgttcccgtcaagatcatcaatggcgacacgaccgcattggcgagcgccatcgatagccggcaaaagatgatacgatccttccaggaacagccgggattcggtgtaattgtgctgtcgcccgtagctgttggattcggcgtcaacatgcaggcggcgaaccatgtcatccacttcacaaggacctggaatccagcgaaagaggatcaggcgaccgaccgggcataccgcatcggccagacgaaggatgtgttcgtttactatccctccgtgtctgcaggagacttcaagacgttcgacgtgaagctggacgagcttctcgaacggaaacgctcgttggcgagcgacatgctcaacggcagcggtgagatcggcctcggcgacttcgacgtcgacgagctacgcccagttgaataa

SEQ ID NO: 10667 - DNA, 1755 bp, Dialister succinatiphilus YIT 11850
atgcgtactttttggctatttgtcggtcccattgttactggtatttggtactatttattgtttgtggctgcatgggtactatggtatctgaaatttaaaaaaaattacaatattaagaaaaaacaaatcaaagaactatcaaccttacttgacggctatgaagaaaaatcacttaatgatatgggagtatttgagaattttaaagcttcgatgaaagagtcaagctttgcgtccttgtggaaacagtacgaaacatcattaatctatttgggcccggatactgaaggtaagtttaaaatttacagtacagataatgcggattgctacttcaatagtgaaacattatcccacggccttatgttgggattttggaagaatcttgccggaatatttacagctattggtattttaggaacattcctcggccttactgctggtctctatggaatcaatattaattctaaagatttggaagtgttaagttctggtattcagaatctgtttcaaggcctctcaactgctttcctgacatccgtagtgggtataatttgtgcaattatctataatatttgctattcccgactcatgagagactataaccaaatgattaatgaagtggcatctaagctggattctatttttactcataaaaatacagagcaaatattggcagacagccttattgaatcaaagcagcagacagaacagatgaaattattcagtacccagcttgtaactgctatttcagaaagtttggataccagtttccaggagcagctggtacctgtatttgatgaattgaggaaatcgattgacaagctgaacagcagtggggcagatgctttagccggaagcattgatgagaagacaggaaagcagctggcttcttttgctgcaacgttggacaaactgcagcagtccatgaatcttgcctttgaaaagtctgctaaacagaatgaggacaatgcaaggcagttaaatgaggcagtaaaagcgttaacagatgcttccaatacagctaatcggtcaattcttgagcatgctgggcaggcggccaatacaatgggtaatgctttgacgggcgctgctgcatctatttccaaaaccggtaatgaactttctaccgtgtcgagcagtatgaagaagagcttggaagagactcttagtatggttcatgatgatatggaacgacatgaagctgctttaaagacaatggttgagagtctgcagaccacaatttccagaaataaagaattaattaactctgcaggggatgcagccagcaaatttgcggatgcatcacggcctatggcacaggtgtcggagcagattggccagagtttggataaagcgattgatgtccagcagtctatcagtaaggagttaaataggcaggcaggcactattcaaacggcatctgtggcaaatgccaatgcagtcaaagaagtgaacgatgcgcttaaacacattgaaacttcctggaaagcatatgaaaataacttcaagggtgtttctgacggactgcagaaaacttttgaaattttgaacaaaggaattaatggatataatgatgcaacgaatagggcattgattaagaatttaagtgcttttgactccagtatcaatacagcattatccggcatacaggatttgaatcaggatcttgctgaatcggtagaagatctgaataaatttataaactcaaacttcgcaggtaaaaatcccctgcaccccttgaaagtccaggctttgtaa

SEQ ID NO: 10668 - DNA, 669 bp, Dialister succinatiphilus YIT 11850
atgaaaagattcagaatgaaatcgtcgcaggaagcagatggtgacgcttttagcaccagtttaagtgacttgatggctggcttattaggtgtctttgtccttgcactagcgtattttatgctcaatgtaggcgatattcaaaatcaatataccggtaataccgaaaaacgaaatgccatgctcaaagagataaaggccgaaatgaagcaatatgatgtcgatattcaaattgtggaagatcagggcattattcgaataccggcaggtgttttatttgaatccggagaagcagatattaatggtgaaggagcagaacatatcaatgaattgtcacaagtgctttatcgggtactccaagaggatacttataaaaactcggtagataccattttcattgaaggtcatacagatagtgatccaatagaaaaccatccccggtatcgctctaattgggatttatctaccgaaagagccattaatacattaacaaaattggaagaggataatgaatcactgaagcagcttaaaaatgcagtaggtaatcctattttttcctgttccggttatgcggatacgagaccggtgacgactgatgaagagagaaaggcggaaaataggcgtattgatttgcgtttcactatgatgccacctaaagaatcatcgagataa

SEQ ID NO: 10669 - DNA, 1359 bp, Dialister succinatiphilus YIT 11850
atggagaccttactagaaactctttcaaagcttaaagagagtggaataattctgtccgattatactcgcttatctaccaaggaaatgtttgtgcagcctatcgctattaacagacttataagaagattgggagatatttcgggaaaaccagtcgcaggtattgatgttaataaactgtatgggaaggttactgctgctgtaaaagggaaaaataaaacgattgagtttagccataaagaagccagatgttttcctgtattgttatctatggcaaaagacaataatgaggtcatacggtttctgcttgatcatattgactttcagaagtccgcgtctttccggcgggcggtaaatgcatatttcaatatctatgccgacaataatatggcagttagttcattgggaaagaaaatcagggcggctttggcaaagaatcatgaccttattcatgcagtaccctatttaaggggacacgagaattttttatccgagaaagggccatactatctggcggattacataaccgaaggggttcttgcatttttcaaagataatcctttattccccaattttttcccctggactttatttactaagaaatctattatattagcctcaattaagaacagccagaatgacacgcaggaaatgaatttgttcagagaaattgctcataccgattcttataagaatcttgtcccccgtttggcagaaaatgctatttttgcagttgataaaggaaatgatatccactatcgtaatgagttgctttttgaattaaacaaggcaatgggggatccaagagatgataaccaggcatatcactgggccgatgtaaatccgaaggcagtggagatttatctctattggcgaaagagaacagaccttgatttgttctttaatattatcagccagacaacggtaagagacgtatcagctgataagatgtggatttatcgtaaaagattctgggaaaaatatttaagggatatgaaatatacccgtgtggtactaggtcctgaagcagagaaaattgctaatcgtttatataggagtaagattccctcttatgcgcgccttgaacgctgcagcccgctgcagagtctattcctttgcagtattggaaactatgttttcttggaagtcagccacaatggttcagtaagagtctatcgaatgggagaagcaccaattcccttttttgaaaaagctgggtataggcggacatatagttataccgatgtcacgcaggccaattatgtttacaagaaagcgcatcttcattcagaaactgattcctggcagagtgctttgagaagatggatttttgaacattgtcgtgcgaatggtatgtattga

SEQ ID NO: 10670 - DNA, 3267 bp, Dialister succinatiphilus YIT 11850
atgaatacatcttggaaggttactgaatcaggatattcttttcaaaagacagattctgtggataaagaaaaatgggaatggctcacaggtgagcttgagatgttatattcggagggtaaagccttatatttggattcttgttatgtaatcccacatgatacggcctcgtcttttagcgaagggaaaagacatcttttaggcctgccacctgtatttccatatgatatctatgtaacttccaatggacgtatcggcacatcaggcttctcctttaccatcacgtacagagataagaataatgagccaattatcaatccggtcatcatcggttcctatattgaaattcataaagtggggacgggcatgtcgtttatgttcaatcatgcccagtatgatttggttcgcgaggtcatacattttaataaaatggtagaggaagaaaccgattcgaaagaactggttcctttaggcttggaaattatggctaaagtcaaaagctatattcaggtagctgatgcaacagcagagccatatatcaagagcactaaaataatggctcccgatgcactctccgttaaagtagaaagcaatggtgatggaacctaccgggttatgccagtactcctaaaaaagaatatgagcggggagtatgaagttaatggcgactctttttcgcgtgcttataatcgtaaatttactgcacaaagacactatctgggagaagataaggttcaatatgttttcactaagaaacagaaggaggggttggcaaaagtcaagaaacttggcaaagtcaatcaggaaacagcagaaattatacgaaaacagccgcagagtatttttactgaagacgtattcaattttgatataaatctatattcagatcgcgtgcagtgcattggtgattatatacggaaaaccaatccatttatgctgaatggattgcatggtcattggctcccggatgaatccgttcagcttgaagatggagaagagttatcagacacggatgaattagagataaccagagataatgtgtcagaaattcatgattctattttagaggcaataaataatcaaaaggactcattttcctaccatgggacaaaatatcttataacagagaaattgattgatactgttgatgctgtttttgaacatgcgaataaatatgccaatgatagtaaaaatgtgcctgagaatccgggtgataccataaaaagtacaaaaaatattcttatcatcaaagataatactgatgctttggaatatgtaaataatcaaggcaaatcaaaagattcagatcaaatgactaagttattatttgccgggttacgtcctgaaatccgattatttccacatcagattgaaggtgttcgtcatttggctaactgttggctggaaggacatcatggtgctttattggccgatgatatgggacttggcaaaacattgcaggcttatagctttatttccggaatgaagaaatcattgaaacatatggagtcggtcctcattgtagcaccggtttccttgttgaaaaactgggaagatgaatatcagaaatttgttaagcctgacgtctttgatggactatgtctgctttatggagaacacttatctaattacaagaaagtggagcgaattgcaaatagcgaagaacctatcctgacgttggatttggcaggattaacggaaaatcatatcatactgacaacctatgagactttacgcatgtatcagttgacctttgggaaaatgaaatggtccgttatgattattgatgaagcacaaaaaataaaaaatccacaaagtctggtttctatggctgttcgtgggatgaattatgattttggaatcgccctgaccggtacgccggtagaaaatacgtggattgatttgtggactatcatggattttgtggcaccgggtaagatgcacagccaaaaagaatttacttcccattatgtaaaaagtttacaaaatattataaagaccggtgggaatgctgatgctattgaaggtttgggaatggaacttcgacgggatttagatcctctttttatacgaaggatgaaaaaagatgtggcaaagtctctaccgcagaaagcagttttcaaggtaaaggaaatcatgccgcctgtacaaaagcaggcatatgaatcaattattgcaagagcaagattagcaaaaagaacgaaagggaaaataaatccactgcaaattattaacgatttaagaacatcatcgttattccctaatttagacagaatgaatgaaggattattcctgaatttgagtgcagaggatttctttatgtcatcagcccgtttaaaaaggatgctgtatattctatacgccataaaaagaagaaatgagaaggtcatcatctttgtcacattgcgattaatgcagcaaaaacttaggcgtgagttgagtaaacttttccagatatacataccggtagctattaatggaactgtggaggcagaatccagacaaaagattgtggatgagtttaattctgcccaaggctttcaaatcttgattctatcgccggaagcagcaggagttggtttgaatattacaggagctaataatgtaattcatttgtcgcgcagctggaatccggcaaaagaagaccaggctacggatcgtgtatatcgcattggacagaaaagggatgtgaacgtgtacattccgattgcctatgattcggcgctaggcgaaggggaatgttttgatgagaaattggataaattgctggatttcaaacgttctttatcagacgtagctctttttccgtcagtggaaacccagaaagatcaagagtatcttttaggctgcgtctttaatcatgaggatggaccacaaagtatctcctcggcggaatcatgggatatggatgaattggatagagttaatgaaaagacgtttaagagtatatcggcaaaacttttgcggaatcttggatatgatgtcagcgttgcaaatcggcgaggtgtggatttaaaagcagataggagtaatggagaagtcctgctcgtacgctgtgcacaatgcatatatccagataaactcaatattgaggacatcataggcattgcggatgcggtaaaaaggaaaagtgatattggggctttagttattaccaattcaacatcaatagaccaacatattactaactatgcaagaaaaatggatgtacagatttggaatagacaaacgttagaaaatctgctgaacatgcatcccgttttgaagtaa

SEQ ID NO: 10671 - DNA, 2025 bp, Burkholderia diffusa
ttgaacatccaatcattacttgctggcgtgccgatgcctgcacttatcacgggcgcgtttttggccatccttgtcgttattgtcgttgtgtttttcttcggcccagcgatacgtcacctgcttcggctgcgcgctattcagcgtcgcatcggaagcttcgaaagcggagacttctcttcgcagtttgaagcggtgttcgcgagcgaccgtcggctcgcccatctctggaatgagtatgccgaatcattgcacgttcagcgggaagagcgggacggacaaatggtcgtgtgcgccgtacgggccaccgcgccggccgaggtgtacttcaacagtcaggttgttgtcgacagccgcttgcgcaccgagttttttaagcacgtccccggcattttcactggtattggcatcatcgggacgttcagcggactcatagaaggccttcacgcgtttcaggtaagcgagaacgctgcaactgttcgcggtagtcttgaatcacttatgcattcggtgggtgaggcgtttcttgtgtctgcatcggcaatcgccgcggcaatgctaaccacgctcttcgaaaaatttctccttgcctcgctgtaccgacgtacggaagaaattgcacatgcgattgatgcttcctttgaggcgggtgccggagaagaatacctggcacgtctagtaaaagcatcagaggagtcggcaagccaatccaaaattttgaaggacgctctcgtcaaggagatgggtgagctgctgcgcgagttgactagcgcgcaaatcgaagcgagcaaagaacaacatgcactcgccgcagaggcggggcgccagaacaacgtcgctctcggacaggttattgccgagagcatccaacagggcctcaaaggcccactcgatgaaatcgcagcgaccgttaaaaccgccagcggtgaccagagcgcaagtgctgggcggatgttgcaggacgtaatgacgagcttcagccaacggttgaatgacttgttcggtggccaaatttcaggcctcaccgagcttaatcaacaaacggcccagagcattcagcaggctgtgagcacgctgcacaccctggtcgcgaacatcgaggcttcgagtcagcgttcgacggatgcgatggcgcagcgcatggcggaggccattgaaaagatagagttgcgacaggaggcaatgaacgcgcaatcggctgcgttcgttgagcagctgcgccagttggttgcaacgtctcagtcagagacaaaccagaaattgcaggcgacgttggagacgctcagcactcacgtcggcgaaatgctaaccacgctgagtggcgcgcagaaagaagtatttgagaacaaccgcgcacgcgagcatgcaatgtctgagcgcgcgagcggcgtagtgaccgcgatgtcggaatcgatggatgctgttgtcaaggagctgggcgtcgcaaccacgcagatggcgcacagcgtgaatgctttgacgcagtcgacaacttcgtcagtcgaccgcatgaatgctggcgcggaagcgttgggcacggcgtcgcggaacttcgccgcggcaggtgagcgcgtcgccggtgtcatggggcaaaccgccgacgtctcaaccaaactcgctgcgacagccgggaatttgacgagcggtgcgggagcaatccaggaactgctgagcgactatcgcgctcatcgcgacagcatcggccagcttgttacggaattgcgcgccaccgtcgatgctgcgagaagggaggctgcgttgaccggtgacattctcaatcgcattgagaaatccacaagccaccttggagcggcgcaaaagcaggcggacgagtatctcgctggtgtaagccaggttctcgctgaagcgcacggcgcttttgcaactgaggttaagcgtacgctggaaaaagcgaatgccgagttccatacaaaactgacctcggcagtggggttgctttcgtctgcagttggtgagctggaggtaacgctcgcctcgatgagcaccctgacaccagcgaggaactag

SEQ ID NO: 10672 - DNA, 711 bp, Burkholderia diffusa
atgtttggaactcaaatcgtcgtcaagcgcggaagccgcgacgaggcggaaaagcccttctggatttcctttgctgacttgatgaccgcgctgatggtgctcttcctcgtggtcatgggggtagcgctgctcgccgtgacgaaaaacgtgacggagaaagaaaagcgcgaagagcaacatcgaaaggacatagagcttatcctcgaccggtttcaaactgccgccaagcggtacgacggtatcaagatagaccgcaatcgacatgttatcgattttggtgaccgcgcccgttttgcgttcgggaaatcaaacctgtcgcccgagcaggaagcggtgttgcgtcagttcgttcctgaaatcctgacattggcgaacgatgacctgggcaagcgcgtacttaagcgagtggttgtcgaaggctacacggacagaactggcacgtacctgagcaacctgaatctgagtctccagcgcagcgagcgggtgttgtgcagcatgtttgcaacgaccggtacgagtgtgctcgacgaggcgcaaaagctggacgtgcgaaatctgtttttggtcggcggatattcgttcaatgactcgaaggaaaccgacgaggagagtcgccgcgtcgagatgcgtcttgagttcctaggtgttggcgaggataggtctccggccccggcgcaatcggggaactttggcgactgtgcattgcgatga

SEQ ID NO: 10673 - DNA, 1428 bp, Burkholderia diffusa
atggaggaccgaccacgcttgcagcatatcctggacagcgttgatggctacataacgaagaccgcgtcatacaggcgctgctatcaagggctcgcaaagagctacttctcctttgacatagatgcatgtggggtggcgtcctcgggaaggaagaactggctgaccctgcgagactaccttcacgaccggaaccccaagatacgtgatagcgggtcgagcccttcatgggtcgacacggcaatcgaaaacagacagctttttgatgagtccccgtgcacacgatatgtgggcgagttgctcgaaggcgatacgtcgcgcatagaccatatttgcgagcagcttcaaatcggaaaagagtcgtggtttctgcgccagctcgtgcttacgcaagttgagggcgcgacgaagctcgatgacgatgagtttgtgaggctgctaccccgcttgcttggtctgcttgcacacaatgaggtgctccgcgaccgaggaacgattctggtcctcgaccgatacgctgaggtctctggcacccccttacacccgagattgcgcgaccatgctgttgcctggtggggcaatccgtggctaccttcaaatgcaacccgatggggtggcgtcgagcctgcggctcgagcaatggtctctgactggttgaagctcgaatttatcgagaccttctttacgaagctggcggaggacggtcttgccgaccgtcggcgaatggagttttggaagcgatacgttaaatccatcgatgacatcgagttcgcattaggctcgactgcacgcaattcacgtgaaccggacctggtcgcgctgcgtaagagaatgaagggcctgactcgcgaactcgacgcctctggcgcgaacaacgccttcattatgacgatgggcaagttggttgctgtcgaatttagtggtctcggaaacgcgttttatggctatgacgccagtcgttctctgccattcaatacaagtgagacattgaggctcgggaaaaatgaacgcaactcgttgaagcaatcgaaaagcatgctgtggctaaagcatggagacggcattcatggctggaatcgatgggaggagatgttcgaggcaacactgcgtgagagttttcagattcttccttcggccgaaactttgcgtgcttcaggtagagccacggccacaaacgagcctacgaagtcgacgagtaacgtctcctcccgtgagaacgttggctcttcgcaaaatcgaaccgcagcacacgaatcctactcacacgttgcgctcaagcgattcgcggcaacgtatggtctgcaaatcgaggacaggactgcactcggcggaaacttgtgggtgcgcggtggtgaaggtgacgagcgtgtcggccgcgttttgatggaatggggcttccgtgtgaagccgggcaagggttggtggaaatag

SEQ ID NO: 10674 - DNA, 3753 bp, Burkholderia diffusa
gtgttcaagttattcaagcaagcaaaagcgcgagacgtcatcacctggaagcggcactggtcggataagggcatcgttctaactcggcgaactcaaagcccgggagcgacggtcgacggagacctcgttggcggctacctcacacaactgaccgatgatggcctcgtcagcccagtggaggacgagttcttgttggattggcagtctttgtacgacatccttgaacaaccggactacgggcagctgcgcgatgttctccgaataccgcctttcacggaattccgtcagcatctgcgaagcaaccattcgttgaccgaccacgagttctctattgcgatagatggatggcgcatcgacggcggccgtgaatttcgaggcactatcacggggcccgtgatgttagaaggcgccgtagagatgctgatgcgtcccgcgcaatggaagctctttaatgcggtcattgcattctcgcgccgtggcgacgaggaccactctgatttagccaaccggcaagggtgggggcggattcgcaagctcgcagtcgatgccgaagcaagacttgatgattttctctaccgctcggtagtcttgagtccggaaaagctcaatataggtctgcggcgctcggtggcagttgtagacgaccacgtagtcgaaatcgagccgagcttcgacggagcacctgatgactggctcgacacgttcgacagagcacgagaagttcgcgaccggtacgacattacaacgcaggatggaatcgtccaggttctggtcacaccgaaggtaaagactgtgctgcgggaaatccggcgattgcccggacggcgggtggcaggttctcgggcccaggcctttttgctcaaccccttcgcggctctcggtgcagacgcgattgacgtcatcgaagaatcacaattcgaacgcgctcgtgaggacgctggcctcgactacgaacgcttcgtaccgacgttcgagcgaaatgctgcgggctatccagtacgcatcggcctgcttatcgaatcggcggtggcgagcggaccgacttcttcgaagacgcattggctcgacgacgacgaactttccacgttcgtctcggctctctccaggtcgctggcactgggccaccagctgcttgcctggcagggctatgaccttgctctgcagggagattcggagcagcaactcaaagaattgtcggctgcacttgcgcagcgtcgccatcctccgacgctagtctcctacgctcaggtccacgacctgggcggctactctgcgcgcatcgagtcgattggtgtggagaagccataccattccccgtatatcgcgaagaaggacgagggcgagggttggtttcctgacaaccttctgcctgtcattgtttatcagtcgaaggacggtggcgagccggtggccgtgccgaccaataagcttgctatcgagaagctgaagaacgatgtacaggtcgctgacgcgaagggcatggtgcagctcgacgtcccttggctcaaggaccccatttcgctggctgatgcgaaagaaatcatctcgacgtttgagagcgtcttttcagatttggagtcgggtaagcagtttgacccagaaaacgcgcgcaaacgacccagcgaaagcgtgaccaaaaaacagctagttctgcgcgcaaacattcaggcactcgagtacgaagagttgcgtcgtgaagcactacaggccgtgcccgctcgtccgaagcttccgaaaagcattcgcccggagttctcattgttgccgcatcaacaagccgggctagcgtggatgcagcatctcttcagtctgcaaacggattaccaggttcggggcgccatccttgccgacgacatggggctgggtaagaccttccaattgctggcgcttatggcgtggttgctggagagggaccccactatgaatccaatgctcgtagtcgcgccggtctcactgctggaaaactgggcagaggaagctgacaagttctttcagcctggagcattgcccctattgactgcatacggcgacagtcttgctgcgtttcgcgtaccgcgtagccagatagaccagcgcttacagaccgaggatggcctggtcaagtttctgaagcccaactggattggcgatgccaaggtggttttgacgacatacgagacattgcgagacttggagttttcgtttgcagcgcaaaagtggtccctgatggtgtgcgacgaggcgcagcgcatcaagaacccagccgcgatggtgacccgggccgccaagaagcagaatgtcgcgttcaggattgcatgcaccggaaccccggtggagaacaccctggccgatatgtggtgtctcttcgactatgtgcagccaggcttgctcggtgccttgaacgacttcggtgagcggtaccggaagccgattgaggcgaagactgacgaagaaaaagctcgtgttgaagagttgcgcgctcgcatctcgccgcagattctccggcggctgaagactgaggtcgatacgggactacctccgaaaatcgttgtcgaagattgccggcggctctcaatttctggcgttcagcggaacctttacgcgaaggcggtggatggcttcaaacggcgccaggagcccaaccatacaacgccgttcaagaatcacctcgggttgctacactacctaaggctggtatgtacggacccacgagtgcacggtctaagcgtgttcaagccggaaccattgggcgactatcgtgcgaaatccccgaagctcaattggttactcgggcagctctccgaaatcagagcgaagggcgagaaggcaatcgtcttttgcgagttccgggagattcagcgactcctgcagcattacatcgaagccgaattcgggtatcgtcccgacatcattaacggtgatacaagtgcgtcctcgagtcacgtcgccagtcggcaaaagagaatcaaggcctttcaagacacgccgggcttcggtgtccttgttctttcgccggtcgccgtcggattcggcgtaaacatccaggcggcgaaccacgttattcattactcgcgcacatggaatccggccaaagaagaccaggccaccgaccgtgcgtaccgcatcaatcagacgaagcctgtgtacgtgtattacccaactgtttgggctgacgactttatgactttcgacgtcaagctcgaccagttgctagctcataagagagggttgtcagaggacatgctcaacggcgccggagacgtggcgccgtccgactttaacctcacggacgtggtgccgcactcgcagagtgacggcctggatgagcgcatcacgctggatatggcacagcgcatggggtggcaacacttcgagtgccttgtaggcgcactttggagtaagcgtgggtatagctgctaccggacaccgggtacgaatgacaacggcgtcgacattgtggccattgacggaaatcgaggtcagcttattcaggccaagtccagcggaattgacggaacaaaactcggatgggacgcagtgaaggaggtcgtggctggcgaagcgttctaccgacgtaggcaccccaatgtgtcgttcgaaaaagtctgtgtcacaaatcagttcttcaatgcgcaggcgaaggaaaacgcgcatttgaactctgtcgagttggttgaccagaagcatctcggcgacctgcttcaagcgcatgaaacaaccatgctcgaggtcgagcggatgctctttgtcgaatggcaatcggcggatgtttga

SEQ ID NO: 10675 - DNA, 1947 bp, Geobacillus sp. G11MC16
ttgtatacattttttgaatcgttcttttctcttattaacaaagtcgggaataaagggtttaccgatttgtttctttattttcagctcgcactgtttttagctatggctatttggcaatttgtgcgtattcaaagggaaattgcggtgatgaatcaattaaagccgaagctgctggaactgaatcgttcggcaaatggaactgcctacgaaatcgatcaggccattaacgaactttttgttcaagtgaaaaagtcgaaatataaggaattgtgggagcggtattataatcgtgtttcgcaaaaaaatgaggatgaacgtattaatgtggaaccatttttcggctttgatgtgatgcatcatcatatggggtatcggacattgatggacatgggggctggcattcatgtcagccttggtgtcctcggcacctttgttggcctttcggttggactgtctgaattgcatattaacgatacagaagcgttgcggtcggggattggcagtttgctagacggaatgaaagtggcgttttatacgtctgtatggggtgtgttgctttcgcttatgtggacaatgtttgaccgatggattagcagtacgcttgaccgcaatatcgattggcactcggagcggcttgattttttgcttagcacggacgacgaggagttatttttaaatcgcttggaaaagttatctcgcaatcaggccgaccatttaaaaacgctgttgaccgatgcgcttgagaaggcgatgcagccgatcgccctttcacttcagcaatcgcacggcaacctgcagcaggcgtttagccagcttcatgaccagtttgcccagctgcacgaaggaatggaaacacaggcgaagctgcttgagtcgcaaattgagctgacgaaaaatacgagcgctgatgtaacgagtcggcttgttgacgagattacaggtggaacgcaacagtccatcggccgatttagcgaatttgttcaacagtcgcaagtgtggcaaacggaaatgataaaaacaatcgaagtgtttgtcagccgttttgcccatacggaagaacggcaggcgatgacgctcgagcgaacggaaaaaatgtttgcacaatttgagaagatggcggtagaacttgaactaatgaaggaaagctatcagaaaacgtcgggcatgatgaacagattaggggaaacgttccaacggttgcaagagttgacgaaagaccagctccctgttcaacaggaagtaatgcgaagcaaccagttgctcgctcaaaaatacgacgatttgtcggagcgttttacacgctttaatgcgcagatcgaaacgcagtacagccagttgctcgaacagcttgttcatgctacatcttccctctccgcatcgtttcaaacgatggccaaccggtttgatgaatcgcttcgcattcaaaaagaatcactgcatgattcacagcagctactcggcgatgtccagtcagccgttgcagcgctgtcgccgctcgtttctgaactgcgtgaaacgtttgatcacgttcgtgaattgaaggagcagctgcttgaaatgcaggaagcgcaaaaacagcttcttccggagcttgtgcaactacggacgcaaacgaaggaaagcgttgaggaaacgttgcggacgacgaaagtatatatgcaggagatgacggaacaaatcgggatgctgcaagaaaattggacgacgacgaaagagcagttgacgaaaattactgaagctctccatctctcaatgaaagatttcgctgaaaatattgacagcggcttaagcaaaacgtatcagcattttgatgagacgctgacaaaagccgttcaggaagtgagcggactcgtttatcagtttagtgaagtgcagtcagactttatcgacaacttggaagacctggtggatcatttcgataaatggaaagcaggggcttcgtcatga

SEQ ID NO: 10676 - DNA, 672 bp, Geobacillus sp. G11MC16; identical to SEQ ID NO: 10255

SEQ ID NO: 10677 - DNA, 1281 bp, Geobacillus sp. G11MC16; identical to SEQ ID NO: 10256

SEQ ID NO: 10678 - DNA, 2625 bp, Geobacillus sp. G11MC16; identical to SEQ ID NO: 10257

SEQ ID NO: 10679 - DNA, 1971 bp, Halomonas chromatireducens
gtgagcgactggttctggctgggaatgatggcgatcatgattatcgctattatctcactttctcactattacattaagtatcgtaaaagtgtcaggctggttgaaagtttgataaaagaccagacgcgagaagagctggcttggaagcgccaggaaatcctggagaaggcgcaaagctcacgcgtcaaggctggaaaactgtgggaagagtttgacgaaagcctggtgtactctcctgacagggacaagctctacaatactctggatgccgaccatttcttcaatggaagaacattagcctacgggttgacgtcaagccgtctgctggcagccacaccgacctttctgactgcgatcggtgtgctgggtacctttattggcctgacaattggtttgagaggccttcaggtcgatgctgatgatgtcgataccctcagggtgggtattgcgagcatgataaacggcgccgctattgcctttttgacatcagtatgggggattgggttaagcctgctacttaatgtgatcgaaaagcttgtggaaagaagtgccctgaggcgtatcaacaagctccagcatactattgattttctctatcaaagaatgccagctgagcactcgctgatccatattgctgagtccagtcaggcaagcaaggaggcacttcaggaacttcacgagcgcattggagacaggcttcaggaaaccgtttcggggatgagcgaggccatgcaggaggctatttcagactcgcttaacaatgtcatggccccagccatacaggctctggttgataatgcaagcaatcaatcaaatgaggttcttgaaaagcttgtttcgaatttcatggagggtatgaagacagcaggaagtgagcaaaccaaggcgcttggaactgctgctgaagaggtgaatcaggcagtaagttcaatgagtacaaggatggacgaactctttacgaagctaactgagcagcaacagaaaagcggtgagcatgtagagaccacatctcgcgagctgtccgagcaccttgggaggcaacgcgagacagccatggaccagcagtctgcgctggcggagaagttcgaatccttcatggaacgcatgacagagtcgatggatacacagtttcatcaggcatctgagcgggatgagcaacggaagcgagcacatgaagaaagtctacagaagatatctgaagatcaggctgcggcgcttgagcgccaggttgcctcggcagaggagcgggatcaggtgcgcgcagctcagtttgatgagcagcaaaaggcaatcgaagaacggttcagtggtctggtagaaaagcttgtcaatgagcagcaagagctgatgcgacaagttggagaggcatccagaagcgccaatcagcacttgacaggcatatcgtcccaatacgaaaagctttccacttcgctaagtgaggtggcaagttctgccgaacgtagtagtcagaacatgacaaatagctctacccagctaggcaccttgtcggccaatcttcacaaggccacagtacttcttgatgaaagggtcagtgccgtcacagaaagcctggagcaagtgtcaaccaggaatagtgaagtgctttctggtatctccgagcacgcgcgtacacttgcgaacatgcaggaagccatcagcgacgctgctcgtcagcttgattctgctgctaaattcgccaatgaaggtttcagcgagcttgggagccgtaatgatgagtttatccgtaagttgcgtgaggagtttacgcggctgggtgactctctgagtgagcaggtggaaaatattgagaagcaagccgaggagtggcttaaggcatatagccaggaggttcgcgagcaggtttcggagagaatggaagcttggaataccaatacgatatcgtttgccgatcagatgaagaggacagtcacagcaataagtggtgttgtggatgatctggagcgtcgctaa

SEQ ID NO: 10680 - DNA, 765 bp, Halomonas chromatireducens
atgagttttcataggcgtggaaagtctcaagtagacgaagagaatccatattggatgtcttttgcagacatcatgtcggtgctgctgataatttttattctggcgtcagtcgtgcttattgtgcagctgatggagatcagggagcagttggaggagcagcagcaagagtttaccgaagaaattcagatgctgcgtcaggctgaagaagtgaggagaacgatattgcatgaagcagccgaggagctgcagcgtaggggaatacgtgtttcagtcagcgagaacgacacagttctgagtataccgaatgacattctcggttttgagacagctgaatttgatcttggtccccagtatcaggacacagcgactcaaattggtaatgttcttgctggcgtaatacttcaggatgaccgggtagattatctagataccgtttttgttgagggtcataccgataatcgaccgtatcagggaatgatgggcaagggaaactgggggctttcggctttccgtgcaatttccctttggcagcactggttagaggtccttcctgaggggcggcggctggatagcttgataaaccaggatgggcatccaatattttctgtcagtggttatgctgaaactcggcctgttacagagtttcaagacacggatgcagagctcagagctaaccggcgaattgatataaggtttaccatccgacgccccacggtggaagattatagagcggtgcaggatgcatttgcaggtgattcgcagtga

SEQ ID NO: 10681 - DNA, 1713 bp, Halomonas chromatireducens
atggctgaagggaagctgctagatgtggtaaggagtcgaaacttcggggtattgccagctctgctccagaaaagggtagccgttcgggccctgacccagctgtggcttgatgactcagacgtgctcaagaggctgatgagccccaggctacttgaaatcatggttgacgctcagcaacccaggctaggcagggtgccgcttctcaatatgctccagctatacttccaggaatttgacagactggatcgctattcctcggaaaatgatgattcactgagggaagtatttgagggtctccttgttgaccagatacaaaaggttgagattcagggcgaagagctgacagcagatgatctgatctcggttgtaaagcaaaagggcgactggattctaaagattgacgggccggcacagcttgtcaagcttgccatcaagaatggtatgacactggaggatgcattatttaagtttggcttgaaggggtttgatagcggccgatatgctgatgtctgtcgtgctcactactatatagaaaaacttcatgagatagatgagcaagaatggtctcctgtcttcgatgagctgttgcatcacgatgtctccaaggctccatatggtaatcatggaaaaagaataggccacgctgcgctagaggtactgattgaccgtgtcatggaggccagtgaagcctggcaggatttcatgttgagcttggccggcgatccgcgtgtctctagcagggtcaagagctatcgggagtggtgggcaccccttggtgagcaaagggtcgagaaggtgcgaggctggtttgccaagcaggacctgcgcctctttctgcaggcgcttgaacagtatggagaaactactgataacgctgagttgaagagaatgttccctgctagaaaaacttttctggaagggctttttcgtctgaagatgataaagaacaccaggctgatgcttggaagcaaggccgagtactcagtcaggaagattttgaaaaatgagttgaaggtaaattatattaaactggatggtcagctttccgataaggcagttatctatctggattgtggtgacttttacttgattgaaggttcgcatagcttcaagctttgggtatatctggctccgccaagccataagcatcttagctatgaagtggcgagcctctcgcacttcgacttaacaaatatggtgcctaaggcctacaagaaagagaaccccagtctggagtatacttccattgtccatagtccttcgacttggcagaataaggtatttgaattcctggcagaaaatggcattagtctggatgtcgaggccctcctcagcaaagaggattatagaaggtatgttgcgaggtttgggcttcccgttgtgaggccggcgaaaaggcatgtggtacggccatctcgtgaagcttccagtgatgccggtgctgatcgaaaagaaagccattcaaatgatagtcgcgctcataatgtgctctcacctctggctattcagatattgctttatcttcacaggcaccccgatagcaaggcaagagatatttccaggcatttgggtcttcctttaaaagctatcaaccatgtgctgtatttggacctgaaggggtactgcatgcaagtctccaacttcaactggatcaactcgggcgaaggcgagagggtactgaaaaatagcggggtgatgggtgatgaagaatag

SEQ ID NO: 10682 - DNA, 2238 bp, Alishewanella jeotgali KCTC 22429
atgagcatggacagcaaaatagatacgactaactatagtttaataaaattatggcctgagttttccaggctgtgggctggcgattttacctcagcagagggcttaagtgcggcgtttgttgcggcgctttttgctttagccattatcttttcagtgatgtcgcttgttaactatattagagcaagtcgtcatttgagtttttataagcgtttattaaaagggcttacggttgagcagttattagataagcgccgtgagttaatcaataccgccttacaaaatcagacttatggccgactatggcgggagtttgatgagtctctggtgcatattccacaaaagcaacgcctttgtaatacgcttgatgccgctcacttttttaatactcacactatttcacgcggcttaaccgaaaaccgtttgttggctgcagtaccaggctttcttaccgctattggcgttataggtacttttgcaggcttgcagcttggtttggggcctttgggcgcgttagacccagccaatgccaaagtagatgatctaacccacggtattttcggcatgattggtggggcatcgatagcctttatgacctcagtatggggtgtgttaatcagtgtgctgtttaacttttttgaaaaatgccttgagcgtaatattcgttctgccatcagttcattccagaatgaagtggactatttatatccgcgtattactgctgagcaaagcctatcaaatattgaagactttacccgccagagtaacgagagcttagctgcgctggatgaaaagattgggcacaaaatgcaagaggcgatgaaagaagcctctaatgtgatcagtgctagcgtggcggatagcctaaacaccatactcgggccagcaattgaacgactcgtcaataatgcacactctggctctgaaaaggcgctggaatccttattggatcgcttcttacaaggcattggctctgccggaaattcacaaaaagcgatgatggagcaggcggcaaaagatattgcagctgcctctactggtatgacggagggtttaaaccagtttaccgctaagttagacggtcaagtgaataatcttatgcaacgcaatgctgaggtgttaaaccaggttaatagttcagttcagcagcaacttgaagcgcaaactaaacaagagcaacaacgccagcaacaactcaataccaatcttaatgagtttatgcagagcatgaaaatgcagttatctgcattggctgagcaaaacgctactacgttaaaatccgtacaagccgcgttttcagaacaaatggctgagcagcaaggccgagaggcagcaagacagcagcttctgcaacaacagcaagtggcacaacaagagcaggaaaaacaacggcaagagcagcttaccgttaatttggcaaactttatgggcagcatgaaagcccagcttgctgagttggcggaacaaaacgctagtacattaaaaaatgtacaaggtgagttaagcgggcaagttgaagcacagcaaaaccgtgatgcagttaggcagaaacaactgcaagaccaactttcggtattccaggctgctcaagagcgggtaacgcaaggcattgataatgtattggcggtacagcaacaacaaaacactgaactattaagtggtttacgcgccgttattgatagatttgaagccctatctggcagtcatcaaaatgccacttctgctatgcaaatggtttccagcgaattaaaagccggttcaaaccaattaggtttgctctcttctaatcttaaagcggctattgatacctttggccagcaattatctgccgctcttgagcacgccgatgaagtaaccaaaaacaacgttgagtcagctgaaatgtttaaggacgttgttgcagggttaaatcgggctggcgatcagattactcaagcatcaagcacgttaaatgaggcatcaggtaaagctgagaatggattaactgctgtggataaacactttaatgcattgtcacagtcgttacagacgcatttggctgaagtacaacgacaggtggcagatttactgacttcttacagtgacagagtgaaagatcaaactgttgccaggttaaatgtttggaatgagcataccgcagcctatattggcgcgatgacaaatgcggttagtgcactaaacagtgttgttgatgaaatcgatggcaaagtcagtcgccgtcatgaaggtactgctgtatga

SEQ ID NO: 10683 - DNA, 792 bp, Alishewanella jeotgali KCTC 22429
atgagggggctaaatagccgcggaagcagccatcaggtggatgaagagaacccatattggatttctttttcagacattatggcgggcttgctggtaatttttgtgttggcagccgtagcgttaattctggagctgacacaaaaaagtgagcaatgggatgaggcaattcgggaaattgcaaaagcagaacaggtaagaaaagacttactgcgcgaaatagagcaagaacttaacgccatgaatattccggtgaaaataagcgataacgatacggttttgcgcattcctgaagatgttcttacctttgcccaggggcggtttgacattccggatgatgcgcgttcgcagcaaaatgctttggatatcggccgtgtgctttttaacagcattaccaaggaagagcgctggaaatatctggataccatttttgttgaggggcataccgatcccgttccatttcgtaacaatgcgataaaaggtaactgggggctttcaacattccgggctatttctgtgtggaattattggaatgaggccatggcggaaaattatcgccttgatgctttaactaaccatgttggaaaaccgctattttcagttagtggctttgccgaaacgcggcctataccttgttcattgggaagtactgaggtagctgatagcagtatctgtccggatggtgttatgactgctgaagaatcgcatagcaaaaatcgaagaattgatattcgctttaccgtgcgtcggcctgcattggaagaataccaagcggtaaaacaggtgataaactaa

SEQ ID NO: 10684 - DNA, 1488 bp, Alishewanella jeotgali KCTC 22429
atgcgcttgccagatttaacctttgagctgccggattggaaagcttctgattttacgcggatacatgatgctgagaagaaggtaaaacagattggccgtaaagcgggaactggctctgattcatttcataaagcttgccttaaattactcaatattgtgctgcaaaagcagcctgaaaagctcgtctccaatattacaagtagcgttgatgtcagggcctttacctttttgcttggggtttcagaagagtttatcaggcagttttctttaacccgtgctcagctggatgtgttgatagcgccccgtgaccccattagtaagttatctttgctccagttgattcgtgcttattttgttcgctatgactctatcgccaacacccaggtattagcggattggcgcgctttgatttgttcgcaacttagtcagctaaagttgtcagctgcgctaagtgacttagcctcttacgttaagcatgcagcagtattgttttccgcaagtggcccagcgcaggtggttgcatttgccagaaacaagcaaagtgatttggatggtgtattgcgtgagctggggttaaatgcttttagtcatggccgttttcttactttgtgtcgctaccaatattaccttgaaacattaaaaacgatacctgttggtgctgagcatgacattttaagtgaggttgtaaaatcagaagtcattaacgccccaattgatgacagccatttgctaggccatgcggtattggagattttaattgatcgtgctgcaggttcaccaatttcacctgcctggcagagtgttatcttaagtattgccggagatccgcgagtaccaacctctagccctaattatcaaaaatggtgggtattattaggcgaacagcgtattggcttaatgcgtggctggttaagccgtttcgatcttgcgctgtttttgaaagtgctggagcaaagtgctcgtgatggcagtattggagatatggagcgtatgtttgagccccgtaaacagtttatggagggcttgctagagcaagggttggtaagccaatctcgtttgtttttaagccgacatgccgaacattatcttcgaaaatcctttaagaaagaagagcttccagagtacgcgctagtagattccccagaaacgtcaatgatttatctaaatcttgctggcaaagtgcatatgattgaagggagccatagttttaaacttaagttattagatactttaccaagccaatttaagctgctggattacagtaagcggctttattttgattatgaatttcgctctaaaatcgtccgcatttatacggaagagtttggcaagcgtcgcggcatagcagaattaacgcatgatgtgcacttaaattggcagcacaatgctattcaatttttatctgagcagggcatttctgtttccgcatatgagttaattggtgcggcgcgttatcgggaatataagtcgaagtttggggtgagttag

SEQ ID NO: 10685 - DNA, 2961 bp, Alishewanella jeotgali KCTC 22429
ttgttgcactggcgcatagatccggttgaaggtgtcgactttattattgaacgtaaagcgcttgctgacgaagaaggttatgctattagaaacccctattttgggatgcaattggcttacctaaaaggcatgcttgagcaaaacaaggcagtaagaaacgctgatggctttaccatcttgtcgcaagatattgtgggattgggtgaagactttattacgctctttgattttcctgatttttatcccggcagttttaatacccgttttgaaggtaacacaggtaaagctgcatttaacgttgcccttgagttgatgctacctggtggcgatagtgttccacgttttactgttttcggccctttattaaagcttgctgataacgaaatgtatatgttacagccagcggagtggcgtgctttgcaggcacttaaatttcatcaaggcttagctgctgataagcgtggtgagtatgaaaataattggttagtgttccaactgcaattagcaaagcgagcaggtatgaaaattaacctggcgcatttcgagaaccttgaagttttccagcctgagaaagttggtgtagctgttgataccttacctaacggtgatttaatactgacaccctcttttggttcaggagtaaatattgatgatatccataaccggcttgggcaagtcggctctgacgataaacagtgtattcttagagtaaaaaataaatttgttttactggatgagcaaaggctggaagccacaaaagaaattctaactaatagacgcatccctaaggcacaggtggcttcttttttgaagtcgcctactgcctatttaaatgcagcattaatcgacttagatactggcttttcgttgcgggtgcatggtgctgaaaaattttgtcagcgctatttcggtgacgtggagaaatctggcgtaaattggtttggcaatacagacgatattgttgaacctgttgaaaagcttactaccattattgatgatcagcagaaacttgatgaggttagggcattattttcggatgctcagaagaccggcgctgacatgattgatgttgatggctgcactattgatgtttctgataagccaaaagttcaaagcacacttgatgatattcagttggctattgatgagggcaggcttaccccgaaaccagccgagcaggggcttaccgatgaagaaattgttactaccactgaaagagccgttgttgcgatagacagtaacgatgacagtattgagtacagtaaagactcacgagtgacaggccttgatttatcacaaattacctttacctctgaaaatcttcagcgcttaccttttccacatcaggatgagggagtacgttggttgctggcgcatttagagcaaattaaaagtacaggcgagcccagtggggcaatgttggctgatgatatggggttgggtaaaacctatatgacactagtcgccattgcagaatggtatagacgttgtaatcaacttaacgagccacaaaaaccagtactgattgttgccccattaagtcttattgaaaactggcaagctgaggtagctgtaacctttaatcaatcaccttttagtgacattgtggttttgcaagcagggggcgatttaagccgcttcaggctggaaggggcagggcgagaaaccttacaggaatttgtagatgacgatttgattcaggatgcagattcgattcgttatgcgcttaaaatcggtaaagtatatggctctgatcgattggatctgccacggcgtttggtattaacaacctaccagacactaagggattatcaattttctttaagccgggtagattggagtattgccgcctttgacgaagcgcaaaatttaaagaatcccaatgcattatctacgcgggcagccaaaggactaaaagctgattttaaattactcgctactggtacgcctgtagagaatacgcttaaggacttttggtgcttatttgataccgcagttccgggattacttggagcctggcaagcatttaggaaagattttattgcaccgattttgtcggcttctacagagcaagttaaccaagtaagggttgatgttgggcgtgagttacggaaaaaagtgggtgactacatgctgcggcgcaccaaagcggaaaagctaaaggggttaccagaaaagcggatttttagtggtgatgctggagcggatgaaggtagttatttacctgtgttgtcagcagtgatgtcaggcccgcaacttgcctattacgacgacataatagccagtgttaaatcctgcaaacctgaagaaaagcgtatggtaattctaccgagtttacgcaagttaaaggttgccagtattcatcatgaaattgatgctaaagcggcgatccccaaagtcagtaatgaactgttaaagcaagcgcagttatctgtaaagctgcaatccttagttgccatacttaaagaaattgaaaagcgagctgagaaggtcttggtatttgcagagaccaaagctgttcaagcttatatttgtgcgttggtgaccagtatctttaaggtgcaagttgaaatcatcaacggtgatactcaagccgtggcaaccaaatacgaaacgcatacccgtaaagccataatcgatcgtttccaaactgccgcaggtttcggcgtgattgttatgtctccggtagctgccggtgttgggttaaccgttgttggtgcaaataacgttattcatgttgagagacactggaacccagccaaagaagctcaggccaccgacagggtttatcgaattggccaaacccgtgatgtaaatgtttatatccctatggcgttacatccaaaactgcgttcctttgatcagcatttaaatggtttattagcaaacaaagttgacctaagtgatgcggtagtagcgaatccgaccatagagcccagtgatttggcagggtgtttttaa

SEQ ID NO: 10686 - DNA, 2190 bp, Brenneria sp. EniD312
atgtcctggcttaattccctcttagtgacacttacgtctgtggaaccccattgggtgcctgtcactgttatcggtctcgttagctttgcagtcgtctgctttatttacttttatttgatcagagccattagaattgtgaatggccttaaaaaatacacacaatcaattatcagcattgaaaacaatgctccagaggcccagcttgaacatcttaagaacctgtttcagcggcctggactcaggcacgcgtggaatgagttcgaagaatcgttgcacccgcagcgtgaactgagtaacggggaagaaaaaatccttcgtattcgcgccactgcaccgagtgccagtttcttctctgagcaacaattgatcgatattcctttaaacaccgaattcttcaaacacctgcccggaattctgaccggtgtggggattatcggcaccttctatggtctgatgattggtctcaaccacttcgatcccagcacaccagaacaagtcaccagtagtgtcaataatctgctgcacgatgtgttgtatgctttcttgggatctgcgttcgctatttttgcctccattcttgtcacctggttggaaaagctatgcatcgccaagtgctacaaatatctggaaaaattcactgctgctctggactccctttatgacagcggcgttggcgaggagtacctcgcctcattggtaaaatccagtaacgaaagtgcgacccaggcacgtcatctgaaagagagcctggttaccgatctccgcgatatgttgctgcaactaaccgaaaaccagaaagccgaaaatgaacgtctggctaatacgttaagcaccacttaccgcgaatcaggcgcacaatttgccgagcaagtcagtggtgcgattgaaaacagtctgaagtcgcctctggataaaattgccggtgccgtgcagacggccagtggcgatcaaagcggtatggtgcagaacatgcttcaggatgtgctgacggcatttatggcgaaactcgacaccacctttggccagcagttcactaatcttaatgaaatgatggggcaaactgttggcgcgattcagacaatgcaaaacggtttcgccacgttattacaggacatgcgtcaggtgagcgacgattcccgccaagggagtgcacaacttatcgagcaactgttatcagagatgaaatctggtcagcaagctatgcaggctggcatgaatgacatgctcaccagccttcaggcttcagtggctaagattggcgcagaaggtgaaggggccggtgagcgtatggctcgccaactggagaaaatgttcgccgatagcgaagcgcgagaaaaagcacaggcagagcatatggccgcctttattgaagccatccaaaactcggtgcagcagggacagagtgccacaatggaaaaaatggcggcctctgtcgaggcgcttggtgaacagttgggtagcttgtttggacagatcgataagggtcagcaacagatttcagcgaatcagcaagcgaatcaacagtccttgcacgaacagacgcagcgagtgatgagtgaggtagacgatcagattaaacaactgatcgaaactgttgccagccaacatcagggaacgactgaaacacttcgcctatttgcggaacaaaccaaccgacagattcaggatatgcaaaatggcgcggacaaaatgcgtgttgcagctgaacgctttgaacacgcaggcgatcgggtatcggaagcaaatcacctcactgctgatgtactgaataaagcgcaatcggcgggttcatcgctctctcttgccaccagcgaacttacatctgtagtggccgattatcgtaacaatcgggaagtcgttagcaaatccattgctatgctggaattactcgccgctaatacacagtctgaacaaaccacgcgtaaccaatttattgccgatcttaaacagcacggtgaacgtctgcagagctataaccgggaagcacaggcttttatggaaaatgtcagtgacgtgctagggaaagggtttgaagacttctctgaaggtgtttcacgtagtctggataaaacactgggtaaacttgatgtagaaatggcgaaagcttccaatctgctcgccggttctgttgaacagattggagaaagcgtcagcgagcttgacgatgttctgtcacgcgtgcgtgcgtga

SEQ ID NO: 10687 - DNA, 741 bp, Brenneria sp. EniD312
atgtttggaaacgcatttggcgttaaaaaacgccgcagcgatgaggcggagaaaccattctggatttcctatgccgacctgatgacggctatgatggtgttatttctggtcgttatggtggcgtcgctgagttctgttacacagcgcattcaacgtgtggagcagggggaaaaaacaagggggcaggatatatccaaattgtgtgagcgcttggaattacatgcccgcaacgtgaataaaactatcgttgtagattgccacgataaccgcatcagttttggcgaagccgggcgtttcgatcacaaccgttttttcctgaatgctgaagggcaaaaagcactccaggatgttgttccgctggtgctggaagctgccgacagtgaagagggcaaaaagtggtttaagcaaatcgtcattgaagggtttaccgacactgatggctcatatctgtataacttacatctctccctacagcgctctgaatgggtgatgtgtagtctgcttgatagccgcagcccactgcaaaaaggtctttctgcagaacaacagatccaaattcgtaaacttttccttgcaggtggcgtctccttcaataatgccaaggaaagcaaagaagctagtcgtcgcgtcgagttacgtatgcagttcttcgggcttaaagataaacgagataaggccgatgaggtggattttccccttgtagttaataaagaagtttgtcagttggtaatgccccaatga

SEQ ID NO: 10688 - DNA, 1683 bp, Brenneria sp. EniD312
atgacgcctgcactcaattctctttctcaacgtattgccgctaggctttcttccagtcaacgggatgaccattatctacgtaatgatttccataagttggcctccgctgctctagatatggaaaaacggtttgataaagcagaaagaatccccttaccgcctcaagaaatgcggctagcggccctgcgtcgtcttcgtctggcggaagaactcacggaacgagagtggcggatggtattttacggtcttgccgataacgatccgtcatatcctgaccagccaatcctgctggaggatgatgtattttttcctgaggtcgacaacgctatcaagacgcggttggaatctaacgcgttaaaacgcaaggattgggcggcactttgttcaagctattttgcttaccagcatgaatcacccgagacaaacccgcactggtgcgtattgcgtgggcatatcgcccaagggtacttcgtggtgaaagccgcgatacgacgagaaaaatcatggatgaaaaccattgagttttatcatgacatttttaccccacaagctggaggcgtgatatccacgcagttactgtcaggcgaaagaaactcactttcagcattagagaaaattgcgcaaatccccgatagtagttggttgtggaaacgcattttcactgttcttttagcacaattggatactcttgatgatcctctgtttctggacaaacttagctggttgttaggtctggctgcgcaatgggtacgttttcgtgacgatataatgactgcgaccctgactcgctattaccattctatctatcgcgatcaggcacattcagcgctgaagcaggctgcgctggaatactgggataatccccaactgaaaagccagcaaaataagtggcaccagtatgtcgccgagccggtcgctgcgatggtacggggatggctggcaaaacaagacctgacacatttctttgaactcttgcgcggtaatggcgatgtcgatcaggcacgattgcactactggcttcgtttcgccaatcagatgggatttactcgtatcgtcatggggactgatgcctggcaagatcgtggtagcgactttgtgaaattccgcgacgagaataagggacgactgagctacttacgaggtggacgtagctttgataatgccatgattatgcagatcaacgattatctgttcgttgagttttccgggacaggaaatgcgatgtacgcctatagaataggtcacgcgccatttaatcctgaatcacgcacgcttgatattaacattcatctaaaagaccagggacgctgcgtactcagaatgcctcatgcacctcgtgctaaggggtataacaaagtacggataactggctggatgttgaaatatgacgatgagctgcgcaagttgggtattcggtggatggcggaagaacccgttaagtttgtcgataagaaaacagcccctccagcctctctgtctgccattaaaattatcaatccgttgcgtgatacggctatacagcgcttggttgaagggacttcatgtgtcgtcagcgataatcgacaaaaaggtggcgtgctggccgtacagctcaatacaccagacgacaccatagaaagagagttgttacgactaggctttgcgcctgtggctaaagaaccgcatcgttactggatcaaataa

SEQ ID NO: 10689 - DNA, 3252 bp, Brenneria sp. EniD312
atgctgaaacgcctgttaagtaaactgacgggaaaccgtcagcaaatagaacgccacctaaagaataaataccaggttgaggaaaacggactcagctttccgctatcgctggttgatgattcgcaactttgggcattggcatcctggcttgaacaactggctgaagaagactatctgatatcacttacagaccggtggttgttgagttgggatgcattgtatcgcctgctggaggatgaggaacatgccagcagcctgcctcttatcggtgtacctgagatactgcctttacgcgcaagcctgagttcacgtggtgcattaagtgaccgtgattttcgcgtctggattgctgaatgggtcacgcttccagcccgcaagccgatccgtttcagtcgtaccggtgccattttaacccatgaaaaccagcaacatttggtatcgcgggaaaattgggcactcttacaggcaacagaacaactcagcgcacagcaaaatcagatcccaggagaaaccactaaccaactgggatgggccgctatccgcaaatgtgcaaaacaagccgcagcaaaatttgatgattatttagaaaaaacacatgtcgtcaaaccaacttcattgtcattacgtctgcgtaaatcaacggttgctgatactgctgttatcgaaattgagccccatttcgaggaccagccagctaactggctagacagttttgacaagaattcgcaggttcatgatagctatcgtatccctggtgagaatggcgaacttagccacgtcatcatccctcccgaagtgaaagaagtcctaaactcaatacattcgatccctggtcgtcgagtggccggaagcgaagcgctttcttttgttcgcaatccctatacatttttgggcgaagatgccgccaatgttattgcccccgaagaacatgagcaggcgttgtttgatgctaggattttcttccatcatttcaggttgataccccaacagaatgctgagaataaaatcgaggaagtgacgctggtacttgaaccagtttcaccagttccccagccagaggtcacttttgtgttctcagccccctgggagcttgaaaaatttatacagcaactcggtattagcgttgcagcacagatgcctgcaggctcctggcaaggttacgaacttgagttaagccagttcaccgaacaacagtggctcgattgtcaggctctacttacacgctggcagcaagaaattgaaggaaaagaatttagcgatgtgctggatattgagaagtatggcgatcgggtgattggcattggtgaatttgaaaaaatttcctctccttggctaaccaaagcgcagagtgagaactggcttcctgatgacatcgatttctccgcattttcagtcgaaacactggctggctggcaacctgaaaatcttcaccatttcggtgaacttcaggagagtattgctcaggcagaagccgcaggtgaaacacatatcaccacaccatggaatgacagcgaattaccgctggatgcagccaaaaccttcagtaagaactgggaaaaacagcagagcgctgaaaatgaatctcaagataaagttgtagataaagcggcccgagctgtactcaaaattgagcagaatattgaagaagcggcctacatcaaacagcgccgcgattcactcctcaatgcgcgtcatgcagaacctgaaattcctctgagtctgaaagaacatatccgactcaaagatcatcaacgtgaaggcgttgcctggctccagcaacttttccttagttcacctgaggaaactgcgggttgcctgttggcggatgatatggggctggggaaaacgctgcaaattttgagtttcttggtctggtttattgaaaaatttccgcaggaaccgccaagtcttattgttgcccctgtctctcttttagataactgggaacgtgagctggacaacttcttctacactgcgggtattcccgtgttgaaattgtatggtgagacgatcaaagcggtgaaataccctaaacaggctattcctgctcatctgcagtttcagggaatcaaaaatctgcttaaacctggctggcaaggtgaggcgaaaatcattctgacgacttacgaaacgcttcgcgatcaagagttttctctggcacgccagccatggtccattatggtgtgcgatgaggcacaaaaaataaaaaatccagcagcgttaatcacacatgctgccaacgcggtacaagcaaggtttaaagtggcgtgtaccggtacgcccgtcgaaaacacacttgttgacctgtggagcttatttgattttgcccagcctggattattagggtcactaaatgaatttggtaagcattatgttcgtcctattgagaacgacgctggccgcgatacggaacgactggagcgtttgcgggcgctgatagaaccccagactttacgccgaaccaaagaagaagttgcgcgtgatttgcctcagaaaattgaagtggaaagctgcaaacaattgacgttgtccggcgtgcaaaaacagctctacctttcgtctgttgcaaattggcaacagcagcaagcattgagcgaaggaatgcagcaggccggagcaggtatgttaggtttgttacaccgattgaaactcatttgcgcacaccctgcagtagttaatccagagccacgttttcgtgataactcacctaagcttaactggctgttaaaaatactcgaagaaataaagcacaccacgcaagataaggtcattatttttactgaacttcgagatttacagcgtgaacttcaacatgcgatctatcagaagtttggtttccgtccagtcattattaacggcgataccagcactaaaagtagtagtcagaatagtcgtcagcggctgatcgatgattttcagtctcagtcaggttttggagtgattattctttctacggttgcagttggattcggtgttaacgtccagaaagccaatcatgttatccatttcactcgttgctggaacccagccaaagaagatcaggcaacagaccgggcgtaccgaattggacaaactaaagatgtgtatgtctattatccgacggtgagggacactgaaataaccacatttgaagaaactctggatgaccttctgcagcgtcgacgtgcattggccagagatatgctctgcgctactcctgacttgagtggtgcagactttgaggtccttttgaaagggggcgtagatgtttaa

SEQ ID NO: 10690 - DNA, 1983 bp, Thiocapsa sp. KS1
atgaccgtcgatctggatctcttgctcgaggcaccaccggcacttctgggaacgggtagcgtccttgtcttcctcgttgtcgtctttgtcctcttcttcttgttgcctgggctgggcttgcgctttcgcctctcctccgttctcggacgcctgcgtaggaagaagcccacgacactcagcgatctgcagaccgtcttctctgtcaacaaaaagctgacgcatctttggaacgagttccgcgacaccctgcatgcgcagcatgaggagcaggatggtcaactcgtcaccgtcgctcttcgtgcgactgccccggctgaatccttcttcaacgggcagtacatcgtcgatagtcggttacggaccgagtttttcaaacacctcccgggtattttgacgggcatcggaatcatcggaacatttcttgggctgatcaccggcctgcaggcattcaaggtgtccgaagacgcaggacaggtccgcgagagcctggagttcttgctgggcggggtcttcgaagccttcttggtgtcggcttcggccatcacgctggccatggtcgtcaccctgctggagaaactcctgctggcatcgctgtatcgatgtacagaggagatcgcgcagtatctcgatagcgtcttcgtggccggtgcgggcgaggagtacttggctcgcctcgtcgccgcctccgaagacacggcgagccaatccaagattctgaaagacgcccttgtcggcgacctaaaagtcattcttcaggagatgaccgagcgccagattgctgcggcgacagctaactcggagtcaatgggacgccagatcgccgggagtattgagaacagccttcagggtccactccagcagatcggaggcgttgtcgccaaagccagcggcgaccaaagcgcagtcgccgccgatctgctcaaagacatcatggcgagcttcagccaacggctcaacgatctcttcggcggccaaatttccgggattcaggaactcaaccagaagagcgccgagtcgatgcaggaggccgtcgcatcgatcaaccaactcgtcgccaaactggcggacaacagccagcgctcgggtgatgccatggccgagaggatggctgccgcggtcgaggacatggaacgtcgccaagccgacatcaatcagcagacccagtcgttcgtcgaagcgattcgcgagatggtggcatcctcgcagaccgaaacgaacgcgcagctcaacgcgtcggtcagtgaactgagcaggcaggtcaccgacatggtcggggcactgcaagcgcaggccgtaaaatcgcacgaagagcagcagcggcgcgagcagagtctgagcgagcgaacgagtggaatggtgacggcgctgggcgactcgatcggcgaagtcgtcaagcaaatggcgacctcgacgtcccagatgcagcagagcgtggcttcgctcgagcgaaccacggcaacatccatcgacaagctgaacgccggagcgagaaccctggagcaaggcgcaatcgccttcgcgacggcaggcgacaaggtcaccggcgccctggaccaagcatcgacggttgcgaataagatgaccgaggtcagtggggccttgacgtcatctgccttggcgctccaaagcattctcgccgactacggggcgaatcgagatgcgacgaacacgatgctggttgagctgcgcgccgttgtcgacgcggccagacgcgaagcatccatgacgcagcgagtgcttgatgacatccagaccgctgcgaccaagctcgccggggcgcagaaagacactgaactctacttggagggggtttcgaatatcctcgcgcaggcccaaagcacattcaacgatgggctgactcgcacgctggatcgggccaacagcgacttccacaacaagctcagcagcgccgtcgggctattgagctcctcgatcgaagagcttgaagccagcctcgctggcgcaaccggctcgcgcagataa

SEQ ID NO: 10691 - DNA, 729 bp, Thiocapsa sp. KS1
atgttttcgatgcgctcaacggcgagggcacgccctcgcgacgaggcggagaaaccgttctggatttcttatgccgacctgatgacagcactgatggttttgttcttggtggtgatgtcggttgcattgctggcggtgaccaaaaccgttacggagcgtgaacaagaagaagagaatcatcgccaagacatcgaggagctgctggaccggttcgaggccgtaacgaatcaagagcagttcgcggggattacgatcgatcgagagagcaacgttatcgatttcggatcgcgagcgcagttcccgttcgcgcggtccaccctgacgacggaacagcagacgctgctgcgcgcatttgttcctgcaattttggagaaggcgaacgacgagcttggccgccgcgttctcaaggagatcgtcgtggacggcttcaccgacaagacaggcacctacctggcgaacttggatctcagtctccaacgcagtcaacgcgtcctttgtgcgctgttcgcccgcccgacgcctgaagagcgtccgatgtcccccgaggagttagagcaggttcgtcgtcttttcgtcgtcggcggctactccttcaatgctgccaaagataccgatgagcagagccgtcgcgtggagatgcgtctgaggtttctcggcgtgcgcgaaacgcggacaccggcgatcgatgtcgcgccgggtaacttcggaacctgcgcgctgggtggatga

SEQ ID NO: 10692 - DNA, 1731 bp, Thiocapsa sp. KS1
atgatgaaggcactcgaacgcctgaggttctcgctcgagacgggctccgcgccggcgttgtcccgcccctgggccatcgagcacgatctcgacaaccacatcgcccgacttgagaagcatctcaaggagggggcgagcacccatatcccacgcgatctgcagttggaggctgttcaacatttctggaccagccagcgcgtggagacgctcaaggacgcgcgcctcgtgtctttcggcatcgcactccccgtcggacctcgacgattgcgcgtcatcgaggacgaggagaggtttccggctctcttggacggtgtcgaccgttaccttccggcaccgaggcaataccgacgctgctaccaaggcttgctgtctggctacttcacgtacgacccgcacggcaacgacgtaccccggaccggtcggaaaaactgggacagcttgagggagtacttgaacaaccgctccaagcgggtcgtcgacggcgagcgcaatccgcagtgggtcgactcgctgcagcagcacacggcgatcttcagcgacaccccgtgcgcgcgctacggagccgcgctgcttgccggcaacaagagcgaagtcgacgagctgagggaggttctcaatatctccgacagctcgtggttcatgcgcgaactcttcctcgcccaagtggaagcggcggtgcagagaaacgatccggatttcctggagattctctaccgcgtactcgatctcctgaaggaaaacgagatcattcgagacgacggcctggcgttggtcctcaaccggttcgcccgcctgatgcctccaccgctggccctgcccctgcgcgacgcggcagtcaactggtggggtaatccatggcttcagtccaactcgatgcgctggggacgcgcgacctcggacgcgcgcgcaatggtcaccgagtggctgaagctcgaattcatcgaggcgttcttcacccttctggctgaagagaaatcgggcgacagtcgtcgtctcgcgttttggaagcgttacgtccatgcgatcgaggacatccactttgggctcggatcggatgcccgaaactcgaaagcgtctgattttgttgcgctgcgcaagaagatgaacgggttgatcgttcccttgaacgatccaatcggctcgaacaacgccttcatcatgcgcatggggcgggtggtcatcgtcgagttcagcggctacagcaatgcctgctatggatacgacgccaccgaatcactgccctttaagtacgaccggcctgtggtgatgccggtcaatgccaagaactccctcaaacactcgacccgcaaactgtggttgacgcacaaggacggcagacatggccgaaagtgggaggagaagttcgaggagacattggccaatgactacaagattcgccccttgagcgcatccgttcaaagagaagtcctcggcggtcgttccgagcacgtcgtagagcacgtaccccggccgccggctcagccgccaaccgaccgagatgggcgtttggatcctgtggccgaggtggcgtcctggaaaacggtgaaatacacgcgcgagacgttgtcacgattcgcccgagcattcgacctcggcatcgacgacctcaccgacaagaacggaaacctgtgggtgcgagccgatgatgcacacatcggcgtcaatgaagtgctcctggcctgggggtttgagttcaagaatgcgcaaaagggctggtggaaggcgcgatag

SEQ ID NO: 10693 - DNA, 3750 bp, Thiocapsa sp. KS1
atgctccgagtcttcaagaagaaccggaaacactccgaggttgcctggtatctacgcgaaaccgaagagggaatcgacatcggggggcatccggagcccgattctcgtccgctgaagtcggcattgttggggagctggctcgaccagctcgaggaagaaggtcacgcgttgccgggagtcgacggcaggctcttcatcccgtgggatacgctctacaccctgctcgagcatcacgagcacgcggaagctgtccccatgctggagctcccatctgtcggtacggtgcatgtcgcgatctcgagcaaggcatcgctcgaggacgcctccttcagcctcgccatcggcgattggcgggtcgaatcaaaaccggtacggaacgcctcactgagaggcgctgtgcttgagcatgccgatggtcgagtccttttgcccgccgcgacatgggccgtcgtccgcgacgtgcgcgccttcgcccgccgtccggataccgagcggaacggacatttccaccgtcacgcgtggggcaggattcgacgcttggcgggtgcggcgtccgcaaacctcgactcctttctccacaagaccgtcatcctgacgcccgagaaactggccctcggcatccgcaaggcacggaccgacgacgataccgtcatcgaggtgcagccaaccttcgacggagctccgcccaactggctggagcggttcgaccggcagagcatcgtacaggagcgctacgacatcccgaccgaggccggcatcgtccaagtcatcgtctcccccaaagtcagaaccgtcttggaggagatcaaacgtctcgacaaccgccgggttgcaggagctagggctcaagctttcatcctcaatccctatgcggcgctcggcgaagatgccaacgacgtcatcgacgagaaacagttcgaggacgcgcgggcaaaggccggcctgaattacgagcggttcctgccgcagatcaaacgcgacgagctgggctacccgctgcaagtcggactgctcatcgagacgacatccgctggcggtgcgatcgcgtccgagtccgtctggctcgacgatagcgaactcgccgcatttatccaggcactgaaatccgccttggcgaagagttatcagctcctcggctggaacggctacgacctggagttgcagggcgacgccgctgagcatctcgatcagctcgaaacggcgcttgccgagcgtcggcatccgcacgttctcatcacctacgagcaagtttacgacctgacccactacgcgtcgcgcgtgcagggaatcggcttcgagaagccatattactcaccctacatcgcgaagaaaaaggaagaagaaggctggttccccgagaatatcgtcaacatcatctcctgggtacccgagggcgagaccgatccggtggcgatgcccatcggtccggacgccatggcggagatgcggcagaagattgccgtcgcaaaggcggccgggaagtccgagatccaccttcctggatgcccgaagcccatgccggtggcggaagcggagcgcattgcgctgaccttcgacgaagtgtatgcggacgcacaggcgaaggagcttgatcccgagcaaccgaaaacaccgaggtcaggcaaccagatcaagcgcaagagccccgttgtcttctcgaacatccagggcatcgactacgccgaagaacgccgcgccgcgctgtcggcaaacgggcgtgagcctgagttgccgtcgtcgctgcgctcggattgcactctcctcgcacaccagcgtcagggcgtagcctggcttcagacgctcttcgaagcccataggaactacaactgccgcggcgccgttctggccgacgacatgggcctcgggaagacgcttcagctcctgaccttgatggcatgggcgatcgagaaggatccaaccgtcgacccgatgctggttgtcgccccggtctctttgctggaaaactggaaggacgaagcaaagaagttctttgaatccggggcgctgcccatcctcaccgcctacggtgaggatctggcagcacttcgcgtgcctcgcgagagcatcgacgagcggctccgcaacgaagacggcctctggaaattcctcaagcccggatggctgggtaacgctcgcatcgtcatgaccacctacgaaacccttcgcgacttggagttttccttcgcctcgcagcgctggtcggtgatgatctgcgacgaggcacagaagataaagaatccatccgccatggtgacgcgggccgccaagaagcaaaacgtcgccttcaagatcgcttgcacgggtacacccgtcgaaaacacgcttgcagacgtctggtgcttgttcgactacgttcaacccggactgcttggcgcactgaacgcattcggccaacgataccgcaggcccatcgaggcccggaccgacgaggaacggacacgggtcgaggaactccgcaccctgatcgcaccgcagattctgcgacgcaccaaagctgaggtggcaaccgatctaccaaagaagatcacggtgaactcatgccgccgcttgcccttatcgtccgatcagcgtgacctctacgggagcgccatcgaactgttcaaacgtcgcaacgatcctggtgccattgttccgtttaaaaatcaccttgggttgcttcactacctccgcctgatctgcactgacccgcgtcgacatggcttgggcgtttttaaaccggagatccttgaagagtaccggaaacgggcgcccaagctggattggctgctcaacgagttgaaggacatccgtaagaaggacgagaaggtcatcatcttctgcgagttccgaaacatccagaggctgcttcaacactacatcgcagaggcatgcggcgttcgccccgacatcatcaatggtgacacctcgccgtccgcctcacacgcgcagagccggcagaagcggatccggacgttccaggaaaagcgggggttcggcgtcatcatcctctcgccgggtgcggtcggcttcggcgtcaacatccaggcggccaaccacgtcgtccattacacccgcacatggaaccctgccaaagaagatcaggcaacagaccgcgcttatcgcatcggtcagacaaaagacgtctatgtctactacccggtggtgcacgccgatgatttcgtgacgttcgacgaaaagctcgaccgtctcctcgaagagaagcgcctgctcgccggcgatatgctcaatggctcgggcgaactgcatccgggtgcatttgatctggaggatgtcgcacctccggatgctcatcttaatgaagagccagtaacgctggacacggctatggctatgaaatgggagtacttcgaagcgctggcggtcgtgctgtacgcgaagcgtggttacgacgcctatcgcacccccggcaccaaagacaatggagtcgacgtcgtcgcattgccgcgcactcagacgtcaggcaagctggttcaagccaaaacgtcggggatcgaaggaaaggcgctcgcttgggatgcagtcaaagaggtggtcgccggacatgctttttatgccaagcagtatccagcgttcaacttcgagcttatctgtctgaccaaccaatactttgatcaacaggctcacctgaacgcaaaattgaacaatgttgagctggtcgagcggccccaattagcggaaatgctgagtcaaacgccagtgacgatgatggacgtcgagagaatgttgttcactgactggacccaaacctaa

SEQ ID NO: 10694 - DNA, 2121 bp, Phascolarctobacterium succinatutens YIT 12067
atgattaaatcatttttaagtgcagtgggattatcattgaattcgtttactattatattgacaattggtattgttgtagtaatgcttgtggttatgtatcgatactggaaaaatttctacaaaaagcaagatttaataattataagtataaatgatacattagaaaaaatagggaaactagaaattaaaaatgctagtgataattatgaggatataaagaatatatttataaagagcgatttgcttaaatctgcatggttgggttataaaaagaatcatttttttatgaaggatataaatggtaaaacagtggtctttactactgatgatgcagataattattttaactataataatcttaccagtcagtataatgccatgttttggcagaatcttggtggcgtttttactggtctgggaatacttggtacctttgttggcctatctgttggtttgggtacaatcaatttggaacacataacaaatgaagaaataggaaatttggttagtggcatgagtactgcttttataacgtccttgtgcggtattgtctttgctttattctacaattggatacataagcatattacagataagttatcacaagctattacgaatctgtctaatgagttagaatcacttttcgttgccagaaatggtgaacaactattagcgatgagttatgcaaattctttggaacaagcaactcagtttaaagcgtttagtactaatttggctgtttcaattggtaatgcattggaggaaaagctctcttctagtagttttgctgataatattaaaaacatggacagcacgttagctcaggtcaatagctttatgtcggaggaattgcctagtgtaattagtgatgctattggtgaacagattaaagaaaatcttgtgccagtttttgttagcctacagaacgcaattgaaaccttgagttccagtggccaaagtgcaattgcagatggtatcaagagcggtgcaagcaaggaattaactgcatttgcagatacattgcagcagatgaataccaatctgcaagcagttatggctcaaatgcaagaaaccagcggcagtgtaaatagcgaccttacttctgctatcaatcgagttgtagatagattggaaagccaaggtgaaaatttacaaggagtaggcaatcaagttgctaaggacttgcaagatacggttgctgcattggttaacgaaatgggtaaacaacaatctggcatgattaatacttccgaaaagataaacgatgacttgaaagcaagtatatccactatggtggaaagcattcaaattagcattgcttccatggttgaggagactaagaagcagcaaggtaatatgcaaaattccgctaacagtattacaagtaacctggaggccaaagtttctgcgatgctggctggatttgaaaagcaacttgctgcaattgaacaacaaactcacaaccaaagcaatactcttagtgaaacaagtacgcaattgtctaatagctttgcaggttccatgaattctgtaaagatggacattaaaggtataatggatgattacgctgctaagaacaaagccgaaaatgaagaaaccattaactttattaggcaagtaaaagctggattggcagagcaacaatcgttattggctaagattactacacaagttgatatgcttatgacaagagcagcaaatactgctgataaatttactcaagcagctggtcctattaatgatgctggtaaagaattaggaaagcatatggatgcagttttgaacgcaactaataattacaatcaggttgtaaaacaatgtgtaagcgaattgcacgcaacagctcaacagaatacgagcaatatgagagatattagtcaagaaatagctcgtgtaaaagaaacattggcgcaaacttctaatcagtattctggtgtaaacaatgaattaaataagatattgggtactgtgagcgataatctaatgaaatataatcaatctgtaaggcaacagtatattgacagcttaaatgcatattctgataaactggctagcgcttatggtcaacttgctagattgattgaggaattacaggaagctattgatgactttaagaattaa

SEQ ID NO: 10695 - DNA, 735 bp, Phascolarctobacterium succinatutens YIT 12067
atgaaaaataagaaaggcctatcgcctgctacttccgatacatttaatctcagtattagtgatttgatggctggtttactagcaatttttatactcatacttagttggcagattttaacatacacaaatatgaaaagtgattttgctgacaaatcatatgaaagagtagcgttattaaatgaaatacacaaagagctgaataatcgtggcataatggtggaaatcaataaaacacatgatgtgttgcgactgcacgataaagcactgaagtttctccctggcagagcaaagcccgaagctggagaagagaatgtccaacagattagtgaggttttatatacagtcttaaataaagacagaggggataaaccaaagtataaagagcttgttgagactatctttatcgaaggacatactgatagtgacttacctagttttcgctctgattatccagataattggatgctgtctactgcgagagcagtaaggacatgggaaatgatgagtgcttttcgtccggatggagcaactcaaacattaggtgagattaagaatcataatggattccctattttctcatgtagtgggtacgcggacacccgtaggattgtggaaaacgaaaccagtaaagaggagaaaagtataaatcgtcgcatagatattagatttgttatggtaccacccaaaggggatagtagtatcaaaaaagaggtaaaggatttgttgtctaaatga

SEQ ID NO: 10696 - DNA, 1386 bp, Phascolarctobacterium succinatutens YIT 12067
atgagtaatattctagatacagctagacaattaaatgctataaaagctgattttgaaatggtactgaagctaaatcttccagaaccattgcatttgaataggcttttaaaaaagctaaatgcagcagaggcagagcataatgacgaaaaaatagaagggatagccgaattatggaaaacggtgctgtctgcctttaaagctggtcgagtaatcacaatggctctgagagataagaaaaagttcccttttcttttgggattagccgcaaataggaatagtcaattatatggtttgttgctagaagaaatcaagagtgttaattcagctattcttttaaaacgagagatttttgtatattttaatgagtatagcaatataaaacatattacggatttaagagtagatatagttaaaaaactgagagcatataaaaagaatgatacatttttattatgtatgaaaagaaattcattcatttttaatccaactagtatcgattttgtccaaaaaaaatgtatttcagaaggtgtttttgagtattttgattcattgcatttttctagatcactaatgtactcaaattatgtaacacaagtcatcaagggcctgtttggtatgagtaataccactgttagccttaaaggcaagttggatttgtttaccaaaatatatggtagactggaaaatgcttttgttgaacttttgccgattatttttgcttcactcataactcagattgaagctcataatgggagtgaaagagaacactacaaagaaataataaggccgaaagcgcttgcttttatgggtgatccaaggctaggaataggctattttgggcgctggagcattgctggagaaaaagctactgatattttcataacttggctgtctcaatatgatttggatgcattctttaaagtaataggagatagtttaactgattacacagctagaaatatgtggatgtatagggagaggttttggaaatcttacaaaaaacacattcaaatggtttgggtatgctacggaacatctgcaaaacaccttgccaagagggctaatatgacgagtggtaattattctgcttttggccaaggaaataagagttgcatccttattgtaataggtgattacatttttgttgaaagaagtcataatggaacccttaaagtttggaagagaaatctgagtccatttaagataggtgagccaaatatttcagaagcaaaattaaataatagtactggaattacacatttagaaaatggaatccctaaagatggatgggtgcatagtagttctgatacatataattggcaaaaaaaggttggtagcttcattgcccagtatatgcatgttattaagactgtgaaagattggtga

SEQ ID NO: 10697 - DNA, 3330 bp, Phascolarctobacterium succinatutens YIT 12067
atgttctgggaagtaaaagatgatggatttgagtttaattgttcagaaggagaagctgctcaagtaagcaaaattgaagagatgttctcagagggtaaggctagtattattggagaggattgctatatagtttcccatgagcatattgctgccctttcaacaaatgaaagagctcttttggatttgccagaaatctttccttatcgtctcaggattagtgctaatggggctctagttgatagaagcttacgctatattgtagattttgtaaaacctaatgggaacagctttattaatcctactgtcaccggagcgcatatcagaatatcagcagatttacagtacacttttaatattgggcaatatcttgtagtaaagaaagtggaagagagcaataaaaagcttgcatcaactgatgaagtagaggatttgacaagatataacttcttgaattttgcagatatcaaggaagtagccgaggaaattgatgcagaattagatagctatctaaagcaaaataaagtagtcgtacctaaaagacttagcatattacctcattttgaaaagaatggcgatgttattattgcgcctattatcatgggtgaaaatggggaagaaataccctttaacggggacttccaaaaaagttttgatgctagagataatgtaaagactgtctacaacggtacaggtgtgttttatgtcataaaaccagaggttgaggaagcgctcaaggagataaaagcaaagcacaggatacccaagaaaaaagcgaaggactttttaaaatctccaggaagtgtattcttttctccggtgtttgattttaaccttgctgattattcagatcgtgtaattgaaataggagagtataagtataagactgagtctaacggcaaatcaggtatagattggctaccacctgaaggtacagcgtttaatagtggtaatgaagtaaagaatctagaaattactcttgaaaatgtagatgaaatagctgccttggtatatgatgctagaaatgagaacatagattttatcgtttatcagggagaaaaatacattataactgctaagcttatttcagaaattgagaactacttagagattaaagccaagaacaaggctggagatgatgagtctaagggtgtaaatcatccagaaggtgatgacgggaaagatacaacgggtgatggatctgaaaaaaagagcggagcaaatactgctactggtagcaatggctcagatggtgacgatgctggtacaaaagtaaagcctaaaaagaacggaaaaagagttcttttgattaaagataatttctcgcatatttcctataatgctgaaatagatacggttgaagaaattgacatcgcagaggtagataattgccttaataacgggataactttgctgaaccaccagaagcagggtttagaatggcttgttaactgctatgccaattataaaggagcattgttggctgatgatatgggccttggaaaaaccttgcagacgcttgccttcatagctcttactaggaaacatttggcaaaagataaaaatcattcggttttgattgtggcccctgtctctttattagctaattggcaagaagaatatagcaagtttttaaaggcagatacctttgagggtgttgttatgctagatagcgagactatcaaggagtatcgcaagggagaaagctatagcttgaaaagcatagctaaggaccatttggtattaacgagctatgaaactctacgtatacatcaatttgctttcggtaaaattgactggggagtaatggttttagacgaagctcaaaagataaagaaccccactgcattgataaccttagctagcaaagccatgaaatataactttggtctttgtctaacgggtactccagtagagaatacatgggttgatctttggagtattatggatttcgctgcacctggttacaatttgggtagtctaagtgagtttaaacaaaactatgtcaataagatcaagaaagataatagtgataaagagttaataaaggaattagggcataagctgaatgatgctttaaaccccttgtttatgagaagattaaagagcaaattatccaaggagggatatttgcctgagctgcctcaaaagatcatcattcgtaagccagagattatgccggtgcaacaaaaacttgcatatgaaagtattgtagcatcagccatggataaaagtgtaactacaaatactgccttagagattattgctaaattaagggatatttccctgtttccagatattggtaccatagatgagcgtagcattagtaaagaagatgcgattaagatattcaatagctctgctaggctaaaggtgacatttagtgagttggtaaatacttattacaataacgaaaaaatactcatttttattgaaagcaaaaagatgcaacgtatcttgaggactgttattcaagatttcttcaagattaaagttccaattcctataaatggagatatgcgaggagagattcggcaatcaattgttgatactttcaatgaatctaagggctttggcgttttgttgctttcgcccctggccgccggcatgggactaaacatagctagcgctaatcatgttattcatttaagtagacattggaatcccgctaaagaggatcaagctactgatagagcttatagaataggacagactaaagatgttcaagtggttattcctatggctttgcatccagtattaaggctggattcctttgacaataaattagatgaactattggaattcaagcgacaacttagcgaagaggcactgttcccaacagcggatagcgctgaagatggtaaaaatatctttgagggaatcacgaaaaccttcggtggaatcaatgttcagaccataacctatgatatccatgctgttgatgcagtggacggtattacttttgagaaaattattgaagcattgtacaaaaaggcaggtatgttaagcgttagaactagtgaaagtaatgataatggcgctgatgtaactgtgtttagtggctcaaagcagccgaatttgttgatacaatgtaagaaaacgaagaactatcagagtaatattggtaaggatggagtgcaagagataaaaacagctttatcatactatgaggatattcattcatgtagttttaaacctgtggtaatcactaatgcaaaaggatttactagcggtgcgattgaccttgctaatgccaacggggtgcagttgatttgcagggccgagctgactaagatgttggaactctatcctgtggagaagatttatatctga

SEQ ID NO: 10698 - DNA, 2004 bp, Parabacteroides sp. D25; identical to SEQ ID NO: 10193

SEQ ID NO: 10699 - DNA, 696 bp, Parabacteroides sp. D25; identical to SEQ ID NO: 10650

SEQ ID NO: 10700 - DNA, 1851 bp, Parabacteroides sp. D25; identical to SEQ ID NO: 10195

SEQ ID NO: 10701 - DNA, 2751 bp, Parabacteroides sp. D25; identical to SEQ ID NO: 10652

SEQ ID NO: 10702 - DNA, 2016 bp, Prosthecomicrobium hirschii
ttgttctgggtgatcgtagcggcggcgcagtttggtctgtcgcaggtgatgccgttctccgactggcagcacgtcgccgacgaactcatgcgcgtggcggccgcgccggacggacccgggcgcttcgacggcgtatcgaacgcacatttcgccttcgcgctggcctcgggaatcatgcagttcgccgtcgccctggcggtggccttcttcgtctgccacgtcctgttcgtgcttctgtggctccgcagcgcccggaagttgctcggccaaagcgccgatccgaagatttttgccgacgggatcgaggccatctcggcgcggctcgcacgcaatgggctggtcggcgatgcctggctgaaattcagggacacgacctacgagcgcgacggggtcgtgcacagcacggtccggccgcaggtcttcatcaatgtcgcggatgcgcgcgagcggctgttcgggctgaagatgatgccggccattccgggcttcttcgtcgggacgggcctgcttctgaccttcatcggcctgctgctcgcgctccataaggccgccggcgccaccgatgcccggtcggccgcggaaatgaccgggtcgctcaacgcactgctcaaggcggcgacgttcaagttcgccacctccatcgccggactgggcgcctcgctcctcttgtcgctgatcttccgcgcctatcagatctggatcgagcaggccttccacgccttctgccatgccgtggaaacgcggctgacctactatccggcgcagaaggctgcgctggaaacgatcgagatcctgaaggaacagcgtaacgaactgaaggagatcaacagcgaccgcttcttcacccggctcggcgaaacggcagggaacaacatcgggacagccatcggcgtcgcgatggagccgatcaccacgaggctcgacaacgccatggcccaggtcgtcgacacctcgcgcggcggggtcgacgaactactcggacgcttcacggaatcgctgcgcggcggtgccggagccgagctcggcgaaatggcccgcaccctgggcgagaccagggcggcgctcgaatccatccggcacgacctgaccggttcgggatcggatttcgcgcgccggctgaacgaggcggccgagaacatggcccgggtcgtcgcgcaggcgagccaggacctcggcggctcggcgagcggcgcggctgggtccgtcgaggcgaccatggcggccgtgacggaccggctgcaaggccagatgaccggcgtcgccgaggcgctggcggcgatccagaccagcatgatcgaacaaggacaggcgggagcccggcgggccgcggaagcggcggacgcggccgcggaaatttcccggcaggcctccgtggaggcggccgcgatcacctccgaggcggcccgcgagacggtcgaggcgatccgctccggcgtcggcgcggtcatcggctcgctgcgcgaggacatcgcccgcctgtcggacacgctgcgctcggtcggaacggccttcgccagccagaccgccgaaatcaacggcgtcgccggccgctcgcgcgaggccgccgaggctttcggtcgggtcgcatcggacgtgagaaccgccagccagcccctgctggcgcagggcgagcggatcgcgacatcgaccgaacgcatggctggcgccgtgaccgcatcggcgacgacattgaccacgaccaccgaggccgcgcgcgccgtcgccgacgcactgaccgcgcatttcgcgcggatcgatttgacctggaaggactacgaggcgcgcttcaagggcgtggacgaggatttcgggcgcgccgccgaccggttccacgaggaggtcagccggcaccaggaggcgatgcgcagcttcatcggcgatgtcgaccaacacaccaagagcatcgccgccagcctcggcggcgccaccgaccggctggccgagaccttcgaggcgttgcacgaaacgctcgaagacttcctggagcgcacggctcagcgccccgcggctaagtga

SEQ ID NO: 10703 - DNA, 867 bp, Prosthecomicrobium hirschii
atggcggttgaagagacagagtcaagcgaaggcgagaactacttcgtgtcgatgaccgacatgatggtcggcatgctgttcatcttcatcatcctgctgatgagtttcgccctcgtgttccgcgatcagaccgatacgcaacagaccacgacggcagagcagcaggccaagatcgaccaggccacgcggctggccgagacactgcaggagatccagcacaagatcgaggtcaacctcgaggagttgcggcaggccaatcaactgcgcttgaaactgctgcgcgaggtcgccgatcttctgagacgcgagaacatcgtggtcgagctgaccaaggccggcgatgtcctgcgactgaccgaaaacgccatccgcttcgatcccgacaagtctgtgctgcgccccgatgccttgaacaacatcggaaagatctccgtcgtcctggctcaggtcctgccgcgctacgcgccctgcgccgccggcgctctgccgccgtcctgccgaggaccaaccgaggcggcgatcgaaacggtgttcgtcgaaggccataccgacgagaccgggaacgacgagcgcaactggacgctttcggcggaacgcgccgccaatacataccgcgagttgacgacgcgagccccgggtctgcgcgacatcgccaatcggcgctcggagcagatcctgtccatctccggctattcggccacgcgccgcctcgactcgtcgggaacccgggacgcctgggcgaagaaccgccgcatcgacctgcgcttcgtcatggacaccgacccgaccgccggtctcgaagagatcaaggcgctggtcgttcagatgaaactgcgcatcgacacgttcaagggaggcgagccgtga

SEQ ID NO: 10704 - DNA, 1404 bp, Prosthecomicrobium hirschii
gtgagcctgcgccagagcctggcccagtggcgcttcgaagcccggccgctccgccagcagagcctgaccgccgactatgatctggcgcgcggctcgcagatggcatcgctcgacaagaggccacgcgaggatctctcggtcgtcgccgcgcgttttctggcggcaatcgagtcgggaaggaaacccgccgtccgcgactggaaccgcgcggcatggtgcctgtggacgaccatgccggcgatcgccgaggattctaccggcctcggggccgtgctcgagcgggtgacgggctcgcggcggccacggccataccggcaactcgcctcggtctatctcgccgaatttgcaccggatcggccacaactcgacaggatcgcaaaatcgctgcgcaatggcgcggaagcggccggcgaaccgtggcggaaactgcaaggccggcttggcgtcttcgacggagcccaggccgccggccgagttgcgcgcgttgcgctgcagagtggcaccagcgtcgccgcggtgctgcgggatacaggcgccgccaccctcgatgcgcgcgcgggattcgtcgaagcgggctatcgcgccggcctgcaagagatcgccagccaacgcccgacaggtgccaaggcctggatcgaccgtgtcaggacattcgccctcgacgacggcgggcagctcgccttcccgcagcatcgcgccgaggtggcgcgcgcgctggtcatgcctcttgcctcgcaaggcctgtcggaggccgataccggtcttctgtgcggggtggtcctcgacctgttcggcgatccgcgcatccgccgcggcgactggatcggcatggacgacattgccgcggtggtgaagcgttggctggtcaaggcgtcgctcaggcagttcctggatgtggtggataaaatcctggaggaagaacaagaagaaacacaacaaaggcaatggagatatcgtcgagcattctggtattcagtttacaatgcgggattgatcgacgacgcctatgtggcgttcgagagccacggtgtcgatattgcggagagagccttcaaggattcacctttcggtcgcctgaagcgtggagatgggcaactactccggggccattctgtactgctgatgagaattggacgatctctggtagccgactggagtcatacaggcacatgcaatatttgggacgatttaaacgcgtccgatgcgccaaatctacacaaaaaagagtattttgccaatgatgtacgaaaagatagaataggaaattcaaggaaaatagatcttgaaatgaatggagtttattcacacgatagcacaataaattattcctggcagaagcgcgtcgccgaacatctgttccggatcaccggcgtgcgcattccgcccgaagactacaaggtctga

SEQ ID NO: 10705 - DNA, 3015 bp, Prosthecomicrobium hirschii
atggcgatacgtttcgaagcgcgtgtcgaaccggacgccgtcgagatcaggcttctcaagtcattcttgggattcggcccgaagccagtgccccgcgcagagtggccgaatgccggagccccgcgcgccgtctgtcgcgcactcgacgcactcctcgaccggggtgaggccacggcgacggccgacgccgtccggctgccgatagcggccgccgccgccctcaccgccgagatcgccgacgcggtcggcttgccgccgctggccgaactgggcctcgccgtcgcgctggagggccgcgtcgagacgcccgacggccatctccgcctgcgctggaccgacaagtcggcgcgcgagatcaagcccgcgcgcaatggtctcgtcctgcactggggcgagaagtcggcgcggctctcggcgcctcttctggccgtcgtcgaggctgccgaggcctataacaagacacgcggcgcggacttcgaggcgcgggtcgcggcctggatgccgatgcagcacgccctcgcccgaaccaccggcggcgaggtcggccgcgacggcttcctggagaccttcaccctctatcaggccggggcgttcgcgctggagatcaatgaaggcgacgacttcacgccgctcttgatggcgcgttcgcaggcgctttcgctcgacgacgatgccccggccgacgacgtcgggccgggcctccgggacggcggcggcgaaaccgatgcgcccgcaccggtcgggtccgccggaagccttttgtcggccgacgattatcgcgccttcctcggcgccttcgcgatgagcgggtcgacgcgcaatgcctaccggctgcacggccgcaaccggttcgtcctggtcgacccgacgctgaagcgcgcgctcgacgtggtccaggccaagcggcgggcgagcccggacgagcgccgtgccttcctgcgcaatccgcgcgccgcccttgcggaggccttgcgcggcaccgacgagaccgcgccgaccgcgacgctcttcgtcgagaccgagggctattcggatcgcgtcgccggtctcggcctgtgggagccgccgtcgatcccatggatgacgcggcagccgaacggttggctgccggagagcgggtggacgcaggatggcgcgcctgtcgatccgcggccgctgagcacggaagaactcgccgatctggagcgcgcctacgaggccgcagaggcacgcggcgattcccacatggtgatccgcggccagtcgatcccgatcgatgccgccccagccgtcctcaagagcgagcgcgaacgcacggaggctgccaaccgggaggccggagcagcggacggagatcgaccgccaccctccccggctgacccggaacaggccgagcggttggtcctggtcatcgccaagaccaactttgagggactggactacgaacttctgctcaaaccgcgagccgcgtgcatcgccctggtcccgccgggcgaactgatgggccctgcgccgctgaaggcccaccaggtcgaaggcttccgctggctcgtcgaggcttggcgcaccggttggccaggcgtgctgctggccgacgatatgggtctcggcaagaccttccaggcgttggccttcatggcctggcggcggcgcaatgcggatttcgccctgcggcgcggaacggcggcggtggcgcagggcccggtgctcgtcgtcgctccgaccgcgcttctgcgcaactgggagaaggaatgcgccgaacgcctgacgcctgaggcgctgggccgcctggtgaaggcttacggccgcgacctcgccgacctgaagctcgccgcagatcggcgcagcgaccctggcgagacgctcgaccgatcccgcctgcgcgaggccgattggatcctcaccacctacgagacgctgaccgaccacgaacgggccttcgggccgatcgccttctcgctggttctgtttgacgagatgcagaaggtcaaggcaccggccaccttgaacaccaaggccgccaaggcgctgaacgccgatttcgtcgtcggactgaccggcacgccgatcgagaatcgcatggaagatctctggtgcctgttcgaccggttgacgcctggctatttgggcgatctgaaatccttctcaaagaactacagcgagggcgaccctgaaaagctggtggccttgaagtcgctcctcgatcaacccgccggcgccgtgccgccggttatgaagcgccgcatgaaggccgacattctgctcggctccgacgcgctgccgcccaaggtcgagcgggtctacaagaccccgatgcctgaggagcagcggcaggcctatggcgacctgatcgccgaggcgcggcggcagccggaccgctcgccgggcttcatgctcggcgttcttcacggcatgcgcggcctgtcgctgcatccgcaggacgcgacaagcgtcaacgtcacgtccgcggaccgttttgaagctttcgcgcgccggtccgctcggctctcgaagaccgtcgaaatcctgcgcgacattcgcgcgcgcggggagaaggtcctcgtcttcgtcgagttcctggccatgcaggacgcgctcgccgacggattggcagcgctgttcgacctgccgcgccgcccgagcatcgtcaacgggaccacgccgggcgagcggcgcctcaggatcgtcgacgacttcgctgccaccggtccgggttttggcgtccttatcctgtctccgaaggcggccggcgtcggcctcaacatcacggccgccaaccatgtcgtgcatctcagtcgatggtggaacccggcggtcgaagaccagtgcaatgaccgctgctaccggatcggacagacgaagccagtcacgatccacattccgcttgccgtccatccggaccatcccgatgcggccttcgacgaaagactgcatgacctgttgcagcgcaaacgcgaactctcccgcaccatgctggcgccgccgacctcggagggggatgtgggcgagttgttcggggcgacgctcggccgatga

SEQ ID NO: 10706 - DNA, 2067 bp, Rhodoplanes sp. Z2-YC6860
atgcattcggtagccagtgtaatttcgcaaccggccgcaatctacggggtcgtctccgttcttggcctttgggcatttatatctggttggtccctgttcgttgggacctcaaagcttgccgcggccctcgctcgtgcggccgatctcatccagcgaacaaaagatccactcgaatttgccgtcaattacgaagccatttccatgcaattggggagcgatgcgatcttaggatcgcggtggcgagagtatcgcgactcgctactaacccctagccagccaaaccgtccggtacgagcaacaagccgtgccggtgcttggtttgacttcgggctatttcgagttccgggcatacaagtcgatttgcgctaccacgcagcgctgccaaatctgttggtgggcgctggcctgctatttacgtttatcggtcttgcggctgctctaggaaccgcgggcggtatcgtaagtggcgtggatcagagcggacgcaacacagctctgcagaccttgcttgatgccgcatcatttaaattcattacgtcactcgttggcttatttttgtcgattgcctacgctctttttcgaaagcggcgcttgcgaaccgttgaacgggcgctcgacggatttgtttcgaccctggaaaatcgaattccgctgctcacaccaacaagtttgcaatttgaggcaaatgaacatctcaagcggcagtctactcagcttgaaacattctcgactgatctcgcggtcaatctcgcttccgtatttgacaaagccttcgacgataggttgggccaacatattgggcccttgactgaagccatgcagcggctcgctggtgctcaaggcagtcgaaatgaagaagccatgcaatcgatgaccgattcatttctggaacgattgcacggtggtgccggcgatcacatgcaaggtgttgtgaccagccttcgcgagttgggtgttcgcctcgaaagtttacagaccggcctcggcgactctgccgttcgaatggcgcagtctgcggatgctatggcgacacgtatgggtgagggggcagagacggctttgtctcgggttacggatcagatggggggtctcgtcgagacattacacatgatggcggagcgatctcaaagcgccgcatccgaagcagggagtcaaatggccttgcgtattgaagccgcagctgcgggattcgaggaggcagctcgatcggtagcatccgttctctctggcgctgcgtcgaatcttgagacgcgcatgggccaacatgcccaggtcagttccgcaaggctctctgaacaattccaagcgatgatcgatgagctgcgtggattggcggagatgagtcgcgctaccggcgctcaggcattcgctgctttagctgagaaggttggttctgccgcggcgggatttgaaacgacggcgaaccgggtcagtgagacactgcaaggcgcggcaaataaaacgggcagtacgttagaacagggagcagaagacgtggtccaacgtctggctgctgccgcggacggtttgggtagtcgggtttcttctctcacggcggctgcagattcgatagcggtacgtattgcagaattaaaccgatcagcaggagacgcagctaagccgcttgtcaccacagccgagcatcttcgtttcgcggggcaagccgcgcaaaatgctgcggagcccctcaatcaggcggcaggtaccatcagtcgttcgctggaccaggtggccggcgttgctcagcgcctcaatagcgcgcaggcggcgtccgaacgtttgatcgaaagtttgaacgccgctgtgcaacggttcgagggcgtcgatcaagaattggcgcgcacacttcaaggactgcaaactggcctgcaaggttttgctcgagaagtggcaacggtcgtcagccaaaccgatcagaacttggctaaggcagcgactcagcttggcagcctagtcaatagtttgcagacaagtctggaagatttcgcgatgacgaccacgagctccacagccttaggcaaggctgacggagatccagcagttcttctgacaaatcaacgcccttga

SEQ ID NO: 10707 - DNA, 1446 bp, Rhodoplanes sp. Z2-YC6860
atgtatacgcgccaagccttagctgctcttcaagcgacgtctcgttcgctttcgccggcgaaacatctccccgcgcgtcttgcgagcgctgaagcagtgcaattgcttggcgcaacccaatcggcacccgccgagcctgctgaggcggttctagagctgttgcggcggaagcttgtggcccgattttctaacgctgcctatgatgttcaaatctcacggagagacctaagcaacgccccctggttgctttggcatcaccagcagcctttggcaaacatttccggcttacttgaggcggtatacgcccaatcgatccgatcaaattccactcgtcgcaatttcatcgaagcttgggttcatgatttctcaaccgaggggcccgcaattggaaaagcgggtgccgctatccgtctgttattgacgtcgacgcgagatccaagacttgagcattggcgaattggagatcgcgtcgcgagcgttttcgacccgaaagctgggccatgtcagtttgctaattggctgctgaatggtcctcaaactgtcgatgaaatatttgaaatgaccggctttgccgatccgtttcgatcggtcgggggcttcatgcgcgtcgttcagcaagaactattgaaactggctgagccaaagttaggaggcgaagcgggcgagcaagctttggcgcgattggtcgcttgctttgctccaggaaaccaactgcgctttcaagaatctcaatcgagaggtgaaattgcccgcggattgcttgcgccatggatcgaaagcgagcaagaaccaacggaatcggttcgacgcggtgtccaggcatttttattgaagtatgttggcgatccccgcattcatccggcgcgttggagtgacgccggcgatcaggccacgagccttatgagacgctggctgacacgtgcatcgttgagcgcattctttgaacttattcgcgaccatgctctcgattcccactggcggtatcgcgaagcgttttggactgcctgtctagacaaggacgaaacggcagatgcctggttagtctttggtcgaaatatccatgcatcggcgcgtgccattcgagaactcaacggaagttacggacgactcgaaggttctggcgtgtctggcgatcacgctgtgatgttactcaagatcaaaaacttgatcttttgtgagtggagccacaatgggaagctacgcgtgtggtcgggcgattggaaagatgctccacgcctcaatcttccgagctatacccgagccgaccttaccgccaatgggctgccattcccgccaaattcaagatttggatccaaaggtgcaggtgatgggggcgggctgagtcatattggatcggaccgaagctattggcagggaagtgcagcggaattgctggcgcgtcgcgctcgcatttcgctgggtccggccgattggttgccccgatga

SEQ ID NO: 10708 - DNA, 2883 bp, Rhodoplanes sp. Z2-YC6860
atgacacatcagttttcattcgcggtgacacctgccgctactgaggttaagttgattgggcccgaggggcctgtcccaaccgatctttggccgatagagacacccgacccgcttttgcgaggcgttgatttggttcagcgtttgatcgccgctggtagcgcaattgcggaaggggatacgcttctcatcgaacaccgcgcgatttcgggactttctgtgaatgaggctgcgtctctccaattgccggcgcttaccaatgcagtcgcgcatgttcgcaccagcgggttaatcactcgtccggaatttaacgcagaactaaattggcgccggccgacgggacaagagatcgtcggcgcaaccaggacaggggcatggctaaagattggggatgagtggcaaagaattcccgatacgctatttgacataaccgaatctgtagaccgcctaaacaacacgtcgggggatgatttcgccgcgagattgacatcgatcgcggccttgcgagaggctctcccgcccgctgctgcatcaaacaatgtggacaccgctggtctgctgggcgaaatgacaattgctattgccgatgcattctctcttgatttgaaaggagaaggtgcaaacgcaaagcttgtcccagtattgcatcgagccggtggtgatccggaggagccactgttgcccgctgataaacagttcgcattcgctgaggatcagttcaaccgtttcaacaccgcacgacctgtctacacgttgggtagtggatggtatgtcgttttggcgccgccgctacgccgtgcccttgcggaggttcgccgcgtacaagacgcgccatgggcgacaaaacgtgcattgatcgcgtccccgagatcgttccttcgccaagtgtcggatgcggttgttgaggacatcctattggaaacggtgtttcgagaaacaaccgcttatgcggatcgagtagtcggcctcggactttggtcagcccgggttcttccgtggatcaaactcggagggtccgattggtttggcccagaggctgaatccgagtcagaacagcagaggcggggttcaggtcgagagagctcgggcggaattattgttggtgaccaaacgatccctttgacgattgaagaagcggaattgctacgggagcgagttgaaagtgccatgggtgccggccgcacaaccgtcccgctcaatcaccacgagactatggtgcaagtcccagcgacctacgacaccttggcagctctgcaggcactcgagatatctcgaacatccacgcgcaacaagtcaccgaaagatgcgtccgcccttccagaagtgctggtaattcggccgaacgaagaattagtcgaagttgagggcgcctttaatgcgcgcgcttcaattccattcgcaaagcctgacgggctcgctacggcgctcaagcaacatcaagtcgatggccttctgtggctacagaaagcgtgggcaatcgggaggcctggcattttgctcgccgacgacatggggcttggaaaaacgatccaaagtctcgcatttctctcttggttgagggcgggaatgattgcaggtcgcattccacatgcaccaatccttatcgttgcacctacggggctcctacagaattggcgggcagagcatgaccgtcatctggttgcgccaggtcttggccgctgcatagaggcctatggacgttctcttagcgcgatgaaaagtaccgggagtgatgagcgtcctggactcagtaccgattcattaaaaagtgccgactgggttctcacaacttacgaaacgctccgggattacgatcgggattttggccgcattcgctttgcagtcattttgtttgatgaagcacagaaaataaagacgccgagcgtcaggattacggatgctgcgaaagctatgaatgcagatttccgcatcgctctaactggcacgcccatcgaaaatcgactggctgatctttggtgcattaccgacaccattcaccctgcatacctgggcgatctcaaacgatttagcgcccagtatgagaagacgccggatcttgatcggctggcggctctcaaagccagcctcgatcggtggcaaggaggacgtccaccaattttgttgcgccggctaaaggaggatcagttaccagacctgcccactcgaaatgaacaggtgcgagagctggtcatgccggccacgcaattttcggcctatgaggcgaccattgcggaggcgcgaagggatcgaagaccaggtgccgtcctcgaagcccttcttcgcttgcgttcgttgtctttgcatccagatggccagatgaaatgcagcgatgaagagttcatctcaggatctgcccgaatgatcctagggtttgaaacgctcgacatgattgctgggcgagcagagcgcgctctcatttttcttgacgatctagatatgcaagcgcgacttgtcggcatcattcaacggcgatacgggctctctacaaccccaatggtgatcaacggccgagtggacggcatatcgcgccaggcccgggtggataagtttcaatccaacaccgaaaaattcgatgtgatggtcctttcaccgcgagccggaggagttggactgacgctaacgagcgcaaatcacgtcatccacctatcgcgatggtggaatccggcagtcgaagatcaatgcacgagtagggtgcaccgcataggtcaaggccgctctgtctatgtacatgtgccgatagcgaaactgccagatgcgcgtgcctcttttgatcaaaatcttcatgcactcctgcagcgtaagcgaaagcttatgaaagaagccctcatgccaccggccgctacagaaaccgaccggaatgatttgtggcaagcgacggtagcttga

SEQ ID NO: 10709 - DNA, 1818 bp, Photobacterium swingsii
atgggcactaacttacatgatgtgatgaacttcatcacatctactctttttatctatgtttactgtggccttattgtcgtcattgcaatttggtgtagtggaagcttttggttcaggttttcacccgtcaaacgctcattgaaaaatgcacttgagaaaactcagtcaaccccaagaaacaaactagagttccccgaatactactatgaactaagagattggatgcacgctgaccaatacctgaaagattcatggagagagttcgaggaaacgttgctgcttccaggagaagactttgatgacgacaaagaagtcatcatgaatacccacctaccttctgtctactttaaccagaaaaatcttcttttgcccaatatcaacatgcgcttctacaacgcgttaccaaacatcctgactggcctcggtatagttggtacatttataggccttactgttggtatatctctcgcagctccagggttaaactcaaacaatattaatgatgcaaaagaagcacttaacatacttctggatggcgcgtcacttgcctttattacatcgatcgtggggttactgacctcactattattctcaacttatgagaaaaaatacatccacttgttcaatagtagttgtcaaaagctaaattcggaactggatgcccgagtagagtatttttcagcagaacggcttgcgagtaagaacctagctgaatcacaaaagcagtccacagcactccaatccttcgcaaatgaccttgctgtgtctcttggccaggtaatagaacaacatgtaacacaaccaatgatcaaagccatcgatgaactacggaatgaccaaaaatcagcaagcgacgaaaccgtaaccaaagtcatgggtgaatttgcagataagatagccggtgccgctggggatgaaatgaaagcctttgcctccaccataaaaactatgagtgatagcctcgagtctcaggttgagtcactaacaaaaggacaagaagatatgcaaaaggcggctcaaaatgccgttaccaatatgtccgacgctatgtcagagggcagcaagaaaattaatgcaggcattgatcaagctgtcgatgctcttcttgaaagtgtagaaaaatccatagacaacgtcactctgcaacttgatatcgcctctcagaagctagcagacaacctaaaggatggtttacaagaattcgaaggcatactgggtaaactcaaagaaacagctactcagtaccaaacaatgacagaagccaatagaactctctacggagaaatatctcaatccattgaaatcattggggagctttccgaaaaagctaaccaaactaatttagacttccagcaaacagcaactactttccaaaattatattcaatcactgaaccgaacatcaactcagctttcggaatcgaccactagcgttgactcaaccctcaaaaccttacaagaagtgcaagaggaaatgtccgatatctggaaagattacgaagaacgcttctctggcttagatactactcttgaaaatgtatttaaaaatgtcagcactggtttagaacgttacgcaacacaaacggacgaatatattttaggacttgataagcacgcttctgatgttgttcaaagcctcgctgctgctacccaggagatctctgaagcagttgaatctttgggagaagctctagattcaaggactgagatatttgaatcctcgataaacactatcgctaactccgcagaagcaaaattgaaagggtttgaagtagaccttcgtgccatggctagaaccagctttcaaccagagcagtaa

SEQ ID NO: 10710 - DNA, 786 bp, Photobacterium swingsii
atgagtgaacaccatgaactcttagaggacgaaggtgctggttatctaatttccgtatctgacatgatgtctggattacttcttgttttcatcattacacttgtcgcgttcatcatcaattttcaggatgccatacaaaaacaaaatgaggtaacggaaacgcggaaagaggttgttaggaaactaaccaataccgagcagatcaggaatgaactactgcaagacctcaaggacaggttaaagaaagagaagatcgacgttgaaatcgatacgcgacacggtgtgctgaggttgaccgaaaaagccgtccttttcaaaactgctgcggatactctgagtgaaagatacaggaataaccttaggactattggtattgtcttaaatgaggtaattccctgttatgctgaaaatcctcctagtaatatcgcttgctccaatctcgatcaaaccaaaggcaaaatcgacgcagtatttatagaaggtcacacagacaacgtaccgatgaaatctagtcgaataaaagacaattgggaactttcagccaacagggctattgcagcgtatcgattagttgtaccaaacagcgtactggataacctccgaaatatatctggacagcctatcttttcagtaagtggatacggagagggaaggcccgtagatggccataatcacagcgtaccaacacctgacggtgtaaaccgtcgaattgatctccgttttattatgaccccaccagcccttacggagcctcaaagggcccttattgcttggggggcaaaataa

SEQ ID NO: 10711 - DNA, 1407 bp, Photobacterium swingsii
atgtccttgaaagagctccttgatgacttcaaaactattgattcaagaaaagcacctgacctttcagagtcgctttttgtctcagaggttttgaagataaagaatcggcatggattcgttacgacaaccaaaccctcacagaccgatattgagacggtttacaggaagctatataagtttcttcaataccagtcaccatcggtttccttaactcgaaaggaatggaagctggttccttgggcattcatgttgacagtaaatggcaatcctcccctatttgaaaatgaagagtttatcccccctttatttgaccagatcaaacgtaaatctaagtttgatacggttagcccttttatacaggtattcctccaagaataccccttaaattcaaagcagtttgatcgactgcgagaagagcttcacgacttgataagtgggagtaaccacacaaaagttaacaccataaagcagtgggtaaatagtactggtattttggatgagaggagccatgagctttgcagccagaaaataatagattcgggttttcagtctaccttttccaattacaggctatctaaagggctggagtatggaggatttgcgttagcgtccctctcccgcctattgaagcaactagagtctgatttaggagtgtttgatgcttctttacagtcaaagatcacttcatcctgtatacactttttccttactcaagatgactcactaaaatatccatccttaaggattaatctcgctgaaggactgctcacgtcattctcacaacatcaaaccaacccccaaataaaaaagatccttatagacttcttccttcatcaatacggagatccacgaacatcaaaggcattgtggcttggtgtcaataccgttgctattaatgtaatgaaaagttggatggtagaaaacaccatgcacgacttttttaacttgttaagtcatgttgcaaaaacggattcaatggccgataagcattggaaatacagaaaacgattctggaacgcttacctgaaaaatggccatatccaagaagcatgggtagctctagggcctagagcctatgccgaggcaaacaattttcttcaaggtggcagaaacacatatgcaaagctctcaggagcccaatcacgtcacagtgcactaataatggtggtgaatggagtcttaattacagaatggagtcactcaggtagtttcaggctatgggactctagcaataagcgtcctaagctctatcaaaaatcatatcatagagaaagtttagttaactgggctgatcatactggggcacattcaggcagcgagtcaggaacatggcaacggaagttgtcatatcttatttacagcttaacggggatatcggtgtcaaacagggagtatatgaatgactag

SEQ ID NO: 10712 - DNA, 2784 bp, Photobacterium swingsii
atgactagctctgcacaattcacatggcaaaaaacagatactggttttctttttcaggtaaaactagataacgaaattcttcatcctaaccagtggtctaaattcagacttatggcaggagataccccggtggtaatagatccattatttaggactgttaatgagattatagctcccagcattaccgattcagggatagcatgctccgaaggctttatcgcagcactgacagaattagaaattcaaaagctatgtcttcctcctgtttcccacgccagagttaaaattgtagctaaagggctgataagtcagccaggtttccagttgtcttatcggctaatgactccagaaggcagaccaatgatgggatctaaggtttctgggatatcgctgaaagtaagaggacaaacagaactaatccttgagccactctactctatcattaataaacttgagcagtttaacaacgtcgatacatcagacagagatgaaaaatttgtccgctggggggaaatcaaggagctattacctgaagagtctattgttgatggacagctacgggatatcaccatttgtcgtgcagatagagtcacgttagatatcaaagaacatggtgtatttaatccactgttgattaagccaaacaccacaaaagactgggatgtccagggtcaagctgatgtagagtacgcaattcctaaagcaagacatacccagtttgaagatcagttcaagacctggagtacagcccgatcaaactatgctatcggaaatggtgtatatgttgtcctcccccagcgagtacaaaaagttctcggtgtaataaaagattaccaaacaagggatagtcaagagaggttagcattcgtatcaaatccacataaggtcatcaatgaaaagcttaaccaggaagatcaccctgaagagcttgaggctatttttgtcgaaacccccgattttatcagccaacgaatcgatactattggtatctggtctcctaagctatgtgcttatgtcgcgaagcgagaaggtgactgggttcctgacgatgatgaacgattgttcttccctattgatgatcttctggtcaatttcacaattgatgaaatgaagcgtcttctagacgaagtcaataaagcactagacgctgaagttcctgaaataacttttgaaggacaacgagttcccgtatcactggaaaccaagaatctgctaataaaaatgctaaagcctttcgatgagcctgaaggcccgcctgataccccgcttgatgtcgttgcaccaatcctcaaagacaatattgaggaagttgagtttgaggtcataaaacatgaagccagacctaaaatcactcggcttccagactcattaaaaacaaaaacactttatgaacatcagaaatatggcgttgactggctagccaatcattgggagtcaggctcaattggtgctttgctcgcagacgatatgggcctaggaaagacgatgcaggcgttagcatttttagcctcggttaaagagttaatgaacaacaaccactatcctaccaagccatttctcattgttgctccttcaggcctgctcaaaaactggcgagatgaagcaaagctgcatgtagaagaagatggacttggagatgtatttgaagcatttggtgctcagatcagagagataaaaaactacaccgttattgagcgcaactccataatatcaggtagtggctgggtgctaactacatatgaaaccctcagggacaaaatcaaatacttcctctctatcgaatggggagttaccatctttgatgaagcccaaaagatcaaaaacccagtatctcgtatgactgaaatggctaaatctttgtcgtcagatttcacgttgattttaacgggcacccctgtagaaaacgaactaaaagacttatggtgtatcgttgatactgctcaaccagggctatttggttctcttagccagttccataatgagtatgctaaaccagcagagagtgatcctgctgaagccaaaaggctcaaatctctgcttgtggaaaaaagcacccctcccctgatgctcagaagattgaaagaggagcacttggatggccttccccaaaaattcattcaccaagtagcgaaaatgatgcctgaacaacaggcggcagaatacgaaaatattgtaagggatgcccagttaaagagaggaatggctggtggagtattggagactatccagaaaattcgcagggcatcgcttattgccgaggaatttgatggaaacgggataactgatggtgttgtgaaacgctcggcaagacttaccgctttaatagaaatcttggataaggtaaaagaatctggagaaaaggttcttatattttgtgaagcgattgacgttcaagaatacctctcaggataccttcagcaccgatatcaactgccatcaagaccacgtcgaataaatggctctgttgatggctacacacgaaaacaatttgtggatgagtttcaaaatggcacggaaggtgagtttgatgtgatgctgttatctcctaaagctggtggagtcggtttgacgatcactgctgcaaaccatgttattcatctaactcggtggtggaatccagcggtagaagaccaaagtacagaccgcgcatttcgtattggacaaaagaaggatgtgaacgtatatctgcctatggcgattcaccccaaatacaaagatggttcatttgatgccaacctcaataggcttctcacgaagaagcggcacttaagctacaacgcctga

SEQ ID NO: 10713 - DNA, 1839 bp, Novosphingobium sp. PP1Y
atggatggcttgcttgaaaacgtcttggctggtgttggggcacctattcactgggccagtcaggcgcttctattctttctgcgctatgacgctagcgttttcgttttgtgtgccctcggggccttctggtgctggcgtttcatcaatcgcaataaaaaattgcactacgacgaggcaatggctgcgctgcagagccgggaagaggccttatcgaagattagcaccgcacaggatcctgttgaggcccaagtctggttttcagaagatttcgacaacatcgccgaggtcatggcgcgaccagatcgacgggaactggcgctcgcatgggagcaattccgtgaaacattcatcgacgagagcgaaccgaccattcggacgacggccagagcagagtcctattttctgcatctcgcggatgacacacgggtgctcgcctggggagctaatatcgccgttgccatcgggctaacagccactttcttgggtctaatcgccgccctcacctcggcgatggggacactttcaggtgctacgaacggcaccgagacgacccaagctctacaaggcctcctacagatcactgctgccaaattttggacttcggtcaccggcattatctgttcaatcgttttgaggcggactgaccggagttggcacgagaagcttcagcatcgtcttgaaaatatttgccaactgctagacagggcgaccctgtatacaccgccgcaacggatcgcagttgatcagctccgtgaaatgaagcgccaaactgaagcgttccaagttctgggtacagatctggccacagctatcgataatgcgctgaacaatcgcatgtcaccagtcgtgcaagtcctcggtgacatcagcaccaacatcgagcagtttcgcagcggtgggtttgatcgcatcagtcaggacctgggatcagctctgcgcgagcacgctggacaagagatgcaggcgttggcgcaatcgctgacgggcatgacaagcaagtttgagacgctgtcgagcggacttgccagtgtgccacagtctctggaaacaagccttcgtgacattcgtcagtcgttcgagacagaacaggaagaaacgcgccgtcgccagcgcgaggcaggcgagcaaatggctggtcagctggagcaggttgccgcaaaactggaaggcgtcacaggtcagttctccgaagatctggcgggaaagctcaaaaataccatcgagactgcagccgataccagtggtgcagctctttcaggcgcatttgcgaagttcggggagcaaatgtcgcagtccgcagatgaacttgttaatcgcttggcccttcttgcaaacaacgcagggcccctcagcgaagccatggcgcgcgcagcggattccacaaatcagcaggcacaaagactggagattgccggacgatctactgaagaggccgggaccaaactgtcagcggcaataactgagctgaacgcagctctggcaccagtggcctcggcaacccgctctgtcagcgaagccgctacctcgatttcttcggctttgaaatcgcacgagtccgctactgaagagctcactggacagttgatcgctacagcgagttccgcggagaaggcctgggaaaactacgaaggccgttttgccggcgtcgacgatgcgttgggcaagacgctcgatggactggtgtctgcaactgccgagcatgccacagccgtcaaccaacaaatcggtgagctagatagcgagctggcgaaggcagtaagtaatctcagggacgcacttgagccgctcgaggagcttgccgacgaaatttcagccctccttgaaaagctgaagtcctga

SEQ ID NO: 10714 - DNA, 777 bp, Novosphingobium sp. PP1Y
atgagcgacacttctttccgacgcaggcaaggagagccagaagaagagagctacttcatctccatgtccgacatgttggtaggactcctttttgtgttcataattttgcttgtttattttgcagttacattcaagcaaaaagaagattacttagttggtgctggagaagcccgacgacggctattggagcagcttgaaaaggacatcgagcaaaagcttccaggcgtggatatatcgattaatacagaaacaggcattctaagactgcctgaagaggtacttttcaattctaacgagtttgagcttagtgaccgcggacgcgaggcagttagcctcgtggcgcaagtactcgccatgcgcttaccttgctacacaagatccacaaactcagcgctgattcggtgtaacggccgagaagaagagcacaagatcgatacacttcttgtcgaagggcacactgaccgcgaccccatccggggggacacgactggactgggcaatctcgatctttctgcccgacgagctacacggacctatcttgccctgacccaagcccagcccggtttggcgatactgacaaacggcgatgatgtttatcccacgccagttctcggcgttgcaggctatggtccatatcgaccagttttgggagcaggggggcgacctttgccggaaacggagaaggcacgtcatcgccgcattgatcttcgctttatcatggtaacgcctaagagcgatgctgcccaggaagctgcccaaatgctgaggtccaaataa

SEQ ID NO: 10715 - DNA, 1302 bp, Novosphingobium sp. PP1Y
atgggcactgacgagcgcgtcgacgcagagccatggcatcaatttgttctgcgggttaatccgtacaagccgtccgaactggctcgaagagatctcaggcgcttggccagcgaaatttgggaccacccagacttagaagactgtgttcccgaccttcttagacactgttctgcaatcgcgaaacggacactggatcgacggcttgcccgggcatattggaatcggttcaaagtcggcgttccgttatttgtagaactcggattgtactgcaaaagtcggcaaaagcagttgggttctccatggagcgagctctcacgcagtattccaatttgggattccgaactcggtcctcctggactgggcgacagacttttgcgagccgaggatcgcgaagcattcctggcaatggccaatctacgcgtccaagacctcagcggcggctttgtcgacgccgcgttcggtgccctcctacaatctctcgctgcaaagcagaatgtcccacagtcgcggtcggtcggtcaggtcgagggagaagacattctgagcctgggtgcatcactcggtgaaagcacgatcaaggcgaatgccgagttactcgcatatgttctgctaaagccctggatagcgatggatcccgacgatgcctatcgggacaaagtcatggcgctactcctggacaggcttggcgacccccggacgtcccaaaacaattgggataccttggctgaaaagctgtcacgcatccaaggccttcgtgatgcggccgaagttctaagggtgctgcatcagtggatcaccgagaaaacagtccgactcttttttgatctcattgctcggacgacggatcgccccgatcagtggaaagaaaggcgcgcattctgggaggcttatctcgacaataagtttgtcgaacgtgcctggttcgctctcggccaagatgcgcgaggtctggcccagatcgcaaagtcatcgcatggattgctattcggtcgggtaggcggcagcggtgcagcatccagccagtccgttctgctcatgaaaatcggcgaccttattgttgccgaatggagcgacaacggccgcgcgcgcttctgggtcgatgcggcagagaactcgagatttttgccaaaattcaacagcaaatactatgaaggccagacgctgcgttcgatgagtggtggaacggggtttgaagcgatcgctcaccaaggcaaatggtacagaaagtttgcagatcacatcgcgaccacaacacgcataccttacaaaggaccaaggccggtatcgctatggggatggtag

SEQ ID NO: 10716 - DNA, 3513 bp, Novosphingobium sp. PP1Y
atggtaggattttcgtcgaaggcggttcctgaaggcgaactgctcacactgatcggccaaactggcgaaactgtgccattcgacgattggacactcaaagcaccagcgcatgcgcgcggcatcgctgctgacttgctcgatcgttgggccaatgatgctcgcggcgttgacggggcgcctttgatcaccccaacagatgatggctctgtgctcctccacggttccgttgttgcggcattttcggagcaggaagcagcggctctcgcactcccacctgcaattcgcattcagttggagatcgaaacatcaggcgtgtttggtcgtccaggattccgactggaaacacgatgggttcgaccaggtggtctggctgcccgcgtaactccggttgctggtcgcctgcgcttcaatgcccaggattggcggttagctgaaccactatggtcaacgctcgaagctgttcgggcggtaaatggcgctacggatgacgccggacaacagtttgcgatgtcgcagctccgcgaaacacttagtgccgcagaaggggacatcctgcatcccaatggtttcctcaagcggttgcgaattagctatgcggctggcttctcactcgatctcaagaccgatggcagacattttgatttcgaccccatcctcttcagtcgggcgcggcgcaacgctgcccaggaaggcgaaatgccagatggggaggatgacggtctgttacctccgtcccttcagcaaaggttcgttgagaagtttcgtgggtctgatcgtgccctcaatgcctatcggttagacgattgcacgattgtctatctggaccccgaacttaaaggtgcactcgaaattgtgcgccgcgcccaagggctggatgaggaaagccgccgcaagtttgcgttgagcccgaggcgctacatctctgaagccatgccggacggcgcattggccgacgggtcggtcgacgcgctctttatcgagacgcagcaatattctgaacgggtcaacggcatcgacatctggcgaaagccggttctgccttggatcaagccgaaagcgaacagttggcttcccgaaagctttggcctctatatcggtgatcctcccgagggcgagcaagtcgatattgctgctgagcagctcgatgaagccatcaacgctttagagaaggctgtcgtagaaggacaagatagcgtccagattgggaacgccacagtgcctgccacggcacaggcattggattcgcttcgtgcccttcgcgatcggatcacccctgtagccgcatcatcgagcccagacagtgaaccgactgaccaggcatgcccattgttcctgacagtgtcggaaaacttcgagcaagttgagtatgaggaaagtgcccttggtgctgtccagaccttcactagccctcaattcccgaatgcggtttccagcgaacccaaggatcatcagcgaacaggctttaactggctagcagaagcgtgggctaaccggatgccgggcgtgttgctcgcagatgatatgggtttggggaaaacgtaccagctcctgtcgttccttgcatggctgcgccatgatcagcgcgtcacagaaccttttctgataattgctcctaccggcctgctcgaaaactggcgccaggaaatgcagctccatcttgttgagggcgctctcggagaaattttacctgcatttggcaccaatcttggcctgctgaggcagggccgaggccgcgatacgcagtcgggatcagcacaactctcggcaagcgccttcgagggctatggcgtggtcctgacgacctacgagaccttgcgggactatcacatgagttttgcgcgtcagcggtttgccgtcgcagtctgcgacgaggcgcaaaagatcaagaacgctaccagccagatccgccgcgctgctaccactgtaaacgcacgctttcggatagcgttgactggtacgccggtagagaaccggttgcaggatttatggaccattatggattggtcttggccaaagctgcttggtgcaagtcgggattttgaacgccgctacactgaagacgatgccgctgcgctaggcgaacttcgcggccagctagtagatcggcaagacgggcgtccacccgtaatgcttcggcgcatgaagagcgaagtccttgacggtctgccccagaagcggatcgtcaagcatcagatctatatgccgcccgcccaggcggaccgctactctcgcgcaatcgaacaagcggtagcactgcgcggaagtggtcaacggggcttgatgctcaaggtgttacacgaactgcggagcacctcgctctatccgggaagtccggacggcgctgaattcgatccagcacattcggcaaggttgcaggcggtgttcacggcgcttgagcagatcaaaatggccggagaaaaagcactggtcttctgtgaagaccttgcgatgcaagcaaggctcgctgccgaaatccgtcatcgttttgacatttctcatcctgttgcccggatccacggcggtgttggacctcagatgcgacaacagattgtgaacgcatttcagacacgaccagctgggttcgacgtgctcattctgtcccccaaagccggcggcgtaggccttactctgactgctgccaatcatgtcatccacgcttcgcgctggtggaaccctgcagtcgaagaccaggctacagaccgtgtctatcgcatcggtcaaactcgcgatgtcacggtgcatttacctctggcggttcaccccgaccccagtctccgcgacgcgagttttgacttcaagttagaccagctgatggaacgcaagcgtggattgagcgcccagcttctgatgccaggcgaaaccaatggcgacctggacaatttgtttgagagcctgttcgaaccggcggccaccgatcagcccgatcagacagcttcggatgctgtggttcatgcggttccagcaaacttggcaccagaggccccggagcagcgtccgaccctttcagtacgccatcaacctgttgaacactcccacaaggcaccgagaatggtccgctataatcagggagatgatcgcgcctgggacatttttgccgacaatctgggaaagcgcgcgatcgagcatctcatcattcgcgatccatatgcgttggccggacgccgcaaccgactgctcacggcagacttcgcttctcacctagcccgaaaggtgccgggcgtttcgcgtgtcacagtcattgcgtgggatgcggaaagcgcgcgaaatgacaacttcgaaacaacgcagcgcacagtggatgatatggagcgggaatgggatcggcgcttcatgggccgtgttccgctccttctcgaactcaagtcgcgcggcgaagatcggcgttttcatgatcgttggattgaagcatatttagatgacggtgaccgcttggcttggaaccttacaagtggtgtcgacggtttcatgaacaccgacagcgaatgcaccgttacgctttgggacgacgtttga

SEQ ID NO: 10717 - DNA, 1926 bp, Novosphingobium sp. PP1Y
gtggaaattaccgaatcgctcggtcatgggctgatctactttttcaccaaaattccgctcattggcgatgcgatggcggcgtttctggcaatcgtgctgatcggaactgccttagcaatagcttaccgatacaaacgccaatatcacgctcccctcgctgaggcgatcgaagcccgcgtccgcctgcttgatgagataaccggcggcagtaccgcggatgtcgaccaggcgcgcctcgagttcgcgcgccgcttcaatgatatcgacgcccagatgatggaggcgaatgacgctgaggcgctgccgctccgcagaacctgggaagaatatcgcgaaacgatcgtcgatccctcggccgatgttcttcagaactccgctcgtcccgaacacttcttcgtcaatcttggcgaccgtcatcgcgggctgaactggtttgctaacatctttatcgccatcggcctgttgatcaccttcctgggcatcatcgcagctctctcgacactcgacttcagcggcggggtcgatgcgatgcaggagcggctcaatgatctcatgaaggtagcgggagcgaagttctgggcctctgtggggggcatcgtggcttccatcgtccttcgatcctatgactacctctttggcaagcgcatcaatgatgggctgtccatgctgtgtgacaaactcgagcacggaatggcctatctgccgccgcaacggatcgcgagcgatcagctggcacagctcaaagagcaaactccggcactccgcaccttttccgaacagcttgccgccgccctcgacggggccttggaaaagcagatggcgcccatgatcacacatctcgggtcgatccagcagggcatcgacaagatcagcggaggcgggggtgaagccgtccgcgacgcgatcgcttcaagtgcaggtgccgagatggccggcctcgcagatgccattggcgcaatgaccgtctcgatggccacgatgtccgaacgtatcgaaaaacagaccggcgaagctgaccgccagatcgaagaggctgtcaggcgctttggccaggcgtcggaagagatgcggtcggcatttggcgagctcaaccgcaactttggcgtagtcgcggaccgcatgcgcgaagaaaacgagcaggccagtgagcttgccagacagcggatggacgaattgctgagcagccttggcaatacgctcgacgatatgaaatccggactcgcctcggcggccagtcagatgggtgaagcctcggcacgcgcggcgaatgacgcggcccggatcggccaggaagcaatggaaaagtccttctcggagttcgttgaacggttcaaccagaccggcggcccgctggtaggcagcatgaaagacgcgggcgatgccatttccacgtctgcggaacgtctctcgaccgcacaaagtgctatcggagatcacgcgcgagcgatcgagcaagtcgccgctcgctcgagcgatctggcgacggcgttcggaacggtggccaacgacgttgaggcggcaaccgcgcctgtacgccagtcggcagtctcgatagccgaagcagtcaaatcggttgagaccatcgtttcccgaaatgcgcagtcatccgagagcgctcgtgacgaaatgcgccagcttgcggcagcgctaagcgagaccgcgagtgcggcctcctccgcatggtcggaatatcgtgctcgcttcgaggatgtggaccgcgctcttggtgacgcaatcgagaagatctcggatgctgccggcaatcatgcgtcgaacctcaacgaacgggttggccagatcgacaaggctctgggcgatggtgtggcgcagctcgccggcgcactcgaaccgctcacgaccctgcgggacaccgtcgaggaacttgccggcatccttgcaaaccagaacagggaagccgctgaataa

SEQ ID NO: 10718 - DNA, 729 bp, Novosphingobium sp. PP1Y
atggaaggcgtggttcgccggaagccacctgaagagggcgaaagctatttcatgtccatgacggacatgatggtcggcctgcttcttattttcataatcctgttagcctactttgccctcaatctgcagaccaagaccgaagagctgaccggcgcaaacaggacccgcgccgagatcctcaacgatctgcagcagtccttgaaagaccgagggctccaggtggaaatcgacaccaagaccggagttctgaggctccccgacgatgtcctgttcgacaaaggtcaatgggaactgacggaaagggggcaggccgccatcagcaaagtcgccagcgccatggtcgaggtcctgccgtgctataccgcctccgatctttgcgaaggcgaacgctcgccgcatttgatcgatgctgtctttgtcgaggggcacacggactccgacgtcatgtctggtggcatgaacaactatggactttcggtgcgccgggcagagacgaccttcaccatgctccagcgcaaccaaccggccctgcgcggttttctgaatagaccggcgggagaagacggctcggcaccgatcctaagtctgagcggctacggtcccgaccgtcccgtcgatcgtggagactccgaagaagccaagaagcgtaatcgtcggatcgacttgcgcttcctgatgaccaccccaagcgctggcctcgaccgcgacattttgaggcaggagcaatga

SEQ ID NO: 10719 - DNA, 1377 bp, Novosphingobium sp. PP1Y
atggaggccctggcatcggctggactggctaaacctccgacgacacagcctgagttgcagcgacaattggcaaagctcgatgcatgtgtgggcgaagcagagcccgtcattgagcttaagccattcctgcgaggcgtggccgatacgggtgcaaacggcttaccgcggtttcagctcaacagagtcctgcgcggcgcatggtgtgacccggaattcgatgatttgggcgtggcggcgctcgaacgggccgacgtcgatcatcggcgcagttccgaccaggccgtaatcgatggctaccttacctatttcccgacaggccgctcgatcatgccgatgcttgcagaagctgcctcccgggctgccggtcggcatgactgggcgtggcgcgagcgtggagcacggtgggatctgttcaagccccagatgggaccagccaaagtggcacgcgattttgttgcgcgcgatgctgatggcatttccttcttgatgcgcgagactggccttggcgcaaaccttgcggcgagcgggtttggtcaggcaactttcgccgagacctgcaaagcaaccgcagagcttcagcctgcagaagcagtcgttccgcagcgcagtatcctgcgtatgtttgatacagaagcgcaggcaggacagttggaactggttgtccgtgccctgctcgagccctggatcaggaccaaacccgaacccgagcatcgaaaggcagtttccgagtttctgctcgatcaggtgggtgatccgcgtctccagcgtacccggtgggacaggatcgtgcgatcgctcgctgaatcgatcggtgaagaacgtgcgcgcgaggtcactcaggtgttcaagcgctggcttaccgaagtcgccatgcgcgagtttttccgcgccatcgcgaagaccacggatcggcctgatcagtggaagcaacgtgaagcgttttggattgcatacctcgatgaaggattggtcaccgacgcatggcccgcgctgggatcacgcgcgaaataccaaatcgattctttaatccgccagagtggcgaacgaccagaatacggtcaaattcgaggaggtccctcccaatcttcgtccatcatcatgcagataggcgacctgcgcatatcggaatggagcgataacggatcctgccgcttctggagtgacaccgatcccggagcaccgaaactctacgcaaaggtctacgacggtgggaagctgcgaaccaccagcggacggacggatttcgagtatgagtctcatgtccctgcgagtcctgggtgggaaggcaagttcgccggtatcatccatcgccggacatcaatcgcgcatccccgtttcgggagaggccggggccgcaactggaatgatcgatggtaa

SEQ ID NO: 10720 - DNA, 3816 bp, Novosphingobium sp. PP1Y
atggtaacgaccaagttcattgccacacagaacgagggcggcggtgagacgattgcgcttctctgcgagcagccaggcgggctttttcggcgagcatcaagcgaaattgtgccggtctcagagtggcctagagtagcccccgaagctgggcaggccgctctggcgctggctcgagctctcgatgatgatagtcagatcagcgaagaggcggagggcattatccttccaccgcagatcgttgcacggctcgatgaggccgacgcattcgccctcggtcttccgccggccacgtcgatgacccttcagcttaactcgggaggttcgctcgctgaaggaacaatcaaagtcgatacgaaatgggtccgccgcggtggcctgccagttcgagccgacatcgcgggcgcacgtctgcgagaaggcgggcgtgtcggacgaattcccgagccgatttactcggcctttcagtccgcacttgcagtcaacgcggctgatgatcccgatcagcgccgcgcagcctttgccgagcttcgttcgacgctcggagatgacatcggcgccggcatcgaggcggatggctttctcgagcgtgtccggattgcctatgccgccaatttttcactcaacgcaaagaccgaccatggacgtttcgacttcgaccccgtcctcttctcgagaaacgtaagcgagagcgctgagggtgacctggtcgacgaagaagaagcgtcgctgcttaccccgcaggacaatcagcattttcagcgccggttccggggtcaggacggcgggcgccgaagctatctgctttccgacggaacgctcctttttcttgacccgatgctgggcaaagccctcgacatcgtgcgcgcaaagcaggtgggcacctcccaggaaaagcgcgaattcctgcgttcgccgcaacgtatcctgcgtgaagagctcaagcttgacgcggcagatgatgacgaggcagctgatcgtctcttcatcgagacacagcagttttccgagcgggtcagcgggatcgaggtctggcaaaagccggtcctaccctggatcaaacccaagccgaacagctggctgcccgaagggtttggattgcggatcggggatccgcctgacgcgcgtcatgtcgagttgggtccaggtgaagctgaaacgatcgcaagcgaagtcgagacagcgattgacacaggccaggaaacgatcgcctggcgcgacgaaagcatccctgcgacgcctgcaaccctgcaggccgcgcgagcaattgcagacctcgaacgtgagatcgctgatgagatcgagggacgcgcctcggacagaaccgaacgcgagagcgtcgatattttcttccttcaggtcggagagaattttgagcagttggactatgcgcggctgcctcgtcccgacgccgaagtgcaggatttcgatgctcccgggctccccaaaggactgagatcagaacccaagcctcaccaggtggaggcgttcgcatggtttgccgaggcctgggagcgccggatgccgggcgtcttgctcgccgacgatatggggctcggaaagaccttccaggcgcttatgttcctgctgtggctgcgcagtagaacgcctcatcagaagcccgtcttgattgtcgcgcccacaggtcttctgcgaaattggcaagccgagctttcgcagcacatcgaagcagatctcatggggcctgttgtcgaggcgttcggctccaacctgcgcaatttccgtctcgaggctgggagcgacattcgcgggggaacctcgcgtctcgacgtgtcggaatggaatgacgccggaatcgtcctcacgacttacgaaacaatgcgcgattatcacatgagcttcgcgcgcattccgttcgctgcaatcgtctacgatgaaatccagaagctcaagaatcctgccagccagatgacacgcgccgcaaaggcgctgaacggcacaatccagatcgccatgacgggcacaccggttgagaaccggctgcaggacctgtggtcgattgccgatacggtctatcccggtttccttggctcgagccgggaattcgagagcagtttcccggcgaacgatctcgagcgccttggcgatctccagcaccgtctgatcgagcgcgacaaagaacttccgcctttcatgctgcgtcggatgaaggacgaaatcctgaccgggctgccggagaagaaggcccgcaaatatcctgtcgagatgccggccgcgcaagcgcaggcctacgacctcgtgctggccagagcgcgagcgctacgggaaagcggcgaacagggtgcgatgctcaaagtgctgcatatgttgcgcggtacatcgctccacccgtcactgccgcgtggaatttcgaacatcgacgagtacatcgggcaatctgcacggctgaagaagaccttcgaaatccttgaggaggtcaagcagcgcggcgaaaaggctctgctattctgcgaagacctcgagatgcaggccttcctcgcgatggcaattcaggagcgcttcgcgctcgcgcgccgcccgatgtgcatcagtgggaaggttgcgggccataagcgccaagagatggtcactgtctttcagagttcgccggcctcattcgacgttctcatcctgtcgcccaaggctggcggcgtggggctcacgatcaccgctgcaaacaatgtgatccatctgtcccgctggtggaatccggccgttgaagatcaggcgacggaccgcgcctaccggatcggtcagaccaggccagtgacagttcacattccgatggctgtccatccggacgaagcgatcggaccttcaagcttcgaccagcgtctcgatgccctcatggagcgcaagcgctcgctgagccggggtctgctcatgccgccggagagcgatcgcgatgtagaagacctgctttccgatgtgctcgacgggtgccctgcagagaaccgtgatcgaagtagcgcgtatgccgccgcagggcaggtggacaaggatattcaggacaccgattacagcgccagtattcgacaagcagaaccgcctgcccctccagtcgcacagccggaaatcgaagagccgacgggagacgaggagagtgctcgctcccgcggacccgcgagcgacaacacagcgagttccgcaaaccttgatccggctgcggagcacgcggcagaactaggattagaagaagcggcgcgctcgcagtctcactctgatcctggcgagacagcatcgagtaatgccgagcgcaaaaaccggcgccccattctctccgtacgtactcccgtcgaggcggctgaagcgcgcgttcctttcgttcagcgggtcgtgtttgaacaatatggacaacgcgactggacgattttcgagcagtacgcgcgcgacgcgcgaattgaacggctcgaaatccaggacccctattgttgcgctgacgaacaagctcgcgggcgcctcatcaatttcatcggtcgctttgaacagctcgcatcggaaatcgcggccgtgcaaatcgtgacattcgacgccgattccgtgcagactcgtgaccctgaaagcacgcgtgaccagcgccaggaccttgaagatcggtggaaccgtatgctggcctcggttcccctccacctcgcacagaagtcacgtcggtcgggcggcgacctgcacgatcgtttcgtgagggctaaactggagaatggcgataccgtcatctgggatcttggacggggtatcgacggcgtcatgaacgcgcgctggtcttgcgttgtgaatgctttttacgagggctcgatttcgacctctcgggcaatgcactga

SEQ ID NO: 10721 - DNA, 1971 bp, Candidatus Puniceispirillum marinum IMCC1322
gtgaatcaaataggtaagtggtttgaagcggttttaggaccattaattggttatcttaagattgaaggatttggtccctttttggcgtttgcaattttagttgttggagcaatagttattgcacttattttatatcattttagtgttttttatagaaggctcaataacgcaatttcggcgcttcaaaattgtgaaaatgaagaagagttttataaaaattttgaatcaataaatggatatttcaataataattctgggctgggagtttgttggagggagtttacagagactataattcaccctcacgttgctaggcccggtgggacagatcctataatacgaaacacctctcgcccgggtgatttttttgatgcagaggctgctggattcgttacgccaacactgaggataatgccaaacatatttgttggtgttggcttgttccttacttttgctgggttgatagcagctttatcaacggccacgacagcgatgtcgggcggtgctgatcaaatgcaggtcgcactcagagatctgctttataccatatctgcaaaattctatacttcattgatcgctttgggagtttcaatctttctaactattattttcaggattttggaaacaaaaagatctgttctgtttaaaaaattaaacgataaaattgaaaggggaatgcacttcgtttcagttgaagagatcgcatacagccaactagaagagatgaaagaacaaaagatccagctccagcaatttaatacagatctggcgatgaaacttggagatcacattgaaacagctgtaacatcggcaatgagccctgttgtagataagttgagttcaatgggagagaatatggggcaaagtaacattaaggcaatgcaggaaattggcgacgctattgccaaaaatgttcaaggagctgcaggcgaaagtttaggccacttgtctgataggcttgataacctaacaactgtacttggcgatatgtcatcaaacctttccaagagcacaagtgagtttgagaatgatatagccaatgcactgacgagtatgaaatcaggtttagaggctatggcgtcagatctgcaaagtaatgccgcgcaaacatccgatatactttctgaaaagcttgagggtcttgctgatagcctatcaaatgcagctgagaacattaaggttagccttgaagcaggggcaggagaggtgtctggtgagcttgaaagagcaatcgaaaggctaactgaggccactgatagaagtgcagacaagatgggctctgctgttgacggtattaacgatgcagtgaagggcattgccagctctctcgaagatgcttcggggcaagctggtgaattagcaaaggcccgaatggaggaagctggagcctccgcagcaaatacgttttcagaagcggggcaaaaaatgtctgacgcgctcgaggtgggtatggaagagctcagtactgcaatggcaggctttgagcagagtctcggtcaagcctcagaaaatatgcttaaaatgaatgatgaactgggcaacacatctaaagtggtttcaaagactagttcagatttagatagtagcgtaaaggctcttaaagaggcatcaggtagcgtaagcggcgcaattagtccagcgttaaatgctgttgaaagtattcagtctgcggtgaggcagatggatgaaaaggtgagttcagcagctagtcgtgtcagcgaagctgttgagaggcttgagacggaaatgcgcctcagcggggagtcttgggaagagcattcgaaaaagtttgacggggttaatgagaaccttggggcagtgttcagtaaagttaactctcagatagaagagagccagagcaggatgagagatttcgtgattggtgttgacggcgcattcagaaacgccttggctggtctccaagaggctgtagaagaactagctgatgaacgaaaagctggaagagattag

SEQ ID NO: 10722 - DNA, 813 bp, Candidatus Puniceispirillum marinum IMCC1322
atgggtggggcaagaagaaatagaaaatcacgcaacgaggcagacgagtcttattttgtgtctatgactgatattatgattggtatgctgttcgttttcattctgatcattatgtacttttcttaccaattgaagattcaatcagaggctcaagatgattatgcgcagtcggcaacagatcatcgcacgcagattcttgacgagttgaaagattatttagagggtaacggtcagattaaaattgagatagatgcagagcagggtatcctaagagttccagagggggtgttgtttgactctggtgttgccgatattctggaaggaagcaatgcagacttcttctcggccaagctggcagcagcttttgcggctgtcattaggtgctccgttctaaatgaagggctaaaagtttttgatggttcagaaaaatgcaggtctaaaaatgttaaccgagcatttattgagtcaatatttattgaagggcatactgacaacagccccataaggggcggtcttagaggcaacgtcaagatcaattcaaatctccgattatcagcgcggagagctacaaatacctacgaaaatatgattgcgaaaaagccagtccttgaagcgtttaagtcgcctaaaaacgaacccgtgtttgcggtgtcagcatatggtaagacacgcccaattgacactaattccacatcctcaggtaaagcaaacaaccgcaggattgatattaggttactgatgtatattccagaaaacagtgcggcgttatttgattacaggaaaaggttggagactttctatgagctcaactga

SEQ ID NO: 10723 - DNA, 1389 bp, Candidatus Puniceispirillum marinum IMCC1322
atgagctcaactgatatctctgaaattgacgtaagctttaagctacatttgccgacgttttctgcaagatcagaatctacagcgaaggcagagaaaattatcaaaaaatatggctctattgtgccaaatgtacctgaaaacatagaacatattattcagaaggcaaaagaatatttcagttcaagtaacgcggaaaaattgactgaaaaagagttgagagcagttgcatttgaaagtttgtctagagacgagggtgataggtttttctttaaccttttaaaagctgttgatgaagccaagtcacgccgggttttttctgctttgttttcctcttatatcatgaattttaataaacatgatgagcgtattgctcaagctgccaaactcctaaaaaagcaccaaaagactttgtcaaaaagctgggtgagacggcttgaaaactttgatttgctggcattcaaaactattgaaacatcgcttgccaaaaaaattatggaagagggcaatgaccactcagtgtttgatcgtgctggccttactggagcattttcagcgagtcgactggttcagagcagccttatcgaattggctaaccaagttgccaagcggataaaaggtggcaatacagacgccttatatgattttttaaagatagtatgtgttggggacaaaattaaacagcatgctggtgcggcagctatgattgcatcacttaagccttttatcgactcttcgccgccagtgcatttaaaaggtctactgcagaaagtgtttatcggttctttctctgacccaaggatcactctaaaccagtggcctgaaattccggcccatttgggcggcactaatttgcgaacctcatgtattggacttattaagaaatggttaaattttgaggcgattgaattattcttcaaggttattgctgaacacgctcctgacgagcagttcgagcctagaagaaacctttggaagtcatactttgatcaagagtttgtggtggatgctcatattattttaggacagagcgccgccttgacggctaagcgattaaaaagaacggatgatgctgctcacggattaatatggggtaacctgtcaggggcaaaccctgatcaatctgttttattgatgcaaattggagatttaactgttgccgagtggagtcataatggaaaatttagagcttgggatcctgactcacctaaaaagccgaggttttaccgcaactcttacagcgcttcagaacttaggctgggttcaaacaaaattagaaacaagaatggttcttatggagacggtatagttcatctgggtgattgggtgccaagagctaaggcctacgttaaccaagcaactggaattcgcttgtcgaggaaaatacgatga

SEQ ID NO: 10724 - DNA, 3393 bp, Candidatus Puniceispirillum marinum IMCC1322
atgaaacaatttcactcttcaatccaaagtgactgtgtcgagctgaggctcaagactgtttcaaaaaaaattttacgaaaagatagcgagtcaatcgaaaacgtttcagagtggatcggtttgtctcgctttgatcaggtagaggcacttggcacactcttcgctgcaatggaagaaaactcgggtagttttgaaaggttggatagtgacgaagggtatcgcgtttcatttgattttgtctcaactcttaacgaagcgcaggcattggctttaggtcttccaaaatcttttccctattcaataagaataaaaagtatcagtaatatagggtcaaagaactattcgctcgactggattgcctatggtaatgggcgccagttaaacgtgagtagagttggctgtttcttgtatcagggtaatgaggttttcaagttaaacgctgatatatggaagatcattgaatgtatagatgaatttaactcaagtggtttagatgactttgactcaaagacttcctttgtgtctgaactgaggtcacttttgcccgagaccccagacgggcgcgtgtacttcgatggtgaacttgctgaggtctcccttcaacacgctgttgcgttttcacttcaaattacaggtgataaaaattcgattaactttaatccagtcctttttaataaaataacaaaagatagagcatcagagactgacacgctgatagaagaagatgagcaagtacttactcccaatgacgctaggaccttttctgctgcttttaaaaagtcagggaaggtcagcgcatcatatcttttaggtaaggggaagtatgtctttatcgataagtcgctaaggcctgcacttggcgcagttaagactgcgatcgcgtccccaaaagatgctcgagttgagttcgccaaggctccacaaaagtttatcaaaaatattctagagagagattttgaaggccttcctgatgtcgatatagaaatagcctcagcgaatattgataggatatttattgaaacgaggcagttttctgacagggtgacaggaattgggctttgggaggctcctgacctgccttggctggagattgagccgcaagattggcgagctgatagctattctttttatgtgcagggaaaaacgatttctataccaacgccggatctggaaaaggaggttgagaaattaagattagccgttcaaacgggtaccactcaggttgagattggtggccaaatcgtcagaccagatcagtcttttttgaattttttgatggggctattacccgttaagccagaagatccaccggagccagaagatccaccggggccagaagagccgccggaacccgtgaaagaaaagggaacatttgttcttctaaccaaagaaaattttgagtcggtgcggtacaacagccgccttgcgtctcgttcaggcgccctgagtgcagagccaccttcttgcaaaagcccaaaaatagttttgaaggcccatcaaacatcagggcttaactggctagttgagtcatataaccgcgggtatcccggtgtgcttatggccgatgatatgggtctgggtaaaactcttcaggcgcttatgtttttggcaataatggttgaaacagggaaaactgagacaggagagccaattttaattgtcgctcccgtgggattgctaaagaattgggaagaggagcactccaaacacctctccggtgaggggcttggttcctttgcaaggctctacggcaacagcctaaagggctttaaagttgcaaagggtagagatatagaaagcggaaacgctagtcttaatactgataaaataaggggtcatgattggttgcttaccacttatgagacccttcgtgattatcaggcttcattcgggcaaattagattttcttgcgtagtttttgatgagatacaaaaggcaaaaaacccgcgtggtttgatttataacggcgctaaaggtcttaatcgggactttgttttgggcttgactggcaccccagtggagaactcgttatcagatttgtggacaattatggatgttattagccccgggagattaggtgatctaaaaacattcatgagtagctatcctgagccaaggtctgagaatgctcaagaggcgcttgaaaacctaaaacaattgtcagtccaacttttggagccctcagcgaatggcccggctccagtgatccgaagaatgaaatctgacctgtcagatgcggggctcccagaaaaaattcttgtgccatctctagaaacaacagttttgatgccaaggatccaagatgatgaatatattgcccgttctaataagttaaacagcgggcagacttcaatgattgaggctcttcatgctttcaaatctatatcactgcatcccatatcccccgttcagtttgagcagttttcgattgatgaatacatcaaggcatcagctcgactttctaaaacatttgaaattcttgaacgcatccataaacaaaatgaaaaagtgttaatttttttggagagtagaaaatttcaagtagttctggcgtccctagttagagaaaaattcaaaatggaccacagtccattaatcattaatggtctgattagtggtgaggcgcgacaggaaagggtgaatacttttcagtccaacccaattggatttgacgtgatgattatatctccaaaggctggtggtgtcggtttgactttaactgcggctaataatgtcattcatctagaacgctggtggaaccccgccgtagaggatcaatgcaccgacagggcttaccggataggccagacaaaaacagttaatgtttacactccaattgcaaagaatggatcctttggggaaaaatcatttgattgtatcttagacaggttgctcaacgagaagaggtctattgcaaagggcctttttgttccaacttctgttactggcgatgagtttggaggggcgtttaaagagggggtgcgcgggcgcgaactaagccttgaagaaattgattgttttgaacgtggtgaagagtttgagaattatataattagccagctaaactcagtgggactgaaggcgtctaaaactcaatcgagttatgattatggagccgacgtgatagtaaaaaatgagaagactggtcgctctgccatagttcagtgcaaacataggtccagtggttcaaaatctgtttcacaggatgcggtcgatgaggtgctaaaagctgtctcatattatgatttaggcgctcccaaactatttgttgttacaaatgcagggtcagctacttcagggtgcaggagcgtagcgaatgaaaatggtgtaacacttgtattgcgagatgacttattgacagttcaaggtgttttaggttctaaacttaattag

SEQ ID NO: 10725 - DNA, 1947 bp, Geobacillus sp. WSUCF1
ttgtataccgtttttgagacgttgttttccttgattaacaaaatcggaaatgaaggttttactgatttgtttctttattttcagtttagtttgtttttggtgatggctgtttggcagtttgtccgcattcatagggagattgcggtgatgaaccagttgaagccaaagcttttggaattaaaccgtcctttagatggaagcgtctacgagattgatcaggccattcacaatctttttgcccaagtgaaaaagtcgaaatataaagaactttgggagcggtattataatcgcgtgtcgcagaaaaatgaggatgagcgtattaatgtagagccgttttttggatttgatgtgatgtaccatcatatgggctaccgaacattgatggacatgggggcgggcattcacgtcagtctcggtgttcttggcactttcgttggtctctcggtaggattggctcaattgcatgtcagtgatacagaaatgttgcggtctggaattgatagtttaataaatgggatgaaagtcgccttttacacttctgtatggggcgtgttgctttctttaatatggacgatgttcgaccgatggatcagtggcgtgcttgagcgcaatatcgactggcattccgagcggcttgactttttgcttagcaccgatgatgaggagctgtttcttaaccgtttagaaaagttatcacgtcatcaggctgaccatctgaagacgctgctgactgatgcgcttgaaagggcgatgcagccgatcgctctatcgcttcagcagtcgcacggcagcctgcagcaagcgttcggtcagcttcatgaccagttcgcccagctgcatgaagggatggagacgcaggcgaagctgcttgagtcgcaaattgagttgacaaaaagtacaagcgccgatgtgacgagtcggcttgttgatgagattacaggcgggacacaacagtcaattggaaagtttagcgagtttgtccaacaatcgcaagtgcttcactcagaaatgatgaaaacgattgagtcattcacaagccgttttgcttatacggaagagcgacaggcgatgacgcttgagcggacggaaaaaatgtttgcgcaatttgagaaaatggctgcagaacttgaattaatgaaggaaagttatcaaaaaacggcggggatgatgaacggattaggagaaacattttaccagttgcagcagctgacaaaagaccagcttccagttcagcaagaagtgatgcggagcaaccagctgttggctcagaagtatgatcatttggcagaacagttcacccgatttaatgcggaagtggaaacacagtacagccagctgcttgagcggcttgtccatgcatcgtcctcactttccggctcgtttcaaacgatggcgaacaagtttgaggagtctctccgcattcaaaaagaatcgctgcatgattcgcagcagctgctcggcgatgtccagtcggctgtggctgcgctgtccccgctcgtttccgaattgcgcgaaacgttcaatcgcgttcgcgagctgaaggagcagctgcttaaaatgcaggaagcgcaaaaacagcttcttccagagcttgtgcagctgcgcacgcaaacaaatgaaacggtggaggaagcattacaaacaacgaaagtgtacatgcatgagatgacagagcaaatcgcgacgctgcagcaaaactgggcgatgacgaaagaacagttggcgaagattacagaagcccttcatctttcaatgaaagattttgcggagaacattgacagcggtctaagcaaaacgtatcaacactttgatgagacgttgacaaaagccgttcaggaagtgagcgggctcgtttatcagttcagtgaggttcagaacgatttcattgagaatatggaagacttagtcgatcatctggataaatggaaagcaggggcttcaacatga

SEQ ID NO: 10726 - DNA, 693 bp, Geobacillus sp. WSUCF1
atggaaagcaggggcttcaacatgaaatatcggagacggacggaagttaattattggatgtcctatgcggatttaatgagcgccatgttgatggtgtttgccttgttgttgatgtttgtcatccttgactaccgtgaattgttagaagagaaagaaaaacaaattgaagaggttgtcagcgtcaaaacggagatcattcgggctttaacagaagcgtttaaaaagtcgaatatggccattgaggtcgatcagcaaacaggagccatccgctttcccggcagcattttgtttgaatcgaactcggcggaaatttctccggaggggaaggcgtttttgcaacaatttattcctaagtatatggggattttattgcaggatcggtttaaagatgaaatttcaagtatcattatcgaaggacataccgaccgaaatgggacgtacatgtacaacatgtctttgtcacagcgacgggcatacgccgttttagagtatatttatagtaaagagtttcctaattttaaagagcgggagctgtcgaaaaagtacattactgcaaatggccggagcttcagcaatccgctgacggatgaaaacggcaagtatgatcctgaccgatcacgccgggttgaatttttattccgtcttaaggacgatgaagcaattaaagccattgaaaagttggtgaacgaatga

SEQ ID NO: 10727 - DNA, 1281 bp, Geobacillus sp. WSUCF1
atgaagtatgagtatgaaccggtattgctgaaacgatggctacgcgaagtgcgtccgcctcttttggagaaaacaatggaaaacagcaatgagaaatatcgggggctgctcgaacggctgtccgaccagtttgcggggctagtcgatgcaccgtcttcggcattcgaacaatgggtcaaacagttgtcgaggcgggaaaagcttcttttgccaaacttatataaaaaagagcttccggaagagatgaaaaaagcgatgattgatgtgatccagcaacacgttcgtcatgagcgccgcctttttcgtgtgttggtcgatgtggtgtatgaaacatgtgatttggatgaaatttggaagcttttacgctatgcttatgcctctcatatcgaaaaaattgaaaaaagaatggaaaaagaaaagagcgaaaaatggcggcgttatttgtcaagcaaagacccgattgtatatttggcgacgacggcgtatgaaagcgagaaaggcattttagaggaattggagacgttttatttaacgaaaaatttcccgttgtttaaactcgtgctgatggaaattttccagctggccgatgaatcgttttttctcaaagaacaagagttgtaccgggatatgtttgtttcttcgacaaatgagcagcaacaaaaaatggcgaacgcattgatcaaaaagtgcaaactgaatcacgtcaagccgctcggaagattgatatttgaaaagttgcaaacgtatcacagaaaaccaatgctatggagatatgtcggggaagaggaaaagcagcggtttgctcagtggattatgaggttggaattgaaagacttttttggcggcgtgaataaaaaccatgaacggtttcaatattgggaaaagtttattccaaagctagaggatgtcgttgtgacggatgaacgcacgacgttgattatgtattttcatgacgttgtcattatggaagtgctcggaactggggcggtttatatttaccgcgccgacgtattccggcgccattttcagcccaaaatcgaccggatgctcgccgaacgcgagcagtttgccaacaaggcgtggcgaaaagtgcgggaagtgaaacgaaccgagctgatggatagagatttgacaattccaggcggctggctgcgccataacggtgggtggcaatggaaatttgatgaatggcttcgccgcgaactcggctgggaggtaagaagggatgttcttcttcaaaaagaaacggaaaatgatgaaggcagttttgacgccgaatga

SEQ ID NO: 10728 - DNA, 2001 bp, Geobacillus sp. WSUCF1
gtgcaccgccatgaccatatcgagcttgtcgttaaaggacgaaatgaggaggaaacccgccatcttcaacgactgcaacgggtcagcagcataaaaaaaggccatgggcgcagccgtttcgtcagcacggagcaggttcatgctgatatgatgcatttgcagcaaaaacggcatattacgggagaagaagtgccgctgtttttggaaaatccggcggccgtcttgcctgagcatgattatttatttgatttggaccagttttcagaacgtgtccgcggccttatcccgattgaacgggttcgccctttttttcatgagcggaccggaatgcaatggtttgatgaggagagcgggcatactgttccgtacgatgagacgttattgcgcgaactgatggaaaaatatccggatcagcaatatgtcgaatacaacggcaaatggatttacctagatcctttattgcgccggaagctgctgcagctgccgaaagacgccgatgaagcgttgaagcgccggtatattcttgatattaaagataacgaagaacaacttgaatacaagatggacagcgcccaaggggcaccatgccggcgctatccggttccatccgggctgcaagcggagctttttccgcatcaaatcgaaggctttgagtggctctgtcacttggcagagcaagaaaggggcggcctgcttgccgatgatatggggcttggaaaaacaattcaggtcattgcgtttttgttgcatcaaaaagcaaatgggcggttgaagccgacgttgatcgtcctgccgatagccctgattgagaactgggtggcggaaatcgaaaagtttgccccaagcttgttggacggtttatatattcataaaggaagaggacggctggcttcgtcgcagctcatttcacagtttgatatcgttttgacaagctatgacacgctcaaaatggaccagcttctgttggggaaaattgaatttcaagcgattatttgtgatgaggcgcaaaacattaaatctcatactagccagcgctcacgcgccattcgcgccatgcaaggacgtttccgtttagcgatgaccggcacgccggtcgaaaatagtttagacgaactttgggcgattatggactttgtccagcctggtgctttaggctctctaaaagaatttcgcttccgctatgcagaaacgtcggactatgatgcgttgcttgtggccctacaaccgtactatttgcgccgcacgaagcaacaaattctcgatggccgtttgcctaaaaaacaccttgttccgccgatttatgttgaagcttcacccatacagaaggaaattgcccggtcaatgttggccacaaaagagatgggtcaggtcgccattttgaatatgattacgagacttcgtcaactgtacggccatcccggtgcggtcattccgaaatatgaacagctctcttatcaagaagtgccgaagctgaaagaaacgatgcatatcattgaaacgattcggcaaaagggagagaaagtgctcatctttactgaatttcgcaaactgcactctcttttaaaacgaatctttatggagacatacggcatttctgttccagtgattgatggcgatgcgaaaaatcggcaattgattgtccggcgctttaacgaaatgcaaggctttggcattatgattttatccccaaaagcggccggcgtcggcttgacgatcacaagtgccaaccatgtgattcattacacacgatggtggaatccagcggtcgaaaatcaagcaactgaccgtgcatatcgcatcggccagcaaaaggacgtgtatgtctaccatattattacgagggacagttcccactttccgcaggggacagtagaggaattgatgcatgaattgcttgaaagcaagcgccatttagccgaaaatgtcattattccgtttaatatgagcgagatccagcaagcggtcgctgagaaggcggtggggcgaagacagcttgtgtaa

SEQ ID NO: 10729 - DNA, 1974 bp, Sphingobium sp. 22B; identical to SEQ ID NO: 10663

SEQ ID NO: 10730 - DNA, 711 bp, Sphingobium sp. 22B; identical to SEQ ID NO: 10664

SEQ ID NO: 10731 - DNA, 1674 bp, Sphingobium sp. 22B; identical to SEQ ID NO: 10665

SEQ ID NO: 10732 - DNA, 3222 bp, Sphingobium sp. 22B; identical to SEQ ID NO: 10666

SEQ ID NO: 10733 - DNA, 1953 bp, Granulicella tundricola MP5ACTX9
ttgccaatcttcctgcacattgtccactcgttgtcccctttcctccgtgggtttgcggcgcttatcgtcgcgttatggatagctttccttgtcagaatgatctggcaggcaatgaaagttcacaaggcgaaccgggcgatcctcgctgtgctggactcagtgcctgctgctagcagcgaagagcgcatcgacggcttacctcttgaccgaataaatctgctgcggtcggccttccaaagctccaacgagcatgcaaaggattggtggaattcgatcgaaggctctctccttcctttaaattcgccgctatcggaagatcgttggttcgtttcagacgcagcaagggacctgttcagttccgaggaactgttcgaggattacgcggacgtttctcaccaagcagtgcccggcattcttacggccttgggccttttgggtacatttagcgcacttttgctcgggcttgccgacctacgctacacagataaagccgttcttggcctttctgatctgatcaatgcactctcgggcaaatttttcacttcggtactcgcgcttgggtcaagcctcatctttgtcttagccgagcgtttccttttcgctacgagattcgaaaggctctactccaaagtctgcgggaggttcgacagagtcttcccccggctcacccaagagcgagtgcttattgacatccgcaaagaggcgctgagccaatctgtttctctatcgaacatcagcagtgatctggtggggcaactcacgggagcgttccaacagacgatactgccgagtctgtcgttcgatctagcggagcaactcacgaagcaactcctcccggccatccaaaagatggaaggtgctctagaacgcctcgaatcacagaaacaagattctgttgtgggcgaattcaggtcgcttgtcacgactttggagacttcaatcacgaatgcgttgtccgacatgggctcgcgctttcacgagcagttgacgggttcagcccactccgaatttgcagctgtacaagagacactatccggaacgtcacaaatgctattacagatgaacgcgcaatttgaactcacgcgttcggctctctcgaatctggttgatgcagcaaacacgtcctccgaccaccaagcaaaggcaagtcaggatcaagcagaggctcttcgacaactcatgcacggcctgattgaggagatgggtaagaacgcaagttcgaacctgcaaaacatcgcaggggctttgacgaacgtgattgcggatctgtcgagaaaagttgaagatgtctcggaaacgatgattcgtactgtcagtaatgcagctcaaggaagccagagttcggcagatgcattgatagcaaagagtggcgcgtggaccgaagctacaagtcaacaactaacgaccctcctggagtcaatcgaggccagaagtggggagtttaaggcagccggtcagagcctccttgaagcaaagagtttgctggccgatgtgctggacaggaacgcgactgcgctcaagtccatggaatcggcggccagacaagtcgaagggtacacaacagccttgacggtagtagctcgaaacagcgacgacacgcaacgccgtcaggctgaggtcgttgcacttagcaggcaaattgtagaagaattgaagcagaccagcgctggaaatcaaggcatcctcgaccaatacaaccgctccctaaacgaagccaagacagtctttggcactcttgatactcaaatcgaaaccctcctcacaaagatcaacaccgggatgcgcgagtacgtgcagacagttgagagcaacttcagcgtaatcgtgaaacattcgaacgactatctgcccgagatttctcgcgtgcttcagagtcagattcaggagcttgaacgtcagcttgaagagttgacatcagtgttcagtaaggcgcttcaagccggagccgagtaa

SEQ ID NO: 10734 - DNA, 684 bp, Granulicella tundricola MP5ACTX9
atgcgatcccgcgagaaacatgatcacctttcgagttcgttcaccgatctgatgtcctctcttgtcgtaatctttatcctgctgtttttggctttcgtccacgaacaggaggaacggcaagaaagcgttaaagataaactcctctccgagttgcaacaacagttgaaggaagcgaatcttgaccaacagaacatcaaaaaggacggggacgccgttgtgattattgtgccggaaggcctcatgaacttcgagaccggcaagtcggatttgaaagatggagggaaggcgtttctcgcgaagtacatacctccaatctctaaaatgctcgtaagcgatttccggaacgatgtcgactctttgattgttgagggctacaccgatcgacaaagggctgcgggtagctcagaagaacaaggggaggctcaaaatctgatcctgagccaggagcgctcgatgaaagttgtagaagagtctcttcgagacctctctggaccggaccacatcccggaaagagaattctttttggatcggttgtccgcaagcggtaggggcgaacagcaagcgatccatcaaggcggacccgaaaataatccgaacctccgacgggtgatttttcgcatcagggtgcgctcgaacgcgatgcaggatgctgcacaagagatcaaggcggaccttcacaaatga

SEQ ID NO: 10735 - DNA, 1338 bp, Granulicella tundricola MP5ACTX9
atgagattgcttgaggcacttcaaggtctagccgcactcccacgcgacatcagcctgacttcgctttccaagaattgcgaccccgtattcgaactgcggcccctcgacgctgctgtgacaaagatgaaggcgcaggccgcgtctacgcgcccgcctgatccggcacgaatcgaaaagctaatcgctcgtttccatgcggaaaagcaaaatttggatcgctttgagccgagagagattcgcctcttggcttggaacaatcagatgcttttaaatgctcgattccgatcccaactggcagagcgtgttcggtcccgcgcagtaaagccaaatctcttgattttgagccaagtgtacttcggtagttggggtactcatgcggaacatgaattgtttgaacaaatgctccgaatcctagcggaccaacaagccggcttcaccccattgcttcaacgctacaaggagaaagccacttctatattcagcgccagcgctgacgtcttcctgagtcgtcagatatcagtcgaacaggcatccttgacggaaacgttggcgctgtggggcgtgccaacgaccacacccctggcttccgcagtgctgactgcatacgtcaatcacatattgactgagatctctagcgggcgggtgggccagttggacgacctcctggcaaccctacaactacctttggttcagatgtctacttttcaggccggagcaggcactctgattctttcaccccatgcagataagaatgattcttttcgaaagcgtatcgaggcgtttgttctggatagcccacgtcttggtgatccacgcctaccgcacaacctcccgaaatggaatggggtcgacgcagcagctctccgaaagttcaggacgtggcgcgccacgaaagatctggtgttcttcttccgaagtgttttgcccgagggtcgggacccccacggccgtaaggatttctggctccggtatgtcgatcaggtagtcgattcagtggtagcgctatgtcccactgacctgcagaggctgcacacttcgctttccttggaacgagtgcaccactgcagaatccaagaaaatcagtcgatcagttgttttctcatgcgcttcaaaggggccaacgaggatttcatcgtagctgagtttagcaatgtgggaaaagcaagaattttctactatggacgctttctcgaaagaattggcgacattaatcgcagtgaattccggctccgcgaactcaagtcggaggagggtctggccatcagcttcagccatatgaacaattggcaaagcaaagtgcggagcacccttgcgcaaataggtattagagcatcatga

SEQ ID NO: 10736 - DNA, 1716 bp, Desulfovibrio sp. X2
atgatagcagccattgcgcaattcatgacgagttcgtgggggtcgtgtctctggtgcggttcgatcgccatgtggtgtgccttgtcctggattgccttcgcgcggaagatgaaccccaagatacgccttttgaaagaggccgtcgcccacatcaaggagcagcccgaccaacatgggttcgcggcggtctaccaggagttcatggagtgggcatccgctcatggactgatcggccactcgtggaaggaattttccgaaacactggtcatgcccgggcccaccgaaccgagcccctacatatgcaataccgacgaagcctgctgccatttcaacgaatcaacggtcgtcaatggagaaataaaccttcactattataaagccctcccgaactatttcaccggccttggcatcctcggcacgtttgccgggctcgtctgcggcatctatctggctggcaaagggttggcgtccgatgatcccaccctgctgaaacatgcgctccagcagcttctcgaaggcgcgtccctcgccttttggacgtcgatcgtgggcatcatcacctcgatcgctttttccatctatgagaagcggacgatgcaaaagctccatcgcttcatcgccacctggaacacggaactggacaagcgcatcgtccgcctgacccctgaatccctcgcctcacggcagctcgagcagctcggcaagcagacagagcacctggagacattcgtcaccgaggtcgcggtcaacatcgccgatgcgctcgatcagcgcatgagcgggagcctcgtgccggttttggagcgactggcgcagtcggtggaggccatgcgctcggagcgtagcgacagcaccgaagcgttgctgcgggacgtcgtggagagcttcaagaccaccatgaccggctcggcgggaagagagatggaggcgctgtccggcacgctcgccggactcaaggagacgctcctccccctgctggacggcatgcgctccgcccaggccgagatgcagcagactgcgggccgcatggccgcgcaggtcggggagtcatacgagaagagcagccggcagttcgctgccggagtggccgaggcgacctcgagcctcggcgacacggtgcgcgaggccggacagctccttcacggcgatctgacggctgccttcggacaggcggccgaacgcatgcaggcagcggtttcggccatggagggcaccctcgacagggtgcgtgaatccggccaggcgagcggggacgccgcggacaagacgcgcggcctgctcggggagttgaacgggattctcgatcgtttgcagcacttccagcaggcggcttcgtccgccgtggactccatccgccagaccgccggctcgctgaccacatcgaacggcgcgctcgtgcaggcggctggcaggacagaggcatccgccgacgccctgcgtcaggcgtcggagcagatacgcggcacgcaggagctgctggagcgccagtggggcggctatgcccagcgcttcgaggcggtggacgagtcgctggcgacggtcttcggcaagctgcaggacggtctcaagggattcgccgaggccactggtcagtatatgtcttcccttgacggtcaggccgagaaggtgacgggcaggctcgcctcggcggtcagcgagctggatggggccatcaccgacctcaccgacgcgctcggatccgcgcggcgctcataa

SEQ ID NO: 10737 - DNA, 768 bp, Desulfovibrio sp. X2
atggccaggcgcgggaacaacgagagcggcacggtcgtcggcgaggaggggagctatctcgtctcggtcagcgacatgatgtccgggctgctcttcatcttcatcatcaccctcatggtcttcgtcatcaacttcaacatgcagcgtatcgacgccaagaaggagcaggagaacctgcaggagaagtacaccgagctgaccgacgcccgggaggcgcgggccgtcctgttgcgcgacctcaagcgcagcctcgacacggccggggtcgaggtctccatagacgaggacaaggggcttttgcacatcccggaggacgtgctcttcgcctcgggcagcgcggcgctgccggcgcagggcgcaaggagtctcgacgtgctctccgaccgcctctccgaggtgctgccctgctattccggggcgcgcgacgcgccagcccccgtctcgtgcggcggggcctacaggcccgggcggctcgaggccgtgttcgtcgaggggcacacggacaacgtgcccatgtcctcgcgcggcggcatccaggacaactgggacctctccaccaagcgcgcggtggtgacctaccgccacatgctcgaacggacgcccgatctcgcccgcttcgtcaaccaggacggcgcaccgctgttcggggtcagcggctatgcggacacgcggccccgcattccgcacgacaccccggtggcggacgcgaagaaccggcgcatcgacctgcgcttcctcctcgccgcgccgcgcgcggacgtacactga

SEQ ID NO: 10738 - DNA, 1365 bp, Desulfovibrio sp. X2
gtggcgctcaggaacgcgctcttgggctggagcccgccgcctttccgctgccccgcgacgcccgtggccatggggcgggcggaacgagaggttgcaaaaaagttgcagggcggaggtagcaccccgcccaagccgttcgagctcgaggagatctatagggagctgtcccgcgccctggattcccacgggacggtccgcgccgccggacgaagggcgttgcgcctggctccgtgggtcctcttcagctatccgacgaatcgtcccggctatctggccgcgatgccgggagtcgcacaggaatacgccgcctggctcgcgccgcaaagcacctgccgtcctctcctcgccttgctgcatgccctcctcctccactacccgcgcaccctggcgacgttcaccgactggcttgcgctcctgaacgagcggctcgcgtcgtccgactcgccgaagctgcacctctggcaggcgcgccgtcgggatttcggcctgctcgcgaacgacggcccggaacgggtctggcgcaggctggcggccgacgccgcgccggtctccgagctcctggacgcaatggggctgaacggggacctcggcacgggccgattcgccgagcaggcgtttctcggcctgcttgcccatgtcgcgaggatgatggacgacggccgggcggacgcgccgctcgagcggctgttcgccttcgccgcgccgatcggaacgggatcggaggaactcctgcgctttcccctggccagggaggtcgccgaggggctgctcatgcccttcgcccgccgccgggtcccgctgtcatacaaggaccgggtgcgtgatttccttctgaagcggctcggcgatccccgcatggtgtcgcgcggctggcagggcgtgccggaggaggcgaaggccgtcatcaagggctggctggtggagaacagcctggaggacttcttccgcatcctgaccgccacggccgaccccatctggacgtatcggcgggatttctggcggacctacctgcaaaagggggtcatcacggaggcctgggtggcgctcggcagcaaggcccggagcttggcgaagcgagccttcgatggcgagtacggggagctcgtcggcgctcttggcacccaatccgtcctcctcatgcgcatcggcggattgaccatcgccgaatggagccattcgggagcctgccgcatctggttgacgccgacaggagtcaccccggatttttataaactcacttacggcgctgccagcttgcgaggcacgcctgacgagaaaatcatacacaacggttccgaaagatatcgctggcagaaccgggtggccaggtacatacggaacagcaccggcatcacttggccttga

SEQ ID NO: 10739 - DNA, 2889 bp, Desulfovibrio sp. X2
atgggcatccggcttgagtggcggcgcgagggcgaggccgtgcgctttttctgttcggaagaggacgcgccgttgcctcttgcggcctggtggcgggcatccgccgagctgccgaatggtcgggccgctgcgctgggcacgctgctcgggctcgtggacgaggagagagcaaccacggacgatggggggacatccgtggtcgtgcccgacgcggcgctcgccgtcctcgagccctggcagctcgccggactcggcctgcccgggcctgcgcccgtgcggctcgccgtcgtcgcacgaggcacgctgtcctcgccatcattcagcctggagtacggcttcgtctacgacaacggcatacccgcttccggtgcgatccgcgacggcgtgttcctgcgccacggtgcgcgcgaacatcttctgcccgagccgctgtatacgatcgtgcagcgcatcgacgcctaccgccgcgatcccatccgtgacatggacgagcgcttcttgtggtggagccgcctggcggacatgctgccctcggacgtcgggctcgaaggattcctgcgtcaggttcacgccgtgcggcccgaggcattcagcctggatttcgtcgccgcgcccggcgggctgtctgtccttccgcgcttcgtgcgcgccgtggaaagcgaggacggcaacgcggcgcacgaggatgtgcttccggcggtggtcggcgcgagcttccaggagcgcttcgcccgccagcaggagcccgggggacgctacgtcctggggcagggctggttcgtggtcctgccgccggccgtgcgcacggcgctcgaggtcgtgcaccgcgtcaacggcgagagcgaggagcgcaagcgggagttcctgcgcaacccgcgcgcggcgatcaggagccgtctggaggatgtctacggcgaggtgacggacgaggtggtcgcctcgatcttccaggagacgccgctctttctgagcgagcgtgtgcgctacctcggcgtctggctgcccaaggccgaactctacgtcaagccgcctgcggggcagtggctcccggacgaggcgccgccgcaaagcctgctcatgcccatcggaccagcgggaacgctgatcgaggtcgcgccggccgatctggacgatctggccgtgcgcatcgacgatgcccgcgacgccgggaagacgaccgtcactttcaaaggccaggaagtggccgcctcggcgcaaagcgctcgggtggtcagcaaggccttgcgcatgttcggctccggtggtgaaccggaacccgagccggacgaaccctctccacgccaggacgtgccgatcatcttcgaccatatcgaggagctcggcatccacctggaggcgggggggctgcgcccggaggccgaggcgcagccctcgctgcacgacggcgtccgtctgcacgaacaccagcagcaggggctggcctggctgcaggagcattggcggcacgcctcgcccggggctctcctggcggacgacatggggctcggcaagacgctgcagaccttggccttcctcagctggatacgcaaccagcagcaggcgggcatggccgaggcccggccgttcctgatcgtcgcccccacggggctcttgcgcaactgggaagaggagatcgcgaagttcctgatccccggcgcgctcggccagctcatccgagcgcatgggagcgagctgcgcggccttgtcgggcgcggggcccgggccgccgccttcgaactcggccacggcggcgtggtgctcaccacctatgaaaccttacgcgacaagatcatcaccttcacgggggtccactggggggctgcggttttcgacgaggcccagaagatcaagaacccgagggccatgtccacggacatggccaagtcgatcaaggccgaattcaccctgacgctcaccggcacgccggtggagaacactctggtggacgtctggtgcatcatggacgcggcccacccgggccggctcgactccctgcgcaccttcatgaggcaatacatgcccgagggcggtccggacgagcgggcgcttcgggacctccaggccgaactcgcacggcccgcggcgtttccgagcctgctgcgccgcaacaaggagacgcactgggccgagcgcccggagaagcgacaggagatcgaacgcattccgatgcccccggagcaggccgcggcctatcagaacgtcatcgtctcggccatgcagcatgcggacgggccgggggcagtcctcaaggcgctgcactccatccgcaccgtgtccctgcatccctacatgtcgtcctgggacggcgccgctccggacgccttcgtgaacgcctcggcccggctgcagggcatgttccggctgctttcccggatcaaggagcagggagagaaggccctcatcttcatcgagtccaaggagatgcagcaggtcctggtcgagctcttgcggctgcgcctcggctgcggcccggtgctcgtcatcaacggagaggtctcgggcgccttgcggcagcagcgcgtgcacgaattccaggcgcggaagggattcgacgccatcctgctctcaccccgggcggccggagtcgggctcaacctcaccgccgccacccatgtcatccacctgagccgctggtggaacccggccgtggaggaccagtgcacggacagggcgtaccgcatcgggcagcatcgcgcggtgacggttcactatcccatggcgatccaccccgagctcggcgaggccagcttcgacgtcaagctgcacgagcttctcgagcgcaagcgtcgcctgagccatggtctgctcggttcgccgctcgccacggccgacgatctggccggtctgctgcatgcggtcgtggagccggatggcgagcccacggcctga

SEQ ID NO: 10740 - DNA, 1890 bp, Bacillus sp. 17376; identical to SEQ ID NO: 10576

SEQ ID NO: 10741 - DNA, 672 bp, Bacillus sp. 17376; identical to SEQ ID NO: 10577

SEQ ID NO: 10742 - DNA, 2661 bp, Bacillus sp. 17376
atggtcaggatttttcaacgattccaaacaaaaaagttagagatgtcgtttcattcaaatggaacggacatcttttttcgcctttttttagtcagggggaaggaacgtgatgaaatccaaatgcccattcccccagacgaatatggagcctatttcggtatacagggttcaacagagtatgtcatttatgaagggttgtccgagacacagtattttgaaggcgggagattgactgtccagtcctactttgatattttacatgatcgcgtaacaattcaagatgatctagagcaagagatttttgctggagacgaactagatttaaaagaagatctttctgctttaggtctcccaatagttgaagagcacctgcaggtttttattcaaatgactgggttatcaggtaagcagcctgaattcaaagtgacaatgaaagacacaaaaggtgagaatgttgaattcgaatgggatattgaaggccctttcttaagaaaagaagatgaagttaaattgctttcagagggaatatggcaattatatcaagtcattcattctgaaatagaagatccgtatgaaaaaattgctcgcgtccagcacctggcaaagaaatatcattttatactagatgactttctaacaagagaaaaatatacctttgttgaagaaatcgaacttgaacccaaactattagatgacgatacgctaaagcttgagattaaaacagatgatgccattgcagatcaattagtcgagcaaaatcagttaaatgctagtatcaaaaagggtgatacaaggcaacgtgtaaggtttgcgcctaaagtagttgaggatataagaaaaatcaagcaaaaacaagttttaagaggggaagaaatcgctcaatttgctgaaaatccacacgccttctatggaggcgatacgttcacatttaatcttgaagacttttctgagcgagtaaagggctatatagtcattcaacgggtgcgctattcagtagtaaatggaaaacgtgtttggtttaatacagagtcaggtgagccggttgaaatggatgaaggtgaaatgcgtgatcaggttacccgcgaaccggataaactcttttacaaacaaaacaatacatacttttatttagacaaaaaagcaaagcaagaactagggtttgtggaccaggaggaaaaacaaaccaaagagaagattgctctggagattctaaaaaatgaagatgaattggaatatagcaaagctggaactggtgaaagacggtacaaatcctatccaataccagagggattaaaagccaatttgtttgactatcaaaaagaagggttcttttggatggctagtcttgctgaagcagggagcaatggattattggcagatgacatggggttaggaaagacgatgcaagtaatcactttcttacttcatagggagaatcaggatcaacttgcacctaccttaatcgtattgcctaaagcacttatcaataactggaagaatgagattgcaaagtttgctccatcgctatctccatttgtgtatatccatagtggaccatcacgccatcggacgaaagcagagctagaaaaagagaatatcatattaactacatatgacacattaaagggtgatcagttcgtttttggacaagtagattttcagaacctaataacggatgaagctcagaatgcaaagaactatggctctgctcgatcattagcgttacgtgccatgaaagcacagttcagactcgccatgactgggactccggtagaaaactcactcgaagaactttgggctatcatggactttgtggaacctggtgcattttcttcgctggcagatttcagaaagcaatatgtgaaagaggtgaatacagagaagttacgtgcattgttgcagccatattatcttcgaagaaccaaaagtgaggtccttgcagacaagttaccaacaaagcacattaaggagccgtactatcttagcgcctcacgtatacaacagcaattagctgcatccattgtttctgccagaagcggtaaccaagcaaatatgttaacggccttaatgaatttaagacaagcatatggacatccatcagcagttaatgatgatatagaaccattagtaaagcactctcccaaacttgagaaagtattagaactactgggaacgatccagaaacagcaggaaaaagtattgatatttacggagttccgaaagctacaatctattttgaaagtggaaatcactaggaaatttaaaatccatgttcctattattgatgggagtacagataatagggcgggcgtggtagaagaatttaataaattagaaggtttccaagtaatgattttgtctcctaaagcagcaggtgttggactcaccattacaagtgctaaccacgtaattcactttacacgatggtggaatccagctgttgaaaatcaagcgactgaccgggcttatcgaattggccaagagagagatgtatatgtatatcatttaattacacaagatccaggaaactttccgaatggaacagtagaggaaatcatgcatcagattctgattgataagtcagagttggcagaggatgttatagtgccatttaatacgaagaagatgcagagtgaagtttgggagagtgttaggaagtaa

SEQ ID NO: 10743 - DNA, 2190 bp, Pantoea rodasii; identical to SEQ ID NO: 10480

SEQ ID NO: 10744 - DNA, 738 bp, Pantoea rodasii; identical to SEQ ID NO: 10481

SEQ ID NO: 10745 - DNA, 1683 bp, Pantoea rodasii; identical to SEQ ID NO: 10482

SEQ ID NO: 10746 - DNA, 3252 bp, Pantoea rodasii; identical to SEQ ID NO: 10483

SEQ ID NO: 10747 - DNA, 2190 bp, Dickeya solani D s0432-1
atggaatggcttaactcgtttttaactatattgacctccgtacaacctgaaaaggttccgctggtcgttattattgtcgttgctgtcgcgctggtattttttgctgctttgtacgtttatcgggcaattaagattatcaataaactgaagaagcagtcagtaatcatttcaggctggaagaatgagacaacggtagtaaagctgcaaaagcttagcgagttatttaccgggacgccgcttgcgcactcctggcgtgagtttgcagagtcactccatcaacaaaaaacgcttgtcgacggtgaattgaaattaaaagatgtgcgggcaacggcccccgcagcggcatttttcactgaacagcaattgattgatattccgcttaataccgagttttttaagcacctgccagggatcctgacaggagtcgggattatcggtacgttttacggattgatgattggtttaaatcatttcgaccccagtacgcctgagcaagttaccagcagcgtggcggcgctcctgcgagatgtgctttatgcctttttggggtcgtttaccgccatcgcggcgtctattcttgttacgtggctggaaaagctgtcgatagcgaagtgctataaatatctcgaacagtttaccgccgctgttgatcagttatttgaaaccggtgtgggtgaagaatatcttgccgagctggtgaaatcgagcaatgaaagtgccactcaggccaagcagcttaaagacagcctggtgaccgatctccgcgatatgctgcagaacctggtggcaagtcaggtcgctgaaaatgaaaaactagcgcacaccttatcttccacctaccgggatactggtcagcaatttgccgagcaagtgagtggtgccatcgaaaatagtctgaagtcgccgttagataaaattgcgggtgcggtacagacggccagtggcgatcagtcgggtcaggtacagaacatgttgcaggatgtcctgacggcatttatgtcaaaactcgacaatacctttggcaagcagttcgaaaatatgcagcagatgatggggcaatctgttggcgcgattgaggctatgcaatcgggttttgccggtttgttacaggatatgcgtaatgccagtgaagacactcggcagggcagcgctgagctgatgtcacagctactgaatgagatgaaatccggacaggtagcgatgcaggctgggatgaacgatatgcttgccagcttgcaatcgtccgtcgccaaaattggtgccgaaggtgaaggcgcgggtgagcggatggcgcagcagctggaaaaaatatttgccgacagtgaagtgcgtgaaaaagcgatggctgagcaaatgaaagcgtttattgactctatccagcaaacgtcccagcaaggccaaagtgaaaccatgaaacaaatggcggcgtccgttgaggcgttaggcgaaaaactgggctcattgtttactcagcttgaacaggggcagcagcaactggctagtcatcagcaggatactcagacctctcttcatcaggaaactcagcagattattgccggttttgacgaacaagtccgctcgctgcttaatgcgttgaatgaacagcagggcgctacggaaagtacgctgcgcaaactggcagagcagacgtctgctcacttgcaggatatgaataccggagccgataaaatgcgcctcgctgctgagcgttttgaaaccgcgggagacaaggttaaagacgctaatcatcttactgctgatgttcttactaaggcgcaaggcgcgggaaatacattgagccaggccagccaggagcttagctcggtggtggcggattatcgtaataaccgtgaggcggtcgcaaaatcaatcacgctgctggaaggcattattgccaatgcccagtctgagctggaggcacgtagccaattcctgaaagaactgaaacagcacaatgaagggttgcatgactacaaccgcgaagcgaaagagttcctcgaaaacgcaggacaggtgctggctaatggattcaatcagttctcggacggcatgaaaacaagcctggataccacgttaggggcgctggatgccaatttagacagcgccgttaaacgtctgggaagcggtattgacgagcttggtgaaagtattgaaacccttgaagaagtgctttctaaagtgtcggcataa

SEQ ID NO: 10748 - DNA, 744 bp, Dickeya solani D s0432-1
atgttcggtcaaacatttcgtattaagacccggcgcacggatgaagcagagaaacccttctggatttcctatgcggatctaatgatggccatgatggtgttgtttctggtcgtcatggttgcttcattaagctcggtgacgcagcggatccagcgtgtagagcagggtgagaaattacgcgggcaggatattacccgcctttgtgagcgtttagagttgcacgcccgcaacctcaataaaaccattgttgttgattgccgtgataaccgtatcagctttggtgaagcgggccgcttcgaccacaaccgctttttcctcaatgctgacggtcagaaagcgctacaggatgttgtgccgctggtgttggaggccgcaaacagcgaggaagggcaaaagtggtttaaacaaattgtcattgaaggttttaccgataccgacggctcctatttgtataacttacatctttcgttacagcgctcagaatgggtgatgtgtagcctactcgacagtcgtagccgtttacagcagcagataacgcccctgcaacaggagcagatccgcaagctatttcttgcgggtggcgtttcgtttaacaatgctaaagagagtaaagaggccagccgccgcgttgaattgcgcatgcagttctttggcctgaaagatgaacatgataaagctgcggtagatgtggatagcgttgccggacccacagcagaaaaatgtcagttggagatgccgttatga

SEQ ID NO: 10749 - DNA, 1686 bp, Dickeya solani D s0432-1
atgatctccgccttatcccgcctatcgtcggagattgccgccaccgtcaagcggcatatcgacacggaagcaacggcttttggtgattttcctaagctcagggccgcagagcaatatctggccgtcaaaatggagaaaagcgagcggacgacagtccctcctttgacaaaacgacacaaagcgattgctgcgcttcgtcagttaaaagtgctaacgaggtacgactggcagttgatatttgcgggcctggcagatagtgaccctgatgcgacattcccggtgctgctggaggatgattcgctttataaccgggttgagcaggagatccagcagcgtatagacagcaaaaaactcaaacggcgggagtggaagtttttatgtagcagctattttggctatcacgcaaaaaagcctgatgagaataacaattggtgttcgttacgcgatcagcttcgtattggctattgtgtgattaaaggccaggtgcgtcgagaaaagcgctggatggcggtgattgatgaatatcaggacttgttcacaccggatgccgggaatttgctggcaaataaaatgagctctggaaagctggttgatttttctgcgttggaaaccgttgcccaggttcccgatgatagctggctttggtaccgggcatttgctgtgctgttagccaaaattttagaactggatgatgaggcatttaagcagcacctgcctaatctgctggagctcgcccgccagcgagaaaggtataaaaatatcatcttacgcgtgtgtttaacgcagtattaccgttcttctttcagaaatactccacatacacagcttaagcagatggtgctggaaagctgggggagcccgcagctgcgcagtaaacaaaatctctggcttactcatttgaaagatcctgataccagcgaaaaaatttgcggcatggtacgtagctggctggcaaaagaggatttgacgcattttttccagttgctgaagggtaatgatgatgctgatcaggcgcggttattctattggttacggtttgccaatcagatggggttcacgcgcatagtgatagggcaagatgctcgtcataacatgcattctgatttcgtcgcgttccggaaaaaaaataagggacggctaagtagtttgtctgggggaaatagcgcagataatgccgtaattatgcagatcggtaattatctttttgttgaattttctcgtacaggcaacgcgctatatgtttatgagttgtcctctgcaccgtttaaccctgaaaagagtgacttgcatttaaattatgagttaaaagccggtacgataaagcatcgtcatgccccaacagcttttggctatagtgataatcatctcactggatggatgattaactatgaagatgaacttcataaattaggtattaaataccaacccgctgatatttctgcatcgccatcgccaatcgctgtaaatacgataaatgcgcagtcagaaaatgcaacgaaaggaacgcgtgaacaagagattcgtagcttgcttaaacaacttaatgccacagtgagtgataagcgtaatattggcggagcgctacatgttcgactttcctcacgtaatgcagaaaacgttgaaaagcttatccgcttaggttttaaacaaaaaaatggcgatccactgacattctggagtaaataa

SEQ ID NO: 10750 - DNA, 3243 bp, Dickeya solani D s0432-1
atgctgaaacgcctgctcagtaagttcaagggtaataattcatcctcagaaaaactgatgagtcaccgttatcaggttgaagagtcaggcctctcgtttttatttaaccttgctgatgaggatgctctgtggcctctggttgcctatatggagcagctttcagaagaagagtatgtcgttgagttatccgatcgctggctgcttacctgggatgagctgtatcgtttatcggcagatgaggaacatcaaaccagcctgccattattaggtattccagaggttaagccgctgaaagtttgtctggcaggaaatggaagcctgagcgatcctgaatttagcgtttatacccgtgactggaaggaaagtgctactgaccggtctgttcagattgaaaaaacgggggcgatatttaacagccctgaaggacaatttttacagacctgggagaactggcagcttctttctgccctgcaacaatttcgtgatgagcagcagcgcagcgcgggagaaaataccaatcagcttggctgggcgaaaatacggcgttttgctaagaaggcgctggcagaattagataattacctggcaaagacgattgtggttaagcctgaatcgttaaaactcaaactgcgtaaagcaaccatttacaacacgccggtaatcgaaatcgaaccctcgttcgacgaccagccagcacaatggctcaatagttttgataacaataagttagtgcaggatcagtatcgcgtactgggcgaagatggttcgctcagccacgtgattatctctcccgaagtgaaagaagtactatcgtccgtacattcaattactggtcggcgcgtggcgggtgatgatgcggtctcttttatccgcaatccctacaccttcattggtgaggaagcggccagtgttgtccctcctgagcagcatgaagaagcgctgcaggatgcgcatatttttttccatcgtttctctgtcacgcctgtgcttgatgatgaagcaaaaaggatcttgtccgtttctcttgttttagaacctatcgccgccaggccgcaacctgctatcgctttttctctgacaaaagcgtatgaatttgaagggtttattcaggagctggctgtaaaactggcgtcgggcttacctgcgggaatatggcaaggctacgaattggaactcagccaattaacgttagagcagctggagcagtaccaatcactcttgcttcgctggcaacaagagatcgctggcatcgaatttgatgaagttttagatctgaataaatatggcgatcgcgtcattggcatcggtgagtttgaaaagatttcctctccctttttaatgaaaggagagagtgaagaatggttgccagagactttaggtgaggcattgctggcgagtgatttttttgagggttgggagctgcagagccaggagcagttatctgacctcgaagaacgcattgaatctgctgagtctcaacaagaaacaaccgtctccatgccttggaatgagcaatcactgccgattgatgatgcaaaatcgttactgaaaaactggcagaagaaaattgagactttggagagcgacacagataaagacatcaccgagccagaaaaaagagccgttctgcagattgagcaaaatattgagcacgcggcttatataaagcagcgtcgcgaggcattgttgaatgcgaaagatgcagaacctgtgttgcctgttttgcttaaagaacatattcatcttcgtgaacatcaacaacagggcttagcgtggttgcagcaactgtttcttaaatcaccagaagaaacctcaggctgtttattggctgacgatatggggttaggtaagacgctgcaaatactggcctttattgtgtggtatatcgaaaaaaatcctgacggtttacccacgatgatcgttgcgcccgtatcgttgttggataactgggagcgtgaacttgataatttctttcatgcggaaaaccttgaggtgcttaaactctatggtaatgcagtaaaagcggttaaattccataaggatgaaatccccgcagaactgagggcccaggggattaaaaatctgctgcgcccaggttgggttgggagtgcaaaaatagtattaacaacctatgaaaccttgcgcgatcaggaattctctcttgcacgccaaaaatggtcaattatggtctgtgatgaagcccagaaaataaagaatcctgccgcattgattactcatgctgcgaacgctattcaggccaggtttaaagttgcatgtactggaacacctgtagaaaacacgttggtggatctctggagtttgtttgattttgcacaacctggtttactgggggcactcaatgattttggtaaacagtatttacgaccaatagaaggttctacagaaagagatagtttcgtgcttgaatcactacggcgcattatcgaagtacagacactacgccgcactaaagaggatgtagcgaaagatttgcctgcaaaagttgaggacacctcgtgtaagcaactgataatgtcacccttgcaacgcgacttgtatatttcatcgattgcctcttaccagaatcgacaaagagtgcaggatgaattggcgcagtctggaatgggcatgctcggtttattacatcgattgaagttgatttgtgcacatccctatagtgtaaaaccggatagccggttaagaggtcactcacccaaattggagtggatgatgcgtaagctcaaagatattgcgaatagaggtaatgataaggtgattatctttaccgagttgagggatatacagcgcgagttgcaatatgcaattcaccaacaatttggttttaagccgtatatcataaatggcgataccagtaccaagagtgagaatgctaatagtcggcaaaaacttatcgatacatttcaggagcaacctgggtttgggatcattattctttcaactgtagctgtcgggtttggtgttaatgttcagaaagccaatcatgttatccatttcacccgttgctggaacccggcgaaagaagaccaggcgacggatcgtgcctatcgtattggtcagacaaaagacgtgtatgtctattatccaaccataacagatgacagtatgtccacctttgaagaaacattggatttactgctgcaaaagcgtcgagcattagcgagagatatgttatgtattcaaggtgatctggtttctgaggattttaatcagttactaacatga

SEQ ID NO: 10751 - DNA, 2190 bp, Dickeya solani
atggattggcttaactcgtttttaactatattgacctccgtgcaacccgaaaaggttccgctggtcgttattattgtcgttgctgttgcgctggcattttttgctgctttgtatgtttatcgggcaattaaaattgtcagtaaactgaagaagcagtcagtgatcatttcaggctggaagaatgaaacaacggcagtaaagctacagaagctgagcgagttatttaccgggacgtcactagcacactcctggagtgagtttgcagagtcactccatcaacaaaaaacgcttgtcgatggagaactaaaattaaaagacgttcgggcaacggcccccgcggcggcattttttactgagcagcaattaattgatattccgcttaataccgagttttttaagcacctgccagggatcctgacgggggtcggcattatcggtacattttatgggttgatgatcggtttaaatcatttcgaccccagcacgcccgagcaagttaccagcagtgtggcttcgctcttgcgggatgtgctgtacgcttttttagggtcgtttaccgccatcgcggcgtcaatcttcgttacgtggctggaaaagctgtcaatagcgaagtgttataaatatcttgaacagtttactgccgctgttgatcagctatttgaaaccggtgtgggggaagaataccttgctgaactggtgaaatcgagcaacgaaagtgccacccaggccaaacagcttaaagacagcctggtgaccgatctccgcgatatgcttcagaacctggtcgcaagccaggtcgctgaaaatgaaaagctagcgcacaccttatcttccacctaccgtgatactggccagcagtttgccgagcaggtgagtggagccatcgaaaatagcctgaagtcaccgttagataaaattgccggtgcggtacaaaccgccagcggcgatcagtcgggtcaggtacagaatatgcttcaggatgtcctgacggcatttatgtccaaactcgacaatacctttggcaagcagttcgaaaatatgcaccagatgatggggcaatctgttggcgccattgaggcaatgcaatcgggttttgccggtttgttgcaggatatgcgtagtgccagcgaggacacccgccagggcagtgctgagttgatgtcgcagttgctcagtgagatgaaatccggacaggttgcaatgcaggcagggatgaacgatatgctggccagcctgcaatcgtcggtcgccaaaattggtgccgaaggtgaaggcgcgggtgaacggatggcgcagcagctggaaaaaatgtttgccgatagcgaagcgcgtgaaaaagcgatggctgaacagatgaaagcgtttatcgactctatccagcaaacgtcccagcaaggccaaagtgaaaccatgaagcaaatggcgtcgtccgttgaggcgctgggcgagaaactggggtcactgtttacgcagcttgagcagggacaacagcaactggccagtcatcaacaggatactcagacatctctccatcaggaaacgcagcagatcatcgctggtttcgacgagcaggtccgctcgctgctgaatgcattgaatgaacagcagggtgcgacggaaagcacgttgcgcaaactggcagaacagacttccgcacatttacaggatatgcacaccggggccgataaaatgcgcctggctgccgagcgttttgaaatggcaggagacaaagttaaagaagcaaatcttctcaccgctgatgtgcttactaaagcgcaaggtacaggcaatacgttgagccaggccagccaggagcttggctcggtggtggcagattatcgaaacaaccgtgaggcggtagcaaaatcaatcacattgctggaaggcatcattgccaatgcccagtctgagctggaatcacgtagccaattcctgaaagagctgaaacagcacaatgaagggctgcatgattataaccgcgaagcaaaagagttcctcgaaaatgcaggacaagtgttggctaatgggttcaatcagttctcagacggcatgaaaacgagtctcgacaccacgttaggggcgctggatgctaacctggacagcgctgttaaacgcctgggaagcggtattgatgagcttggtgaaagtattgaaacccttgaagaagtgctttctaaagtgccggcgtaa

SEQ ID NO: 10752 - DNA, 744 bp, Dickeya solani
atgttcggtcaaacatttcgtattaagccccggcgttcggatgaggcagagaaacccttctggatttcctatgctgacctgatgacggccatgatggtgctgtttctggtcgttatggtggcctcattaagctcggtaacacagcggatccagcgggtagaacaaggtgagaaattgcgtggtcaagatattacccgtctgtgtgagcgtttagagctgcacgcccgcaacctcaataaaaccatcgttgttgattgtcgtgataaccgtatcagctttggtgaagcgggccgtttcgatcataatcgatttttcctcaatgccagcggtcagaaagcactgcaggatgtcgtgccgctagtgctggaagctgcaaacagcgaggaagggcagaagtggttcaaacagattgttattgaaggttttaccgataccgatggttcttatctgtataacttacatctttcgttgcagcgttcagagtgggtgatgtgtagcctgctggacagccgtagccgcttacagcagcagataacgcctctgcaacaggagcagatccgcaagctgttccttgcgggtggggtttcgtttaacaacgccaaagagagtaaagaggccagccgtcgcgttgagttacgcatgcagttctttggtctgaaagatgaacatgataaggctgcagtcgatgtggatagtgcggccgggcttacaaccgaaaaatgtcagttggagatgccgttatga

SEQ ID NO: 10753 - DNA, 1686 bp, Dickeya solani
atgatctccgctttatcccgcctgtcatcggagattgctgccaccgtcaagcggcatattgatacggaagcaaccgcttttggcgattttcctaagctcagggctgcagagcaatatctgtctgtcaaaatggagaaaagtgaacggacgacagttcctccgctgacgaagcgacttaaagcgatcgcagcacttcgccagttgaaagtgctgacgagatatgactggcagttgatctttgcgggcctggctgatagcgatcccgatgcggcatttccggttctgctggaggatgattcgctttataaccgggttgaacaagagattcagcagcggatagacaggaaaaaactcaaacggcgtgagtggaagtttttatgtagcagctattttggttatcacgcgaaaaagcccgacgagaataacaattggtgttcgttacgcgatcagcttcgcattggctacggtgtgattaaaggccaggtacgccgagaaaaacgctggatggcggtgattgatgaatatcaggatttattcactgctgatgccgggaacttgctggcaaataaaatgagttctggcgagctggttgatttttctgcgctggaaactgtggctcaggttcccgatgatagctggctttggtaccgggcctttgttgttctgttggcaaagatcttagagctggatgatgatgcatttaaagaacggctgcccaacctgctggaactcgctcgccagcgcgaaaggtataaaaatatcatcttacgtgcgtgtttaatgcagtattaccgatcttctttcagaaataccccgcatccacagcttaagcaaatggcactggaaagctggggaagcccgcaattacgcagtaaacaaaacctctggcttactcatttgaaagatcccgatactagcgaaaaaatttgcggcatggtacgtagctggctggctaaagaggatttaacgcatttcttccagttgctgaaaggtaagggtgatgttgatcaggcccgactattttattggctacggtttgccaatcagatgggatttactcgaattgtcatggggcaggatgcgtgggaagatcgtagttcagattttgtggcattcagagataaaaataaaggtcgtttgagccagcttatcggtggcagaagctgggacaatgccatgattatgcaaattggtgattatttcttcgttgaattttcgggcaccggcaatgctatgtttatttatagcattgcagataaagactttaagccagaaagcgaatatctacatatcaataatatgcttaagaaaaaaacgggcattgttgcgagaatgctgcattcatcaccggtgcgtcgtttagatttgagatatattgaaggatggatggcaaaatttgacgataaattgaaagagttgggcattagatatctgccggatgatactcctgtaactgaacttgtgcccgaatcgggggtagtaaaaaatattaatagtgataccgaaagagaaaaggaaattcaggagctaataagcaccatcgaatgcactgttaacgataaaagagagataggtggtgctctgtatataattttgccagcatcaaatccagtttttgaagcaaaattattacgtctcggctttacaccgcaacgcggtaattcacttatgttctggagtaaataa

SEQ ID NO: 10754 - DNA, 3246 bp, Dickeya solani
atgctgaaacgcctgctcagtaagtttatgggtaatgattcatcctcagaggaacgagtaagccaccgttatcaggttgaagagtcaggtctatcttttttatttaacctggctgatgaggatgcgctttggcccctggttgcctatatggagcagctttcagaagaagagtatgtcgttgagttatccgatcgctggctgcttacctgggatgagttgtatcgtctggcagccgacgaggatcaccacaccagcctgccattattaggtgttccagaggttaagccgctgaagatttgtctggcaggtagtggaagcctgagtgattctgaatttagcgtttatatccgtggctggaaggaaagtgctactgaccggtctgttcaggttgaaagaatgggggcgatatttaacagccctgaggggcaatttttacagaccaaagagaactggctactccttactgctttgcagcaatttcgggatgaacagctgcgcagagcgggagaaaataccaatcagcttggctgggcgaaaatacgacgcttagccaaaaaagcgcatgcagaattagataactacctggcaaaaacgattgtggttaaacccgaatcgttaagactcaagctacgcaaagcaaccattcacaacacacctgtaattgaaattgaaccctctttcgatgaccaaccaacgcaatggctcaatagtttcgataacagtaagttagtgcaggatcagtaccgtgttctgggtgaggatggatcgctcagccacgtgatcatcaccccggaagtgaaagaagtgctctcttctgtgcattcaattaatggcaggcgtgtagcgggtgatgatgccgtctcttttattcgcaatccctacactttcattggtgaggatgcggccagtgttatcccgcctgaacaacatgaaaaagcgttgcaggatgcgcatatttttttccaccgtttctctgttacacctgtgcttgatgatgaagcaaaaagaatctcgtccgtatctcttgtcttagaacctattgccgccaggccgcaacctgctatcactttttctctgacgaaaccctatgagtttgacgaatttattcaggaactggcagtcaaactggcgtcgggcctacctgcgggaatatggcaaggttatgaattagaactgagccatttgacgttcgaacaacttgaacactaccaatcactcctgcatcgttggcagcaagagattgcgggtatcgaatttgatgaagttttagatctgaataaatatggcgatcgtgtcattggtattggtgagtttgaaaagatttcctctccctttttaataaagggcgaaagtgaagactggttgccagagaccttaggtgaagcattactggcgagtgatttttttgagggctgggagccgcagagccaggaacagttatcggaccttgaagaacgcattgaatctgcggagtcccaacaagacacaaccgtctctatgccctggaatgagcaatcattgccgattgacgatgctaaatcgttattgaaaaactggcagaagaaaattgagactctggagatcgctacagataaagatatcaccgagccagaaaaaagagccgttctgcagattgagcaaaacattgagcatgcagcttatataaagcagcgacgcgaggcattgttaagtgcgaaagatgcagaacctgtattgcctgttttgcttaaagaacatattcatcttcgtgaacatcaacgacagggcttagcatggttgcaacaactgtttcttaaatcgccagaggaaacgtcaggctgtttattggctgatgacatggggttaggtaagacgctgcaaatactggcctttattgtgtggtatatcgaaaaaaatcctgatggtttacccacgatgattgttgcacccgtatcgttattagataattgggagcgtgaactggataatttcttttataccgaaaaccttggggtgcttaaactctatggtaatgcagtaaaagcagtgaagttccataaggatgaaatccccacggaactgagagcgcagggcattaaaaacctgttacgtccgggctgggttggtggtgcaaaaatcgtgttaaccacttacgaaaccttgcgcgatcaagagttctctctcgcacgccaaaaatggtcaattatggtgtgcgatgaagctcagaagataaagaatcctgccgcgttaattacccatgcggcgaatgctattcaggcgcagtttaaagtggcctgtaccggaacacctgttgaaaacacgctggtggatctctggagtttgtttgattttgcccagccaggtttgcttggtgcgcttaatgatttcggtaagcaatatttacgaccaattgaaggcgctcccgaaagaaatagtctcgtactggaatcactacggcgcattatcgaagtacagacactgcgacgcaccaaagaggatgtagcaaaagatttaccctcaaaaattgaggacacatcctgtaagcaactggctatggatcccttgcagcgcgacttgtatgtttcatcgattgcctcttatcagaatcgacaaaaaatgcaggatgaactggagcaacctggaatgggaatgcttggtttattgcatcgtttgaagctgatttgcgcacatccctacagtgtaaaaccggataaccgcttaagagatcactcacccaaactggagtggatgatgcgtaaactcgaagacattgcgaaaaagagtgatgataaggtcattatatttactgagctgagagatattcagcgcgaattgaaatacgccattcatcagcgatttggcttcaagccttatgtcatcaatggtgataccagtactcgaagtgaaagtgcgaatagccgacaaaaactcatcgatatttttcaggatcagcctgggtttgggatcattatcctttcaactgtggcggtcggatttggggttaatgtgcagaaagccaatcatgttatccatttcacccgttgttggaacccggctaaagaagaccaggcgacggatcgtgcctatcgtattggtcagacaaaagatgtgtatgtttattatccaactataacagatgccagtatccccacgtttgaagaaacgttggatgcactgctgcaaaagcgtcgggcattagcgagagacatgttatgtattcaaggcgatctggcttctgaggattttaatcagctactcacatcttaa

SEQ ID NO: 10755 - DNA, 2202 bp, Limnoraphis robusta CS-951
atgcaattagttaattctttttacacatttatttctgtcctttggcaaaatagcttctttcatgtttgcaccttaatattatttataattgctgtttggggtgagcatagatttgtgaggcaataccaacgctatctaaaggctaaaagtcagattactcaagaagctatcacctatttatcacttcagctagaacgtcaacctgaaggtcgaatcgaattaaaatcaaccgaaatttttcattctaactggggattactattggactggtttagcagctacctcatcggtgaaatttcctatcaaggtaacacctacgaaactgaaattaaaggtagaaaatttattttatttcaatatcccgcctttttaacccgatcaattccgcgaagtcaatggcaatttgtaccgagtttgttgattgcaattggagtgctaggaaccttttatggtattcagagtggattacaagatataagtttaggaaacttagaaaataccacagaattactcccttcaatccgactacttctagaaggaatgaaaactgctttttctagctcacttatgggtttaggttctgcaagtttaatgacgctggtactggcttggggagagcgaaaacggcaaaattttagagataatttgcgagaaaaactcgatcaaatttctcaaattaaactctcaaactctgctaactctcaaggtaatttgaatattgcagagattatgaaagcaggtttttctcaactgatagaagctcaaaatcgagtagattctcacgccattggaactcaagtcggattagcaatgacaccgatttttcaagatattcgggaggaattaactaccttaaaacaaattaaagcggatcaaggtgaagtgatcttaaataacttactgcgagaactgcgaatacaagtgattgaacctgttgtggaacgactcgatcaaagcgcacaattgactcaagaagcgtctcaagcagtgcgagaattaaaaagtgaattagggggaatttcggcgagtttagcccaatcgattttaacgattcaaacgtttcaggaagataccttaactcagttacaagcttttgcaggttcattgcaaagtattttaggagaatttcaaagcgatactcaaggagttttacagcaagtttctctggaaattcgatcaggagttgcagaaagtattgagggaatgaaagcacaaagaattgcgtttcaagctagtgctgaagatgcggcgaatacgtttagaggaattaaagaaaacctgcaattcgctttgcaaactcaagctgaacaagaacaacaaatgcttgaacaagtgcagcaacgcatgacgaaaattttaacagcaactcacaatgcgtttcaaactcaatcgaatacgattaaagccgtcggagaagaagcatctcaactgatgaaccaagctcaagaaaatttagtcgggagtttgcaaaatgtagatacaatgctacaaaatacgcgcttaacggtacaggaagaattagaaaggtttcgcattggttatcaggtttctctgcaacatttctttgaagaacaaaataacttattagagggaacacttggaaagcaacaaaaaggtctagctcaagttgtcgttgcattgcaacgggtatttcaagaggagtcagaaaagcgacaattgatgtcgcaacaagttgatgaaagcatggcaattgttttaaaaacggcaaaagaagtgagtgaatatgctaattctgttgggttaaatgcgagcgatcgcatggctcaattacaagaactggcgaagatcactgctgaggaagtaaaacgggtagaaactgtttatgaaaagttagttgaacagttaaatactgaaggaaaacgactcgaaaatacttatacaaacttagttgaacaattgcacatttctttgcaagctgaacaagaacaagtacagcaagttgagagtgtttatcagaatctagttagtcaatttaatctggctttggagtcgggaaatcaacaattaattcactatttagaacaagctagtgcatcccaaaataagttttttacagatgccgatagttcgatggcaaaagtctgtcaagggttgcaagcaagttctgatgggttgatgcaagtggctcaatatttagtcgcctctgctgacaatttaagtctcaaacaaaccaaaaattaa

SEQ ID NO: 10756 - DNA, 717 bp, Limnoraphis robusta CS-951
atgaacatcaatcgctttgattttgaaaccaatgaagatttagaagataaccaagattctagtgtttggctatcaattggggatttaatgtcaggtttgctactgttttttgcgctattgtttattactgtacaagttcaactgaatgattatgtaaaaaagcttgatgaaaaaatggctcaggtcgaaaaactttcaaaagagttagaacaatatcaacaggcgtttaaagccttaccgcagattattattaatgcgctagaagggaaagttggaactgaagatacttttacagttgatccagcgacgggagatgtgagtattcgcgatcgcattttatttgatgataatagttcggtactgaaagcagaaggaaaagagtttttaaaagcatttatcccagtttatagcgaggtagttttttctaattctgaattttctgaacaaattgctcggattattatcgaaggtcataccagttcagccggaactccaactcgcaatatgcaattgagtttagagcgtgctttagctgtttctaattatatcttatcgaatgagctatcttttactcaaaaaccacaatttcaaaataaaattttagtttcaggtcggggggaaattgatgctgatcaaactcaagataattcaggcgatcgcaaagtgacgttccgttttcaattccgtcgtgagagtttaagtctggattcaaagtaa

SEQ ID NO: 10757 - DNA, 1155 bp, Limnoraphis robusta CS-951
atgactgttgaatttagctccatcaaaattccatcaaatcaacctgatgaaaccccgaataaactgcatttagtgagtaaaatttcacctaaattttctctgaatttacctcgttttgaaacttcattacttcgttttatagatgagattattgctgatctagaaagtcaaaatatagataaactcacaaaaatagaatggatttattatctctggatacaaactcaatgggaacatgagtatccagaaaaaagtaaaaaaatatcacaaattatttggcaagggattagtgaagatttcttgttagcagattggttaaaacagctacttttttggcgaattggactttattaccaaagcaaaaaagagttagtaacatcacaaaatatcccgtttccagtgattgctgaaagtttaattacagcatttctagactggagtttaactgcgacgtctggagatgctttatccatacaaatcctcaaaaccatttctcaaggtgaaattgattatgagatcgcaaacttaagctggaaatatggaaaaacacctcaagaactccttgaaaaagcgcaattacctgtttcccttcctgtcattgaactcacgctgaattgtgtgggtcaaatttttgttaaaaataatgtttctgatcgttcgggtgtggaatggatgctgcgatgtctccaacagatgtcgcctcaacaaaaacttgcaactgttgaaatattactcacacaaatttcagatgacgttttaaaaaatcaccgtcccaagttgattgaatggctaaaagatgaatattcaactcaactcgatcaactgtctgaacccgctcaaaatagtctcaaccgttggatcggtgcgctgaattatcattatattcagagattgattgacttaattttaagatttttacaaccgacagaatttgacagaaaacagttagaagaacgacagaatttttggggaaattatagtgacagtattcggcgagttcgtctactcttaccccaaagttcttttgatcgcctgggttatcaacggggtgatttatcttgtgatattttcaaaacctgtcccaacgaaactgaagtgatcatcttagatttcgggatattttgtgatagaatttttgcagggagttggctgtga

SEQ ID NO: 10758 - DNA, 1866 bp, Marinomonas fungiae
atgttggaatttttgagtgattactggtttatacctaaatcaactttaggcctttggttttgggcctcactattagtggtcttctttttctttttagttcaaacggttgttctctacagacgatttagctttagtatcaagcaagtctggctgattataaatgatcagagtattgacttactctatcaaaatattggtgatattcgtgaaaaaggccaacagtcagaaagcgaaaaaattagaaagctttggcatgaatttgatgaaagtttggtactagaccatcgtgaaaaaggagtattcaatactcttgatgcagagcatttttttaatactagaacgttagcatcaggaattacttcaagccgcttattagccgctgcaccttcatttttaaccgctatcggtgtgttaggtacttttatgggcttgactatggggttacaaggaattcatttagatagcaaggatattgatattttaaaggccggaatttcaagcatgatgaatggtgctgcttttgcattcttaacatcagtttggggagttggtctaagtctgttgctcaatatttttgagaaaattgctgagaggagtgtaattagaaaggtgagctctttacaacaagaaattgacgccttattccctcggctacccgcagaaaaatcattagtcgacattagcaaattcactggagaaagcagtgaagctcttcaagagctgcatgaacgtatcggtgatcgcctacaagagaccatttcaggcgtgagcgatagcatgcaagaagctttcaccaatgcgcttaacaatgtcatggcaccggctatgcagtcactcgttagtaataccagccaacaaacaagtggtgttttagaacagttgatcggtaattttaccgaaagcatgcaagctgctgggcgaggccaaggcgagttaatgcaaaagtctactgaagaaatgcgtcaagccgttgccacccttagcgatcagatgaagacagttgtagatcaaacgtctaataaccatcaagcaatggcaaaacagcaagagcaagcgtcgcagcagtttaatgagcagttgcgtgcaatgctttcacagagtgaagaacgtcagcaagcaatggagtctaaatttgctgagactctaaatgcgcaacaacaagcactaactgagcgtgagaccgagcatcgagataagctacaaacacagctagatagctggcttgaaaagcaagcgcagttaattgaaaccatgaaagatgctgtagagcgtactcaagctcatatggattcagtcattgaacaacaccgtgatgtagtggggcaattgaaaacggttgcggatacaacggcaacaagtagtcaaaatctaagcaatagctcaaatcaaatcggtgtgctttctgggaaccttgttaaagcgacagagctttttgatacacgtttaggcgagatgacagattctattaaaggcatttcagctcaaaatgatgcattagcatctcatgtgattgagcaggccaaggtgcttagaggtcttgagacgtctttggtaacgactacggataagttcggtgaaactgcacagttagctcagaatgggtttaatgaaatgaaagaacaccaaacggagttcattgctaatatagaatcgtcatttgagtccttgggtgagaacctgaaaaagcaagtttcggacattgagaagcaaaccaacgaatggctacgttcttactcaagtgaggtaaatactcagcttaaagagcgtatggaaacatggaacgataaaactcgtgaattcagtgatcagatggtgagaaccgtgagctctatttctgatttagtggatgagttggagcgtaagtaa

SEQ ID NO: 10759 - DNA, 759 bp, Marinomonas fungiae
atgcgagtgttcaagtctgggcaagtcaatgtcgatgaggaaaacccatattggatgtctttttctgacattttgtcaggtcttttgattttgtttgttttggcctctgttgtgcttatggtcgagttgatggaagccaagcaggagcttgaaaacaagcaagaagcgttcaccgaagaactagagatgcttcataaagcagagcaagttcgtagaactcttcttcatgaaatcgctgactctcttcgtcaaatgggcattcaagtcacgatcagtgaaaatgaaacggtgctaagtatccctaatgatattcttggttttgatagtgcggcatttaacattggtcctaaatttgaaacgacagctttagaaattggtaaagtattattcaagaaaataagtttggataaaagtgagcaatatttcgataccattttcattgagggtcatacggatagtaagaatttcaatggcatgatgggtaaaggtaactgggggttatcgactttcagggcaatttctttgtgggagttatggagttcttcattgcctgaagatcttcaattagataacctaaagaatcaagatggtaatccactattctcagttagcggctatgcagcaactcgacgtgctgttgaatcagaagctacagagcaagactatcgagctaaccgtcgaattgatattcgttttaccattcgccgccccagcagtgaagagtatgagtccgttagaaataggctggagatgcagtag

SEQ ID NO: 10760 - DNA, 1716 bp, Marinomonas fungiae
atgttgcaattaccttctattcctaagttacacgatgctcagtgggaaaaagtcactgagcagtggggtaagctaacagcaaacaccaaaaaaattgcagacggtgcagggcaaagccaagaatttaaagcgcttgaagaaggtgttcgacgactggttttgcaaggtgacttcgagcaagtaaaaaagatcctccggaagcgacgtggtgttcgtgtgctgacgcagttgtggatcgataatgatgaagtgagaaagagctcttttaatgagtcttttatctccttcattcaagagcagcatcctaaactaggtatgtcgtctctgatgaacttaatttcgctgctttatcgctattttgatgacttaaatatcgggtcagctttccataagttgactgcttggttgtcgcagcagatcgatatgcgcctaaaagatcgaaagcgtagtagcgataccattctttcagttctgcatcagcacaaaagttggttatttgacatgacggctccgaaggcagtcgtagacctagctaaaaagaatcatttagatttgaatgaccaacttaaacaattacgtttaagtgagcttccacaaggacgttttttaaatatttgtcatgctcagtactacctagaaacattgcgagacattccgttaggagaggatcacgagattttatctgagctgtctaaaactgaagtggcaggaatgcccttcgaagacggtaagcgaattggccatattgcattagagatcatcattgaccgctctggtggtgccccttcaagtgtttggcaaaactttgtccttgatctagctggtgaccctcgtatcgctagtacggctaagaactatcgtgagtggtggatgccgataggcgaaaaccgaatcaaaacagtaaccagctggcttgcgaaagaagatttgcgcttgtttttgggggcaatcgaagagtatggcaagcagtctggtgatgaagctcttaatcgaatgtttcctgctcgaaagaagttcttagagggattatatgagcacggaattatccgtaatactaggctgatgctaggtaatagcgcagcatctacagtcaaaaaagtgcttggtaaaagcatgactacaaattttataaagctctctgattcaagtatgaatgacaaagcagtcatctacttagattgtggagatttccatatcgtagagggttctcacgcatttaaactatggatctatatgggcctaccaagtgctcgactatctgattactcattgaagaagctgagtcattcagacttaactacaggttttgttcgtgattttaataatgcatacgatgaagggagctacaaggctattacccattcgccgacgacttggcagagaaatgctattgagtttcttgctgagaatggggtagagcttgatcttgaaaaggtcctctcaagagaagattaccaggtttatctcagaagatttggcacaccagtagtaaagaaaattaaaaccgaagcgagcaagacgctagaagcccaaatcttaagaatattagagaccaaatctccgattaaggcgaaaggcttggtcaatgcaatgctttcagaatttggattagtgattgaacgatcaaaaataaactcaattttgtactcacttcgctcagaggggaaagcagtattagattctgaatacttctggagcctgcctgaagatcactag

SEQ ID NO: 10761 - DNA, 3027 bp, Marinomonas fungiae
atgtctcttgtaaattttattaaaggcttgatctcaaaggacgagcagcacagcagccataaagataatgcttatgagtggcaatctgattcttttggtttgatctttaaaacagatcaatcggtctatcattgtttaaatcagggtgaaggttcaggtcgtcagcttgttcagcatattttgctgaaaatgttagaagagcgtgacatagccgaggctctgccaaatggttttaggattgatagtgagcaggcttgtttgttagagcctgatgatgcagaggctcttgggttaccgcctttttttaatggcttttttgatatcgatatccaagggagaacgacaaagagtagttttgctcttcagctttttgtgaaatatgggaatcaaaaataccccgttcggcgcaaaggtcccgtgttggtcctaagtgagcaaactaagtttctactcacaccagaacaacttgatgctgttattgcggttgaagagcatagtggtctttcaccagatgatcgaacagaactaaacaacaccttggccatggctaaacttcaaaatgccattaaccaaggtctaaagctcgatcttaaacattttaataattttgaattagtccaacctgagcacattacggtaaccgctaagcagaatgccgatggcagccttgagctatctccaaatatgggagaggggtcaaccccagaagagcttgaaaatcgttgggcgcaactggccaatgatggtcaagtcatgcgaatcaaagatcgtattgttttgctttctgatgagaaaaagcgagctgtgcaggaagtgcttcaacatcggaagattcctgcgcacaaggttgcagagttcattaaaacgccgtcagcgttcttagatgcatcgattttaaatttggatcttggtttctcggtaagggtctcaggcatcggcaaaatggtgcatatcccgtttggtcaggactcagatggaagtaatggttggttctcaactaatgcccaagctgagccaccagagcgcctgacaaaacttcttgaatgcgaagaagatcttgagtcttttgagcaaagctatgcgcaagccaaagcgcaaaatgctgaaagcctaatggttaatgatgaaaacatcgacatcagtgatgaaaaacgggttcaagaatctatatcagaagtacgagaaagaatatctaaccctcccagtgcagatggagccactgacattgacgaagtattagagcgcaaagaaaaagtttctttgctgcttaaggatgcggatgaacataaccaagagatcgtttctaaggtctctcaactggataaaaacaccggtttcgataaaacaaatctagcacgaacgccatttcctcatcaggagtcaggcattagctggatggtggctttattgaaatcagtattgtctgaaaatcatgatgacatgtatcgagtacaaggagccttactcgccgatgatatggggctgggtaaaacctttatgacgctcgtgatgctgtcagaatatctggccatgcaaaagtctcagtctaatcctgaaaagccaattcttattgttgcgcctttgagtctgttagagaactgggagcaagaagttgaagctacgtttaagctctcgccgtttagagatattaaaatcttacagtcagggcgtgatctaaaagaatttagaaagcaaggtgctgagcgagagtcaatgcagttaacaacggtgatgaatgagaccacagcggatcatgaatcaattcgatacgctcttcatgttggctctgaggccgcgacaaaacgattagatatggatcgtcgtatcgtaatcacaacttatcaaacgcttcgtgattaccagttctctttgtgtgtgattgactggggtgttgtggtatttgatgaagcacaaaatattaagaatcctaatactcaagctactcgtgctgcaaaagctttgaaagcagacttcaagcttttagcaacgggtacgccagttgaaaatagcttaagcgagttttggtgcttgatggatacagcacagcctggactattaggcgattggggatattttagagagcgctggattaaacctattagcagtgcaagcgaagaggaaaaagctgagaagcgattagaagttggtgaggacctacgaagtgctgtaggtcagtttatgcttcgccgaactaaggaagaccaacttcaaaatatgccaaataaaaccattttaacaggtgttcatttggatatgcctgataatatgaagtttgaacctaatcttgcccgcaatatgagcggaggtcagcttttagcatataacgatattattgaagagtatcgaaagaaaaaagccaaagaagacggttcaggccacgctctagctgtgcttcaaaatcttcgctctataagccttcacccaaggcttgacgaaattttcaagtcaccgccatccaacgcaaaggaggcacaaaaccagttgcaggagtctgagaaactgagaatgatgctggatactctagctgaaataaaaagtaagcaagagaaagtaatcatcttcgcaacgactaagaaactgcaagcagtgcttaagttgtgcctagataagctttatggacttagcattcacataattaacggtgatgctaaagcagtagccactaaaaaggatcaattgtctcgtaaaggaatgattactgactttgaggcaaaggaaggttttaacatcatcattatgtcacccgttgctgctggtgtggggttgacggtagtaggggccaatcacgtcattcatctagaacgtcactggaaccctgctaaagaagcgcaagcgacagatcgagtttatcgaatcggccaaaagaaagatgtatttatccatttaccatgcttacttcacccagagtacgactcgtttgatgtgaacttagatagattattagccaaaaagactatgcttagagatgctgttgtcacaccagaggcagtcaatgagcatgagctgatgaattctatgggattttag

SEQ ID NO: 10762 - DNA, 2193 bp, Pseudomonas sp. GM17
atggatttttcgacattggtgcatttgtggagcgctgcgcgctttgaacagcttatcgctccaacgatggtcgttgggtttgtcatcgttttatgtacttggtacttagttcgttatttctatcggtcatttcgcttgagtggcaggctaaagaaactgaccgcacatttgctaaaagcgcattctctcgccgctcctcagcgtcgcactgagttggagaacctgtttaaaggtaccaaccttgagcactcctggcgggaatacgctgaaacattgcatgaccagttcgagctttcgggaggtgagcaagcactcgtccgctcgcgtgctaccgccggcgcagcacactttttttcacctcaaagcgtcattgataccccactcggaacagagttttataaacatctgccaggcattttgacgggcattggtattgtcgggactttttttggtctgatgctaggactgcagcattttgaccccagtacacctgagctggtcaacagtagcgtcgacaagcttttaaaggacgtattgtttgctttcataggctctttcatttcgatcatggcttctatcgttgtgacgatcactgaaaagtggcgcctcggccgttgttacaagcaccttgagacattcaacgaaaccatcgatggtctgttcgacagtggcgttggcgaggagtacctagcagagcttgtacgttcgagtgcagaaagctcggtgcagacgcgtcagcttaaggacagtctggttactgacttgcgtgaaatgctgcagaacctggttgatacccaagttcgggaaagtctcaaattagccgataccttgtcggccacctaccgtgactctggtcagctgttggccgatcaggtgagcggtgcaattgaaaacagtctcaaatccccccttgaagccatcgcgggcgcggttcaggccgctagtggcgaacagtcagggcaagtgcagaatcttcttcaggatgttctggttgccttcatgaacaagttggaaggtacgtttggtcagcaattcaacgggttgcacgagttgatggggcagtctgtcgctgcaatgcaatctatgcagcaaggcttttccacgcttattcaagatatgcgttcggcgagcgagtcctctacccaaaacagctcaaccatgattgcaaagttgctctctgatatgcaggccggacaaagcgctatgcaggcggggatgaacgagatgcttgtcaatctccagacttcgattgcccgtatcggaaatgaaggcgaggacgcaggggctcgaatggcacaacagttagaaaaactgttcgctgaaagtgaggctcgtcaacaggcgatggctgagaaccttcaggcctttgttgagtcgatcaagcagaacattggccaagggcaacaggaaaccatggcgaaaattgccggctccgttgaggtgctgggtgagcaactttcggcggtgttcaagcaactggaacatggtcagcagcagatggatcagtcgacccgtgctgcacaggctgatctgcatcaaggtactcgcgatttggtgggtggattagatgaacaagtaaaggcattgctgcaaacagttacagagcaacaaaaatctgcgcaggacaccgttaaagcattgagtgctcaaacagaacagcacttacagagcatgcagcaaggtgctgacaagatgcggatggcggcagagcggttcgaaacggctggacagagcgttgctcgcgccagtgagtcgaccgcaggtttgatggggacggtccagggtgcaggaactgaactcgctcaagcatcccgtgagttaaacactgtggttgcagactaccggaacaatcgtgaagcactggcgaaaaccttggcagtgatcgaaggcgttgttgcaagcgcacaaggggaagctagtggccgtagccaatatcttcaggacctgaaggttcaaagtgagcggatgcaggcacttaatcgtgaagtgtatgagtacctggaaaatatcagtggtgtgctgggtaacggcttcaaagagtttggtgaaggcatggatcggaccttgagacaaacactcggtagtctggatgccgagcttgataaagcggtcaaaagcttggccggcggggtagagggggtcaaggaaagtctcgaagatttcggcgacatcatggaacgcatcaggcagtaa

SEQ ID NO: 10763 - DNA, 744 bp, Pseudomonas sp. GM17
atgtttggtaagcaaatgccttcggcagcccgttcaagagacgaaggagaaaagcctttctggatctccttcgctgatttgatgacggcgatgatgattctttttttggtggtaatggttgcagccttgagctccgtaactcagcgtattaaccaagcagagcagggtgagaaacaacgtagtcaagacattagccagatctgcgaacatctcagtctcaaggctaaagctgctaatagaacaatcgttgtggattgcaaagacaacagaatcagcttcggcgatgccggccgctttgggcataaccaatatgcgctgagcagcgaggggcaaacagcgctacaggatgttgttcctatgattctggatgcggcaaacagtgacgaagggcggaagtggtttaagcaggttgtgattgagggatcgactgataccgacggttcttacttatataacctgcatctttctttgcagcgttcagagtgggtgatgtgcagcttgttggatagtcgcagcccacttcaagttgggttgtcgcctgagcaccaacaacaaattcggtcgatattccttgcgggtggtgtctcgttcaacaatgcaaaggacaccaaggaagaaagtcgacgagtagaactgcgcatgcagttctttggcctcaaggaaaaggaagaaaacctcaaacctgaggtgccggtgttcaataataccgatatggaaaaatgtcagttggcgatgaaccgatga

SEQ ID NO: 10764 - DNA, 1626 bp, Pseudomonas sp. GM17
atgactagcccaattgcaaggctttccgccgctatcgatttggggctgtctgtatatcgcacagggcatgcatctgagccactggcgcgattcccccgcctgggagccgcgagagctgatctttacgagagattcgagcgtgctgaaaaggccctacctccgccccaggaaaaacgccgtgaggcaataaacaaattccgaaatgttctcccgctcagtgcttcagagtggcggttggttttcgccggtctttcagataagaccgagcgtgtggggccgatcttggaggatgaacagctttttgttcgtgttcataaagaggttcatgaccgtatcgaaaagagaaagctaagtcgtcgagattggttggcactgtgcttcagctactttgggtatgaggcttccactcctgatcagaatgctaattggtgcctgttaagggcggacatccagcttggctttgactgtgttagagctcagcaaaggcgcgagaaggaatggattcagattgtccaacagcatcaggaactcttttctgagcaggcgggtgcgcgattgggtgaccagatgttcaatggtgagatcagcgatctttctgcactgcagacgattgcgcagatcccagttagcagttggctgtggcgtcgaatttttaatgtcctcatatcccgcattttcatgttggatgataccgagtttgcccagcgtctaccggatctggtggatataggccgcgagcacccgcgttacatgaacgatgttctcagtgcctgtctttcccgctatcacttggctgattatcgggaaaaaccgtcgtcactcttgaaacaggtcgccctcgataattggggaagtccgcagattcgctccaagcaaaacagctggttgcagtacgttgacgaaaatgtctgcgcaatggtggttgcatggttcgctaaggaagaccttgagcactttttcaatttgctgaagggggaggcagaagtcgatcagtcgcgtctgcattattggctgcggtttgccaatcagatgagctatacccgaatcgttatgggggcggatgcttggaacgctggcggacgggactttgttcatttccgtgagaaaaacaaagggcggcttagccggctgataggggctccaggtcacaacaatgctgttgtcatgcagatcgggaactatttctttgtcgagttttccggaacgggcaatgcctgctacgtgtaccaagcagataagtcgccgttcaatccagacaagacacaactcgatttgactgatctaaaacagccttatcgtgccctggatcgtatgcggcattcacctgcaccaagtcgtccaaatcgcatagaaggttggctcagcaagttcgatgactcgttagggaaatgggggattcgcgtgcaaagtcagatcagttcatctggttcccccaaacctgtggcgcttgaggatcagattcgtgatgccctgaagtcggtccaacacaaagtctacgaccaacgtgaacgaggtggcgcctttcaagttcaactgagtgttgcagaccaaacggcaatcgcagcacttctacgattaggctttaagcccgtcaatcaccagcccctcaggttctggaggcaataa

SEQ ID NO: 10765 - DNA, 3249 bp, Pseudomonas sp. GM17
atgctcaagcgtttccttaaaggcataggcctgcaacaggacgcctcattggtaactactgcaccagttttctccattgaggaacagggtctttgctaccccttgagtttggctgaggatgctgagtcctggccattggcaagctatctggaccagttggaagaggaggagtttgtctcccaactcagtgatcgttggttgctgacctgggatgagctttatcggcttattgatgatccggaccatgcgacgagtgtgccgttgttgggcctgcctgcgcagacgaagctcgttcctcaacttagcagtcaaggcagccttgcctctaacgactttaaggtcactatcagtggttggcgcgaccctcagtcaaacgccagcattcagatacagcgtattggcggcactatccaatacaacggagcgattgaggttttgcctgagtcatcttggaggttgactggtgctgtacgacaactttatttggctcaacagagtgagccaggtgaagtgactaaccagattggttgggccagcatcagaaagttggcacgcaaggcgagtgcgggtatggacggcttcttggataaaactgtcgtcatcaaacctgaaagcctgcggctcaatccacgaaaatcgacggtgggtaatactccggtgattgagctggagcccagcttcgaaggccaaccggcgaactggctcgagagtttcgatggcgccaagcaggttcaggatcgatatcgagttacgggtgatgacggggcgttgacccacgtcctgatagagcctgaggttaaatcagtactggattacgttcgctcgttgcccggtcgacgagttgctggtgatgatgcgctttcatttgttcgtaatccctacagcgcgctaggggatagtgctgcacaggtgttggacgcagacacttatgaagaggatttgattgaggctgggatcttctttcatcgctttcacctggagccgaagttggatgatgctggtcatcgaattgagagggtaaacctgactctcgaaccgatttcgccagtaccgcaagcctccatcgaaattacgttcaatgcggcgcatgagctcgcacctttcgtgcatgaattgcatctgaaactggctgccggtatgcctgcaggcttctggcaaggatacgagcttgaactcagcgattttgatttacgccagctcgcaggaattggagagctgcttaagcgttggcaaaatgaagcagctggtattgagtttgactcagtactggacctttcactctatggggaccgagtaacgggtatcggtgaagccgagcgcatcacatcaccattcctggtcaaagaggcaactgaaaactggttgccaccggatgttgcgatgcttggcattgatgcggagattttggggcgttgggatccctccgaccgtgctcaattcgaggcttttgagcagcgactggacgaggctcgtgccgcgggtgacgagtcggtttatttacctgagtctgagacacctctttctattgctgcggcagagcagctttttgaggcatggtcgaaaaagattgctcctgtcgagactgcgttggccaagccagtcgataaggtcggtcgtgctgttctgcagattggtcacaatatcgacgaacccacctacgtacaggttcgtcaggcggccttgcgaagcgctttggatgcaacgtcagagctgcctaatcttctaaagcctgaagtcgtgctgcgggaccatcaattgcaaggtgtcgcttggttgcagcatcttttccgtctgtcccccacggatgtatcgggttgcttgcttgccgatgatatgggacttggaaaaacaatccagctacttacctttctggtctggtatctcgaaaagtatcccgaagataagccaacactaatcgtcgccccggtctcgttattggataactgggagcgtgagcttcgaaaattcttctttgctgacgctctaccagtactgaagttgtatggttcagccttgagtgctgtgaagttcaaaaaggaggaaattcctgccgatttgaaaggtaaaggcatcaaaaatcttcttcgtccagggtggatgggcggtgccaaaattgtcctgacgacttacgaaacgcttcgcgaccaagagttttctctggcacgccagcagtggtcgatcgttgtctgtgacgaagcgcaaaagctaaagaatccggctgcattggtgacccaggcagtcaaagctattcctgcgagatttcgagtggcctgcaccgggacacctgtcgagaacacgcttatcgatctatggtgccttttcgacttcatccagccgggctttctgggtggcttgaaccagtttggtcgcgagtatcagcgcccaatcgaagctggcttggagcgcgatactgttgccttggagcgacttcgcgagcttatcgagccacagacactacgtcgtaccaaacaggatattgccaaggacctacctgcaaaaattgaagactcggcatgccgtgcactggtcatgcataccttacaaaggaatttgtacctgtctgagatatccgcctacagccagaagcaacagatcaacgagcagctcgatcaaaaggcctcccatatgcttggcttgctgcacaagctcaagcttatttgcgcccatccttacagcgtccagcctgataaaaggctgcgcgataactcaccgaagctgcaatggttgatgcaaacccttgagtccatcaaaagggccggcaagggggataaagtgattgtcttcactgagttgcgggatattcagcgggaattacagtacgcgattcaggagcactttggctttcgcgccactgtcattaacggagataccagcaccagcagccagagtgccaatagtcgacagaagcttattgatcagttccaggatcttccggggtttggggtaatcattctgtcgaccattgctgttggttttggggtgaatgtgcaggcggctaaccatgtaattcacttcacccgttgctggaacccggccaaggaagaccaagcgacggatcgggcttatcggattgggcaggagaaggatgtatatgtgtactacccgactattcgagatgaggcgatgccaacgtttgaggctacgttggatgagttgttgagcaagaggcgggcgttggcgcgggatatgttgagtggggcttcggagattcagacatcggaatttgaagcattattggggactcgttga

SEQ ID NO: 10766 - DNA, 2316 bp, Pseudomonas sp. GM41(2012)
atgatggaactgcttaaacacctttggcccaacttcacatcactcacgctcggtactaccgaagccttgagcgcctggttttggattgttatggccaccatcgctgcgggttgtattgtcttcctgctgcttgactggtttagattcaaggtgcgtatgcgtgctttgggtagcctgctggaagggcaaaaccgcgaaaatctggcgctcaaccgtagggaaacactgcaaaaagccctgacattaaagtcaacgggcattggggcgctctggcgcgaattcgatgacagcctggtcagttccagcgatcacaaacagttgtttaacacgctggacgccgaacagttttttaacccccgcacactcgcttcagggctaacctccagccgtttgctggcctccctacctggtttcctggtaggactgggtgttttggccaccttcgtagggctgacaattggtctctcgaaactgaaactcgacagtcatgccggagtggaacaactgcgttctggcattgacgtcatgatccaaggcgcggcagtcgcctttatgacctctgtgtggggcgtattcttcagcctgctgctcaactttatcgaaaagttggtcgagcgcttcgcattgagccaaattcatgctttgcagcatcggattgactctctctaccagcttatccccgccgaacaatcgctggtgcatattgccgactacagccgtgagagcaaggaagccctccaagaactgcacgaacgcatcggcgaccgcttgcaggaaaaccttgcaggcatgggcgatgcgatgcaacaagcgatgacggatgcgttgaacaacatcatggcgccagccatccaaaccctgatcagtaccagcagccagcagtccacacaaatgctggagaagctggtcggcaacttcatgtctggcatcacttcggccggccgcgagcaaggtaatttgatgcagcaggctgctgccgatgtgaacgcagcggtggggggcatgaccgcgcggctcaatcagttgtcccatacactgagcgaccaacaaactcggcaattggagggcagccagcagcaaaaccggcagttcgaagagcaactggggcgcattgcctccgccgcggagcaaagtcagcaacaaacggaaagtcgctttaacgagctgatgaccgacctgaccagtcagctgaatagccagctcggttcagcgcaacgccgcgatgaagagcgccagacgatggttgagcgtctgctggccgaggcgagcgccagtcaatcagcgttgctggacagagtcaccaattccagccgtgaacaactgcaggcgctgtccgaggccggtaaccagcggcatgacaacctggagaaaatgttctctcgcttgatgacaaacctcaatgctcaactagattcgcaaatgggcgcagcggagcagcgggaacaggagcgctccttgcgccacgagcatcagcaggcttctagctttgctcagcaccaacagcaagtgagtgctctcgccgaagcctcagccgcgcagcaacatgcactggaagagacggtgggtaagttgctgaacaattttggtgaacaaatggccggccagggtcagcagtccgaacagcgtgaacagtcgcgtcagcaacgcttcaacgagcagttggaaagcatgacgatgcagcagcaggagctgcttaaaggtatcgccagcgcagtgcaggttacccagcagcagagccggcagatggccgaacaacaccagcaactcatgggtgggctacaacaagcgagcgacgccgctttcgccagtagtcggcacatggacaacagtgccaatcaacttggtctgctttccaccaatgttcgccaagctgccgagttgcttggtcagcgcttagaaagcgtgacacaacgaatcgaatccgcgggcacccaaaatgcccaactggccacccagctgaacagccaggcagaggttctcgcaaagctgcagcaggcattgctcgacagtgcgcagcgtttcgaacaggcagcgggcgaggcacgcaatggctttggcgagatgaggagccatcagcaagagtttcttatcggtgttcgtggcgaattcaccgcattgggcgaggctttacgcaaacaggtggaaggcgtcgagcaacaggcagagcagtggctgcgtgcctacgctggtgaggtacgccagcaggtgcatgagcgaatggaccagtggaacaaggaaacccttagctttgcgaacacgatgcacgcagccgtgcaagcaatcagtaacgtggtcgatgaactggaggcccattga

SEQ ID NO: 10767 - DNA, 744 bp, Pseudomonas sp. GM41(2012)
ttgaagcgctggcgcaagtccaatgaagccccgatggaggatgaagatccttactggaggtccttcgtcgacatcatgtcggcgcttctggtgctattcatcctcgcctcggtggtgctgattcttcagttgatggagaaaagcgcgcagttcgataaacaggtttcccagctggagcaggcggaaaaagttcgccgcactattctagacgaagccgtagaggaactgcgcaagcgtggagtcaaggtccaggttaccgagaatcataccgtgttacgaatccccaacgagttgcttggcttcgatacgggcgctttcgagattcaaccgcgttatcaaccgacagcacttgagattggcgaggtgattgcccaagttatcaaacgggatgatcggatcaattatctggacaccattttcatcgagggccataccgacaatcggccattccccgggttcatgggcaaaggcaactggggactttcgacgttccgtgccatttcattgtggcaattctggagctctgaactaccccaggcgcaacgtttggaccggctgaacaatcaagacggtgaaccgttgttctcggtcagcggctatgccgagacccgaccggtgaacaaggatcagggaagcgaagatagctatcgcttaaaccgtcgcatcgacatccgttttaccatccgccgcccacagagcacagaatatgaggcactcaagacgcttcttgagaactcccaatga

SEQ ID NO: 10768 - DNA, 1959 bp, Pseudomonas sp. GM41(2012)
atgatgaagttaccccccatcgaaaaccattctggtgagtggttgccaacggttattgagggctgggggcagttggtggaaaaaaccaaacggatgaagaccaaagtaggcagcagcgatgcatttgagcgcacacttgccgcgcttcgagacatggctagcaccgggcgcttcgatgatttacgagaactgctcggacgtcggctaggagcccgagcactgacttggctatggttgcacgacgaggtagtgggtaagcgattgtttaatgccaggatactcgacgtgctggtcgaatatcagcaaccacggttgagtcgcttaactctgattcagctgatccagttatattttcgttattttgacggtctggatgcgtacaacaaacacggtgaagatagcttgcgtaagcggcttgaactgcatttgctcgtgcagataagccgtattccgagtcggccaacgaccttcggaacggatcccttgatgaccttgaaccgggagggtgaatggctattaacactcgacggtccagtgcaactgatcaatagggtacgcgacgagggtggagagctaactgaggccttcgagaagatgggcttgaatggcttcgatgtcgggcgctacggcgatgtttgtcgggcgcattactacctggcagtgctgcgagaactgtcgccgggggagtggagcgatgtgctcgacgaattgcttaagcctgaggtgaacaacgcaccgtacgaggatggtcggcgcattggtcatgctgcactagagattatgatcgaccgcgcaggcagtgagcctggagatgcgtggcaaaacttcatcctgagcctggctggcgacccacgtattgccagctcttccaaaaatttccgtgagtggtggcaaccgctgggcgaggagcgtattgggaaggtccgtggttggttatccaaagaggatctgcgtctattccttcaggcggtccagcagtacggtgtggagtcggggaagcaagatctgcaacgcatgtttccagcccgcaagctctttctcgaaggtctgtatcggctggggttgattcgccatacgcgattgatgctaggtcgccttgccaaggagtcagtgcatcgcatcctcggcgaagaaatgaaaaccgagtttgctcgtatggacggcataatgaacgacaaagccgtaatctatttagattgtggcgattttcacctgatcgaaggttcgcatagctttaaggtttgggtataccttgctcagccgggaacctcattgcaatcttacgaacgcaatcatttcacgcactcagacctaatctctggattgcctcataagtatcgggaaatgtacccctcccttccatacgaagcgattgttcacaatggtacttggcaacgcaaggtattcgaattcctcgcgaataatggtatcgggctggatttggagcagttactaagcaggcaggagtacaggtcatatttgagcagatacggcatacccgttgttagacgcaaaaatgcacaggttctgaaatctacagagcgatctacctgggcagcagcccctacttttgtgcaggccgaaagaggtgccgttgcgccaacgcgacctcagcaaacgagtttgaattcggcaccgagacctcccccacagccagaggagctgcactcaagtaccatttcaaaatctatcaagcctttgcctgagagcgggaatgatccgctgaaggatcttctgagccatctcggtacgtttgagctaaacgtgctgcgctacttcgccaccaaccccggcgacaaggtgcgttacgcagccaatgtgctgacggtcgaagcacgcgaaatcaatcaggttctatacggccgactaaatgctttgtgccaacaaactgatagttttggttggtcggttcgtgcagatatcgctgccgccctagaccatctgcccgcaggggattga

SEQ ID NO: 10769 - DNA, 3030 bp, Pseudomonas sp. GM41(2012)
atgggactagtcgaaatcttcaaaagcctgctgggagaaggcagtgccaagctgagtacacagcagggttttatctaccatgcagactcggaaggtctaaatctctacctagatcgaaaggtttatgcagatcttgtcgagggtctgggcaacgcgttgcagaagattcaactggtagtcctgcatatgctcgaagagcagggcattgccttgcctcttgccaatggctttcatctttccgcggaagacgcggcgggcctagacgatgaacaggcagaaattctgcgtctgccgcgtcgcttcaatatgggttttgttagtcagctcagcggtcgaaccgggaatagcagtttcaagacacagctgctggtatcgtccgactcaggcgaggtgccatttacccgcaaggggccgttgctctatttgaccttgagcgaggcctaccgtcttacgcctgcggagctaatgggattgatggcttgggagcatcaccagaaactgcagcccgagcaacgtggggagtcggccaatctgcggctaatggccgaactccagactgcagcacgcagcggcatgcgcatcgacctcagccactttgagcgattggaggtggtggtgcccgaaaatattggcgtcgtcgctacccgcttgcctgatggcagcttgattctctgccccagtctaggtgacggctcaacgccagatcaattagagaagcgctggtcacagctcgacatgggcgctgatgggggcgtgctgcgtatcgataatcgcgtggtgctcctagacccgcagaaaatgcaggcaatcaaggaggtactgggtaacaagcgtattcctgccgacagggttgccgaattcatcgcgacgccgagtgcatttctggatgccgcattggtcaatctggacctaggcttttccattcgtgtggccggcatcggcaagctccagcatatggagttcggcgagcttgataccaaaaagcaagactggtttagtcttgatactcgtgcggctcctgttgagatcatttccaagttggtgcagtccgaggaggatttggtgcgattctcggatgcctacgcagcagcaaaacagcaaggtgcggagagcctgatcttcgatggggagtcggtggatatctccaactcggagcgggtggaggaacaattagcaaaagccaagacggctttcagcatatcgaagaccgagacaccggacggttctgacgcggcagacgacataaaagaacgagtcagcgtcttgttgcacgatgctaataaaataaataacgagcttttgcgtatggctagccaggccaaggcagttcgcgaaccaaactgggaagcctatgcacgccagccgtttccacaccagcgcgagggtattgattggatgctcgggttgttggcatctgcgttgcaggccgaccatgacgacctttatcgactacagggcagcctgctggcagacgatatggggctcggcaagacctatatgtccttggttacggtaggtgagtacttgtctgaacaaaaggctgcgggtcggccgcagaagccagtcttggtcgtggccccgctaagcctcttggaaaattgggaggatgaggtcagtcataccttcaacggcattccgttccgcgacattgtcgtgttgcaatcggggagggatctgagtcgtttccgaatcaaaggtgcagagcgggaatccagccagttggcctcattgatggatgatgagggacaaatggctgatgacgctcttcggtatgcattggccattggtcccgaatgcggcgctcatcgcctggacatggatcgtcgactggtgctgacaacctatcagtctctgcgtgattaccagttctcgttgtgccgaattgattggggcctcgttatctttgatgaggcccagaacattaaaaatcccaatgccgcgcagacccgcgcagccaagggcctgaaggctgacttcaaattgcttgctactggcacgcccgtggagaacagccttggggatttttggtgcttgatggatacagcccaacctggcttattgggtggctggagagagtttcgtgacacctggatcaagccaatattgaatgcagccgatgatgaccgagatgaggtcagacgtgatctcggcggcaagctgcgcgatgctgtcggcgcgttcatgttgcgtcgggtcaaggaggaccaattaagagggcttccaagtaaaacgattcacagcggcgtgccccaacttgaaggtagccagcttagtcatgatacccaactcgcgcagtgcatgagcggagcgcaattgagggcatacgacgccgtactcgacaactatcgcagccagcgggccacggaagatatgcgtgggcgcgcactgggcgtgctgcagaaccttcgagagatttccctgcatccgtggttgcggcaggagagccacttgttggcaggaaatgccaaagaagcgcgtacgcgaatgtcggaatccgggaagttggtcgttctgttaaacgtgttagatcgaatcagtaagcgggaagagaaggtgatcctcttcatggtgaccaaacgcttacagcgcgtggtgaagctttggctagaccagatttttgatttgaatatttcgatcatcaacggtgacactgcagcggtacccaaaaaatctgatgtgctgactcgtaagcaactgattgcaaagtttgaggcgcaggctggctttaacgtgctgatcatgtcgccggttgccgcgggtgtcggccttaccgtagtcggagccaaccacgttgtgcacgtggagcgccactggaaccctgccaaggaggctcaggcttcagatcgggtttatcgaataggtcagaaaaaggaagtccacatccatctgcccatcgcacttcacccaaggcatgactcattcgatgtccatcttgatcgtttgctgcgcggaaaactgatgcttaaggatgcggtagtcacaccagagatagtgggtgaagttgagatgattcagtcgatggggttgtaa

SEQ ID NO: 10770 - DNA, 1878 bp, Rhodanobacter sp. 115
atgaactttattcacgacgtcctggctggcggcgttctcgtggtcacgctggccacgatctcggcggcgctgctgttcgactatctttggcgttacgccacacgtggcttgctgcttcgccagcagctcaaaacggttgccgcgcgcatcgaggctcttgccaacaaacctcgtcccacactgcgggaagagctgaaaaaggtattcgaaggcaccgcatgcgatcacgcctggagtgagtacgaagagacactccacgaccagtacgacatccggaatggtgagcggaaggtgcgcgaggttcgcgccaccgtaccctcggaatcctttatcaacttggaaaccacagttgatccaaggatcggatcggaatacttcaaacacctgccaggcatctttaccggcctgggtatcatcggcacgttcaacggactgattcagggcctcgtggcgtttaatcccgatgtggatgcggatgcgctcaaggttggactgagcggcctgttcggccatgttctccacgcattctccttctctatgatggcgatcatccttgcgatgatcatcacgatcactgagaagtggatctacgccgcctgcgccaagtgggtcggtcgggtttcgcagaagctggacagcttgttccgcgctggcgttggcgaggagtatctatcggatcttttgcgctcgtcgcaggacaatgcaacgcaaaccaggcagttgaaggaaagtctggttcaggatttgaaggaattgttgacgcagctagcggagcgtcagatcgcagcaacccagcaactttcgatcgagatcggcgagcggatcgaaggaagcctgaaggagccacttgcccatattgccgacacagtgcgcaccgccagcggacaacagaccagcatggcgaccacggcgatcgagacgttgatgcgtgccttcatcgacaaaatgcaggaaacgcttgggggccagatggatggccttaacgagatgatgcgcacctcggcacaatccatgacgcaggtcgaagctgccatgcgctcactcgtgacagatatgcagcgagtaagtggcgagtcgacctcaggcatgcagcaagccgtgcgcgacctgatcgaacagatgggtgaacagcaacgtctccacgccaatcagtcgaccgtcagcatcaataacctgctcacccaagtcgaatcgtcagttaaggaggtggctcgccagcaggagaacatgagtcagcgatcggagcagtctgtctccgccctcatggaagcgatgcatgatcgcgtcgaccagttggcaagcagcaatcgcgaaacccaagagcgcggtgtcgctctggcggcgtcgctaagcgaggtgtccaccaaagcgatatccggtctcgaagagggcgccttggccgtgggacaggcgctcgacagcgtgcgcgccgccgttgagcgcctcggcatcctgaccgaaaagatgtccgcgctgcagtcgggcctgaaccagtcaacagagcagatcgcgcagtccagcaatgtcttgggtggcgcggcgcagtctctcagcacggccataggcacccttggagctgcaacatcgcattttgacgcgttcggcaagctggttcaggcagaaagtgccgcccgcagcggcatgcttgaggatctgaggtgcctgacccagcaagcccaacaaaccggacagtcactcacgtccctgacggatgaggttcgggacaagttaggcgatatggtcgctaaattcggggtcggcgtcagtcaggcgctcgaacacaacctcgcaacctacaacaagcaactcagcgatgcagtcggcatgctcaagagcgccttcgaagagatcgccgagtccgtggatgcggcgagctga

SEQ ID NO: 10771 - DNA, 726 bp, Rhodanobacter sp. 115
atgatgtttgccaaagtcgttcggcgcaagggcaagagcaagagcgaaggagaaaagcccttctggatctcctacgccgatctcatgaccgcgatgatgacactgttcctcgcagccatggccgtgaccatggtggccatcacgcacaaggttcgccaggtcgaggccaaagaggtcattcgcgccaagcagatcaagcaaatctgcagcaatatccgaagtcagctggccaatgacggcgtggttcatgtggattgcgaagacaaccgcatcagttttggcgaggccggacggttcggtcacgatgactatcatctcccgtctgctgcaggcccggcgttggccagactggtcccggccgtactcgaggctgcagacgacccgttgggccgcaaatggctcaaacaagtcgtcatcgagggcttcactgataccgacggatcctatctgtacaacctccatctaagtcttgagcgctcggaatgggtgatgtgcctgcttctggatccgcagcgcaataccgatctttccttgacgtcacagcagcttcaacgggtccgggacctcttccttgccggcggcgtgtccttcaacggcgccaagtccaccaaggatgccagccgcagggtggaattcaaattgcaattctacggttcggataccgacagctcacaagccaagccgatattccaagtcacggcgaccgaccgatgcatgctccactaa

SEQ ID NO: 10772 - DNA, 1572 bp, Rhodanobacter sp. 115
ttgctcgcgaaccttgtccgggaacggatccctgacgccgatcatctacccttggcggttcaggtcgccgaggtaaagcaccgcttcggtacggcctcggcagccattcgccccgacagggtcgaggccgcggcccgtcaggcgttgtctgacttaggcaagttacgcgccagtcaccgcttcgttcttgcacattcgctggcgcaaccgatcgctggcctcgaaggcaggtcagttctcgatcacgaacgagtggcccgacaactgctcaacgattgggagtcggcggcacgcaaccaagtgctaaaactgtcgcattggcgcggcctgttccgatcctatatgcaggcgccagatggcgactggcagaaacgtctgaggctcctgctctcgaagacgattgaaccggtggtgaagcgtcgccgaggccgccccgcgtggctggataccctgacccgacacgagcacctgcttggcgacgagccctgccttccttatgtcgacgagatgatggccggcgagcacgaactgctcgcagatctccgtgatcacgtggatattccacccaccagctggttctggcagcagctcaaatcgaggctttttcagcagatcgcatccattggcgaggcggccttccgagcatcgattgacgcgttcctggagcttgaccatctgattcccctaatgggcgatgagcttccgaaggccatccttgagcgttacgacgcagggagagatcgctcgatacaaccgtcgcttatggacttctcgctgaaagcttggggaagtccccagctggcgagaaacacaaagtgggatctttgtcgaccttccgtccggcagatggtcaacagctggctggccaaggacgatctcgaagacttctatcggctgtgcaacaccgaaaggatggtcgatgagcggcgactggcgttctggcttcggttcaaggatcagatgaccttcacccagatacttctgggtggtcggttgcggagtagtcgcgatccggacgtcagggcatttatagcgaagaagggcgagcgcctgggcgacctcacggcaagcacctccaccaacaatgccatcctcatgcaaattggtggctggctgttcatcgagttcagtgaagtggggacggcagcgcgggctattcgactaagtgatggggtaatcaagactgggatggcttcgtacccgttgaccacactacggcatacgggcgaacagtggacccaccaaccgagtgccgcatgggaagaaaaattcctcgaccggcttcgggacgtcggcgttttccctgacgactcaaagacgaaaagatcaccgcgtgcgccctccctgcctcagaacgaaatcacggccagccccagcgtgaggcgagtgcagcctccccccaccttgatcagcaagctcaggaatatggatgttgaggtcgtcgacaaccgactgaagggtggcgcgctctgggtctataccagcagaaacacgaccgctgaagaacttgcagagatccgcaacctgggtttccgatggaaggaaagcaagcgagggttctacttgccatga

SEQ ID NO: 10773 - DNA, 2556 bp, Escherichia sp. KTE114
atgttttcgctgacttcgttcctcgacacgttaacctctgttaatccagaaaatgtgccgatttatgtcgctattgtggttggggttttgttgctgggtttcattgtccgttacgcgattccttcatttagggtttcagcgcgctttaaacaaaaagcgaaagcaattcggggacttggcaatgaaaaaccggcacaacaactcgaaaaattagacgcgttattctctgataaattttttgcgcacccctggagcgaatttaaagagtctctacatcgccagtttgagtttgatgaaaatagcgggcaaaaaaaaattagcgccattcgttcaacggctccagcgtcagcatggtttacggaaccgttattagtcgaaattcctctctatacggaagcgtttaaacatcttccaggcatcctgaccggaattgggatcatcggcaccttttcgggattgatgattggtttgcaccattttgaccccagcacgccagaacaggtcagcgccagcgttgctaaccttttacgcgacgttctgtatgcgtttttaggttcggcgtttgctattacgttttccattctggtcaccatgtttgaaaaatggcgactggcgcaatgctataaaaaccttgaactccttaccgccagcattgaccagctttttgaaggcggcgtcggtgaagattacctttcgcaacttctttccagtactaaagaaaacaccacccatgcgcggcaacttaaggatggtctggtcactgacctgcgcgaaatgctgcaaaatctggtggatagccagatgcgggaaaatcaaaagctggcagagacattatcaacaacataccgcgagtcaggccaacagtttgctgaacaggttagtggcgctatcgaaaccagcctgaaaaatccgctggataaaattgctggcgtggtgcaaaccgcctccggcgatcagagtcatcgtgtgcagtcgatgctggagaacgtcctgaccgcctttatgagcaaaatggataacacctttggtcagcagttcaccaccatgcaggagatgatggggcgttcagtggaagccattcagtctatgcaaagcggcttctcaacgttgttgcaggatatgcgtcaggccggggatgactcacgtcagggcagcgcgcaactgatctctcaactgttaagtgaaatgaaaagcggtcagcaggagatgcaggcagggatgaatgagatgctgcgcagcttgcaggagtccgttgcccgtattggcgcagaaggcgaaggcgcgggcgaacggatggcgcaacaactggaaaaaatctttgccgacagcgaagcgcgtgaaaaagcgatggcggaacagatgcgcgcgtttattgaggctatccagtccagtgttcagcaagggcaaaatgaaaccatggagaaaatggcagcttccgttgatacgcttggcagccatatggcgacgctctttgcacagctggaaaatggtcagcagcaacttaatcagcagcaaaatcaggcgcaaaatctgctgatgggcaatatgagcaaaggtgtcgaaacgctgacgcaaaacctggcgggcgtattcagccagctggagtccgggcaaaaacagatgagccagactcaggaacaggggcaacgcgtgctgcatgaagagactcagcagcttctggcacgtagcgaagcacgtgagcaggcggcggctgagcaacaacaacagtttatgacgtcgttacagcaaaccatgcattccggtcaggatgccctgcgagaaaaaatgaccagcggtatcgatcacctgggtagccaacttggcaacctgtttgggcaactggaagaaggccagaagtcgctcagccagcaacagcaatcagcgcagagtgcgttacaacaggaagcgcagcgaatcattggtcagcttgaaagtcaggttgagtcgctgatgcagatgctgcgtgaacagcaatcggcttcaggcgagctgctgcaacggatggcgaaaaacaccacgcgccatctggaagagatacaaacaggagccgataaaatgcgcgtggctgccgaccgctttgaagctgcgggcgatcgtgtcgccgaggctaatcagttgaccgccgaggtgctcaatggcacgcaacaggcgggacgcacgctttccagtgccagcgcggagttgggggcattgattgctgattatcgtaatacccgcgaagtcgtggcgaatgccataacggcactcgaaacgctgattaaccgtagccatgatgaacaatcatcgcgcagccgttttgttgacgatctgaaagcgtactctgaacgcctgcaacaatataaccgtgaggctcaggagttcctgcataacattgccgaggtaatgggaaccagttttgaatcctttacgaccggagtggaaaacggcctgaatcgttcactgcaagagatggatacgcaactgacgaaagcggcgggagccttaagttcttcggttgagattatcggtgaaagcgtggatacgctggaaacagtactccgtcatcgtcgcgcgtaa

SEQ ID NO: 10774 - DNA, 735 bp, Escherichia sp. KTE114
atgtttaaccgggtatttaatggcaggcaacggcgcagcgatgaagcggaaaaacccttctggatctcctatgcagacctgatgaccgccatgatggtgctgtttctggtggtgatggtggcgtcacttagctctgttacgcagcggatccagcaggcggaagcgggggagaaatcgcgcgggcatgatatcgctcgcctgtgtgaaaaacttgagcttcaggcgaaaaatctcaacaagacgattcaggttgattgtcatgacaaccgtatcagctttggtgaagccgggcgttttgagcacaatcgctttgcgcttaacgccgaaggattgcaggcgctacaggatgtggtgccgttagtgctggaggcggcaaatagcgatgaaggcaaaaaatggtttaagcaaattgttatagaaggttttacggataccgacggttcttatctctataacttgcacctttcgttgcaacgctcggaatgggtgatgtgcagtttgctggatagcagaagcgcgctacagcaaaaaataaccccggaacagcaagtccagatccgcaaattatttctggcgggcggggtttcgttcaacaatgcgaaagagagtaaagaagccagccgtcgcgtagaactgcggatgcaattctttggcctgaaagacaaaaagcacgacgaaagcatggatgttgttcctggcattagtcaggaaacctgtcagttgggagccatgtaa

SEQ ID NO: 10775 - DNA, 1788 bp, Escherichia sp. KTE114
atgacttccgctattgaaaaactgaaaacccgtttgctgccctaccgggagcagaacgtgcagccgacggtaagtcacgcttttcactatcttcagcgcgttatcgcgcaacttgagaggaaggtagatgctcgcgcagtgcagatggttccccctctggagaaacgccgtcaggccattgcccgactgcgtgcgggggagatgccagggcccttcgagtggaagatgattttttttggccttaatgacgtggcagaaggcgatctgtttgaaattgcattgattgatgatgcaacaaacttcgcgaggattatcgctgaaattgaacaaaaaattgcgcagcagcggttaacacgccgcgaatggctggcgttatgtaccagctactttggtcattccaacgatacgccggaaaagaatccacagtggcttcagctacgcacgcagattgctcgcggctttcagcagctaaaagagagtgcgccgcgtcagatgtcctggatgtcggtcattgacacctatagcgatatttttaccgataatgcaggttttcttctcggacaacagcttgggcgtggagaaatcacggatatttcggtgctggagaaagtcgcgcaaattccgcaaaccagctggttatggcgcaaaattgttaaccacctggtcaatgagattttttgcctgactgacgatgattttcagcagaaaattaattctcttatcgccttaagccgccagcttacgcggtttaaagataatattctggcagccacgctgacccgttattatcagtcagcttttaaacatcaaacgcatttcgaactcaagcaattagccctggaatattggggaaatccgcagttaaccagccgtaataaaagctggcaggttcacgttgaaaatcccgtattactgatggtgcaaggatggttcgccaaagacgacctgaaactgttctttgaattgctgaaaggcaatcgggatgttgaccatgcgcgcctgttctactggctacgttttgctaatcaaatgagctatacgcgcattgtgctgggcgaagatgcactgcgatccaaagatgccgattatgttgaattcagggcgaaaaacgcagggcgattaagccgcctgcaaggttctggttcacgcgataacaatgccatgattatgcgcattggcgattatctgtttgtcgaattttcgaaagtgggggcgatgtatgcctaccatatggggaatgcgccttttaatccggaaaccggcattcttgatattgattatgatctgaaagataagcggaataaccgccgtaaagtccggttgcgtttaccgcatttatcgccggtatttctctactcactcaaccgaattgaggggtggatgagccgatatgatgaagaacttcgtaagctgggtattgattacgttgcggaagatataaatcagtcctctgtcactttggatatctctcgcttcaatgcgtcaaagaccgtgagtcggcctgaacctgcatcgttacctgaacatgaagtcagtgatgtaaagtcagaccgggaagagcaaatcaaaatcatcgcctcctcgttaaaagccaaaaaagagctccctggccgggaacagcaaatccgggagattattcgttcggtcgattgcaaagtgatggataaacgagggctggggggcgcaatccacattcagttcaatgaacctgaccatgaagcggcacaaaaattactcagccttgggtttaaaccggtgctgggtaaatttacttactggagcaaatag

SEQ ID NO: 10776 - DNA, 3240 bp, Escherichia sp. KTE114
gtgttcaaaaaattgttgggtaaatttattaaagagaatacctcactacccgcttcatttgtgccgttgtatgtgatgaaagaagagggttttgctttcccctttagtcttgccgatagcgaagataactggcctgtcgcctcatgcctggaacagcttcatgaggaagattatgtttctcactggtctgattgctggtttcttggttgggatgatttttaccgcatccggaaaaatgacgactatgccagcagcctggcgattttcgcttttcccccacagcgcaatctgacggctcatcttgctgcaacaggaagcattagcgatgacacttttcgcgttttcattgataaatggaccctgcctgacgactatcgccctgttgagataacttgcacaggcgccagcttttcctctgcggaaggcacctttgtgttaagtgaagagaactggcaacttctggacgcactacagcaactcaggttgcagcagcgacagacgccgggcgaaacggtcaaccaaaccagttgggccaaaatacggcggcaggccaaaaaagcaggggcaaaactggatgactatctcgcgaaaacgatcgtcatcaggccggaatcgttgcagttaaaactgcggaaatcgctggtggtggatactccggtgctggaaattgaacctgtttttgatgagcagcctgccaactggttacagagttttgaccgcacgcaacaggtgcaggatcgttaccgtgttttaggggacgatggtgtcttaaaccatgtcattctttctcctgaagtcaaagacgttctgacctccgtacacgctattacagggcgtcgcgtggcgggggatgatgcgctctcatttgttcgcaacccctacacctggattggtgaagaggcgagccaggtgctcgatcctgacgtttatgagcagaatttacaggacgccgggatctacttttatgatttccgcctggaaccgcagattgatgaaaacaggcaaattgcgtcggtaacgcttcttctcagtcccagaactgagcaatctgtggcggatgaaacctatatctttaaacgacctggtgaactggcggcgttgctttctgaactggagcaaaagttagcggcacaactgcccgccggagtctggcagggttacgatctggagctttccagattcagccaggaagaactgcaaggttatcaggcattgcttgaaaactggcagcaccaggcggcgggaatgaattttacccacgtcctcgatctgaacaaatacagcgaccgggttatcgggatcggtgaatttgaaaaaataagttcgccttatctggtcaaaagtgaaagtgaaaaatggcttccagagaaccttgcgcaagagatgtgcgaggccatgttctctggctgggatctcgataatcatcaacattttcaggaactggaagagcggctggaagaggcaaaagccacggatgcgccggaagtcgccatgccctggaacgacaaccttttgccccgtgaagaagcagaaattttccacgataaatggaaaaagaaaatcgatggcgaaacaaatgatggtgtcaatagtgagccggtcagtcgcgccgttctgctgatagaacaaaatatcgagcaggcgctgtatgttaaacaacggcgggactctttgctcggtgcacatcaggcagaagtcgaactaccgatgatcctcaaaacgtccattcagctacgtgaacaccagcgtaaaggggtagcgtggctccagcagttgtatctaaagtcgccaaccgagacggcgggatgtttactggcagacgatatggggctgggtaaaaccttacagattctaacttttctcatctggcaccgtgaacgtttcccggatgcgcctccttcgctgatcgttgctccggtgtcgttactcgataactgggagcgtgaggttgggaatttcttcctgcgcgagcaggtgtcgattttaaaactctacggtaatgaacttaaggcgaagaaatgcgcgaaagagagcattcctcaggcgcttaaaagtaaggggattaagaacttactgcaaagtgactgggtgggggacgcgcatattgttcttaccacctatgagacgttgcgcgatcaggaattttcgctggctcgccaaccctggtccataatggtgtgcgacgaagcgcagaaaattaaaaatccggcggcattaattacccaatcggcaaaagccattcaggcacaatttaaagtcgcatgtaccgggacaccagtcgaaaatacccttgtcgatctgtggtgtttatttgacttcgttcagcctggtttgttgggggctttaaataattttggtaaagattatctgcgccccattgagcaacagaatgataatgctgtcctcgaatcgctacgtaaattaatagaaccgcagacgctgcgccgcaccaaagaagaagtggcgaaagacctgccggataagattgaagatcaacgctgtaagcagttgaatatgctgccattgcaacgggatctctatacccactcggttgcaagctggcaaaaccaacaggagatcagcgaagggctggatcaacgaggctcaggtatgctggggttactgcatcgcctgaaacttatttgcgcatggccttattccgtcagtgcagatctgcgcttacggaacgatgccccgaaagtaaaatggctgctggagacattaaatacgattcgccagtcatccgatgacaaagtgattatttttacggaactgcgcgatattcaacgagaactgcaacatctgattgcgcagcattttggctttaagccttttattattaatggtgataccagtaccaaatctggcagcgatcaaaatcgtcagagcctgatcgatgcatttcagtcaacgcccggttttaacgtcattattttatccaccattgcggttgggtttggcgtcaatgtccaaaaagcaaatcatgtcatccactttacccgttgctggaatccggcgaaggaagatcaggcgaccgatcgggcctaccgtatcgggcagcagaaagatgtttacgtctattatccgacggtgcgtgatagccagttaatgacttttgaagaaacgctggatgaattactgaaccgacgccgggcattggcgagagatatgctcaaaggggcaaccgatctgaccgccgcagattttgaagcggtgctggcgggtacaccgcaggcgtag

SEQ ID NO: 10777 - DNA, 2556 bp, Escherichia sp. KTE11
atgttttcgctgacttcgttcctcgacacgttaacctctgttaatccagaaaatgtgccgatttatgtcgctattgtggttggggttttgttgttgggtttcattgtccgttacgctattccttcatttagggtttcagcacgctttaaacaaaaagcgaaagcaattcggctacttggcaatgaaaaaccggcacaacaactcgaaaaattagacgcgttattctctgataaattttttgcgcacccctggagcgaatttaaagagtctctacatcgccagtttgagtttgatgaaaacagcgggcaaaaaaaaattagcgccatccgctcaacggctccgtcgtcagcatggtttacggaaccgttattagtcgaaattcctctctatacagaagcgtttaaacatctccctagcatcctgaccggaattgggattatcggcaccttttcggggctgatgattggtttgcaccattttgaccccagcacgccagagcaggtcagcgccagtgtcgctaaccttttacgcgacgttctgtatgcgtttttaggttcggcatttgctattacgttctctattctggtcaccatgtttgaaaaatggcgactggcgcaatgttataaaaatcttgaactccttaccgccagcattgaccagctttttgaaggcggcgtcggtgaagattacctttcgcaacttctttccagtactaaagaaaacaccacccatgcgaggcaacttaaggatggtctggtcactgacctgcgtgaaatgctgcaaaacctggtagatagccagatgcgggaaaatcaaaagctggcagagacattatcaacgacatatcgcgagtcaggccaacagtttgctgaacaggtcagtggcgctattgaaaccagtctgaaaaatccgctggataaaattgctggtgtggtgcaaaccgcttccggcgatcagagccatcgtgtgcagtcgatgctggagaacgtcctgactgcctttatgagcaaaatggataacacctttggtcagcagttcaccaccatgcaggagatgatggggcgttctgtggaagccattcagtcgatgcaaagcggtttttctacgttgttgcaggatatgcgtcaggccggggatgactcacgtcagggcagcgcgcaactgatctctcaactgttaagcgaaatgaaaagcggtcagcaggagatgcaggcagggatgaatgagatgctgcgtagtttgcaggagtccgttgcccgtattggcgcagaaggtgagggtgcgggcgaacggatggcacaacaactggaaaaaatctttgccgacagtgaagcgcgtgaaaaagcgatggcggaacagatgcgcgcttttattgaggctatccagtccagtgttcagcaagggcaaaatgaaaccatggaaaaaatggcggcttctgtggatacgcttggcagtcatatggcaacgcttttcgcacaactggaaaatggccagcagcaacttaatcagcagcaaaatcaggcgcaaaatctgctgataggcaatatgagcaaaggggtggaagcgctgacgcaaaacctggcgggcgtattcagccaactagagtccgggcaaaaacagatgagccagactcaggaacaagggcaacgcgtgctgcatgaagagactcagcagctcctggcacgtagcgaagcgcgtgagcaggcggcggccgagcaacaacaacagtttatgacgtcgttacagcaaaccatgcattccagccaggatgccctgcgagagaaaatgaccagcggtattgatcaattgggtagccaacttggcagcctgtttggacaactggaagaaggtcagaagtcgctcagtcagcaacagcaatcagcgcagagtgcgttgcaacaggaagcgcagcgaatcattggtcagcttgaaagtcaggttgagtcgctgatgcagatgctacgtgaacagcaatcagcctctggcgagttgctgcaacggatggcgcaaaacaccacgcgccatctggaagagatacaaacaggagccgacaaaatgcgcgtggccgccgaccgctttgaagctgcgggcgatcgcgttgccgaggctaatcaattgaccgccgaggtgctgaatagcacgcaacaggcagggcgcacgctttccggtgccagcgcggagttgggggcattgattgctgattatcgtaatacccgtgaagtcgtggcgaatgccataaccgcactcgaaacgctgattaaccgtagccatgatgaacaatcatcccgcagccgttttgttgacgatctgaaggcgtattccgaacgcctgcaacaatataaccgcgaggctcaggagtttctgcataacattgccgaggtgatgggaaccagttttgaatcctttacgaccggggtggaaaacggcctgaatcgttcactacaggagatggatacgcaactgactaaagcggcaggagccttaagttcttcggttgagattatcggtgaaagcgtggatacgctggaaacggtactccgtcatcgtcgcgcgtaa

SEQ ID NO: 10778 - DNA, 738 bp, Escherichia sp. KTE11
atgtttaaccgggtatttaatggcaggcaacggcgcagcgatgaagcggaaaaacctttctggatctcctatgcagatctgatgactgccatgatggtgttgtttctggtggtgatggtggcgtcgcttagctctgttacgcagcgaattcagcaggcggaagccggggagagatcgcgcgggcatgatatcgctcgcctgtgtgaaaaacttgaacttcaggcaaaaaatctcaacaagacgattcaggttgactgccatgataaccgtatcagctttggtgaagcagggcgttttgagcacaatcgcttcgcgcttaacgccgaaggattacaggcgctacaggatgtggtgccgttagtgctggaggcggcaaatagcgatgaaggcaaaaaatggtttaagcaaattgttatagaaggttttacggataccgatggttcttatctctataacttgcatctttcgttgcaacgctcggagtgggtgatgtgcagtttgctggatagcagaagcgcgctacagcaaaaaataaccccggaacagcaagtccagatccgcaaattatttctggcgggtggggtttcgttcaacaatgcgaaagagagcaaagaggccagccgtcgcgtagaactgcggatgcaattctttggcctgaaagacaaaaagcacgatgaaagcatggatgttgttccaggcattagccaggaaacctgtcagctaggaatcatgcaatga

SEQ ID NO: 10779 - DNA, 1788 bp, Escherichia sp. KTE11
atgacttccgctattgaaaaactgaaaacccgcttacttccctacagagagcagaacgcgcagccgacggtaagccacgcttttaactatcttcagcgcgttatcgcgcaacttgagagaaaggtagatgctcgcgcggtgaagatggttccccctctggagaaacgccgacaggccattgcccgactgcgtgcgggggagatgccaaagcccttcgaatggaagatgattttttttggcctcaatgacgtagcagaaggcgatctgtttgaaattgcattgatggatgatgcaacaaactttgcgagaattatcgctgaaattgaacaaaaaattgcgcagcggcggttaacgcggcgggaatggctggcgttatgtaccagctactttggtcatgccagcgatacgccagaaaagaatccgcagtggctgcagctacgcacgcagattgcccacggttttcaacagcttaaggagagtgcgccgcgtcagatgtcctggatgtcggtcattggcacctatagcgatatttttaccgataatgcagggtttcttctcggacaacagctcgggcgcggagaaataacggatatttcggtgctggagaaagttgcgcaaattccgcaaaccagttggttatggcgcaaaattgttaaccacctgatcaatgagatttttcgccagaatgacgatgattttcagcagaaaattaattcgcttatcgcgttaagccgccagcttacgcggtttaaagataatattctggcagccactttgacccgttattatcagtcggcttttaaacatcaaacacatttcgaactcaagcaattggccctggaatattggggaaatccgcagttaaccagtcgtaataaaagctggcatgttcacgttgaaaatcccgtattactgatggtgcaagggtggttcgccaaagacgacctgaaactgttctttgagttgctgaaaggcaatcgggatgttgaccatgcgcgcctgttctactggctacgttttgccaatcagatgagctatacgcgcattgtgctgggcgaagaggcgctgcgatccaaagatgccgattatgttgagttcagggcgaaaaacgcagggcgattaagccgcctgcaaggctctggttcacgcgataacaatgccatgattatgcgcattggcgattatctgtttgtcgaattttcgaaagtgggggcgatgtatgcctaccatatggggaatgcgccctttaatccggaaaccggcattcttgatattgattatgatctgaaagataagcggaataaccggcgcaaagtccggttgcgtttaccgcatttgtcgccggtatttcgctactcactcaaccgaattgaaggttggatgagccgatatgacgaagaacttcgtaagttgggtattgattacgttgcggaagatgtaaatcagccctctgtcactttggatgcctcccgcttcaatgcgtcaaagaccgtgagtcggccagagcctgcatcgttgcctgaacatgaagtcagtgatgcaaagtcagaccgggaagagcaaaccaacatcatcgcctcagcgttaaaagccaaaaaagagctacctggccgggaacagcaaatccgggaggttattcgttcggtcgattgtaaagtgatggataaacgagggctggggggcgcaatccacattcagttcaatgagcctgaccatgaagcggcgcaaaaattactcagcctcgggtttaaaccggtgctgggtaaatttacttactggagcaaatag

SEQ ID NO: 10780 - DNA, 3240 bp, Escherichia sp. KTE11
gtgttcaaaaaattgttgggtaaatttattaaagagaatacctcactacccgcttcatttgtgccgctgtatgtaatgaaagaggagggcttttctttcccctttagtcttgctgatagtgaagataactggcctgtcgcctcatgtctggaacagcttcatgaggaagattatgtttcacactggtctgattgctggtttcttagctgggatgatttttatcgcatccggaaaaatgatgactatgccagcagcctggcgattttcgcttttcctccacagcgcaatctgacggctcatcttgctgcaacgggaagtattagcgatgatacttttcgcgttttcattgataaatggacgcagcccgacgactatcgccccgtcggaataacttgcacgggagccagcttttcctctgcggaaggcacctttgtgttaagcgaagagaactggcagcttctggacgcactacagcaactcagattgcagcagcgacagacgccgggcgaaacggtcaaccaaaccagttgggctaaaatacggcggcaggccaaaaaagcaggggcaaaactggatgactatctcgcaaaaacgatcgttatcaggccagaatcgttacagttaaaactgcgaaaatcgctggtggtagatactccggtactggaaattgaaccggtttttgatgagcagcctgcaaactggttacagatttttgaccgtacgcaacaggtgcaggatcgttaccgtgttttaggggatgatggtgtcttaaatcatgtcattctttctcctgaagtcaaagacgtcctgacctccgtgcacgctattaccgggcgtcgtgtggcgggggatgatgcgctctcatttgttcgcaatccctacacctggattggtgaagaggcgagccaggtgctcgatcctgacgtttacgagcagaatttacaggacgccgggatctacttttatgattttcgtctggagccgcagatcgatgaaaacaggcaaattgcatctgtaacgctttttctcagccccagaactgaacaatccgtgccggatgaaacctatatctttaaacgcccaggtgaactggcggcgttgctctctgaactggaacaaaagttagcggcacaactgcccgccggagtctggcagggttacgatctggagctttccagattcagccaggaagaactgcaaggttatcaggcgttgcttgaaaactggcagcaacaggcggcgggaatgaattttacccacgttctcgatctcaacaaatacagtgaccgggttatcgggatcggtgaatttgaaaaaatcagttcgccttatctggtcaaaagtgaaagtgaaaaatggcttccggagaaccttgcgcaagagatgtgcgaggtcatgttctctggctgggatctcgataatcatcaacattttcaggaactggaagagcggctggaagaggcaaaagccacggatgcgccggaagttgccatgccctggaacgacaaccttttgcctcgcgaagaagcagaaattttccacgataaatggaaaaagaaaatcgatggcgaaacaaatgatggcgtaagcagtgaaccggttagtcgtgccgttctgctgatagaacaaaatattgagcaggcgctgtatgttaaacaacggcgggattccttgctcggcgcacatcaggcagaagtcgaactgccgatgatcctcaaaacgtccattcagctacgtgaacatcagcgtaaaggggtggcgtggctccaacagttgtatctaaagtcgccaaccgagacggcgggatgtttactggcggacgatatggggttgggtaaaaccttacagattttaacctttctcatctggcatcgagaacgtttcccggatgcgcccccctcgctgattgttgctccggtatcgttactcgataactgggaacgtgaggtcgggaatttcttcctgcgcgagcaggtgtcgattttaaaactttatggtaatgagcttaaggcgaagaagtgcgcgaaagagagcattcctcaggcacttaaaagcaagggcattaagaacttactgcaaaatgactgggtgggtgacgcgcatattgttcttactacctacgagacgttgcgcgatcaggaattttccctggctcgtcagccctggtccataatggtgtgcgacgaagcgcagaaaatcaaaaatccggcggcattaataacccaatcggcaaaagccattcaggcgcaatttaaagtcgcatgtaccggaacaccagtcgaaaacacccttgtcgatctgtggtgtttatttgacttcgttcagccggggttgttgggggctttaaataattttggtaaagattatctgcgccccattgagcaacagaatgataatgctgtcctcgaatcgctacgcaaattaatagaaccgcagacactgcgccgcaccaaagaagaagtagcgaaagatctgccggataagattgaagatcagtactgtaaacagttgaatatgctgccattgcaacgggatctctatacccactcggttgtaagctggcaaaaccaacaggagatcagcgaagggctggatcaacgaggctcaggtatgctggggttgctgcatcggttgaaacttatttgcgcatggccttattccgtaagtgcagatttgcgcttacgtaacgatgctccgaaagtaaaatggctgctggagacgttaaacaccattcgccagtcatctgatgacaaagtgattatttttacggaactgcgcgatattcaacgagagctgcaacatctgattgcgcagaattttggctttaagccttttattattaatggtgataccagcaccaaatctggcagtgaccaaaatcgtcagagcctgatcgatgcatttcaatcaacgccaggttttaacgttattattttatccaccatcgccgttgggtttggcgtcaatgtccaaaaagcgaatcatgtcatccactttacccgctgttggaatccggcgaaggaagatcaggcgactgacagagcctaccgcattgggcagcagaaagatgtttacgtctattatccgacagtgcgtgatagccagttaatgacttttgaagaaacgctggatgaattactgaaccgacgcagagcgttggccagagatatgctcaaaggggcaagcgatctgaccgccgcagattttgaagcggtgctggcgggcgctcccccggcatag

SEQ ID NO: 10781 - DNA, 2556 bp, Escherichia sp. KTE31; identical to SEQ ID NO: 8585

SEQ ID NO: 10782 - DNA, 735 bp, Escherichia sp. KTE31; identical to SEQ ID NO: 8586

SEQ ID NO: 10783 - DNA, 1788 bp, Escherichia sp. KTE31; identical to SEQ ID NO: 8587

SEQ ID NO: 10784 - DNA, 3240 bp, Escherichia sp. KTE31; identical to SEQ ID NO: 8588

SEQ ID NO: 10785 - DNA, 1974 bp, Sphingobium sp. AM; identical to SEQ ID NO: 10663

SEQ ID NO: 10786 - DNA, 711 bp, Sphingobium sp. AM; identical to SEQ ID NO: 10664

SEQ ID NO: 10787 - DNA, 1653 bp, Sphingobium sp. AM
atggcgaggctgcagcagcggctgaccgatgtcggcgctgcggctttcagggacatgccagaaccggacctccgtgctttgaaggggcatgttcagtcgcttcaggcgatgctcagcggagcaggggcgggcgctggcgcgtcgaacgaccgtatccagacggagctcgtcagatttcgcgagacggggaagctccatgatgttcggtctgcacgcctggtgagctggggcacccgcctccggtcggtgggtcaacccgccctgatcgaggacggtgagcggttcgatccgctcctgagcgagatagactcattccgatcgatgccccgtccatacaggcgatgctggcgcgggcttctggacggctatgtgaactacgaccccggcagtgcgcgtggggcaggcgatcggaactggcgtgtcctgcgggaatatctgaacgacaaccttccgcagctggagcgctccgggcaggcgcctgactggctcgcagcgatagacgaccatgcgaaccttctgacggaagacccgtgcacccgctacggcgccgagatcctgactggtgagggggatcctctcgagatccttcgccgcgatctttcagccggcgacacgtcttggatcggacagcggatattcgaggcgcagatcgaggctgcggtgaggttcgacgaccgtagattccgtgatgttctcccacgcgtcatcggactgatcgaggagcacgacgtgctcgccgacgagggcctgtcccgcgtgctcgaccgctacgcggaatgcgcgtcgatcgaggtcgatccggcgctgtgtgagacctccgtcacccggtggggcaatccgtggctagagcggaacgacacgctctggacgctggtccgtccggacacgcgaaggatggtgtcgtcctggcacaagctccgtctgatcgaggacttcttcaacctgctttctgccgacggaataaacgaccagcgtcgcatcaagttctggaagcgccatgtcgatcagatcagcgacatgcacttcgcgctcggcgacgccgcgtatcgggatccgcgaccgagcttcaaggcccttcgccagatgatgaagggacgtatgatgagtctgacgagcggaggcgtctcgagcaacaacgccttcattatgcgcatcgcgggccacgtctatgtggagttcggggaggagggcaacgccatgttcgcgttcgacgccgcgaagctaccgttcgaccttacgaaaatgcaggttgccggcaacaagacggctttgaaacacccgagccatgtcgcccgcatcgtccacaataacggtgcgggagagcgatgggagcgtagggccgaccgtctcatcgcttccctctcaaccgcaagagggggcccccaggtcagtcatacgacgccgtcttacggcgcacgtccgtccgcatcaccgccgcctagtgcaaggtcatcatcgaccggttcaagcgttggcaaagatgctgagctcttcgcgtttctcgccaagcatgggatcaagaccgcggattcgcgtgataagggaggttcgctctgggcttacgcaccgcgttccggtccagcggcgaacgaactcacccgtaggaacttcgcctgggcggagcgccgcggcgcctggtatcttcgctcatga

SEQ ID NO: 10788 - DNA, 3222 bp, Sphingobium sp. AM; identical to SEQ ID NO: 10666

SEQ ID NO: 10789 - DNA, 2556 bp, Escherichia sp. KTE52
atgttttcgctgacttcgttcctcgacacgttaacctctgttaatccagaaaatgtgccgatttatgtcgctattgtggttggggttttgttgttgggtttcattgtccgttacgctattccttcatttagggtttcagcacgctttaaacaaaaagcgaaagcaattcggctacttggcaatgaaaaaccggcacaacaactcgaaaaattagacgcgttattctctgataaattttttgcgcacccctggagcgaatttaaagagtctctacatcgccagtttgagtttgatgaaaacagcgggcaaaaaaaaattagcaccatccgctcaacggctccgtcgtcagcatggtttacggaaccgttattagtcgaaattcctctctatacagaagcgtttaaacatctcccaggcatcctgaccggaattgggattatcggcaccttttcggggctgatgattggtttgcaccattttgaccccagcacgccagagcaggtcagcgccagtgtcgctaaccttttacgcgacgttctgtatgcgtttttaggttcggcatttgctattacgttctctattctggtcaccatgtttgaaaaatggcgactggcgcaatgttataaaaatcttgaactccttaccgccagcattgaccagctttttgaaggcggcgtcggtgaagattacctttcgcaacttctttccagtactaaagaaaacaccacccatgcgaggcaacttaaggatggtctggtcactgacctgcgtgaaatgctgcaaaacctggtagatagccagatgcgggaaaatcaaaagctggcagagacattatcaacgacatatcgcgagtcaggccaacagtttgctgaacaggtcagtggcgctattgaaaccagtctgaaaaatccgctggataaaattgctggtgtggtgcaaaccgcttccggcgatcagagccatcgtgtgcagtcgatgctggagaacgtcctgactgcctttatgagcaaaatggataacacctttggtcagcagttcaccaccatgcaggagatgatggggcgttctgtggaagccattcagtcgatgcaaagcggtttttctacgttgttgcaggatatgcgtcaggccggggatgactcacgtcagggcagcgcgcaactgatctctcaactgttaagcgaaatgaaaagcggtcagcaggagatgcaggcagggatgaatgagatgctgcgtagtttgcaggagtccgttgcccgtattggcgcagaaggtgagggtgcgggcgaacggatggcacaacaactggaaaaaatctttgccgacagtgaagcgcgtgaaaaagcgatggcggaacagatgcgcgcttttattgaggctatccagtccagtgttcagcaagggcaaaatgaaaccatggaaaaaatggcggcttctgtggatacgcttggcagtcatatggcaacgcttttcgcacaactggaaaatggccagcagcaacttaatcagcagcaaaatcaggcgcaaaatctgctgataggcaatatgagcaaaggggtggaagcgctgacgcaaaacctggcgggcgtattcagccaactggagtccgggcaaaaacagatgagccagactcaggaacaagggcaacgcgtgctgcatgaagagactcagcagctcctggcacgtagcgaagcgcgtgagcaggcggcggccgagcaacaacaacagtttatgacgtcgttacagcaaaccatgcattccagccaggatgccctgcgagagaaaatgaccagcggtattgatcaattgggtagccaacttggcagcctgtttggacaactggaagacggtcagaagtcgctcagtcagcaacagcaatcagcgcagagtgcgttgcaacaggaagcgcagcgaatcattggtcagcttgaaagtcaggttgagtcgctgatgcagatgctacgtgaacagcaatcagcctctggcgagttgctgcaacggatggcgcaaaacaccacgcgccatctggaagagatacaaacaggagccgacaaaatgcgcgtggccgccgaccgctttgaagccgcgggcgatcgcgttgccgaggctaatcaattgaccgccgaggtgctgaatagcacgcaacaggcagggcgcacgctttccggtgccagcgcggagttgggggcattgattgctgattatcgtaatacccgtgaagtcgtggcgaatgccataaccgcactcgaaacgctgattaaccgtagccatgatgaacaatcatcccgcagccgttttgttgacgatctgaaggcgtattccgaacgcctgcaacaatataaccgcgaggctcaggagttcctgcataacattgccgaggtgatgggaaccagttttgaatcctttacgaccggggtggaaaacggcctgaatcgttcactacaggagatggatacgcaactgactaaagcggcaggagccttaagttcttcggttgagattatcggtgaaagcgtggatacgctggaaacggtactccgtcatcgtcgcgcgtaa

SEQ ID NO: 10790 - DNA, 738 bp, Escherichia sp. KTE52
atgtttaaccgggtatttaatggcaggcaacggcgcagcgatgaagcggaaaaacctttctggatctcctatgcagatctgatgactgccatgatggtgttgtttctggtggtgatggtggcgtcgcttagctctgttacgcagcgaattcagcaggcggaagccggggagaaatcgcgcgggcatgatatcgctcgcctgtgtgaaaaacttgaacttcaggcaaaaaatctcaacaagacgattcaggttgactgccatgataaccgtatcagctttggtgaagcagggcgttttgagcacaatcgcttcgcgcttaacgccgaaggattacaggcgctacaggatgtggtgccgttagtgctggaggcggcaaatagcgatgaaggcaaaaaatggtttaagcaaattgttatagaaggttttacggataccgatggttcttatctctataacttgcatctttcgttgcaacgctcggagtgggtgatgtgcagtttgctggatagcagaagcgcgctacagcaaaaaataaccccggaacagcaagtccagatccgcaaattatttctggcgggtggggtttcgttcaacaatgcgaaagagagcaaagaggccagccgtcgcgtagaactgcggatgcaattctttggcctgaaagacaaaaagcacgatgaaagcatggatgttgttccaggcattagccaggaaacctgtcagctaggaatcatgcaatga

SEQ ID NO: 10791 - DNA, 1788 bp, Escherichia sp. KTE52
atgacttccgctattgaaaaactgaaaacccgcttacttccctacagagagcagaacgcgcagccgacggtaagtcacgcttttaactatcttcagcgcgttatcgcgcaacttgagagaaaggtagatgctcgcgcggtgaagatggttccccctctggagaaacgccgacaggccattgcccgactgcgtgcgggggagatgccaaagcccttcgaatggaagatgattttttttggcctcaatgatgtagcagaaggcgatctgtttgaaattgcattgatggatgatgcaacaaactttgcgagaattatcgctgaaattgaacaaaaaattgcgcagcggcggttaacgcggcgggaatggctggcgttatgtaccagctattttggtcatgccagcgatacgccagaaaagaatccgcagtggctgcagctacgcacgcagattgcccacggttttcaaaaacttaaggagagcgcgccgcgtcagatgtcctggatgtcggtcattgacacctatagcgatatttttaccgataatgcagggtttcttctcggacaacagctcgggcgcggagaaataacggatatttcggtgctggagaaagttgcgcaaattccgcaaaccagttggttatggcgcaaaattgttaaccacctggtcaatgagatttttcgccagaatgacgatgattttcagcagaaaattaattcgcttatcgcgttaagccgccagcttacgcggtttaaagataatattctggcagccactttgacccgttattatcagtcggcttttaaacatcaaacacatttcgaactcaagcaattggccctggaatattggggaaatccgcagttaaccagtcgtaataaaagctggcaggttcacgttgaaaatcccgtattactgatggtgcaagggtggttcgccaaagacgacctgaaactgttctttgagttgctgaaaggcaatcgggatgttgaccatgcgcgcctgttctactggctacgttttgccaatcagatgagctatacgcgcattgtgctgggcgaagaggcgctgcgatccaaagatgccgattatgttgagttcagggcgaaaaacgcagggcgattaagccgcctgcaaggctctggttcacgcgataacaatgccatgattatgcgcattggcgattatctgtttgtcgaattttcgaaagtgggggcgatgtatgcctaccatatggggaatgcgccctttaatccggaaaccggcattcttgatattgattatgatctgaaagataagcggaataaccggcgcaaagtccggttgcgtttaccgcatttgtcgccggtatttcgctactcactcaaccgaattgaaggttggatgagccgatatgacgaagaacttcgtaagttgggtattgattacgttgcggaagatgtaaatcagccctctgtcactttggatgcctcccgcttcaatgcgtcaaagaccgtgagtcggccagagcctgcatcgttgcctgaacatgaagtcagtgatgcaaagtcagaccgggaagagcaaaccaacatcatcgcctcagcgttaaaagccaaaaaagagctacctggccgggaacagcaaatccgggaggttattcgttcggtcgattgtaaagtgatggataaacgagggctggggggcgcaatccacattcagttcaatgagcctgaccatgaagcggcgcaaaaattactcagcctcgggtttaaaccggtgctgggtaaatttacttactggagcaaatag

SEQ ID NO: 10792 - DNA, 3240 bp, Escherichia sp. KTE52
gtgttcaaaaaattgttgggtaaatttattaaagagaatacctcactacccgcttcatttgtgccgctgtatgtaatgaaagaggagggctttgctttcccctttagtcttgctgatagtgaagataactggcctgtcgcctcatgtctggaacagcttcatgaggaagattatgtttcacactggtctgattgctggtttcttagctgggatgatttttatcgcatccggaaaaatgatgactatgccagcagcctggcgattttcgcttttcctccacagcgcaatctgacggctcatcttgctgcaacgggaagtattagcgatgatacttttcgcgttttcattgataaatggacgcagcccgacgactatcgccccgtcggaataacttgcacgggagccagtttttcctctgcggaaggcacctttgtgttaagcgaagagaactggcagcttctggacgcactacagcaactcagattgcagcagcgacagacgccgggcgaaacggtcaaccaaaccagttgggctaaaatacggcggcaggccaaaaaagcaggggcaaaactggatgactatctcgcaaaaacgatcgttatcaggccagaatcgttacagttaaaactgcgaaaatcgctggtggtagatactccggtactggaaattgaaccggtttttgatgagcagcctgcaaactggttacagatttttgaccgtacgcaacaggtgcaggatcgttaccgtgttttaggggatgatggtgtcttaaatcatgtcattctttctcctgaagtcaaagacgtcctgacctccgtgcacgctattaccgggcgtcgcgtggcgggggatgatgcgctctcatttgttcgcaatccctacacctggattggtgaagaggcgagccaggtgctcgatcctgacgtttacgagcagaatttacaggacgccgggatctacttttatgattttcgtctggagccgcagatcgatgaaaacaggcaaattgcatctgtaacgctttttctcagccccagaactgaacaatccgtgccggatgaaacctatatctttaaacgcccaggtgaactggcggcgttgctctctgaactggaacaaaagttagcggcacaactgcccgccggagtctggcagggttacgatctggagctttccagattcagccaggaagaactgcaaggttatcaggcgttgcttgaaaactggcagcaacaggcggcgggaatgaattttacccacgttctcgatctcaacaaatacagtgaccgggttatcgggatcggtgaatttgaaaaaatcagttcgccttatctggtcaaaagtgaaagtgaaaaatggcttccggagaaccttgcgcaagagatgtgcgaggtcatgttctctggctgggatctcgataatcatcaacattttcaggaactggaagagcggctggaagaggcaaaagccacggatgcgccggaagttgccatgccctggaacgacaaccttttgcctcgcgaagaagcagaaattttccacgataaatggaaaaagaaaatcgatggcgaaacaaatgatggcgtaagcagtgaaccggttagtcgtgccgttctgctgatagaacaaaatattgagcaggcgctgtatgttaaacaacggcgggattccttgctcggcgcacatcaggcagaagtcgaactgccgatgatcctcaaaacgtccattcagctacgtgaacatcagcgtaaaggggtggcgtggctccaacagttgtatctaaagtcgccaaccgagacggcgggatgtttactggcggacgatatggggttgggtaaaaccttacagattttaacctttctcatctggcatcgagaacgtttcccggatgcgcccccctcgctgattgttgctccggtatcgttactcgataactgggaacgtgaggtcgggaatttcttcctgcgcgagcaggtgtcgattttaaaactctatggtaatgagcttaaggcgaagaagtgcgcgaaagagagcattcctcaggcacttaaaagcaagggcattaagaacttactgcaaaatgactgggtgggtgacgcgcatattgttcttactacctacgagacgttgcgcgatcaggaattttccctggctcgtcagccctggtccataatggtgtgcgacgaagcgcagaaaatcaaaaatccggcggcattaataacccaatcggcaaaagccattcaggcgcaatttaaagtcgcatgtaccggaacaccagtcgaaaacacccttgtcgatctgtggtgtttatttgacttcgttcagccggggttgttgggggctttaaataattttggtaaagattatctgcgccccattgagcaacagaatgataatgctgtcctcgaatcgctacgcaaattaatagaaccgcagacactgcgccgcaccaaagaagaagtagcgaaagatctgccggataagattgaagatcagtactgtaaacagttgaatatgctgccattgcaacgggatctctatacccactcggttgtaagctggcaaaaccaacaggagatcagcgaagggctggatcaacgaggctcaggtatgctggggttgctgcatcggttgaaacttatttgcgcatggccttattccgtaagtgcagatttgcgcttacgtaacgatgctccgaaagtaaaatggctgctggagacgttaaacaccattcgccagtcatctgatgacaaagtgattatttttacggaactgcgcgatattcaacgagagctgcaacatctgattgcgcagcattttggctttaagccttttattattaatggtgataccagcaccaaatctggcagtgaccaaaatcgtcagagcctgatcgatgcatttcaatcaacgctaggttttaacgttattattttatccaccatcgccgttgggtttggcgtcaatgtccaaaaagcgaatcatgtcatccactttacccgctgttggaatccggcgaaggaagatcaggcgactgacagagcctaccgcattgggcagcagaaagatgtttacgtctattatccgacagtgcgtgatagccagttaatgacttttgaagaaacgctggatgaattactgaaccgacgcagagcgttggccagagatatgctcaaaggggcaagcgatctgaccgccgcagattttgaagcggtgctggcgggcgctcccccgacatag

SEQ ID NO: 10793 - DNA, 2190 bp, Klebsiella sp. KTE92; identical to SEQ ID NO: 10533

SEQ ID NO: 10794 - DNA, 744 bp, Klebsiella sp. KTE92
atgatgtttgcgaatgcatttggcgttaaaaagcgccatagtgatgaagctgaaaaacccttctggatttcttacgccgatctaatgaccgctatgatggtgttatttttggtcgtcatggtagcgtcattgagttcagtgacccaacgtattcagcgtgcagaacaaggtgaaaaaacgaggggacaggatatctccagattatgtgaacgcctggaattgcatgctcgcagcgtgaataaaacgattgtggttgattgccacgataaccgcatcagcttcggtgaagcaggccggttcgaccacaaccgatttttcctgaatgccgaagggcaaaaagcattacaggatgtagtgccgcttgtacttgaagcctccgacagcgaagaaggtaaaaagtggtttaagcaaatcgtcattgaaggttttactgacaccgatggctcgtatctttacaacctgcatctatccttacagcgttctgaatgggtaatgtgtagcttgctcgatagccgcagccctctgcaaaagagcatctccgcagaacaacaaatccagattcgtaagcttttccttgcgggtggcgtctcctttaacaacgctaaagagagcaaagaagccagccgtcgcgtcgagctacgcatgcagttctttgggctcaaagataaacgcgatggcactgaagaggtggattttccgcctgttgtgaataaagaagtttgccagttggtaatgccacaatga

SEQ ID NO: 10795 - DNA, 1683 bp, Klebsiella sp. KTE92; identical to SEQ ID NO: 10535

SEQ ID NO: 10796 - DNA, 3243 bp, Klebsiella sp. KTE92; identical to SEQ ID NO: 10536

SEQ ID NO: 10797 - DNA, 2556 bp, Escherichia sp. KTE96
atgttttcgctgacttcgttcctcgacacgttaacctctgttaatccagaaaatgtgccgatttatgtcgctattgtggttggggttttgttgttgggtttcattgtccgttacgctattccttcatttagggtttcagcacgctttaaacaaaaagcgaaagcaattcggctacttggcaatgaaaaaccggcacaacaactcgaaaaattagacgcgttattctctgataaattttttgcgcacccctggagcgaatttaaagagtctctacatcgccagtttgagtttgatgaaaacagcgggcaaaaaaaaattagcgccatccgctcaacggctccgtcgtcagcatggtttacggaaccgttattagtcgaaattcctctctatacagaagcgtttaaacatctccctggcatcctgaccggaattgggattatcggcaccttttcggggctgatgattggtttgcaccattttgaccccagcacgccagagcaggtcagcgccagtgtcgctaaccttttacgcgacgttctgtatgcgtttttaggttcggcatttgctattacgttctctattctggtcaccatgtttgaaaaatggcgactggcgcaatgttataaaaatcttgaactccttaccgccagcattgaccagctttttgaaggcggcgtcggtgaagattacctttcgcaacttctttccagtactaaagaaaacaccacccatgcgaggcaacttaaggatggtctggtcactgacctgcgtgaaatgctgcaaaacctggtagatagccagatgcgggaaaatcaaaagctggcagagacattatcaacgacatatcgcgagtcaggccaacagtttgctgaacaggtcagtggcgctattgaaaccagtctgaaaaatccgctggataaaattgctggtgtggtgcaaaccgcttccggcgatcagagccatcgtgtgcagtcgatgctggagaacgtcctgactgcctttatgagcaaaatggataacacctttggtcagcagttcaccaccatgcaggagatgatggggcgttctgtggaagccattcagtcgatgcaaagcggtttttctacgttgttgcaggatatgcgtcaggccggggatgactcacgtcagggcagcgcgcaactgatctctcaactgttaagcgaaatgaaaagcggtcagcaggagatgcaggcagggatgaatgagatgctgcgtagtttgcaggagtccgttgcccgtattggcgcagaaggtgagggtgcgggcgaacggatggcacaacaactggaaaaaatctttgccgacagtgaagcgcgtgaaaaagcgatggcggaacagatgcgcgcttttattgaggctatccagtccagtgttcagcaagggcaaaatgaaaccatggaaaaaatggcggcttctgtggatacgcttggcagtcatatggcaacgcttttcgcacaactggaaaatggccagcagcaacttaatcagcagcaaaatcaggcgcaaaatctgctgataggcaatatgagcaaaggggtggaagcgctgacgcaaaacctggcgggcgtattcagccaactagagtccgggcaaaaacagatgagccagactcaggaacaagggcaacgcgtgctgcatgaagagactcagcagctcctggcacgtagcgaagcgcgtgagcaggcggcggccgagcaacaacaacagtttatgacgtcgttacagcaaaccatgcattccagccaggatgccctgcgagagaaaatgaccagcggtattgatcaattgggtagccaacttggcagcctgtttggacaactggaagaaggtcagaagtcgctcagtcagcaacagcaatcagcgcagagtgcgttgcaacaggaagcgcagcgaatcattggtcagcttgaaagtcaggttgagtcgctgatgcagatgctacgtgaacagcaatcagcctctggcgagttgctgcaacggatggcgcaaaacaccacgcgccatctggaagagatacaaacaggagccgacaaaatgcgcgtggccgccgaccgctttgaagctgcgggcgatcgcgttgccgaggctaatcaattgaccgccgaggtgctgaatagcacgcaacaggcagggcgcacgctttccggtgccagcgcggagttgggggcattgattgctgattatcgtaatacccgtgaagtcgtggcgaatgccataaccgcactcgaaacgctgattaaccgtagccatgatgaacaatcatcccgcagccgttttgttgacgatctgaaggcgtattccgaacgcctgcaacaatataaccgcgaggctcaggagtttctgcataacattgccgaggtgatgggaaccagttttgaatcctttacgaccggggtggaaaacggcctgaatcgttcactacaggagatggatacgcaactgactaaagcggcaggagccttaagttcttcggttgagattatcggtgaaagcgtggatacgctggaaacggtactccgtcatcgtcgcgcgtaa

SEQ ID NO: 10798 - DNA, 738 bp, Escherichia sp. KTE96; identical to SEQ ID NO: 10778

SEQ ID NO: 10799 - DNA, 1788 bp, Escherichia sp. KTE96; identical to SEQ ID NO: 10779

SEQ ID NO: 10800 - DNA, 3240 bp, Escherichia sp. KTE96; identical to SEQ ID NO: 10780

SEQ ID NO: 10801 - DNA, 2556 bp, Escherichia sp. KTE159
atgttttcgctgacttcgttcctcgacacgttaacctctgttaatccagaaaatgtgccgatttatgtcgctattgtggttggggttttgttgttgggtttcattgtccgttacgctattccttcatttagggtttcagcacgctttaaacaaaaagcgaaagcaattcggctacttggcaatgaaaaaccggcacaacaactcgaaaaattagacgcgttattctctgataaattttttgcgcacccctggagcgaatttaaagagtctctacatcgccagtttgagtttgatgaaaacagcgggcaaaaaaaaattagcgccatccgctcaacggctccgtcgtcagcatggtttacggaaccattattagtcgaaattcctctctatacagaagcgtttaaacatctccctggcatcctgaccggaattgggattatcggcaccttttcggggctgatgattggtttgcaccattttgaccccagcacgccagagcaggtcagcgccagtgtcgctaaccttttacgcgacgttctgtatgcgtttttaggttcggcatttgctattacgttctctattctggtcaccatgtttgaaaaatggcgactggcgcaatgttataaaaatcttgaactccttaccgccagcattgaccagctttttgaaggcggcgtcggtgaagattacctttcgcaacttctttccagtactaaagaaaacaccacccatgcgaggcaacttaaggatggtctggtcactgacctgcgtgaaatgctgcaaaacctggtagatagccagatgcgggaaaatcaaaagctggcagagacattatcaacgacatatcgcgagtcaggccaacagtttgctgaacaggtcagtggcgctattgaaaccagtctgaaaaatccgctggataaaattgctggtgtggtgcaaaccgcttccggcgatcagagccatcgtgtgcagtcgatgctggagaacgtcctgacagcctttatgagcaaaatggataacacctttggtcagcagttcaccaccatgcaggagatgatggggcgttctgtggaagccattcagtcgatgcaaagcggtttttctacgttgttgcaggatatgcgtcaggccggggatgactcacgtcagggcagcgcgcaactgatctctcaactgttaagcgaaatgaaaagcggtcagcaggagatgcaggcagggatgaatgagatgctgcgtagtttgcaggagtccgttgcccgtattggcgcagaaggtgagggggcgggcgaacggatggcacaacaactggaaaaaatctttgccgacagtgaagcgcgtgaaaaagcgatggcggaacagatgcgcgcttttattgaggctatccagtccagtgttcagcaagggcaaaatgaaaccatggaaaaaatggcggcttctgtggatacgcttggcagtcatatggcaacgcttttcgcacaactggaaaatggccagcagcaacttaatcagcagcaaaatcaggcgcaaaatctgctgataggcaatatgagcaaaggggtggaagcgctgacgcaaaacctggcgggtgtattcagccaactggagtccgggcaaaaacagatgagccagactcaggaacaagggcaacgcgtgctgcatgaagagactcagcagctcctggcacgtagcgaagcgcgtgagcaggcggcggccgagcaacaacaacagtttatgacgtcgttacagcaaaccatgcattccagccaggatgccctgcgagagaaaatgaccagcggtattgatcaattgggtagccaacttggcagcctgtttggacaactggaagacggtcagaagtcgctcagtcagcaacagcaatcagcgcagagtgcgttgcaacaggaagcgcagcgaatcattggtcagcttgaaagtcaggttgagtcgctgatgcagatgctacgtgaacagcaatcagcctctggcgagttgctgcaacggatggcgcaaaacaccacgcgccatctggaagagatacaaacaggagccgacaaaatgcgcgtggccgccgaccgctttgaagccgcgggcgatcgcgttgccgaggctaatcaattgaccgccgaggtgctgaatagcacgcaacaggcagggcgcacgctttccggtgccagcgcggagttgggggcattgattgctgattatcgtaatacccgtgaagtcgtggcgaatgccataaccgcactcgaaacgctgattaaccgtagccatgatgaacaatcatcccgcagccgttttgttgacgatctgaaggcgtattccgaacgcctgcaacaatataaccgcgaggctcaggagttcctgcataacattgccgaggtgatgggaaccagttttgaatcctttacgaccggggtggaaaacggcctgaatcgttcactacaggagatggatacgcaactgactaaagcggcaggagccttaagttcttcggttgagattatcggtgaaagcgtggatacgctggaaacggtactccgtcatcgtcgcgcgtaa

SEQ ID NO: 10802 - DNA, 738 bp, Escherichia sp. KTE159; identical to SEQ ID NO: 10790

SEQ ID NO: 10803 - DNA, 1788 bp, Escherichia sp. KTE159; identical to SEQ ID NO: 10791

SEQ ID NO: 10804 - DNA, 3240 bp, Escherichia sp. KTE159
gtgttcaaaaaattgttgggtaaatttattaaagagaatacctcactacccgcttcatttgtgccgctgtatgtaatgaaagaggagggctttgctttcccctttagtcttgctgatagtgaagataactggcctgtcgcctcatgtctggaacagcttcatgaggaagattatgtttcacactggtctgattgctggtttcttagctgggatgatttttatcgcatccggaaaaatgatgactatgccagcagcctggcgattttcgcttttcctccacagcgcaatctgacggctcatcttgctgcaacgggaagtattagcgatgatacttttcgcgttttcattgataaatggacgcagcccgacgactatcgccccgtcggaataacttgcacgggagccagcttttcctctgcggaaggcacctttgtgttaagcgaagagaactggcagcttctggacgcactacagcaactcagagtgcagcagcgacagacgccgggcgaaacggtcaaccaaaccagttgggctaaaatacggcggcaggccaaaaaagcaggggcaaaactggatgactatctcgcaaaaacgatcgttatcaggccagaatcgttacagttaaaactgcgaaaatcgctggtggtagatactccggtactggaaattgaaccggtttttgatgagcagcctgcaaactggttacagatttttgaccgtacgcaacaggtgcaggatcgttaccgtgttttaggggatgatggtgtcttaaatcatgtcattctttctcctgaagtcaaagacgtcctgacctccgtgcacgctattaccgggcgtcgagtggcgggggatgatgcgctctcatttgttcgcaatccctacacctggattggtgaagaggcgagccaggtgctcgatcctgacgtttacgagcagaatttacaggacgccgggatctacttttatgattttcgtctggagccgcagatcgatgaaaacaggcaaattgcatctgtaacgctttttctcagccccagaactgaacaatccgtgccggatgaaacctatatctttaaacgcccaggtgaactggcggcgttgctctctgaactggaacaaaagttagcggcacaactgcccgccggagtctggcagggttacgatctggagctttccagattcagccaggaagaactgcaaggttatcaggcgttgcttgaaaactggcagcaacaggcggcgggaatgaattttacccacgttctcgatctcaacaaatacagtgaccgggttatcgggatcggtgaatttgaaaaaatcagttcgccttatctggtcaaaagtgaaagtgaaaaatggcttccggagaaccttgcgcaagagatgtgcgaggtcatgttctctggctgggatctcgataatcatcaacattttcaggaactggaagagcggctggaagaggcaaaagccacggatgcgccggaagttgccatgccctggaacgacaaccttttgcctcgcgaagaagcagaaattttccacgataaatggaaaaagaaaatcgatggcgaaacaaatgatggcgtaagcagtgaaccggttagtcgtgccgttctgctgatagaacaaaatattgagcaggcgctgtatgttaaacaacggcgggattccttgctcggcgcacatcaggcagaagtcgaactgccgatgatcctcaaaacgtccattcagctacgtgaacatcagcgtaaaggggtggcgtggctccaacagttgtatctaaagtcgccaaccgagacggcgggatgtttactggcggacgatatggggttgggtaaaaccttacagattttaacctttctcatctggcatcgagaacgtttcccggatgcgcccccctcgctgattgttgctccggtatcgttactcgataactgggaacgtgaggtcgggaatttcttcctgcgcgagcaggtgtcgattttaaaactctatggtaatgagcttaaggcgaagaagtgcgcgaaagagagcattcctcaggcacttaaaagcaagggcattaagaacttactgcaaaatgactgggtgggtgacgcgcatattgttcttactacctacgagacgttgcgcgatcaggaattttccctggctcgtcagccctggtccataatggtgtgcgacgaagcgcagaaaatcaaaaatccggcggcattaataacccaatcggcaaaagccattcaggcgcaatttaaagtcgcatgtaccggaacaccagtcgaaaacacccttgtcgatctgtggtgtttatttgacttcgttcagccggggttgttgggggctttaaataattttggtaaagattatctgcgccccattgagcaacagaatgataatgctgtcctcgaatcgctacgcaaattaatagaaccgcagacactgcgccgcaccaaagaagaagtagcgaaagatctgccggataagattgaagatcagtactgtaaacagttgaatatgctgccattgcaacgggatctctatacccactcggttgtaagctggcaaaaccaacaggagatcagcgaagggctggatcaacgaggctcaggtatgctggggttgctgcatcggttgaaacttatttgcgcatggccttattccgtaagtgcagatttgcgcttacgtaacgatgctccgaaagtaaaatggctgctggagacgttaaacaccattcgccagtcatctgatgacaaagtgattatttttacggaactgcgcgatattcaacgagagctgcaacatctgattgcgcagcattttggctttaagccttttattattaatggtgataccagcaccaaatctggcagtgaccaaaatcgtcagagcctgatcgatgcatttcaatcaacgccaggttttaacgttattattttatccaccatcgccgttgggtttggcgtcaatgtccaaaaagcgaatcatgtcatccactttacccgctgttggaatccggcgaaggaagatcaggcgactgacagagcctaccgcattgggcagcagaaagatgtttacgtctattatccgacagtgcgtgatagccagttaatgacttttgaagaaacgctggatgaattactgaaccgacgcagagcgttggccagagatatgctcaaaggggcaagcgatctgaccgccgcagattttgaagcggtgctggcgggcgctcccccgacatag

SEQ ID NO: 10805 - DNA, 2403 bp, Pseudomonas sp. UW4
gtgttggttgaaaaggctgcttacttactgcttacgctgatcctctggaccgatatcatggaattcttgaatcacctgttgcccaacttttccttgctgaagagcggtagtaccgaggccctaggtgtcgtgttctggttgatcatggcggcacttttcacctattcggtcatctctttgattcgcagcgggctgagctttagggcgcgcatgcgtgcgctgaacacccttgtcgctggacagattcgtgaaaacctggccctgaatcgtcgagagaccttgcagaaagcgcttgggctcaaggtcaagcgagtcggtgtactgtggcacgagtttgacgacagcctggttagctctagtgatcacaaacagttgttcaacactctcgatgctgagcatttcttcaatgcgcgcactctggctccgggcctgagcggaagtcggtttttcggttcgctgcctggtttattggtcggtttgggcgtgctggccacgtttgtgggcctgaccatcggcctgtctaagctgaagttggacagcagcggaggagtagatcagttacgggcaggaatctccgtgatgatccagggcgcagctgttgctttcatggcatcggtatggggcgttgggtttagcctagtgctgaacttgatcgagaagattaccgagcgctgggcgttaggtcggatacatgatcttcagcaccagatcgacgcgctgtatccactgattcctgccgagcagtcgctggtacatatcgcggattacagtcgcgaaagcaaggaagcccttcaggaattgcacgaacgtatcggtgatcgcctgcaggaaagccttgtaggtatgagtgaggcgatgcagacggcactcaccgatgcgttgaacaacataatggcacctgccattcagacgctcgtcagcactaccagtcagcaatccacccaagtgcttgaacagttggtaagcaacttcacacaaggactgacctcggctgggcgtgagcagggcaatctgatgcagcaggctgctgcggatgtgaacaccgccgtgggtagcatgacgcagcaactcaaccagctgttccagagtttgagcgaccagcagggtcgccaacaagaagtcgtccgtcagcaaagcggagagtttcaggaccagctgaagcaactatccaattcagctgatcagcgtcagcagcaattggagacgcgtttcaatgagctgatgagcgggttgacggggcaactggacatacaactcagctccgtcgaaagacgggatgaggagcgccaattgttgttcgaacgcactctggccgaggccagtgcgagccagtccgcgttgcttgagaagtccgccagcgccagccgtgagcagctgaaggccatgaccgaggccggcaatgagcaacacaggagtctggaggcagttttctcgcgattgatgatgacgatgaactcccaactggattcgcagatgggcgctgcagaaacacgtgagcaagagcgtgcccagcgtcacgagcatcaacaggccgcttcactggcccaacagcagcaattgattggtagcctagggcaaaccagccagcagcaaatcaacgctatagctgagaccgcttctgctcagcagcaggcattggaagtcacagtcggtaagttgctgggtaacttcagtgagcagatggcaggtcatgggcagcaagcggaacatcgcgaacaatcgcgtcagcaacgttttaccgagcagttggaaaacatggcgctgcaacaacaggcgcttcttgagggtatagccacggccgttcaggcgactcagcaccagagcaggcagatgaccgaacaacatttgcaactgatgggccgcctacagcaagccagtgaagctgccgctgccagcagtcggcatatggatagtagtgccaaccagctcggcctgctttcgaccaatgttcgccaagcggctgaattgctcggccagcgcttggagagcgtgacgcatcgtatcgagtctgcgggtgagcagaacgctcagctggctgggcacttacagagccaggccgctgcgttggcacaacttcaaggcgccctgctggaaagtgcacagcgcttcgaacaggctgccaccgaggcgcgaaacggatttggtgagatggggagccatcagcaggaattcctcacgggtgtgcgtggcgagttcacggctctaggggaggtgctgcgtagccaggtacaaggcatcgagcagcaagcagaacaatggttgcgcaattattccagcgaggtgcgtgatcaggtgcatgagcgcatggaccagtggaacaaagagaccatgagctttgccaaccagatgcatgccgtagtgaaggtgattaacgacgtggtcgatgagctggaggcccgctga

SEQ ID NO: 10806 - DNA, 744 bp, Pseudomonas sp. UW4
atgcgctggcgtaaatctaatgacgttccaatggaggatgaagatccgtactggaagtccttcgtagatatcatgtcggcccttctagtgctatttatcctcgcttcggttgttctgattcttcagttgatggagaaaagcgcggacttcgatcagcaggtcgagcaactgaaaaaggcagaaacggttcggcaacagattctcgatgaagcagtcgagaagctgcgacagcggggcatcaaggtagaggttagtgaaaaccatacggtgttgcgtattcccaacgaattacttggcttcgatactggcgcttacgagatccagccgcgttatcaacaaacggcactggagattggtgaggtcatcaatcaggtggttagccgggatgaccgcatcaactatctcgacaccatttttatcgaaggccatacggacaaccgtccgtttcctggcttcatggggaaaggtaactgggggctttcgacgtttcgcgcaatctcgctctggcaattctggagcactgagatacctgaggctgagcgcctgaaccggctgagtaaccaggatggcgaacctctgttttcagttagcggttatgcagagactcgacccgtgagcaagcagcaacgaggtgaagaggattatcggcttaaccgccgcattgacatccgtttcactatccgtcggccgcagagtgctgattatgaggcggtcaaaaccttgcttgggaattccggccagtga

SEQ ID NO: 10807 - DNA, 2163 bp, Pseudomonas sp. UW4
gtgaagttgccgccgatagacaaccgccccggtgaatggccgcctacagtcattgagggttgggtacggctagtggaaaaggccaatcggatgaaggccaaggtgggcgggagtagtgcgttcgaacgaatgctcgctcgatttcgcgacatggctggcagcgggcgtttcgacggacttaaagagttgctgacgcgtcgacttggcgcgagggcgctgacttggctctggttgcatgacgaagttgtaggtttccgactgttcaatgcgcgaatgctcgatgtgctgattgagcaccagaagcctcgacttagccgactgacgttaatccagttgatccagctgtacttccgccatttcgatcatttggacgagcgcgaaaaacaggcagaaagcagcttacgtggtcgattggaacttcatttgttggaccagctaaagcgaatgcctgcgccacgccaggcattcggtagtgattcactcgtaacccttagacgggaaggtgagtggctactgacgcttgatggcccactgattttggtgaagtcagtccgcagtaagggggaggagctgggccagacctttgaaacccttggtctaagtggcttcgatgtcgggcgttatggcgatatttgtcgcgcgcactactatctcgaagtactacgccagctgcaccctggagaatgggatgacgtgcttgatgagttgctcaaaccttcggtgagcaaggctccttatgagggcgacaaacgaataggtcatgccgccctggagataatgatcgaccgagcgggggacgatcccggtgacgcttggcagaacttcttcctcactctcgccggcgacccgcgaattgccagttcagcgcagaacttccgtgaatggtggaagccattaggcgaggagcgcattgccaaggtctgtggctggctgtccaaagaggacttgcggttgttcctgcaggcagtcgaacagtatggcttggaatcgggaaaggaagatctcaagcgaatgttcccggcgcgcaaattgtttttggaggggttgttcaggctcggattgatccggcacacgaggctgatgctcggtcgcagtgccaagcattccgtaaagcgtattctcgggggcgaggtaaaaaccagcttcgcgagcatggactcaatcatgaacgataaggctgtgatctatctggactgcggcgatttccatctggtcgaggggtcacacagcttcaagatctgggtgtatctcggccagcctgggcactggatcaagtcttacgaacgcaatcagttttcgcattacgatttgaccacgtcgttgccggggcagtacaaggctgcctacccgactcttccctacgaggcggtaacccacaatggctcctggcaacgcaaggtattcgacttcctggcggaaaacggtatttcagtggatatcgagaagctgctgagccgatctgagtacaaggcatatctgagcaagtacggcatgccggttgtgggttggaagaaagcgcgagttgagcccctggcgcaacaaggcacaacgcctgatttagccctagccaccaagccatcaacgattgcgtctgtggtggagcagcgtgtggtaatgccacgtgtaatgacggaagacgttcacgcttcgggggcgcctggtaccgtcgacaaggagctgaccgataatcagctgtccattttgacttatctggccgatcatccaggaagtttgatgggagaaatccgccgggctttaaagggagatgaggcgttcttttatgagattcaggacagcctccgcggaagcctttcaacgtacgtacagcaaaatggtgccttccaatggtcattgtccgacaagggcaatgcgttgctgcgtaaaaccgctttagcatcggtagcggcgaaagtagatcggtcacctgtagccattgacttagggcgacttggagtatttgagttacaggtgctctggtatttcaaagagaacccaggggacaaggttcgacacgcggcaaatgtgctggggatcgatgcacgtgaaattaatcgggtgctcaatgggcccttaaagagtgcgtgcgagcaaagcagcagcttctgctggtcggtaaaaaaagaagtttctttggcattggatcgccagccggcggggaagtga

SEQ ID NO: 10808 - DNA, 3036 bp, Pseudomonas sp. UW4
atgatcatggggctagctgacatcttcaaaagcttgctgggggaagggggggcaacgctaagtaaccagcagggcttctcccacgcggcggactcggatggtgtgaatttctatctggacaagacagcgtatacagcgttgttggagggaaagggaaattccttgcagaaggtccagatggtcgttctgcgcatgatgcaggagcagggcatagctgagcccctggccaatggatttcatgttgctgccgaggacgttgcaggcacggatgaagagcaggcggaaattcttcggttgccgcgacgcttcaacatgaccttcgccagtaagatcggtggtagaacggggaatagcggtttccgcattgatctggcggttctttccgagtccgttgaagtacctttcactcgcaaagggccactgctttttctcacttcaacagagtcctatcgactgaccccggccgagttgatgggtttgatggcttgggaacgccatcagaatttgcttcccgagcaacgaggggaggcagccaacctgcgtatgatggccgagctgcagactgcggctcgcagtggtatgcgtatcgacctcagccatttcgacaggctggatgtggtggtgcctgaaaatatcggtgtcattgcaactcgattgcccgatggcagcctaatgctcagccccagcttgggagatggctctacgccggaccaattagagaagcgctggtcgcaattggatataggggccgatggcggtgttttgcgaatcgacaatcgcgtggtgcttctcgagccgcagaaaatggcggcgatcaaggaggttctgagtaacaagcgtattcctgctgacaaagtggccgaattcatcgctactcccagtgctttcctggatgcggccctggtcaatctcgatcttggtttctcaattcgtgtcaccggaatcggcaagctccagcacatggagtttggtgacctggacaatcggaagaatgactggttcgcgcttgactcacggccggcgcccgcagagatcattccgaccctggtgcaatccgaagaggacttggtgcgcttcaacgaagtctacaaggctgccaaggagcagggcgcagacagcattattttcgccggagaagtcattgatatctccgaccatgttcgaatcgatgagcagctgaagacagtcgagaggtccctggtagacccggaaaccgacttaccttctgatgaggaaccatcggtgggtccgaaggagcgagtcagcgtactgctgcacgatgccgacgagataaacagtgctttgctgcgtaaggcaagtgaggccaaaccagcgcatgagcctaattggggagcctatgctcgccagccgttcccgcaccagcgggagggtgtcgaatggatgctggggctgctggagtcggcagttcaggatgatcatggtgatctataccggcttcagggggggctgctggccgacgacatgggccttggcaaaacttacatgtcattggtgacggtgggtgaataccttgcccgtcagaaagttgcggaacgtgcgcagaagccagttctggtcgtggctcccttaagcctcctggagaattgggaggatgaggtcaatcaaactttcaagggcatccctttccgggacatcgtggtactacagtcgggaagggatctgagtcgcttcaaggtcaagggggctgagcgggaatcggcacagctggcttctctgattgatgaggatggagtgatggctgacgatgccattcgttacgctctttccatcggcccggaggctggggtacatcgtctggacatggatcgccgccttgtactgaccacttatcagacactcagggattaccagttttcactgtgcaggattgactggggcttggtgatcttcgacgaagcgcagaacatcaagaatcccaatgctgcgcagacgcgagcggcaaaaggactgaaggcggatttcaagctgctggcaactggcacaccggtcgagaatagcctgggagatttctggtgcctgatggacaccgcgcagccaggcattctcggaggatggggccagttccgcgatagctggatcaaaccaatcctgtccgcagcagaggatgaaaaggatgagataaggcggaagtttggcgcggggctacgcgaggccgtcggcaggtttatgctccgtcgcatcaaggaagatcagctgaaggggcttcccagcaagacgatctatagcggtgtggagcagccgaagggcggccagcagctacatgcggcacatctttccgtttgtatgaagggtgcccagctacaggcgtacgatgcagtactaaatgattttcgtgctcgacgtgcgaccgaggacatgcgaggtactgcactggcggcattggcccagttgcgtgagatctcactccatccgcgtcttcgcgaagaaacaaaactgatggccagcaatgccagcgaggcgcgcgcaaacatggcgcagtcggggaagttggtagtgctgctggagttacttgatcgtatccggcagaacgaagagaaggtcattttgttcatggtcaccaagcggcttcagagaatactgaagctttggttggaccagatctatggactggatgtggcagttatcaatggtgacacggcggcagttgcaaagaaatctgacgagttgactcgcaagaaactgatcactgttttcgaatcgaagcctggtttcaacgtgatgatcatgtcaccagtagctgcaggggttggattgacagtggttggtgccaaccatgttgtgcacttggagcgccactggaaccctgcaaaggaagcgcaggcatctgaccgagtctatcgaattggtcagaagaaagacgtgcacattcatcttcctgctgtacgacacccgcaatttgattcgttcgatgttcatttggatcgcctacttcgaggcaagctgatgctaaaggatgcggtcgtgacgcctgaagcggttagcgagagtgagatggttcaatccatggggctttga

SEQ ID NO: 10809 - DNA, 2058 bp, Ralstonia sp. A12
gtgaatctcgagacgtctctggtcacggcgccaacaccagtccttgttaccggcgccgcactcgctgttctcgttgtagccttctttgcagtgttccttgggccgggttttgcacattggttgcgcttgcgtcgcattcagcaagacatcgcaaatttcgaagcgaaggactacccagctgagttcagaaaggtgtttgctggcgataagcagttggcgcaccactggaaggaatatcaggaatcactgcatgtccagcgtgaggaacggggcggtcagatggtcgtacgggcggtccgtgccacagcgccagcggagttgtacttcaatagccaaaccgtcgtcgacagcaggttgcgcacggagttcttcaagcaccttccgggtattttcactggcatcggcatcattggcacgttcagcggtctcattgagggtcttcgcgctttccaagtgagcgagaacgcagccactgtgcgaacgagcctcgagtccctcatgcactcggttggggaggcatttcttgtctcggctgccgccattgctgccgcgatggttgttaccttcatcgaaaagctgttgctggcatcgctctaccggaagacagaggagattgcgcacgcgattgacgcatgcttcgaggcaggtgccggcgaagaatacctgtcacggctggttaaggcttcagaagagtctgcaagccaatccaagcttctcaaggacgctctcgtcgaggagttaggcgagttgctacgcgaactgaccagcgcccagattgctgcaggcaaggagcagcaggctcaggtcgtggagcgattggttcaagcatcccgcgagcaattggaggctgctcgtcaagacaaccaagtcctgggcaacactattgccgaaagcattcagcagagtctcaaaggcccgctagaagacatcgcctcgaccgtaaggacggcgagcggcgaccaaagcgcaaccgccgcccgtatgcttcaggacatcatggctagctttagccagcgtctcaatgacctctttggtgggcaaatctctggcctcaacgaactcaatcagcagacagcacggagcatgcaggacgctgttggcacgcttcaggcgttagtagccaacatcgaggcgtcgagtcagcgctcaactgatgcgatggcacagcggatggccgaagctatcgagaagattgagtcgcgccaagaggcgatgaacgcccagtctgccgctttcattgaacagattcggcaactggtcgccacctctcagtcggagaccaaccagaagctgcaaggtacgctggaggcaatcggtacgcaggtcaccaccatgctggcaagacttagtggctcgcagcaagaggtttttgagagcaatcgtgcccgagagcaatcgatggccgaccgcgcctcgagtattgtcactggaatgtctgagtcagtcgaagctgcaatcaaggagctcggcgcagcaaccagccaaatggcacagagcgtcacgacactgacccaggtcacgtcgtcgtcagtcgacaagatgaatgccggggcggagcagttgggtacggcttcccgaaatttcgctacggctggtgagcgcgtcacgagcatcatgggccaggtaaccagtgtttcaaccaagctctccgaaacctcaggaagtcttacggctggcgcaaccgccattcaggaactgctgaaggactatcgcaaccaaagagatgcaatcagtcagctcgttaccgaactgcgtgccacggtggaggcggcgcgcaaagaagccactctcaccagcgacatcctggggcggattgaaggttccgcaaaccgtttgggtgcggcgcaaaagcaggctgacgaataccttgatggcgtcagccgggtcctcggagaggcacatacctccttcgctactgaggtaaagaggacgctcgacaaagcgaataccgagttccacacaaagctctccacagcagttgggctgttgcattcagccgttgcggagctggaagtgacgttggcctcgatggggagcctcgccccggtgaggaggtaa

SEQ ID NO: 10810 - DNA, 711 bp, Ralstonia sp. A12
atggtgggcgcaagggtcgttctcaagcgcggcggccgggacgaggcggagaagccgttctggatttcgttcgctgacctgatgactgctttgatggtgctgtttctggtcgtcatgggcgtagcgctgctcgcggttaccaaaaacgtcacggagaaggagaagagggaggagcagcaccgtaaagacattgagcttatcctggaccgcttcgtaaaggctgcgaagcggtatgacggcatcaaggttgaccgtgataggcatgtcatcgacttcggtgaccgcgcgcgttttgcttttgggaaatcgaatctgacgactgaacaggaggtggtgcttcgtcagtttgtacccgaaatcctgagggtggcaaacgatgagctcggtaagcgggtattgaagagggtagtggtcgaggggtacaccgacaagaccggctcgtacctcagtaacctgaacctgagtctgcagcgcagccaacgggtgctctgcagtatgtttgcagcatctggcctaagtcttctctctggggagcagaaggaaagcgtccgtagcctgttcctggttggcggatactcttttaacgcggcgaaggatactgacgaagagagccgtcgcgtcgaaatgcgcctcgagtttctgggcgttggcgagcagcggcccgaagcaccggagcagtccggcaattttggggagtgcgcactgaaatga

SEQ ID NO: 10811 - DNA, 1677 bp, Ralstonia sp. A12
atgagcgcactagaccatctggcgtcactgctgcgaccagctgtcgaagaaggcgcgaagacgatgacgccaagccgcggcattgatgaggcaattgctgcgatggaagcgcgcacgaagtcacgcaaaggcagcgcgctttctgaggactatcagctagagacgctacgtcatttttggcagagccaagaagtgaaatcgttccgcgatgcctatctgttgtcgtggagtctgtgtttgccgcatcgcccgcaaggggcgtgcgtcatggaggaccggccgcgcttggagcgagtcctcgagggcgtcgacgcgtgggtgagtaggccgagcgcgtaccggcgatgttatcagggcttggtcaagagctacttcacctatgacgccattgctgatgggacggctctaaccggccgaaagaattgggtcttgctacgggagtacctgcacgaacgaaatcgactcatcaaggacagaaacctcaatccggaatgggtcgataccgcagtcgaaaacaggcggctcttcggggagcaaccgtgcgagccctacgtggatgcattgctccgggatgacactggggacattgagcgcctctgcgagcagctgggaatcgggaaggcgtcctggttcctccgggagcttgttcttgcacaggtgaaaggtgcaactcgcctgaaccatacacagtttcaagcgcttctacccaggatgcttgagctgttggccgttaacgaggtattgcgtgaccgtggaatgattcttctgctcgaccggtacgcagaggtgcccaatgccgcgctacaccaaaggctccgcgaccactcggttgcctggtggggtaacccatggttgccatcgaaccggacacgatggggaggggttgcaccagaggctcgggcaatggtggccgactggttaaaactggagttcattgaaacattcttcaccaagctggccgaagatggacttggcgacccacgtcgtatgaatttctggaagcgatacgtcaagtcaattgaccacatagagtttgcgcttggttcgtctgctcgcaactctagggaacaggatttcgttgcgctgcgtaagaagatgacggggctcgtccgtgaactcgatgcatccggtgccaataatgccttcatcatgtcgatgggtagcctagtcgccgtagagttcagtggcctcggcaatgccctgtacggctatgacgcgaaacggtccgtgccctttgacaccacgcagacgctacggctcgaagtaaatggccgaaattcccttaagcagaagagcaaaagcattctctggcttagtcaccaagacggcatccataactgggataagtgggaggacatgttcgaagcgacgctggccaaggaatttggaatcaaacctactgattcagttcctcgtgcgacacgggctgcgacgaagctgccttcaacccgccaatcatcccaggaaacgaaccagcacgctgcgagagcgaagtctcagccgtactctcgctcagctcttgctgggctggccagagagcatggccttgaaatcgacgataaaacatctatgggcggcaacctgtgggttcggggtggtgaaagcgatgagatagtcaatcaggttctgacgcactggggctttcggaaaaaagccggcaaggggtggtggaaataa

SEQ ID NO: 10812 - DNA, 3765 bp, Ralstonia sp. A12
gtgttcaagctattcaagaacgcgaaggcgcaaaaaaatgcatggcggcgccagtggtcgccggcgggcgtcgtgctgacgtccgacaaggctatgccagatgtcccagctattgagggctcattgctagagggctacctcacgcagttggtcgatgacggattggcagtggagacagaggacggcttcctgcttggctgggattccatgtacgcggtacttgacatgcctgcttatgtcgagctttccagtcttcttcagcttcccggattcaccaatgctcgcccagcccttcgaagcagccactcattaacggaccgcgatttctctatcgcgctggctggttggtacggtaatgatggactcgagtttgatgaaattctcaacggccccgtgatggcgcgcgacgggcatcaggctctcatgcgtccggagcagtggcttctgttcaaggaagtcgtcgcgttttcgcagcgagcggaggaagagcgaggggatttggctcatcggcaggcgtgggggcgcattcgaagactcgccatcgctgcaggggctcatctcgacgacttcctatatcggtcagtcgtattgactccggaaaaacttcagattggcttgcgccgctcggagagtgtcagcgacgaccacgtcgtcgagattgagccggtgttcgagggggcaccagccaattggctcgaagtgttcgaccgagctaaggacgtccgcgacagatatgacattgtgacgccagaaggcattgtccagattctggtgacaccgaaggtgcggactgtgctgcaggaagtgaagcgtcttcctcataggcgtgtcgccggctctcgtgcacaagcatttcttctgaatccgtacgccacgcttggcgcagatgcggtggatgtcattgaggaatcgcagttcgaacaagctcgcgagaatgcaggtcttgattacgagcgatttgtccctctgctcgaacgggatgcgaccggctatccagttcgcgttggtttgctcatcgaaactgcagttgcaagcggaccgacttcgtcagaaatccaatggctagatgacgctgagctgtcgtcattcacacaggcgcttgcccgcgcgctcaaacgtggcaaccagttggttgcatggggcggatatgacttcgtcgtccaaggggatgctgagcagcatctcaaggaactgacggcggcactggagcaacgattagcgccaccgacattggtctcatattcggcggtccacgacctgagcggctactctgccagagtcgattcaatcggaatcgagaagccgtattgctcaccctatatcgccaaaaggaaggaggatgatgggtggttccccgagaacgtcttgccagtagtcgtctacgacccgcaagatggtagcgggccggtggcaatcccgaccagcaagacagcgatagaacaactcaaggcggggctgcagtcctcagagcaaaagggggcgggtgaggtgagcgttccctggcttccgaagcccatatcggtccaagaggctaagcagattgtcaaaacgttcgaggaagttttcgccgatatagagtcgggtaagccgttcgaccaggagaaggttatccaaccgcctccgagcactaaggggccccaaaagcagctcgtgctgagagctaacatccaggcgctcgagtatgaggagctgcgacgtgaagcactgcagtcagtgccagttgagcccaacgtgcctaagagtatccgcccggagtacgcgttgctacaacaccagcgggaagggcttgcgtggatgcagcatttatttcgcctgcaaaccgaataccaggtcaggggagcggtgctggcggatgatatgggactggggaaaacattccaactactagcacttatggcctggctgcttgagctggaaccagacatgtcccccatgttggtcgttgcgccggtttcgctgctggaaaattgggccgaagaggccaacaaatttttccagccgggctcattacccttattgaccgcctacggtgacagcctttccgaactgagagtgccgcgcgctcagattgaccagcggctccagtctgaggatggcctagttaagtttctgcgaccgaattggataggcagtgccaagatagttctgacgacctacgagactttgcgtgacctcgagttttcgttcgccgcccagaagtggtccttgatggtttgtgacgaagcccagcgaatcaaaaatcctgctgctatggtcacgcgagccgcaaaaaagcagaacgtggacttcaagattgcctgcacaggtacaccagtcgagaacacgcttgcggacatgtggtgtctgttcgactacgtccagccgggattgttgggcgctctaaacgatttcggtcagcgctacagaaagcctattgaggccaagactgaagaggagcgagctcgcgttgaggagctaagggcacgcatcgcgccgcagattcttcggcgattgaagagtcaagtggatacaggtttgccgccgaagattgtggtggatgagtgccgacgcttgcagctatcaagcacacagcgaaacctatatgcgaaagctgtggagagcttcaagaaacgtggagacccgacggttacgacaccgttcaaaaatcacctaggactactgcattacctgaggctggtttgcaccgacccccgacctcatggattgggcgtcttcaagcctgagccggtcaggcaataccgcgagaaagctccgaagctagactggctgctcaaccagcttcatgcaattaaggccaaaggcgaaaaggtcatcgtgttctgcgaatttcgcgaaattcagcgacttctgcagcactacatcgaggccgaatttggatttcgccctgacatcatcaacggggacacaaaggcatcagcgaatcacgtggccagccgtcagaaacgcatcaaggcgttccaagaaactcccgggtttggggtcctagtgctttcgccagttgccgtcggcttcggcgtcaatattcaggcagcgaaccacgtcgttcactacacgcggacatggaatcctgccaaggaggaccaagccactgaccgcgcgtaccgcataaatcaaaagaagcctgtgtacgtctactatccggtggttcgtgcggacgatttcacgactttcgatgtaaaactcgacatgctgcttgaatacaagcgcggtttggcggaggacatgttgaatggtgctggggacgttgcgcctggcgacttcaacttggccgaggtcgttcctgagtcggaaggcgcaggcatcgacgaacgcatcacgctcgacatggcattgcgcatggggtggcagcattttgaatgcctgacgggggctctgtgggggaagcgcggatacggttgttaccgcacacccggcacgaatgacaatggcgtggacatagttgccattgacggtcgcaaggggcagctcatacaggctaagaccagcgggacagacggtgccgcccttgggtgggaggctgttaaggatgtcgtgaccggcgaagctttctaccgccgtagacacccgatggtggagtttgagagggtctgcatcacgaatcagttcttcaaccgacaggcgcacgagaacgctgctttgaactctgtggaactattggaccaaacgcatttggccagcctgctggagaggcacgaagtgacgatgttggaggtggagcgaatgcttttttctgaatggcaacagcatgaggcgactgcacagtag

SEQ ID NO: 10813 - DNA, 2061 bp, Acinetobacter sp. ANC 3929
atgttagcttttgctgaatttctacaaaattattttataattccaatatcaatgcttatttttgttttgtggattggatttagattctttacaaagtatatccaacctgcaaaaaatctaaataataaattgttgacgataattaacgcattacaggctgctaaaaaagatgcgagctcaagtaaaaatatcctagattcagagtttgaacatgatacccctctacaacatgcttggttaaattataagaactcttttcatgatatttatgaaacagtagatggtgaagatttattggtatcttctagagctacagcttctagtgatgttttcttttctcaaacagttattgttgatacccctttaaaagttgaattttataagcacttaccaggaattatcacaggtgttggtatcatcgccacatttgctggtcttttatttggtttgttagcatttgatcctgcaggagatccatcaaaagttcaagatagtttgggtctattattggctggtgtgagtgaagcatttatggcttcaggtttagcgattgcaacagctatgattattacttggagagaaaagtcgtggttaagaaagtgttatgaaagtctagaaactttaaccactgaaatagatcaaatttttgaaacggatgctactggtgaagaatatctagctaagcttttaaggtcgtcagaagcaaatgaaacaaatgcacgtcagttaaaagatagtcttgtgaatgacttaaaggcaatgatgactaatttggtagaggagaacaagaagaatcaattagcatttactgcacaattaagtgaaagttatacaaaaacaagccaagatatggcgacacaaattgggcaatcaattaccgatactttacaagccccattagataaaattgctgcaagtgttcagcaggttagtggtgatcaaggctctgcagtacaagagttaatgaccgatgtactaactgcatttatgagtaaattagagtcaacatttggcagtcaaatgacaggtatgagtgagatgatgactcaatctgtgtctgcaatgagagagatgcagttcggtttttctcaattgttgacagaaatgaagacgaacagtgaagcttcgaccaagactttagaaactcagatgtcaaaaatgatcgaggaaattcaagtaaaacaaaatctaatgtctgaccagatgaatttaatggttgagcacttatctcagagtactgttaaaattggagaacagggtcaacaagctattgagcagttaaattataaagtatctgaattgatgatgggacttggtggcactatgtctgaattaatgtcagatgttgctaggcaacgtatggaacaagaccgtgtagttatagaaaatcagcaaaaacttcatgaacattcatcaattttgattgataaccttggctctgagattaaagatcttattgttcatagtcaggatgcagttcaagcatataaagaaaatattcaaaaaattgctcaagtaacgacagaaagtattacaggcatgaacaatggtgctgaaaaaatacgtttagcctctgataagtttaatacagcaggtgaatcattaattactgtggctgataaaaccactcgtttaattggtgaagtgagtactacatcaacacatttaacaacagcaagcagtaatttaatcactttattaaatgaatacaaaaattcgcaagacagtattaagcaggcaatcagcaccttagatagcttgattaaacaggcccaatccgaagcgagtatgagtactgaaatgcttaaagatatgaatcagatgacagttgctcttaaccaagttaagaaagaaatgcaggattatcttgaacaggtcaatgatgtattggttaaaagctttgaaagttttggtgcctctgttgagacgagcttaaatcattctttgggtgcttttgataatacattagatcaagcagtaaaacgtctttctactggtgtagatgccttgagtgagtttgttgaagatctggaagatcttgtacataaaaagaaaaactaa

SEQ ID NO: 10814 - DNA, 732 bp, Acinetobacter sp. ANC 3929
atgttaggtaataggtactctaaaaaaccacgcataaaagatgagggtgaaaaacctttttggatttcttttgcagatttaatgactgcgctcatgacattgtttctagtggtgatggcagtttcattgatggtcgtaaccaaaaaaattaatgaagcaacacaagcggagaaagagaggagctcagagattttagatatttgtacgagtatccaaaatgatgcagcgttaaaaaataaaattattactgtagattgcaaagataatcgaatcaattttggtgaggctgggcgctttggtcataacgattacaggttgaatgctgcagggatagaagctttaaatactctagtaccaatagtgttggatgctgcgaatagtgaaaatggaaaaaaatggtttaagcaaattgtcattgagggtttcacagatacggatggttcttatctctataacttaaatttaagtttacgtcgttctgaatgggtgatgtgtagtttacttgatccaaaatttagtcagggactaagtttgactgacacacaaaagaatctggttaagcaattattcttagcaggtggagtttcttttaactcagcaaaagatagtaaagaagcttcacggcgtgttgaacttcgtatgcagttttatggtttaaaagaaaaagataatgctgagcctcaaccacattttgtttcagcacctgttgaaacatgccaattagcaaggtga

SEQ ID NO: 10815 - DNA, 1389 bp, Acinetobacter sp. ANC 3929
atgagcattgttaatttaaaaatgcggatgcaagaaaaaataaatcagatgtctgaaccaaatcacatacaaaataaatttgttaaaccgcaacgtttattgaaaacactttcagctatagaaaaaaaaattgatgattatgaaaatgctcagccattggatgaaaaaatatttaaaacgattaatcgcctaaaaaaatatggatttagggatttgactaaaagggatctaaaaaacttagcttgggcattagggaaaaaattgccaagtgataatgaaaaaatgttatttagccaattgggcaaagaaataataaattattttgatcaagctgattttgaattgttgcgtttcgtttattttccattgctttatacatacttttcttttgaaaaaaatgagatagaaaagactcccacttcatggattcagttaagaaatattcttagccaaaataaatctaaaatatttaattctgtaccaaagcctaaaaagtggatgaataccctgatagatcattcagaaatactatctgatcaacctgcaaagaagtttgtacgagattttttacaagataatcatcaaaataagatttctcccgagcttgaaagtttaagaatatcagctagtagctggttttgggatgacttaatacgatcttcaattaagtctattaaagatatgaaagaagatgagtattttaagattattccaagatttttagaacttatagaaaaaaataaaatatatacaactgatattttggtagcacttcttgaacgttatgctaacagttcagatcgagcaaaagtacatgaggagctgaaaaatattgctcttaatcagtggggaaatcctcaatatgaatcatcggcagggtggaataatgtgaatacagatactaaaaaaatggtaattcaatggttcgttagggctgacttggaagctttctttagattgtttagccgtacagctgacgttgatagatttaattattggattaaatttattgataaaatatcagtttctcagatatttcttggtccagcagctactaaatctactcaagctgaacatcgtaaatttcgagaaataaataggggacgtttgaaaagactttcaggatcaacacaaacaaacaatgcctttatgttgaaaattgagaatatttatgtgtttgacttttcagatattggtaatgcatgttatatattaaataaaattccttataatcaagcacgtgctgaagttcatattgatacccttaaaccttgggaacatattcttaaattaagtcatacgtcaggatggcaaagaaaatttgatgagaaattagctgaattaggtatttttgcaaatcgaaatataaattcacgatatggcagataa

SEQ ID NO: 10816 - DNA, 3204 bp, Acinetobacter sp. ANC 3929
atgaagttagcattctggaaaaaggaaaaagatactaaatttgttactgaaattaatttggtagacagtgtaataacgcctttacaatacgatgaagttggattgctctatacttataaacaaaatgctaaaaatgatgcagacttttattggcaaagcctagaagaagaagatatcgcttatcgtattgatgggcagtatgtattgccttgggaggatttttttcaacttcaacaagatcctgatcattcgaatgtacttcctttattaaatttgcccaagcaaacaaagttgtatccagttcttcgtagtgaaggggggttaagcaactctgattttaaaattattcttgatgggtggcgtgaccaaaatggaattaaacttaaagggataaaacgaggaggtgcagtacttgacgttgaaggtgaagagcagttaatagatgaaataacttggaagctagttgagaaaataaaagagttttctcggttagtagataaaaattataaacaaaatcaaaaatattgggcacaaatacgaagcttagctaatcgtagtcaagcaaatctagatgattttctgaaaaaaacagtggtacttgcacctgaaaaattacaattaaatttgcgtaaaaatgagattagcacagagtcagttgttgaagtacaaccagattttgaggaggcaccatcaaactggctacaagtatttgataaatataatcaagtgcaagaccagtacagtataagtttacctgatggtgggatagctcatgtagttattgatcctcaagtaaaaaatgtactcaatgaaattaaaaaaatgccgaataggcgagtatctggtgagcgtgcacaaacttttttacataacccttttgcacaattaggggatgatgcctcagaggttatttctcctgaaagttttgagcaatccaagcaagaagcaaaaatttatagttatagtttgcaattagataaacgatataatgaggtagggcattatgtttcttctcatctgcatcttaatgaaaattcagatcgtgatcaacaacctataatattagagctcgttaatctagaacaaacaaaatattttattgatgcttttgataagccctcaccagttttcctttgggcaggttatgcaatagatagaacaagctatcttgatcatcaaattcaagatcttaaaagtgacatattagaaattcaaaaattccaagatgaattgcaagctaaacaaatactagatttatcaaattatagtgagcgtgtgattggtattggggaggctcaaaagttaaatccaggatttgtccaaaaagacagtggtgaatcagtatggttaccgcaacatttggtggagctagagcagcacttacaaaagagctctgaagatcaaacatttcaattgcttgagcagcttataaaacaggctgaacaagtaggcaaagctcgtgttgtaattccaaatacagatactgaagtttctatcgatgaagccaaggaattattaaataaattaaaaacttccaaaaaaaatagtcttttagagctggaaaaagagcctttagaaaatcttcagaaaaaaaagaaagatactttgcttatcgcaagtaatattgaagaagcagaattcactaaacaaagaatggaactgctaactttggataaggtaagttttccaccaccaagattaccttcaagttttagaaagcaggaatttagtttaaagcagcatcaagagtatggtatttcatggttgcagaatctctatcaatatgcaccagaaaatgtgagtggttgtctcctggctgatgacatggggttaggtaaaacacttcaattgttgtgctttattggtgagtatttagaaactgcaaaacagaaaaagccagtattgatcgtcgctccagtatctttgcttgaaaattgggaggctgaagcaaatcgtttctttagtgcaaaatttgcaaaaattctaagtttgtatggagaaaatttaaaagatcgaaaaattcctaaacttttgatttctgctcaacttcgtgaagatcatggaattacaaatttacttgaggaagattggctaggcgatacagatattgtattgacgacttatgaaactatgcgtgatctagagttttctttagcacgagttgattggtcaattatggtgtgtgacgaagcacaaaaaatcaaagtacctacagccatggtcacaaaagcagctaaagctcaaaaagctgattttaaaattgcttgtactggaacacctgtagagaattccttggtagatctttggtgtttgtttgattttatacaggaaaatttacttggatcattaagtgcatttaataaaacgtatcgtcgcccgattgaaagtggtgaaaatgcagatagccaattattagagcaactacgtgagttgataaaaccacaagttcttagacgtatgaagaaagaagtagctgatttaccgaataaaaatgaagttagtgattgtaagaaaattggaatttcaatgcttcagcgtcaattatatgctgaagtaattaatcgttatcagaagttatctactgaaggtaatcaaggggcaatgttagcatcattgcacagcatgaggatgatctgtgcacatcctttacaaattcgtcctgatgcttcgattcaagattcacctaaagttgattggttaataaaaaccttagaacaaatcaaagcaaagaatgaaaaggtaattatttttactgaatttagggatattcaggtttttctcaaacgtattcttttagaaaggtttgggttgaatattactactgttaatggtgattcaagtacaagcagtaaaaaaggtttatcacgtcaaaatttaatcgataaatttcaaaatacagttggctttaatgtcattattttatccactgttgctgtgggttttggtgtgaatatacaaaaagctaatcatgttatacattacacgcggagttggaatcctgctaaggaagatcaggcaactgacagagcgtatcgtatagggcaagacaaagaagtatttgtttattatccatccatatcggctcatgattttgatacatttgaaattaagttagattaccttttatcaagtaagcgtgctcttgcagatgacatgttaaaaccaagtactgatttaactaaagagttgagtaaattaatctag

SEQ ID NO: 10817 - DNA, 2484 bp, Magnetospirillum caucaseum
atggacccgaattctactgaacaaatagcacacgcctcgttcaatcttggtcgcctcgcgattgactttgttctccccttcttctctctattccgtgacgagacagtggcgccaaccattgccaccgtcatggtgtttttcgctatcgttctggccattgcgttcctggtcagcattgttcggttgacccgacaggtccagcatcgcgtgaattttgtgaggggctgcaaggaccggcaggagttctacaccaaactcgacgaattcgacgagctaatggcgaggagcaagcttctcagccatagctgggatgaatacaaggagaccctgctcccacagaagcccggatcgaccctcatcgaaagcacagtgcggcccggggatttcatcaatctcacggaacttgagcattcggggctaaagctcaagtggttccacaacatcccgggcatcttcgtcggcgtcggcctattgttcaccttcattggcctagtggcggctttgtttttcgcctcccaggccatccatgccgtgggcggcgacggcgtcgatgcggcaacgcagaccgcagagatgcagaaggcgctcagccaattgctgagcactgccaccttcaaattctggacgtctatcgccggtcttggcagctccatcgtcctgggcatgctgtaccgtttcttggtgcgctcgctggaccgctcgctggatgccttgtgccgccagattgagcgctgcacgctcaccgtgacgcccgaagtcctcgccaaccggcagctcgacgaacttcgggagcaatcctcgcagctcaaggaatttaccggccagcttgccttcaatcttggccgggcgctggaggaagctcttcagaaggccatgccgagcgtcatcacatcggcaatggagcccatgggccacaaggtctccgagatcacctccagcatcaacaatctgcaccaagcgatgccgagcgtgatgagcgacgccatgtcgccggtggctgagaagttgggctccctgacccagaacatggcccaggaatttggctccgtggtttccgagaacgcgggtgccgaaatccgcgagacggcaaaggcgttggtttccgtcaaggacgcactgctggaagcatccaagcatgtatccggaagcggcagcggcctgtcggaccaaatcgcggaagccgccggagacctgcgcgccgccgccaaggccatcaccgacggcatggccgggattaccgagacggtacgcgccgacgtcgacaagaccaaagatacactgaacgcccaactgctggctgccacggaaggcgtgagcagcgttgcggatgtcatccgcgccagcttggctgatgtgggcggcaagatgcgtaccaccaccgaggaagcgggctcagctttcagcaagcagatcgccgacgcggtggcgcgcatagagacagggacccaggccaatgccactgccatccagcagaccctcactcagctgcgggacatgaccgccagcgccaccggcagcatggcctcggagactaatgcggttgtggcggctatgcgccagaccgcggagcagatggctcagaccgtcgcagaaatcaccacccagatccgccagggttcacaggagggcgtgaccgggctcacggaacacttggtcaaggcggccgaggacatgcaggaggcgtcaaaccgaaactctgagcgcatcagcgatgccgtggaccgtatcattgccgcgggcaacaaggccgaggccggtgtcggcgaggcgacggcctttgtggccaagaccatggaggttcgtggtgccgaagctgcagccaaggtcgtgtccggtgccgatcaggtgctgaccgaccttaagggaaacatccaggatctaagcggcagcatcaccgaactctgggaacgcctggacaaggtcaccggggccatgggcaccgtcgagggcaaaatcggcctgcacgcccaggctctggacgacgtcaatcgggccgccaagggaacagaaacgtccctgtcggcggcggctgcgagcctcattgaagctggacatcctctcaatcaggccacccaggcactcagggaaagcatcgacaggtcctcacggtccgtggaagccacagctcagacgttgagcgagacgcagcgccagagttcggcgctctccaaggagatggctcacacgttgtccgagcttcaggccgtctggaaccgccattcgggcaggttcgacaaggcggacgagaacctgggcgccgccgttatcaaaatcatggacatcgtggacaaaaacactactaggctcgacgagcaggtcaaggccatcgacagcggcttggctaggacagtcggcatgttagcaggcaacatcgaggagctgcaggaagctgccaacgagttccacgaagtgaccaaaggcttggatagcgccgccaagtccttggaaaaggcagcgtctagacagggtgccgggttccggtga

SEQ ID NO: 10818 - DNA, 756 bp, Magnetospirillum caucaseum
atggctattcgacgccgccacgcccccgccgatcaagaagatgaggggttttttgtcagcatgaccgacatgatggttggtatgctgtttcttttcatcctgatgctcatgttcttcgcactgaagtttaatgaggcttcagttcatttcacagagacgacaaaggacctgaccaccgccgaagacactcggaaggccatcctggagaacctgcagaattcgctcaagagccagggcatccaggttgagattgacatcgagaacggcatactccgcctaccggaaagcatcctgttcccgaccaaccgggcggatttgaccagccagggcgtccaagcagtgggcatccttgcccgcgccctcggtggcgtgctgccgtgctacacgcacatcgaaggacgcgaacggccagcagattgcccggagtcgaagcacaccgtcgagtcggtgtttgtcgaggggcacacggacaacaccggcagcaacgggttgaactggaacctgtcgtctcagcgagccctaaacacctaccagacgctcatcaacgagaactccgtgttggagcggctgcataacacccggtcgctggctgttttcggcatctccggctatggccaacatcggccggtccagcccaacaacacgacggctcagaaagcgcagaaccgccgcatcgaccttcgcttcatcatgaccaccccaaaggcccccggcgtggaaaaggtcgagaagcaggttgaggagctcgcgcgatga

SEQ ID NO: 10819 - DNA, 1374 bp, Magnetospirillum caucaseum
atgaacttcgaggacgcgcttgcgaaactcgccgcctggtccccgaaaaaggtcgcctttcctccgacccccgtgatggtccatgaagccaacgcagtggccaagcggctgcgtgaggtaagcgcctccgtcaatcttatcgaccttgatgacctacgccgtcggctgtcacaggccaggtccgccggtgactggacttccatttcgacccgcgattggcgttacgttgcggactgcctgggtgccgggcaatctcccctggtggatgacgcaggattcctagatgagtacctcgcccgcctgaaggatcagttgtccagacgagcgatttccagactgattcgctactatgtcacccatttcgaccccgcccaccagggcctcaggaagatagctgcattcctccaggtggccgtcggtcagtggcaatggcaatggtctgataaggaagccgtggacatgttcgacgtgtccaatgctccgagccaattggcgaagtatgtgcggcggtccaaggagatgcccgccgccgacgccatggaggcagccggacttggcggcacgctgtacggctgtaagctcgcgggccacgcctacatcgcggcggcgaatggtctgaagaccttcatcagcaacaacccctcctccctgccagcgatccggcgctttgccagttggggcgtcgtagacagccgcttcgctttcgacggcacctccggtgccgccgctcgcatggcagaggcgatgcttctcccttgggtagaccgccagccaccggacgacgttcggagctttatcgagagccaccttctggcgctcctgcacgacctccgcattgagcgctcccggtggcttgacgtcgccgaggatgccaagcgggtaatgcgccgctggctgacccgcgcatcgctggaacagttccttgacgtcgtcgaccgcactgcccagacgcatatgtgggccgcccggcggaagttctggaacgcctattacgagaacaaatttatgctggaagcgtgggtggccttcgcaaaggatggagccgacttggcgaagcgcttggcggcagagaaggaaaatcccgctatcggaaatttcggcttgctggagtcaggggcgcgagacaaaacccaagccgttctcatcatgcaaatcggcgagcttctcgttgcggactggagtcacaacggcaaatgccacgtttggttatccggaaacccaagcgcgccaaaactctaccgctcatacagccgtgaggacttggtcaccggttccgatttcgagaaaatgcatcttggcgcatggcagagcgatgtgcatgagtacattcgccgaaacactggcattcggatgatgagcagggactacatgtaa

SEQ ID NO: 10820 - DNA, 3363 bp, Magnetospirillum caucaseum
atggctcggcagcacttcacctgggaaatggccgaagacggcatccttctccgcctgcatcggaggaagattctagggtcacgcattgtgccagtcgaccagtggacggatgctatcgagcctcaacatctgtttgcggtcggcagcctgctcaaaatgctcgactacgacgatgctgcagggccgttggttcggcacgagagcgacggactctgggtgcgggacgcggtcgtcgcgtccatgtccagcgcccatgcgcaggcactagacctgccgagccccacttctctgattttgggcctacagtcacgcgggaacctagcccagcgcgactttaccgtcacggcccagtggcttgaaagtacctctgtcccggcctggcgggcttccgccagcggatgcatgctcaagcatggcggccagacctaccgcatcccggaaccgctgttttccatctggcacggcgttgcgctattcaacaaaaccgctggtgacgatgacaacgttcgtttcgcccatcttgcctgtcttcgagagctgattccggacggggacggcgaacaggtctcgaccgacgcctacattcgaaacaccaagatcgttcatgcggcggctttttcccttcgtcttcaaaccgggaaaaacggcttccaggtcgaccccgtgctgtttgcccgcaaggtcaaagatgcctgggcggaaacagacggcgaggcgtccattagcgaagcagaaagcctgctgcctgaggcgttgcaggaggtcttttccaaaacccgcttcccccagtggaacgactgccgtgaccgctatggcctgggcagccaccactacgtctacatcgagcccggtctgcaaaaggcgctcagcgtcgtgcgcaaggtgcagacatcagacgtcgataccaggcggaagttcgctcggaaccctcaggcttatttgaaggaggccctggccgatgacgcggacaccgcagagacagtcgagcacctgttcgtggcgacggagcaatattcacagcgcgttatcgacctaggcatctggcagccggccgttctgccatggctcaagcgtgagcctaacacttggctcccagagcggttcggcattcagatcggcgacaagcgcattgaattgggccccagcgacattgagccagcccgccacgcggtctcgacggcaatcgaccagggggccgaaaccgtcgctctcaacggccaagacgtcccggcgaaccgcagtacccttgatgccctaaacgccctcatgggcttcgccacgccgatcggcaaggacgaggacgacgaagcccaggggccggatgaacaaggccaggatgacgccaagccggagcctgtgccacccgggaagatgttcctcatcgtcgacgaaaactacgaagaagtctcatatcaccggaacctgtcgtcccgcgtgcctgagggctcaggtggcgttcctccatcgctgctaacatccttaaagccccaccaggaagaggggctgacctggctccaagccgcatggcggcagggttttcccggcgtcctcctgggcgacgacatgggcctaggcaagaccctactggcgcttgcattcatgaaatggctggcggacatccgggctcagcacagcctggagcgcttgcctatgttggtcgttgccccgaccggcctgctggccaactggaatgccgaacatgaccggcacttgagctttccgggtctcggtcaacctttgaaagcctatggcagcgagttgaagcagctccgggccaatagcggtcgcgacgtggacttgggtcagccgctcttgaatagcacgaagttgcaggaagcagactgggttctaaccaccttcgaaacccttcgtgactaccatcattctttcgccaaggtccgctttgcagctacggtctacgatgaagtgcagaagatcaagaatcctacatcgcagctcgcccgcgcggccaagaccgttaacgcagactttacgctggcaatgacgggaacgccggtcgagaaccagttagaagacttgtgggccattctggatgtagcctatccaggctatctgccggagcttaaaactttttccagcgagttccagcccgatgacttggacgcactgaagcgcctccgggcgatactgttggacccggtgggcagcgcgccccccgtcatgatccggcgcatgaaggctgacaagctcgaagggctgccggaaaaggaagcggtggctatccgacaggacatgccaccgaaacaagccgatagctacgccgagatcatcacccgcgggcgccaggcttcaggcccaggctccatgctggagatacttcatgccatgcgcggcgtctcgctgcaccccatagacccgctgcaggccggcggaattccgcatgacgactacatcgcttggtctgctaggctatcgaagacattcgagatacttagggcaattgcggaagcgaaggagaaggcgctcatcttcgttgagagtttggacatgcaggatgtcctatcggcgatgatcaagcgggaattcaaacttccccgcatgcccatgctcataaatgggacggtcagcggcgataagcgccagcgtgcggtcgatgatttccagaagctccggggcgaattcgacgtgatgattttatcccccaaagcggggggcgtcggcctgaccttgaccgcggccaaccacgtaattcatctatctcggtggtggaacccagcagttgaagaccagtgcaccgaccgtatttaccgtatcggccagacggccacggtggtccgtgtctactaccccatggcagttcacccggcaatcggagacagtagcttcgacgttaagctcaatgacctattggaacgaaagcggagcctcagccgcgacttgcttatgccgccagttcttcccggccaggacgaatcgacactgttccgtgacaccgtcggggccgcagcaggacagcatagtgcggacgaggtcgacctgggtgaactggaccgcatgacatccacccaattcgagaactgggtcctgcgacgccttcagacgaaaggttaccgctctctccgcacgccccagaccggcgacggcggtgccgacggcattgccgtccattccaccaccggccaacagctcatcgttcagtgcaagcatcgccagagccgttattgcaatgccgagcccgtcgatgacctgttgcgcgccagagatgcctatggccacccggaggcgcgtcttatcgccgtaacaactgctgagtgttatacctcacagggaagagagcgagccgggcgacatggcattgaattggtggcccgagcaggcctcctcacattcccacgaatgtaa

SEQ ID NO: 10821 - DNA, 1851 bp, Acidaminococcus sp. CAG:542
atggggaattggctgtcttggatttcagattttttctatttattatttattataggtgcaggtttctgttttcggtggttttttagaatcagtaaagctggttcttctgtggaacagattatttctgttttgcagaattattctcgggaatccatcagggaaaattacggcaatcttcaggcagaaatggggcaggccccgtatgattcgatttggaagaaatttgaacggacgctgttcaaaagcaaagcagaaggggtgctgatgacccaggatccggaggctttttacaatgatcagactttgttggacaatctgcctctggacctgttccgtgccatgccgggaatttttaccggcttggggcttttggggacttttgtcgggattaccgcagggatcagcggcatcgacctgggcaatgtggaaaccatgaaaagcgggattgaagtcctgctcagcgggacgaaaacggcgttcctgacttctgtggtcggacttctcctggcactggtgtacaaccttgttgacacctggatttaccgtccttacaccaaaaaactggccactctgatcgatcagctcaatacccttttcccttccaagagtctggaagaattcctgtctcatcaggcggaacaggcggaagaacagacggatgccatgcgggaactgaatggggaactggtgggccgtctggaagacatgtttgtaaagctcagccagagcattgatgtggcgctgaaaaacaacttgacggaatcttttacccaaagcctggaaccggttttccaggatttgaaccagtccattgacaaactgggcagcagcgccggggataccctgtccaaatccattgaacagggggccggggaccagatccagggtctggccgtgacccttcaggatttccaggggaaaatgggcaatatgatggaagtctctgaacggctgaatgcggaaaataccgcccggcttcaggggtctgtagagatgatggtgaccaagctgaacgaagccatggacgccaatatccagaaacaggccactaccagcgatgccagccaggcggctatgaagcagttggtggaagagatgaacaccaacctgaaagcagctctggatcagatggtggaagctggccggacagccaaccaggccttgctccagactacggaagccaccaagggaaccatccaggagattacagacaccatgagccagagcacccggacccagagggacgaaatgatccaggtgacagcgaatatgaaagaatctgttttggaagtgctgaaacagctccagaccgatatgcaggaacggaaccgtaccatggattcttacatggccgggctgaaggaaatgctggggcacaaccgggaaatcatggcttcggcagggaaaactgcggacaaatttgcccaggccagcacgcccatgcagaaagtggcggataccttgggcagccagctgaacctggtggtcagcgccagcaatcagttcaacagccatgtggaccagaatgtccagaaactggtcctggccagccagagcagtcagaaagatctggaactgatcagggattccatgagtaccatgcgcagcgcctgggaaaactatcagcagactttccagggggtaagccgggaaatgcgggaagctacggatacgttggcacgaactctggagcagtacaatacttctaccagcaaatggctgtctgaaactcttggccagtacgacaagagcatcaaagaggccatgaattctgtgtccaccattaaccagagtctgagtgattccatccaggatctgtccgatgccatggacaagaacagacggcactaa

SEQ ID NO: 10822 - DNA, 708 bp, Acidaminococcus sp. CAG:542
atgtggaagaaaaagaaagaagaaaaagcccaacagagcggtgatgcttttaccacttctgtcagtgacctgatggcagggctcctgagtatctttatcctggctctgtgctatttcatgctgaatttccagacggtgaccaacaaatataccgggaatacggaattgcggaatcagctgctgaaggatgtggggaaggacctccaggcccaaggcctccaggtgcggattgataccaagcagggggtgctgcggatcccggaaagtgtgctgtttgaatctggggaagccagtatcaaagaacaggggcaggcagcggtcagcaagctgagccagtccctgctgaaaaccatgacccggccggaatatcgggaagccctggaaacggtctttatcgaaggccatacggacaatgtgcccatccacaacgaatttttccaatccaactgggagctttccacccagcgggccatcaacacctggaatttgatgcggaacgatgtaccggaattcaactggctggtgaatccccggggagaacctatcttctcctgttctggctatgcggaaacccggcctgtccgggaaaatggtctggatcccaattcagaggcgggacgggccgccaatcggcggatcgatatccggtttgttatgatgccgccccaggatcctggggaaaagccttccggaggcagccatggataa

SEQ ID NO: 10823 - DNA, 1404 bp, Acidaminococcus sp. CAG:542
atggataagtcgttgctgcacagcctggaacggctgaaatctttcaaaatccgcctgcctgatgtatgtctgcatccaggcaggcccgtggaactggaaaaatggataaaaaagaccgtatccagctcctgcagccggccagccctggatccggtgaccatggaagagctgtatgccaaggtgaaaaatcaggaaaagaaccggaaagtggtgctggacttgagacgggaaatcccttttctgccggtgctgctcacccgggacaggaaggaaaaaccccgcttttatgaagtactgctccaggacatcctgcaggccatagggaatggggttcgtcgttccgtccggcggaataccttccggaatctggtatttgcttattttactgtatacggacagtcatacaagggagaacggctgcagaaatgcatttctcttttccttcagaaagacccagaactgttgaaatcggtgctgtatctccggaaccggaagcaactgctgaaacccaatggccataagctgttgacccgggaaatccagaaccggcggagtttccataaagcattggcagaattctgctggccggtgaacctgtggtatggggcatttgcccagtgggctgtcaaggatttttttcagctggaggaagaggacgactgggatgacctgttcggcgtattgaaagaaatctgtgaggacaaggcctgtgagaatatggtcccttttgctgccgaaaagatgatttacctgacggaccggtccggtgacggaaatcgggaaaaagaagtacggatcctgctgttacaggcgctgggagatccccgggacccggggtccagtctgaactgggtggatgtggatgaaaaggcccaggagattttcctggcctggctgaaaaagaacgatctgaacctgttctttaccattatttccaagacagtacggcaggttgccacatcggaaaacatgtggaaataccgtaaaagtttttgggaaaaatatctggatgccatgtactataccagggtatttctggggcccgaagcagaacagattgccaggcagatggatttggccaaacagggtatgggctttggacggttgaacggttccggagattccctgagaagtctgctgatgttcagtattggggattacgtttttattgaggccagccacaatggcaaactgagagtttggaaaagaggaaaagagcctctgcctttttatcaggcaaaatatacgtataaaggattttcttatacggacgttacacaggcttccaatattgaggaagaattcgtccattccagttcagaaaccggttcctggcagcggaaggtcaatgactgggtgcggagacactgcggggtacggcccaaagaaagccgatggaggtag

SEQ ID NO: 10824 - DNA, 2919 bp, Acidaminococcus sp. CAG:542
atgaccaacttccgtttttggacagcacaagagaacggatatttttacccttgtgttccaactgaatctacaggagattggccgctgatacagggacaattggaaatcctggcttctgaaggaaaagtggaggagaaaacagatggattcctgctgccccatggacaggctgtggaactagatccggaaatttcagaaatcctggaactgccggattgttttccttatgccatcactctccgcagccatggcagtctgggttctccttccttccgctacgagctggaataccagcgatcagacgggactcctttttatggaatcaaggtgttggggtcttatgtggaactgaaccgggaaacctgttaccggttcagcagggaccagtatgaattggtgaacctggtggaagaaagcaaccgggaaagccagcagattaagaacagaggggaactgagccagtacaataccctccaactggctcgaatcaaagagagagcgaaaaaaatccacgccaccctggaccggttcatggaacggcagaaaatcgttacagcggataaactttctgtgcgattggaaaaaaatccggacggatccttttccgtactgccggtgctgcttcggaaagatggggattcctatacccggatggaagccgattctctggagcagggattccggagcaatccgtacaataccggaaaaatctatggaccggacaagacccagtatgtttttactccggaacaggaagaaggcatccggcagatgcgccggtgtcagcggctgtctccggaggcggcccggcaggtagcagaacaccctcgggaaatctttggttcagatgctttcgattttgatctgggagtctatggggaccgggtggtctccattggagaatttctggctccagatttgcctttttccctgagttccgggcggaactggctgcctccggaaggaaccggcatgaaagctgccgataaccgggaaaaatccggggaccattatgccagccttgcgctggatgaaaaagattatccggaactgttcctgaaggtcagcgatgctctggaccggggagaaaaacgaattgttgttggagaccaggaagttgaactgacaccgggttttctggactatgtggaccagcttaaggtaaaggctggggaaaagcaagagaaacagaaccaggaaccggaagccgctggtgaaaagaaaaaagaagcgtctctccagatccaggagaattttctttcccaggaatatcgttccaggaaagcggcacgggagaaacggctggggtccaaccggctgggggattatctgggtcagggcctgaaaccaggcatccgtcccatgcctcaccaacaggtgggaatggagcagctggcggcctgctgggaacatggctgtcatggagtcctgctggcggatgatatggggctggggaaaacgctccaggcttttggattcctggcagccctgaaaaaagcctatggaaacagtgccatggcatcggtactgattgtggccccggtttctctgcttcagaactggatggaagagtacaggaaatttgtggcagaagggttgtttgatggaattgtacccatgtatgggagcgaactgaagaaacactgggccaggaatccggacgggagccgctgttatttccggcccccggaccccaatctgaaagaagtttccatgttggattttcaggaccgggaaaatcggatcgattacagtcggaaccatctgattctgaccacctatgaaacccttcgggaactgcagctttcttttggacgggtggcctggagtgtcatgatcctggatgaagcccagaaaatcaagaatccggccacccggacttctgttgcggcacgggccatgaactgcgattttggactggcactgacagggactcctgtggaaaattcctggacggatctgtggaccattatggattttgtggaaccaggcaaattggaatctctgaaagatttcaacagtcattatcagcatcagctgcagaatgtggaaaacaagggggaactgttgaaagaactgggtgaccagctgcggaagaatctggatccctgttttatccggcggctgaaagaagatgtaaatctggggctgcctgccaaagaaatcctccggttcaaggatcccatgccggaagaacagcggaaactgtatggggaagtagtccgggaagcacgggaagggcagggagaaaaatccatcaccatgctccaggccattgcccggctccgggatatttctctctgtcccagtcttggagccggcgggaatgtaaagaaatatactttgggtgatccggagcatttctttggctcctctgccagactgatgcggacaaggacaatcctggatgaagtgagagaaaaaggggaaaaagccctgatctttgtggaaagccgaaaaattcagctgctgctccggacttttctggaacaaatctacaaaatccaggtgcagcctcccattaacgggaccacacaggctgtggcccggcagaaaatggtggaccagttcaatcgggcaccggggttccaggtgctgctgctgtctccggaggctgccggtgtggggctgaacatcaccggggccaatcatgtaatccatctcagccgctgctggaacccggccaaagaagaccaggccacggaccgggcttaccggatcggccagaaaaaagcggtaaccgtctatcttcccatggctgtggatacggactttccggaagacgcatcctttgatctgaacctggatgctctgctccagtacaagcgggatttgagccgaagcgccctgtatcctacagaagccagtgaagaaaatgctgtagccatgctgaaacggattgaagaggcggcagggtga

SEQ ID NO: 10825 - DNA, 1974 bp, Dialister sp. CAG:486
atggaatttattcagttttgtaaaatgtttttttctcaaacgataaattgggtgttcattgtggcattctttgctacattccttttatataaataccattttgtaaaaccattggacgctcggtataaagaaatagagacatatcttgatatattgaaaaaatacaatccgcagaatgtcaatgcttattttgagtcattatctcaggaaatggagaatagtgatctcataaaggggatttggagaaagtatcagcggacactgatttctatccccggaaaagatgggctagagaagtattcgactgttgaatcggagtcctatttttcagttgcagcatttaccgagggcatgaaaggcggactttggtcggggttagcggggacttttaccggtatcggcattttaggtacttttatagggttgactattggtctggcaggtgtagataccagcagtaccggcgcgctttcttccagtatcagtggtcttcttggcgggatgagtactgcgtttgtgacatctattttcggtattgtgagcgctattgtatttggcgtgtggcatagtcagaatatgaaaaggtttggcgatgcggtttctcgttttactgatgcactggatcaggtcttcattcgcaaaagcgtggaagaaatcctgctcgaagagctggcagaaagccgggcgcagcgggcagcgatggaacagctcagcacagatatggctatctctatttgtgatcatctgccggatgtgttggatcagttggcggagaagatggatagtgccatgaagggcaatctggatactatgcttgtgggactttcagaaagacaggataagcaaactgaacagctgatgcagatttcgtctaataccaattcccttgtaagtggcggttttgaccagctgggggatgttctgaaaaaaggtgttggtcagggggcagaagaattaggaaattcgctgaagaacttgtcttccgatattgcatctcttgctgaaggaattcgggacattctggaccgctcgacgaaggcctcttcggaagccaatcagaaaacgctggatgcgttgaatgaggcgatttcccaaatgaatgagaccatggaaggcatggcgaacaaacagacggaagagacggataaaaatattcagaggatgacagctctcatggaagagatgaaaacgaccatgaaggatatttttgacaagatggcagcgagtgcgaaggaacagcgcgcagaaattgacaaaatcgctaaagacagtgctgaccagacgaaagaaaatctgggtgtgatcaatgccagtgtcaaggaactcatggcggaaattgctgatcagatgcagcagatgcagtctatgatggatacgcatgaaaaacatatgcaggaaacgctcgatcagatgcggcaggcggtgtcctcttctgggaatgtagtgaatgcggctggtaagacggtagaggcggcgggcaagaccgccaaggtattcgtagaagcggcggatgatgtttctatgaaattgaaaacagcggcagaacctttacaaaaggcagcccagcctctgcaacaggcagctgcttcactggacagcggtgtgcaggtgctggctcagtctatgacaaagcaacaggcggatgcaaagagcgtagcagagtcgatgcggaagatttccggcgattatatggaatcttctctgtatgtaaaaagcgcactggaagaggcgaggaactcttggactgcctacgaagaccgtttcaaaggggtcagcggagagttggagaaagcttttgtacagctggataatgggatgcagaagtataacaaagccaccaatgagggcctgatagcgaagctgaaagaatttgatgaaacgatttcgacggcggtcgatacattggccggcgtaacggaggaggtaaatgagaatattgaagatttgacagatgccattaagaaaatgagataa

SEQ ID NO: 10826 - DNA, 687 bp, Dialister sp. CAG:486
atgcgaagaactcgtggaaatacacaaatgcaggaaaatcatgaaaatgcctttaacctgtccatcagtgatctcatggcagggatgctctctgttttcatcttggcggtctgctacttcatgctgaatttgggacaggtaaaagatcaatatatgggaaacaatgccaaaagagaccagctgcttgaagaaatccaagaggagatgagtgagcggggaatctctgttaagatcgataagaagcagggggttctccgtattccggaaggcgcactttttgcacagggagaagccgatgtcaaagaagaagggcagcaggtcatccggaatctgggggatgtcttgtaccaattgctcgataaaaaagagtataaaaatgtggtagaaactgtctttatcgaagggcatacggacaatgtggatattcatacggatgaatttccatcgaattgggagctgtctacgaagagagccatcaatacatggaatctgatgcgtggggatgtgccggagctggatagagaaaagaatgccaatgagcagccgatattctcttgctccggctatgcagatacccggcccatcgtggatgatgaatatgatgaggactcagaagaaggcaggcaggcgaaccggcgtattgatttgcgatttacaatgatgcctccggtggatgagtccaaatag

SEQ ID NO: 10827 - DNA, 1314 bp, Dialister sp. CAG:486
ttgagccgtcaagcgagagaaagcaaagaacagtggattacgctctgccttcctcagatagaaacggtgcttagaaaactcagagagaaggcagataagatgatccaggtggaccccttggatctacaagtgctggtaaaaaagacagaacgtatgtaccagggaagtcaagaagagtttacgcgaagggaaatcagaaatcttcctttcgtcatattctctcctgagttatccatgccagttgctaaatttgctttgcgtcaggtggatttagataaaacgagttgttttcggcggttgctttttgcttattttcgtggctatgagccgaaagaaagcaagacggaatggatacgtaccgtgctttggaaacaaatgcagagaaatgacaggatgggaagaagtatccattttctgcaggatttcccgcagcttcttgccaaagatggtgtctcgcaaatggcagaattcttctccgaaggaaatctccgtgacgcactcaaaacattgtcttttcctcccacgttatctggaagcaattttgtaaaagctgctatagtgaaagcgtttcaaatggatattggattggatgccaagcaggtgcttcttgaaaatttgacgaaagatcaggtttacaaaggactggttccccaggtggtgggacctgtcatcatcaatgtggacgaagaaggcagtgacagtgcgaagaattggttgatgcagcttatttttcggtacatgggagatccgagagggaatgatacggcttggctatacgtggaagaagaagcaaaggaaattttcttgcattggctggtcaaaaatgactttgctgtattctttcatattattgcgagtactgcagatgccaagtggaagtacaggcaggatttttggagcgcgtacatggatgaaatacgtgcttcccgcatcatcataggccaaaaggcaaagctcatgctgaatgaccggccaaaagaggagaagagcaagctaatggcatatgattatctggaaggaaaatcttctgacacgagtctcttggtatttacaataggacagtatacttttatagaggtcagttataacggaaagcttcgtatctatagccgcgaaaaatcaccaatccagatttttgctcagggacaccgtacgattccttacagccatttaataaattcagatacagagaaggagtttgttcataccaatccgagggggagtggaccgaactggcagcctaaggtgagaaactggatttatgatcattgcgacatttggagagaggaacagcaatggaaggtgaaggtatag

SEQ ID NO: 10828 - DNA, 3294 bp, Dialister sp. CAG:486
atggaaggtgaaggtatagccatgaatatatcctactggacttgcagcgaagagggataccattttcattgggagggagatagcccccagtgggaagatatccatacagaactggatatgttggaaatggaagggaaggcagtgaaggtgggagattcctatcggatctctcacgagacagctgtctctttttcgcgtgatgaaagggagctcttgacgctgcctcccatatttccctatccgttgtttgtaggaaaagaaggtctgccgcagaataacagtttccgcttgaaagtgaattttcaaaaagcggatgggacatatttcatgaatccggaagtgatgggctcctatatagatattcgtcccgggtactgttatatgtgcagtgaggagcagtatgccatcttgaaaagtgcatcgtcatgtaatgctgagattggtcgattgaaagagcgagagaaaatcttagcttgtagcctgcgatatgtggcactcatcaaggagaatgccaaaaagattgacgccagactcgatccgtttttggaaaagatcgatgtagtggcacctgattatttaagtatctcggtaaaagaagatacggatggtacatattatgcctctcccgtcattttgaatgctgatggcagtccttatggggagaaggatgccagtgaatttggacgcaagtttaaaaacgggagcaaagcgcagcggtcgtacatggggaaagatcgtacctattacgtatttgatcaggagcagcaagatggattgcagcagatcaagaaggcccggaaactgacaaaggaacaggccaaaaccttggttctgtctccacaaagtgtctttaccggagctccatttcgctttgatcggggtgagtactcggatcgtgtgattgagtatggagcttttatcgcaaaaaattatccttacctcaaaggaatagaaggcggctggctaccggaggaagggagtgtagggagagaagatcttgacgggattgatgaacttgacgaaccggaagtgaccgaggaaaatgtggcgattctcaaagaattgattgagaatgcttttgcaaaaaacaagtcttcgatttcttaccaaggaaaaacgtacaaacttactggtgctttcattgagaaggtgatggggaaggatgacgtaacagatagcaccggtggcagcgcagacggagagaagccaaaggaagatagaggaaacctgattagtgaagaaaatgccgaaagtgtaggctacgagcaggcaaatgagcagaggaggcagaagcgaagagaggcgcgttttcaaaaattgggcgcggatttgtcgatggagcaggtattatccggtttcaaagatagcgtagtgcctttttcctatcagaaagagggcattcgctggatggcacaaaactggaaggcagggtatcagggggtacttctcgccgatgacatggggcttggcaaaaccatgcaggttttgggattgatttccggagtcaagaatgcctatggtgaaaaagacatgaactctgttctggtggtggccccggtatcgctcttggcaaattgggaaagcgaattcattcactttgtgaaagaaggcgtttttgaagagatagtccctctgtatggaaatagtttcagagatttcaaaagagggcatgatctgcgccttgatttttctccggtggcaaagaacaggattgtattgacttcttatgaaacgcttcgtaattacgatatcagctttggctgtattgactggtcattcatggtgcttgatgaagcgcagaagatcaaaaacccagtgacactcatcacgaatgcagtgaaatccatgaaatatgattttgcaatcgctatcacagggacgcctgtcgagaacgcatgggtggatctgtggagtatcatggatttcgtagagccaggacgtttgcgggatttgaagaatttctgtaacacctaccaaaaccaactaaagaaactgcatggagatatggctggacaggaagcgctgggaaagaaattggaacaagagcttcagccgattttcctcaggcggcagaagactgactacctggaaggactgccgcataaagaggtcataccgaaacctgtgctgatgcctcctgtgcagagagaagcgtatgaaaaaataattgctgacgcaaagaagaaaaaaggaaatatcctgcaagtgattgcgatgcttcgagatacatcgctttgcccgcatctgacttcgtatgcggatagtacgtttgaaaatatgaatgtcgataccttcttcaatatgtcagcgcggttgaaggcgacatttcagacactggtgaatatcaaagccagaaaagaaaaagtactgatctttgtgacgagccgaaaaatgcagcgaatcctgaagcgttttctggaaaaggcattcgggatttccattcagccgcccatcaatggagaactgatggggctgaagcgacagcagatcgtggatgccttcaatcaaaaggaggggtttgcgattctgatcctttctgcagaggctggtggcgtcggctttaacattacggcagcgaaccatgttatccatttgagtcgctgctggaatccagccaaggaggatcaggcaacggatcgcgtgtatcgcatcgggcagaaaaaagaggtgcatgtgtacttgccgattgctcagtatgaagggggcgactccttcgatgtgaagctggatcagcttttgcagtacaagcgttcactgagtcagagtgtcattttccctaccgcggataccgaagtagatgggcaggatatgtataatgagctggtaggatggaataatgacatggaatcgggatctgcatgcagcacagcgtcatattggacaatcgaagacacagataaggtgacaggcgatgtgtttgaacgcatggtggcgaaactctatgcgagtatccccggctatgcggcggaagagacgaagcaaaccaataattacggggtagatgtggttgtggaaaccgatcagaaatcccggcggggacttttggtgcgatgccagcagatgatgggggcaagcctgtctcatgatagcgtggaagccatctacagcgcgatcccgttttatgagaaaaagctcgggtatcatttttcaggggtggtagtcacaaatgcacttgattttacgagccatgataaagaacgagccgctgcagccggcgtcaaactgattgcgcgacaggatttaacgaaacttttggagagataccccttagaaaaggatctctatatgatgtaa

SEQ ID NO: 10829 - DNA, 1947 bp, Asticcacaulis sp. AC460
atgggcagcgctttagatattttgatgtggccgttcgtcgttgtcttcggccagtcgtgggttgcgcctttcgttttgcttcccgcgcttctcggctgggctattattgtcatcgtccaggcggacggcaaggtacgcccgttctgggcggctgtggacaaacgtctggaaaccttacgaagcatcctgaaacccgccggcgttgattcgggacgaagggtatttgccgatcgttttgacgatattaaagccgtgatgtcgccagtcgaaacggacgctcaggcgctcgtcctagcatgggatgagtttcacgaaactctcgtcgacgaaaccgcaattcctattgtcaacacaagcagacctctgacctatttccaaaaggttgcgccatcacaacttcgcttgatgttttggtccaacatgtcggttggcatcgggttggttttgacattcttgggacttgtcgttgccctttatgttgcccaaaaaggcatgggaaacagtcccgatccatctgcctcactgatcgaacttttgaaagtcgctggggctaagtttttcgcctctattggcggtgtcggggcttcattgttgctccgcgggtatgagtaccggataaaccttaaatcacgagcaaagatcgaagaactttgctcactgctggaatcgggtttgctctacattccgccgcagaagatcgccattgaccagctagacgtacttcgtgagcaacgcgaccaactgaaaatgttcaacactgatgttgcgttacaattatcggaacggatcggtgttcagttcagtcaggcgctgcaaccggtgacggcgtcattggataggttgagtgaaggcttcagtggcgtaagagaaggccttggcgcaggcgctgcggaggcgttccgggatggtatcggaggagaactgcgagcgtttggccaaatattgggggagttgggcacaaaacttgacggcttaagcaccgccgttggggcatcgagtgatgatgctgccggcaagatcaaaaccgcaggtgaggatttcgccgccgctgcccgagatattcgagacgcctttgatcgcctaacctcgaacgtcgattcgctcgggaagaaattgacagatcaaagcgaccaggcatctcaagctcaggcggatgccatgagtcgagtcttgaaggatttcgaattgcttcaggggcggtcgtccgggacgatagagaaggctgttgaagcgcttcaatttgcggcgaccaaggccgcagacagagtgcaagaggagtttgcaacgactttggggaatgccatgcacgaaagtgaccggcaattccgctccatactggaagaatcgggcgaggggctcaggtccgtctccacagggcttactcaggctgtcagttcggcggctcaatccattgctgatgccagccttggtttccagcgcagtgctgatggtgcgaagcaaacagtcgacgcgatgtctggcattgttaccagcggtcgcagtctggcggtttctctcgatgaatccgcacgttcgttcggccaggctgccgatcccgtagctctgagcgccaaggcgcttcacgaagcggcggggcgcatttccgcttccgtagacggtgcaactcgggcggagcgcgaggctttgaaggagatgcaagtgtttgtagctcaggttcgtgcttcacacgaagaggctgagacagcccttcgcacctaccgcggccgttttgaggatgtggacaaatccctgggtggtgccgtcgagaagttgggagcggctctgggcggctcgttcgaccagttccgcgactttgctcagaagtttgatagcgagatggcgggagccatcaataagctcgctacccgcctggcaaccatcgaggatcatgccgaggcgctggagcgacataatgatgtgatgcaggcagggcgggcggctgaatga

SEQ ID NO: 10830 - DNA, 756 bp, Asticcacaulis sp. AC460
atgattatcgatgacgcccacgagccccaggtcgaggaagaaaactattttgtttcaatgacggatatgatggtgggtatgatcttcatcttcatcattctgttgatgtactatgcacttcagttccgtacagttacggatcaactgacgggagccgacgaaactcgggcgaagatacttcacgaaattcagtcatcactgaagtccaagggtgttgaagtcacgatagatactcaggatggggtcttgcgcctcccggacgctattctttttgatagtggccaggcagtgctaaagccgggtggtgccgaaaaggtcgcaaagctggcggcgacactgggcgatattctcccctgttacacggataccgtaggcgacgctgcatcgacacgcccctgtccgaccacggaacacaggattgagtccgtctacatagaagggcatacggataaagatccactgtcgggtggtggtctgatccaggataattgggatctgtcggtggttcgggccaccaatacctaccgcagcctggtcggggcggaaggacggcttacgcatttatgtgcgcgaaagggcagtgggtgtgccccagttttgagtgtcagcggctatggtgaccgccgtccagtcaaggcaggcgacagtaacgaagacaagagtagcaatcgccgcatcgacattcgcttgatcatggttacgccggatcggggaaacatcgaggccatttcccgcgaagttgaggcacgtcagtga

SEQ ID NO: 10831 - DNA, 1368 bp, Asticcacaulis sp. AC460
gtgagcggccttaaggaggcactttcaagcgattggattcgcaggcttagcgttagagcaccactcctggtgagggttggccgcgccatacgggccttggacggcgaaggcgtaagtgctgagcctgagaatgttgacgctctgcagcggcgcctgctggccagcctggagactggcgaaggtctgagtgggcgggacttgcgcgagggcgcacgtgtgctttttcacccgcctttgcagccgggccgggacgagacctttttgcggcatttcgtagccttggtcgagaagcaacatcgacgctcggcgttgtttggtcttatcgacgcctatatcgaccggttttcaccagaccacgctgaaatctcagtcctggcgcgagaactcaaagcgctgactgcccaatggccatggcgcgaagatgatgtatggcgtttacgcgataaagcatttttcgatgttgatcaggttgccggacaaatcgcaaaacacgtcttgcacgacgatttggcgccgaatcgcacgatggaagatgccggtctggacactgccttgcgccaaaaaggcggcttggcgctggctgcgtttgtttgcgcctgccgagaggtcgcgactaaaaaaggcgccgttgcagggcggatgcagtcaaggctcatagattgggcgcggttggatgacagcccgttgaactatccggctgcctggcgcgactatgctgaagccttgctggccccttggtcgcaggcagagccctcagaagcacacaagtccctggtgatcgaggcggtgtttgcctatggcggagatccaaggtttagcacgggccgatggaatcaagcctcggccgaagcgcggtccgtgcttaatagttggttggcccgggcttcctttgaacagttttttgcgatcgtggacaggatggacatggctggccgtggtgatatgtggcgggacaggaaaactttctggtcgcagtacctcgatcaagtctcaaaagcatgggtcgtatttggtgaagatggcgccttcatcgcaaaacaaatatcgcgacagtccggagatgcgtcatttctgaattttggattgcacgatgctcgctcggggagaaccaagcaacacacagcccttatcatggcgataggcgagttaactgtggtcgaatggagtcataatggaagctggaacatttggcttacatcggacagaacggcacccaaattctacgaaaaaaattacaggtgctatcgaataatgaatgccccagcgcttggggaacacaagggttgtggatcacatgaccagcctggccgttggaaaggcaaaattgcaaatatcatcaggcatttcacggggattggctggcgatga

SEQ ID NO: 10832 - DNA, 3561 bp, Asticcacaulis sp. AC460
atgaaatttccttttttcaagtcgaaaaaggataaggaaagcgcagattttacctgcgaaatgcgcagtgaccgcgttttcctggccatgcttgatcgtggaaaatcagttcccgtctccgaatggtcgaggctgaaacctggcgcggcgagtgctatcgcaaccgtatgcggccttgacgaggcctttgcgatcgttgacgaccacaccatcgaatttacgccgagtggcttggctgaacttggggccgcaacagggtcggcgttaaatctaccctcgcctacgcccttggccctggacatcaaggcgattggcaggatcgacgaagatggcttcatagtccaggtaacctgggtccggctgggtggccaaccgatccgagctacagtcgaaggcgccctgctgcgggctgatggccagcagtggcgcatcccgcagccgctgtacgcctgttggtgcgcggcaaaagcgctgactcagccaaccgataaggccaatcggttccgcgcgctggccgctttaaaggcctgctggcctgaaggcacggcggtaacctcggaatcttatctgcaggatttacgtgtgcattacgcttcggcgatgtctttgaaactgaagacattaacgcccaatcgaacggacttcgatccgatcctctttggtccggcggccgacctaccttccgaggacaggcaaagggatgaggaatgggacaaccttctgacgccgcgggcgcaaaagctgtttgctgaaaaccggtttcgccgcgaatccgagggccgtccggtctacgtgctgcgcgacggggagtacgtctttattgatcccgaactacgaccgattctgaactccattcgaacgcttcaggatcgtccggaggcagaacgccggaattttgtactgaacccgcgtgctgtcttgcgaaccttgattggggaggcccgcgccgacgaattgccgctggacgagctatttgttgagacacagcaatattccgatcgggtggccggggttgacctttggcgggttgctgtcctgccgtggatggtcccgtcgcataagaaccactggctgccggaacgcttcggtttaaaggtcgccgatgactactatgctgtttcgcccgataaggtcgaagcactggtatcatctgtctcggccgcggctgaggccggccagcccaaggtggatgtctcaggcctgcttcagggcgtcgccgccgattctacgcctcccagtcatttgccggtcaatgatcaggtcttggccgccatatcgcacctgaagccgtttgccgctggcactgatgccggctccgcggacgaagccagctcgccggcagaagaaatttggccggggaaactgttccttatcgtaaaggagaatttcgaggaggtggcgtttgcgcctcgcgaaacgccagaaggaacggacagtgatcctgtgtccgttccaagccttctgcgaacgcccctgaaacctcaccaggttgaaggcttgggctggctggccaaatcctgccgtttggggcggcgcggcggtctcttggccgacgatatgggcctgggaaaaaccttgcaggctatcgcctttatggcttggctccaggcacagcggcttgagcacggtggggatcgttcggcttgtcttatcgttgcgccgaccggcctgctgggcaattggcgtgatgagatcgccaagcacctaaatgcccctggcctgggacgattgattctggcgtttggtggcgacctgaaactgcttcgtgaagaggccgacttatcgcagcgagacattgaaaccggtcgcgcgtcccttgatgcagaaagatggcgtgagggtggggttgttctgaccacctatgagactctgcgtgactatcatttcagctttgcacggacccggtttggcctgattgtttttgacgaaattcagaagctgaagaacccggtcagtcagatgacccgggccagtaaaacgttgaatgctgacttcgtcctgggcatgaccgggaccccggttgaaaaccggttgcaggacctgtggtcgattatggatgtgatttcccctggtcttctgggcgcatctcgtgattttgaacgcaggtttccgcccgaccaaccagacaagctggccaatctcaaagcgcttttgacgaaggatacggatgggcaaacgccgtacatgctgcgccgaatgaagtctgaggtcctgggtagtttaccagccaaacatgtccacacctatcgcgtggccatgccgccggttcaagccgatacttatcgtcaagtggttgtccgggcggcggcgctgtcggcgagcggtgcgttcggcaagggggggatgctccaagtcctggccaatatgcgtggggtatctctgcatcccgttaatccggagcaagctcccgacagcctggatatctatgctcgtgactcggcgagattgaccaaagctttggagatcctcgacatggtttgcgagcgcaaggaaaaggcgctgatttttgtcgaagatttggccatgcaggatcgactggcgggtcttatccaggcacgtttcaagttgagaacccttcccaaacggatcaatggcggggttcccggtcccaagcgtcaagatatggtccgggcgttccaaggcagcttagatccgtttgatgtcatgatactttcaccgaaagccggtggggtcggactgaccttgacccaggccaaccacgttattcacctgtcgcggtggtggaacccagccgttgaagatcaggccaccgatcgtgtctaccggattgggcaggcgcgggaagtgcatgtacatattccgttggcagtacatcctgatcccgtgttggcagagaccagtttcgaccttcgcctggatgcgctcctgagccgaaaacgccaactcacacaagatctgttctcgccgccagaagcagacgagaacgacttgatggttctgtttggcgaggtgactggcacccaggatgcggcggagccggcggcccctgccgtcgaagttctcgcgccggagcgagaggtcaaacggcagaccttaagtctacccgacgcccctcaagcctccggtgcgaggaaatggaaggctttggctggaactgcgcgaccgacagcagagatactgtcaattttcaaggggcgggtgatcgtcgacatggtcattaaagacccctatgcgcttgctactccgcgtgcacggcaggctcatgtgtcatttgtggaagatattgccaaagaagcgtcgagcttggggcaggtcaccatcgagtatgtacccgacttagggagtgcggatgacagccaggaccggcgagatatcggtggccggtttgcgttgaacagcgctggtcggcaaaccgtcgtccgtttgaaaagtcgccccaagagatcaggcggcgtcgacttccatgaccgaagcgttgaactttcggtccgtcacgctggtggcgcagttagaaagcacgaactgtggattggacgcggcgtcgaggccttgtatcacgacggctttgagtgctccgtttcgtattttcaggattcgtga

SEQ ID NO: 10833 - DNA, 1989 bp, Asticcacaulis sp. AC402
atgactgtggataagcctattttggatgccattttctggttcttgggcatctttttcaagcaagagttcgtcgcgcctctcattctgcttcccgggttattcatttgggctggctatttttggttccgtgccagccagcggttgaaacctttccatgcggccgttgcgacgcgccttaagacgcttgaggcggcgctgggtgacgacctagacccttccgccgccaggcaagctttcgccgagtcgtttggcgaggtaacgggagccatgaacgaccgtgcaccaggggctgaaccgctggtgcgggcctggcaggagtttcacaagacgatcgtcgacgagtcggagacgcccattcgcaataccgcgcgtccgagtgccttcttcgtcaggattattccgcagcccagagacttgatcttctggtccaataccttcgtcggcattggcctgatcctaacctttatcggcatcgtcgtggccttgcacacagcgtccgaaggtatggaggccggcagcacagcgcagcagtcccaagtggcactccagggcctgttgagcgtcgccgctgccaagttcttcagctccattgccgggcttggcgcctcattgatgctgcggttcgttgaaaacaaaatgacccggcgcctgaacactgaggtcaatcgcctctgcgaccttctggaaaagggcctgatgtatgtccctgctcagttgctggccgttcagcagctcaatgagctcaagcgccagtcgacacagttggagaagttcaacacagacctggccctgtcgatcggcgaacaggtcggccaacagttccaggcggtgatgaccccgatgcaggcctctctgagcgcgctgcatagctctatggactcaatgagcgacagcctttccaaatcgcttggcgagggcgttggcaaggccatcgagggcgccgccagcggtcaattgggtgaattggccaagacgctcgcaaaccttggcgagcagttggcggggctgtctgagcacgttcaggactccggcgaggacgccgccaagcagatcagggcagctggcgccgacttcgcccaggccgcccaggacattcgcgaagccttttccggcctgaccggccaggtcggcgaaattggcgcggccattacccaagacgccgaggccgcgcgcaaacagcaggccgatctgctgcaactgaccatggccgggttcgaagcggccaatcagcagacccaggccgccatggccggtgccgtccaatcccttcaggatgccggcaccaaggtcgccggcgatcttcaggcccagatgggcgatgccatgacctcggcggcaaaggaagcccaagcgttggtccgtgcggcgatcgaagactccagcaaatccttcgccgacgccggtaaatcgatttcggaggccgtcgagaccgctgcgctcaggattgctgctctggccaccgcgatcgaaaagagcgaacgccatgcctccagcacggccgaggcctttatgaacaccgctgacggggcgcgatcggcagcttcctcgatggccgacgcggcgggtggatttgcgaccgcggcaacgccggtggctaatgcggccaaggcactgcaagaggccgccacgcggattgcagcaaagctcgatgagagcgaaaaatcggcgctcgaggccttgaaggctatgcaaggcttggccgatggcatcgctgacacccagtcgtcagcgacagaagcctggaccagctatcgctcccactttgacggcgtcgacaaatccttggagggcgtcctggggcaaatgacccagaccttgtccaactcgatgaaaacctttgagaccttctcacagaacttcgatgccgagatgggcaaagccgtcagtcgtctgggcggggtgctggaacccctcaaggaaaattccgaagccatctccgaactggctgatgagctcaagaaacaatccagggcggagtctggtcgatga

SEQ ID NO: 10834 - DNA, 804 bp, Asticcacaulis sp. AC402
atgattgcctccgacgacgagcatttcaccgagcatgtcgaagaagagaattacttcgtgtccatgacggatatgatggtggggctggtattcatcttcattattctgatgatgtattacgctttgcagttccgcaaggaggccgaccgcaggaccgaagcgaaggacgagcgcacgcagatcctgacccgactaaaggacgagattgaaaaaagcgatcctaaactgcaggttatcatcttgccggaaagtggtattttgcgattgccggcgagttctttgttcgacagcggcgaggacgctcttacaccctctggcaggacgacagccgagtatttggccgaggcgctgtacaaggtcataccctgctataccaatcaggtacaaagatcgcccgactgcagtcccggcagcgaaaagataaaaatcgaagctttgtttatcgagggccataccgataccacccctttcgccggtcggccgggcatcagcaacaatctcgaactgtcggtcaagcgcgcttccaatacatatgcccgcctgacatcggttgagccggagctcgaaaatctgaaatcaggcacgtcaagccatgcagtaccgggcacctcaggccagaccgtactcagcataagtggttacggtgacaagcgtcccgcctatcgggagaccgatgccgcctccaaagccatgaaccgtcgtattgatctgagaatactgatggccgccccgctcagcgatatgcccgcgccgcccagcgacgaggtcgtcaaggccctaaaagaacagggtttacgccaatga

SEQ ID NO: 10835 - DNA, 1395 bp, Asticcacaulis sp. AC402
atgagcctcagggatgcggtcacctcgccgaaagaattcagcgggcctatccgcgtcagagatgtcgagcccatccagatgcgcaaagccatcaaagccttgccagacttcggttcagggacacccaagggcctggacgtggctgaacttcaggcgcgttttgttgaccgggtatccaacaatacactggccagcgtcagcccggccgagatgcgccaatgtccctacggttttttcgatgaacctcggccgtttatcgatgatcccacggtcacagcggctttgttatcggagctggctacgcgggcgcaaaagtcagccacacgcattctgatctatcaatatttggagcactacaacccatcaaagccgggctgtgtcgctgttgccaactggctggaccagcaggtgatgcaatggaactgggcctggcgggaccggtcagagacctatgccctgttcaacgccgaagaggcgcccgccaagctcgccatccatattttggccagccaagcgcctgttcgcgaagtctttgaggacctgggcctgagcgacaccattctaaccggcagcctcggtgaggccgcttttgccgcggcatgcatcatcgtgtcggccagtcgctcagcgaaggcgcaagggcaacagcgccggttgatggagtgggcgcggcgcggcgatcgctttggctatgaaaaggcattccccgcctatgtttcggcccttctgatgccctggcaatcatcggaaccagatgcagcgcacaaggcagccctcctggccgaacttgagtcctttgccggtgatccgcgcgtaaagccggcaaggtgggccagggtaaagagccaggctgcgcaggcctatgacgtgctgatgcgctggctgacccgggcctcggtctatcagtttttcgacattattgaccaggttctctcagccgatgagatgcgtatgtgggcctaccggcgcccattctggacatcttaccttgagcccggttacatcagtgaggcgtgggtggcctttggcgccaacggtgcgtctcaggccaggcatgttgcaaggacaacgggaggcgacgcggccttgggttttgcaacccttactggcaaatcacaaagccacgcagcgctcattatgaaaataggcgacctgaccgttgcggaatggagccacaacggaaaatacaatatctggccatccgccagccaaaacgcgccccggctctacaagacccgttacgacgcctacgagctttcgggtgcacctttcgatggttcgcactatgggtccgacagcttctcctggcaaagaaaaatagcgcgaaaaatcgaagttgaaaccggcttttcgacgcagaaaacgtcctggatgccgaggcgatttggccgataa

SEQ ID NO: 10836 - DNA, 3759 bp, Asticcacaulis sp. AC402
atgttcaccacccagcgcacccgtgccatcgcttttagcttcgatcaagacggcctcgacgtcctgatctcggcgcaggtcaagaccttgctcggcaccaagccgttgccgtttgaacaatggtccgcgacatcgtcaaatgtcgcaacagcccttacaaaaatactggcagacattgaagatggtcggatagcctccgacggcaggccacgtgccatcgtgtcggacacgcaactcaggctgcatccggaactcgtggccgatttggacagcccttcggcctcggcgctggggctgccggccacgacaacacttgcgctcgatctccaaagccagaacctgtttcatgagacgtctttcgttctcaaagcccggtggctgaggggcggtggcggaccggcacgcgcaacagttaccggcgccatcatcagctacgacggccagaaacgtcgcctgccggagcctctgtatagcctgtggcgcaccgctgaggcgctggcatctccccaacccgaggccgagcggtttggcttggtggcacggttacagacccttcttcccgaagccgccgcccacagcctgatgaccaatggctacctcgatgagacgcgtgtggtctatgcctcggccttttccctcaagctgggtaggcaggatccctttgacttcgatcctgtcctgtttggtcccggcgtgcgtgcttttgccgacgaaggacgggtaccggacgaagaggtcgacaatgtccttactccgcaacagcaacgagtttttgccgatgagcgttttcgtcattatcgcgatgttcgtccggcctaccctctgagaggggggcaatacgttttcatcgacccggcgctgcgtcccgtcctccaggaagtcagggcgctgcaatcgggtacggtcgagcaaagacgcgagtttgtcacgcatccgcagagggtgctgcgtcagcgacttggcgacgaagtggccgaggcgtcggatctggagtccctgtttatcgagaccgagcagttttcggcgcgcgtcgccggcgtcgctgtttggacgaaaaccgtcctgccgtggattaagccggtcgccgatgcgtggatgccggaaaagttcggcattcgcatcggcgatgatacacctttagggattgcgcctgccgacgtcgtgcctctgtcaaatgcagttgagcaggccatcgccgcatcccagcttacactggaattcgagggccaaaccatcccggccaccgaacagacgcgtcaggccctggccgagctcaggtcattcgtcgaagcagagatttctcagcgaggccaaccctatacgtccgctcttccaaaatcgctacttgagaagcgattcctgacggttcgagaaaacttcgacgatctcgaatatgtgacgctggaccattcgccccaagcggtggtcgacgaagcgttcgtccttccggaaatcattagatccaaacccaagccccaccaggtcgaaggtatgacctggctgcaacgtctttatctctcgggaaagagcggcgggctcctcgcggacgatatgggactgggcaagacgtaccaggccattggcttcatggcatggctccagacgcatctgcttgcccagagcgccccaaaacgccctttccttattgtcgctccgacaggcttgctggccaactggcgaaaggagatcgatctccacctgcagccgccgtggcttggggacattgtgctggctttcggttccaacctgaaggccttgcgcgacgaggacagcttcgatcaaaaagacatcgtcgctggccgcgcatcattggaggccgcggcctgggcaaaggcaggcgtggttctgacgacctacgagacactccgcgattatcacttcagcttcgccaaaagcccgttcgagctggttgtcttcgacgagatacaaaaactcaaaaacccgacgtcgcaactgaccaaggcggcaaagaccctcaatgcccgtttcaccttgggcatgaccgggacgccggtcgaaaatcgcctccaggatatctggtcgattaccgacgttctgcgccctggctttcttggactgagccgcgatttcgagaagacctacgtgccgtccgacaaggcggcccttcggtcccttcgcggcaagctctgtgacgccacggtcgtgagcgcaccctacatgctgcggcgaatgaaggtcgaccacctgccagaaatgccggaaaagaccgagcaggccaaggccataaccatgccaccggcacaggcgctcgcctatgaagaccttgttcgccgggccatggctgggcgaggcaccatgggcaagaatgatggtatgctgcaaaccttgcacgccatgcgctcggtttcccttcacccgtaccgaccagatgagtcggacagtgatgacacctacgttgcccaatcggcccgactgctttggaccatggacatcctggaggcggtaaaggccaagaaggaaaaggccctgattttcgtcgagagcctggacatgcaggcgtgcctggcacggatgatccagacgcgcttcggactgcaggcaccgcccagccgtatccacggtggcgtccccggcgcgaaaaggcatgatctcgtcgaggcctttcaggcgcgagtcggcagctttgatgtcatgatcctgtccccaaaggctggaggggtaggtttgaccctgacggcggccaatcacgtcattcacctgtcgcggtggtggaacccggcggttgaagaccagagcacggaccgcgtctaccggatcggccaaacccggcccgtccaggtttaccttccgatggccgtgcacccggacccactgattgggcccagcagctttgatatcaaactaaacgacctgttgagccgcaaacgcgccttgtcgcgtgacatgttggtggcgcccgagggcgaccaagccgatatcaccgaactgttcgacagcgtctcgaccttcgctcgtgagccccagacgccaagcgatgagcagcctggtttgccgcctgagtcgccgcccgagtcgcaggctgagacgatacctgagcctgtgcctgcaacgccgcctgaggtggtggtggcgcaagagattgtacctgacgccgagcctgagactgccgccctgccggcacccgaagcggttccgctggcggtcgtggccagcaaagaggaggtggcggctgcagtctcgccaccggtttcgccagcagttggtattcagacccgcaagatcttgacgcttccgggcattaagccaaatcgaccgtcgatcatgttgtgggacttccctacgggacgcgcgcgcgatctgacggaaatcctcgacctgtttaccggggtcaaggtgtcaagactaaagatctcggatccttatgccattgccaatagcgaagcgcgtgaggcccagatggccttcattcgggacgtgcgcaaagtggtcaccaggcttcatgaggttgccattgaatatgacccccggcattccgagccgcgcgaagctgaggagcagtcaaggcgctacatgcatgaactttggctgttgcacttcaacccgggggagtctccattaagacttgaaaggcggcagaagagctacctgcgtgacttccatgaccgcatcatctttttggaccttccccgcgccgcaggagctgtcgccacgcacgagttgcgcttgtcccgaggcttaatcggcttgatgacggaacgcatgcagtgttccgtcacctatgtggcaccgcgcgcctga

SEQ ID NO: 10837 - DNA, 1851 bp, Planktomarina temperata RCA23
atgaaatatttgagtcaagtaataggaaagatggtaggtgcactaatggaattcattcaagctattggtttgcccgtaaagaaagcaattttgtggttggctggtgttttaaccgaaagtaaccttgatacgttgtcatcagaaaaaggtgctgcgcctggttttgttgcagcattactttttgtcttcctgattattggagtacttatttattcgtttcaagtaagacgaaaaagccaagccattttgtggctttataaacttataaaaagttacgaaaccccccaagaatttacgcagaacataacagatattgacatagaagttagaaagcgttgggggcaaaacgcttatgatgaattggcacgtggttggctagaatataaagaaacccttgtactatatggagagggcgatagccgtcaccttcgcaattctgtgaggccggcaacatttttcaatgctgaagaccttaatttcactcctgggtcttggaaaatcgtacctggtttattcgttacgattggtttgtttcttacatttttgggcctagttgctgcgctggatagcttaaaggttagtggaatggatgctgcgcagctcaaagctagccttcaaaccttgctagaaacggcctctgcaaaatttgttatgtcgttaactggattggcctgctcgataatttttactatcaggcttcgcaccggtgtttcgcaaatcgagaatagattacatgaattggccaaccatactgaatttcttctgaaatttatatctctggaagatattgcatcggatcaactcgcagcgatcaaggaacaaaaagagcattttagaactattggtttggaactcgttgccgagttaggtcggccgctcaaggaggatctaccaataacgattgcacaatcgatttctgacgcaatgtctccgttaatctctcaagttactgaagtaggaactgagggtgtcggagggatggtcagtgatttatctgaaaagttttcaaaagatgtaagcggagccttagaaagtgcctcattaagcattcaggctgctggagataaaatagaccaaagttctgctaacataggtgctgaactttcatcttcggtattggctcttaaacaaatgatagatgaggttcagggaagcaccagggaacgtatgctcgatactggggaggcgcttgcgagtagctttggccaaactgcaaatcaaattacagagcaagcaaattccctttcggacacgctcattgcaccattgaacgatttgcaggcaaaaatagccattctaagttctgatatttcagaaagtggcgcccaatttaaagtaatgtcagaaagtgttaaacttggtgcagatgcgacgcaaaaagcagcttcatctttcgagaaatctgcgcaagatttctcaaaagtaacgtcacccatcaatcgttctattgagcttattgctgggtctattagtgatttagaggactccacagcgaatgttaatgataccctgacggagggtataaagcagctcatggcatctagtgaaaatgcattgaattccgctgtagaaataatcagaggtgaacagtccgcactggagaatgcgcttcaaggaatgcaagatgttatcgaagaatttagagggcaaggtgaccgtctggacgagttggacgaaaaacttggcgtagcatttgaaacttatgccgagcatgttgaaagtcagcttgaagagatgaaacttcacgcaagagatcttacagaacgcttaactcctgctttggacaaaatgcgtgaggttgtggagcacgcagagcagtttattccagaatctggagttcagcgtagatga

SEQ ID NO: 10838 - DNA, 1296 bp, Planktomarina temperata RCA23
atgaggtcccttggacgaaaacgcagagacgaagacgaagaggagtctgtctttgttccaatgacggatatgaccgtttcatttttgtttattgttatgattttactggcattcttcgccgtacaatttacggatgaagataatgtaccacgttcgatctatgaggaagttgttttagagcgtaatggtctgatcgaggaggtgaagcgcttaaacatagagatcgataagctggaaacgttgataaaaaaacttaagttagagaattcaaatttaacaaaccaaaatactgagctcactgcaaagaattctcgtttagatggtgaaattaaaattgctctccgtaaaatttctgaacttaaagaagacgtttccttgttaaaggccgatttagcgcaggcagatgaaaaaatcaaatctttaactctaaaaaacaatgatttgacagatcagcttcagaagcttgaagatgaaaagaatgatttattaaaggtaatcgatcaaaaggatgagttgctcagatcaaaggatgacataattgcctctctagaacgtagtgtcaaaaatctcaatgatcaagttactgtaaaaaatcaaaaaatttctgaattagagcaacagctagaagagcttaaggcaaaactaaaagatgatccgttagaagcttatttgattgagtcacaatatcgaagaacggccatcttatctgaaattgaaagaaaactaaaaatagaattcccgaatattctagtagaagtaagtccggagaatgatgcgttgaggttcaaaggtgatggattgttcacatctggatctagccaattaagctcattaaaaagaaagattgttgagaaggttggagttctggtcacggatgcaattgagtgctttacgataaatccaaaagagcctgactataaatcctgcaatccagatgggatactaattgaagcaatccagattgaaggccataccgataatactaggttcgtaggagcagatggcagagataggaatattgagttgtctgctaaaagagcgacatcagcattttttgcaatgaaagacgctaagcctaacctgctatcctatcaaaatttgaaagggcagcctgtaatatcaatcgctggatatggggatatgcgccctgtcaacattgaccccaagatgaaggctgaaaatcgtcgtattgatctacgattgattatgttcactccagtaagcagagatcagatcaatattattcaaaggcggatcaaaagtgatcttgaaatccttcttgaggaggtaaagtga

SEQ ID NO: 10839 - DNA, 2028 bp, Planktomarina temperata RCA23
atgtctcttagcgaagttctaattcgtcgtagccaaccagcaacaccgtcatctgtaccaaataccaactatgtggagtcagcaatcaatcgaatttttgatcgttggccagacattaaccctgaggcacgagaagaagatcacgaaaaaattttattacaattaaatgatattatttttaaaaacatctgggaagatgttaaaatatcgtttgtaatttcgggtttcaatattgcgttcttggaaaggtacaataatagacctgatgtgcaggttattacagattttgcatttaatgaattgcgagcaacgacgaagccatcaatagtaaacgcactgatgcgtatctactcttccactttttctttgggctctgaaaatacgaaaaaacttggagagatgctagtattaaagactgaattattaagtcaaaaatggaaaggcatattatatgagtttcccgattatcttttaccacagcaagcccctgaaactatagcggactttatgttattgagaaaaactccttgggtctcgttaaagcaggctggctttaatgatccatttgcctctggcattatggattatgcacatcaagcatatgtggctaaactcgctcccgatcttaaaaatctggacaatattaaacagctgttcgaatggctcattccagagtcaggaaaggttaaggctaccggtaatgtaatcgttgttgaagctctcattgatcattggctgaaagaaaccccgccagaaccacttcgccaatacattaccgaaaatttaattcttctttacgacgatccaagaatacgacccgagcgttggaatgcagtagagcaaaaatataaagatgtaatttttagttggctcactaaagaagatctacgttttttcacttcagtggttactgcgacccaaaaagaagaaatgtggattaaaaggcgagatttctggctcaaactttatgacgatgagttggtagatcaagcttgggtggcattctcacctaaagcagaacgctatgctcggcaaaacttatcttccggaaagtcagatttaggcgaaactagatttgctagacaaacaggcagatatggaacagaaacatctcttcttttcttgaaaattgggaataaaatattcgtcgatggttgccataattataaaacgcatgtttggaatatatcagatagagtagcgccgaaattatttaaatcctggtatcattgcgacgcagatattatgcgtaagtccccggcttcaaaaagtcatagccatattccgtcttggcagagctgggtaatggaaaaaatttatgccacagtgccaaattcgacctacaaacctgtgaattgggatgatccaagccgcagtttttcaaaccgaagtatggaacagcgaaacgccgctaccgacggccaatatgaacctgctcgggtgagacgaagttttggaaacaggtctaaccaaaacgtcgaggcagcttacagtccaacactaagagcgcaaggctcacagtcggcacaggccagtcaaagtgagcctatgcatcacagaagaccaactctcgaaagtttcgatatcgacaaccatttgatggttgctgaagtcaataaattgcaatcggtatttagccaaaatgattacagctcttttaatttgagaagttcaataaggagggtacagaaaggccaaacgttgaatacctcaaataaaaaagaatttgaaaatttatttacagagagtgtgatttctgctgaagattatccaaatttgagtagatttttaaaaccaatattcaaagaaacttctggacatggcgcactaacactctggcagccaattattaatgaattagtcaacgcagccaatcaaaataggatatcgatatccccaaatgcgaaaactgcgcttggtaaaatcaaagaaggtgagcagaatttgacccgaacagatattaacgcttttgagaatttcttacaaaacttgcgggcaaataaggtgagtatagatcaattcttataa

SEQ ID NO: 10840 - DNA, 3123 bp, Planktomarina temperata RCA23
atgcaaatagagttcaattactccaacgaaggcgtaatcattaattttttggggatccgtaaaggatttctcaagttttttctcagtagcactattaaaactagcctgtcacagttaagtaaagaagatcaaaaccttgctttagcgatagcggatctaaagttttgcgccgataacattcaatctcagttggatataagcgaggataggcttcaattttcgcacgaggtagctgcgtcaatatcgtctcaaactgcaaaaaaattaggcctgccacctatcagtcacctcaccttagaaactgacgttgtttcaattcctggtcatgatagttttcaattaaaatataactggtcattaaatggtcaaaagcagaacccaaaaagaataggtgctatactgcaaacctctgaaggcttgaggcggattccattttggttgcttcaagcaatagatttagctgaaacagagttagcgcagaagtctttagagcatcattggcaccaaatggctaagtttcgaaaagcacttgagccggattttgatacagcacacagctcgactagttcggtcgaaatgagtcaatttttatcaaatcttaaggtgaagatttcagatggtttctcgatactgccagatcaggatgaaaccactggaagctttgaagttattccattttcaaaccaacatattgacgatcagttaatcagctcggaaacaacagtaactgttgccatgagtgagctcgatcaagatgaactgcaaaactttcaagatcggtttgagcgcaaaggttctttgagcgcttataagattggtgatggaagctacatggtggtagagccatcttctaagccagcacttgatgttatggcgaatatgcaatcggcttctattgaagaaagacgggagtttatcaaaaacccccgcttaaaaattaatgaagcaattgaaagttatctaagtaagaacggtaagttagacggattgtcggatgcccaaaaagaagaaacaattgagcaggcctcatttcccgtttttattgagacggcagaatattctgaacgtgtcactggtaagacagtttatatggggaattcactacctggaggtgatggatctgcaacaacttggctaccggagatttttgatgaacctcaacgagactttttaaaagatctaccaatcaatgatctagaggaggttaagtcaaaattaaagacagcggtcgatttaggaaaagatattattgtttttcgaggtaacgaaataccagcatctgaagcaagcattgaagcaataaatgcgcttttggcctcaaaggaagatacagagactcatcccgctgagccttcagaagttccaggtggagatacagcagatgggcccataatcttagatgttgaaaataattttgagcagttgaaatggagagcagagattagtcccagatcggttacaattccgatggctgcaccaaaaaatattacaacgcagctgagaccgcatcaggaagatagtttggattggcagataaatgcttgggaagccggtttgccgggagttttaaatgcagatgagcagggactgggaaagactctgcaaacactttcatttctggcctggatgagagcgcaattaagtagtgataaagaagccaaggcaaaaggtccggttttgattgttgctccaacctcgcttctagtaaattgggaacaagaagtagaaaaccatatgagcagtggaggtcttggccagttggtgagactctatggcaccgcaacgagtgcgagaaaacgtattggtgctaatggtttagatactaaaactggtgaagatttattagatcttgatttcttgattgaagccaccaaacagggacaaggccatacattttgggttctaacgacttacacgacactgacaaactaccaacattcattaggtcgtatccctttctctgtagcggtttttgacgaaatccaggccatgaaaaacccaggatcgttgcgggcttttgcaggtacagctatgcaagcggatttccgaattggattgacgggaacgccaattgaaaattccacaagtgatctttgggcgatactagatcagatatcccctggtcgattaattccactcagtaagtttagacaagagttttcagcaccaaatcaagacaagatgcaaatgttgtatgaactaatttttgaagatgttgatggtttgccgcctatggcaattcgtcgattaaaggatgacgttgcaacagaacttcctaaaaagaaaagaattttgcacgctgaggcgatgtcagaacaccaagccacttcatatgaagaagcgaggggcaaattagtaactggaaagaaaggcgcagcccttaaaatgctgcatcatattagatctgtatcggtacatcccaatatctcctcagaacttatcgctgatgaatatataagcttgtctgctcggctaaagtctacctttgaaattcttgatcgtattcattcaaaaaacgagagagctttggtttttatagaacatatacaaatgcagtatcggttcattgagctattaaaggctaggtacgatttagaaaacatagacctaataaatggaaaaacaccgattaaacaacgccaaaaaatagttaaccggtttcaaagtcatttgaaaaatgatcgtggttttgatgttttagtgctaggtccaaaggctgcaggaaccggtttgacgttaactgccgctactcatgtcatacatttatcgagatggtggaatcccgccgttgaagaacaatgcaatgatcgggttcatcgcattggacagacaaaacctgtaacagttcacgtgccgttatcagtgcatccagaatacgaagaaaaatccttcgatttgctacttcacagcctaatgacttggaagagaaaattggctagttctgctctttggccaatgggtgacacagaggccgacatgcaaaaactgcaggagttactcggatcagaagcgacttctaagggcgacaaagatttcgtaaagaattcggttatcaaaatgtttgagcgagatgaagttgttcctttggagatagttgacgataagacatttgtttatgactaa

SEQ ID NO: 10841 - DNA, 2079 bp, Idiomarinaceae bacterium HL-53
atggataatgaaaaacaaatcgaattaacttggttgctgcctgatttatcgcagctcggtttcccgccacaaaccgtcgaagagttgagtagtgttttcgtagttacattgtgggcgattacttttattgcttcgctaatatttttatggaaatttgtccgaacaagaagtcggctcaaatggttttctaggattttagagggccttactcgagaggatgttgccaaaaagcgcatcgacttattaaatgaggccaaaaaaagagacaaagatattggttttctatggatggaatttgatgaaacccttgtagagatacaacgtggagacgtcgtagaagttcgaaatacacttgatgcagggcacttttttaattcgtattcattggcagcgggagttattgaaaacagacttgttgctgctgttccaggttttcttacagcacttggtgtgatcggtacatttgccggtctgcagctggggctgagtcaattgcagttgggtgccgacgttggtgtggctgttatgcaagatggtgttgctggggttgtagatggggccaaggtggcattcttaacttcggtttggggtgtcgcattaagcgtatttttcaactttggtgaaaaatggttagaacagaaaacacgcaaacgaattagagcaatcgaaaataaggtcgactggctatttccgagaattcgaccagaagaacaattgcagcttatttctgaaaatagtgttgaatccagagaagtgcttcaaggattggcagagaaaattggtgaaaaaatgcaggaggcaatgctcaccgcaacgcagggcattcagacgagtttagaagcgagcctttctgaaataatggcgcctgctattaataaactcgttgacgagacctcgcaaggaaatcaaaaggcacttgaaggactcttagagagctttatggaaggatttggccaagctggaaatcaacaacgagttgcgcttgatgatgtgtctgcgagagttaatcaatccgttgaatccatgcaggccaccatgagtggattcgtagagcagttacaaaaaacccaagcagaatcacgcgagagggaaagagcactgatagcagacatttcaaaccagattcatagtctgtcttctgtgtctgaagctacgcataaaaagctctcctcttttattgaggagcagattggcgaaatgtcgttacagatgaaaagtcgcgaagaagccgcagcgcaacgcgatacggccttggtcagcacaattaagactcaagtggacgagctgatctcaaactctcgcaagcaaggcgaaacgttaacaaagtttgttgagactcagttgagtggcctcgctaaagctatcgatgaacgagagcatcgctctaatgaaatagagcgagttcgtaacgaaaaaatagagagtcaatctaaggcgctaagtacactctcgagcgaaattttacagtctgttgaacattctgtaacagagcaagtaaacacagttaaacagctgatcgcccaagggcagacgctacaaaatagtattaattcctctgtagaagcgagcgcccaagccgcgcaagcgatgcgcgagtcatcaagcgaattgaggatttcagcagataatatgaagttattgagctctcacgtgaatgaggctgggaataaactatcgggggccattaaggaagcggttgagagcacatctgatttagctaatcagaatcaaatgtcagcgcaacgaatggagagcctgagaaatgaactgttatcagacgtaacacgatttagtgaacttacggaacagttaaacggactgattcagcgcaccagcactacgttctccgatctaaaagtaacacagaaagagtttattggagagttaaaaggcgaggtggaaagtttaaacagaaagatgactcaaatgttagaagactatgctgaacaggcaaatggtcaaacaactgagcaccttagagtttggtcgcagtctgtgaccgattattcaactcaaatgaatagcgcaatcaaagcactatcgagcgttgtagacgaaatgcaaagcaagttggggtaa

SEQ ID NO: 10842 - DNA, 732 bp, Idiomarinaceae bacterium HL-53
atggatagagtattcgctcggcgaaattctaaggtagacgaggaaaatccctactggatgtctttttcagacttgatgtctggcttattggttatttttattctggctgcggtcgccttaattattgagctgacacaaaaatcggagcggatagatacgagtattgaagagttgaaattggcagaagcagcgagaagcgcaattttacgtgacataaaggaagaactagctgaaaagggaattatcgttaatatcgttgaaaacgacaccgtattacggattccggaaagcaccctttcgtttgaatcgggacaagacacattgccagatgacgatagaactatttttgaagttcgagcgatcggtgatgcattgcatcgagctattaccactaatgagcgatggcggtatttagatacggtatttgtcgagggccatacagacagtatgggtatttggtatcgtggtaagggtaactgggggttgtctgctgatagggctgtttctatatggaaactttggcaggaggaaatatcggttgagcccaaactcaatgagttaaggaactataatgggcaattacttttctctgtcagtggatatgcggatacgcgccgtattaatcttgtagaagagacggaagaggaaagggcgagaaatcggcgtattgatatccgttttacagtgaaaaagcctgagattgcagaatatgaaagggcacgggatatatga

SEQ ID NO: 10843 - DNA, 1428 bp, Idiomarinaceae bacterium HL-53
atgaagtttactttaagtgatgaggtctatcgtcataatattaagcgactttcgaaacttgctgaggagcagcgtaatctcgctaaaagagctggaactcataaccctaaatttgaggctgcatggtcgcggcttttcaatttactctcaagcgggcaatttgacagatttacaatagagaatcgatttgatgttcgagcgttagcaattgcactgactgataagcccgatttgcggaagaaaataacgattacacataatctgttggagtctgtaaacgcgatactgccgagggggagtagcttattcattgagtcactttatcagttctttctgagtgatttcgattcaattgacgacgctaatatgattggagcatggctttgtgctgagcgcaggcgaaagaaaatttttttagattcagaagataaaattctttgtgctgatgggccaacatttatagcaaaacaagcgattcaacgtaatacagcattcaaccagcagattaagtactggcagttagatagatatgcatccggagattttataaaacgtgctcaagcagtttattttgtagagcaacttcaaaatataccagtgaatcaacctcatgagcttttggaagaagttagtaaaaagcaggtcgcagaaagtcgctatgatgaaaacgacttaatagggcatgttgcactgcggattctaatcgaccgagcaccaccgcaaaatattcatgagagttggcaaaatgcagtgattgcgattgctggagatcctcgagttcctagaagtcaccctaggtttattaagtggtggggtcaactaagtcagcaacaggctaaaaaggttcaaggctggctttcgaaactagacctaaaattatttcttgaagcactcgaggactattctatgagttctcgtgatacggatatgatgaggatgttcccgtctcgtaagcattttttagaggggatgcatgaagctggtgttataacgcatacaaagctttatctgtcacggaatgccgatcgttatattcgaaagaactataaagccgaacacatccctgattattctattgttaacgatggagaccgttcaattatttacgcggagttaacccgaggacatatgattgaaggaagtcataactgtcagatttggttttataaagagttgcatgaatcagcccctgtacttcaatttggtacccagaggcaggcttaccgttcactaactattggtctcaaccaaaaaatgtatagatacggctgtgaggcattcgataactttaatcactcaccagcaaattttagttggcaacgtagatcgataaaaactcttactaagctgggcgtaaatctcaaagcttcggatgttctcagtgacgaggattacaaacgctataaacgtatttatggagtagggtaa

SEQ ID NO: 10844 - DNA, 3450 bp, Idiomarinaceae bacterium HL-53
atgaaaaactggttttcatcattattcggcgtaaaagaatcaagtcctaagtttgagtacgaaattaacgatgagagtgtggacttttattgtgatcaatatctattgaatagcataaaaaatggccacgctgacgaatatgttaccgcccagtatgtcgcgttaagaatgttaacagaggaagggaatgcagagccaattccgaatggttttattgttcctcacgcaacggttgctcgacttgataatgatattcatcagttgcttcgattgcccgagcgttgggatggaaacgcgaaagttgatattaaaggcacaacttcaggcgacagtttcaaggtaaaaatttatttggagtcacctaatggacgcttcacatcgtcttactctatagaggggagcatactcgccttcggcgaatccaaatatacgctaccaagcactatgtttgaggctttttctgctttagaaatctactcgaagtcagcaaaaagtgagactgataatttgtttctgctgcattctctccagagagcccagcggtcgggcgctaaattaacgttaagccattttgataagctagatattcatgttccggagaggattactgttgaggcggaactggattcgcatggcaatttgatactaacaccaagcatggggcaaaaagcagatcacgacacgctgcaacgcgtgctcggccaattacaagcagaaaacgcctacacattaaaggtaggcaatgaaatcattttgtttaacgagaagacagcgcgagcagcaaaagaaattataagtcaacgtaccataccaagatcacaagtaacccaatttctagaggccccaggagtatttctagatgcatctcttgtcgacttagatgtgggattttctttgagagtaaaaggtgcaacgcgatttaagcacgcctattttggtgagactgatgagtcaggtatcgattggtttgggcaaagtcaggcgtctggaaaaattttaccgatcagtgccgtggtaaaggatgtaaaaacgcaagctgattttaaccagcttgaacaagtgttaaatgatgctaaagctaccggtgctgaagagatagaatttaatggcaagagttatgatatcggcagtgaagcccagattaacgatatcctaacgaagctaaagcaaaaaattgagaaaggtgaagattatactggggatatttcagatggaacaggcgagcggacggctgaaaaagatcaggaagatgagaccacaattgtaatcgatattgcgctgaatgacgatgaattggatagcccttcgaaagtagttgaagaggctctgaatgaagtactgtacagggaaagtcttgattggagtaattataaacgaacaccttttccacaccaagttatcggggtgcaatggatactagggcttgtggaactggctagcagtcaagagcttgttaatggcgccttactggccgatgacatggggcttggaaaaaccttcatgtcattggcagctatcgagcattattacaagctttgtgagcaaaggtgtgaaacctgccgaccaacacttatagttgctccgcttagcctgcttgagaactggaaagatgaagtagacgatacattcctaaagtcacccttcaaagatatcgttattttacaatcggaaggcgagttaaatcgttttcgagacggtagcacggaaacacgagtatcgaatatcgatgatgtcacatttgagccgagatattcacttaaattcggagaaaaatatgggccggaacgtttagatcttcccaaacggcttgtgattacgacttaccagacattgagagactaccaattttcgttgtctcaaattgattggggattggcagtttttgacgaggcccaaaatattaaaaatccgaatgcgttgcaaactcgggcggcgaaaggtttaaaatccaagttcaagttactagcaactggcacgccagtagagaacagtcttgccgatttctggtgcttgatggacactgcttgccctggttacctagattcatatcaagtgtttagacaaaatttcatcacacctatactgcaggctgctggtgatgaaattgattccgtgcgcggcactttaggaaggcagttacgtgaaaaagtcggagcgttaatgttgcgacgggtcaaggaagataatttaaagggacttcctcagaagcgaatgtttgttggtattgaaggctccgagtggcaatatgagccgaaattacacgcagtaatggcaaattatcaacaaaagatctatgaaggagcaatagaggcgcaacaagaaagtgaagacagtcatgtactgaccacgttgatgcgcttgcgggatagctcattgcatccccgtttagcggagagtgggaggttagatgctcctacctccaaagaagaaattgcgtccttatttgaggagtcggctaagctcagtaaaacgattgacgttttatctgaaatagaaagtcgccaagaaaaatgtattatttttgcggtaaataaacgtctgcaacgttttttaagcatagccttgggtagttattttaagcttggtccgcttcacgtgattaatggggatgccaaagctgtagttaagcgaaagggagctcttagtcgaaaaggaatgattgctgaatttgaagctcgggacggtttcaacatcatcattatgtccccagttgcagcaggtgtagggctaacagtagtcggcgcaaataacgtaatacaccttgaacgtcactggaatccagcaaaggaagctcaagcgactgacagggtttttcgaattggacaaaagaaagacgtgaatatatacgttccaatattgcatcacccagtattcgaatccttcgacgtcaacttacatcgacttctatcgcaaaagtcgatgcttaaggatgcagtagttacccccggcgaggtaatgcccaatccagcgggtactgaaaagcttggtcttggggcaacgagtataataatggcagaagacctatcgaaattaagctggaagcaatttgaagctttttcacttgaactgctagctagagagtacaaagcagacaatgcgtggctcaccagagatggctcagattttggtgcagatggtgttctgacgagaggcgatacaggtattctaatccaagctaaacataaacaaggcgcgtacaaagggcacagcgctatacaagaaatatccagtgcacgagagctttatggtaagcgtttgggcaggcagataacgcatcaaatatttataaccaatgcgacacaacttgctaaaacaactcgtgatatcgcgaaaaatcttagtgtgacagttattgatggaaacgatttaagcgagttgtgtgaacgccatcaaataacacttacgcaagtagtaacgcgtctatcaaaagtacgttatgtggtgacttag

SEQ ID NO: 10845 - DNA, 2079 bp, Idiomarinaceae bacterium HL-53; identical to SEQ ID NO: 10841

SEQ ID NO: 10846 - DNA, 732 bp, Idiomarinaceae bacterium HL-53; identical to SEQ ID NO: 10842

SEQ ID NO: 10847 - DNA, 1428 bp, Idiomarinaceae bacterium HL-53; identical to SEQ ID NO: 10843

SEQ ID NO: 10848 - DNA, 3450 bp, Idiomarinaceae bacterium HL-53; identical to SEQ ID NO: 10844

SEQ ID NO: 10849 - DNA, 2136 bp, Enterobacter sp. MGH 22
gtgcccttcactgtaatcagcatcgtatgcctggccgttgcctgctttattttcttttatttacttcgggccattaaaattgttaacagtctgaaaaaatacacccaatcaattaatagcattgaaagcaactccccaagggaacagcttgcacatctgcaaaatctctttaaacgtccagaactcaaacatgcgtggaatgagtttgaagagtcgttacacccgcagagtgagttggaagatggggaggaaaaaatcgtccgcatacgtgccactgcgccaagttcgagctacttctctgagcaacagttagtcgatattccacttaataccgaattcttcaaacacctgcccggtattctgaccggtgttgggattatcggtacgttttacggtctgatgattggcctcaaccacttcgaccccagcactccagagcaggttaccagcagcgtcaataatttgctgcacgatgtattgtacgcattccttggctctgccgtggctattgccgcctcaattttcgtcacatggctggaaaaactgtccatagccaagtgctataagtatctcgaaaaatttaccgccgctatcgacaagctctacgttagcggtgtgggcgaggaatacctcgcctcgctggtgaaatccagtaacgaaagcgctacccaggcacgccatctgaaagagagcctggtcaccgatcttcgcgatatgctgctgcatctcgccgaaagccagaaagttgaaaatgaacgcctcgcgaatacattgagtaatacctatcgcgaatcaggcgcgcagtttgccgaccaggtgagcggagcaatcgaaaatagcctgaagtctccgctggataaaattgcgggtgcggtacagaccgccagcggcgatcaaagcggcatggtacagaacatgctgcaggatgtgctgaccgcatttatggcgaagctcgataccacctttggccagcagtttacgaatctcaacgaaatgatggggcaaaccgtcggggctatccagacgatgcaaagtggattctccgccctgctacaggatatgcgtcaggttagcgacgattcccgtcagggaagtgcacagctgattgaacagcttctctctgaaatgaaatccggacaacaggcgatgcaggctggtatgaatgacatgctgaccagcttacaagcctctgtcgcgaaaattggcgctgagggtgaaggcgccggtgaacggatggcacggcagcttgagaaaatgtttgccgacagcgaagcgcgagaaaaagcgcaggcagaacatatgtccgcctttattgaagccattcagaattcagtgcagcagggacaaagcgcaaccatggaaaaaatagcggcctcagtcgaagcactcggggaacagttgggcagtctgtttggccagatagataagggtcagcaacagatatcagcgaaccagcaggctaaccagcagtctctgcacgaacagacgcagcgtgtgatgagtgaagtagacgatcagatcaaacagttgattgaaaccgttgctagtcagcatcagggaaccaccgaaacgctgaacaaacttgcagaacagaccaaccgacagattcaggatatgcaaaacggcgcggataaaatgcgtgttgccgccgagcgttttgaacacgcaggcgataaggtgtcggaggcgaatcacctcacggctgacgtattgaataaagtgcagtcggcgggctcctcgctctcccttgcaaccagcgaactcagttcagtagtggccgattatcggaacaatcgtgaagccgtcagcaaatccattgccatgctggagctgcttgcagccaacactcagtctgaacagactacccgcagccaatttatcaccgatctcaaacagcacggtgaacgcttgcagagctataaccgtgaagcacagacctttatggaaaatgtcagcgatgtgctcgggaaaggctttgaagacttctcagagggcgtttcgcgcagcctggataaaacgctgggcaaactggacgtcgaaatggcgaaagcctctaatctgcttgcaggctctgtcgaacagatcggtgaaagcgtcagcgagcttgatgatgttctgtctcgcgtgcgtgcctga

SEQ ID NO: 10850 - DNA, 738 bp, Enterobacter sp. MGH 22; identical to SEQ ID NO: 8440

SEQ ID NO: 10851 - DNA, 1683 bp, Enterobacter sp. MGH 22; identical to SEQ ID NO: 8449

SEQ ID NO: 10852 - DNA, 3243 bp, Enterobacter sp. MGH 22; identical to SEQ ID NO: 8442

SEQ ID NO: 10853 - DNA, 2037 bp, Osedax symbiont Rs2
atggaacaaatcacagaaactcttatcagtatttttcatattagccatataggtttatatcttgcgtttggattaatgggggcaggggcattagttatattggctatgttctggaaacgcatgagactgatgaatgcgatcaattcaatgaaaaaaatcatcaggactactaaggatgagactgagtttaccgcacaatatgaaacaattagagggaaggttttaaaaatttccgactttgcccatacatggcaggagtttgaagaaacactaaccccgcctatagatgacatagatgatccaaattatcgagtttaccgtaatacgaaaagacccagtgaatatttttctacagccagtgtccaccactttcaaataaagcctttcgtactacctagtacttttgttggtttaggtttgctattcacttttctaggattagtggctgccctaactgaaacaggtaagtcttttagtaacaataatattgaagaaattcaaaaagccttagaggcattactattaatagcaggtacaaaattttgggcatctgtaggcggtttatttacttcgattgttgttggagccttttatcaattatttaataacagtgtccgtaacggattgaatagcctaagtgaaattatagaaaaacgtttaacttatgccaatgccgaacgtatcgctgttgatcaatacgggcactcgcaacgtcaaactcaacgactcgaagcaatgtctacagaaatcactgtggccttaggtaagcgaatcagtgaggccttaattgaattgccgccaatgttatctgtttcattagcggaaactatgcgaccagtgactgatgaattaaaaaatgtaacatcgaatatgagcaacagcaatcagtctgcactccacgatatggcgaatgagtttgctgataaaatggcgggctctagtcaagagtctttcgcacaagttaataatcaactcgaaaaattggtatcaaccctcgaaagtactgcaactaaattatcaggtggtggtgatgagttacgcgcgggactagaagggaccatttcgaatatcaatgaaaccatgttaggtatttgtcagaagctgaaggagactacgcaggaagcggggggtagttttaaatcggatgcacagtttgcttcgtcagagttgaaagaagtgatattagcgattaagtcacaacaagaaagtagtgtcgataagattactaaactcacagattccctagaccaagtgtcattgaatgcaactaaatcaatggatacgatgcttgaaaagtcgggtgagcagcttggcaatgcagtaggtgaagcagtaagccaaacatctacagttgttgctgaggcacttaatggattaggggacgatattcaagatagagtacagaaagcaacatcggtggcacaagatgcctttaccaatacatttagtgaccttagtcaaaaactagataaaactagtaatgggttaagtagtgttattggtgattggcagaaacagcttgccgatataagtgtcaggtttgaatccatatctggccagttatccaatcaagttagtgagattgcgaaggttaatacccaagtagcagtaacaggagatgcgttttcaaaatctgcacaaactgtacgggacgtcacaataccgctcactaatgtgacaaaccagcttaatcaggctagtaccagcattagccagacccttcaggaaactatcacagagacccaaaacacctctgagaccttctcatcaacgctgaaagaaatggcagccgctgtcgctaacttgcaatacgcttgggaaacaaatgggcaacacttgaaaaatgttgattcagaacttgaaagggcatttatgcaaattacccagcaaatgagcactagtttggggactcttaatagctttactaaagacatggatactcaactgtcccaatcaatcactccactggcggggtttgtagctgaagtccgtgaacttgttgaagagttcggtgaagttaaagcaagactatcatag

SEQ ID NO: 10854 - DNA, 1053 bp, Osedax symbiont Rs2
atggataagtcagaagagagtggtgattatttcgtatcgatgacagatatgatggttggtgtactttttgtatttatcattatcgtatcttatttcgtgttagagctgcaaaagtcgttagataaggtggctaaaaaagaagaagttgttttgttatccacacatgaaaagattgttaaagactttgagttagaagttattacacttgaggaaattgaaaaagagcaggcagatgttatagatgagcaagttatagagattgatgagaatactgttgtcattgatgagcaagctgtagtaattgaagaaaaaattgttgttatagaccagcaacaaatttctataaataagaagaaggtagttataacgcaattggaagaagaaattgcaaaactgcgccgtaactcatggcaaatatatgcagcagctgcaaataacaaacgtagtgaaataatacaggcaatctctgctgtattagctaaagaaggtattaagtttaaagctgatcctaaaataggtgtgatccgcctggagggtgatgggctatttaataccggtagttcaaatctcaaggcgaaaaaaggtgcggttaataggatacagatattagctaaagcactgtataaaaacttggaatgttatagcctccataaagaagatgaatctctccaattaccaaaagattttaacagttgtaatcctgagcatgtttttattgaagctgtttatgtagaaggtcattctgactctgacggctttacaggaaaattacgcgacggaagtcgtaataatttggagttaagtgcaaggcgggcaactaatacctacgcacaaatgacacttgcacagtatctattaccggcaatagttaaccctttagggcaacaagcgttaagcacggctgcctatggagcacagcgacctgtagtagaaaatattaacgattttaacaagtcgcttaaccgccgaattgatttacgttttgtgatgtacttgccagaaagtgaagatgcacgtctcaagctacaacgggaagttgagaagctgctatga

SEQ ID NO: 10855 - DNA, 1659 bp, Osedax symbiont Rs2
atgagtatattagagcaattaaagcacttcgatgttaggttgcggtttgaattaaaaaatccaaaacaaagtagtttggcaaaaacagctctgcaaattcaaacaacaatagattcagtaggcctgctgtcaaatttgaatccacaggaatatatcgaagctgctattgctgaaataaagctaggtacagccactaatatcacaactaaaaatctacgcattttttgtatagcagggttgtcgtcttttgatcacctatctgatgtcgtcaaactagttaggcatttcctggaagaagtttataagcgagggaagtcctctctgtaccgcgcattgataaatgggtatttaagggtggcagattcaccttcaccttggatcgaagaaattcgtaattttttgctattaaccattgaacaactacctaacgcctggattttgcgttgtaaagaatttggattgttagaccgggccccctgcttaaaactagccgaaatgtttatggataaaactgtcgattttgaagcgcagctacgccgggcagggatcactggttcattaaaaacagtggggattggtaaccaattattacaaatactgtgtacaaaacttagtacaagtaattggttagtagaagaggatgcaatttttctatttgataggtttactcacctaatacagcaagatggaactgtaatctataaaggctcaaccaaccaagtttctatagtcgacgcacttttaaggccatgtatagatcaacaaccagagatagttatacaaaaacaaatagagcacctgcttttaggagaatataaagacccaagagtaaaccccgggaaatgggggaacgttccagaagagttaaccttaatattgaaaagatggctaacgaaacaggcgattggtttgttaattcaagtgcttaataggacggcagaagatcatcattgggattctaggaatgcgttttggagttattatcttgatcatgacctagtagaagaggcttgggttgtctttggtccagaagccacgcggcatgctgaagatttagtcagaacaaatactgatttccataagggtacttttggaagtttcgaaaagggtaagggatatatacaacccaatcattctgtcttaattatgcgtattgataatgttgtcattgcggaatggacacataatggcaaagttaggttgtggcttaatgacacaaatactccgccaagtttttataaacaatactactctgctgatcgattacgtggcctaaagtttgtgcctgatgcgggatatacacatgaccacacaggtagctggaaaggaaaagttacccagttcatatatcagcatacaggtataaagcacccccatgtaacgttgatcaataacgccaggatcaagaaacgtccctcatattttactcctacgccaaagcccaaacccaacgcgagagaccgaaccaggccttttgtagattttggaggtagagatgacccgtacctaaatttaccggcaatgagtgattgtaaaagctgtggtcaaataaaagccgctagagagttttatatttctaaaaggcgaccaggggaattaactgtgttttgtaaggtatgttccaaagcaaatgaactaaatagaaaagcgaataattaa

SEQ ID NO: 10856 - DNA, 2985 bp, Osedax symbiont Rs2
atggcgaagatatcacttaattttgatttagtacctgatggtattcatctttttctgactgaagaaaaaaggaccatattacttaaaaaggttaaagagaaactcgatgtttctaaatgggacattcaaaaagatttatacgcattaagtggcttagcaaaattggcgtcattgattgactctgccagtgccggggtcagtgtcgataagcctgtagtatctgttttaccagaaaatcaagggtattttatcccgcatcatattgtagcagaactgacagaaggccaagctttatcacttggcctaccaccttcagcaccttttcaattacgaatttcaacaacaggaccgctgctagaatcaagtacccaaatcaaagctagttggtattcaaaggggcgaaaggttcgtgtagaccgtataggatccgttctagaagtaggcgaaacacaatatagactccctgaacctatgtattctgctttggatgcaatacatggttttaatgtagatgatagtccaactgtagatgatcgtttagaaaaattgtcaggtctaagccagttgttatccttagacgcgaaagatactcttgatctagaaagatcactaaaagagttaagaatcagtcatgcatctgcttttagcctagacattaagtcctctagtttaggtgtcgactttgatccgctactgtttggacaagaagttattgatgaatttttagatacaggtgaacaaataacagactcaacacatctgctaacaccggagcaacaaagtcagttctctagttctatttttaaaaactatgataaagctagaccaatgtatgttattgacaaaggtacctacctttatattgacccttcacttcgaccagcattagaaattgtccgtgaacaacaaaaagcaggccctgcaagtaaaaaaagttttgccaaaaacccagcgggttttatcaaagagcaaattttaggggatggcgagcatgatcaagagctggccgatagcttagagctattgtttgttgagacaactggtttctcctccagggtgaaagagcttggtttgtgggtccctaaagtaatcccctggctgcaaagagagccgaactcatgggtgccagaaaaatttgggatacgaataggtgaccaaattattacagttaacgaatctgaattagatgaggctataacaacaatagcaaacggattagaggctggggtgcaatctataacattgccagatggtagccaaataccaccttcgatcgaagttgctgaagcctttgcagcattgaaaaaagagatacaaataccgacagagcatgacgcagacagtaatgctgatgaagatgatacaaataccgacatcgaagaacttaagctagcacctcacaagcatgtattagtagttgaagaaaatatagaagaaacgatgtttgttaaaaatttctccgcccgttgcgaatatgttaaacctgaaatatcacctttattgaaaaacagtcccaaagaacatcaagtttatggcataggatggttacaagaatgttgggcgacaggttttcctggtgctttattagctgatgatatggggcttggtaaaacattccaaaccttaggttttatatcttggttgcaacgtaagagacactcactaggcttaccccgtttacctgtattaattgtagcgccaactagcttactcaataactggttagatgaagaaactctgcatctagctgatcccggtcttggggcagtggggctcttgtttggcaatgaactgaagaaattcaaattaaaaggttactctaacgacactgccgaggggatgaataccctacgatcagctgagttggtggaatgtgattggttactaacaacgtatgaaaccttacgtgattatcaaatctccttaggtcagcttcatttgtcatgtgttgtttttgatgaaatgcaaagagtcaaaaatccaagctcactgaatactcatgcgtcaaagtcgctgaatgcggatttctctttaggcttaacaggcacaccagtagaaaatagtctgtcagatttatggtgtatttgtgacacattaatccccggatttttaggggatttgaaatcatttatgaatgattatcctgaggatgatcaggaaaagcttatccaattacgtaaagatttattggagcgtagtgttgatggccctcaacctatattacgtagaatgaagtcggaagtattatctgacttaccccccaaaatggtgcatttagtcgatgaacagatggctggccatcaagcgaatacttatgacgacttagtaaagcgggttaaacgagaggaagaacctagagggcttagggtaattcatcaatttagaaatatttcattacacccgtattctcctgacagtgaacaaagcaatgatgcagataaatatattgcagattcagcccgactgaaaggagtattccgacagttggataaaattgcaaaaaaagaagagaaagtgttaatttttcttgaatcattagccatgcaagagtggttagcttttgtcatacaacagaggtatggctttaaacaattgccaccaaggatttatggtggaatcaaacccatcgaaaggaaacgtatcgtggatcgcttccaagagaggaaaaatatctttggagtgatgatcttatcgccgaaggctgggggtgtaggtttaacgattacagcggcaactaatgtcatccatttatcccgctggtggaatcccgcagtggaagatcagtgtaccgatagagcgtaccggataggtcaggataaagaagttaatgtttatatccctagggcaatacaccctacttataaagacgggagctttgatgtgatactgcacaatttattagaacgcaagcgtggtttatctgaaacaatgctagtgccaatggaaagcaagggtgatatggacgctatattttctgaaatatag

SEQ ID NO: 10857 - DNA, 1959 bp, Sphingobium baderi LL03
atgaacgacatactcgacctgatcctcggcgcactcaatattatatacggagaacgctgggtcgcgccgttcgtcctgcttccgatcatgttcgctcttgcggcttatgtgcgccatcgcgccatcgtcaccaccaggccctatctcgatgcagcccgccggcgagttcagacactcaaggatgcgctgggaagcgatagtgaccctgtcgccgaacgctcggcgtttgccgagaattacatacctgtatcagccgtgatgagcgatgatcaaaagggggcgcacagtctcgttctcgcatggcgggaattccaggaatctatggtggatgagagcacttccccggttcgcaacaccaaccggcctgctgccttcttcaaccgcgcggcaccgaagttgacgatgctgacatttgcttccaacatctttgtcggtgcaggtctcattctcacctttctggggctgattgtcgcgctcaatacggctgccaatggcatggcgggacaggacgtgtctgttgcgaagcagtcgctccaggagctcttggtggtcgcaggcgccaagttcttcacgtcggtcgcgggccttggcgcctccatatggcttcgttttgccgagcacagcctcagtctcaaagtgcgccgcgagaccgacctcatttgcgaatttctcgaacgcggactgctctacgtctcgcctcagcgcttggcggttgaacaactcgaggtgctgcgcgaacaacgcgatcagctcaagtttttcaacaccgacgtggccttgcagttgtccgaacggatcggagctcagttcacgcaggcaatcgcgccggtgacggcatcgctgacggcactgaacgacaacatggcctctgtaacgcaaggaatcggggctggtgcgcgcgaagccatcgagaaggtcagtggcgagcagttgcgcggcctcagcgaaaccttgggcgatcttcgcgggcgtctcgatgcgattggccaggctgtggggagttcgagtgacgacgctgcccggcagattcgtctggctggtgaagattttgccaaggcggccagtgatatccgcgatgccttcgtcaatttgaccacccaggtcgatgggatcggccaaggtatggctgaacggggcgaggcggccaacgcagcgcagaaggaagcgcttgagaccatccttggcagcattgaggtcgcgcaaacgaggtctgtcaccatggtaacggagatcctggaagccctcaaaaatggcagcgttagtgctgcaggcaagatgcaggaagaggtgggcagcgtgctcaagtccggcgtggaagccagtcaggagaccttccggattgcgatcgaagagtcggggcaagcgcttaaggacacgaccatcagcctaagccaggcagtcggagaagctgcacagcaagtcgagagagctgcaagcggacttgcccggaccggcgacaacgccgagcgcaccgccgaggctattcgatcggttaccgacaacgcccgcgttgtggccacgtcgctcggtgatgctgcccaaggatttagccaagcggctggaccggttgccgatgctgcacgctcggtcaatcaggccgcaaaccaactcgctcagacaataaccgccgatcgtgcggccggcacgcaggcgctcggcgaaatgaaatcgctggctgaaggggttcgcgcaacccaggacgcggctggacaggcctggcacgattatcgcgcgcgtttcgaaggtgtggacagagcgctttccgaggccacggaaaagctggcccagacgctggccgacagcctcactgagttccgcgaattcgcccagaatgtggaccgcgaaatggccgcagcagttggccggctcggcaacaccatgacgcagatcgaagagtatgcggagtcgcttgacgagtacgtcgaacaaacgcgcaaccagcgggaggccgctgaatga

SEQ ID NO: 10858 - DNA, 753 bp, Sphingobium baderi LL03
atgatcctcgaagaggcgcaggagctcgtcgctgaagaggagaactacttcgtctccatgaccgatctcatggtcggtctggttttcgttttcatcatccttctcatgtacttcgccttgcagtttcaggatgttaccgaggagctgaccggggcgaacaagacgcgcacagaaatccttgagcaacttcagcgcaagctcaaggaacagggcgtacccgtcatcatcgatagcgaaaatggtgtcctgcgtttgcccgactcagtcctgttcgacagcgggcagcgcgagctaaagccccaggggcgaacaaacgtcgagcatcttgctgcagcgttgatcgatatcctgccatgctacagcgacggtatcgcgaagccagcatcttgcccccaaagcaagcacaagctcgaatcggtctatatcgaagggcatacagacagcgatcgctatgccggaagtggtggcctcaaggataactgggacctgtcagtagtgcgcgcgacgaacacctatcgaaccctgatcgagtatcaaccgggtctgagcagtctgtgtgctcccaagcagggaaggtgcgacccgatcctcagtgtcagtggctacggtccgcaacgaccagtcccggatgggcagggaacagaggaggaacgcaagcagcaaaatcggcgcatcgacctgcggctgatcatgatgacgccagactccggggaggccgagcgcgcggttgccaatcggatcaatcgcaaatga

SEQ ID NO: 10859 - DNA, 1431 bp, Sphingobium baderi LL03
atgaccttcctggcaaggcttgcagcggaccccaagtccctcactgcgcgaatgcgggtgggccaggttgagccagttgcgcttcgccgtgccgttgccgccctggacatgcgggagggaactgaaggaacaagcacggacccggatgtcgccgaactccagcagcgcattgcaagccttgtgtcagaagatgccttagacggcctcagccgccgagacctgcgcgctggctgcaaggcgatcctccatccgccccatccaccggcagccaacgaagctactcggaacgggctattggccgtagttgcacgaaacaagcggcgagcggcgttctttgctgttatcgatgcctatctcgatgggttcgcgtctgaggatgaaacgatcctttcgctagccaagaagcttgagacaatggccgcgacctggccgtggcgtgaggcagaccactggcctgcaaaaattggcgagtttgcgctccttgatccgacccgtgcaccgcaactactggcgcggcggatactcgatagcgggagccaccctcgggacgttttcagggaagcaggcctggatacccccggacgccgtttcgggggcttggcagaagcagcgttccgtttcgcatgtcgtctcgtcatgggaatgaaagggcagcaggcagtcgatggccagagaacgctgatcgcatgggctgcggatgacgcgggtaagttcgcctatcagcgggcgtggcccgaatttgttgaagccagccttgtcccgtgggaggtggtcgagcccagcgaggcacacaagtccgcacttctcgagatgctccagcgttttggcgagggagacccgcgcgccaaaccggcgcgctggcgcacggtgatggacaaggccccgggcgcttatgcggtgctaatgcgctggctcacgcgcgcttcagtcctgcaattccttgatatcgtcgatcgtctgatgcccgattccgcagccaagctcatgtgggcgtaccgacgagctttctggatgtcctacttgctcagtgatggcaacgcgccgggaattgacgccgcatgggttgccttcggcgacgaaggcgagcggctggccaaacgtgctgccagagaaagtggggacagctcgtttgctgccttcggcaagcaacatgacaaatctccgcagcacgctgccctgatcctgcaaatgggtgatctcacgatcgtcgattggagccactcggcaaaataccaggtatggaaacgcggcgatccacgcattccagagctcttcaggccaagctactcctatggtgccctctactgcgcgccgatccaggaaagccattcgtcaccatcgacctacacctggcagaagcggctagctcagataatcgagggacgtgcgttctactcccccaaatcaacgtggaaacccaagcgtgcttaa

SEQ ID NO: 10860 - DNA, 3753 bp, Sphingobium baderi LL03
gtgcttaagcgtctcttcggcaaagcggatcagcccacgttcgcatggcgagaggatggcgatcatctcatcattactcttgcgcagtcaggcaaagaactgcccttcagcagttgggcgactgccagaccggacgctgcccatgccttgagcgaactttgcgcggcaaacgacctggatgacgatccagccgatcaaccgctcgccatcggggatgatcatctccggcttgcgccgagggtgttggcaggcctcgatacggccacggctgcattgctgggactaccggcccccacgcccttggcgctcgatctccgggcgcaaaaccggatcgatcaggatgactttcgtctgaccgttcgctgggtgcgccctggcggacagcccgtgcgtgcgcagatgaggggcgcgatgctgctgacggacgcaggcccacggcgcgttcccgaaccgttgtggtcgctctattcgtcggcgcaacccctgacacgcgcgctcgagaaaccggagcgcttcgaggcactcgccaggctgaaggagcactggcctgaggacccgaggcttgccgtcgagagcgaaggctatctgcaggacattcgggttcactatgcatcgagcttgtcgctcaagctgaagactctgacgcctgatcgaacagaatttgatccggtcctgttcagtgcgcgcgcgattgctgaagccggggaaagcggccaggcggtcgatgaagatgccgacagcatcctgtcgccatccacgcaaaagctgtttgccaccgatcggttccgccgcgagagcgaggcacgaccggtttatgtgctcagaaacggcgagtacctgttcatcgaccaggcgctgcggcccgcgctgagcgccgtgcgtcacctccaggatgcgccggagtcagaaagacgcgccttcgtcctcaatccacgaaaagtgttgcgggagaccatcggcgaggaggcgtctgagcggataggtcttgaagagctcttcatcgaaaccgagcagttttccgaccgcgttgctggggtggacgtatggcgtgcacccgtgatgccttggatcgtcccgtccgaaaagaacaagtggattcccgagaaattcgggcttcgggtgggcgaagactactacgggatttccagccctaacatcgctgaggtcatcaaacgggttgataaggcagctgacgctggcgagcgcgatgccgatgtctcagggctattagaccccatcgacgatgatggtccgccgcctccagacagaattcccgtcaatgagcaaagccgggcggccctggccagtcttgagccttttgcccagggcccgatcgaggagggtgcggacgaggcagaagaaactgagcaagcatgggatgctgctacccagggcaagttgttcctcgttgttcgagacaatttcgaagaggttgagtttgcgccgcttggcctgacagaatctctcgatggcgaaccctatgaagccatttctgcgccggagcggctcaacacctcgctcaagctacatcaggtcgatggtctgaattggctcgcccagaacgctcttgtcggacgtccgggcgcattgcttgccgacgatatgggcctgggcaagacgctacaggcgatcgccttcatggcatggctccaggatgaggccaacgcaggaaggcgtcatcgcaccccatttctgatcgtcgccccaactgggctgctgggtacctggcgtgccgaaatcgagaagcacctccacgatccacaacttggccccctggtcccggcatttggcggaaacctgcgcctccttaaggacgaggacacttttggcgcgcgcgatatcgaaaccgggaaagcatcgctggatgccgccaactggcgggatgctggcgttgtcctcaccacctatgaaacccttcgcgactaccatttcagcttcgccaggacgcgcttcgggctgatcatcttcgacgaaattcagaagctgaagaatcccggcagccagatgacccgagcggcaaaggcgctgaatgccgagttcaccctcggcatgaccgggacaccggtcgagaaccggctgcaggacctctggtcgatcatggacgtggtcgcgccaggtttcttgggcgccagccgtgacttcgagaaacgccatcctgccgataacgtcgaagctttagcgcacctgaaagcacagctcaccgatccgataaagggtcggccaccctatatgctgcggcgcatgaagggcgacgtacttgacggcatgccagtcaagcacgtgcatccgcttgagatgaccatgcctccggcccaggcgagcgcctatcgtgaccttgttgtccgcgcggctgctgcgggtgcggctgggaccttgggcaagggtgggatgttgagcacactcgcaaatatgcggggtgtctcgcttcatccacttgacccgcgcgaagctcctaacgagctcgattcctatgcgcgggactcggcacgtctgtcacaaacgttggcgatcctccagaagatagccgacgccaaggagaaggcgctgatcttcgttgaagatctggcgatgcaggaccgcttggctgggctcatccagcagcactttgatttgtcctcacgtcccacacgcatcaatggcgggatacccggtcataagcgccaggcactggttgataccttccaatcccggcccggaagcttcgatgtcatgatcctgtcgccgcgagcgggcggcgttggattgacgctgacggcggccaatcacgtcatccatctttcacggtggtggaatcctgctgtcgaggatcaggcgacggaccgcgtattccgcattggccagacgcgcgacgtccacgtttatctgcccatggcggtccatcccgatccggacctcgcctcctctagcttcgatttgcgcctaaacgccctcatcgagcggaagcgcaagttgactcgcgacctgttcttcccgcccgatgccagcgatggcgaaatcggggagctgttcagggaagtctcgctggaaagcccaattgagccggtcgaggctgacgatgctgacgatgcagaagcagccgagagccgtccggaaccgaccgcgcctgctactgacgaggcagcaacacctgcagctggcagcaaggattctccagccgacactgaaaatctgatcgttgcgacgagcggtgcagagccttcggaagcaacctcaagggataagcgtgaacggccgcgactttcgctaccgaaagtcgcggctgaagctcaggtaaggatttggcgccggtcagctggagagccgcgcccaactgaggaaatcctcgcgctcttctccgggcggcatttggttcaggtctcgatccgtgatccgtatgccttgggcacctacgaagcccggcgatctcagctacaattcctccaagacttgcagaaatgcaccatcgctcttgataatgtgttgatcgaatatgctccggagatcgacggcgatctcgaagaactcgcttgcaggagagagttcggctcggcctttgccacggagttcgccggcgcactgcccaagctcgttcttgctcgccggagcaagcgcgcacgcgatgacgatttccatgatcgcttcatcgaggtggacgtgaggcactcaggcggtgcggtgaagcgccatgaactgacgatcggacgaggtctagaggcgctgtacaaccctaaacggcaatgcaccgtcacatatgtcccgccggggaattattga

SEQ ID NO: 10861 - DNA, 1959 bp, Sphingobium baderi LL03; identical to SEQ ID NO: 10857

SEQ ID NO: 10862 - DNA, 753 bp, Sphingobium baderi LL03; identical to SEQ ID NO: 10858

SEQ ID NO: 10863 - DNA, 1431 bp, Sphingobium baderi LL03; identical to SEQ ID NO: 10859

SEQ ID NO: 10864 - DNA, 3753 bp, Sphingobium baderi LL03; identical to SEQ ID NO: 10860

SEQ ID NO: 10865 - DNA, 1953 bp, Geobacillus sp. JF8
gtgacattgtacacagtttttgaggctctgttttcctcaatcaataagattggaaataaagggtttactgatttatttctttattttcagcttggtttgtttttggtgatggctgcctggcagttgatacgaattcaaagggaaatcgcggtgatgaaccaactgaagccgaagctgctcgagttaaaccgctccttagatggaagcgcctacgaaatcgatcgaaccattaatgatctttttgcccaaacgaaaaggtccaagtataaagagttgtgggaacgatattacaatcgtgtttcgcaaaaaaatgaggacgagcgcatcaatgtagaaccattttttgggtttgatgtaatgtatcatcatatgggttatcgaacgttgatggatatgggggcgggcatccatgtcagcctcggtgttcttggcaccttcgtcggtctttcggtcggattggctgagctgcatattggcgatacagaagcgttgcggtcagggattagtagtttgctagacgggatgaaagtggctttttacacctctgtatggggcgtgctgctttcattgacgtggacgatgtttgaccggtggattagcggtacgcttgagcgcaatatcgattggcattccgagcggcttgactttttgcttagtacggacgatgaggaactatttcttaaccgtttggaaaagttatcgcgcagtcaagccgatcatttgaaaacgctgttaaccgatgcgctcgagaaggcgatgcagccgatcgccctgtcgcttcagcagtcgcacggcagcctgcagcgggcgttcggccagctccatgaccagttcgcccagctgcatgaaggaatggaggcgcaggcgaggctgctcgagtcgcaaattgagttgacaaaaaatacaagcgctgatgtaacgagccgacttgttgatgagattacaggtggaacacaacaatcgatcgggcggtttagcgagttcgtccaacagtcgcaagtgctgcaagcggaaatgatgaagacgattgaagcgttcacgagccgtttcgctcatacggaggagcggcaggcgatgacgcttgagcggacggaaaagatgtttgcgcaatttgaaaagatggctggagaacttgagctgatgaaggagagctatcaaaaaacggcaggcatgatgaacggattaggagaaacgttttatcagttgcagcaactgacaaaagatcagttcccaatccaacaagaagtgatgcgaagcaatcagctattggccgagaagtatgatgatttggctgaacagtttacccgctttaacgcacaagttgaaacacagtatagccagctgctcgagcagcttgtccatgcatcgtcctcactttcggcctcgtttcaaacgatggcaaacaggttcgaggagtcactccgcattcaaaaagaatcgctgcatgattcgcaacagctgcttggcgatgtccagtcggctgtggcggcgctgtcgccgcttgttcccgagctgcgtgaaacgttcgaccgcgtccgcgagctaaaggagcagctgcttgatatgcaagaggcacaaaaagagcttctgccagaacttgtgcagctccggacgcaaacaaaggaaacggttgaggaagcgctgcagacgacaaaagggtatatgcatgaaatgacggagcaaatcgaggcactgcaacaaaactgggcgacaacaaaagaacaattgtcaagaatcaccgatgcccttcacttgtcgatgaaggatttcgctgaaaatattgacaatggtttaagcaaaacgtatcaacattttgatgagacattgactaaggcggtgcaggaagtgagcgggctcgtttatcaattcagtgaagtgcaggcggattttattgagaatttggaagacttggtggaccattttgataaatggaaagcaggggcttcaacatga

SEQ ID NO: 10866 - DNA, 672 bp, Geobacillus sp. JF8
atgaaatatcggaaacggacggaagtcaattattggatgtcctatgcagacttaatgagcgccatgttgatggtgtttgctttgttgttgacgtttgtcatcctggattaccgtgaactgctcgaagaaaaagaaaagcaaatcgaagaggttgtcagcgtcaaaacggagatcatccgggctttgaccgaagcgtttaagcaatcgaatatggcgattgaaattgaccagcaaacaggggccatccgctttcccgggagcattttgtttgaatccgattcggcggaaatctccccggaggggaaggcgtttttgcagcaatttattcctaagtatatggggattttattgcaggatcgttttcaaaatgagatttcaagcatcattattgaggggcataccgaccggaatggaacgtacatgtacaatatgtctttatcgcagcgtcgggcgtatgccgttttagagtatatttatagcaaagagtttccgaactttaaagaacgggagttgtcgaaaaaatacatcacggcaaatggccgaagcttcagcagcccgttgacagatgcgacaggtaaatatgaccctgaccgttcgcggcgggtcgagtttttattccgccttaaggacgatgaagccattaaagccatcgaaaagttggtgaacgaataa

SEQ ID NO: 10867 - DNA, 1281 bp, Geobacillus sp. JF8
atgaagtatgagtacgaaccggtgttgctgaaacgatggctgcgggaagcgcgcccacctcttttgaaacaaacggttgaatatagcgctgagaaatatcaaggtgtgcttgaacggttgtccgagcagttcacgcaaatagccaatgcgccggtttcggcgtttcaagagtgggtacaacagctgtcgcggcgcgagaagcttcttctcccaaacttgtacaaaaaggagcttcccgacgaaatcaaaaaagcgatgatcgagtccattcagcgccatatccagcatgagcgccgcctgttccgcgtgttggttgatgtgatgtatgaaacgtgtgatttggacgaaatttggaagcttttgcgttacgcctatgctgcccacatagagaagatcgaaaagcggatggaaaaagaaaaaagtgaaaaatggcggcgttatttgttaagccgagatccgattgtatatttggcgacagaggcgtatcaaagtgaaaaagggattttagacgagctagagacgttttatctaacaaaaaacttcccgttgtttaaactcgtgcttatggaaattttccagctggctgacgaatcattttttctcaaggaacaaaatttataccaggacatctttgtttcggcaacaaatgaacaacagcaaaagatggcgcacgctctaattaaaaagtgcaagctgaaccgcgtcaagccgcttggaaaactgatttttgaaaagctgcaaacgtaccggagaaagccgatgctctggagatatgtcggggaggaggaaaaaagtcggtttgcccagtggattatgaaactggagctgaaagacttttttggcggcgtcaataaaaaccatgaacggtttcaatattgggagaagtttatcccgcagcttgaagatgtcgtcgtgaccgatgagcgcacgacgctgattatgtatttccgtgacgttgtcattatagaagtgcttggcactggggcggtgtacatctatcgtgccgacgtttttcaacgccattttcaaccgaaaattgaccggatgctcgccgaacgggagcggtttgccaacaaggcatggctaaaagcgcgggaagtaaggcggaccgagctgatggatagaaatttgacaattccaggcggctggctgcgccataatggcggatggcaatggaagtttgacgaatggcttcgccgcgaactcggctgggaggtaaaaagggatgttcttcttcaaaaagaaacagaaaatgatgaaggctgttttgatgccgactga

SEQ ID NO: 10868 - DNA, 2598 bp, Geobacillus sp. JF8
atgatgaaggctgttttgatgccgactgaagatggggttcatttttcgtttcaactgcacgacggcaaaactgtcactgagctgaagctgcctatggccagagaggatatcgaaaaatattataaagtgcaaggatttcagcagtatgtcgcttgggaggagctgtacgactccggcgtccttgccgattcgatcttgccgtatcatgagtattatagattgttggaagacgaaggcgccaaagaggtgctccaatgtttggggcttcctgttgttgaggagaaggtaagcggaaaactcttgcttcgttcgctgcctaatgaagccgatttagttctgcagctattcgatgccagcgggcgcaacctagaccggattgggaagtcggcgggagcgatgtatgggttgcccgatcgtttcctactgcttccggagcaggtgtaccgtctgaaacgtgcgcttttggaaccgtatgaatcggggtatgaaaaaatcggcatttgtcaacagctggctaaggaggcgggcattcagcttgaaaactttttgcaaacggagacgtaccatattgttgatacatatgatctcgacatcgccgtgcaccgacctgaccatatcgagctcgttgtaaaaggaagaacagaggaggagacgcgccaccttcaacagttggagaagatcagcagtgtaaagaaaggccatgcccgaagccggtttatcagcaccgcacgagtccatgccgatattgtccatttacagcaaaagcggcatattatgggggaagaagtaccgctgtttttggaaaatccagccgctgttttgcctgagcacgattacttacttgatttggatcagttttcagaacgcgttcgcggcctcatcccgattgaacgagtgcgccctgtttttcatgaaggggcaggaatgaaatggttcgatgaggaaagcggttttgtggttccatacgatgagtcgtttttgcgcgaactgatggaaaattatccagaccaacaatacgttgagtataacggcaaatggatttacttagatcctttattgcgacgaaagctgctgcagctgccgaaagatgccgacgaagcgttgaaacggcggtatattcttgatattaaagataatgaggaagagcttgaatacaaaatggacagcgcccaagcggcgccgttccgtcgttatccgctcccttccgagctgcaggcggaactttttccgcatcaaattgaagggttcgaatggctttgccacttggcggagcaaggaagaggcggcttgctggccgatgatatggggcttggcaaaaccattcaagtcatagcgtttttgttgcatcaaaaggctcgtgggcagctgaggccgacgttgatcgtcctgccaatcgcccttatcgagaactgggtagcggaaatcgaaaagtttgctccaagtctgctcgagggtttgtatatccataaagggggcgggcggctggcttcgtcgcagattatttcacagtttgatctcgttttgaccagttacgatacactgaaaattgaccagcttttgttggggaagattgaattccaagcgattatttgcgacgaagcgcaaaacatcaaatcgcacgccagccaacggtcgcgcgccatccgcgccatgcaagggcattttcgtctggcgatgaccggcacgccggttgaaaatagcttagatgagctttgggcaattatggatttcgtccagcccggtgtgttaggttcgttaaaagagtttcggttccgctatgcggagacatcggattataactcgctgcttaaagccattcaaccatactatttgcggcggacgaagcagcaaattctcgatgaccgcctgcctaaaaaacaccttgttccgccgatttacgtcgaggcgtcgtcagtgcagaaaaagattgtccggtcgatgttggccacaaaagaaagtggacaagtcgccattttgaatatgatcacaaggctgcggcagctgtacggccatccgggagcagtcatcaccgactatgaaaatctcccggctgcagaggtgccgaagttgaaggagacgttgcgcatcgttgaaacgattcgacaaaagggggagaaagtgcttatctttacagagtttcgcaagctgcactttcttttgaagcgaacattcatggaaaaatacggaatttccgttccggtaattgatggggatacgaaaaatcgtcaatcggtcatacagcgttttaacgaaacaaaaggtttcggcattatgattttatctccgaaagcggccggtgtcggcttgacgatcacaagtgccaaccatgtcattcattatacacgctggtggaatccagccgttgaaaaccaagcgaccgaccgggcgtatcgcatcggtcagcggaaagatgtatatgtttaccatattatcactacggatcgttcccatttcccgcagggaacagtagaagaattgatgcacgaactgctggaaagcaaacgccatttggccgaaaatgtcatcatcccttttgacatgcgtgagatccagcaagccattgccgagagaatgatggaacaacgtcaactcgtctag

SEQ ID NO: 10869 - DNA, 2028 bp, Pseudoalteromonas sp. OCN003
ctgaattttgagtcgcaattgagtgctatttttgtggcattccttatgggaataacatttttctttcttgccaaatcaggtaattcgttcagaaaggctaaaaaaaggataaaggtcttaaatgatgctctgaaaggtatttcaacagaaaacatttcatctaaaagaagagacttgattagctttatcaccgaaaaagataaagagaaaagtcagcctgtaagacatatctggaaagaatttgatgaaacactaatagaagttaaggctattggtaatgttcatctacataatacgtttgatgcttcacattttttcaatactcacactctggcaaaaggtgttacagataacagactaattgctgctgtaccgggttttttaaccgctgttggtgttataggtacttttgttggtcttcaaattggtctttcggagatgaacatttcttctgatgtctcagttgaagaaatgaaagcaggtgtttctgcggtgattggtggtgctaaagttgccttcatgacatctgtttggggtgtattgttaagtgttttatttaattttattgagaaatcattagagcaaagcattagaaaaagaataagcattctccaagataaaattgacgatatttttccgcgtttaagtcctgaatctcaacttcaaattattgctcataatagcattgaatctagggagagtttacaaggtttagctgagcaaataggcattaaaatgcaggaatcaatgctaactgcaactcgaggaatcagtgaagcattagagacaacgctaaatgaaataatggcgcctgctattaataaactcgtggacgaaacttcagaagggaatcaaaaggcgttagaggatttgttaacgaaatttatggatggttttggcgctcaaggtaatcaacaaagagtcgcaatggaaaatgcttcagaaaaagttaacgaatcaatttctggtatgaataccacgatggaagcgtttatttctaagattgaagcgtctcagcaagcatcaggagaaagggaaaaagaacttatctcttctatttcattgcaagtttctcaattagttgaacaaagcaatgagcaaggtcgtaagatgactgagttgatggaaactcaaattggcagtttaaatgatgcttttgatagcagccaagctcgtgcaaaagaaagagagcaagagtttacgaacaacattgaacaacaaattaagtcgctaacagaaggtatcgcgtctcaaagttcggtgttaactgagtttgttcagtcacagatgtcctcattaaatgaatcatttaccaagcgtgacgagcagagtgctgcaatatctgagcaaaggaatgctgccttagaacagcaaacacaagcaatttcaaaatcaacacaagaattagtttctcaaatagaatcaagcatacagaaccacaaaacgagttcagagcagattattgaacaaggcaaatcacttcaacaaagtgttgagtcatctgtattagcaagtgctaaagcaactgatagtatgcgtgagtctgcgacagaacttaaatcagcggcagaaaaaatgagtatatttggttctcatgtcagagatgccggaaataaactatctggtgccgttactgaggctattgaatcaacgaaagatttagctagccaaaatcaaactacttctgagcgaatggagaatttacgagagcaattgattgcagatacagggcgtttcagagatttagctgatcaaataaatagcatgatcgttaatgcaggcaatacttttgatagcttgaagtcatcccagaaagaatatttgtcacaattacagaaaaatgtaaatgaactggcaactcaaatgaccaacttgctttcagactatgctgaacaagccaatgctcagactaaagatcatctgactatatgggctgattcttcaactcaatatgcaaccactatgaataatgctgcaagagcattagcgggtgttgttgaggatattcaagacaaagtaggtgcataa

SEQ ID NO: 10870 - DNA, 744 bp, Pseudoalteromonas sp. OCN003
atgaaatttgcatcacgtacacatgtaaaagtagatgaagagaacccatactggatctctttttctgatctaatgtcggcattgctagtcatttttattttagctgctgtggcactgatcattgaacttactcaacgaacacaagatattgatgcaggcattgaagagcttaaaaaagcagaacaagcaagacaagatattttgaatgaggtcagggaagagttggcaaagcaaaatattaaggtggaaattgctgataatgagacggtgattcgtattccagaagaaaccctctcttttaagtcaggtgacgatcaaattcctgaagatatggtggaatcagttaaaagtatcggtgcagttcttcattctgcagtaatgaaaaatgatcgattcacttatttagatacagtatttgttgaaggccatacagacagtgttcctattaagttcggtaaatattggactaaaggaaattggggtttaagtgctgatagagcgataacagtttggaagctatggagtgaagaattagttttagaaccaagcttaaatgaattattgaatcattctgaagaaaatttattttcagtaagtggttacgctgcgactagacgagttgagttagatgagtcaacaccagaacttagagcaaagaatagacgcattgatattaggtttactgtaaaaagaccttcgatcgaagatcttgaaaagataaaacctaattacaacaaaaaataa

SEQ ID NO: 10871 - DNA, 1443 bp, Pseudoalteromonas sp. OCN003
atgagaataaatttaaaaaagctcagatttacaatacctgaaaacccttttgggaaaaatactaacttgatgttggacctggttaacggactcaaacaaatttcaaaaaaggcaggtacagataatgacagttttaaggctgcttggagaaaagtttataatgctgtgcaggcgaacaaaaaccttgagaatgtaattgaaaataaattggatattcgtgcacttggtttcgctcttaattcaaaagttggacaacaaatccagcttacaacttctatcttagataaaattgactttttaaccgaaaaaccaagttcgttatttttggagagtttttaccaatattatttgagtcgttatagtagcttaaataatgttgcgtatacgtcagaatggttgattaacgctagaaaaaagcgtaagcagtcaaaagggtttgatgaaaatttactttctcaagatgggcctaaatggttagcacaacaagctatagataaaaatagagatttcgattttatcgttaaagaattcgaacttgatcagtttcagtctggtcaatttatggagctagctcaacgaatttactttgtagaacaactcaaaaacattccagttaataaacctcacgaccttcttacagaggttcaaaaaaaagaggtctatgaatctagctttgatagctccgagttattgggccataaaattttgaagatactaatagaaagagcaccttcgcacgatatccatgagtcttggcttaatacaattatgtcaattgcgggtgacccaagagtacctgttagccatccaagatacagaaagtggtggagtcatgtttcaaaagacatgtctgctaaagtaaaaggctggttatctgggcttgatttaagactttttttagaagcattggaggacttttcttattcttcttatgatcctgatatggaacgaatgtttccaactagaaaaaagtttttggaaggtctttacgataagaaattaattaaaaacaccaagctatatatgtgtaaaagcatggctcgttttttaaaaactaaatacaaagaagagcacctaccagacttttccatagttgatgatggtgaaaaatctattatttatgtggacttaggtagtgcccatatgattgaaggtagccaccaatgtcaattgtggatatatcgctctttgcatgaatctgcaccagtacttcaatatgataaacagcgcatatcctataggagcctaacaaaagggcttcatgaggctatgagtaactatggccacggtgcatatgactactttactcactctccagcaaactttagctggcagcgcagagctgtagactcattaagggatttaagggtgccagtaacaataaaagatgttttaaccgcagatgattatcgtacttatattcgaagatttggagcagattag

SEQ ID NO: 10872 - DNA, 3459 bp, Pseudoalteromonas sp. OCN003
gtggcactttcgaacttaattaataaattttttaaaaatgcagatcggtctgtttcgtttaattttattcctgatgaactcgatggcgcctacttttctttagacaaaaaagagtttgaaaaagttagaaatggcactgctaacgagtggcttatacaacaatatgtcactttaaaaatgctagaagagcaaggagaggctgagagtatacctaatggcttcattgtgcctgctaatgtactttgtcgattagatgattatgttcgagaatctttatcattacctccactttgggatggtgtaatttattctgatataagagggaatacgagtagatctaattttaaggttgagcttgcggtatcagaccctgatggcaggacgactcatagttattctatcgaaggtccagtaattaaatttggagagacttcgcaatacttactaactcaggctcaactcatagcatttgagtcaaaaaagaaacatgagaattctgataaaactgaattcgataacttaaccttgcttcataacttgcaattgagtcagaagcaaaatgccaaattacaacttcaacatttcgaaaaattaaaaatacatactccagaaaaaatagcggttgaggcggagttagattcttttggtaatttgatacttacaccttttatggggcaagaatcaagtcacgaagatatacagaaagtgttgggacaaatagttgcaccaaatgccaatactataaaagtaggtgatgaaatcattctatttacggaagaaaaaattaaagccgtaaaagaagttttggacaacagggttgtacctaagagtaaagtaaaagactttctgcaaaacccaaccgctttcattgatgcgtctttggtagatttagaccttgggttttcgttgcgtgtacatggggcgacaacttttaaacacgcctattttggtgaaactgatgattcaggagttgattggtttgggaaatcagcttcttctgagcaagtacttccaatttcaaaactccttcctttagtaagtgatacatcatcatttgaacacgttaaaaaagtaattgatgatgctgtgaatacaggggccaatgaaatcgagtttgaaggtaaattttttgatatttctgactctgacaatgtaagcaaaactctcgatgagattgaggtgaaattacgctctggtaatgatgaagaagaggttgagacaggttttgattcagatagcgaagaagaggcaacagaaacagaagaaacaatagtagtagatatcgaccttaatgatgaagaactatccgaaaattcaccgattgtttcagagaagataaatgatgtatgccgaatgggggatttagattggggcaattacttaagaactccatataagcatcaagatattggagttcgatggattctagggctattggatcaaagtcacgaaaatagcgctatcagtggctctttgcttgctgatgacatggggttagggaaaacgttcatggcactttctgctgtggaacatcattatcgtgaagtaagtcaaattaatgaaactcagaaaccgacattgattgttgctcctctgagcttgcttgaaaactggaaagatgaagtagaaaaaacctttaaaacatctccatttagagacattgttattcttcaaactgatggtgagttaaatcgatttaaaaatggtggtgttgaaatcagaacaaacacttcagatggtgacgaatttgaacctcgctattcgttaaacattggtaaagactgcgtcgatagacttgatatgccgggtcgattggttataacaacatatcaaacccttagagattatcaattctctctttgtcttatagattggggtttagtcatttttgatgaagcacaaaatatcaaaaaccctaacgccttagcaaccagagcagctaaagggcttaaagcccaattcaaattagttgccactggtactcctgttgaaaatagcttagcggatttctggtgcctaatggatactgcctgtcctaaatatttaggaagttatcaggattttagagccaaatacatttcaccaatattacaagctgcaagcgatgaagttgaagatattagaaatagagttggtcgggagttaagggttaaagttggggctataatgcttcgcagggttaaggaagacaatcttgacgggctacctgaaaagttcatgtatgttggaattgaaaatactgattggaaatacctgccagaactagggaagacgatgacaggttatcaattaaaggtttatgatggtgctatagagtcgattgaagagtcagattctaatcatgtactgagcacactacaaaggctcagaaatagttcattacatccgcgattagcggatgggggtagtttaaattgcccccaatctaataaagaactagaccaaatattatttgaatcagagaagttaaaaagtttactacagctactagatttaattaaaaccaaaaatgaaaagtgtattattttcgcggtaaacaaacgtcttcaaacttttcttagtattgcattaggaaggaaatacgggctaggccctctttcaataattaatggtgatgctaaggcagtttcaaaaaaagtatctacacctactcgtaaaacaatgattgctgattttgaagcaaaagaaggatttaatattattgttatgtcccctgtagcagcaggtgttggattgactgtagttggagcaaataatgtggttcatttcgagcgccactggaatcctgctaaagaagcccaagctaccgatcgcgtatacagaattgggcagacaaaagacgttaacatttacgttccattacttcttcatcctgagatggagtctttcgatgttaatcttcataagttactcacaaagaaaactcaactaaaagatgcggttgttacaccggaagaagtgatcccaatgcccggaggtattgctggtgctaaaggattcagtgatgaacaagtaataaatgctgatgatataaaaaaattaagctggcagcagtttgaagcattaacagtagaggtaatgaataaagagctttgtgcagacagtgcttggctggcaagcaatggtgctgataaaggctctgatggggttttgatagtaaataatgaaatggtactgattcaagcaaagcacactactagaggccgctatgatggttataaagctgtgcaagaaatttttgcagccaaaccaatttacgagcatcaaataggtaaaactagtgcaaagttacttttcattactaatgcgacaatgctctcatcaaggactagagaagttgcaaagcaatgtggcgtcgacgttattaatggaagtgagttggctcagttagttaagaagcatcagattacctttaaacaaattttaatgcgtttagataagaaaagaatgaaagtatga

SEQ ID NO: 10873 - DNA, 1962 bp, Ferrovum sp. PN-J185
atgagttttttaggaaatttaaattggctaattttggcgccagttttagcggttattggttttctactatcccgctttattactcagtatcaaaatccagcaaaaaaacttcagttggaactagtcaagattgctgatggactccaaaagtataaaaaagaaaatattcaaatattggatatagctaatttaaaacccatattttctgtagagccatttaggcatttatgggctgagtatgaagatactctgcatttagtgagggcaccagatggcgagccaatatcaatgagagctacggccacttcggagctttatttttctaaagagtcggtggtagatactcaaattgatgctgatttttttaggcacttaccaggcatattgactggtattggaattattggaacttttagcggtctcgtctggggtctatttcaatttaatcctgtagagcctgataaaacccttgagttacttttgcatgaagtaacttctgcatttattggatctggaattgcaattcttgcagctatcggtattacatattttgagaagactacattaaataaatgttaccggctattagagactgttaacaatcgaattgatgatttattttcaaaaggcgttggcgaggagtatctgtataggttagttagcgcctctgagaaaagctcagccaatacagcaagccttaaggatgcattaattgatgatttaaagcagttaatgcatgaggtagcagataaacaaatcaatgctcagcttcagtcagcacaaaacttctcatcacaggtatcgggtgctattaaagagagtctagatgctccgatgaaggatctgatggaggtcgttgctagagcatcgggtgagcagggtggtgctgtaacaggcatgctggagaatttactgagcgcatttatggcaaaaattgatgagacctttggatctcaaattcagaatatcaatacagcaattcagaagtcatctgactctatgactatggttcaagaggcaatgactcgtttgattacggatatctcaggcgctggtcaaaaagccacatctgaaatgtctgcgaagatggaggagtcaatgtctaaggctgctcttgcacaagagcagatgaaccaacagttgcgcagttttgttgaggagttgcgtaagttaatccttgagcagcaaaatcaaacgaagcaggcaatggatgagactatgcaaaaaatcttatctgagcttgagaaatcaatctccgtaatttctgcagaaagagagaatcaggctgtagcagataaggcccgggcagagcgcttagtggcagaaacagaaggtctctatagcggcttaactgataacgttgttcagttaatgggcgatgtgaaggatgctgcttttaagaccgaggaaaatattaaagccattcaaaatgctgccaccgttgcaatatccggaatgaatgacggagctcttgtgatgcgtgatgcagcagatcgattcactaaggctggcgatagtatcggaggtgtatttgataagagtcgtgtggtaactgatcaattagagcaaacagcctctacgcttcaaatggcttctgcatcggtaagaactgcattcgagaaatatgatgagtctcgggaatctgttcagggttacgtgctccagcttcaagctcttgtggaaaacgcaaaaaaagaagctggattaagcacgcaaatgctttcagatctggagagaattttaggttcattgcaaactgctgaaaagcaaagtactgactatttaaatcaagttaattcggtactcaagggatcattccagcagtttgggcaggaaatggtagcccaggtcgaggcgctcaaagtgtcgtctgatactttgttaacgggctccttaagcgccttagagggtgcagttcagtcaatgctgatgtcagtcgccaagcttaaaaagtctgaataa

SEQ ID NO: 10874 - DNA, 750 bp, Ferrovum sp. PN-J185
atgtttaaccaaagatcttccaagaagtcgtacaaggatgaaggtgagaagcccttttggatttcctattcagatctaatgactgcatgcatgacactttttctagtagttatggcggtaacaattgtgatgttgaaaaagaagtatgaaaatcaatatgctgccgaagcagccagagaggcaacgatttcagcttgcgcaaaagatcttcaaggaattgcaaaccaacgctttcctggtcaggctcgtattgaatatagcaagggagatgcaatacggattgatttggggtcaatcgttaaatttgatgatggcaagcacggaattagttcagaagcctcaaagttcttaagggactatatcccaacagtacttaaaacagttaagaataatgaatgtaagcagtttttcagaagggtgatagttgaggggtataccagtaaaactggtaactatatgactaacttagacctgtcgttaaagcgcagtaaagaggttatttgcgaactcgccaaaaccgatcctgatggaactggcggattatcgctagatgataaaaatcaagttaaaagcctttttcttgtcggcggcttttcatttaactcgcagaaaagaagcgatgaagaaagtcggcgggctgagttaaagcttgaattctggcagttgggtgacgataaaaagaggcaagaggaatctacgattgatttatctggaaaagattttggcgtatgtccttcacagacctattaa

SEQ ID NO: 10875 - DNA, 1482 bp, Ferrovum sp. PN-J185
atgtccttcacagacctattaaaaaattcacttgctgatttaaatagtacttttcaatatgaattgaagagtgatcgtggggagagttatcccaagctttctaaaatccataaaaaaataactgatgaatttactttcatcttgaaaccaaaagatgaagttgcttatgctgcagcacgtaactttcttgatggctcgttaaatggtgatgttggcgagtatgaaatcatctcatttgttttaacaaaacccatttctgaattaggcggcatatctgttgcctcagcttctgaaaagctaaggtctcttttggatcgttatgcaaaagagtttgaaagtgatgagattgatggaatattttggttcggcgtttttcaatcttattttcaggcgcaaaagctgaattaccaaggggatagtttctttagctcccagcgagctataaggagcttcctagttaaaacttggccagatgtaaaaaagaatgcagctttctcaactaattggatgaaaagtattgaggcaaatcagcatttgcttggtgagtcaccatgcgaggtttatggcgctgagtggcttgccggaagtgaggttcgggttaagcaaattaagcaggagttgcatattccggatacaagttggttttgggaggaattttttaagtcatgcttaaaggcttcgttatctcaatcagatgctaagtttaaagaatctatcccacttattattgccctacttaaaaggcatccatcctatttagataatggactgcgtgccttattggatagatatcgggcttcctcagatatacgggttcacagggagctcaaagaatttgccctagaaacatggaagagtcccaagctacgaaatacaggagcttccaaatggattcacgtgtcagagccaacttggcgaatggttttaacttgggtacaagaggccaatctaaggctgttctttgagttacttaagcgccgtggtgttccagatctacatggaagagttgatttttggatgcaatatataaatcaaataacctttactcgacttgtattgggcgaggatatgcgcagatatttgacggcacatccagagttaaaagagcactttaaaaatgatgtcgagtcatatgccaatctaatgggggcgaaaggcgagtcttcgctagatgcattcattatggaaattagcggacatttaattgttgaatttaatccccatggtggatgctacatctatcaaaaaggggaaaacacatttaatgtaaatgccgttagtcttgatgcctcaactagccaaagaggcttaaaagagcgttattacactggtagcgccaaaggtcctgacatagttcatagagagggatggcaatataaagctagaacctatcaattgcctgcatttggcatctttgatgatgtccgagctggtaaagtgggttcaggaacaaccacattttcaattgacaaatatttctga

SEQ ID NO: 10876 - DNA, 3996 bp, Ferrovum sp. PN-J185
atgaattttcttagcaggctttttaaatcacgtcccgaagttaaaaatgttttcgaggaaatgggtaataatccatcttcccaaaagttaattcaacctgcattttctaacgataggatctcttaccttattgacgttaatatcgggttaagtgcctcgagtcagttaatggatattgcaaccgatcctgtttctggtagtcagcagttaatttaccttgctcagctagtgtccgatggcgtggcagcattcaataattccgagatagctattccttggtctgatctttacgctttattcgaagatgctgaacatgaagattctctatatctgctgtcgcttccaaagattgatcattcaatcccaattcttggggaagatggaacagttgcagataagttctttaggttaagaattgatggttggcgagaggtttcaggccgtagcattagagttagaaagtggcttggaggtgcttttgttgatgggtctacttactcacttcaatcaaaggattcttggcaattaatagactttattagtcgcaatcatggatttgaagcccagtcacgctctcaatctgaaaatgaaatattgtggggtgaggctcgcaaattcgccttgttagcaaaggcagagctttcaccttatttggctgcaaccattgttttagttccaagcttgctaaagatgcgttacatcagagcgcaagctctgggaaccagtgttgtcacaattgaaccatattttgatggggcacctgatgattggatggggcaatttgattcattcaaattcattcctgaacacagtgattttccaacggctacaggcagaacaagggtcatttttcctgaggcgatacgagatgttctaacggttatcaaaacacaatttgatgggcgcaaagttgctggtagtaaggctgaagcctttcttagaaatcctttcgcttatcttggtgaggctgcctccaaagtattggatgagaatcagatacaagaagccaaagaagaggctggaatcttttctactcgaatatcactatttccagatatttcaaagggtgccattgaaagcgtaacagcaagcgtttatcaaaatcttgaagatggaatggcgaaggccgatagatcaattatttcaactgcccatgagcttaacttgttaatacaagaaattgaatcggctctctcggaagagcgtcaattttttacttggcgtaattttgtaattgatgttgatggtgatctttatcagacattggatagtgctaaggcttggttcaatgtttggaaagatcaggtaaaaaatttcatagactttaacgacatttatgctctcgataattatggtgggcgaattgatggtattggagttgcaaaacccatctactcagcttacataaaaaaagagggtggagatgactcctcttgggcgccaccgcttctcggtgtttcattaactccaggctcagcgcctgtttttatagctgttgatgaaatatgggtaacggaatttgaggccaagattgagcaggcaaaggcagcaggtgtcgacaaagttgccgatccccgattaccaattcctctttcaatacctgaagctattgatttggtaaaagatctaaaggttttacttggaattattggttcagggggtgaccctctgccacctgacccaactcctccggggccaactcctccagggccgacaccacctggcccaactcctccagggccgacaccacctggcccaactcctccagggccgacaccacctggcccaactccgccaagtccaaacccgcccggaaaggggcgcaaagaaacactcttggtgaaagtcaatattacacagcttgactatagcgaaactgcggcagaggaaatgcgtgcggcaatacttaaggtgcccgaaggcttttcgcctcaattgcctactgatctgaagagtgaaattaagttaaaaaaacatcagttagatggattagcttggatgcagtacttgtattcaaaggctccagaatattgtcgaggtgcattgttggctgacgacatgggtcttgggaagacattacaacttctatcattgctttcttggttttatgaacgcaatcctgaggcgccaccatcattaattgttgctcccccggtattaatgcaaaactggaagaatgaagctaggaacttttttaataattttccagagattttattgctccatgctgaaggattgagcgctagaagacagcctaagcaatttattgaccagtcattattagataaaaaaatcgttaatttattaacaccaaattggttgggttctgctaaggtagttttgaccacatatgaaactgttcgagattatgaatttagtttagccagacaagaatttaccttcatgatttgtgatgaagctcaaaaaattaaaacacctaatgcgcaatctacaacagcagctaagaagcagaaagctaaatttagaattgcatgtacaggaacgcctgtagaaaatagtttggcagatttgtggtgcttgtttgactttatacagcccggtttgctcggggcattagacgaatttggtagaacatatagaaagcccattgaagcgaaggaagctggtgatgaaaaggcagcagaagtaattgaacatctgcgtgcaatagttagccctcagatattaagaaggatgaagagcgatattgctgatgagttgcctcagaagatactggtttcaaatgatgaatatgagtttgatggagcccttagaaaaaggttatctgtgcctatttcaaatcatcagagaaatttatatgcgcagggattacgacaaatcgctgcagcagcccaagaaaaggatgcaaaaagaaggtcgaatgtttcttttgcagttttacattttgtaagagccttgtgttctgagccatattgtctgccaaagacaacgtttactattgatgtaaacggaatagacgcccatttaaacaatgccccaaaactaaagtggctattgagtaccctggaattaatcgcgcaaaagcaagaaaaagtaatcatattcacagatattaaggaaattcaaagatcattggttatgtttattcgtaagcgctttgatttttccgcgcagattattaatggagatattgatgatcgacaggatttaattgatgcgttccaatcacgcgaaggttttggcgtaatcattctctcgccattagccgttggctttggagtaaacatagtttcagctaatcatgttattcatttcacgagaacgtggaatccggctaaagagggtcaagcaacagatagggcatatcgcattgggcagaccaaggatgtatatgtttattgcccaactattacagctgaagactttgtgacctttgacgccaagttagatcgattgatgactttaaagatggatcttgctggagatatgttagatggagtgggctctgatatcccaaccggaacattgatgcctgatagtggacctggcggtattcaagttgacgcggataagttagttgatataagccgtgtggatactttggatggagctacgtttgaagtattttgtcagcttttatttggcgcttatccaaataaagcctacattacccagaagcaaagaggcgacggtggcatcgatatcgttgttattggtaatgatggcaaaggaatgatttgtcagtgcaaatatagtatgcaagatgagctgggttgggatgcggttaaagaggttgctgctggtagtccggcttatcaagcacgacatccgggcgtaatgtttcaaaaggttgcaatcaccaatcaaaaattcaactctacagctattcaacaagctaatactttaggggtaaagctgattggaagggctgagttgattgaattgttgaacaaagtaaagcttaagcagcttgctttagatgaggaaatttttaagttttatatgaacacatctaaattttcggccaatgtatga

SEQ ID NO: 10877 - DNA, 1590 bp, Vulgatibacter incomptus
atgaccgaaatcgccaagcttctgacttcgaccgaatcggtttgggtctcctgtctcttcatcgtcgcggtcggtgtcgtccctttcctgatgatgtggggaaagctgcgttcggtccgggtagacgccgagaaagggatcggcacgctcgcgaccgctgacgggaagtcggcgttccgggcgaactacgaggaccacgacgcgcgcttcctggaaaatcgcgtgctgggcaagacgtggcgcgagtaccggcggacgttcgagttcccggcatcgctcggtggggccgcggcgccggtgcggacccccttggaggcgtccgcgttcttccaagccgagcggctgatggccgaccgcttgaaccttcgtcgttacggagcggtcccgaacatcctcaccggtctcgggatcctggggacgttcgtcggtctcgcggcgggcatccaccttgcgaacctcgggatcaacgtcgcggacatcgaggcgatgaagagctcgctcggcgatctcctcgctggcgcttcgatggccttcctgacgtcgatctgcggcctgacctgttcgatgctgttcaccttgggcgagcggactctcgtggccaattcgggcgccgcgatcgagaggttcgctgcctccttggacgatcgcctcgagttcgtgaccgccgaggccctcgcggcgaagcagctcgaggagtcgaaggagcagaccacccagctcaagcagttcaacgacacgctggccattcatatcgccgaggccctcgacgagcgggtggcgggccgcctgaccccagcgctcgaccgtctcatcgaggcggtgaacggcgtgcggagcgatcggggcgagagcaacgagaagcttctgaccagcctcgtgcaagagttccagcgcacgatgtcgggtgccgccggcagcgagatctcggcgatggcgcagacgctcgagagggtccaggacgtcttggagaactccctcggcgccatgcaggaggccgggcacgccctgacgtcaccgatagcggcgacgacgaaccgcctcgaggtctcgatggcgaagctggagaccgctatcggagggtgggcttccttgatcgaggggacgaagcagacgttggagcggttcgactcgctgacgcgcgcgatggacggcgttcatgggaagttccagaacacggcccttgcggtcgagcgagcaggcgagaacctgaaggtcacaggcgaccggctcggagccgcatccgacgtcacgcagacggcagcgcagtcgatgggggaggcctcggtgcagctcgcaaccgcggtacacgccacgagcgcgagctgggccgactatcagaaccgcttcgccgatacggaccggagcctcgccgccgcgttccaacagctcgacgaaggcctccaccgatactcggatcaggtgaagcacttcttgctcgagatcgacgagcagttcggcaaggcgtcgaagcacctcgtccaggcggtctccaccatgggtgacgacctcggcgacctcccagtcgaggtgaagaagctcaccgagcaggtcgatcggatcgcgagcggcctgcagaggcgggttggatga

SEQ ID NO: 10878 - DNA, 717 bp, Vulgatibacter incomptus
gtgagcgacctgatggccggtctgctcttcgttttcatcatcacgctgatggtcttcgccttcaatctccgccgtgcggaggacagccttcgccaggcggaagagcagaagcaggaggaggtcaagcagctcaagggggcggatgccgctcgcgcccagctcttatcgaccatccagacgcgtctcgctcgggaaggtctggcggtggagatcgacgtcgagcacggcgtgcttcgactcccggaggagattctcttccggtcgggtttcgacgacttcaatccgggcggacgggagcggctcgcggtgctggccgacaatttggcgaccgtccttccctgcttcaccgtaggttcgatcgaccgttgcccgcagcgaacctacgacgcgaacgtcgaggcggtcgtcatcgaggggcacacggacgacgtgccgctcctgcctgggatgcggttcaaggacaactggcagctctccgcggcgcgagccatccggacctacgaggtgctgacttcgaggagtgcggagctgctttccttccggaacgaacgaggcgagccgctcttcggtgtggcgggctatgcggattcccggcgggtagctctggaatcgacccccgaggcccgagcgcgaaatcgcaggatcgatctacgggtcctcatgacgccgccctccacggacgagcgtccggccgtctccgaggtggtggagttttga

SEQ ID NO: 10879 - DNA, 1413 bp, Vulgatibacter incomptus
ttgagcggcgatggtctcaaggcgcagctcgagagccgtagggcttcctccggtcgatgggatctggggcactcgatcgccggcctcgcgccgaggaacgtcaaagccgcggcgttcgaggtcttccaggccctcgaaaagtcgggagggaaggtacccccgctcgtcgagctggatcaggtgctccgagaggttcgagcccactgggagtcgacgaagtcgttggacgggcttccgaggcgccaccttcgcgctctgccatgggtcctcttcatgccggagggggccgagcacgcggaccggtggctcggttcctctagcgagctcctgaaggcctacgtcggttggctccgtgtcgctggccgaccctccgcgcttctggcggccgtgaaggcgttccttcgcgactatccccaggcggcgccgaccttcgacgagtggcgtctcgcaatcgaccagctccttcgggattcggcgagcccgcaggggatcgcctggcgggagcgcaacgagacgtggaagttgttggaagccgatggacctggggcgttcgcggaccagctctggcgtcggtctgacggcattccggtgctgttggaaggggctgggttcaccgacgacctccagaacgcccggttcgtccacctcgtggccgacgcgctgttggatcgcttggggcgtgagctctcccgcggcttggcgccgacgtcgccggcggcgcagcgtgtcgttgcaatggcggtcggcgccggacagttcccgtacccatcgcttcggaccaagctgcccggagcgctgctaggtccctacgtcgaccgcgacccggacgaggcaggacgcaagtggctggagcgactgtttctcgactactacggggatccacgcatcgacacgagccggtggttcggagtcgacgaacgccatcgcggggtaatgcaccgatggctcgtgcgccagagcctcgaggcgttcttcagagtgttggatggcacggcggacaagcggcactgggatgcgcggcgggcgttctggggcaagtatttcgacgcaggcgtggtcgttcaggcatgggtcgtcttcggactcgatgcctacagaattgcgaccgggcgcttgaacatggacggtcgtcaattcggtaccgttcatggcgagcaggaccaatccaagtccgtattgctgatgcagattcgtggcccgagaggttcggtggacatcgcggaatggagccatatggggagatgccgcggctggccttccggtgggtccggtgcgccgcagttctaccggcgtcgctacgacgggtgggacttgagaggcgaggcgccactcgagcaaacgcattatgcgggaggttcgtggatgcccaaggtgcgtgagtggatcgggctgcagaccggactgcgggtttga

SEQ ID NO: 10880 - DNA, 2763 bp, Vulgatibacter incomptus
gtgggaccgctgctccgcctcgtttcggaggagcaggcagtcctggagggggccaccgtcctcgtcccccacgcttcgatcgccggcctccacgactccgagctgcgctcgctcggcctccctccgcgcgccgcgctcttcttggcgatcgaagccaagggcaccctgacgagctccgatttccggctcctcgtcacgctccgccacatcgacggtcggccggtctccttctacgagcggatcggcgcggagctgcgcatggggagcaccgtgcgcacgttggacgccgcgctcttctcggccctggaggcgatcgacggattcaacgcctccccgcctacggacctcgactcccgcatgctcgcgtgggccgcgatcaaggagctccttccggaaggcgccaccgacaaatatctcaccgagttccgagtcgcctcggcgcctagcttcacgcttcgtcctttccgcaacgagcagggcgagccggacttcgatccggtgccttgccagatcgagacgatcgaagggttggattcggttgagcacgaagcgcgggaggtgctgccgcccggcatgcagaaggagttcgccgcgtcctaccggaggaggacgcaggtgcctacgaggtacgccgtcggcggcggatggttcctcgtgcttccgccgcaggtgaagaaggcgctggaggtggcacggcgagcgcaagcagggagcgtcgccgagcgaacggccttcttgaagaacccgcgcgccttcgtgcgcgaggcgctcggggacgagctgaacgaagaacagctcgaaggcctcttctgggacgagggcttcagcgaccgagtgaaggccgtcggtctctggcagccaaaggtggttccctggtactcgcaatcggcgtcgcagtggatgccgccggagcacgtgggacttcggatcggcgacgtcgaactccgcctcgaaccgacagaggtccgcgctcttgccgccgacttggaaggcgcgatcgccctcggaaccgagtcgattcgggtggaggaggtcgacgtcccggccacaaccgactcgttggccgccgtccggcagctcgtggacgtcctcgaccgctacccttctgtcgaggtggtgcacgaggccgagccgcaggaggcgctgccgaccgtcgatgaggagaagccggccaagctcgcactcctcgtgaaggataatctggaggaagtcgaataccggcccaccgtccgccgaatggcggctccgaaggttcgccggcccgggaacctcgcgacgagcttgctgcagcatcaggtcgagggactggagtggctgcaggaccactggatcgccgggcaccccggcgctctgctggcggacgacatgggcttgggcaagacgctcactgcgttgtcgttccttgcctggctgcgagagcggcaggacgagggcgtcgtgggccgcaagcccctgctcgtagttgctccgaccggcctgctccggaactggcgcgacgagcacgatcggcatcttctccgccctggcctcggcatcctctgcgaaggattcggcgcggggctcagcgggctgcgaacgacgaagggtacgggaggtgatctcgcaggcgggctcccgacgctcgacgtctcccgcttccagaacgcggactgggttctgacgaccttcgaaacccttcgcgactaccagcacagcttcggtcgcgtttcgtggggttgcgtggttctcgacgaggcgcagaagatcaagaaccctgcggccggcgtcaccgacgccgtgaaggcgatgaagaccgatttcctcattgccatgacgggcacgccggtcgagaaccgcctagccgacctgtggagcatcgtcgacacggcctgggccggacgcctggggtcgctcaaggatttcctcggaacctacgagaacgaagccaccgaggagcgcctcgaggagctccaggtggcgctgaccgagaaaccgccgcccccgttgatgaagcggaggatgaaggaggaccatctccatgggttgccggagaggagcctccacgtgaggcgaatcccgatgccggaggtccaggccaccgagtatgccaaggccctcgagtacgcccgcggcagccagaagaagggcgggatgttggaggcgctccacgccctccggcggatttcgctgcatccgttcgcggatgcctcgacgagcgacggcgcttggattgacgcctccgcacgcgtccacgggtgtgtcgaaattctcgacggggttttcgagaggggtgagaaggcgctcgtcttcctcgagttcctcgaagagcaggggatcctcgcggagcttctgcagcggcgctaccgcctgacgtctccacccatggtcatcaacggcggcgtcgcgggcgacaaacgaaagtcccgcgtggatgagtttcagcggcgctcggggttcgacgtgatgctgctttcacccaaggcaggcggcgtcggcctcacgctcacggcggcgaatcacgtgatccacctctcgcgttggtggaatcctgccgtcgaggatcagtgcaacgaccggatctaccgcatcggccagaaccggccggtccacgtccaccacgtgctcgcgatccacccccgctaccaggatcactcgttcgacgtgaccctccacaacctcctcgagcgcaagcgcctcctcagccgctcggtactggcgccgcctgccgccacggacgccgacgcctccgacctcttcgacgcgacggtcaacgccgggaggtga

SEQ ID NO: 10881 - DNA, 2037 bp, Marinobacter sp. C1S70
atggattttgtcagtttgctttcgcacctacttcctgactttactgctttatcaaacggcacaccacaaggcctagcaacgttgttttggctgcttatgattgtgatttttttggtcgcagtcatcgcagttactcgtcattttctgcgtttcgaaggcaggttgggttcgctcagaaccctcatcagtgatcaagataagaaatcgctcgcgagcaatcgtcgtgaagttttgcaaaaagctatggccttaaagcaagaggatgttggtaaggtttggcgagaatttgatgagagcctggtgatttcgggcgatcagaaggcgctgtttaacaccctggatgctgatcatttctttaacgccagaacccttgcgcctggccttacaggaagtcgtttgcttgccgcgacgccaagcttcttggtggcgatcggtgtgctagggactttcgtgggtttaacggttggcttggatagcctgaacttgagctcccgctctgacatccctgaactgcgtgatggtattgatcgactaattcagggggcgacagttgcctttatgacctctgtttggggtgtgggtcttagcctactactcaatatgattgaaaagtttatggagcgctcggcgctatccaagattaagtcggtgcagcaagagatcgattttctctacccaagaataccggcagagcagtcgttggtccacatcgccgatagtagtcgggagagcaaggaggcacttcaggaacttcatgagcgcataggtgatcggttacaggagagtatcaaaggcgtttctgattcgatggaagaggcttttaccacggcgttaaacaagattatggcgcctgccattgaatctctagtcagtaacgcaagccagcagtccactcaagttctcgagcggttggtaggcgatttcgttgagggcgttagcggggcagcaaaaaaccagggggcattgcttgaacaggcggcttccgacgtgaacaatgctgtcactgatatgagctcccaacttggagagctcttcacaaaactcaacgaacagcaagaaagacagcttgagagctcacggcaacaagccagtcaatttgacgaccagattagtcgggttgcggactccgcatcaagcagccaaaaagcgttggaggacaagttcggtcagctgatggcaagtttctcagaacaggtcgaaagacaactggaggctgccgataagagagctgagagggcatcagaaggatctttgaaacgcgagcagaaaatggagcaaatgttcgcggttctgaccggtcggacaatggaaagcctcaagtcacagattgaggcggcagatgagcgagaaggtcttagacaagaacgtttccgagagcagaatgaacaagtcgccgagcaacagcaacgtctgcttaatgagattgcggaatctgtcagaacaacgcaaaaacaaagcctgcaattggctgagcagcaccgagaaactctccaacaactcgctagtgttaccggttccatttccgagagcagcaaacatctggatagtagtgcaaatcagcttggcctactcagctcccaggtaaaacaagccaccgacctattgggcacccgtatgtcggaggttttatcagtcatagaatctgccggcgagcagaatgcattgctttcagaacgactgagcgaacagtctagactgcttgaaggcctccaacggtcgattcaagctagcgtagagcaatatggcaatgctgcaaaactaacaaacgaaggtttcgctgagctcaaacagcatcaacaggaatggttgagctcaatcaagactgaattcagtgggttatctgagaatctggccaatcaggtttctggtattgaaaaacaggcagagtcctggctgtcgagttattccacacaggtgaaccaacaaatcgaagaccgcatggacaaatggaataacagttctcgagcatatgccgactccatgctgcgggtggtcgagaatatgaacagtattcttgatgaattggagacccgctaa

SEQ ID NO: 10882 - DNA, 792 bp, Marinobacter sp. C1S70
atggcgctgctccggtctcagaagcacatgtcggtagacgaagagaatccttactggatgtctttctccgacattatgtctgggttgttggtcatttttatcttggcctcagtgatcttaatcctccagttgatggagctgcaggaggaagctgagcaagagcgggagcgtttgcaggaacaagtagtagaagtagaggaagagattaatctgcttcgaaaagcggaggaggttcgaagaaatatcctaacagaggccgcagagatacttcaaaagcgtggaattcaggtcgaagttagcgagaacagtacggttctcaggattccaaaccagttgctaggatttgatactgccgctgaccaaatcgggcagcaatatcagaataccgctcgcgaaatcggtgaagtgctccaccagctcatttctaaagaagaccggtccgattatctggacaccgttttcgtagaggggcataccgatagcaggccgtttacaggacggttgtgtggcgaaaaaggtaattggtgtttgtctacattcagagctatctcactctggcaattctgggagcgctcacttcaggagcgtgccaagttgagcagcctgaaaaacggagagggcaaaccacttttctccgtgagtgggtacgcggaaaccaggcccgtcgtcgaaaatcagcgtactgcagatgactatagcaagaaccgtcgaattgatattcgatttactattcgacggcccagtagcgaggactatgaaaaggtccgagcaaaggtagatttaactaaatga

SEQ ID NO: 10883 - DNA, 737 bp, Marinobacter sp. C1S70
atgaagctgcctcagcccccgcaacttaaaaaggaatggccggaacacgttcagtccggctggtctaatctcattaatcaggccgaaagtttcgctcaatcagcgggaagtggcagtgcctttgatttgatgtgtcaaaggatagtcaaagcaattaataatggcgacttcggcgacgtttatgacgccttggagaaacgcttgggcgcaagagcgctaacttggctatggtgtaacgacgaaaaaattcggaaaatcagttgtagacagtcagttatagaggtgttggtggaggcccaaaaccctaggcttacccgaacaaccttcctgcagttatgccagctttattttcaggagtttgaccaccttgaaagtatagagcctgggctttcctctaaattagaagcggtactccgggaccaaagcaaaaaacaacctcgtcagacgcacaagcacatgtcgagagatcctgttgcgtcgatcaaggagaatgtcaactggctgatcggcggtgagggcccctcctatttttctcgacaggtccgtgaaagtggccaggaacttgagcaaaagttcgctgcgcttggcttggtcggctatgaccaagggcggtatggggacctatgccgggcgcactactatattgagactctcaaagaagtggagctcggccagtgggatcctattttcgacgagcttctcaaaccgtcagtcaaccgtgcatattccggcccatc

SEQ ID NO: 10884 - DNA, 2001 bp, Halomonas sp. PBN3
atgactatttcccggtatcaggagcttttggtgagcgactggttctggctgggaatgatggcgatcatggctgtcgcgattacttcactttcatactatttttccaaatatcgaaagaatgtcaggctggttgaagctttgataaaaggccagacgcgagaagaattggcctggaagcggcaggaaatcctggagaaggcgcaaagctcacgcgtgaaggctggaaagctgtgggaagagtttgatgaaagcctggtgtactctcctgatagggataagctttacaatactcttgatgccgaccatttcttcaatggaagaacattagcctacggtttgacgtcgagccgtctgctggcagctacaccgacctttctgactgcgatcggtgtgctgggtacttttattggcctgacaattggtttgagaggccttcaggtcgatgctgatgatgtcgataccctcagggtgggtatcgcgagcatgataaatggcgctgctattgcctttttgacatcagtatggggggttgggctgagcctgctacttaatgttatcgagaagctggtggaaagaagtgccctgaggcgcatcaacaagctccagcacactattgactttctctatcaaagaatgccagctgagcactctctgatgcatattgctgagtccagccaggcaagcaaggaggcacttcaggagcttcacgagcgcattggagacaggcttcaggaaaccgtgtcaggaatgagcgaagccatgcagcaggctatctcagactcgcttaacaatgtcatggccccagccatacaggctctggttgataatgcaagcaatcaatcaaacgaggtccttgaaaagcttgtttcgaatttcatggagggtatgaagacagctgggagtgagcaaaccaaggcacttggaactgctgctgaagaggtgaatcaggcagtaacctcaatgagtacaaggatggatgaactctttaccaagctaactgagcagcaacagaaaagcggtgagcatgtagagaccgcatctcgcgagctgtccgagcagcttgacaggcaacgcgagacagccatggagcagcagtctgcgctggcggagaagtttgaatccttcatggaacgcatgacagagtcgatggatacccagttccatcaggcatctgagcgggatgagcaacggaagcgagcacatgaagaaagtcttcagaagatttctgaagatcaggctgcggcgattgagcgccaggttgccctggcagatgaacgggatcaggtgcgtgcagcgcagtttgatgagcagcaaaaggctattgaagaacggttcggtggtctggtagaaaagcttgtcaatgagcagcaagagttgatgagacaggttggagaggcatcaagaagtgccaatcagcacttgacaggtatatcgtcccaatacgaaaagctatcttcctcgctaagtgaagtggcaagttctgctgagcgtagtagccagaacatgacaaatagctctacccagttagggaccttgtcggccaatcttcacaaggccacagtgcttcttgatgaaagggtcagttccgtcacagaaagcctggagcaagtgtcaaccagaaatagtgaagtgctttctggcatctccgagcacgcgcgtacacttgcgagcatgcagcaagccatcagcgatgctgcccgtcagcttgattctgctgctaaattcgccaatgaaggtttcagcgagcttggcagccataatgacgagtttatccgtaagctgcgtgatgagtttacgcagcttggtgattcactgagtgagcaggtggaaaacattgagaagcaagccgaagagtggcttaaggcatatagccaggaggttcgcgagcaagtttctgagaggatggaagcctggaataccaatacgctatcctttgccgatcagatgaggagaactgtcacggcaatcagcggtatcgtggatgatctggagcgtcgctga

SEQ ID NO: 10885 - DNA, 1737 bp, Halomonas sp. PBN3
gtgggccgtggtgatgcttacctcaaggctgaggagaagctgctggatgtggtaaggagccgaaacttcggggtattaccagctctgctccagaaaagggtagccgttcgggccctcacccagctgtggctcgatcattctgacgtgctcaagagattgatgagccccaggctgcttgaaatcatggttgacgctcagcaaccccggctaggtagagtgccgcttctcaatatgctccagctctacttcaaggaatttgacagactggaccgctattcctcggaaaatgatgattccttgagggaagtatttgaggatctccttgttgaccagatacaaaaggttgaaaatctgggcgaagagctgacagcagatgatctgatctcggttgtaaagcaacagggcgactggattctaaaggttgatgggccggcgcagcttgtcaagcttgccatcaagaatggtatgacactggaggatgcattctcgaagtttggattgaaagggtttgacagcggtcgatatgccgatgtctgccgcgcccattactatatagaaaagcttcatgagatagatgaacaagaatggtctcctgtcttcgatgagctattgcatcacgacgtctccaaagcgccatatggaagagaagggaaacgtatagggcacgccgccctggaggttctgattgaccgtgttaccgaggccagtgaagcctggcaggatttcatgctgagcctggccggcgacccccgtgtttcgagcagggtcaagagctatcgggagtggtgggccccccttggtgaacaaagggtagagaaggtacgtggctggttttccaaacaggatctccgtctctttcttcaggctcttgagcagtatggtgaagccactggtaattctgagcttaagaggatgtttcccgcccgaagaacctttctggaagggttgtttcggctcaaaatgatcaagagtaccaggttgatgcttggcagcaaggccgagtattcagtcagaaagattttgaagaatgagttgaaggtaaactacataaagttagacgggcagctttccgacaaggcaattatttatctggattgtggtgattttcacttgattgaaggctcgcacagcttcaagctttgggtatatctggctccgccaagccgtaagtatgtgggctatgaagtgacgagtctttcccactttgacttaacacaaatggtgcctaagagctacaagaaagaatatcccagcctcgagtataccggcattgtgcatagcccttcaacttggcagaataaggtgtttgagtttctgtcagaaaacggtattagcctggatgtcgaagccctcctcagcaagcaggattatagaaggtatgtggagaggtttgggcttcccgttgtaaggccggcgaaaaggtttgtttctagagtgtctagtgaatctgccaataatgttggtgctgattataaagaaagccaatcaaatgctgatcgtgatcagagtgttctctcacctctggcaattcagatattgctttatctccacaggcaccctgacagcaaggcaagggatatctccaggcatttgggtcttccattaaaagctatcaatcatgtgctgcatttggacctgaaggggtactgcatacaagtctcaaacttcaactggatcaactcgggcgaaggcgagagagagctgaaaaacagcggggtgttgggtgatgaagaataa

SEQ ID NO: 10886 - DNA, 1638 bp, Halomonas sp. PBN3
atgttgcggttgattgagctaagtgccctcgacgactctgaaagctttgatcgcattcaaggcggacttctggccgacgacatgggtttgggtaagacatacatgtcacttgttgccatcaatgagtatctgtctcacaggaagctgcaaggtcttccggagaaacctgtcctgatcgttgctcctctaagcctactcgagaattgggagcaggaggtttcgctgacttacaagagcattccctttaaagatgtcaaggtattgcaatccggaagagatctttctgagttcaagaagaaaggggagaagcgagagtccgttcaggcatctgagctcctggacgaggagggtcagatggagcccgacaagatacgctttgctcttcacgtgggccctgatgcaggtgtgaagaggctggatgtcaacaggcgtctcgttattaccacctatcaaacgcttcgtgactaccagttctctctctgcctcgttgactgggggatggtgatttttgatgaggcgcaaaacctcaagaaccccaacaccctgcagacccatgcggcaaaagggcttaatagtgatatcaagatattagcgacgggcacacctgttgaaaattcgctgggtgacttctggtgcctgatggataccgctcagccagggcttctgggggattggacctatttcagggatcgctgggtaaccccgatacttcgtgcccaagaggatgaaaaggatttcgttcgtggttcggttgggagcgacctgcgcaaggctgccggtgatttcatgttgcgtcgtatcaaggaggatcagctatcagccctgccttcgaaaagcattcttagtggcgttcccactgcctcccatggggcttcctataatcctaagctgtcttgctccatgaatggtttccagctctcggcctacaatgagacgattgagtcgtatcgaaagcgtcgcgcagaagaagacgatgttcgtggctttgctctttcgacgcttcagaagctgagggcgatatctcttcatcctcgagctaatgaaccgttgcaatctcttgtttccaagcctgactcatatcgtatgattatgtcagagtcggcaaaaatgaaagtaacccttgatgtccttgatgatataaggtcggcgcaagagaaagttattatatttatactttctaaaaatgtgcagcgcttcatgaaagtgtggctagacaagatttacggacttgatgtcagtattatcaatggggatacatctgcggtagaaggaaaaggtgacagcctgacaaggaaggggctgatagaacagttcgaatccgttgatggctttaatatcatcatcatgtcccctgtagcggctggtgttggcctgacagtcgtgggtgccaaccatgtcattcatctggaacgtcattggaatcctgctaaggaggcacaggctactgacagggtttaccgtattgggcagaagagagacgtcttcatccatattccaaccgccttgcatcctgaatttgattcattcgacgtccacctcgacaggctgctcagtggaaaactgctgctgaaggatgccgttgttactacagacgtggtcagtgagagtgaggtgatgaaatctcttggcctggattga

SEQ ID NO: 10887 - DNA, 2694 bp, Burkholderia megalochromosomata
atgattgagaccatccttgaagcgccaatcgtggccaagatttgcgcaggcttcatcctcttctttgtcgcggtgttcctggttcgctttgtccctcgtgcgttggggcgctggagcgacctgaatcgaattatctcggggctcacccctctgaaagccgccggtggcgacccagcaccgctattcgcaaaaaaggaagaccttgcgcacctgtggagtgagtttcgcaagagccttttcgacccgaagtcctttgacccagcaacgggtgagtacatcacggagacctcgcggcgtaccgtgcctgccgaacagattttcaacgcgcaggtcgtagtcgacagtcgggtggggactgaattttttaagcacctgccaggcatcttgaccggcatcggaatcatcgggacgttcgccggtctgctgcagggcctatctgccttcatcatttcggacaacacgaaggttgtccgcgacagcctgagcgcattgctgcacagcgtagctgaggcatttctcgtctccgcaacagccattttcttcgcaatggtcatcaccgtcatcgagaagttcttcatttcccggctctaccagaaagccgaagaggtcgcgtgcctgcttgacagtctttacaaggcgggcgcaggcgaagagatgctcgaagagcttctgtattcctcaaaagagaacgtttccaatagcaagatactgaaagatgcgcttgtccacgaactgaagggcatcctgacttccttgtctgagagccagattcaggcgcagcagaaaattatcgaagcgcaaatcgcggcgcaaaagaatattgctgaggaccagagccgggcatatagcaagacgagcgaagacttgggtcggcagattggccaggacatcagggacggcctgaaggccgcgctcgaggaaccgatggaagagctgaaaacggccgtgaagtcagccaccgtcgaccgcgccggcgcggtgcacaccctgcttgcgcaagtcgtggaggggctcaaccagagcctgaaagacctgttcggcgaccagattgcgggcatcaacacgatgcagcagcaaactgtttccgctttgcaaactgcggtggctcgcatggagcagatgtcttcgtcgctggaaacggcgggcacgcgcgcaacagacaccatggccgccaaactgggcgaggcgctctccggcatggaggcgcgccaggaaatgatgtcgcgccagatggcgcaggttgttgaagacatgaagacgactgtcgcaggctcgcagaccgagacgaacgcccgtttgcaggaaacgttggccggggtgagcaacaccatcgagtccctcgtttcatcgctgtctcagtccgtggcgacgtcgcaggatgcgaccaacgagaagcttcagagcgcgctcaccggcgtgacgcaatccgtcgaagcgcttattggctccctgtcacagactatggcgagctcgcagtctgaagttagtgcgaagcttcaggacacgcttgctgccgtcagcaacgccgtcgagaacctcgtgacgaacctctcgcagtcagtcgccacgtcgcaaacgcaaagcaacgaccgcttgcaggagaccgtctcctcggtgaggcataccgtcgaaaacctcgtgacgaacctttcgcagtcggtcgcgacgtcgcaaactcaaaccaacgaccgcttgcagcagactgtctcgtcggtggggcagaccgtcgagagcctcgtgacgaacctctcgcagtcggtcgcgacctcgcaaactcaaaccaacgaccgcttgcagcagaccgtctcttcggtgggacagaccgtcgagaccctgctgacgaacctctcacagtcggtcgcggcatcgcaagcgcaaagtaacgaccgcttgcagcaaaccgtctcgtcggtggggcagagcgtcaacgccctcgtgtcggacctgactcagcaggcggcttctgcggacgctgggcaccgtgagcggcagacccaactggctgcgcaggccgaagctgccgcgctgggggtgaagagctcggtcgaggcgttgaccgccgaaatgcggaccttggttgcaggcacccgtgacgccgtcgacacgatgcgttcgagcgtagacacgatgcgttcgagcgccgactcaatgcgcacggtgacgacggatgtggtcagccggatgaattccggtgcggacacgctttacgctgcctccagcgaattcggcaaggcggccgcgagcgtcaccggcgtcctgcagcaggccacgagcaccaccgacaagctggtggccgccgcagcgtcggtcggtacagccgcccaaaccatgcagggcatcgtcaccgactatcgcgcaacgcgtgaccagctttcgcagatgctcacggaattgacacaggtcgtgaataacgcccggactgacgcatcgctcaccagtgacgtactgcgccggattgaggcgtctactcaagcgctgaatgcggcgcagcgaagcgcagaagagttcctcgaaggcgttggcgacctgatgactgactcgctgacaacgttccagcaacgcctcgcggactccatgacggcggtgaaccgtcagctagtcgacaagacggcggcggtaacgagcctgctcaggcagaccattgcaaaccttgctgactcaatcgaactcgtcgtgccgaatccggaggcctaa

SEQ ID NO: 10888 - DNA, 726 bp, Burkholderia megalochromosomata
atgctgggtgcacgcatcgttatcaagcgtggctcccgttcagaggccgaaaagcctttttggattagctacgcggacctcatgactgcgctcatggtgttgtttctcgtgaccgtgtccgtggcgcttctggccgtcaccaagcaggtcagtgagaccgaacgccttaaggcgcagcgcgaccgggatatcagtgcgctcatgcatcgcattgaagtcgctgcgagcaagcgcccgggcgttaaggtggaccacgagcgcaatgtcatcgacttcggggacaaggcgcacttcgacaagaacagctatgacctgaaaccggaccagcagcgccttcttcgcgcgtttgtgccagaggtgctcgcgattgcccgtgacccgcttggcaagaagtggctcaagcagattgtggttgagggcttttccagcccagagggcgattatctgtacaacctcaatctgagcctcgagcgcagccaacgcgtcctttgcgtgctgctcaccaaaccgtacgcggatgagcgcgccatgagcgacgatgaactggagcaggtcagggacttgttgcttgttggcgggtattcgttcaatgcggccaaggcgtcatatgaggacagccggcgtgttgagttgcgcctcgagtttctcggtatcggggagcaacggccttccgtttcgaatgccccacgaggccacttcggcacgtgtgcgctgggaggtgcgtga

SEQ ID NO: 10889 - DNA, 1794 bp, Burkholderia megalochromosomata
atgggcgccctgagtccccttgaaaagatgcggcaggcgctctcgtcgaaacacggtccacagcctgtagtgctcgtccagccgctcacggaaatgaataggcatgagcgcgagctggagaaagagatacgagagaagcgaccgttgccgccccccaaggaccttgttatcgaagctatcgagcttttcagggaaacgcgacggctggccaattcgcgtcaagcaagactggttacgctcggctgcgtcgaaccgctcggcaagacacattaccgcctgattgaggacgctgaacgcttcccgcacgtgcttaccggagtcgaagccttccgcaagcaccgccagacctttcgcaactgctatcaggggttgctcaacgcgtaccttacctaccatccggacaagaagggctgccggccgcccgggcgtgcaaactgggaactgttgcgacaatggctgcgccgcaacattgcgaacatccgcgagcaaaacggcggcgtaaacgaggattgggtcactgaagtcgcggcccatacggacgtgttctcggaagctcccgtagcccggttcggtaaggagacccttcgcggaaaccgagagccatttctgcttttcaagaagacgctcggaatcaaggacttttcgtggattgtcgaccaacttgtccttgaacaagtgcatgcggcggggcgttcgggcacctctgagttcctgcattacctgccagggcttatcctgctgctggggtcggtcagtgagaacaataagacgctcttgaacaaggcgttcgcccagattctgacgtactaccacgcccgcacatccggtgcgccccacaaagatttgcaggaaaactcggttaagcgctggggcaatccatggctcaagcgaaacaacgaaggctgggaccttgtagataggcccgttcgcgagatggttacgtcgtggctcaagcgacactacatccagtactttttcgaagtccttgctcaggagggcaagagcgaccgccgtcgcttggacttctggataaagtaccacgaagccgttggcccgctgacgttcgctctgggtccgcagaccctcgggagtaacgacgaggatatggctgacgcccgcgacctgatggaagggatgtatgtcgggcttcagggtaacggttcgaacaacaacaatgctttcataatgcagttcggcgagtgggtcgtggttgagttcgcacagaaaggtaacgcctgcttcttcttcaaggagtcgaaccttccgttcgagctaaaccgtgatgtttccgtgccggctgtcaagaaccatatcgaaggggattctgacgacccgcgtgacccagttcgacggactcaccgggacctcattgaggccgactgggagaccacgttcgaacgagtactgagcgcgcgcggcattttcgccggacaagccgcactttcatccccggcaaaacgtcgtagcaccacgtcccggggcccctcaggtgcgacgccgcaggccctgactcgcaccgcgcagccgtcacagaccgcagcggcgcatgcccgtcaatcggagaacgcgtcgttccagtccccaggcgtaagccgcctgacgcctaagcaggagcaaggtgtcaaagcgctttgtacgcggctcggtatcaggctagaagaccttcgaagcaaaaacggcaatctgtgggtctaccacgacatggcacatgattcccgtgctacgccgcagctgaagcattggggcttcgaataccggcgcggaaagggttggtggtacaagggccccgcataa

SEQ ID NO: 10890 - DNA, 3774 bp, Burkholderia megalochromosomata
atgctgaagtggctcaaacgcgctgccagcgccggcaccccttccaacgagcagaagccggcggacgtctggcgctgccttgacagccagggcgtcctgctcggaaccttggaggcggtcggagggcttcccggggcgacgcccctgagctcgcccatgatgccggcaatgattacgcagttgcacgatgagggctatgcggtcggcgaagaagcaagcgcgcacctttcatgggagtccctctataaccttctggacgacccagcctatgccagcagccttgagctgcttgagcttcccgccgtctgcgactatgtgccggagctcaaaagccacaacagcctgacggaccgtgatttctacatcggcgtgacgcgctggcgcgacggaggtggccgtgttctggagggcgccacccgaacgggagcgctcgtcgaggtgggaggaaaagcccagctgctgtcccgccgcgcgtgggatacggccgagcaggtcgcacgctttcacagtcggcccgagaccgagcgcgacgatgcttcgcaacggaggcaatgggggcagattcgacgcacggccatggcagctcgggcgagaatggacgaattcctgtacaagagcgtcgtcctcacgccggacacaatcgacatcaacctgcgcaagacagaaacgggcggcacgcgggtcgttgaagtcatgcccggattcgaaggcgcgccggaaaactggctcgatgtcttcgattcgtatcagaaggtgcctcaacgctacgacatcagcacggacaaaggtattgtccaggtgctcatctcgcccgaagtacgcacggttctggacaatatccgccgcttgccggggcggcttgtcgcggggtcgcgagccgaagctttcctgctgaatccgttcgcgacgctcggcgaggatgccagcgcggtcattgatgaggcgcaattcgagcgcgcccgcatcgaagccgacatcttctttgaccatttcaccgcccttatccaacgcgatgccgttggcttccccgagcatgttgccctcgctattgagacgccgggtccgagcgaggtctctgctgaggaacgttccttcgcagacgacgccgagctggaggacttcatccggggcgccgaacgggcgctgacagccagcaagcaactgtacggctggcagggctacgacttcgagctgctgggcgacagcgtcgcgcaggttgagcttctgaaggccgcgcttgccgagcgccaacagccgcgcattctcgtgcgctacgaggacgtgtacgacctgagcgcctacacctcccgtatcaacgacatcggcatcgagcagccttactactcaccatacattgccaagaaaggcgaggaatggtggccagagaatctggtcaacgtcatcgtctacaccccggaaggcagtgcggacccggttgcggtgccagtcaccgaagccgtgcgtgacgaattgaaggcaaaggtcgagcaggctcaggcaagcggccagacgtccgtggagctgccaggtttcccgaagccgctgccggtgaccgaggcgcgagacatcctcgatgcgttcgagcagttcggcaagagcgttcgtgacggacacgaggagccgcccaaaccccgcgacgaggggacgagccgtcccaaggcaaagcagctccttatcaagcccaacgtcgacgctgtcgactacgaggaaatccgtcgcgaaattctgacgacggtttctgccgcgccggtgctgccgacaggcttccttcccacgacccgactgaaggagcaccaggaggaaggtgtcgcctggctgcagcacctgttccgccactcaccgacccattgcaggggcgccgtggtggcggacgacatggggcttggcaagacccttcagctacttaccttcatggcgcgcgcgttcgaggacgacccgagcttgccgcccgcacttgttgtggcgcccgtctcgcttcttgaaaactgggccgaggaaatcggcaagttcttcaagcccggcactttccagccactcattgcgtacggcgacagcctcgcgtcgcttcgtgtaccgcgcgccgccatcgacgaagagctgcgcagccagaacctcgtgcggttcctgcgcccgaactgggtgggtgacgccaacatcgtgctgaccacctacgagacgctgcgtgacctggagttttcgttcgcggcgcaaaagtggtccatcatggcctgcgacgaagcgcagaaaatcaagaacccaaatgccatggtcacgcgcgctgcgaaaaagcagaacgtgatgttcaagattgcgtgcaccggcacgccggttgaaaacacgctggtggacctttggtgtctcttcgaccttgtgcaggccgggctgctcggcgcactcaacgagtttggcaagcgctaccgcaaaccgattgaagcggagaccgaggacgagaaggcctgcgtcaacgagctacgccgcctgattgagccgcagattctgcgtcggatgaaagctgacgtcgcaaagcttccgcccaagcacgtggtgccaacgctcataccaatatcaacccttcagcgtacgtactacacaagcgccgtcaacgcgtatatggccagcaagaaccccgccggcggcgagaccggcgtctcgccgttcaagaaccacctggggctcatccagtatctgcgctccatctgcacgatgccgcatgcgccgggacaaggacgattcaggcctcaagcacttgaacaggctcgcaacgaggcgcccaagcttgcctggctcatcgagacgctccagcagattcgtgcgaaggctgagaaggccatcgtgttcgccgaattccgcgaaacccagcaaatgctggcgcactacatcaaggaggtgtttggcttcgcgcctgacatcatcaacggtgacgtgaccgcatcggccaaacacgtcgcgagccgacagaagcgcatcaaggcgttccaggcgaagcctgggttcggtgccatcatcttgtcgccggttgcggttggattcggcgtcaacgttcaggaagccaaccacgtcatccactacacccgcaactggaacccggcaaaggaagaccaggcgaccgaccgtgcctatcgcatcgggcaggagagagaagtgtgggtgtatctgccgatactgagcgcacaggacttcacaacgttcgacgtgcggctcaacaaacttctggacgaaaagcgcgagctcgcgggcgacatgctcaacggagcaggaacggttctgccgagtgactggaatcttcaagacatcgttccgcgcggctccaacgaccctgccttcaaccgcaaggtcacgctcgacgacgtgttgcgcatggaatgggactacttcgagtcgctggtcgccgccctctggcagaagaagggcttccgcacggtgtatcgtacgccgcgccaggacgaaggcgtcgacgttgtcgcattcactggaaatgcgggcgacctaattcagtgcaagagttcgggaacggaaggcgcggccctcgattcacagggcgtcaaagacgttgtcgctggcgaggcggagtaccgcttgcggcaccccggtgtgagcttcgccaagtgggcagcgaccaaccagtacttcaacgagaccgccgctgaccgcgctcgcaagaacaacgttgcgctgctcaaccagaaggatatcgaaacgttgctgcgtcaacatcccgtcgcgcacagcgatgtgcaacgcttcctgcacgcatactgggatgaggcggcctag

SEQ ID NO: 10891 - DNA, 2004 bp, Massilia sp. WF1
gtgaactctatcagcgcagctcttgcgcatatcaatccctcgctcgctgcagtgcacgggttcccgttatatatcttcttgattgtggtgttcctgacgttgctgttcatccttggctacctcgtcatgggtatcaaggtctggacgcaaattcgctcggttctgcatgcgacgcaagctctccacaaagcaaatccttctcctgacccgaaggcagtcggcaaggcgttccgttgggagccctttaagcacctttgggctgagtatgatgacaccctccatgagctgcgcaaagccgggtctggagagaatgcgcttatagaggtccgggctacggtgccggccgactcgatttttacccgcgacgtacttgtcgacagtcggctctttgacgagttcaccaggcacttaccgggcgtccttaccggacttggcattatcggtacttttgctggccttctagacggtttgcagcagttcagacctacgcctatcgaggaggcggtgaaagggctggggccgctgcttatgggcgtgcagcacgcatttgtcgcctcgggtaccgctattgcctgcgcaatgctcgtcgtctttgtaagccgactgacactcgcgtatttctatcgcttggttgagaagcttacgcacaccatcgacagcatgtactcgactggagcaggggaggagtatctctctcgcctggtcaagtcttccgagcaaagtgcggcaagtaccgctcagttgaaggatgcgctggtagaggacttccgcttgatgatgacaaacctcgtcgagcggcaaatccaagcccaggaggctactacggtcgcccttggtaatcacattggcgaagccatctctaccgcaatcgcagagccgatgaagcgtgtttcggaagcgatggaaaccacctcccgcggtaacggcgaacaggtcaattccatgctggaggcactcttgacgggcttcatggccaagctcgaggacacttttggcggtcagatgcgcggcatcaacgaacaaatgcagcgctcgatggactcgatgacagccgtccaggcgtccctgcagtctctgctttccgatatcaagcaaactaacgaacaggcggccactcagatgagcggcacgctggaagacgccatgcgcaaggcagctgacaatcaacagctgatgaccgaccaaatgcgcgagttcgtgcaagagttcaggcgcctcgtgacagaggagcaggccaaatccaaacaactgatggatgaggcagtaatgaaagtgctgtcggaagtagctgctgcgatggacaatatggagggtgtccgaaagactgcggcggcagaggaggctgggcgcagtgaacgcctagccagccagacagaccacttagtaggcggtcttgcatctcaagttgaagcacttcttggcacggtctctgagcaggtgactaagacgcagaggaacattgatgttctcagtgatgtttcgcttcgtgctatcgacggtatgaacaatggcgcgctaactatgggcgcagccgctcaaaagttcgaaaccgccggtacgtcggtaacgaacgtattggaccgttctaccaacatcgccgagtcgttaggttcggtagcccaaacactacaggttgcctcgaccgccgttcagcgtggttttgagcaatatgactcgacgaggcgaactgtcgatacacaagttgctgccctgatgggcctcatcgagtccgtgaaaaaggaagcaggcgtttctcagcagctagttgaaagtatcaaaaccagtgcggaagcgatgcgccgttcagaagaggaagcccgagcgcacttggaccaggtcaatcaagctcttgtcaaagcgttcagtgattttggtaactcgctggttagccaagtgaagtcgaccatcgccgaaaccgaccgtcacctggcacaaggaaccggacacctgaacggtgtcgtgcaggagcttgccaacgcagttcagagaatgaagagagcgtga

SEQ ID NO: 10892 - DNA, 705 bp, Massilia sp. WF1
atgctagcccgagttttgctcagaaggtcgggaaagcatgagggagagagcccattttggatttcgttctccgaccttatgtctgcgctgatggtcttgttccttgtcgtgatggcggtaactcttgttgccgtcacacagagcattgatgcatctacgaaggcgaacattgagcgcacagcagcaatcagcaaaatcatggcgatgattgctaatgaccctaagagtgcgggcgttggcgttgaccagcaaaactaccgaatcgacctcggtaagcaggttcgcttcgacagtggcagctatacgattaaccctgaagctgggcagttccttcgtaactacattcccacgctcttgaaagcgaaggacaccccagaagggcagcggtggattaagagcattgtcgtcgaaggttttacggacgaggacggtacctacctctacaaccttcagcttagcctggaccgtagccgcggagtcgtttgctctctcttccagaacacagctggcggcacggccctctcagcagaacagctccgtaaggtacaagagcttttcctagtcggcggctattcgttcaactccatcaagaaggacaaagccgagagccgccgcgtcgagttcaaagttgatttctggggtatcggagagaagcccccatctgctcagagtgtccttatcactaagggatttgggacatgctag

SEQ ID NO: 10893 - DNA, 1737 bp, Massilia sp. WF1
atgctagccagcattgcacttgagagcctatctcgtgacttagctaaagccatcgggacattaggcctcgctgacgtaaagtttggtgttcccgacttggtcgagaagccagctaagcaagctgaagagatattccaaggctacgcgaaggccaagcccagcaaagaggatgcgtacgcagctgctctagcattcttgcgaggcaccaagctagacgaatggcagcgcgacatggtggcgtctgctctctgtgttcctgtgcgcgaacagtcaggcgctacagtagtcggcgctcaagagcggttcctcaatctcttggagacctacagggacgaagcaaaatgcggcgacttgtggcggcttacatggcatgggctgctttactcctatttcaatttcgaccttgacgctgcgaaaagcgcctcggttcacactggctgggaagcgttgcgcgacttccttgcagagacctggccattcgttgataagcaaactgaaggaaaccttgtcccagcctgggttagtgtgatacgtcaagaggtggaactgctcagtaagcagccggttgataagtacgcgaatgcgttcttgcgaggagacaccagcggcatagataggttagcgtcagaccttgggattccaccatccagttggttctggcacgcgctggtccttagtgcggtcaaacaggcgacgaccgagagtgacaccaagttccgtgaacgactgcctcagttgcttgacctcattcgaagcaaaccaggcttccgtgatgaagcgctcgaattcattctcaatcgctatcacgcctgtcaaggcgcacctgccgacgagcgccttcgcgacttcgtttgccagcctactgtttggaagaatccgaaactcaaagctgccggcatcgctacggcttggaatcgagtgcctgaagccgtttggaagatggtacttgcctgggtcaatgagcaaaacctcaaagacttcttcgatattttggccgcacgtaacaaggccgatgaggggcgcctagcgttctggtccaagtaccttaaacagatttcgtggacgcgcttgctgttcggtgccgacacaatggcgttgcaaaaggcgaatgcggaggtgaggaatctgatagcccgcgaagagggctcttacgcacaactgactggcaagccagaggttgatgcattcatgatgcaactcgggccatacgtcgtgattgaatttagcaagaagccaaacgcttgctatgtgtatgaagctgaccagcttcccttcgagccgtatgaccgctactacgatggtggaacatcagacctcgctgcaggataccgctccgacgtcaactacgctcttcgaatcgtgcatcgcgttggttgggacgaccgagccgagattgacctgcgccagcttggcatacaaccggatgcccgtagtgggaccaacacctttcgcacaactgctgccaaggccgagtctacaaaaacttcatatgacaagcctggccggccctcgatatcggccgcttcgaaaatgcatggcgggccagacctcgcgatagtgaaagcgattgtgagccggttcaatcgcgccattgtcgacgatagacgaaacttacctaacggcggtcgcctttgggttgctgaccctcttcagcgcacacaactcagcgcagagctcgaacgcatgggcttcaagtggtctgacagacgcctagcctggtacttccctgaaaattaa

SEQ ID NO: 10894 - DNA, 3855 bp, Massilia sp. WF1
atgagcatcttcaacatctttaaacgtgcagcgtcgaatacatcggccgctccagttctgaaaacactttggtcagcggatggcgtgcgagtcgagttttcggacccattgcccgagccgactcaggatgccttgttagacgctttgtctgctgctagcgcggaggagtctgtcctaggcgcttatcttgctcagcttgtctccgatgagcaatgtaagctgcaacgcgatgctgctatcgtacgttgggaagacatctaccagcttcaaacctcggctgagcacgtcggcgctctcgcgttactcgacctgcctccggtaggccctctgcgaccaatcatcgattcgacaggaacgctatcgggtcgagacttcgaactggaggtcacaggctggactgatgggagtaagcaactgcgcgtcactgagctaatcggtggtatcgcgacggtggacggcagaccgcagatgctcactcgagcagcttggcgaacagcatcggaaatcgcaacatttagaagtcgggatgacggtgagcggtcacagaatcatcatgaacttgcttgggcccgtattcgaagattcgcagacgaagcccaagcgctgtacgcgaacccttatctcgaaaccacccttgttctaagccccgagaccttgcgtcttccgcagtcaaaagccgagacgccatttgggaaagtgttgacggtcgctccaacttttgatggtgctcccgacggttggctaactgcgtttgatggctttaactctgtgcaacctcactacgacttgacgcgaggtgcgggacgggtgcgtgtagtcatatccgaaccggttcgcaaagtccttgaggtcatcaagcgggagatgccagggcgccgggtggccggttcaaaggcagagaagtttgtacacaatcctttcgccttcttgggtgacgccgcccatgaggtattcagagaggacgaattcgaagccgatagagctgaagctggtgcggttgaagccatctttagcctggtaacgcgtacttccaacgccagggtcgatagtgttgacctcttggtcactgagcactatgccaatggagctgcttccactgattgcgaagttttcaatacgcctgaggagcttgaagaattcctctccgcgttaaagcgtgcgctcgaagacgatttgcaaaaactcaagtggggcgagtacgacctgaccatcgacggacattgtactgtccagttagagcaaggagagcaagttgcccacgtctggcgcatgcagccggccgagcgcatcgacttcaatgatgtctacgaaatggaggggtatagctcgcgtatcgaaggaattgggcctgccagacccatctatgtgccggtctttcagaaggacaaaacggaggaggagaaggagggtgtttggctcccttctgacttgactcctatggttcgggttacgttgcaggaccatgaaggtcaggtagtgattcctttgaccaaagaatgggtcaagacctttgaccagcaagttgagcgagcagagctagatggaagccctagtgttagcaatccgagcttaccaacagcgattgcaacaccgcaggcgcgccagctcgttgatagcttcaagagcatggtcgatgcgcaggagcgtgttcgaggtgacgtcgcgggtgcaccaaaagacaaaaaagggccgcgtcagacgctgctggtcaagacaaatttctacgacgtcgattacgtggaagagcggcgcacgtccttagccttaccggcgggttggagtgccaaactcccgcggtgcctacgcccgtccatcaagctgaagcagcaccagctttacggcattgcttggttccagcatcttgtttcgaaagcccctactgagtgtcgtggcgctcttctggcggacgatatggggttgggtaagacagtccaacttttgtcagttctggcttggtattacgaacacaatcccaacgctgcaccgtccatcattttcgccccgaagagcctcctcgagaactgggaaggtgagtcaaagaagttcttcaatgactcgttcccagaagttcttgttctctacggagacaagttaaaggagcggaagcagccacttgggctaatcgacgaagggcttcgtgataagggaatcgtcgacctgttgaggccaggttgggccagcaccgccaaggtcatcatcacaacgtatgaaatgttgacctcctatgagttttcgttagccaagcagccatttgcttttctcatctgcgacgaggcccaacgtattaaaactccgggcactttagtgaccttggctgccaaaaagctcaaggcggtctttcgtatcgcatgtcctggaacccccgttgtgaactcccttgctgacctatggtgtctctttgacctggtacagcctggcttgctcggggcgctcgacgagttctggaaaaagtaccggaggcctatcgaatgtgatacggaggagcaaagagatgctcttcaacgtctacagtcattgattgcgccgcaaaccctgaggcgcacgaaagcagacatcgcgagcgagctgaaggcgaagcttttcgcgttcacatcagttaaagaacagggactcagtttcaaggcgcttctggaagagaccgagcggcttgagattcctatgactgagcaccagcggatactgtacaagggcggcctcaagaagctacaagacgcaaacgctgaatcgaacagcaaaaagcgagcgcaactgtcgtttggagcactgcacttgatgaaggcggtatgcgccgagccctactgtctaccaggtacgaagttcttgatggacaagtcagggtttgacgtccacctcaagaactcccctaagatgaagtggcttttggaccggttggctgcggttaaggctgctggcgaaaaggctattgtgttcactgaacttcgggaagtgcaggcagccctgtactacttcctcaacaagacattcggtatcaaaccttctattatcaacggcgacaagcagggaaggcaggcttacattgataagttcactgcttcgcaagggttcgatgtcatcattttgtcgactctcgcagctggcgcaggactcaatatcacggcagctaaccacgtcttccactttacgcgtgcttggaatccatcgaaagaggcgcaggctactgaccgggctttccgcatcgggcagcaaaaagacgtttttgtgtactgcccgactatcgttgctgatgacttcaacactttcgaagtgcgcctcgaccaaatcttgaaacgcaaggctgggctcgcgggagcgacgcttgacgacggcgggctctcggcaatgctcaatggttccggaggcgacgtcggctttgcagacctggtagacaacatcggcattggcgagcgggtagtaaagcactacttgacgatggacgacgtcgaccgtatggatggcgctggctttgaggtgttctgttgtctcctatggcagaagcttggcttccaggcccgtatcacggaaaaacgccgaggggacgggggcgttgatgtcgtcgcaattaaagggcgcaagggcgagctacttcagtgcaagagctccaaggcgtctagtatcggctgggaggcaatcaaggatgttactggtggggctgctggttaccaagtcaggtaccccaacaccttattcacgcgcgtggccgtgaccaatcagatgttcacgcagggagccatgacgcacgcagtcgagaataaggtccaggtcgtgacgcgcgcaagtttagaagagttacttggcctatatccaacgacaaaccatgagttcgacgaagctcttcaggcttgggcgatgaactaa

SEQ ID NO: 10895 - DNA, 1899 bp, Alcanivorax sp. 97CO-5
gtgcaagaaattcaaataacagatcttcttatgctgttgacgaagatgaacgggccatctttggcatttgtctgcgtgatgctattcctgtttacggttacatgtttcttcctgttgagacactggctgaattatcggggaagaatggcaggcgttagtgcgctgattaatggtcaagttaaagatgatctggcaaataggcgcaggcaaacacttgaagatgcaatctcgaaccggagggaagaagttggcaatctctggcgagaatttgatgaaagtttggtcttttcaaatgacaaagcaaagctttacaacacgcttgatgcagaacacttctttaatgcaaagactctagcgtcagggttgacagaaagtcgcttgttggctgctgcgcctagttttcttgtggctatcggtgtgttggggactttcgttggcttgagtgtgggtctggccggtttggatgtcagtggtgcacttcctgaactcaggatggcgatgaataccatgatttcaggcgccgcgacggcttttaatacctcggttttcggtgttttgctctctttaattttgaatctaattgagaaattgctggagcgaaatgtcaggaaccaggttcgacttcttcagcagaaaatagatttcttatatccaagaattcctgcggagcaaacgcttgttcatattgaagatgcaagtcagaaatcagctgaatcgttaatggggcttcacgagcgcatcggagatgagcttcaaaagaccgttaatgaaatgagcgtcagcatgcaggaggctatttctgaatcgcttacaaaagtgatggcccctgctctggagcggctagctcaaaacgcatcagatcaatccaccacggttctcgagcagttagtggggagttttctcgacaagtttggcgaagcagggcggcagcaggggcaggcacttgagaaggtggctggggatgttggcggcgcagtggaagggatcagcagggaggtcggacgtgtgtcttcaatgctatctgaggccggttcgaaaacagatgaattgttggttcagcaacgtcagcagatgtccgagcaaatggccaggctgcaggaacaggcaagcacgcgagaacaggcgcagagacagcagtttgagagcttgcttgaaggggtgacccgcaaactgtctgagcaggcagataccgcctcaaaagcggatcaggaaaggcaggaacgactggatggctcgatcacaaggatgcatgaagggcaggtgggggcactgaatgccatcaaggaatcctctgagaacagcattggcgcctctgagcgtctacttgaaaccatggagccaattgcaaaatacctgggtgaagctgcaggatctctggatcgttctgccgaaaatctcagggccacagagaaaggcttctccgtacttggtgcggaaatccataacagtgcagatcgtcttggtaacacagtaacggcaatggttcagaagatggccgaggtgtctgaaggttcaagccaggttagtgaaggaatccaagggcaacttgggctgctggagcagctacaggccggactcggtgagacctccaaaagaatggagggggcagcaacaagaatgcttgatggattcggttccatggaagcaagtcagaatcgctatctggaaagtgtgaaacagcagtttgagtctttgggcgactccctcaagcagcaagttatgaccgtagagaagcaggcggaacaatggctggctacttatcataaagaagtaacaggccagattcaggaccgaatggggaagtgggacgaggtgtctcgaaactatgcggacaaaatgctgactacagttcaggcgattgacggtattgttgatgagcttgagagcaagtcgcgatga

SEQ ID NO: 10896 - DNA, 756 bp, Alcanivorax sp. 97CO-5
atgaggtcatttaggcaatcctccgcccccgttgatgaggaaaatccttattgggtgtccttttctgatgttatggctgcgctggtcgtgatttttattctggcatcgctagttcttttgatgcagttggttgacctgaggcaggatgtaaataaggaaataaaagaacttaaaatagcagaaaaggtaaggaaaacggtcgtcgaagatatagcgcgcgagttgaaagataaatctattgaggtccagatcgccgagaatcattcgattattcgtatacccaacgatgtgctcggatttcgttcagggaagttcagcattgatagccaataccaggatactgcgagaattatcggtgaagtgttggccagtgtcgtgaccaaagataaccgaacggaatatcttgacactatttttgtggaaggtcataccgataatcgcccattttggggggcgccgggaaaaggtaattgggggctttccacttttagggcgattagcttatgggagtattggggagaggcaatagataaaaggatggctctttataacttgcggaatcatgaagggcagccgcttttttctgtgagtggttatgcggatacgaggccggtcacagagatccaaagtgcagaatcggattatgaattaaacagaagaattgatatcagaatcacgattcgtcgccccgacgcagaagattacgagaaagtgaagtcaaagtttggagagcctgatgcgactccccaagattga

SEQ ID NO: 10897 - DNA, 1527 bp, Alcanivorax sp. 97CO-5
atgcgactccccaagattgacaaaaaatcgtttccagagtggccagaaagcacttatcagacatgggctgctctggaagataaggttgcacataaatcagaagaacttggcaaaagcggagctttccaaagactggaaaagctcattaaagaatgtagccgccgtggccaagagttgcctgatgaagcctaccatactcgccctggagtccgcgcgctgacttggctctggctgcagagtgagactgtcagagaagactatttggatcaggaggcgctggagtatttgttgtcagcccagaacgaaaagctgtcgagaatggttgtgctgcagctcattcagcttttctttcgtgaacatgacaggctatctgatggagaaaaggggctaatggagtcgttggggataatcctttcccaacaagctgaagcaataaacgcacgatccagtgttcaaggaagagacatcatagctgtggtaaatagtgatagctggctcatagagaatgatggcccggctcgattggttgaaaaatgcctcctgacaggacttccactggatgactttatctctcgtctgggcatggatggctatatggatggccgttttggcgaggtgacgcgagcaatttactacatcaaggagctgcaaaatattccaattggccaggaccatgatgtgctcaatgaaatagtaaaagagcgagtcgctaaagctccctatcaggagaatcttcgtgtcggacatgcggcgataaaaattctgatcgacaggacagaagaagagccttcagaacggtggcaggatgtcatcttgactattgcaggtgatcccagagtgtctggcactaacaggcagtttgcagaatggtgggctcccctgggggatgacagggtcaacaaggtcaggggctggcttgccaaggaagacctgaagttgttcctcgaagcggtagagcaatatggcctggattcaggtgacgagagtctgaacaacatgttcccggcaaggaaacagttcctgacaggattgtttaaacaaggtgtagtgagaaactcaaggctgatgttaggcagtaaagctgagtttttcgtaaaacgtattctcgacaaagagatgctgtcttcctacgcgagaatggacggaacaatgtccgataaggcagtgatatatctggactgtggtgattttcatattgtcgagggctcacactctttcaaaatctggctttatcaggaaaggccagatccttcatttgttaactatgacaagaattactacacccactcggacttaacgataaaactaccccggcagtaccgaaaagaccataaagggaagcggtatgcagcgatacctcattacccgactacgtggcgcaagaatgtgctcgagtttctggtcgatcacgatgtcgagctggagtggccacctcttttcggtaagggtgagtggaagtactacaagaacttgcatggcataccaaccaaagatgcacgcaggctaaaaaactatgaaggtggctaa

SEQ ID NO: 10898 - DNA, 3015 bp, Alcanivorax sp. 97CO-5
atgggattccgtgaatcgatagcaaatatcctggggcgaaactcaacacaggagaagggtgggctctcccttctggtcgaagatgaaggcattagcttctatacctcgccggataaacttaccgatatcaggtctggtaacgccagtagtcttgctggcgcccagcatgttgccctcaccatgctcagcgagtcgggtcaggcgcagccgatctccaatggctttttcgtgccctcggagtctgtcgcctgtctggaagaagacattctgtccatcctgcagcttgcgcccagagcgccgctccagttccagataaaagttgacgggaaaagcacccacccagggttcaaggtgtcagcgtttgtgctgatcgatggtgagtcataccccattaaccgcaaaggtcccattctcagcaacaccagcacggacaaatacacgctgacaccgccccaattactggcgctggatgccattgatatccacgcctccatgcctgccgatgagaaaggagaaggcagtaacctgcgactgatcgccaccctgcagcaggccaagcgcgacggcctggatatcaacctttcccatttcgacaatatcaacgtcgccgaagcagaacggattggtctcaccgtgtccaaattgccggatggcagcatcgaactgtcaccaacccttggcgacggcacaccctatgccgagctcctctcccgttgggctcagctggatccgggtgccgatgaaggcaccatgcgcatcggcaaccggattatgctgctcgacaagcaaaaaatggagggtatccgcgaggtcttttcctcccgccgtattcctgccgatcaagtcgtccgtttcatggaggcaccaaccgctttcattgatgctgcattggtagatctggataccggcttttccgttcgtgtggacggtgtgggcaccatgcgccatatcgccattggtgagttggacgcgaaaggggctgactggttcagccaggagggcaggccagccgttccgcaggtactgggtgggctgatccaaagtgaggaagatgcagatcgcatcgagcaagaaattcaagccgcccggggcgatggagcatcaacagtagtggttgatggtcaggaaattgatatctctgatgaggaagcggtaagcgccatcatcgagaaggctcgcaaaaatttatcagaaccagacgtcgttctagaagaagcagagcagcctgatgaaaaacgccaaaaagtctcggtgctcgttaaggatgcagaagaacgcagggaagaactgctggccatggcggaccgggcagcgccgtcatccgagcctgactggtcgctttataagcgctcgccctttcctcaccaacgggcaggtattgactggcttgttggcctgggtgagcaggcccagaatgcggacgccgaacagttctaccgaatgcagggctgcctgcttgcggatgacatggggctcggcaagacctttatggcgctggtgtccctgtccgagctcatgcagcgccagcgcaaggccggtaatgcagtaaagcctgttctggtagtggcaccacttagcctgctggaaaactgggaagaggaggttgaaaagaccttcacgcgctctccttttcgcgacattgtcgtgctgcaaggcggcagagatctcaagcgtttccgcattcccaacacgcaaagagaaacggtgcagatagccaacatggcggatggtgaggtggatatggccaccctgcgctatgccctccatgtgggcccggaagccggcccggaccggcttgatatggatgcccgcctggtgctgaccacctaccagaccctgcgcgattaccagttttctctctgccgcattgactgggggactgtaatctttgatgaagcccagaacatcaaaaaccccaacacgggggttacttgcgcggccaaagccctgaaaagcagcttcaaggtgctggctaccggcaccccggtggaaaacagtctgctggatttctggtgcgtcatggataccgcccagccggggctgttaggtgactggccagctttccgcgaacagtatgtgaagcccatcctcaaggccgatgacgaagagagaaaccgtgttcgtcaggaagtgggtaacgaccttcgccaggccgtagggcgctttatgctgcgccgaaccaaggaagaagagctgcagggcctgcccaaaaaatccatcttcggcggtgccatcacggaaccatctggcgatgtgcagcccatgccggccctggccggaaccatgactggcgttcagctacagacctatgatcaagtgctggacgactaccagagccgccgccatgaagagattcaagggttggcaatctccagcctgcaccagctcaaaaccatttcactccacccccgtctacaggatggcgacatagcggccctgtcatccggcaagaatgtccgtggcgtaatggccgaatccgccaaactggaagccatgctcaatactctggacgagatccgtgcccgtaaggaaaaagtgattgtcttcctgatcaccaaaaagctgcaagtgctcctgaaagtctggctggatcgcctttatggactcgacgtgggcattatcaatggcgacaccaaggcggtatcctcaaaaaaagacgatgcgacccgcaagggcatgatcagcaagttcgaggccgcatcgggctttaatatcatcattatgtcgccggtggctgccggggtgggcctcaccgtggtcggcgccaacaatgtcatccacttggaaagacactggaacccggccaaggaagcccaggcctcggatcgcgtctaccgcattggccaggagaagccggtaaacatctacctgccggcggcgcatcacccggaacgggatgccttcgatgtgcatctacatcggttgctggataacaagctgctattaaaaaacgccgttgtcaccaccgaagccgtatccgaagaggaaatgctcaagggcatggggctgggttga

SEQ ID NO: 10899 - DNA, 2040 bp, Candidatus Accumulibacter sp. BA-92
gtgattgaggtttcgaatattgcaacccaccttctggtgaccggtggcttgctgagcgtattagtgctgggctttttggctctctttctggtgcctggcgtaattcactggttccgcctgcggaatattctttctggcgttggttcgcttgaggccaagacgtcaccgggtgacttcaagaagctcttcatgcgagacaagcaactggcccacctctgggcggagtattcagagtctctgcatgttcagcgtgaagaacgtgatggccagatgcaagtggttgccgttcggtcaaccatcgcggcagatacatatttcaacgagcaattcgttgtcgacagcaggctccgaaccgaattcttcaagcacctgcccggaatcttcaccggcctaggcatcatcggaaccttcacgggcttgattgaaggcctgcgtcgcttccaggtgagcgagaatgcagcgaccgtccgcgccagcctcgagtcgctgatgcatgcagtcggtgaggcctttctcatctccgcagccgccattacggccgcgatggcggtcaccttcctcgagaagctgttgttagctgcgctctaccggaagacagaggcgattgcccacggaattgatgcccgctttgaggcaggggccggagaggagtacctctcgcgcttggtcaatgcatcggaagcctcagccagccaatctaagattctcaaggacgccctggtcaaggagctcggcgacatcctccgcgagctgaccgcttcgcagctctcgaccggtcagcaacttcatgcacagcttgctcagcgcatcgaggagtcgaccaaccggcaggtcgaagcagcacgagaagacaatcaggttcttggcgatatcatcgccggcagcattgaaaagagcctgaaggggcccctcgacaagattgctaactcggtcgagaccgcctccggtgaccaaagtgcgaccgccgtgaagatgctgaacgacatcatggtcagtttcagccaacgactgaacgacctcttcggtggccaaattaacggcatcaacgagttgaacaaacagaccgctcaaggtatgcaggatgctgttgcttccctcaacgcccttgtcggaaagcttgaggagagcgggaagaaaaccaccgacgacatggcggcgcagatggccgcctccatcagggcaatggaggagcgccaagccagcatcaacacgcagaccgaggagttcgtcgaccagattcggcagttggtgcagtcgtcccaggccgagacacagcagaagctccaagcaacgctcgattccatcggtcagcagatgaccaccatcctgagtaagctgagcgaatctcaggcgaaggtgttcgaagacaatcgggcgcgtgaacaatctatggcggaccgcgcctcgaacgccgtctccgagatgaccggcagcgtcgaagccgctgtgaaggaaatctccgcagcttcccagaccatggcgcaaagtgtttcgacgctcacggcggcaactgcctcaaccgtggacaagatgagcgctggcgcgaatcggttggacaccgcggcaacgaacttcgctgctgcaggcgaccgggtgaccagcgctatgggccaagctgcgacggtgagcggcaaactgaccgagttgtctggtgccctcaccacgagttcgggcgccctccaggaggcactgcgagactacaagtcgcagagggatgctgtcagtgcgctgctcggagacgtacgggccacagtcgagctggcaaagaaggaagtaagcctcactggcgacgtcctgcagcgcatcgagacgtcgaccaccaagctcagccaagcgcagaaggccgccgacgagtatctcgacggggtgagccaagtgctagccgactccagcgacgcgttccgagaatcggttgtgtcgaccttggcgaaggtcaaccacgacttccacaccaagctgagcagtgcagtcggcctcctttcgacggcggttcaagagctggaagtgacgctcggtggcagccttgcagcgaggcgctaa

SEQ ID NO: 10900 - DNA, 711 bp, Candidatus Accumulibacter sp. BA-92
atgttcggtgctcgtgcagtagtgcgaaggggcaaccgcgatgaagcggaaaagcccttctggatttcctttgccgacctgatgacagccttgatggtcctgttcttggttgtcatgggcgttgccctgctcgccgtgaccaagaacgtgaccgagcgcgagaagaagctggagcaacatcgcaagaacatcgaaaaaatcatggaacgcttcgaggaagccgcgaagcgacacgagggcatcaaggtcgacaaactccgtcaggtcattgactttggccagcgtgcgcagttcgcgttcggcgactggcgcctgaactcccaacaagaggatgtgctcaggaagtttgtgccggaaatcatcaccttggccaacgatgagctcgggaaaagcatcctgaaacgcatcgtggttgaggggtacacagacaagaccggtacctaccttgccaacctgaatctcagcctgcttcgcagtcagaaggttctctgcacgatgttcgcaaccagcggtcccagcctcctcaacgccgagcagaaggagcaggtacgtggtttgttctttgttggaggctactcctttaacgcagcaaaggatacggctgaggagagccgccgcgtcgaaatgcgaatggagtttcttggcgtggatgaatctcgcagtgctccccccgcaggtaccggcaactttggcgactgtgcattgcgatga

SEQ ID NO: 10901 - DNA, 1722 bp, Candidatus Accumulibacter sp. BA-92
atgacagcgctcgaccgtctctcaggacttctacgcggcagccttcgggtggcggagcggccgttccctcagaccgacgatttggactcggttatcgcaggcctgaagaagcacaacaaggccggctctggctcgaacgtccccgaggacatgcaggaagccgcggttcgtaagttctggcatgcccagcggttcgaaacactcaaggacgcccgactggtttccttcggcatgtgtgtgccgagccgcccctccggtccctgcataatggaagaccgccagcgcttccaggcagtgctggacagccaaaccggcattgaccagtgggtagatgagccacggtggtatcgccgttgctatcaggggctggtacgaagctacttcacctacgatgccaaggtggctcaagcgcccactgtcgggaaacaaaactggggagacctgagggattatctaaacgagcgcactcgcaacatcgtggataagaaggtcaaccccgattgggtcacgactgcggtggggaaccggcaacttttcggggaggacccctgcgccccctacgccgccgatgtcctgtcaggtgatacgaccaaggttgacctcctctgtgagcaactcggcgtcgtcaagtcgtcttggtttctgcgcgaactggttctttctcaggtgcgccaagccaccaagttgagccatgagcacttcaaggacctcataccccgactgctggagctgctgtcaacgaatctggtgcttagagaccggggcctgattctgatgctcgacaagttcgcatctacggtgcagcccggcatcaacgagcctcttcggaacgccgctgtggagtggtggggtaacccctggcttccttcaaatgagacccgctggggcggcgtgatttcggctgctcgggagatggtgtccgagtggctcaagcgcgagttcattgaggccttcttcaccaaactcgccgaggatggcgtcggtgaccgtcgccgagcgaacttctggcttcgctacgtgaaatcgatggacaacatccaattcgcgctcggtgcacgagccctccactcgagagaccgcgatttcgaggcactgcgcaagaagatgaaagggctgtacacagagctgaagacaacggacagctctaacaacgccttcatcatgaccctcggggaccttgtagccgttgaattcggcggcatgggcaatgcgttctatggctacgacgtgcgcaagaccttgccgtttgatgcctctcgtccggtaggcacaaccgtcaatgcgtcaaactccctcaagcataagaaccgtatgctgtggatgcagcaccaagacggcatcaagggttggaaaaaatgggaggatatgttcgaggcaaccctcaaaaagcactttgacatcactccgaacgctgccgcgagacgagtcgtaccacgggcagttgcacctgcgcctactgaacttacccctggaccggtcgctcctcgcccacctgttcaatcactagggactggccagaccgggcggcattcatgcgacgagcacgatttaagcatggctgcgctttatgcttttgctcgtgctcatgagctcaaggtcgaggacaataggaatttgaacggtaacctgtgggttcggaccgatgacaacgaccttcgagtcgacaaggcacttctcgactggggctttcaatacaagccgggcaagggctggtggcgatag

SEQ ID NO: 10902 - DNA, 3753 bp, Candidatus Accumulibacter sp. BA-92
atggtcttcagtttcttcaagaaagctcacacggaacctgcggaaccgtggcgccgccaactgtcggacaaaggggtggtcatccaccgctcgggtgaaggcaccttgctggcgggcgagatgctgcctgcttatcttgctcagctcatcgacgatggattcgcaaaccaggagcccaacgacgaggtgagcatttcgtggaactctatctacgaagccctgcggagcccgggatacgacgagttggccgaggtgctggagttcccacccttcacgtcatgcgtgcctgcgctggagagccggaactcattgaccgacgatgatttctccatcgccgtttctggatggcgctcgggtcagcatttcgtcgagcaacccgaggttctgggggcgctgctcgttcgggatgatcagaccgaactcatgcggcctgagcactgggagctattcaccgaggtagtcgccttttctaggcgcgcgccggaccagcgcaacgagaaggtgcaccgacagacttgggggcgaatccgtagtctggctttgaaggccggcgccaagcttgacgacttcctgcatcgctcagttgtactcacgccggagcgccttgacatcggactgagaaagtcggcacccatcgccgatgatagcgttatagagattgaaccctcctttgccggggcgcctcctgactggtttgagcgatttgacagctcacgggaagttctcgaccgctacgacatcgtcaccccagagggcattgtccaggtcctcatcactcctcaggtcaagaccgttctgcaggaggtaaagcggctgccgctgagacgcgtggcagggtctcgcgctcaggccttcatcctcaaccctttcgcaacgctcggcccagacgctcaagacgtcatcgatgaggggcagttcgagaaggcacgggagcgcgcggggctgcagtatgagcgctttgttccgaacatcgggcgcgacgcaaccggttacccactgcgggtcgggctcctcattgagtctgcgagcgctgccggtcctgcctcatcggagacagagtggctgacagatgaggagttggcgaagttcgtcgcccgtcttgaggcatctctggccaaagggttccaattgcttggttggaacggctacgacctagaactgcaaggggagacgccgagtcacctcgcggagctgcaagctgctttggagcagcggcgtaagtcggaatccatggtttcctacgcccaggttcatgacctgagcgcgtactcatcgcgtatcgagggtatcggggtagagaagccgtactactccccctacatcacgaagaagaaagacgacgagggttggttccccgagaacgtactgcccctaattgcatatacccccgagggtgacaccgagcccattgcggttccagccacgaaggatgcgctcgagaagctgcgagaagcaattacaaaggccgaggcggcaggccaagacacgcttgaggttccctggcttcctaagccgatgcctctcgaagaggccaaggatattgcaggcacctttgatgaggtgctggacgaggtcaagcacaagaagttcgaccccgagcggcaggcagcggagcgcaaagagaagctcggagcgaagaagacgctcattcttcggtccaacattcaggccgtcgactacgacgagcagcggcgcgaagctctactggcgcttccaagcgagcctgaagaccctcctggtttgagcagtgacttcaccctgctgccacatcagcggcagggccttacctggttgcagcatttgtacaagtcccaagccgagcaccaggtgcgcggtgcggtgctggcagacgacatgggtctcggaaagaccttccagctcctggccttcatggcttggcttgcagagaaggaccttgatgtcgccccaatgctggttgtggcgccagtgtctttgctggaaaactggatggaagaggccggcaagttcattcgtccgggtctcctacccatactcacggcttacggcgactcccttgcgcctctgcgggttccgcgggaggcaatcgatgctcgactgcgcaccgaggacggactggttcgcttcctcaagcctggatgggttggcaaagcgaaaatcgtcctgacgacttacgaaacgcttcgggacttggagttttccttcgctgcggagcgttggtctgtgatggtttgcgacgaagcgcagcgcatcaagaacccggcggcgatggtcacccgcgcggcgaagaagcagaacgtgggcttcaaggtggcctgcacagggacgccggttgagaacacgcttgcggacctgtggtgcctgttcgacttcattcaacctggtcttcttggtgcgttaaacgacttcgggcagcgttaccgtaaacccatcgaggccaggaacgaggaggaacgcgctcgggtggaggagctccggacgcgcatatctccccagattcttcgtcgcaccaaggctgaagttgccaaggacctaccgcagaaggtagtagtcgacgagtgcagacagcttccgctgtcatccgctcagcgcaacctctacgccaaggcgattgaggactttaagaagcgcaacgaccctaccgcgtcggttccgttcaagaaccatctgggcctgctgcagtacctccgtctggtctgcactgacccacgacgctatgggctgaccgcgttcaagcctgagcccctcgctgagtaccgcgcgaaggccccaaagttggactggctcttgggacaactgcagcgcatccgtgacaagaatgagaaggcgattgttttctgtgagttccgaaacatccaacgcctgcttcaacactatatcgagcagacctttaaggttcgtgccgacatcatcaatggcgatacgagtgcggcagcgaaccacacgacgagcagacagaagcgcatcaaggctttccaagaacagcccggttttggggtcatcatcctctcgccggtggctgttggttttggcgtgaacattcaggcggccaaccacgtcattcactacacgcgaacatggaatccggcgaaggaagaccaagcgacggaccgcgcgtatcgcattgggcagaagaaggaggtctacgtctactatctggtggtgaccgccgatgacttctccactttcgacgtcaagctcgaccagctgctgaccaagaagcgtgagctggctagtgacatgctcaacggctcaggagacctgtcgcctggtgacttcgacatcgccgatgtcattcccgtgggcaatgcggctgatatccaggagcgcgtcgacattgagtttgctttgcggatggagtggcgccacttcgaaggccttgccgcagccttatggagcaaacgggggtatgacctctgctactgcacaccaggcgcaaaggaccagggcgtggacgtggtggccatctctggcgatcaaggcgtgctgattcagaccaagacatctagcaatgagggcacgaagctcggttgggaaacggtgaaggacgtggttggcggcgaggctttctaccgccgtcgacatcccaacgtggagttcaagaaggtaggactgacaaatcagttcttcaatgcccatgcacacgagcaggccgaactcaatgacgtgctgctcgtagatcaaacactgctaagcgagatgctgagcgagtatccgatcacgatgttggaactcgaacgacttctttacacagactgggaatccgtgacatag

SEQ ID NO: 10903 - DNA, 2358 bp, Burkholderia jiangsuensis
atgaactcaacgtccgattcgctttcgcacctgctgcattacttcgtctttaccgcgctgtcgatcgcgttcgtcctgtttctatggcagttcgtcttgccgttcattcgcgtacgtgcacgattgctcggcgttagcaaggcaatcgaggaattgaaatcggcggccgggcatgtcgatgccgaccagattggcggcaccataaagaacgaggcgctgcgtcactgctgggacgagtatcgcgacacgcttcatgcgcagaagacggtcaatgcgtccggcgtcacgcagaccgggcgctggcgcgcaacagcgatcgcgagcacgttcttcacggagcaggcgctcatcaacgcgccgctgcgcaccgagttctacaagcatctgccgggcattttgacggggatcggcatcatcgggactttcggcgggttgattctcggtctcaatgacttcaagatcaccgacgatccgctcgtggtccgcgccagtctcgaatcgctggtgtccagcgtgggcggcgcgttcaaactgtctggcctggccatcgtgctcgccatgttgatcacgaccgtcgaaaagtcgatggtcaacaagctgtacacgcatctcgacgcgctgtgcggcctgatcgacgggctgttcgactccggcgcaggcgaagagtacctgcaacgtctggtcgaggcttccgaaacctccgcaacccaggcgatgcagatgaaggaatcgctcgtcaccgacctgaaacaggtgctgagcgaactcacgcaacagcagatccaggccatgcgcacgacgagcagcgacctcggcgcatccatcacgaacagtctgtccgaagggctcgccgaaccgctcgcgcgcatctcgaacgccgtgcagacagtcggcaacagtcagggcgaagcggtcagccgcattttgaccgacgtgttgtcgagtttcaccgcgcagatggaatccatgttcggctcgcaattgcacggcatgaacgagatgctgctgaagaccgcgaacacgatcgagtcggcgtcgcagggttttggcgcacttgccgcgcagatccaagatgccggcaccggcgccgctgacgccatggcccgacgcgtcgaagaagcgctcgggcagatccagaaccatcagagcgaggcgaacgcgcagatgcaggcattcgtcgacagcctgaaggacagcgtggcgcgtgggcaggcggaatcggcagacctgactcagaacatgctgcggcagatgagcgagagcaccgcttcgttcgtcagaacgcttcaggaccaaaatcaggcgagccacgcgcaagccgccgcgcaacagggcgaagccaatgcctgcatgcgcgccttcgtcgatgaattgaaggacggtgtggcgcgcggccaggccgaatcggcggacctgacgcgcgacatgctgcgtcagatgagcgaaggcacatcctcgttcgtgaaagaattgcaggaccggaacaacgccagccacgccgacgccgccgcgcgccaggcccgcgccagcgagcagatgcacgtgtggatggaagagacgcgcgcgagcatggcgcaaggccaaaacgaagcggcgcaggcgtcgtcccgtttaattggccagatcggcgacaaggcaagcgagatgatcgacgcgctgaaggcccagacttcctccgcgcacgaagagcacggcagacgccaggcgcaactcgccgcgcagatcgccgatttgctcgacagacagacgagccagatcgacaaggtgacgctggccgtgcaggaaggcagcctcgcgatgcgcgatgccatcgacaagctcaacgcggcgacgcacggcaatatcgagcgcatgggacagggcgcggaacgtctgcacgacgcctcgacgcgcttcgccgaaaacctgctcggcgtgaaggccgccactgacggcgtggcgaacacggccgagcgcttcagccaggcggcggcgtcgctcgatggatcgctcggggccgtgcagcaggcgctggcggatcagcgcaccgtgcgcgacacgctcgcggacatggtgtcggaactgcgcaccgtggtggaaaccgtgtcctcggaagcctcgctcaagcgcgagctggttcagtcgatggaacaggcgggcaaatcgcttcgtgaggcgcaggacgcgacgcgcgaccatctcgacgatctgatcgaggatctcgccgaagtgcaccaggaattcgcggaccaggtcagaaagacgctgcgcgagagcaacagcgcgttccatacggaactcgcgcaggcgaccgggctgctgaagggcgcgatcgtcgatctgggcgacgcgttcgaccgtctgcccgccgcggcctga

SEQ ID NO: 10904 - DNA, 759 bp, Burkholderia jiangsuensis
atgttgggtattcagacaccggcgcgccgccggagccgcgacgatggcgagaagccattctggatctcgttctccgacctgatgacggcgctgatggtgttgttcctcgtcgcgctgagcgtcgcgctcctggcggtgacgaagcacgtgtcggaggcggagcgcgaggagaagcagcgcgccgaacagatcagcgcgctgatgcaggaagtgcgacgggtggcgaatcagttcgacggcgtgcgcgtgatcggcacgacgatcgatttcggaccgcgcggccgcttcgagcgtgaagggcagaacacgctgtccgagccgcagcgtgcgctgctgcgcgagttcaccccgcgtctgctcgagcaattgcggaccacggaggcgggcaagaactggttcaagcgcgcgaccgtggaaggctacgcgagccgcagcggcaagtatctgttcaatctgaacctgagcctcgagcgcagcgagcgcgtcctgtgcgaacttctgcgtgatccaggacacgctcaacccgcgctgtccttcgcggaccgcgcactggtcgcgacgcgcttcttcgtcggcggcgcgtcgttcaattctttgcgcgcgacggcggacgacagccgccgcatcgaaatcaagctggagttcaagtcgcgtcaggaacgcaaggacgaagccacgcagatcgcgcccggcgcggatgacggcgctctggaacaagctctcgacctgaaagaacgatgcccgctgatcgaccgctga

SEQ ID NO: 10905 - DNA, 1857 bp, Burkholderia jiangsuensis
atgcccgctgatcgaccgctgaccccatccggcgcgcggctgcgcgaggccatgctgcgcaacggcccgtccctgacggcggatgcgcgcgtcatgagcgtggcgctgcgcgaaatcagacgcgcgttcggtggccgcgacgacacgccttcgctcgatcagttgaagatcgccctgcgcacgttcttcgcgggccgccagggcctgagtccgacacagattcgctatgtctgctacggcgtggcggtcccgctggacgatcgacagggcgaacggctgatcgacgatcgcgcgttatttagatcgctgatggcgctgctgggcgactacgaacagcaggaacggcgctttcgcaagttctatcagggcctgttgcagggctacttcagctttaccagcgattccggccagcagtccgacccgcatgccaactgggtcgggctccgccgctatctcgacgagcgtctgcccgccgtgcacgcgagcgccagcgagcgcggcatcgttcccgaatggctcgatacgctgcgcgagcacgccaacctgcttaccgatgacccgtgcagccgctatgcatcgcatctcgccagcggcaggaccgccgagcttgcgcaagtcttcgatggactgggcatcgactccaattcctgggtctgggaagaagtcgtcatggcgtacgtccgctcggtctgcgagcgtgatgacgcggagttccaggacgcgctcggcgacgtactcgcctacgtcaacggacgcgcggatatcaagctgccgcaactgctcgccgtgcgcgcggcggcgcgggtgatcaggcgctatgcgaaatgccgcaaccgccccgaacatgagcggctgcgtgacacctgcctgacgctgatcggcaatccatggatcgatcccaccgcctgggatgcgcatgtgaaccacgaacccgcgcggcagatggtggaaggctggctgaagcgccgcttgatccgcgacttcttcgaactactggctaaggacggagccgcggacctgcggcggttgaactactggctgaagtgggagcccgagatttccgacatgtggttcgtgctcggccgggacgcgcaacgaaacaagagcgcggcgttcaccaatgtccgcaagcgcatggcgggcaaggaccgcatcctcgccgatgccgccgacgacaataatgccttcgtcatgcgtgtcggctcgttgctggtggtcgaattcggcgtgaccggcaatgcctgctacgccttcgaagcgtcgcgttttcctgttgatctcgacgcgcccgccttcagtctctacggcatgaagaaccgcagggtggcggcactttggctttctcacagcggttacacgtgggaacagaatttcgatatgaagctgcgcggccttctgcgcacgacgcccgcgacgcctgctacgccgcgcgccacggccgcgccgtctcgcgccgctgccacgccgccacgcgcgactgctacgccgccgagccggccgcaggtcaccccgccgcccgtttcccgcgcgccgaatcgccccgccggcccgttcgatggcctcatgccgcgcgaagcgtcgccgctcgtctccccgccgccggagcgtcccgccgcgccactcgagggcctcgtcccgcgcgacgcccgccgcacccgcgcggagtcattcgaccgcgagttgcgggatgtcctgtcgctgtgcgagctgagcggtttcgagtgggaagacaaccggtcgaatggcggcgcgttgtgggtgctgctggaacagcgacgccagcgtccacatctcgcgaatcggctcgaggcgctcggtttcgaattcaagccaggccagggtttctgtctgaagtga

SEQ ID NO: 10906 - DNA, 3309 bp, Burkholderia jiangsuensis
atgctcgcgaaaatctttggctggggaaaaacaggtaaatcggatgcgggaaaagcattcgcgcccgatgccgccgccgccgtcccggtgctgacgatcgacgagcacggcttgcgctacgcctcacccgcgccgctcgccagacaatggctcgcctcgccgtacgactatcctgctcacgccgaactcggcgcgcatctcgcgctggtggcgcaggagggcttcggcgtcgccgtggggtcggccgtgctgctgtcgtgggaacacgtctacggcattctgcgcagcgatgaattgcgttccttccgcgcgccgttgcacttcccgcccgacacgctcatgcgtccgcgtgtgaccaacgccggtgcgctaggcgatgcggacttcgggctacgcatcgacgaatgggtggacgctcagggacgcggcgcgcggcctgcgccacgtctcatcggcaaagtgctgcgtacgggcgatgcggatgcgctgctgccggcgtccgtcagcgatatgctcgacctgttgagccgcttccacgcaacgccggccgacgcgcgcacgctctcgttcaaggagcacatctacggacgcgtgcggacgctcgcggccgagagcggctgtccggtctcggactacgtggcgagcaccatcgtgcttgcgcccgaacatctcagactcgatgtcgagcggcgcggcgaaggtgcggccgccgtcctcgaagtgtcgcccgtattcgaaggtgcgcctgacaactgggtcgcacatttcgaccgtctgccgctggacgatcgctacagcattcccgaaggcccggcgctcgtgcgcgtcgtgcctacgcccgaagtgaaagccgtgctcggcgaaatcaagcgtcgcatgccgggacgacgcgtgacggggacgcgtgcccaggcgttcgtgcgcaatcccttcgcgacgctcggcgaaagcgcccgcaaggtgctcgacgccagcgagttcgaagtcgcgtgcgaggcggcggggatcgtcttcaagtcgttcctgccgcaggttgagcgcgccgagagcggggagatcgttcgcgtcggcctgctcgtgcaaccgatcgcggccagcaatgaagaagccgcgatgacatggttcgcgtcgcccgatgaactcgcgcggttcaccggccgtctgtcgcgcgcactcgacgacggctcgcagtgcaccgcctggaacgatgacgaactcgaaatcgtcggcgacacgtccgagcatctggaaacgctgtccggctggctgcgggaatggaaaacgcctgcgctgtggacggcgtccgaagtgctcgatttgcgtcactattcggagcgtatcgacgagatcggagtggagaagccgtttgcggtgccggtcatcgcgaagaatcgggaagagggcggctggttcgaggaaaacacgtccatcggactgcgcgtcgacgatccttcgggcggcacgcgctatgtgccgttcgagttcggcgagatcccatccctccaggagtccgtcaacgaggcgcgagcggccggtgcggaccgtgtgacgctgcccggcctcgtgcagccgattcccatcgccgaagcacagcgcgcacttgaagcccttgctcgcgccgcagccgaggtgcagcgcggcgcgttcacgccgcgcgtcgcagccttgccggccgccaggaagcggctgatcatcaagcgcaatttcgaggacatcgaatataacgaggtgcgcgccgacgcgctccacatgccgccggatcgcgcgcccgcgatgccaaagacgctgcggcctgaagtcgtgctcaagccgcatcaggaaacaggcgtggcgtggcttcagcatctctgggcgctgtcgcccgccgcgtgccgcggcacggtgcttgccgatgacatgggccttggcaagaccttgcagttgctcacattcattgcctcttgcttcgaacgcgagccgcagctcgaaccggcgctgatcgtcgcgccggtcgcgctgctcgaaaactggcgcaacgaactcgcgcgcttctttgagccggacacgctgccgctgcttctgctttacggcgacacgctcaagtccttgcgtgcgagccgtcaagagatcgatgaaagtctcgccgcgcagggcgtgacgcgacttctcaagcgcgactggataggcggcacgcggctcgtgctgaccacctacgaaaccatgcgtgacctcgagttcgcgctcgcgcgtcagtcgtggtcaatcatggtgtgcgacgaagcgcagaagatcaagaatcccgctgcactcgtgacgcgctcggcaaagaagcagaaagtgcgcttccggattgcttgcacgggaacgccggtcgagaacacgctcgccgatctgtggtgtctgttcgacttcgtgcagcccggcatgctcggcgcgctgaatcagttctcgcggacgtatcgacggccgatcgaggcgaagaccgaggaacagcaggccaaggtcgaggccttgcgcaaagtcatccagccgcagattctgcatcggaaaaagacggacgtcgcgaaggacctgcccgtgccggtcgagaacgaggcgtgcaagcggttgccgatgtcgccctatcagcaacggcactacgagggcgcactcgcgacgctgcgcgcgcaacgcgaaacgaatccgtccgcgcaattgcaggcgctgttggccatccgcaagatttgcacggatccgcacggcttcgcggagcccgacgtgcgtgacgtgccgatcacacgcctcgttgatgattcgccaaagatggggtggctcgtcaagacactgaaaatgcttgccgccgatgcagagggccgccacaaggtcatcgtgttttgcgagttcagggagttgcaactggttttgcagcgtgtcgttgccgcgatgttcggctttgcgccgagcatcgtgaatggcgacacgtcggcggacccgcgcgccattggcaaccgtcagcagcttatcgatgccttccaggcgagcgacggattcgacgtcatcattctttcgccgctggcggtcggattcggcgtcaatatccaggcggccaatcatgtcatccacttcacgcgcacgtggaatccggcgaaagaagaccaggccacggcgcgtgcttaccgtatcgggcagacgcggacggtcacgctctactacccgggtgtgatcagcgaagcctttccgagtttcgatgtccgtctggacgcgctgttgcagcgtaagcgcgcgctcgccgccgacatgctgaatggatgcagcgatctcacagctgcggactttgccgatttcggctga

SEQ ID NO: 10907 - DNA, 1935 bp, Comamonadaceae bacterium B1
ttgaagaatgttcttcggagccttgaagacaagagcctcaaggatgcaagagacccgcaggcgttggatgtggcgttcccaaaggagggtgaacttgcccacttatggcgcgagtacaagaagaccctatacgccgtcccaggcgaagcaaccgacggcatctcgacggttcgttgggcatccactgcaccagcagaggtggtgtggaactcgcaacttgctgttgaccagcgagttggcgcagagttttttaaacacgtgcccggaatgttcacggggctgggcgtcatcggcaccttcttcggtctaatcgaaggcctgcgccgttttgaagtcagtgccgacgccgacgtagttcgaggaagcctcgagtcgctcatgcactcagtgggcgaggccttcctcatatcggctgcagccatcaccttggctatcgtcgtcactttcgtcgagaagctggtgcttaccaatctttacggaaaggtggacgccatcgcttcgagccttgaccgcaggttccaagccgccgtcgccgagaagtttcttgagctgacagcagctcacactgaagagactgcaacgcagctcaagcacctcaagggagagctcctcaaggaccttcgtccgattcttcaagatctcagcgacaagcacaccgccactctagagcgcctagccacagcacttcaggagcgtttaaccgaaggaacgcatactcagattgaggctgcccgagacaacaacctagcgcttgggtcaacaatctccagtgccataacgggtagccttgcagctccgctgcatgacatcaagaccgccgtccaacaggccagcggcgaccaatcagccgctgccatcaatatgctccaagacgtcatgacgagcttcagccagaagctaaacgacctgtttggtggtcaaatttctggtatcaacgagctcaatcagcgcaccgcacaaaccatgcaagacgcagtcaccaagctcaacgaactggcggttgccctgcaagacgctggcaaggtgtcaagtgacgagatgaccaagcgcatggctgaagccatcgagaagatggagcaaaggcaggagagcataaacacgcgtaccatggagcttgtggaccaaatcaatactttggtcgcctcctcgcaaaccgaaacgagtgcaaaggtgcagtccaccctccaaacactgggcgagcagatgggtgggatgctccaaaagttccaaaccgaacagcgcgatgccatggatgccggccgcaagcgtgaacaggagacgaacgagcgaactcagtccgccgtttccgggctaatgggctcagtcgagcaactggtgcagcagattgccaccgcgtctacaaaaatgcaagagagcaccgcctctctcggcgccacgacaacattggccatctctcggctcagcgtcggcgcggatcaaatcaacactgcaagtcgaaacttcaccgccgcctcagacaaggttgctggcgctatgaatcaagccgcaacagtcacaaccaagctgtccgacttgaccacgtcgctcaccgtcgcagcgtcatccttgcatcaaggggttcaagactacaaggtgcatcgtgattctgtcggtaaacttgtcagcgaactgaacggtctggtcgcgaacgccaagactgacgtcagcattacctcggatgtgctgcgccgtattgaagcagccgccaaggagctcagtaaggcccaagttcaaactgagcagttcatggctggcgtagccaacgtccttgctaaggcgcacgagtcatttcgcgaagccatgctcaagaccgtgcaggataacacccacgatttccataccaagctttcatcggccgtggcgctccttggaacttccattaaggagctcgatgatgtgcttagcaccgcgactcccaaggagcgaagcaagtga

SEQ ID NO: 10908 - DNA, 711 bp, Comamonadaceae bacterium B1
gtgattggacgccgtagcccctctcagcaacggggcaaggacgaacccgagaagccgttctggatttcctttgccgacctcatgacggcactcatggtcctgtttttggttgtaatggctattgccctgcttgccgtgacgagaaccgtctctgagttggagaagcgcgaggccgagtacagggcagacattgacaactgcatgattctagccgtagaggcagccaagcgacatgagggagtgagggtcgacctgcgccgaaacgttatcgacttcggtgaccgagcccgctttgctttcaacagctcattactgagccctgaacaagaaggtgtgctgcggcgtttcgttcccgaactcttgtcaatggcagacagcgattcctgcaagcgcgtcatgaagcgaatcatcgtcgagggtcataccgacaagacgggcagttatctggccaacctcaacctgagcctcatgcgcagtcagcgcgttctgtgcgccatgttcaagactgatggcccaaatcctttgacagatgcgcagaaggcgcaagtacgtgatgtctttctagtaggaggcttcgcgttcagcgcatcaaaagacactcctgaagaaagccggcgagtcgagatgcgcatcgagtttctggggattgatgagaagcgcgttaagccgccacagggtgcgactggcggcttcggaacctgcgctatttga

SEQ ID NO: 10909 - DNA, 1830 bp, Comamonadaceae bacterium B1
atggacccgctagcactcctatccgacctgctcaggcaaacgagcaaccagagttcggtacccatgcgccaatgtaccgagattgatggggtgcttgctgagctcgaaaagcgtgtacgtagtggcagctccagctatgaaccgaatgacctacaggttgaagcagtaaaaaatttctgggatgcacgtgggtttgagtccctgagacaggctcgactggtttcctttggacttgccgtgcgcccgtggaacgaccgccgatgcctgatcgaagagccagagcgcttcggtgccgccctcactggactgcgcaactgggagtccagcccaaggcagtttcgcagatgctatcagggccttgtgcgcagctatttcgactacgacggtcttgggcgcgatgtgcctgctactggccacaggaactggcgacagcttcaggcttacctttgtgataaggccaagctcatcagagatgccgccatcaatcccgactgggtcgagtgcgcccttgagaacaaagggctgttctcgccaacaccatgcgcctcatatgcgcaggacttgcttgatggtcgggaagacaaggttaggcaagtccgtgaactactgggcatcaacgacgcgagttggttcacacgtgagctcgtgcttgcgcatatcaaaagggcgtgcgagcttgaagataccgcattcaccaacatggtcgggcgccttctagcgcttctaggcagaaatgaagtactcagagaccgtggtcttcgggtgatactggaacgttacgccgaggttgcgcagatgcctcagcattcgggcctaaaagactacagcgtgaacgcttggggaaacccttggcttccctcgaacgagcaccgctggggcggggtcacagatgatgcccgacaaatggtcggagactggctcaagcttgaatttattgagctgtttttcacaaagctggtccaagatgggcgtagcgacacccgtcgggtgaaattctgggccaagtatgttccgctcatcgagaacattcacttcgcactaggtacgcacgccaagtactcccacgaacccgactttgtggcgctgcgagcaaagttgaagggcttaacggtcagccttcaagataacaagcccttcaacaacgcctttgttatgaccatgggtgacttggtggcagtcgagttcagcggcgagtcgaacgccttctatggctacagcttcaagcgcagcctaccgttcgacctgtccaagccggtccgaagcgctccggtcaatggcaggaactccctcaaaaacgacgcacgtgttttgtacttgacacatcaagactctgtacgcggatactcaggatgggaagaccgcttcaagaaagaactccaagacaagttcgggctagttcctagtcggcagtctgctccgctcgttgtgttgagccctgcgtctactggcagccatacacctcttgctcaacccgcagtaccgccacagcaatcaacctcccccgctgccgatacgacgcgccagaacatctcgccccagagcttcggtgttcttcggccgtctgcagcgccagttcaatcacaggttgctccaagaacgccgacagctccggaacagaagaccctgcctatccctgcttctgaggtctacaacgaggtcaacctccgaaagttagcatggcgatttagcgcatctatcgttgaccggagggaaaaaggtggatctctttggctggtgatggcaaacgcgccggaagcgcggcgaatcctgaaggcttggggctttcagtactctgagggcaagggttggtggaagaaggacttggaatga

SEQ ID NO: 10910 - DNA, 3768 bp, Comamonadaceae bacterium B1
atgagcatcttcagtttgttcaagaggtccaccgtgagtgagcagcacaagcgttggcaccggacactcactgaagcaggcgtgacgcttagccctcgagctgctgaaggtgagccgctccaagcaacggggttcggtggcgcccttcggcaaatgctcgacgatgggcttgcgaatgaagctggagagagatacttactgacatgggactgcctattcgaagcactcagcttgcccgcgtacgatgggctgtcggaggcgcttgagctaccaacaactaccaaacttcggcccatgctgtcgtcgcgtggtgctttggtcgatgaggactttgctatcagcctcggtccttgggtggatgcggaaggccaagatttcagtccggaataccgaggagcatcgcttcagattggaagtcgctccgagctaatgacacctgaacagtgggggctcctcaaagctgtcaagagcttcgctcagcggcctcccgagcagcgcgctgaacatacacagcgccttgcttgggggcgcattcgacgacatgcattggcggctagagcggttctgggtgacttcttggtcaaaaccgttgttctgactcctgagcgtctcgacctagcgttcaggaagtccgatgcggtgacggacgataccgtaatcgaggtattgccggggttcgaggacgcccctgctgattggctcacccaattcgaccgatttgaccacgtatccagccggtatgacctgcccacccaagacgggggccttgtgcaagttgtcatatctccagcggttcgaacagtcttagagcaggtcaaacggctccctgcacgccgtatcgcaggtgcgcgagcgcaagcgtttctggtcaaccccttcgcgacgctaggcgaagcagcctccaaggtcatcgacgaagcgcagtttgagcaggcgaagttagatgccggtctcttcttcgagcggttcacgcccttggtggagcgaaccgaggatggagtaccgtcaaaggtggggctcagcatcgaacgggctgacgatacagggttggcttccgctaacgtcatttatttatcagatgaagagctgaggcgctttattgggcggcttgagcatgcgataaagcgcggtcatcaactggtattctgggaaggtcgagagcttgaactccttccggaagccgaagaacacctcaagactcttcgtctcgctctcgatcagcggttgatgccgagggttttggtcacatacgaccaagttcatgacctgtctgcctactcgtctcgggtcgagggagttggggtcgagaagccgtactactcccccttcatcgccaagaagaaggaggatgaggggtggttccctgaaaacgtttaccccatcatcgcctacacccctgaaggtagtgccgaacaggtcgcgatacccgtcaatgacgaagctatcgatacactgcgtaaggccgctcacgaggcggagcgccgtggagaggccgaagtcaccctcccctggctgccgaagcccatcaaggtcgaggaggccaaacgaattgtcggcactttcgttgaggtcttggatgaggtcaaggaacgcaagttcgaccctgagaagcgaaagccagccgggcccaagtcgaagaagactctgttactgcgcccaaacatcgacaccgttgactacgaggagaaacgatcggcagcgcttcgactgaagcagcatgacccacgtgtcccgcgcacacttgcgcctgatgccaagttgctcgatcaccagttagagggtgtcggcagactgcaacacctctttggtctgcgcacgggactgaacatccggggcatggttttggcagatgacatgggccttgggaagacactccagttgctcacgcttatggcctctatcctcgaagaggaaccggcgacgaagcccatgctggtggtggcgcctgtgacgctgctggagaactggaaggaagaagcgcagaagttttacccgggtgcgttcagcattttgactgcctacggagaggcgctcgctccacttcgcgtgccccgggagagcgttgatgagcgactcaggaacgaagacggtttggtcaaattcttgaaatcaaactgggtgggtgatgccaagctcgttttgaccacgtacgagacactgcgcgacctagagttctcgtttgcatctcagcactggacgttgatggtctgcgacgaagcccagcgcatcaagaatccatcggcgatggttacgcgggcagccaagaagcaaaacgcagaattcaagatagcctgcactggcacacctgtcgaaaataccttggctgacctgtggtgcctcttcgactacgtccagcccgggctattgggtgcgctcaatgagttttgccgcatgtaccgccgaccgattgagattgatgaccgagacgagaagggcaagaagcgcatcgaggacttgaggcagcgtatcgacccgcagattcttcgtcgaaccaagctggaagtagctaatgacctgccgaagaaggtcgtggtggatgactgccgccgcctaccgctctcgacaactcagcgtcagctctatgctagggctatcgaggacttcaagacgcgtggcgacccagagtcgcacacaccgttcaaaaaccacctcggccttctgcagtaccttcgtcttgtgtgtaccgacccccgtaggcatggcctgacagtcttcaaacccgagccacttgaacagtaccgcaaggctgcccccaagctggactggctattgactcagttgcgccgaatcgaagcaaagggcgacaaagtcatcattttttgcgagttcaggaacattcaaaggctattgcagcattacattgctgaagtttttgggttcgaggcagacattatcaatggcgacacgacagcatcggctacgagtgctatgagtaggcagaagcgcattaaggcgttccaagcgaagcttggctttggcgtaattatcctgtcccctcttgctgtaggctttggagtcaacatccaggcagcgaatcacgtcgtccactacacacgcacttggaacccagcgaaagaggaccaagcttctgaccgagcttggcgtataggtcagaagaaagatgtgttcgtctattacccggtagttgcggctgatgacttcacaacctttgatgtcaagctagatcaactattggaaagaaagcgctctctagctggtgacatgctaaacggctgttccgatatcagcgctgcagatttccgggttgaggaagtcgtgccaggagatttcatccaagacatcgacgaagtcgtaacgctagacacagcaatgcggatggaatggcggcactttgagggacttgcggcagctctgtggagcaagcaaggtttcgataccgtctattgcactccggctagtaacgacaacggggtcgatgtcgtggcaatacgcggagcttacggagagctcgtacaaaccaagtcttctgctgcagatgggcgtctgctgagctgggacgccgtaaatgaggtagttgccggcgaggcgttctatcgtcgcaggcatccaggggtgaccttcaagaaggtgggtctcacgaaccagtttttcaacagcggcgcgcatgagaaggctactttgaacgatgtagagcttctcgaccaaagtcaccttgcccagttgctagccaagcatagcgtgacaatgcttgatgtggaaagacttttgtaccatgattggcagcaacaaagtgactgccgggtttag

SEQ ID NO: 10911 - DNA, 1890 bp, Paraliobacillus sp. PM-2
atgtttgctagtatatatgaggtaatatcaaatgatttttatattcgaattttaactatagcagcagttgttatattctttgtcacattggcattttatttatggattaagattggaatgaattcttttagcaagaagttaaatgaagtctcaaatcaagagggcgggattgataaacggatagttcttatcaatgaatggttcaagtcttctaaatcaaaatggttgccagggatacttgaaaagtcttggaagaagttttattgggaatacagttctaccgaagaacattatatacctgatgtttatgaatcatttaaagaagatcaaatagtctataaatacgggcgaagaaaactagttgaaacgcttcctgctgttttcgtttcactaggtattttaggtacgttttgggggattacttcagggattactggtattaattctaatgcaggggttgatgaactgcaaggtggtataaatactttgctctctggaatggaatttgctttctactcttctattgctggtattgttatatcgttaatctatcaattgtgtgatcgtatattcttttataggatgatttctaagaattttgatctactaatgtctgatttagacaaggcattcccgattaaaacagagggaagtttattagaagaaatggtcaagacgcaacaagagcaaatgaacgaccttaaaacattctttgctgatgaatttgtcacaaaattaacaaccggaatatctgaaactgttcaacagtctcttaatccgcacttagaacgtagtaatgaaataatggagactgtcgtacaaaacacaaccgaagcacaaggtgaaaaattgaatgaaatggtcaactattttgttgaatctctaaatgaagtaacaggagatcatatgaaggatttaggtgaggcacttaataagactgtagagtggcaagaaaaagttcacggagaaatgagcgcattagtagaagaattgtctaatgttgctgaaaaacaatcagaaatggcaaaaaatacaacagatttaagtgaacaaatgaatgaatacacagagacgttatctgattatcaaggaaaattaattacttcaacccaagagttaagttctatcacagaacaaaatacaagtttattggagcaaatgaggtcattatctcatgaaatgaatgatcgtcataaggaatctgaggataactttgctaatcgtctagatcagatgaatcatacgatgaaacgtattactgaacttggtgcagtaatgaatgacatgcaagaggaaacaaaaacaacaattgaatcattatcttacgctaatgaatctattgatcaaagtatcataaataatactaaactaactgattcattggtagatcaacacgagatttccaatcaatggagtgtgaagacacaatcattacttgaagatttagtagaaaactctgaaatcaatgaatcgatgcatacaaatatgaaacagctttttgaaagaataacagaagaaagagaaactctagataatacgaaacaggaacatatggatcttctacaaaggaatgtgcaagaacttaagtattattggacccagaacagtgaggccttggtgggtaacagagaacaatttgaggcgctcaataatagattagatcagtccatgaatgatttcgccgatcatatgcaacgtggtgttcaacgaacatttgaacaatttgataaagagttgaagacggctgtcgaatatcttgcaagaggtgttggtggcattaatcaagttgtggagtcgatggaacaagatattgatagtgtaaatggtcaaatatcgaggtttaaccaatcgctagagcaaattgcagctggcgtagagaagcaagggtga

SEQ ID NO: 10912 - DNA, 711 bp, Paraliobacillus sp. PM-2
atggctagaaaacgtttagaaaggtccagacaagtcaaaaggtttgaagaaggaagcaaccactattggatgtctttttctgatttaatgagcgcattgttactaatatttgctttattgctaatggttaatatttttggtaaccaaactgaaatggaagcaaaagaccaaatgatagaagaagtattaggcgtaaaaacgcggttaattgaagagttaagtgaatcgtttagtgattcaaatctcgaaatggaaattgacccacaaacaggtgctattcgattctctagtggtgttttctttagttacgatagtgctaaagttagtgaagcgggtagtgagaacttaaaatcattcgttccaaaatatattagtattttactttcagatgaatttagagagcatatatctcaaattattgttgagggacacacagaccaagaaggtacttatttatacaatatggagctatcacaagatagatcttttgcagtagtaaaagagatttatgaagatgatttccctgattttgaagccaagaaggaactgagacaattaataacgtcaaatggacgctcttttacagtaccaatgtataatgaaagtggagaagtagatagtgagaaatcgaggcgtgttgaatttaagtttcgtttaaaagatgaagaaatgattaaaaatatacaagagctggtgaacgataatgaatag

SEQ ID NO: 10913 - DNA, 2697 bp, Paraliobacillus sp. PM-2
atggctttatttaaaagaaataccgttaacattattcttaataaaaatatagaatcaaagggtgttattttttctattcaacaggatgaaaagccactttccctccctattaggcttactgtgtcagaaatgaaaggcttaactaacttggatcaattacagttggttgaagacttatggttggatgagaaaatacaggaagtggagaaatatagttattttctttcatatgaaatgttatataagttggaaagtgaagaaagagcgatactcactctccctgaacagacaacagctgttgatataaagatagagaatgagagttttgtaggttcaaagaattttaaatttattccacggatacacactgaaggttatcctaatttacatagagttggaacaagaaaaggcgcaatatttgaactccccacaaaagaaaacattctaattgaacctgagtactattctttacttgagaatattgcgaatgcacctgatcctcgtgatcgagatgaactatttctttatattgcaaaaataaaaaaacaagcaaaagcattaggcgttcgagtaagtgagcatatcgagcgtgaggaatatgagtttattgatgaagttagtattgatttggaaagatcacataatagtattaccttttcttcctcctacaagcacgatgaactagcggaagaggatttgactgaactaaacaaaacaagaagcggctatacgaaattagggacgacgagagtttttgttgatcaaaatacaagagaaaaagcagctaaagtacaacaaattgaatcaattcaaggtcaagatatacctaaatttgtacaaaatcctagtgcgtttatccctgaagacattgatatctcattagaagactttggagaaagagtaaaaaatttaggcattcgtgtttataaagcacaaccttttatacatgctaataaatctgagaatggatggtttgagtatgaaactggatatcaggtgcgagatgatcaagggaattctatttctaaagaattagatgattttttctctgaagataatagcggtgactttaaacaattggatgaggatacatttgttgcagctcctgctcatgcagaagattttaatcatctggcaacaaaaattaaagaagaggcaaaacagaatccatcttcacaagtaataccatctaattatattttagagatatttgagaatataaataatatagagtttaaccaacctattcaagaagttcgggaaacattaaatgacgaacaagtacttaataatcagcctccccaagggtttactgcaactttaaagtcatttcaacaagatggttttgtctggatgaaatcactgcgttttacagggtatggcggtttacttgcagatgatatggggttaggtaagactattcaagttattgcatatttgtcttatttaaaggaaatgagtcgtttaactccgacattattagtactaccaaaatcgctaattgataattggataaaagaaatggataagtttgccccgatgttatctgggaatgtttatgtccaccttggaagtaatcgtataaaagatccaactattatttctaagtttgatattgttttaacaacataccaaacactgataagagatcagttagtgatgggaagagtagactggcaaatggtgatttgtgatgaagcacaagctattaaaaatccatcaactggtgcatctgtagtagttaaagctttaaaaaatagaggacgtattgcgttaacgggaacaccagttgagaataatttaacagaactttggtctattgttgattttgtgcaaccgggtatcttaggtagtttaaaagaatttagaaatagctatgaacctagacttactgacgagtcagcttatgattctattcaacaagatattgaaagcaaaatccattttatatataaaagacggacaaaggctggggagttgaaagatcagctaccatctaagacagagtataaattccctgttccaatggggaaacaacaaaaagccgtgtataagaatatattaaagcaagtagaagacaaagatatgccacctattcaaggcattatgagattaaaaatgctctcttctcatccagggctagtagatagttcttataagggaactaacattaaaaatgtaccgaaactagtaaaaacactagagctgctaaatgatatcaaaaataaaggtgaaaaagcgatcatatttacagagtatcgcgaaatgcaagtaatattaaagcaagcaattttaaataagttcgatttaaatccagctatcatcaatggtacaacagaccgccgtcaacacgttgttgatcaatttaatcaaaaggatggtttcgatatcttaattcttgcacctaaagctgctggcacaggtttaacaataacaagtgcgaaccatgttattcattatacaagatggtggaatccagcggtagaaaatcaagcaactgatcgagtttatagaattggtcaagaaaaagatgtacacgtgtactatccaattgtcacgagtgatgagggtggtacatcagttgaagaggtagtagataaattgttgtctaagaaaaaagaattggctgaaaacgttattgttccaagtaaagatattgatatcgagaaagaagttttggggcaagtggtaaattaa

SEQ ID NO: 10914 - DNA, 1962 bp, Burkholderiales bacterium GJ-E10
atgattgcggcaattcaggtgtttttggggcaaatctatgctccgctcggaagtctctctggaattccccttctgtgcttcctcctggccagcttcttgaccatcgcctatgtgttcggatttcttgggaaaggatttgttgtcggctcgcaattgaagaaggctgtaagcgcagtcgaagcgctatcggacggggggaaaggggtctctcccgatcgggtcgcaaaggctatggagcgggagccgctacggcacctatggaacgaatacagcgactcgctgcatgaggtgaaaagagggtccggcgcagcaggggcgcttacggagattcgcgcaacacaacctgctgaactcttttttacgcgggaagcgctggtggatagccgccttctcgatgactttgtgcggcaccttccaggtcttttgaccggaattgggattatcgggacattttttgggttgctcggcggcttgtctggtttcgatgcatccacatcggctactgccgtggccggcttaaagccgcttttgatgggcgtcgcccatgcatttctggtatccgctactgcgattgcctgcgcaatgttcgtcacatctaccagtagatttctcctggcacggtgttaccagctcgtggaaaagctaaaccacaagattgatgccctctattcaaccggcgccggggaggagtacctgtcgcgtcttgtccattcgtcggaaaaggccgaggcgcatgcggcccagctaaagcaggcgctaatcgaagatttgacaacgctcatgacaaatctgaccgagcgccagattcaagcgcaaattcatagccaccaatcgcttgggacgcaactcggagaaacgctttccgggcctttaaaggaaatgaccaacgcgcttcaaacaaccagccagggaaatagccaggccgtaacgggcatgctggaatccatgctggccgggtttatggcaaagcttgaagatacgttcggcgggcaaatgaggggaataaatgaacagatagcgcattccgtagaggtaatgaataccgcgcaatcctctttgcagaagcttatcgatgacatggggcgagccaatcagcaggcggccaatggcctgagcggggtactcgaggaagcaataaggcaaaactcggcaaaccaagctgccatggtcgatcaaatgcgtgacttcctccaggaaatgcgttcccgagctacggaggagcaggacaaggccaagcgagcaatggacgaggcggtcggaagcgtactgaagcaactttccgtcgcggtcgagcaaatggaagaggtgaggagaggcgcggtagctcaagaacaggggcgaaaccaacagttgtcgcagagaacgcaagagctggtatccggactatccggccaagtcgatacattgctgaaatcggttggtgatatcggagcggtgtcgctgcgagcggtagagggaatgaatgcgggcgcggcaaccatggagtcagcggcacgacgatttgaaagtgccggaggttctgtctcgacggtatttgacaagtcccaacatgtcgcagagcaactaacgacagcctccggagctttgcagaccgcagccgctgcaattcgagagggattccagaaatacgactccacgcgtgcggcagtagatggtcatgtcgcgtcgcttaccgccttggttgagaccgcaaagcgggaagctggcttgtctaaggtgatcctgacggatttggaacgaattgtcgagcaattgcggcgcgcggaaagccaaagcgaggcctatttgcagggcgtgaatggtgcgttggttgaggcgtttgaaaaattcggcaccgccctgaacaaccagctaaccaagacgatcggcgcgacagattctcatatggaacgcggcgttcaacatctgaccggggtggtagacgaaatagcggcggcaatgtcgcgcttgaagaaggtataa

SEQ ID NO: 10915 - DNA, 714 bp, Burkholderiales bacterium GJ-E10
atgttcggacgggttgtattgaagcgcgggggaaaggcggaaggggaaagcccgttctggatttccttttcggacctgatgtctgccctgatggttttgttccttgtcgtaatggcggttacgttgatttccgttacgaaggacgtaagcagtgccgagcgcaagaaaattcgacgagagcaagacatccaggcactcatggccgaaattcgtcaggactcgatcgagtttcctgaggttaaggttggcggcgcgccgacctacaaaatcgacttgggggatgtcgttcatttcgatagcggtagttcggtaatctctccatccggcgcggccttcttgcgaaaatatgttcctgtgctgctaaaggtgcaggcgactccaaggggacaaaagtggattcggagaatcgtcgtcgaaggatttaccgaccaggatggcacctatctttataaccttggattgagcctcaatcgaagcaagagcgtcgtatgcgttttgttttcgaggccggctggcaatgaacagccgttgtccgaacaacaaaagcgacaaattcaaaatcttttcctggttggcggatattcgttcaactcgatgaaggcttcgaaggaagctagccgacgagttgagttgaagcttgacttttggggcgtcgacgaggatagggacgtaaatacggcgattcttgacacgaaagaaatcggccaatgctaa

SEQ ID NO: 10916 - DNA, 639 bp, Burkholderiales bacterium GJ-E10
atgatgcaaattggcaaatacatcgtcgtggagtttagtaaaaagggaaacggggcctacgtttatgaatcggaggggttgaggtttaaccgacactccggtagcttcgatggcggcacgccggatttgcgctacggctattacgatggcgcagtaatcaagattattcatcggccccagtgggaggagtgggttgaagcggatctgaggagactggggatttacccggacgaggataaaagagcaaggaagaagccatcgactccgcatgtgacacgggtcacgaaccgccaaaatacccggtccaccccgaagctaatgagtgaagactgggcgtttccaactcccacgctcggcgccggagccggggaacctgtatcggagcagcatggggaggaagccacggtggagacgctgagggctgctccgcatggggcgccgttcaccatggcggaactagcgaagctacttggtagaaccccagggtcacatatagaagatcttcgcaaggaagacggagggggcggtcgcctttgggtgattggtgccctgacaaatattccggtgtccaaaaagcttgtccagtggggattccgctggtccggaaagagatctgggtattactaccctgaggagtaa

SEQ ID NO: 10917 - DNA, 3771 bp, Burkholderiales bacterium GJ-E10
atgatccggtttgttgatccattggaggacgcatctgtcgaaggcctcaacgctctagcgggtcaatcggcaaaaaaggaggatgagctcctcgttgcctatctcgctcagcttgccattgaagagcgatgttcaattgcccccgatggtgtcaccatactttggagcacgatttatgacctccaggaagacgacagccaccaggacgttctgcaccaattggggttgccggcggcgggagccctacgcccggttctggattcaagcgacaccctggcggactcaacgttcgaaattctcgttgacggttgggccgtagacggtaccgaagtgcgcgttttgcgaatagacggcgccatcgccgttctgcaagatcaatcctggctcctgggtcggtctgcttgggcgtgctatcaggcaatcaagaagtttgctgaccgggacgccgatcatcggacccagaacgaaaatgagctcggctggggcagcattcgtcagttggctgatgcggctggcgcgtattaccggtctccctacctggagacgacgtatgtattgacgccgcaatctatccgcctccctcttcagaagcaggagacttcattcggacgggtcgttacggtcgaaccgacgttcgagggcgcgccgtcaggctggctgaaggcatttgacggatttaattcggtccaacctcactacgacctaacgagttccggtctcgggcacgttcgcgtcgtcgtgtcggaacctgtccggaaggtcctcaatgtcatcaagcaggaaatgccaggccggcgggtcgccggcgctcgggcggagcgctttatccacaacccgtgggcatttcttggcgatgcggcgcgggaggtaatcaaagaagaagaatttgaagaggatcgagcgggcattggggccatagccgctatcttttctattgcgccaagaattgacaactcccgggtcacacaggtcgacctgcttattacggagcacttccacggtggcgccgctcgaaccgagcgggaatccttttctacgccggcagagctgcaacggtttgtccaaagcatcaaatccgctctagaggatgagagacctcgatttccctggaatgaatatgacctgacggtcgatggaaattccgcctcgacgctagaactcgcacagcaaatgctttgcctctgggaaaaccaaccccaggaaatcatttcattcgaggatatctacgaaattgcaggatatagcaatcgaatcgaaggaattggcgtcgccaaagccatatacgttcccgtatttcaaaaggaaacggacgacgaggagacaggctggacacctagtgacttaaccccgatggtcaaagtgaccctgacgggtcacgagggaagcgtcctcattccgttgacgagggagtgggttgataagtttcaagagcaagtggcggcggcagagtcgacgaaggccgcggaggttcgaaacgagtccctaccaacacccgtcgaaacgacgcaagctcgggctctggtcgatgcatttcgaacaatgttggacggccaggaggatataaaaaaggatcggccaagaaccccctcgaaggatagcccgaagccagaaaaaattctggtgaaaatgaatttcagcgatatcgactatcgggaggagcgtaggttaactttagctcttccgagtgaagccagtccaagtctaccgaaatgtctccgaccagcgatcgagcttaaaaagcaccagctcaacggtgttgcttggtttcaacatttggtttcacgcgcaccaatcgattgtcgtggtgcgctgcttgccgacgacatgggcctcggcaaaacgctacagctgcttacggttcttgggtcctattacgagcgacacccgaacgcatcgccttcgctaattctcgcgccgaaaagtctggtcgacaattgggctggcgagaccgaaaagtttttcacggagtcctaccccaaggttcttgtcctttacggggatgagttgcgaaaaagaaagcagccgcaatccctgatcgacgaacgtctgcggcaacggggaatcgttgaccttctgattccggattggccgggaagtgccaaaattgtcattaccacgtacgaaacgctggtcaatttcgagttttcgctagccaggcagccatttgcgtttgttgtatgcgacgaagctcaacgcataaagactccaggtacgcaaacatcgatcgccgtcagggcactcaaggccgattttcgaatcgcctgcacgggaacgccggtcgaaaacacgctatcggacttgtggtctcttttcgattttgttcagccggggctcctcggaagtctagaggagtttagtagaacctatcggcgtccaatcgagtgcaatacggaggagcagaaggcggcgctcaaacaactccaggaggcaatcgcaccacaaactttacgacgcaccaaacaagatatcagcgacgagctaccaaggaaatactttgcctatcgtgcaggcgaggacattacaccggaattcaaggaacgccttgatcagggcgatcgactgctcgtgcccatgtcaagctatcagaacgtcctctatcttgggggattaaagaagctacgggatgcaaatcaagagagtgattccattaagcgggctaggttaagctttggggccctccatctcatgaaggcagtctgcgccgagccatactgccttcctggaatgaaatttgaaattgccaagtcagggtacgagacccatctcgaaaattccccaaaacttgcatggcttctcaagcagctaagtcaaatcaaggcgcgcgaagaaaaggcaatcatttttaccgagttgcgagaggtgcagttggcgttgtttcatttcttgaaggaagaatttggactcaagccattcgtgattaacggagactcgcagaatcgccagcggtacattgatcggttttcggaatcccccggctttgatgtaatcatcctttccactttggcggctggagccggattgaatgtaacagctgcaaatcacgtcttccactttacaagagcttggaacccggcgaaggaaaaccaggcgaccgatcgcgcatatcgtattggccagaaaaaggatgtgtttgtctactgcccgattgtcgcaacacccgactaccccacgtttgacgtgcggttggatgagctgctcaaggcaaaggacaagttggcgaactccaccattgatggctcggagatggaggtcatgctcaacgggagtggctctgatatctcgaaatcagagctatttgctgccgaggatggggcggagccgcaacgccggttcctcaccatggacgatgtggaccgtatggacggcacccgtttcgagatattttgtaggtttctctgggagagagaggggtatcttgcctccatcaccaagaagcgcgggggcgacgggggaattgacatcgtcgcgctaaaggggcgtaacggcgagctactccagtgcaagagcagcttgtcagacggcctcgggtgggacgccattaaggaagtcaccgccggatcagcccgatatcaggcccaacacccgggaaccctatttcgtcggatcgcggttaccaatcaaacatttacgaagggcgcgaggagccaggcagaagcaaacagcgtattccttgtcgagcgcaataggcttgaagagctccttggaaagtaccctgttgataactttgagtttgatctcgaggtcgacaggtggatcgcgtggtttcaatag

SEQ ID NO: 10918 - DNA, 1992 bp, Cupriavidus sp. SK-3
atgaccccagactccttcgcttttgcgtcaacagctctccactgggtagtcgggagtcttctctccgtagcactctgcgccttcttctggcaattccttcgcccagcttggcgcacccgtggcgagctaagacatgcactggagcaactcagcaaactcaaggctatagggccggttttggacttggatcgtgtagcggatgaggcaatgttgagcgacacactacgacattgctgggacgagtaccgcgacacattgcacgggcaaaagcaggcaacggcgaccggaatgatggaggtcgtccgcttgcgagccggcgcgatggcgaatggcttctttactgagcaagcactggtcgactcgccactacgtacggagttctataagcatttgcccggcattctcaccggcttggggattattggcacgttttccggcctaatcttcggtcttcagagctttcaggtatcagacgatgcggcggtggtccggggcagcctggaggcactgatcctcagcgttggcggtgcatttgtcgtttcaggcatcgcgattgcgctcgctatgatcgtcacgactgttgaaaagctaatgctcaacggtcgttatacccaggttgaagcactttgtggcgtcatcgacagcctgttcgattccggcgccggtgaagagtacctgcaacgcctggtagaggcgtctgaaacttcggcaacgcaggccatgcagatgaaggagtcgttggtcaccgatctgaagcaagtcctcagcgaacttacgcagcaacagatcgcgacgattacttcgaccagcgcgcagcttggccagtcgatcacgagcagtttgtccgagggactggctgagcctttggagcgcatttctcacgcagtgcaatcggttggcaacagtcaaggagaggctgtcagcaagcttctgaccgacgtgctggccaatttcactgcgcagatggaaaacatgtttggctcccagatgcgcggcatgaacgacatgctggtgcagactgccaacaccatccagagtgcgtcgcagagcttcgaacgtcttgccgggcagattcaacaggcgggatcgggcgcggcagacgccatggccaagcggatggacgaggcactacagcagatgcaggcgcgccaggcagaagccaacgaccagatgcgagttttcatcgaccaactgaagcagaacgtcgcagatgggcaaagcgagtctgctgtgctcacgcgaaacatgatgcgcgagctcagcgagagcaccggggccttggtcaaaggtttgcaggagcaagcgcacaacgcacaacaagcgcatacgcagcatcaggcggatctggctgctcacacgagtgagctggtagcccaacagtcggaccaagtcacgggtctcacgaacgctgtcaaggaaagcagcgcaatgatgcggcaaacgattgatcgcttggagagcgccaccaacgtgaacgtcgagcgcatgggtcttggtgcggagcggctgcaaagcgcctccaaccgcttgagcgagaaccttgatgcgatgaagtccgctagcgatggcatggcaagcaccaccgacaagcttaacagctcgacgaacacgctgaatacggctctcatcgcaacccagcaggcactcggcgagcagaaggcggtgcgggatgcgctgacgacgatggtcacatcgctccgcgacattgtggaaaacgcaaaacgcgaagcaggaatgacatcggagctggtcagcaagttgcaagttgcctcccagcatttggccgaggcccagaacacggcgggtacttaccttgaagatctaaacgaggtcctggcagaagcgcacgccgcgttcgcccagcaaatggaaatcacactccgtcagggaaacaaggtgttccacgaggagcttgcgcaggcaaccggcttactcaagggggcaatacaggatctggccgatgtgctcgacgcagttccttctgcggcgtag

SEQ ID NO: 10919 - DNA, 759 bp, Cupriavidus sp. SK-3
atgatcggcatacgaatggcgtcacgccgacgcgggcgcgaggaaggagagaaaccgttctggatctctttctctgacttgatgacggcattgatggtcctatttctggtggcgctcagcgtagcgctccttgcagtcacgaagaagatttccgacgacgaacgggaagagaaatcgcggtcggagcagatcagcgaactcatgacggaagtccagaaagtggccgcacagttcgatggcgtgagggtcatcgacaggaccattgattttggcccgcggggacgcttcgagcgggagggccaaaatacgctttccgcgcagcaacgcaccttggtgcgacagttcacgcccaaactgtttgagcagttgcggaccacggaggctgggcgcaagtggttcaagcgggcggtagtggaaggctatgcgagccagaccggcaagtatctcttcaacctcaatctcagtctggagcgtagcgagcgagtcctctgcgaacttctgcgtgagcccccgcatggagagcccgcactctccgaagcagatcgtaagcttgttgcaacccgcttcttcgtcggtggcgcgtcgttcaactcattgcgctcgacggccgatgatagccgccggatcgaattcaagctcgagttcaagacacgtcaggaacgccaggaggagctagctcacccagccccaccagtagatgatgacgcactgacccaggctctggatctgaaagaacgatgcccgatcgccgaccgatag

SEQ ID NO: 10920 - DNA, 1800 bp, Cupriavidus sp. SK-3
atgcccgatcgccgaccgatagacgccctccgatctcgcttggctgccgaaatgggctctgagcaagtatttcgagctccggtctggggcaacccgcacgccatgacagaggcgcttcgtcttctcaagcgcgacttgagcgaagccgagcccagtgagcccgcctccgatcaagtccaggcatccttgcgacgcttcggtgccactcagcaagtccagaacttcacagagctgaagtacgtctgctatggcattagcgtaccggttggcgaggaacaatggcgcgtgatcgacaacgggccattgttcaagagactgctgacgctggtcgacgagcaagaggtgaggccaaagcaatatcggcgctgctatcaagggctgttgaatggctacttcagcttcacgcacagcgataccgccgccccgagcgaggtcaactggaagacgctgcgtggcttcctcgggagcaagctggagccgattgcacacacagcctctaggcggggcgttgtcccgacatggctgcaaacacttaccttgcaccgcaacctactcactgacgatccctgcagccggtacgccaacgagctcgtcgggggcaacacgagcgagctgaaggagctgtgcacggggctcggcattgccagcaactcatgggtgtgggacgaggctctcatggcttatgttcgcgctgtttgtgcgagcaaggacggggcgttccacaatggcttgtcaggtgtactgcaactcgtgaacggccgttctgacttgaagctgccgcatacgttagccaagcgagcgaccgcgatgacggtcgtgcgttattcgcactgtagcgaaaagcccgaacacgcatctctacgtgacacctgtgtgaactggattggcaacccgtggcttaagcgcgttgcctgggatgccgaggtaggacatgagcctgcacgcaagatggtggagggatgggtaaagcgccgacagatcaaggacttcttccaacttctggccgaagatggggctgctgatctaaggcgcctcaactattggttgatgtgggaacccaagatcacccagatgtggttcgttctaggatccgatgctcggcgcaacaagagcgcgtcctttgtcaaactccgcaagagcatggaggagcaggagcgaacgctgatcgacaacaacgataggaacaacgcgttcgtcatgagaatcgggccgctcctgattattgagttcggcgtcaccggaaacgcatgctatgtcttcgctgcctctgacttccgcacaaacttggacgcgccgaccttttccatcagcgatttgaaacagcgtctgcatgccaagcgcctctcccacatcgcgaactgggagcatcgcttcgactacgagttgaagagcatgttgcagtctgtacctgcgtccaagggcgaattgcgcggcgctggcaatgacaaatctggcgtgcaacaggagagtgcgggtcgtggcttcgcagctgagcgctcccaacaagaagcagccagctggaaggttccacagaccgcgaagccaggcactttacccacccccactcgcactggaaattcgcagacgcaagccaggtcgctcagcgatagcgacattgaggccatctgcaacctgtgcacgcagcacggcatcgactgggaagacaatcgccgcaggaatggggcgctttggatactaataccagacccgcaaaagcatcccacttttgcgaagcgcttggaagcgcacggattccggttcaagcaaggtacaggattttggctaaagggagagggctaa

SEQ ID NO: 10921 - DNA, 3294 bp, Cupriavidus sp. SK-3
atgtttggcgcgtggttccgtaagacacaatccgagccgcatcccgttgaaactgccccgcaggccgcttttgacgccaacggcattcgttaccgggcgcccgctggcatggctgccgagtggctagcggcgcccttcgcatttcccaaggccgccgaccttggcgcgcggctttcccagattcagctggagggtctcggtgaatgcagtggggcagagtttttcctgccttgggacagcgtatatgcagttctacgccaccctgagctctccgcctatcgcgagccgctgctctttcctcccgaatccgacgcacggccgcgcctgaacagcaaaggtgctcttgccgatcccagctttacgattcttctagacgaatgggttgacccgcaatggcgaccgctgcaaccaacgccaaagctagttggacgcacacttcagaccggcaactcggtatcgctgctgtcagcgcacattcacgagatcctaggcgagttggaacgcttccacgcgacgcctgcaggcgagcgcacccaggccttcaaggagcaggtcttcggcaagatgcgacggcttgcgaccacgatcggatgccccgtttcagactatgtcgcgcgcacgattgtcttgactcccgagcgtctggaactcgccatggagcaacgcggcacgggtgacgcaaaggtagttgaggtcattcctggcttcgcggaggcgcccgcgcagtggctacccctgttcgacaggctcccgctccaagatagctatgacgtgccggacggcccatccctcgtgcgcgtggtgttgacgccagaggtgaaggccgtgcttggggaagtcaagcggatgcacggccgcagggtatccggcccgcgtgcggaggcgttcgtgcggaaccctttcgcactgctcggggaatgcgcccatgccgtcatcgacgccggtcaatttgaggagagcctggctgccgcggatgtccgcttcaagcgtttcgcaccgcaagtcgagcggagcgaggcgggacaagtactgcgcgtcgcattgctgatcgaagcgatcgacgacgtcagcgcatcggctcgtgagccagtcacaacctggtttgcgtctgcggatgaactgtcccggttcaccggtaagctgagccgctgtctcgatgacgggtcgcaatgcgttacatggggggagcatgatctcgagatcctgggcgacacgccatcctgcctagctacgctcgagaactggttgcgggattggagccatccagcgctctggactgcagccgaagtgctggacttgagcaactactctgagcgtatcgaggatatcggggtagagaagccgttcatcgttccagtcatcgccaagaacgacgagggtggtgggtggttcgaaaccaacaccaccgtaggtgtcctggtcagccgggatgcggaaggcgctcgtaatatcgtcccgattgccttcggtgagataccgtcactccaagaggctgtcagggctgcggagcaggcaggacatacgaagctacatttgccgggactcgatgatccggtaccggtgaccgacgcacgtcatgcagtcgatgcactgctgaaggcgcaagctgcgctgcagcgcaacgacttcaagcctccgaaggaaaatgtagccaatgccaccaggaagcgcctggtgatcaaacggaacttcgaggagatcgactacagcgagtcgcgcgcggaggcactacaaatgcccgagggccgcaaggcacgccttccgcagacgctcaagcccgaaattctgcttaaggaccatcagcacgtcggggtagcctggatgcagcacctctgggaggcgtccccgcacaactgccgcggcacggtgctggcggacgacatgggcttggggaagacccttcagcttctggcgtttatcgcctcctgcttcgaacaggatccgtcactgccacccgctttggttgtcgcgccagtagcgctcctggaaaactggcgcaatgagctgagcgggttttttctccccggaacacttcctctcctgatgctgtatggagacgccctcaagtcacttcgcgtcagcaagcacgaactcgatgcggagctgaaatctcagggcgtcaccaggctcctcaagaagaactgggtgggtgacgcgcgactggtgctgacgacctatgagaccatgcgtgatcttgagttcgccatggctagccagccgtggtcgattatggtctgtgacgaagcacagaagatcaagaatccagcggcactggtcacgcgttcagccaagaagcagaaggtgaggtttcgtatcgcatgtaccgggactccagtggagaacaccctggcggacttgtggtgtctgttcgatttcgtccaacccggcatgctcggcgcattgaatcacttctcccgaacctatcgccaacccatcgaagccaagaccgatgagcagatggccaaagtcgaagaattgaaggcggtgattcaacctcagattctgcaccggaagaagaccgatgtggccaaagatctgcctactccgatagaggatcccgtctgcaaacagcttcctatgtccggctaccagcaacggctctatgaaggcgcgctggccgtgctccgggagcagcgcgctaccaacccatccgcgcagttgcaggcgctgctggccattcgccaaatctgctcagatcctcacgggttcgccgagccagatatccggcagatctctatcgaacgactggtcaacgaatccccgaagatgggctggatggtagagcgtctgaagacacttgccgccgatggagacagcaatcacaaggtgatcgtgttctgcgagttcagggaactccaacttgttttgcagcgcgtgatcgcagccttctttggcttcgcgccgaatatcgtaaatggcgatacgtccgcggatccccgtaccgccggaaaccggcagcagttgatcgatgccttccaacgaaagcctgggttcaatgtgattatcctctcgccgctggcagtgggattcggggtgaacatccaagccgcgaaccatgtaatccacttcacgaggacgtggaacccggcgaaggaagatcaggcgacagctcgcgcatatcggattggccaaacacgaaccgttacggtctactacccaggggtggtcagcgagagctttccaagcttcgatgtgaggctagacgcgctactcggcaagaagcgcgccctggcctccgatatgttgaatggttgcagcgacttgaaggcagccgacttcgctgattttgggtga

SEQ ID NO: 10922 - DNA, 2121 bp, Vibrio metoecus
atgaccgatagccttaatctttccagtttatggccagacttgagcagtctaaatgtaatgccacctcaaactcctgagcaattgagtgctttgtttgtggttattttatggggtgtcgctctatttttcttaatttggtcagttgctgcatttattcgcgcaagacaacgagtagtttggcttaacaaatctttggatgatgcggagaaatcgactctgtcaggtgttcgaaatgatttaatttctagagctgaacaaaaaaaagattcagtagggcatttatggctcgagtttgatgaaacattgcttgaagtaaaaggtgctgatgacgttgttcgattgcataacacatttgatgctgactatttttttaatagttctagtttagctggtggtagtactgaaaacagaatgattgcggcggttccaggctttttaacggctctgggtgttattggtacttttgtcggtttacagctaggactttcagatctcaatatcgcgggcaacgttgatgtcaatgaaatgaaaaatggcgttgctggagttataaatggtgcaaaaatcgcatttatgacatcggtttggggcgtgctactcagtgttgcatttaatttcattgagaagatacttgagcaaattattagaaagaaaattaagtctttgcaaaaccgaattgacaggatgttccctcgattaagtgcggaatatcaactgcaatctattgcaaataacagccagcaatctcgagaaagcctacaaggacttgctgagaaaataggcgagaaaatgcaggagtcactcattcaggcaactcagggtattcaacaaggtctcgagagtagtctggaaaaaatcatggctccggctatcaataagctcgttgacgaaacatctgacgggaatcaaaaagcactggaaagcgttcttcaatctttcatggagggttttggtcaacaaggcgaacaacaacgtgtcgcgatggactctgcgtctcaaaacgtaaataagacgctagaatcaatgagcgtttcgatggctgctttcgtcaataagttggaagttcagcaaaacgcatcttcagaaagagagaaagaactgatctcaactatttcagttcaagtttctgagctagttactcagggtaatgagcagaagcgtgttctaacagagtttgtagaaaaacaagtctcagagttaggtgagcagcttactaaaagagaattagctgcttctgaacgtgaacagaaattggcttcctcaatggaaagtacgattaaagatttagtagaaaatgtttcagcacaaagccaagtcttgaccgattttgttcagaatcaagttgtccaacttacccaaacgttctccgaacgagatggaatggcaagtcagatggaaaaagagcgtaatgatatatttgtgaatcaaacgcaggcgatgaaagctggaacggatgagcttcttgctcaagtgaaagcggcgactgaatcacaacaaatcacatctaatagtattattgagcaaggtaaacaattacaaaatagtatcgattcatctgtttcggcatctgctcgagctacggagagtatgcagcagtcggcgaatgagttacgagttgccgctgatagtatgaatgtgtttggttccaacatcaaagatgcgggcaacaaactatctggtgctgttactgaagcggttaacagcacgaaggatttagcggaacaaaaccatctaggcgcagtgaaagttcaagcgttgagggagcagttgctggaagatacaagtaagtttagcgcgattgcagatcagataaacaatatgctgattagtgcagaacagtcgtttagcacgcttcgcactacccaaaatgagttccttgcagaacaaaaaggtaatctaaacgaactcacttcagaaatgaaacgtaatgtgaaagagttgacggagcaaatggctcaactgcttgaagattacgcagagcaagccaacggacaaaccgccgagcacctcaaagtttgggccaatagtagcacacaatatgcagagagcatgaatacagcagttagagctatttctagtgttgtcgatgaaattcaagataaagtgagccaacatgcgtag

SEQ ID NO: 10923 - DNA, 735 bp, Vibrio metoecus
atgcgtagaggtgttcgttcgcatacacaaaactcagtagatgaagaaaatccctactgggtttcattttccgatctaatgtctgctttgcttgttatatttatacttgcagctgttgctctgattattgaattaactcaaaagaccaatgatgtcgaaactggtattgaagagcttaagcaagctgagttagcaagaaagaatataatttatgatgttcgagacgaactggcgaaaagaaacgtaattgttgaaattgctgataacgatacggtaattcggattccagaaagcacactgacgtttgcatcaggtaaatcatcaattccgaacgatgcaacaatacagcaagcagttaaggacataggtgttgttcttcattctgcaattcagaagaaagaccgatttcaatatctcgataccatttttattgaggggcataccgatagcgatagtatccattacagaggaaaagggaattgggggttatctactgatcgagcaatatctgtctggaatgtctggcaaaatgaactgagcttaacgcctaaactcggtgacttagaaaatgcttatcatgcaaagctgttctctgttagtggttatgcggcgacaagacgtgccaatctacatgagtcgaatcagcaagaaaagagccagaataggcgcattgatattcgatttacagttaagaaaccatctattgctgagctcgagaggattgttggaccgtga

SEQ ID NO: 10924 - DNA, 1452 bp, Vibrio metoecus
gtgagcctaaatataaaaaagctcaaagttagtttgcctgctaatccttttggtcaagccatcaaggactttgcacatctatcgagtcagctagaagtgctttctaagagtgccggtattgaaaacaataagttccgaactgcatatggagaagtatgtaatgcgcttgcctctaagaaaagagttgaggacgttatagatagctctgtacacgttcgcgccttagctctttcgctacatacggatgcgaagaaaaatgtcagctttacgcgcagattgcttaataaaattacagaaattgtaaaaaaaccaagctctttagtcatagagtcgttttatcagcatttcttatcagagtatgaccgactggcagacttggaagctacagcagactggttgttggaggctaaaaggctgcgaggcaatgatgagcagtttgatgaaaatatattgtcaaccaatggccccaagtggcttgcggaaagggctattcaaaataatgtcgattttgatcatttaattgcggagatgaagctggaacgttatgcaaatggcagatatttaacggcggctaaaggcatctactatattgagcagttaaacactataccattaggccaagatcaccctctcctagaggaggttcaaaaaacggtggtttttgattctcgatatgactctgaaagtttgttagggcatcaaattcttagaattttgattggccgatcgataggttctcacatcagtgagccttggatgaatgtgatcttagcaattggcggtgacccacgagtaccaagttcaaatccaagatatattaagtggtggaagagtttagaaccaaatctggttcaagctgttcgcggatggttatcaaaactagacttgaagttgtttctggaagcgttggaggattattcttactcttcagctaattacgagctacagagaatgtacccatctaggaaaagtttcttagaggggatgttcgatgcgggggttatttcaaatacccggctttatttgagtctggatgctgcaaggtatttgaagagaaattatgaccctaagcacttgccaaatttctctactgttaaagatggtgacaaatcgataatttatgtgcaaatgaacggcgctcacatggttgaggggagccatagttgttatttgtggttgtaccggtatcttgacccttccgtttgtgtttttaactataacattgatagtcctacgtactcacaactcacaatcggtataaacaatcaaatgtcaagattgtcatctggtgcagttgctaaaataacgcactctccgagtggttacgcatggcaacgaaaagcacttatagcactaagagagttaggtgttaaattgacgccgaaagatgtgctttcgaatgaagattatattgattttaaacaacgttatggggtgcgagagtggagttaa

SEQ ID NO: 10925 - DNA, 3450 bp, Vibrio metoecus
gtggagttaacctctttaatcagcaagttcttctctagctcagataaaacgtctcagtttgaactcatttgtgatgatagtcttgattttgcaacttccagaaaaactctagagaaaattaaagctggtaaagctgatgagtggataacagcgcagtatgttgcacttaaaatgcttgaagagcagggggatgtaagctcatttccagatggcttcattatgcctgccgatacagctgtcagactcgattctgagttgagggatttgtttagtttgcccccggtttggaaaggagtcattgacgctgatattcaaggaaaagctagtacacccacctttaaaattgatctttcggtcacaaccaaacaaggtcgaacaacactaaattacactgtggatgggcctttcattcggtttagtcaaaatgagcagtacctgctaacacccgagcagcttatggtctttgttgcgcataaaacccatgtaaagtctgataggtctgaatatgataacttactgtacttacactctttgcaagaggcccaaaagaatggttgtaagctgaatctaaagcactttgaaaggctaagaatattgacaccaaataaaatcacagtagaagcagaattgaattctcaaggcgagctaatattgacgccaaacatggggcaaagtgcgagtcatgagtcgattcaaaaggttttggggcagttgcaaagcgacaacgcagttactctgaaagtgggtgatgaaatagtcttattttctgaagaaaagctaatggctgtaaaagaagttattagcaacagggtaattccccaacagcaagttaaagcgttcctggaaaaccctacagcatatattgatgcgagtttagtggatcttgatttaggtttttctatcagagttcatggtgcgacagtttttaaacatgcttattttggagaaacggacgagtcaggtatagattggttcggagcctcccccacatctgatttgattaatccaatatccaagctgactgatagagttcgcgataaaacaactcttgaggacgtagctaagaagattgaagatgcacgacaaaccggagcaaccgttttcgattatgaaggacaatcatacgatatcagcgaccctgcagctgttgaaaaagttctaaacgaaataggtcacaagatatctagccctaatacagatctttctagctacggagaggcagaagacgccgagactgaatcagaaggctcagaaatacatgttgttgatattgatctaaatgacgaagagctgtctgaaaattctcctaaagttgaacaactgatttctgatatttcatgggatggtgagttaaattgggaaaaccacaagcggacaccattcccacaccaggatattggtgttcgttggattttaggcgttgaacaaaaaagcttatcagactcgaaagttagtggagccttgctagctgatgacatggggttaggtaagacttttatggccctctcagcaatagaacatatttatcaacgacaacaaattagtggtgaaacgaagaaacctgcgttgatagttgctcctttgagtttattggaaaactggaaggatgaggtagataaaacctttaaacactcaccattcaaagatgtagtcattttgcaatcatccgctgagttaaatgagtatcgcatggggggcgtagagattcgaggccagagcgcatctgatgattgtttagaacccaaatattctttgaaagttgggaaatactttggtcctagccgtttagatctaccagagcgattggtaatcactacttatcaaactttgcgcgattaccagttctccatgtgtttgattgattgggggatcgtggttttcgatgaagcccagaacattaaaaatccaaatgcacttcaaactcgtgctgcgaaaggcctaaaagcggatttcaaactagtggctacgggtacgcctgtagaaaacagcttagccgatttttggtgtttaatggatacagcttgtccaggtcatctgggtagctatcaagaatttcgtgctcgttatatctcaccaattcttaaagctgctggtgatgaagttgaagaaataagagctaggcttggaagagaacttcgtatagctgtcggggcattgatgcttaggcgcattaaagaggacaaccttaaagggttacctctaaagcatatgtatgctggcggagaatttgaaaactggaagtatttagaagaacttaagtcgacaatggttggctaccagagagatgtttacgaaggagctattagccatcaactcgagaatgaagaaagtcacgcgcttaccactttgatgcggctaagagatagttcgttacatcctaggttaagtgatggaggtcgccttgatattcccaaaaatgcaaaatcagctagagctctatacggagaatcaggaaaattagtttccttgcttgagactttagacagagtacgaagcaaacaagaaaagtgcattatttttgcggttaacaaacgactgcaaagtttcttaagtgtgactttggggcagatctataacctaggtccgctctcagtgattaatggtgatgcaaaagctgtagcaaagcgtaaatctgtcccaactcgaaaatcaatgatttcagacttcgaagcaaaagaaggctttaatctaattgtaatgtctccagtcgcggctggtgtcggtttaactgtggtcggtgcgaatcatgtggttcatttagagcggtactggaacccagctaaagaagctcaagctacggatagggtttatcgtatcggacaggaaaaagaggttcatatctacatccctctgttgcatcaccctgaatttgaatcatttgatgtaaacctacataggctacttacccaaaaaacgttgctgaaggatgctgttgttacaccagaagatgttattccacagccagcaggtgtcgggggagtagtttctggtgatttgattgataaacgtattacagcggctgaacttgataagttaagttggcagcaatttgaagcgttatgtgtagaattgcttgcaaagattacggatagtgaaagcgcttggttgacgaacaatggtgctgatcatggtgctgatggtgtactacttaataacagtggtaatattttgcttcaggctaagtttacgcaacgacaatatgatggttataaagggatacaggagattcattctgctaaacctatttatgaatcagcaatgagaagttcttttgggcgtttgatttttgttactaattcacctttgttagctaagcgaactcatgaaattgctgccacatgtggtattgaagttttgggcagaacacagctgttaacttaccttgaagaatatgacattacactgaaagacattctgtcaaggttggggaaagatcgattaagagtttaa

SEQ ID NO: 10926 - DNA, 2121 bp, Vibrio metoecus
atgaccgatagccttaatctttccagtttatggccagacttgagcagtctaaatgtaatgccacctcaaactcctgagcaattgagtgctttgtttgtggttattttatggggtgtcgctctatttttcttaatttggtcagttgctgcatttattcgcgcaagacaacgagtagtttggcttaacaaatctttggatgatgcggagaaatcgactctgtcaggtgttcgaaatgatttaatttctagagctgaacaaaaaaaagattcagtagggcatttatggctcgagtttgatgaaacattgcttgaagtaaaaggtgctgatgacgttgttcgattgcataacacatttgatgctgactatttttttaatagttctagtttagctggtggtagtactgaaaacagaatgattgcggcggttccaggctttttaacggctctgggtgttattggtacttttgtcggtttacagctaggactttcagatctcaatatcgcgggcaacgttgatgtcaatgaaatgaaaaatggcgttgctggagttataaatggtgcaaaaatcgcatttatgacatcggtttggggcgtgctactcagtgttgcatttaatttcattgagaagatacttgagcaaattattagaaagaaaattaagtctttgcaaaaccgtattgacaggatgttccctcgattaagtgcggaatatcaactgcaatctattgcaaataacagccagcaatctcgagaaagcctacaaggacttgctgagaaaataggcgagaaaatgcaggagtcactcattcaggcaactcagggtattcaacaaggtctcgagagtagtctggaaaaaatcatggctccggctatcaataagctcgttgacgaaacatctgacgggaatcaaaaagcactggaaagcgttcttcaatctttcatggagggttttggtcaacaaggcgaacaacaacgtgtcgcgatggactctgcgtctcaaaacgtaaataagacgctagaatcaatgagcgtttcgatggctgctttcgtcaataagttggaagttcagcaaaacgcatcttcagaaagagagaaagaactgatctcaactatttcagttcaagtttctgagctagttactcagggtaatgagcagaagcgtgttctaacagagtttgtagaaaaacaagtctcagagttaggtgagcagcttactaaaagagaattagctgcttctgaacgtgaacagaaattggcttcctcaatggaaagtacgattaaagatttagtagaaaatgtttcagcacaaagccaagtcttgaccgattttgttcagaatcaagttgtccaacttacccaaacgttctccgaacgagatggaatggcaagtcagatggaaaaagagcgtaatgatatatttgtgaatcaaacgcaggcgatgaaagctggaacggatgagcttcttgctcaagtgaaagcggcgactgaatcacaacaaatcacatctaatagtattattgagcaaggtaaacaattacaaaatagtatcgattcatctgtttcggcatctgctcgagctacggagagtatgcagcagtcggcgaatgagttacgagttgccgctgatagtatgaatgtgtttggttccaacatcaaagatgcgggcaacaaactatctggtgctgttactgaagcggttaacagcacgaaggatttagcggaacaaaaccatctaggcgcagtgaaagttcaagcgttgagggagcagttgctggaagatacaagtaagtttagcgcgattgcagatcagataaacaatatgctgattagtgcagaacagtcgtttagcacgcttcgcactacccaaaatgagttccttgcagaacaaaaaggtaatctaaacgaactcacttcagaaatgaaacgtaatgtgaaagagttgacggagcaaatggctcaactgcttgaagattacgcagagcaagccaacggacaaaccgccgagcacctcaaagtttgggccaatagtagcacacaatatgcagagagcatgaatacagcagttagagctatttctagtgttgtcgatgaaattcaagataaagtgagccaacatgcgtag

SEQ ID NO: 10927 - DNA, 735 bp, Vibrio metoecus
atgcgtagaggtgttcgttcgcatacacaaaactcagtagatgaagaaaatccctactgggtttcattttccgatctaatgtctgctttgcttgttatatttatacttgcagctgttgctctgattattgaattaactcaaaagaccaatgatgtcgaagctggtattgaagagcttaagcaagctgagttagcaagaaagaatataatttatgatgttcgagacgaactggctaaaagaaacgtaattgttgaaattgctgataacgatacggtaattcggattccagaaagcacactgacgtttgcatcaggtaaatcatcaattccgaacgatgcaacaatacagcaagcagttaaggacataggtgttgttcttcattctgcaattcagaagaaagaccgatttcaatatctcgataccatttttattgaggggcataccgatagcgatagtatccattacagaggaaaagggaattgggggttatctactgaccgagcaatatctgtctggaatgtctggcaaaatgaactgagcttaacgcctaaactcggtgacttagaaaatgcttatcatgcaaagctgttctctgttagtggttatgcggcgacaagacgtgccaatctacatgagtcgaatcagcaagaaaagagccagaataggcgcattgatattcgatttacagttaagaaaccatctattgctgagctcgagaggattgttggaccgtga

SEQ ID NO: 10928 - DNA, 1452 bp, Vibrio metoecus
gtgagtctaaatataaaaaagctcaaagttagtttgcctgctaatccttttggtcaagccatcaaggactttgcacatctatcgagtcagctagaagtgctttctaagagtgccggtattgaaaacaataagttccgaactgcatatggagaagtatgtaatgcgcttgcctctaagaaaagagttgaggacgttatagatagctctgtacacgttcgcgccttagctctttcgctacatacggatgcgaagaaaaatgtcagctttacgcgcagattgcttaataaaattacagaaattgtaaaaaaaccaagctctttagtcatagagtcgttttatcagcatttcttatcagagtatgaccgactggcagacttggaagctacagcagactggttgttggaggctaaaaggctgcgaggcaatgatgagcagtttgatgaaaatatattgtcaaccaatggccccaagtggcttgcggaaagggctattcaaaataatgtcgattttgatcatttaattgcggagatgaagctggaacgttatgcaaatggcagatatttaacggcggctaaaggcatctactatattgagcagttaaacactataccattaggccaagatcatcctctcctagaggaggttcaaaaaacggtggtttttgattctcgatatgactctgaaagtttgttagggcatcaaattcttagaattttgattggccgatcgataggttctcacatcagtgagccttggatgaatgtgatcttagcaattggcggtgacccacgagtaccaagttcaaatccaagatatattaagtggtggaagagtttagaaccaaatctggttcaagctgttcgcggatggttatcaaaactagacttgaagttgtttctggaagcgttggaggattattcttactcttcagctaattacgagctacagagaatgtacccatctaggaaaagtttcttagaggggatgttcgatgcgggggttatttcaaatacccggctttatttgagtctggatgctgcaaggtatttgaagagaaattatgaccctaagcacttgccaaatttctctactgttaaagatggtgacaaatcgataatttatgtgcaaatgaacggcgctcacatggttgaggggagccatagttgttatttgtggttgtaccggtatcttgacccttccgtttgtgtttttaactataacattgatagtcctacgtactcacaactcacaatcggtataaacaatcaaatgtcaagattgtcatctggtgcagttgctaaaataacgcactctccgagtggttacgcatggcaacgaaaagcacttatagcactaagagagttaggtgttaaattgacgccgaaagatgtgctttcgaatgaagattatattgattttaaacaacgttatggggtgcgagagtggagttaa

SEQ ID NO: 10929 - DNA, 3450 bp, Vibrio metoecus
gtggagttaacctctttaatcagcaagttcttctctagctcagataaaacgtctcagtttgaacttatttgtgatgatagtcttgattttgcaacttccagaaaaactctagagaaaattaaagctggtaaagctgatgagtggataacagcgcagtatgttgcacttaaaatgcttgaagagcagggagatgtaagctcatttccagatggcttcattatgcctgccgatacagctgtcagactcgattctgagttgagggatttgtttagtttgcccccggtttggaaaggagtcattgacgctgatattcaaggaaaagctagtacacccacctttaaaattgatctttcggtcacaaccaaacaaggtcgaacaacactaaattacactgtggatgggcctttcattcggtttagtcaaaatgagcagtacctgctaacacccgagcagcttatggtctttattgcgcataaaacccatgtaaagtctgataggtctgaatatgataacttactgtacttacactctttgcaagaggcccaaaagaatggttgtaagctgaatctaaagcactttgaaaggctaagaatattgacaccaaataaaatcacagtagaagcagaattgaattctcaaggcgagctaatattgacgccaaacatggggcaaagtgcgagtcatgagtcgattcaaaaggttttggggcagttgcaaagcgacaacgcagttactctgaaagtgggtgatgaaatagtcttattttctgaagaaaagctaatggctgtaaaagaagttattagcaacagggtaattccccaacagcaagttaaagcgttcctggaaaaccctacagcatatattgatgcgagtttagtcgatcttgatttaggtttttctatcagagttcatggtgcgacagtttttaaacatgcttattttggagaaacggacgagtcaggtatagattggttcggagcctcccccacatctgatttgattaatccaatatccaagctgactgatagagttcgcgataaaacaactcttgaggacgtagctaagaagattgaagatgcacgacaaaccggagcaaccgtttttgattatgaaggacaatcatacgatatcagcgatcctgcagctgttgaaaaagttctaaacgaaataggtcacaagatatctagccctaatacagatctttctagctacggagaggcagaagacgccgagactgaatcagaaggctcagaaatacatgttgttgatattgatctaaatgacgaagagctgtctgaaaattctcctaaagttgaacaactgatttctgatatttcatgggatggtgagttaaattgggaaaaccacaagcggacaccattcccacaccaggatattggtgttcgttggattttaggcgttgaacaaaaaagcttatcagactcgaaagttagtggagccttgctagctgatgacatggggttaggtaagacttttatggccctctcagcaatagaacatatttatcaacgacaacaaattagtggtgaaacgaagaaacctgcgttgatagttgctcctttgagtttattggaaaactggaaggatgaggtagataaaacctttaaacactcaccattcaaagatgtagttattttgcaatcatccgctgagttaaatgagtatcgcatggggggcgtagagattcgaggccagagcgcatctgatgattgtttagaacccaaatattctttgaaagttgggaaatactttggtcctagccgtttagatctaccagagcgattggtaatcactacttatcaaactttgcgcgattaccagttctccatgtgtttgattgattgggggatcgtggttttcgatgaagcccagaacattaaaaatccaaatgcacttcaaactcgtgctgcgaaaggcctaaaagcggatttcaaactagtggctacgggtacgcctgtagaaaacagcttagccgatttttggtgtttaatggatacagcttgcccaggacatctgggtagctatcaagaatttcgtgctcgttatatctcaccaattcttaaagctgctggtgatgaagttgaagaaataagagctaggcttggaagagaacttcgtatagctgtcggggcattgatgcttaggcgcattaaagaggacaaccttaaagggttacctctaaaacatatgtatgctggtggagaatttgaaaactggaagtatttagaagaacttaagtcgacaatggttggctaccagagagatgtttacgaaggagcgattagccatcaactcgagaatgaagaaagtcacgcgcttaccactttgatgcggctaagagatagttcgttacatcctcggttaagtgatggaggtcgccttgatattcccaaaaatgcaaaatcagctagagctctatacggagaatcaggaaaattagtttccttgcttgagactttagacagagtacgaagcaaacaagaaaagtgcattatttttgcggttaacaaacgactgcaaagtttcttaagtgtgactttggggcagatctataacctaggtccgctctcagtgattaatggtgatgcaaaagctgtagcaaagcgtaaatctgtcccaactcgaaaatcaatgatttcagacttcgaagcaaaagaaggctttaatctaattgtaatgtctccagtcgcggctggtgtcggtttaactgtggtcggtgcgaatcatgtggttcatttagagcggtactggaacccagctaaagaagctcaagctacggatagggtttatcgtatcggacaggaaaaagaggttcatatctacatccctctgttgcatcaccctgaatttgaatcatttgatgtaaacctacataggctacttacccaaaaaacgttgctgaaggatgctgttgttacaccagaagatgttattccacaaccagcaggtgtcgggggagtagtttctggtgatttgattgataaacgtattacagcggctgaacttgataagttaagttggcagcaatttgaagcgttatgtgtagaattgcttgcaaagattacggatagtgaaagcgcttggttgacgaacaatggtgctgatcatggtgctgatggtgtactacttaataacagtggtaatattttgcttcaggctaagtttacgcaacgacaatatgatggttataaagggatacaggagattcattctgctaaacctatttatgaatcagcaatgagaagttcttttgggcgtttgatttttgttactaattcacctttgttagctaagcgaactcatgaaattgctgccacatgtggtattgaagttttgggcagaacacagctgttaacttaccttgaagaatatgacattacactgaaagacattctgtcaaggttggggaaagatcgattaagagtttaa

SEQ ID NO: 10930 - DNA, 2193 bp, Pseudomonas sp. WCS358
atggatttttcgacgttggtgcacctatggggtgcagcaagctctgagcagctgatcgcacccaaaatggttgttggtctcgttttcattctttgcgcttggtatttcgtccgttacttctgtaggtcattcaagctgagcgccaagctgaaacgtttgactgcaagcttgcagagcgtaaaaactctcgctccacctcttcggcgctctgagctggaacgtctgttcagtggcggcaggctggagcattcctggcgcgagtatgctgaaacgctgcacgatcagttcgagctaaaggagggcgaacaggtccttgtccgatcgcgagccaccgcaggagctgcacacttcttctcgccgcaaagtgtggttgataccccgctgggaaccgaattctataagcacctgcctggtatcttgactggtatcggtattgtcggaaccttcttcggcttgatgctggggcttcagcactttgacccgagcacgcctgagcaggttaacgctagcgtggataagctgttgaaagacgtgctgttcgctttcatcggctccttcatttcaatcatggcctctatcgctgtcacgcttactgaaaagtggcgcttggggcactgctacaagctgcttgaggcactcaacgaaacaatcgacggccttttcgacagcggagtcggtgaggaataccttgccgagctggtgcgatcaagtgctgaaagctcggtgcaaacccgccagctaaaggacagcctggttaccgatctgcgggaaatgctacagaacctcgttgatacccaggttcgtgaaagcctcaaattggcagataccttgtccacgacgtaccgtgactcagggcaactgctggccgaccaagtgagcggcgcaattgaaaatagcctcaagtcgccgcttgaagctatcgcgggagccgtgcaggccgccagtggcgatcagtccgggcaggtgcagaacctgcttcaggatgttctggtggcgttcatgaacaagcttgaaggtacgttcggccagcagttcaatggcctgcacgagttgatgggccagtcggttgctgccatgcagtcgatgcagcaaggcttctcgacgctgatccaggatatgcgttcggctagcgagtcttcgaatcaaagcagttcgaccatgattgcccaactactggccgatatgcaggccggacaaaacgccatgcaagcggggatgaacgagatgcttgccaatcttcaggcttcggttgcccgtatcggcaacgaaggcgagggggctggcgcgcgaatggccgagcaactggagaagctgtttgctcaaagcgaggctcgccagcaggcaatggcggagaatctccaggcttttgtcgagtcaatcaagcagagcatcggccaaggccaacaggaaaccatggccaaaattgcaggctcggtcgaggtgctgggtgagcagctttctgcagtcttcaagcaactggaacagggccagcagcagatggatcaatccacccgcgctgcccaggcagacctgcaccaaggtacccgcgacctggtgggcggcctcgacgagcaggtcaaggcgttgctgcagacggtttccgagcaacagaagtctgcccaggacactgtcaatgcattgagcgcccagacagagcagcatctgcacagcatgcagctaggtgcggacaagatgcgggcggcggctgagagatttgaaactgccgggcaaagcgttgtgcgcgccagtgagtcgactgcagggctgatgagtacagttcagggcgcaggggctgagcttgcacaggcgtcgcgtgagctgaacaccgttgtcgcggactatcggaacaatcgtgaagcgttagcgaaaacgctcgctgtcatcgaaggggtagttgccagtgctcaaggggaagccagcggtcgcagccagtatctccaggacctgaaggttcaaagcgagcggatgcaggcgctcaaccgtgaagtgtatgagtacctcgaaaacatcagtggtgtgctgggtaacggcttcaaggaattcggtgaaggcatggaccgggcgttgagacaaaccctgggtagcctcgacaccgagctcgataaagcagtcaagagcctcgctggcggtgtggaaggggtcaaggaaagccttgaagacttcggcgacatcatggaacgcatcaggcggtaa

SEQ ID NO: 10931 - DNA, 744 bp, Pseudomonas sp. WCS358
atgtttggtaagcaaatgccttcggctgcccgttcaaaggacgagggagagaagcctttctggatttcctttgctgatttgatgaccgcgatgatgattctgtttctcgtggtcatggtcgcggctttgagctccgtgacacagcgtatcaaccagtcggagcagggggagaagcagcgtagcaaggacatcagtcagatttgcgagcacctcagcctcaaggcgaagactgccagcaagaccatcgtcgtggactgcaaggacaaccggatcagcttcggcgatgctggccgctttgggcataaccagtacgcgctgagtaacgatggccaatcggcacttcaggaggtcgtgccgatgattctggacgcggccaacagtgaagaggggcgcaagtggttcaaacaggtcgtgatcgagggatctaccgataccgacggttcctacctttataacctgcacctgtcactgcagcgctcggagtgggtgatgtgcagcctgctcgatagtcgcagcccgctccaggtcggattgtcgccggagcatcagcagcagatcagatcgatgtttctggcgggtggtgtgtcgttcaacaatgcaaaggacaccaaggaagaaagccggcgtgtggagttgcgcatgcagttctttggcttgaaggagaaggagggcaatctcaagcctgatgtgccggtgttcactaacactgatgtggaaaaatgtcagttggcgatgaaccgatga

SEQ ID NO: 10932 - DNA, 1629 bp, Pseudomonas sp. WCS358
atgaccagttcgatcgcgaggctttccgccgccattagccaaagcctgtcagctcatcgcacggtgcaggctccagaaccgttggagcgatttccccgtctggctgctgcgggagtcgatctttacgagcgattcgagcgcgcagaaaaggccttaccgccacccgaagaaaagcgccgtgctgcgataagcaagtttcgcaatgtactaccactcaacgcctcggaatggcgcttggttttcgccggcctttccgacaaaagtgagcgcgtcgggccgatactggacgatgaccagctttatgcccgggtgcacgaagaagtacatcagcgtatcgaaaagcgaagactgagccgccgggattggttggcgctgtgcttcagctactttggctacgacgctgccaagcctgcgcagaatgccaattggtgcctgttgcgcgaagacgttcagctcggtttcgaatgcgtcagagaccagcagaagcgagtgaaggaatgggtgcagatcgttcagcaacatcaggagcttttttccgagcaggcaggtgccacgctgggtgaccagatgttcaagggcgagattagcgacctttcggcattgcagacgattgcgcagatcccggacaacagctggctgtggcgcagggtttttaccgtactgatttctcgcattttcatgttggatgacgccgagttttctcagcgcttgcccgatctggtcgacatcggccgacagcacccgcggtacatgaacgacattctgagtgcatgcctgtcgcgttaccacttggcagcttatcgggagaagccgtcgtcgctgctcaaacagctggcgctagacaattggggtagtccgcagatccgctctagacaaaacagctggctgcagtatgtcgataaagatgtctgtgccatggttgtggcgtggtttgcgaaggaggatctagagcacttcttcaacctgctcaaaggggaggcagaagtcgatcaatctcgtctgcattattggctgcgttttgccaaccagatgagttacacccggattgtcatgggttcggatgcctggcatgacagcgggcgagacttcgtccacttccgagagaagaacaaggggcgcctcagccgactgctaggcgggcctggccataacaatgccgtcatcatgcagatcgggaactactttttcgtggaattctccggtacgggtaatgcctgctatgtgtatcaagcagacaagtcgcctttcaacccagacaagatgcagctcgaattggcgagcgagctgaagcagcctaatcgtgcactggatcgaatgcggcattcacccgcacccagccgcccggaccgcatagagggttggctcagcaaattcgattatgccctcgaacaatggggtattcgtgtacagagtcaggccgcagcggcaggctcagccaaagcgttgccttttgaagaccaggtccgtgacgctctaaagtcggtcaaacacaaggtctatgatcagcgcgagcgcggcggtgcatttcaggtccagcttgatgatcatgacccggccgcagtaactgcactgcagcgcctgggcttcaggcccgtcaataaccagccactccggttctggagacagtaa

SEQ ID NO: 10933 - DNA, 3249 bp, Pseudomonas sp. WCS358
atgctcaagcgtttcctcaaaggcattggcctgcagcctaactcggcagcagaaaatactgagccggttttttccattgaagagcagggcatctgttatcccctgagcttggcggagagcacggagtcctggtcgctggcgagttaccttgatcagctggaagaagaggagttcgtctcccagttgagcgatcgctggctcttgacgtgggatgagctctaccggctgctggatgagccagagcacgaaacaagcctgccactattggggttgccgccgcagacagccctcatccctcaattgagcagccagggcagccttgcctccgacgatttcaaggtctccatcagtggctggcgtgatccgcagtccaatgccagcgtgcatgtgcagcgaacgggggccatcgttcaacatcagggagccacagaaacgctgcctgaggcgtcctggaaactgaccggtgctatacggcagctttatcaggcacaacaaaatgagcccggtgaagtgaccaaccagatcggctgggccagcatcagaaagctggcgcgcaaggctggcgctggcatggatggcttcctggacaagaccgtcgttatcaaacccgagaaactgcggctcaacccacgaaagtcgacgcttggcgacacaccagttatcgagttgcaaccgagctttgatggccagccggccaactggcttgagagctttgacggtgccaagcaggttcaggatcggtaccggataacgggtgacgatggctcgctgactcatgttctgattgagcctgaagtcaaatcggtactggagtacgtgcgttccttacccgggcgtcgggttgctggtgacgatgccctttcattcgtccgtaacccttacagcacactcggcgaaagtgccgcacacgtgctggatgccgaagcctatgaagacgagctcgctgaggccggtattttctttcatcgcttccatctggaacccaaactggatgaagcgggccagcgtatcgagcaggtaacactgacgctcgagccgatttctccaaccccgcaggcgcctatcgaaattgagttcaaagcggcccatgaattcgcgccgcttgtgcatgaactgcacctgaagttggccgcctgcatgcctgcaggcttctggcagggctatgagctggaactcagcgattttgatttgcgccagttggcaggcatcaatgacctgctcaagcgttggcaaaacgaagcggccggaatcgagtttgaatcggtcctggacctttctctctacggcgaccgtgtgacaggcattggtgaggcgcaaagaattacttcgcctttcctggtcaaagaggcgaccgagaactggttgccgaaagatgtggcagcgctgggcatcgacgcagaaatcctggggcggtgggatccttccgatcgtgctcaatttgaagcgtttgggcagcggctggatgaagcacgcgctgccggtgatgacacggtctgtttgccagagtccgaaacaccactctcgatcgccgcagcagaacaactgttggatgcctggtcgaagaagattgcacctgtcgagaccggccaagttgagcaacgggagaaagttggccgcgccgtactacaaatcggccacaacattgacgagccgacttacgtacaggtacgtcaagcagcgttacgcgccgctttggatgcaacgccagagttgcctggtttgctcaagcctgaggtcgttctgcgtgaccatcagctgcaaggcgtggcgtggttgcagcatttgttccgcttgtcacccacggacgtatcgggttgcttgctcgctgatgacatggggcttgggaaaacgatccagttgctcaccttcctggtctggtacttggaacagtacccaaacgatcaaccaacactgatcgtcgctccggtttcgttgctcgataactgggagcgagagcttcaccgtttcttctttgctgacgcgctgcctgtattgaagctgtacggctcagccttgagtgcagtgaagttcaagaaagatgaaatcccagcggacttgaaagccaaaggcatcaagaacctgctgcgtccaggttggatgggcgatgcccgaatcgtcctgacgacttacgagacactgcgtgatcaggagttttccctggcgcgccagcaatggtccatcgtcgtgtgtgacgaagctcagaagctgaagaacccggcggcactggtgactcaagcgatcaaagctatccctgcacgcttccgagtggcgtgtactggtacaccagtcgaaaataccttgatcgatctctggtgtctgttcgacttcattcagccaggatttctgggcggcttgaaccagttcggtcgcgactatcagcgccccatcgaagccgcactggagcgtgatacggatgcgctggaacgcctgcgtgggcttatcgaaccgcagactttgcggcggaccaagcaggatatcgccaaggacctaccggccaagatcgaagacgcagcatgccgttcacttggcatgcatgtcctgcagcgtaacctgtatctgtccgaagtatctgtatacagccagaagcagcagatcgaagagcagctcgatcagaagagctccggcatgctggggttgctgcacaagctcaagctgatttgtgcccatccttatagcgttcaaccagacacgcggttgcgcgacaactccccgaagcttcagtggctgattcagacgctcgagtcgatcaaaagggctggcaacggcgacaaggtcatcgtctttacggagttgcgtgatattcagcgtgaattgcagcacgcgattcagcagcatttcgggtttcgggcgacggtcatcaatggcgataccagtaccagcagtcagagcgccaatagccggcagaggctcatcgatcagttccaggagctgccaggtttcgccgtcatcatcctgtccactatcgccgtcggattcggggtgaacgtgcaggctgccaaccacgtcattcacttcacgcgttgctggaacccggccaaggaagatcaggcgaccgatcgggcttatcggattgggcagcagaaggatgtgtatgtgtactatccgacggttcgagatgcagcgatgccgacgttcgaggcgacgctggatgagctcttgagtaagcgacgggcgttggcgcgggatatgttgagtggggcttcggagcttcatgcttcggattttgagggattgctgggggcgcggtga

SEQ ID NO: 10934 - DNA, 1851 bp, Paenibacillus sp. TCA20
gtgagtgtatcttcaattttcgtaattatcgtctgcgttggagcaattttgattcttggaatctatcaacttatccgtaggtttaagcagaacaaagaggttctacacgaatctgaaatgattcagcaaaaattgattgaaatacaaaaagtagatgatataacggaacgttttaaccagatgaatgactggatcctaaatcaggaaagtaaatatgtgaagaattatgttgtacctgcttggaaatcattccatcaaaagtatatgagccaaggagtaagcttaaaactcgttcctgacgtttacgatttcttcgtagaggaagaactagtccataaatatggaaatcgaaagttcgttgaactcattcctggcatgttcctatcgattggtattcttgggacatttgcgagtcttgccgttggagtcggatcgctagatctcaatgcgaattctgaaaacatgagagcaggggtaagttcccttttgagtggtatgcaatcaaagtttgcttcgtcaattttcgggatattcgcttcgatcacatggcaatccctagataagaaacttttccttccaagactacaacatgcgtacttcagaataagggattcgtttgatgaagcgttcccaactcaggatcaaaatacatttctagtacaaatgctagaaaaccaaaagaatcaaatgaatgacttccaagtatttatgtcagagcagatgattccgcaaatgataaatggttttaaccaaagtctgaaccaatcgttgctgcctcctatggaaaaaacgcaagaactgatgaatgagttaatcacaagtgcttctgtaaatcagatggatggcgtaaaacagctcacctcagaggtcatgaattcattaaatgatcttactggagaacatatgaagcagttaggagaagcattggaggcaacggtagagtggcagaagaaagtccatgaagaaatgacgggcttggtagattctatgcaggaggctgccaagaaccaatcggaaatggtcgataaaacgacagtccttacccaagagatacataactatacggataatataacaaattatcagaaagtacttgagggaacggttgctcaactaaatgatacaacatctacgaatagtgagctgcaatctgctactagtagcttattaggaaaaataattgaagaaagaaatgtgtttaacgcacactttgacgaacatatatcaaaacttcaaaccaatgtagtatctattgtggatcagacagagaagcaagtagtcgtacaagagttattgggtcaaaacttggaacgaatatcagaaatgacattgagccaggaacagttagcagtttccttatcagaacaagcaagtcatacccaaagttctagtgaagagcttggtaagctcctgattcattttgagaacaatgccgttcaatataatgatctgcaggaaaaaatgggagatatgttacagcaagcagagaaagatcgtagggtcttcgatcaactcgttgaacgtatccaaacgaatttagcggagcaagtggaagatatggacgagcgcgtagagtatttaggttcgctctggtccgaaaataaagagactatggacaagttaagtaagcagctgagtacttcaatgagtcaatttacagatgacatgcatcgcggaattatgagaacgttcgagaagtttgatgaagagcttactacgtctgtgaatcttctagcaaaaggtgtggattccatgagagacggattagttgatatgccagatgtaattcaagagctcaagcagtctgtaatagaaataaataatcaagccaagcgtgctacaaccgtttaa

SEQ ID NO: 10935 - DNA, 777 bp, Paenibacillus sp. TCA20
gtggcacgaggaatacggggagcaaagggtagtaacggtgtaggagaagaaaaggaaagttcctggatctcctacacagacttaatgtcggcattattaatcatttttgcacttgtgattatgattacaatgtatgacacgcaaaatgcctatgagcagcaacaacaagccatggatgaagctgcggaagcacttaagcagaaggaagaagtcattgcccagaataaccagttgattgaagaggtagttggagttaagtcgaaaattatcgaagaattgatgcttgcttttcaggattctaatttagatttgcaaattgatcagcagacaggagctattcgcttctctggaggcgtattttttaataaagacagcagtactgtttctgttaaaggaacagaataccttgaaatgtttatacccaaatacattgaaattttattatctgaccaattccgggatgagattgctcaaattatagtagaaggacataccgatagtgacgggggatatctatataatttgaagctttctcaagatcgggctttgtccgttgtagaagaagtttttgcaccgacctttcctaagttcccatatcaagaggatctcaaggctgtcattacggcgaatgggcgttccttcagtgtgcctatcctagataagaacgggaagatggatcaagataaatcacgtcgtgttgagttcaaattccgattaaaagacgaacagttacttgaaaaactacaaggattaatggtggaagaagatggaggataa

SEQ ID NO: 10936 - DNA, 1275 bp, Paenibacillus sp. TCA20
atggaggataaatcatatatttttcattttgcatttacaccgagcaaattgtctgcggtaagaaaaaaggtggaagagaaatatcgtgacgtggatatgctgactgcttcacagattagctatctacggcttccaaaaattctggaactgattcggagtacatctgaggatcgtctggaacaaatggcatcagagttttttagagggagagactattcggttctgacctatagttatccgtataccaatgaatcaagtgatgtagagaaaaagattaatatggtattggcctacggttatactcctggcaatgcaaatatgatttgggagaagttccagagagattacaaacatatttataccgaggacttactaagaaggtttctacttaaagatgagggtatttcatttatatactcggattatacagatgctgaactaaaggaattgcttatcccggcttttatgcataaggcaggaattgctcaagggctattacaggttatgattcataaagatcctaagatagctgagtttttgaagaagatgaagatcaaaccagagacacctttagaagattttttggtctatgagagattaaaagagggtctcagtcgagaggatttcttagaacaaaatactattgaatatattacccgcatgtttgaaaagtacccaattgaacaatatcaagaactcatgaagatttatctggaaggtcgaacttttgaacagtttcattttcagatcatggatcaggcgattaagcgacttcatgatcctagagaacgggatgaagattggcggtttttatcggaacaagcacgtgaagaggtaaataaatggctagtggaagctgagcttgaagactatttcgatactgagagatttgaatattggaaacgttatttacgagtaatggataatgtgaaaactctaaaaagaaccaatgatccgaaagtgatttttctatattttgagaacttcgtagttgtggaatttggcgaaaatggaaaggcggtttatttctattataagacagggtttgagcgtttcattctaccacgaactactagttatgaatatatgagaaaaggtacatcagatagggagtcattattgaaagaaagatatgagacttttaatggagaacctttatttataattaagcttcatcatactccaaagggaatgtggatggatagatttaccagatatatgcaaaactatctgagtgggaattacagctacacagaaaggaataaaggaccatga

SEQ ID NO: 10937 - DNA, 2754 bp, Paenibacillus sp. TCA20
atgagtttttggagtaaacttaaaaagagaaccaaagaacctgaatataatgcaattacgtggcaattgggtaaagtgccgcagggacttagtattcaacttttccgtgatggggggcagacgatagtctctcccccacttcgtatgtcagtagccgaaataagacaacagccgaatgtagagcttctggagctcattgagtccatgtggtacgaagaattactgcaggagtcagacaatagatatttacttccttatgaattgcttgtcgaggccccttcagaaatcagagaaacacttggtgtaccggagcctgttcagcttgagctgtttctcggtcacgaaggattcgtaggcagtccccgttttcagtttaagcttgaaaaacatctgccagcttggaggcatatagagaaatcatctcgtcagattggaccgtggatacagcttcccgatcgctcatatattctaatggcattggaacaatatcaacttcatagattaatctccgaggaaacacctgatgtcatggataaggagcaggtctttgcatacgtagccaaagtccagtctcaggctagacagcttagtattcctgtagatgattatttacagaaacaaaattacaaatttgccgatgggctagatcttgatgttagctacgatggaagcgaaatagagattattcctaaatatctatccagtgatgaagtgcctgataagctgcttgatgagatggctggaaataactctacctattatagcgattcagaaacagggaagatttttgtctcgacggatgtagttcagcaagctaaggtagtaaaaaatagagcacctatccgaggacaggatatccctcgttttgccgagaacccggaagcctttctaccagagctcggagagctggatttatccctgtttggggagcgagttagatctctaggtataagagtgtataaggcacaaccttatgttcatgcagaagaaaaaggacgaggatggtttgaactgaatgctggtgtctcattagttgattccgagggagaaaccaatagcaatttttctacagagcagtttaaggatttaattaataacgctagagaagctggtgccgaattcattgagctggatggaaattggattaaggtcccacatgatgtggaaaagtttgaggaagcagtgggtcgtttccatcaggcgctgggtgataaacctgaagtggatgttaccaaacttccttacgtactagagatttttgaaaatataacacaactcgaatataatcagccgattttggctgcacaccaggaaatgatggatcaagggattttagatcctgctcctcctacttactttaacgcgcaattaaaaccattccaacaagacggatttgtgtggatgaaatctctccactatcgtaaattgggcggactcttagctgacgatatggggcttggaaaaacgattcaagttgtgtcattcctaagttatttacatgagcaaaataaacttacacctacgctcatcgtggtgcccaagtctcttatagataactgggtcgctgaagtacataaatttgctagtccactggctagtaagatttatatacatactggagttcaacgcttgaaggatccagagagattacaacagcaaccgattactctaactacctaccagacactggtgagagaccagcttgtcttcggacaagtagcatggcaggcattagtttgtgacgaagcacaagccattaaaaatccaacgacagctgcaagcaaagtcatcaaagcaatgaacgtaaagtttagactggccatgacaggaacacctgtagagaacggattgagcgaactttggtctattatggattatgtgcaacccgggctgcttgggagtctgagcgagttcaagaaggaattcatggataaattagaagctgaggaaagagaccgggagacggagcaaagactgctggctcgaattaatatggtgtacaaacgtagaacaaagtcagaagaacttagtggtcaattgccgtccaagagcttaattgaactacccgtatcacttggtacggaacaaaaacagctgtattcatctattatttctcaagttcagtccaaatcattatctggtttgcaagccattcaacaattgagagagctttgttctcatccggctcttctggttccaactttgaagtcattacccgtaggtgctgtacctaagctcgcacaaacgatgaaattacttagagaaatacaaagtaaaggtgaaaaagcacttatttttaccgagcttcgtcttatgcaagagattatccgagatgcagtacgtgaagagtttcagattgatccttttattattaatggggtaactaatcgtagacaagaagtagtaaatcagtttaatgagaaagctggatttgatgtgatgatcttgtcaccaaaggcagcgggtacagggctaacaattactgcggcaaaccatgtcattcactatacacggtggtggaatcctgcggttgagaatcaggcaacagatcgcgtgtatcgtattggtcagaataagccagtccaggtttactatccaatcgtaacagctgagcaaaattttctttcttcggggacagtggaagagattgttcatcggattctatcggagaagcaggagcttgcttcttcgattattgtatcctctcggaagctggagatagagaatgaagtgctggagagtgcatttcaatag

SEQ ID NO: 10938 - DNA, 2025 bp, Burkholderia territorii
ttgaacatccagtcattacttgctggcgtgccgatgcctgcacttatcacgggcgcgtttttggccatccttgtcgttattgtcgttgtgtttttcttcggcccagcgatacgtcacctgcttcggctgcgcgctattcagcgtcgcatcggaagcttcgaaagcggagacttctcttcgcagtttgaagcggtattcgcgagcgaccgtcggctcacccatctctggaacgagtatgccgaatcattgcacgttcagcgggaagagcgggacggacaaatggtcgtgcgcgccgtacgggccaccgcgccggccgaggtgtacttcaacagtcaggttgttgtcgacagccgcttgcgcaccgagttttttaagcacgtccccggcattttcactggtattggcatcatcgggacgttcagcggactcatagaaggccttcacgcgtttcaggtaagcgagaacgctgcaactgttcgcggtagtcttgaatcacttatgcattcggtgggtgaggcgtttcttgtgtctgcatcggcaatcgccgcggcaatgctaaccacgctcttcgaaaaatttctccttgcctcgctgtaccgacgtacggaagaaattgcacatgcgattgatgcttcctttgaggcgggtgccggagaagaatacctggcacgtctagtaaaagcatcagaggagtcggcaagccaatccaaaattttgaaggacgctgtcgtcaaggagatgggtgagctgctgcgcgagttgactagcgcgcaaatcgaagcgagcaaagaacaacatgcactcgccgcagaggcggggcgccagaacaacgtcgctctcggacaggttattgccgagagcatccaacagggcctcaaaggcccactcgatgaaatcgcagcgaccgttaaaaccgccagcggtgaccagagcgcaagtgctgggcggatgttgcaggacgtaatgacgagcttcagccaacggttgaatgacttgttcggtggccaaatttcaggcctcaccgagcttaatcaacaaacggcccagagcattcagcaggctgtgagcacgctgcacaccctggtcgcgaacatcgaggcttcgagtcagcgttcgacggatgcgatggcgcagcgcatggcggaggccattgaaaagatggagtcgcgacaggaggcaatgaacacgcaatcggctgcgttcgttgagcagctgcgccagttggttgcaacgtctcagtcagagacaaaccagaaattgcaggcgacgttggagacgctcagcactcacgtcggcgaaatgctaaccacgctgagtggcgcgcagaaagaagtatttgagaacaaccgcgcacgcgagcatgcaatgtctgagcgcgcgagcggcgtagtgaccgcgatgtcggaatcgatggatgctgttgtcaaggagctgggcgtggcaaccacgcagatggcgcaaagcgtgaatgctttgacgcagtcgacaacttcgtcagtcgaccgcatgaatgctggcgcggaagcgttgggcacggcgtcgcggaacttcgccgcggcaggtgagcgcgtcgccggtgtcatggggcaaaccgccgacgtctcaaccaaactcgctgcgacagccgggaatttgacgagcggtgcgggagcaatccaggaactgctgagcgactaccgcgctcatcgcgacagcatcggccagcttgttacggaattgcgcgccaccgtcgatgctgcgagaagggaagctgcgctgaccggtgacattctcaatcgcattgagacatccacaagccaccttggagcggcgcaaaagcaggcggacgagtatctcgctggtgtaagccaggttctcgctgaagcgcacggcgcttttgcaactgaggttaagcgtacgctggaaaaagcgaatgccgagttccatacaaaactgacctcggcagtggggttgctttcgtctgcagtcggtgagctggaggtaacgctcgcctcgatgagcaccctgacaccagcgaggaactag

SEQ ID NO: 10939 - DNA, 711 bp, Burkholderia territorii
atgtttggaactcaaatcgtcgtcaagcgcggaagccgcgacgaggcggaaaagcccttctggatttcctttgctgacttgatgaccgcgctgatggtgctcttcctcgtggtcatgggggtagcgctgctcgccgtgacgaagaacgtgacggagaaagaaaagcgcgaagagcaacatcgaaaggacatagagcttatcctcgaccggtttcaaactgccgccaagcggtacgacggtatcaagatagaccgcaatcgacatgttatcgattttggtgaccgcgcccgttttgcgttcgggaaatcaaacctgacgcccgagcaggaagcggtgttgcgtcagttcgttcctgaaatcctgacattggcgaacgatgacctgggcaagcgcgtacttaagcgagtggttgtcgaaggctacacagacagaaccggcacgtacctgagcaacctgaatctgagtctccagcgcagcgagcgggtgttgtgcagcatgtttgcaacgaccggtacgagtgtgctcgacgaggcgcaaaagctggacgtgcgaaatctgtttttggtcggcggatattcgttcaatgactcgaaggaaaccgacgaggagagtcgccgcgtcgagatgcgtcttgagttcctaggtgttggcgaggataggtctccggccccggcgcaatcggggaactttggcgactgtgcattgcgatga

SEQ ID NO: 10940 - DNA, 1428 bp, Burkholderia territorii
atggaggaccgaccacgcttgcagcatatcctggacagcgttgatggctacataaccaagaccgcgtcatacaggcgctgctatcaaggactcgcaaagagctacttcgcctttgacgtagatgcatgtggggtggcgtcctcgggaaggaagaactggctgaccctgcgagactaccttcacgaccggaaccccaagatacgtgatagcaggtcgagcccttcatgggtcgacacggcaatcgaaaacagacagctttttgatgagtccccgtgcacacgatatgtgggcgagttgctcgaaggcgatacgtcgcgcatagaccatatttgcgagcagcttcaaatcggaaaagagtcgtggtttctgcgccagctcgtgcttacgcaagttgagggcgcgacgaagctcgatgacgatgagtttgtgaggctgctaccccgcttgcttggtctgcttgcacacaatgaggtgctccgcgaccgaggaacgattctggtccttgaccgatacgctgaggtctctggcacccccttgcacccgagactgcgcgaccatgctgttgcctggtggggcaatccgtggctaccttcaaacgcgacccgatggggtggcgtcgagcctgcagctcgagcaatggtctctgactggttgaagctcgaatttatcgagaccttctttacgaagctggcggaggacggtcttgccgaccgtcggcgaatggagttttggaagcgatacgttaaatccatcgatgacatcgagttcgcattaggctcgactgcacgcaattcacgtgaaccggacctggtcgcgctgcgtaagagaatgaagggcctgactcgcgaactcgacgcctctggcgcgaacaacgccttcattatgacgatgggcaagttggttgctgtcgaatttagtggtctcggaaacgcgttttatggctatgacgccagtcgttctctgccattcaatacaagtcagacattgaagctcgggaaaaatgaacgcaactcgttgaagcaatcgaaaagcatgctgtggctaaagcatggagacggcattcatggctggaatcgatgggaggagatgttcgaggcaacactgcgtgagagttttcagattcttccgtcagccgaaactttgcctgcttcaggtagagccaaggccgcaaacgagcctacgaagtcgacgagtaacgtctcctcccgtgagaacgttggctcttcgcaaaatcgaaccgaagcacacgaatcctactcacacgttgcgctcaagcgattcgcggcaacgcatggtctgcaaatcgaggacaggactgcactcggcggaaacttgtgggtgcgcggtggtgaaggtgacgagcgtgtcggccgcgttttgatggaatggggcttccgtgtgaagccgggcaagggttggtggaaataa

SEQ ID NO: 10941 - DNA, 3792 bp, Burkholderia territorii
gtgttcaagttattcaagcaagcaaaagcgcgagacgtcatcacctggaagcggcactggtcggataagggcatcgttctaactcggcgaactcaaagcccgggagcgacggtcgacggagacctcgttggcggctacctcacacaactgaccgatgatggcctcgtcagcccggtcgaggacgagttcttgttggattggcagtctttgtacgacatccttgaacaaccggactacgggcagctgcgcgatgttctccgaatcccgcctttcacggaattccgtcagcatctgcgaagcaaccattcgttgaccgaccacgagttctctattgcgatagatggatggcgcatcgacggcggccgtgaatttcgtggcactatcacggggcccgtgatgttagaaggcgccgtagagatgctgatgcgtcccgcgcaatggaagctttttaatgcggtcattgcattctcgcgccgtggcgacgaggaccactctgatttagccaatcggcaagggtgggggcggattcgcaagctcgcagtcgatgccgaagcaagacttgatgattttctctaccgctcggtagtcttgagtccggaaaagctcaatataggtctgcggcgctcggtggcagttgtagacgaccacgtagtcgaaatcgagccgagcttcgacggagcacctgatgactggctcgacacgttcgacagagcacgagaagttcgcgaccggtacgacattacaacgcaggatggaatcgtccaggttctggtcacaccgaaggtaaagactgtgctgcgggaaatccggcgattgcccggacggcgggtggcaggttctcgggcccaggcctttttgctcaaccccttcgcggctctcggtgcagacgcgattgacgtcatcgaagaatcacaattcgaacgcgctcgtgaggacgctggcctcgactacgaacgcttcgtaccgacgttcgagcgaaatgctgcgggctatgcagtacgtgtcggcctgcttatcgaatctgcggtggcgagcggaccgacctcctcgaagacgcattggctcgacgacgacgaactttccgcgttcatcttggctctctccaggtcgctgacgcagggccatcaactgcttgcctggcagggctatgaccttgctctgcagggagattcggagcagcaactcaaggaattgtcggctgcactggcacagcgtcgcattcctccgacgctggtctcctacgctcaggtccacgacctggctggctactctgcgcgcatcgaatcgattggtgtggagaagccctaccattcgccgtatatcgcgaagaaggacgagggcgaaggttggtttcctgacaacattctgcctgtcattgtttatcagtcgaaggacggtggcgagccggtggccgtgccgaccaacaagcttgctattgagaagctgaagaatgatgtacaggtcgctgacgcgaagggcatggtgcagctcgacgtcccttggctcagggaccccatttcgctggctgacgcgaaagaaatcatctcgacgttcgagagcgtcttttcagatttggagtcgggtaagcagtttgacccggaaaacgcacgcaaacggcccagcgaaagcgtggccaaaaagcagctagttctgcgtgcaaacattcaggcactcgaatacgaagagttgcgtcgtgaagcgctgcaggccgtacctgctcgtccgaagcttccggaaagcattcgcacggagttctcattgttgccgcatcaacaagcgggtctcgcgtggatgcagcatctcttcagtctgcaaaccgattaccaggttcgcggcgcaatccttgcagacgacatggggctgggtaagaccttccaattgctggcgcttatggcctggttgctggagagggaccccaccatgaatccaatgttggtagtcgcgccggtctcactgctggaaaactgggcagaggaagcgaacaagttctttcagcctggagcattgcccctattgactgcatacggcgaaagtcttgccgcgtttcgcgtaccgcgcagccagatagaccaacgcttgcagaccgaggatggcctggtcaagtttttgaagcccaactggattggcgatgcgaaggtggttttgacgacatacgagacattgcgagacttggagttttcgtttgcggcgcaaaagtggtccttgatggtgtgcgacgaggcgcagcgcatcaagaacccagccgcaatggtgacccgggccgccaagaagcagaatgtcgcgttcaggattgcatgcaccgggaccccggtggagaacaccttggccgatatgtggtgtctcttcgactatgtgcaaccgggcttgctcggtgccttgaacgactttggtgagcggtaccggaagccgattgaggcgaagactgacgaagaaaaagctcgtgtcgaagaattgcgcgctcgcatctcgccccagattctccggcgcctgaagaccgaggtcgatactgggctacctccgaaaatcgttgtcgaagattgccggcggctctcaatttctggcgttcagcggaacctctacgcgaaggcggtggatggcttcaaacggcgccaggagcccaaccatacgacgccgttcaagaatcacctcgggttgctacactaccttaggctggtctgtactgacccacgagtgcacggtctaagcgtgttcaagccggaaccattgggcgactatcgtgcgaaatccccgaagctcaattggctactcaggcagctctccgaaatcagagcgaagggcgagaaggcaatcgtcttttgcgagttccgggagattcagcgactcctacagcactacatcgaagccgagttcgggtatcgtcccgacatcattaacggtgatacaagtgcgtcgtcgagtcacgtcgccagtcggcaaaagagaatcaaggcctttcaagaaactccgggcttcggtgtcctggttctttcgccggtcgccgtcggattcggcgtaaacatccaggcggcaaaccacgttatccattactcgcgcacatggaatccggccaaagaagaccaggccaccgaccgtgcgtaccgcatcaatcagacgaagccggtgtacgtgtattacccaactgtttgggctgacgactttatgactttcgacgtcaagctcgaccagttgctagctcataaaagagggttgtcagaggacatgctcaatggcgccggagacgtggcgccgtccgactttaacctcacggacgtggtgccacactcgcagagcgacggcctggatgaacgcatcacgctggatatggcccagcgcatggggtggcaactcttcgagtgccttgtaggcgcactttggagcaagcgtgggtataactgctaccggacaccgggcacgaatgacaacggcgtcgacattgtggccattgacggaaatcgaggtcagcttattcaggccaagtccagcggaattgacggaacaaaactcggatgggacgcagtgaaggaggtggtggctggcgaagcgttctaccgacgtaggcaccccaatgtctcgttcgaaaaagtctgcgtcacaaatcagttcttcaatgcgcaggcgaaggaaaacgcgcatttgaactctgtcgagttggttgaccagaagcatctcggtgacctgcttcgagcgcatgaaacaaccatgctcgaggtcgagcggatgctctttgtcgaatggcaatcggcggatgttcgatgtcggcacccacctgtgtcgcgccagtccgttgtttag

SEQ ID NO: 10942 - DNA, 2025 bp, Burkholderia territorii; identical to SEQ ID NO: 10938

SEQ ID NO: 10943 - DNA, 711 bp, Burkholderia territorii; identical to SEQ ID NO: 10939

SEQ ID NO: 10944 - DNA, 1695 bp, Burkholderia territorii
atgagcgcactaaactacctggcgtctttgctgcaatcgtcggtcagcgaagagacgcagccgattcgctcgggcactgaaatcgacgtgcttctcgaacagttgaaagcgcgcgcaaaatctcgtgttggccgagaacctgttcatgaccatcagctcgacgcggtgcgacggtattggcagagccacgaagtgtccacgttccgcgatgcctatcttctgtcctttggcctatgtattccacaccgtccccaaggcgagtgcgtgatggaggaccgaccacgcttgcagcatatcctggacagcgttgatggctacataaccaagaccgcgtcatacaggcgctgctatcaaggactcgcaaagagctacttcgcctttgacgtagatgcatgtggggtggcgtcctcgggaaggaagaactggctgaccctgcgagactaccttcacgaccggaaccccaagatacgtgatagcaggtcgagcccttcatgggtcgacacggcaatcgaaaacagacagctttttgatgagtccccgtgcacacgatatgtgggcgagttgctcgaaggcgatacgtcgcgcatagaccatatttgcgagcagcttcaaatcggaaaagagtcgtggtttctgcgccagctcgtgcttacgcaagttgagggcgcgacgaagctcgatgacgatgagtttgtgaggctgctaccccgcttgcttggtctgcttgcacacaatgaggtgctccgcgaccgaggaacgattctggtccttgaccgatacgctgaggtctctggcacccccttgcacccgagactgcgcgaccatgctgttgcctggtggggcaatccgtggctaccttcaaacgcgacccgatggggtggcgtcgagcctgcagctcgagcaatggtctctgactggttgaagctcgaatttatcgagaccttctttacgaagctggcggaggacggtcttgccgaccgtcggcgaatggagttttggaagcgatacgttaaatccatcgatgacatcgagttcgcattaggctcgactgcacgcaattcacgtgaaccggacctggtcgcgctgcgtaagagaatgaagggcctgactcgcgaactcgacgcctctggcgcgaacaacgccttcattatgacgatgggcaagttggttgctgtcgaatttagtggtctcggaaacgcgttttatggctatgacgccagtcgttctctgccattcaatacaagtcagacattgaagctcgggaaaaatgaacgcaactcgttgaagcaatcgaaaagcatgctgtggctaaagcatggagacggcattcatggctggaatcgatgggaggagatgttcgaggcaacactgcgtgagagttttcagattcttccgtcagccgaaactttgcctgcttcaggtagagccaaggccgcaaacgagcctacgaagtcgacgagtaacgtctcctcccgtgagaacgttggctcttcgcaaaatcgaaccgaagcacacgaatcctactcacacgttgcgctcaagcgattcgcggcaacgcatggtctgcaaatcgaggacaggactgcactcggcggaaacttgtgggtgcgcggtggtgaaggtgacgagcgtgtcggccgcgttttgatggaatggggcttccgtgtgaagccgggcaagggttggtggaaataa

SEQ ID NO: 10945 - DNA, 3792 bp, Burkholderia territorii; identical to SEQ ID NO: 10941

SEQ ID NO: 10946 - DNA, 2025 bp, Burkholderia territorii
ttgaacatccagtcattacttgccggcgtgccgatgcctgcacttatcacgggcgcgtttttggccgtccttgtcgttattgtcgttgtgtttttcttcggtccagcgataagtcacctgcttcggctgcgcgctatccagcgacgcatcggaaacttcgaaagcggagacttctcgtcgcagtttgaagcggtattcgcgagcgaccgtcggctcgcccatctatggaacgagtatgccgaatcattgcacgtccagcgggaagagcgggatggacaaatggtcgtgcgcgccgtacgggccaccgcgccggccgaggtgtacttcaacagtcaggttgttgtcgacagccgcttgcgcaccgagttttttaagcacgtccccggtattttcactggtattggcattatcgggacgttcagcggactcatagaaggccttcacgcgtttcaggtaagcgagaacgctgcaaccgtgcgcggtagtcttgaatcacttatgcattcggtgggtgaggcgtttcttgtgtctgcctcggcaatcgccgcggcaatgctaaccacgctcttcgaaaaatttctccttgcttcgctataccgacgtacggaagaaattgcacatgcgattgatgcttcctttgaggcgggtgccggagaagaatacctggcacgtctagtaaaagcatcagaggagtcggcaagccaatccaaaattttgaaggacgctctcgtcaaggagatgggtgagctgctgcgcgagttgactagtgcgcaaatcgaagcgagcaaagaacaacatgcactcgcagcagaggcggggcgccagaacaacgtcgctctcggacaggttattgccgagagcatccaacagggcctcaaaggcccactcgatgaaatcgcagcgaccgttaaaaccgccagcggtgaccagagcgcaagtgctgggcggatgttgcaggacgtaatgacgagcttcagccaacggttgaatgatttgttcggtggccaaatttcaggcctcaccgagcttaatcaacaaacggcccagagcattcagcaggctgtgagcacgctgcacactctggtcgcgaacatcgaggcttcgagtcagcgttcgacggatgcgatggcgcagcgcatggcggaggccattgaaaagatggagtcgcgacaggaggcaatgaacgcgcaatcggctgcgttcgttgagcagctgcgccagttggttgcaacgtctcagtcggagacaaaccagaaattgcaggcgacgttggagacgctcggcactcacgtcggcgaaatgctaaccacgctgagtggcgcgcagaaagaagtatttgagaacaaccgcgcacgcgagcatgcaatgtccgagcgcgcgagcggcgtagtgaccgcgatgtcggaatcgatggatgctgttgtcaaggagctgggcgtcgcaaccacgcagatggcgcaaagcgtgaatgctttgacgcagtcgacaacttcgtcagtcgaccgcatgaatgctggcgcggaagcgttgggcacggcgtcgcggaacttcgccgcggcaggtgagcgcgtcgccggtgtcatggggcaaaccgccgacgtctcaaccaaactcgttgcgacagccgggaatttgacgagcggtgcgggagcaatccaggaactgctgagcgactaccgcgctcatcgcgacagcatcggccagcttgttacggaattgcgcgccaccgtggatgctgcgagaagggaagctgcgttgaccggtgacattctcaatcgcattgagacatccacaagccaccttggagcggcgcaaaagcaggcggacgagtatctcgctggtgtaagccaggttctcgctgaagcgcacggcgcttttgcaactgaggtcaagcgtacgctggaaaaagcgaatgccgagttccatacaaaactgacctcggcagtggggttgctttcgtctgcagtcggtgagctggaggtaacgctcgcctcgatgagcacgctgacaccagcgaggaactag

SEQ ID NO: 10947 - DNA, 711 bp, Burkholderia territorii
atgtttggaactcaaatcgtcgtcaagcgcggaagccgcgacgaggcggaaaagcccttctggatttcctttgctgacttgatgaccgcgctgatggtgctcttcctcgtggtcatgggggtagcgctgctcgccgtgacgaagaacgtgacggagaaagaaaagcgcgaagaacaacatcgaaaggacatagagcttatcctcgaccggtttcaaactgccgccaagcggtacgacggtatcaagatagaccgcaaccgacatgttatcgattttggtgaccgcgcccgttttgcgttcgggaaatcaaacctggcgcccgagcaggaagcggtgttgcgtcagttcgttcctgaaatcctgacattggcgaacgatgacctgggcaagcgcgtacttaagcgagtggttgtcgaaggctacacagacagaaccggcacgtacctgagcaacctgaatctgagtctccagcgcagcgagcgggtgttgtgcagcatgtttgcaacgaccggtacgagcgtgctcgacgaggcgcaaaagctggacgtgcgaaatctgtttttggtcggcggatattcgttcaatgactcgaaggaaactgacgaggagagtcgccgcgtcgagatgcgtcttgagttcctaggtgttggcgaggataggtctccggcaccggcgcaatcggggaactttggcgactgtgcattgcgatga

SEQ ID NO: 10948 - DNA, 1428 bp, Burkholderia territorii
atggaggaccgactacgcttgcagcatatcctggacagcgttgatggctacataaccaagaccgcgtcatacaggcgctgctatcaaggactcgcaaagagctacttctccttcgacgtagatgcatgtggggtggcgtcctcgggaaggcagaactggctgaccctgcgagactaccttcacgaccggaaccccaagatacgtgatagcaggtcgaacccttcatgggtcgacacggcaatcgaaaacagacagctttttgatgagtccccgtgcacacgatatgtgggcgagttgctcgaaggcgatacgtcgcgcatagaccatatttgcgagcagcttcaaatcggaaaggagtcgtggtttctgcgccagctcgtgcttacgcaagttgagggcgcgacgaagctcgatgacgatgagtttgtgaggctgctaccccgcttgcttggtctgcttgcacacaatgaggtgctccgcgaccgaggaacgattctggtccttgaccgatacgctgaggtctctggcacccccttgcacccgagactgcgcgaccatgctgtcgcctggtggggcaatccgtggcttccttcaaatgcgacccgatggggtggcgtcgagcctgcggctcgagcaatggtctctgactggttgaagctcgaatttatcgagaccttctttacgaagctggcggaggacggtcttgccgaccgtcggcgaatggagttttggaagcgatacgttaaatccatcgatgacatcgagttcgcattaggctcgactgcacgcaattcacgtgaaccggacctggtcgcgctgcgtaagagaatgaagggcctgactcgcgaactcgacgcctctggcgcgaacaacgccttcattatgacgatgggcaagttagttgctgtcgaatttagtggtctcggaaacgcgttttatggctatgacgccagtcgctctctgccattcaatacaagtcagacattgaagctcgggaaaaatgaacgcaactcgttgaagcaatcgaaaagcatgctgtggctaaagcatggagacggcattcatggctggaatcgatgggaggagatgttcgaggcaacactgcgtgagagttttcagattcttccttcagccgaaactttgcgtgcttcaggtagagccaaggccgcaaacgagcctacgaagtcgacgagtaacgtctcctcccgtgagaacgttggctcttcgcaaaatcgaaccgaagcacacgaatcctactcacacgttgcgctcaagcgattcgcggcaacgcatggtctgcaaatcgaggacaggactgcactcggcggaaacttgtgggtgcgcggtggtgaaggtgacgagcgtgtcggccgcgttttgatggaatggggcttccgtgtgaagccgggcaagggttggtggaaataa

SEQ ID NO: 10949 - DNA, 3753 bp, Burkholderia territorii
gtgttcaagttattcaagcaagcaaaagcgcgagacgtcatcacctggaagcggcactggtcggataagggcatcgttctaactcggcgaacccaaagcccgggagcgacggtcgacggagacctcgttggcggctacctcacacaactgaccgatgatggcctcgtcagcccggtcgaggacgagttcttgttggattggcagtctttgtacgacatccttgaacaaccggactacgggcagctgcgcgatgttctccgaataccgcctttcacggaattccgtcagcatctgcgaagcaaccattcgttgaccgaccacgagttctctattgcgatagatggatggcgcatcgacggcggccgtgaatttcgaggcactatcacggggcccgtgatgttagaaggcgccgtagagatgctgatgcgtcccgcgcaatggaagctttttaatgcggtcattgcattctcacgccgtggcgacgaggaccactctgatttagccaaccggcaagggtgggggcggattcgcaagctcgcagtcgatgccgaagcaagacttgatgattttctctaccgctcggtagtattgagtccggaaaagctcaatataggtctgcggcgctcggtggcagttgtagacgaccacgtagtcgaaatcgagccgagcttcgacggagcacctgatgactggctcgacacgttcgacagagcacgagaagttcgcgaccggtacgacattacaacgcaggatggaatcgtccaggttctggtcacaccgaaggtaaagactgtgctgcgggaaatccggcgattgcccggacggcgggtggcaggttctcgggcccaggcctttttgctcaaccccttcgcggctctcggtgcagacgcgattgacgtcatcgaagaatcacaattcgaacgcgctcgtgaggacgctggcctcgactacgaacgcttcgtaccgacgttcgagcgaaatgctgcgggctatccagtacgtgtcggcctgcttatcgaatctgcggtggcgagcggaccgacatcctcgaagacgcattggctcgacgacgacgaactttccgcgttcatcttggctctctccaggtcgctgacgcagggccatcaactgcttgcctggcagggctatgaccttgctctgcagggagattcggagcagcaactcaaggaattgtcggctgcactggcacagcgtcgcattcctccgacgctggtctcctacgctcaggtccacgacctggctggctactctgcgcgcatcgaatcgattggtgtggagaagccctaccattcgccgtatatcgcgaagaaggacgagggcgacggttggtttcctgacaacattctgcctgtcattgtttatcagtcgaaggacggtggcgagccggtggccgtgccgaccaacaagcttgctattgagaagctgaagaatgatgtacaggtcgctgacgtgaagggcatggtgcagctcgacgtcccttggctcagggaccccatttcgctggctgacgcgaaagaaatcatctcgacgttcgagagcgtcttttcagatttggagtcgggtaagcagtttgacccggaaaacgcgcgcaaacggcccagcgaaagcgtggccaaaaagcagctagttctgcgtgcaaacattcaggcactcgaatacgaagagttgcgtcgtgaagcgctgcaggccgtacctgctcgtccgaagcttccggaaagcattcgcacggagttctcattgttgccgcatcaacaagcgggtctcgcgtggatgcagcatctcttcagtctgcaaaccgattaccaggttcggggcgcaatccttgcagacgacatggggctgggtaagaccttccaattgctggcgcttatggcctggttgctggagagggaccccaccatgaatccaatgttggtagtcgcgccggtctcactgctggaaaactgggcagaggaagcgaacaagttctttcagcctggagcattgcccctattgactgcatacggcgaaagtcttgccgcgtttcgcgtaccgcgcagccagatagaccaacgcttgcagaccgaggatggcctggtcaagtttttgaagcccaactggattggcgatgcgaaggtggttttgacgacatacgagacattgcgagacttggagttttcgtttgcggcgcaaaagtggtccttgatggtgtgcgacgaggcgcagcgcatcaagaacccagccgcaatggtgacccgggccgccaagaagcagaatgtcgcgttcaggattgcatgcaccgggaccccggtggagaacaccttggccgatatgtggtgtctcttcgactatgtgcaaccgggcttgctcggtgccttgaacgactttggtgagcggtaccggaagccgattgaggcgaagactgacgaagaaaaagctcgtgtcgaagaattgcgcgctcgcatctcgccccagattctccggcgcctgaagaccgaggtcgatactgggctacctccgaaaatcgttgtcgaagattgccggcggctctcaatttctggcgttcagcggaacctctacgcgaaggcggtggatggcttcaaacggcgccaggagcccaaccatacgacgccgttcaagaatcacctcgggttgctacactaccttaggctggtctgtactgacccacgagtgcacggtctaagcgtgttcaagccggaaccattgggcgactatcgtgcgaaatccccgaagctcaattggctactcaggcagctctccgaaatcagagcgaagggcgagaaggcaatcgtcttttgcgagttccgggagattcagcgactcctacagcactacatcgaagccgagttcgggtatcgtcccgacatcattaacggtgatacaagtgcgtcgtcgagtcacgtcgccagtcggcaaaagagaatcaaggcctttcaagaaactccgggcttcggtgtcctggttctttcgccggtcgccgtcggattcggcgtaaacatccaggcggcgaaccacgttatccattactcgcgcacatggaatccggccaaagaagaccaggccaccgaccgtgcgtaccgcatcaatcagacgaagccggtgtacgtgtattacccaactgtttgggctgacgactttatgactttcgacgtcaagctcgaccagttgctagctcataaaagagggttgtcagaggacatgctcaatggcgccggagacgtggcgccgtccgactttaacctcacggacgtggtgccacactcgcagagcgacggcctggatgaacgcatcacgctggatatggcccagcgcatggggtggcaacacttcgagtgccttgtaggcgcactctggagcaagcgtgggtataactgctaccggacaccgggcacgaatgacaacggcgtcgacattgtggccattgacggaaatcgaggtcagcttattcaggccaagtccagcggaattgacggaacaaaactcggatgggacgcagtgaaggaggtggtggctggcgaagcgttctaccgacgtaggcaccccaatgtctcgttcgaaaaagtctgcgtcacaaatcagttcttcaatgcgcaggcgaaggaaaacgcgcatttgaactctgtcgagttggttgaccagaaacatctcggcgacctgcttcgggcgcatgaaacaaccatgctcgaggtcgagcggatgcttttcgccgaatggcaatcggcggacgtttga

SEQ ID NO: 10950 - DNA, 2136 bp, Halomonas sp. KO116
atgttcgacttgatcagtcatttatggccacagttcgcgttggtactcacgccaggtctggaaatggaggaaattgcagtctggatctggttgctcatgatggtaatcatggccatatcagtgatgtctgtaattcggcatcggttgcatttctcacggcgcttgaaaagggttcagcagcttatccaaggggaggatcgcaacagcctggctcagaatcggtttgtcacgttggaaaaggcgcttgaacaggatccggttgttactggccctttgtggcgggaatttgatgaaagcctagtttattcagcagacaagtcccgactgtccaatacgttggaagccgagcatttcttcaataactacaccctggcctatggtctgacttcaagtcgtttgcttgcggccgcgcctgcctttctaactgctatcggggtgctgggtacctttcttgggctgacactcggactcaagggcttgcagattaatgccggagatgtcgagactctgaaagatggcatttcagtgatgatcaacggtgcggctgttgccttcatgacctcgatttggggtgtggccctcagcttattgcttaacctgtttgagaagctggtagaacggggggcactggcaaaaatccgtgacctgcagcaacgtatcgactttctgtacccacgattaccagcggagcattcgctggttcagattgcagctgccaccgatgaaagcaaggaggcgctgcaggagctgcatgaacgtatcggcgatcgtttacaggaaactgtatctggcatgagtgactcaatgcagcaggcctttactgatgcgatcaataccgtgatggcacccgccattcagtccttggtgaataatactaaccagcagtcaacggatgtactggagaagctggtatctggttttatggatggcatgaaaacggcaggttcagatcagagtcatctgatgaagaatgccgctgaagaagtgcaacaggctgtgtccggtatggccggccaaatggaggcgctattcaagcaattggacgagcagcagagtagggcaagagaacagactgagggcacctccagagaatttgcacaactgcttgaacagcatgtcgcagatgccgcgcagcgtcagcagcaaatggagcaacgcttcaatcagctcatggaacagatggaacagaaagtcagcacgcagttcgacaaggcggcggaggatgagcgcaaacgggcagccgcccaggagcatttgcatacgcagatggtgtctggattccagagtcagctggagcaattcaatagcgcttcgagcggccagatccaggccattaacgaagcctcggcgaaacagcagagcgaaatgggtcagacctttgaatcggcactgggcggtctgcaaacgcttataagcagccaggctgcagcagccagtgaacgtgagagtgttatcgagtcccgcttcaatagccagcttgagcggcttgcggcagaacagcagcagttattgtctgccgtgacgcagggggcccagcatactcaacagcagatgcttgaattgaccaaacagcaccagaagttgatgactaaaatgggcgaggtcagtcgttcggttgaggttagcagtcagcatatgaacaacagctccactcaattgggtctgctgtcggctaacctaaagcaggcagcggacgtactagattcgcgcttgcaggctgtaacagaaacactggcgggggcctctgatcagaaccgcgagctggccgaacaggtgagcttgcaggcggatacgctcagacaattgcaggcagaactgaccacggcgacccagcatttcgagaaggctgcggtggctgcagagcaaggctttgaagtgtttgccaaccatcaacagcagttcctgcagggcatcaatactgagtttcaagggcttggccaggcgctcaaggagcaggtcggcgggatcgagcaacaggctgatgagtggctacgcagctactccactgaggtgcgtactcaggttggcgagaggatggagcactggaacaagaacacgctggagtttgctgatcagatgcggcgcacggtgagtgcgatcagtgggatagtggatgatctggagcagaaggtctga

SEQ ID NO: 10951 - DNA, 765 bp, Halomonas sp. KO116
atgcgctttttaaaaaagggtcccgctaatgtggatgaggaaaatccctattggatgtccttttccgatgtaatgtctgcgcttttgatcatattcatcctagcgtctgttgtgctgatcatccaactaatggaaattcaagaagaattgagaaagcagcaacaggagttcaatcaggaaatacaggagttgcggcaagcagagcaggtgcgtagaactatcctgcatgaggcagctgatttgttgcaacaacgtggcatacgcgtcacggtaagtgaaaatgacactgttctgagtattcctaacgatattctggggtttggtaccggtgcgcatgaaattgggacagcctatcagggcacagcagtagagattggcagggtgcttagtgatgtcataaataaggataatcgagttgattacctggatacgatttttgttgagggccacacagataaccgcccactgaacggctttatgggcaagggaaactgggggctgtcggcttttcgagccatctcgctctggcagctatgggatgagctgctgcccgagcaattctctttggatgacatagagaataaagacaatcagccgctgttctcagtcagtggctatgggccaacccgaccggctaccagacgacaggatacagaagaagagcttagccagaatcgacgaatcgatatccgctttaccatcaggcgaccgagcagtgcagagtaccgtagggtcagtgagaatcttgaggaagctatacgatga

SEQ ID NO: 10952 - DNA, 1593 bp, Halomonas sp. KO116
atgaatcttccgccacctgaactgctggtaatagattggcctgagggtactctggaaagctggccgatactgacagaacgcctgaaaagggtggccggagctgctggcaaaaacgatttgttttacgaaacatccgaggatttgaagcggctgtcgaggggcatggatggtcgggcactcgctaacttgatgcgcaaacgcattacggctagggccattactcagctttggctggaagatgccgagttccgccgcagaatgctgagcccgaaaatccttgctatcttggtgaagcaacagcttgggcagttaggcgtggttccgttgcagaacctgattgctttgtacttccgcatgttcgatgagctaaatcagcatggggaaaacctcagagaagaactgcaacacctcttagagcaacagctgtctacacgctttgcacataattccaaatgctctggtcaccaacgggacttattgtccattctgtattccgaagcgaaatggcttctttcaattaatgggccgaaacacttggtggattacgtctatgaggaaggtttggagcttgaccgggcctttctgtacttcgagctacgggggctcgatgatggccggtatgcgagtatctgtcgggcgcattattatttgaataccttgagggagttgccggttggtcaatatcacgaggtactggctgagctactcaagccagcggtcagccaagccccctttgaggacggcaaccgtatcggccatgttgctctggaaattcttattgatcgggcaggtgatgcaccgggtgatgagtggcagaatttcattatggatctggctggtgatccacgtatcgcaagtactgcacagaactatcgtgaatggtggcagccgctgggcgaagatcgaattgaaaaggtgagacgttggctttacaaggaggatttgcgtttatttcttagcgcgttggagcaatttggcaaggaaagcggtgatgctgccatgcagcgcatgtttccggctcgtaagcggtttatcgagggactcgacagactcaagttggtacgcaaaacacgcctgatgcttggagccaaagccgcgttcgcggtgaagagtattcttggtgatgaattaaaaacaaacttcgtaagactctccaatgccaacggcatgtctgacaaagcggttatctatattgattgcggtgatttttgtctgattgaaggctcccataacttcaaactgtgggtatacctgcggccaccgtgggagagattgtatagttataatactaaagaactatcacattccgaactgacgatacgtgccccaagtggatataagggactttacggtgtagatgcgccatacgaagccatcacccatagtccctctacgtggcacaaccgttttttcggctttttggccgaccatggggtgtctattgatatcgaacagttgatgttcccagatgactacaggaactatctcaggcggtttggcgtaccctatgtaaagccgctgaaaacgcggcttgatccgttgtcagctgctagcccaagaaacgataacactgacagacatggcctgggttaa

SEQ ID NO: 10953 - DNA, 3033 bp, Halomonas sp. KO116
atgaaaaatcatctcaaggatctgttcggctcgttgatgtttggtcggcaagcaactggaatagatggcgagccgctgcagacgcaggttgattccagcggtttgctcttttttgcctctccccagaccattgctgagcttaaggcaggtaagggctcgcctattgcgttattgcaaatggttgtgctgcagatgctgcttgaacaaggcgatgccgagtcgttgccaaacggctatctggtaagttcgcgagttgctgccgcgcttgatgatgaacaggcggatttgctgaatctgcctggtcgctttacccatggctttgtcgcgaatgtgaaagggcatacccgaaattctggcttcagagtgcagctttttgcctccattgatgggaaggagtatccgatcctcatcaagggcccttacttacatgttggccagagccagccgtaccgtctgaatccggctgaaatgtcggcattttcggcgcttgcaggtcatagtagcctgtctcctgatgagaccggtgaagccgcaaatttgaggttgatggcgcagctgcaggccgcccggcgcagtggtatggatcttgcccttggcgcattcagtaatctcgacgtggtggtacctgaagggattggtgttgtggcaacgcggatgccggatggcagccttgagctttgtccttcactgggtgatggttcgactccggatcaactcgacaagcgctggagccagttggatctgacccgcgatggtggcgtgttgagggtagaggaaagactggtactgctggaaccggagaagatcgctgcggtacgagaggtgctgggcagtcggcttataccagctaacaaggtggaggagttcatcaagacaccctccgcgttccttgatgcttctctgatcaatctagatatgggattttcggttcgcgtgctgggtattggcaaaatgctgcacgtggacttcggcccactggatgacaagaaacgggattggtttgcgacttcatcgcgtccccagcctcctgaatcgttgcataaacatgttacttgtaatgaagatcttgatgccttcaaggaacgcttgcacgccgcccaggcacagggtgcccagatcgttgagtttgaaggagagcagtttgatatcagtgaacctgccaatgtctcaagtgtccttaggaacatagaagcagaccttcagcataaacctgtaaaacaggaacaggaaggtaacgaccagctcgcaaccgagcgggtcacgcttcttttaaaggatgcggacgaactcaaccgtgaattgctgatcaaagcgcagcagcaggacagagcgccgggagtcgatgcctcgaatctgcttcgatcgccctacccgcatcaggcccaagggatcagttggatgcttgatctgttgctcaaggctttggccgacgatcatgaaaacatgtatcggttgcagggggctttgctagccgacgatatgggtctgggcaagaccttcatgactctggtgatggttgccgaatatctggccatccagacggcggcgggtaaaacacagaagcccatattggtggtagcaccgctcagtttgctggaaaactgggaagatgagataagcaagaccttcaagacttctccgttccgggatgtgaaggtgctgcaggccggcagggatctgtcggagttccgtatcaaaggagcccaacgagagtcgcttcaattggctgatttgctggatgaaagcgatgcgatgagcgaagcggatatccgttactcgctacaaattggatgggaagccggtacccagcgtctcgatatgggtggccgggtagtgttgactacttaccagaccttgcgcgattaccagttttcactctgtgtcattgattggggtgtggtgatttttgacgaagcgcagaatatcaagaacccgaatacactgcagacccgcgcggcaaaggggctgaaggcggatttcaaactactggcaaccggcactcctgttgaaaacagtctgggtgatttctggtgtctaatggatacggctcagccgggtttgctcggcaactgggcagagttccggagtaaatggatcactccggttactcaggctacggaagaaacacgggatcagatgcgcatcgagatcggctcttccctgcgagaagcggttggccctttcatgctgcggcgaattaaagagcagcagcttgaaggcttgccgaacaaatatatacgctcagggctactccagagcgaagctgggaatcttcatagggcacccgaactggcagtagcgatgaaaggtggtcagttacaggcttatgacggtgtgctggatagttaccggcgacagcgtgtagaggaagatatgcgtgggcaggcactttcagcgttgcagcagttgcgttctatctcgctgcatccacgaatgggtgatacgggcttgctccgagttaccggagcagaagctgcgcgcaatgcgattgcagagtcggcaaaattgtcggtggtgctggagcagcttgactgcatcaaggctaaaggggagaaggtgattcttttcatggtcaccaaacagttacagatagcgctcaagatgtggctgagccagatctatggcctggacattcacatcatcaacggcgataccgcagctgtgcagaaaaagcgggacgtgctgactcgcaagaagatgattgagcaattcgaatcagttgccgggttcaatattatcatcatgtcaccgattgctgcaggtgtgggcttgacggtggtaggcgccaaccatgttatccacgtagagcgtcactggaacccggcgaaagaagcccaggcaactgatcgagtgtaccggatcgggcaggcaaaggacgtatacgttcatttgcccgctgcgctacatccgcagttcgattccttcgatgtacacctagatcggctgttgagcggaaagctgatgatcaaggatgcggtggtgacgccggagcctgtggacgaaaaaagtatggttacatccatggggctttga

SEQ ID NO: 10954 - DNA, 2172 bp, Mesorhizobium sp. ORS3359
atgttcgtgttcttcaattggctaacgcggtcagtactattctggctgatcgctgctgccgcggttctcctggcggcaaaagagttaccgttcatcaatctaccgttggtgtggggcacaatcctgggcgccacatccgggaacatcgagtccattagcaaaccggcattcgcgtacggacttgccggcggtctcttcttcaccggaatcggtttcgcggctgccttctacatttgccacgtttttccggtccagatcgcgctgtggcgtgcgacgggtcaggtcacccgggccaagggcaaggagcgagggcgggacgccattcgcaaatccttcgcctcaaacttcgagagtctgcgccagactctcgagcgaaattcattgatcgggcatgcatggctcgaattcgaagagacgctgttcaacaccgacggcgacagagcgattggcaacactgtccggccgcagacttttttcaatctggcgctggcccgcgagaggttgagcggcctcaagatgatgaacgcggtgcccggctattttgtaggcgttgggctgcttctgacgttcattggcctggtcttcgctctttacaaggccggggcggccgcaaatgccggcgacgccgacaagatggcccaagagatgggcgcgcttctgcagatcgccactttcaagttctcaacctcgatcgcgggactgggtgcctccatcgtcttgtccgtcatttttcgttggtattttgtcttggtcgaaagtgcattcgagcgattcaacgccacgctcgagcgtggcctgctctataccgcgccacaatcgatctcgttggaaatgaacaggaccctgcaggatcagttggtgcaactgaaggacatcactcaaggtgagttcttcagtcgcatggggtccgagctcgcaccgaggctgaatgccgcgatcgttgaagcgatggctccggtgaccgaccagataggaaacgctgttggcagcctgactgccaacagccaggacggcgtgcaacagatgctgcacaaattcaccgactccttgcagcacggagctgggacggaacttcgcgagctcgcagcaaccctgaagcagctccagatgtccatcgttgaaatgcagggtgggctacgcggcagcggcgacgagtttgcaaccaagctgtccgatgcggcagacaatctgaaccgcatggtggagcgcgcgggccaaagcttcgagacgagctcgggccaaagccgcgatgcgttggcgacagtcatggatttgctccgccagacaatggagaaagccaacgctgaaatagacactgcccttggcacagcagccagcggtgcgtccaccaagctcgaggcggccatgggccttgtcatggacaagctcgacaagcggattggcgagttgggagatggtctgcaaacgatgcagaggaccatgggagaacacggagacgcggccagaaggcagatcgaggtctcggtttcgcaatccaccgacatgcaaaaagctgttttgtcggagttggaagccacagttcagggtatatcgggtcggatcagcagcgcggtcgaagatgccgtcgcttcagtaggtaggcgatttgatgagcttgccgcttccatgcgagcgattgagggcgcattgatcggtcagaaggcagcactcgagggagcatcaagcgaagccagaaagaccgcagaagcgctcggaaagagtgcccagagcgttcaggcagcgaccgcgccgcttgtcagcgtcggcgatcgcttctcgttggccacggagaagatgacggagggagtcacagcgacccttgatgcgctcaaactggcgcaatcagagatggctggactcgccgcggatctctcggcggccaacaagtcatctggcgacttctggaacaattttgcaggcaaattcgatgacgtcgacacggcgctcggccaagccgtgtctgtgctgtctagatccacgagcgaccagcaacaaaggcttgaaacacacgtgcagagcgtagacaggggcctatcggaagcaatcggcaagctttcgggcatcctgacccagatgtccgacagcgcggagtccattgccgatagtctggaagccgcgaaggtgggtggtgctttgagcagctccaacggtgcgcgcgggacccagcaatga

SEQ ID NO: 10955 - DNA, 909 bp, Mesorhizobium sp. ORS3359
atgatcgtcgccgagcccgatcaccgagctgtgtctcacgccgaggaggacgagaactatttcgtgtcgatgaccgatatgatggtcggcatcctgtttatcttcatcatcatgctgatggtgtttgccctgcattttcgacagcagaccgatgagaccgtgaagttgacagcggagcagcagcagcaattgcaaaaagcaaacgagttggcagagcagatagctcaactgcgccgccagatagcagccgagatcgccgaattgaacaaagctgaccaggcgcgtgccaggctgctggagaaaattcagcgcaaactggacgaagtgggcctcaaagtcacaatcgagcgtgagaccggagtactacgacttacggaagaggccattcgcttctcgccggacagctcggcgctggacgacactgccaaacgcaatgtcgatgctgtggcaaaggtcctgcttgacgtgctcgccaactatgccgcctgcccggacaccgagacctgcccaggcgcctccggctacgttgtcgaaacggtctttattgaaggtcacaccgacaggaccggggacgacggccggaactggcagctttccactgaaagagctgtcaacacctatcgcaggatcgtcgacaatttcccaggtctgcgcaagctgcgcaattccgatcatcgcgagatactgtcggtttccggctatgcgtacacgcgcccggcgaccgagcaggacgatagcgaaggcttccgcatcaatcgcaggatcgatctgcgttttgtaatggaagccgatcgacgcgaaaggttgacggaagtcctcgatcttctggacaagatggaaaagaaggtcggcgagctgagcccgaccggaacacctgtcatctcgactgctccgacggcaaggccataa

SEQ ID NO: 10956 - DNA, 1383 bp, Mesorhizobium sp. ORS3359
ttgagcaaacatctcaaggaggcgatcgcagaactgctcatacgccacggcgtgccggcgcgtgcgtcggcgcctgcgcagatcgagatcacggcgggcaagctgcgcgatactgacggtgacgcacctcggacaaaggactatgacgcgatatccgaacagctggcgctcacactttcaaaaggcgatagcatcaccggcaggcaggcacgcgacggcgcatggtgtctttggcagacccggttcgcgatcgcgacggacccggcgatgctcgagccttttctcgggcagcttcgtgggttgaagcacaagggtgcctccagggcgctagctctttcatatttgatcagcttccacgaagatcgaccaggcctttcagccgtggccgccacgctgcgcgaccttgccgccgtcgccggaaagccgtttgacacgctggaggagaagtaccggatattcgacatcagcgacgggccgcggcggataggcgaggcagcgttcgcgcaccgaaagtcgcctcgcaccgtgctggcagaacaaggactacagatggaactcgtactcggtggcggctttgttgagccatgcgcccggcgagtgcttgagcgcgtcgcggaagacaaaaggctgccttcgctcgaacgcatcgatttcgtgaagctgatttcagttaatggcgaaacgaagcggctgaactttcccggccacaaggacctcgtcgccaatgcattgctgctgccatatgcaaaccaaagaccagatgaggccattcgcgacaggacacttgacctgctgatttcgctcgaaggcgtgggtgatccccgcacgcgaagcggcaattgggcaagcatgccgcgatctcgtgacatcgcggtctcctggctgaccgagcaggccctccggcaattcctggacgttgtcgaagaggtcaacccaaacgactattggcactatcgacggacattctgggaagcaatgcacgacagcgatgccatttcggccgcttgggtcgtgatggaccgcgaaggggctcgagaggcacgacggcggttcggcaagaacaccggttttgcccagttcacctccggcgccgtgcaggccggacatgccgtcttgctactgcgtatcggcgagggggtttgtgcggagtggagtttcaacggcaaatgcaggttctggcaggatgcgcaacgtcagggtgctccgcgcctttatgacgatggctacgacgccgaattcttgcgcaccggtacaaggtatccgccgatactcgagattacacactatccccacactgggccgaacgcctggcagcatctggctgcccgccagatccagggtatgactggtatgcgattttcacccaaggagtacatgccgtga

SEQ ID NO: 10957 - DNA, 2979 bp, Mesorhizobium sp. ORS3359
gtgagcctgagctttcggcatgtatctcttcccagcggcgtgcaattgaaggttttgcggcgacgattgcttggcacccaagtcgtcgagacctcgctttggccgcatctgacaggcaaggagggcgctgctgcgcgctatctgctggcgcttgcagatagtggcgaggctgacatctcggccaccgaggtattggttgtgcaccctgcgattgcggcattgcctgcctccgtggcggaggctgtcagattgcctccacttggcactctttcagtgacgttggcgtttcaagggatcatgaccgatccgagggcccgcattcgcgtcagctggtatgatgccgacactcgcagaataaggattgaaagaaccggagcactggcccggtggggtgccttggagggccgcctgtcagggcctctctatgcactgaccgaggctatcgatcgctacaacgcaaccgagagttccggctcggacatacggatcgctgcttgggcgccggtgcaaaatgcattgaagatgaccaccggacaggaggtaagtaccgaagatcgctttcttaccagcctcacgatctatcaagcaggggcggttgcgctggatgtcttcgcgaccccctatgggccagatttcctccccgttgtcatgggtcgagagaaatcggcaacccttaatgatgatgcgcccgccccggaaggaaccgagcacgcgccagcggcaccagatctcgtctctgacgctctgttacctgagccgctccaaagacgtttcgcaagcgaactgtttgctgccgaatccaccagtcgggatgcctatgttctcgatcgaaacacctaccttgttgtcgatccggcgctcaaatccgccttggatgtcatccggacgaaacgttccgcgccgcgagaagagcgtatttcattcctccagaatcccaggatcgaaattgcacgggcgctcggcgacgaaacaggtgagatggcgcagactctgctggtcgaaacttggcagtattcggagcgcattctcggcctcggcgtctgggagccgcctgccatgccatggcttaagaacaaggccggccaatggttgcccgagcgctttcccgtcaggatcggcgaccagatcgtcgaaatggatcaacggattttcgacggtctcaagaccgcagtggctgctgcagatcagcaaggcgacagcaaaatccaattgggtgatcgggcattcaaggtcccggaggtccaggatgcttttgaacggcttggtctcgaccgtcagggaaatgcgccaactcaggccgttgaggagggcaatcagctagaacaaactcaaagggacccgcacgcgggtgaacaagaacgcctcatcattcaacaaaattttgaaggcaaggaatttgccgtctcccacaatgccaggcagaccgtggcaggcgacgaatttcctccaacagaggttgtcacgacaagaccaaaaccgcatcaaaaggacggctttgattggctggtcggcagctacaaggcaggctggccaggcgtgctactcgccgatgacatgggtttgggaaagacctttcaggctctagccttcctggtgtgggtcagacaaatccggagcaagctcggcatcgatgcaggctcgcaaaagaagccggtgctaatcgtggcaccgacggcgcttttgcgtaactgggtcgaggaagccgaccgacatctggcgccgcaagcgttgggcgagcgcatagatgcattcggttcggccttgcgtcacctcaagatggaaaggctcgagcactggactgccgaaactgcgcttgacgtcgccaggttgcgctcggccgactggatactgacgacctatgagacactcgccgactaccatcgggcctttgcgcgcgtcccattcagtgtggccgtctttgacgaagcgcagaagatcaagtcgcctggctcgatcaacacacagtccgcgaaggctatgaatgtcgaattcgcgctggccctcacagggacgcccattgagaaccgtcttgccgacttatggtgcatcatggatcgcgtggttccgggctatctcggggatcttaagggcttcgtccagagctacgagaaaggcggcggggacgaccttcggcgattgaaagccagccttgatcagcctccgaggccagagaccccgcccgtgctattgaggcggatgaaggcggaaattctggagggcttgccaaaacgcgaggtctcaaaaaggcagatgcaaatgccgccggaacaggcggaagcctatgccgcggcagtctttcgggcacaaaccggcggcacaagccagggcgatatgttgcgggcgattcatgcattccggggcatatcattgcatccaaccgggagctctggctgcgatccgctcgacatgacctcggtgcgggattggatcgcaaaatcggcgcgcatggtccatgcggtcaaagttctggagcacctaaacacaatcggcgagaaggcactggtgtttgttgaagaccttgaggtccagaaggttttcgcagctgcgatcgccactcatttgcaaatgccacgccagccggcgatcattaacgggactgttccgggagaaaagcggcttgagatcgtagaaaggtttcagtcctcaagctcacgtttcgacttgcttgtgctctcgcccaaggctgccggcatcggtctcacgatcactgccgcaaaccacgtgatccatctgtcgcggtggtggaatccggccgtagaagaccagtgcaacgatcgctgttatcgcatcgggcagcaaaggccggtcactgtccatgtgccaatcgcagtccatccggaatttggcgagacctctttcgatcagacactcgatgcattgttggagcgaaagcgccagctctcgcgcgacatgcttgtcccacctgtagaggatggcgatgtcgaagccctcttcggcagaacgctcggaagggtctga

SEQ ID NO: 10958 - DNA, 2172 bp, Mesorhizobium sp. SOD10
atgttcgtgttcttcaattggctaacgcggtcagtactattctggctgatcgctgctgccgcggttctcctggcggcaaaagagttaccgttcatcaatctaccgttggtgtggggcacaatcctgggcgccacatccgggaacatcgagtccatcagcaaaccggcattcgcgtacggacttgccggcggtctcttcttcaccggaatcggtttcgcggctgccttctacatttgccacgtttttccggtccagatcgcgctgtggcgtgcgacgggtcaggtcacccgggccaagggcaaggagcgagggcgggacgccattcgcaaattcttcgcctcaaacttcgagagtctgcgccagactctcgagcgaaattcattgatcgggcatgcatggctcgaattcgaagagacgctgttcaacaccgacggcgacagagcgattggcaacactgtccggccgcagacttttttcaatctggcgctggcccgcgagaggttgagcggcctcaagatgatgaacgcggtgcccggctattttgtaggcgttgggctgcttctgacgttcattggcctggtcttcgctctttacaaggccggggcggccgcaaatgccggcgacgccgacaagatggcccaagagatgggcgcgcttctgcagatcgccactttcaagttctcaacctcgatcgcgggactgggtgcctccatcgtcttgtccgtcatttttcgttggtattttgtcttggtcgaaagtgcattcgagcgattcaacgccacgctcgagcgtggcctgctctataccgcgccacaatcgatctcgttggaaatgaacaggaccctgcaggatcagttggtgcaactgaaggatatcactcaaggtgagttcttcagtcgcatggggtccgagctcgcaccgaggctgaacgccgcgatcgttgaagcgatggctccggtgaccgaccagataggaaacgctgttggcagcctgactgccaacagccaggacggcgtgcagcagatgctgcacaaattcaccgactccttgcagcacggagctgggacggaacttcgcgagctcgcagcaaccctgaagcagctccagatgtccatcgttgaaatgcagggtgggctacgcggcagcggcgacgagtttgcaaccaagctgtccgatgcggcagacaatctgaaccgcatggtggagcgcgcgggccaaagcttcgagacgagctcgggccaaagccgcgatgcgttggcgacagtcatggatttgctccgccagacagtggagaaagccaacgccgaaatcgacactgcactcggcacagcagccagcggtgcgtccaccaagctcgaggcggccatgggccttgtcatggacaagctcgacaagcggattggcgagttgggagatggtctgcaaacgatgcagaggaccatgggagaacacggagacgcggccagaaggcagatcgaggtctcggtttcgcaatccaccgacatgcaaaaagctgttttgtcggagttggaagccacagttcagggcatatcgggtcggatcagcagcgcggtcgaagatgccgtcgcttcagtaggtaggcgatttgatgagcttgccgcttccatgcgagcgattgagggcgcattgatcggtcagaaggcagcactcgagggagcatcaagcgaagccagaaagaccgcagaagcgctcggaaagagtgcccagagcgttcaggcagcgaccgcgccgcttgtcagcgtcggcgatcgcttctcgttggccacggagaagatgacggagggagtcacagcgacccttgatgcgctcaaactggcacaatcagagatggctggactcgccgcggatctctcggcggccaacaagtcatctggcgacttctggaacaattttgcaggcaaattcgacgacgtcgacacggcgctcggcgaagccgtgtctgtgctgtctagatccacgagcgaccagcaacaaaggcttgaaacacacgtgcagagcgtagacaggggcctatcggaagcaatcggcaagctttcgggcatcctgacccagatgtccgacagcgcggagtccattgccgatagtctggaagccgcgaaggtgggtggtgctttgagcagctccaacggtgcgcgcgggacccagcaatga

SEQ ID NO: 10959 - DNA, 909 bp, Mesorhizobium sp. SOD10
atgatcgtcgccgagcccgatcaccgagctgtgtctcacgccgaggaggacgagaactatttcgtgtcgatgaccgatatgatggtcggcatcctgtttatcttcatcatcatgctgatggtgtttgccctgcattttcgacagcagaccgatgagaccgtgaagttgacagcggagcagcagcagcaattgcaaaaagcaaacgagttggcagagcagatagctcaactgcgccgccagatagcagccgagatcgccgaattgaacaaagctgaccaggcgcgtgccaggctgctggagaaaattcagcgcaaactggacgaagtgggcctcaaagtcacaatcgagcgagagaccggagtactacgacttacggaagaggccattcgcttctcgccggacagctcggcgctggacgacactgccaaacgcaatgtcgatgctgtggcaaaggtcctgcttgacgtgctcgccaactatgccgcctgcccggacaccgagacctgcccaggcgcatccggctacgttgtcgaaacggtctttattgaaggtcacaccgacaggaccggggacgacggccggaactggcagctttccactgaaagagctgtcaacacctatcgcaggatcgtcgacaatttcccaggtctgcgcaagctgcgcaattccgatcatcgcgagatactgtcggtttccggctatgcgtacacgcgcccggcgaccgagcaggacgatagcgaaggcttccgcatcaatcgcaggatcgatctgcgttttgtaatggaagccgatcgacgcgaaaggttgacggaagtcctcgatcttctggacaagatggaaaagaaggtcggcgagctgagcccgaccggaacacctgtcatctcgactgctccgacggcaaggccataa

SEQ ID NO: 10960 - DNA, 1383 bp, Mesorhizobium sp. SOD10
ttgagcaaacatttcaaggaggcgatcgcagaactgctcatacgccacggcgtgccggcgcgtgcgtcggcgcctgcgcagatcgagatcacggcgggcaagcttcgcgatactgacggtgacgcacctcggacaaaggactatgacgcgatatccgaacagctggcgctcacactttcaaaaggcgatagcatcaccggcaggcaggcacgcgacggcgcatggtgtctttggcagacccggttcgcgatcgcgacggacccggcgatgctcgagccttttctcgggcagcttcgtgggttgaagcacaagggtgcctccagggcgctagctctttcatatttgatcagcttccacgaagatcgaccaggcctttcagccgtggccgccacgctgcgcgaccttgccgccgtcgccggaaagccgtttgacacgctggaggagaagtaccggatattcgacatcagcgacgggccgcggcgaataggcgaggcagcgttcgcgcagcgaaagtcgcctcgcaccgtgctggcagaacaaggactacagatggaactcgtactcggtggcggctttgttgagccatgcgcccggcgagtgcttgagcgcgtcgcggaagacaaaaggctgccttcgctcgaacgcatcgatttcgtgaagctgatttcagttaatggcgaaacgaagcggctgaactttcccggccacaaggacctcgtcgccaatgcattgctgctgccatatgcaaaccaaagaccagatgaggccattcgcgacaggacacttgacctgctgatttcgctcgaaggcgtgggtgatccccgcacgcgaagcggcaattgggcaagcatgccgcgatctcgtgacatcgcggtctcctggctgaccgagcaggccctccggcaattcctggacgttgtcgaagaggtcaacccaaacgactattggcactatcgacggacattctgggaagcaatgcacgacagcgatgccatttcggccgcttgggtcgtgatggaccgcgagggggctcgagaggcacgacggcggttcggcaagaacaccggttttgcccagttcacctccggcgccgtgcaggccggacatgccgtcttgctactgcgtatcggcgagggggtttgtgcggagtggagtttcaacggcaaatgcaggttctggcaggatgcgcaacgtcagggtgctccgcgcctttatgacgatggctacgacgccgaattcttgcgcaccggtacaaggtatccgccgatactcgagattacacactatccccacactgggccgaacgcctggcagcacctggctgcccgccagatccagggtatgactggtatgcgattttcacccaaggagtacatgccgtga

SEQ ID NO: 10961 - DNA, 2979 bp, Mesorhizobium sp. SOD10
gtgagcctgagctttcggcatgtatctcttcccagcggcgtgcaattgaaggttttgcggcgacgattgcttggcacccaagtcgtcgagacctcgctttggccgcatctgacaggcaaggagggcgctgctgcgcgctatctgctggcgcttgcagatagtggcgaggctgacatctcggccaccgaggtattggttgtgcaccctgcgattgcggcattgcctgcctccgtggcggaggctgtcagattgcctccacttggcactctttcagtgacgttggcgtttcaagggatcatgaccgatccgagggcccgcattcgcgtcagctggtatgatgccgacactcgcagaataaggattgaaagaaccggagcactggcccggtggggtgccttggagggccgcctgtcggggcctctctatgcactgaccgaggctatcgatcgctacaacgcaaccgagagttccggctcggacatacggatcgctgcttgggcgccggtgcaaaatgcattgaagatgaccaccggacaggaggtaagtaccgaagatcgctttcttaccagcctcacgatctatcaagcaggggcggttgcgctggatgtcttcgcgaccccctatgggccagatttcctccccgttgtcatgggtcgagagaaatcggcaacccttaatgatgatgcgcccgccccggaaggaaccgagcacgcgccagcggcaccagatctcgtctctgacgctctgttacctgagccgctccaaagacgtttcgcaagcgaactgtttgctgccgaatccaccagtcgggatgcctatgttctcgatcgaaacacctaccttgttgtcgatccggcgctcaaatccgccttggatgtcatccggacgaaacgttccgcgccgcgagaagagcgtatttcattcctccagaatcccaggatcgaaattgcacgggcgctcggcgacgaaacaggtgagatggcgcagactctgctggtcgaaacttggcagtattcggagcgcattctcggcctcggcgtctgggagccgcctgccatgccatggcttaagaacaaggccggccaatggttgcccgagcgctttcccgtcaggatcggcgaccagatcgtcgaaatggatcaacggattttcgacggtctcaagaccgcagtggctgctgcagatcagcaaggcgacagcaaaatccaattgggtgatcgggcattcaaggtcccggaggtccaggaggcttttgaacggcttggtctcgaccgtcagggaaatgcgccaactcaggccgttgaggagggcaatcagctagaacaacctcaaagggacccgcacgcgggtgaacaagaacgcctcatcattcaacaaaattttgaaggcaaggaatttgccgtctcccacaatgccaggcagaccgtggcaggcgacgaatttcctccaacagaggttgtcacgacaagaccaaaaccgcatcaaaaggatggctttgattggctggtcggcagctacaaggcaggctggccaggtgtgctactcgccgatgacatgggtttgggaaagacctttcaggctctagccttcctggtgtgggtcagacaaatccggagcaagctcggcatcgatgcaggctcgcaaaagaagccgatgctaatcgtggcaccgacggcgcttttgcgtaactgggtcgaggaagccgaccgacatctggcgccgcaagcgttgggcgagcgcatagatgcattcggttcggccttgcgtcacctcaagatggaaaggctcgagcactggactgccgaaactgcgcttgacgtcgccaggttgcgctcggccgactggatactgacgacctatgagacactcgccgactaccatcgggcctttgcgcgcgtcccattcagtgtggccgtctttgacgaagcgcagaagatcaagtcgcctggctcgatcaacacacagtccgcgaaggctatgaatgtcgaattcgcgctggccctcacagggacgcccattgagaaccgtcttgccgacttatggtgcatcatggatcgcgtggttccgggctatcttggggaccttaagggcttcgtccagagctacgagaaaggcggcggggacgaccttcggcgattgaaagccagccttgatcagcctccgaggccagagaccccgcccgtgctattgaggcggatgaaggcggaaattctggagggcttgccaaaacgcgaggtctcaaaaaggctgatgcaaatgccgccggaacaggcggaagcctatgccgcggcagtctttcgggcacaaaccggcggcacaagccagggcgatatgttgcgggcgattcatgcattccggggcatatcattgcatccagccgggagctctggctgcgatccgctcgacatgacctcggtgcgggattggatcgcaaaatcggcgcgcatggtccatgcggtcaaagttctggagcacctaaacacaatcggcgagaaggcactggtgtttgttgaagaccttgaggtccagaaggttttcgcagctgcgatcgccactcatttgcaaatgccacgccagccggcgatcattaacgggactgttccgggagaaaagcggcttgagatcgtagaaaggtttcagtcctcaagctcacgtttcgacttgcttgtgctctcgcccaaggctgccggcatcggtctcacgatcactgccgcaaaccacgtgatccatctgtcgcggtggtggaatccggccgtagaagaccagtgcaacgatcgctgttatcgcatcgggcagcaaaggccggtcactgtccatgtgccaatcgcagtccatccggaatttggcgagacctctttcgatcagacactcgatgcattgttggagcgaaagcgccagctctcgcgcgacatgcttgtcccacctgtagaggatggcgatgtcgaagccctcttcggcagaacgctcggaagggtctga

SEQ ID NO: 10962 - DNA, 2103 bp, Desulfosporosinus sp. BICA1-9
ttgattcaaaaggtacgcaattttccaatgactatttatctaatcatgttttcagcggtattatttttctacttttatccccctgtaagttttattatttctgacattaacgcaagtcaacttggtaacaaagtaatcctcatcattttttttgtttgtatggccagcataacgacttattctttattcatatttgataagtccagcaaaagaaaccttaaactattcaaagatgttttaggaaaacttgaatcaaggccaaccctagattttcaaggtgatgtatataaggtgcgtaccctgttctcacattctgtacttagtgctgtttgggataagtacgaaaacacgattcgacgcatagagtccggaagctcagacgatggtgaagtaagagtaaaatattattcaacgatagagtcaaactgctttttcaatgaagaagtagtctatagcaatttatcttatttcaagtttatcaactacgcaccccagttgctgacggccttgggtatatttgggacctttcttggcttggttataggacttctcggtgtggattttaatgatgtaacgaatacaacaaatagtattaaacttcttctaaatggagttcaaatctcctttcgaaccagtatctatggcattgcattttctttaatattgaccgtgtatcagaaaattctactgggtaatcaagagtcgttaatcgtcaaaattagtgataaaatcgattcgatttttcctatgaatacacaagccgatgggattaatcaactccatgttgaacttgaaaaacaaactgcttctatccaaaggatggggactgaaatcgcagagtctgttgcgaataagttcgaatcatctttgcaaaacaccttaggacccacgctagagaagttttctcaaaccacggaacaacttattgagattgtcaaaaatagtaatcaatccacaatcgcatccttagtggataacattggaacgataatttctagctctacaagtcaagagctagaacgacttcaatctacgatcggaactatggcggagcgtaatgaaagtttattatcagagtttgaaaaaacaatccaaacgttacaatctctcgtagaaagtcaaaagtcggtcgtttcggaaactaatctgtctgcaaatagtactaagcagatgaatgagaatacttcattgcttgcgggggagcttgtcaatatcataagtggtttaaacaactttgccagtgttcagcaggattcctatgatgggcatttggagcttgtgaagaatgtcagagagacactcgaacagcaagacaagtcaatggcgctatttaaggaaaccgtacagcaaacagtctattcggctgaagtacaaaaacatgctaatgaaaaattatcggttactgttggtaaactggatgagttcaataacaactttcaaagtgttttagatagtataaagaagagcgtgggtgaattcgaaggagcaagcgaaactatttgtaataaatttaacgataccatggcaaacctcgggatgactcatgccagcattggttcgtcgatggagggactgacaacgggtctgaatcaggccattaagagtcttgatgtaattgtttcgaacgatttacgagaaattaacgatcagtacgtggtcgtagtgaagaatttaaacggatttagtgagaagtcggataagctagttgagcaactggcaatctttacggatacaaaccaagggtatgttcagctttggggagattataaagagagttttgataatctcaatcaagaaattaacaaaggtgttgttgattatacttcaaatgtcagacaaggcttgcagaacttatttaaagattatgatgatcacatttctaaggtgctcggtgagttcaaggcaacgattgagaacttcgggaactcaattgaggaacttaatgagatcttagatgagaagaacttagaaggaatgcatcaaaagacatccaagatcattcaggatggaaatacggtgttgaaagctttcgtgggtaaaatggacgagcttaaagaagtatatcaacaacaaatggctgcagttaggatgacaagtcgatga

SEQ ID NO: 10963 - DNA, 729 bp, Desulfosporosinus sp. BICA1-9
atgagtggtagacgcttaaggaaagttaaaaagcatgacgaagaaataacctactggttatcctttagcgatttaatgtctagtttgttaattatttttctactagtttctgtttatatgcttcttgattataaaaaagctgccgctcaggctgttgctgtgagcaacgaattacaagatgcgagatctgaacttgaaaaattcacttctattaatgatgatattattaaaaagatcaaagaagagtttggcgattctctttatatcgatgatactggtaccttaactttacaaagtgacttgttatttgatagtggaaaaagtgaattgaaggctgtgggtaaggagtttatccgtaaaaatatgccgcgttattttggtattcttttgaaggacccagaaattagaagcaatattgccaagatcatcattgaaggatataccgatgacttaggagattatcattatggtttagatcttagccatgatagagccttaagtgtctacacttttatttacaatgatcctgaatttgctggttatagggaggatcttaaaaattacattattttaacgggaagaagtgagacgggctttctgaagcagatgcaagatgagagtgttgaggattggagagcccgaaatcgacgggttgaaattaagtttgaattaaaatatcaagagatttttgaatatctcaagaaaagcttagacaaagagaagatataa

SEQ ID NO: 10964 - DNA, 3510 bp, Desulfosporosinus sp. BICA1-9
gtgaggttcggtttagaacggctaaaatcaatgcttaaagcaaataaagaacgaagcttaactcttgattactcagattcaagtgttcttcgcatctatcttcaggaaaatggtctaaatatctcttttcaaggtgccgatgacaacattcatttgcttgtcaatatgtccaatgcatctttggcggaggataagatttgtttagtaatcccttatgaaaatatgtatgagttttacttcgatgaggaaggcaaccctattgaagattatcgatctttaaatttacctgcgctatttgatggatttatctatatcgaaaataatggcaactttgtcgaagatgatcgtgttacatataactttcaatttaaggacggccgggagcatgatattaaacgatttagggaaaatattgttctcgtagatggctcagaaagattactgtcccccgagatgtatgactgtttaaaacttgtcacaaagtataatcaagatgaaaggctcagtaacaatattgcttcccagtttgaactattagcatctataaaagattttgcggaacgaactaacttagcgttaaatcatcgtttgagtattgaaggtaaacccgtcatagtggataaaatcaaattagatttcaacaaaactccccggggtttagaaattatgcctgttattgcgggcaaggacgaggagtttaatagctcatttgtgtcggccttcgataaatatgcagaaatcaagaatttctatacggttaaagaaaatggtaaagacgtaaaagttattattaaaaataaggactcagcaaagaaggttaaacaaaaccgtttacttactggtgagaaggagcaagatttttatagaggccaaaacgagttgcttgaagatgagaattttgacctttcggaatacggccctagagtaaaggggttgggttaccttaattatcgagccgttgcctcaccatctaataatagtgatgaaagttggtttgacttttctcaagcgtatcagacaccttcgctctatacagatgaactggttcatccttggcggccggaagatagagagatactccaggaaaaactcgttgcaatggacagagatcaaagaaacctttcggaacttgaactccaaaatgaaggagaagtatttaaggtccagctaactcgcgagcagctcatcgatgagataaccaaaataagcgatgcgtttatcgatccgagccaaattaagagtattaaagatttaaaggaaattaaagagaaatgtgaagctaactcggatcagcggtttattgaacacaagggaagatttataaaaaattacggcaaacaagaaatcgagcgacagattgagcgattaacggaggaattaaagcgccctaagagtaaacaaaaagatcctatgctcttgattaaagataatcttacagaactcgaacacactgaaggcaaacccgctccgcaatcagaatcggcttctataccctatgaaaacccagcaagcttacaaattaatctttatgagcatcagacagaaggggttcataaattacagtcgctatatcatacctcatcaacgaatggttttttattagctgatgatatgggattaggtaaaacaattcaaattctaaccttccaagcctggctcaaggcaagagggacaatttcacctagcttaattgttgcacccactacgcttattaatatttgggataatgaagatcctaatcagattggtgaaatccaaaagttcttccgaccccagacgtttaaaacatataagatccaggggattaaaagggattcctcacgcgaacttgaaactatccgccgttgtgatctggtatttattacctatgaatcactgagattaaatcacctctggctcggcaaagttcattggaaatgcattgtttgtgacgagattcaagcagtaaaaaatcctaaaactttggtaagcgtggccctgaaagcacaaaatggagactttaaaattgcctgtagtgccacacccattgaaaatacaacagaagacctatggaacattatggattttgcggtgcccggcgttctgggatccttgaatcaatttaagcgtcagtttgtaaagccaatcgatactttgagacccgaccaaaatgacgaaagaaaaacaattaatgatatcttggtacaaaagattgggaataactttctcagaaggagcaaagaggataagctaaaagatctccccaataaaaaagtagtagtccaattaatcgaagccagtgaccaggaatcgaagcgcatcgcggagattaacagacttaggcagcaaggggagccctccttgccactcattcagaaattaatagcgagttgtggtcatccaaagatagattcaaacattgatgtgaatcgtatttctccaaaggatttgatcgcggaatcctctaaacttgcttatctaaaagagatattggacccaattcgtgccaaaaatgaaaaagcgattatctttactatgtttcgacagatgcaagtaattctatttaaggctttaaactattggtacggaattcaacccaatatattgaatggtaccctatccccagataaacgatcacatatgttaagcgcttatagaaaaagcaacggctttgatgtcattatactttcccctttggcagcgggggtagggattaccttaactgaagcaaatcatgtgatccattatacgagattatggaatccggccaaggaggcacaggcaacggaccgtgtctaccgaataggtcaaaccgaggatgtgcatgtgtattatcctatgttaagttttgaaagcacgtcaacgatcaagtttgaaactgagaacaaatatctggaatattttctcaaagaaaaaacaataggaaaaacacccgacgaaaagttaaatagactattagtcaagaagaaaaatatgttgaataactttttccttgcagcgggcaatcccaaagcagatatcatcgaagattgggaggaggaagtatcgaatcctcatcaattgacgttgaacaacattgaccgtcttttaaagccaagcgaattcgaagctgcctgtagtgtattgtacaaaaagcttggatatcatactttccttacagttagtagtggggattttggtgtggatgtggtaatcgaaaaaggtggtaaatacggacttattcaatcaaagatggtcaaggaactgacacgaagtgctttagatgaagttaatggtgctaagaacatctatgctagtcagctaggtgttaatatcgacgaattaattgtaataagcacggccgaaaggataacggattcaatcaaattctcagcagaacaaaataagatatcagttatcttacaaaacgatttggaaaagctcttcactgaaaatccgatattttacggtgaggtagaaaatgaagctaaggatagattttccttagaacacttaaaaagagaactggtgtgcaacggagagacacgataa

SEQ ID NO: 10965 - DNA, 2010 bp, Achromobacter sp. RTa
gtgaacgaaatatcaaaggctttgggcgtagtgcatccatcgcttgccagccttcatggacttcctctctatgtgttcctgcttgtcgcggtattaactcttgcattcctgattggctatgtcgtcaagggaacccaggtttggtggcagctcaggtccgcacttaaggccgttcgcagtcttcttaaagcaggcccagctcccaacccgacagaggttgcatcagcttttcgacgcgagccgctgaagcacctgtgggtagagtacgccgatacgctccacgaactgcgaaaagccgggtcaggggaaaccgcgctcaccgagttccgagctacgatgcccgctgaagccatgttcaccaaagaagtgctggtcgacggacggctgttcgatgaattcacgaggcatcttcccggcgtactcactgggcttggcatcattggaacgttcgcgggcctactgagtggtctggacaaattcaaggtcgaccccgagaaagtgcaaaacaccgtcaacggactgggtccgttgctggagggagtgcaacacgcctttgtggcctctggttcggccatcgcctgcgcgatgctggtagtcttcatcagccggtttaccctcgcgtatttctatcgcctcgtcgaacacctgacgaacggtatcgacagcttgtatcgaacgggcgccggtgaggaatatcttgcccggctggtcaagtcatcagagcagaatgcagccagtacagctcagctcaaggatgcgcttgtggaggatctccacaagatgatgaccaacctggtcgaccggcagattgctgcacaggagaccgcgtcacttgcactgggcaagcacattggcgaggctatttcgacggccattgccgagccgatgaagcgggttggtgatgccatggaagccacttctcgtggcaacggcgagcaggtgaattccatgctcgagaccttgctgaccgggtttatggcgaagctggaggacaccttcggcgggcagatgcgaggcatcaacgagcagatgcagaggtcgatggattcgatggctgcggttcaggcgtcactgcaagggctactttccgacatcaggagtaccaacgaacatgccgcctcccagatgagtggaacgcttgaggatgccatgaagaaagcagcggataaccagcagttgctgaccgagcaaatgcgcgagtttgttcaggacttccgcagcctggttaccgaggagcagagcaagtccaagcacgctatgaacgaggctgtgatgaaggttctcggtgaggtagaaactgccatggaagggctggaaaacgttcggaaggcctccgcagccgaggagtctggtcggaacgacaggctggcaacacagacgaatcagctggtcggtggtttgacgactcaggttgagtccttgctcggtgcggtctctgaccaggtcagcaagacccagcgcaacatcgacgcgctgggggatgtatcgcttcgtgccattgacggaatgaaccaaggtgccctgaccattggttcggctgcccagcgcttcgaaacagcggggggtgcagtgaccgatgcctttgaccgctcgacgaaggttgcagagacgctggccacgacggctgcgtcgctgcaggccgcctcgactgcggttcagcgcgggttcgagcagtacgactcaacgcgcaagacggtggacacacaggtggctgcgttgatgggcctcatcgagtccgtcaagagagaagctggcatttctcaggaactggttaacagcatcaagaccagcgccgaagcgatgcgtcagtctgaggccgaggctcgtgagcatctcggccaagtcaatgcagccctggtgaaagctttcagcgacttcggaaacgcactggtgagccaggtcaagtccaccatcgctgagactgaccgccaccttgcccaagggactggtcatctcaatggggtggtgcaggagctcgccaatgcagtccaacgcatgaagagagcttga

SEQ ID NO: 10966 - DNA, 705 bp, Achromobacter sp. RTa
gtgcttgcacgactcgttctcaagcgaggcgccaaacatgaaggtgagagtccgttctggatttccttctcggacttaatgtcggccctgatggtgctgttccttgttgtcatggcggtgacgttggtatcggtcacgcagagcatcgacgcagctactcgggcgaccgtagagcgaagcgcggccatcaatcgggtaatgcagatgattgctcaagacccgaagagcgccggggttggtgtcgaccaacagaacttccgcatcgacctaggcaaggaggtgcgcttcgatagtggtagctacaccatcaacacgacagctggccagtttcttcgaagctacatcccggtgctcttgcgagcaaaagagtctgatgatggcaagcgttggatacgaagcatcgtcgtcgaagggttcacggacgaggatggcacctacctctacaaccttcaactcagcctcgaccgcagtcgcagcgtcgtctgctcgctgttccagaccagcggcgtggcagacgcgctgacaccagagcagctgcgcaaggtccaagagctgttcctggtcggtggctactcattcaactccatcaaaatagacaaggctgagagccgccgtgtggagttcaagatcgacttctggggattggacgagcgggttccagaagcaagcgacgtcttgaaaggcaaggagtttgggcggtgttag

SEQ ID NO: 10967 - DNA, 1713 bp, Achromobacter sp. RTa
gtgttagccgtttctgccctgcagcgtctgaccaaggacctggctgcgtcgcttgcatccatgggactgcacgcgggggagtttggaaaaccggatttggttgaaaaaccgacacgcgaagcagagcagctgttccagggatacgccaaggccaagcccagcaaggaggatgcgtacgctgccgctcgtgccttcgttcgggggcaaccgcttgatgcctggcagcgcgacctggtggcttcagcagtggccgaacctattcgtgagcaatcgggcgcgatggcgcttgcgtcgaagcgtttcccggcgctgctcaagtcctatgaggacgaagcagcacggggggacctgtggcgcctgacttggcacggtctactctattcgtatttcaacttcgaccttgaggcggggaaggatacggccactcgcgaaggatgggaggcccttcgggccttcctcgaacagacctggcctttgatggataagcaggcaggtgaggatctggtcccggactgggtgaaggtgctccgtcacgaagtcgacgttctcacggcgaagccagttgagaagtactcgagagcttatctccgcggcgagaccgaatccacggaccgcgtggcagcggaccttggcatctccccgtcgagttggttctggcacgccttggtacttggggccgtgcgtcatgcagcgagagaaattgactccgagttccgaaggttggttccccaactcatcaagctaatccagaccaaaccgggctttcgcgatgaagctattgaggtcgtcctcaaccgctaccacgggtgcaagggggcgcccccggacgaacggcttcgcgacttcgtctgtcagacgacggtctggaagaacccgaagctcaaagctgcgggtattgccacggcctggaaccgggtgcccgaccctgtatggcagatggtgttgggttgggtgaatgagcgcaacctcaaggacttcttcgacatccttgccgctcggaataacgcggatgagggcaggctggccttctggtcaaaatacctcaagcagatttgctggacgcggctggtgtttggtgccgacacgatggcgctgaagcggaccaacgctggcgtgcgggagctcatcgcgcgggaagagggggcgtacgctcaactcacgagcaagcctgaggtcgacgcgttcatgatgcagttggactcgtacatcatcatcgagttcagcaagaagccgaacgcttgctacgtctaccaggcggaccaactgccttttgaaccgtattcgcgtcattacgatggtgggacagctgacctcgcggcaggattccgagacggatgcgcgctgcggatcgttcaccgagaaggatggggcgcgcgagccgagcaagagctccggcaactgggcatcattccggacgtggcagatcctcgacgcgtgtcgtcgtctgccacaggcggtacggacacagcgaaaaacaccggtcgtgctgccgaacgcccagaatcggcgacacccagtcctgacatggcaaaactgaactcgctcgttgcgcggtttcggggtgcgtccattaatgacaagcgtagaacctcaagccggggccggttgtgggtggaggacccgctccaacggaggcagttggcctcagagctgaaggcacatggcttcaagtgggcaaacagtcgccaagcgtggtatttcccggagagatga

SEQ ID NO: 10968 - DNA, 3882 bp, Achromobacter sp. RTa
atgggtttgttcgacttcctcaagcgtgccgcgagctccaacggacaggcgccggctctaacgacgatttgggccgccgagggagtgcgtatcaagttcaacaatgacatcgcggatacgacgcccgaaggattgctcgaagccattcatcaggcgggagccgaggattcggtgctcggcgcgtacttggcgcagttggcatctgagtcgcgatgtcgggttgacgcgcacggcgtaaccattccatggtcggacgtctatgagttgcagggctctgccgagcatgcaggcgcgctgaagctgctggctcttccgccacagagcccgctccggcccattatcgacggctccggaacgctgtcttcagacgacttcactgtagaggtgtctggctggacagacggcgcgcaacaggttcaagtggaccggctggacggagcagtcgccaccgtgggcggtactacccagatgctgtctgcctctgcatgggctgcggcgtccgacattatggctctccagtcgcgtccgccagaggggcgcacccaacacgcccaggagatggcatggggacgaattcgcagccatgccgaccgtgctggagcgctgtacgccagcccgtacctcgaaacgacgttggtattgacgccggagagcctgcgcctccccctggcgaaggaggagacgccgttcggccgcgtgctgacggtttccccaaccttcgacggcgcgccagacggatggttggccgccttcgatggcttcaattcggtgcagccacactacgacctcacgcggggcgtcgggcgcgttcgcgtggtgatttccgagcccgtccgcaaggtactcgcggtcatcaagcgagaaatgccaaaccgcaaggtggccggtgccaaggcggaaaaatttgttcacaaccccttctctttcttgggagagaccgcgcatcaggtcctgaaagaaggagagtttgaggcagaccgggcggaggcaggggccgttgcggcagtcttcagcatcgtcggccggaccgaacacgggcgcattaactcggtcgacctactgatcaccgagcacttcggtgacggcacagcgcgcacggacaagaaagcgttcaaaaccgccgacgacctcgacgcgttcctcggtgcgctgaaatcggcccttgagcaggaccgggagcatttcccttgggatgagtacgacctgaccgtggatgccgagtccaccgtacagcttgaacaaggcttgcaggtggcacatctttggcgcatgcagccagctcagcgtatcagcttagacgatgtctatcagctcgatggttacagcgggcgcattgaaggaattggcgcggctaagcctatctacgtgccggtctttcagcgcgataagacgcaaagcgaagacgagtccggctggttgcccacagacttgacgccaatggtcaaggtgacgctccaggggcacgaaggtcaggtgctcatcccattgaccaaggaatgggtcaatgactttgacaagcaggtcagcgacgcggagcgggaaggggcagctgaagtaaagaatgccagccttcccacttcactagagactgcgcaagcgcgcaccctcgccgacgggttcaaggcgatgctcggtggccaggaccgcgtgaaagtcgagggagaatcaagaccgaaggagaaaaagggcccacgggagacgctgctggtcaagaccaacttccatggagtcgactatctcgaagagcgtcgcgcgaccttggctttgcccgagggctgggaagctcagctcccgcgctcgctgcgacagtccatcaagttaaagacgcatcagcttcacggcgtagcttggtttcagcacctagtgtccaaggctccggcagagtgtcgaggggccttgctcgccgatgacatgggcctagggaagaccctgcagcttctgtcgttgctcggttggtactacgaggagaaccccaacgctgcgccctctgtcatctttgcgccaaagagcttgctggagaactgggccaacgaggcgcgcaagttcttcagcgactctttccctgaggttctcgtcctctacggcgacacgctgaaagctcgaaaacaaccgctcagccttatcgacagccagttgcgtgataagggcatcgtcgaactcctgaagcctgactgggtcgggaccgcgaaggtcgtggtaaccacctacgagatactaacctcgtacgagttctcgctggccaagcagccgttcacgttcctcatctgcgatgaagcgcagcgaatcaagactccgggcacgctggtgacactggccgcaaagaagctgaaggcggacttccgtatcgcctgtacggggacccccgtcgagaattcgctcgcggacctgtggtgtttgtttgatttggtgcagccgggcctgttaggtgcgctggaggagtttgggaagacctaccgtcgccctatcgaatgccagaccgaagaacaggtgacagcattgcaacgtttgcaggcagcgattgctccgcaaacccttcgtcgtacgaagggcgacatcgcggcggaccttccgaagaagttcttcgcgtacaaaaaggccgcggaggctgagttgcaattcaagcctcatcttagtgatgacgagatgcttgagattccgctcacggagcatcagcgtattctctacaaggggggcttgaagaaacttcaggaagcggcccacgagtcgaatggtcgaaaacgcgcccaactgtcattcggcgcgcttcacctgatgaaagcagtctgtgctgaaccatactgcctgccaggcacgaagttcatcgtcgacaagagtggacgtgaaccgcatctagcgaactcgcccaaactgggttggctgctggcacgattggctgacattcaacgcaccgaggagaaagccatcattttcaccgagctgcgggaggtccaggcggcactgtactactttcttaaggagacgttcggcctgcgtccattcatcatcaatggggactctcaggggcgtcagggatacatcgacaagttctcagcgcagccaggcttcgacgtcatcatcttgtcgacactcgccgcaggtgcaggactcaacgtcaccgccgcgaaccatgtcttccattttactcgtgcgtggaacccatccaaggaagcgcaagcaaccgaccgagctttccgcatcggccaggaacgggacgtttttgtctactgccccaccgtagtggcagacgacttccacacattcgaagtccggctcgaccaactcatgaagcgcaaggctggattggcaggctccacgttggacgacggtggtttgtctggggcgttaactgtaatgctcaacggctcaggcaaggatgcgacgttcacggagttggtcggggacagcgggtgcggcgaagcgcttccgaagcgatacctgacaatggacgacgtcgaccgcatggacggggacagctttgaggtgttctgcagtttgctttggggcaagagaggcttccaggcgacggttactccgaagcgcggtggtgacggcggcatcgacgtcgttgcactaaaggggcgtgaaggtgagctcctccagtgcaagagttccaaggcctctgatgtggggtgggatgccatcaaggaagtgaccgccggcgcagcgaagtaccaggccaggttcagaggcacgcgattccgtcggttggccgtgacaaatcagagcttcacgactggagcgcgggagcaggccgcagccaaccaggttgaattgatcgttcggtcacgcctggatgagatgttgggggcccatcccgtcacgaaccacgagttcgacacggcgctgcaggagcagacgctttactcagaagtcatggcttag

SEQ ID NO: 10969 - DNA, 1788 bp, Thalassotalea sp. ND16A
atgttaactaatatggaattaagtgcgcttgtatctactactagcatttatgtttattgtgggatcatactgcttctggcgatatggcattttataaggttttattttttcaccaaacctattatctcagagttgaaagatgctattagtcgaataaataagtctgcaagagaaaaagtggcattcccggaagattattatgattttaaagaatggatggataacacaaattacctcaaagacagttggcgtgagtttgaagaaaccttactgatacctggagaagactttgatgatgaacggcaggtcatattaaatacccacttaacttccgtacactttaatcaaaaaaatattttatggcacagagtaaatatgcgtttttacaatgccttgccaaatatgttaacaggtttaggtattatcggtacttttgtcggtttagcagttggtatctatattgcggcccctggcctgaactcagacagtattctagatgctaaggaagcattaaatagactccttgatggcgccgcactcgcatttattacttcaatagtaggattagcgtcatccttggtcttttcataccttgaaaagggtaggattcataagttcaatacgttctgtcaaagcttggtatcagaaattgatgctagagtagaatatttttcggcagaaagacttgctagcaagagcctgaatgaatcacaaaaacaatcttttgcacttgaaacctttgcgaatgatcttgctgtttcccttggacaagttattgaacagcaggtatctagacctgttgttgaggcaattaatgcacttaaagaagagcaaaagtcagctaatgatgaaactttagagaaacttatttccgaattttcaagttctatcactggagccgcgggcgaagaaatgaaagcctttgccacgacaatggactctgttagctcaaaccttgaacaacaaatgactgctatgacagaaaaccaatctgaaatgcaagagtcgtcaaagagagctgtagaagatatgtctgatgctatggtgcaaggtagtcaaaaaattagagatgagatcagtggtgcggtcgcatctctagctgatggtatcagtaagtctttagaagccgtttctgaaaaactaaacaatgctgctgaagttttatcggaaaagcttagcgatagtataaatggctttgatacagtgctaaataaaatagaaaatatcagtgaaaaatatgaagctatatcaaccaataccactgaattacactctcaactcaacaactcaatagaaaaagctggcgagacagtacagctagccggggaaattaatggcgccttcaatgaatctattactgagttaacggaattcactaatagtgtcgatagatctgcttccaccattgtgaaatcaactgaaaatatgcattctctagttgatcaaattaatggtatacaggaaactcttaaaacacactgggataactataatagtcgttttgaatctgtagaccagtctttatcaaattcaataacatcattaagtagcggtcttgatggttatgccagtgctacaaatgattatattcttggattggataaacatgccgcgcaagttgtgcaagatttagcttcggcagttcaagaagttaatgatgcaatggaaacaatcaatgaaaccttagattctcaaaaaacatctttcttagattccgtaaatgttatatcaaaccaagccctgaataatttacagactttaagtgataaatcggttcaacagttgtaa

SEQ ID NO: 10970 - DNA, 786 bp, Thalassotalea sp. ND16A
atgagtgaacatcacgatttattagaagatgaaggagcgggctaccttatatcggttagcgatatgatgtctggtcttttatttattttcattataacgcttgttgcctttattttaaattttcaggatgcaattcaaaaacaaaaaaaggttacagaaacccgaaaagaaattgtgagaaaattaaccaataccgaacagattagaagtgagttattaaaaagcatacaggagcaacttcagagacagaatatcatagttgaagtagacaacgaacacggtgttttaaggttgacagagcaggctgttttatttgaaaccggcaaggaaactctagacgaagcaagtcacaagaacttacaaataatcggcatggttatgtcaaaaatattgccatgctactcccaaatgccgccagacaattcattatgtgttgatatgctccaattccaaggtactttagatagtgtttttgtggaaggtcacacagataatgtaccaatcaattcatggcgttataaagataattgggatctttccgctcaacgagctatatcagcatatcgatatttagttccggggtcggtattaaacgatttagtgaatacttcgaaccaaccaatattttcagtaagcggttatggtgaagggcgcccggtagaaggccataaatattctgtcgcgacaagtgatccaacgaatagacgtattgatattcgttttatcatgacaccaccaagcttaacatctacccaaagaacattgattcaagaaggcgttcaataa

SEQ ID NO: 10971 - DNA, 1173 bp, Thalassotalea sp. ND16A
atgaaaacgcaatcattattgaaatcgattggaaattttagtcaagtgtcgccttccttaagcgaatcgctattggttaatgctgcaaagaaaataactgaagagtttggtttttctgcggtcgaagagccaataaggtactcaattgaagaagtgttagataaacttcttcaaattaaaaacaaagaattaacttttgaacagttgagtcggaaagagcatcgattagcgccttgggcactatttcaaacatataatgaaaatgaaaaacttattgattctcaagagtttgtaaagcactttttagcatataccaaacttcatacaggtcaatatacagcacctattctgatacatttatacttactgtacttcccggtgcagtcagctgtttttgaaaatttaagaacaggtataaaagaaattattgcctcatatgattccaataaaatagcacttctaaaagcttggaccgagggaactctgatattagatccgggtgctactctaaactttgccagaaactgtatgacagatggcgttgaagagacattcaataaatataaattatctaaatctcttgctacagggcagtttgcatgcttcggtcttagtcaactattaacattattaagctcaagcctctcaaataaaaatgagaatgaacaaactgaaataattacttcactcttggaacaattaatttctaacgatgaattacattaccccacactaagggctgatatagctgatggtttattgcagtcctacaatatcaataagccatcacatgctattaaaaaagcattgaaagaatttttcattacgttttatggcgatattagaactgaaaaaacacgatggattggcgtttcggaagaagccaaacaagttatgcaacaatggatggttgagaatacccttaatgactttttcgcattgttaagccatgtttcaagaaccgattctcaagcagatcatcattggcggtatagaaagcgtttctggaacgcctaccttcaaaaaggtgtgatcaccgaagcttgggttgccctagggcctgtcgcaaatgatcaagcgagaaaattccttaaatcagataaaaatgtgtatgcgagtttatcgggggcacaacgtaaccatagtgctttaataatggttataggggattga

SEQ ID NO: 10972 - DNA, 2190 bp, Erwinia iniecta
atgtcctggcttaattcccttttagtgacacttacatctgtggagccccataaggtacctgtcactgttatcggcctcgttacctttgccgtcgtatgctttattttcttttatttggtcagagccatcagaattgtaagtggcctgaaaaaatacacacaatcaattaacagcattgaaaaaagtgagccagaggtccagctagtacatctgcaaagcctgtttcagcagcctggactcaggcatgcgtggaacgagttcgaagaatcgttgcacccacagcgtgaacttgaggacggggaagaaaaaatcgttcgaattcgcgctacagcaccgagcgcaagtttcttctcagaacaacaaatcgttgatattccgctgaacactgagttcttcaaacacctgcctggtattcttactggtgtggggattatcggtaccttctacggactgatgattggtctcaaccatttcgatcccaacacacctgagcaggtcaccagcagcgtcaataatctgctgcacgatgtgttgtacgcattcctgggctcggcatttgctatttttgcttccattcttatcacctggctggaaaagctatccatcgccaagtgctacaaatatctggaaaaattcactgcggccctggattctctctatgacagcggcgttggcgaggagtaccttgcctcgctggtgaaatccagtaatgaaagcgcaacccaggcgcgccatctgaaagagagtctggttaccgatttacgcgatatgctgctgcatctggccgaaagccagaaagttgagaacgagcgcttggcgaccacgcttagcgctacttatcgcgaatcaggacaacactttgccgagcaagttagtggcgcaattgaaaacagcctgaagtcgccgttggataaaattgccggtgccgtgcagaccgctagtggtgatcaaagcggtatagtgcagaacatgctacaggatgtgctgacggcgtttatggcgaaactcgatactacttttggtcagcagtttacaaatctcaatgacatgatggggcaaactgttggcgcgattcagacaatgcaaaccggttttgccacgctattacaggacatgcgtcaggtgagtgatgattcccgtcagggtagcgcgcggctcatcgagcagctgctgtcagagatgaagtctggccagcaagctatgcaggctggtatgaatgacatgctctctagccttcaggtctcagtggctaaaattggcgcagaaggtgagggggccggtgagcgtatggctcgccaacttgagaaaatgttcgccgatagcgaagcgcgagaaaaagcacagtcagaacatatggctgcctttattgaagctattcagaactcggtgcagcaggggcaaagcgccacaatggaaaaaatggcaacctccgtcgaagcccttggagaacaactgagtagcctgtttgggcagatcgataagggtcaacaacagatttctgtaaatcagcaagtgaatcagcaatcactgcacgagcagacgcagcgtgtgatgaatgaggtagacgatcaaattaaacaattgattgaaacggtttccagccagcatcaaggcacaactgaaacactgaacaaactcgcagaacaaaccaaccgacagattcaggatatgcaaagcggtgcagaaaaaatgcgtgtggcggctgaacgctttgaacatgcaggtgatcgggtgtcggaagctaatcaccttactgctgaagtgctgaataaagcgcaatcagcaggttcatcactctcccttgccaccagcgaactcgcgtccgttgtagctgattatcgtaataatcgggaagccgttagcaaatccattgccatgctagaactgcttgccgcaaatacgcagtctgaacaaaccacgcgcaaccagttcattgccgatcttaagcagcacggtgagcgtctgcagagctataaccgggaagctcaagcctttatggaaaatgtcagtgacgtgctcgggaaagggtttgaagatttctctgaaggcgttttacgcagtctggataaaacactgggtaaacttgatgtcgaaatggctaaagcctccagtctgctcgccggttctgtcgaacaaatcggagaaagcgtcagtgagcttgatgatgttctgtcgcgcgtacgtgcctga

SEQ ID NO: 10973 - DNA, 741 bp, Erwinia iniecta
atgtttggaaacgcatttggcgttaaaaaacgccgcagcgatgaagcagagaagccattctggatctcttatgccgacctgatgacgaccatgatggtgttatttctggtcgtcatggttgcctcgttgagttccgttacacaacgtattcagcgtgcagagcaaggcgaaaaaacaagaggtcaggatatatccagattgtgtgagcgactggaattgcatgcccgtaacgtgaacaaaactatcgtggtggattgccacgataaccgtatcagttttggtgaagccgggcgtttcgatcacaaccgttttttcctgaacgctgaaggacaaaaagcactgcaggatgttgttccgctggtgctggatgcagccgacagtaaagaaggtaagaagtggttcaagcaaatcgtcattgaagggtttaccgacactgacggctcatatctgtataacctgcatctctccctgcaacgctctgaatgggtaatgtgtagtttgcttgatagccgcagcccgctgcaaaaaagtatttccgcagaacaacagatccaaatccgtaaacttttccttgcgggtggcgtctctttcaataatgccaaggaaagcaaggaagccagccgacgcgtcgagttacgtatgcagtttttcgggcttaaagacaagcgtgatgaggccgatgaggtggattttccccctgtcgttaataaagaagtctgccagttggtgatgccccaatga

SEQ ID NO: 10974 - DNA, 1683 bp, Erwinia iniecta
atgacgcccgctctgaattctctttctcagcgcattgctgcgaggctctcttccagtcaaagggatgacaattatctacataatgatttccatacgttggcctccgcagccctcgatatggaaaaacggtttgataaagcagaaaaaattccctcaccaccacaacaaatgcggctggaggctctgcgtcgccttcgtcttgcaaaagaactcacggagcgagaatggcggatggtcttttatggtcttgccgataacgatccgttatatcctgaccggccaatcttgctagaggatgatgtattttttcctgaggtcgacaacgctatcaaaatacggcttgtatctaaggaattgaaacgcaaggattgggcagcgctttgttcaagttattttgcttatcagcatgagtctcctgagacaaatccacattggtgcgtactacgtgggcatatcgctcaaggttactttgtggtgaaagctgctatacgacgagaaaaatcatggatgaaaactatcgagttttaccacgatatttttaccccgcaagctgggggcatgatttccagacagctacttgcaggtgaaagcaattcactttcatcattagagaaaatcgcgcagatccccgaaagcagctggttatggaagcgcattttcacggtgcttttagcgcaactcgacacactcgacgatccgcagtttctggaaaaaattagctggttgttaggtctggctgcgcagtgggtacgtttccgtgatgacatcataactgcgaccctgactcgctattatcattctatttatcgtgagcaggtacattcagcgctgaagcaggctgccctggaattctgggataaccctcaactgaaaagccagcagaataaatggcatcaatatgtctccgagtcggttgttgcaatggtccggggatggttagcaaaacaggatctgacacatttctttgagctgttgcgcggaaacggtgatgttgaccaggcaaggctgcactactggctgcgtttcgccaatcagatgggatttactcgtatcgtgatggggctggatgccagacaagatcggcgtagcgactttgtgaaattccgtgaggataatcgtgggcgactgagccatttgcatggtgggcgaagttttgataatgccatgattatgcagatcaatgattatctgttcgtcgagttttccgggacaggaaacgcgatgtatgtctatcgaataggtcacgcgccatttaaccctgaatcacgcatacttgatatcaacatccatctaaaagatcagggacgctgcgcactaagactgccccatgcacctcgtgctgaggggtataacaaagtccggataaccggctggatgttgaaatatgatgatgagcttcgcaagttgggtattcgttggatggcggaagagcccgtcaagtttgtcgataagaaagggtcctctaccgcttcgttatctgctatcaaaatcatgaatccattgcgtgatacagcgatacagcacctggtcgaaggtgcttcatgtatcgtcagcgataatagacaaaaaggcggagtactgtccgtacagctcaagatgcctgatgacgcaatagaaagagagttgttacgactaggctttgcgcctgtggctaaagaaccgcatcgttactggatcaaataa

SEQ ID NO: 10975 - DNA, 3252 bp, Erwinia iniecta
atgctgaaacgtctgttaagtaaattggcgggaaaccgtcagcagatagaacaccatcttaagaatcactatcaggttgaggaaaatggactcagctttccgctatcgctggttgatgattcgcagctttgggcactggcatcctggcttgaacaactggctgaagaagactatctgatatcgctaacagaccgatggttgttgagttgggatgccttgtaccgtcttctggatgatgacgaacatgccagcagcctgcctcttatcggagtgcctgagatactgcctttacgcgcaagcctgagttcacgtggtgcattaagcgatagtgattttcgcgtctggattgctgactgggccacgcttcctacacgtcaccccatccgtttcagccgtactggtgctatttttacttttgataatcaacagcacctgctatccagagaaaactgggtactcatacaggcaacagaacaacttagtgcgcagcaaagtcaggctcccggtgaaaccactaaccaacttggatgggccactatccgcaaatgtgcgaaacaagcctccgcaaaatttgatgactatttagaaaagacgcacgtcgtcaaaccgacgtcattgtcattacgtttgcgtaaagcaacagttgccgatactgcggttatcgagattgaaccccatttcgaagaccagccagctaactggttgggtaattttgataagaattcgcaggttcatgatagctatcgtatcccaggagaaaatggtgaacttagccacgtcatcattactcctgaagtgaaagaggtcctgaattcaatacattccattccaggtcgtcgagtggccggaagcgaggcgctttcattcgttcgcaatccctacacatttcttggtgaagatgccgccagtgtgattgaccctgaagagcatgaacaggcactgtttgatgctcatattttcttccatcactttaggcttcaacctcgtctaaatgatgagaataagatagagaatattacgttggttctggagccggtctcgccagtacagcaaccggaagtaaccttcctcttttccgccccgtgggagctggataaatttgttcaggccttgggtatgagcgttgccgcacaaatgcctgcaggttcctggcaaggttacgagctggaactgagccaattcactgaacaacaatggcatgattgccagtcattgctgtcacgctggcaacaggaaatcgaaggtaaagaatttaacgatgtcctggatattggtaaatatggcgaccgtgttatcggtattggtaagtttgaaaaaatatcctcgccttggctcaccaaagctcaaagcgaaaattggctccctgatgacatcgatttctctgcattttcgattgaaacactagcgggttggcaacctgaaaacctgcaccattttgatgaacttcaggagaggattacccaggcggaagcggctggtgaaacgcatatcaccccaccatggaatgacgctgtattacagctgtatgccgctaaaaccttgagtaaaaactggaaaaaacaacaaaatacggcaaataaatcacagggaaacgttgccgataaagcagcccgagccgtactaaaaattgaacagaatattgaaaaggctgcctacatcaagcagcgccgtgattcgctcctcaatgcgcgtcatgccgagcctgaaattcctctgagccttaaagagcatatacggctcaaagaccatcaaagtgaaggtgtggcctggcttcagcaactcttccttcgttcacctgaggaaaccacaggttgcctgctggctgatgatatggggctggggaaaactctgcaaattctaagtttcctggtctggttcattgaaaaattcccagatgaaccaccaagcctcattgtcgccccggtttctcttttagataactgggaacgtgagctggataatttcttctacaccgctggtgttccagtgttgaaattgtatggcgagaccattaaagcggtgaaataccccaaacaatctatacctgctcatctgcagtctcaggggatcaaaaacctgctcaaacccggctggcggggtgaggcgaaaatcattttgaccacgtatgaaacgcttcgtgatcaagagttttctctggcacgccaaccgtggtccattatggtgtgcgacgaagctcaaaaaattaaaaacccggcagcattaattaccattgcagcgaatgcggtacaagccaggtttagagtagcctgtaccggcacaccggtagaaaatacgttggtagacctgtggagtctgtttgatttcgctcaaccgggtttattcggggcgctcaatgactttggtaaacactatgttcgccctattgagaacgaagcagatcgtgatacagaacggctggaacgtttgcgagccttgattgaaccacagacattacgccgaactaaagaagaggttgcgcgcgatctaccgcaaaaaattgaagtgaccagttgcaaacaactaccgctttccggccctcaaaagcaactgtacctttcttcaattgccaactggcaacaacaacaggcactaagcgagggaatgcagcaggcgggtgctggaatgttagggttgttacatcgactcaaactcatttgcgcgcatccagcagtggttagccctgagcctcgctatcaggaaggctcgccaaaacttaactggatgctgaaaacgctggatgaaattaagcacacgagtaaagacaaggtgattatcttcactgagctacgcgatctccagcgcgagatacagcatgcgatacagaagcggtttggcttccgcccggtaatcatcaatggtgatatcagcactaaaagtcacagccagaacagccgccagcgattaattgatgatttccagactcaacccggctttggcgtgattattctttctacggttgcagtcggattcggtgttaatgtccaaaaagccaatcatgttattcatttcactcgctgctggaatccagccaaagaagatcaggcaacggaccgcgcgtaccgaattgggcaaactaaagatgtgtatgtctattacccgacggtaagagactctgaaatcacgacgtttgaagaaacgctggacgaactccttcagcgtcgacgttcattggccagagatatgctctgtgctactcctgatttgaatggtgctgatttcgaggctgttgttgccaaaaaagcttcgatttga

SEQ ID NO: 10976 - DNA, 2190 bp, Erwinia iniecta; identical to SEQ ID NO: 10972

SEQ ID NO: 10977 - DNA, 741 bp, Erwinia iniecta; identical to SEQ ID NO: 10973

SEQ ID NO: 10978 - DNA, 1683 bp, Erwinia iniecta; identical to SEQ ID NO: 10974

SEQ ID NO: 10979 - DNA, 3252 bp, Erwinia iniecta; identical to SEQ ID NO: 10975

SEQ ID NO: 10980 - DNA, 2064 bp, Acinetobacter sp. neg1
gtgagttttttagctattgcagagtttttacagggtttttatgtcattccaatagcaatggcaattttcgtttctgtagtgatgtttttctttgttaaagaatactggactccggccaaacgcttagctaaagagcttgatgatattattaaaaatgtcgatgaaggagtgaattttcaagaaagtaaaaattcactaaacagtcttttgtcagcgaatcctactcttaaacatgcgtgggaaaattataaaaactctttacatgatattagagaagaagttgatggtgagtttcagataatttcatcgaggtcaacggtctcaagtgacatgtttttttctcaaatagcaattattgatacaccactaaaagttgatttttataaacatattccaggaattattactggtgtaggtattattgcaacatttttaggtcttttattcggtttactcgcatttgatcctgctggcgatcctgcgaaggtacaaagtagtcttgctctactgttaggtggggtaggtgaagcattcatggcttctggattagcaattttgatagctatgctcattacatggaaagagaagttttggttaagagagtgctatgagaaattggaacagctaacgactgtcatagatttaaagtttgaacctgatgaaacaagtgaggaatacttatctcaattactaaaatcatcacaagcaaatgaaactaatgctcgtcaattaaaagatagcctagttaatgatttaaaaactatgatgactaatctaattgatgaaaataagaaaaatcaactagcgtttactgctcaattaacggaaagttatagcaagacaagtaaagagatggcagatcagataggtcaatctatttcggatcatttacaagccccattagaaaaaattgcttccagtgtccagcaggtgagtggtgatcaaagctctgccgttcaggaattaatgacagatgtgcttacagctttcatgacaaagttagaatccacattcggttctcaaatgactggtatgagtgaaatgatgactcgatcggtatctgccatgaaagaaatgcaactaggttttactcagttacttacagatatgaaagtaaatagtgaaagtagtacaaaaaatttagaaactcagatgaacaaaatgattgaagatattcagtcaaaacaaaatgcaatggctgagcaaatgaattcaatggtagatcatttaacgaaaggggctgaaaaaattggcgaacaaggtcaacatgcaatagatcaattaaatggtaaggtttcagaacttattgagcatatgggcggaacaatggccaatgtgatggctgatattgctaaacaacgtatacaacaagatcaagtcattgcagataatcagcaaaaactacatgaccagtcatcaactttaattaatgatttgggctcagagatcaaagaattaattgtacatagtcaaaatgctgttgatgcatataaagataatattcaaaaactgacacatgtgactactgaaagtattacagggatgaacagtggtgcagaaaaaatgcgtctcgcttcagaacaatttaatagtgcaggaacttcattgattagcgttacggataagacgtcacagcttatctcagaagtaacagctacttctactcatttaactagtgcaagcaataatcttctttctttattaagtgattataagaactcacaggatgctgttaataaagcaataggggctcttgaaggtctaattcaacaagcgcaatctgaagctggcatgagtacgaaaatgctagatgatatgagtcaaatgacaaccgcattaaatcaagtgaaaaaagagatacaggactatcttgaacaagttagtggtgtactatttaaaagttttgaaagttttggggcttctgtcgaaacaagtcttaatcattcactagggatttatgataatacacttgatcaagctgttaagcgcctttcgagtggagttgaaggattaggtagcttcgtcgaggagctagaggatctcgttagacagaagaaaagctaa

SEQ ID NO: 10981 - DNA, 732 bp, Acinetobacter sp. neg1
atgttgggtaatcggtactctaaaaaggcacgacataaagaggaagctgaaaaaccattctggatttcatttgcagatttaatgacagctctaatgactctttttctcgtggttatggctgtatcgctgatgattgtgacgaaaaaaattaatgaagctactcaagctgaggatcaacgaagtgcagaaattttaaatatttgccagagtattaagcatagtgcgaagttgaaagacgcaggaattgaagttgattgcaaaaataatcgaataaattttggcgaggctggacgtttttcacataatgattatcggttaaatgaagttggtcaaaatcgactcaatacaattgtgccgattattcttgaagaggcgaataacccacaaggtgaaaagtggtttaagcaaattgtaattgaaggctttacagatacagatggttcgtatttatataacttaaatctgagcttacgtcgttcggagtgggttatgtgcagtttacttgatcccaaatttagttcaggactatctttaactgaacaacaaaaaaatcaagtgaaacaactatttcttgctggtggtgtgtcttttaattcagctaaagatagtaaagaagcttcacgtcgagtagagctaagaatgcaattttatggcttaaaagagaaggagtcctctgaacctcaacctcattttgtttcagctcctattgaaacatgccaattagcgaggtaa

SEQ ID NO: 10982 - DNA, 1419 bp, Acinetobacter sp. neg1
atgccaattagcgaggtaatgagtgtgagtattgaaaatttaaaactacgcttagaacaaaagctcagcgattcttataatgaacaatatatacattcaaaatttctaaaacctcagcgactaattagaacacttcacattcttgaacaaaagtttgatgatttggagaatgcgattcctttagatgaaaaaatttttagaacaatttctaaattagagcattcaggttttgagcaatttacacgcagagattggaaaaatttagcttgggctttaagcaagattgtacctgatacaaatgaaaaactactttttagtgaaataggtaaaaggattattcatcattttcaacaagcggaaattaatcttataggattggtgtattttccgttattatatagctattttgctctagaagacaatgatataaaagaaaagccagcaatttgggttcagttaagagaaatactgaaaacacacagatcaagcgtttataagggtttaaagcgaccaaaaaaatggatgaatacacttgtagattattccgaactcttatcagaatcacctactaaagcatttgtaaatagatttatacatgatcaagatgcaactgggattcaaagtgatctagaaagtttaaaaatagccgctaatagctggttttgggatgatttaattaaaaactctattcaagctgtcaaagtaatgggtgaagatgagtatttaagagttattcctcgcttcttaaaattagctgaacataatattttgtataccactaacattcttgtagctttattagagagatatgccagaactgcaaaaagaggagcagtgcatgaagatttaaagcatttagctttaaatcagtggggaaatccacaatatgattcttctgctggctggaataatgtaaatatagatacaaaaaaaatggtcattcaatggtttgtacgagctgacctagaagctttttttaaattatttagttcctcagcagatgtaaatcgtttcgattattggatcaaatttatcgatcagatttcattttctcaaattttcttagggccaagtgcattacaatcagtacaaccacagcataaaaaatttcgtgatttaaatagaggacgtttgaaggatttagtagattcaacttcatctaacaacgcttttatgttaaaaattggtaacttatatattatcgatttttctgatactggaaatgcttgttttatatctccgaaattaccatataaagataataaacgacgtgtctctatttttgagttaagagcagatcatattgaacgtttgattcatactaatggttggcaaaaaagatttgatgagagcttagcaaaaagagggatttttgctaaatctttagaaaaatcttcccgtacttcgacttatagataa

SEQ ID NO: 10983 - DNA, 3210 bp, Acinetobacter sp. neg1
atgaaattagcattttggaaaagaaagaaaaatactgatgttgtaaaagatgatgagttgaaacatatttcaaagctcttcagttataacgagcttggtattactttttcaagctcacaaaatgctaaaacagatgcagatttctattggcaaagtcttgaagaagaggagttagcttatctggtagatgggcactacgtacttccttgggaagagctctttcaaattctacaggatgaagagcataaaaatgttattagtttgcttaacctgccaaaacaaacttctttccggccagtgattaaaagcgaaggtggtttaagtgattcgaattttaaaattattctagacggctggttaaatgaaaataatgttaagattagaaatattcttcagcgtaaagggagtattttaataatagatggagtagagtatctattaaatgaacagagttttaggcttattgaacaattaaaagagttttcaagattagaaaataaagataaagagttaaatcagaaatattgggctaagattcgaaatttagcacacaaagcgaatgcaaatttagatgaatttttaagaaagacggtagttcttgcacctgagaaattacaattaaatcttcgtaaaaatttaataagccaagaatctgttgttgagattcaacctacatttgatgaagctccatctaaatggttaaatacatttgatcaatataatcatgttcaggatcaatacagtatcagtctacccgatggtggtattgcacacgttgtaattccttctacagtaaagcaagtactgactgaaataaaaaaaatgccaagtagacgtgtttcgggcgaaagagctcaggcatttttacataatccatttgctcaattaggtgatgatgctgttgatgttatttcacctgaaagttttgaaacttcaaagcaggaagcagaaatttatacttatacattacaattagaaaaaaaatatgatgagttaaagcattacatatcagcaaaattagagctttatgaaaactctgaaagagaacagaatcctattctattggagctacataatttagatcagactttatattttattgaagcttatgagaaaaaatctccattttttttgtgggctggatatgaaatagaacgaaataattatttagatcatcaaattcaagatttaaaaaatgatctaaatgtaataaagcaatatgaagatgagcttcaaacaaaacaagtgctagatttatctaattacagtgaccgtgtaattggtattggagaagcagaaaaacttaactctgaatttattaaaagagatagtggtgaatcagaatggttaccacaacatttaatggatttggagcagcagttgcaagataaaaatatagagcaaaatatagagcaactagaaaaaagtattagacacgcagaaaaaaataatttaaatgaaattatagtaccaaatacggatacaaaattatctctcgagcatgctcggactctattaaatcaactacgtacatcaaaaagtaaagatcaagatgaaaggttggaagaacaggaaactacacaacctaagaaaaaaaaggataccttgttaattgcgaacaatattgatgaggctgaatttacaaaacaacgatccaatctattaatttttgatgaacataattctccatcagcaaggttgccgacaagttttagaaacactgaatttagtttaaagcggcatcaagcatatggagtagcatggttacagaatttacataagtatgcgccagaacaggtaagtggatgtttattagcagatgacatggggttaggtaaaacacttcaattattatgttttattagtgaatatctagaaaatgctgaagctaagaaacccgtattggtagtcgctccagtttcattattagaaaattgggaagctgaagctagtcgattttttagtaatagatttccaaaaatattaagtttatacggtgataaattaaaggaaagaaaaattcctaaacatctaatttcagcacagcttagagaaaatcatggtattacaaatcttttagaggaagattggcgtggtgaagcagatattgttctaacaacatatgagacaatgcgtgaccttgagttctctttggcaagagaagactggagcattatgatatgtgatgaagcacaaaaaattaaagtgccaacagctatggtaacgaaagcggctaaagctcagaaggcagattttaaaatagcatgtacgggtactcccgttgaaaattctttaactgatctttggtgtctctttgattttatacaagaaaacttgttaggcccacttaatgagtttggaaaagtatatcgcaaacctatagaaaacgtagatggaactgatgaaacggcacttataaaactgcgtgaaatcattgctcctcaagtcctaagaagaatgaaacatgatgtcgcagatttacctgctaaagttgagatcaatagctgtaaagatatcccaattagtatattgcagagacaattgtatattgatgtagtcaaccgattcaaaaagttgactgctgaaggtaatcagggagcaatgttaagttctttacatagtatgaggatgatatgtgctcatcctttacacttttacccaactgcaggtttaaaagattctccaaaagtagattggttgtttaaaacattagaatcaataaaacaaaaaaatgaaaaagtaataatatttactgaatttagagatatacaagtttttctaaagagaattctaatggagcgctttggattaaatattacaacggtaaatggtgattctaataccagtagcaagaaagggttaaccagacaaaacttaattgataaatttcaagaaaagtctgggtttaatattattattctatccactaccgctgtaggatttggtgtaaatatacaacgtgctaatcatgtgatccattatacacgtagttggaatccagcaaaggaagatcaagcgacagatcgtgcatatcgtattggtcaagataaagaagtatttgtttactatcctactatatctgctgctaaagactttgatacttttgaggtgaagttagatagacttttagaaagtaagagagagcttgcagatgatatgcttaaaccgaaaacagatgttggtaaagagttaatgcaattaatagattaa

SEQ ID NO: 10984 - DNA, 2193 bp, Pseudomonas endophytica
gtggacttttcgacattattgaaattgtggggcgacgccagcactgctcagctaatagctccgcgtgtagtcatggtggccgtggcagtcttgtgtctttggtacatcggaagatatttcatcccatcgttcgtgttgagcagaaggctcaagtcgcttacgagtagcattgctactatcaaggcaaagtcgcctgatcagcttcaagcagagctgtcgaaagtattcaatgcgacaaaactgaagcatctttggaaagagtattcagagacccttcacaatcagttcgaatatcacgaaggcgaggatcgcctggtgcgctcccgtgcgactactgtcgcggcgaacttttttaccggtcagagtgttgtcgatacaccgctggctactgaatttttcaagcacctgccaggcatcctgacgggggttggcattgttggaaccttcttcggcttgatgctagggttgcagcacttcgatccaagcacgccggagctggtcaactcaagcgtggacaagctcctgaaggatgtactctttgccttcatcggttcatttctctccatcatggcgtcgatcatcgtaactgtctcggaaaagtggcgattagggcgctgttacaagcaccttgaatcgctgaatgaggcaatcgatagcctattcgacagcggagttggcgaggaatatcttgctgcgcttgtaaggtccagtgctgaaaactcggtccagactcgccaactgaaagacagcctcgtcacggatcttcgggaaatgctgcaaaacctcgtcgatacacaggtccgcgaaagcctcaagttggcagacacattgtctacgacctatcgtgactccgggcagctgttggcggatcaggtcagcagtgccattgaaaacagcttgaagtcgccattggaagcgattgccggggctgtacaggctgccagcggcgatcaatccggccaagtgcagaatctgcttcaggatgttctggtggcattcatgaacaagctggaaggcaccttcggccagcaattcaacggcctgaatgaaatgatgggccagtctgtcgctgccatgcagtcaatgcagcaaggattctccagcctcattcaagacatgcgctcggccagcgaaaactcgaatcagagcagctcggcaatgattgcacagctgcttgccgacatgcagaccggccaaagtgccatgcaggctggcatgaacgagatgctggcaaatctgcagtcatccattgcccgcatcggcactgagggcgaagacgctggcgcgcgcatggcacagcagttagaaaaaatgttcgccgacagcgaggcgcggcagctggcgatggccgagagtcttcagtcgtttgtcgagtcaatccaaaaaaacatgggccaaggtcaacaagaaaccatggccaagattgcaggctctgtagaagtgctcggcgagcagctttctactgttttcaaaaaactggaaagtgggcgcgagcaaatggatcagtccactcgcgttgcacaggcagaacttcatcacggcactcgcgcgctggtgggggggctggacgagcagctcaaaacgctgctgcagtctgtcgcggaacaaaataaagcctcgcgagacaacgtcaaagcattaagcgcgcaaaccgaacagcatctgcaaagcatgcaacttggtgcagacaaaatgagagccgcagctgagcgctttgaaaatgctggattgagtgtatcgaaggccagtgaatcgacggctagtttgctgggcactgttcagggggctggtgccgagcttgctcaggcctcacgagaattgaacagcatcgtcgcggactatcgcaacaaccgtgaatcgttgagcaaaacactaaccgttatcgaaggggtggtagccagcgcgcaagttgaggccagcggacgtgctcaatatcttcaggatctgaagcaacaatcggaacgcatgcagtcgctcaatcgcgaggttcatgagtacctggaaaacatcagcggcgttttaggcaatggtttcaaagagtttggcgacggcatggacagggtactccggcagacgttgggtagtctggatacggagctggataaagctgttaaaagtctggctggtggcgtcgatggagtgaaggaaagcattgaagacttcggcgacatcatggaacgaatcaagcagtaa

SEQ ID NO: 10985 - DNA, 744 bp, Pseudomonas endophytica
atgtttggtaagcaaatgccttcggtggctcgcgctaaggatgatgcggagaaaccgttctggatctcttttgcagacttgatgaccgccatgatgattctgtttctcgtcgtgatggttgcagctttgagctcggtcacccagaggatcagtcagtcagagcagggcgaaaaacagcgcagtcgcgacattagtcagctctgcgagcatttgcagctcaaggctaagcattctaatgcaaccatcgtcgtcgactgcaaagacaatcggatcagtttcggtgaggcgggacgttttgggcataaccagtattctttgagcgacgagggtcaaagtgcccttcagggcgtagtgccactcattcttgatgctgccgatagcgaagaagggcggaagtggttcaagcaggttgttatcgaggggtttactgataccgtcggctcgtatttatataacctgcacctgtccttacaacggtccgagtgggtgatgtgtagcctgcttgatagtcgcagccctttgcaaatcggcctttcagctgaaagacaacagcagatcagatcgatgttcctggcgggtggtgtttctttcaacaacgcaaaggacaccaacgaggcaagccgccgagttgaactgagaatgcagttctacggtttgaaggagaaagaggaaaacctcaaaccagaagttccagtattcgccagcacagtgtccgagaaatgccagttggcgatgacgcgatga

SEQ ID NO: 10986 - DNA, 1650 bp, Pseudomonas endophytica
atgaccagtgcattagccaagctgtcgtcagctatagcgctcaggctcgatgcccgtagaatcgcgatcagttctgaaccgttggctcgctttcctcgaatggaagctgccagtgccgatttatacgaccggtttgagcgggcagagaaagcattgccaccgcctcaggaaaaacgtagagccgccatcaataaattcaggaatgtcctgcctctgtcgtcctccgaatggcgcatggtcttcgccggtctcgccgataaagtcgagagtgtgggccccattcttgaagacgagcgactttatggtcgagtccatatcgaggtcagtcagcggatcgaaaaacggcgcctgagccgccgcgattggctggcgctttgtttcagctacttcggttacgagtccgataagcccgacacgaatccggtctggtgcttgttgcaaggcgacatccgcaatggtttcgcttgtgtaaaggcgcaacagactcgtgaaaaagaatggatccgtatcgtccagtatcataagcagctgttttccgaacaggctggggtgacgcttggcgagcagatgttcaacggcgagatcagtgatctctcggtgctgcaaacaatcgcgcagatacctgacagcagttggttatggcaccggatatttaacgtattgctgtctcgaatctttaatttggaagacgacgagttctcgaaaagattccccgacttcattgagatcgggcgtcagcatccgacatacatgaatgcgctcctcagcgcctgcctgacgcgttatcacgcagcgtcgtatcgggaaaaaccgtcgtcccttctcaaacagagtgctttggataactggggcagcccacaaattcgctccaggcaaaatagctggcttcagtacgtggagaaagacgtttgtgcgatggtggtcgcgtggtttgctaaagaagaccttgagcacttcttcaatctcctcaaaggcgatagggatgtagatcaggcacgcctgttctattggctacgtttcgcggatcagatgagctatacacggattgtgttgggtgcagacgccaaaacggatgccgggtctgactttgttgattttcggcgaaaaaacaatggccgtttgagctacctggcgggcagtaaatcaagcaacaacgcagtcattatgcaaattgcaaattatctgttcgtcgagttttcggagaaaggcaacgcttgttacgtctacaaagccgacagcgcaccgttcaacccggaccagatttatctggatcttaactcggagttgaaacagaaaaataaatcagccgtaaaacccatgggacatatggctatgccatcaaggccaaaccatgttagcggatggctggcaaaatttgacgagactcttgcagaactcggtatccgggctgatgggcacattgatagtcgaggtgatcacccattcaggtcgccacccaaaactattgctttcgaagcgcagttggcggaagcgttgaaggggatttctcatagggtgtatgactcccgcgccaaaggcggagccttacaagtgcaacttgaaagtcatgagccagcggccatggcttctctgcagcgcctcggcttcaagcccgtcaacaatcagccactgaaattctggaggcagtaa

SEQ ID NO: 10987 - DNA, 3249 bp, Pseudomonas endophytica
atgctcaagcgttttctatctggaaaaggcctgctgccgaagtccggtgagttcaataatttgccactatactcgatagaggagcagggattgtgcttcccgctgagccttgccgacagtactgagttttggtcacttgtaggttacctcgatcagctcgaagaggaagagttcgtatcccaactcagtgatcgctggctactgccgtgggacgagctttatcgacttttgaatgaggaagggcacgtcagcagcgtaccgttactcggattgccaaagcagtcgaatttgacgccgcagctcactagccaaggcagtcttgcttcgaacgatttcaaggtatcaataggtgcttggcgcgatagcgaatccgcggcgacagtgcaaaccaaacgtgcgggcgctgtcctcacgcatggcgataaaatcgagctgctgcctgaggcaacttaccaattggtgagtgctgttcggcaactccatttatcgcaacaagaaagccctggcgaacttaccaaccagatcggctgggccagcgtccgcaagctggcccgcaaggctggcgcaggcatggacggttttctcgacaaaaccgttgtggtcaggcccgaaaaccttcgtctccatccacgtaaatcgagcgtaggcaatacgcctgtcatcgagctggaacctacattcgacgggcagcctgaaaattggttggaaaatttcgatgcccacaaacaagtgcaggatcgttaccgggtcatcggggctgacggatctctgacccatgtgctgatcgagccggaagtaaaatcggtactagattatgtgcgttcactgcacggacgccgggtggcgggcgacgatgcgctttcattcattcgcaatccctatagcgctttgggtgatagtgccagtcaggtgttggacgctgacacctacgagagcgacttggcggacgctggtatcttctttcaccattttcatcttgagcccgagctaaacgatacaggtctacgcattcagcgcattaacctgacccttgagcccatttcaccaacaccgcaagtatcgatagaactgccgttcaacgaagcccataagtttgctcccttcgtgcatgaacttcagttgaagctggctgcaggcatgccggcgggcttctggcagggttacgagcttgaattaagcgacttcgatttgcgtcaattggcaggcatcagtgagttgcttagacgctggcagaacgaagcggctggcgcggagttcgacgcagtgttggatttgtcgctgtatggcgatcgtgtcactggcatcggcgaagcagagcgcatcacgtcacctttcctggtcaaggaggcgacagaaaactggttgcctaaagacctcgcggatttgggctccgacgccgaaatcctcgggcgctgggatccgtcggatcgggctcagtttgatgagttcgagcaacggctgggcgaggctcgcgcggcaggtgatgatacggtactgatgccactctccgacacgccgctttccatcgcggcggcagagcagctgtttgatgcctggtccaaaaagatatccacacccgagaccaagatttcgagttttgaagaaaaagtaggtcgagcggtacttcaaattggtcataacatcgacgagccaacgtacgttcaagtacgtcaggaagccctacgagcagccctcgatgcccagcctgagctgccgagcctgctaagacccgaagtcatcttgagagaacatcagttacagggcattgcatggcttcaacatctcttccggctttcgccgacagacgtctcaggttgcttgctcgccgatgacatgggcctgggcaaaaccattcaactgctgacgtttctggtttggtacctggagcaaaatcctcaagacaagccgaccttgatcgttgcgccggtttcattgctcgataactgggagcgagagctgcaccgcttcttctttgctgacgcactcccagtcctgaagctttacggctcggctttgagcgcggtgaagttcaagaaagatgagattcctgccgacttgaaggctaagggtatcaagaacctacttcgtccgggctgggttggcggtgcacgcatcgtactgaccacctacgaaacgcttcgtgaccaagagttctccctcgctcgccagcaatggtcgatcgtcgtgtgcgacgaagctcagaaactgaagaaccctgccgctctggtgactcaggcaattaaggctgttccggctcgattccgggtagcttgcaccgggacgccagtggaaaactccctgattgatctttggtgcctgttcgacttcatccagccaggcttccttggcgggttgaaccagtttggtcgcgagtaccagcgacccatcgaagctgcacttgagcgagacaccgttgccctggaacgcttgcgtgggctgattgagccgcaaaccctgcgccgcacaaaacaggatatcgccaaagacctgcccgcgaaaatcgaagacaagggttgccgttcattgtcgatgcacgccctacagcgaaatctttacctctcggaaatttcggcctatagccagaagcaacagatcgaagaacagcttgatcagaaaacctccggcatgctcggcctgctgcataagctcaaactcatctgtgctcacccctacagtgttcagccggacaaacgcctgcgtgacaactcgccgaagctgcgctggctgctcgatacccttgagtccatcaaaaaggcagggaagggtgacaaagtcattctctttaccgaactgcgtgatatccagcgtgaactccaacacgccattcaggagtatttcggattccgcgcaaccgtgatcaacggcgacaccagcaccagcagccagagcgcgaacagccgacaaaaactgatcgaccagttccaggatcagccgggcttctctgtgatcatcctctcgactattgcagttggctttggcgtcaacgttcaggctgccaaccacgtcatccacttcacccgatgctggaacccggccaaggaagatcaagccactgatcgtgcgtatcgtattggacaggagaaggatgtttacgtgtattacccaacagtgcgggatgcggcgatgccaacgtttgaagcgacgctggatgagttgttgagcaagagacgggcgttggcgagggatatgttgagcggctcgggggaaattcaagccagtgatttcgaacgagtgctcggggtctgttga

SEQ ID NO: 10988 - DNA, 711 bp, Rhodocyclaceae bacterium PG1-Ca6
gtgatcggtacacgaattatcatcaagcggggatcgagtgacgaagcagagaaaccgttctggatttcttttgctgatctcatgacggccatgatggtgctctttgttcttgtcatgagcgtcgccctgcttgctgtcacaaaaacggtttccgaggcggagcgaaaaaaagcagaacgcgaacaggatgtgcagcgcttattggacaaggtagaaaaggctgctgccccattcggggtaaccgtcgaccgcaagcgccaagtcgtggattttggcgatcgcgcccgctttgatacaggtagctatcaattgacgcgcgaccaggcaaaactgctcagagctttcgtaccgaaagtacttgatatcgcccgagatgatttgggaaagcgtgtgctgaaacgaattgttgtcgagggttataccgatcaacgcgggacctacttatacaacctgaatctgagtatgcagcgtagtcaacgagtgttgtgcgcgttgttggataagcctggttcagaggagcgcccactggaaggacgggaacaagaggaagtgcgggaactatttctggtcggtgggtattcatttaactcatccaagccgacacttgatgaaagccggcgtattgaactcagacttgagttccttgcagttgatgaggcccgccctaaggcggatgtcgcacaaggcaacttcggcgtttgcgccatctaa

SEQ ID NO: 10989 - DNA, 1662 bp, Rhodocyclaceae bacterium PG1-Ca6
atgaaccatattgaccaattacgaaggcttctgcagcgaaccaatcagtcgctgtttgatgtcgagcactggggagatttggcatcaattcagaacgccggtcgtgctgttcgaaaacagtttggtgaactatctagcgcaggccctggagatgagagatccattggagtgtcagtgctggcataccatcgaagtggtgacttgcccaattatcgtgaggccaaatacgtctgtttcggaattgccaatagctatggtcgcgacgaatattgcctaatcgaagaccgcaagcttttcccaagactcatcactcacgtcgatcaatacaaacaagaacccagaaagttcaggcgatgctaccaaggactcctttcaggttacttcgagtatccaggccttgtgtctccaagccaggacggaaaatccaactggactgatcttcagggctatctcaagggcaatctaaccttcgtgcaaaggcaagagccgcctgtcgaatggactaaaactctcggtgaacacgccaatctttttacggacgctccctgccttcgttacggcgatgcccttcttatgggtgatacacgagacattgatacgctcagagaaaagctcgcattaactgaccgatcttgggtcctccaggagatcattattgctcagattgaagccgcaaccaaaaagagtgatgccgactttaaggagcacattagacgcttgcttgccttgattgatccgctggagttgttgcggagcaaaggcttggcgcgtctcttgcagcgctatcacaagtgttcggaaccgttagaaaacatcgaccttagagacttttccctgaagcactgggggagcccgatgcttcaggtgaaaaggcagacctggtccgcctgggtgcaagaaccagtaatcaaaatggtcgacacatggctcaaactccggtccatcgaagatttttttgccctgctcgcccaggatgggcaggcacgccgagatcggcttgaattttggctgcgctatgtagacgccattgatgacttgtattttgctcttgggacaaatgcacgtcagaacaatacgcctgactacaagcgcattcgagaacacatgaaagggcactggatgtcgctgggcggtgctggtgtttctgcggacaacaatgcattcctcatgcgtattgggaatagcttattcgtcgagtttgggaagcacggcaatgcttcacatgttttccaatacgacaatctgcctttcagacttggtagtggatttgtcgacggcaccggtgatggtctgaaaaatacctaccatccaggccaccaggccaagatgacgcaccaccaaggatgggaaagcgaatttgaatggacaattaaaagactcacgggtgctcgtccaatcgcgccaaagataaagacaccacagccaatcgcgcaaaacacataccgagtagagcagccctccactccccacccgtcttcattcattgagacattacgcaagttggccagtgcaaacggctatacagtggtcgaccacactagcaaaggggggaatctctgggtggaagccccatacagtgtgaacaattccttccggcaattacttgaaaaatggggattcaagttcaaatcaggcaagggctggtggagagagattgaatga

SEQ ID NO: 10990 - DNA, 3765 bp, Rhodocyclaceae bacterium PG1-Ca6
atgatgtggacctggttctcaagacaatcgccatcgggagatgtgtcttctccaagtgataatcggctaaccctcacgatatcaaatgagggggtgacatttcgccctgacacgtcaataccagagtggctctacaacccgcttcaatttggcagatcctccgagaccgtttcatttctgggccagatcgaagaacgagggtttgcggagttcgacggaaatgccatccttctcagttgggactcgtactaccgactactgccggaatgcgatgcagatgagctcaattcgctgctttcccttcccaaagaaagaaagcttcgcccaagcattcaaagtcagggggcactggaagacccagattttcgagtggtattaggcgattggttcgatgaacgcgatatagctttaacagtaccgccagacttcgttggtgggctggcgaagctcggaagtgaagaatgtgttgttcccgaagcggtatggcgattggtttcgtctatcaagcatatcaacaccgcgaccggtagatccggcctggaaaaccgccgcctctggtcggatatccggattcatgctcaggcagctgatgccgagctatccgattttttgcgtcgaacagttgttctgacacctgaacggctaaaactggggctgcggaaaaccgacatcggagatgcgaagactgtagaggtgctgccttccttcgagggagctccgaataaatggattgagttctttgatcgatttccaaatgtattggatcggtacgacatcccagatggtgaaggaatcactcaagtaatcatcgatccgcaggtaaaaacagttctgagagagatacggcgctggcccgcccggctggtttcaggacaacgtgcagaagcctttgtcagaaacccctttgcggcacttggcgaggacgcatcgaaggttatcgatgagaaagagtttgagatgtcccgtgccgaagcgggtatcacattccagaatttcacagctgacattcaaagaaactctactggcgctgtcgttgcggtatctcttcttattgaagagaccgatgccacaaccgtcatcggagaaagatatgagtttcccgatatcgaccagctcgatcgtttcattgcaaaactagccggtcggatagaaagtaatcaccagtgctgcgtatgggaggggtttgagcttgagattattggtgataccgaagctcaactagagatactgagggaggcgcgtaaagagtgggggaagccgcaagtcgtcatcagctatgcggaagtccacgatctatccaggtattcaagtcgcattgatgggattggcgttgagaagccttactgctcaccgttcatcgcccgaaaaagcgatgatgctggattgatacctgaaaatgtcgtttttgggctgtggtacacaccaacaggtagcgagcaaccaattgccatctccttagacgagcgtcagcagtcgaagctgaagtcaacggtcgaggaagccaagcgtgctggtgaggacacgatctcattcccggggctggaaaaacagatttcggtaagtgatgctgaaaatattattgaaatccttggcgaagcaacgaaagatgtcaagaatggtgtctacaaggcacctaagatcggcgagggagaaacaaagccgcccactgagagaaaatcacttctcctaaagcccaatattgaatcgctggagtatgtggagagcaaatctcgacgaatagaagctctctcgctgccgccatcggcaagccctgccttgccctcttctctgaaaaaaagcacgcagctgaaagaacatcaacgcttgggaattgcttggctccaacatctctggaaaaacacaccagagtattcacgtggtgcgctccttgcagacgacatggggcttggcaagacacttcaactgctgtgctttattgcaagctgtatcgaaaccgacccaaaaattgatccggtcctcattgtcgctcctgtatcactcctggaaaactggaaagaagaagtcgagaagttttttgagcctggaacattgccagtcttgatgctctacggcgatgacctgaaaagcaagagaatatccaagagccttattgaccagcaactgctgcaggaaggaatcctgcgttttctctctcctgggtggcttggagatgcaaaggttgttcttacaacctatgaaactctacgtgatctagagttttccttggccgcccaaaaatggtcgattatggtctgcgatgaagcgcagaagatcaagaatccaaacgccttggtcaccagagctgcgaagaagcagaacgttcgcttcaagatcccctgcacaggaaccccagtagaaaacactctggccgacctctggagcctatttgacttcatccagcccggattactcggagcacttaatgaatttgggactcggtaccgcaggccaatcgaggcagaaacggatgaggaaaaggagcgggttcaggagcttcgtgctctggttgagccacagcttcttcggcgtaccaaggctgacgttgccaaagatttgccgaaaaagattgttgttgatagctgcaagtccctgaatatctcacagcatcaacgtgatctgtatagccatgctgttcgtctatacaaacaacgtttcaacggtggagatagcccattcaaaaatcaccttgggctaattcagtaccttcgccatctttgcacggatcccagaccgattgggcaacgaagtaatcttacggagtcatttgaggactattcccgaaaagccccgaaaattggttggctgatgaacgctcttgaagaaatcaagtcaagggatgagaaggccattgtcttcgtagaatttcacgacctacagcgtctacttcagcgtttcattgcccatcgttttgacatcgttccagacattatcaacggcacaacgtccgcatcgtcaaaaagctcggacagccggcaaaaacgtatcaaggcgtttcaacaggacgatggttttggggtgattattctttccccactcgctgttggcttcggcgtgaatattcaaggtgccaaccacgtcattcattacacccgaacctggaaccccgcaaaagaagaccaagcgactgaccgagcttacagaattggccaatcgaaggatgtttttgtgtactacccagtggtgactgctgatttcacaacctttgatatgaagctggatgccttgctggaatggaagagaggcctctcaaacgacatgttgaacggatgcggagatctgtcttcaggtgactttgacgagcttgaaagccccgatggggatggcgctttcgatgatgtccttgtggacgaagacgatattgcaacatttgacggccgatttttcgaggccttctgcgcggcactgtgggcaaagcagggctacaccacgtaccgaacccctgactgtggcgacggtggtatagatgtggttgctatcaagggaagcaacggctatctgttgcagtgcaagagttcgatgaatgatggagcttcccttgggtgggaagcgatcaaggatgtcgtggccggcgaggctctgtatcaaaagaagcatcccaaagtggcattttcgaaagttgcggcgacaaatcagcggttcaacagcaccgcgaattctcaggcacaagcgaacggtgtaacactttttgacagacacgacttggttcagctactgcgatctttcgcagtaaagcggattgagctagaaaagttcctgctgacgtag

SEQ ID NO: 10991 - DNA, 2001 bp, Thauera sp. SWB20
atgcttaaggaatttcttgcctcacttcaccccagcttggccgtcctcgacggcgtgccgatgtgggtgtttgccatcgtggtggtcctcaccgctgttgtcctcttgggttacttgctgaaaggtgggcaggtcgggtggcagctctggatgtccgttcgtcgtatcggggccctgacgaggacgggtagcgggccggtcaagcctgaggacgtcgccaaagtcttgcggtggaagcctgcgagccatttgtgggatgagtactcggacacgctgcacgaattgaagagggcgtcgaacggtgagctttcggtcaccgaaatacgtgcgacggttccggccgagacctacttcacccgagatgttctggtcgacagccggctgctcgatgatttttcacgtcatgttccgggcgtgcttacggggctgggcatcatcggtacgttcgcagggctcttggacgggttggcgagtttcaatccgtcgtccccggaggctgctgtcgccgggctcaagcctctgatgaatggggtcgagcatgctttcattgcgtcagcgactgcaatcggctgcgcgatgttggtcctgttcgctggacggttgatgttggcttggctgtatcggctcgttgagaagctggttcacggcattgatgccctgtacgctaccggtgcgggggaggagtacctttcgcgcctggtccatgcgtcggagaagaatgaggctcacgcagcccagctgaaggaggcgttggtcgaggacctctcgaagctgatgacgaatctgacggaacgccagatccaggcccagtcctctgcaagccagctcttgggcgagcacatcggcaacaccatctccaactccttggccgaaccgctgcagaagatgacggagtccatgaccgtcacgagccgcgggaacagcgaagccgtgtcgggcatgcttgagaccatgttggcgggattcatggcaaagctcgaggacaccttcggtgggcagatgcgcggcatcaatgagcagatgagccagtccatggctgccatggccagcgttcaagcttcactcaaggaactggtggaagacatcggccgaacgaacaagacagcgtccgaagagatgagcaacaagctcgcggacgcaatgaaggacgcgaccgcaaatcagaatctgctgaccgagcagatgcgccagttcgttacggagttccgtgggctggtgaacgatgagcaggagaaggcccgcgccgcgatggatgcttcggtccaagaggtcctgagcaaagtggccagtgctgtcgaacacctggaggctgtgcgtactgccgcggctgctgatgagcagcgcaggggagagcgtctggtccaggagtcgacgtccctgatcgaaggactctcagggaacgtcgacaacctgctgcaaaccgtatccgagcaggtgctgcaaacccaacgcaacatcgatgagctcgccaaggtctcgatgacggccatctcggggatgaaccagggcgcctcgcagatggaaacggctgctgaacgcttcaagcaagcaggtagcgccgtaaccggtgtcctcgaacattccgctcatgtgtcgcaacaaatgtcgtccactgcgtcaacgctccagtcggccgccgcggtcgccaagcagggcttggaccagtacgagcagaccagaagggctgtcgatggctatgtggcgacactggcggggctccttgagaacgcaaagcaggaggccgggcttaccaaggagatgctccgcgacttggagcgcatcgttcaggagctgcgcaaggctgaggagcagagcaaggaatatttccagcacttgaatggagcgctagaaggcgcgttccgaacctttggcagcgagctgacgacccaggtgaaggacaccattgcgaccacggatcgtcacttgtcgaacggcgtcggccagctgactggcgttgttcaagccttgcagatggcgcttgcccgcttgaagaaggcgtaa

SEQ ID NO: 10992 - DNA, 708 bp, Thauera sp. SWB20
atgttcgccagaattgtcttcaagaagaacggcaagcaggacggagagagcccgttctggatttcgttctcggacctgatgacggcgctgatgacgctgtttctggtggtcatggctgtgacgctggtttctgtcacgcagggcatttccgcagagttgaagcggaaggttcagcgtgaaaacgacatccgtagcgtgatggcgatgatccgtgaggagtccaaagcgttccctgccgtgaagtttgacgactccacctaccgcatcgacatcggcgaggtggtccgcttcgagagtggccgcttcgacatcaaacccgaggctgcgacattcatccgccggtacattccagtcgtattgaatgctcagtcgtcggacctcggtcgccgctggattcgccggattgtggtcgaaggcttcaccgaccaggacggcacttacctctataacctcggattgagcttgaaccggagccgctcggtcgtttgtgccctgtttgcgccgcccgggcagagcgagcctcccctcacggacatccagaagcggcagattcgggacctcttcctggtagggggatactcgttcaactccattcgggcgaacaaggaagagagccgtcgagttgagctgaagctcgagttttgggcgctcgatgaagagccgatcgagaacaaggggctcgatgagaaggagttcggccaatgttga

SEQ ID NO: 10993 - DNA, 1788 bp, Thauera sp. SWB20
atgttgatggggcccgttgaggacttgaagcgcaagctgtccctcgccatcgagtcttcaggggtgagggatggcgcgttcggtcagcctcaactggtcgaagccgccagccaagaggccgaacgcgtgttccagggcatcgcgaagagccggccgtcaaaagaggatgcctacgcggccgcgctggctttcatgcgtggacatcgactcgaggagtggcagttcgacttgcttgccagtgcggtctgcacgccaatcagggaacaacgtggtgcaacattgcttgggcatgagcggttcggcgaattgctggcgtggtatgagcgcgaatgcgccgctggcgagttgtggtggctcacgtggtatggcttgctcgggtcgtacttcgagttccgcatggagtccgccactgaagccgagcggactggctggaagaccctgcgagcgctgctacagaagacttggcccaagatcgaccgccagttcgcgcaggggcccgttcccgactgggcgaaagtgctgcgtggagagcctcagctgctcaccgagaaggccgccgacaactacggctttgcctaccttgaaggggatcaggaggggcttgagcatctcaagcgtgacttgggaattcccgcgcatagttggttttatcacctgctcatccttgcggccgttcgggcggcaacgacttgtcctgacggaacgttcaagaagcatctgccacagctgatgtccttgattgacaggcaaccggcttttcgagacgaggctatcgagctcatcctgagtcggtactttaagtgctcagaccggtccgtgcatccgcagcttcgcgactatgtcgtgcgtaaggatgtctggcgcaacccgaaactcaagagcgtcgggctggcgacggcatggaacagggtccccgatgccgtctggaagatggtccttggttgggtgaacgagggcaatctacgtgacttcttcgacatcctggcggccaaaaacaaggccaatcaagatcgactcgcgttctggtctcagtacctcgagcagatttcctggactcgactggtcttcggaaacgcgactctacagcttgctcaaaagaatccgtctgtgcggcagttgattgcccgcgaagagggtgcctatgcgttgttgacgggtaccaaagatgtagacgccttcatgatgcagattggcgacttcatcgccgttgagttcacgaagacgggccatgctgcgtacgtctatgcagtcaacgcgctcccgtttgaccaattctcgcgtgactacaccggtggcacggacgaccttagagcaggcttcaagagcctgcccgccgcgcgtattacccatcacgccggctgggaggattcggcacgttctgatttggcaaggcttggcattcatccggacaagagggggggctccacctatgggacgcggtcccatcaagccgagacggcggccggcagtaaccgtccgggtacgcgtactgaaagaacgcctgctaccgggtcgccgagagaccagttcttgtcgggcggggcaccgaggccgccctctacgaagccagttgcccgagcgccgcttggggcaaatttcactatgacgaccttgcaagagtgcttgtcgggctacgacggagctcgtattgatgataagagaggcgtgaacggcgggcggctctgggttcaagaccccaaacaccaatacgagctttcaaagaagcttgtcggcttcggcttcaagtggtctgagaagcgccaagcctggtaccacccggaggcgtaa

SEQ ID NO: 10994 - DNA, 3858 bp, Thauera sp. SWB20
atgggactgttcgattttttcaagcgtggcaaggcctctgctgctcccaggctgctgcctacctggcgcgaagaaggcgtcctttttgctttcgctgaacgtccggcggaactcgatgtggaaggggtgctgaatcattttgacggcgcatccaccgaagagtcattgctgggcgcctacctctcgcagttggtcatggacggggatgcgacccttggcgacgacggactcttcatcagttggggaacggtttttgagctcttgaagagttcagagcacagcggtgcagtcgattacctcggattgcctgctattgggtcgctgaagcccatcctgacccacgactcttctttgtctaacccggactttgaggttcgcatcgacggctgggtcgatgctcagggcaccgtgcgcgtcgacaggcgggttggggcggttgcccaagcaaatggtcaagaggttctgcttggggagtacgcctggcggctagccgatgagctctcgcgcttctcggcccggtcgcgtgatttccgaactcagcacgaaaacgagctcggttggggacggttgcgggcactggcgcacgaagctggggcgttctacgcatccccctatcttgaaacgaccatcgtacttacaccgcaatcccttcggctgcctcttagcaaggtagaaacgcagtttggccgcgtagtgacggtggcgccgacgttcgaaggggcgccggatgattggctgaaaacgttcgacggttacgagtcggtgcagaaccattacgacctcacgcagggtggccgaggccgtgttcgggtggtgatctcggagcccgttcgccgcgtgctcgaggtcatcaagcgtgacatgccgggtcggaaagtcgcaggcgcgcgcgctgagaagttcgttcacaacccgtgggcctttttgggggatacagcgcgggaagtcatcaaggaagaggagtttgagcaggacaaggctggggcaggtgcgctgtcggctgtcttcagcgtagtgccgaggctcacggatgggcgcatcgaacgcgtcgaccttgtcgtcacggagactttctccggcggcatggccagcaccgatacgaaaacgttcaaaggccctgatgagctcgctcaattcgtggccacgctcgaaacggcgttgatgtccgagcgcgagtggtttccctgggacgagtacgacctgaccatcgatgccgagtcttctctccaggtggagcaggcacgacaggtgctgtgcctgtggcgcaaccaaccggcggagcgtatttcgctcgaggacatctacgagatgtcggtgtacagcgaacgcatcgagggcatcggggaagcgaaggcaatctatgttccggtcttccagaaaccctccgccgaggacgattcaggatggctaccgacggacctgactccgatggtccgcgtcacgctccaaggccatgaggggcaggtgctgattccactgacgaaggagtgggtcaccgccttcgcagagaaggttgaagctgctgccgccgaaggtcaccgtgaagtatcagaccctctgctacctgccgcggtagagctcaagcaggcgaagctccttgcggatagctttcttgcgatgttgggtgcgaaggacaaggtgcgcggagaccagccaggcaagccgacggaaaagcgcgaaaagaaagaaacgctgctggtgaagaccaacttccatgcggtcgattacgcggaggagaagcggctggcgcttgaactgccgcctggtacccagcccatcctcccctcaacgctgcggcctgagctggaactcaaaaagcatcaactctacggggtggcctggtttcagcacctgtggtccaagactcccgttgcttgccgaggggcgctcttggccgatgatatgggtctcggcaagacacttcagctcctgacgctactgggctggtattacgagaagtctccagacgccgctccgtcgctgatcttggcgcccaagagcctgatggagaactgggaaaatgagtcgaagaaattcttcaatccctcgtatccggaggttcttgtgctctacggcgatgttctcgccgaacgcaagcagccgcttgggctgattgatgaggcgctgcatcaacgaggcgtgacggacctcctgcgtcccggctgggttggttctgcgaagattctggtgacgacgtatgaggtcctgacgaactatgagttttcgtttgcccggcagcagttctctttcgtcatctgtgacgaggcgcagcgcatcaagactcctggcacgcaggtgaccttggcagccaagaagctcaaggctcacttccgaatcgcctgcaccggaacaccggtagagaatagcctggcggatctatggtgtctcttcgattttgtgcagccaggtctcttgggggcccttgaggacttcggtaagacttaccgccgtccaattgagtgcgagacggaggagcagcgctctgcgctggagcgattgaaggcgctcatcgctccccagatattgcggcgcacgaaggccgacatcgccgatttgctcccgaagaagctctacgcacacggaaatgttcaacgcggcatcgaattcaaagagcgccttgccgttgatgagcggcttgaggttcccgcctccgagcatcagcgcgtgctctacaaaggtggcctaaagaagatgcaggatgcgagcagcgaacaagacagccgaaagcgggctcgactctcgtttggagcgctgcatctgatgaaggcagtgtgcgcggagccctattgcctacccggaacgaagttcctgccggaaaagcgcggtttggaggcgcatctttcaaactcgccgaagctgagatggcttctcgaccagctcgagcaggtcaaggtgcagggtgaaaaggccatcatctttactgagctgagggagattcagtccgcgctctactacttcttgcgcgagcggttcgggataatgcctttcatcatcaacggcgactcccaaggcagacagcggtacatcgacaagttttcaggaagccctggctttgatgtcatcatcttgtcgacgcttgccgcaggcgcgggactcaacatcactgccgcgaatcacgtcttccatttcacgcgagcctggaatccggcgaaagagaaccaggcgaccgaccgtgcgtatcgcattggccagcagaaggatgtgtcggtctactgccccactttggttgccgacgacttcatctcgtttgaagtacgcctcgacgagctcctgaaacgcaaggctgggcttgccgatgtgaccattgatggcgacttgatgacttcgatgctaaatgggacgggaggagatgtcccaatcaccgagttcgtcgcgagtggaggcaagggtacagagctgccgcggaagattctgacgatagacgacgtcgaccgcatggacggctttggtttcgaggttctcgtgtcgatgctgtgggccaagcaaggattccaagcattcgtgacgcccaagaaagggggcgatggtggtatcgacgtcgtagcgctcaagggcagggtgggtgagcttatccagtgcaaaagctcagtaaaagcggacgtgggttgggatgccgtcaaggaagtgtttgcaggagccgccaagtacagagcgatgtatgccggcaccaagctgagtacggtggccgtcacgaaccagcgattcacaagcggtgctgtttctcaggcagaggccaaccgtgttcgccttgtgcagcggtcggagttggaggagctcttggcgagtcaccctgtcgtgaatcttgattttgatgctgaagtgtttgagtgggcaccgaaagcgggggtagcagcatag

SEQ ID NO: 10995 - DNA, 1752 bp, Fusobacterium hwasookii ChDC F174
atgaaaaatgagaagaaatttatttattttttatttgctataacatgtatattaagcttaggaggacaattctatttaatggattttaaaatattccaattgttcaacttttttaatataaatgttgtatttttttggttaatttttggaatatttatttactttaccttattcaataaaaaaattaaaaatcaagaaagaacgattaaagaattggatgatataaatatattttttgaagctgagaatttagcagataaaaatataactgaaaaagaaattttgaaaataaaaaatgaatttttttacaaggaagatgacatagaaaaatatccattactttcaaaagtttggaaagagtatagctcaacaatgttaaaaactgatagagacaactattatcaaataattgatgctgaagatctatttaatgaaaattctctagtgaaagagaaaatgaatatgaaaatcttaaattatattcctcaactttttgtggggcttggtatttttggaacttttttaggtttatcactaggtttatctcaaataaatttaaaagatactggagatttaggacaaattagtaacttaatagaaggagtacaaacatcattttatacaagtttatatgggatgtttttttccatttctataactttacttttcaataactatatgagccaaattgaaaaaagaatatttatcttaagaaataaattaaataacttatttttcttaaataatggtggagaacttatacaagatatgagaactgaattgaaagaaataagagcatataatagtgatatggctagtcaaataacaaatggaattaataaagaattagttcaaatgacttctgttcttgataataaaatatctggttttacaaatggaataacaggaacatttcaacaaacaatgagtgaaaaccttgaaaagatattttcagaagattttattaagaactttgcaaatataaaagacgagttacttgaaacctcaagagaaaataataaatttatagctgactataaaaatgaaatgaaagaaatagttacaacaacaaaatctcttaaagatgaatttttagtttttgctgatgaaataaaccaaaaatataacgatacaaatgaaaacttaaaagaaaattttgaaaaaatttcaatagtattaaatgatataaaagaaatacacagtagtataaatgaatttacggagaatgtccaatttatagcaactgaaaataaacaaataatatcagattttaaagatgtaagtataaacttaaaagaattttcaaaaggtcaggatacaatattagagctatgggaaggatataaagatagctttgctggttttgaagatagtatcaatagtaactttgaaaattatcaaagtatactagaagatgtatctgataaatatggaaatacaatagataaattaacaactgaatatgttaaaactatgaatatgggaatggaagatgtattcagaggctatgataatcacttaacagaaattatagaaaaatttcaaggggttttaagaaattttaaagaaaatcttgaactttcagatgaaaatttgaaagttaatgtagagttattacaggaaaatttagagaatcaatctatattaggcgaattaaataaggacatctctgaaaaaaatagaatattactagaaaaaattcaaaaaactcaacaacaccttgaatttttagaaaaaaaaggtgatcaatag

SEQ ID NO: 10996 - DNA, 699 bp, Fusobacterium hwasookii ChDC F174
gtgttttttataaataaaaagaaaaaggagatacaaatagaagaaacaaattattggttatctattggagacttaatggcaagtatcctaatgatattcatgttgttattcattgttaaaactatagaagcagggcaagaattaagaaaaaaagaagaaattattgaaggttttactggattaaagaaaaatatcatatcaaaaattcaaaaagattttgaagaaagagggataaaagttgatctagatcctcaaacaggaacaataaagatagatgataaaatcctttttaatactggtgaatatctattaaaacctgaaggaaaaaaatatttgaatgaatttgttccaatttatataaatttattattaaatgatgagcaagtaaaaaaagaactatctcaaataataatagaagggcatactgatgatgtaggaagctacatttataatatggaattatctcaaaaaagagcttttgaagttataaaatacatctatgatgaaatgccaaattttaagggaaaagaagaattaaaaagctatataactgctaatggaagaagcaatattaaggttttaagagatgagtctggaaatattgatagggataaaagtagaagagttgagtttcagtttaaattaaaagaagacgaaactttaatgaaaattgaaaaaactttaaaagaaggaaattaa

SEQ ID NO: 10997 - DNA, 1209 bp, Fusobacterium hwasookii ChDC F174
atgaatgaaataaattttaaaaaattttatccagtaaatttagaaaaaaagaaagatgagataaataatttttggaatcaaatttttaaagtagtaagagatgaaaaaatatttgaattgatagaaagagttttaaaaaagaaaaacttaaaagtggatgaaataataatattactttttaacataaaaaaagttcatgattatttaattcataagaatgttgaacttgctgattttataatgaatataaaatttgatttatctgaaaaaaaagtaaaaagaaaagaatgtatgatggatatttaccaagctattgtatcatactttaatgaaaatgatgtagagttagctttgaatctttttgttgatgaaaatattaattttgaaaaagaggatgaaagtgaaattatccaagtatatcaagaatatagtaaatcaaaaaaagattatactttatttctatatgatgaaacggtcaaagctataaaaaataataagttaaaagatacccttgatagactttttataagtgaagaaagagaagtattcttaaatataatgaataaagttttgtttgacatagtctattttgtgaaacttgaaaaagattatattaataaaatattagcagatttttttgatagagtaacacatgaagtaagaattgaaagtttcaaaaaagttcttaactactatgttgaagaatatgaaaaaactgatgatattagtgtttgttctagagcaattatggaaaaaatccatgaatatttaaaagaccctcataaaaatagtccaaaatggcaatggggtgattttactgaagcacaaatagaaattatgagaatctggcttgtaagtgcagatcttgaaaaatatttttcaatagaagtaaaagataaaataagactaaaattctggaaaagatatataaaatatattaaagaagttagatattttgaaagactaaagcaagctattgtgatgttgactgatgaacacatatttatagaatttggtgaaaaaggaaatgccgcttattgccatagaaaagactatataagttttaacgaaataaatagattatcaactaattcaaaattaaaggatagagacgaagctgtattttttatacctcattcaggaaattgggaaataaagttaaagactagactatacgaattaggctattgtgtaaaaatatggagataa

SEQ ID NO: 10998 - DNA, 3492 bp, Fusobacterium hwasookii ChDC F174
atgggaataatagagagactttttaaaaaaataaaagaaactgataaaaaactcaaactttcattagaatatgaagaaaaatatatcaaaataatattaaaagttgctgacaagatagtgtctttaaaagatttaaaagatgaagtagatatttcaagtctttcaaaatctgatatattcgaaattgatgagaatggcgatactttattattagactatgatgagatatatagtttagatagaagtacattaaagcttttaaaattacctaacttctttcctggtgtagtctatatagataacaaaggatattttggtagttctaaggtagaatttcattataaaataagttttggtttagatgaatatcatatagtaaatgctaactatgtagaaagtataagtagttcagaaagatacattctaacaaaagagcagtatgatttaataaaactaataaatcaatataataatgatgatagtaaaaataaagaagctaatgaacaatatagaatgttaaatgctataaaagatgtctctcacaaaacaaaccttttacttaatgagactataaaaaaagaagatgacctagttttattggaaaatatagagttagattttttagaaagtgatgaagattatttagaagttgttccccaatcttcacaactttcaaaggaacaaaatgaaagtttaaaaaaagcttttaaaaatgcaaatttatctcaaaatttttatttactaaatatagataataaaaaagtaaaagttgtagtaaatagagagctaaaagatgctttaaaagttgtaaaaaataatgaaaaaataagtaaaaaagattttgtaaaaagggaatctccaatctttgatgatattgattctgaaaaagttgaatttaactatggaccaagagttattggcttaggatacttaaattatagaccttcaccaacaccaaatatttctgaaatagattggttctcaaaagaatttcctaaaattatgacagatacagctatcacattaaaacctgagcatctaggatatatgcaaggtaaatttaatgatttagatgagtttgaagaaactgagctgaaatttgatgttgaaggtgaagagaaaaaattttttatatcaaaagaaaatttagctaatgaaataaaaaaattagaaacttctataaaagatataacagactataataaatcaaaagcattggatgaaataattgaattggcagaagcttataattataaaccagattacattgaatataaaggaaattatataaaaaaatttgataaaaatgtagcagagcaatatagagatgatttgagagaaattgaaattgaaaaaagagaagagaaaaaaaattcaaagaaagaaaaagaaaaagttttacttacagaagataatttaaatgaagaaggttatgcagaaggaactgaacaaataactcaaaaagaagaagttgaacttcctaaatctcttagatattctgaaggtatagacttaaaagaacatcaaaaagaaggtcttttaagaatgcagtctctgtataaaaaatcgaatgtaaatggtttattactttgtgatgatatgggtttaggtaaaactatacaaatactctctttcttagcttggttaaaagaaaaagatgccttaaaaccttcattattaattatgcctacttctttaataacaaattggtatgatgagaaaaatattggtgaaattcaaaagttctttttagatggtacatttaaagtaaaaatattagatggtaaaaaaacaagagatgaaatttttgagttaagaaattatgacttggtactaacatcttatgaatctttaagaattaaccataaagaaacaggatatattgagtggaaagttgttgtttgtgatgaagctcaaaaaatgaaaaatcctaaaacacttttaacaagagcaattgaatcacaaaatgcactttttaaaatagcttgtagtgcaacaccaatagaaaacagtgtattggacttgtggtgcctaacagactttgttaagccaggtctattgggaagtcaaaaagatttttctcaaaaatatatgaaacctttatcttcaaatgatataaatgatgaaaagaggcaagaaattaataatgaattaagtgataaacttggtgatttctatataagaagagagaaagaaaaagttctaacatcagacttccctaaaaaaatagttatatacgataaaataagaccctcaagtcaacaagaagatataatagaaaaattaaaaaatactggaaaagctgcactagccataatccaaggaatgataatgacttgtagccacccacaactagtagatagagatatagaagaagttcctcttggaagtgaagaaagtttaatagaagaagcatataagctaggacacattcacactatattaaaggaaataaaaatgaaagaggaaaaagctattatttttacaaaatataagaaaatgcaaaaaatcttatggaatgttataaagtattggtttggtatagaagttggtatagtaaatggagatgcagataaaacttcaagaagaagaatattagacgattttagaaaaaaagaaggttttaatgctataattttatctccagaagcagcaggagtcggacttaatattgttgaagcaaatcatgttattcattatactaggcattggaatcctgcaaaagaagagcaagctacagatagagcatatagaataggacaaaaaaaagatgtatatgtttattatcctattatctctaatgttgaaaatatagaaagagaagaatatcgtactgttgatgagtggataagaaaacaattggaaatagatatgactgatagttcaccagaagaaaaattaaatagaataattgtaaaaaagaaaagaatgctcaaagatttcttcttaacttgtggtggagaatttgatgatgatatggcaaaagaatttgcagctatgtcaagtggagtagaaaaagatttaagtattgaaatgattgacaatattccttatcaagagtttgaaaaattagcagtagtattgttagaaaaagaatttaatagcaaatatggactagtgactgttgaaagtggagataaaggaatagatggacttattttctcagaaaatggaaatattctaattcaagcaaaacacacaaaaaggttagattctaatgctgctagagatttattttttggtgaaaaattttactctgaggcattgaataaatcttttcctaaattaatagtttttacttctgcatctaaaaataatataagtgaagatattaaaaaattagaggtaaaaggagagatagaaatatattacagagaaaaaattacagaattattaaataaatatcctactaaaattactgaattgatagatagagatataagatattctattgagaatataaaaagttatataaaaactatgtgtatataa

SEQ ID NO: 10999 - DNA, 2214 bp, Aeromonas sp. L_1B5_3
atgaatttcaccttgttgttcgactggcttaagcaccttgagcccagctctgtccctaccatcgtgttctgtctggtagttttgttttccgcatttttttgtgtgttttatcttgggccatcatttttggtggcgaacaagttaaagcaggctagcaagggattagaaatacagcatgaactacctgcttctgaaaagttagaacaggctacagccatgtttgctgagcccaaatatcgggccatgaatcatgcatggaaagaatacgctgacactctgcacagacagagtgaattggttgagggagagagtcgattagttgctgtgcgagcaacctccctatctgccactttcttctcagtgcctagtattgtagagacgcctctccgcaccgaggttttcaaacacctgccaggtgtactgacagggttaggtatcgtaggcaccttcctgggtttgatgtcgggtttgatgtcgggtttgatgcattttgatgtgtcggatcctgccaaggttaccgaaagtgtctctcgcttgctcaatgacgtgctttttgcttttgttgggtcttcgatcgcaatctttgcatccatcgtagtgactggattggaaaaatggcgttggggacgttgcctccagttactggaaaagttgaccgagtccattgatgaactcttcaagggtggtgtgggtgaggaatatttagctgacttggttaaggccagcaatgaaagtgcagttaatgcacgacaactgaaagacagcttggtcagtgatctacgcaccatgatgcaaaatctggttgatacccaggttcaggaaaatctcaaactggccaataccctctcaacctcttatcaagaggttggcacatctttggctacccagatcggtcgctccatcgaagatagtcttaaagatcccttggaaaaaattgctggttcagtgaagcaggcaagtggcgatcagtcaggccaagttcagcatctattgacggatgtactgagtgccttcatgagcaaactagatgcatctttcggtcaacagttcagcggtttgcatgaaatgctcggtcagtcagtaactgcaatgcagtccatgcagcaaggctttgtggcattggtggacgatatgcggcgagctggcgagtcctcttctcagcaaagtgccacagtcatcgcgcaactgcttacagacatgcaggctggtcaagccagtatgcagaatggcatgaacgagatgttgtcaaaaatgcaggcggcggtagagcgaatgggaagctcgggcgaggatgccagtgaacgcatagctcaccaattggagagattgtttgccgagagtgaggcccgtcagcaacagatagccgaacacctgaatagctttattgaacagagccagcggagtattggccaagggcaagaagaggtcatgaccaacatgtccacaaacttgactcagctgggctcacaacttaatcagatgttccagacctttaacgctaaccaagaaggaatggatgcacagcatcgcttggcacaggcggatatcaggaatacaactgaaacggttattggtgggttggataagcagcttagagagacgctgcaattggtcgagcagcagcgcaaagaggcacaggaagtcattgaccttcttggcttgcaaactagagagcacttgcagcaaatggcacaaggggcagacaagatgcgccttgctgcggatcgattcgacaccgcgggcagcagtgtggtgcaagcgggtgagaccactgccaaagtattggggtcggtgcagcaagtcggtggagagctggcggtagcttcccgtgagctcacaaccattattggtgaataccgcaatcatcgagagtctgcggccaaagttttggccaccatcgagtccgtagtcgccggagcgcagagcgaacaaagccagcgagcacaactaattaacgatctcaggcaacacggtgagcggatgcgtgaccttaatcgtgaggccacagaatatttggaccagattggcaatgccctagcgaaagggttcaatgagtttgccgatgggttgaatcgtaatctggtcaagaccatgggaagtctcgatagtgagctagacaaagcggtgaaggggcttgctagtggtatcgttgatatgaaggaaggaattgaggatctttccgagttgtttgagtctatcaaggtgcggcgctaa

SEQ ID NO: 11000 - DNA, 744 bp, Aeromonas sp. L_1B5_3
atgttcgggatgaaaggcgctccggcctcgcgtcgcaacgatgaggcggaaaagccgttttggatatcttatgccgatctgatgactgccatgatggtgttgttcttggttgtcatggttgcttcacttgcgtctgtgacccagcgtattcgcgaagttgaggctggagaaaagcaaagagggcaggatattgcccgtatctgtcaaagcttggagatactggcgcgaaagaagagcaacatcattaaagttgactgtcgtgacaaccggattagctttggggaggccggtcgctttggtcacaaccaatattttctagacccacagggtcagcaggcattgcaggacgtggtgccgttgatcctggatgttaccgatagcccagaggggcaacgttggatgaaacaggtggtggttgaaggttttaccgatacggatggttcttacctctataacctccacttgtcgctacagcgttccgagtgggtaatgtgtgcactgcttgacggacggagccagttgcagcaatccctttctgccgaacaccagcagcagatccgtagcctgtttttggctggcggtgtttcttttaacaatgccaaggacagcaaagaggcaagtcgtcgagtggagctgcgcatgcagttttatgggctcaaggaagacaagcagcaggcggcggagagcgcacctcagttttctggtctgatgacggctgaacgttgtcagttggagatgcgctga

SEQ ID NO: 11001 - DNA, 1761 bp, Aeromonas sp. L_1B5_3
atggtggatgcaatttcccgtcttacggcgatcttggagtccagtgtggagcgggtcaatggtcgctatcaggagaggactctgcattccttttcggctttgaagcgagctagatctgaggttgaggctaggtttgaccaagcggaggcagctccagaaccaccgaaggagaagcgtcatgccgctctggcggccttcctacgtaatgaaccgctcacccggcggcagtggcggttggtatatgcagggcttgttgactgcgttgaagcaggcaagcagttgctagatgatgaaaaggtctttccacgagtgagtaggcatgtatctgctcacatcgatagccgtgagttggttcgccgggattggactgctctctgcttcagctattttggctatgaggcaatagagcctgagaagagccaaaactggcaacaactgcgcacttatatccgggatggttatcgtgtactacggaatccggagaagcttaaagcttggatgcgggtagttgatgagcatcaagaactttttcagagtgaagcaggtttacggttaggacagcaggtatttgaggggacagtaacagatcttactcagctacagactcttgcccaaatcccagcagaaagttggctttggcatcaagttatcgcggtcgtgcagaaaaaaattgccgaacttgatgaagctacgtttttagaccggttatcagagttgttagcgctgatggctatcaataatcggcgttattccgacgagatcatggctgcttgtctcactcgatatcatggttgtagctgtcatgtgcagccacaagccaacttgatacaagctggtctggagatctgggggaacccccagttgaaatccgatcaaaatcgctggcgtcaccatgtggataaaccggtatgtgacatggtgggggcatggcttgccaagcaggatttacagcacttttttagtttgctgaaaggtgaaggcgaggttgatcaggcgcgtctcttctattggctccgttttgccgatcagatgagttatacccgtatcgtgatgggacgtgatgctcaattaaaccgagatggagagtttgtccgttttcgtgatcaaaataagggccgcctaggagatttatctgggggctcgccagctgataacgcagtaatcatgcagattggcgattacatctttgtcgagttttcgcacacaggaaacgcctgttatgtatatcgagctaactcctgcggatttaatcctgatgccagtacattgcacttaactcatgatttgaaacaaaaaaacctcgcgaaggggcgttggatacatgttcccaaaccattaaagcccgatgcgatggaggggtggcagcaaaaatatgatgatgagttacggttgcttggtattgttccaaacccacagggagccaatcaattatggaatcgtgtagttaaaccaaaaattgtcaaaccaagcgttccatcatttcaagctccccttggcaacaattctgaatcaaagagccaagttgtgaacacacctgctgatcggaccgttgtgattcattcaggcggtaaggggaaagttgattttgctctgttgctcgaacagttaggcgaaaacctgcgacattatacggatcatcgtgaaaagggcggtgctttccatatagagatcaagcagcgcaatacagatgacattttgcttctgaggcgcaatggttttgtggtcaaaactggcagcccgtttatgttttggaaaaaatga

SEQ ID NO: 11002 - DNA, 3237 bp, Aeromonas sp. L_1B5_3
atgcttggacgttggtttagcaaatttgggaaaaataagcatgatccggttgatctcagcccatgttggcaggcggatgagagagggatcgtgtttgccgaacgtatacagagcgagcctgagcgatgggccttggttgcctatctggagcagcttgccgaggaggagtacgttgcggtgcttagcgaccgctggctcctgacatggcgtgatatgtatcgattaatggccgacgccgatcatgaaagtagtctggcgttgttgtcgctgcctcactgtactgatctacgccccaaattggaatgcagaggcagcttggtcgatcctcagttcaccgttgcgattactcactggagtgatgaagtaacgggagaacatgtcgagttaaaacgtcagggggcgttggtaacaacgaagaagggacaacgtctactgaacgaagccagctggcagctctgtgagtctctgcgtgaccttgctcgttgtcagagggatgagccgggtgaggcgaccaactatgaagggtgggccgttattcgcagtgttgccaaagcggctaatgccgacatggatggttttcttgccaagacagtggtagttaaacctcagcgactggctttgcgaccacgtaaggcagagatcgactcttgtcctgtcattgaggttggcgttgattttcctgaacaaccagttgggttcctttcctcatttgatgctacccaacgggtacaggacagataccgtatcacgcaaccagatggcaccatcgctcatgtgttgatagagcctgagatcaagcaagtactcgaagccatcaaggcgataccggggagaagggtggctggggattcggcgttgtccctgttgcgcaatccctatgccctgctgggagaagtgaccagcgtggtactcgatccagagcagcacgagcaatcgcttgtcgatgcggggatctattttcatcattttcgtctggaacctaaatgcgaggccgaaagtgggaagatcgccaccgtattgctgcatctctcccctataagccgagagccactccctgatgaaacactgagtttcaattcacctggaatatttgcgccttttgtacaggagctgcgctttaagctggctgctggtatgagcgcaggtttctggcagggttttgagctggagttaggcgactttgacgagcagcaattgttggacatcgaaaagttgctagatcgctggcaacgagaggtgtccggagagttgttcgattctttgtttgaactctctcgctatggtgatcgcattatcggtctcggcgaggtagtgccagtatcatctcctttcctgacccgaacaaccggtcaggattggctttcgagcgaatcgaatggaattgaggagtcagtgggtgatgttgtcgcacagatcaattttgacgatgcagcggcgctggatgagttatcaaagcgtattgacgaggcgtttgcagagggagcagggcatctttgtttgccaggatctgagcaacccgtgccattgcgcttggctgagcagatacaaaaggaatggcgaaagcagatccggagcgaagagccaacagttcaagaatccatgaggaaaaacagcattggtttgctggtggaagaaaatatcgacgaggtgggttatgccaagtggcgacaagatgcgattcaacaggcgcgtctttcctccccgtcattaccggagaggcttaagccagaaatctcgctgcgtgagcaccaattacacggtgtggcatggttacagcatctgttcgagctgtcaccagaacatgtatcgggttgcctcttagctgatgacatgggtttaggaaaaacgatccaattgcttacctttgtggttgattatctggaacgtcaaccaagtggtgatcctgtacttatcgtagccccggtttcgttattggataactgggaagcagaattgcgaaaattcttctatgccgatgacattgcagtcatgcggctctacggtgatgctctatcagaggcaaagtttcgcagctatgaaatcccagaatcattgcgtcagcagggtgtaacaaatctgttgcgtcccggttggttacaggaggctcgtatcgtgttaaccacatacgagacgctgcgttcccaagagatctccttgggtcgtcagtcatgggccatggtgatctgtgatgaagcccaaaaaatcaaaaatccagcagctatggtgactagggctattaaagccatgaagtccaggtttcgcattgcttgtactggtactccagtagaaaacaccttgatcgatctctggagcctgtttgattttgtccagccaggtttgcttggggccttaaaccagtttggtcgtgaataccaaaaaccaattgaagagggggagtgcaaggatctagaagctctggctcgattacgttccttgattgagccccagaccttgcggcggaccaagcaggatgtggctaaggatttgccttccaagatagaagatcgcacttgccgcaatctgaccatggttagtcggcagcgttccctctataaccagcagattggtgaatatcgacagcgacaattggtgcaggaggccgcagggagtaaagagagtttcatccttcctgtgttgcataaactcaagctggtctgtgctcacccctattgtgtggagcctgacctttggttacgtgaacattcccctaagatgaggtggctgctagaacaactggataacatccgttgcagcggggataaagttatcatcttcaccgaactacgggatgttcagcgtgaagtacagcacgcggttaaggtccgtttcgatatatccccaacaatcattaatggggacaccagtacaagtagcgatagcctgaatagtcgccaacgtctgattgatcgtttccaggcagtgtccggctttaatgtgattattctttccaccgtggcggtggggtttggtgtcaatgtgcagggagcaaaccatgtgatccatttcacccggtgctggaatccggccaaagaagatcaggcgaccgatcgagcataccgtatcggccagaccaaggatgtatttgtctattatccaactatacgcgatgctgacattcagaccttcgaggcaacgctcgatgatttactggaccagcgtagatcgttagcgagcgatatgttgcaggggaaaaatgacttacaactgtcggagtttgatggtgtgcttaacaaatga

SEQ ID NO: 11003 - DNA, 2193 bp, Pseudomonas sp. DSM 28142
atggatttttcgacgctgttgcatctatggggtgcagcaagctcagagcagctgatcgcgccaataacggtagttggcttcgttttcattttgtgcgcttggtactttgtccgttatttttgtccatccttcaaacttagcagtcagctgaaaaaactgactaaacgtgtgcacggtgtgaaagcgctcgccccgtctcaacggcgctctgaattggagcaactgttcaatggaagcaagctggagcactcttggcacgaatacgctgaaacgctgcacgaccagtttgagtttcaagaaggcgaacaggttcttgtccggtcgcgcgccaccgccggagccgcgcattttttctcacctcaaagcgtggttgataccccgctgggaaccgagttttataaacacctgcctggtattttgaccggcatcggtattgtcggaaccttcttcggcttgatgctaggcctacagcattttgatccaagcacccctgagcaggtaaatgccagcgtcgataagctgctcaaggacgtgttgtttgcgttcatcggctcctttatttcaatcatggcctctatagctgtcacgattactgaaaagtggcgtctgggccaatgctacaggctccttgaaacgttcaacgaaaccatcgacgggcttttcgacagcggtgtcggtgaggaatatctagcggagcttgtgcgctcgagtgctgaaagctccgtgcaaacccgtcagctcaaggatagcctggtaaccgatctgcgggaaatgctgcagaacctcgttgatacccaagtccgcgaaagcctcaaattagcggataccttgtcaacgacttaccgtgactctgggcaattgttggccgatcaggtaagcagtgcgattgagaacagtctcaaatccccccttgaagctatcgcgggtgcggttcaggccgccagtggcgaccagtcagggcaagttcagaatcttcttcaggatgttctagttgccttcatgaacaagctggaaggtacgttcggccaacagtttaacggtctacacgaactgatggggcagtccgttgccgccatgcagtcgatgcagcaaggcttttcgacgctgatccaagatatgcgttcggctagcgagtcctcgacccaaaacagctcgactatgatcgctcagttactctccgatatgcaggccggacagaacgccatgcaagcggggatgaacgagatgctcgccaatctccaggcttcggttgcccgtatcggcaacgaaggggagggggcaggtgctcgaatggccgagcagttggagaagatgtttgctcaaagcgaggctcgccaacaggcaatggctgagaatctccaggcttttgttgagtcgatcaagcagaacatcggccaaggtcaacaggaaaccatggcgaaaattgcgggctccgttgaggtgctgggtgagcaactctcggcagtcttcaagcaattggagcacggccagcagcagatggatcaaaccacccgcgctgcacaggctgacctgcatcaaggcacccgtgacttggtgggcggtcttgacgaacaggtcaaggcgttgctgcaaacagtgtcagagcaacagaagtctgcccaggacactgtgaaggcattgagtgcgcaaacagagcagcatttgcagagcatgcagctaggcgcagacaagatgcgtgcggctgctgagcggtttgaaacggccggacaaagcgttgcgcgagccagtgagtcgactgcggggctgatgggcactgtgcagggcgcaggtactgagcttgcacaggcgtcacgtgagctgaataccgttgttgcggactaccgaaacaatcgtgaagcgctagcgaaaacgctcgctgtcatcgaaggggtagttgcgagtgcacaaggggaggccagcggccgtagccagtaccttcaggatctgaaggtgcaaagcgagcggatgcaggcgcttaaccgtgaagtgtatgaatacctggaaaacatcagtggtgtactggggaacggcttcaaagagttcggtgatggaatggatcggacgttgagacaaaccctgggtagcctggatgccgagctcgataaagcagtcaagagtctcgctggcggtgtagaaggggtcaaggaaagtctcgaagacttcggcgacatcatggaaaaaatcaggcagtaa

SEQ ID NO: 11004 - DNA, 744 bp, Pseudomonas sp. DSM 28142
atgtttggtaagcaaatgccttcggctgcccgttcaaaagacgagggagagaagccgttctggatctccttcgctgatttgatgaccgcgatgatgattctgtttctcgtggtcatggtggcggctttgagttctgtgacgcagcgtattaaccaagcggagcagggagagaagcaacgtaataaggacatcagtcagatatgcgagcatttgagtcttaaggcgaaaactgccagcaagaccatcgtggtggattgcaaagacaaccggattagcttcggagacgctggccgctttgggcataaccaatacgcgctgagcaatgatggtcagtcggcacttcaagaggtcgtgccgatgattatggacgcggctaatagtgaagaaggccgaaagtggttcaaacaggtggtgatcgagggctcgacagacactgacggttcttatctttataacctgcacctttcactgcagcgttcagagtgggtgatgtgtagtctgctcgatagtcgcagcccgctccaggttgggctgtcgccggagcaccagcaacagatcagatcgatgttcctggcgggtggcgtgtccttcaacaatgcaaaagacaccaaggaagaaagccggcgagtggagttgcgcatgcagttctttggcttgaaggaaaaggaagaaaacctcaagccagatgtaccggtgttcaataacactgatatggaaaagtgtcagttggcgatgaaccgatga

SEQ ID NO: 11005 - DNA, 1629 bp, Pseudomonas sp. DSM 28142
atgactagcccaatcgcgaggctttccgccgctattaacctgagtctttcaacgcatcgagcggggccggcgcctgaaccgttggcgcgtttcccccgtctgggtgctgcgggaattgatctttacgaacgattcgagcgcgctgaaaaagccttgccaccacctcaggaaaaacgccgcgctgcgataagcaaatttcgcaatgtactcccactcaacgcctcagagtggcgcttggtttttgccggcctctcggacaagagcgagcgagtcgggccgatactggacgatgaccagctttatgcccgagtacacaaagaaatccatcaccgtatcgaaaaacgaaagctgagccgtcgggattggttggcgctgtgctttagctactttgggtacgaggccgccacgcctgacaagaatgccaattggtgcctgttgcgcgaagacgttcaacttggcttcgaatgcgtcaaaggccagcaaaagcgtgaaaaggaatgggtgcaaatcgtccagcagcatcaggagcttttttccgaacaggcgggtgcaaggctcggtaatcagatgttcaagggggagatcagcgacctttcggcactgcagacgattgcgcagatccctgacaacagctggctgtggcgcaggatttttagcgtactgatttctcgtattttcatgctggatgatgccgagttttctcagcgcttagccgaccttgtcgacatcggccggcagcatccgcggtacatgaacgacattctgagtgcatgcctgtcgcgttatcacttggcagcgtatcgagagaaaccgtcgtcgctgctcaaacaggtcgccctcgacaactggggcagccctcagatccgttccagacaaaacagctggctgcagtacgttgaaaaagatgtctgtgcaatggtcgttgcgtggttcgcgaaggaagatcttgagcacttcttcaacctgttgaagggagactccgaggtcgatcaatcgcgtctgcattattggctgcgatttgccaaccaaatgagctacacccgaattgttatgggggcggatgcgtggaatgaccgcgggcgggacttcgtccatttccgtgagaagaataaagggcgcttgagtaagctggtaggcggtcctgggcacaacaatgctgtagtcatgcagattggtaactactttttcgtagagttctccggtacaggcaatgcctgctatgtgtacaaagcagatgattcgccattcaacccagacaaatcccagcttgagcttaccgccgagctgaagcaggcaaatcgtgcgctggatcgaatgcggcattcacctgcaccgagccgcccaaaccgtatagagggttggctgagcaaattcgatgactctctagggaaattgggcattcgcgcgcagagtcaggccggcacgccagggtcatccaaacccatggctttcgaagaccaagtccgtgacgctttaaagtcggtcaagcacaaagtctatgaccaacgcgcgcgcggtggcgcgtttcaggtccagcttgatgacaatgatcaggctgccgttgcagcgctccaacgcctgggcttcaagcccgtcaatcaccagccactcaggttttggagacagtaa

SEQ ID NO: 11006 - DNA, 3249 bp, Pseudomonas sp. DSM 28142
atgctcaagcgtttgctgaaaggcatcggccggcagccgaattcggcggtagaaaataccgagcctgttttttccattgaggagcaggggatttgttatcccctgagcttggcggagaatgcgcagtcctggccgctggcgagctatctggatcagttggaagaagaggagttcgtctctcagctcagcgatcgttggttgctgacgtgggacgagctttatcggcttcttgatgagccagagcacttaacaagtctgccgctattggggttgccgccagagacagccctcatccctcaattgagtagccaaggcagtcttgcctctgacgacttcaaggtcgctgtcagtggatggcgcgacccgcagtccaatgcaaatgtgcaggtgcagcgtacaggtgccatcgtccagcgccacggaataatggaaattctgcccgagtcgtcgtggaaactgaccggtgcggtacggcaactttatctggctcagcaaaatgagccgggtgaagtaactaaccagattggctgggctagcatcaggaagttggcgcgcaaggctggtgccggtatggatggcttcttggataagaccgtcgttatcaaacctgaaagcttgcgactcaacccgcgaaaatcgacagtaggtaatacgcctgttatcgagctggaaccaagcttcgaaggccagccggcaaactggcttgtgagtttcgacggtgccaatcaggttcaggatcgatatcgggtgatcggtgatgatggatcgttgacacacgtcctgattgagcccgaagtcaaatcagtattggactatgtgcgctcgttgcccgggcgtcgggtcgcaggcgatgaagcgctttcatttgtccgcaacccgtacagcgcactcggtgacagcgccgcgcaagttctggatgccgggacctatgaagacgatctgacagaagccgggattttctttcatcgctttcatctggaacccaaactggatgaagcgggacagcgcattgagcaggtaaacctgacactcgagccgatctcgccaaccccgcagccgcccatcgaagttgaattcagtgcggcttatgagctcgcgccgttcgtgcatgagttgcagctgaaattggctgctggcatgcctgccggtttctggcagggctatgagttggagctcagcgattttgatttacgccagctggcgggtatcaacgacctgcttaagcgttggcaaaacgaagcggcgggtatcgagttcgactccgtcctggacctgtctctttatggcgaccgtgtgactggcatcggggaagcggaaaaaattacttcgcctttcctggtcaaagaggcgaccgagaactggttgccgaaggatgtggccgcgctgggtattgacgcagaaatcctcggacgttgggatccatccgaccgcgctcaatttgaagcgtttgagcagcgattggacgaagctcgcgctgccggtgatgaaacagtctgtttgccagagtccgaaacaccgctctcgattgccgccgccgagcaactgtttgctgcctggtccaagaagatctcccctgtcgagaccagccttgtccagccacaggaaaaggttggccgcgccgtactgcaaatcggccacaacattgatgaaccgacctacgttcagattcgccaggcagcattacgcgccgctttggacgcaacgccagagttgcccagcttgctcaagcctgaggtcgtcttgcgtgagcaccagcttcaaggcgtcgcgtggttgcagcatttgttccgcttgtccccctcggacgtgtcaggttgcttgctcgctgatgacatggggcttggaaaaacgatccagttgctcaccttcctagtctggtacctagaaaagtatccacaagacaagccaacactgatagtcgccccggtttcgctgctcgataactgggagcgagagcttcaccggttcttcttcgctgacgcgctgccagtgctgaagttgtatggctcagccttgagtgcggtgaagttcaagaaggaagaaatccctgctgacttgaaagccaagggcatcaagaatctgttgcgcccgggttggatgggcggcgcccgaatcgtcctgacgacttacgagacacttcgcgatcaggagttctccctggcgcgccagcagtggtcgatcgtcgtgtgcgatgaagcacagaagctgaagaaccccgcagcactggttactcaggcgattaaagccattcccgcacagtttcgagtggcatgtaccggtacgcctgtcgagaacaccctgattgatctctggtgcctctttgacttcattcagccaggttttttgggcggtttgaaccagttcggtcgcgagtatcagcgcccaatcgaagccgcattggagcgtgatacggttgcactggagcgccttcgagggcttatcgatccgcagactttgcgccgtaccaagcaggatattgccaaggatctacctgccaaaatcgaagacacagcatgccgttcacttagcatgcatgtcttgcaacgcaatctgtacctgtccgaaatatccgcgtacagccagaagcagcagatcgaagaacagctcgatcaaaagacctccggcatgcttgggttgctgcacaagctcaagctcatttgcgcccacccgtatagcgtccagcccgacaagcgactgcgcgacaattcaccgaagctgcagtggttaatgcagacacttgagtcgatcaaaagagccgggaacggtgacaaggttatcgtctttaccgagttacgcgatattcagcgtgaattgcagcactcgatccaagagcatttcgggtttcgggctacggtcatcaacggcgataccagtaccagcagtcagagcgccaatagcagacaaaagctgattgaccaattccaggagcagtctggtttcgcagtaatcattctgtcgacgatcgcagtcgggtttggagtaaacgtgcaggcggctaaccacgtcatccattttactcgttgctggaacccggccaaggaagatcaagctacagatcgggcttatcggattgggcaggaaaaggatgtgtatgtgtactacccaacggttcgagatgctgcgatgccgacgtttgaggcgacgctggatgagttgctgagtaagcgacgagcgttggcgcgggatatgttgagtggggcttcggacatccaggtttcggattttgaggcgttgctgaaagcacggtga

SEQ ID NO: 11007 - DNA, 2319 bp, Geminocystis sp. NIES-3708
atgattgaaaataacgatataaaaaaatatcaaacaaaagattctcaattaattagtaaagttattgattttttagaaaatgaaaaaaaacaaaatacaaaaattattaacctcaaagattgcaataaagatattaaagaatggatattcaaacacttaaaaggtaataatgaaggatcaatatttactccaaagctagaaaataattattatattctttcatcttatcctagcttattaagtaattctgtccctcgtagccctgtttattatgcaccaactttattaacagcattaggtattttaggcacttttttaggaatctttttaggtttacaagaaatagggataagtggaattaataacacacaatcattattagattcttccactaaattattagagggaatgaaaacagctttttctacttctttagctggaatgagtggtgctatttttatgatgggatatttagcaaaaggagcaaaatcaagacaaaaaattcgtaatgatttaaggctaaaactcagtaaaattgcttttcttgaatcacctcaaaagttactatcaagattagataattcttctatggaagacgttgcacaaaatttagaaatagctgcaaataatctttcttctctcggtgatttaactcctgaaaatatcgctttagcaattcaaaaagccattatttctgatgagagtattttaatcaaacaattacagttacaaactcaaagtcttgatggtttaagtaacttaacacctgaaaatattgcttcaactatccaaaaagttattgctttagaaaaatcagttatttttgcagaattacagaaacaaaatgattatttacaacatcttacccctgcaaatattcaacaagtagttagagatgcgatcgccattgaaaaggttgctattgttgaagaattacaagcacaaaatcgctatttacaaaatcttacacctgttaccatcgccaatgtaattcaacctttagtaaaaccaattcaggaagaattaacggctttaaaacaaatacaaatcgagcaagaatctaccatacaatcattaatcaaacagttacgcaacgaattaattgagccagtagtgcaaagattggatcaaagtgctaaactcacagaagaagcatccctcgccgtcagagaattgaaagacgagttaggcggtattgcggaaagtttatcaggtgcagtaaaaactatccaagaatttcaacgagataccctcattaaattgcaggaatttgcccaaagtttacagcagattttaaatcaatttagtggtgacaccaaagatgttttacaacaggtagccgaagaaatcaataacgccgttgctgaaagtataactggcatggaagcccagagaaaagcctttgaagaaagtgctaattctgccgccaatacttttagaggaattcgggaagatttacaggaggctttaaccactcaggcaacccaacaaaaagaaatgttagaaggggtgaaaaattccactgaaagcattttagaaaaaacaacgattgcttttactcaacaaacagaaactataaaaaatgtgggagaagaagcatctcaattaatgagtcaagccaaagaaaatctccttgaaactctcaaaaatattgatactattttagatcaaactcgcattactttgcaggaagaattagaaagatttagactggaatatcaagtatctttaacggaattttttacccaacaaaataacttattagaggaaactttaggcaaacaaaaagaaggtttagcagaagttgttaacaatttacaaactacttttaaagaagaagcagaaatgagaaaagagttaagtcatgaagttaatcaaagtttaggaaaaattcaagaaacggtgaaaatagttaataacttagttaacgttgtcggtatgaattctagtgaaagatttgctcaacttcaagaattagcttataccatcggtaatgaagctcaaaaagttgaaaatagttatcaaaaaatgaatgaaaaagttaataataatgtggaagtaatgactaataaatttgaagagactatcacgaaaattgtagaagaatttaatcaactttctactaacactaatactcaaattaataattatttgactaatgctagtaatagttataatgagagtttcaatgatgcggacaaagcaatggctaatatttgtagtaaattaagttatacttcccatggtttaatgaatgttgctgaatatttagtcgcttctgttaatgatttaaagcaaaataatctgagtaataactaa

SEQ ID NO: 11008 - DNA, 669 bp, Geminocystis sp. NIES-3708
atgagcgaatttttagaatacgaaaccgaagaagaattactagaagagcaagattctggagtatggttatccgtaggagatttaatgtcgggattattgatgttttttgccctcttatttatcgctgtttccgcccaattagtagaatatgataatatcatcaaaaaaattccattagctattattcaaaaaactaaagaaattccgggtattggagatagtataaaagttgatcctaatggtgatttaagtttagatgataaaattttatttgacgaaggaaaagctatcttaaaacctcaaggtaaacgttttttaaaagattttattcccctttatgctgatactatatttagtgacgaaagatttgataatcaagtttcaagaattattatagaagggcatactagcttaaaaggctcacaaaaagataacatggaattaagttttcaacgagcattagcagtaacagaatatattgatacaattaatttttctaatcaagataaatttagaaaaaaattgttagccgcaggaagaggaaatattgatgcaaataaagcatttgatgatccaaaagatagaaaagtgatgtttcgttttcaatttaaaagagaagatttaggacaagtatttaagaataaagttaaggataaaaataataattga

SEQ ID NO: 11009 - DNA, 1512 bp, Geminocystis sp. NIES-3708
atggcattttttaccgctaaatttcaacctttagaatttcaaaaacctgagcctaaagaattatttaaactaggttatggtattcaaggagaaataataatacctcctccattacctaatggtatcgaatttgataaaaataaaaaagttagaaatattgatcaaattattaatgagatagaaaataataatttagaaaatattagtttattagaatgggtttattgcttatttagtaaacatagttgggatatagaaaatccgaataaaagtttaccaacttctcaaaaaatttggaaatttaccaaagaatctgatgcccttaaattgcgtttattttggcgtttagttttatatacttttaaccccaatgaaaaaattttaccattttctttagcggatacttgtcctagttttgaacctcaaacagaatttgataagtcattaattaaaattcttaacttacttattaaaaatgcttataaagaattagccgaaatttgcttaaataaacttatacaacccgataaattattaacccaatactctttaccctataaaataaatattgatgataatttaactttagtagaagcgatacaattatcttttcccttagccttaaaaactattcaaaatattaatgaaaaacaaattaattttttaatcgaaaccttaaatatattatctccttatccccaattaaaaacagtagaaaatctattaaataatatttctgctgatgttggtggtaaatatccaaaattggtgaattggcttaaaaataattatggtttaacaggtaataactctcgttggaatcagttatcaattgaagctaaaaaggctttaaaacaatggattggtgcggtaaattatcgtgattttgaaaaattagttgatttaataattaatcgtttaaatttagaagattgggaaataaggcaattaagaaatagaaaagttttttggtctaattatactgatagatttgatagaattagaattttattacctgcttcttccatacaaattgtaggaaataatattaatcaagaagatataacttcattaatttatgatggtagtgaagccactgaagtttgtattttcgattttgataaatggtttattgtagaattttttagaggaaaaggaagtgaaaccagaatttttcctaaaagtaacgaattggaaaatttattttttaatagtgatgatatttctcttaaacaattaagaagtttatctatagctagaaataatgtacatgatcatcgatattgttggcaaagtgattgtgaaacacttttaagaagtaaaaatattttaccgaatcaaggtactagatattttaaaattgtagagcgtcagcccggatttccttataattttaattcagggatgccaccactaaaacaaagccagattaatgatagaaatagacaattaattgattggaaaagagacattcaacagttagaagcagaagcaaaaaacaaaatattttga

SEQ ID NO: 11010 - DNA, 2099 bp, Pseudomonas sp. BICA1-14
aggcatccaatgtcggcatgctctggcgcgagttcgatgaaagtctcgtgcagtcgtccgaccagcaaaagctgttcaacacactggatgccgagcatttcttcaatgcgcgcacgctggcgagcggtctgactgccagccgcctgttggccgcggcgcctagcttcctcgtggcggtcggtgtgttgggtaccttcgttggtttgaccgtcgggcttgaggggctggtgggcacgtccgacgaaatcgaagcgctaaagggcggcatcaacaagctgatctccggcgctgctgtggcgttcatgacatctgtgtggggcgttgccttcagcctgctgctgaacatcatcgagaagatgttcgagcgtagtgcgctgaatgatattcagcggctgcagcacgatatcgactttctctacccgcgcattcccgccgagcaatcgctggtgcatatcgcggaatacgggaaggagagcaaggaagcgctgcaggaattgcacgagcgcattggcgatcggctgcaggaaaccctcaatggcatgaatgaggccatgcagacagcgctgaccgatgcactgaacaacatcatggctcccgctattcagacgttggtcagcactaccagccagcaatctacccaggtgctggaaaccctggttggaagcttcatggacggtatgacgtcggttggccgggagcagggcagccagatgcaacaggccgctgccgacgtgaacgcggctgtaagcggcatgagtgagcgcctgaaccagctgttcaccagtttgagcgagcaacagggacggcagatggaggttgcgcagcagcagagcagccagttcgaagctcaattgcaacgcattgctggctctgcagatcagcggcaggaacagctggagcagcgtttcagcgagctgatggccggactgtcgagccagttgcaggggcagttgggctctgcgcagcgccgcgatgaagagcggcaggcgatgttcgagcgtttgctgagtgagtccagtgccaatcaggcggcgcttctggagaagttctccagttctactcaggaccagatgcgagtgatggccgaggcgggcaatgagcggcataacaacctggagaaggtgttctcccggttgatgatgaacctgaacacgcagctcgatacgcagatgggggccgccgagcagcgtgagcaggccagggcgcagcgccacgaggagcagcaagcggcggcactggcgcaacagcagcagctgatcggcaatctgggccagaccagccaacagcagattggcgccattgccgaagccgcggcgatgcaacagcgcaatctcgaggaaacggtcagcaagctgctcggcagtttcaatgagcaggtcagcgggtacggcgtgcaggcggagcagcgtgaacagagccgccagcagcgctttaacgaacaattggaaaacatggctgcgcagcagcaggagttgctggcaggtatcgcgtccgccgttcaggttacccagcagcagagcaggcaaatggctgagcagcatcagcagctgatgacgcgcctgcaacaggctactgaagcggccgcgaccagcagcaagcacatggatagcagcgccaatcagttgggcctgctttctgccaaccttcgccaggccgctgatgcgctgggccagcgcctggaggcagtaacccagagcgtggaagctgcgagcacacaaaatgccgcgttggctgcacaactgcagggccaggcaagttcgctgtcgcagctgcaggcggcactactcgaaggcgcgcagcgcttcgagcaggccgcaagtgaagcacgcaatggctttggtgacatgaaacaaactcagcaggaattcctgtccggcgtaaggcatgaatttacaacgctgggtgagacgctgcgtgcccaggtagaggcaattgaaaagcaggctgaagagtggctgcgtagctacgcctccgaagtgcgtatgcagactgaggaccgcatgaacaagtggaacgaggtctcgcttgcctatgccgatcagatgcatcgcaacgtccaggcggtgagcgggattctggatgagctggaggcacgctga

SEQ ID NO: 11011 - DNA, 765 bp, Pseudomonas sp. BICA1-14
atgcgctttcgcaagtcgcatgacgtggccgtcgatgaggaaaacccgtactggatgtccttctcggacattatgtcggcgctgctggtgatcttcattctggcctcggtgatcctgatcctgcagctgatggacattcagcagaagttggaggagcggcaggtccagttcgaacaggaaatcgaagagctgaaaaaggcggagcaagtgcgccgcactatcctcgatgaggcagttgaggcactgcgcaggcgcggcatcaaggtggaggtcagcgagaatcacacggtgctgagtattcccaacgaccttcttggcttcgataccggtgcctatgaaatccattcggcctatcaggcgcgagcgcttgagatcggcaaggtcatcaatgaggtgatctcgcgtgatgaccgggtggaattcctggacacgatttttatcgagggccacacggataatcgcccgttgcagggattcatgggcaaaggcaactgggggctttccacctttcgtgctatttcgctctggcagttctggggggacgccttggcgcgcgaggagcagttgtcgcgcctgaacaacaaggacggaaaaccgctgttctcggtcagcgggtatggcgaaacacgtccggccgtagccgatcaggtcacggaggaagacttcaagcgtaatcgccgaatcgacattcgttttaccatccgtcgtccggatagcgcgcagtacgagcaagtcaaggagcggctgggggagaccaagccatga

SEQ ID NO: 11012 - DNA, 2259 bp, Pseudomonas sp. BICA1-14
atgaggctgcctccagtagagtttcctgctgtcagctggagcgctcagatgctcgagcgctggactgtactggcaaaaaaggcagccactatggaggcgagcgtcggaaacaatgatgtctatgagcgcacgtgcgccgaactgcatcgtatggctcaaacactgcgctttgatgcgctgccggagatgttaaagcgccggataacggctcggacgctgacctcgctgtggctcaaaaacgaagtaatcgaacttctaaatgcacgcttgctaaccaccatgctgagagcgcagcagccacgtcttacgccgatgacgctgcggcagctggcacagctgtattttcggcgattcgatcgattggatgaaaaggaaggggtgcgcgagcttctggagcgaagcctgttacagcagcttgacctgataccgccgtcgaagatccagacatcgcgagccgatccactggttacgctcaagcgcgaggggcattggttgctaggcctcgatggtccacgtcatctcgctgaacgagtacgtcaaggcggacgtgagcttggcgagacgttcatggagctcggtctgcacggctttgatgatggccgttatggtgatatctgcagggcgcacttttatctcgaaacgttacgacacttgccccttggcgagtccgatccggtgctggatgagttgcttaagcctacagtggccaaggcgccctttgaaggcacacggcgaatcggccatgttgcgcttgagattctgatcgaccgtgctggccaggaacccggcgaagtctggcagaacttcattcttaacttggctggcgaccctcgtatctccagcacgaacgaaaggtttgtaaggtggtggcgcccgctcggtgaggagcgcattcaaaaggtacggggctggttgtccaaagaggacctgcgtctgttcctgcaggccgttgagcaatacgggcttgaaacggccaatacggaaatgcagcggatgttcccagcccgcaaacgattcctggaagggctcttcaagctcaagttgattcgtaacactcgcctcctactgggcggtaaggctcaacagtcggtcaagcgaatcctgggcaaggacgttaagaccagcttcgcgcggatggatgggcagatgacggacaaggccgttatctatctggactgcggtgacttccatctagttgagggctcacatagtttcaagatctgggtctatctggccgcccctggcgaagccctcagaacttatgagcgcaataccttcagccactacgacctgaccaccacggtccccggaacttacaagaaactctaccccgggttgccttacgatgcttttgtgcacaccccacacgcctggcagaacaaggtcttcaccttcctggccgagaatggcattgctcttgatgtcgagcagcttctgagcgctgaggactaccgccttcagcttcgtaaattcggaatccctgccgtaagtgccaagcgcacggtggttcccgctccggcgaaagaaggggccaaagcggtaacgcgagcgccgacggctgctcaacaaggaactgaacacgctgcggcgccgatgtcacgcaacgccgatgtgccaaccccagcacggcgttcagccgatgttgaatcagtggctgcaaatggtgcgatgagatcaagcaccattgcctccgggcgggacaacccggttccgcaacgaacgaagctgccgcccttcagctcgctccaactggcggccctgcgttatctggagactcatccacgttgcggtttctatgcgttgctggacgctgtaagcaatcagggcggcaatgtgttgaacgtgaaaacaatgttggagagcagcctctctcagtacgtccagcaggacggagaggggcattggctgctgtcgactcatggtgcccagttagtagccgagctggccaggtcggagccatcagatgcaagtcagagcgtgccgagtgcggcaaatatgaacgcaaacgaaaacgcaggctcgagggtcgctaggctagagccgtttgcgcttgccgtattgcgttatttcgccgccaacccaggcgataaagttcgttatgcggcgaatgttttggaggtcgacgcgaggctggtgaaccaagctttatacgggccattgaaagggatctgtacgcaggatgataagtacggatggcagctcacaggcgcggctcaacgggagctggaaacgttcgacgcacagggggaggagtcgtaa

SEQ ID NO: 11013 - DNA, 2190 bp, Enterobacter sp. 42202; identical to SEQ ID NO: 8439

SEQ ID NO: 11014 - DNA, 738 bp, Enterobacter sp. 42202; identical to SEQ ID NO: 8440

SEQ ID NO: 11015 - DNA, 1515 bp, Enterobacter sp. 42202
atgcggctggcggcactgcgtcgttttcgtcttgcagaagaactgaccgaacgtgagtggcgaatggtgttttatggcctcgccgataccgatccgctctaccctgacaggccagtattactggaggatgatacactcttcccccgcgtcgacagcgctattcaaaaacagattcaatccaggacactgaaacggaaggactgggcggcactttgttcaagttattttgcctacaaacacgaatcgccagaaatcaatccacactggtgtgtactgcgtggtcatatcgcccatggatactcagtagtaaaagccgctatccgcagagaaaaaccgtggatgaaaaccattgagttttatcacgacatttttacgcctcaggctggcggtgtgatatcacaacaactactttccggtgagagcaactccctatcatctttagagaaaatagcgcaaattcccgacagtagctggttgtggaaacgtattttcacggtgctgctggcgcagcttgatactctggatgatcctcaatacctggacaaaatcagctggctattgagcctggccgcgcagtgggtacgttttcgtgatgacattattacggcaacgctgactcgctattaccattcaacctatcgcgatcaagctcattccgccctgaaacaggcagctcttgaatactgggataacccgcagctcaagagtcagcagaataagtggcatcagtatgtttctgaacctgtcgctgcaatggtgcggggctggttagcaaaacaagacctgatgcatttctttgagctactacgcggcaacggcgatgtcgatcaggcacgactccactactggctgcgcttcgcaaaccagatgggatttacccgtatcgtgatgggacccgatgcctggcacgatggtagcagtgactttgtgaaattccgcgaggagaatcgtggaaggctgagccatctgcgtggtgggcgtagtttcgataatgctatgattatgcagataaacgattacattttcgttgagttttccgggacggggaacgcgatgtatgcctaccgagtgggtcaggctccctttaaccctgagtcacattcattagatattaatatccagttgaaagataaatatcgtaatgttcttcgtcttccacataccccaagagcagaagggtacaacaagacccgcatcaccggctggatgcttaaatacgaagatgaattgcgtaagttaggtatccgctggatggctgaagagcccgtcaaatttgtagataaaaaagcgccctctcccgcctcggtatctgacatcaaaatcatcaatccattgcgggatacagcaatacagcgcctggttgaaaacacctcatgcatcgtcagcgataaccgacaaaaaggtggcgtgctctctgtacagctcaaagcacccgacgacacgacggaaagagagttacttcgactgggtttcgcccctgtgctcaaagagccgcatcgctactggatcaaataa

SEQ ID NO: 11016 - DNA, 3243 bp, Enterobacter sp. 42202; identical to SEQ ID NO: 8442

SEQ ID NO: 11017 - DNA, 2058 bp, Burkholderiaceae bacterium 26
gtgagtgttcaggcatttttggccagcgcgccaacggcggtgctcgtcaccggtacagtgctcgctgtactcatcggcatctttttcgtgttattcctagcgcccgctctggcgcactggaaccgcctgcgagcagtccagagccgtatcgctcggttcgaaactaaggactatccggcagagttcaagaaggcgttcgctggtgacgaacagttaacgcacctttggaaggagtatcaggagtctttgcacgttcagcgcgaggagcgggacggacagatggtcgtgcgagcagtccgttccacagcacctgctgagctgtacttcaacagtcaggtagtcgtcgacagcaggctacgcacggaattcttcaagcatttgcccgggattttcacgggtatcggaatcatcggtacgtttagtggcctaatcgaaggccttcgtgcctttcaggtcagcgagaacgctgctacggtgcggacgagtcttgagtcgctcatgcactccgtgggggaagcctttctcatttccgcttctgccatcttcgctgcgatggtggttaccttcattgagaagctgttgcttgcgtcactgtaccggcgaacggaggagattgcgcacgccatcgatgcgtgttttgaatctggcgccggtgaagaatacttgtctcggctcgtcaaggcgtcggaggagtctgcaagtcaatcgaagattctcaaggatgctctcgtcaaagagttaggcgaactgctgcgcgaacttaccagcgcacagattgcggcggggcaggagcagcagaccaaagtcgtagaccgcttggttcaagcctcccaggagcaggtagaagcggcgcgccaagacaacgtggcgctcgggaacaccatcgccgagagtatccagcaaagcctacagggacccttggcggatattgctgccactgtaaagacagcgagcggcgaccaaagtgcgacggctacccgcatgctgcaggacgtcatggttagctttagccagcgcctcaacgacctctttggtgggcagatttcgggccttagcgaactcaaccaacagacgtcccgcagcgttcaggaggctgtcagtacacttcaaatgttggtcgccaacatcgaagcgtcgagtcagcgttctgctgatgcgatggctgagcggatggcagacgcaattgagaaaatggaggcaaggcaggaggcgatgaatgcccagtctgcggctttcattgaacaaattcggcaactggttgccacctcccagtcggagacgaaccacaagttgcagaccacgcttgagactattggtttgcaggtcaccgatatgctggccacacttaatgggtcccagaaagaggtattcgagagcaaccgcgctcgcgaacaatcgatggcggaccgggccacgggagccgtcactgccatgtccgagtcggtcgacgcggtcatcaaggaactcggcacagcgaccaaccaaatggcgcagagcgtagcaaccttgactcaggttacttcgtcaacggtcgagaagatgagtctcggcgccgaacagttgggtgcagcgtcccgcaatttcgctacggccggtgaacgggtgtcgagtgtcatgagccaggcagccggcgtttcggcgaagctcgccgaaacatccggcagcctgaccagtggagccgctgctatccaggaactgctgagggactatcggaatcagcgagatgctattggccagcttgttgcggaactgcgcgcaactgtggaggcggctcgcaaggaagccacacttactagtgacatcttgggtcggattgaaggttctgccaaccggcttggtgccgcacagaagctggctgatgagtatcttgaaggcgttagccgagttctcggggaagcgcatacatcttttgctaccgaggtgaagcggacgctcgacaaggcgaataccgagttccacacaaagctcacttcagccgttgggctgctgcactctgcagtatcggaactggaggtgacgctggcgtcaatggggacacttgccccagcgagggtgtaa

SEQ ID NO: 11018 - DNA, 708 bp, Burkholderiaceae bacterium 26
gtgggcgccaaggttgtactaaaacgtggtggccgggatgaggcagagaagccgttctggatttcgtttgccgacatgatgaccgcgttgatggtgctcttcttggtcgtcatgggcgttgcgctgcttgcggtcaccaaaaacgttacggagcgggagaagagggaagagcagcaccgcaaagatatcgagctcatccttgaccggtttgtaaaagccgcgaagcggtatgacggtattaaggtcgaccgtgaccggcatgttatcgacttcggcgaccgagctcgctttgcatttggaaaatcaaatctgacgactgagcaagaagcggtgcttcgtcagttcgtgccagaaattctgacgctcgccgacgatgacctcggaaagcgagtgttgaagagggtggtggttgaggggtacaccgacaagacaggctcgtatctcagtaacctaaaccttagcctgcagcgtagccaaagagtgctctgcagtatgttcgcaacgtccggcccaagcctcctcaccagcgagcagaaggagagcgtgcgcaatctgttcttggtgggcggatactcgtttaacgcggcgaaggacacggacgaagagagtcgccgggtcgaaatgcgcatcgagtttttgggggttggcgagttgcggtcggaagcgtcgaagcaatcaggtaacttcggagagtgcgcactgcgatga

SEQ ID NO: 11019 - DNA, 1677 bp, Burkholderiaceae bacterium 26
atgagcgcactagaccatctggcgtcgctgctacgcccagccgttcaggaaggcgccaaaacaatgacgccaagcattggcattgacgcagtcatagcggagatggagacgcggacgaagtcccgaaagggtggcctctttgcagaggacctccagctcgaggcggtacgtcgtttttggaagagtcaggaagtgaagactttccgtgacgcctatatgctgtcgtggagcctgtgcttgccatatcgtccgcagggtccgtgtgtgatggaagacgctccgcgcctacggctggtccttgacggagtcgatgggtggaccactagaccgagcgcctatcgccgctgctatcaaggtttggttaaaagttactttacgtatgacccgctcgctgacggggccgtcccggctggacgaaagaactggggactgctgcgagagtacctgcacgagcgtagccaactcattaaagaccgaaatatcaatccggaatgggttaataccgctaccgataacaagcaactcttcggcgagcaaccgtgtgagccatacgtggaagcattgcttcggggggacgctgcgcatatcgaccgcatttgcgagcagctcggtgttggcaaggcgtcctggttcctccgggaactgattcttgctcaggtgaagggcgccacgcggctagaccatccacagtttcaagcccttctccccagattgcttcagttgcttgctgccaacgaagtgctacgtgaccgtgggatgattctcgtcctcgaccgatacgcgcaggtgccaggtaccgccctacaccaaggcctccgtgaccattcggtcgcttggtggggcaatccgtggctgccttcgaatcagacccgatgggggggtgtggctccagaggctcgaacaatggtggcggactggctgaagctggagttcattgaaacgtttttcaccaagctggcggaagacggccttggtgacccacgccgcatgaacttttggaagcgatatgtcaaatcaattgaccatatcgagttcgcgttaggttcgtttgctcgcaactcccgagagccggatttcgtggcgctacgcaagaagatggcgggccttgtttgtgaactcgacgcttccggtgctaacaatgccttcattatgacgatgggcagtgtggtcgcagtggagttcagcggcctcggtaacgcgttttatggctacgacgcgagtggttcggtccccttcgataccactcagccgctcaggctcgaggtgaatggacgtaactcgctgaaacacaaaaccggaaacatcctcagactaaggcaccaagacggcatccataactgggacaactgggaagatatgtttgaggcgacattgagtcagcaattcggaatcaagccgtctactgaagcttctcccaccacaagggttctgacgcagccatctccggttgtgcattcgtcgaaagacagcgctcagagtgttgcaacgcgggcatctgcccagtactcccggtctgtcctcaccaaattcgctcaggaacacggacttgaaatcgatgacaagacgccatacggaggtaacttgtgggtccggagcgccacttttgtcgtgatagttcatcaagctctggcgcgctggggattccaatataagcccggcaagggatggtggaagtag

SEQ ID NO: 11020 - DNA, 3783 bp, Burkholderiaceae bacterium 26
atggtggaagtaggggggaacgtgttaaagctgttcaagaagacaaaggcacccaacagcatctcgtggcagcggcagtggtcgcccgtaggtgtcaccctgaaagccggcacggcagcgtcagatggcgcgaccatagagagtccattgctcggaggttacctcactcagttggtcgatgacgcgttggccgtcgaactggagaacggtttcttgctgggttgggactctatgtatgcagcgcttgagaagcctgcctatgatgcgctgccagacattcttcagcttccttcgtttaccgatgctcgaccaaatctccaaagcagccattcgctgaccgaccgggatttctctatcgctctggctagctggcgcggcgatgacggggtgcagtttgacggagttctcacgggcccactgatggtacagggcgggcagcaggcattaatgcgccccgaacagtggcagctattcaaggccgtcgtcgcgttctcaaagcgtggggaagaggagcgtggagacctcgctcatcgacaggcgtgggggcgtatccggaagcttgcccttgatgcaggggcaggtctcgatgatttcctgtatcggtcggttgtattgactccggagaaactccaaatcggattgcgccgttcggaaagcgtcagcgacgaccacgtcgtcgaaatcgaaccgggcttcgaaggagctccgccggactggctcgaagctttcgaccgagcgcgagaagttcgagaccggtacgacatcgtcacgccagaaggtattgtccaggttctggtaaccccgaaagtgcggactgtactgcaggaaatcaggcgactcccaggccggcgcgttgccgggtctcgagcgcaggcgttcctgctgaacccatacgcgactctcggcgcagacgcggtcgatgtcattgaggaatcgcagttcgagcaggcgcgtgaggatgccggtcttgactatgagcgctttacccctctgctcgagcgggacgcggccggatacccagtacgggtcggtttgcttatcgaaaccgccgttgcgagtggcccgacttcgtctgaaacccactggcttagtgatgccgaactctcgtcgttcactggcgccctttctcgagctctgaagctcggcaaccagttggttgcctggagcggctacgacttgctcgttcagggcgacgctgaacaacacctgaaggatttgactgatgcactggagcaacgcctagcaccaccagcactggtctcctacgcacaagttcacgacctgagcggctactcagctcgggtggaatcaatcgggattgagaaaccgtactattcaccgtacatcgccaagaagaaggaagacgacggatggtttcccgagaacgtcttgccaatggttgtgtaccagccgcaggacggtggcgagcctattgctgtgcctaccagcaagccagcagtagaaaagctgaagaaagacgtgcaagcggccgaagccaagggggagtcaaacataaatgttccctggctcccgcgtcccatttcggtcgaggaagcaaagaagattgtcacaacgtttgaggatgtcttcgcagcagtgaactcgggtaagccgttcgacccagaaaagcgcccgtcgcgcaatgatatcggcccgaagaaacaacttgtgctgagggcgaacattcaggcgctcgagtacgaggagatgcggcgcgaggcactgcaatcggtgcccgctgaacctaggctgccgaagagtattcgccccgagtacatgctgctgccgcaccagcggatagggctcgcttggctgcagcacctgttcagtctgcagactgattaccaggtcaggggagcggtactcgcagacgatatggggttggggaagacattccaactgctggcgctgatggcttggctagtcgagcaagacccaaacatggctcccatactggttgtggcgccggtatcgctactggaaaactgggctgaagaagcaggaaagtttttcctgcctggcacgctgccgctcttgacagcttacggggacagccttagtgacctgcgagtgccacgctcccaaattgagcagcggctgcagaccgaggacgggttggtcaaattcttgcgcccgaactgggtgggtagcgccaaggtggtcttgacgacgtacgaaacgctgcgcgaccttgagttctcgttcgcagcgcagaagtggtccttgatggtctgtgacgaagctcagcgcatcaaaaacccggctgcaatggtgacgcgggctgcaaaaaagcagaacgtagctttcaaaatcgcttgtacgggcaccccagtcgagaacacgctagcagacatgtggtgcctgttcgactacgtgcagccgggcctgctgggcgcgctgaatgagtttggccaacgttaccgaaagcctattgaggccaagaccgatgaagaaagggcgcgcgtcgaagaacttaggcttcgtatcgcaccgcagattctccgacgtctgaagggtcaagtagataccggtctaccaccgaaagtcgtggtggaggagtgtcggcgactgccgctctcaagtgtgcagcggaacctctatgcgaaagccgttgagagcttcaagaagcgcgcggacccgaagcacacgacgccgttcaaaaatcatcttggactgctgcactacttgcggttgatatgcaccgaccctcgaccgcacggcttgaacatcttcaagcccgagcctgtcagtcaataccgcgagaaggcgccgaagctcgattggctgcttagccaactccatggaatcaaagccaaaggcgagaaggtcatagtattttgtgagttccgcgagattcagcgactcctgcagcactacatcgaggccgagtttggtctccgtcccgacatcatcaacggagacaccaacgcgtcggcaagccatgctgccagtcgtcaaaagcgaatcagggccttccaggacgctcctggttttggcgtccttgtgctctctcccgttgctgtcggctttggcgtcaacatccaggcagcaaaccacgtcgttcactacactcgcacttggaaccccgccaaggaggaccaagccacagaccgggcttatcgcatcaaccagaagaagccggtgtacgtctactacccagtggtctgtgcagacgacttcacgaccttcgatgtcaagctcgaccaattgcttacatacaaacgcggcttggcggacgatatgttgaatggtgctggagacgtaatgcccggcgacttcaacttggccgacgtagttccagagtcagaaggcaaggatatcgatgagcgcgtcacacttgacatggcgttgcgcatgggatggcagcactttgagtgcttagcaggagctctatggagcaagcgaggatacgattgctaccgcacgcccagtactaacgataacggtgtagacatagtcgccctcgccggcgacagggggcagcttattcaagcaaagaccagcggtactgatggcgccacgctgggttgggaggccgtcaaggatgtcgtaaccggtgaagcgttttaccgtcgtagacacccagcggtggagttcgggaaggtctgcatcacgaaccagttcttcaatcgacaggcacacgagaacgctgctttgaatttggtagagctactggaccagacgcatttgaccagtctgctcgagaagcatgtagtgacgatgctagaagtggagcgcatgctattcaccgaatggcagcaagcggaggtagctggccaatag

SEQ ID NO: 11021 - DNA, 2121 bp, Vibrio sp. S457-15
atgaccaatagccttaatctctccagtttatggccagagttgagcagtctaaatgtaatgccacctcaaactcctgagcaattgagtgctttgtttgtggttattttatggggtgtggctctattttttttgatttggacagtatctgcttttgctcgtgcgtggcaacgagttgcttggttgcataaatctttgggcgaggctgagaagtcgagcccttcaggtgttcgaagcgatttgatttctagagctgaaaaaaagaaaaattccgtagggcatttatggctagagtttgacgaaacactgctcgaagtaaaaggtgctgatgacgttgttcgattgcataacacatttgatgccgactacttctttaatagttctagtttagctggtggtagcactgaaaaccgaatgattgcggcggttccaggttttttaacggctctgggtgttattggcacctttgtcggtttacagctaggactttcagatctaaatattgcgggcaacgttgatgtcaatgagatgaaaaacggcgttgctggagttataaatggtgcaaaaatcgcatttatgacatcggtttggggcgtcttactcagtgttgcattcaacttcattgagaaaattcttgagcaagtaattagaaagagaattaagtctttgcaaaaccgtattgacaggatgttccctcgattaagtgcggaatatcaactgcaatctattgcaaataacagccagcaatctcgagaaagcctacaaggacttgctgagaaaattggcgagaaaatgcaggagtcattagttcaagcaacgcagggtattcaacaaggtctcgagagtagtctggaaaaaatcatggctccagctatcaataagcttgttgatgagacgtcagatggtaaccaaaaagcgcttgaaagcgttcttcaatctttcatggacggttttggtcaacaaggcgagcaacaacgtgtcgcgatggactctgcgtctcaaaacgtaaataagacgctagaatcaatgagcacttcgatggctgctttcgtcaataagttggaagttcagcaaaacgcatcttcagaaagagagaaagaacttatctcaactatttcagttcaagtttctgagctagttactcagggtaatgagcagaagcgtgttctaacagggtttgtagaaaaacaagtctctgagttaggtgagcagcttactaaaagagaatcagctgcttctgaacgtgaacagaaattggcttcctcaatggaaagtacgattaaagatttagtagaaaatgtttcagcacaaagccaagtgttgaccgattttgttcagaatcaagttggccaacttacccaaacgttctctgaacgagatgggatggcaagtcagatggaaaaagagcgtaatgatatatttgtgaatcaaacgcaggcgatgaaagctggaacggatgagcttcttgctcaagtgaaagcggcgactgaatcacaacaaatcacatctaataatattattgagcaaggtaaacaattacaaaatagtatcgattcatctgtttcggcatctgctcgagctactgagagtatgcagcagtcggcgagtgagttacgagttgccgctgatagtatgaatgtgttcggttccaacatcaaagaggcgggcaacaaactatctggtgctgttactgaagcggttaacagcacgaaggatttagcggagcaaaaccagctaggcgcagtgaaaattcaagcgttgagggagcagttgctggaagatacaagtaagtttagcgcgattacagatcagataaacaatatgctgattagtgcagagcagtcgtttagcacgcttcgcactacccaaaatgagttccttgcagaacaaaaaggtaatctaaacgaactcacttcagaaatgaagcgtaatgtaaaagagttgacggagcaaatggctcaactgcttgaagattatgcagagcaagccaacggacaaaccgccgagcacctcaaagtttgggccaatagtagtacacagtatgcagagagcatgaatacagcagttagagctatttctagtgttgtcgatgaaattcaagataaagtgagccaacatgcgtag

SEQ ID NO: 11022 - DNA, 735 bp, Vibrio sp. S457-15; identical to SEQ ID NO: 10465

SEQ ID NO: 11023 - DNA, 1452 bp, Vibrio sp. S457-15
gtgagtttaaatataaaaaagctcaaagttagtttgccagccaatccttttggtcaagccatcaaggactttgcacatctatcgaatcagctagaggtgctttctaagagtgccggtattgaaaacaataagttccgaactgcgtatggagaagtatgtaatgcgcttgcctctaagaaaagagttgaggacgttatagatagctctgtacacgttcgcgccttagctctctcgctacatacggatgcgaagaaaaatgtcagctttacgcgtagattgcttaataaaattacagaaattgtaaaaaaaccaagctctttagtcatagagtcgttttatcagcatttcttatcagagtatgaccgactggcagacttggaagctacagcagactggttgttggaggctaaaaggctgcgaggcaatgatgagcagtttgatgaaaatatattgtcaaccaatggccccaagtggcttgcggaaagggcgattcaaaataatgtcgattttgatcatttacttgcggagatgaagctgaaacgttatgcaaatggcagatatttaacggcggctaaaggcatctactatattgagcagttaaacactataccattaggccaagatcatcctctcctagaggaggttcaaaaaacggcggtttttgattctcgatatgactctgaaagtttgttagggcatcaaattcttagaattttgattggccgatcgataggttctcacatcagtgagccttggatgaatgtgatcttagcgattggcggtgacccacgagtaccaagttcaaatccaagatacattaagtggtggaagggtttagaaccaattctgattcaagctgttcgcggatggttatcaaaactggatttgaagttgtttctggaagcgttggaagattattcctactcttcagctaattacgagctacagagaatgtacccatctaggaaatgtttcttagaggggatgttcgatgcgggggttatttcaaatacacgactttatttgagtcaggatgctgcaaggtatttgaagagaaattatgaccctaagcacttgcccaatttctcgactgttaaagatggtgataaatccataatttatgtgcaaatgaatggtgcgcacatggtagagggaagccacagttgttacttgtggctgtacaagcatttagattcgtcagtatgcgtatttaattatgacattgttaggccaacgtattctcagctaaccagtgggatcaataatcagatgacacgactatcatcgggagccgtagcaaaaataacgcattcaccaattggctactcatggcagcgaaaagcacttacagcacttagaggtctgggaattaaattgacgcctaaagatgtgctttcaaatgaagattatattgactttaaacaacgttatggggtgagagagtggagttaa

SEQ ID NO: 11024 - DNA, 3450 bp, Vibrio sp. S457-15
gtggagttaacctctttaatcagtaagttcttttctggtctagataagacgtctcaatttgagttagtctgtgatgatagtcttgatttcacaacctccaagaaaaccctagagaaaattaaagctggtaaagctgatgagtggataacggcgcagtatgttgcacttagaatgcttgaagaacagggggatgtaagctcatttccagatggctttattatgcctgccgatacagcggtaaggctcgactctgatttgagaatcttgtttggttttccttcggtttggcaaggaactattgatgcagatattcaaggaaaagctagcacacctacctttaaagttgacctttcggtaacaaccaaacagggtcgaacaacgctaaattacactgtggatggacctttcattcggtttagtcaaaatgagcagtacctgttaacgcccgagcagtttatggcctttaacgcacataaagcccatggaaattctgctcggtctgaatacgataacttactttacctacactctttacaagaggctcaaaagagtggttgtaagttgaatctaaagcactttgaaaagctaagaattctgacaccaaataaaatcacagtagaagcagaactgaattctcaaggcgagctgatattgacgccaaacatggggcaaagtgcgagccatgagtcgattcaaaaggttttggggcagttgcaaagcgacaacgcagttactctgaaagtgggtgatgaaatagtcttgttttctgaagaaaagctaatggctgtaaaagaagttattagcaacagggtaattccccaacagcaagttaaagcgttcttggaaaaccctacagcctatattgatgcgagcttagtcgatcttgatttaggtttttctatcagagttcatggtgcgacagtttttaaacacgcttattttggagaaacggacgagtcaggcatagattggttcggagcctcctcttcatctgatgtgattaatccaatatctaagctggctgatagaattcgcgataaaacaactcttgaggacgtaactaagaagattgaagatgctcaacaaaccggagcaacggttttagattatgaaggaaaatcatacgatatcagtgagcctgtagctgtcgagaaagttctaaaagaaataggtcacaagatatctaaccctgatacagatctttctagccacggagaggaagaagacgccgagactgaatcagaaagcgcagaaatacatgttgtcgatattgatctaaatgatgaagagttgtctgaaaattctcctaaagttgaacaactgatttctgatatttcctgggatggtgagttaaattgggaaaaccacaagcggacaccttttccacatcaggatattggtgttcgttggattttaggcgttgagcaaaaaaccttatcagactcgaaaattagtggagctttgcttgctgatgacatggggttaggtaagacttttatggccctctctgcgatcgaacatatttatcaacgacagaaaattagtggtgaaacgaagaaacctgcgctgatagtcgctcctttgagtttattggaaaactggcaggatgaggtagataaaacctttaaacacttaccattcaaagatgtggttattttgcaatcagccgctgagttaaatgactatcgcatgggtggcgtggagattcgaagccagagcacatctgatgattgtttagaacccaagtattctttgaaagtagggaaacactttggtccaggccgtttagatctaccagagcgattggttatcactacttatcaaaccttgcgcgattaccagttctccatgtgtttgattgattgggggattgtggttttcgatgaagcccagaatgttaaaaacccaaatgcacttcaaactcgtgcagcgaagggtctaaaagctgatttcaaactagtggctacggggacgcctgtagaaaacagcttagccgatttttggtgtttaatggatacagcttgcccaggccatctgggtagctatcaagagtttcgtgctcggtatatctcaccaattcttaaagctgccggtgatgaagttgaagaaataagagctaggcttggaagagaacttcgcatagcggtcggggcattgatgttgagacgcgttaaagaggacaaccttaaagggttacctataaaacatatgtatgctggcggagattttgaaaactggaagtacttagaagaacttaagtcgataatggttggctaccagagagatgtttacgaagggactattagtaatcaactcgagaataaagagagccacgcacttaccactttgatgaggctaagagatagttcgttacatcctaggttaagtgatggaggtcgccttgatattccaaaaaatgcaaaatcagctagggctttatacggagaatcaggaaaactagtttccttacttgagactttagatcgagtacgaagtaaacatgaaaagtgcattatttttgcggttaacaaacgactgcaaagcttcttaagcgtgactttgggacagatctataacttaggtccgctttcagtaattaatggtgatgcgaaagccgtagcaaagcgtaaatctgccccaactcgaaaatcaatgatttcagactttgaagcaaaagaaggctttaatttaattgtaatgtctccagtcgcggctggtgtcggtttaactgtggtcggtgcgaatcatgtggttcatttagagcggcactggaacccggctaaagaagctcaagcgacggatagggtttatcgtatcgggcaagaaaaagatgtacatatctatatcccgcttttacatcatcccgaatttgaatcgtttgacgtaaatctacataggctacttacccaaaaaacgttgctgaaggatgctgttgttacaccagaagatgtggttccacagccagcaggtgttgggggagtagtttctggtgatttgattgataaacgtattacagcggcagaacttgataagttaagttggcagcaatttgaagcgttatgtgtagaattgctggcaaagattacggatagtgaaagtgcgtggcttacgaatagtggtgctgatcatggtgctgacggtgtgttactcagtaatcgtggcaacattctagtgcaagctaagtttacgcaacgacaatatgatggctataaaggaattcaggagattcactctgcgaaacctatttatgaagcagcaatgagaagttcttttgagcgtttgatttttgttaccaattcaccttcgttagctaagcgaactcatgaaattgctgccacatgtggtgttgaaattttgggcagaacacaattgttgacttaccttgaagaatatgaaattactctgaaagaaatattatcgagactgggcaaagaaagactgaaagtttag

SEQ ID NO: 11025 - DNA, 2121 bp, Vibrio sp. S512-13; identical to SEQ ID NO: 11021

SEQ ID NO: 11026 - DNA, 735 bp, Vibrio sp. S512-13; identical to SEQ ID NO: 10465

SEQ ID NO: 11027 - DNA, 1452 bp, Vibrio sp. S512-13; identical to SEQ ID NO: 11023

SEQ ID NO: 11028 - DNA, 3450 bp, Vibrio sp. S512-13; identical to SEQ ID NO: 11024

SEQ ID NO: 11029 - DNA, 2163 bp, Hoeflea sp. IMCC20628
atgaaagtgctgagttgggtatttgggcacccgtggattcgggtgattcttttctggacactgtttgctctgactatggttgggctggatttagtttcgacgcggttggaccttgggttgatcttcgaacggtttggactgggtggtgacctgcttggcgggcaattcactgacgatgcagcagcaaaagaagcgctgaaccaactcagccagttggatttcattttttcgttggcttatgccatcggtgccgtcgcgttgtccttcgcgatctgtttcctgctcctgcatgtattgccaatatttttcgcgctccgacatcaccggcgcaagatcgaccagcttgccgggctggaagccttcgctgccgagtatgatcaatccatctatgagaacttcaagcagagccgtctcatcggccacgcttggcgcgagtttgacgagaccctggtcaagccggttgccggtgaacgcccggttatccgcaacactgtccgcccacagagttttctcaacaccggcatggcgcgggaaaagtttatcggcctgaaaatgattgccggaattcccggatatttcgttgcgctggggctgctgctgaccttcaccggtatcgtgctggccctctacaaagccggggaagcatcagccggggaagatgtcaaagcgatgcaagacgccatgacggaactcctgcagatcgcctctttcaaattcgctacatcgatcgcaggccttggcgcctccctggttctctccatcgttttcaagacctacatcatctgcattgaggccagcttcagcagcttttgtgaagctctggagctgaggctcaaatatgttccgccgcaatcgctcgccatcgagatgaacgaagccgcgaaggagcagcgcgatcaactcaaggaaatcaacagcgacaagttctttgcgcagatgggcgcccagctcgaaccccagatacagtcggcgttcacatcggctatgacaccgatcaacaccagcatttcagcagcgctcgatcgcatatccgagaccagccagaccggcgtcaccgatatgctcagccaattcaccaacacggtccagggcagcgccggaaccgagttgcgcgaactcgccgaaacgctcaaagcgatgcaggtcacgcttgccgagacgcaaagcggcgtcaaaggcagcggcgaggattttgcgcgccgcatgagcgaatccgcggaaaacctgaaccgacttgtgagtgacgctgcccgcacgctcgataccggcgccagtcagaaccgggacgacctggccgagatcatgtcctccatgaaagccacgttcgaaaatgcaaatgcgcagatcgaaacgcagttgggcaatgccgccggcggagcctcaagccgcatggaagaggcaatggggcgcgtgctcgaaaagctcgagggtcaggtcaacaacgtttcgagcaacctcacttcctttgatgaaggccttcggaagggtttggctcagacccaggaagaaatccagaatgcgcaaaagagcgctgccgagacagtcgcgagcatggcgcaatcgagcgccgaagcgatccgtgatggccttgctgacgccatctcgacgatccgtgtggaagtcgatcgctttgaaagtgcgttaagtaattcgggttcagcgctgacggcacaggcaagcgccatcggcgacgccacgtcacaaacccgcctcgtctctgacagtttcgcaaaaaccgccaatgacgtacgtgtggcctcagcgccgcttatccagtcaggcgaaaaaattgccgctgcaacgtcaagttttgaacagtcgttgagcgccgcggtgcaagcattgtccgcgggccaggatgcatcgggcgagctcgctacgtcgattaagcagcagggcgaaaacctggtcgaaacctggcgcgaatacgaacagcggtttgtccggatcgacgaggctttggcaaaggcagtcaacgatttggctggggctaccgaaagacagggcgagacgctgggccgctacacttcggatgtcgacaagggactcgctcaggcggtcacccagctttcatcgtccttgaccgatatccaggaatccgtcgaggaattcggggagtctgtcaccgaattgaaagctgcgctccgaacgtcagggcaatag

SEQ ID NO: 11030 - DNA, 909 bp, Hoeflea sp. IMCC20628
atgctggcgtttgacgacgacacgaaccataaaatcgaagaagaggaagagaattattttgtctcgatgaccgacatgatggtcggcatcctcttcattttcatcatcatgctaatggtgttcgcgctgcaattccagcagcagactgatacatccgaatcgcagatcgaagaggtgttgaagcgagtcgaggaggttgccagtcagctgaaggtcttgcgcgatcaaattgacagcgagctcgcatctctcaatcaatcgcaaaaagaacgcacggcactcctcaatgacctcaaggacgagttgaaggcagtcggccttgaagtgcagattgatcccgagaacggtgtattgcggctgacggacaacgccatccgatttgactcggataaatccgggttgaattctgctgcgtcagaaaacgtctcgaaactggcacaagttctactgcatgtcctgccaaaatatgtgcgctcctgcgatgacgctgacttggttgactgcaatagcgctaacaaacctagctcaacaatcgatactgttttcatcgaaggccacaccgacaagaccggggcagacgaacgcaactgggttctttcgaccgagcgggccgtatcaacttaccgtgccataacaactcttcagcccggtctccgacatctgaaaaatcgtggagaaaaggaaatcctctctgtatctggctattcatcgacccgcccaattccggaatccactgatggtattgaaagcgatgaagcccgtcgaaaccggctggcaagcaatcgccgcatcgacatgcgcttcgtcatggaagtcgacaattccgtgcgtttgaacgaggtcctcgaattgacgggcgctatggaaaaacagatcgaaattcttcgccgcgaagtgattgcaaaatga

SEQ ID NO: 11031 - DNA, 1422 bp, Hoeflea sp. IMCC20628
atgaccggcgccctaagagaggcttgcgaagggtggagttctagcgttgccggcacacgcagcacagtcgtgcttcctgctgagtcgtttaccaccaaggcggcagccaggatcggcgctgctgagatgaacatcattgctcgcacagacaccaaatccatgaatgaaatttcgatggacctgctcaaattgctacattccggcgggtcgctttcctccaagcagcttcgagatgcgatttggtgtctgtggggaacgacacctgcgctggctgattatccggaagtcttcagcgggatcatgaagatggtcgaagcaagcccaaaacggaaaccgtttcgcaatctcgcaactgtctacctggttcagttctcgccgaagcggcaaagttttatagaggcgagctctgccctacagcgccttgcaattcaatggggaaagccttgggccgatcatcagcaattacacagtctgtatgattgtgttgcaggcccgagaatgattgccaagtctgcgttgcaacagaatcaatctgcgacccaggcacttcaggcgatggggctgggagcgcttaatgcgcaatcaggtttcgctgaggcaatcacccgtgagttgctcgtcaatctcgccaacggcgcagaatcagatcacgaaacgagactcgcccgggttcaggcctatgccatggattcggttggtgtgccgttgttcaacaccctagatctggagctggccgaagcgttgatgaagccgttcgaggcgagagctccggaaaagcgcatcaaggacatctttctgaatttcatactttcgatttttggggacccgcgaattcatcctgggcgctgggaacgcttccctcacatcaagacgatggtgatagcgtggttgaccgagcaatcactccgccagttcctggatattgtcagcagatccatgaacagcgaatccgatgaaagaatgtggaaataccgccgggctttctgggaagctgctcatcaaaagggcctcatccggggggcctgggtcgtgtttgccgaggaaggagcggccttagcgcggcggtcttttggtaagaatgtcgcctttgcaaggtttagcagccgaggtggaaagcaggttcacaggacgcacgcggtcttattgttggaagttggcaatgggatagttgcggactggagtcatagcggcaaggtgaatatctggagcaatgcgcaagaccgcagcgcaccgcaaatgtacaaccattcttacagctcggatgacgttcagatacgaagccgcggcggggatatggaaaacaacgagtatctggtgaagtcccatgtctcaccaagcacttatagctggcagcgcgcggttgcccaacggctctatctattgacgaagacgaagttgcagcaatccgattaccaggcttaa

SEQ ID NO: 11032 - DNA, 2970 bp, Hoeflea sp. IMCC20628
atgaacttcttctgtacccccttaccaagcggtgccctgatcgaactcgaacagcgaggcctcctgggaaagaagtctattccgttctctcaatggaaagagaaagctggtcagttatcatccaaggttcgtttcatcgagcatgcattggccgatggtctgatcactcaggaaggaagcggcataaacgctccttccgagtgggtactttctcttcctgcctcccagatcgaggcgctaaacattcctccgcttgccggaatatccgtcggtgtgtcgatgcgcggccgaatcgacagtgatgacagtgtgctgcagttggtttggcaggaccaaaacctgcgcgtgatctcgcctgagatcatggggccattcatcaaggttagcggcgaatggtgtcgattgtcactcgccttgcactcgatcaatgacgcagccagagctttcaaccaaagcgccggcaccgactttgaatcccggttgcctcactggcaggccgtgcaggacatcctgcaaacgacgataggtcatgaaattgctgctgatcgatttgttggcactctaacaatttatcaagcgggcgcatttgcacttgatgttcgagagacatcaaatgggccagacttcgttccgatacttatggccagaggcttgccgccagagcttggtgaaatcgacgatacggtcgatgcaccggagactgacggaaaaattgcagctgagtgggcagaagatgacgaaaagaagagcaacgaggatgacgcgctgctcacgccattgcttcaatcacggttcagcgacgaagtctcaaaccgtccgggaaatgccaagccggcttatgtcctcgatcgaaatacctacctcttggtcgatccggctcttcgtaccgcgctcgatgttgtaaagcggatccggagctcgcccgatactgagcggaaggcatttctcagaaatccgcgctcactcatcgctgaaaccctgggagaaggcggcgatgcgatcgtcagctcgttgtttgtcgagacgcagcagtattcggatcgtatcgagggccttggtctctgggagaagccaaaacttccatggatcacgcgaaaatccagtcagtggcttcctgaaaaatttaccgtccaggtcggggccaaaaagctcgaagcgacaccggaaaaaatcgaggaattgtatgttctctgtgagaaagcagagttggaacacgccgatgatatcgcatttgaacacgaccttctcccaacccccgacgtgcgcaacatgttggataggttggaggcgagtggccctccggtcaaacttgaccaaccctcagatgagcattccgagcgcccagagcgagaccaagacgtccttcagataaagcagaatctggaggaaattgactacgcatcgaagctggtcaaacgcggaaatcttgtgcctttcggctttccgagcaaccacatcaaacacacagtacccaaagagcatcagttgcagggttttgattggttgtgcaaatgctggaagcaaggttggcctggagtcctgctcgcggatgacatgggtttgggtaagacatttcaggcgcttgcatttctcgcttggatcaagggcaaccaaatggcccggaaggggcattaccggcctttgcagggcccattcctaattgttgcgccaactgctctcttagacaattggaagaaagaggctgacattcatctcaaacccaacaccttgggttcacgtgttgatgccttcggcaatgatctcaaatacatcaagacggcaaaacgagcaggctggactgaagaagacgctcttgatgtcgagcagctgcggcatgccgattgggttctcaccacgtatgaaacgctggctctctatcatcggagttttgccagagttgcctattcggtggctatttttgacgagatgcagaaggtcaaatccccagattcaattaacagccatgctgccaaaacgatgaacatcgattttgttttaggaatgacgggcacgccgattgaaaaccgccttgaggatttgtggtgtttgatggaccggatcgcgcccggttacctcggagatatgaaaactttctctaagacctacggagaggaagatccggcagcgctcacagaactcaaacataaaatggatcatcaacaaggcgatgcccctgcgattatgctacggcgaatgaaagacgacgtagcaaaggatctgccacgaaaagacatccgcacctatcagattgagatgcctacggttcaagctgctgcatacgacgaagccgttgccgtggctaaagcggccaaggcttcccccaaatcgatgttagaaacactccacttacttcgcggtatatcgcttcacccgctgcgatcatcagatacaaatgcctatgatccggaatggcgccagaattggataaatggttcggcgcgtctccaaaagacatttgcaatattggaagatattcaaagccgctccgaaaaggcgcttgtctttttggaagaccggtcgatgcagaaggtatttgcctcgtctgttgccgaacatttccgattgcacgccaagccgccaatcatcaatggcgagatgtcagggcgccagcggttgcaggctgtcgatgatttccaaggaaggccgacgggatttgacctgctcgtcctatcaccaaaagcggccggcatcggcctcaccattaccgcggctaaccatgtcgtgcatttgagtcgctggtggaacccggcggtagaagaccaatgcaatgaccgagctttccggattggacaaaccaaagacgtcacaattcacctgcctatggcaattcaccccacctatggtgaggcgtcgttcgacaacaaactgcacggattgcttgaacgaaagcggacgctgtcccgagacatgctggctccaccaacatcggaacgggatatcgacaacctgtttgccggggttgtcacatag

SEQ ID NO: 11033 - DNA, 1737 bp, Nitrospina sp. SCGC_AAA799_A02
atgtcgatcctagaaaacttatttccttttctatttgtcttctttaacccaacctctcaatctgtattttcatcgatttggattctagcaatttttggggtcgcctcattttatggcctaagattttataaaaaagactacctattttgtagttcacaattaaaggaagttaacgaaaaactatcttctctcaaagaaacaaaatcatcatttgaagagataagaaagtcattaacaaaagacgaggtaataggtcattactggtcggaattttgggaaacagttgtcgttacgaaaaaccagaatggagaagaccaagtatttaataccatcgatgctcaccattttttcaatgaagataacctaataaatcaccaaatagacactaggctctataacacactgccaggaatattaactgggttgggaatattgggaacctttctagggttaatttttggattatcacaaataaacctaacaacaacagacccagatcaattgcgagatggaattaaaggtttattagcaggggctacaatcgcattttccacttcgatttggggaatattcctttccattttatttaatattttagaaaaatggggaattaaaaaactaagtgttgaagtagattttattcaaagaaaaatagatacgttgtttgacagaaaaaccactgaagactggttgtcagaaataaaacatgagtctgttcagcaatcaatccaactaaagaaatttaatgatgatttggctatcagcattgcatctgctctagaagagaaactagccgaaaaactttcgccatcgctagataaattattagtagccattgaaaatttaaacaatgcgggtgttcaaagtattagcgaatcaataacaaagtcggcgggaaatgaatttgaacgagttgcacaggtaatgcgtaacgtgggcgactcaatgaaaaccacggctgaccatggtcagaaaattcaggaggatctagaaaaatcacttaatcagaacatagatcaattttcatcaaagattgatgaggtttttgcaggtttatctcaatcaacagaagaacactcaaacaatatagcaaatcagattaatgatctaaatactacaactattgatactacgagtagagtttcaaggttagtcgaggaccttgccgataaattttcagaaaatatgaatcaggcgattcagtcaattagtgaggaaagagagaatgttggtgtcatgttgggaaaagtcaacgaatcgatttcaagaattaccaacctcattgaagaagcaggtttagttgcggatacctttaaggaaagttctgatccagttaaagaagcggtagagactttaaggactcaggtcaatgaaatatctaatatgcaggatgaatttatggaatcatccagaaggtcaagtgaaaattggaataataccatcgttaaaatggagaatatttttgatcaaatacaatcagaatccagtgaaacaagagaactttggtcgggttataaatcaaattttgacaaacttagggaagaccttaatgcagtgttccaaaatttgaatgaagggttggaggggtatagaaaacagacgggggaagggttaaagagttatctgcaacagttcgaccaatctttctcaaaggggctgacaggactccaaggagggatcgaagcattgtcagaattggtagaaagtattaatgaaaaaaataatggtaatcaatag

SEQ ID NO: 11034 - DNA, 1416 bp, Nitrospina sp. SCGC_AAA799_A02
ttgaagatatcagactcctttttatttcattttgataacagagttagtaaatctctgctcccaataaattttggaaacccagagtattgcgcaaaagttgaaaaggaaatccttgataaatttgatagcgatttaggtaagccaagtcatacagatttggatgagctttatgtaaggttgcagagaggtaatgcttcatcctttagccaaaaagaaaaaaagtggctaccttggattttatactttggtgaatatcctcagtttatagaaaatccaacccaaactaaagacatacttaaattattaaacaatccgtttcgtattagtttcctgaggggactgatccatgcatacttagaaaactatgatcctggtcagggagggtgtgatttagtcagaaggtttatatgggataaatttgaatctctttcagatgaaaagattgtccctagtattcgattctggaaggagcgcaagaccccggtatttttacctaatgggcatcaccagacggcgaatatctttttaagagaaaagggagaaattcatcaaacgttattagattatggttttgataatgaccttagctcatcaaagtttattaaatttgtatctacctcaatgatagatgcaatagtaaaaaactttccatctcatatagaaaagtgtttgtctataaatgaaacagcagcccatccacctagtccaaaatttaaggacttgatagtaaagatggcctcaacttttctgtctaaagctggtattgatattgaggttccaataaaggaaggattaagttcatattttctaagacatcttaatgaccccagaattccagggaatgacatttactgggaaggagtggatgaaaaaagtaagaaaatattttgccagtggttatcaagtaaagacttggagttttttttcaatatagtggatgaggtctcgaccgatacaaaatggaaatatcgcagaaaattttgggaagcatatttgccatatattgaaaatacctgggtgattctgggaagaagggcaaaagaaatagctgagcaggttgactcaagtcatctaaacttggacttaaatcgatatggcttgcttacaggcggtgattcgattcaaagcgcctttttgattcaaatgaggggttatatttttgtggaatggaacaactctggtgcgtgtagggtttggaattataagaaatgcccttttaaattttcaaaagaaagttattcaagtgatgaattacgagggccaaattttgaagacaggtttcaccatagatcacctgagaaatataagtggcaagatgaaatgagaggctggattagggataatacgactatttttgttgagtcatacgaatataggttgccaggaaatgatttcgatccatatcaaaatttgtga

SEQ ID NO: 11035 - DNA, 3399 bp, Nitrospina sp. SCGC_AAA799_A02
atgatttcgatccatatcaaaatttgtgacaaaggatactccttcagtttagatggagagggagagttaattgatatctcaggatgggatagaaatattaaaaataaagaagacacggctgcacttcaattgctaagccaattgatagatgatgggactgcctatattagtggaaatcaaatcgtagtacctcatgaaactgtatccattctccttcaagacgaaagagacctactagacctaccagaaccattcccatttgatatagaaatatctggattagggaatttgacggattcagactttaaataccaataccgctttttaaatggagggtccaggggatttataagtcctgaaagaataggatcctttctaagaatatcagaggaagaaggttactcattggttggtaatcaatatcgcattttggaatccattgatgatttcaatggtatttcctctgataaaaaagatctcaaatcgaattatttgtcttttgggtcgattaaggaccttgagggtgaagcaggaataaaattagataactatctaaactctgagaatgtagttacgccgaaaaatatttgccttaggttaaatccattagaggacggtgatgttgaaattttgcctatcttttgtgatgaagatgagtctgatgtggggattaagtgcaataaaaatatcctaagcaaggatcagacgcaaaattttcataagcatttcaaaaaattaaaggaaaaggggatttatacggtaccaaatggaccaaaagttattttgaatgataagcaaaaggaaagtttgggaaagataaaagagaattctaaagttgatagtagtaatcgaattatattgaaggaaccgcaatcattttttgatcctgaggttatagacttcgataatccagtctttgaggatggtgaattagttacttggagcgatcgagttaaggagataggtgaatataggtataaagcaattccttttgtgagaaaagctaaggagagttggcttcctccagagggtgggattattttagacgatgaaataataaatgttcctgaagaagatagggaaaaattaaaggagaagttagaggaggctattaaggaaaagaaaatttttattgaacatgaaggtagaaaaatccctgcaaaaccagaggtgttagatgctgtaaatgacttgattaaagaatatccaaaaggaaaggcatcaaaagataaaaaggagagtgagaagacaagggataataatgcatctaaaattttagtcatcaaggacaatattgataaggatgaatttgggattccggttcaaaaaaggtcaggaaacattgaagctccaattccattgaaggagggtgtaaaatttctgggacatcaagaagagggggttcgatggctacagaattgttggttaaaaggatatagagggtgtttgttggcagatgatatggggcttgggaaaacgcttcagtcattgtccttgatatcttggataggaaaaatatctggagctaataagaagaaaaaaattttaataattgctccggttgttttgctcgaaaactggaaaaatgaatacggaagattcatggagcctattttcggtcctttttacgagttacacgataaaggcttaagaaatattaaaatgaaggaagtgtctcagagtctggatataaataaagaaatagatgtcaggaataaggatgatgctgaaaaaataatcaaaatgggacgtgggctattgttaaaccctcatgaacttgcaaaacaccaagtgatattgacgacctatgagactgccagggattaccaattctctttaggcttgataaattgggatgtcttagtattggatgaatgtcaaaagattaaaacgcctaacgctatggttacttcagctattaaagccatgaaatatgaatttgcattagtattatcagggactccaattgaaaattcatgggtggacttgtggagtattttggactttgttcagccaggatacctaggaagtctgagggagtttactaagaaatatcagactcctctgaaaaaggaaggaacaaatagagaagagttgggaaatgaattgaagaaaaaggttgacccgataattaaaagaagaatgaaggaggatagcttagaaggtttgcccaggaagatagttaaaaaacacgattacaataaaatgccagagatacagttgcaaagatatttggatattgttaaaaatgccagatctaaatcccctgaaaatgaaagtaaaaaaaaccatatatttaataccataagaatattaagtgatatttctctccaccctgatcttccttacttatctgatataggttttgcagaaaaaagtgacgaagaaattattaattcctcctcaaggtttataacaacatttagcctgctttctgaaattaagaaaaatgatgagaaggttgttgtttttttgctaagcagaaaaatgcagcgggtggttaaaagactcattgataataaatataaaatcaaaacccatattatcaatggtcaggttaaggggtctgaaagacaagttatgatagattcttttcagagaacgccagggtttaatgtgattattttgtcgccagaagctgcgggtgtaggattgaatataacagaagcaaatcatgccattcacatgagtaggacttggaatccagctaaagaggatcaggccagtgatagaatttatagaatagggcagaaaaaggatgtgtttgttcatattcccatgtcagtgcatagcacctttgataacgatgaatgtaatgggtcgtttgatcagaaattagataggctcctagatgaaaaaagagatcttcataaaagaatactattccctgctaatgtagaggaatctgagttgcgaggaataggtgaagaaatattaggcatagatctttctaagggagaggaggctgggattaaattaactgatgttgatggattatcatcagaaaattttgaaaaacttatagccgaattatttagatccccagataaaagtactgtctatcaaactcaggttaacggaggtccgggagaccagggcgcagatgttttgtgttttcctcatgggactgatggaaaaggaataattattcaatgcaaacattctgcgaatgttagtaagcgtcaaggcaatgcaggggtccaggaagttataggggcgaaaggtgtttatgaggctagatttagtagggagtttgatttaattgttgcgactaattcgacaggttttacaagaaacgcagaagaaatagcaagggggaatggagttcgattggtatatagagaagttcttgcgaatatgctaaatactcaaaagatatctcttgttagcctagtttaa

SEQ ID NO: 11036 - DNA, 2346 bp, Pseudomonas sp. BRH_c35; identical to SEQ ID NO: 10561

SEQ ID NO: 11037 - DNA, 765 bp, Pseudomonas sp. BRH_c35; identical to SEQ ID NO: 10562

SEQ ID NO: 11038 - DNA, 2265 bp, Pseudomonas sp. BRH_c35
atgaggctgcctccagtagagtttcctgcggccagctggggcgctcagatgctcgagcgctggactgtactgacaaaaaaggctgccgctatggagacggaggccggaaacaatgatgcgtttgagcgcatgctcgcagtgctgcgtggcatggccagctcgggtcgattcgatggcctgccggcgctgctgaggcggcgtattacggctcgggcgttgagctggctgtggctcaatgacgaggtgatcggcagccgcctgctaaatacgcgcttgttagctgccttgctggatgcccagcagccacgtctaacgcgtatgacgctgcagcagatggcacagctgtatttccggcgattcgatcggctggatgaaaaggaaggggtgcgcgagcttctggagcgaagcctgttacagcagcttgacctgataccgccgtcgaagatccagacatcgcgagccgatccgttagttacgctcaagcgtgaggggcattggttgctaagcctcgatggtccacgttatctcgctgaacgagtacgtcaaggcggacgtgagcttggcgagacactcatggagctcggtctgcacggctttgatgatggccgttatggtgatatctgcagggcgcacttttatctcgaaacgttacgacacttgccccttggcgagtccgatccggtgctggatgagttgcttaagcctacagtggccaaggcgccctttgaaggcacacggcgaatcggccatgttgcgcttgagattctgatcgaccgtgctggccaggaacccggcgaagtctggcagaacttcattcttaacttggctggcgatcctcgtatctctagcacgaacgaaaggtttgtagagtggtggcgcccgctcggtgaagagcggattcaaaaggtacggggctggctatccaaagaggacttgcggttgttcctgcaggccgttgagcaatacgggcttgaaacagccaatacggaaatgcagcggatgttccccgcccgcaagcgattcctcgaagggctcttcaagctgaagctgattcgtaacactcgcctcctactgggcggcaaggctcaacagtcggtcaagcggatcctgggtaaggacgttaagaccagcttcgcgcggatggatgggccgatgaatgacaaggccgtgatctatctggactgcggtgacttccatctggttgagggctcacatagtttcaagatctgggtctacctggcagcgcctggcgaaaccctcagaacttatgagcgcaataccttcagtcatcaagacctgaccaccacggtccccgggacttacaagaaactctaccccgggttgccttacgatgcttttgtgcacaccccacacgcctggcagaacaaggtcttcacctttctagccgagaatggcattgctcttgatgtcgagcagcttctgagcgctgaggactatcgccttcagcttcgtaaattcgggatccctgccgtaagtgccaagcgcacggtggttcctgctccggcgaaagaaggggccaaagcggtagcgcgagcgccgacggctgctcaacaaggaactgaacacgctgcggcgccgatgttacgcaacgccgacgtgccaaccccagcacggcgttcagccgatgttgaatcagtggctgcaaatggtgcgatgagatcaagcaccattgcctccgggcgggacaacccggttccgcaacaaacgaagctgccgcccttcagctcgctccagctggcggccctgcgttatctcgagactcattcacgttgcggtttctatgcgttgctggaagcagtaagcaatcagggcggcaatgcgttgaacgtgaaaacgatgttggagagcagcctctctcagtacgtccagcaggacggagaggggcattggctgctttcgacccatggtgagcagttagtagccgagctggccaggtcggagccatcggatgcaagtcagagcgtgccgagtgcggcaaatatgaacgcaaacgaaaacgcaggctcgagggtcgctaggctagagccgtttgcgcttgccgtattgcgttatttcgccgccaacccaggcgataaagttcgttatgcggcgaatgttttggaggtcgacgcgaggctggtgaaccaagctttatacgggccattgaaagggatctgtacgcaggatgataagtacggatggcagctcacaggcgcggctcaacgggagctggaaacgttcgacgcacagggggaggagtcgtaa

SEQ ID NO: 11039 - DNA, 3039 bp, Pseudomonas sp. BRH_c35; identical to SEQ ID NO: 10564

SEQ ID NO: 11040 - DNA, 2103 bp, Peptococcaceae bacterium BRH_c23; identical to SEQ ID NO: 10962

SEQ ID NO: 11041 - DNA, 729 bp, Peptococcaceae bacterium BRH_c23; identical to SEQ ID NO: 10963

SEQ ID NO: 11042 - DNA, 3510 bp, Peptococcaceae bacterium BRH_c23; identical to SEQ ID NO: 10964

SEQ ID NO: 11043 - DNA, 2556 bp, Enterobacter sp. GN02174
atgttttcgctgacctcgttcctcgacacgttaacctctgttaatccagaaaatgtgccgaaatatgtcgctcttgttgtcgcggtgctgctggtgtgcttcattgcccgctatgccattccttcttttgtgatttcagcccgctttaaacagaaagcgagggcgattcaactgattgccaaagataaaccggcccagcaactggaaaaactggatgcattattttccgggaagttttttgcacatccctggagcgagtttaaagagtcgctgcaccgtcagtttgagttagacgaagatagtgggcagaaacggatccatagcattcgttctaccgccccagcttccgcctggttctctgaacctttactggtggagattccactctatacggaagcctttaagcatttgcctggtatcctgactgggattgggataatcgggaccttctcaggcctaatgatcggtttgcaccactttgaccccagcacgccagaacaagtgagcgccagcgtagctaaccttttgcgtgatgtcctttacgcgtttttaggttccgcctttgccattgctttctccatcctggtcaccatgtttgaaaaatggcggctggcgagatgctataaaaatcttgagtcgttgacagccagcatcgaccagctttttgaaggtggcgtcggcgaagattacctttcgcagctcctctccagtaccaaagaaaacaccactcatgccaaacaactgaaagatggtttggtcagcgatttaagagagatgctacagaacctggtggacagtcaggtgcgagaaaatcagaaactggcagagacgttgtcttccacctatcgggaatcaggccagcagattgcggagcaggttagcggcgctattgaaaccagtctgaaaagcccgttggacaaaattgcgggcgtggtgcaaaccgcctccggcgatcagagccatcgagtgcagtcgatgcttgagaacgtccttactgcttttatgaacaaaatggataacacgtttggtcagcagttcaccacgatgcaggagatgatgggtcgttccgtggaggccatccagagcatgcaaagcggtttctctaccctgctgcaggatatgcgtcaggctggggatgattcacgtcagggcagcgcccaactgatctctcagttactcagcgaaatgaaaagcggccagcaagagatgcaggcaggtatgaatgacatgctacaaagcctgcaggaatctgtagcccgcattggcgcagaaggtgaaggcgctggcgaacgcatggcccaacagctggaaaaaatctttgccgacagtgaagcgcgtgaaaaagcgatggcggaacagatgcgtgcctttattgaagccattcagtccagtgttcaacagggacaaaatgaaactatggagaaaatggcggcctctgtggatacgcttggcagccatatggcaaccttgttcgcacaactggaaaatggtcagcaacaacttaatcagcagcaaaatcaggcacaaaatctgttgatgagcaatatgagcaaaggtgttgaagatctgactcaaaacctggcaggtgtatttagtcagcttgagtccggacaaaaacagatgagccagacccaggaacaaggtcagcgtgctctgtatgaagagacccaacaactattagcccgtagtgaagctcgcgaacaggcggccgccgagcaacagcaagattttatggctgctctgcaacatactatgcactccggccaggatgccctacgtgagaaaatgaccagcggtatcgatcaattaggtagccaattgggcaccttgtttgggcaactggaagaaggtcagaaatcccttagccagcaacagcaatcggctcagaatgctctgcaacaggaagctcagcgaatcattggccagcttgagagtcaggttcaggcgttaatgcagatgctgcgtgaacagcaatccgcatcaggtgatttactgcaacggatggcgcaaaacacgacgcgtcacctggaagaaattcagactggtgccgataaaatgcgggtcgctgccgatcgctttgaaacagcggggaatcgtgtcgccgaagctaatcatctgactgcagaagttctgaatggcactcagcaggcaggtagaactctttccagtgccagctctgagctgggcgcattgatcgctgactaccgcaatacccgcgaggtggtggcgaatgccattagcgcactggaaacactcatcaatagcagccatgacgagcaaacatcccgcagccggtttgtggaagatctgaagtcgtattccgaacgtctgcagcaatacaaccgtgaagcccaagagtttctccacaacgtcgctgaggtgatgggcaccagctttgagtcattcaccaccggggtagaaagcggtctgaaccgttcgctacaggagatggatacacaactgacaaaagcggctggcgccttaagttcttctgttgaaatcatcggtgaaagcgtggatacgctggaaactgtgctccgtagtcgtcgcgcgtaa

SEQ ID NO: 11044 - DNA, 738 bp, Enterobacter sp. GN02174
atgtttaaccgggcattcaatagtaggcagcgtcgtagtgatgaagcggaaaaaccattctggatttcctatgccgacctgatgaccgccatgatggtgctatttttggtcgtcatggtggcatcgcttagctccgtcacgcagaggatccagcaggctgaagcaggggaaaagtcccgagggcatgatatcgcccgtctgtgtgaacgacttgagctgcaggcaaagaatctgaataaaacgatacatgtcgattgccacgataaccgtattagttttggcgaagcagggcgttttgaacataaccgcttttcgctcaccccagaagggcagcaggctttgcaggatgtggtgccgttggtcctggatgcggcaaatagcgacgaaggtaagaaatggtttaaacagatcgttattgaagggtttactgacacggatggttcgtatctctacaacctgcatctctctcttcagcgctcggaatgggtgatgtgcagtctgctggatagcagaagtgcactgcagcaaagaattactgcagatcagcaaatccagattcggaaattatttttggcgggtggcgtgtcattcaacaatgcgaaagagagtaaagaagccagccgtcgtgtcgaattacgcatgcagttctttggcctgaaagataagaaacaggacgagagtatggacgtcgtccccggtattagtcaggaaacctgccaactgggtgtagtgcaatga

SEQ ID NO: 11045 - DNA, 1794 bp, Enterobacter sp. GN02174
atgacgtccgccattgagaagctgaaatcacgccttcttccttacagggaaaagagtgtggggccggttgtggggcacccttttacctatctacagcgtgtcatcagccaactcgagagaaaggtcgacgcccgcacagtacagatggtgccccctaaggagaaacgcaggcaggcaatttcccgattgcgttcgggagacacgccacagccatctgagtggaagatgatcttttttggcctcaatgacgtggcagagggagatctgtttgatacagcactcattgatgatgcggtaaactttgccaaaatatcggctgaaattcagagcaaaattgcacaacaacgattaacgcgtagggagtggttggcgctgtgtaccagctactttggacatgtcagcgatactcccgaagaaaatccgcagtggcttcagttacgcaagcagattgctgctgggtttaaacagttaaaagagagttcgcctcgaccgttgtcatggatgacggtaatcgacacttatggcgatatttttaccgacaatgcgggctttcttcttgggcaacagctcggccgtggggaaataaccgatatatccgtgctggaaaaagtggcacagatcccccagaccagttggctatggcgcaaaattgttaaccatctggtgagcgagatttttcgtcagactgacgatgagtttgaacaacaaattaatgaactgatagcgttgagccgtcagctttctcgttttaaagataatatcctggcagctgcacttacccgttattaccagtcaatatttaaacaccggactcaccttgaacttaagctgttagccctggagtattggggaaatcctcagttaactagccgcaataaaggctggcaggttcatgtcgataacgcggtgctgcttatggtacaggggtggttcgctaaagatgatctgaaactgttctttgagttgcttaaaggtaaccgggatgtcgatcaggcgcgtctgttttactggctacgatatgctaatcagatgagttatacgcgaattgtattgggtgaagatgctcagcgttcgaaagataccgattatgttgagtttcgggcaaaaaatgcgggtcggttaagccgtctacaaggtcccggttctcgcgacaacaatgccatgatcatgaggattgggaattatctttttgtcgagttttcgaaagtaggagccatgtactcttatcatatcgataatgcaccatttaatccggaaacaggtattctcgacattgattatgatcttaaagataagcgtaataaccggcgtaaagtgcgtctgcgtttaccgcatttgtctccagtaacgcactattcgcttaaccgtattgaagggtggatgagccgctatgatgaagaacttcgtagactaggcattagctacgttgcggaagattccaatcagccatcagccactatcgatatctcccgttttaatgcagttcaaagcggaggcaggtctgtatcttctccggctaaatcagaagccaatgaatcaaggtcaaacagagaagaacagattaaaattattgcagcttctttaaaagctaaaaaagtagaccaaaattttacgactcgagaacagcaaatcagggaagtgattcggtctgtcgattgtaaagtgatggataaacgtggcatggggggagcaattcatatccagttcaacgaaccagatcatgaggctgccaaaaaattgctaagcctcggatttaagcctgtgctgggtaaatttacttactggagcaaatag

SEQ ID NO: 11046 - DNA, 3240 bp, Enterobacter sp. GN02174
gtgttcaaaaaattgttaggtaaatttattaatgataataaagcagttactgcttcacttgtgccgctttatgcaattaaggcggagggcttcgttttcccctttagtcttgccgacactcaggataactggcttatcacttcatgcctggaacaactccatgaagaggattatgtatcacactggtcggattgctggtttatcagttgggatgacttctatcgtattctgaataatgaagattatgccagcagtctggcaattttcagcttccctcaacagcgtaatctgaccgcccatcttgctgcgacagggagcatcagtgatgacacttttcgcgttttcattgataaatggacccagcctgacgattatcgtcccgtagagatcactagccggggggcaagtttttcctccccggaaggcacatttgtgcttagcgaagagaactggcagcttctggactcactgcaacaactcagattacaacagcgacagacaccgggtgagacggtcaaccaaaccgggtgggcaaaaatacgtcgacaggcaaaaaaggcaggagcaaaactggatgattacctagctaaaacgatagttatcaggcccgagtcactgcagttaaagttgcggaaatcactggtggcggatacccgggtactggaaattgagccggtttttgacgaacagcctgcaaagtggctgcagagtttcgatcgcacgcaacaggtacaagatcggtatcgcgttttgggtgatgacggtgaattaagccacgtcattctttcacctgaagtcaaagatgtgcttacctctgtacatgccatcaccggccgtcgagtcgctggcgatgatgcgctctcgtttgttcgcaatccgtatacctggattggcgaagacgccagccaggttcttgatcccgatgtatatgagcagaatctacaggatgcagggatctatttttatgatttccgtctggagcctcgggttgatgaaaacatgcaggttgtgtctgtttcgctgatcctgattcccaggactgaacagcctgtgccagatgaaacatacgtgtttaaccgaccaattgaattggcagcgttgattactgagctggaacaaaagttagcggcgcatcttcctgctggtgtctggcagggctatgacctcgagctgtccagattcactcaggatgaattgcaagagtatcaggcattgctggaaggctggcagcaacaggctgcgggattgaatttttctcacgtactcgatctcaacaagtacagcgacagagttatagggataggagagttcgagaaaatcagttcaccgtatctggtcaaaagtgaaagtgaaaattggcttccagacaacctcgttaaggagatgtgtgaagccatgttctcgggctgggacctggataatcatcagcattttcatgagttagaaacgcgtctggaagatgcaaaagcctctgatgctcctgaagtcgctatgccctggaacgataaccttctaccacgagaagaagcagaggttttccacgaaaagtggaaaaagaaaatcgatgctgaaacaagtattaccgcgaatactgagccggtgagtcgcgctgtcctgctgatcgaacagaatattgagcaggcactgtatgtcaaacagcggcgaacctccttgctagaagcacacttggctgaggccgagcttccaatgattcttaaggactctattcagctacgtgagcatcagtgtaaaggcgttgcctggctccagcagttgtaccttaaatccccaacagagacgacgggatgcctgctggcagacgatatggggctggggaaaacgttacagattttaaccttcctcatctggcatcgtgagcgtttcccggatgctccgccctctctgattgttgccccggtgtcgctactcgacaactgggagcgtgaggtcggtaattttttcctgcgcgagcaggtttcgattttaaagctttacggcaatgaactcagagagaaaaagtgcgctaaggagagcattcctttcgaactaaagagtaaggggattaaaaacctgctgcaaaatgactgggttggagaggctcagatagtactgaccacatacgaaacattacgcgatcaggaattttcattggctcgccaaccttggtccatcatggtttgcgatgaggcacagaaaattaaaaatccagcagcccttattacccagtcagctaaggcaatccaggcacaattcaaagttgcctgtactggaacccctgttgaaaatacgcttgtcgatctatggtgcttgtttgactttgttcaaccaggtctcctgggagctctgaataatttcggcaaagatttcctgcggccgatcgagcagcagagtgatgataaggtacttgaatcattaagaaaattgattgaaccgcagactttgcgtcgaacaaaggaagaggtggcgaaagatcttcctgaaaaaattgaagataagtcctgtaagcaccttagtatgttgccgttgcagcgggacctctatactcactcggtagtgagttggcagaaccaacaggaaatcagcgaaggtctggctcaacgtggggcaggtatgcttggactactccaccgcctgaaactgatttgtgcatggccttattccgtgagtgctgatttacgcttacgtaacgatgccccgaaagtgaaatggcttttggatacattaaataatattcgccagtcatcagatgataaggtcattatctttactgaactgcgagatattcaacgtgaattgcagcatctggtctcgcagcattttggattcaagccttttatcattaatggtgataccagcacgaaatccggaagtcaccaaaaccgtcagagtttgatcgataactttcagtcatcgccgggttttaacgttatcatcctatcgacgatagccgttgggtttggcgtcaatgtacaaaaagcaaatcatgtcatccattttactcgctgttggaacccagccaaagaagatcaggcaactgaccgggcttaccgcatagggcagcaaaaagatgtctacgtttactatccaactgtgcgtgatagtcagttaatgactttcgaagagaccctggatgaattactgaaccggcgcagagctctggcaagagatatgctcaaagcttcaaccgatctcactgctgctgattttgaagcggtacttacccgggctaatactaattaa

SEQ ID NO: 11047 - DNA, 2190 bp, Enterobacter sp. GN02204; identical to SEQ ID NO: 8439

SEQ ID NO: 11048 - DNA, 738 bp, Enterobacter sp. GN02204; identical to SEQ ID NO: 8440

SEQ ID NO: 11049 - DNA, 1683 bp, Enterobacter sp. GN02204; identical to SEQ ID NO: 8449

SEQ ID NO: 11050 - DNA, 3243 bp, Enterobacter sp. GN02204; identical to SEQ ID NO: 8442

SEQ ID NO: 11051 - DNA, 2190 bp, Enterobacter sp. GN02225; identical to SEQ ID NO: 8439

SEQ ID NO: 11052 - DNA, 738 bp, Enterobacter sp. GN02225; identical to SEQ ID NO: 8440

SEQ ID NO: 11053 - DNA, 1515 bp, Enterobacter sp. GN02225; identical to SEQ ID NO: 11015

SEQ ID NO: 11054 - DNA, 3243 bp, Enterobacter sp. GN02225; identical to SEQ ID NO: 8442

SEQ ID NO: 11055 - DNA, 1926 bp, Erythrobacter sp. s21-N3
gtggaaattaccgaatggctcggccatgggctgatctatttctttacggaagttccgctcatcggcgatgcgatggcggcgtttctcgcaattgtgctcgtcggaaccgcatttgcaatcgcgtatcggtacaagcgtgagtatcatgcgccactggccgtcgcgatcgacgccagagttcggctgcttgatgaaataaccggcggcagcacggccgatgtcgatcaagcgcgcctggaattcgctcagcgcttcaatgatattgatgcccaaatgatggaggcgaaccactccgaggcgctgccgcttcgcaggacctgggaggaatatcgcgagactatcgtcgacccttccgccgaagttcttcagaactctgccagacctgagcactttttcgtcaacctcggcgagcgccaccgcgggctgaactggtttgcgaatatctttatcgctcttggcctgctgatcacgttcctgggtattatagcagcgctctctaccctagacttcagcggcgacactgcagcaatgcaggataagctcaacagccttatgaaagtcgccggagctaagttctgggcctctgttggcggaatcatagcctcgatcatcttacggtcttacgattaccgtttcggcaagcggatcaatgatggcctctcgatgctgtgcgacaagctcgagcatgggatggcctatttgccgccgcagcgaattgcgagcgatcagcttgagcagctcaaggagcaaaccccggcgctccggacgttctccgagcagttagctgcagcgcttgatggtgcgcttgaaaagcaaatggctccaatgattacgcatctgggatcgattcagcagggaatcgacaagattagcggcggtgggggcgaggcagttcgtgatgcgattgccactggcgccggcgcagaaatggcggggttggcggacgctattggcgcaatgacggcgtcgatggccaccatgtcggagcgcctcgagaagcagaccggcgaagccgaccgccagatcgaagaggcggtcaagcgcttcggtcaggcatccgaagagatgcgctctgcattcggagagctcaatcgcaattttggtgtcgtggctgaccgcatgcgtgaagagaacgagcaggcaagcgaactggcgcggcaacggatggatgaattgctgagtaatctcggcaacacgcttgatgatatgaagtcaggccttgcgtcggctgccagccagatgggcgaagcttcggcccgggctgcgaatgatgcggcccgtatcggtcaggaggcgatggagaagtcgttttcggaatttgtcgatagattcaatcagactggagccccgctggtcggcagcatgaaagatgctggcaacgccatatcgacatccgcagatcatctttcgagcgcgcaaagcgcgattggcgatcatacacgggcgatcgagcaagtggcggctcgctcgaacgatcttgctacagccttcggaacggtcgcgaatgatgtcgaagctgcgactgcgccggttcgccagtcggcggtttcgatcgccgaagcagtcaagtcggtggaattgatcgtctcgaagaatgcagattcgtctgaaagtgcccgcgatgaaatgcgccagctcgctgcggcgctcaatgatactgctacggccgcttcatcggcgtggtctgaatatcgtgcccgtttcgaggacgtggatcgcgcactcggagacgccatcgataaaatctccgatgccgccggaaaccacgctacgaacctcaacgaacgggttggtcagatcgaccaggctctgggcgatggtgtggcacagctcgccggtgccctcgaaccgctgaccactctgcgtgacaccgtcgaagaacttgcaggcatcctcgccagccagaaccaggaagccgctgaataa

SEQ ID NO: 11056 - DNA, 729 bp, Erythrobacter sp. s21-N3
atggaaggcgccgtccgccgaaggcctgctgaagaaggcgagagctacttcatgtccatgacagacatgatggttggtctgctgcttatcttcataatcctgctcgcctactttgcccttaatctgcagacgaaaaccgaagagctaaccggcgcgaacagaacgcgcgcggaaatcctcaacgacctgcagcagtcgctcaaggacagggggctccaggttgaaatcgacacaaaaagcggggttttgcggcttcctgacgatgtcctgttcgacaagggtgagtgggaactcaccgggaggggacaagaggccataagcaaggttgccaatgctatggttgccgttctgccttgctacacgacttctgatctgtgtgagggtgagcgatcaccgcatctgatcgatgccgtctttgtcgagggacacacggattcggatatgatgtctggcggcatgaacaattacgggctttcggtgcgccgggccgagacgacctttactatgctgcagcgtaatcaaccggctttgaggggcttccttaacagaccggccggagaagacggttcggcaccaatcctgagtctgagcggttatgggcccgaccgtcctgtggatcggggtgaatcagaggaagcaaaaaaacgcaatcggcgtatcgacttacgttttctcatggcaacgccgacttctggtcttgatcccgacatcctgaggcaggagcagtga

SEQ ID NO: 11057 - DNA, 1323 bp, Erythrobacter sp. s21-N3
atgcaacggcaattggcaaagctcgatgccagcgtcggtgaagccgaacccgttatcgagcttaagccatttttgcgggaagcaaccaacaggggcgcaggcggattgccgcgttttcagctcaaccgggtcttgcgcggcgcctggtgtgactccgaattcgatgacttgggcgtagcagcacttgagcgcgccgatagcgaacatcgacgcagttctgaccaagcaatgatcgatggatatctcacgtactttccaaccgagcgcccaatcatgccacagcttgctgaggctgcttcccgcgccgccggtcggcacgaatgggcctggcgtgagcgaagttcccgatgggatctgtttttgcctcaagcaggtccagccaaggtggcacgcgattttgtctcccgtaatgcggaccagatatcccttttgatgcgcgaaaccggtctgggggcaaatcttgctgcaagcggctttggccaggcagtcttttacgagacctgtatagcgaccgctgagcttcagcctgacaaggcagtcagtgcgcaacgcaacatattgcgaatgttcgataccgaggctcaggccgggcaattggagctcgtagttcgcgcgttgcttgagccatggatcaagaccaaaccggagcctgaacatcgcaaagcaatctcggagttgctgctcgatcagattggtgacccgcgcctccagcgcacgcgctgggacaggattgtgcgttcgcttgcggaatcaattggcgaggaaaaggcgcgcgaagtcacccaggttttcaagcgctggcttaccgaagtcgccatgcgcgagtttttccgcgccatcgcaaaaacaaccgaccggccggaccagtgggcccagcgcgaaaaattctggatggcttatctcgacgaaggcctggtcacggacgcctggcccgctctcgggatccgggcacgcaacaggattgaagatctcatccgacagagcggcgaacggccagaatacgggataatccggggagggccttcgtcgtcatcttccatcatcatgcagataggtgatctgcggatctcagaatggagcgacaacgggtcatgccggttctggagcgatagcgatccgggagccccgaaactttatgccaagacgtacgagggtggaaagctgcgtaccaccgccggccgtgcggatttcgagtatgaatcccatgttcccgcgagcccgggttgggaaggcaaattcgcaggcatcattcaccggcgcacatcaatcgctcaccctcattttgggcgaggccgggggcgcaactggaatgaccgatggtga

SEQ ID NO: 11058 - DNA, 3732 bp, Erythrobacter sp. s21-N3
atggtgacgacaaagtttattgccacgtcccatgagaatggcggagagaccattgccctgctgcgcgaacagccgggcggactattccgccgggcttccagcgaaatggttccggtttcggattggccgaggtttgcgcctcaagctggtcaggcttctcttgcactcgcccgggttctcgacgatgagagtcggattagcgaggagaaggacggcattgtccttccgccagagatcgtcgcgcagctcgatgaggccgatgcctttgctctcgggcttcccccgaccacgccgttgacgttgcagctcaactcaggcgggtcgctcgccgatggtacaattaaggtagatacaaaatgggtccgccgcggcggtctcccggttcgagcggacatcgctggcgcgcgcgtgcgcgaaggtggaaaggtcgggagaattcccgagccgatctactcggctttccaggccgcgctcttagtcaatgctgctgatgatcccgacgagcgccgggcggcctttgccgatcttcgcgcgaccctcggcgatgagattggagcagggatcgaggcagacgggtttctcgagcgtgtccggattgcctatgcggcaaacttctcgctgaacgccaagaccgaccatgggcgttttgactttgatccggtcctcttctcgagaaacgcgagcgaaaacgctgacggggacctggtggatgaagaagaagcgtcgcttctgacgccgcaggacaatcagcatttccagcgccggttcaagggacaggaaggcgggcggcgcagctatctgctctccgacgggacactcttgttccttgatccgcttctgggcaaagctctcgacatcgtgcgcgccaaacaaactggctcgtcaccggagaagcgtgagtttctgcgtgcgccgcagcgtgttctgcgcgaagagctgaagcttgacgcaggcggtgatgacgaggcggccgatcgtctgttcatcgagacccagcagttctccgagcgggttagcgggatcgaggtctggcagaagcccgtccttccctggataaagcccaagccgaacagctggctaccagaagggttcggattgcgcattggcgatcctcctgatgcgcgccatgtcgagctggccccgggtgaagccgaaacgcttgcgggcgaagtcgagacagccatcgcgtcgggcaaggaatccatcgcctggcgtgacgaaagcattcccgccactcccgcgacactgcaggctgcacgcgcaattgcggacctcgaacaccagatcactgccgagagcgaggagcaatcttctgagcgaagcgagcgggaggccgtcgacacatttttccttcaggttggagagaatttcgagcaactcgactatgctcgcctgcctcgccctgaaatcagcgctgaggtttttcaagctcccggacttcccgaaggcctgaaatccgagccgaaaccccaccagattgaagcgtttgcctggctcaccgaggcatggcagcggcggatgccgggcgttctgctcgccgacgacatgggcctcggtaagacgttccaggcgcttttgttcttgctctggctacgccggagctctgcgcatccaaagcctgttctgatcgtcgcccccactggtttgctgcgtaactggcaagctgagctggcccaacacattgaagctgatctcatggggccggtggtagaggcgtttggcactaacctacgtgactttcgcctcgaagccgggagcgacattcgcggaggaacgtcgcgcctggacgtgtcccaatgggaagaggcgggcatcgttctgacgacctacgagacaatgcgcgattatcacatgagctttgcgcgcattccattcgcggccatcgtttacgacgaaatacaaaagctcaagaatcccgccagccagatgacgcgggcggccaaggcgctcaatgggcgtctccagatcgccatgacgggcactccggtcgagaacagattgcaggatctctggtcaatcgccgacacggtctatccaggatttctcggctcaagccgggaatttgagaacagctttcccgctcatgatcttgagcgcttgggcgatcttcagcaacgcctgatcgagcgcgaggaggccctgccggcattcatgctgcgccgcatgaaggacgagattctgaccggcttgccggagaagacggcgcggaaataccctgtcgagatgccgcctgcacaggcacaggcctacgatcttgtgctcgccagagcacgggcgctcagggaaagcggcgaacagggcgcgatgctgaaagtgctgcatatgctccgcggcacgtcgctccatccgtcaccgccgcgtggcataaccgatatcaatggctacatcgaccagtctgcacgcttgaaaaagaccttcgagattctcgaagagatcgaacagcgcggcgaaaaggcgctgctgttttgcgaagatctagaaatgcaggccttccttgccatggccattcaggatcgtttttcccttgaacgtcggccgatgtgtatcagcggaaaagttgctggccacaagcgacaggacatggtcactgctttccagacttcgcctacatctttcgatgttctcatactctcacccaaggccggcggtgtagggcttacgataaccgccgccaacaacgtgatccacctgtcccgctggtggaaccctgctgtcgaggatcaggcaacggaccgggcctaccggatcggtcagacaaggccggtgacgatccacatcccgatggctgtccatccggatgaggcgattggaccttcaagcttcgaccaacggctcgatgccctcatggagcgtaagcgctcgctgagcagggggctgctcatgccgcccgaaagtgcgcgcgacgttgatgacttgctttcggacgttctggatggacgaaaaactctcagcgaagaagacgccgaaagcgctccgtcttctattctgttgtcgtcggacgcccaggcaagtgatgtcgaaaatgtggcccaagaagaatctgacgcagagtcgcagatcggccctgagaacacggcacacgctgcgtcttcttcacctgcccctgtccctcttcctacccctgttgctgttgaacccgagcccaaaccaccggtcaatgctccccagagacccgtcttatcggtccgtacaccagtcgaggctgctgaagctcgcacacccagtgttcagcgtgtggtctatgaacaatatggtccgcgcgattggacgatcttcgagcaatttgtccgcgaagcaagaataaaccgtcttgaaatccaggacccctattgctgtgcagatgaacaggctcgcggaaggctactgaacttcgtcaatcggttctgtgagctcgcagcgaagcttgatgaagttcagattgtgaccttcgatgcagactcggtcgataaacggatgccggaaaccaacggcgatcaacgtgccgatctcgaaaaccgctggagaaacacgatcggatcgactgcgctgcaccttgcgcagcgttcacgccgctcgcgaggcgatttgcacgaccgctttgtaagagcgcaactggaggatggggacgccgtcatatgggatttggggcgggggatcgacggcgttatgagcgccaaatggtcatgtgtcgtcaatgcctttcacgacaagcgctcggctggcatcggcgcacggggccatcgcgtacagtaa

SEQ ID NO: 11059 - DNA, 2190 bp, Enterobacter sp. GN02275; identical to SEQ ID NO: 8439

SEQ ID NO: 11060 - DNA, 738 bp, Enterobacter sp. GN02275; identical to SEQ ID NO: 8440

SEQ ID NO: 11061 - DNA, 1683 bp, Enterobacter sp. GN02275; identical to SEQ ID NO: 8449

SEQ ID NO: 11062 - DNA, 3243 bp, Enterobacter sp. GN02275; identical to SEQ ID NO: 8442

SEQ ID NO: 11063 - DNA, 2190 bp, Enterobacter sp. GN02366; identical to SEQ ID NO: 8439

SEQ ID NO: 11064 - DNA, 738 bp, Enterobacter sp. GN02366; identical to SEQ ID NO: 8440

SEQ ID NO: 11065 - DNA, 1683 bp, Enterobacter sp. GN02366; identical to SEQ ID NO: 8475

SEQ ID NO: 11066 - DNA, 3243 bp, Enterobacter sp. GN02366; identical to SEQ ID NO: 8442

SEQ ID NO: 11067 - DNA, 2556 bp, Enterobacter sp. GN02454
atgttttcgctgacctcgttcctcgacacgttaacctctgttaatccagaaaatgtgccgaaatatgttgctcttgttgtcgcggtgctcctggtatgcttcattgcccgctatgccattccttcttttgtgatttcagcccgctttaaacagaaagcgagagcgattcaactgattgcaaaagataaaccggctcagcaacttgaaaaactggatgctttattttcaggaaaatttttcgtgcatccctggagcgagtttaaagagtccctgcatcgtcagtttgagttagacgaaaatagtgggcagaaacggatcaacagcattcgttctactgccccagcttccgcctggttctctgaacctttactggtggagattccactctatacggaagcatttaagcatttgcctggcatcctgactgggattgggataatcgggaccttctcaggcctaatgatcggcttgcaccactttgaccccagcacgccagaacaagtgagcgccagcgtagctaacctcttgcgtgatgttctttacgcatttttaggctccgccttcgctattgcgttctccatcctggtcaccatgtttgaaaaatggcgtctggcgagatgctataaaaaccttgagtttctgactgccagcatcgaccagctttttgaaggcggtgtcggtgaagattatctttctcagcttctctccagcaccaaagaaaacactactcatgccaaacaactaaaagatggtctggtcagcgatttaagagagatgctgcagaacctggtggacagtcaggtgcgagaaaatcagaaactggcagagacgttgtcttctacttatcgggaatcaggccagcagattgcggagcaggtaagcggcgctatcgaaaacagtctgaaaaacccgctggacaaaattgcgggcgtggtgcaaaccgccaccggcgatcagagccatcaagtgcagtcgatgcttgagaacgtccttactgcttttatgaacaaaatggataacacgtttggtcagcagttcaccacgatgcaggagatgatgggccgttccgtggaggcgatccagagcatgcaaagcggtttctctaccctgttgcaggatatgcgtcaggctggggatgattcgcgtcagggcagtgcccaactgatctctcagttactcagcgaaatgaaaagcggccagcaagaaatgcaggcgggtatgaatgacatgctgcgaagcctgcatgaatctgtagcccgcattggcgcagaaggcgaaggcgctggcgaacgcatggcccgacagctggaaaaaatctttgccgacagtgaagcgcgtgaaaaagcgatggcggaacagatgcgtgcctttattgaagccattcaggccaatgttcagcagggacaaaatgaaactatggagaaaatggcggcctctgtggatacgcttggcagccatatggcaaccttgttcgcacaactggaaaatggtcagcaacaacttaatcagcagcaaaatcaggcacaaaatctgttgatgagcaatatgagcaaaggtgttgaagatctgactcaaaacctggcaggtgtatttagtcagcttgagtccggacaaaaacagatgagccagacccaggaacaaggtcagcgtgctctgcatgaagagacccaacaactattagcccgtagcgaagctcgtgaacaggcggccgccgagcaacaacacgcttttatggctgctctgcaacaaaccatgcactccggtcaggatgccctgcgtgagaaaatgactagcggtatcgatcaattgggtagccaattgggcaccctgtttgggcaactggaagaaggtcagaaatcccttagccagcaacagcaatctgctcagaatgctctgcaacaggaagctcagagaatcatcggccagcttgagagtcaggttcaggcgttaatgcagatgctgcgtgagcagcaatccgcatcaggtgatttactgcaacggatggcgcaaaacacgacgcgtcacctggaagaaattcagactggagccgataaaatgcgggtggctgccgatcgctttgaaacagcggggaatcgtgtcgccgaagctaataatctgactgcagaagttctgaatggcactcagcaagcaggtagaaccctttccagtgccagcgctgagctgggcgcattaatcgccgattatcgcaacacccgtgaggttgtggcgaacgccatcagcgcactagaaacgctgatcaatagcagccacgatgagcaaacatcccgcagccggtttgttgaggatctgaagtcgtattccgagcgcctgcaacaatataaccgtgaagctcaggaattcctccacaacgtcgctgatgtgatgggcaccagctttgagtccttcaccaccggggtggaaagcggcctgaaccgttcgctccaggagatggatacgcaactgacaaaagcggcaggcgccttaagttcttctgttgaaattatcggtgaaagcgttgatacgctggaaaccgtgctccgtagtcgtcgcgcgtaa

SEQ ID NO: 11068 - DNA, 738 bp, Enterobacter sp. GN02454
atgtttaaccgggcattcaatggcaggcagcgtcgtagtgatgaagcggaaaaaccattctggatttcctatgccgacctgatgacagccatgatggtgctatttttggtcgtcatggtggcatcgcttagttccgtcacacagaggatccagcaggcagaagcaggcgaaaagtccagaggacatgatatcgcccgtctgtgtgaaaaacttgaactacaggcaaagaacctgaataaaacgatacatgtcgactgccacgataatcgtattagttttggtgaggcaggccgctttgagcataaccgcttttcgctcacccctgaagggctgaaagctctacaggatgtggtgccgttggtcctggatgcggcaaatagcgacgaaggtaagaaatggtttaaacagatcgttattgaagggtttactgacacggatggctcgtatctctacaatttgcatctctctcttcagcgctcggaatgggtgatgtgcagtctgctggatagcagaagcgcgttacagcaaagaattaccgcggatcaacaattacagattcggaaattatttctggcgggtggcgtgtcgttcaacaatgcgaaagagagtaaagaagccagccgtcgtgtcgaattacgcatgcagttctttggcctgaaagataaaaaacaggacgagggtatggatgtcgtccccggtattagtcaggaaacctgccagctgggtgtagtgcaatga

SEQ ID NO: 11069 - DNA, 1794 bp, Enterobacter sp. GN02454
atgacgtccgcgattgagaagctaaaatcacgccttcttccttaccgggaaaagagtgtggatccggttgtgggtcacccatttacctatctacaacgcgtcgtcagccaacttgagagaaaggtagacgctcgcgcagtacaaatggtgccccctacggagaaacgcaggcaggcaatttcccgattgcgctcgggagaaacgccacaaccatctgaatggaagatgatcttttttggcctcaatgacgttgcagaaggtgatctttttgatacagcactcattgatgatgcggcaaactttgccaaaatctcggctgaaattcagagcaaaattgcacaacaacgattaacgcgtagggaatggctggcgttgtgtaccagctactttggacatgtcagcgatacccctgaagaaaatccgcagtggcttcagttacgtatgcagattgccgccgggtttgaacagctaaaagagagttcgcctcgcccgttgtcatggatggcggtcatcgatacctatggggatatttttaccgacaatgcgggatttcttcttgggcaacagctcggccgtggagaaataaccgatatctccgtgctggaaaaagtggcacagatcccccagaccagttggctatggcgcaaaattgttaaccatctggtaagcgaaatttttcgtcagactgatgatgagtttgaacataaaattaatgaactgatcgcgttgagccgtcagctttctcgttttaaagataatattctggccgctacacttacccgttattaccagtcaatttttaaacaccggactcaccttgaacttaagctgttagccctggagtattggggaaaccctcagttaactagccgcaataagggttggcaggttcatgtcgataacgcggtgctgcttatggtacaggggtggttcgctaaagatgacctgaaactgttctttgagttgctcaaaggtaaccgggatgtcgatcaggcacgtctgttctactggctaagatttgctaatcagatgagttatacgcgaattgtgttgggtgaagatgctctgcgttcgaaaaataccgattatgttgagttccgggcaaaaaatgccgggcggttgagccatctacaaggctccggttctcgcgacaacaatgccatgatcatgaggattgggaattatctttttgtcgagttttcgaaagtgggagccatgtactcttaccatgtcgataatgcgccgtttaatccggaaacaggcattctcgacattgattatgatcttaaagataagcgtaataaccggcgtaaagtacgtctgcgtttaccgcatttgtctccagtaacgcactattcgcttaatcgtattgaagggtggatgagccgctatgatgaagaacttcgtagactaggcattagctacgttgcggaagattccaatcagccatcagccactatcgatatctcccgttttaatgctgatcaaagcggaggagggtccatatcttctccggctaaatcagaagccaatgaatcaaggtcaaacagagaagaacagatcaaaattattgcagcttctttaaaagccaaaaaagaagagcaaaactttacgactcgagaacagcaaatcagggaagtgattcggtctgtcgattgtaaagtgatggataaacgtggcatgggtggcgcaattcatatccagttcaacgaaccagatcatgaggctgccaaaaagttgttaagcctcgggtttaagcctgtgctgggtaaatttacttactggagcaaatag

SEQ ID NO: 11070 - DNA, 3240 bp, Enterobacter sp. GN02454
gtgttcaaaaaattgttaggtaaatttattaatgataataaagcagttcctgcttcacttgtgccgctttatgcaattaaggcggagggcttcgctttcccttttagtcttgccgacacgcaggataactggcttatcacttcatgcctggaacaactccatgaagaggattatgtatcacactggtcggattgctggtttatcagttgggatgacttctatcgcattctgaataatgaagattatgccagcagtctggcaattttcagcttcccccaacagcgtaatctgaccgcccatcttgctgcgacagggagcatcagcgatgacacctttcgagttttcattgataaatggatccagcctgacgattatcgccccgttgagatcactatccagggggccagcttttcctccccggaaggcacttttgtgctcagcgaagaaaactggcagcttctggactcactacagcagctcagattacagcagcgacagacgccgggtgaaacggtaaaccaaaccgggtgggcaaaaatacgtcgacaggcaaaaaaggcaggggcaaaacttgatgattacctggctaaaacgatagttatcaggcccgagtcactgcagttaaagttgcggaaatcactggtggcggatacccgggttctggaaattgagccggtttttgacgaacagcctgcaaagtggctgcagagtttcgatcgcacgcaacaggtacaagatcggtatcgcgttttgggtgatgacggtgaattaagccacgtcattctttcacctgaagtcaaagatgtgctgacctctgtacatgccatcactggccgtcgagttgctggtgatgatgcgctctcgtttgttcgcaatccgtatacctggattggcgaagaagctagccaggtacttgatcccgatgtatatgagcagaatctacaggacgcagggatctatttttatgatttccgtctggagcctcgggttgatgaaaacatgcaggttgagtctgtttcgctgatcctgatccccaggactgaacagcctgtgccagatgaaacatacgtgtttcatcggccgattgaattggctgcgttgattactgagttggaacaaaaattagcggcgcatcttcctgctggtgtctggcagggctatgacctcgagctgtccagactcactccgaatgaattgcaagagtatcaggcattgctggaaggctggcagcaacaggctgcgggattgaatttttctcacgtactcgatctcaacaagtacagcgacagagttatagggataggtgagttcgagaaaatcagttcaccgtatctggtcaaaagtgaaagtgaaaattggcttcctgacaacctcgctaaagatatgtgtgaagccatgttctcgggctgggacctggataatcatcagcattttcatgagttagaaacgcgtctggaagatgcaaaagcctctaatgctcctgaagtcaccatgccctggaacgacaaccttctgccacgggaagaagcagagattttccatgaaaagtggaaaaagaaaatcgatgctgaaacaagtgaccccgtgaagggggaaccaataagtcgggctgtcctgctgatcgaacaaaatattgagcaggcactgtatgtcaaacagcggcaaacctccttgttgggagcgcattcggctgaagccgagcttccgatgattctcaaggactcgattcaactgcgtgagcatcaatgtaaaggggttgcctggctccagcagttgtaccttaaatcccccaccgagacggcaggatgtttgctggcagacgatatggggctggggaaaaccttacagattctaacctttctcatctggcaccgtgagcgtttcccggatgcgcctccctctctgattgttgccccggtgtcgctactcgataactgggagcgtgaggtcggtaattttttcctgcgcgagcaggtgtcgattttaaagctatacggcaatgaactcagagagaaaaagtgcgctaaggagagcattcctttcgaactaaagagtaaggggattaaaaacctgctgcaaaatgactgggttggagaggctcagatcgtactgaccacatacgaaacattacgcgatcaggaattttcattggcgcgccagccctggtccataatggtttgcgatgaggcacagaaaattaaaaacccggcagccctgattacccagtccgctaaggccattcaggcgcaattcaaagtcgcgtgtaccggaacgcctgttgaaaatacgcttgtcgatctctggtgcttgtttgactttgttcagccaggtctcctgggggcactgaataattttggcaaagattacctgcggccgatcgagcaacagagtaatgataaggtgcttgaatctctgagaaaattgattgaaccacagacactgcgtcgaactaaggaagaagtggcgaaagatcttccggaaaaaattgaagataaatcctgtaagcagctcagcatgttgccgttgcaacgggatctctatacacattcggtggtgagctggcagaaccaacaggaaatcagcgaaggtctggatcaacgtggttcagggatgctcggattactccaccgcctgaaactgatatgcgcctggccctattccgtgagcgctgatttacgcttacgtaacgatgccccgaaagtgaagtggttgctggagacattaactaatattcgtcagtcgtcagatgataaagtcattatctttactgaactgcgcgatattcaacgtgaattgcagcatctgatctcgcagcattttgggtttaagccgtttatcattaatggtgacaccagcaccaaatccggaagtgaccaaagccgtcagagtttgatcgataactttcagtcatcaccgggatttaacgtcatcatcctgtcgacgatagccgtcggatttggtgtcaatgtacaaaaagcaaatcatgtcatccactttactcgctgttggaaccctgccaaagaagatcaggcaactgaccgggcttaccgcatagggcagcaaaaagatgtctacgtttactatccaactgtgcgtgatagtcagctaatgaccttcgaagagaccctggatgaattactgaaccggcgcagagcgctggcaagagacatgctcaaagcgtcaactgaccttaccgctgctgatttcgaagcggtactgacacgagctaacactcattaa

SEQ ID NO: 11071 - DNA, 738 bp, Enterobacter sp. GN02457; identical to SEQ ID NO: 8440

SEQ ID NO: 11072 - DNA, 1683 bp, Enterobacter sp. GN02457; identical to SEQ ID NO: 8449

SEQ ID NO: 11073 - DNA, 3243 bp, Enterobacter sp. GN02457
atgctgaaacgtctgctaagtaaactgacgggaaaccgtcagcagatagaacaccatctgagaaatcagtatcaggttgaggaaaacggactcagttttccgcaatctttagttgatgacccagatctttgggctctggcatcctggcttgagcaactggccgaagaagactatctgatttcactaacagaccgctggttattgagctgggataatttgtatcgcctactggaggacgaggaacactccagcagtctgcctctaattggcgttccagagatattaccattacgtgcaagactgagttcgcgtggggcattaaacgatagtgattttcgtgtctggattgcggaatggactttggttccaacccgtaagtcgattcgtttcaatcgtaccggcgcaatttttaattatgaaaatcaacagcatttgttatcacgggaaaactgggctcttttgcagacaatagagcagcttagtacccagcaaattcagaccccaggcgaaaccactaaccagttggggtgggccgcaattcgcaaatgtgcgaaacaggcctctgcaaaatttgatgactatttagaaaaaacgcacgttatcaaaccaacgtcgttgtcattacgccttcgtaaggctacggttgctgataccgcggttatcgagattgaacctcactttcaagaccagcccgctaactggctcgacagttttgacaagaactcacaggttcacgatagctatcgcatacccggagagaatggcgaactcagccatgtcatcatcccacctgaagtgaaagaagttctgaattcaatacatgcaatcccagggcgtagagtggctggtagtgaagcgctttcctttgttcgcaacccctatactttcctgggtgaagatgccgccagtgttatttcccctgaagaacatgagcaagcactttttgatgcccacattttcttccatcatttcagacttcagccccgtgtaaatgatgagaacaagatagacgatattaaactggtacttgagcctatctctcccataccacaaccggaagtgacatttcttttctccgcaccatgggaactggataaatttgttcagagcttaggtatcagtgttgctgcgcaaatgccagcaggttcctggcagggttacgaactggaactaagtcaattcactgaacagcaatggcatgattgccaatcgctgttgtcgcgctggcaacaggaagttgaaggtaaagaatttaacgatgtccttgatctcggtaaatatggcgatcgcgttatcggcattggtgaatttgaaaaaatatcctcgccatggctgaccaaggcgcaaagtgaaaactggctccctgatggggtcgacttctccgcattttcggttgaagccctggatggctggcaaccagataacctgcaacatttcgatgaactgcaggaaagaatcactcaggcagaagcgactggcgaaacgcatatcatcttcccctggaatgagactgaactgccattggatgcggcgaaaaccttcagtaagaactgggaaaagcagcaaaatatagcacatgatttaaagagtaacgttgttgaaaaagcagcccgggcagtgctcaaaattgaacagaatattgaagaagctgtttacattaaactgcgccgagattcactcctcaatgcgcgtcatgccgagcctgaaattccactgagccttaaagaacacatccggctcaaagaccatcagcgtgaaggcgtggcctggctccaacagcttttccttcgttcgcctcaggaaactacaggttgcctgctcgcggatgatatggggctggggaaaacgctgcagatcctgagctttttggtttggttcattgaaaaattccctgacgagccacccagcctcatcgttgcccctgtctctcttctggataactgggagcgtgaactggacaatttcttctatacatctggcattccagtaatgaaattgtatggcgacaccatcaaagcggtgaagtacccgaaacaggctattcctgctcatctgcagtctcaggggatcaaaaatctgcttaaacccggctggcagggtgacgcgaaaattattctgacaacctacgaaacacttcgcgatcaggaattttcactggggcgccagccctggtccattatggtgtgtgacgaggcacaaaaaataaagaacccggcagcattaattactcatgcagccaatgcgatacaagcacgatttaaagtggcatgcaccggcacgccagttgaaaacacgcttgtagatctctggagcctttttgatttcgctcagccgggtctcttaggagcgctcaatgaatttggcaaatcctacgttcgccctatcgagaacgaagcgggtcgtgatacaggacagcttgaaagtttacgagcgttgattgaaccacaaacattacgccgaactaaagaagaggttgcgcgtgacttgccacaaaaaatcgaagtcgtcagctgtaagcaactgccgctttctgcccctcaaaggcaactgtatctttcttcgatagcgaactggcaacaacagcaggcgcttagtgaaggaatgcagcaagcaggcgcgggtatgttagggttattgcatcgtcttaaactcatttgtgcacacccggcagtcgttaacccagaacctcgctatcgggaagcctcacccaagcttaattggatgttgaaaacattggatgaaattaagcacaccagcaaagacaaagtaatcatctttactgagctgcgcgatcttcagcgcgagatacaacacgctattcaacagcgatttggtttccgtccagtgatcatcaacggcgacaccagcactaaaagtcatagtcagaataaccgccagcgactgattgatgatttccaggcccaacccggctttggcgtgatcattctctccaccgtcgcggttggttttggggttaacgtacagaaagcaaaccacgttattcatttcacccgctgttggaatccggcaaaagaagatcaagcaactgaccgcgcttaccgtatcggccagacaaaggatgtgtatgtgtattatcccacggtaacggactctgaaatcacgacgtttgaagaaacgctagatgaactccttcagcgtcgccgggcattggcgagggatatgttgtgctctgcaccagatttaagcagtgctgattttgagaacattttaaaagggtcttaa

SEQ ID NO: 11074 - DNA, 2190 bp, Enterobacter sp. GN03191; identical to SEQ ID NO: 8439

SEQ ID NO: 11075 - DNA, 738 bp, Enterobacter sp. GN03191; identical to SEQ ID NO: 8440

SEQ ID NO: 11076 - DNA, 1683 bp, Enterobacter sp. GN03191; identical to SEQ ID NO: 8475

SEQ ID NO: 11077 - DNA, 3243 bp, Enterobacter sp. GN03191; identical to SEQ ID NO: 8442

SEQ ID NO: 11078 - DNA, 2025 bp, Burkholderia sp. HB1
ttgaacatccagtcgttatttgctggcgtgccgacgcccgcacttgttaccggcgcgtctttggccgcccttgtcgttgctgtcattgcgtttttcttcggcccggcgataaggcatctgcttcgactacgctctatccagcggcacattaaagcctttgaaagcggaaactatccgtcgcaatttgaggcggcattcgctggcgaccgtcggctcacgcatctctggaaagaatacgcagagtcattgcacgtccagcgtgaagagcgcgacggacaaatggttgtgcgcgccgtacgcgccaccgtgcctgccgagctgtatttcaacagccaggttgtcgtcgacagccgtttgcgcaccgagttttttaagcatgtccccggaattttcactggcgtcggcatcatcgggacgttcagcgggctgatagaaggtcttcatgcgtttcaggtaagcgagaacgctgcaaccgtgcgcggcagtcttgagtcactcatgcattctgtgggagaggcgtttctcgtctcagcctcggcaatcgccgcggcgatgataaccacgctcttcgaaaaactccttcttgcctcactgtaccgacgtaccgaggaaatcgctcatgcaattgacgcgtgctttgaggccggggccggcgaagaatacctcgcgcgtctggtgaaagcatcggaagagtcggctagtcaatccaaaatactgaaggatgcactcgtcaaggaaatgggagagttgttgcgcgagttgaccagcgcgcaaatagaagcgagcaaggagcattatgcgctcgccgctgaggcgggtcgtcagaacaatgccgctctcggacaggttatcgcggagagcatccaacagggtctcaaaggaccgctcgaagaaatcgcagcaaccgtgaaaacggctagcggagaccagagcgcaaccgctggacggatgctgcaagatgtaatgacgagtttcagccaacggttgaatgacttgttcggcggccagatttcgggccttaccgagctcaatcaacagactgcccagagcattcagcaggccgtcagcaccttgcatacgttggtagcgaacatcgaagcttcgagtcagcgttcgacggatgcaatggcgcagcgcatggcagaggccatcgaaaagatggagtcgcgacaggaggcgatgaacgcgcaatctgccgcgttcgttgagcagctgcgccaactggtggcgacatcgcagtcggagacaaaccagaaattgcagacgacgctggaaacgcttggcacgcacgtcggagaaatgctgaccacgttgagcggtgctcagaaagaagtatttgaaaacaatcgggcacgcgagagcgcgatggctgagcggacgaccggagccgttacagcgatgtctgaatcggtggatgctgttgtcaaggagctggccgccgcgaccaagcaaatggcgcaaagtgtaaacgccttgacgcagtccacagcgtcatccgtagaccggatgaacgccggcgctgaagcattaggcacggcttcgcgaaacttcgctgcggcgggcgaacgggtagcgggcgtcgtcggtcaaaccgctgatgtttcaaccaagctcgccgcgacggccgggaatttgacgagcggtgcgggtgcaatccaggaactgctgagcgactatcgcgctcatcgcgacagcatcggtcaacttgtcacggagttgcgcgccaccgtcgacgccgcgcgaagagaagccgcattaactggcgacattctcagtcgcatcgagacctccactggccatcttggcgcggcgcaaaagcaggctgacgaatacctcgctggtgtaagccgcgttctggcggacgcacacggcgccttcgcgaccgaagtcaagcgcacgctggataaggcgaatgccgagttccataccaagctgacttcggcagtggggttgctttcttccgcagtcggtgaactggaggtgacgcttgcctctatgggaaccttggcgcctgctaggaggtag

SEQ ID NO: 11079 - DNA, 711 bp, Burkholderia sp. HB1
atgtttggaactcaaatcgtcgtcaagcgtggaggccgtgatgaggcagaaaagcccttctggatttcttttgccgacttgatgactgcactgatggtcctctttctcgtggtcatgggggtagctttgctcgccgtgacaaagaacgtaacggagaaagagaagcgggaagaacagcatcggaaggacatagagctcattctcgaccggtttcaaaccgcagcaaagcggtacaacggcatcaagatagaccgtgaccggcatgtcatcgattttggagaccgtgcgcgttttgcgtttgggaaatccaatctggcgcctgagcaggaagccgtgttgcgtcaattcgttcccgaaatcctgaccttggcgaacggtgacctgggcaagcgcgtacttaagcgcgtggttgtcgaaggctacacagacagaaccggtacatacctgagcaatcttaacctcagccttcagcgcagcgagcgggtgttgtgcagcatgtttgctacggctggtgcgagtctgctggtcgaggaccagaaggaagatgtacgaaacctgttcctggtcggcggatattcgttcaacgactcgaaggagacggacgaggagagtcgccgcgtcgagatgcgcctcgagttcctgggtgttggcgaacaaagagctgcggccccggtgcagtcggggaactttggcgactgcgtactacgatga

SEQ ID NO: 11080 - DNA, 1695 bp, Burkholderia sp. HB1
atgaatgcattgaactacctcgcgtccttgctgcaatcgtccgtcagcgaggagacgcagccgattcgcctgggtggtgaaatcgacgcacttctcgaagagctgaaagcgcgtgcgaaatcaggtagcggccgggaacccgtgcacgaccatcagctcgatgcggtccggcggtactggagtagccaggatgtgcccacgttccgcgatgcatacctactgtcctttggcttatgcattccgcaccgcccccagggtgagtgcgtaatggaggaccgaccacgcttccagcgtgtcctcgacagtgttgacggctacatagccaggaccgcgtcatacagacgctgctatcaagggctcgcaaagagctacttcacttatgacgtggacgcgcctgaagcagcgcccgccggaaagaagaactggttgactttgcgagactaccttcacgaccgtaaccgcgagatacgggacagcaaaccagggcccgcgtgggtcgacacagcaattgagaatcgacagcttttcgacgaagcgccctgcacgccctatgtgagccagctgctgcgcggagacgaatcgcatatcgaccgtatttgtgagcagcttcaaatcggaaaggagtcgtggtttctgcgccagctcgtgctgacacaggttgagggtgcgacgaaactcggtgacgacgagtttgtgagcctactacctcgcttgctcggcctgctggcccataacgaagtgctccgcgaccgaggaacaattctggtccttgaccgatacgcccgggtctctggcagcccgctccatcccagacttcgcgaccatgctgttacctggtggggcaatccgtggctgccgtcaaatgcgacacgatggggtggcgtcgcgcccgcggctcgaacgatggtctctgactggctgaagctcgaatttatcgagaccttctttacgaagttggcagaggacgggctcgccgaccgtcgccgaatggaattttggaagcgttatgtcaagtccatcgacgacatcgagtttgcattaggctcaaccgcacgtaattcgcgtgaacctgacctcgttgccctgcgcaagaaaatgaagggcctgacacgcgaactcgacgcctccggtgccaacaacgcgttcatcatgacgatgggtaagttggtcgcggtggagtttagtggcctcggaaatgcgttttatggctacgacgcaagtcgttcgctgccctttaatacgagtcagacattgaagctcgggaaagacgagcggaattcgctcaagcgttcgaatcgcatgctctggctcaagcacggggatggcattcatggctggaatcgctgggaggatatgttcgaggcaacgcttcgcgagagttttcagattgttccctccgtcggcgcttcacgtgcttcagtcaaaacccaggcggcaaacgaacgtgcgaagccgacgagtttagcatccccgcgcgagaacgctcgctcgtcgcagaaccgaacccagacgcacgaatcctactcgcatgtcgcgctcaagcgattcgcagcaacgcatggtctgcaaatcgacgacaggactgcactcggcggaaacttgtgggtgcgtggagatgaggatgatgaacatatcggccaagtcctggcggattggggcttccgtgcgaagccgggcaagggttggtggaaataa

SEQ ID NO: 11081 - DNA, 3759 bp, Burkholderia sp. HB1
gtgttcaagttattcaagcaggcaaaagcgcgagacgtcgccacctggaagcggcagtggtcggataagggcgtcttcctgacccgccgaatcgaaggtccgggtgcgactgtcgacggagacctcgtcgggggctatctcacgcagctcaccgatgacgggctcgccagcccggtcgaggacggtttcctgttggactggcagtcggtatatgaaatcctcgagcggcgggactacgggcagttgcgcgaggttcttcgaattccacctttcaccgaattccgtccgtacctgcgaagcggccattcgctggtcgaccgcgagttcggtattgcgatagatggatggcgcgtcgatggcggccgcgaatttcaaggcactctcacggggccggtgatgtcggaaggcaccgcagagacgctgatgcgccccgcgcaatggaagcttttcaaagcggtggttgcgttctcgcgccgtggtgacgaggaccgctccgatttagccaaccggcaaggttgggggcggattcgcacgctcgcgctcgacgccgaagcaggacttgatgattttctctaccgctcggtggtgttgagtcccgaaaagctcaatatcgggctaagacggtcggtcgaagtagcggacgaccacgtagtcgaaatcgagccaagcttcgacggcgcgccagacgactggctcgacacgttcgatagagttcgcgacattcgtgaccggtatgacatcacgacccgagagggaattgtccaggttctcgtcacgccgaaagtgaagacggtgcttcgggaaatcaagcgtttgcccggacggcgcgtcgcgggctcacgggcgcaggcgtttttgctcaatccttacgcggcactgggcgctgatgccgtcgacgtcattgaagagtcgcagttcgagcgcgctcgtgaagacgccggcctcgactatgaacgcttcgtaccgacattcgagcgcgacgctgctggttatccactgcgcgtcggcctgctcatcgaatcggccgtggcaagcggaccgacctcttcgaagacgcattggctcgacgacaacgagcttgccacgttcgtcacggcgctttcaaggtcgctcgcgcttggccaccaattgctcgcctggcagggctacgaccttgctctgcagggggattcggaggagcaccttaaggagttgtcgggtgcactcgcacaacttcgtaatccaccaacgctggtctcatacgctcaggtccatgacctgggaggctactcctcgcgcatcgaatcgattggtgtggagaagccgtaccattcgccgtatatcgcgaagaaagatgaaggtgagggttggtttcctgacaacatcctgcccgtcattgtttaccagccaaaagacggtggcgagccagtggctgtgcccaccaacaagctggccatcgagaagctgaagaacgacgtacaggacgccgacgcgaaaggcgtggcaaaggtcgacgttggctggctcaaggaccccatttcgctgtcggatgcgaaagaaatcgtctccacgttcgaaagccttttttccgatttggaatcgggtaagcagtttgacccggagaatcaacgcaaacggcccaccgaacgggccaccaaaaagcagctggttctacgcgcaaacatccaggcactcgaatacgaggaattgcgtcgggaggcgctacagtcgatacctgcgagtccgaagcttccgcaaagcattcgcccggggttcgccttgctgccgcatcaacagacgggcctcgcgtggatgcagcatctcttcagtctgcagaccgactaccaggtccgcggcgccatccttgcagacgacatggggctgggcaaaaccttccagttgctggcgctcatggcctggttgcttgagaaggacgccaacatgaatcccatgctggtggtcgcgcctgtttcattgctggaaaactgggcggaggaagccaacaagttttttcagccgggggcattgccgctgttgactgcgtacggcgacagtcttgccgagtttcgcgtaccacgcggccagatagaccagcgtctgcagactgaggatggcctggtcaagtttttgaagcccaactggattggcgatgccaaggttgtattgacgacgtacgaaacattgcgcgacctggagttttcgttcgctgcgcagaagtggtcgttgatggtgtgcgacgaggctcagcgcatcaagaacccagcagcaatggtgacccgggccgccaagaagcagaacgtggcgttcaggattgcctgcacgggcacgccggtagaaaacacactggccgatatgtggtgtcttttcgactacgtgcagccgggcttgctgggtgcactgaacgattttggtgagcgataccgcaagccaatcgaggcaaagacggacgaagaaaagtcccgtgtcgaagaactgcgcgctcgcatctcaccccagattctccggcgcctgaagaccgaggtcgatacgggacttcccccgaaaatcgtggtcgacgactgtcggcggctccccatttctagcgttcagcgcaacctttatgcgaaggcggtggatggcttcaaacggcgaaaagagcccgaccatacgacgccgttcaaaaatcaccttggattgcttcattatctcaggctggtgtgtaccgacccgagagtgcatggcctgagcgtgttcaagccggagccgatgggcgactatcgcgcgaaatctccgaagctcgactggctgctcaaacagctctccgaaatcagggcgaagggcgagaaggcaatcgtcttttgcgagttccgggagattcagcgacttctgcagcactacatcgaagccgagttcagctatcgtcccgacatcatcaacggggacacgagtgcggcatcgactcacgtcgccagtcggcagaagagaatcaaagcctttcaagaagcgccgggcttcggcgttttggtgctttcacctgtggccgttggattcggtgtgaacattcaggcggcgaaccatgttgttcactactcacgcacctggaatcccgccaaggaagaccaggcgaccgaccgcgcgtaccgcatcaatcagaagaagcccgtctacgtctattatccaacagtatgggcggacgatttcacgacgttcgacgtcaagcttgaccagttgcttgctcacaaacgagggctatcagaggacatgctcaacggtgcgggagacgtggcgccgggcgatttcaatatcgcagacgttgtgccgcattcacagacgagcgacctggatgaacgcatcactcttgacatggcgcttcgtatgggatggcagcatttcgagtgtcttatcggcgcactctggagtaagcgtggattcgattgctatcggacgccgggcacgaatgataacggtgtcgacattgtagctatcgatgggaaacgaggccagcttattcaggcgaagaccagcgggattgatggtacgaaactcggttgggacgccgtaaaagaagttgtggcgggtgaagcgttctaccgacgcaggcacccgaatgtctcgttcgaaaaggtctgcgtcacaaatcaattcttcaatgcgcaggcacaagagaacgcgattttgaactcagtagaattgattgaccaggcgtatctcgccgacctgcttcggacgcacgaaacgaccatgcttgaggtcgaacgaatgctcttcgtcgaatggcagtcggcggaccttgcggattaa

SEQ ID NO: 11082 - DNA, 1947 bp, Geobacillus sp. PA-3; identical to SEQ ID NO: 10675

SEQ ID NO: 11083 - DNA, 672 bp, Geobacillus sp. PA-3; identical to SEQ ID NO: 10255

SEQ ID NO: 11084 - DNA, 1281 bp, Geobacillus sp. PA-3
atgaagtatgagtatgaaccggtattgttgaaaaggtggttgcgcgagccgcgcccacctcttttggagaaaacaatagaaaacagcaacgagaaatatcgaggtgtgctcgaacgactgtccgaccaatttgcagggttagtccatgcgccggcttcggcgttccagcaatgggtcaaacagttgtcgcggcgggaaaagcttctcttgccaaacttatataaaaaagagcttccggaagagattaaaaaagcgatgattgatgtgattcagcaacacgttcagcatgagcgccgcctttttcgtgtgttggtcgatgttatgtatgaaacgtgtgatttggatgaaatttggaagcttttacgctatgcttatgcctcccatatcgaaaaaattgaaaaaagaatggaaaaagaaaagagagaaaaatggcggcgttatttgttaagcaaagacccgattgtatatttggcgacggaggtgtatgaaagtgagaaaggcattttagaggaattggagacgttttatttaacgaaaaatttcccgctgtttaaacttgtgctgatggaaattttccagctggctgatgaatctttttttctcaaggaacaagatttatatcgggaaatgttcgtttcttccacaaatgaacagcaacaaaaaatggcgcatgaactaattaaaaagtgcaagctgaaccacgtcaaaccgctcgggagactgatattcgagaagctacaaacatatcggagaaagccgatgctatggaagtatgtcggggaagaggaaaagcgacggtttgcccagtggattatgaaactggaattgaaagactttttcggcggtgtgaataaaaatcatgaacgtttccaatattgggagaagtttattccaaagttggaggatgtcgtcgtgacggatgaacgcacgacattaattatgtattttcgtgacgttgtcattatggaagtgcttggaactggagcggtttatatttaccccgccgacgtattccaacgccattttcagccgaaaattgaccggatgcttgccgaacgcgagcggtttgtcaacaaggcgtggctaaaagtgcgggaagtgaaacgaaccgagttgatggatagaaatttgacgattccgggcggctggctgcgccataatgtcgggtggcaatggaaatttgatgaatggcttcgccgcgaactgggctgggaggtaagaagggatgttcttcttcaaaaagaaacagaagatgatgaaagcagtcttgacgccgaatga

SEQ ID NO: 11085 - DNA, 2625 bp, Geobacillus sp. PA-3
atgttcttcttcaaaaagaaacagaagatgatgaaagcagtcttgacgccgaatgaagacggggttcatctttcgtttcaactgcatgatgggaagacagtcacagagttgcagctgccgatggccaaagaagagatcgaaaactactacaaacttcaagggtttccgcagtatatcgcatgggaagaactttacgattctggtgtgctcgtcgattccactttgccgtatcgcgagtattatgaactgcttaaggacgaaagtgccaaagaggtgctccaacatttagggcttcctaatgtcgaggagcaagtgagcggaaagctctcgctccgttcgttgccccatgaagcggacttagttttgcaactgtttgatgcaaacggacgcaacttagaccggattgggaagcaggctggggcgatttacgtgctgccagatcgtctcatgttgctcccggaacgcgtatatcggttgaaacaagcacttttggaatcatacgaatcaggatacgaaaaaatcggcatttgccaacagctagccaacgaagcggggattgaacttgagaactttttgcaaaacgaaacatatcacgtcgttgatacatacgatgtagacgtcgccgtacaccgccatgatcacatcgagctcgtcgtcaaaggacgagatgaggaagaaacacgccatcttcaacaactacaacgggtcagcagcgtaaaaaaaggtcatgggcgcagccgtttcgttagcacgaagcaggttcatgccgatatgatgcatttgcagcaaaaacggcatattacgggagaagaagtgccgctgtttttggaaaatccggccgccgtcctgcctgagcacgattatttatttgatttggatcagttttcagaacgggttcgcggtctcatcccgattgaacgggtgcgtcctttttttcatgagcggaccggaatgcaatggtttgatgaggagagcggccatgccgtcccatacgatgaggcgtttttacgggagctgatggaacaatatccggaccaacaatatgtagaatacaacggaaaatggatttacctggatccgttactgcgccgaaagttgctgcagctgccgaaagacgccgatgaagcgttgaagcggcggtatattcttgatattaaagataacgaagaacaacttgaatacaagatagacagcgtccgagagacatcatttcggcgctatccggttccatccgagctgcaagcggcgctttttccgcatcaaatggaaggctttgaatggctatgtcatttggcggagcaggaaagaggtggcctgcttgctgatgatatggggcttggaaaaacaattcaagtcattgcgtttttactgcatcaaaaagcaaatgggtcgttgaagccgacattgatcgtcttgccgattgcccttattgagaactgggtggcggaaatcgaaaagtttgctccaagcttgttggacagtttatatattcataaaggaagtgaacggctggcttcgtcgcaactcatttcacagtttgatatcattttgacaagctatgacacgctcaaaattgaccagctgttgttagggaaaattgaatttcaggcgattatttgtgatgaggcacaaaacattaaatcccacactagccagcgctcacgcgccattcgcgccatgcaggggcgttttcgtttagcgatgacgggcacgccggtcgaaaatagtttagacgaactttgggcgattatggactttgtccaacccggcgctttgggctctctaaaagaatttcgcttccgctatacagaaacgtcggactatgatgcgctgcttatggccatccaaccgtattacttgcgccgcacaaaacaacaaattctcgatggccgtttgcctaaaaaacaccttgttccaccaatttatgttgaggcttcaccaatacagaaagaaattgcccggtcaatgttggccacaaaagagagtggtcaggtcgccattttgaatatgattacaagacttcgccaactgtatggccatcccggcgcgatcattccgaaatatgaacagctctcttacaaagaagtgccgaagctgaaagaaacgatgcacatcattgaagcgattcggcaaaagggagagaaagcactcatctttactgaatttcgcaaactgcactttcttctaaaacgaatctttatggagacatatggtatttctgttccggtgattgatggcgacacgaaaaatcggcaattgattgtccaacactttaacgaaacgcaaggcttcggtattatgattttatccccaaaagcggccggcgtcggcttgacaatcacaagtgccaaccatgttatccattacacacggtggtggaatccagcggtcgaaaaccaagcaactgatcgtgcatatcgcatcggtcagcaaaaggacgtgtatgtctaccatattattacgagggacagttctcactttccgcagggaacagtagaggaattgatgcatgaattgcttgaaagcaaacgccatttggccgaaaatgtcattattccgtttaatataagcgagatccagcaggcagtcgctgagaaagtggtggagcaaaggcagcttgtgtaa

SEQ ID NO: 11086 - DNA, 2067 bp, Psychrobacter sp. P2G3
atggatttgttaggtttagctcaattttcgcaaaagttctttattttgccactatcgatgtgtgccttcgttttgattatcggtacaatcttttattttaattacactagacctgctaaattactgaagatcaggctatcaaagctggctagcgatttagaaaagcttgataaagaatctatgactgataaagattcattagatgcaagctttaccgatgaccctgctttgaaacaagcttggttaaattacaagcacacctttcataatgtttatgaagtggtggacggtgaagatactctagctcattcacgtgcaactgcgcctagcgagatatttttctctgaatcagttgtagttgacgtacccctgaaagtagaattttataaacatttacccggtatgattaccggtattggtattattgcgacctttataggcttactatctggattattagcatttgaccctgcgggtaatcctgacaaggttcaagatagtttagatttgctgctaaacggggttgccgaggcctttatggcttctgcagtagctattctcgcagctatggttatcacgtggcgtgagaaatcatggcttagacagtgttatgcacagttacaacgactgaataccgccattgataatgccttcactcctgatgatagtggtgaagaatatctagccaagctacttaaatcatctcaagcaaatgaggctaatgctcgacaacttaaagatagtctggttaatgatttaaaaaccatgatgactaatttggtcgaagagaataaaagaaatcaagctgcctttgcaagtcaattgagtgagtcttatgctaaaacaagccagtcgatggcaacacagattggcgagtctattacagataacttgcaaggtcctttagataaaattgcctcgagcgtgcagcaggtcagcggtgatcaaggttcggctgtgcaagaacttatgactgatgtcctaaccgcatttatgagtaagttggaaacgacattcggtggtcaaatgacaggtatgagcgacatgatgactcagtctgttacggccatgcgtgagatgcaatctggtttctctcaattaattacagatatgcaaactaacagtgaagtgtcgactaaaactttagaaactcaaatggcaaaaatgatggaagatattcatcaaaagcaaaatgagatgtctacccaaatgaacgaaatggtagaaaatttatcagcaggttcggctaagattggtgatcaggggctatatgctgttgagcagttaaacagtaaggtttcagagcttgtatcgggtttaggtacttcaatgtcagagttgctatcaagtgtcgcagagcaacgtatcgagcaggatcgccaaatatcaaataaccaacagaaattgcatgagcagtcgtctgtaatgattgatagcttaggcagtgaaattaaagagctcattacgcatagcaaagaagccgttcaaactcataaagaaaacatccaaaaactctctcaagtgaccaccgatagtatcactggtatgaataatggtgcagaaagaatgcgcttggctgctgagcagtttactacggctggtagctcgctaagcgcagtgactggtaaaacatcagaacttattgcacaggttaatacgacttcgaccaatatgactagtgcaagcagtaatctgattgagttgataagagattataaaaactctcaaaacagcgttaaccttgcaattgaaacactagaaactctcattcagcagtcaaagtctgaagctgggatgagtagtcaaatgcttaatgatatgcagaatatgactacagctttaagccaagtgaagatggagatgcaagagtatttagcagaagttagtgatgttctagtgaagagctttgatagttttggtacttccgttgaaagtagtctaaatcaatcgctattgtcttttgacaatacacttgaccaagccgttaaacgtcttgcaacaggggtagagggtttaggtaatgtggttgaagaccttgaagatcttacgcaaaaaaccagacgctaa

SEQ ID NO: 11087 - DNA, 732 bp, Psychrobacter sp. P2G3
atgattggtaataggtacgctaaaaaacctcgttcgaaggatgagggtgaaaagcctttctggatctcatttgctgacttaatgacagcgctaatgacgctttttttggtagtgatggcggtatctttaatggtagtcactaagaaaattaatgaagcaacccaagcggagaaagaacgcagttcagagatcttagatatctgtactagtattaaagacgaccttactttaaagaatcagctcatcacagtagactgtagagagaaccgtataaattttggtgaagcaggtcgctttgggcataatgattaccgattgaactcagagggtatacaggctctaagtgctttggtgcctgttgtcttggaagctgccaacagtgaaaacggcaaaaaatggtttaaacagattgtgattgaaggttttacagatactgatggttcatacttatataacttgaatttaagtttacgtcgctcggaatgggtgatgtgtagtttattggatcccacatttaaccaagaactcactttaactaatgagcaaaaaaaccaaatcaaacagctgtttctagctggaggtgtttcattcaatgcggcaaaagacagtaaagaggcttcacgtcgcgtagaactacggatgcagttttatggcttaaaagaaaaagacagtgctgaagcgcagccaatttttgtttcagcccctattgaaacctgtcagttggcaaggtga

SEQ ID NO: 11088 - DNA, 1422 bp, Psychrobacter sp. P2G3
atgagtatagctattttaaagcagaggctaaatcaaagtatcgataagttctctgaaccggcccagttgcataacaaatttgctagaccgaataaactaattaagaccttaggccttattgaacgtaagtttgatgatatggagaatgcccagcctatcgaagaaaaaatggttaactcaattttaaagttagaaaagcatggcacagactatctaacaaagcgcgattggaagaacctagcttggtcattaagtaagaaactgctaagttatgaggataaaatacttttcacctttataggtggccagcttattgagcagtttagcaaaatggagcctgagtcactaaagcctatttatttcccgctgttgtacggttattttgcagtagaacaagacgagataaacaaacgacccaataactggattcagctcagaaatatcttaaataacaatcgctctacattatttcaggccacgcttaagcctaaaaaatggcttaccacgttaactgctcatcctgaagtactctcactagatccttcaaaacgattcattcgtgattttttacagaatagcgatgacagcagagtcagtaatcagttagaaagtttgagcattgcaccaaacagctggttttgggacagtttggtcaactcatctatcaagtctgttaagaccatgaaagaagaggattactttaaagtgattccacgttttttactgctattagaaagaaatcctatctataccaccgctattctaacagctctacttgaacgctatgctgctacctcaaagcgcgcggtagtacacggagctttaaagcacgtctgtttgacgcaatgggataatccgcaatacgactcatcagcaggctggcggaatgtcagttcagacactaaaaaaatggtgattcagtggtttgtccgagccgacttagaggctttctttaaattattcagccaaacagctgatgtcgaccgctttgattattggattaaatttattgataaaatctcgttttctcagatatttttaggcccagcagccgtgcaatctagacatgctgagcatagaaagttcagagagcttaatcatggcagattaaaaaatattacgggttctactcctagtaataatgcttttttactaaaaattgataacgtccatattgttgatttttcagatactggaaatgcttgctatggatatagtgatttaccttttaatcttagtaagaaaaacataacggttcatgaattaaagagcaaacagcattcaatatttaaaagtgattctggtcgagcaatgagtttgagtcattcaggaaactgggaagcaaaatttgatgaaaaactcgctgagttgggcgtctttgcaagccaatccagtagtctaaaatacaaaaaacgttattaa

SEQ ID NO: 11089 - DNA, 3228 bp, Psychrobacter sp. P2G3
atgaaactagcgttctggaaaagaaaaaaatccgttgagcatgcttctgaagaagatgcagtagaaagtattctgcctttacagctgcaatacgatgatattggcttaaagcactgctatacatctgcagctaaaacggatgcagatttctattgggagagcttggctgacgaggaggttgcctatcagtcagatgataactatatcttaccatgggaagagctttttcagatccgacaagactctgagcatgatggcgttattaatctgctcaacctgccgttatcaaatgatttatacccagtcattcgtagtgaaaatggcctcagtgattcgaatttccaaattattttagatggctggtgcgataacaacaaggttaaattcaaaggctcagtcaagcgtacaggagcaatcattagtcttgctagtaaagagcatctgttgagtgaggcaacttggaagctattagagaaaatcaaagaattctctcgtgtcacggataaagataaatcattaaaccaaaagtattgggcgcaaatacgcagtttagcgaataaaagtgaggcgaacttagatgagtttctgcgtaaaaccatcgtacttgccccagagcagcttcaacttaaccttcgtaaaaacttagttagtacagagtcagtgatagaggtacagcctgactttaaagattcaccctcaaattggctacaaacttttgataaatataatgacgttcaaaacgaatatacgatcagcttaccagaaggtggtttggcacacgttatcatcgatccgcaagttaaaaatgtgcttaatgaaattaagaagatgccaaatcgtcggatagctggcgagcgtgcacagacgtttttacataatccttttgctcagttaggagaagatgccgtcgaggttatctcttcagagggttttgagcaatccaaagaagaagcagaaatctatagctatcgtttactaatagataaaacttataatgaattatcacattttagtttggctcaattaacattgcatgaaaactcgagtcgagaacaagatcctattcttttggaactctcaaatctagagcaagctcaacattttatcgcaacttatgagcgatcatcacctgttttcttatgggcgggctatagtatagatagaacaaactacttagataaccagatggaagagctgaaaagcgatctagaaaaaattcaacagtatgatgatgaattgcaagctaaaacagtgctagatttaagcaattacagcgatagagtgattggtattggtgaagctgaaaaactgagctctgaagccattcaaaaagatagtggtgaatccgaatggttaccacagaattttattgatgaatcagccaacttatcccaattccctttcgaaaatactgatgccagcactgaactgcttgagcaacgtatccagcatgcagaagcagaaggggaggattttgttctacacccagacagtaatgtatctattggcttagaagatgcaaaaaacttacttgatgagcttcgtgagtcaaaaggtgagggcacagctgaaaacgatgtagaacaagagcagccagatattgatgagaaaaagaaaaaatccaccttattaattgccaataatatcgatgaggctgactttactaagaagagagctgaaattctgacttttgatgaaagtaatcgccctccggccagattgccctcaagttttagaagccaagaatttagtctaaaaaagcatcaagaatatggtatcgcttggctacaaaacttatatcagtatgcgccaattcaggtaagtggttgcttgttagcggatgatatgggattagggaaaacgttgcagttactttgttttattggtgagtatttagaaaccacagaagataaaaagcccgcattagtcgtagcgccagtttctttattggagaactgggaggctgaaatcaatagattttttagcgcaaagtttggcaaggttctaagcttgtatggagataacttaaaacagcgaaaaataccgaagcacttaatatcctctcaattaagaaatgattacggaataacgaatttgcttgaagaaggttggttagatggtgcagatatcgtattgactacttatgaaaccatgcgagaccttgagttttctttaggaagagtagattggagtgtcatgatatgtgacgaagcccaaaaaataaaagtgcctactgcaatggttactaaagccgctaaagcacaaaaagcagactttaagatcgcttgtacaggtacacctgtagaaaactcacttgttgatttatggtgcttgtttgatttcattcaagaaaatctaatgggttcgcttagtgaatttaataaagagtatcgtcgtcctattgaaaagaaagacgatgaagacaatacgataatagatgagcttcgtcaattgatagagccacaagtattaagacgtatgaagcatgatgtcgctgagttgccagcaaaacacgaagttaatgattgtaaaaatattgaaatatcaacgctgcaacgcacactctataaacaagtatcaaatgattatagaagtttatctgagcaaggccacaaaggcgttatgttaaaagcgttacatgacatgcgaatgatttgtgctcatcccctaaagttccaacagcaagcgaatatcaatgattcgcctaaagctgaatggttaataaagactttagagaccataaaacaaaaagatgagaaggtaattattttcactgagtttagagatattcaagtctttttaaaacgccttctccttgagcgatatggattaagcgttactacagtgaatggggattcaaatactaacagtagagtaggcttaactcgacagggcattattgataagttccaagaaacggatggtttcaatgtgattattttatccacggtggcagtgggttttggtgtgaatatccaaaaagctaatcatgtggtccattatacacgaagttggaaccccgctaaggaagaccaagcaaccgatagagcctaccgaattgggcaagataaagaggtttatgtgtactatccatctattgcagcaactgattttgagacgtttgagattaaactggataagctactatcaagtaagcgtagtcttgctgatgatatgttgaaaccaaacgtagagctcactcaagaactgattcagtcgatttattga

SEQ ID NO: 11090 - DNA, 2148 bp, Chelatococcus sp. CO-6
gtggtgaagttcttcattagccttctgcgtcttgcatttttctgggcgattcccgtcttggcagttgcctgcaccgagatcttttttccgcttgtcaactataggctggctgcgagcaccatcgtcgatgctatccgcgggaatatcgatctcgtaagtgagccggccttcgcctacgcactggccgcaattctggcctgcttcgcggccggacttgcagtcgcgttcttcctgctccacgtcgtgccggtgttgttcacgctctggcgggcaacgcggctggtctccacagcgcaaggtcgggataggaaacgcgcggaaacccgcaggagcttcgcgatcaatttcgagagtctgaaccagagacttgagagcaactggctgatcggccatgcctggatcgagttcgaggagacgctcttcgacaaggacagtgaccgagcgatcggcaacaccgtacggccccaggtcttcttcaacccggggctcgcgcgagagcggctcggcggcctgaagatgatgaatgctgtgccgggatatttcgtcggcatcgggctgctgctcaccttcgtgggcttggtcttcgctctctacaaggcgggcgccgcggcgagcgcaggcgacgcggacatcatggccgcagagatggcgggtctgctgcggatcgcgaccttcaagttctcgacctctatcgccggcctcgctgcctcgatcgtgctgtcgatatttttccgctggtttttcatcctgatcgagggttccttcggccgctttaacgccttgctggagcgcggtcttctctatgccgcaccacaggcgatctccatggagatgagccgcaccatgcaggagcaactcgtacaactaaaggacatcacgcagggcgagttcttcgcccgcatgggttcggagatcgcgccgcgactgaacgcggcgatcgccgatgccatggcaccagtgaccgagcagatcggcaatgccgtcggcaacctgtctgcaagtagccaagacggcgtgcagaagatgctcgagtccttcactaaccaacttcagcacggcgccggaaccgaaatgcgcgaacttgccgcgacgctgaaacagctgcagatgtctatggtcgagatgcaaggcggcctgcgcggcagcggcgacgatttctcggctaagctgtcggaggcagctgagaacatgaaccgcatggtggaacgcgccggccagagttttgaaacaagctccggtcagagccgcgatgccctgaccgcagtcgtcgaaacccttcgccagactatggaaaaggccaacgctgaaatggatgcctcgctcggggctgcagcgggcggggcgtctgcgaagcttgaggcggcaatgggtctcgtcatggaaaagctcgacaggcagatcggccagatcggcgaaagcctgacgaacatgcaacgcacgatgggcgaacagggagactacacgaggcagcagatcgaggcctccgtctcgcattccgctgaaatccagaaatccgtgctggctgatttgcaggaaacggtcggatcggtgtcagcacagttgcgcaatgcggtcgaggaggccctcgcctccgttggccagcgtttcggtgagctgtcgacatcgatgcgcgcgatagaaggcgcgctgatgaatcagaaggtggcactcgaaacgactgctggagaggcacggaagacggcgcaagccttcggcgagagcgcgacaagcgtgcgtacagcgaccgcacccttggtgaccgtcagcgacaagttttctggcgcgactgaacgcatggcgacgggcgtcgagtcgacgttaaaggcgattgaggcggcccgggatgcgattgcgaccctcgccgctggcctaggcgctgcaaacgagaggtccagcgacttctggacggaattcactgcaaagttcgacgcggtggacactgcactcggccgagcggtcgagacgctctctcggtcgacctcagagcagcaagacaggctgcagagccatgtaaggggtgtcgatcagggcctgtcggaagcgatcgggaaactgtctcccttcctcgcccaaatcaaggacagcgccgaggccatcgcagacagcctcgaggccgcgcatagccatcgcgaggcagctcgcgcatga

SEQ ID NO: 11091 - DNA, 921 bp, Chelatococcus sp. CO-6
atgatcatcgcggacagtggtgacaaagacaacagccataccgaggaggacgaaaactacttcgtctccatgaccgatatgatggtcggcatcctcttcatcttcatcatcatgctgatggtcttcgcccttaattttcggcagttaaccgacgaaacggtcctactgacagcagagcagcaggagcagctgaacagggccaacgagctcgctgaacagatcgccgagttgcgaaggcagatcgccaatgaaatcacagagctcaacaaggcagaccaggcgcgcaacgagcttctggaagccatcaaggcgaaactcgacgttgtcggactcaaggtaactattgacaaggataccggcgtcctgcgactggccgaagacgccatccgtttcgcgccggagagttcgcgcctcgacgccgaagcgcaacgcaatgttgatgcggtggccaaagtcctgctcgacgttctgccggactacacggcttgtccaggcgggatgacctgcaatccctcgaccggatatgttgtcgaaacggtcttcattgaaggtcacacggacaagaccgggtcggacagcctgaactggcagttgtccaccgagcgtgccgtgaacacctaccgccggatcgtcgacaattttcgaggcttgcgagcgttagtgaactcgcagggtcgggaaatcctgtcagtttccggctacgcctatacacgaccggcaatcgaacaggacgacgccgaaggctatcggatcaaccgacgcatcgatctccgcttcgtcatggaagccgaccggcgcgaaaggctgagcgaggttcttatccttctggaacagatggagaaaaaggtcagcgagcttcagaatccgatgggtgccgcactcgatgcaccgacgcagcccgagcgtgtggtaccccagtga

SEQ ID NO: 11092 - DNA, 1299 bp, Chelatococcus sp. CO-6
atgctgagagcggcgagacggctgccggcgatgattggcgatgaaccttccgccaaggactacgacgaggtctcgggtgacctcgcccgccggctggctcgcggagagcggctgactggccgtcaggcgcgggacggcgcatggtgcctctggacgacgcgtactcaactcgccgcggatgccgcaacactctccccgttcttggagcaaatgcgcagtctgaggcacaagggggcgtcacgtgcgctcgcgctgtcctacctgatcagttttcaccccgaccggcccggcctccgggcggtcgctggtgccttgcgcgacctggcgagcgccatgggcaagcccttcgacgacctgaacaaacggtttcacatcttcgacgtcgatgagggtcctcgtcgggtcggcgataccgccctcgccgagcgcaagtcgccgcgccaggttcttgaggagaacggactgctgatggaactggtcctcggcggcggctatgtcgagccctgcgcgcgccgcgtgctggagcgtgccgtggaggatcgccgcctgcagccgggtgatcgactggaattcatcgagacgatctcggtcaagagcggcacgcggcagctcaacttcgcggcgcacaagggcctggtggccaatgcgcttctgcttcccagccgtgatcggccccccgaaaaagccgtcaaggatcagatcctcaacttcctgatctcactggaggggctgggcgatccacgaacgagacccggcaactgggtcaacgcgccggacgctcgcgacgtcgcgatgttgtggctcacggaacaggcgcttcgacaattcctcgatgttgtcgaagcggttaatccgaacgagaactggaagtaccgccgccgcttctgggagacgatgtacggcaacggcatcatcagggaggcctgggtcgtccttgacggtcagggagctgcggaggcgcatcggaagtttggcaggaattcgcctttcggcaggttccgtggcggggttcagtcgggccacgcggtattgctcctaaggatcggccgtggcgtctgcgccgaatggagctacagcgggcaatgccggttctgggatgacgcggaacgtgctggtgctccgaagctgtaccagcgcgagtacgacacggagttcctgaagaatggacgtcagtatgccccggtcctcgaaattcgacacagctcgcacaccggcccgaatgcctggcagcacaaggcggcagagcagatcaagatgatgaccggcgagcgcctctccgcccgggactacatgctgtga

SEQ ID NO: 11093 - DNA, 2004 bp, Massilia sp. WG5; identical to SEQ ID NO: 10891

SEQ ID NO: 11094 - DNA, 705 bp, Massilia sp. WG5; identical to SEQ ID NO: 10892

SEQ ID NO: 11095 - DNA, 1737 bp, Massilia sp. WG5; identical to SEQ ID NO: 10893

SEQ ID NO: 11096 - DNA, 3855 bp, Massilia sp. WG5
atgagcatcttcaacatctttaaacgtgcagcgtcgaatacatcggccgctccagttctgaaaacactttggtcagcggatggcgtgcgagtcgagttttcggacccattgcccgagccgactcaggatgccttgttagacgctttgtctgctgctagcgcggaggagtctgtcctaggcgcttatcttgctcagcttgtctccgatgagcaatgtaagctgcaacgcgatgctgctatcgtacgttgggaagacatctaccagcttcaaacctcggctgagcacgtcggcgctctcgcgttactcgacctgcctccggtaggccctctgcgaccaatcatcgattcgacaggaacgctatcgggtcgagacttcgaactggaggtcacaggctggactgatgggagtaagcaactgcgcgtcactgagctaatcggtggtatcgcgacggtggacggcagaccgcagatgctcactcgagcagcttggcgaacagcatcggaaatcgcaacatttagaagtcgggatgacggtgagcggtcacagaatcatcatgaacttgcttgggcccgtattcgaagattcgcagacgaagcccaagcgctgtacgcgaacccttatctcgaaaccacccttgttctaagccccgagaccttgcgtcttccgcagtcaaaagccgagacgccatttgggaaagtgttgacggtcgctccaacttttgatggtgctcccgacggttggctaactgcgtttgatggctttaactctgtgcaacctcactacgacttgacgcgaggtgcgggacgggtgcgtgtagtcatatccgaaccggttcgcaaagtccttgaggtcatcaagcgggagatgccagggcgccgggtggccggttcaaaggcagagaagtttgtacacaatcctttcgccttcttgggtgacgccgcccatgaggtattcagagaggacgaattcgaagccgatagagctgaagctggtgcggttgaagccatctttagcctggtaacgcgtacttccaacgccagggtcgatagtgttgacctcttggtcactgagcactatgccaatggagctgcttccactgattgcgaagttttcaatacgcctgaggagcttgaagaattcctctccgcgttaaagcgtgcgctcgaagacgatttgcaaaaactcaagtggggcgagtacgacctgaccatcgacggacattgtactgtccagttagagcaaggagagcaagttgcccacgtctggcgcatgcagccggccgagcgcatcgacttcaatgatgtctacgaaatggaggggtatagctcgcgtatcgaaggaattgggcctgccagacccatctatgtgccggtctttcagaaggacaaaacggaggaggagaaggagggtgtttggctcccttctgacttgactcctatggttcgggttacgttgcaggaccatgaaggtcaggtagtgattcctttgaccaaagaatgggtcaagacctttgaccagcaagttgagcgagcagagctagatggaagccctagtgttagcaatccgagcttaccaacagcgattgcaacaccgcaggcgcgccagctcgttgatagcttcaagagcatggtcgatgcgcaggagcgtgttcgaggtgacgtcgcgggtgcaccaaaagacaaaaaagggccgcgtcagacgctgctggtcaagacaaatttctacgacgtcgattacgtggaagagcggcgcacgtccttagccttaccggcgggttggagtgccaaactcccgcggtgcctacgcccgtccatcaagctgaagcagcaccagctttacggcattgcttggttccagcatcttgtttcgaaagcccctactgagtgtcgtggcgctcttctggcggacgatatggggttgggtaagacagtccaacttttgtcagttctggcttggtattacgaacacaatcccaacgctgcaccgtccatcattttcgccccgaagagcctcctcgagaactgggaaggtgagtcaaagaagttcttcaatgactcgttcccagaagttcttgttctctacggagacaagttaaaggagcggaagcagccacttgggctaatcgacgaagggcttcgtgataagggaatcgtcgacctgttgaggccaggttgggccagcaccgccaaggtcatcatcacaacgtatgaaatgttgacctcctatgagttttcgttagccaagcagccatttgcttttctcatctgcgacgaggcccaacgtattaaaactccgggcactttagtgaccttggctgccaaaaagctcaaggcggactttcgtatcgcatgtacaggaacccccgttgagaactcccttgctgacctatggtgtctctttgacctggtacagcctggcttgctcggggcgctcgaagagttcgggaaaaagtaccggaggcctatcgaatgtgatacggaggagcaaagagatgctcttcaacgtctacagtcattgattgcgccgcaaaccctgaggcgcacgaaagcagacatcgcgagcgagctgaaggcgaagcttttcgcgttcacatcagttaaagaacagggactcagtttcaaggcgcttctggaagagaccgagcggcttgagattcctatgactgagcaccagcggatactgtacaagggcggcctcaagaagctacaagacgcaaacgctgaatcgaacagcaaaaagcgagcgcaactgtcgtttggagcactgcacttgatgaaggcggtatgcgccgagccctactgtctaccaggtacgaagttcttgatggacaagtcagggtttgacgtccacctcaagaactcccctaagatgaagtggcttttggaccggttggctgcggttaaggctgctggcgaaaaggctattgtgttcactgaacttcgggaagtgcaggcagccctgtactacttcctcaacaagacattcggtatcaaaccttctattatcaacggcgacaagcagggaaggcaggcttacattgataagttcactgcttcgcaagggttcgatgtcatcattttgtcgactctcgcagctggcgcaggactcaatatcacggcagctaaccacgtcttccactttacgcgtgcttggaatccatcgaaagaggcgcaggctactgaccgggctttccgcatcgggcagcaaaaagacgtttttgtgtactgcccgactatcgttgctgatgacttcaacactttcgaagtgcgcctcgaccaaatcttgaaacgcaaggctgggctcgcgggagcgacgcttgacgacggcgggctctcggcaatgctcaatggttccggaggcgacgtcggctttgcagacctggtagacaacatcggcattggcgagcgggtagtaaagcactacttgacgatggacgacgtcgaccgtatggatggcgctggctttgaggtgttctgttgtctcctatggcagaagcttggcttccaggcccgtatcacggaaaaacgccgaggggacgggggcgttgatgtcgtcgcaattaaagggcgcaagggcgagctacttcagtgcaagagctccaaggcgtctagtatcggctgggaggcaatcaaggatgttactggtggggctgctggttaccaagtcaggtaccccaacaccttattcacgcgcgtggccgtgaccaatcagatgttcacgcagggagccatgacgcacgcagtcgagaataaggtccaggtcgtgacgcgcgcaagtttagaagagttacttggcctatatccaacgacaaaccatgagttcgacgaagctcttcaggcttgggcgatgaactaa

SEQ ID NO: 11097 - DNA, 1461 bp, Ruegeria sp. CECT 5091
atggattttgaaagcgtaggcgtctgggttcgggactttatcctgtcggcggccaacatgatcgttgacgagcactggcccggcatcatcagcgcgggtctttttgcagctatgatgctattcgtcatttggatctccctcatttcgtggtcgcgcaggcaagcgcttgctgccgcgctgagagacgcagaacgcgcttccgacagttcgggccatggcctggatgcagaagccctgagagcggcactcaaacgccggaagggcgcagccgaccgtacattgtcgactggattttcggaatattgtgaaacgcttacagttgtcggcaggggcgacgaggcgcggattcacaactcaattcgcccatcagcattcttgaacgtggatgatcttggattttctttgaaatctttgcgatgggttccgggagttttcgtttctcttggtctgttgttaaccttccttggtttggtggcagtgcttcaacagacccagggtttattgaatggcaacgatgccgcaacagtaagtgcgttgcgtgaacttctggggcaagcttcagccaaattcactatgtctttgagtgggctggcctgttccatcataatcaatttttgtctgcggtactggtcgaccagagttgaaaagggggccgattccttcgccgcttcacttgagaaaaatatggcgttcatcagcttggaggatctcgcagggaagcagctgagggcaatcgaggaccaaacagtacaacaggctgaactgaatacacatttggttgcgaagctgagcgagccattgaacagggtggtggaacagtcggtgcagaatgtaggcaccatggtcgatcaactgggaaaagacattacctcggggattggcggttcgttggactctgtttcagagaggatggaagctgctgcaaatgccttgtcttcaatcggagacgacctgaacctggcgggtaaacaatttgatgaggctctttcttcttccacgaagtccctgatttccgcactctcgcgtcttgaggaagtgtccgaaaagctgacaagcgcaagtggaatggttggcgacttggccccaacggtcatggaaacagtcaaagaaggaaatgcggcaaacttgcgggtagccgaaggcgcaaccgaaatggttcacgccgccaagactgcgatctcggaggagaaacaggtcgttttggaggcgatgctgtctatcaaaggcctgattgaagccttcgagagccgagcagccgcctatgatgggcagcttgagaaagcctttcagacctaccaggtcgaagtgggtaagacgatcgacaagctcgaagatcacggaaacggcgtacaggagaggttcgccgatgcgttgtctactctccaggcggtcattgaaaacgcgaaggcgttcgagccggaaagccagcccaagtcgtcggttgaggcgattgcagaatga

SEQ ID NO: 11098 - DNA, 1077 bp, Ruegeria sp. CECT 5091
atgaggcatgcgtttcgccagaggttgtcggaagaggaggaagaatccgtcttcgtttcgatgacggacatgacagtgagctttttgttcatcgtgatgattttgctcgcctttttcgccacccagattacgccaggggaaacagtcccgaaacatatgctcgatgaagcagaaagcatcatcgagcagcgggatcttcaggtcagacagctgcttgaggagttggaaagctatcgttcaggagaaccaagcatcatctctaagttgcaggctgaaaaagcgcagcttgaggccagagtgcgtgcgctggaagaagatatcgacgcaattcatgcagagttggaactggcggatggggacaccgccgtggcacgtatttcactgctccgaaacgaactgcaacgcttgcatgcgctcttagctgccagttcagacgagaacttgatcgaaagatacaataccgttgtctctttgcagagggccaggatccttcacgttttgcgagaaaggatcgttgcggttgatccctcgatcgatgtcagcatttcgcgcaaccaggatgcactccaattcagaggtgatgggctttttgcgtcaaattcaacgacaccatcgcgccaaggtcgggccaaaatgcggctcattgctggtatcctccaggaagtcatagcttgtttctctctgggagaaccatcgacgctgggcagtacttgcaacgaagatattgctgtaatcgatgcgttgcagattgaaggtcacgcggacagtgttggaagtgataatcacaacatggatctgagtgcccggcgtggtgcggcaatctatggcgaaatgattgcggccaacccgcagttgcttgggtttatgaacctgcgtgcacagcctgtgctttccgtgtcaggctacggcgaaggccgaccaattgctgatgaagccttacctggtggccgggatgcaaaccggcgtatcgacattcgtttcataatgttctcgccggtggatgaagcttcgataccgtctggtctggatgatctggcgcgcattcaaaaacttctccagggaggagaactcgaatga

SEQ ID NO: 11099 - DNA, 1311 bp, Ruegeria sp. CECT 5091
atgagcctggccgatcgacttgtcctcaaacctgacttcagtgttcgcgtcaaaggtggagccttggataaggccgcagaacggatcgcagaagcctttcctgggctcgagaaacgcgcgccagaggatgtcccgatcattcttcgtaaagtagaggaggcatataaggcgggaatttggcaaggtgtgacgtccggcgatgttggtatcgcggtttatgagcatcttcgagaaaagatcgaactcccacaggaattgcgccttttcctggatcaggaaatgaaggttgcaacgaacccgaccctgatcgatgccatgtgccggggatactttgtgagttggtcaaaacgagcggccaagacacgtgttctttcaaaccttttgcttgaaaaggcctccgtactgccgacgcgttggaagacaatattcgcaaagcacccggcctttcttgatattgaagatggcgcagagaagatggctgcacgaatggtcgaagccacgacaccttaccagtggctcaagtctgaaggtttacctgcccctcacgaagaaggcttgatgagagaaacccatctcgcatttctcaggcaaacccccatgccacagactgagatggccgtagacaagcttctgggatgggtaacaccgccaaaccgtccgaaactttttgacccttgggctgctgagactgtcgaaaaaattctatccccctgggtttccaccgactgccctcagaagctccgcgaattcaacctggaaaggctcgtgaataggttcggcgaccctcggactgatcgcccagctttttggtccatggtagggcagccttatcgacggatcctgctgaaatggttggctcgcaagagcatggaagcgattttcgatattgtgaccagggcagaaggaggatcggaacaggggcaccaatgggcaaatcgaaaacggttctggatgggagtctatgacaagggccgtattgaggaagcgtgggtcgcactcggcagcaaagccgtgccccatgcaaaggaactttatgctcgtacgggtgatccatcctacatgagctttggccaccaaggcactcgaagtgatacctgtctgctcatgatgaagatcggatcgaagacggttgtcgaaggctcgcatagttttcgggtgcatatttttccgacaccaactcgagcaactcctgagctttatctcagcaactacgatcttgacgatatcttgctgccagtgggccaccaggatgccagaaggcatgatccacctggccattggatggagtgggtgcaaaggcgggttttgtaa

SEQ ID NO: 11100 - DNA, 3216 bp, Ruegeria sp. CECT 5091
atgcatgagtttcagttcgatattgaagaaaatggccttcgagtacgaatttcacaacaaaagacaggattgtttgcacgctttcggaaacgggaacctgtagatctaaaaacacttgcaggcgctgaaagaacccttgctgttgccttttcgagcatccgtgctttggatcgtgactccgatcaccatgaactttcggctgattacttgtggctggatcactggatggtgtcacggctggatgacatgtcagcttccgtgcttgggataccccggaaactttctggtgtagtgttccatgcggaaatgcgaggatcccttgggagcgagagctttgctctgcagtggtggtgggagcgtgacaagcggcaaattcggctcaatcgtacgggtgcgatagtagaatctggcggcgttttcatgcgattgcctgcgcagatctatgacgcaatcttcttgtctgaagccttcgacggcggcaggcctctgccagaacactggcgcgcgctctcggagtttcgtgcggcattgggtgaccttgaagatgacgggttaacgcggccagaacgttatctggaaaaggtggaaattgtcgcgtgtgacaaggtggggttggctgtcgatcccgaggatccattgggatttgcgccgctaccatttgtatctcagcaaatccgacaaggagaaatggcgtccgaggtttccgccgcgctccagggcgatgagctttctgccttcaaagacgattccaaccgccgaggcgctcaaccagcatatcgggtaggagagaacaggttcctgatcctggacaagtctgttgtgccggttgtcgatgtgatttcgcgccatgcgagaggaacagaccaggagaagaggaatttcctcgaaaatgcagatcgcttggttgcagaagcgattgagcaagctctgatagatgagggtcggctgaacgaactgatgccgtctgccgatctggtagatgcggttgaaacagagttcgaaaaagcttgggctgaaacgcgggagtggactgatcgcgttatcgagatcaggaagtggaccaagcccgagatcgaaattcttgaaggatctggcacgtcgtggttgcctgatgacattgaagctgtcgttggtgagatcctgggtaccattccagaagaggatctggataccgtgttgaaggctctccttgctgcgcaggagagcggggatctggaggtcctgcttgaacaaggagttcttcctgtcacggagttggttatccaggcagtgagacggcgtctggaactgtatctcaatcgaatcagccaggatcaggcagaagaaggcgaggtcacggccattttgccggtgacacatgacaatttctgggaactcgaattccgcgaaaggttgcgcgacagaccttcagcaacggagcgagggttgcccagttcgctaaagaaatctttgtacgtacatcagagaaacgcctttgattggcaattgtctgcatgggaggccggtctccctggaatcctgaatgctgatgaacaaggtcttggaaagaccgttcaaacgctctctttcctggcatggttgaatgagaggatgacgaaaggtgaattgcctaccaaaccgtttctcattgtcgcccccacatccttgcttaggaattgggaagatgaaaccaggaagcaccttctgccgggtattttcgatgagccggttcgtctctatggccgcgaactcaaggcgtggcgcgttcagggtgaacggggcagggacattcaggatggtcgcgcgaaacttgacctctccagtcttgttgattgctccgagccgcgactcgtaattaccacttaccaaactttggcaaattacgcggtgacctttgcccaaactcctttcgaagtcgccgtgtttgatgaaatccagaatctcaagaacccatcaacgttgcgttcgaatgcggcgaaggctgtcaacgctgactttcgaattggtttgactggaactcccgttgagaatgctacccgcgacatttgggctatcatggatcagctgattcccggggctctgggtgcgctcaacgattttcgtatcgcctttgacattccaaagcagggtaacatgcaagagttgcaccgtgccgtgttctcatcgatcaacgggtacccggcattgggcattcgacgcacaaaagagaaagctgcatcggatctgccacccaaagtgagggtgctgcatccacgcatcatgccagagatccaagcgctcagatatgatgaggctcgtaaacccgggcaatccctgtttggcctcctgcaccacatcaggagaacatccttgcatccgggtttgttggaaggtgaagcgcctgaaacttttatccacgcttcagcccgtattgaggctgccatagatgtccttcgagcgatccaggcaaagggggaaaaggcgctcgtgtttgtcgagaacagggatgttcaagcctggtttgctgaactggtcaaaatcgaattcggcttgccacgcgtcgaaatcatcaatggatcaacaccggtgtcgcatcgaaaggaaatcacagaccattttcaacgccatatgcagcatgatgaaggtttcgatgtccttgtattggggccgcgtgcggcaggtacggggttgaccctgacagcggcaaaccacgtgatccatttgactcgctggtggaatcccgcggtcgaagaacaatgcaacgaccgaactcaccgcattggacagacccgcccggttactgtgcatatccccttggctatacacccgcgcctccagcgcggttcttttgattgcctgttgcagaacttgatgaagaacaaaagatccctggcagacagcgtactatggcctcctgaaagtgatgaaagcgaggtccgcgcgctttacgacgcaatcgtttccgctgaggaggaggatggtctcgcagcagatgaggggcttgttctctcaggccgcccggacttggaaacgcaggagcttggcgagaacatacttcgggtgtgcctgaaggggggaggagcctcggtcgtagtagccctggatggtgcagaccttcagcgggttatcttaaggccagagacggatgctgcggcaatcgtcctttctgacttcgacaatcttcctgaaggcacgaatgttccaacgtcaattctgggtgggtcagcgctctggccagaattcgtattgccggattga

SEQ ID NO: 11101 - DNA, 2061 bp, Phaeobacter sp. CECT 7735
gtgcaattcgaatttggcgatgaccttggactttttctgaaagacggcattatcgccctagcagaagccttgactctgtccgatagccgtcccggatatttggccggtctttttttgttactcactgtcattgcggggatcctttacctgcgtcggacgtcccggcaagtgaaggccgtaaaggaactggatgcccgagtgcgcaagcatgatggcatcgaagccttcgccgagggctatgacgaatttcgtgcgtcactgcgagaaaactatcggacaaatcgggatcgagaagctgtttgggaggcatttgacgaattcaatgaaacagtggttcccgatgacattgatggccctctgcgcctgcgaaattcgatccgacctgcatcattcctaaatgtagaagatctcgagttcggcccaggtatctatcgcatttttccgaataccttcgtgtcagcgggccttctgctcaccttcctcggactggttgcggccttacaccagttttcgcagtccctgaatgtgggatctggaggcatggaccgtgccatgcaggacttcatgcagattgcctctgccaagtttgtcatgtcgctggtcggtctgttctgttcgataatcttcacgttcttgctccgcgcgaggcaaaaccggatcgaagcggctctcaatcggctgtgtaccgggattgaacgtcggttggtgtttgtaagcctggaagacattgggttccgccaacttcgcgcggcgacagaacagcgcgagcatcttcgcgaaatcggaacaggaatgatcgcccaacttcgagagccgctcgatgccctgcctgaggccatcactactgccatctccagcaagatggatccgattttcgaccgtgtttcaaccatgggaaccagcaacatggaagggctggtcggcgacctgtcccaacaattgtctcattccgtcggaaacgccctcactcgggcaagcgattcactgggtgaagcaaccgaccggatcggtctgatggtagaccgcatgaatacctcgaattcgcaagccggagatgggctccgtgatgccctggacgagatggcgcgtgccataacggaaatgcgcactgaagtagccgcaagcgggcgtacagcgtctgaggcaatgaacgacggtgcagatcgtctgctctctgtcatgaacgatacgctgtcaagcatccgggacaataccggccagggggccgaggccatgagggcggctgccgatgagatgaaggacgcggccgaagggttccgaaaaaccttggaaagcgcaagccaagagagtgccgaagccgcacgacagcgcatggctgccagtagtgacgaggccggccaggcgatcacaggggctggccgcacgcttctcgacagcttcaatcagaccagccaggacatagccaagcttggcactgagatgggcgacgtgatcggtgaaaaactactctcgcgccttgaggacatcggcacccgtttgtccgagatggccgaagccgtgcagcgtggggcatccggagcccaaagcgccgcgcagggaatgaacacaggtgcaagtgctatccagggcgcgtccgaaggcttccggagcgccagccagagcctgacggccgcagccgaaccgattcgagcatcgcaagagcggatcgaaaacacccttcgccgcgccggtgacctggtcgagacggtttcggaaaccttgatgcagaattccgcatcagtggcggaaaacgcagcgcatgtactggaaagcgcccagactgcgcttggcagcgaacgtgaaggcatccgacggaacctcgaagctacccgagctgttatcgagcagttgtcggatgaggcagagaagctggaccagatcgacattatgctggggcgtgcgctcaaggaatacaatgcacagctcgactcagcccttggctcggcccaggatcacgtcggtcagatgcgtgatgctctggctccgggcctcgacaccctcaagagtgtcgtagaacaggccgaaaccttcatcccgcgtcaaccgcgaggccaagcatga

SEQ ID NO: 11102 - DNA, 1116 bp, Phaeobacter sp. CECT 7735
atgagagcgcaagcaaagaaaatccggcaagaagaagaggaagaaagtgccttcgtctcgatgaccgacatgactgtcggtttcttgttcatcatgatgattctgctggccttctttgccagccaggcacgcgattccgagacagttccaatcagcaggtttgatgcaatggttgaacagcgcgacgaatggcgagacttggcggaaacccgtgctgaaaccatcgagcgcctagagaaggaactggaggcccttcagttgctagtcgccgaactcactgcacaagttgaggcgctgactgaagaaagggacgcccttaaagctgaaatttcatccctcaaagccgacaacgaatctctgaaacagcgcgtcatggaactcgaggagcttgtccagaacttgcaggaacggattcaagaccttgaagatcagattaaggtcaaggacgaggaaatcgagaagctgcaagcgcaacttgccgaattgaaaaaggtcgatccgctcgaggcataccttgcgcgcgtttcaatggcccggcgagaagttctgacccgattgcgcgacgccatccttgcagattttccggacctcaaggtcgaactgagcgaggagagtgacgcccttaggttccaaggcgaagggctatttgcctcaaatcgttcgaatctgactcgtgaaaaggtggcaattgtctcgaaactggcagagcgtcttgacgagatccttccctgtttcaccattggtgacgcatcgcgcttcgacgaggcttgcaacccggcttttgccctggttgaggctgtccaaatcgagggccataccgacaacaggggaacggatcaggtcaatcggtctctgtctgctgcgcgcgcaaacagtacgttcttcgctatgaccggagccgcgcaaggcgtgatgcagcatctgaacctgaagcagcagccggtgctttccgtagcagcttacggccctgatcggcctgtcacgacaaacgatacgccggagggtcgggccactaaccgccgaatcgacttacggttcattatggtgacgccgcaggatactggtgggattgaggtcatccgcgaggctcttgaagcggtgggagagcggcagtga

SEQ ID NO: 11103 - DNA, 1344 bp, Phaeobacter sp. CECT 7735
gtgaacgaccaaccagaacgcgcggacagcataaacgccctactaggtcaaccgaacccgctccgaaatcgtgttctgccacccttggaccagatcagccgctcggttactagcattctctcccgctggccggccaccatcaaagcaccggaggaccgtgatcgagaaaagctcactctgaacatgctttttcgtgtccagaactggaaatgggaaaacatcaccacccagcgcgtaatctcttctgctgtggccgtcttcgatgaagaaaggcgaacacgtgcggacttggcgcccgtacgcagcttctatctttcggagatcgagacacgccaacccggcgccttccttaacggcatggttggtgtctacatcgaaagtttcgaacccggcgcctctcatacgcggttgctcgctcaagctcttgggcaacgcagagccgaactcggggggcgccatcgcaagctgactgaaaccttgccctcgctgttcgaacccgatgccgcgccaccggatcttgcgaagatcatgctggattcagacgatccgtatacggctctcaaatccataggcctaagcaccccccacacgtcagggcttgcaaaagctgcgcacaagacattcgtcgaacgcttggctccagaccttgcaagaccggaggctcggtccaaattcttcaaatggctgacgcccgaaaacggaccagtccttcaggcgggagcagggcctgctgtcgaggcccttttgtctgtatggcgcaatcgtacgcccccggactctctgcgcaacgagctgtcggaacggatcatagcagcttggaaggacccgcgtttgcatgcaggcggcatctggcccggtttcgatgtaggcctaaagaacctgctgctgcggtggcttacgcgagaaaacatggagtttttctgcgaaattgtaagcttgtcccaggaaagccacatgtgggaaccacgccgggatttttggcttgacctatatgaccagggccgtattgacgaagcttgggtggccttcagttccgacgcccatcgcattgccatgagcaggttgagacgacaggaaaactccgccacgcggtttggtcgacagacggcgatccgtgatctttcactgttagttatgaggatagggaacaagatcgtcgtcgacggttgccacagctacaaaacccatatcttcagaaccgacgatccgaatgcgccaaagttgtaccagatgaagtacgacgcggtgaaaatccggaactcctctcgactttcacaaacacactattggagcgagagtcgaaaactggctgtttgggagcagtgggtcgagcagcatgtctga

SEQ ID NO: 11104 - DNA, 3120 bp, Phaeobacter sp. CECT 7735
atgtctgataacgcacctatccataccttttctgaggacgccatcgagatccgctttcctgaggcaaagcaggggctgctctcccgcctcatggctaaaccctccacacgcagtttcaccgacctggcgccagaagatcgcgacctgctttttgcgattggtgatctgcgagcgtggaaggacaatcacccaggagaggtcaaggttgcgccagatctactgcgcatttcccatgatgccgcggccagcctatctgcaccggcagccgatgccttgggcctgccgcgtactgttgacctgatgttgcgaacagacgtgaccggcgtgcttggtcgcccggaattcaaactccactacgaatggttccgcgagggtcatcgcgagacaccgaaacgcatcggtgcgatccttcgtacatccaaggggcgccgccgtattccgctttggatgaaacgcgcgcttgaactttctgacggcttcgacgccaaccagcctatagaagaccactggcgggccttggccgagttccgccgagccatcgaaccagactccgaaatcgagtcgaaaatgcctgccaatcgcgagatggccggtctctcgatgaccgccttcctgcgtggtctcgaagttcgtatcgccgaccgtttctccatctcgccggacaaggcactgggacagttcgacgtggtgccctattcggcagagcggttggaaaacgccggtttgaccgatgacatttcagaggagaacgccgaactgagcggagaggcgttggccgtcttccagttcggattgcaccagcatggcgcaaaaccggcctaccggctcggcaataacgcatacgttgttatcgacaagggcgccgcaccggtcctcgaggaaatggtccgtgcccaaagagccccgcgcgaggagcgacgtgcttttgttgagaacccgcgcgcctttatcacagaagctgtcaatcggcaccttgccaagactggggagctggacgggctcgacgatgcgcagcaggccgagatggtggaggcaatcgccggtccagcgctgatcgaaagcctagagtactcggaacgggtaacgggggtgactgtctacatacgcacaccggagatcggcgaaggtagcggcacaacctggttgccagaggtctttgccccgcacctcgttgaagaaatcaggtctttgccggaccctgaccttaaggctttgcgtgatcacatggctacggtcttggagacaggcacacatacccccgccaagattggtggtgaagaggtgcaggtcacccctgcaaggcttgccgccattgaaggcgagatccagcgacgtgaggcgctcgtcgccgtccgtgaagaagatgatgaacactcaaaggaagccgaagggccgatcatcctcgataccaaggaaaacttcgatgacctgacctgggaggcaaaactttccccgcgtgcaccttccatcccagtcgttctgcccgaggctatccgcactccgctccatgagcatcagaaggtcagtttccactgggcaatagaggcctgggaggctggacttcccggcgttctgaacgccgacgaacagggtcttgggaagaccctccagaccatctcgttcctggcctggttgaaagagcacatgaagcaacccactgcggcaaaccgtggtccgatcctcgtcgttgcgccgacctcgctgctccggaactgggaacaggaagctggcacgcacgtcgagggccgtggctttggcaccctgatccgcctttatggcagttcactgggctcgcagaaacgacatgacgcgcgcggtacggaaacacaatcagggcttcctcagctggatttcgattggcttgacgaggctttcgaagacgggcgcgcccatcgctactggttcctaaccacctacacaacgctagcaaactaccagcattcgcttgggaaaatcccattctccacgatggttctggacgagattcaaaacataaagaaccgagtgacactggcatccaaggcggtagaggccatgaacgcggattttcggatcggcttgactggaaccccaattgagaatgctgccatcgatctctggaccatcatggaccggatagcaccgggttgcctgggttccgggtcggaattcaagacactttatgcgacgcctgacgccgagaacatggcagagctccacggccgtgtcttcaagccacgtgggtctgtgccgccactcggcctccgccgcctgaaggatgaggttgcgcgtgatctacccaagaagcgccgtttcctccatccgcgtctgatgccaaaggttcaggctgatgcctatgacctcgcacagatgaagcttgccaatggcggaccaggggctgcgctgaagatactacaccacatccgctctgtgtcggtccaccccggtgcgaccgcagcattgccgcctgaggaattcatttcacagagcgcccgattggatgccgtgatcgatatcctgcatcggataagggacgcgggagaacgcgtgttggttttcatcgaacatcgcgacatgcagttccgctttgccgaaatcgttcgtcacttgtttgggcttgaaaagatagacgtgatcaacggcgacacgccaattccaagacggcaggaaatcgtaaaccacttccagcggcatctgacggcggacggcggtttcgacctgcttatccttgggccaaaggcagctggtactggcctaacactaaccgcagctacccacgtcattcatctttcacgctggtggaacccggcggtcgaagagcagtgcaatgaccgcgtccaccgcatcggtcaggcgagacctgtctcggtccatatcccgatggcgctgcacccggaactgggagctcaaagctttgacgcgctcttgcagagcctcatgcagcgcaaacgcaagctcgcagaacaggcgctttggcccatgggtgacagcgcggcggatgtctcggggctgaccgaagccatagcaacccccaagcgatgcaagcatgcagtgatcgcggacagtatggccgaacaatttcggcgcgatggtttgccgatacccagccctgatacactgggcgcatgggaactgacatga

SEQ ID NO: 11105 - DNA, 1818 bp, Candidatus Nitrospira inopinata
atgagcacaatggttgatttacttcttcatcccttcactgatgctaatcccatagggcttgtaactgctcctggcctcagttgggtcggctcagcgggcatcattgtggtcacgctcgctgtgcttacgtggatggtagtgaaagtgtggatggtcaggcaacctcttacagtggtcgccacagaactccaaaagctccggcatcagcattctgtgctggatgcagaagggcttaaccgtctcgacggtcttttcggtaaagttgagccgctcgcccaggcatgggaagagtttcgagagacagtacttgttaaagactcaccgggcaagatttataatacccgtccagcagaggagttttttactgaagacaatctgatcaatcaacgtatcaatttgttcttctactccagctttcctggaatcgtgacaggtgtcggcttattattaacttttttagctattttcgcaggactattgcaagtcaacatcgatgaagaatcctctcgcattgagggaatttctggccttatcaacggattagcaggaaagttcctcacctccatcgtagcgttatcttgtgcgaccgtttacctcttacttgagaaaccgctggtccatggcctaagtaatagttactatcgattcacccatgcccttaacaggctactcagtcgcaggacgagcgaacacattctcgaagacatgcatcaaaatctcgcagagcagaccacggcgtttcgtcattttggggttgatctttcaacccgcctgaaagaagggatttctgaaagcctcggcccaactcttcgccgcatggtggaggttgtggagcgcttggccacccaacagcgccaagacaataacgatgccattaaggagcttatcgctcaatttctgaaaggtcttgaagggacgaccaagacacagtttaccgaactgcaaacggtcctcgcttctgctagtaatcggatggaggagcttaaccgagcaggcgaagaaagccgagttggcttagccacgttcatccaacgtttggacgattccatggcggcccaaaatcgagccgtgagtgaccagataggacaattgcgagaaaccgtggggtccgtgcttgctcgactggagaatgtgggatctgaacatgaacgtcgagcccatgaactcttggcatctgtaacaacgacaatccgcgaggcacaggaacactcacaagcccatctctccaagactgtcgatatcgtacttcagcgaacggctaaatggaccgagcagggtgccatgaacctcatggctgcacttgatgagcatcgatcagccagccaacagcttgcgcagactaaatctgtcctcaacgaagctttggagtcgttccgcgccatggtaactgaaggccaacaggctctcaaacaagtcgaacaggcagcttatacgctcctggagggccaacgttcgttcgcagctactgtgcaggaaatgcggcagcttcaggagcaagcaggccagaacgccgagcggttagcccaacagctgacccgcttcgcagagatccacgctgttcagacagaaaccctcaaacagttccaaactgtgttccatactgttgagacaggactcggcaacgtgcttacggaactcacccatagcatggaacggtattcgtcggtggttcaagagtatacagaacaacaactcacgcgatttgatgaatcattttctcaggcggcgcaagagttaaaggccagtagcgatatggtacgcgatgggcttcaacaggtcactggacctcttgaaaagctagtcaagcgtattgagtga

SEQ ID NO: 11106 - DNA, 735 bp, Candidatus Nitrospira inopinata
atgattcgagtaactcgcgacaaaactgctaaggatcaaacgattgtcatggggatcacagacctcatgacgtctttggccgtgattttcatattgctgctgacgctattcatccgcacgcagtttgcgtctcgtcaggtcagtcaggacatcagacaagacgtcattgataccctggttgcaaagctcatgagttcacaggatgaatcgttacaccaagtgaaagtggctaaagatcctaaggatcctcttggaatcgaagtagtgatacgagatcctctcctgaggtttgagcctgacaaatcaaaccttagcgaggaggcaaaagaattcctaagggggtttgtgccattacttacctcggttatttgccaggaccaattagaaaacattcagaccatcgtgattgagggccacactgatcgcacagccccgcttggaaaggatcccgacgaacacaatatccctctcagccaggatcgtgcacggtcagtgatggaacataccttgtttgtgttgaaggaaacagaagaggagaagagagattgtcttctcaatatgacctctgtcaatggaagaggcctccgcgagcctcctccagaactcatcggcaaacctgagcgggagcttacagcccaagaacgtgaagccatgcgtcgagtcgtcttcaagattcgtatcaagtcgaccgagcagcggaggggtgtggttccggtgcagacaagcgcatattga

SEQ ID NO: 11107 - DNA, 1440 bp, Candidatus Nitrospira inopinata
gtgtggttccggtgcagacaagcgcatattgatgttcatagtctttacggcttagccatgtcggagacaataagccttgcggatgccttcgccgctttgcaacaactcaacaagcaagtaaagcgatctgcccatcaaccgctaaactgggtgccgagttttccgtctaaactaagtcggcttgtcaagtcttggggtgacattcccccttttaagggtcttcttgtcccagccgacgaagtgatccttcaaaaatggcagcgttatagagagagcaacgacactctcgaactttctttttatgagatcggtcgcttgtgtcaacacccaaccagcgcaacggaccccctcttctatcactatctcgtcaggaagcgatattcaccaccaccttatgcgctgctgggattggtctatacttaccatgcaaggtggtgttcgctcacagtcgggaatcgtcgtttcattgaggaagcacttgaggctttccttcaagcttatcgtgggttcttcaaggcactctgtgtgtggcagaaatgtctcgattacatcataggatccgaagcgcctgttcgtctgggcagggaattagccgacaagcgttcgattcctgagtcctttgctgctacctatgctctacataccaacacggagttctgggccgaggcgctagcgcaagcagcagagcacattgttcataggattgaaagagtgcccgtttctcagctcgaatatttgacccagacgttgtttgccgacccggggataccgaaatcccgagtgaaagagctgttggcaaaggcaatcctcagccagcggtgcgataaggatgagctggcaagaactattataatcaactttgctttaggagccacagattttggcgaccctcgtgttcatcaagctggttggatcgggatagaagctgctagggaacgctttatctcgtggctttctcgcgaagacatcaaatttttctttgatttagttattgaccggtcaagcgatcgtcagggacgaaaaccgtactggttgatgtggttgccacaattgaagcggaccagagtattgctcagccgtcacgaccaggatcgtattcgattgcggctacagcgtcggaatgaacagattccctcttacggactcctcgatgcgcctgatacaagcgcattccttctcgattttggcagtgtcgtgattgtggaattcagcaagagcccgaatgcttcgtacctctacccacgagccattgctagggatttgttccgtgacttctatcaacagaatcgccgatggaccgttcaggagctgaagcgccgagaccttgtagaacgagaagctgccagacgcttagagcatcggcgttatcgccacaaccaatggcaggacgaaatgacgggtcttttaactcgccactatcgcctgcataggccagagtga

SEQ ID NO: 11108 - DNA, 3456 bp, Candidatus Nitrospira inopinata
atgccggtagaatcgttgctccttcaagagtttggtccggacattcacctgaaagcagagcacgatgggttgtggttgcgatacagtggatccaatccacatgtatgcctcgcacggagcgactgctggcctgagtatcagggggaatcggcctgtgtccgaacctggcggaccgtggtggaacaactggtcgaccaagaactcgccattcctgaaggacagcacctcagagtcccttatgaccatctagacactattgaggaccagagtttgactctgtttagtgaaatcacgaaatgggcacccttctccgtccatgtgcgagcccacagcatctttggcgctccagattttcgctatatcgctcaattaaaactcggaacacgagtgtttacccctgtgagatttggatgctttcttttggtcggagaaatgatttaccggcttcctcgtgccgtgtactgtctattgaacgcgatagagactttcaacgccttaccatcagagcacaagagcacagccgctagcctcaaagaattcgcagcgatcaagactctgatcgacgaatcggatgctgaagctgacccattgttaactacaactcatgtcgtggttccgtccaaagtgtcccttgatgtggacttcgatgaggatggtcgcataagcctattcccctcgttcgacggagtcccacgagatgctttcaagaaggtcttctttcagctaagtgatgtggattcagtctacgccttgccgtccgatgatggaggccgggttcgcgtggttctccatggagacctccaggaagcccttaaggtcatgcacaagattcgacatgtaggaggcgaagagaaactcgcaatcctcagcaatcctgcttcgcgtttcgagagcgtatgtgacctcgatcttattgatctctcactctacggcccacgtgtccgtggaatcggcaagtacccagcacgagtttctccatatgtgcgaaaaggtgggcgtcgtcttttcaatcaggaggaagtgtttgaggtagggctcgcctatgagtttgccgatggtgagtcccagcaagtgcagtttgaatcacgcgatgaacttctcaattttgcggaacaagttggcgcagcccatgcagccggcgagaactttgtccaatttaagaacgcaagtgtgcctgttactgattcccttgtccgtgcgcttacaagtctcgttaaacgatttgatcgacagaataatcgccaaaagcaagaatcgccagacacagcgaagctcctcatttatgccaatgaggaagttctcgagtacgacgaggcagcacagtcgatccctgggtcactcgtgcctgagttacccaagagccttatccgttgtgacaggttgatgccccatcaagttgaaggcatcggatggcttcaacatttgtaccgtcacagccccattcgtcgcggcgggctactggctgacgagatgggccttggtaagacgctccaggtacttgccttcgtcgctgcacacctagagtctgctccgcccacggatgttggcctgtcttccgggcatggtcctgtcctgatcgttgcgcctctgatgctgcttcccacatgggaggaggagatgcgccggtacttcacgaaccgtggcgaaattttcgagcccctgctggtacttcatggtgccaaactgagtcagtttcgttgtgtcaccaatactcttcgtgaggcccaggctcagacctcagttctagatcttgaccgaatccaagcccatcgtgtggtgctcaccaattacgagacggtgcgaaactatcaatactctctcgcccgtattcgttggcgcatggttatcagcgatgaagcgcaagagttcaaggaccgttcgaccggtgtttctcatgctgtcaaagctctatatccaaaatttcgcatcgccctcaccggcacacctgtcgagaacagactttcggacatttggaacatcatggattttgtgcaaccaggtgtgttgcttgggagctaccgcgagttcgtaaaggcctatgaggagccggccatggccggcacattggatgagcgcctgcagcacctacaggcgctgcgggaccgcctgcgttatagaaagtcggatgcgttcttgctccgacgtgagaagaaactcctgtcgggtttgccggtcaagcatccgccccatatactcgaaacagaccttacacctgagcagcgtctcttacaccttgagtgcctggctcggatgcggaaccccggcaccgaggagcaccgctttgcactacttgatcggctaacgaaactgtcacagcaccctttcctactggatgcaaccaggcgcttggaactacaggacccgctttgttatctccaatcgtctccaaagctaaagaaagttgtcgaaacgctacacgtgatccgtcaacaaggtgagaaggcaattatcttcacccggtctcgtcccatgcaagacatcctcaaacttgtgttcgaacacgagtttaagctcgccgtcggtgtgataaatgggtcaccaatcagcggccgtcgctacatcgtcaaagatcggacgaatcggatcaaagactttgaatcactccccggtttcaatgtcttgatcctctcgcctgatgttgccggcgtaggcctaacgatcactgcagctaaccatgttatccactatggccgatggtggaatcctgcgagagaagcgcaggcaactgaccgagtttaccgcatcggacaagaacgagacgtccatgtctacttgcccatcgagcgcgacccgcggggtgagtttcgcacgtttgaccaatgcctccatcaactgttggtaaccaaggagcaggaggctcgcgattttctgattccattaccatccgaggaaaacttagaaacggaattattcgaacaccttcggcaggagcgtccgcagtcttctgggaaggtgcggcctattcggaataaggaagacctccagctcatgacgccagaaatgttcgaagccctggtcgcaagactttttgtacaagaaggattaaaggttgtccttacaccagttagcggggaccgaggagtagacgttattgctgtgtcacatcgggcagtaacccttattgaatgcaaacattcggctgtcggatcctctctcacgagcgaggttgtggatcacttcgtcaacggggttgaatattacgtgcataacattctccctgcatcgcttcgcaatcgtccgcgcgagtgtttcttaatcacgaacacctcctttgaccggcatctgatggcctcggctcgcgcccgcgacattcgcgtagtggccactgatgacctcattacaaagcttgcacaatttacgataacttgtctcgatgttgaggagcagcattcgacacgtcagcgctccatgaacgacgttcgtgcggcgttgcacgggcttcaaaaaatgttgtga

SEQ ID NO: 11109 - DNA, 2193 bp, Pseudomonas sp. TAA207
atggaagattcatcattttttagtctactgaaggacgcgagtgcggaacaactgacagccccggtgttggtggtcagtgttgtgctgtttttacttgtggtatttgtcttccgctacttacggccctctctgaggctggctaaaagtctcgcagagcttaaggttgcccttaaaaaggccaaagcatttgcacctggtcagcgccgctctgaacttcaacgaatttttgcaggcagttcgcttgagcattcctgggatgaatactctgaaacgctgcacgaccagtatgagtttcgcgagggtgagcaagtcttggttcgctcgcgtgcgacagccgctgcggctcattttttctcggctcagagtgttgtcgatacgccattgcgtacggagttttataaacaccttcccggcatcctgacgggtatcggtattgtcgggacttttttcggacttatgttagggttgcaaagttttgatcccagtacccctgaattggtaaatgctagcttggataagctgctaaaagatgtattttttgcgtttgtcggttctgtattttctatcggagtttcaattctggtcactttggtcgaaaagtggcgtttaggccgttgctacacattgcttgaaggtctgaccgagaccctcgacagcctgtttgatagcggcgtgggtgaagagtatttggctgaactggtgcgttccagcgccgagagttcgattcagacgcgtcaactcaaagacagtctggtcacggacttgcgggaaatgctgcaaaaccttgtcgacacccaagtgcgtgaaagcctgaaactggctgacactttgtccacgacttatcgcgattcaggtcagttattggctgatcaagtcagcggtgccattgagaacagcctcaaacagcccctagaaactatcgcaggagccgttcaagccgccagcggtgcccaaaccgggcaggtggaaggcattctcaaagatgtgctggtcgcttttatgaacaaactggaaagcacctttggccagcagtttaatggcctgcacgacttgatggggcaatcggtggccgccatgcagtccatgcaacaaggtttctcgacgcttatccaggacatgcgttcggccagtgattcgtctaatcagaccagctcgacgatgattgcgcagttgctgacggacatgcatttggcccagaacgccatgcaggcgggcatgagcgagatgttggcgcatttgcaggaatccgtggcgcgtatcggcaatgaaggtgaaggcgcgggccagcgtatggcgcagcagatggaaaaactgtttgctgacagtgaagcccgccaacaagccatggctgaacaccttcaggcgtttgtcgagtctatccagcagaatattggtcatggacaagaagcgacgatgtcaaaaatcgcaggctcggtggatgtccttggcgaacaactttcggcggtgttctcgcaacttgagcgtggccagcagcagatggaccaatcgacgcgcgcggcgcaagccgatttgcatcaaggcactcgggatctggtcggtggtctggatgagcaggtcaaagccctgctgcaaacggtgggtgagcagcagcaggcggcgcaagacacggttaaggcactgagtgcgcaaaccgaacagcatttacagagcatgcaggtgggcgccgagaaaatgcgcgccgcagctgagcgatttgaaactgcaggccacagtgtaaccaaggccagtgactcgacagccaacttgatgggggctgttcaggcggcagggactgagttgggccaggcaacccgggagcttacggccgttgtgtcggactaccgcaataaccgcgaagcattggccacaatcttggccgtgattgaaggggtggtagccagtgctcacggtgaagccagcggccgcagccagtatttgcaagatctcaaagcgcagagcgagcgtttgcaaacgatgaaccgtgaagtgtacgagtacctcgacaacatcagcggtgtactgggcaatgggtttaaagagtttggcgatggcatggatgatgtcctgcgccggaccctgggcaacctagaccttgaactggataaagcggtcaagagtatcgctgccggggtcgatggggtgaaggaaagcatcgaagatttcagtgatgtcatggaaaaaatcaggtcgtaa

SEQ ID NO: 11110 - DNA, 744 bp, Pseudomonas sp. TAA207
atgtttggtaaacagatgccttcggcgacgcgtcagaaagatgaaggcgaaaagccgttctggatatccttcgccgacctgatgacggcgatgatgatcttgtttttggtggtgatggtcgcgtccttgagctcggtgacccaacgcatcaagcaggctgagcaaggagagaagcaacgcacccaggatattggacggttgtgcgagcgtcttcagctcaccgccaaaaactcaaacacgacgatcctagtggactgcaaagacaatcgcatcagcttcggtgaagcggggcgttttgggcataaccaatattcgctgaatgcacagggccaaaacgccctgcaagaagtggtgcctttgatcctcgatgcggcagacagtgaagaagggcgtaagtggttcaaacaagtggtgattgaagggtttaccgacacggtcggttcttacttgtacaacttacacctgtccctgcagcgctccgagtgggtgatgtgcagcttgctcgatagccgtagtccgctgcaaattggtctgtccgccgaacgccaacaacagattcgctccatgtttttggctgggggtgtgtcattcaacaatgccaagggcaccaatgaagagagtcggcgggtcgaactgagaatgcagttctatggcttgaaggagaaggaaggggcgctggtgccggaagtgcctgtattcaccaacattgaagccgaaaggtgtcagttggcgatgtcgcgatga

SEQ ID NO: 11111 - DNA, 1656 bp, Pseudomonas sp. TAA207
atgagcgggtcactggcaaagctggcagcggtcatcgagtcccagctcatcggcaaacgcatgggcatgggcaggggcccagagcctctgctgcgtttcagccatttgcaagcggcgagtcatgagttgtatcagcgctatgaacgcgccgagcaggcattgccgcctccgcatctgaaacgacgtgaagcgctcaacaagttcagaaacgaacaaaaactcaatccatcggaatggcggttggttttttcaggtctgtccgataaaagtgagcgggtgggccctattcttgaagagagccagttgtttgaccgtgttcaccatcaggtgcaggaacgtatccgccagcgttcactgagccggcgtgactggctggcgctgtgtttcagctacttcggctatgagtcggagatgccggatgccaatttcagttggtgcacgctcaggcaagatattaaagatggtttggaaagcgtaaaaggccggcaggtacgtgaaaaggaatggattcgtattgttcagcagtacgaagagttgttcactgacacggcaggtgaaggcctgggcgagcaaatgttcaatggtgaaattgacgatttgtcggtgttgcagacgatcgcacaaatccctgacagcagctggctgtggcggcgaattttcaatgtgctcctgtcgagaatatttaacctggacgatgtagagtttgagtaccgcatcgcaggttttattgcccttggaagccaacaccctaaatacgtgcacgatattttaagtgcttgtttatcgcgctattaccttgcgtcgttccgtgaaaaaccatcatccatactgaagcaagccgctctggataactggggcagcccgcaaatgcgctccagagaaaatcgttggcttcagcatgtaaagcccgacgtgtgcgcaatggtggtggcgtggtttgccaaggaagatttggagcactttttcaacttgttgaaaggtgatgctgaagttgaccaagcgcgcttgttctactggctacgttttgccaatcaaatgagttacacgcgcattgtcatgggaagtggcgcctggattgatcgcagtcaagactttgttcatttccgtgagaagaacaaaggccgcttgagtcgccttgagggcgcgccgatgcataacaacgcagtggttatgcagattgggaattacctgtttgtcgagttttccgggacgggcaatgcctgctttgtgtacccggtggacacatgcccgttcaatccagataaatttatgttggatttgaatgacgacctaaagcagcgagggcgtaaacctaagcgtttattacatacgccagtgccttattaccccaacaaagtagaaggctggctcagtaagtttgacgacgagttacgcgctttgggtatcaccctcaatggccatatttctgcgcagcctgctcaaccactgatgcaggccacaccgcagtcagtgtcgattgagggcaaggtagaagctgctttggtaggcattccccatactctgcatgacacgcgcgccaagggcggcgcgttttacgtgcaactggagcgcccagatccaaccgcgatggctgctttgcaccggttaggttttaaacaggttaacgatcagcctttgcggttctggagacattga

SEQ ID NO: 11112 - DNA, 3249 bp, Pseudomonas sp. TAA207
atgttcaagcgttttctatcagggaaaaaacgtcaggcgggtaatacggctgggttgcctttagtgctttactcggtcgaagagcagggcctgtgttatccattgagtctggccgatcaggccgattcatggccattggcgctgtaccttgatcagttgcaggaagaagaatttgcatgccagctgagtgatcgctggttgctgtcctgggatgagctttatcgcttgattgaagatcccgagcaccatagcagtctagggttattgggactgcccccgctcacgacgttgactcctcagttggtgagtcaaggtagcctggcctcacctgattttaagatttcgatcagcggttggcgtgattcggtctcgggtgccgttgtagctgtgcaacgcacaggcgcaatgattgaacatggcatacagactgaaatgctttcccagacctcatggcggttgctgggggccgtgcgtcatctttacctggcgcagcaggaaacccccggcgaattgaccaaccaaattggttggtcgcgtattcgcagcctggctttaaaagccggtgcagggatggacggttttctggataaaacggtggtggtcaagcctgagagtttgcgcctgaccccgcgtaaatccatggtgggcgataccccggttatcgagctcgtgccttcttttgaggggcaacctgccaattggctttccagtttcgatggccagcagcaggtacaggatcgctatcggattaccgacgacgatggctcgctgacccatgtgctgattaaacctgaggttaaatccgtacttgattatgtgcatacgttgccggggcgccgcgttgccggggatgacgccttgtcctttgtgcgcaatccttacagtgccttgggggaaagcgcgagccaggttctcgacgccacggtctacgaagagggcttggtagcagcaggcatctttttccaccgcttcagcctgcacactcaagtcgatgaaccaagccagcgcatccaacagatcacgttgacccttgagccaatcgcccccacaccccaggccccgatcgaattggcgtttcatgcggcgtttgagtttgctcctttcgtcaatgagctcgaattgaagctcgcggcggggatgccagccggattttggcagggctatgagttggagctgagtgactttgatttgtgccagttagcgggcatcaaagagctgctcaaacgctggcaaagtgaagccatgggcgccgagttcgattcggtgctggatttatcgcagtacggcgaccgagtgacgggtattggtgaagcggagcgcattagctcccccttcctggtcaaagaggccaccgagaactggttgcctaaagacattgccgacttagcactgggggctgaagcattcggccggtgggatccctctgacagggcccagtttgacgacttcgcgcaacgcttggaggacgctcgtgccaacggcgagcagaccgtgttattgcccaagtcgactattgaacttccattgccggcggcacagcaactgcttgacgcctggtcgcaaaaaatcgccccggcttcaacggctaaaccagacgtggaaaaggtcgggcgtgcggtgctgcaaatcggtcagaatatcgatgagcccaactacgtacagttgcgccaagaagcattgcttgcagggcttgacgctgtgccgcaattgcccacattgcttcagccccacgtggtgctacgggagcatcagttgcaaggagtggcctggcttcagcacttgttcaaattgtcacccaccgatgtctcgggctgtttgttggcggatgacatgggcctgggcaagaccattcaattgctgacttttctggtttggtatctcgaagtctatcctcaagacaaaccggtattgatcgttgcgccggtgtcattgctggataactgggagcgcgagcttggccagttcttttatgctgacacgttgccagtgctgaagctgtatggcgctgcgttgagtgcggtgaagtttaaaaaggacgaaatacccgtcgatatcaaagccaagggcattaaaaatcttctgcgtccgggctggctcggtggtgcccgaattgtgctgaccacctacgaaaccctgcgtgaccaggagttctcactggcgcgtcgacaatggtccattgtcgtgtgtgatgaggcgcaaaaacttaagaatcctgccgcgttggtgacgcaagcgattaaggcgatccccgctcgctttcgtgttgcgtgtaccggtacgccggttgaaaactcgctgatcgatctctggtgtttgttcgactttattcagcccggctttttgggtggattgaaccagttcggtcgtgagtatcagcgtccgattgaagctgccctcgaacgggatacgattgctcttgagcgactgcgcagactcatagaaccgcagacactacgccggaccaagcaggacgtcgccaaggacttaccggcaaaaattgaagaccgcgcgtgtcgctcgctgaccatgcatggccttcaacgagatctgtatctatccgaagtgtcggcctatagccgcaagcagcaaatcgaagagcaacttgatcagaaaagttcagggatgttgggtttgctgcataagctgaaattgatctgtgcccacccatacagtgtgcagcctgatgcccgtttacgtgatcactcgccaaaaatgcagtggcttatgcgcacgctggaaagcatcaagtccgccgggcaggacgacaaggtcatcgtctttaccgaacttcgtgacattcagcgggaactgcaacatgccattcaagagcgtttcggttggcgtgtcacggtgattaatggcgataccagtacgagcagcgagagtgccatgagtcggcagaagttgattgatcagtttcaggcgcaacctggctttggcgtgatcattctgtcgaccattgcggttggctttggtgtcaatgtccaagcggcgaaccatgttatccactttacgcggtgctggaaccccgcaaaggaagatcaagccacagatcgtgcgtatcgaatcggacaaaccaaagacgtgcatgtgtattacccgaccgtgctggacagtggaatgaccacctttgaggccacgctggatcaattgctcagtaaacgccgagagttggctcaggatatgttgagtgcagcgtctgagattcaggcttcggagtttgaggcgttgcttagggctaggaagtag

SEQ ID NO: 11113 - DNA, 2193 bp, Pseudomonas sp. TAD18; identical to SEQ ID NO: 11109

SEQ ID NO: 11114 - DNA, 744 bp, Pseudomonas sp. TAD18; identical to SEQ ID NO: 11110

SEQ ID NO: 11115 - DNA, 1656 bp, Pseudomonas sp. TAD18; identical to SEQ ID NO: 11111

SEQ ID NO: 11116 - DNA, 3249 bp, Pseudomonas sp. TAD18; identical to SEQ ID NO: 11112

SEQ ID NO: 11117 - DNA, 2094 bp, Desulfosporosinus sp. BRH_c37
atgaatattaaagaccgttcaacgtttaccatctacgcaagttttagtttgatcgtcatgtttttctccctatatccacccgttagctttattttagcaggttcaaaaactaccctagcgaatatagtgactctcgttttgttttttatttttatggcaagcttgtccttcttttctttacgggtgttcaacaaatctagtcaacaaaatctcaaagcatttgaggatgtattccaaagcctcaattcaattgaaacggatgatagacaagaagaatttcataaagttaagagtatattgaagaattctttgctcaaaagtgtatggtcgaaatatgagaagactattcggagaatcaatgatggtagaagcaacgagggagaaataagacaaaagttttatgcgagtgtagaagctagttacttttttaatgaggatgtagtctatagcaatttagctttttataaattcatcagctatgtacctcagctattaaccgctctaggcatctttgggaccttccttggtctggtgattggactgatcggtgtcgatttccaaaatacggcgaatacaaaaagtagtatagaactccttctcaacggagtccaaattgcctttagaaccagtatttatgggcttgctttctctttattattaacagtttttcaaaaaatgatgttaggaaagcaagaagccaagatttgcaaaatatgtgaccaaatagaccagatatttcccatgaatacgcaggctgatggagtcaatcaattgtatgtcgaacttgagaaacaaacagcctcgattcagaaaatgggaactgaaattgctgaagcagtaggtaataaatttgatctatcattgcaaaataccctagggccaactcttgaaaaattcgctgaaactacggaaaaacttttcgagacagttaataatagtaatcactcgacagtatcctccattgtcgaaaatattggttcgattatttctagcaccgccggtaaggaattagaacgtcttgagagttcgataggcagcttaaccgaacgcaatgagggcttgttatccgaatttgaaaagacgattcagaccttacagtccctcattcacacccaggagtctgtaattacggaaacaaatcagtcgaccaataatgcaaagcaacttaatgaaagtatcttttccgtgacggacgagctagcaacgattatcagcgggttgaacaattttacaagtgaacaacagacttcctacaaggattattctgagctggttaataatgtcagagagagcctcgaacagcaggacaaatcggcttccctcttcaaggataccatccagcagactgtctatgctgcagagatgcagaaacaagcaggggagaggtttacaaatgtggttagcaaactcgatgagtttagcagaagcttccaagagactttgactggtatgaaaaatggcacaacgacgtttgtggaagcaagcgaaacggtctgtaataaatttgatacgaccatctcacgactcggagagacccacgaggacattagtttatctattaaggggttgtcctctggtcttaacgaatcaatcgctaaccttaatggtattgtctcaggagattttcaaaagataagttccagatccgcagatatcgcagagaaattagagggttttggagttaaggcggatcgattagtcgatcagctgacgtcgtttacagacaccaacaataaggcagtacaattatggggagattataaggagagcttcgaagctctgaatggagaaatcagcaaaggagtagaagattatcaagcgaatattagtttagggttgcaaaatctatttaaagattatgatgaacatatttccaaagtactcggtgactttaaatcgacgattgaaagtttcgattcatcgataggggagcttacggacatcttagccgctcagaacttagaggtaagccaaaaacatacatcaaagatcattcaggattttaatactgttttgtacaaatttggtgggaagatggacgaactcaaagcggtatatcaagaggctacggcagttaggatgactggtaaatga

SEQ ID NO: 11118 - DNA, 729 bp, Desulfosporosinus sp. BRH_c37
atgatcattaaacgcctgaaaagaaacaaaaaacaagataatgatatatcctactgggagtccttcagtgatctaatgtctagccttcttattatcttcttacttgtttctgtctatatgctgcttgactataaaacggcagcagatcaagccgctaaaataagtaatgagttaaaagatacaaaatcccaattggaaaaattcacttccttaaatgatgacattattaaaaaaattaaggctgaattcggagattctctctatgtggatgatacagggactttgaccttacaaagtgatttattatttgacacgggtaaaagtgagctgaagcctgcaggtaaggaatttatccgtaagaatatgccccgttacttcggcattttaatgggcgaccctgaaatcaagaagaatattgctaagattatcattgaagggtacacggacgatcaaggggactatcattacggattggatctcagccatgagcgggccttaagtgtctatactttcatatataatgatcccgatttttccgcctttaagaatgaccttaaggattttattcttttgaccggtagaagtgagaccggatatctacagagaaagccaaatgaaacggttgatgagtggagaacacgaaaccgacgggttgaaatcaagtttgagttaaagtatcaagagatttttgaatatcttaagaagagcttggaaaaaggaacgctataa

SEQ ID NO: 11119 - DNA, 1200 bp, Desulfosporosinus sp. BRH_c37
gtgccaatcgatttttataagtttgacttcaataaatatatgcctaaaaagcttgaacggatggctaaatccgtcaatgtcgatgaccattatgctttaccggacacggacaaagtaaaaggtttattagacaaaatgcgtaatggaattgaactgcgaaatagtgaagttaagatcctgtgttactttgtaagtatcattaaagaagaaagtctgtttgatcgatttagcagtgcttgtgaacactgttttgctaagcaagaacggctttactaccatatcaaggggcttcttcattcattttatgatgatttttgggatcctgaactgtttcacttgcttcaactcgcctttgataaaaacagggtctggaaagaacccttagcctccacaaaagatgggatttttatcaactcgactagtacaacaagttgtttcttgaatctttatcgttatttcgagggtttcaaaacctttgccgagcttcgacaaggaaaagatcacgttctcatgaaggaaaaccatcgaatttttaacataattagtttaaggttacttgaagaacggattattagtatcaagaatctcgatgacttttccgtggtcaaagaccttatcaactcattgaaagattataatacgctgaagccttgcttggaaaaattccttttgacccagaaatttcgagaagacttcgataaactgcccatctacttggaagagatgttcaatgtgattggggatatactcggtgatccttatggtcaaaacagaactagatggcaaggaattaaggatgaagctaaaagtgttttcacgctctggaaaacacaaaagaaaatcggcttattctttggagaaattgcaggggacccgatacgccttaatttttggaaaaagtattctcattatttctatcggatcgagtattacgagaaatatgctggggctatcttaatggaaactaatcaacacctattcgttgaatttgctgagatgggtgccttatatatgtataatgtaaaaaatctcagtattaacgatgttgaccgttatttcaaaagtggtttggggaaaacggcgatgattgttaggttgaaaaataaaagtattgccaagttgaacctacgccacctgtctcgctggcaggagccattccaaagggaatttgattattttggttataagatgagggggtga

SEQ ID NO: 11120 - DNA, 3492 bp, Desulfosporosinus sp. BRH_c37
gtgagatttggcgtggataaacttaaatcattgattcattccataaaggttcggaccttaacccctgatttctcggactcggcaaagattcgcatcagtttaaaggagagcggtcgcaacatctcttttgaaagtgctgatgatcaggttcacttacttaccaatatgtctaatttacttttatcagaggataagctgtttttagaaatgccctacgcagaggtttatgagctatattatgatgaagagaataatccgattgatgactatcgctatttaaacttgccaccaatctttgatgggattatctatattgaaaattacggtaatttctctgagtccgatcaggtaatgtacaattttaaatttcaagatggtagagatcatgacattagaaaactaagaaataacatagttctggtggacggtaacgaaagagtgttgtccccagaaatgtataaatgtctaaacatggtggcgcaatataatcaaaatgagacgcttagtagggacgtggcttcccagtttgaactgttggcgttcataaaggattatgctgagcgaacggctattgccttgaatcaacgacttagtatcgagaataaacccattattctcgatgagctgaaattagattttaccaaaacccctcagggcttggagattaagccgacgatcgatagtaaaagtcaagaatttaaccatctatttgtgtctgcttttgataataattcgactgtcaaaaacttctatacagttaaagaaaacggtaaggacgttaaagtcgttattaagaataaagatgccgcaaaaaagattaaacacaaccgtgtgctgactggagaaagggagcaggagttttatagaggagaaaatgaactattagaagatgagagttttgatgtatcactctatggtcctagggtaaaggggttaggcttcttaaattatcgagccaatatctccgcttcgaataatcgtgatgagagctggtttgatttctcaaaggcctatgaaccaccttcgatggttactgatgaattagtgtttccctggcttccagaggatcgggatatgcttcaggaaaagctcgtggagatggatagacttgaacgaaatgttacggaccttgagttgaaaaaagagggcgaagtgtataaggtgttcgttgatcgcgagcagctcaaagaagaaattactaaaataacgaacgcttttcttgacctgaatcaaatcaagagtgtaaagactttgaatcaagttattgagaaaagcacagcaaatcctgagcagaagtatatcgagcatcaaggaagatttattaagaactatggtcaagaagtctttgagaatcggatcgctgaactacaggaagaggataagctttcgaaggctaagccaaaagagccaaccctcttgattaaggataatctaacagaactgaatcatcgagaagatggaagggccacgagagagatgccctttgaaactcctagaagtctgaagattaagttgtttgaacatcagattgaaggggtacataaattacagaccttatttcaggcttcgatcaccaatggttttttattggctgacgatatgggactcggaaagacgattcaaatcttgacgttccttgcttggctcaaggagagagggcaactctctccaacgttgatcgttgctccctcaattttactaaatgcttgggataatgatgagcctactcaggctggagaaattcaaaagtttttccaaccggatacctttaagacctataagattcaggggtatagaaaagattttcaaaaggatcttcggattatcgaaaattccgatcttgtcttgatcacttatgaatcattaagacttaacaacatttggttaggtagagttcattggaagtgtattgtctgtgacgagatccaagcggttaaaaatccgaaaaccctggtgagtgttgccctaaaagcacaaaatggagactttaaaattgcctgtagtgcaacacccattgaaaacacaaccgaagacctttggaacattatggattttgcagtgccgggtgttctcggatctctgagtcaatttaaagggcagtttgtgaaacccattgaaaagttaacctcggaccaagatgacgagcggaagattctaaatgatcagcttgtgcaaaaaattggtgataattttctaagacgaagcaaagaagataagctaaaagatctacctaataaaaaagtcgttgttcatttaattgaggcgagtgccgaagaaaagaagcgcatcgcggagatcaaccgcttaaggcagcaaggcgaaccttccttgcccttaatccagaaattggtggcttgctgtagtcatttaagattagagtcgaactttgacccctctaagattgctcctaaagagttaattgcagaatcctcaaagctcggatatctgaaaaaagtactagatcacattcaagcaaagggcgaaaaagcaattatctttaccccatttagacaaatgcaaattgttttgtttcaggctcttaaactctggtatagtattcaaccctttattattaacggtactttgtctacagataaacgatcccagatcttaagtagctttaggaagaaaaaagggtttgatgtgataatcctctcccctttggcagcgggtgtagggattactttgacggaagcgaatcatgtgatccactacactcgcttatggaatcccgctaaagaggcacaggccacggatcgtgtgtatcgtatcggtcaaatgaaggacgtctttgtctattaccttatcttaagcttcgaaagctcaagctttttcgagtttgaatcagaaaagaagtatgtggattattttctgaatgaaaagactttcggaaaaacaccagaagaaaagatgaatcggttgttaatcaaaaagaagaatatgttgaataacttctttctggtcgctggtgatcaggcggcagatctcaaaggggagtgggatgaagaagatgaagcagcggcccccttgacacttcaagatgttgagtgtcttctaaaacccagcgaatttaaagcattatgtggaatgctttataaaaaactcggctatcaagtttttctcactgcaagcagcggagatcctggagtagatatggttatccaaaaagacggcaaaaatggactgattcaggccaggatgcttggcgatgatctaccgcatagcgctttagaagaggttatgggggcgaaaaatatttattgtaaccagcttgagattcgcattgctgaacttatcgtaataagcactgcagaaagaataacggaaacctttaaaaattcagctgaaaagtataatgtcaaaatcatccttcgccaggagctgaagaggttactcaatgaaactaagatttattatggtgaactagaaaatctagcaaaagatcgcttttctctggaacagttaaagaaaattataggatcgatattataa

SEQ ID NO: 11121 - DNA, 1452 bp, Rhizobium sp. Leaf202
atgtttgagacgttgcgtcaagcgggtattgcgacgcgggatctggttcttcatctcgcctctctcctgaaggaaccgccggcgccaggtttattcagccttttacttctcttgcttcttgttgtgcttgttcttgtatttttttcgatcgtgagccgccgcacgaaggtgctcaagtttgcaacccatctggtcaaaaagacgagtggcgcaggtggcttgcagcaagacttcgaagacattcaaaatcgtcttacgaagcagaagggaagcgcggcgcgtcatctgaccgacacatggaaggagtttcgcgacactactattgaaccgcgaccgggaagcgcactcggtgtgcgaaattcgatcaggccatcggtgttcttcaatcttgaggacatgggcttcagcgtatccggctggaggttcgtgccgggttttctcgtgtcgattggactggctgcgacgtttcttggtttgatcgccgcgctccagcagaccggtgaaagcctgaagggtggtgatcaggctcaggtcagagaagcgcttacgcagttgctctcggttgcgtctgcaaaattcatcatgtcgctgacggggctcttgtgctcgattatattcaccgccttcttacgcgtctgcggtcatcggctagaaagcgccatgcgaaagctgacccatgagatcgaaattcgcatgaatttcgtcagtctcgaagatctagcagagcgacagcttgaggcgattgtcgatcagcgtgatcatatgcaaaagctcaaccatgaacttatcgctgcgatctctaagccgctcgagaatgcgctggccgccagcaacacccatgtggggacgatggttgatgatatttctcgctccctttccacagggcttgcggcggcgatggataaggcgagcgaccggctggaaagcgcatctgaatccctgaatggccttgccacaaagataagcggagcggcggagcaatttacgatggcggcggagcggacggccgtcggccttgatggtgctgcccgcaggtttgaactcgtgacagataacctttcccgagcgggaagcggcctcgctgatgcggccgagcctatggtagaagcgatcaacggaacggcgacaacgaccaagcagatagctgatgcaagcatcgaaatggttgagtcagcgcggcaagctctgaattccgagcgcggtgtggttgtggcggcggctgaagccattcgtgagcagatcaagagtttcgaagctcgtgcggcatcctacgacggccagctcgaaaaggcattcaaggccttttcaactgagattagcagatcggtttcggaggtcgaaaatcactcgaacgcggtccatcagcagtatgccgacgctttgagcactttgcaggccgttattgaaaacgccaaagccttcagtcccgaaagcgagaggccatcggaatga

SEQ ID NO: 11122 - DNA, 933 bp, Rhizobium sp. Leaf202
atgaggggcgtaggcggaacccgtcctcaggaagaggaagaggagtctgtcttcatctcgatggccgatatgacgatcagcttccttttcgtcatcatgatcctgcttgcgtttttcgcgagtcagttcacggaccccgaaaccgtgccgcgttcgcagtatgagcaagtcctcaagcaaaaagatgacatggaaaaggagctacgccaggtccagacgatcgtcggagcgcccgatcttcaagtttctgacgagattcaggccatgaaggacgagatcgaggaattgcggcgacggctggcgatgccggatgctccgaaccagatggaagtctacaacaacaaggtatcagaaacccgcagagctcttctaacgagcctgaagaaacagatcgatgacgagatcaagggtgtcaatgtcagcatcagcgcgaacttcgagtcgctgcaattctcgggcgacggtctgtttgaaacaaatgctgatgtgccaactgcggctggatcgctgcgcgtcagcaagatcgcggaaattctcgatcgtaaccttgggtgcttctcactcggtgcacgcaaaagatttggtccagactgcaatccgggatatgcagttatcgattccctgcaagtcgaaggccataccgacaatcgcggcaccgacatgctgaacatgcgtctaagtgcaaaccgcgcctcttcggtctattcgttgatgacatcgcagcgacccgatctcctcaactttaataacagaaacgcgcagcctgtcctttcggtggcgggcttcggcaaggggcggcccattcagtccaacgcgaccgatatcggccaggacgccaatcgccggatcgatttgaggttcatcatggcggtgccagcaaaagaggcggatatttctgtaatcaagaacgccctgaccgaggtgcctcgatga

SEQ ID NO: 11123 - DNA, 1332 bp, Rhizobium sp. Leaf202
atgagcttgatcgagactattagggcatctcggatcgttcggcgccgagagcttgctgctcccacagagttgacgcaagcagcggcaaaggtgaagagcgcattcccagatgtcatcaatgccacgccggtgtctgtagaggaggccatccaacgggtcgacatcgcgctccgcaaatgggactggcagcatatgaccgtcggcaccatatcgcttgccgtccgagcctttctcagcggggacaaagtttcactcgccgtcgacagtttcctgaagagagagctggaggcaacaagcagctcgattctcctggatgcggttgcggaggcttacttctcgggctggactcgacacggtgagagtacccgttggctttcgtccattctccagtcaaggtcatcctatctctctttccggtggaggcggctctttgtcgcggttcccgaacttcttgacgccgacgaagcacctttgaggcttgctgagaagatgctcgaccaggcggacccattccaatggctgctggatgcgggctttgctgcgcctcatgccggacagctttcgaccgaagcttatctcgcctggctgaagctgttgccagccgtcttcacgccccagcatgtcgagcggatctttaattggataagaccggtaggaaacaagcccatttccgatgatctcgccgcaagggccgtggaaaagcttttggagccttggcgcaccgatatgcccactccagatttccgaatgcttctaacagataggattatcgaggctttcggcgatccgcggtacaaagacaagaccggcgcgaaggccaaggcattctggcctcttgttgccccggatcgtcgcaacattctgctcagatggcttgccgggcagagcatagatgcgttgctggacgtaattacaaaggccaccggcaaccacatgtggcctccaagacactatttttggaagagcttgtatgatcgagggctcgtcactgaggcttggatcgccctttccaagccggcgatggacatcgcaggacgtctgtttagcgatcgcgaagataggcttggtcagacggccgcgctacaaaacgccagcggcaacaaaaaggaaacctgcctgctgattatgaaggtcggccgctacacggttgtcgagggatcgcacgattaccggatccacctctttttgaataccgatcgccgggcgcctgcactttatgaaggcgagtataatgcagaaaagatcatgcttccccagaacgatcggatgacgcgcattcacgatatacatggtgcttggaaaaactgggtcgaggagcgtgttcttcgatga

SEQ ID NO: 11124 - DNA, 3210 bp, Rhizobium sp. Leaf202
atgaagttcgagtttcggtttgaccaagatggggcgtttctcacgatccaaacggagaaaaaaggctggctctccagtttcagaagagaggttcaacctgatctttcgaaactgccgcgggaggaaatggacacggcattggcattgtcgcgcctgaggcaactcgacccgaacaatgccctccactcggtcgactccaatatggtcgtcattcgccatccactggtcgcgcgacttgatgtccgggcagccaaatctttgggcctgccgcctttgctccacgacgttacctttcgggctcggcttgtcggcacggtcggcagtcccgacttccgaattgaatggtggtgggagcgtgcaggtaggcgcgttgttctccctctcacgggcgcctttctagggccgccgtcaaatgtcatgcgggtcccggagccaatatacctggcgatcgccgaagcagagaagcttggcaaaagtggcgctctgaccgaccactggctagcgctcggtcggttccggcggcttttcgacggcgagggggaaaatgatcggacatcgcttgaaggttttctgcgcgatgtgtctgtggtcacctgcgggtccgtcggcatcgggttcgatccggaagatgacacgaagttctttccgctgccatttgcagataatcattggtcggcagatggagcgaccgcgaggacatctgccctgcttcacggggatgaacttaacaaattcaagtctgcagccctccaacgcggctcgcagccggccttccgagtggcgaacggtaagtttctgatcgtcgaccgttccgctgtgccagtaatcaatgcgatcacggcgcatgctggcaaggacgaagaaggccgtcgtgccttcatcgccgacgcaggacggattgttgctgaagccatcgagatggacctcaggcgcgaagggcgattgaccaccctgatgagccctgaggcgcgcactgaaaagattgaggaggaggtcgctcgcgcctggatcgaaacggaggagtgggtttcccgcgttgtgggcgttggaaaatggcaggtcaccacgatagacggcattcagggatcaggaacccgctggttgcaagaggggatcgacactgagcttggtgaacgactggccgccattccagacgaagacctgtttgaggtgatcgcgcgattgcgcgatgctcttcaaaaaggtctctcaacgatccaacatgatgtaggcgaaattcctgcaacaaatgacgtcatcgaggcgctgagcaggcgtctcgccgattttctcagacgtcaggagtcggaagaggccgggacatcgctcgatgcctatctgccgatcacccatgacaatttttgggaagtcgatttcaaggcatctgtacagagacgaacgggtgacttcgacgatgttacgccggcattggtgaagtcagccttgcaaaaccatcagttaaaatctctaaagtggcaggtgaatgcctggcaggcgggtgtgccgggcattctcaacgcggatgaacagggcctcggcaaaacgctgcagactctttccttcatcacctggctgcgggaagaaatgacggaaggcatcattccgagaaagcccttcctgattgtagccccgacatctctgctgttgaactgggaagccgaaatcgagcggcaccttgagccggggtgcctgggaaaacctgtccgcctgtacggagactatctcggcgactacaagaagccgggcggtgggaaggatgtgcgtgacggtgaggcgcggcttgatatttctgccttggccaacgccgagggcggatgcgcagtaatcatcacgacatatcagacgcttgccaattatgcgattagcctaatggacctggattgctctcttgtcgtcttcgacgagatacaattcctgaagaatccagtcacaatgagagcgaaggcctccaaggcggttcgcgccgatttccgaatcggactgactggaacgcctatcgagaattcgacaaaggatctttgggctcttgtcgaccagttgttccccggcgcgctcggcgcgctcgcgcagttccgcagagtgtttgacgcgccgacggaagcaagtatggcggccctacattcggcactcttcagaggccacaagggctatcctgctctggcattgcgcaggctgaagacagatgccgcaccacatctcccgacgaaggtccggatcctacatccgcgcgagatgccgaacgcgcagatgctgcgttatgatgaggttcgcgccaagggaggcggcattttggcactgctgcagcatatgcgacgggtatcgttacaccccggcttgctcgacggcgaaacgatagaggaattcaacctttcatcggccagggtcagtgctgcgatggatatcctcagacatatcaaatcgaagaatgagcgcgctctcgtcttcgtcgaaaatcgggatgtccagagttggttcgccgaggtggtgcggatcgaattcgatcttgaaagggtgatgatcatcaatggcgacactacgatcgacggccgcaaggatatcactgatcgatttcagaggcacctcgtcgatgatcgcgggttcgatgtccttatcctcggtccgcgcgcagcgggaacaggcctaacgctgacggcagcaaaccacgtaatccatctcagcagatggtggaatcctgcagtcgaagaacaatgcaacgatcgaacccatcgcatcggtcaaactaagcctgtcaccatccatatcccgctcgctgttcattcgggccttggtcgagggtcgtttgactgcctgttgcagagcctcatgaaaagaaaacgctctcttgccgatcgtattctctggccgggagatgtgacggagggcgaaacgaagatgctctacgacgcggttttggcggcggagacgacatccgatttgaagtccatgaacgttgatgaaatccttgagggtcggagcgatctccattttgaggaactggccaaaaactccattcgtgtgaagccgaccagaggcggtgcctccatcatcgtttccgcagatgccgccgtgccgatgccgctttccggtgaagatggagatgcggccgttattacactcagcaagcaatcgcgggttccggcgggcgtcgtcgtgccgcagtcagaattgacaacagcgacgctttggccggagtatattctcccggactag

SEQ ID NO: 11125 - DNA, 2244 bp, Sphingomonas sp. Leaf25
atgattgaagatgtgatcctgccgaaccggcttgtcgcaatggtgttcggtaacgcatgggtcggctttggcctagcgctcgggctgctggcctgggcggtgggcatcatcatctggaactacacgcgctatcaccgaccgttcagcgcggcgctcgcggttcgcgtcgatgccacgcgcatcgtcgaggatcagcccgacgaccatgaggcgcagactacctttgccgcgcattataattcgatcgaggcagcgatgctctcaggcgagggacgggcgaaggagctgcgccacgcctgggttcagttcactgaaacgatcgtcgataccaacgaaacgcccatgcgcgcgacgacccggccggagggatatttcctgcacctcggcgacgacacacgcgtcctcgcatggtgggcgaacatctttgtcgcgctcggtctgacggcaacgttcctaggtatcatcgccgcactggtcggcgcggtccaggcgatgtcgggcggtgccgatatgggcaagatgcagggcgcgctgatcggcctgttgacgatcactgccgcaaaattctggacctcgattggcggagtcgtcgcctcgatcattctacgccgcttcgatcgtaaatggcattcggccaacgagcagaagctcgagacgctgtgcgatcgcctcgaatacgggacgctgttctcgccgccgcagcgcatcgccgcgcgccagcttcgcgagctggaacaacagtcgatcgcgctcaccgattttagccagcaactcgccgcctcgatcggtgacgcgctcgaagcgaagctagcaccagtcgtcaatggccttggcggattgcagacctcgcttggcgaacaactggcaccgctcaccgacatccgtacctcgatcgacgacttcaagagcggcagcctcaacgatttcggtagcaagctcggcgacgcaatcaaggaaaacgccggcacggaaatgcagggcctggcaaatgctttgacccggatgactgccgacctcggttcggtgaacgaccggcttgagggggcgagcggtgaagcaagcgcgcagatcgccactgccgcgcgcgaattctcggtcgcatcagaggcgatgacgcgcgcctttagcgatttgaacggcaacatcgatcgcatggccacgcggcttgccgaccaagcggacgaggcagaggcgcgcaaccaggcgcgggtcgccgaggaccgcgatgcctatacgcagatcgcgaccggccagcgcgaggtcatgcggactatgggcgaggagatgcgcgccgcctccaccgtcgcgacgcaggaaatggtacgcgcggtccaggccgcggtccgcgaggcgatgggagagagccagaccgcgatccgtggcgcgctcgatggttttgcgggggcaacatccggtatccagattgccttcgatcagatgcgcgcgcaggtcgccgaactggggcaagcattgtcgggcagcgcatctgacgcggccgaacgcaatgccgaggtcttggcgcgcgctggcgccgcgctcgaggctgccgccgcgcaggcgcagagcgggctgagtgagacgctgaacgatgcaatcagccgttccaccgaggcatcgagccaggccatcgccgccgcctttgccacgttcggcgaacggttcgagggggcgagcgccggcttgatctcgacgctgactacaacagctggccgcatggaagcgctggcaggcgcgatcgaacgttcaaccggggcggcgaacgatcatgccggcaagctcgccgatgccgggcgagaagcgcaggcggtgtcgaccatgctcggccgtgccgccaacgacgtgtcgggcgctgccggccccattcgtgatgcagcgcgcacgatcagcgagagcgtcggccagagccaggagctgcttcgccgcgcgaatgaacagggcgaacgccagcaaagtgcgataacctcgatgtccgagcgcctggagcggactgccgacagtgcgaccacggcgtgggagaattatcgcgcccgctttaccgaggtcgacgaatcgctgggcaaggcgctggagcaaatccgtggcgcctcgtccgagcatgccaccgctctcaacacgcatgtcgggcggatcgacggcgcgctcgccgacgcggcgaaccggcttggtgccgcgctcgaaccgttggcggaaatcggccagtcgctggaggatgtcgttggccgtctgcagcagggacagcgctaa

SEQ ID NO: 11126 - DNA, 684 bp, Sphingomonas sp. Leaf25
atggccgacatgatggtcggcctgttgttcgtgttcatcattctgctcctctacttcgcgctccaattccagcagaagagtaaggcactgtccgacgcgggcgaggcgcgcgcgcagctcctaaccgagctgaagcgcgaaatcgaacggtccgatcagacgctgaaggtaactatcgatcccgtcaccggtgtgctgaccctacccgccgcggtgctttttgcgaagggagacgaccgcctttccgcagggggacaagctgcggtcgcggcggtgggacgagccatggcgagggtgctgccctgctatacgctaccccggcgatcggctggatgcagctatgtcaccgaacgtagcatcgatgcgatcttcatcgaggggcataccgacagcgatccgttcaccggcaacgggcggatcggcgacaatctcgatctgtcggcctttcgcgcggccaatacgttccggcagcttcgcacgcttgagctcgggcttgacgggctgcgtaacagcgcagggcagccgatcctgtctgtaagcggctatggcgaggcgcggcccgtgccgaacaatccgggcttgagcgaggcgcagaaaagcctcaatcggcggatcgacctgcgcttccttatggacacaccgaaagccgacgatctcgacgaccttctaacgaggcaacagtga

SEQ ID NO: 11127 - DNA, 1230 bp, Sphingomonas sp. Leaf25
atggctgacgcgcctttcgacccacgaacgctgttgcggcgtgacctgcgccggctcgtcagcgagctttgggaggacgagcggtgcgactcggtcgccatccccgtgctggaagcggcgatcggcaccgatgccaagagcctcgatcgcgcggtgatcggagcctatttgcgccacttcccacgagcgcatcccgcgttcgagccgttgcgcgcggcgagcgcgctaggagcgggccgacgcgattggccttggcgggcgcgcggagagcgatggcagctatgggatgcgtccgccggcccggcgagcctcgcccaggcattgttgggcgctgatgatgcacggacgacgttgcgcgagatcggcctcgatggcgacctagccgaaggcgagttcgtcatagacgcgctcgagacggcatgtgatcaggtgggcagtgcgagtgacgaggccgcgacgaaggcgggtgagcggctgatcggcctcttcgaacgattgggcgtgaccaacctcgacgcgcatctagcctgggcgctcctccatccttggcgtgaccggacgccgcccgatacttatcgcgaacgcctgaccaagctgctggtcgaccgcatcggcgacccgcggttccaacgcggccgatgggatgcgatcgccagtgaaatgccgggtgtcgccgcttccgcgctggtggacatggtgcggcggtggttggtgcaccgcgattttcgcgcgtttttctcgattgtaggggcggtcacgaacgatccaaagcagtgggcatcacgcgaggaattctggctcgggtatcttgatagtgaagtggtcgaagatgcgtgcttcgcctttggccgccaagccgatgcgcttgcagaaatagggcgttcgggaggggattcgctcgattatgccgaaatcatgggtgggggtgccgatccgacgcatagcgcgcttatcatggcgatcggcgatcttcgaatcgcggaatggagccacaacgggtcctgccgcttctgggacaagcgggatatgaaagcaccaggcctttatcagaagcaatattttgggatgcagttgcgggcaatgaacgggggacggccctatgaacagcgctttgccgcgataccccatagttcaggctggcagacccatttcgccggcttcatcttccaaatgactggcatacggcatccacgctggggcgagggcagctcgagacgaagctatgcctga

SEQ ID NO: 11128 - DNA, 3585 bp, Sphingomonas sp. Leaf25
atgcctgaccccacagtccggttcgaggcggtagggaacgtcgtcacgctggtccgtgagacgccgtcgcggctgccgttcggcagcgcatcggcgggcacggtccctgtcgatcaatgggtgatcgcccgccccgcacccgccgccgctgcggtagcgaggctcctgcaggcgatcgaggatggcgagatggccggtgatggccggccgatggcgaccgtggaggcgaaccgggcaatcctgcatcctgtgttcatagcgtgcctgaacgatagcgaagccgtcgcgctcggcctaccgcccgcaacgcgcctgtcgctcaacctgcgatcgagtgggctgatccacaaggacggtttccgcatcgaaaccgaatggacccgcgctggtggcgtccgtgaacgcgcgacgatcgccgagcaccggctgcatcatgcaggcaaggaatggcggatacccgagccattgttctcgacgatacttaccgttgcgcgcgtcaacaccgcaagcgatgcgtcgacccggcaggccgcgctcgccgacttgaagaccacgattggtcaggacgcggcggcgcgcatcgcgaccgacgggcatatcgaccgtctgcgtctgtcctatgcctcgggcttctcgctggtgctgcgcgccggggccgcaggcttcgacttcgaccccgtgctattcgggcgagagcgattggaggcggcagcgaacggcgacccgctcgacgagggtgccgacagcctgttgcccccggcgctcgccgccgacttcatgcgccgctttcggaatggcgacggcacgcgggcgacctatctattgggcgacgggtcgatcctctacatcgaccctcaactgacccgggtcttgggaacggtgcggcgggcgcaggatgcggatcctgacacgcgccgtgcctttgccgccgcacctcagcgctacatcgcagaagcgcttcagaacgccggcgatactccggccgacgccgcgtgcctgttcgttgagacgcagcaattttctcagcgcgtcgcgggcatcgacctgtggcgcaaacccgtccttccatggatcaagcccaaaccgtcgtcttggctgcctgagcgcttcggcctgcggatcggcgatggcgacgatgcccgcacgatcaccattccgccggaacgcatcgacgaagccgctaccgccgcgaccaatgcattgcgagaagcacgagcgagcttccagttcgagggtgaaaccattcctgcgacgcgagcgaccgtcgcctcgctggaaagcctgtccgaactcaccgcagctgcaagaacagcgacaaggcccggcaacaccgacgaccaactaccggcgccgctacgccagcgttactttctgcaggtacgcgacaatctggacgacctgtcctactcgccgctgaccggaacggcaccgtcggctgccccaccgccaccggccgagttgccgacatctctgcggtcggcacccaagccgcatcaggtcaccggctttcgctggctggccgattgctggcgagcgaacatgccgggcgcgctgcttgccgacgacatggggctaggcaagacctatcaggtgcttgctttcgttgcttggatccgggagcagcaggcgcatccggccccggtcctgatcgttgcgccgaccggtcttctggccaattggcgcgccgaaattctccagcatctggaaccggacgcactcggccgactgatcagcgcttacggccgtgagctcggggagctgcgcggcgaagcgggacgcgacatcgacagcggggcaagtgcgctcgatccggcggcatgggagcacgccggtatcgtgctcaccacctatgaaacgatgcgcgattatcatctgagtttcgcgcggctgcgcttctctgcaattctgtatgacgaggcgcagaagctcaagaaccctgcaagccagatcacgcgcgccgccaagacactgaacgcgcgcttcagcctagcgatgacgggcacgccggttgaaaatcggttgcaggacctctggtcgattttcgacgtcgtccatcctgggctcttgggatcgagcaaggcgttcgagcagacctatccgcccgaacctaagccgctggaggcgctacgcgaccggttgaccgaaccgcagggggcgatcccgccagtgctactgcgccggttgaaggaggaatgtctcggcagcctgccgcgcaagattttgcaggcgatgccgatgccaatgccgccccgccaggccgctgcctatgaccgtgcggtgcatcaggcactggcggtcaagggcaccggcgaacgcggccggatgctggaagtgctggccgcgcttcgcggcgtgtcgctgcatccggtgaaccccggcgaggcgggcgagatggcagaatactggaccgactcggcgcgcttgtgcgttctgttcgaggtgctggaccagattgctgcgcgtggcgaaaaggtgctgatcttttgcgagagcctggcgatgcaagggctactggctgcggaaatccggcgccgctacgatctcaggcatatcgtttcccgcattcatggcggggtggccggcgacgcacgccagcgcgaggtcgacgccttccagcggcgcggtcccggtttcgacgcaatgatcctgtcacccaaggctggcggcgtcggcctgacgctgaccgcggccaaccacgtcatccatctgtcgcgctggtggaatccggcggtcgaggatcaggcgaccgatcgtgcctttcgcatcggccagacgcgcgacgtgaccgtctatctgccgcaatcggtgcatcccgatccagcgatcgccgaaacgagcttcgacctcaagctgcatgcactcatggagcgcaagcgagcgctgagccgtggcctcttcgccgccaccgaagacgtgagcgatgccgctgagctgttcgacgcggtcgtgaccgatgccgcacccgtcccgggcgccgccccacccgccgccgctgttcattccgagccgagcgcggtaacgaagccgactggccttcgggagcggttgagtctgcgggtccggcccaaacccgagcctgcggtccctccaccgacgcccgccacgactcggacgctcgcttggccgcagcgggtggtttatcagcccgatactccccgagatctgaccatcttcaccgccccggtcgcgggcgacccgccggtagaaatccatatcgttgacccctatgcagctgcgggtcaacgcgcccgcgatgcgactactgcgttcgtggccatgctggtcggcgaatcgccggcgcctgcgcgggtcacgcttacgacctacgacggcgagagcattgagcggccccccgaaagctcggcgcaacaatatgaagcgatgcaggcgcggtggcgccgcgactttgcagcgacgccgctgacacaccggcagcggtcaaagtggcaggctgccgacctgcatgaccgagaggtacgcgttttgacgcagtcgggtcgaacggtcctatgggatctcggccgtggtattgatggggtgatgagcaccagatttgggttccgggtgaacgtcaccgagatctag

SEQ ID NO: 11129 - DNA, 1452 bp, Rhizobium sp. Leaf68; identical to SEQ ID NO: 11121

SEQ ID NO: 11130 - DNA, 933 bp, Rhizobium sp. Leaf68; identical to SEQ ID NO: 11122

SEQ ID NO: 11131 - DNA, 1332 bp, Rhizobium sp. Leaf68; identical to SEQ ID NO: 11123

SEQ ID NO: 11132 - DNA, 3210 bp, Rhizobium sp. Leaf68; identical to SEQ ID NO: 11124

SEQ ID NO: 11133 - DNA, 2040 bp, Methylobacterium sp. Leaf123
atgtccgagttggtttctgcgttcggaatcgcggcgcgcaacgccgtcctcaccgtggctggattgctgaagagcgaggccgtcccggggctcatcgccgtcgtgctcgtcctggcgctcgcactcctcatcgtcctctacgcgcgaagcatcgccatgcgcgtggcggcggtgcggggcttgcgcctcgtggtgcgccgggccgccgacgaggcctcgttcggacaatccatcgccgacctcgacgcggaggtgctgcgctcgggcagccggggggcgcgcaagcagatcgccaccgcgtgggacaagtatcgcgagacgctggtcgagcacgacgaggacggcgcggtcatcctgcgcaactcggtgcggccagcggtcttcttcaacgccgacgaccttggattcggcgccggcttctggcgggcggtgccgggcctgttcgtgacgatcggcctgttcctgaccttcctgggcctgatctcggcgctcggcgcgatggacctctcgacgccagacaaggtgcagagttcgctgcgcgaattgctgctggtcgcctcggcgaagttcatcatgtcgctgaccggcctcctgtgctcgatcgtattcacgatcgtcctgcgctggggcatcggcagcatcgagggggcgctgcacacgctctgcgccgagatcgagaagcgcctcagcttcatcagcctggagagcctcgcggccgagcagctgcgggcgacccgcgagcagcgggagcactttcgcctgatcggcctcgagctggtcgccgaactcggccgccccctgcgggaagaaataccggccgcgatctcggcctcgatcaacgcgacgatgggcccgctgctgcaacaggtcggccagctcggcaccgatcacatgggcagcatggtcaaggacctctcggcccgcttctccgacgatgtcggccgcgccctggcgcaggcgagcgagcgcttggtccaggcgggcgaccgcatcggcgaactctcgacgcgcatggaccagagttccggccgtatggggtcggagatggacgctgccgtcgcccgcctcgcgcaggccgtcgacgatctgcgggacacgatgagcgccaccgccgcctccgcgagcggcgccttcaccgacggggcggaccgtctcctcggcgccatgaaccagaccctccaggaaatccgcgacaacacccgcgcgggggccgaggccatgggggcggctgccgccgacatgcgtggggcggcggaagggttccgcacggagctggaggcggccacgcgctcgggcgcgaccgaggccgcggcccggatgcaggcggccggttcggaggcgagcgcgcagatcagtgccgccgggtcgaccgtcgtgcaggccttcggccgcacggcgagcgacattgccgaggcgacgcgggaggtcggcgcgcgggcggcccaggacctgctggccccgctggacggcatcgcggcgcggctgcgcgagaccgccgatggcatcgcggccgcggcaggcggggtcgggcgcctgggcgacggggtgcgcgcaagcgccgaggcggccgagcgcgcggccggcgcgttccggggctcgtcggaagccctggtgacggcctccgcgcccctgcgcgccaccaccgagcgaatcgagtccagcatccgccagctcgcggacgcgacgcagcacgtcgccggaacggtgagccgctcggccgagcagaccgcccgcagcgccgccgacgcgctcgccgccgcgcagaccgcgctcggcggccacgcgggtgcgatcgaggcctcgctggcgggcgtcggccaggtggtagaccgcctcaggggccagggcgcgcagctcgacaccctggacgagaagctcggtgccgccttcgacacctacgccacgagggtcgccacggcagtcgcctcgctgtccgactacgtgcgccggatgcagtccgaactcgcgccggccctcgatacgctgcgcgccgtcgtcgagcaggccgagcagttcatccccgaaagtaggaagccctga

SEQ ID NO: 11134 - DNA, 891 bp, Methylobacterium sp. Leaf123
atgcgcggcgcgacccgccgtctcgcgcatgaggaggaggaggaatccgccttcgtctcgatgacggacctcacggtgagcttcctgttcatcgtaatcatcctgctcgccttcttcgcctcgcagctcaaggacgaccagacggttccgctcgcggagtaccggcaggtcgaacgtgagcgggatcgctcggcgaccgagaacgcggacctccgccgcgaggtggcgcgcctggaggaggaattacgcaaggagcgcacgaaccgcctccagacatacctctccgcggtgtcgagcgagcgcgatcggatcctgcggaccttgcgcgaccggctcgtcgtggatttccccgagctcgaaaatatcgtgagcatcgagactggcgcgctgcgctttaagggcgacgggttgttcaagaccgacaggtggcagctcgccgaagacaagcgccgcgtcgtcacggcaatagcgacccgcctgaacgagttgctgccctgctacaccttcggcaaggcggcccggtggcaggcgtcgtgcaacgccgccggcgcggtgatcgaagcggtgcagatcgaggggcacaccgatgcctccggccaggaccgatcgaatttcagcctctcgaccgaacgggcggtcgagaccctcttcgccatgactggacgcgagcccgccctgctagaaaaccgcaacagcgcggggcagccggttctctctgtcgccggctacgggcgccttcgccccgtcgcggacaacacctccgagcgcggcagggccacgaaccggcgcatcgacctgcggatcatcatgtacacgccgcagagcgtcgaggaggtcgagcggatcaaggacgacctccggcgcggcctatccgggacggtgctgcaatga

SEQ ID NO: 11135 - DNA, 1317 bp, Methylobacterium sp. Leaf123
atgagcctggacgccaccctcgcgcgactgcgccccatggaaccgcccgccctgccgaacctcaagaccctcgcgacggccgcagagcgggtcctgcaccgctggccggacgccgcaccggacccgcccgagcgcgaccgcgaacagctcgtgcagcgcatggaggcgcatcgcgccgaggagcggtgggacggggtgcggatgtcgctggtgacggcagcagcgcgtgccgtcttcgacgcgacgaggcgaagcaggcccgacctcgccgatctgcgcggcttctacatcgcggagatccgggcctcgcaccggaccacgttcctgggggcgatggtctcggtctacctcgagagtttcgtgccggccgcgtctcacacgcgggccctcgccgaggccttgagcggggtgcgcgatcgattgggcgcccgctggcgcaccctcgtcgaaggtatcccggaggtgttccggccggacctcgcccccgaggcgatcgcgcgcctgatggtggggatgcggagtccctactccgaattgaaggcgctggggctgcgcgctccgcacgcgccgggcctgatggatttcgtccatgacgcctatgtcgcgcggctcacaccacatctgacgttgcgagccgagatcgagcagctcctgtcgtggctgaaacccgacgatcaggccgtggcccgctcgtcgggggcgcccgcggcgatcgaggctttgctcggccattggcggacgggcaatccgcccgaggccgacatcgacctaatcacacgctccctcgtcgcgttctacggcgatccacgcgtgcagcagggcggggcctgggcgagcgtcgccccggattgtctcgcggtgatcctgcgttggctcaccggcaaggacatccgcttcttcatggacgtcgtctcagccgtggaggatagccacatgtgggagccgcggcggcgcttctggctcaagctgcacgcgcagcgccggatcgacgccgcctgggtcgccttctcgccgagcggcgccgagtacgcgcgacgcctgctcaagtccggcggagagcggggcgtggtgagctacggccagcagacggccggctactcccgagccaacacctcgctcctcatcctgaagtgcggcaacaagatcgttgttgaaggctctcatagctacaaggtgcacatcttccgggaagggcatccgcgcgcgccggccctttatcagcgcgcctacgattgcgagcagatccgtctggtgcccggcgcggaatcgcgatcgcatctcggcgactggcagggatgggtcgaggagcggatctga

SEQ ID NO: 11136 - DNA, 3102 bp, Methylobacterium sp. Leaf123
atggtgtcacccgccctcgacttcaccttcgacccgcaaggcatcacgctctcccgctcgacgcggggcggcctcctcgggcgactggggttcgggcgggatcgccgcgaacttgatcgcctgccgctcgccgaacgcacgctgctccttgcgatcgccgacctgcgggccgcggccgccgagaagcccactgagctcctggagatcacgcctgagcatatccgcctctcgcatcgcttggcggcggccctggacgccgagacggccgcgtcgctcggattgcccccggtggtcgatctgtcgctgcgcacggacgccgagggcgtgctcgggtcgccctcgttccgcctgcgccacgagtgggtcaagaacggccaacgccagaccgtgcagcgggtgggcgccatcctcaagacctcggcaggcccgcgccggctgcccgaatggctcatggatgcggtggcggtctccgagggcttcgaggccggacggaacgagagtcagcactggaacgcgctggcgcgcttccgacaattgctcgaccccggagtccgggtcgcggagccaacggcggcggcgcgggtctcgatgacggacttcctgggcggcctggaggtccggatcgcggatcgtttcgccctcgcgccgaccgccgaggacgatttcgaggtcgtcccgttctcgggccgtgaactcgcccgggccggctacgacgaggccgcggttggcgtgcccgaaggggcgggcgaactcgccggagacctcctgcgcgggtttcaggagcgtgtgcggtcgcggggcgcgctctcggcctaccggctcgggccgggcaacttcctcgtcatcgattcggcggcctcaccggcgctctcagtgatggcccggatgcagcacgcccccgctgcggagcggaaggccttcctgcgcaatccgcgccccctcgtcacccaggcggtggaagcggccttgcgcagcgcgggccggcttgatggccttgacgcggtcggcgaggaggaggccatcgaggccgccgccctcccgctgttcgtcgagacgcaggaatatgccgaccgggtgacgggcgtcggcgtgttccgcaagcccgaactcgagatcggcccgggcagcggcacgacctggctgccggaggccttcgcagaaaggctccagggcgcgctggcggccttgacaccggcggaactcgacgatctgcaccggcaggtctctcaggcgatggcggccggcgaggccaccgtagcactggctgggttcgacttgccggcccgcgccgaggcgctggcgctcatcgggcagtaccgcggggacgaggcggcgaccgaggacgccgtcgaggagaagggaccgtccgagcctgtcgtcctcgagacggtcgacaatttcgatgaattgaagtgggtcgcgcggttgaagccgcgctccacaccgggaggcgaagatgtcccgtctaccatccgcacggacctcaaggcgcatcagcgcacgagcttcgaatggcaggtcgcggcttggaaggccggcctgcccggcatcctcaacgccgacgagcaggggctcggcaagacgcttcagacgatcgcgtttttggcctggctgaagcagcaggcggtcgatccaggggcgctgcaacgggggccggtactcgtcgtcgccccgacctcgctcctcgagaactgggagcaggaggtcgcccgccacacccacgagccgggtctcgggcatctgatccgcctctacggctccgggatcggtgcgcgaaagcgagccggcgagtccggtcgcgacattgatgcgggggagagcaagctcgacctcgccttcctgcacaaggcgctggcggagggccgggcccaccgctcctggatcctcacgacctacacgaccctggtcaactaccagcacagcctccgggaaatccccttcagcgccgtcgtctttgacgagatccaggcgctgaagaaccccgcgagtctacgcgccgccgcggcccgggccgtccgcgcggatttccgcatcgggttgacgggcacgccgatcgagaacgccgcggtcgacctgtgggcgatcatggaccagctggcgccgggctcactcgacagcctccccgagttccgggcccgatatggcacgcccgacgcgaccaacatggcggagcttcatcgccgcgtgttcacgtctgcgctcccggcacagcccctcgcgctgcggcggatcaaggatgtcgtcgcgcgcgacctgcccgagaaggctcggcgcctgcatccgcgcgcgatgccggagcgccagtctgcggcctacgaggacgcccagttcaagctggcgcagggcggggcgggggctgcgttcaagatgctgcaccatatccgcaccgtgtcggttcacccgaatctcgatggggcggagacggattccgcctttgtcgaggcgtcggcgcggctcagcgccgtgttcgagatcctcggcgttatcgctcaacggcgcgagcgcgccctcgtcttcgtcgagcaccgccgcatgcagcaccgcctcgtcgaactcgcccgcgcacgcttcgacctgccgcgcgtcgatctcatcaacggcgacacgccgatctcgcagcgccaagccatcgtcaaccgcttccaacgccatctcgaaggggagccggcgttcgatatcctcgtcctcggcccgaaggcggcgggcacgggcctgacgctcaccgccgccacccacgtcatccacctgtcgcgctggtggaaccccgcggtcgaggagcagtgcaacgatcgcgtccatcggctcggccagacccgccccgtcaccatccacctgccgctggctatccacgcgggctatcgggagggttccttcgattgcctgctccacggcctgatgcatcgcaagcgccggttggccgcttcggccctctggccgatgggcgacacgcaggcggatgtcggcgaactcacgcgcctgctcgacggtgccgcgaagcaggagggggcagaccccgtgcgcagtgcaatcgccgccatgtttgcacgggacgggctggaagcccccgtctgggagcaggatggatcgatccgggtcccgtga

SEQ ID NO: 11137 - DNA, 2058 bp, Acidovorax sp. Leaf160
gtgaacttgcaatccattctcgcgacagctccaacgcccgtcctggctacgggagccgtgctggcattcctcatcttggtcttcctgacggtctttctcgttccgggcgtcctccactggaatcggctgagggctatccagaaggacatccagcgttttgactccaagaactccgcctcggagttcaagaaggtctttgcgcgagaccggcggctggcgcacctctggaaggagtaccaagactccttgcacatccagcgcgaggaacgcgatggccaactcaccgtcatcgcaacccgtgcaacagcgcccgccgagttgtacttcaacagccagttcgtagtcgacagccggcttcgcacggagttcttcaagcacctccctggcctgttcaccggcatcggcatcatcggcaccttcagcgggcttatcgaaggcctgcgccagttccaggtcagcgagaacgctgccaccgttcgggatagcttgcagtcgctcatgcacctcgtgggtgaggcgtttcttgtctcggccgcagccattgccgcagcaatgctcgtgacgttcatcgagaaactgctcctggcctccctctatcgccgtaccgaggaaatcgctcatgacatcgatgcgagcttcgactctggtgcaggggaggaatacctgtcgcgcctcgtacgcgcctccgaggactccgccagccagtccaagattctcaaagacgccttggtcaaggagctgggtgaactgcttcgagagctgacctccgctcaaatcacggcatcgaaagacgcccaattgcagctggtcgaccgcctgacccagacctcgaaagagcaagtcgacgcgtccagggaagacaacaaggcactgggtgccaccattgcagagagcatccaacagagtctccaaggtcctctgcaagacatcgccagcactgtcaaggccgcgagcggcgaccaaagcgctacggctgcacgcatgcttcaggacgtcatggccagcttcagccagcgcttgaatgacctgttcggtggacagattagcggtctgagcgacctcaatcagcagacagccaagagcatccaggacgccgtcggaaccctgcagacgctcgtcgccaacattgaagaatccagccgccgttccacggacacgatggccgagcgaatggcccaggcgattgagaagatggaggcacggcaagaagcgatgaacgcccagtccgcggctttcatcgagcaaattcggcaactcgttgcatcgtcgcagtcagagacgaacaccaagcttcaggccacactggaaaccatcggaacccaggtggcgggcatgcttgccacgttgaacgactcccaggctgcggtgttcgaaagcaatcgtgctcgtgagcaagtcatggcggaccgcacaaccagtgccgtcaacagcatgtccgagtcggtcgaggccgccatcaaggaaatcggcgtggcgtccacgcagatggcccagaacgtcgcggtcctcacccaaaccaccagcacctcggtcgacaaaatgaatgccggtgctgagcaactgggagctgcctctcgaaacttcgccgcggcgggcgagcgtgtcaccggcgtgctcggacaagcggcaagcgtcactgccaagctcgccgaaacatctggtgcacttacagccggggcctccactttgcaagacctcttgcgtgactatcgcgtccaacgtgatgcagtcggtcaattggtcgccgaactgcgagaaaccgtcgagctcgccaggaaagaggcctctctcacaaccgacatcctcgcacgcatcgagagttcggcgacccgattgggaaccgctcagaagcaggccgatgaatatttggaaggtgtcagcagggtgctcggcgaagcccatacgaccttcgccactgaagttcggcgcaccctggagaaagccaacacagagttccacaacaagctcggtgcagccgtcggcctcctgtcctccggtgtgcaagagctggaggtgacgcttgcctccatgggcaacatgaaaccagcgcgggtgtaa

SEQ ID NO: 11138 - DNA, 711 bp, Acidovorax sp. Leaf160
atggtaggggccaagcttgtcatcaaacgcggcggccgggatgaggcggagaagccattttggatttccttcgcggacctcatgactgcgctgatggtcttgttcctcgtggtgatgggcgttgcactgctcgccgtgacgaagaacgtgaccgaacgcgagaaggcggaagaacagcatcgcaaggacatcgagcgcatcctcgaacggttcacggaagcggcgaaacgctatgacggcatcaaggtcgacaaggagcgtcgcgtcatcgacttcggcgaccgcgcccggtttgccttcggtaaatccacgctgacgtcggaccaggagagcgtcctgagacagttcgtgccggaaatcctcacattggccaatgaagacctgggcaaacgcgtgctcaagcgcgttgttgttgaagggtacacggacaaaacgggttcctatctgagtaacttgaatctcagcctgcaacgcagccaacgggttctgtgcacgatgtttgcgaccagcggcactaacgttctgtcggctccgcagaaggaggacgtccgaagcctctttctcgtcggtggctactccttcaatgcggccaaggaaaccgacgaagaaagccgccgggtagaaatgcggatggagttcctgggcatcaacgagcaccgagcgccggcgccggtcgagtccggaaacttcggagagtgcgccctgcgatga

SEQ ID NO: 11139 - DNA, 1338 bp, Acidovorax sp. Leaf160
ttggctaaaagctacttcacttacgacgcgttcggggacaacgtacgcgcgacggcccgcaacaactggaagctgctgcgcgaatatctgcacgacaagaacggcctcatcaaagaccagcacatcaatccaggctgggtagccaccgctaccggcaacaggcaactgttcggggagagcccctgcgctccctatatcgatgagttgctgcggggcgatgccagtgctattgaccatctctgcgcagaactgggcatcgccaaggcttcctggttcttgcgcgaacttgttctcgcccaaatccgcggagcgacgcagctgagcgatagccagttcaaaggcctgctgccccggatgctggagctcctcgcaaacaacgatgtgctgcgagaccgtggtctcgtcatgctgctagacaggtacgtgaaagtccccggcatgcatctgcagcagaacctgcgggactggtcagtgctttggtggggaaatccatggctcccctccaatgaaacccgttggggtggcgtcgtgcccgaagcacggtccatggtctccgattggctcaaactggagttcatcgagaccttcttcaccaaactggctgaagatggcctgggtgaccgccgtcgcatggagttctggaagcgctacgtcaaggccatcgacaacatcgaattcgcccttgggtcgacggcgaggaatgcccgagaccgggactttgttgctctgcgcaagaagatggatgggctcatttgtcatctcgatgcatcgggtagcaacaacgccttcatcatgcggatgggcgacctggtcgccgtcgagttcagtggcatgggtaacgccctgtacgggtacgacgcccgcaggaccgttccattcgacacggctgagccgctacgcctgccgcagtacgaccacaattcgctcaaacagaagaaccgcagcatcctgtggctcagccaccaagatggcatcaacggctggtccaagtgggaacagatgttcgacgccaagttgcgcgaggagttcggcatcaagccccagaccgctgcgacgcgcgtagctcggccctcacaaccctattccactcgaactccagaagacctcccaccgctccgagagcaacctgctgctgaaggcgcaggcgcggaggtcccccggcactacaaccggtttgctttgaacaaactgtcccatcgacttggtttgcgcatcgaagacagaacgcccaagggcggcagcctctgggtccttacagatgactccgaccgacaggtctccgaaattctgtccacctggggcttccaacacaaggctggcaagggctggtggagataa

SEQ ID NO: 11140 - DNA, 3753 bp, Acidovorax sp. Leaf160
atgttccagttattcaagaagaacgcagcacctccgtccgaatgggcgcgtcgctggtcgccgaccggcctggtcatcgctcgtggccccggacatggtggcggcgtacacctgcgcgaccccatggttggcgggttccttactcagttggccgacgatggccttgcggtcgaagtcgaagatggttttcttctgggatgggatgcgttgtacgccgccatcgccgatgccgcctatgcctcgcttcccgaagtcctgtcgacgcctcctttcacgaaggcgcgacctgtactccaaagcagcaactcgttgaccgacggaaacttctccatcgctctcgcaggttggcgagaccgtgatggagcgccccaggactgggagctcacaggcccgctgatggcgcgcgaagactgctcggaattgatgcaacccaagcagtgggagctgttcaaagcggttgttgcctttgctcgacgcccggcctcagagcgcaccgatatcgcacatcgccaagcttggggcggcatccgaaagctcgcacttcaagcaggtgcgcaactcgacgattttctttatcggtcagtggtgctgaccccagaaaagctggagatagggctgcggcgctctgatgtggtcgacgatgaccatgtggtggagatagagcctggattcgagggagccccttcgaattggctggacgcgttcgaccgcagcaaggacgttcgagaccgctatgacatcgtcacgccggaaggaatcatccagattctggtggcccccaaggtccgcaccgttttgcaagaaatcaagcgactacccggccggcgagtcgcaggcagccgagcccaggccttcctggtcaacccatacgccacgttgggcgatgacgcagtcgatgtcatcgtcgagtctcagttcgagcaggcccgtgaagacgctggactcgcatacgagcgattcacccccgtttttgagcgtgacgcttcggggtaccccctgcaggtgggcttgctcatcgaaacagccaacaccagcggtccgacgacatcccagacagaatggctggacgatgctcaactcgacgtgttcgttcgaacccttcacaccgcgcttacccgcaactaccagctcgtcgcctggcatggatatgaccttgaggtgcaaggcgacactcagcgccatctcgaagaactgaaagaagcgctcgcccggcggagcgccccgcccaccctggtctcgtatgcccaagtccatgacctcagtggctacagctcacgcgtggaaggcatcggtgtcgagaagccgtactactccccttacatcacgaagaaggacgaaggggaaggatggttccccgagaacgtactacccgtcgtcgtttaccaaccggcagacggtggggagccagtagccgttccgacaaacaaggcggccattgaccggttggagaacgcgatagctgcggctcagcaatccggggcatcgaccgtaaaggcgtcttggctgcctcaggatattccgctggatgaggcgacagccatcgtcaaaacgttcaaggaagtcttcaaagacctcgagaataggactgccccgcccccaacactgccgccaccaccgccaagcgcgcagaaaaagcagctcgtattgcgagcaaatattcaagcactggagtacgaagaactccgtcgtgatgcgctggagtccgtaccgtccgaacccaaagttccgaaggcgattcgcgcagaatacccccttatgaagcatcagcgggatggcctggcctggatgcaacatttgttcagcctccagaccgactaccaggtgcgcggtgcggtccttgccgatgacatgggcctgggcaagaccttccaattgcttgccttgatggcatacctcattgagaaagaaccttctattgagcccatgctcgtggtcgctcctgtgtctctgctggagaactgggcagaggaagctcgcaagttcttccgggaaggctcacttccgctgctgaccgcctacggtgatgcactggcgcctttgcgggtgccgcgcgcccaggtagagcagcgactgcagaccgacgacgggctcgtgaagttcctgcgaccaaactgggttggtgatgccaaggtggttctaaccacctacgaaaccctgcgtgacctagagttttcgttcgctgcgcagaagtggtcattgatggtctgcgatgaggctcagcgcatcaagaaccctgcggcaatggttacccgaaccgcgaagaagcagaacgtggccttcaagattgcctgtacggggactcccgtggagaacacgcttgccgacatgtggtgcctgttcgacttcgttcagcccggcctactcggtgctctcaacgacttcgggcaacgctaccgcaagccaattgaggccaagacggatgaagagaaggcccgcgttgaggaactacggaatcgcattgctccgcagattctgcggcggatgaaagcggacgtggcaactgaactgcccaagaagattgttgtcgaggactgccgcaagctgtcgctgtccagcacgcagcgcaacctgtacgccaaagccatcgacagtttcaagaaacgtggcgacccagaccaccccacgcctttcaaaaaccatctggggttgctgcactacctgcgccttgtctgtaccgacccgcggccgcacggtctgaatgtcttcaagccagagccgaccaagcagtaccgagaaaaggctcccaagctggattggctgttggcgcagctacgccaagtacagaagaagcaagaaaaggctatcgtattctgtgagttccgggagattcagagactcttacagcactacattgaggctgagttcggtctcaaaccagacatcatcaatggcgacacaagcgcctcggccagtcataccgccagccgacaaaaacgcatcaaggccttccaagaagcgcccggattcggtgtcctcgtcctttctccagtggccgttggcttcggagtgaacatccaggcagcgaaccacgtggtccactacacccggacttggaacccagccaaagaggaccaagccaccgaccgggcataccgcatcggacaaaagaaagacgtttatgtctactaccctgtcgtctgggctgaagacttcacaacttttgatgtaaaactggaccggctactcacctacaaacgtggtctagccgaagacatgctcaatggctccggcgatgtgaaccctggcgactttaatattgcggatgtcgttcccgtcgccgatagtttggatattgatgagcgtgtcaccctggatatggcgctgcgcatgagctggcagcacttcgagtgtctcactggtgttctatggatgaagcaaggatacgactgctatcgcactccaggcgccgcagacaacggggtggacgtcgtcgcgctggcgtcgtccaaggggaaattgatacaagccaaaaccagtggaaaccaaggcacctcactgaactgggatgccgtgaaggaagtggtgaccggagaagccttctaccggcggcggcatccaatggtggacttcgacaaggtttgcattaccaaccagttcttcaataggcaagctcatgaaaatgctgcgttgaattccgtagaactgctggaccaaactcatttggcggagctcctgggccgtcacacagtgaccatgctggaggttgagagaatgctctattccgagtggtccgatatcccctcgaatcaatag

SEQ ID NO: 11141 - DNA, 2040 bp, Aureimonas sp. Leaf324
attttggaattgatcctcgctgtcggcaattcggtccgcgagcatgtgctcggtgtcgcggcccttctaaaaaatcccgcttctcccggcctagtcactttggctctgatctcggttttggtcgcagccatcctccaatttgggctaacggtcaaaaggcgacgatccgcacttaaccgagcccaggaaattatttcttcggccacagacgcgaaaacgttcagcagctccatctcgcggttcgatgctcagattcgggcgctagcgggatcctcagagcaacgccacgtcagagccgcatggagtaagtatagagagacccttgttctccacgaagaggaacacgaaaccattttacgcaatgccgtccgtcccgcgacgttcttcaacctcgaagacttggggtttggagcgggcttctggcgcattgtacctggactctttgtatctgttggcctcttccttacttttcttggcctcatatccgcactcacttcgcttgacttaacaacacccgatcaggtgcagacgtcgttacgcgaacttctaacgattgcctcggcgaagttcatcatgtcgctcacaggcttgctctgttcgatcgttttcacgattgcgctgcgcattggattgggccgggttgaccaagccatccaccagctttgtggaaaaattgaacaatgcctcacttacataagcttggaggctctggctgctgaacagctcgctgcaacacgtgagcagcgtgaacatttccgtcacataggcttggaacttgtggcggagctgggacgccctctgcgcgaggacttgcctttagcgatctcgacttcgatcgcctctgccatgtcacctatcctgcaacaggttgggcaagcgggtgcagacggcatgggttcaatggttaaggacctatcttcccgtttttccgacgatgtcgggcgcgcactttcggatgcaagcgccaagttggctgaagctggcgaacggatcggccatctgtccgaacgcatggaccagagttccgggcgaatgggaagcgagatggactcagccgtcactcgactttcacaggcgatcgaagacttgcgcaattctatgggatcgactgcggaaacagcgagcggcgctctgaccaaaggggcagaccatctcctttcggtcatgaatcaaacgctggagggcatacgagataacacgggagaaggcgctcgggcgatcagcgcggctgcatttgagatgcggggcgccgctgaaatcttcagaacagagatcgaacaagcgtcccgcagcggttcggaagcggtcaatgccaggcttcagaatgctggcgacgacgccagtaacgcgatcggcacggccggccgaggtatgattgaagttttcggacaaacgagcggagaactggctagagtagcctccgatctttcggaaaaagcggctcgagatcttttcgagcctcttgatcgcatctcggagaagttcagcgtcatcttggacggactagcagacggcacaaccaacctccgtcgcctttcggacggcatgcgagccggtgccgaggccagcgaaaccgcggccggcaattttcgctccgcttcgaacgacttcgttcaggcggcaacaccgatgcgggcgatccacgagcgaatcgaagccgccatccggcaactgtccaccagcacacagaccgtcgccgaaacgctatcgcggtccgctgaaacaacggcgcggagtgccgctgatacgcttgcctcagcaagtcaggttctcggcggagaagctcgcgcgatcgagtccgcactaagcggggttgccaccgtcctcgaacggatgaaaggccaaggcgaccgtcttgacgagatggacgagaagctcgggcgcgcgttcgagatctacaatgaacgcgtcgctgctgccgttgaaggcatgttcgaccatgtgcgacgaatgcaggccgagctgtcgccggctctcgacacactacaatccgtcgtcgagcaagctgaacagtttgcgccggaaagccggaggcgctga

SEQ ID NO: 11142 - DNA, 999 bp, Aureimonas sp. Leaf324
atgagaggcggcacttacaagcgccaccatgaagaagaggaagagtcagtcttcgtggcgatgactgacatgaccgtaagcttcctcttcgtcgtcatgatcctcctagcattcttcgcttctcagattcaggatgaagacactgtgccgcgtgcgcagtaccagacactagaaaacgaaaggagccggctgcaaagtgagctgaacgcagccctccgcctccagcagcaggcggaagatcgccttcgcgaacttgagcgggatctacagcggcaagcggaggcactcaacatcgccattgcagctaagaatgcagcagacgagcgggttgcgacgttagaggccgaactagcaaggttggatcagaaggatccgctcgagatttatctagcggaggtggcggatcaacgccgaaatattctggaaagcctacagaagcagttaaagatcgatttcccagacctgcaagtcgtggttagcgaggaactggatgctctcagatttaagggagacggcctcttcgaacgcggaaaaagcagccttcgaccagacaagcggctaatcatcgaaaacatcgccgctcgcctcgatgaaacgctgacttgcttcactcttggcagcacagctcgttggagcgaaacctgcaacgagattggtgcggtcatcgaagctgttcagatcgaagggcacaccgatgccgacggtcccgacaacgcgaatattgcgctctcgactgcccgcgccaacgagacctttttcgccatgacggcgcgtgtgccgtcgctggtcgatcacttcaacacacgcaaccaacctgtcttgtctgtcgcgggctatgggaaaatgcgccctatcgcgcccaatgataccttggaaggtaaagcgaccaatcgccgaattgatcttcggataattatgtacactccgcggtcagccgatgaaatcagcgcgattgccgataagctccgcagtggaatcacgcatggagctccgctttga

SEQ ID NO: 11143 - DNA, 1314 bp, Aureimonas sp. Leaf324
ttgatgctcaaggagcttctgtcgcgccccacatcgttcgaggcacctgcgcttcctgctttgaacaggcttatcgcgacgaaagaacgtgttttgagccgctggccggacgttactcccgaacccgccgagaaggatcgagaacggctcgtagcagaaatgcgtaatcgagtggtccgtgatcaatgggatggcgctcacctctcgttcgtcacagcagccgccagagcaaccttcgacgcggaacgccaagggcgttcagatcttgccgagcttcgcgctttctacgttgacgagatacgagcttccacgagccggacgtttctcagcgctatgtcatcagtttacgtcggcagtttcgtgccgggtgcgcagcatacgataacgcttgcaggggcgctccaggacgtgttggtccgcatcggctccccatggcgtcagctcttcgaacatgtcccggccattctatcgccaagtggcgcatcgaaggcaattgctgagttgatgacgacaatgactgatcctttcaatgaactaaaaaggatcggaatgcgcagcccccacgcaaccgggctcatggatcacgcgcatgtcgcttacgtcgaaaccctggagcgcgagctttcgcaacgcgcgggactcgatcggttgtttcagtggttgagacctgacgggcagagcgcgcgcgtgtcaggcggcgcggaagccatcaacgcagtgctcggtcactggcttaccaagaacccagctgccgctgacgtcacccacatcacgcagtcgctcatcgggttctatggcgatcctaggatccagcggggcggcgcgtgggccggcgtgtcccccgatcgtcttgccgtcattctgcgctggctgacgggcgagaacatcaggttctttctggatgtggtgtctgccgtagaagacagtcatatgtgggagccccggaggcgcttctggctgaagctgtatgaacaggggcgaatcagtgctgcttgggtcgcattcagcaaacctgccgctcagtacgctcggcagcactcttcaatgcacggcagcacagggatgctaaattttggccatcaaattgctcgtggcgggcgcatgaatacttctcttctcattcttaaaatcggtcaaaagatagtcgtcgaggggtcgcataattataaagttcatattttcgacgaacacagcgtgacaagcccgcaactgtatcagcgtggatacgactgcgaaaagatccgacttctcccaaaggccaacgcgaaatcccataatggagattggcaaggttgggttcttgaaagagtctaa

SEQ ID NO: 11144 - DNA, 2034 bp, Rhizobium sp. Leaf371
gtgcagtttgtaatttccataggagattttttccgagcctcaatcttgcatctcgcgggacttttgacacacgaatctgcgccagggtttattgcttttctcctgctgctggctctccttgtggtgtcggttgcattttggcgccgggtaagcaagcaacgccgcgcggtggtgtggttgcgcaaacagatttccgctagcgccaatgaaatcgaattcagccgcgatatcgacgccctttgcgcgaaaatcacagaaaatgcaaagtctcctgaacagcgccaacttgctcacgcatggaccgagtatcgggagacatttgttccccacgaggaagacggcaatatcattcttcgaaatgcggtccgaccctcgacgttcttgaatgttgaagatttgggtttcggggcgggagcctggcgtatcgctccgggcctgttcgtgacgatcggactgtttctgacgttccttggattgatatcggcattgaatgcgatgtctcaaggcgacgaaatcaacagcgcaacaatgagaacgttgctaagtatcgcgtcagcaaagttcataatgtcgctgacaggcctcttctgctccattgtcttcaccgtcgtattccgccgcgtttacgggttgctgctgaaagccacgcatgggctttgtgagtccatcgagaaaaagctgacatacatcagccttgaagcgctcgcgtccgaacagctccaggccgttcgtgaacaacgtgaacacttccgcatcatcggaatggaattggtcgccgaaattggtcgcccacttcgggaagagctgcctaaggcaatctctgcgtccatcagcgacgcgatggcccctatgatggaccgcgttggaaagctcggcgctgaaggcgtcggcgatctggtttccggcctctccaacaaactcaccgacacagtcggccttgccctgtccgatgccagccagcgtctctcggaagccggaatgaagatcggacagctagccgatcgcatggaccagagttccggccgcatgggttcggagatggaaacggcgacgatgcgggtcgcgcaagcggtcgaggagctaaggaactcgatggccgcgacaacgcagtcggcgggaggggcatttacgcagggcgcggaacggctgctcgatgtcatgaaccagacactggagggcatccgcagcaataccggggaaggcgctcaggccatgtccgccgccgcaggcgaaatgcgcgctgctgccgaatcgtttcgctctgaaatcgaggctgcggcgaaatccggcaccgaggccgcaaatgcacgaattcaggctgcgacgtcggacgcgagcggctcgatcagcgccgctggccagaacgtcgtcgatgccttcggcagaaccagtgccgagatcgcccggatttccgagcaggccgcgatgaaggcgggccaggaactgatggcaccgctggagggcatcgcaggtcagctcaaggagatgatcacagggctcaatcagagcaatgctgatctgcgccgaatggccgagggagtgcgtgcaggcgcagatgcatcctccgaggcggccggcaccttccgttccgcatccggcgatctcatttccgccgccacgccaatccggtctattgccgaacggatcgatacatcggtccgtcagctgaccgacagtacacagcatgttgccagcgtcgtctcgagaaccgcagagacgacggcacagtctgccgcagcggccctcgacgccgcggaaaagatactggggcaggagcggctcgcaatcgagaccacgatgtcaggtctgaaaactctcgtggaccagatgcgcggtcagggcgatcgtctggatgacatggatagcaagcttggtaatgcgttcgatatttacaccgagcaggtcgcgcgcgccatcgacggaatgttcgggcatgttcgcgagatgcaggatcgcttgaacccggctctcgacacgatgagggaaatcgttgagcaggccgagcagtttgcgccgcagtcacggagagtgtga

SEQ ID NO: 11145 - DNA, 981 bp, Rhizobium sp. Leaf371
atgcgcggcggtttcagggttcagcatcaggaagaagaagaggagagcgcgttcgtctccatgacggacatgaccgtcagcttcctgttcatcgtcatgcttcttctggcgttcttcgcaagcgagtacagcgaaaacgatactgtcagcaggacgatccacgaagaggtcgtggcagaacgcgacacggccctggaggagataaagaagctgcgcgcgctcatctccgacaaggagaaacgcatcgatgagcagtccgtcgaactcgacacacagcagatcgagatagctcaacttcagaaaaagatcgccgaactggaagagatcatcgcgaaatccaaaaagcccgatcctctcgaagcatatttgacacggtcggcagcggagcggcgtcgaattctcgagacactccgtaaccagttgaaagtcgattttcctgacctgcaggtcgtcatcagcgaggaaagcgacgcactccgtttccagggcgaaggtctttttgacaggggtatcagcacgttgaaggctgacagaagggcggtcgtcgaaaagattgccgcgcgcctcgagcagatactgccttgctatacgttgggtccgaagaagtcgtggaatttggaatgcaacccgagcctgtccatcatcgaggcattgcagatcgaagggcacacggattcggacggaacccccgacagcaacctgaatctctccacggcgcgggccaattctaccttcaccacaatgactgcgagcaaaccgggactggtggatttccagaattttcgcaaccagcccgttctttccgtggcaggatatgggcagatgcgaccaatccgaaagaacgatacgcttgagggaaaggcaaccaaccgccgggttgatctgcggatcatcatgtacagcccgagccgatcagacgaaatcgaacggattcgcgcttctctcgaaaagagcgacggggtggcgaatgggaatccttga

SEQ ID NO: 11146 - DNA, 1314 bp, Rhizobium sp. Leaf371
atgggaatccttgagaagctgaaggcgcgcggtcgctttgaagctcccgcccttcccgcgataaatcggctgtggtcggcgacggaacgtatcctctctcgctggcccgacgtcgtagcgaacccaccggagcgcgatcgcgagaggctcgtcgccgagatcaatcgccgcttccagagcgatgactggaacaacacgccgatgtcgcttgtcacatcggcggcaagagcgctctttgatgaggagcggcgtgagcgaccagacctcgcggacctccgcaggttctattacgacgaatgccgggtttcgacgcgtatgggctttcttggcgccatggcatcgatttatattggtagctatgttcccactgctcgccacaccttggagctatcggaagtgcttcgcgaggctcggattcgtttgggcggacgctggaaaaacctgctggagcgcatccccgagatactcgatccattcatcgcgcatgaggccgtcgcccaaaagatgctcccgatggacgatccatggagtggcctgaaaagtctgggtctccgcagcccgcattctaatggtttgatggaccacgctcacctcgcctatattcggtcaatcgcaccggagctgaagagccgcgaaggcatggcaaggctattcggatggctgaagcccgataatcaggaagcgaagcttacaggttctgcggacgcaatttccgcttgccttggccattggacgcaagcggtaccaccggaggatgaccagcgttatctcctcgaaaacctgatcgggctttatggcgatccgcgggtgcagcgcggcgacgcctggacgggcgtgcccgagcagttgatgagcgtcatcctccgatggctgacccgcgagaacatccgcttcttcctcgatatcgtttcagccgtcgaagaaagccacatgtgggagccgcggcgaaagttctggctgggtctgcaccagcaagggcggatagatgccgcatgggttgccttcagtgaccgagcggctcgagaggcccgaacgagaagcaaacagtctggtagtcgaggaacgctgcgctttggtcgccagattgccggcgggggccggagtaacacgtcgcttctgatattaaaggttgggcgcaagatcgtcgtagagggctcacacagctataaggtccatgtgttcgacgctacgaatctgcgggctccggccctgtacggcgacaactacgattgtgacgacatccgggacattccaggagccaaggcgaagtctcaccaaggctactgggaaggttgggtgctggaaaacatctga

SEQ ID NO: 11147 - DNA, 3102 bp, Rhizobium sp. Leaf371
ttggaatttgatgtctcgttcgaccagagcgttgtaactcttgcccttcgtgaaaaacgatatgggtttcttagccggctgatgtccagaaaggcgacaaccgatctggacagcctcccgatcgaggaacgcgatctcctgttggccgtcgccgatgtccgtgcaatcggtgatgagattgatgctccacctcgtatcacctcgaacgccattgttctcgatcaccgccttgtcgccgctcttgacgccaggactgcggaaattctgggattgccggctgtggttgatctggtcctcaagaccgacgtcgaaggcattgtcggggctagcaacttccggctgaggcatgaatggctgcgcaacggacagcgacaatttcccaaaaggatcgggtctatccttgaaacagccaacggactgcgccgcgttccgttgtggatgatggacgcgatcgaaacgtcggaagcgcatcggcccggcaacggcgattcgacggactgggaagccttggcacggttcaggcagatgctggacccgggtaccgatggcgaaaacaaaggccctgccgctcggctttccatgaccgactttctcagcggtctacaagtgcggatggcagacagtttttccatttcgccccgcagttcgtccgattttgacgtcgttccattttcattccagcgcctggaacgcgatctgagcggcttcgacgaaatttccgaagacatgggcgaaatcaggaataccgacctcggtatcttccagaaccgggttcgcgaacgcggcgctctccccgcttacaggctttcgcccggcagctacctcgttgttgaccgttcggcggcacccgccctgcaggtgatgggagagatgcaacatgcgccggcggcagaacgtcaggacttcatccgcaatccgggcctgaagatatcgaatgccgtagaagcttcgcttcgatctcaaggcaagcttgaaggtctgtcaccccaagccgagcaggagatgatcgaggctgcggcaggcagcctcatcgtcgaaaccaaggaattctccgaacgcgtgacgggcgtcgtgactttcgagaagatcgcgctcgacatcacggaaggtagcgggacgacttggctgcctgaagaattcagccgaaaactcggagaggcgctcggtgcgatgcctcggtccgacctcgaggcgctacgggaaagggtttcatctgctatcgagcaagagaaatccgcggttgaactgggcgaactttcgataccggccaggccggaaatgctgagcgtgatagacaatcatctcagcgcggccgcagaaaacgacgacggtgataacgtcgacgaaaagaccgacgaagggaagcgcggacccgtcgtcctcgacaccgcagtcaactttgaagaggtttcctggcacgcgaaactcaccccgagatcagcgacggccagttccgggattccgacttccatcagaacacccctgaaacctcaccaggtagagagcttgcaatggcagatcgaagcctggaaggctggcctccccggcgtactgaatgcagacgaacaggggttggggaagacgcttcagacgatcgccttcctgacttggctgaaatcgcatatggcggaaacggatgctcacaacaaaggtccggtccttgtcgttgcgccgacgtccctgcttgaaaactgggaacaggaagtcgcccgccatcttcacgatcctggcctggggcatctcatccggctttacggtagcagtctcggtggccgaaagctggtcggtgcaaaggggcgtgacaccgacagcggagacgccaaactcgacctgagctccctacacgaagcgatcgaggagggccgtgctcacaggttctggcttctgacgacctacactacccttacaaactatcagcattcgctgggtcgcatcccgttctccgcgatcgtcttcgacgaaattcaggcgttgaaaaaccccgtcagcctcagagccgtcgccgcacgagcgatgaatgccgactttcgcattggtctgacaggtacgccaatcgaaaacgctgcgaccgatctctggtcgatcatggatcagctcgcaccaggctcgctcgacagtctgcgtgacttccacgggagatacaaggaaccgacggcagataacatgaccgatctccatgcacgcgctttccggcccaataaggattgcccaccactggcactgcggcgcctgaaagacgaagtcgcgtcccatcttcccaaaaagtcgcggaaaattcatcccagactgatgccggaaggccaggctattgcctacgacgatgccaaactgaaattggcaactggcggcctcggcgctcagctgaagatgctgcatcacattcgcaccgtgtccgtccacccatccgtccagtctgcatggagcgacgaggacttcatttcggcatcgggacgcctgaccgccgtcatggatatcctgcgccgtgttcatgcgcagggcgagagagctctcgtcttcatagagcacaggcagatgcagtaccgttttgtcgagctggtaaaagctgagttcaagcttcagagggtcgatctgatcaacggcgacacgccgatcccccagcgccaagccatcgtcaaccggttccagcggcatctggaagacgatcgggggtttgatctccttgtattgggaccgaaggctgctggcactggtctgacgcttacggctgccacacatgtcatccatctttcccgctggtggaatccggctgtcgaagagcaatgcaatgaccgtgttcatcgtatcggtcagacaaaccctgtgacggtccacatccccatggcggtacatgcgtcataccaggaccaatcctttgattgcctccttcagagcctgatgatgcgcaagcggcgcctcgccagttccgcgctttggcccatgggcgacacacaggatgatgtcgcagcacttcagcagctgatgagtgccgagaagacaggcgacaagggcgatccggtgagagccgcgatgcagggaatgtttgaacgggacaagctgaggtttccggcggcggaggccgacggatcgctggcgatcgattga

SEQ ID NO: 11148 - DNA, 2034 bp, Rhizobium sp. Root1212
gtgcagatcatcatttcgaccggagactttttccgtacattcattttgtatattgcgggtttgttgacacatgaatctgcgcccggattcattgctttcctccttttgctgtcactgttgatcgcatcgttcgcgttctggaaaagggtgaacaaacagagacgagccgttctctggctcaagagagagatagcggccagtgccgacgagctcgaattcagccgcaacatcgatgcgctcggcgcgaagattgcagagaacgcgaagtctccgcagcaacgtcagctggcgcatgcgtggacggaataccgcgagacctttgttccccacgaggaagacggcaacatcatccttcgcaatgccgtgcgaccatcaacgttcctgaatgtcgaggacctggggttcggtgccggagcctggcggatcgctcccggcctgttcgttaccattggattgtttctgacctttctcgggctgatctccgcactgaacgccatgtctcagggcgaggagatcaacagcgcgacaatgaggacgctgctgagcatcgcttcggcgaagttcatcatgtcgctgactggcctgttctgctcgatcatcttcaccgtcgtgtttcgccgcgtctacggtggactcctcaaggccgcccatgatctttgcgaggcgatcgaaaagaagctgacctacatcagcctcgaagcgctggcatcggaacagcttcaggctattcgcgaacagcgcgaacatttccgcattatcggcatggagcttgtctccgaacttggacggccacttcgtgaggaactgccaaaagcgatctctgcgtccatcagcgacgcgatggccccgatgatggaccgcgttggaaagctcggcgccgaaggcgtcggcgatctggtttccggcctctccaacaaactgaccgacactgttggcctcgccctgtccgatgcaagccagcgtctctccgaagccggaatgaagatcggacagctcgcagatcgcatggaccagagttccggccgcatgggttcggaaatggaaacggcaacgatgcgggtcgcgcaggcggtcgaggagctcagaaactcaatggccgcaaccacgcagtcggcgggaggggcgttcacacaaggcgcggaacggttgctcgatgtcatgaaccagacactggagggcatccgcagcaataccggggaaggcgctcgggccatgtccgcggcagcaggcgacatgcgcgctgcagcggaatcgtttcggtcggaaattgaggccgcggccaaatccggcacggaggccgctaacgcacgaattcaggctgcgacgtcggacgcgagcggctcgatcagcacggctggccagaacgtcgtcgatgcctttggcaggaccagtgccgagatcgcccggatttccgagcaggccgcgatgaaggcgggccaggaactgatggcaccgctggagggcatcgcagggcagctcaaggagatgatcacagggctcaatcagggcaatgccgacctgcgccgaatggcagagggagtgcgtgcaggcgcagatgcatcctccgaggccgctggcaccttccgttccgcatccggcgatctcatttccgccgccacgccaatccggtctattgccgaacggatcgacacatcggtacgtcagttgaccgacagtacacagcatgtcgccagcgtcgtctcgagaacggcagagacaactgcacagtctgccgcagcggcgcttgatgccgcggaaaagatactggggcaggagcggctggcgatcgagagcaccatgtccggtctgaaaacactcgtggaccagatgcgcggtcaaggcgatcgtctggatgacatggatagcaagctgggtaatgcattcgaaatttacaccgagcaggtcgcacgcgccatcgacggaatgttcgggcatgttcgcgacatgcaggatcgcttgaacccggctctcgacacgatgagggaaatcgtcgagcaggccgagcagtttgcgccgcagtcacggagagtgtga

SEQ ID NO: 11149 - DNA, 981 bp, Rhizobium sp. Root1212
atgcgtggcggtttcagggttcagcatcaggaagaagaagaggagagcgcgttcgtctccatgacggacatgaccgtcagcttcctgttcatcgtcatgcttcttctggcattcttcgcaagccagtacagcgaaaacgatactgtcagcaggacgatccacgaagaggtcgtggcagaacgcgacacggccctggaggagatagagaagctgcgcgcgctcgtttccgaaaaggagaaacgtatcgatgagcagtccgccgaaatctacaaacagcgagatgagatcactcaacttcagcaaaagatcgccgaactggaagagattatcgcgaaatcgaaaaagcccgatcctctcgaagcatatctgacacggtcggcagcggagcggcgtcggattctcgagaccctccgtaaccagttgaaggtcgattttcctgacctgcaggtagtcatcagcgaggaaagcgacgcacttcgtttccagggcgaaggcctttttgacaggggcatcagcacgttgaaggctgacagaagggcggtcgtcgaaaagattgccgcgcgcctcgagcagatactgccttgctatacgttgggtccgaagaagtcgtggaatgcggaatgcaatccaagcctgtccatcatcgaggcattgcagatcgaagggcacacggactcggacgggactcccgacagcaacctgaatctctccacggcgcgggccaattccaccttcaccacaatgactgcgagcaagccgggactggtggatttccagaattttcgcaaccagcccgttctttccgtggccggatatgggcagatgcgaccaatccgaaagaacgatacgcctgaaggcaaggcaaccaaccgcagggtcgatctgcggatcatcatgtacagcccgagccgatcagacgaaatcgaacggattcgcaattctctcgaaaagagcgatggggtggcgaatgggaatccttga

SEQ ID NO: 11150 - DNA, 1314 bp, Rhizobium sp. Root1212
atgggaatccttgagaagctgaaggcgcgggggcgctttgaagctcccgcccttcccgcgataaatcggctgtggtcggcgacagaacgtatcctctcacgctggcccgacgtcgtggcgaacccaccggagcgcgaccgcgagaggctcgtcgccgagatcaatcgccgcttccagagcgatgactggaacaacacgccgatgtcgcttgtcacatcggcggcaagagcgctctttgatggggagcggcgtgagcgaccagacctcgcggacctccggaggttctattacgacgaatgccgggtttcgacgcgtatgggctttctcggcgccatggcatcgatttatattggtagctatgttccagctgctcgccacaccctggagctatcggaagcgcttcgcgaggctcgggctcgtttgggcggacgctggaaaaacctgctggagcacatccccgagatactcgatccattcatcgcgcatgaggccgtcgcccaaaagatgatccggatggacgatccatggagtggcctgaaaagtctgggtctccgtagcccgcatgctaacggtttgatggaccacgcacacctcgcctatattcggtcaatcgcaccggaactgaagagccgcgaaggcatggcaaggctattcggatggctgaagcccgataatcaggaagccaagcttacaggttctgcggacgcaatttccgcttgccttggccattggacgcaagcggtaccgccggaggatgaccagcgttatctcctcgaaaacctgatcgggctttatggcgatccgcgagtgcagcgcagcggcgcctggacgggcgtgtccgagcagttgatgagcgtcatcctccgatggctgacccgcgagaacatccgcttcttcctcgacatcgtgtcagccgttgaagaaagccacatgtgggagccgcggcgaaagttctggctgggtctgcaccagcaagggcggatagatgccgcatgggttgccttcagtgatcgagcggctcgagaggcccgaacgagaagcaaacagtccggtagtcgagggacgttgcgatttggccgccagattgccggcgggggccggagtaacacgtcgcttctgatcttgaaggttgggcgcaagatcgtcgtagagggctcacacagctataaggtccatgtgttcgacgctacgaatctgcgggctccggctttgtacggcgacaactacgattgtgacgacatccgggacattccgggagccaaggcgaagtctcaccaaggctactgggaaggttgggtgctggaaaacatctga

SEQ ID NO: 11151 - DNA, 3102 bp, Rhizobium sp. Root1212
ttggaatttgatgtctcgttcgaccagagcgctgtaactcttgcccttcgtgaaaaacgatacgggtttcttagccggctgatgtccggaaaggcgacaaccgatctggacagcctcccgatcgaggagcgcgatctcctgttggccgtcgccgatgtccgtgcaatcggtgatgagattgatgccccacctcgtataacctccaacgccattgttctcgatcaccgccttgtcgccgctcttgacgccaggactgcggaaattctgggattgccggctgtggttgatctggtcctcaagaccgacgtcgaaggcattgtcggcgctagcaactttcggctgaggcatgaatggctgcgcaacggacagcgacagtttcctaaaaggaccggggctatccttgaaacagccaacggactgcgccgcgttccgttgtggatgatggacgcgatcgaaacgtcggaagcgcatcggcccggcaacggcgattcgacggactgggaagccttggcacggttcaggcagatgctggacccgggtgccgatggcgaaaacaaaggccctgccgctcggctttccatgaccgactttctcggcggtctacaagtgcggatggcggacagcttttccatttcgccccgcaattcgtccgactttgacgtcgttccattttcatcccagcgcctggaacgcgatctgagcggcttcgacgaagtttccgaggacatgggggaaatccggaacaccgacctcggcatcttccagaaccgggttcgcgaacgcggcgctctccccgcttacaggctgtcgcccggcagctacctcgttgttgaccgttcggcggcacccgcgctgcaggtgatggcagagatgcagcatgcgcctgcggcagaacgtcaggacttcatccgcaatccgggcctgaagatatcgaatgccgtagaagcttcgcttcgatctcaaggcaagcttgaaggtctgtcaccccaggccgagcaggagatgatcgaggccgcggcaggcagcctcatcgtcgaaaccaaggaattttccgaacgcgtaacgggcgttgtgacttttgagaagatcgcgctcgacatcactgaagggagcggtacgacgtggctgcctgaagaattcagccgaaaactcggagaggcgctcggtgcgatgccccgctccgaacttgaggcactgcgggaaagagtttcatctgcgatcgaggacgagaaatccgcggttgaactgggcgaactttcgataccggccaggccggaaatgctgagcgtgatagacaatcatctcaacgccgccatcgataacgacgacagtgataacgatggcgacaagaccgatgaagggaggcgcggccccgtcgtcctcgacaccgcagtcaacttcgaagaggtttcctggcacgcgaaacttaccccgagatcagcgccggccggttccgggattccggtttccatcagaacacccctgaaacctcaccaggtcgagagcctgcaatggcagatcgacgcctggaaggcgggcctccccggcgtactgaatgcagacgaacaggggctggggaagacgcttcagaccatcgccttcctgacctggctgaaatcgcatatggcggaaacgggtgcgcagaacaaaggtccggtccttgtcgttgcgccgacatccttgcttgaaaactgggagcaggaggtcgcccgccatctccacgatcctggcctggggcatctcatcaggctttatggtagcagtctcggtggccgaaagctggtcggcgcaaagggccgtgacaccgacagcggtgacgccaaactcgacctgagctcccttcaggaagcgatcgaggagggtcgtgctcacagattctggctactgacgacctacacgacccttacaaactatcagcattcgttgggacgcattccgttctccgcgatcgtcttcgacgaaattcaggcgttgaaaaaccccgtcagcctgagagctgtcgccgcaagagcgatgaatgccgactttcgtattggtctgacaggtacgccgatcgaaaacgctgcgaccgatctctggtcgatcatggatcagctcgcaccaggctcgctcgacagtctgcgtgacttccacgggagatacaaggaaccgacggcggagaacatgaccgatctccatgcacgcgttttccgccccaacaaggattgcccaccactggcactgcggcgcctgaaagacgaagtcgcgtccgatctacccaaaaagtcgcgcagaattcatcccagactgatgccggaaggccaggctattgcctatgacgacgccaaactgaaattggcaaccggcggcctcggcgctcagctgaagatgctgcatcacattcgcaccgtgtccgttcacccatccgtccagtcggcatggagcgacgaggacttcatttcggcgtcagcgcgtctgaccgccgtcatggatatcctccgccgtgttcatgcacgaggcgagagggctctcgtcttcatagagcacaggcagatgcagtaccgtttcgtcgagctggtaagagctgagttcaagctccagagagtcgacctgatcaacggcgatacgccaattcctcagcgccaggccatcgtcaaccggttccagcggcacctggaggatgatcgagggtttgatctcctcgtgttgggaccgaaggctgctgggactggactgactctcacggctgccacgcatgtcatccatctttcccgctggtggaatccggctgtcgaagagcaatgcaatgaccgtgttcaccgtatcggacagacaaaccctgtaacggtccacatccccatggcggtacatgcctcctaccaggaccaatcctttgattgcctccttcagagcctgatgatgcgcaaacggcggctcgccagttcagcgctttggccgatgggcgacacacaggatgatgtcgcagcacttcaacgcctgatgactgccgagagaacgaccgacaacggcgatccagtgaaagccgcgatgcacggaatgtttcagcgggacaatctgaggcttcctgcagcggaggccgatggatcgctcgcaatcgattga

SEQ ID NO: 11152 - DNA, 1953 bp, Brevundimonas sp. Root1423
atgaatagcgttctcgacttcatcctgattgggctggaacttatcttcggcgtcccttgggtagcccccttggtgatcgcgcccctgatgcttgcatggacaggctggctatcgttccaggcacgcacgcggacccttccctatctgaatgccgcgtcaaagcgcgtcgaggttctccaaggcgcgattgggtctgaaagcgatcccgttgcggaacgggccgcattcagcgcgaactatggagacgtcgctgccgccatggccgctcctgcaccgggcgcagaccctctcattctggcttggcgcgagttccaggaatcgatcgtcgacgaaaccgaagccccggtcagaaatacgaaccgacctgcggccttcttcaaccgcgccgcgccgcggcaaagccttctcatcttctggtccaacatcatggttggactgggactgatcctgactttcctcgggctcatcgtggcgctgcacaaagccagccaaggcatggcgacgggcgaccagacggctatgcagcagtcgctgattgacctgctcaccgtcgcgggcgccaagttcttcacctctgtcgcaggtgtcgggacatcactcgttctgcgattcgtcgagcacgggctgcagaagcgcaccaaccgagtgacggatgccctttgttcgctgctggagcggggcatgttgtacgtgccaccccagcgcctggcggtcgagcagctcgatgtccttcgcgagcagcgcgatcaactcaaggccttcaataccgacttcgctctccagctcagtgagcgcatgggggtggaattccaacaagccatcgcacccgtaaccgcctcgctcggcctgctcaatgacaacatgacgtcgatgggtcaggggctcggccaaggagccgccaaggcgatcgaggaggcgtcaggcggtgagctgcgagcactgggtcagacgctttccaccttgggcgaacgcctggacgatttgagctcgtcggtgggctcctctggagaggacgccgcccgccagatccgcgccgccggcgcagatttcgctcaggctgcgactgacattcgcgaggccttcgaccggctcactggccaggtcgacggtatgggtgagcgcttctcgacccagggcgaggaaatggctcgggctcagtccgacacgctcgagcgcatgctgagcggcctcgagagcgcccagaccaagtcggctgacgccatcaccgaagcagtcaatcgattgcagggagccggcctcaacgctgcagagacgatgcagaaggaggtctcgaacgcgatgacggcgggtgtggccgcgagccaggaaacgttccgcgtggcgctcgaggagtcgggggaaggccttagaggcgtggccgcaggcctcgccaaagcggttggcgaagcggcggagcagattgaccgcgccggtcagggcttcacccggagcggcgaaagcgccgtgcgaacggctgaggcgatggaaggcgtgacggggcatgccaagaccgtcgcaatctccatcggcgacgcttccaagggatttgcggcggcggcagcgccggtcgcccaagcagttcaagccgtcaacgaagctgcaggtcggatcgcgcgttcgctggaagccaatcagcaaatggacgcggaggcggtgcagtcgctgcagaaactcgccgatgggattcgcgagacgcaggaggccgcagaaaccgcttgggccgactaccgcgcacgcttcgagaatgtcgacaaggcgctcgagcaaaccaccgttcgtctcggagagacgctcgagggtaccttcagcgagttcaagcgcttcgctgccgataccgatcgcgagctggcgtccgcagtgggcaagctctccggcgcgctgacatccatcgaggaatacgcagaatccctcaacgactatgtcgaggccaaaaagctgtctgaggctgcctga

SEQ ID NO: 11153 - DNA, 750 bp, Brevundimonas sp. Root1423
atgatcctcgatgacgcgcacgagcatgccatcgaggaagagaactattttgtctcgatgacggacatgatggtggggctcgtcttcatcttcatcattttgctgatgtattacgccctgcaatttcgccaggtcactgacgaactgactggcgcggacaccacgcgtgcggaaatactggcgcagatacaagcgtccctcaagcaaaagggcgtggaggtatctatagatacgcagaatggcgtgcttcgactgcccgacaagatcctgttcgacagcggcgacgatcagctgaaggtcgaagggcaggagaatgtaggcaagctggccgaagcgctggaagaagtgcttccctgctacacgcgccaccagtcgggacgcgcggtacccccgacatgccctgccaccgagcacgcgatcgagtccgtctacatcgaggggcacaccgatcgcgacgcgttttccggcggcggtcgagacaactgggacctgtcagtcgtccgagcgacaaatacttatcgaacgcttgttggttcccgagccgatctctcagagctttgcgccatgaagggcaagctgtgcgagcctgttctcagcgtcagcggctatggtcctcaacggccaattgacccgagcgacaccatcgatgccaaagcccgcaaccggcgcatcgatcttcgcatcatcatggtcgcgcccgactccgggcaaacggttcgccgggtcgagcgggcgctggacgctcgatga

SEQ ID NO: 11154 - DNA, 1065 bp, Brevundimonas sp. Root1423
ttgttcgctctccttgacgcctacctcgacggctttgatcaagatgatgcggacgtcgcgtggctcgccaagcgactgaccaccgcgtcgaagtcctggccatggcggggaaccgatccctggccggctcggatcaaggcttttgagttgctcacgccctcaaaggcgcccggccgcctggcggcagcggtgctcggcggtaaaggcgactttcggtccatcctcgacgaagctgggctgacgacggaaggccgtcgcatcggtggcctggggctggccggctttacagcggcctgcgagacggtgcgcaagctcaaggcggcccaggcggtcgcagcccaggaacgacttattgaatggtcgggcggttcaggcaccctcgcctatcccaaggcctggccgcaatttgcgggcgctctgtttgagccttggggcgcaagcgagcccgcccgagcccacaagacactgatcgtcgacaaggcggtcgcgcacgcaggcgacccccgcatcaaccgcgcacgatggcggccggtagaagaggtcgcaggcgatgcatacgccatcattctgcgctggctaaccgaggcttcggtccgacagtttttcgacatcgtcaacgaaaccatgactgatcgccctgacatgtgggcagaccggcgcaaattctggacccggtacctggacgccgacatgatctcggcggcctgggttgccttcggctcggacggtgcggcccgtgccgatcgcgccgcccaacgaacgggcgacaagagtctttcgatgttcggacgactggcctcgggctccggtcgttcctcacaacacgccgcgctcataatgaagattggcgacctgaccatcgctgagtggagccacaacggaaaatggaacatctggggtcgcaacgacccgaagcaccccgtcctgttccggcacaatagtcggcgattgcccgactacgattcttccgaactcatgcgcgcgccgacctccggttcccatacgacgtggtggcaatcgagagtggctgacatcatcaagaacgaaaccggcctgcggccatga

SEQ ID NO: 11155 - DNA, 3687 bp, Brevundimonas sp. Root1423
atgatcaacccattccggcgcaaggcccgcacggcggaagaggcatcattctcggtcagagaagacggtgagatgctccacttggcgctcgcgcaaagcggcgtgatcgtcccaactgccgaatgggccaatcgacgcccggacgctgccacggccctggggggtctgttcgccaaagccgaggacgcgctcgaagccggacaacagccttcagtcgtggtgctcgacaacgagattgttctcagtcctcgctgcgtggccgagttcgacgctgcgacggcgctggtgctcacggtccctcccgcgacgcccttggcgctcgacctcaagcctgtcggccggatcgatgaggacgatttccggctggatgttcgatgggtgaagccgggcggccagccctgtcgcgtctcgatcaatggcgcgatcatttcctgcgaaggttcgcagcgccggatccccgaacccctctggtccatcctcagtatcgcccggtcactcaccgtgcctgtcgacaaggccgagcggtttcggctcctggcgctcctgcgccgtcactggcccgaggatgcgtcatcaggggtcacgtctgaaccttacctgcgagacatgcgcgtacattacgcctcctcgctatctctgacactgcgcacgctcacaccagaccggaccgacttcgatcccgtgctgtttggtctgggcgttgcggacgaggcccaatcggacggtcgcgcgctggacgaggcgtttgacaatgtcctgacgcccagcgcccaaaagctcttctccgaagatcggttcaggcgcgaggccgacgtacggccagtctacgtcctgagggacggcgaatacgtcttcatcgacccctcgcttcgcccggctctcggtgcggtgcgtagattgcaagaccggccagagagcgaacgccgagccttcgtcctaaacccgcgcaaggtgctcaaggagaccttgggcgaggaggtcgctgaacggatcgcactcgacgagctcttcgtcgagaccgagcagttttccagccgggtcgccggcgtggatgtctggcgcacgcccgtgctgccttggatcgtgcctgccggaaagaacagttggttgccggagcggttcgggcttcgagtgggcgatgattatttcgagatcccagccgagaacgtcgcggccgtaatcgaccaggtggccgcggccgctgaagctggcaaggccaccgccggggtcgagggcctgttgcagtcgaccgggccagatggtcctcctccgccgtcaagcctgccggtcaatgatcagctgatacagtcgctcgagagcctgcgcccatttggccgctccaagggtggcgaggatgcgcccgccgtcgacgaggacacgccgccggccgggtgggacgcagcccttcagggaaaactcttcctggtcgtgcgcgagaatttcgaggaggtcgaattcgcgcccttccggtcggaagaggcgacgccgccgccctcgccgctccgcatacccgagcgcctgtccagcacactcaagccccaccagacgcaaggcctccgctggcttgtccgatccattgaaacccttcatcccggcgccctgctcgcggatgacatggggctgggaaagaccctgcaagccatcgccttcatggcctggctccaggaagaggcggaagccggccgtcgtcccaaagagcccttcctgatcgtcgcgcccacagggctgctgggcacctggcggggcgagatcaagaagcatctctccggcacgcagctggggttactggtgcccgccttcggctctgacctgaagcagcttcgtgagcaggacagtttcggccagcgcgacatcgagactggcagggcggcgctgaaagccgaggcctggcgcgatgccggggtcgtgctcacgacctacgagacgctccgggattatcacttctcgtttgcgaggacccgcttcggcttgatcgtctatgacgaaatccagaagctcaagaacccggtcagtcagatgacccgggcggcgaagaccctcaacggcgcattcacgctcggcatgaccggcacgccggtcgagaataggctccaggacctgtggtccatcatggacgtgatcgcgccgggcctgctcggcgccagccgcgactttgagcggcgtcatcccgccagtgacactgcggcgctctctcggctcaagacacaactgaccgaggcgccgaccgatcaagctccctacatgcttcgtcgcctgaagagcgatgcgctgaaggatatgccgtccaagtcggttcaccccttcgagggtgaaatgcccgcgacgcaggcagatgcctacaaggatctcgtggtccgcgcggctgccgccagcgccaacggggccgtcggcaagggcggtatgctcaccacgctcgcgggacttcgcggcgtttcccttcacccgctcaacccccgtcatgcacctgcggatctcgacgcctatgcccaggattccgcccgcctgtcgcgaaccttggacatcctcaaggatatcgcggcaaagggggaaaaggccctgatcttcgtagaagatctggccatgcaagaacgtcttgccggactgatccaagggcgattccaccttcctcgcatgcccatgcgcatcaacgggtccgtccctgggcccaagcgccaggagatggtggacgtcttccagaagtcccctggcagtttcgatgtgttgatcctgtcgccgaaggcaggcggcgtgggcctcacgatcaccgaagccaatcacgtgatccacctgtcgcggtggtggaacccggcggtggaggaccaggcaacagatcgcgtgttccggattggccaaaagcgcgacgtgcacgtccacctgccaatggcggtccatcccgatccagcgatccggtcgtccagctttgacctgcgcctgaacgcgctcatcgaccgcaaacgcaagctcacccgcgacctctttctgccgccggatgccagcgacggcgagttggcgaacctgttccgtgaggtgtcgctcggagaggcgtccaacgacgtcgaagaggcctacgaaaccgaagaaactgcggctccgagtgcgatctcggaatctgttgccccccacgagccatcggtcatcgttccacccgcggctccgcctgtccgaaccacgctcaccctgccaaccgcactgaccaattccgggatccgtcagtggcgcgtggccgccgggggtatcaggcctacggatgaaatcctggcgctgttcgcgggcaaggacctcgtcgatatttccatccgcgatccttacgcgctggcgcgtcgctcaaaccgtgaggcccaagtccagttcatcgcagatctcaaagctgtcgcgcgctctgtcgagagcgtgacgatcgagtacgcagaagaggtcgaaggcgacgcctctgatacgcagagccgacgcgagatgggagacatgctgacccggcggctgacaccgatgccgcgcctggcgctgacgcgtcgacgcaagcggtccagagacgatgatttccacgatcgattcgtggacatcgcggtgcgccacgccggcggcgccgtccgaattcatgagctgactttgggtcgaggcgtcgaggcattctacgacgagcgaaagcagtgcacggtgacatatgcgccgcctggctcgaatggctga

SEQ ID NO: 11156 - DNA, 2178 bp, Acidovorax sp. Root267
atgacgcctgagacctctgccctgatctcgtccgccctgcactggggcgtcggcgccctactcgccatcgccgtcgcgttcttcttaatccagttcctgcggcccgggtggcgtgtgggccgcgagctacgagacgcgcgcctgcggctggagcagttgaaggccaccggcccggtgcttgacctggaccgggtgcgcgatgacgctatggtcagcgaggcattgcgccactgctgggacgaataccgcgacactctgcatggtcagaagcaggccaacggtatgggggtgatggaggtgaggcgctggcgcgccaccagcatggccaacgctttcttcacagaccaaggtctgatcgaggcgccgctgcgcaccgagttttacaagcacctgcccggcatcctgactgggctgggcatcatcggtaccttctcgggcctcatcgtgggtctgcagggcttcaaggtgtcggacgacgccagcgtcgtgcgcggcagcctagagacgctgatcgtgagcgtgggcggtgcgttcatggtgtcggggattgccatcgccttggctatggcggtcactacgatcgagaaatcgatcatcaatggccgctacacggaactggagcgtctgtgcagcctgatcgacagccttttcgacacgggcgcgggcgaggaatacctgcagcgcctggtggaggcgtccgaaacctcggccacgcaggcaatgcagatgaaagagtcgctggtcaccgatctcaagcaggtgctgtcggaactgacacagcagcagatcgcgaccatgacatcaaccagccaggcgctggggcattcgatcaccaccagcctgaccgaggggctagccgacccgctaacgcgcatctcccacgcagtgcagcaggtgggcaatagccagggcgaagcggtaaacaagctgctgactgatgtgcttggtaacttcaccgagcagatgcacagcatgtttggctcgcagatgcgaggaatgagcgagatgcttgtgcagacggccagcactattcagaatgcgtcgcagcgcttcgaccagttggccgggcagattcagcaggccggcgccggtgcggccgacgccatggcccggcgcatggaggacaccctgcagcagatgcaggcccgccagaccgaagcgaacgatcagatgcgcttgttcatcgaccagctcaaggacagtgtcgccaaggggcagagcgagtcggccgagctgaccatgggcatgatgcgcgagctcagtgagagcacaagcgcgctggtgctgggccttcgcaaccaggcgcacgcggccgagcaggcgcacagccagcaacaggctgcgaccagtgagcgccttaacagcttcctcgaccagatgcaggcgtctgcggcccgaaaccaatccgagtcggctgaagcgacacagcgcatgttgggacagttaggtgattccgccagtggcatggtgcaggccctgcaggcacagacccaaaaagcgcaggaagagcatgcgaaccgtgagtcagaactgaccgccaagtctagcgagctgatggagcagcagtccgcacagattgcccgtctggccgacgcggtgcagcaggccagcgtgtctatgcagagtacggtggagcgtctgcagacacgggcgcaggctaccatcgacagcatgagccaaggggctgaaaagctatatggcgcgtcatcccgcctgggcgacaatttggaccgaatgaagaccaacagtgacggcctgaatgacatggcggacaagctgaccgggtcggccaccactcttggtgccgcgttgacagtcacgcagcaagtgctgggtgatcaacgcctcgtgcgcgatgcgcttgcttctctggtgggggacctgcgcgaaacagtcgaactcgccaagcgggaggcatcaatgtcgtctggcctggtggacagcctgcaggcggcaagccagcgtctaaccgaagcgcagcgcaccacagaaacctacctgcaaggggtgaccgacgtgctgggggaagcccacggcgcgtttgctcagcagatgatggccacgatgcgcgagggcaacaaggcattccacgaggagctcgcgcacgccacaggcctgttaaagggtgcgatccaggacttgggcgacgtgctcgacaacctgccatcggcagcctga

SEQ ID NO: 11157 - DNA, 768 bp, Acidovorax sp. Root267
atgctaggtggtgtgcgcttatcagcgtccaaacgcgggcgcgaagaaggtgaaaaacccttctggatttccttttcagacctgatgtccgcgctgatggtgcttttcctggtggccatgagcgtggcactgctggcggtgaccaaaaaggtgtcacaagaggagcaggaagaccgtgaacgtaaagaggcgatcgcccacctgatgcagcaggtgagcaaggtcgtttctcagaaagagttcgagggtgtgcgtgtgatcgggaacactatcgacttcgggccacgcgggcgatttgagcgtgaaggccagaacactctgtccgttccgcagcgggcactggtgcgtcagttcacgcccaagctgctgtcggaactgcgtgattcggatgccggcaagcactggttcaagcgcgctgtggtggaaggttacgcgagccagaccggcaaatacctgttcaacctcaacctgagcctggagcgcagcgagcgcgtgatctgcgagctgcttcgtgcaccagaggcaggcgagaccgccatgtccgacgaagaccggaagctgatcgcaaccaagttctttgtgggcggtgcatcgttcaactctttgcgggcgacggccgatgacagccgacgcatcgagttcaagctggagtttaaaacgcggcaggaacgccgcgatgagctggagagcccgcccccccctgtcgatgaggctgccctcgcccaggccctggaccctaacgaacgatgccccatcttcagccgctaa

SEQ ID NO: 11158 - DNA, 1938 bp, Acidovorax sp. Root267
atgccccatcttcagccgctaaacgccctggatcatctgcgcgaccgtctgcgcagcgagctcgacgttcatcgcgcggtccacgcgatcgagtggggcaacccgcgcgtgatgacggagacactcaaacgcatcaggcacgaccttggcggcgagggcaacgaccaaccggctgcggaccaactgcaggctgcgctgctgcgtttcgcgagaagccgccaggtggcttcgtttaccgagctcaaatacgtgtgctatggctccactgtgccggtgggacacgacctttggcggatgatcgaccggcggcctctgttcgaggccatgctggagctggttaatcagcgcacccagcaacccaagcagtttcgtcgctgctatcaaggcctgctatcaggctatttcggcttcgagcgcaatctggaaaagccgggagaggccgacgagcgctggatcggactgcgcaactaccttgctgatcagctggccccattgcagtcgacctcttcaaaacgtgggactgtgcccgagtggctgaacaccctgagcgagcatcgaaatctgctcacttcggatccctgcagccgctacgctgatgcgctagcgcgagatgactataccgagctgcgcagggtgtgcaccggactaggtatttccagcaactcctgggtctgggaagaggcgctcatggcctacgtgaagcgtgtgtgtcaatgcgatgacgccgaattcaaaaagcgcatgcgatcggtgctagatctagttcatggcaagacttcgctgacactgccaccaatcctggccgtgagagccgttgcgctggtggtggcgcgctacgcgcaatgcacggatcaccctgagcacccagcgctgcgtgacacttgtgtggagtggatcggcaacccatggctgaagcgaacagcctgggatgcggccgtgaaccatgagcctgcccgcctgatggtcaacagctggcttaagcagcgtctgatcaaagacttcttcgggcttctggcagcggatggcgcagccgattttcggcgtctggaatactggctaaagtgggagccccagatctcagatatgtggtttgtgctgggtagcgatgcccaaggcaacaggacccctgagtttctggacctgcgaaaacgcatgtctggccgagaccggaaacttgtggacagcaaccacctgaataatgccttcgtgatgcggatcggacagctcttggtgattgagttcggtgtgacgggcaacgcgtgttatgtgtttgccacttcggattttcagacgagtctggacaacgcggttctgaatttgcatcagctcaagcagaaggcctacgccaagcgactttctcacacggcccaatgggaattcaaattcgactacgaactcaaaaaactgcttcagtccgtgcctatgagcaaaggcgagctcaaagagttcaaccctataagcaacactcccgatgcagtcgggcattggcgtgcccaatcgacaccagtgacagcgcccaagccagtcgcgcctgtcacttctcaccagcgaaactcactgctcccacctgccgtcaagacggctgactacacgggcttcgattcgaagcccgcgtggccaacccctcccccacgagcacagcaagcgggcattcgcgcgtcagcgaacggtgcccagaacaccgacagcgctaggcaaaagccatcggtaacgcagctcgcagggcaaaagaaacgtctgacggatgtcgagttctcgcaactccagggcttgttcatgaagcatggcgtcgaatgggaggacaaccgtcacaaggggggtgccttgtgggcgctgatacctgacaagaaccagaagccaagtgtcgctatggttcttgagctctttcggtttcgctttactgaaggcaaaggctactggctcaaggacgaggattga

SEQ ID NO: 11159 - DNA, 3282 bp, Acidovorax sp. Root267
atgtttgacgcgctgttcgcaaagaaaccagccccaccccaaacccgcaaaggtcctgccgtcgctttcgattccgtcggcgttcgctacgcgtcgccggcacctactacctgcgaatggctggcactgcccttttcttatgccgaagcggccgacctgggtgccaggttggcgcagatcttcatggaaggcttcggcgaccgactggaaaccgagttcctgctgccatggaaggacgtgtatgcgctgctgcgacatcccgagttgagcgcttaccgcgaagccttgctgatcccgccagatacggcggctcgccctcggttggtgagcaagggggctctgatggaccccgactttgccgttttgttggacgaatgggtggacggtcagggcagacgtttgcaaccggtgccgcagctggtggggcgcgtgctgcaggcacccagcggtgcagcgctgttgtccgagcctttgcaccaactactggaggagttgacccgcttccacgggacaccgccggaggaacgcagccagtctttcaaggagcaggcctttgggcgcatgcgcaaactggccacgtctaccggttgtccggtgtcggactatgtcgcccgcaccatcgtactcacgccggaccggctgcgactggcgatggagcgtcgcggtgaggacgatggcaaggtggtggaggtcatcccaggttttgacgaggcgcctgcgcattggctgaaccagttcgaccgtttgccattgcaggacagctacgacgtgcccgacggaccctcgctggttcgggttgtggtgactcctgaagtgaaagcggtgcttgcggagatcaagcgcatgccgggtcgcagagccactggcccccgagccgaggcgttcgtccgcaaccctttcgcagtgctgggtgaatcggcggagcaggtcatcgatcctgcacagttcgagaaggcccgcgaagaagcgggcatccggttcgagcagttcacgccgcatgtcgaacgaggcgagttcggtgaggttcaccgggtcggtctcatggtcgaagagctcggcaatgagagccaggcctctgaagtgctgtggttcgccaactctgatgatttgcagcggtttaccggcaagctaggtcgagcgttcaccgatggctcgcaatgcgtgacctggcaacggcgtgagctggagatcgtgggtgacaccgagcgccacttggtcgatctagagcaatggggccgcgaatgggccagcccacagctctggaccgcagccgaggtgctggacctgagccactactcggaccgcgtcgcagagatcggcgtcgagaagccttttgtgaccccggtcatagcccgaaacgatcagggcagcggctggtttgaagggaatgtcagcgtcggcgtgcgcgtggaagaccccgccggcggaagcccgacctacgtgcctttagccttcaacgacgtgccgacgctgcagcaggcggtcaaggccgccgagcaggccggtcagtcttcggtcaatctgccaggcttacgcacggcggtgccaatcgttgatgcccgacgcgcggttgacgccctggccaaggcacaacagcagttgcgtgatcacagctttcagccgccgggtgatcgccccgcagccgagcccaagaagcgcctggtcattaaacgcaaccttgaagacgttgactacaccgaggcgcgcgcagagtccctgcagatgccctcggaccgagagccgttgctaccgcagaccctgcgccctgagatcgaactcaaaccgcaccagcgggtcggcgtggcatggctgcagcatctgtgggaggcatcaccggaacactgtcgtggcacggtgctggccgatgacatgggactgggtaagacacttcaattgctcaccttcatcaccagttgtttcgagaccgatccgacgctaccgccagctctggtggtggcgcctgttgcactgctggagaactggcgcaacgagctggataggttcttccagccaggcaccctgccactgctgatgttgtatggcagcacgctcaaatcgatgcgtgtgggcaggcacgaactcgatgctgatctcaaggcacaaggcgtcacccggctgttgaagaagggctgggttggcgatgcacgcctggtgctcaccacctacgaaacaatgcgcgacctggaatttgcgctggcaagccaaccgtggtcggtcatggtctgcgacgaagcccagaagatcaagacgcctgcggcgttggtgacaaggtcggccaagaagcagaaggtgcgctttcgcatcgcctgcacgggaactccggtggagaacacgctggccgatctctggtgcctgttcgacttcgttcagcccggcatgttgggcgcgctaagccatttttcccgcacctatcgccagccgatcgaggccaagacgcccgagcagatagcaaaggtggaggagttgcgcgccgtgatccagccgcagatcctgcaccggcgcaagacggaagtcgccacggagttgcccaccccggtcgaggacaaactctgcaagctactcccgatgtctcccttccagcaaggtctgtatgagggtgcgctcaagactctgaaggaacagcgggtcagcaatccgtcggctcagttgcaggcgttgcaggcgattcgcaagatctgttcggacccgcacggttatgccgtgccggacagccacaaagcgccgatcgacaagatcgtgaacgagtcaccgaagatggggtggctggtggaccggctcaaggcactggccgccgatggcgccggcaatcacaaggtgatcatcttctgtgagttccgggagctgcagctgcagctgcaacgtgtgatcgcggccttcttcggtatcgctgccagcatcgttaatggcgacacgtcagcagacccccgcgcgatggacaaccgacagcagctgatcgacgccttccagcgttccccgggcttcaacgtgatcatcctttcgcctctggcggtgggttttggtgtgaacatccaggcggccaaccatgtcgtccatttcacccgcacatggaaccccgccaaggaagatcaggccacggcgcgtgcttaccggatcggccagacccgaaccgtcaatgtctactaccctggcgtggttagcgacctgttcccaagcttcgacgtcaagctggacgccttgctgggcagcaaacgcgcgctggccacagacatcctcaacggttgcagcgatctcaaggcctccgacttcgccgacttcggttga

SEQ ID NO: 11160 - DNA, 2034 bp, Rhizobium sp. Root268; identical to SEQ ID NO: 11148

SEQ ID NO: 11161 - DNA, 981 bp, Rhizobium sp. Root268; identical to SEQ ID NO: 11149

SEQ ID NO: 11162 - DNA, 1314 bp, Rhizobium sp. Root268; identical to SEQ ID NO: 11150

SEQ ID NO: 11163 - DNA, 3102 bp, Rhizobium sp. Root268; identical to SEQ ID NO: 11151

SEQ ID NO: 11164 - DNA, 2193 bp, Pseudomonas sp. Root329
atggatttttcgacgctgttgcatctatggggtgcagcaagctccgagcaactgatcgcgccaataacggtagttggcttcgttttcattttgtgcgcttggtactttgtccgttatttttgtccatccttcaaacttagcagtcagctgaaaaaactgactaaacgtgtgcacggtgtgaaagcgctcgccccgtctcaacggcgctctgaattggagcgactgttcaatggaagcaagctggagcactcctggcacgagtacgctgaaacgctgcacgaccagtttgagtttcaagaaggcgaacaggttcttgtccggtcgcgcgccaccgccggagccgcgcattttttctcacctcaaagcgtggttgataccccgctgggaaccgagttttataaacacctgcctggtattttgaccggcatcggtattgtcggcaccttcttcggcttgatgctaggcctacagcattttgatccaagcacccctgagcaggtaaatgccagcgtcgataagctgctcaaggacgtgttgtttgcgttcatcggctcctttatttcaatcatggcctctatagccgtcacgattactgaaaagtggcgtctgggccaatgctacaggcttcttgaagcgttcaacgaaaccatcgacgggcttttcgacagtggtgtcggtgaggaatatctagcggagcttgtgcgctcgagtgctgaaagctccgtgcaaacccgtcagctcaaggacagcctggtaaccgatctgcgggaaatgctgcagaacctcgttgatacccaagtccgcgaaagcctcaaattagcggataccttgtctacgacttaccgtgactctgggcagttgttggccgatcaggtaagcagtgcgattgagaacagtctcaaatccccccttgaagctatcgcgggtgcggttcaggccgccagtggcgaccagtcagggcaagtacagaaccttcttcaggatgttctagttgccttcatgaacaagctggaaggtacgttcggccaacagttcaacggtctacacgaactgatgggtcagtccgttgccgccatgcagtcgatgcagcaaggcttttcgacgctgatccaagatatgcgttcggctagcgagtcctcgacccaaaacagctcgactatgatcgctcagttactctccgatatgcaggccggacagaacgccatgcaagcggggatgaacgagatgctcgccaatctccaggcttcggttgcccgtatcggcaacgaaggggagggggcaggtgctcgaatggccgagcagttggagaagttgtttgctcaaagcgaggctcgccaacaggcaatggctgagaatctccaggcttttgttgagtcgatcaagcagaacatcggccaaggtcaacaggaaaccatggcgaaaattgcgggctccgttgaggtgctgggtgagcaactctcggcagtcttcaagcaattggagcacggccagcagcagatggatcaaaccacccgcgctgcacaggctgacctgcatcaaggcacccgcgacctggtgggcggccttgacgagcaggtcaaggcgttgctgcaaacagtgtcagagcaacagaagtctgcacaggacaccgttaaggcgttgagtgcccaaacagagcagcatttgcaaagcatgcagctaggcgcagacaagatgcgggcggcggctgagcggttcgaaacggccggacaaagcgttgcgcgagccagtgagtcgactgcggggctgatgggcacagtccagggcgcaggtactgagcttgcacaagcatcacgtgagttgaacaccgtggtcgcggactatcgaaacaatcgtgaagcgctggcgaaaactctcgcggtcatcgaaggggttgtcgcaagtgcacaaggggaggccagcggccgcagccagtatctccaggacctgaaggttcaaagcgagcggatgcaggcgcttaaccgtgaagtttatgaatacctggaaaacatcagtggtgtgttgggtaacggctttaaagagttcggtgatggcatggatcggaccttgagacaaacgctgggtagtctggatgccgagctagataaagcagtcaagagcctcgctggcggtgtagaaggggtcaaggaaagtctcgaagacttcggcgacatcatggaacgaatcaggcagtaa

SEQ ID NO: 11165 - DNA, 744 bp, Pseudomonas sp. Root329
atgtttggtaagcaaatgccttcggttgtccgttcaaaagacgagggagagaagccgttctggatctccttcgctgatttgatgactgcgatgatgattctatttctggtggtcatggtggcggctttgagttctgtgacgcagcgtattaaccaagcggagcaaggagagaagcaacgtaatagggacatcagtcagatctgcgagcacctgagccttaaggcgaagactgccagtaaaaccatcgttgtggactgtaaggacaatcggattagcttcggcgatgctggccgatttgggcataaccagtacgcgctgagcaacgatggccagtcggcacttcaggaggttgtgccgatgattctggacgcggctaacagtgaagaaggccgaaaatggttcaaacaggttgtgatcgagggatcgacagacaccgacggctcttatctttataacctgcacctttcactgcagcgttcagagtgggtgatgtgcagcctgctcgatagccgcagcccgctccaagtcggattgtcgccggagcaccaacagcaaatcagatcgattttcctggcgggcggtgtgtcgttcaacaatgcaaaggacaccaaagaagaaagccggcgagtggagttgcgcatgcagttctttggcttgaaggaaaaggaggacaacctcaagccagaggtaccggtgttcaataacactgatatggaaaagtgtcagttggcgatgagccgatga

SEQ ID NO: 11166 - DNA, 1629 bp, Pseudomonas sp. Root329
atgactagcccaatcgcgaggctttccgccgctattaacctgagtctgttggcacatcgcacagggccggcgcctgaaccgttggcgcgattcccccgtctgggtgctgcgggaattgatctttacgaaagattcgaacgcgctgaaaaagctttgccgccacctcaggaaaagcgccgcgctgcgataaacaaattccgcaatgtactcccactcaacgcctcagaatggcgtttggtttttgccggtctctcggacaagagtgagcgagtcggaccgatactggacgatgaccagctttttgaccgagtgcacaaagaaatccatcaccgtatcgaaaagcggaggctgagccgccgagactggttggcgctgtgctttagctactttgggtacgaggccgccacgcctgataagagcgccaattggtgtctgttgcgggaagacgttcagcttggcttcgaatgcgtcagaggccagcaaaaacgcgagaaggaatgggttcacatcgtccagcagcatcaggagcttttctccgagcaggcaggtgccaggctgggtgaccagatgttcaagggagagatcagcgacctttcggcattgcagacgattgcgcagatccctgacagcagttggctgtggcgaaggatctttaacgtacttatctctcgtatttttatgttggatgacgccgagttttctcagcgcttagccgaccttgtcgatatcggtcggcagcatccgcggtacatgaacgacattctgagtgcatgtctgtcgcgttatcacttggcagcctatcgagaaaagccgtcgtcgctgctcaaacaggttgcactcgacaattggggcagccctcagatccgttccaggcaaaacagctggctgcagtatgttgaaaaagatgtctgtgcaatggtcgttgcatggttcgcaaaggaagatcttgaacacttcttcaacctgttgaagggagactccgaggtcgatcaatcgcgtctgcactattggctgcgatttgccaaccaaatgagctacacccgaattgttatgggggcggatgcgtggaatgaccgcgggcgggacttcgtccatttccgtgagaaaaacaaagggcgcttgagcaagctgataggcggtcctgggcacaacaacgctgtagtgatgcagattgggaactactttttcgtggagttctccggcacaggcaatgcctgctatgtgtacaaagcagatgattcgccattcaacccagacaaatcccagcttgagctgaccgccgagctgaagcaggcaaatcgtgcgctggatcgaatgcggcattcacctgcaccgagccgcccaaaccgtatagagggttggctgagcaaattcgatgactctctagggaaattgggcattcgcgtgcagagtcaggccggcacgccagggtcatccaaacccatggctttcgaagaccaagtccgtgacgccctgaagtcggtcaagcacaaagtctatgaccagcgcgcgcgcggtggcgcgtttcaggtccagcttgatgacaatgatcaggctgccgttgcagcgctccaacgcctgggcttcaagcccgtcaatcaccagccactcaggttttggagacagtaa

SEQ ID NO: 11167 - DNA, 3255 bp, Pseudomonas sp. Root329
atgctcaagcgtttgctgaaaggcatcggccggcagccgaattcggcggtagaaaatactgagcctgttttttccattgaggagcaggggttttgttatcccctgagcttggcggagaatgcgcagtcctggccgctggcaagctatttggatcagttggaagaggaggagttcgtctctcagctcagcgatcgttggttgctgacgtgggacgagctttatcggcttcttgatgagccagagcacttaacaagtctgccgctattggggttgccgccacagacagccctcatccctcaattgagcagccaaggcagtcttgcctctgacgacttcaaggtcgctgtcagtggatggcgcgacccgcagtccaatgcaaatgtgcaggtgcaggtgcagcgtacaggtgccatcgtccagcgcaacggaataatggaaattctgcccgagtcgtcgtggaaactgaccggtgcggtacggcaactttatctggctcagcaaaatgagccgggtgaagtaactaaccagattggctgggctagcatcaggaagttggcgcgcaaggctggtgccggtatggatggcttcttggataagaccgtcgttatcaaacctgaaagcttgcgactcaacccgcgaaaatcgacagtaggcaatataccggttatcgaactggaacccacctttgaaggccagccggcaaactggcttgaaagtttcgacggcgctaatcaggttcaggatcgatatcgggtgactggtgatgatggatcgctgacacacgtgctgattgatcccgaagtcaaatctgtattggactatgtgcgctcgttgcccgggcgtcgggtcgctggggacgatgctctttctttcgtccgcaacccttacagcgcactcggcgaaagtgccgcgcaagtgttggatgccgagacttatgaagacgacctggccgaggctgggattttctttcatcgctttcatctggagcccaaactggatgaagcgggacagcgcatcgagcaggtaaatctgactctcgaaccgatctcgccaacgccgcaagcgcccatcgaagttgaattcaaagcggcctatgagctcgcgccgttcgtgcatgaattgcaactgaagttagccgctggaatgccagctggtttctggcagggctatgagctggaactcagcgattttgatttgcgccagttggcaggcatcagcgatctgcttaagcgttggcaaaacgaagcggccggtattgagttcgactcagtcctagacctgtctctttacggagaccgtgtgactggcatcggggaagcggaaagaattacttcgcctttcctcgtcaaggaggcgaccgagaactggttgccgaaggatgtggcggcgctgggcattgacgcagaaattcttgggcgttgggatccatccgaccgtgctcaatttgaagcgtttgagcagcggctggacgaagctcgcgctgccggtgatgaaacggtctgtttgccagagtccgaaacaccgctgtcgattgccgccgccgagcgactgtttaatgcctggtccaagaagatcgcccctgtcgagaccggcctggtccagcaacaggaaaaagttggtcgcgccgtactgcaaatcggccacaacatcgacgaaccgacctacgttgagattcgccaagcagcattacgcgccgctttggatgcaataccagagttgcccagcttgctcaagcctgaggtcgtattgcgtgagcaccagcttcaaggcgtcgcgtggttgcagcatttgttccgcttgtcccccgcggacgtgtcaggttgcttgctcgctgatgacatggggcttgggaaaacgatccagttgctcaccttccttgtctggtacctggaaaaatatccacaagacaaaccgacacttatcgtcgccccagtttcgttgcttgataactgggagcgtgagcttcatcggttcttcttcgctgatgcactaccagtgttgaagctgtatggctcagccttgagtgcagtgaagttcaagaaggaagaaatacctgctgacttgaaagcaaaaggcatcaagaatttgctgcgcccaggttgggtgggcggcgcccgaatcgtcctgacgacttacgagacacttcgcgatcaggagttttccctggcgcgccagcagtggtcgatcgtcgtgtgcgatgaagcgcagaagctgaagaaccccgcggcactggtgactcaagcgatcaaagccattcctgcgagatttcgagtggcgtgtaccggtacgcctgtcgagaacaccctgatcgatctctggtgtctgttcgacttcattcaaccaggttttctaggtggtttgaaccagttcggtcgcgagtatcagcgcccaatcgaagccgcgttggagcgtgacacggttgccctggagcgccttcgagggcttatcgatccgcagactttgcgccgaaccaagcaggacattgccaaagacctgcccgccaaaatcgaagacacagcatgccgttcacttagcatgcatgccttgcaacgcaatctgtacctgtccgaaatatccgcgtacagccagaagcagcagattgaagaacagctcgatcaaaagacctccggcatgctcgggttgctgcacaagctcaagctcatttgtgctcatccttacagcgttcagccagacaagcgattgcgcgacaactcgccgaagctgcaatggttgatgcagacccttgagtcgatcaaaagagctggaaatggcgacaaggtcattgtctttaccgagttgcgtgatattcagcgggagttgcagcactcgatccaggagcatttcgggtttcgggcaaccgtcatcaacggcgataccagtaccagcagccagagtgcgaatagccggcagcggctgatcgaccaattccaggagctgccgggattcgcagtcatcattctgtcgaccatcgctgtcgggtttggggtgaacgtgcaggcagccaaccacgtcattcacttcacccgttgctggaacccggccaaggaagatcaagcaactgacagggcttatcggattgggcaggagaaggatgtctatgtgtactacccgacggttcgtgatgcgcagatgccgacgttcgaagcgacactcgatgagttgctgagtaagcggcgggcgttggcgcgggacatgttgagtggggcttcggatattcaggcttcggactttgaggcgctgctgaaaacacgctga

SEQ ID NO: 11168 - DNA, 1965 bp, Devosia sp. Root436
attttggattcattggtttcaatcgggctgtatgtccgcgcacttgtactcggcgtcgctggatggctccgggaggaatatgcccctggcttggttagcctagcgttggtggctttcctcgccctagcagtaggcctgttcctctttagggtcggcagtaaaaggcgggcactggcccgccttcgggccgaggtgcgcaaatacaaggacggagccgagctgagccgaaacattgcggagctcgacagtcggatcaaaagcttcgggcgtcgaggatcggcaaagagcgtcgctgaacactggacggagttcagggaaaccttggtcgcttacgagaccggagaaaatgaatacgtcctgcgcaatgcggcacggccgtcaatctttttcaacgttgaggacttgggatttggcgccggattctggcggatcgtccccgggcttttcgtgaccgcggggctattccttaccttcctcggactagtcgcggcgctgcaggggctgtctgacatcaatgaggaaagcatgagccggttaatgaatgtggcttcggccaaattcatcatgtcccttaccggcctgttttgctccatcattttcacgattgtgctgcgtatcggcatgtctcgcctggaagatacggcccacagcgtctcaaacagcctggagcagcggctttcgttcatcagcctcgagtccttggcggttgagcagcttgctgcggttcgagagcaacgggagcatttccgcgccatcggtatggaactggttgccgaacttgggcggcccctgcgagaggatatcccgctcgccatttccaatagcatttcagccgccatggcgccccttcttgaccaagtgggcaaagcggggaccgaaggcgtgggcagcttggtccaggacctgtcgtctcgattttctgacgacgtgggcaaggcgcttggtcaggccagcgacaaactcgcccaggccggcgagcggattggagcgctatcggagcgaatggacgccagctctggccggatgggcggcgagatggacgctgccgtggcccgagtggcccaagcggtggacgatctgcgttctactatgacagcggcggccgacgctaccggtggtgcattcagccaaggcgccgatcgcatgctgtcgatcatgaacgagacgcttcagggcatccgtgaaaatactggtgagggcgcacgggccatgagcgcggccgcagcggacttgaaacaagccggtaccgcattcaaggaacagatggaaagcgcttcgctgagtggaagcgcagcggcgcgcgagcggatcgaagcctctggatcggaaatagcccgcctgacgggcgagctgacgtcaaaggcgtccgaacaattgctggcgccgctgggcgaaatcgcccgccagatggatgggttggtcggccaagtcgccggcgccagttccgaaatgcgaatgctctcggaaggcgtgcgctcgggcgccgaggcatcggtacaggcggcctcaactttccgcacggccagccaagacttggtgacagccgctgtcccgatacgcgcgaccagcgagcggatcgaaggttcaatacggcagttggcagacagtacgcaaaatgtcgccacgacggtctcgcgttcagcagaggccaccgccagcagcgcgctcgatgcgctcaacgcggccaagcaaatccttagcaccgaggctcgcgcgatcgaggctggactcgagggcgtgtcggcaatgttggagcgcctaaagggtcagggcgaccggctcgacgacatggatagcaagctcggtcaggctttcgagatctataccacgcaggtggcgagtgctgtggactccatgcgcggccatgtcagtgaactgcagggtcgcctcaatccggcgcttgatgtgatgcaagcaattgtcgatcaggccgagcagttcgccccgcaatccaggaaatcctga

SEQ ID NO: 11169 - DNA, 936 bp, Devosia sp. Root436
atgcgcggcggcgctcgtcgacaacatcgcgaggaggaagaagaatctgctttcgtgtcgatgaccgacatgacggtgagcttcctctttatcatcatgatcctgctcgccttcttcgccagccagttcaaccctgaggaaaccgtcctcaagtcagactatgacaaggcgctggcgacaatcgaattgcagaaagtctttatcgcccagaaagatcaaacgattgctgatcagaccagtcagatcgaagaattgctcaagcgtatcgctgagctggagcttcgactggtggaagcggagaagatcgatcctctggaagtctatatcggccagaccgcgagtgaacgtaggaacattcttgagcggttgcgtgaccaattactgcaagaatttcctgacctcaatgtggtgatcagtgccgagaatgatgcgcttcgctttcagggtgatggcctgtttgccagtggctcatcggcgttgcgtgatcagcgaaccgttatggtcgtccagcgcattgcggctcgcctgaacgagattttgccctgctacacgcttggccccctctctgcctgggacaccggctgcaaccccaacggagtgattatcgaggcggtgcaaatcgagggacataccgactccacaggtgctgacatctccaatttgtggctttctacagagcgcgccaataccacctatgcggagatggtaggaaaccaaccaaatctggttagccaccaaaactatcgcgaacaacctgtgctttccgttgcaggatacggcaagatgcgaccgatagccgacaacgacacgtccgaagggcgctccaccaaccgccgcattgatttgcgtatcatcatgttcacgccggggagttcggaagaaatcgagcgtattcgtgaggagttgcaagctggcgtgggattggaaagcccatga

SEQ ID NO: 11170 - DNA, 1305 bp, Devosia sp. Root436
atgagcctcgcgcgctttttggctaagccggcaagctttcacccaatcgcgttggcggcgataaacaggttggcctccactactgatcgaatcatggctcgctggccggatgtggtggttgaaccgccagatcgagaccgggagcgactggtccaagagatgcaaaagaggctggaaacgggcgactggagcgacacaaagatgtcgctcgtcaccacggctgctgtagccttgtttgatcaggctcgtcgcgagcgtagcgaccttgccgccctgcgaaaattttactgcgaggagatcgaaagcagcgatcgtcgaaccttcctcaacaccatggttgccgtgtttatcggtagctatgagcctggcgcggcacacaccgccgctttggccaacgcgctcgatcggtcccgcgccaagattggtgcgcgatgggctgccctactcgggagtgttcccgaactgctggatgccagggtcgcgccttctgctctggccagtcggatggttagaatggctgttccatgggacgatctgcgacatttagggctgcgcagtccgcatgcaccaggcctgatggaccatgttcatcttgccttcgtcgagcaacttgcgccgcagctagaccaccgctcgggtatggagcggttgatcggatggttgaagcccgaaggtcaacaggctcgggcatctggtgctgcccaggcgattagcgcgctgttgtccccatggcagagccgtgcgccatcgaccgatgacgagcgctttctcaccgaagcgcttatcacgctatatggcgacccgcgggtacaccgaggtggcgcctgggagacggtcccggaacagctgcgaaacgtcatcatccgttggctgaccggcgaaaacatccgctttttcctcgatgtcgtctcagcggtcgaagataatcacatgtgggagcccaggcggaagttctggctgggactacaccagcaaaagcgcatagacgcagcctgggtcgccttcagtccggaagctgcatcctatgcccgccaaaaaggcgcaggcaataaattccttcgatacggcaaacaaatcgcaggcggtggcgacaataagaaatctcttctcgtactgcagataggccaaaaaatcgtagtcgaaggctcacattcttttaaggtgcatgtctttcgagatgacgggaagcgcgttcccaagctctatcaagaccgatacgactgccaagacatcagagacttgccgggctcgtggtcgacgatgcatttgggtgattggcaaggccgcgtgctcgaacatatctag

SEQ ID NO: 11171 - DNA, 3087 bp, Devosia sp. Root436
atggctttttcgctggcctacgatgcacattccgtctcccttcacttggagagtggtggcgggttgttgcagcgtctgatcggacgcaagccgcaggatctgggacggcttccgttgagtgaccgcgaactgatttacgctgttgccgaccttcgggcgcttgccgatgagacgggcgagaccctggagattaccggccaacagatccgcatgtcgcaccggctcgcggctgcggtaacgagcaaaaccgccgaggcactgaaccttccgccagtcatcgacctgactttccgcaccgatgtggaaggggtgattgggtcgccctctttccggctgcgccatgagtggaccaaggccggacagcgacagctgcccaagcgcactggcgctatcctgaccacctcagacggcgaccgacgcgtgccgctttggctgcttgaggccgtggaagtggctgagcaattccagccgggcggtcaggacgatgctgcgcattgggaggcgttggcacgctttcgccaagcgctcgatccaggcgtccgtgtggccggcgctgaccacaccgccaaggtttcgatgactgactttctttccggtctctcggtcaatctggcggatcgattttccatctcgcccaacgccgatggctctgatttcaatgtcgtccccttctcgggcaagacactagaacgcgttgggatggaggaggcggctactccgtttgaggcacaaggcgaattgcaggatcgcgacctgctgaccttccagcaacgagtgcgcgaccgcggcgcactacctgcatatcgcatcgctcctggaagctatctggtcatagatcgctcagcatcgccggtgcttgaggtgatggccaagatgcagagagcgacgcaatccgaacgacagaatttcattcgcaatccgcgtcctgccattactgcggccgtcgaggatgcattacggcgtgacggcaagctcgatggcctcgaccctgttggcgaagaggaggccatagaggcgatcgccgggcctgcactggtggaaacacatgaattttcggagcgtgtggttggcatcaaaatcttcgaaaagcgagcggccccgatcgactttgaagccagcacatggatgcccgaagatttcggccgcaagtttgcagagctactggcagatatgcccagctcggcgctggacgatcttcgtgtcgcgattgcgtcggcgatcgaaagtggcgttgcacaagtgcaggttgacgatctcgctgttcccgcacgcgccgagaccttgactacgatcgacaaacatattgccgaccgagcagacctcccagaacaggacggtctccctgatgcccagaccagacccattgttcttgagaccgaagacaatactgacgaattgcactggatcgctaacctaaccccaagggcaccggcgatcggcacttcagtgcctaccattgtaaagacggctcttaagcctcaccaagttgatagtctggcttggcaaattgacgcgtggactgccgggcttccgggcgtgctcaacgcggatgagcagggcctgggcaagacgctacaaaccatcgccttcctctcttggcttcaagacaacatgaggcagtctggccgcgcggccagtcggccaattctggtcgtggcgccaacttcgctcctgattaattgggaacaggaggtcagcgggcacctgcaggagccaggccttggtagcgttatccgcctctatggagccggaactggatcgcgcaaggtgacaggcgccagaggcatggacatcgacgacggcgtcgccaagcttgacctgagctcgctccacgaagcgatcgaagaaggtcgcgcgcatcgacagtggatactgacaacctatacgaccctgaccaactaccagcactcgctggcccaaattccctttgctgctgtggtcttcgacgaaattcaggccatcaaaaatccctttagcatgcgtgccgaggctgcccgcacgatcaatgcagatttcagaattggcctgactgggacaccgatcgagaacagcgcgcaggatttgtgggcgatcatggatcagctgacgccaggaagccttgatagcttgggcgaattccgccgagcctattctgagaccactccgcaaaatatggctcagctgcattcacgagtcttcatgcctagcggtaaagtgccccctctggcactgagacgactaaagcaggctgccgccaacgacctccccgaaaagacgcgccaattacatccgcgcgaaatgccgcgccaacaggccgagagctatgaggatgccaagctaaagctggcccaaggcgggccaggtgccgcgctcaagatgctgcatcacattcgaagcgtctcagtccatcccgatcctcaggccatagctgcaaatgaagacatgatcgccgcctcggcccggctggaagctacatttgatatcctgcggacaatcaaaaaggagcaggagcgcgcgttagttttcattgaacaccgacagatgcagtaccgcttcatggagctggtcaaggcagaatttgggcttgcgcgggtggatctgatcaacggcgacactcccatcaagaagcgccaagagatcgtcaaccgcttccagatgtatcgcgatgcgcccggctttgatctcttggtccttggccctaaggctgctggcaccggattgacgctcactgcggcaacccatgtcatccacctttctcgttggtggaacccagccgtggaagagcagtgtaacgaccgtgttcatcgcattgggcagactcggccagtcagcgtgcatgtgcccatgtccattcatcctggatttcgtgagcactctttcgactgcctgttgcatagcctcatgcagcgcaagcggcgtttagcgacttcggcactttggcccatgggcgacaccgaggctgatgctagtgatctccagcgcatggtggcggatggagtgacaagcagtgggggcgatgcagtcatgtcagccatgaccgcaatgtttctgagagacaacattccagtacctgcacttcgagccgacggatcgctgccattcgattga

SEQ ID NO: 11172 - DNA, 1956 bp, Bosea sp. Root483D1
atgcgcgggctctttatcgcgacgacgcgattcgttttgttctgggcgatacccgtcgcttttgttttcgccgccgagcttctccttccacaggtgaactaccggcttgcctacgacaccgttgtgagcgccgcaggcggaaacattgaaggtatcagccagccggaattcgcctatgcgctggccgcaatactattcgtcttcgccatcggcttggcggcagccttcatgctgctccacgttctcccggtcatcctcgcgctttcacgagccaagcagatgatccaggctgctgggggtaggagcaggaaccgcgcggaggttcgaaagagcttcgcgtccgggtttgaacggctgcgacagcacctcgcgcgccgttggctgatcggccacgcttgggttgagttcgaggagacccttttcgatatcgacagtccggacgcaattggcaacacggtgcgcccgcaagtctttttcaacgccagcttggcgcgcgaaagactggcagggctgaagatgatgaacgccgtgcctggctacttcgtgggcattggcctgctgctaacttttgtcggtctggtcctcgccctttacaaggcaggcaccgccgccgcggccggcgacgccaacgttatggctgcggagatgggcaagctgctgcagatagcgacgttcaagttttcgacatcgatcgcgggactcggcgcgtcgatcatcctttcgatcgtctttcgttggttcttcgtgctgatcgaaagcgccttcgatcgcttcaacgccgcgctcgagcgcggcctgctctaccacgcgccacagtcgatcgcgatggagatgaaccgcaccatgcacgatcagctggttcagctgaaggacatcacgcagggcgactttttcacacgcatgggcgaggagatagcaccgcgcctcaacacggcgatcagcgatgctatgggcccggtcactgaacagattggcagtgcggtcggcagcctaacggcgaacagccagactggcgttgcaaggatgatggagtcctttgtcagctcgctgcagagcggtgctggcaccgagatgcgcgagctcgccgccaccctgaaacagctgcagatggcgatgaccgagatgcagtcaaacgtccgtggcagcggcgatgccttctccgacaagctctcgaaggcggccgacaatctcaacctcatgatcgaacgcgccggccagagcttcgagacgagctcgggacagagccgcgacgcgctggcctcggtcgtcgagacgctgcgccagaccatggaaaaggcgaatgccgacatggatgctgcgctgggcaaagcggccagcggcgcctcggcgaagctcgagacggcaatgggaacggtcatgggaaagctcgacgagcagattgtcggcgttggcgaaagtttcgccgccctggcgcgttcgatgcaggcgatcgagggagcgttgtccagccagcgcgccgcgctggagggcgcgacggtggaggcacacaacgccgcgaaggcgttcactgaaacggccggcagtgtccgcaccgcagctgtcccacttacgaaggtcggtgagcaattcactaacgctacagaacaactggcaactagcgtctcgaccacgctggagacgctcaacggcgccaaggtcgagatcgcggcgctcgccgcaaacctcgatgcgaccaacacgacgacaaacgaattctggaacggcttttcgtcaaaattcgatgaggtcgacactgcgctgggcaaggcagtcaagacgctgtcggaaacgtcactcgaccaccagcagcgccttcaggagcatgtgcgccaagttgaccaggggctaaccgaggccatccaaaaaatggcaccaatgctgacgagcatttcagacagcgcagagtcaattgccgacagcttagaaaaaactacgtcactggaagcagcggaataa

SEQ ID NO: 11173 - DNA, 921 bp, Bosea sp. Root483D1
atgatcgcagcagaaaccgacgaaagcgccggaagccatgccgaggatgacgaaaactatttcgtctcaatgaccgacatgatggtcggaatcctgtttatattcatcatcatgctaatggtgtttgcgctaaatttccagaagcaaaccgaccagacagagatgcttaccaagcagcagcgtcagcaaattgagagagcacagcacttggctcggcaaattgccaacctccagacccgcatcgatactgaagtaagcgagatcaacaaggcggacaaggcgcgggctaccctgctcgaaacggtccgggctcggctcgaggcagtggggttaaaagtgacaatcgacagctctactggcgtcttacgtttggcggaggatgcgatcgaattcgcgtctgataattccacgctcgacaggaccgcttcggccaatgtcgacgcgctgtcgaaggtacttctcgacgtcttgccggcctattccgcctgtgcatcagacgcaacttgccctcggcacagcggatacacggtcgagaccgtgtttattgaagggcataccgaccgaacgggacaggatagccgcaactggcaactgtctaccgaacgagcggtcaatacatatcggcggatcgtcgacaacttccccggtcttcgcaacctgaagaattcggcaaaccgggaggtgctttctgtctcggggtacgcctacacgcgaccggcgactaacagagaagaccctgacggtcgcaagataaaccgccggatcgaccttcgttttgtcatggaagctgatcgcgagaaacgtctgacagaagtaacaaacctacttgagcagatgaagcagcaggtcgaaacgctgcaggaatcggcgcgcgcaggattgccagtttcaaaacgaccagcaccgaatgtcgctccgtga

SEQ ID NO: 11174 - DNA, 1368 bp, Bosea sp. Root483D1
ttgaaggacgctatcagcgagctgttgatacggcacggtccgtcgagagccccggccatcgagccgtccgtgctgagactggcgcgcaggcttccggagggcaggggcgatctgcgtggcgccaagaactacgaggagatcgcggtccggctcaagactgcgctcgggcgtggcgagcgccttaccaaagcacaggcgcgcgatggtgcatggtgtctttgggaaaccgaggtcgcgatcgcggaagagcctgatctcctcaaggcgttcctagcccaggtgcgagcgctcaggcacaaggcatcctcgcgtgtgctcgcattctcctacttgatcagcttccaagctggcggaccgggtttcgccgccgtcgcttcggtgttgcgagacctagcatccgtgatgggagaaccgtttgaggtgttgcatcataagttgcagatcttcgacgaggaacaggggcctcgcctgataggcgatgcggcattcgccaaacgcaaatcgcctgcaacaattcttgaagagagcggcctgcggctgcagcaggttctggccggcggctatgtggagccctgctcccggcgcgtcctgcagcgcgccgccgaggatctgcgcctaccggcgctggagcgcctggatttcatccagctcgttgcggtgaaaggcggcaagctgaattttccaactcacaaggatttggtggccaacgcgctgctgctcccgcaccgtgaccgcgaagtagaaaagagtatcaaggatcgcacgctcgacttcttagtgtcgctcgagggcctcggcgatccccgtacgaggagcggcaactgggttggcatcccgcaggcgcgtgatgtcgcgatcaactggctcaccgagcttgcgctgcggcaattcctcgatgttgtcgcggcggtcaacccgaatgttaactggccgtaccgccgcaggttctgggaggcgatgcacaagtccggcgcgataagcggcgcgtggctggtgctggacagtgagggaacaaaggaggctcatcggcggttcggtcgcaacgtgccattcgggcgatttggctatggcagcagcggcgtgcaggctggccacgccgtgctgctgctccggattggatcgggcgtgtgcgccgagtggagcttcgatggcaaatgccgcttctgggccgatgctcagcgcaaaggggcaccggagctctacaagccgcagtatgacgccgacgaactcagaaccggcaaccgctacgctccggtcgaggaaatcgtccacattccccatcagggtcaaaacgcctggcagcataaggctgcacgccggatttcattgatgaccggcgaacgcttcaattccagggactacatgtga

SEQ ID NO: 11175 - DNA, 3000 bp, Bosea sp. Root483D1
gtgaaagccaccttcacccatttggtgcagcccgacggcgtgttgcttaagctccagcggcggcgcttgctcagctggcagccattgccggtgaaggactggcacctggctgacggcaagcagggtgccgccgctcgcttcctgctgccaggggtggaggcaggcgacagcgtcgagcgcgaaggtggcatctttgtgcctcacccgctggtcgcatcgctgccggggaccgtcgcagaagctgccggtctcccgccgctcggtacgctgtcgatcacgctcgccttcgagcgcatcatgaccgatcccaaggcgcgtatccgtgccagctggtacgatcacgaggagaatcggatccgcatcacgcgggtcggcgcactcgccacttggggcgccatcgaaggccgtctgtcgcggcctctctacgagcttgccgaagcgatcgacggctacaacaagactgaaggaaagaacgctgagacccgtattgccgcatggggggtggtccaggctgcgctgaagcgcaccaccgaggacgagctgcgcagcgacgacaactatcttaccagcctgaccgtctaccaagccggcgcggtggcgctggacgtgatcgaaaccgcgagcggacccgacttcttcccggtggtcatgggccgcgagaaggccgctaccctcgcagataatacagcggcgcccgatgaggatggtgaagcgccgccggcgcagcgtgacctcatttcggacgcgctgctgccgcgagccatgcagcagcgattctcgcgcgagatgtttgccggcgagtccagaagccgcgacgcctatgtgctggaccgaaatgtcttcctagtgcttgatccgtcgctgaagactgcactcgatgtcatccgccgcaagcgcgccgcgccgaaagcggagcgtattgccttcctgaaaaacccgcgagctgagatcgccgccgcgattggcgacgagagtggcgagacgactttgtcgctgctggtcgagacctggcaatattccgagcgcgtgctggggctgggcgtgtgggagccgccagcgattccgtggctcatgactaagtccggccagtggttacccgagcgctttccctgtcgcatcggcaacgaagtcatcgaactcgaccgcaaggcgttccagacgctcaagagcgaagtcgcccgcgccacggccagcgatgagaaggaaatcaccgtagatggccagcatttccatgttgtcgacgttcaggccgcgtttgtgcagctcggcctggacccatcaggcaatggacagatggaggagccgccagcgcgtccggacatgccggagcaggctgaacccgatctaggcaccccgccgggcgtcaatgtcgatgaccgcctcgtcatccggcagaacatcgacggcaaggagttctgggtctcctattcgccgcgcgtggtcgccgctgacgtggcgttcccccgcgcaccgctcgtcgccacacgtccgaaaccgcaccagaccaccggcttcgcctggctcgtggatgcctacagggccggctggcccggtgttctgctcgccgacgacatggggctcggcaagactttccaggcactggcgttcttggcttgggtgcgagagaaccgccgcaaggcaggtcttgatcgcggcgcccagaacaagcctatcctgatcgtcgcgccgacggccctgctgcgcaactggatcgatgaagccgaacggcatctcgagcccggtgcgcttggcgagcgcgtcgacgcgttcggctcgagcctgcgccacctcaaggggccaaaggacgagcactggacgccggagacagcgatccatgtcgacgaattgcgcaacgccaactgggtgctgaccacgtacgaaacgctggccgacaatcaccgcgcctttgcacgtgttgccttcagtgtcgccgtcttcgacgaggcgcagaagatcaagtcgcccggtgccattaacacgcagtccgccaaggcaatgaacgccgagttcgtgctcggcctcaccggcacgccgatcgagaaccggctcgccgatttgtggtgcatcatggaccgggtcgtgcctggttaccttggtgacctgaagagctttgtctcgacctacgagcagggcggcgatgaagagctgaagcggctgaaagaaagtctcgacaaagctccggagggaagccgcgggcccgcggtgctgttgcggcgcatgaaggccgagattctcgaaggcctgcccacccgccagttcaagaacgtgcgggtcgagatgccggccgagcaggcgcaggcctacagcaacgcggtgcgcaaagcacagattggcggcgcgacgcagggcgacatgctgcgggcgatccatgtctttcgcggtgtgtcgcttcatcctagcggcgcgcgcgactgcgacccactcgacaaggactctgttcggcgctggttctcgcagtcagcgcgcatgcgccacgccatcgccgtgctgggagagctaaacagaacaaaggaaaaagcgcttgtcttcattgaagacctggaaatccaggcgctgttcgccgctgcgatcgcaacgcatctcgacctcgagcgacagcccgccatcattaatggtggggttccgggcgaaaagcggctggagatcgtcgaccgcttccaagcttcgccggcgcctttcgatcttctcgtgctgtcgcccaaggcagctggcgtcggcctgaccatcacggcggccaatcatgtcatccatctgtcgcgctggtggaaccccgcggtcgaggaccagtgcaacgatcgctgctatcgcatcggtcaacaaaagccggtgacggtgcacgtgcctatcgcggtgcatccgcactatggcgaggcgtccttcgacgtgaagttggatcaactcctggaaaataagcgccaactgtcgcgcgacatgctgatgccgccggtcgctgatggcgacgtccagcagctgttcggtcagacggtgcgaagcgtctag

SEQ ID NO: 11176 - DNA, 2193 bp, Pseudomonas sp. Root569
atggatttttcgacgctgttgcatctatggggtgcagcaagctccgagcagctgatcgcaccaaaaatcgtagttggcttcgttttcgttttatgcgcctggtactttgtccgatatttttttaggtcttttagacttagccgccagctgaaacgcctgactaaaagcttgcagagcgtgaaagttctcgctccacctctccggcgctctgaactggaacgtctgttcaatggcagcaaactggaacattcctggcacgagtacgctgaaacgctgcacgaccagtttgagtttcaagaaggcgaacaggttcttgtccggtcgcgcgccaccgccggagccgcgcattttttctcacctcaaagcgtggttgataccccgctgggaaccgagttttataaacacctgcctggtattttgaccggtatcggtattgtcggaaccttcttcggcttgatgctaggcctacagcattttgatccaagcacccctgagcaggtaaatgccagcgtcgataagctgctcaaggacgtgttgtttgcgttcatcggctcctttgtttcaatcatggcctcgatagccgtcacgattactgaaaagtggcgtctgggccaatgctacaggcttcttgaagcgttcaacgaaaccatcgacgggcttttcgacagcggtgtcggtgaggaatatctagcggagcttgtgcgctcgagtgctgaaagctccgtgcaaacccgccagctcaaggacagcctggtaaccgatctgcgggaaatgctgcagaacctcgttgatacccaagtccgcgaaagcctcaaattagcggataccttgtcaacgacttaccgtgactctgggcaattgttggccgatcaggtaagcagtgcgattgagaacagtctcaaatccccccttgaagctatcgcgggtgcggttcaggccgccagtggcgatcagtcagggcaagtacagaaccttcttcaggatgttctagttgccttcatgaacaagctggaaggtacgttcggccaacagtttaacggtctacacgaactgatggggcagtccgttgccgccatgcagtcgatgcagcaaggattttcgacgctgatccaagatatgcgttcggctagcgagtcctcgacccaaaacagctcgactatgatcgctcagttactctccgatatgcaggccggacaaaacgccatgcaagcggggatgaacgagatgctcgccaatctccaggcttcggttgcccgtatcggcaacgaaggggagggggcaggtgctcgaatggccgagcagttggagaagttgtttgctcaaagcgaggctcgccaacaggcaatggctgagaatctccaggcttttgttgagtcgatcaagcagaacatcggccaaggtcaacaggaaaccatggcgaaaattgcgggcaccgttgaggtgctgggtgagcaactctcggcagtcttcaagcaattggagcacggccagcagcagatggatcaaaccacccgcgctgcgcaggctgacctgcatcaaggtacccgtgacttggtgggcggtcttgacgaacaggtcaaggcgttgctgcaaacagtgtcagagcaacagaaatctgcacaggacaccgttaaggcattgagtgcccaaacagagcagcatttgcagagcatgcagctaggcgcagacaagatgagggcggctgctgagcggtttgaaacggccggacaaagtgttgcgcgagccagtgagtctactgcgggtctgatgggaacaatccagggcgcaggttctgagcttgcacaggcatcacgtgagctgaacaccgtggtcgcggactatcgaaacaatcgtgaagcgctggcgaaaactctcgcggtcatcgaaggggttgtcgcaagtgcacaaggggaggccagcggtcgtagccagtatctccaggacctgaaggttcaaagcgagcggatgcaggcgcttaaccgagaagtgtatgaatacctggaaaacatcagtggtgtgcttggtaacggcttcaaagagttcggtgatggcatggatcgggttttgagacaaaccctgggtagcctggatgccgagctcgataaggcagtcaagagcctcgctggcggtgtagaaggggtcaaggaaagtctcgaagacttcggcgacatcatggaacgaatcaggcagtaa

SEQ ID NO: 11177 - DNA, 744 bp, Pseudomonas sp. Root569
atgtttggtaagcaaatgccttcggttgcccgttcaaaagacgagggagagaagcctttttggatatccttcgctgatttaatgaccgcgatgatgattctctttctcgtggtcatggtggcggctttgagttctgtgacgcagcgtattaaccaagcggagcaaggagagaagcagcgtaatagagacattagtcagatctgcgagcacctgagtcttaaggcaaagactgccagtaaaaccatcgtcgtagactgcaaggacaaccggattagcttcggcgatgctggccgctttgggcataaccagtacgcgctgagcaacgatggccagtcggcacttcaagaggttgtgccgatgattctggacgcggctaacagtgaagaaggccgtaaatggttcaaacaggttgtgatcgagggatcgacagacaccgacggctcttatctttataacctgcacctttcactgcaacgttcagagtgggtgatgtgtagtctgctcgatagtcgcagtccgctccaagtcggattgtcgccggagcaccaacagcaaatcagatcgatgttcctggcgggcggtgtgtcgttcaacaatgcaaaggacactaaggaagaaagccggcgagtggagttgcgcatgcagttctttggcttgaaggaaaaggaagacaacctcaagccagaggtcccggttttcaacaacactgatatggaaaagtgtcagttggcgatgaaccgatga

SEQ ID NO: 11178 - DNA, 1629 bp, Pseudomonas sp. Root569
atgaccagcccaatcgcgaggctttctgcctctattaacctgagccttaccgcgcgtcgaacggggccggcacctgagccgttggcgcgattcccccgtctgggggctgcgggaattgatctttacgaaagattcgaacgcgctgaaaaggcgttgccgccacctcaggaaaagcgtcgcgctgcgataagcaaattccgcaatgtactcccactcaacgcctctgaatggcgcttggttttcgctggtctctcggacaagagtgagcgagtcggaccgatactggacgatgaccagctttttgaccgagtgcacaaagaaatccatcaccgtatcgaaaagcggaggctgagccgccgagactggttggcgctgtgctttagctacttcgggtacgaggccgccacgccggaccagaacgccaattggtgtctgttgcgtgaagacgttcagcttggcttcgactgcgtcagaggccagcaaaaacgcgagaaggaatgggtgcatatcgtccagcagcatcaggagcttttctccgagcaggcaggtgccaggctgggtgaccagatgttcaagggagagatcagcgacctttcggcattgcagacgattgcgcagatccctgacagcagttggctgtggcgaaggatctttaacgtacttatctctcgtatttttatgttggatgacgccgagttttctcagcgcttagccgaccttgtcgacatcggccggcagcatccgcggtacatgaacgacattatgagtgcatgcctgtcgcgttatcacttggcagcatatcgagagaaaccgtcgtcgctgctcaaacaggtcgccctcgacaactggggcagccctcagatccgttccagacaaaacagctggctgcagtacgttgaaaaagatgtctgtgcaatggtcgttgcgtggttcgcgaaggaagatcttgagcacttcttcaacctgttgaagggagactccgaggtcgatcaatcgcgtctgcattattggctgcgatttgccaaccaaatgagctacacccgaattgttatgggggcggatgcgtggaatgaccgcgggcgggacttcgtccatttccgtgagaagaataaagggcgcttgagcaagctggtaggcggtcctgggcacaacaatgctgtagtgatgcagattgggaactactttttcgtggagttctccggcacaggcaatgcctgctatgtgtacaaagcagatgattcgccattcaacccagacaaatcccagcttgagcttactgccgagctgaagcaggcaaatcgtgcgctggatcgaatgcggcactcacctgcacctagccgcccaaaccgtattgaggggtggctcagtaagttcgatgacgctctcgagaaattgggtattcgcgtgcagagtcagaccgcagcgcctgggtcacccaaaccaatggctttcgaagatcaggtccgtgatgccctgaagtcggtcaagtacaaagtctacgaccaacgcgcgcgcggtggcgcatttcaggtccagctggttgacgaggatcgggcggccgttgcagcgctccaacgcctgggcttcaagcccgtaaatcaccagccactcaggttctggaggcagtaa

SEQ ID NO: 11179 - DNA, 3249 bp, Pseudomonas sp. Root569
atgctaaagcgtttcctcaaaggcataggcctgcagtcgagcaccaaggcggaaagctacgcacctgctttttccattgaggagcagggcctttgctaccccctgagcttggcagataacgcggaatcctggccgctggcaagctatctggatcagttggaagaggaggagttcgtctcccagctcagcgatcgctggttgctgacgtgggatgagctctatcggcttcttgatgacccggatcacttaacaagtctgccgctattgggattgcctcccgagacagatctcatccctcaattgagcagccaaggtagtctcgcttctgacgacttcaaggtcgctatcagtggttggcgtgaccctcggtcaaatgccagcgtgcaggtacaacgtacgggtgccatcgtcctatacgacggaacaatggagactctgcctgagtcttcctggaagctgaccggtgctgtacggcaactttatctggctcaacaaaatgagccaggtgaagtgactaaccagatcggctgggccagcatcaggaagttggcgcgcacagcgggtgcaggtatggatggcttcttgaataagaccgtcgttatcaaacctgaaagcctgcgcctcaacccgcgaaaatcgacagtggggaatacgccggttatcgagttggaaccaagctttgaaggtcagcctgcaaactggcttgagagtttcgatggtgccaatcaggtccaggatcgatatcgggtgactggtgatgatggatcgctgacacacgtcctgattgatcccgaagtcaaatctgtattggattacgtgcgctcgttgcccgggcgtcgggtcgcaggcgacgatgctctttctttcgtccgcaatccgtacagcgcactcggtgaaagtgccgcgcaagtgttggatgccgagacctatgaagacgacctggccgaggctgggattttctttcatcggtttcatctggagcccacgctggatgaagtgggacatcgcattgagcgggtaaagctgacactcgaaccgatctcgccaacaccgcaagcgcccatcgaaattgagttcgatgcggcccatgagctcgcgccgttcgtgcatgaactgcagttgaaattggcggcgggcatgtctgccggcttctggcagggctacgagctggaactcagcgattttgatttacgccaattggcgggaatcagcgacttgcttaagcgttggcaaaacgaagccgccggtgctgagttcgactcggtcctggacctgtcactctacggcgaccgagtgacaggtatcggggaagcggagcgtattacctcacctttcctcgtcaaagaggcgacagagaactggttgccgaaggatgttgcggcgcttggcattgacgcagaaatccttggccgttgggatccttccgaccgcggtcagttcgaagcttttgagcagaggctggacgaagcccgcgcagccggtgatgaaacggtttgcttgccggagtccgaaacaccgctctcgattgccgctgccgagcaactttttgatgcatggtcgaagaagattgcccccgtagagaccggcctggtcaaaccgatcgaaaaggttggccgcgccgtactgcaaattgggcacaacatcgacgaacccacctacgtccagattcgtcaggccgcattacgtgccgctttggacgcaacgccagagttgcccagcttgctcaagccagaagtcgtcttgcgtgagcaccaacttcaaggcgtcgcgtggttgcagcacttgtaccgcttgtccccttcagacgtgtcaggttgtttgctcgcggatgacatggggcttgggaaaacgatccagttgctcaccttccttgtctggtacctggaaaagtatccacaagacaaaccgacactgatcgtcgccccagtttcattgcttgataactgggagcgagagcttcatcggttcttcttcgctgatgcgctgccagtgctgaagttgtatggctcagccttgagcgcagttaagttcaagaaggaagaaattcctgccgacttgaaagcaaaaggcatcaagaatcttctgcgcccgggttggatgggcggcgcccgaatcgtcctgacgacttacgagacacttcgcgatcaggagttctccctggcgcgccagcagtggtcgatcgtcgtgtgcgatgaagcacagaagctgaagaaccccgcagcactggttactcaggcgattaaagccattcccgcacagtttcgagtggcatgtaccggtacgcctgtcgagaacaccctgatagatctctggtgcctcttcgacttcattcagccaggttttctgggcggtttgaaccagttcggtcgcgagtatcagcgcccaatcgaagccgcgttggagcgtgacacggttgccctggagcgccttcgagggcttatcgatccgcagtccttgcgtcgaaccaagcaggacattgcaaaagacctgcctgccaaaatcgaagacataacatgccgttcattgagcatgcatgccttgcagcgcaatctgtacctgtccgaaatatccgcgtacagccagaagcagcagatcgaagaacagctcgatcaaaagacctccggcatgctcgggttgctgcacaagctcaagctcatttgtgctcacccgtacagcgttcaacctgatacgcgactgcgcgacaactcgccgaagctgcagtggttgatgcggacgcttgagtcgatcaaaaaagccgggaacggcgacaaggtcatcgtctttaccgagttgcgagatatccagcgggaattgcagcactcgatccaggagcatttcgggtttcgggcgactgtcatcaacggggataccagtaccagcagccagagcgccaatagcagacaaaaactgattgaccaatttcaggagcagcccggtttcgcagtaatcatcttgtccactatcgcagtcgggtttggggtgaacgtgcaggcggctaaccacgttattcactttactcgttgctggaacccggccaaggaagatcaagctacggatcgggcttatcggattgggcaggagaaggatgtgtatgtgtactacccaacggttcgggatgcggcgatgccgacgtttgaggcgacgctggatgagttgctgagtaagagacgggctttggcgcgggatatgttgagtggggcatcggacatccaggcttcggattttgaggcgttgctgaaaccacggtga

SEQ ID NO: 11180 - DNA, 1953 bp, Brevundimonas sp. Root608; identical to SEQ ID NO: 11152

SEQ ID NO: 11181 - DNA, 750 bp, Brevundimonas sp. Root608; identical to SEQ ID NO: 11153

SEQ ID NO: 11182 - DNA, 1386 bp, Brevundimonas sp. Root608
atgacccgcctggcctctctgctggaccacccagaacgcctcctcgacgccttgcgagtccgtgcccccgagctggtcttgctccctagagctgtcgcccagatcagtggagaggcaagggccatcaacctcgaggcgaccgaagcgctccagcagcgagtggccggtctgatatctgagggtcaggtcgcatcgctttcgcggcgggacctgcgggagagttgcagaacatttctgcacccgccgcacccaccggccaaagacaccaccatcgcgaaccccatttgcgaccaggtcgaaacgctgcgtcgccgttcagccttgttcgctctccttgacgcctacctcgacggctttgatcaagatgatgcggacgtcgcgtggctcgccaagcgactgaccaccgcgtcgaagtcctggccatggcggggaaccgatccctggccggctcggatcaaggcttttgagttgctcacgccctcaaaggcgcccggccgcctggcggcagcggtgctcggcggtaaaggcgactttcggtccatcctcgacgaagctgggctgacgacggaaggccgtcgcatcggtggcctggggctggccggctttacagcggcctgcgagacggtgcgcaagctcaaggcggcccaggcggtcgcagcccaggaacgacttattgaatggtcgggcggttcaggcaccctcgcctatcccaaggcctggccgcaatttgcgggcgctctgtttgagccttggggcgcaagcgagcccgcccgagcccacaagacactgatcgtcgacaaggcggtcgcgcacgcaggcgacccccgcatcaaccgcgcacgatggcggccggtagaagaggtcgcaggcgatgcatacgccatcattctgcgctggctaaccgaggcttcggtccgacagtttttcgacatcgtcaacgaaaccatgactgatcgccctgacatgtgggcagaccggcgcaaattctggacccggtacctggacgccgacatgatctcggcggcctgggttgccttcggctcggacggtgcggcccgtgccgatcgcgccgcccaacgaacgggcgacaagagtctttcgatgttcggacgactggcctcgggctccggtcgttcctcacaacacgccgcgctcataatgaagattggcgacctgaccatcgctgagtggagccacaacggaaaatggaacatctggggtcgcaacgacccgaagcaccccgtcctgttccggcacaatagtcggcgattgcccgactacgattcttccgaactcatgcgcgcgccgacctccggttcccatacgacgtggtggcaatcgagagtggctgacatcatcaagaacgaaaccggcctgcggccatga

SEQ ID NO: 11183 - DNA, 3687 bp, Brevundimonas sp. Root608; identical to SEQ ID NO: 11155

SEQ ID NO: 11184 - DNA, 2100 bp, Rhizobium sp. Root708
ttggcgatcggggtcgtcttcgggctgagctttgtattgccgccgctcgatgtcggcttgatcatcgaacgcgttggtaacggtttggcgttgctgagtggtcaggttggtgcgcaggaagcgaaagccgcgctggacgccttgagccagaccgatttcatcttcagccttgcatcgcttattttcgcggtggccgtttccttgatggtgactttcgggctgctccacgtcgcagcgattatcggcgcgctctacaatcttcgtcgcgttgtctcacggcagaaaacacgtgctgattttgccaacgaatacgatcagtcgatctatcatcacttggaaggcagcaagctgcttggtcatgcctggcgcgagttcgatgagaccctgataaagccgtcagtcggtgagccaccgctgatcaagaacacggtgcgcccccagagcttcatccatttcggcgccattcgggaccgcttcttcggcctgaagatgatggcgagcattcctggctatttcgtcgccgtgggcttgctgctgacattcgcagggatcgtcctggcactctataaagcgggaagcgcctccagtgcgggcaatgtgaacgaaatgcaggtcgccatgaccgagctgctgcagatcgcatccttcaagttcaccacatccatcgccgggcttggctgctcgcttctcttgtccatcgtcttcaaggtctacacgatctggctcgaagccagcgtgcacaagttttgtgaggctgcggagagcaggctgaaatatgtcccaccgcaatcggttgccatcgagatcgccgaagcggccaaggaacagcgggatcagctgaaggaaatcaacagcgacaagttctttgcgcagatgggccgtcaactcgagccgcaaatccagtcagcttttgcgtcggcgatggcgccgatcaatgacagcatcaccggtgtgcttggaaagatcacggagaacagccaaagcggcatcaacgacatgctcgcgcagttctcgtcgagcgtccagggaagcgccggcacggagttgcgccagcttgcggagaccttgggcgccatgcaggcgacgcttgccgatatgcagaccggcgttcgcggttcgggcgaggatttcgcgcgccgtatgagcgaggcagccgaaaacctcaaccggctggtcggcgatgccgcccgctcgatggatgaaggcgccaaccgcaaccgcgacgggcttgcggagattctcgccgccatgaaggccaccttcgacaaggcgagcgcgcaggtcgacacggagctcggacgtgccgcaggcggcgcttcggagcggatcgaggcggcgatgggccgggtgatggagaagctggaaagccaggtcaccacgctgacgggcagcatgacttctctcgacggcgacctgcgggatggcgtgacaaagacgcaggagcaaatacggacagcacaagaaagcgcggtctctaccgtcagcgcggtagcagccggggccgccgaggcgatcaagacaggccttgccgaggccattgcgacgatccgtcaggaagtagaccgcttcgaaagtgcgttgcgcggatccaattccgccctgtcttcgcaggccaatgcccttggcgaagcgacgtcacaaacgcgcatcgtctcggacgcgttttcaaagacagcaacggatattcgctccgcatcggcgccgttgctgcagtcgggcgagaagatcgcttccgcaacctccagcttcgaagattcgctgcgcctggccgtcgatgcgctcgctgcaagccaggccgcctcgcagcagctgaatggatccttgcgtgagcaatcggagagcatggctgcgatctggagcaactatgaagcacggttcgcccgcatcgacgaagcgctagccaaatcggtcagcgacctcgcgacggcaaccgagcgacagggtgacacgttgagccgttacgcgaccgacatcgatcgcgggctcgccaatgcggtcaatacgctttcgtcgtctgtaaaagaaatgagcgattcgtttgatgagttctccggctcgatctcagacctgcgatcggctgttcggcctgcggcggaatag

SEQ ID NO: 11185 - DNA, 945 bp, Rhizobium sp. Root708
atgttggcatttgacgatgctgccgggaagccggcgatcgaggaggaagaggaaaactacttcgtgtcgatgaccgacatgatggttggcatcctcttcatcttcatcatcatgctgatggttttcgcgctccagtttcagaagcagaccgacgaatctgaaaagcaagccgataaatcgaaggtccagatcgaagaagtcctcgagaaggtcaggcaggtaagcgagcagctccatagcttgcgatccgagatcaacgaggagctcgaggatctcagccagtcgcagcgcgagcggaccgccttgctgaacgatcttgagcgcgagttgaaagccacgggcctcgacgttcagatcgaccgcgaaaacggcgttttgcgtttgacggagaatgcaattcgctttgccacggacaagtcaaacttgagcgcccaggctgccgacaatgttcgaaagcttgctgctgtgctcgcgcgggtgttgccgcgatacacaagttgcgtcgtttcaagtagtgccacggattgcaaactgcttgcgcctggcgcagcaatcgacaccgtcttcattgaggggcacacagacaggcagggatcggagaccgcggccggtgatagtcgcaattggcaactatcgactgagcgggctgtcgagacctatagaacgctgacggctttcgaaccatcgctcagggcacttagaaacccggagaagaaggaaatcctctctgtttcgggctactcctcgacgcgcccgataccggggaccgaaatgcctgcgcaaggcgctgaaatcacccaacaggcctgggagaagaaccgccgtatcgacatgcgctttgtcatgcaggttgacccttccgatcgactaaaagatgtgctccgtctgactgacgatatggagggacagatcgagaaactgcgggaagcggcgacactcaaatga

SEQ ID NO: 11186 - DNA, 1413 bp, Rhizobium sp. Root708
atgattgggctcttccgcgaagcttgcacaggcatgtcagcccgcgcgtccgggctgaccggtcatgacgtgatacccaaatacacttacgtgcatgaggcagcacgatcaattggcgcaaccggcattgatgatcgtgcaaagcgtgacctcgcatccattaatgaaattgcagcgcggctgctaccgatgttgcaggcaggcgatgtcttgtcgacgaaggaatttcgcgacgctatctggtgtctgtgggaggctaggacgccgctggccgaccaacccgcagcgctgaagcgaattgtcgacgaagtggatcggagcgacaagcgcaagctgttcaggacgctcgctacggtctatttgatacagtttcgcccaggcagacccggacttgaggccataagctccatcttgcaacaaggtagtgttcgctggggcgagccgttcgcatcatatcaaaaagactacgcactctacgacccgatccttggacccaagaatatcgcagccttggcgttgcggcaggctatgtcgccctccgacgcaatgcgatctctcgggtttggtgcgctcgacgcgcagtccggcttcacggaggcgatcacccgaaacctattggtgcaactcagcgacggggcggagcccgaccatatgaggcgcctggaaatggtcagatcatatgcgctcgatagccggaacgagcttgtcttcaagggacttgatctggagatagccgaagcgttgatcaaaccgttcctcggcaagtcgcccgagaaggcgattaaagatctcttcttgaatttcattgtctcgcttttcaaagatccgcgaacctatcccggccgctgggaacgattcccgcaaattaaggcattgatcgtctcgtggctaacggagcagtcgcttcggcagttccttgatatcgtggggctcaccgtaaaggatccgaacgacgctcagatgtggcgatatcgacgcgcgttctgggaagccgcgcaccggaaaggtattatcaggggcgcatgggtggtcttcgcggaggatggcgctcgattggcgcgtagtcgttttggcaagaatgtggactttgccacctttgtcagcgctggctccaaacagatccagcgcacgcacgccgttcttctccttgaggtagggcaaggaattgttgccgactggagccacaatggcaaagttaacatctggtctgacgcgtccgagcgaggcgcgccgaagctctatcagagaagctatagttcggacgatgtaacgatttcgaaggacgataccgaaacgtcacgctatctcgtcaagacgcatagctcgcccaaaacctacagctggcaacgcgtcgtcgccgaacgaatttaccggatgacgaatacgaggttgcagcccggtgactacaaatag

SEQ ID NO: 11187 - DNA, 2967 bp, Rhizobium sp. Root708
atgagtttcaaatgcgtgccccagcataacggcgctctcatcgagtttgaacagcgaggcctgctcggcaagaagttaattccctacgagcaatggggcgacaaggctgccgctgcagatcacggctttcgttttctctcgcatgccgtcgcagccggtgacgtcgttccatcaggcgatggtgtcttcgcaaagccggaattcatcttgtctttgtcggcgacgcaggccgatatgctgcgcgtgcccaaactggtcggtctttcggtcagcctctccatgcgcggtcggatcgataactctgatagcaccctcctcctgcactggcaggaccagaactcgcggcccatcaccccggacttccacggccccttcctccgcgtgggcggcgactgggccagattgtctcgcccgctctacgatatccacatcgctgcccgcgactacaacaattccgccggccaacccttcgccgagcgtcttcctttctggcagccggttcaggataagttgaagacctatcttggcaacgacgtgcagaccgacaagtttgtgggttctctgacgatctatcaggcaggcgcgtttggccttgatgtccgcgaaaccgctcagggaaccgatttcctgccggtgctgatgtcacgaacggtcgagcccgagcttggccaggtagacgatggcaatgatgcgccggaaaccgatggcgacgatgcctcggcttgggcttcggacaccgaccgacgcagcaacgatgccgatgcgctactgccgccaatcctccaggacacattctacgaacaggcgctctcccgacccggaaggaccgaagcggcgtatgttgttgggcgcaatacctatcttctgctggagccaacgctgcgcaccgcccttgacgtggtcaagacgatgcgtggcgcatcgcccgaggcccgtcgagagttcttgaagaacccgcgcacccgtatcgcggcggcgctgggcgatgatggtgatgctctcgcctccggtctgtttgtcgagacggcgcaatattccgatcggatcgaaggcctggggctgtggcaaaaaccaagcctgccctggatcaagaaaaagtccacccagtggctgccggaaaacttcgtcgttcggatcggcagcaagacactcaatgccactccggacaagatcgaggagctggaggttctctgtgaccaagcggagcaggaccgctccgacgaaatcaatttcgagcaggagctttatccaaccacagatgttcgcaggatgctcacaagccttgatgaagacggcgtgccctactccggcgagccgcaaggcgagagaccgcctcgtgaggctacggacaatgacgtcctgatcatcaggcagaacctagaggagctcgacttccagtcaagactggagaaacgaagcaacctcatccccggcgggtttccaacgcagagcataaacggcacacagcccaagcagcaccagctgcagggcttcgaatggctccgcaactgctggacgcaaggctggcccggtgcgctgctcgccgacgacatggggctcggcaagacatttcaggcgctcgcgtttcttgcttggatcaaggacaacatggctgcaaggcgtggcgcttatcgtcctctgcagggtccaatcctgattgttgcgccgacgtcccttctcgacaactggaaaaaggaagcgagcattcacctcaagccgggcaagcttggcgtgtgtgcggaggctttcggatctgggctgaaaacacttaagacccgtaagggagttggctggagtgaagaggatgctctcgatgtcgattacatgcgacaggccgattggatcctcacgacttatgagaccttggcactctatcaccgcagttttgcgcgcatcgcctattcgatcgcaatcttcgacgaaatgcagaaagttaagtcgccggattcgattaacagccatacggcgaagacgatgaatatagacttcgtcttgggtatgaccggaacgccgatcgaaaaccggctggaggatctatggtgcataatggatcgaattgcgcccggctacctgggtaacctcaaaagcttttccggcacctatggcgatgaagatcccaaggctctcgctgagctcaaggcaaagatggatcaacctcagggcaatgcgccggccatcatgttacggcgtatgaaagatgacgtcgcgaaggatctgccagccaagcatatcatgccatactcaatcgcgatgccggcgagccaggcaagagcatatgacgacgccgtcgcggcagcgagggccggctcaaaaagccgcaagagcatgctagagaccctacatctgctgcgcggcatatcattgcaccctgatcgcgcgggcgacgccaatgcctatgacgcagcgtggcgcagctcgtggatcaacagttccgcacgtgtgcagaaagccgtcacacttcttgagcacattcgcagccggtcggagaaggcgttggttttccttgaggaccggtccatgcaacagacgtttgcagcagcgatcgcagagcatttgaaccttcctgcacggccaccgatcataaacggcacgatggtgggacgacagcgccaagagatcgtagatgcgttccagaaagcgccgacaggtttcgatctcctcatactctcgccgaaagcggcggggattggcctcacgatcactgcggcaaatcatgtgatccacctgagccgatggtggaacccggcggttgaggatcaatgcaacgatcgcgccttccgcatcggccaaaccaaagatgtcaccattcatctacccatggccatccacccgtcccacggtgcggggtcgttcgaccagaaactgcacgacttgctagagcgcaaaaggtcattgtcgcgggatatgctggctccgccaacttcagaaagagatgtcgatggtttgttcgcggaggtgattgggtga

SEQ ID NO: 11188 - DNA, 1947 bp, Geobacillus sp. Sah69; identical to SEQ ID NO: 10168

SEQ ID NO: 11189 - DNA, 672 bp, Geobacillus sp. Sah69; identical to SEQ ID NO: 10169

SEQ ID NO: 11190 - DNA, 1281 bp, Geobacillus sp. Sah69; identical to SEQ ID NO: 10170

SEQ ID NO: 11191 - DNA, 2625 bp, Geobacillus sp. Sah69
atgttcttcttcaaaaagaaacggaaaatgatgaaggcagttttgacgccgaatgaggatgggattcatttttcgtttcagttgcatgacggcaaaaccgtcgccgaactgaagctgcctatggccaaagaagacatcgaaaaatattacaaagtgcaaggatttcagcagtatgtcgcttgggaggagctttacgactcgggcgttcttgtcgattcgactttgccgtatagcgagtattatgaattgctgaaagacgaaagcgccaaagaagtgctccaacatttagggcttcccgttgttgaggagcaagtgggcggaaagctctcacttcgttcgttgccgcatgaagcggacttagttttgcaactgtttgatgcaggcgggcgcaacttagatcgggttgggaagcaggctggggcgatttatgtgctgccagaccgtctcatgttgctcccggaacgcgtatatcggctgaaacaagcgcttttgggatcgtacgaatcaggatatgaaaaaatcggcatttgccaacagctggccaacgaagcaggaattgaacttgaaaactttttacaaaacgaaacgtatcacgtcgttgatgcgtacgatgtggacgttgctgtgcaccgccatgaccatatcgagcttgtcgttaaaggacgaaatgaggaggaaacccgccatcttcaacgactgcaacgggttagcagcataaaaaaaggccatgggcgcagccgtttcgtcagcacggagcaggttcatgctgatatgatgcatttgcagcaaaaacggcatattacgggagaagaagtgccgctgtttttggaaaatccggctgccgtcttgcctgagcatgattatttatttgatttggaccagttttcagaacgtgtccgcggccttatcccgattgaacgggttcgccctttttttcatgagcggaccggaatgcaatggtttgatgaggagagcgggcataccgttccgtacgatgagacgtttttgcgcgaactgatggaaaaatatccggatcagcaatatgtcgaatacaacggcaaatggatttacctagatcctttattgcgccggaagctgctgcagctgccgaaagacgccgatgaagcgttgaagcgccggtatattcttgatattaaagataacgaagaacaacttgaatacaagatagacagcgcccaagaggcatcatgccggcgctatccgattccatccgagctgcaagcggagctttttccgcatcaaatcgaaggctttgagtggctctgtcacttggcagagcaagaaaggggcggcctgcttgccgatgatatggggcttggaaaaaccattcaagtcattgcgtttttgctgcatcaaaaagcaaatgggcggttgaagccgacgttgatcgtcctgccgatagcccttattgagaactgggtggcggaaatcgaaaagtttgccccaagcttgttggacggtttatatattcataaaggaagaggacggttgtcttcgtcgcagctcatttcacagtttgatatcgttttgacaagctatgacacgctcaaaatggaccagcttctgttggggaaaattgaatttcaagcgattatttgtgatgaggcgcaaaacattaaatctcatactagccagcgctcacgcgccattcgcgccatgcaaggacgtttccgtttagcgatgaccggcacgccggtcgaaaatagtttagacgaactttgggcgattatggactttgtccagcccggcgctttaggctctctaaaagaatttcgcttccgctatgtagaaacgtcggactatgatgcgttgcttgcggccctccaaccgtactatttgcgccgcacgaagcaacaaattctcgatggccgtttgcctaaaaaacaccttgttccgccgatttatgttgaagcttcgcccatacagaaggagattgcccagtcaatgctggccacaaaagaagttggtcaggtcgccattttgaatatgattatgagactccgtcaactgtacggccatcccggtgcggtcattccgaaatatgaacagctctcttatcaagaagtgccgaagctgaaagaaacgatgcacatcattgaaacgattcggcaaaagggagagaaagtgctcatctttactgaatttcgcaaactacactttcttttaaaacgaatctttatggagacatacggcatttctgttccagtgattgatggcgatacgaaaaatcggcaattgattgttcgacgttttaatgaaatgcaaggctttggcattatgattttatccccaaaagcggccggcgtcggcttgacgatcacaagtgccaaccatgtgattcattacacaagatggtggaatccagcggtcgaaaatcaagcaactgaccgtgcatatcgcatcggccagcaaaaggacgtgtatgtctaccatattattacgagggacagttcccactttccgcagggaacagtagaggaattgatgcatgaattgcttgaaagcaagcgccatttagccgaaaatgtcattattccgtttaatatgagcgagatccagcaagcggtcgctgagaaggtggtggggcgaagacagcttgtgtaa

SEQ ID NO: 11192 - DNA, 2031 bp, Rhizobium sp. BR10423
gtgattcaggaaattggaagtttcgtcgttgcctcgattcttggcgcggcgaattatcttgtaaaggatgcggctgctccaggtattgtcgctctaggaattgtcgttcttctggtggtttttactgcggctttctttcgagaagtctttcagcgccagaaagcagttcagtggctcagacgtgaaattcaaaacagcccgacaggcgctgatttcagccgtgacatcgacgttctgtccgcctccatcaagaaaacgggcacgaacaggtatcgccggcaattggcggctgcgtgggagaaatacagagagacccttgtacctcacgaggaagacggcaaggtcgtgcttcgcaatgccgtccgaccgtccatgtttctcaatccagaggacttgggttttggggttggcttttggcgcatcgtacccgggctctttgtttcggttgggctttttctgacgttcctggggttgatcgccgctctctcgacgatggcgcaaggagcagagatcgatagcggtgtcatgcgacagctgctttctgtggcctcggcgaagtttattatgtcgttgacggggcttttctgctcgatcgtcttcacgatccttcttagaagcatctacgggcgactggagcagtcgatccatgaactatgtgccgccattgagcagcgtctcacctacatcagtctggaggcccttgccacagaacagctgaaggcaacccgggaacagcgggagcatttccgattgattgggatggagttggtcgcggagattggccgtcccttgagagaggagctcccggcggcaatccagagttcgatcgccggtgcaatggcaccgatcgtagagcgagtgggcaaactcggcgcagagggcgtgggagatatggtgtccggaatttcggacaagcttacagattcaatcggtattgcgctaaccgaggctagccagaaaatctcggatgcaggtgaaaggcttgggttgcttgctgaccgtctcgatcaaagctcggggcggataggctcggagatggaaggcgttacggagcgtgtcgcccaagctgtggaagacctccgtgcggctatcacgaatacggccgaggtaaccggggggacgtttaacgaaggtgccgagaagctccttgcggtcatgaaccgtacgcttgagggcattcgcgataatacgggcgaaggtgcgcgcgccatgtcggcagcggctgaggacatgcgccaggcggccgaatccttcaagcaggagatcgagtccgcagcgcgaacaggaacagaagccgcgcaggaacgcatgaaacttgcaggtcagcaggtgagctcggctatcggcgatgccggcaaggacgtggcagacgtgttcagccgcaccagcgcggagattgctcgggtcgcggaagaggtttccgagaaagccggcgccggcttgctcgctcctctggctgaaataggcaacaggttcgaaggtctggtcaagcagctcaatgacggcacgtcagacatgcggcgcatggccgacggagtgaaggctggtgccgatgcttcggaaaaggctgcgggtacctttaacggggcggcaagctcacttgtggctgctgtcactcccgtgaaggccgtcgtggatcgcatggaaggttcgatccggcaactcactgacagcacgcaacacgcggcgagcaccgtatcgaggtctgcggaggcgaccgccgagtccgctgcctctgctcttgccgctgcgaaggaaatcctccaggcggaagcgaaatccatcgagaacgcgctgggcggtgtctctgtgatgctggaacgtctgaaggggcagggcgaccgcctcgatgaaatggatggaaagctcggccaggctttcgatctctacacggaaaatgtggagaagtccgtccagggcatgttcggtcacgtgcgcgatctgcaggaaaggctaaatcctgcgctcgacaccatgcgtgaaatcgttgaacaggccgagcaattcgctccgcagtcccggagagcctga

SEQ ID NO: 11193 - DNA, 999 bp, Rhizobium sp. BR10423
atgcgcggaggtttccggacgcgttacaaagaggaagaggaggagagcgcatttgtgtccatgacggacatgactgtcagcttcctcttcatcatcatccttttgctggcttacttcgcccagcaatatagcgaaaaggacaccgtacccaggcctatacatgaggaggtcattaaagaaaggaatgtcgcgcaacagaagatagtccgactgcaggcaatcatcgctgttcatgagaagacgatcgctaacctcaaggaggagattaacaggaagcaggtggagatcgagcggttacaggctgagatcgcgaagctgcaggccgagctcaaagagctaagagaggcgcttgaaaagcttcggaaagttgacccactggaagcctacctagccacgtcggcgatcgagagacgacgaattctcgaaactctacgcgatcagctgaagattgattttcctgatctcgaggtggttatcagtgaagaaaccgacgctttgcgctttcagggcgacggcctatttgcaaccggatcatccacgttgcgccccgaccggagggcaatcgttgaaactgtcgcaacgaggctatcgcagattttgccctgctatacgattggcccgcgttcgaagtggacggccgaatgtaatccaggcaatgcgattattgaagctttgcagattgaaggacataccgactcaaccggggattttacggccaacctggccctgtccactaatcgcgcaaacagcactttttctacaattctcggcaaatccggtgagctagtcgattttctgaacttccgaaatcaaccagttttgtccgtcgccggatacggccaaatgcgtccggttaaggacaactcgacgaaggagggacgagatgcgaaccgccgcgtcgacctgcgaatcatcatgtacacgcctagccagtcggcggaaatcgaccgcattcgtcaggcgttgagtcaagacagctcccggggtatcgcgaattga

SEQ ID NO: 11194 - DNA, 1308 bp, Rhizobium sp. BR10423
ttgaccctcagcaagagcctctcccagaaccgtcagttcgtcaggcccgccttgccggctttgaactcacttgcatctaggacagagcgaattctatcccgttggccggacgtcgtcgccaatccacccgagaaagaccgtgaaaaactcgtggccattgttcgggacaaactggagaataatagctgggaggacacgaagctctcgctgattacaagcgctggcagggcgttgttcgacgaggatcgtcgcactagacctgatttggcggagatgcgagatttttattacagcgagacccgcgcctcgacacgggcggggtttctcggcggaatgttctccatctacatggacagctttgatgccaaggcggaacatacgtggcaactggccggtgcattgtcggcagcggcagggcgtctcggagctcgctggcgtatgatgctcgatgccatccccgagatgctctcgcccgatgcagtggccgatgccgtcgcgcgacagatggtgctgatggacgatctctggatcggcctacagaagcttggtattcgcagcccccatgcacctggtctgatgaatgccgtccacctagcctatgtgaagcagatcgagccgcatctcgatcagcgtgtggagatggagcggctgatcgagtggctgaagccggagggcagggaggcgaagacgaccggcgccggcgaagcgatctcggctctgcttggacactgggtcaagcattctccgaagcccgatgacctacgctacctgacagagaacatcatcggcatttacggtgatcctcgtgtccagcgtggcggcgtttggtcagcagtaccggaagacaggatggcggttatcctgcgctggctgacgggcgagaacatccggttcttccttgatgtcgtctctgaggtggaagacagccacatgtgggagcctcgcaggagattttggctcggcctgcatgatcgtggccgtatcgatgcagcctgggttgctttcagcgattccgccgcgaaagaggcaaggcgacgcggggcgggaggtaaggggacgttgagatttggcgttcaaacggcaggctacggtcgcgcgaatacatcactgctcatactgaagatcggcaggaagatcgtcgttgagggctctcacagctataaggtccacattttcgacgagtccaaccagcgtgcgcctgcgctctaccagtggcgatatgactgtgaagcaatcaggttcattcccggctccaatgcgaaatcgcacaacggcgattggcagagttgggtcttggaacacatctag

SEQ ID NO: 11195 - DNA, 3099 bp, Rhizobium sp. BR10423
atgaacttggaagcttctttctctccagatgcaatcactctgtccgcaaagaacgagcgcgcgggtctactgcaccggttggtgcgccgtagtgtcaaatctgatcttcagaacctgagtcccgacgaacgttcgctggcctatgctattgccgatctacgggcggcagcggacacgctcggcgaacagctttcgatcgattctgatcgcatcgtcatgtctcatcgcatcgctgcgtccgtcaccggtgaaacgggcgcagtgctcggtctgccgcctttggtagagatgacgctgaagaccgatgcggagggaattgtcggttcgtcaggtttccggctcaggtacgaatggtcgcgcaacggccaacggcaaatgccacgtcgaactggagccattctcgaaacggcaaatggtttgcgacgaattcctgtgtggatgatggacgccatcgccatcgcagacgcctaccggccggatggaaacgacgccgccgattgggaggcgctaggacgtttccgcaaggcactcgatcctggtgctgtcagcggagcctcggatgaggcgtcgcgtatctcgatgacagattttctgagcggtctggaggtgcgtctcgtcgaccgcttctcactctcgccaaagggggagacggacttcgacgtagtaccattctctggtgatactttggaggcgcatggtagcgcttctgaagccgctgaggtttccgagtccatgagcgaggtacagggactggacctgcagcgatttcagacattggtaaggggaaggggggcgctgcctgcctatcgcctatctcccggacgctatgtggtggtggaacagtcagcgtcgccagcccttgccgtgatggctgaaatgcagaaggcagcaccagatgagcggcgtgcgttcatccgtaatcccttgccacgagtaacggaagcgatggaggcgcagctccgttcttccggacaattggacggtttgtcgccccaggccgagcaggaagcgatagaggcagcggttggtcccgtgcttgttgaaacccgtgagttttccgaacgggttactggtgtcgtcaagtatgaaaagccgggtctcggcgagttcgaggatagcgggacaagctggctgccagaggacttcagcgcgcgcctgatcgatatcctcgacaggcagggtactgccgagctgcacaccctgcgcgagcgcgtccaggaagcaattgaggctggaaggccgaccgtcgatttcgaggatttggaggtccccgctcgaccggaaatgctgcagctcatcgacgagcggatggtgtcgggagacgctgacgacggtggcgaggatgaggcaaaaccagaaaaggtgggcccattcgttctcgataccgaagtgaactacgacgatctcaaatggctcgctaagctcaggccgcgcatgtccgagttgccggacactctacccgagggcattcgaacgccgttgaaagggcatcagaaggagagtttcagctggcaggttggcgcgtggcgggccggattgccgggcgtcctcaatgccgacgagcagggcctcggcaaaactctccaaaccatctctttccttgcctggctcaaggaagtgatcgctcgtcctcaagcccagagccgggggcctgttctcgttgttgcgccaacatcccttctcgaaaattgggagcaggaagtcgcccgacacatgcacgagcctgggctgggtcatctgatccgcctctatgggtcgagtatcggtggacgcaagctgacgggagcgaagggaaaggacacggacgatggggaggccaagcttgacttgggcgcgctgcatgaagccgtggcagaggggcgggcgcatcgctactggcttctcaccacctatacgacgctgacgaactatcagcattcgctggctcgcatacccttttccgccgttgtctttgacgaaatccaggccttgaaaaaccctgtcagcctccgcgcagttgctgcccgttcgatcaatgctgattttcgaattggcctcacaggtactcctatcgagaatgccactgttgacctctgggcaatcatggaccaactggcaccgggatcgctcgacagcctcaaagatttccgtcaacgctatgcgaagccagaggaagacaacatggccgagctgcacggcagggtttttctgccccgtggcggcacgccgcctcttgctgtccgccgcctgaaggaaacggtcgcaaccgatctgcccgccaaatcccgtcgtattcatccccgcctgatgccggatgttcaggccttggcatatgacgatgcccgactgaagcttgcgcgaggcggcatgggcgcgcagctcaagatgcttcatcacattcgcagcgtttccgtccacccggcgctggaaatcaaagcaagtaacgatgagttcgtcgtatcgtctgcgcggctacaggctgccatggatatcctgaatcgcatcaaagcgaatggcgaacgtgcccttgtcttcatcgagcaccggcagatgcagtatcgctttatcgaattggttcgcagtgaattgggtctgccgcgagttgacctcatcaacggcgacacgcccattcctcaacgtcaggcaattgtgaaccgtttccagcgccatctggatgacgaccaggggttcgaccttctagttctcggtccgaaggcagcgggcaccgggctgacgctaacggcggcgacccacgtcatccacttgtctcgatggtggaatccggcagttgaggaacagtgcaacgatcgcgtacaccggattggccagacgcggcctgttacagtgcatttgcctatggccattcatgaaggctatcgggagcagtctttcgactgcctcctccagagcttgatgatgcgcaagcgtcggctcgccagttcggcgctttggccgatgggggacgtcgatgacgacgttgctggccttcagaagggcatggcgtccgagcggttaggcatggaggctgaccctcttggcaagaccatggcggccatgtttgctcgcgacgagctggagttgccgccgcgagaagccgacggttcctaccccatccattga

SEQ ID NO: 11196 - DNA, 1647 bp, Vibrio sp. MEBiC08052
atgggattacaattgggactggctgatctcaatattggtggtaatgttggcatcgatgagatgaaaaacggagtcgcaggtgttattagcggtgcgaaaattgcgtttgtgacgtctgtatggggtgtaacgttaagcgttatttttaattttgtagaaaaattacttgaacacaaaattcgtcgacgtttaagtaatttacagcaaattatcgataatctatttcctaggttgagtacagagtctcaacttgaacgtatagctcatgacagccatgaatcacataaaagtcttaatggcttagcagaacaaattggtgaccgacttcaagattctcttatacaggcgacacaaggtatccagaacggtttggaatctagtctcgaaaaaatcatggcaccagctattaataagcttgtcaatgaaacttcagacggtaaccaaaaagcgctcgaagctacattacaggcatttatggatggttttggtcaacaaggtgagcaacagcgtcttgctatggataatgcttctcatggtgttaatgcttctttagataagatgagtacatcaatggagacatttttaaatcgattacagacgcagcaagacgcatcttctgaacgagaaaaagatctcattagttcaatttcagttcaagtatcagagctcgttgaacaaggaacagaacaaaagcgcactcttgcagagtttgtggatagacaggttacaacacttggtcagaactttgatgatagagaaaaggccgcagcacaacgtgaagaaaaactagctacatctatagaaacaacaattaaagatctcgttaataatatttctagtcaaagtcaggttctcagtaattttgtcaatgaacaaataggttctctgaccaccagttttaatgagagggatctaaagacgcaacagatggaacgtgaccggaatgaagtttttgttcaacaaacagatgcgatgaagcagggaacagaaacgttgttgtcgcgtgtttcagatgtcagtgaagcgaatatgaaagccgctgaaaatatcctttctcaaggaaagcaattacaagctagccttgattcatcagtttcagcttcagcacgagctacggaaagtatgcaacaatcagctaaagagctaagaagtgcttctgataacatgcaggtgtttggatctcatattagagaagctggtaataatctttcaggtgctgttcagcaggctgttgatagcacaaaagatctggcacaacaaaaccagctttctagcgacagaatcgaacagcttcgaagcaaattacttgaggactctgctatgtttgatgcaatagcccaaaccctcgaaagaacaatacaaaatgcagagtccacatttaattcgctaaaacaatcccagaaagagtttttacaagagcaaaaaatcagcctaactgatttaagtgaaagtgtccgtaaccatgttgctgaattaactagtcagatgactactttattagaagattatgcaacgcaagccaatgcacaaacgttaaatcaccttaatatttgggcaaattctaccagtcagtattcgactcaaatgaacagtactgtcaatgcacttgccagtgttgtcgacgaaattcaaggtaagatgagttaa

SEQ ID NO: 11197 - DNA, 735 bp, Vibrio sp. MEBiC08052
atgaaaagaggcctgactacacataacaagcgttatattgatgaagaaaacccttattgggtatctttttcagatttgatgtctggattattggtgatttttatcctcgcatcagttgctttgattatcgaactcactcaaaagacgaatcaagttgatgcgggaatagatgaattgaaaaaagcagagcaagtacgccgtaatatcgtttttgatataaaagaagagcttgcccgccgcaatgtatttgttgaaatagcggaaaacgatacagttatacgtatcccagataagacattgtcatttgtatctggtgaagatgaactccccagaaacaatgaaatgcaggatgctgttcgagaagttggattggtacttcatcaagcaataatgaaagaaggtcgattaaaatatctcgatacggtctttgttgaaggtcatacagatagtgacaatatctattatcgaggtaaaggtaactgggggttatctgtggatagagcgatctccgtttggaacatttggcagaaagatattgaaatcgaaccaaagtttggtgttttagataatgtttatggacaaaaattattctcggttagtggttacgcagcaacacgtaggataaacaccacagaagtcgatgattctgaaaaaagtcagaacaggcgtattgatatccgttttacagtaaagcgtccaactattgctgatttggagaggatagttgcacaatga

SEQ ID NO: 11198 - DNA, 1455 bp, Vibrio sp. MEBiC08052
atgatgattaacctgaaacgtttagagtttacattgcctgagccagagaaactttttgaaaaggaaatttcaaatctaaaaaatttaagtaatgagcttaatatttgggctaataaagcaggaacgaataatcagcggtttaatcgagcgctagatgaagttcaagaagcgatacgttttaaacgcccgttggaggagactcttcgttcaaaaacgcatgttcgtgcattcgctctttctcttgaatcagataccgataaccaaattaaggttactcaaaaattattagatacgattacacaaattgttatcaaacctaccagtttacttattgagtcattctaccagcattttttaaaaaaatttgatgaattgggagatacagtcgcgacaggtgcatggttgctgaagtcaatgaagcatcgaggaatagtattaaagcacgggaacgaaattttatccgccaatggtccccagtggttagctaatcaagccatacaacaaaatatcgattttgaccaattggttcatgcattgaaattagatcgttattcaagagggaaatttattactttggcgcaaagtatttattatgttgagcgcttgaaaacaattacattgaatcaagatcatgaactcctacatgaagttcaaaagcctaatgtctatgaatctagctatgatcgtagtttgcttgggctcaaaattctcgaaatattgatttccagagcacaaggtacagcgattaacgattcttggctaaatgttattatggcgatagctggagatccaagaataccgaaagatcatcctcgatatatcaaatggtggactcatattaatgacacattaatcaaaactgttcggggatggctatccagatatgacttaaagctgtttttagaatcactagaagatttctctcacacctctggtaattcaaaactaattaggatgtatccacaaaggaagcaattccttgaaggtttattcgatgctggtttaatcaagggtactcgtttatatatgagtagagccgctacgagatatataaaaaaatatcgcgatgaaaagcatctacctgatttttcaatggtaaaagatggtgataaatctgtaatttttgtggagttcgattatggttatatgattgaaggaagccatgattgttcgttgagattttacaagcatctcgaaccttcaatatgcgtatttaattatttaattaaaagtccgacgttttctcaattaacaaccgacatttacacacgaatgagcggtattcctggtgcggttaagcctccaataactcataatacatcaaacttttcgtggcaacggaaggcactaactacactcaaggagttagggatcagtgtaaaagcaaaagatgttctgagcgatagcgattacaaagaatttaaacaattatttggagtaagagaatggcaatag

SEQ ID NO: 11199 - DNA, 3471 bp, Vibrio sp. MEBiC08052
atggcaataggttcgttaatcagccgttttttctcatctatagataaatcagaatgttttgatgtgatttgtgatgatggactcgatttttctgccgataaaaaagtgcttaatgctattaccatcggtaatgccagcgaatacattaccgcgcaatacgtttgtttgaaaatgctggaagagcaggggctggtcagtgctttccctgatggttttatgatgcctagtcatacggcggtcaggttaagtgctgaagaacgtgagttgttaaaactcgccgaggtatggcagggtgccattgatgtggatgtgatcggtcgttcgagtcatccggacttttcagtttcgttttcggtctccaatccacgtggacagatgactagaaattatcggatttctgagccttatatccagtttagtgagcaatccaaatatttgcttagccctcaacaactgatcgcatttcaggcgttggcctctcatcactcttccgcgaaatcagaatacgacaatctgttattgatccatgcattgcagcaagcgcaggaacagggatgtcggattaatctgcaacattttgataaattgaggattctcaccccagataaaattgcagtggaagcggaagtggatgctgccgggaatttaatccttactccgaacctcgggcaaaaggcatctcacgacaagatgcaacgggtgctcggacaactgattcatgattcgacaaccgcgctacgggttggggaagaaatcgtcttattcaacgaagaaaaactggatgccgttaaacagatcatctcaaatcgggtgattcccaaacatcaggtaaaacagtttttaaaaacaccaactgcatttattgatgctagtctggttgatttggacttgggtttttctctgcgtgtccacggtgtgacagtatttaagcatgcgtattttggtgaaacggatcaatccggtattgattggtttgctcaagcagctaatgctgaggttatctatccgttttcaaaaataaaagatactgtatctgatgctgaaacattggaacaactcagtcagaaaattgatgatgcgattcaaactggtgctacggttatcgattttatgggtaatacgtatgagatagccgataaggatgttactcatactgttctcaatgaaatcaaacataacctagatattgggcatgaaactatagctgatgaaattgatgatgaggttgacgttactgggaccgaaggtcaagtttcagaacaggacggtatttatgttgttgacattgatcttaacgatgacgttttaagccaagaatcaaccgttgtagctaaaaatttagatcatgtgttggataaacacgagttagactggagcaaccataaacgcacgcctttccttcatcagaagattggggttcgctggatcttagggctcgaagacaaagctcagtcagaagataccattagcggtgccatattggcagatgatatggggctggggaaaacatttatggcactgtctgccatcgagcatagttaccagcgttgtgaatcgatggatgccacacaaaaaccggtgcttatcgtggcacccttaagcctgctggaaaactggaaagatgaagtggataaaacctttcatacttcgccattcaacgatgtagtgattctccaatcggatgttgatttacccacgtttcgtttaggtggtgcagaaataagaggggcatctggcaatgacgacgagcttgagctcagatattccttaaaagtcggtaaggactttctcatcaatgagcgtctcgatcttcctaaacgtttggtgattaccacctatcagacgttgcgggattaccaattttcgctgtgtttgattgactggggaatggtggtatttgacgaagcgcaaaacattaaaaatccgaattcactgcaagctcgtgcggccaaaggtttaaaagctgattttaagctggtggcgactgggacgcctgtagaaaacagtctcgcagatttttggtgtttaatggataccgcctgtccggggtatctgggcagttatcaagaatttcgtgctacctatatttcacccattttaaaggctgcgggggatgaagtggaagcgatccgaaatcagctgggccgcgccctcagagaaaaagtcggcgcgttgatgttacgccgtgtcaaagaagataatttagaaggattacctgagaagcatctgcatgtaggcgggcatttcgatggctggaattatctcgattcattgcattccgtcatgcagggctatcaatgtgatgtgtatgagggcagtattctcaaccagctacaaaatgaagacagccatgccctgacaacattagcgcgtttgcgtgacagttctctgcatccgagattagccgatggcgggcggttagatgtcggtaaatcattcaaagagacccgagcgatgtatcaggagtctggcaaactgatgtcgctgcttaccactctggaacaaatcaaagcgaagcagcaaaaagtgattattttcaccgtcaacaaacgtctgcagagtttccttagtgtctcgttaggacagttatttggcttagggccgctttctgtaattaatggtgacgctaaagctgtggcaaaaaataaactgagtccgacccgaaaaaccatgattgaagcctttgaggccagagacggctttaatattatcgtgatgtcaccagtggccgccggggttggtttgactgtggtcggtgccaatcatgtgattcatcttgaacgtcactggaacccggctaaggaagctcaggcgacggatcgggtctatcgcatagggcagaaagaagatgttcatatttatgtgccgttgctgcatcaccccgaatacgaatcgtttgatgtgaatctacaccgtttgttgactaagaaaatgcagttgaaagatgcggtcattacaccagaggatgtgatcccccaaccagccggaatgggtaatggtgtgtttggtgattctatatcaacacgaattacggcagacaatgtcgatcgcctgagctggcaacaatttgaggcactctgtgttgaaatttttgcgaagcagacgtcgtccgagagctgctatttaaccaagcagggtagcgatcacggtgctgatggcattattgtcgggaaacagggcacaagtatcctgattcagtccaaatttaccctgcgacgctacgaagggtataaagctgttcaggaaatcacctctgcaaagccgatttatgaaaatgcactgaaaaccacgtttgagcgcttagtgttcatgaccaattcatcgacgctcggaaagaaagtcatggatgttgctaaagcttgtcacgttgaagtgatcaaccggacgaagttattggaactattatcgaaaacagaagtgacttataaagatgtattaacccgtttagataaacagcgattatctttgtaa

SEQ ID NO: 11200 - DNA, 2172 bp, Pseudoalteromonas sp. XI10
atgttggattctatgccatcgcattggttgataccgcaatctatattgggtgtatcgttttggcttgcattaatagcagtgtttgttgttgcttttatctcgattattgtacttaccgttaagagcaatagtcgagtaaagcaggtcaggcacattgttaatggtgaatctattaccacgctttatgataatagcttggttattagcgagcgagctaaagcgtcaaaatctaaaatagtgcatagcctgtggcatgaatttggtgaaagcttagtaaaagaagaccgttcgcaacgtatttacaatactttggatgcagagcacttttttaaccataaaaccctttcagcggggcttacatctaataggttattagcggctaccccttcatttttaaccgcaattggtgtgttaggtacgtttatgggccttactatgggcctgcgcgatattcatattgaaagtaacgatattgaaatactaaaaaccggtattgctagtatgatgagcggtgccgcttttgcctttgttacctcggtatggggggtaggtttaagcttactgctgaactttattgaaaaaatagcagagcgtttaattatacaaaacattactgccgtacagcaccgcattgattttttatatccgcgtttacccgctgaaaaatcacttgttgatatttctaaaaacaccagtgatagcagtgaggctttaaaggaactgcatgagcgaattggtgataaattacaggagactatttccggtgtgagtgacagcatgcaagatgcttttactaacgcacttaataatgtaatggcacctgcgatgcagtcgttagtcagtaataccagccaacaaaccagcggcgtgctggagcatttaattagtaattttactgaaagcatgcaagcagcaggcagaggccaaggcgagcttatacaaaagtcaactgagcaaatgcatgatgcagtaagtagcttaagcgggcaaatgagcgcagtgctagaacaaagcagcaaacaagctgagttactggctgagcaacaagcgggtgcgtcatcgctatttaaccagcaactcgaagcgatgctgagcaaaagcgaagaacgccaacagcttatggagcaaaagttatttacagcgattgagtcgcagcagcaatcgcaagctacgcgagaggcaaaccatgtagataatttacagtcggtattaggtgtttggttaactgagcagtcgcaaacgcttaataaactttctgactctatggccgaagtacaaactgcaatgagcgaatcgaaccgtggatttgttaatgaactttcggaccaaaacgaaaaaacaacggcgcagcaacaggcatttaccagtggccttgaaaccagcttacaaagctttatgcaaaacactgaacagagtcaaaaggcacttgaagacacgtttggctcattaattaatagccaacagcttgaagcggctaagcgtgactcagaatatcgtgagcaattacaatcgcagttaagtaagtggctagcacaacaagaccaaatgcttacctcaatgactgatgtggtaaaacgaacacaaacgcatatggactcggttattgcacagcataaagatgtaattggcgagcttaaaaaggttgcagagtcatcagctacgagtagccaaaacttgagtaacagttcaaaccagataggggtgttatcgggtaatttattaaaggcaacagagctgtttgatacgcgcttaggagacatgaccgacactattaaaggtatttccgcgcaaaatgatggattagcaaatcacgtgattgaacaagctaaagtgctaagagggctcgaaacctcacttgtagctacaacagaacaatttggtaatacggctaaattagctcaaagcggttttagcgaaatgaaaacacaccagagtgagtttatacgtggtgttgaggcatcgtttgagggactaagtaatacgttagctaagcaagtgtcggatattgaaaagcaaacgaatgagtggttacgtagttattcgtcagaagtaaatacccaagttaaagagcgtatggaaacctggaataccacaacccttgagtttagtgaccaaatgcgcagaaccgttagctctatttctgatttagtggatgaattggagcgtagctaa

SEQ ID NO: 11201 - DNA, 759 bp, Pseudoalteromonas sp. XI10
atgcgagtatttagaagcaaccaagtcagtgttgatgaagaaaacccgtattggatgtcattttcggatatcttgtcggggttactgattttatttgttttagcatctgtagtattgatggttgaacttatagaagctaaacaagagcttgaaaataagcagcaagtgtttactcaagagcttgaaatgcttcataaagctgaaggtgttcgcagaactattttacatgaagcggctgatttacttcgtaagagaggaatacaagttacagttagcgaaaatgaaacagtattgagtattccaaatgatattttagggtttgatagcgctgcattcaatataagtccagagtttgaaggcaccgcgcttgaaattggtgaagtgcttgccgaggttataaataaagataaccgagagcaatttctcgatactatttttattgaaggacataccgacagtaaaaacttttacggcatgatgggtaaaggtaattggggattgtcgacgtttagagctatttcgttatgggaactttgggttaaattactgccgagccaacatgacctcgcagggattatgaataaagaaggtaacccacttttttcggttagtggctatgcggcaacacgtagaatgatagttgaagaactaacagaaattgattttagagccaataggcgaatagatatccgttttactattcgtaggcctactagtgcggaatatgaaactgtaagaagccgtttggagattcagtaa

SEQ ID NO: 11202 - DNA, 1695 bp, Pseudoalteromonas sp. XI10
atgttgcttttacctcctatcccagagcttcctcagtttaactgggaacgtatttcacagcagtggagtagcttaacagttcaaacgaaaaaaattgctgatggggcaggacaaggcgaagaatttaaagcccttgagcaacaggttaatcgctacgttatgtacgatcaaaaagaaaagctaaaacaaattttaattaagcgaaaaggtgttcgtgttttaactcagttatggattgataaagaagaagtaagaaaaaactccttaaacgaagaaacaatagattacattcaagctaaacaccccaaacttggtatgtcgtcgttaatgaatttaatttcgttagtttatcgttattttgatgcacttgttgaaggcaatatttttaatcgattaacgcagtggcttaaccatcaaatagagctgcgtttaaaagatcgcaaaaattcaagtgacacaatattgtcggtacttaatcaggctaaatggctgcttgatttaacagcccctaaggcactagttaaccttgccaaacaaaaccacttagacttaaacgaacaattaaaaaaactacgcttaaatgagctgccacaagggcgctttttagatatttgccacgcgcaatattacttagatacgctaagagaaattgcagttggtgagcaacatgatgtactgcatgagttattaaagcatgacgttgccactatgccttttgaagaaggtaaacgaatagggcacatagcgcttgaaattattattgatcgctctgctggagcacccagtgaaatatggcaaaattttgtactgaatttagctggtgatccgcgtattgctaatacagcaaataactaccgccagtggtggaagcctattggtgaaaatagaataaaagcagtgacaagctggcttgctaaagaagatttacgattatttttaggagccattgaagagtacgcgaattacatcggtgatgaagcgttaaatagaatgttccctgcgcgtaagcgttttttagaagggctttatgagcatggttttgtgcgcaatgcgcggctgatgcttggaaaccaagcggagcttacagttaagcgagtgctaggaaagagtttaactaccagttatataaagcttagaggaatggctcaaacttccattatttatttagattgtggtgattttcatattattgaaggctctcataactttaagttatggatttatatgggtttacctagtgagaagcttaacgattactctttgagtgagttaaaccattttgctttaacaaatagctttccacaagagtataaaagaaactatcccaaaggcgagctaatgccaattcaacactcgccgacttcttggcaaaaaaatgctattgattttttaactcagaacggtgttgagctcgatttagaaaaactctttgataaagatgaatacagaagatatataaatcgttatggactacctgtggtaaaaaaagattttgaagaaaagaatctttttgaaataaatttattaaacgcactagagatgtaccaaccaattaccgccaaagagctcgtaaaggttttaaacagtgagtttaatatgatggctgatcgctcaactgttaattctaaactttattcaatgttatctgaaagtagagtaaccagagacgacatgctttactggcaacttgcttga

SEQ ID NO: 11203 - DNA, 3024 bp, Pseudoalteromonas sp. XI10
atgtcacttgttagtttgataaaagggcttttgccaaacaataaaaatagttctttagtagatgaacagtattctttagtgtatgactcgtatggcgttaattttgctactgatgaggcgtcattccattgcctgaacaaaggtgaggggggagggcagcagcttattcaacatgttgtccttaaaatgcttgaagaaagagatatagctgaaacactgcctaatggctttagattagacagtgagcaagcatgtttattagacccagaagatgcaggcgttttagggctaccgcctttttttaataacgactttgacattgatattcaaggtagaacaactaaaagtagttttaacctgcagttatttgcaaaatttgagcagcaaaaatatccagtaaaaagaaaaggccctacacttttttttagtgagcaaactcagtatttaatgacgccagagcagcttaatgctgtgttagccgtagaagagcattcttcgcttaaacctgatgaacgcaatgaattaaataatgtgttggttgtcgctaagttacagcaagctgttaaagatggattaaagctagatttaaaacattttgataagtttgatttggtacaaccagaaaacatcacagtaactgcaaaccaaagggccgatggtagtttagagcttagcccaagctttggtgatggttcatcacctgaagacgtgcagaatcgtttagctcagctccagggcgatgggcaagtaatgcgaataaaagaccgcattgttttacttactgacgataaaaagcaagctgttaaagaagtactgcaaaatagaactattcctgcacataaagttgctgaatttattaaaacaccttcagcttttttagatgcatctgttttaaaccttgatcttgggttttctctcagggtagctggtattggcaaaatggtacacattccctttggtcaagacagcgatggcagtaatggctggttttcgacaaatacagaaagtgaaccaccagagcgcttggttaagctactagagtgtgaggaagatgttgtatcgtttgaacaaagctatcagcaagctaaaggtcaaaatgccgatagtgtacttgttgatgatgagtcaattgatatacgcgacgagcagcgagtaactgaaacactcgcagaggtaagagaaaatttagcaaacccacccgatgaaaataacatatctgatactgatgatttgccggttaaaacagaacaagtttctttattacttaaagacaccgaagaacataataaagatatagttaataaagtttcgcagcttgataaaggtattagctttgacaggagtaatttagcgagaactccttttccacaccaagaatcaggcattagttggatgttgtcgttacttaaatcagcgcagttggataactatgatgatatgtatcgagtacagggggctttgttagcggatgatatggggctaggtaaaacatatatgacgctagtaatgatggctgagtacatggaaatgcaaaggcaaaataataaattagaaaagcctatattaatagttgctccacttagcttattggaaaactgggaacaggaggttggtgctacctttaataagtcgccatttagagatatcaaagtattacagtcagcaagagatctaaaagagtttagggttaaaggtgctgaaagagagtcgatgcagctgacctcagttataaatgactctcatgcagatcatgaatctattcgttacgctttacacgttggggctgatgcagctacaaaacgcttggacatggatagacgtgttgttattactacataccaaacacttcgagattatcagttttcactatgtgtaattgattggggggttgtggtatttgatgaagctcaaaatattaaaaaccctaatacgcaagctacccgtgcagctaaaggtttaaaagctgatttcaagttattagcaacaggtacacctgttgaaaatagtttaagtgagttttggtgtttaatggatacagcacaacctgggctattaggcgattggggctattttagagagcggtggattaagccaataagcagtgctaatgaggaagaaaaagcagaagtgcgtttagaaattggtaacgatttacgtaatgctacaggccagtttatgttacgtcgaaccaaggaagacgagctaacgggaatgcctactaaaacaattaaaacaggcattcataaagacttggctgaaaatatggcatttacaccagagcttgctcgtaatatgaccggtggccaactacttggctataaccaagttgtagaaaattacagagcagaaaaagcaaaagagcagggtggtggacatgccttaacggtattacagcaattaagggctgttagtttacaccctaggcttgacgaggtttttaaacagccacctaataatgcaaaagatgctcagcgtaatttacaagagtctgaaaagttacgcatgctgttagatatattatccgatataaaaagcagacaagagaaagtaataatttttgcaacaactaaaaaacttcaagctgttcttaagatatgcctagataaaatttatgagcttaatattcatgttattaatggcgatagtaaagcgatgaaaactaaaaaagatcagttatcccgtaaagggatgattactgactttgaagcaaaagacggctttaacattatcattatgtcgcctgttgctgcaggggtaggtttaactgttattggcgcaaaccatgtagtgcatttagagcgccactggaacccagcaaaggaagcacaagcgacagatcgtgtgtatcgtatagggcaaaaaaagcctgtttttattcacttaccttgtcttctacacccagagtatgactcatttgatgtgaatttagataagctacttgcaaagaaaacgatgctcagagatgccgtggttactcctgaaacagttagtgaaaacgagttaatggcgtcattgggattgtaa

SEQ ID NO: 11204 - DNA, 2712 bp, Burkholderia sp. LMG 29317
atgaccaacggcctccagacttttctggcttccatagatccttccctacgttatctgtctggcttgcccctggtcgttttctgtctggtcgtcgtcattacgctcgcgctgatacttttatatgttggtcggggcggggtggtgtttgtgcagatttccgcaatcgtgaagggcgtgcgccacgccggaataggccccgatcctgattcgcttgcttcgcttttcaagcacgagccgttcagacatctgtggctcgaatatcgcgataccctgcatccgcttcgacggaccgcaaacggtgcgtcggaaattcgtgcgacccttccggcagaaacctatttcacgcgggacgtactggtcgatagccgtctattcgacgacttcgcgcgtcatgctcctggcatcctgacaggtcttggcatcattgggacctttgccggtctgcttcagggacttggcaagttcgatccctcgacgcccgccaaagccgtctcgggtttgtcgccgctcctgggcggtgtttcccacgccttcattgcgtcagctgtggcgatcggctgcgcgatcttcgtgactttcctgggccggctcgttctcacatttctctatcgtcgcgtcgaacagctcaatcacgcgatcgatgcgctctacaacaccggcgccggcgaagaatatctcgcacgtctcgtgcacgcttccgagaagagcgaagcgcatgccgcgcaactgaaagatgcgatggtcgaagacctgagccgcatgatgaccgaactcgtcgatcggcagatcgcggcacaggccagcgccaccgcggcgctaggtgagcagatcggtcagactttgcacacgtcgcttgccgcgccgctgcagcgcatgaccgacgccatggagcatacgagtcgcggcaatggcgaagcggtgagtggtctgcttgaatccatgctgacgggtttcatggcgaagctggaagacacgttcggcggacagatgcgcggtgtcagcgagcagatcgagcattcgctttcggcgatttccgccgtgcagggttcaatgcagcaactgctgggcgacattgcccggacgagtacggaatcgtcggctcgggtcaccgggacgctcgaagaagcgctcaagaccgctgccgccaatcaggaaaccatgacgaaccagatgcgcgagttcgtcaatgagttccggcagctcgtgacggccgagcacagcaggacgaagcaggcgatggacgcgaccgtcggccagatgatgacgcgcgtgaacgaaacgttggaaagtctggccgatagccgtgcaacgtcgtcccgtcaggaagaagagcgcaacgctgcgctcgcgcgacgaaccgaagacgtgatcgccgggctttccagtcatcaggaattgatgattgcgcagatgcgtcagttcgcgcaggacttcggcaagaccgcggtcgaggagcagcaaaagaatcaggctgtcatggataaaaccctcgatcagatgatgacacgcgtgagcggcgcgctggacagtctcgccgaaagccgcacgctttccgcgcagcaggaacaggcgcgcaacgacgcattgagccgcagcacgcacgaagtcctgtccggcctgtcgggacaccaaaatacgatggcttcgcaggtgcgccaactcgcggccgagctaggcgcaggcgcgagccgtcagcacgaagaatctgcgcgagtgatgaacggggcggtcgagaaggtgctgagcgacgtgtccgcatcgatggccgcgctccattcgtcgagagaagcggccgcgcagcaagatcaggcccgtagtgacgctttgagccgcagcacgcacgaggtcctgtctggcctgtcggggcaccaggacgcgatggccgcgcaagtacgccagttcgcggccgagctaggcgcaggcgcgagccgtcagcacgaagaatccgcgcgcgtgatgaacggtgcggtcgagaaagtgctgagcgaggtatctgcatcgatggccgcgctccatttgtcgagagaagcggccgcgcaacaggatcaggcgcgcaatgacgcgatggtgcgccggaccgaggagacaattcagcaagtcaccaggcaactcgcgcaagtttcggaaatggtggctgcgcagatcacgcgcgcgcagacgaacatcaacgagctccaaaacgtgagcattcgtgccatcgacggcatgaatagtggtgccgcaaccttgagcgccgcggcgcaacgtttcgaaaccgctggcgcttcggtcgtgaccgtgttcgacagatcgtcggcggtcgcgaacgatcttcagcggacgtccgcggctttgcagagtgcatcgtcggcggtcaacgcggcattccaagaatacgatcgcacgcgcggagcggtgcaggaatacgtcggcattctcagcaaactcgtggagtccgcacagaccgaaaccggtctgacgagccgaatgatgtcggaccttgatcggatcgtgaataccttgaagaacgtggaacgtcagacgaccgaataccttaccggtgtcaacgaagcgctaacgcactcgttcgagcaattcggcaacgcaatgtccaaccagttgaccaaaacgatcgcccagaccgaccgtcacctgggcgatggtgtacagcaactcacgggcgtcgtccaggaactcggcaccgcattgcaacgcatgaagcgcgcggcataa

SEQ ID NO: 11205 - DNA, 711 bp, Burkholderia sp. LMG 29317
atgttctcgaagatcacgctcaagcgcgccgcgaaggcggaaagtgaaagtccgttctggatttcgttctcggacctgatgtccgcgctgatgacgctcttcctcgtcgtgatggcgacgacgctcgtcacggtcacgaacagcgtgtcatcggtcgagcagcggaagattcagcgcgagacggatattcgcgaactcatgtcgcagatcaaggaactgtcgcgcgaatttcccgaggtcaaggtcaacgaatcgacttatcgcatcgacctaggcgatgtggttcgcttcgacagtggccgctccgacatcacgtccaatggcgcacgcttcctgcgccgctacgtgccggtgctcctaaaagctcagcaaactgacatcggacggagatggattcgccgcatcgtcgtcgagggcttcacggatcaggacggcagctatctgtacaacctcggtctgagtcttgatcgcagccggcgtgtcgtgtgtgcactgttcgtttcgccatcgcagacagaagcgccgttgaacatagcgcagaaaactcagattcgcgatctgttcctcgtcggcggatattcattcaattcgacgaaggaatcgaaggaagccagccgccgggtcgaactgaaggtcgagttttgggcgctggatgagaacccgtcgacgatctcggcgccggcatcgaaggagtttgggcaatgtccgtga

SEQ ID NO: 11206 - DNA, 1785 bp, Burkholderia sp. LMG 29317
atgtccgtgacgaccggaccactcgcttccctggctacctctctcgaagaagccctgcgccgcatgttttccgattggcaggaattgggtcggcctgaactggtcgagcgcgccagcaatcacgccaaggcggtctttcaagcctatgcgagcgcgcggccttccggcaaggacgcttatgccgccgctttggctttcgtgcgcgggaaggaactcgatgaggttcaatatgacgcgctcgccggcgccctgaacacgaagatcgaggagcgtcgcggagagtctccgattgccagtcgcaagcttcaggaagcgctgcactggtacgaggaagaagcgaccgccggccggctgtggcgtctaacgtggttcggcttgttgacgtcttatttctcccacgatccgcgggcagtctcgccggctgccgagcaggggtgggccgcactgcgcggcttgctgcaaaaaacctggccgctcatcgatcgagccaaccagaatgtggcggtcccggagtggctgcgcacgttgcgcgagtacccggcgctgatcacggagggcgcgactgatgagttcgcccgggacttccttgatggaaacgaggcggcgctcgatgccttggcccagtgcgtgggcattcccgaaggtagctggttctggcaggcgctcgtgctaagcgcggttcgcgcatgcactgaagacacggatagcgctttccatgcgtgcattccacgtttgctggagctgattcgttcgcgccctgtgtatcgcgatcaggcgctcgaactgattcttgcccgttactatcggctggccgaacgatctgtgcacgaagcgttgcgcgactttgtcgtcgacaagaatgtgtggcgtaacccgaagctcaaggctgccggaatcgcgacggcgtggaatcgggtgccggaagagatctggcgcatggttctgcaatgggtgaacgaaggcaatctgcgcgatttcttcgatgtgcttgccgcgagaaacagcgcggacgaaggccggctcgcgttctggagcgggtatatgagccagatcacctggactcggctgatcttcagcagcgataccttgatgcttgcgcggacgaacaaggacatccgcgcattgatcgcacgcgagagcgactcatatgcctcactgacaggaaacaggaacctcgatgcattcatcatgcagatcggggagtacatcatcgtcgagttcagcacggtcggcaatgcggcatacgtgtatgacgccgccacgctcaagttcaaccgctactccacttcctatcacggcggaacggtagacctgcgatacggcttcaagtcaggcgctcgctgtcggatcgtgcacaagcatggttgggaatggcaagcgaaagctgacctgagccgtctcggtattctccccgacaatgctgttagcagagcgaaatcccaacccgttgccccgaagtcggtcctcaccccgaatgaaacccgtcgcgccgacccgcccgtctacagccagatcgaaacacgccgcaccgaaccgcccgctcagccaaaacccgacccggtccgctcgcgcaacgactgcgtgacagtcggccctttgaccttcgcggaactgcaacgcgaagtcgcctgcttctcaggcgcttatgtcatcgataaaagagcggctgacggcggccgcttatgggtcgaagatccgaatcagaacatgcaactcggcctgctgttgaagagctggggtttcagatgggcgaactcacgttcggcctggtattacggggagtga

SEQ ID NO: 11207 - DNA, 3858 bp, Burkholderia sp. LMG 29317
atggcttttctcgacatcttcaaacgcaaatcgaagtccgaagacatcggtccggacttgcgcccggaatggacaggcgaaggcatcagtttcagggttgcgccggctctgtccgaggccacggtcgaagcgttccaatcgagagtttatgacgtcgcagccgatgagttcgtcatcgcgcatcatctgctgcagatggtggaggccggccgcgcacgactgaatgtcgacagcgtcgtgattgcatggaccgaccactatcggctcgccaactcgccagatcatgacacgctgttcgcgaacatcggcttaccggaagaagcggcattccagccggtcatcgactgtcatggcacgctctccgacacggacttcgatccgttcgtctccgaatgggagcgagcaggacgcgtcgtgcgttcgtcggcgcaagctggtgcgatcttcgtcgttgacggccaggcatcgcttttacctgaaagagcgtgggcactcgtagaggcgctcaatgtctttcgccatcgacctgatacgcagcgaagccagcacgacaacgaactgggctggggcacaatccgcacactcgccgatgccgcgagcgcactgtatgcaagccaatatctggcgaccacacacgtggtaacacccgacaagctacgcctgctcatcgacaaggacgacacaccgtttggccgcgtccagactgtcacgccgactttcgacggtgcccccgaaggctggattcgcgccttcgatcggctgtcgaaagtgcagccgcactatgacttcacaagcggcacgcaaggtcgcgtcagggtcgtgctgtcggaacctgtgcgcaaggtgctcggcgcgatcaagcgggcgatgcccggcagacgggtcgccggcgtcgaagccgaaaggcttctacacaatccgtgggcggtactcggcgatagcgccggcgaagtcatagatgaagacgatttcgtgcgcgagaaagcatcgctcggcgcgttgagcactgtcttttcggtccagagcagaatgtccgatgggcgcattgagagcgtcgaactggtggtgaccgagcactttgcggacggtgcggcaagaacgtccgcgtctgtcttcgaaagctccctggaactggcagagttcgctgcgtcgcttgaagatgcgctgaaactcgaacgcgagcagtttccatggaacgagttcgatctcaccatcgatgcagaagcgacgcaacagtttgaactggctcaacatttgctcgttctgtggcgtaatcaaagcgacggccggatcgatttcgaagacatctatttgctggatggatatagcgaacgaatcactggcatcggtgtagccaagccggtctacgtgccagcgatgcaaagcgcatcgcaacgcgaagacagcgacggctggctgccttccgaacttacgccgatgatttccgtcacgctggcgggccaagatggctcggtcatgattccgctcactaccgactgggtcaaggacttcgaggagaaggtcagcctcgcgcaaagcgaaggacgcgccgaagtcacggacgcagccttgccgaccgcaatcgagacgaaacaggcacggcaacttgtcgattcgctcaccgcgatgatcgacgccggcaacaaagtcaaagtcgagcagggggacaccgaccggcagacgcgaaagaacaaggaaagcctgctcgtcaaaacgaacttcaatgagatcgactaccaggagcaacgccgcagcttgctcagcctgccgctcgatcgggtcgctgtgctgccgggtacgctgcggcccggcatcgagctgaagaagcaccaattgcatggtgtcacatggttccagaatctcgtgtcgcacagccccgccgattgtcggggcgcactgctcgcagatgacatgggactgggcaagacgctgcaactgctgacgctgctgggatggttttacgaagcgcatcccgatggaaagccgtcgctggtggtcgcgccgaagagtctcctgcagaactggtcgaacgaaatcgagcgcttcttcaatccctcgtatccgcctcatctcgtgttgcatggcgaggcgcttcgccaccgcaaacagcctgtcgccctgatcgacgaacaattgcagacgcgtggcattacggacttgcttcgcccggactggatcggcgtgaacaagatcgtcatcacgacctacgaggcgctgacgggatacgaattcacgttcgcgcgacaggaattcgcgttcgtcatttgcgatgaagcgcagcgcatcaagacacccggcacacgtgtgacgctcgcggccaagaagctcaaagcgaacttcagaatttgttgcacgggcacgccggtcgaaaattcgctggcggatctttggtgcctgttcgacttcgtgcagcccgggctgctaggtgcgctggaaacgttcggcaagatgtatcgtcggccgatcgagtgtcagacgcatgaacagagagccgcgctggacgaattgcaggcgctcattgcaccgcagaccttgcgtcgcacgaaggaagagatcgcgagcgaactgacccggaagcattttgtcctccaggcattgaacgatgcggcatcgactttgagcgcggcgcctctggaaaacgaaaggctggagatccggttgtcagatcatcagcacgcgctgtacaagaacggcctgcaaaagcttcaggatgcagcagccgaacgcgacgcacggcgccgcgccacgctttcgttcggcgcgctccatcacatgaaggccgtgtgcgcggagccgtattgcctgccgggcaacaagttcgtgccggacaagcgcggtcttgaggcgcacctcgacaattcgccgaagatgcaatggctgcttaacgaactcgggcgtgtcgagcgatgcgcggagaaggcgatcgtcttcaccgagctgcgcgaggtgcagacggcgctgtcgtatttcattcatgagcgcttccgcattaagccgttcgtcgtcaacggcgacacgcagggacggcagggcatcatcgatcggttttcggcgtcgcgcggcttcaatgtcattattctgtcgacgcttgcggcgggagcaggactcaatgtcacggcggccaatcacgtctttcacttcacgcgcgcgtggaacgccgcgaaggaaaatcaggcaaccgatcgcgcctatcgcatcggacagcagaaagatgtgttcgtctattgccccacggtcgtcgccgatttcccgaccttcgagctgcgcctcgaccaaatgcttaagcgcaagggcaaactcgccggcacgacgatgagcggctcttccatggagcagatgctcaatggcagtcccgacgacatcaaggtctccgacttgttacgcgacgtatcggacggcgaagcgtctcataggcggccgcaaccggtgacgctggatgacgtcgtcaggctcgatggttccgcattcgagtatttctgccggctgctgtgggaaaagcaagggtacgttgcgtctgtcaccaaaaagagtggcggtgacggtggcatcgacatcgttgcgctgaggggcaatgaaggcgagttgctgcaatgcaaatcgtcgttgagtgccggaataggctgggacgcgatcaaggaagtgtcggcaggggcggcgggctaccaaaacgcctataaaaacacgacgtttcgccgggtgtgcgtgacgaaccagcgcttcaacaccggcgcccatgagcaggcgcgaatgaaccgggtgcgtttggtcgagcgggaacagatcgaagggctattggcaaagcatcccgtttatgcggatgagttggatgatcagatcatcttcgggattggcgtgtga

SEQ ID NO: 11208 - DNA, 2343 bp, Burkholderia sp. LMG 29320
atgaacattcttaatacgctttcccacgcaccgtgggtctcgcaaacgtgcgcttttgttcttctggttctcgtggctgcgttcttcggccacttcgtgctgaaatgctttcgcaggcgcgcaaccctgctgaagctggttaacggtctaaaaacgctcaggaaagacgagagccctgacgcgctttttggaaaagccggcgacctggagcatctctggaaagaattcggcgagacgctcctagacgagacggaattcaattctataaccgggcaatacgacctgaaggcgaagcgcgcctcaatgccatcagagcagttcttcagccaacatgcggtggtcgactccttcgtctggacggagttctacaagcaccttccggggatactaactggcatcggcatcatcgggaccttctttggcgtgcttcacggccttcaggcgttcaacatcagtgacaacgcagcactcgtacgcaccagtctgagtaacctactgggcagtgtgtccgaagcgttcctcgtgtcggccttcgcgattttcttcgcgatggtcattacgttcgtcgagaaactgctgctcgcccgcctatacaaacaggcggagacgctgacggccgaaatcgaccggcgctatgtcgccggagcgggtgaagcgatgttgcaggaacttgtgcattcgacgaaccgatacgtcaccaacagcgaaacgctcaaggacgcactagtttccgacctgaagggaattctcgtgtcgctctccgaaagtcaaattgctgctcaggagaaaatcgtcgaggcgctcaaggctaacgagaagagcacttcctcattgggcgaaaaaattggagaccatatcgcgaaaggcgtatcagaggccgtcgctgaacccatggcggcgcttaagaaagcggtcgagaccgcaactgggacgcagacaacggcggtaggcacgctgttgacagacactatcatcgcgctcaaggactctcttagggaccttttcggcgagcagctaaccggcatcaatgagatgcaacaaaagacaattgagacgttgcagggcgctgtcgcccgtatggagcatctcactcagtctcttgagacgacgggcgcgcgcactaccgaaacgatggccggcgccatcgcgaaggcgattgaaggtatggacgcgcggcaggatttgatggcgcgcaagatgtcggaggtagtcgatgaaatgaaaaagacgtccgaaggcgcgcagacagcggtcaacgaaaagttggaatccgccatttcaggcttgagctgcaaaatgacggacctcgtcgccaaactcacggaatcggtgagtgcctcgaccgattccaccaatcagaagcttggggcagcgttaaatggtgtctctcagacggtcgagacgcttgtgtcgacgctgtcgcaattggtagcgaagtcccaggacgcaaccaatgagaagctcaccaaggcagtgggggatgtcagcgccaatgtagagaaactggtcaacggactgtcgcagtcggtggtcaacgcgcaagagaagagcaacgcaacccttgaaggcgcagtctcgaccgtaaacgacaaggtgggtggttttctgagaggcatcacggagcaggccgcccgcgccgaagctgagaatatcgaacgtcagaagtggcttagcgagcaggcagaagccaacgcaactgcgatgcgagccgcgcttgagggcacgaccactgaaatgaaagcgcttgtagctggcacgcgcgcggccgttgatacgatgagacagagcgtcgactcgatgcgtaacgcgacttctgacacggttgccaagatgaattcaggcgctgagacgatgtttggtgcggcaaatgagttttcgaaggcgggaagctccttgtcgggcgttttacagcagtcggaggccacaacggccaaactggccattgccgcaggttcggtcgagacggccgcacaagctatgcgacgcgtggtcgacgattacagcacaacgcgcgaccaactgcttcagacggttatcgaagcgcgcaaaatcgtcgacgacgcaaaaaacaacagcttatcgtcgggcaaggtgttggctgaaattagggatgccacggacgcactgagcgcagcccacaccgaaatcgactcgttcatgaccaaggttgccgaagttatgggcaagtcgactcttgcttttcaagccgaactcaaagagtccattatcacggccaatcgaggccttgtggacaccaccgctgaggtcactagcctgctcgcgcgtagtattgcgcgactggccaacgcgaccaggccggtcctcgcggagcgagtgcaatga

SEQ ID NO: 11209 - DNA, 726 bp, Burkholderia sp. LMG 29320
atgattggcgctcgcatagttgtaaaacggggctccaagtccgaagctgaaaagccgttttggattagctacgcggacctcatgaccgccctgatggtgctgtttcttgtcacgatgtcagtcacgttgcttgccgtgaccaagcgcgtcgacgaggcagagcgcgctaaggcagaacgggacaaagaaatcaccgagttgctgcaccgcgttcaggtcgccgcgcaaaaataccccggcatcaaagttgataccgcgcgcaacgtcatcgatttcggcgacaaggcacacttcgacaagaacagttcggggctcaagcccgaacaacaacggttgcttcgcgcattcgtgccggaggtgctgcgcatcgcccgcgacccgctcggcaagaagtggctcaagcaaattgtcgtcgagggcttttccagtccggaaggcgattacctctacaacttgaatctgagcctgcagcgtagccaacgcgtgctatgcgttctgcttgcgaagccgttcacggatgagtccgcgatgactaacggcgaactggaacagattcgcgacctgtttctcgtgggtggctactcgttcaatggtgcgaaggcgacctacgaggacagccggcgcgttgaactgcgcctcgaatttcttggtattggcgagcaccgcactttgacagcaggtattgcgcgaggcaacttcggaatctgcgcgctgggagcgaactga

SEQ ID NO: 11210 - DNA, 1893 bp, Burkholderia sp. LMG 29320
atgctccagaccctcgcccacatcttgcaaatgcgcgaccgcaccggtgcgcccgacgacctactttcgcctctaaccggttgggtagagaaacttcgagttgagctcaaagggcacaaacctgtggccgaagaagatgacattcgcgcggcagtggtcaagttcaggcaagacctgcgaatgcacgattctcgccaagccgtctacgtgagcctcggttgtcttttgccaattggacccaagaagcagaagctcattgaagacacaacagtctttccggtcgtcctttcgaacgttgagcgctaccggaagcatctgatggtgttccaggactgttataagggtctactcgacgcgtacctcggttatcacccggaagggaagcgcggctccagaatagcgtggccaaactggaaccagttgcgcgactggctcgccaagacgtctgcggacatttacgacccgacgttccaagaggactgggtgaacgcggttcgctcgcatcctgagcttttttccgcacagccgctgcgcgcttttggctcggagatgctcacgggcgagtgtggggcctacgacaagttcgccagcgatttgggtgtttcgaaggcgtcgtggcttgaagaggagatggtgcgcgccatgattcagggagcggccaactccaaagctggaattgttccgcatcttccacagctaattgccgcgttacgaagagtcgagggagagaacaagcaccttttcaatcacggcctcgcggaagtcttcacacactactacgaacagtcggacggagaagtgcatgaagacctgcgcaaagttgcgctggacatctggcgtaacccgatgcaagacagcgataacaagtacgcttgggaaaagtcgggatgggcgttgctcgacgacggcccgctcgctatggcgaaggcatggttcgcgtctcacatcatcgagaaattcttcagcgtgcttgcgaagaaaagtgagcgcgaggagcgcgacaagcgagagaagcgcatccggcggatgaaattttgggtgcaatatgccggcgctctgaccgacgtaaagttcgcgctgggtccgtacgctagtagtgacaacgaccctcggatgcgagaagtgctggacctgatgcgaggcatgacgcttgagctttggggtgggggcgacaaacagaacaacgcattcattctccgattcggcgactgggtggtcgtcgagttcgggcttgagagcaacgcaacgtttatctaccgcgcctcggacctcccgtttgagcgcggccagaaagccgtctcgacgcaggtcatcaaggactacatcaagcatacgccgcctacaaagaacggaccgattcgaaaagagcaccgtgactcgggcgcgcagacttgggaggacgactacagggatgcgctcaagaagcgcggcatcttacccagccgcgttccggtatttagctcgacgcagtcggcttcgggaaaacaggcggcgactcaaaccgcacaatcgggcgaaaccgcagcgaaatccatgacgatgacgcaagtcgagactcgtcgtttggtccagattgagatgctacccgggctcacgcaaatagagactcaaaatccgcgaccgaatgaaatacccgcgcgcgacacgccggtggagttaagcctcgtgacacagaaagcgacaccggcgtttagcgagaaggaacaacgcgaacttgaaactttctgcaggcgcttctcgattccgattcgcgacatgcgccgtcagggaggcaatttctgggtgatgcacgacagcgacgccgaaaaccctatgactgcattgttgaacaaactcggattcacctaccgcgcaggcaagggttggtggtatccgagtcaaaaagacgcctga

SEQ ID NO: 11211 - DNA, 3795 bp, Burkholderia sp. LMG 29320
atgttgaaatggctgaaacgggccgccgggatgacgtcagcaaccgacaacaccgccgtaagcccgacgctcaccggggtctggcgtgcgtttatgccggaagggttggaccttggcactttcgaagccgtcggcacgcgagcaggcgccacgttgctttccgccccgacgctaccagcgtttatcacgcaattgcacgacgaggggtatgcctccggcacggaggacactgcgcatctgccgtgggcaagcctctatagtctgctcgacgaacctgtttttcagcgaagtctgccgcaactggagcttccgcccttctgcaacgcggtgccggaactcaaaagccatcattcgctgacggacgcggatttttcaattcacgtcgcgagttggcgggacgaagctggcagaagcctggcaggcgcagagcaatcgggtggcgtcatcatgattgacggcaaagcgcacttgctttcgctggccggctggaagacggctcagcaggtgatgcaattccaagcgcgcccggccactgagcgcaacgaaagcgcgcatcgtctcgcttggggccaaattcggcgttcagcgctcgcagccaacgcccgcctcgatttgtttctgtatcagagcgtcgtactcactcctgagaccctcgccattacgatgcgtaagagcgacgtgggtggcacgcgcgttgttgagattatgccgggatttaagggcgcgccgccgaactggcttgacatcttcgactcgtaccgcaacatcccgccgcgttacgacatcaatactcctgaaggcgtggtacaagtggtgattacagctgagatgcgcgccgcgctccagaccatccgtaacatggaaggccgccgggtggcaggaagtcgcgcggaagcatttctcgtgaatcctcgcgcgacgctcggggtggatgtggccagcgtcatcgacgagacgcagttcgagcaggcgcgcatcgacgcaaacatcttcttcgaccatttcactgcgattgtccgccgtgacgcgttcggatatccggagaccgtcggactttcggtcgagtcgccgggcacggccggacaggtcactgctgaggagcggctcttttcagacgacgagcaactggacggcttcatcacgggccttaatggcgcaattgtcaagcaacgccaactctacgcctgggcaggttttgagttcgagctcctcggagatagtccggaccagctccaggcgctcaacgacgccctcgaagaacggcgtcagccgcgcatccttgtgcgatacacggaaatctacgacctgaacgcttacacttcgcgcgtcgaggacataggcgtcgataggccctactactcaccatatattgccaagaagggcgatgaatggtggcccgagaacctggtcaacatggtcgtgtacacacccgatggggacacggagcccgtcgccgtaccgctcagtgacgacgtccagaatctgctgcgaacaaaggtcgaagaagcgcaggcgacaggaaagacctcagtcgaattgcccggactacccaagccgattccgattaacgacgccaaggacctgctcgatgtctaccgcaaagtgcgcagtgatgcgcaaaagaaccgtgacgacggtgtaacaggcggcgagaaagagaatacggtgaaggcgggcaagggcaagcagctcctcatcaaatcgaacatcgacaccgtcgattatgaggaaatccggcgcgacatcctgacaacatactctaaggagccgaggctcccgacggggttcaagtccaccaccaacctgttgcagcaccagaacgaaggcgttgcgtggcttcaacacctgttcagccatgcaccgaatcactgccggggcgccatctttgccgacgacatggggctcggcaagacgctgcagctgctgacattcatcgcgcgtgccttcgaggaggacccgaacctgccgcctgcgctgattgtggcgcccgtgtccttgttggagaattgggcggaggagattgcgaagttcttctccgagggaacatttcggccgctcatcgcgtacggggacaatttgagcaacctccgcgtgccgcgttccgcgattgacgcgcagctgcgtgacgagaatctcctgcgatttctgaagccgggctgggttggcgacgccaacatcgtgctgacgaactacgagacactccgcgacctcgaattctcgttcgccgcgcagaagtggtcgattatggcctgcgacgagtcgcagaaaatcaagaacccgaacgcgatgatgacgcgggcggcgaaaaagcaaaacgtgctgttcaaggtcgtgtgtaccgggactcccgtggaaaatacgctcatcgacctttggtgcctcttcgacctggtccaggccgggctgctgggcgcattgaacgagttcggcaaacgctatcgcaagcctatcgaagcggaaaccaaagaggaagaggctcgggtcaaggagcttcagcagctcattgacccgcaaatcttgcgtcggatgaagacgaaggtcgcgaagcttcccctcaagcacgtgaagccctgcctgattccgatgtccaacctccagcgaacgtactacacgaacgcggtcaacagcttcaaacagagccaagacaagtcgcgcgagacgcctatgccgtctccgttcaaaaaccatctgggcctgcttcagtaccttcgctccatctgcacaacgccacatgcgccggggcagggccggttcaagcccgtgccgctagcgcagtttcgcattgaagcgccgaaagccgggtggctgctcgatacgcttgagcaggtgcggatgcaggacgagaaagccatcgtgttcgcggaatttcgcgacacacagcagatgcttgcctacttcatcaacgagcagttcggtttctcacccgatattataaatggcgacgtcgaagcatcctccaagcacattgctagccgccagaagcgcatcaaggcgttccaggcaaagcccggattcggggtcatcatcctgtcgccggtcgcagtcgggtacggcgtgaacgtgcaggaagccaaccacgtcatccattacacccgtacctggaacccggccaaggaagaccaggcgacggaccgcgcctaccgcatcggccagaagcgcgaggtccacgtctatctccccatcacgtcagcggccgacttcaagacgttcgacgtacgccttcacgagttgctcgaggaaaagcgcgaactggctgacaacatgctcaacggctcaggttcggttacgccggcggactggaacgttcaggacatcgttcccgacggcagtaacgaccccgtgttcgccagcaaggttacgctggacgaggtcgttcgaatggaatgggactggtttgaggccttgatagccgctatctggcagaagaagggctacaagactgtttaccgtacgccccggcaggatgaaggcgttgacgttgtcgcattcaccgggacgaaaggcgacctcgtgcagtgcaagagttccggagccgacaacgcttcgctcgactctcaaggcgtcaaagacgtgctgctcggccgggcgcagtacgaggcgcgccacccacaggttgatttttcgctatgggctgtgaccaatcaatttttcaacgacagcacctgcgagcgggcgcggaacagcaaggtgtcccttgtcaatcagcgagacatcgaagagctgcttgagaaatatccagtcaccaacgcggacttgcagcggttcctctacgtattctgggaagaggctgcgtga

SEQ ID NO: 11212 - DNA, 2175 bp, Burkholderia sp. LMG 29320
atgagcattgcttctgtttcgttatcctttgtacttcacgtgtttgttctatcggcacttggcttcgcgcttgcgtgcttcatcgggcaattcatcctccccttccttcgtgtgcggcgcgaattcggccgcgccgcgcgcgtactgaaagccctgaagggcgccggcgagcgcattgatgcggaccgcatcggtgaggaggtcatgaaggggaccgggttcgggcactgctgggacgaataccgcgacacgcttcacgctcagaagcgcgtcgatgcggcgggcatgacggaaacaggccgttggcgcgcgacagcgaccgcgagcacattctttaccgagcaggctctgatcgacgcaccgctgcgcacggaattctacaagcatctgcccggtatcttgacgggcatcgggatcatcggcacgttctcagggctgattctcggcctgaacggcttcaagatcaccgacgatccgcaggtggtgcgcagcagcctcgaatcactggtgtcgagcgtgggcggtgcgttttcgctttcggggctggccattgccctcgccatggtggtgaccaccatcgagaaggccatggtcaacaagctctacacattgctcgatagactctgctgcgatatcgacggcctctttgaatccggcgcgggcgaggagtatctgcagcgactcgtcgaggcatccgaaacatcggccacgcaggcgatgcagatgaaagaatcgctcgttaccgacctgaagcaggttctgagcgaactgacgcagcagcagatcgcggccatcacccataccagtaccgcactcggacagtcgattaccacgagccttaccgagggcctcgccgaaccgcttgcgcgcatttcgaacgcagtgcagtccgttggcgacagtcagggcgaagcggtgaaccggctgcttaccgacgtgttgtcgagttttaccgcgcaaatggagaacatgtttggttcgcaactgcgcggcatgaacgacatgctgctcaaaacagccaataccatcgaaacggcatcgcacggtttccaggcgctcgccagtcagatccagcaggccggcgcaggtgccgccgatgcaatggccaagcgtgtcgaagaagcgctggagcatatgcaggcacggcaatccgagagcaacgaacagatgcgtgcgttcgtcgatcagctgaaggaaaatgtcgcgcgcggtcaggcggaatcgaccgatctgaccaaggagatgatgcgtcagttgagcgaaagcgcgtcgtcgctcgtgaagggtcttcaggagcagagtcacgcgagccacgcagaagcggccgcgcgtcagaccgaggccagcgagcagatgcgcgcctggatcgaagaggcgcgcgccagcatggtgaagggccagagcgaagcggcagaagcctcgacgcgcgtgatcggccagttcggggaccaggcaggcgaattgatcgagtcgctgaggcagcagagcgcttcggcgcaggaagaacatggacagcgtcaggcgcagctcgcggcgcagatcgccggcctgctcgacgaacagaccggccagatcgcgaaggtgaccgaggcggtcaatcgcggcagcgtggcgatgctcgatgcggtgaacaagctcaacaccgcgacccacggcaacatcgaacgcatggggcagggcgccgaacgtttgcacgacgcgtccgcacgcctcgccgacaaccttcgttccatggaggctgcgagcgacagcgtgaacggcacgaccgagcgtctcaatcaggcggcagcctccctgacgagctcgctcggcagcgtgcaacaggtgctcgccgatcagcgcaccgtgcgcgattcgctcgcgggtatgctcaccgaactgcgggccgtagtggagaccgcctcccgggaggcgtcggtgaagcgcgatctggttgcgtcgatggatcatgcgagcaagtcgatgcgcgaggcacagggcgtgacccgccagcatcttgacgacctcgtcgaagacatgagcaaggttcacggcgagttcgccgagcagatcaggcggaccttgcgcgagggtaacagtgcgttccacaccgagcttgcgcaagcgaccgggattctgaagggagccatctccgatctgggcgacgtcttcgaccgattgccggccgccgtctga

SEQ ID NO: 11213 - DNA, 759 bp, Burkholderia sp. LMG 29320
atgctgggcattcaaacacccgcgcggcggcgcaaccgtgatgaaggcgagaaaccgttctggatatcgttctccgatctgatgacggcgctgatggtgctgttcctcgttgcgctgagcgtcgccttgctggcggtgacgaagcacgtgtcggaggcggagcgtgaagagaaagagcgctccgagcagatcagtgcgctgatgaaggaagtggagcgcgttgcgaaccagttcgagggggtgcgcgtgatcggcacgacgatcgactttggaccgcgcggccggttcgagcgcgaagggcagaacatgctttccgcgccgcagcgcgaactgctgcgcgacttcacaccgcgtcttcttgatcagttgcgtacgaccgacgccggcaggaactggttcaagcgcgcgaccgttgaaggctacgcaagccgaagcggaaaatatctgttcaacctgaatctgagtctcgagcgcagcgagcgcgtgctgtgcgaactgctgcgcgatccgggacatgacgagccgatgctgtcgtttgcggatcgcaagttggtggcgacacgtttcttcgtcggcggcgcgtctttcaactcgttgcgcgcgacggcagacgacagccgacgcatcgaattcaaactcgaattcaagtcacgccaggagcgcaaggacgaagccgctcatgtgtcgcccgaaaacgatgacgtcgcgctcgaacaagcgctcgacccgaaagaacgatgcccgctgatcgaccgctga

SEQ ID NO: 11214 - DNA, 1641 bp, Burkholderia sp. LMG 29320
atgctgcacgagcgtgccggcgcgtggggccaaacgcgcgacatggctatggcgctgcgcgacattcgcaaagccttcggcgaccgcagcgatgcgccatcgctcgatcaattgaagatcgcgctgcgggcattctttgccaggcgcaccgatctgagtccgacccaggtcaagtacgtctgctacggtgtgacggtgccgcacgacgatacggaggatggcgtacggatcatcgacgaccgtgcgctctttcaggcattaatgaaggtgctgggcgattacgaaacgcaggaagggcgctttcgccagtgctaccaggggctgctgcaaggctacttcggctttcggcgcgatcccggcgagaagtctcaggcgcatcagaactggatcaatctgcggcgctacctgagcgaacgcttgccggcgatgcatgcgaaagccacatcgcgcgagttcgtgccggactggctcggcacgctcaacgagcacaagaatctgctcacggacaatccctgcggacgctatgccgacatgttcgaggcgggcaaaacggatgaactgcgggcgctgttcggtggactgggcatcgagtcgaactcgtggatatgggacgaagtagtgatggcctatgtccgctcggtttgcgagcgaggggacgccgagttctacgacgccttgcgctgtgtgctgccgttcctgaacggcagggcggatatcaagctgccgcagttgctcgccgtgcgcgcgaccgcgatgatcgtgaagcgttatgcgcagtgccggagccgaccggaacacgacggcctgcgcgatacctgtgtggcgctgatcgggaatccgtggctcgatcctactgcctggcacgcccgcgtcggctacgaaccggcgcgcgagatggtcgagggatggctgaagcgccgtctgatcaaggacttcttcgaggtgctggcgaaggatggggctgcggacttgcggcggcttcactactggctcaagtgggagcctcagatttcggatatgtggttcgtgctcggcgcggacgcgcgaaacaaccggacggcggcatttagcaatgtgcggaagcgcatgggcaatagggagcgcgtgctcgaaaaatccaccgccgacaacaacgcgttcatcatgcggataggcccgctcatcgtaatcgaatttggtctgaccggaaacgcatgcttcttcttctcaaatacgactgttccggtcacgttgagcgcacgtgcttttgatttgagcgacttgaagaataccgatcgtatgctggagaagcattcgcatcattcaggttgggaagatcgattcgattccgtgctcagccggcttcttgatgagaggtccgcgaatgggcacccgcccgaagcatccattgcaagcggtcagtctcgcccctcgtcgtcgcagagaatcgctacccctcgcgtcgctcgacccgacggttgggagattcaggagttgctgcgaaagtgcgcgaagcacggcatctcctacgaagacaaccgccccaagcgaggagccttgtgggttcttctgagtgacccgaaacgcagcccgcgcattgccgaggaactcgtcgagatgggtttcaaatacaaggaaggcagcggcttctggatcaagtga

SEQ ID NO: 11215 - DNA, 3285 bp, Burkholderia sp. LMG 29320
atgctggcaaagctattcggccgcaacaagacggcaacggtaacgcacgaggcgcctgctgcgccgttgatcatcgacgaagacggctttcgctatgcctcgcccgcaccgctcgcgaggcaatggctcgctgcaccgtacgactatcccgatcacgcggaacttggcgcgcatctcgcgcaggtcgcacaagaaggactgggcctcgcggtcggatcgggatttctgctgtcatgggaggatgtctacagcatcctcgcgcaccccgagctggacgcgtttcgcgcgccgttgcgttttccgccggacacgccgttgcgaccacggctcgtcagcacgggcgcgctcggtgacgcaaatttctccctgcgcatcgatgaatgggtggacgcacagggacgtggcgcgcgtcctgccccgaagctcatcgggaagacgctgcgcacggtctcgtcggaagcattgctgcccgcgccgttaagcgagatgctcgatttgctcgcgcgttttcataccacgctggcgagcgagcgcacactttccttcaaggagcacatctatggccgcgtgcgtgcgttggccgcgcagagcggctgcccagtgtcggattatgtcgcgagcacggtcgtgctggcaccggagcatctgaaactcgacgtcgagcgccgtggcgaaggcaacgcggttgtcctcgaaatcgtgccgaaattcgatggctcgcctgataaatggctgacccaatttgaccgtctgccgctgcaggatcgttacgaggtgccggaagggtccgcgctcgtgcgcgtcgtgcccacacctgaagtgaaggcggtgctcggcgagatcaaacgagagatgcctggccggcgtgtagcggggccgcgcgcgcaggctttcgtgcgcaatccgttcgccacgctgggagaaagcgccagggtagtcctcgatgccagcgtgttcgaggcgacttgcgaagcggcgggcatcgtcttcgagtcgttcacgccgcaggtggaacgcagcgagcgcgggcggatcgagcgcgtcgcgttgctcgtgcagccgatttccgcgggggggcagagcgccaccgtggcctggatcacctcgcccgacgacctttccgctttcaccgatcgcctgtcgcgcgccctcgacgacggctcgcaatgcgtgacatggcgcgagcatgaactggagatcgtcggtgacaccaaagaacacttgcagatgctctccggctggttgcgcgaatggaagagccccgcgctctggaccgcatccgaagtcctcgacctcagccactattcggagcgcatccatgagattggcgaggaacctccgtttgccgtgccggtcattgcgctgaaccgcgagcagggcggctggttcgaaggaaacgtcacgatcggtttgcgtgtggacgatccggcgaacggcgggacacgctacatcccgtttcaattcggcgagattccttcgcttcaggaatcggtgaacgcggcgcgggctgccggcgcggatcgcgtggtgctgcctggactcgttcaacccgttccgatagccgacgcacaaagcgccctcgatgcactggcgaaagcgtgcgctgaagtgcaacgtgacgagttccagggcggcggcgcgaagtcggtcgcaaagaagcgcctcatcatcaagcgcaatttcgaggacatcgattacagcgaggcgcgtgccgacgcgctgcagatgccgcccgaacgcatgccgtccattcccggcgcgctcaggcaggaggtcgtgctcaagccgcatcagaaagtgggtgtcgcgtggttgcagcatttgtgggaactgtcgccggcggcgtgccggggcacggtgcttgccgacgacatgggcctgggaaaaaccttgcaattgctcacgttcattgcgtcatgctttgagcgcgagccgcaactggagccggctctgatcgtcgcgccggttgcgttgctcgagaactggcgcagcgagttgaatcgcttcttcgcgcccgatgcgttgccgttgttgctgctctacggcgaaacgctgaagacgttgcgcgccagccgagaggaaatcgatgagagcctcgcgtcgcaaggcgtaacgcgcctgttgaagcgagactggattggcggcgcgcggctcgtgctgaccacttacgaaacgatgcgtgacctggaattcgcgctggcgcgtcagtcgtggtcgatcatggtgtgcgacgaggcgcagaagatcaagaatcctgcggcgctcgtgacccgttctgcgaagaaacagaaggtgcgctttcgcattgcatgtacgggcacgccagtagagaacacgctcgcggacttgtggtgtctcttcgacttcgtgcagcccggcttgctcggcgcgctgaatcagttttcacgtgcgtaccgccggccgatcgaggcgaaaacggaggagcagcaggcgaaggtcgaggagttgcgcggcgtcatccagccgcagatcctgcatcggaagaagagcgatgtcgcgaaggacttgccggtgccggtcgaggatgttttgtgcaagcagttgccgatgtcgccgtatcagcagcggcactacgaagccgcgctcgcgacactgcgtgaacaacgccagaccaacccgtcggcccaattgctggcgctcctggcgatccgcaagatttgcacggacccgcacggtttcgcggaacccgccgtgcgcgacataccaatcaggcggctcgtggacgagtcgcccaaaatgggctggctcgcgaacacgctgaaagcgctcgccgctgacaaggcgggcggtcacaaagtcatcgtgttctgcgagttcagggagttgcaactggtcctccagcgcgtcgtcgctgcgttgttcggcttcgcgccgagcatcgtgaacgggaatacatccgcagacccgagcgccgtcggcaatcgccagcaactgatcgacgcgttccaggccaccgccggcttcaacgtcgtcatcctctctccgctggcagtcggcttcggcgtgaatattcaggcggccaatcacgtgattcacttcacccggacctggaatcccgcgaaggaagatcaggcgacggcgcgggcgtatcgaatcgggcagacgcgaaccgtcacactctactatcccggcgtcgtaagcgatgcctttccgagcttcgatgttcgcctcgatgcgctgctgcaacgtaagcgcgctctggcatccgacatgttgaacggttgcagcgatctgacggtcgccgatttcgcggacttcgggtga

SEQ ID NO: 11216 - DNA, 2358 bp, Burkholderia sp. LMG 29320
atgaacttaacgtccggttcgctttcgcttttcctgcattcatttgtctttatcgcactgtcggtcgcgctcgtattgttctcctggcaattcctgttgccatactttcgcgtccgcgccgagttgctcggcgccaaaaagacaatcgaggcattgaaatccgttgacggacctatcgatgccgaccggatcggcgagatcatgaaaggccaggcgctccggcactgctgggcggaatatcgcgatacgcttcatgcgcagaaggcgatcaatgcgtctggcgtcgtggaaaccgggcgctggcgcgcgacggccatcgcgagcacgttcttcacggagcaggcgctcatcaacgcgccgctgcggacagagttctacaaacatcttcccggcatcctgacggggatcggcatcatcggcacattcggcgggctgattctcggcctgaacgatttcaagatcaccgatgacccgctcgtggtccgcaccagtctcgaatcgctggtgtccagcgtaggcggtgcgttcaaactgtccggcctggcgatctttctggcgatggccatcaccacggccgaaaagatcatcgtcaacaagctgtacacccatctcgatgcgctgtgcggcctgatcgacggactgttcgaatccggcgcgggagaggagtacctgcaacgtctggtcgaggcttccgaaacctccgcgacgcaggcgatgcagatgaaggaatcgcttgtcaccgatctgaagcaggtcctcagcgaactcacgcaacaacagatcaatgcgatccggacgacgagcaacgaactgggggcgtcgatcaccaacagcctctctgaaggtcttgccgagccgctcgcacgcatctcgaatgccgtgcagtcggtcggcaatagtcagggcgaagcggtcagccggatcctgaccgatgtgctgtcgagcttcacctcgcagatggaaaacatgtttggctcgcaattgcgtggcatgaacgagatgctgctcaagacggcgaacacaatcgagtcggcctcgcagggcttcggcgcactagccgcacagattcaggacgccggcacgggagccgcagacgcgatggctaaacgcgtcgaagaagcgcttggacagattcaaagtcgccagaccgaatcgaacgctcagatgcaggcattcgtcgacaacttgaaggaaagcgttgcgcgcggtcaggccgaatctgcggatctgactcagaacatgctgcggcagataagcgaaagcaccgcctcgttcgttaagggtctgcaggaccagaatcaggcgagccatgccgaagccgccgcgcaacagtctgaagcgaatgcccgcatgcgcgccttcgttgacgagttgaaagacggcgtagcgcgtggtcaggccgaatcatcggatcggacccgggagatgctgcgtcagatgagcgagggcacatcgtctttcgtgagggaattgcgggaacagaacatcgcgattcacgccgatacggccgcacgtcagacccaaaccagcgagcagatgcacgcctggatggaagagacgcgcgcgagcatggcgaggggtcagagcgatgccgtggaggcgtcgtcgcgcctgattggtcagctcggcggaaaggcgagcgagatgatcgatacgctgaaggcgcagacttcctccgctcacgaagagcatggtaagcgccaggcgcaactcgccgcacaggtcgccgatttgctcgacaaacaggccgatcagatcgggaaagtgacggaagccgtgaaacaaggcagcctcgcaatgcgcgaggctgtcgacaagctgaacgtggcaacgcatggcaacatcgagcgcatggtgcagggcgcagaacgtctgcacgacgcatcgacgcgctttgccgacaacctgctaggcgtgaaggcggccaccgacggcgtggccagcacggccgagggcctgagccacgcggcggcatcgctcgacggatcacttggcgccgtgcagcaggcgctgacggatcagcgcaccgtacgcgactcgctcgcgggtatggtgaccgagttgcgcaccgtactcgagaccgtgtcctcagaggcggcgctcaagcgcgatctggtccagtcgatggaaatggctggcaagtcgctgcgcgaagcgcaagacgcgacgcgcggccatctgaacgagctgatcaaagatctcgccgaagtgcatcaggaattcgcggaccaagtgaggaagacgctgcgcgagagcaacagtgcgttccatacggaactcgcgcaagcgacagggctgctgaagggcgccatcgtagatctgggcgacgtgttcgaccgtctgcccgccgcggcctga

SEQ ID NO: 11217 - DNA, 759 bp, Burkholderia sp. LMG 29320
atgttgggtattcagacaccggcgcgccgcaggatccgggacgagggcgagaagccattctggatctcgttttccgacctcatgaccgcgttgatggtgttgttcctcgtcgcgctgagcgtcgcgctgctggcggtgacgaagcacgtgtcggaggcggagcgtgaggagaagcagcgcgctgaacaaatcagcacgctgatgcgcgaagtgcagcgcgtcgcgaaccagttcgacggtgtgagagtgatcggtacgacgatcgacttcgggcctcgcggccgcttcgagcgtgaagggcaaaacacgctttccgatccgcagcgcgcgctgttgcgcgaattcaccccacgcctcctcgaacagttgcgcacgacggaagccggtaagaactggttcaagcgtgcgaccgtcgaaggctatgcgagccgcagcggcaagtatctcttcaatttgaacttgagcctggagcgcagcgagcgcgtactctgcgaactgctccgtgatccgggacacggcgaactggcgctctcgtttgcggaccgcgcactggtcgccacgcgattcttcgtcggcggcgcctcgttcaactcgttgcgcgcgaccgcggacgatagccgacgcatcgaaatcaaattggagttcaagtcccggcaggaacgcaaggatgaaacggcgcacactacgcccggtgcggaagatggcgcgctcgaacaagctctcgacccgaaagaacgatgcccgctgatcgaccgctga

SEQ ID NO: 11218 - DNA, 1671 bp, Burkholderia sp. LMG 29320
atgctgcgcaacggcctctccctgacgaccgacacgcgcgtgatgagcatggcactgagcgacatcaggggagcgttcggcggcgatggcggcgcgccttcgctcgatcaactgaagatcgcgttgcgggcattcttcactgaccgtaaggatctgagtccgacacagattcgatacgtctgctacggcgtagccgttccgctggatgatgaagaaggcgagcggctcatcgacgatcaagcgctgttcaggtcgctcatggcgcttctgagcgactacgaacggcaggaacggcgattccgtaagttctatcagggtttgttgcagggctactttggcttcaccagcgatgccgacccggcgtccgccgcacatgtcaactggatcgggctgcgtcggtatctcaacgagcgcctgccgttcgtgcatgagagcgccaaccgccgcggaatggttcccgaatggctcgatacgctgcgagagcacgccaacctgctcagcgatgatccatgcagccgctacgcgtcgagtttcgccgcgggcgagactgccgagctcgcggaagtcttcgatggactgggcatcgattcgaactcttgggtctgggaggaagtggtcatggcctacgttcgctcggtatgcgaacgtggcgaagcggagtttcaggacgcgctcggcgatgtgctcaggtacgtcaacggccgggcggacatcaaactgccgcagctgctcgccgtgcgcgccgcggcgttggcagtcaagcgttatgcagaatgccgcaaccgacccgaacatgagcgtctgcgcgatacctgcctcacgctgatcggcaatccgtggatcgaccccaccgcctgggatgcccacgtcaaccacgagcccgcgcggcagatggttgaagggtggctgaaacgccgcttgatccgcgacttcttcgaggtgctggcgaaggacggggccgcggacctgcgacggctgaattactggttgaagtgggagcccgagataaccgacatgtggttcgtgctcggcaaggacgcgcagcgaaacaagacttcagcgttcaccaacgttcgcaagcgcatggctggcaaggaccggattctgaccgatgccgccgacgacaacaacgccttcatcatgcgtatcggctcgctgctcgtgatcgaatatggcgtgaccggcaatgcctgttacgccttcgaagagtcgcgctttccagtcgatctcgacgcacccgccttcagcatctacggcatgaaaaaccgaagggtcgcggcgctctggctttcccacaatggttcctcgtgggaacgcaatttcgacatgaaactgcgcgaactccttcacaaagcgcccgcgccaaaacgcgctgccggcacgccgtctcgccaggcgtccgtcacccggccgcctcatcgccccgccggccctttcgatggcctcatgccgcgcgaggctagccgcgtcgtccttgatcgtgtcgagcgggagttgcgggatgtcctgtcgttatgcgaagcaagcggcttcgagtgggaggacaaccggcccaatggcggagccttatgggttctgctggaacagcggcgccagcgcccgtatctcgcggagcgcctcgacgcgctgggcttccaattcaaggccggccgcggtttttggttgaagtga

SEQ ID NO: 11219 - DNA, 3315 bp, Burkholderia sp. LMG 29320
atgctcgcaaagatctttggttggggaaaaacaggtaaatcggatgcgggaaaagcgtttgccccctatgccgcggccacgcccgcttcaccgctgacgatcgacgaggacggcttccgctatgcctcgcctgcaccgcttgcgaagcagtggctcgtcgcgccgtacgactaccccgactacgctgaactcggctcgcatctcgcgctggttgtacaggaaggcttcggacttgccgtcggctctgccattctgctgtcgtgggaacatgtctacggcattctgcggagccccgaactgcgttccttccgcgcaccgcttcgcttcccgcccgacacgctcttgcgtccgcgtctgacgaacgcgggagcgctgggcgatgcgggcttcgggcttcgcatcgacgaatgggtggatgttcaggggcgcggcgcgcggcccgcgccacgccttgtcggcaaagtgctgaggtttggcgaagcggatgcactgctgcccgagtccgtcagcgaaatgctggacctgctgagccgcttccacatgtcgcccgccgatgaacgcaccttgtcattcaaggagcacatctacgggcgcgtgcgcgcgctcgcggcgcagagcagctgtccggtctcggactacgtggcgagcacgatcgtgctgtcgcccgagcatctcagtctcggtgtcgagcgacgcggcgaaggcccggccgccgtcctcgaagtctcacccggctttgaaggcgcgcctgacaattgggtcgcgcaattcgatcgtctgccgctgcaggatcgctacaacgttcccgaaggcccggcgctcgtacgagtcgtgcccgctcccgaagtgaaggccgtgctcggcgaaatcaagcgcagcatgccgggacggcgcgttgcggggatgcgtgcgcaggcgttcgtgcgcaatcctttcgcgacccttggcgaaagcgcccggaaggtgctcgacgccgccgagttcgaggccgcgtgcgagaccgccggcatcgtcttcaaatctttcgtgccgcaggtggagcgtggcgagcgcggggaaatcgtccgcgtggggctgctcgtacaaccgatcgcagccggaaacgaggaagccgcgatgacgtggttcgcgtcgtccgatgagctctcgcggttcgccggcaggctggcgcgcgccctcgacgatggttcgcaatgcacgacctggaacgacgatgaactcgaaatcgtcggcgacacggtggagcatctgcaggcattgtccggctggctgcgcgagtggaagacgccggcactgtggacggcgtccgaggtgctcgatctgcgtcactactcggcgcggatcggcgagatcggcgtggagcaggcgtttgccgtgccggtcatcgcgaagaatcgcgaggagggcggctggttcgaggagaacacgtcgatcggactgcgtgtcgacgatccggcgagcggcggcacgcgctacgtggtgctcgagttcggcgagattccgtcgcttcaggaatctgtgaatgcggcgcgcgcagccggcgcggaccgcgtgacgctgcccggcctcgtgcagccgatcccggtcgccgatgcccagagcgcgctcgatgcactcgcccgtgccgccgccgaagtgcggcgtggcgagttcacgccgcgcgccggcgcgcggccggccgcgaaaaagcgcttgatcatcaagcgcaatttcgaggatattgaatacaacgaggtgcgcgccgacgcgctccacatgccgccggattgcgcgcccgcgatcccgcgcacgctgcggccggaggttgtgctcaagcctcatcaggaagtcggggtggcgtggcttcagcatctctgggcgctgtcgcccgcagcgtgccgaggcaccgtgctcgccgacgacatgggccttggaaagaccttgcagttgctcacgttcattgcgtcgtgctttgaacgcgagccacagctcgaaccggcgttgatcgtcgcgccggtcgcgctgctcgaaaactggcgcaacgaactcgcgcgcttcttcgagcccgatacgttgccgctcttgctgctctacggcgaaacgctcatggcgttgcgtgcgagccgtcaggaaatcgatgagagtctcgcggcacaaggcgtgacgcgtctgctcaagcgggactggatcggtggcgcgcggctcgtgctcaccacgtatgaaaccatgcgtgacctcgaatttgcactcgcgcgccaatcatggtcgatcatggtgtgcgacgaggcgcagaagatcaaaaatcccgccgcgctcgtgacgcgttcggcgaagaagcagaaagtgcgtttccgtatcgcctgcacaggcacgccggtcgagaacaccctcgccgatctgtggtgtctgttcgatttcgtgcagccaggcatgctgggcgctttgaaccagttctcccgtacgtatcgacggccgatcgaggcgaagaccgaggagcaacaggccaaggtcgaggcgttgcgcaatgtcatccagccgcagatcctgcatcggaaaaagactgacgtcgcgaaggatttgcccgtgccggtcgaagatcagacgtgcaagcggctgccgatgtcgccgtatcagcagcagcattatgagggcgcactcgcgaccttgcgcgcgcaacgcgaaacgaatccttccgcgcaattgcaggcgcttctagccatccgcaagatttgcactgatccgcacggattcgcggagctcgaagtgcgcgatgtgccgatcacgcgcctcgtcgacgagtcacccaagatgggctggctcgtgaagacactgaaagcgctggcggccgacacgcagggccggcacaaggtcatcgtattctgcgagttcagggaactgcaactagtcttgcagcgcgtgattgccgcaatgtttggcttcgcgcccagcatcgtgaatggcgacacgtccgccgacccgcgcaccatcggcaaccgtcaggagctcatcgacgcattccagtccagcgccggattcaacgtcatcattctctcgccgctggccgtggggttcggcgtcaacatccaggcggcgaatcatgtcgttcatttcacgcgcacctggaacccagcgaaggaagatcaggcgaccgcgcgcgcgtatcgcatcggacagacgcgaacggtcaacctctactaccccggggtagtcagtgaggcttatccgagcttcgatgtccgcctcgatgcgctgctgcaacgcaagcgcgcactggcagcggatatgttgaatggatgcggcgatctcacggcggacgacttcgccgattttggctga

SEQ ID NO: 11220 - DNA, 2304 bp, Burkholderia sp. LMG 29323
atgtaccagactttcgttcacgcgccggtcatcgcgaagctgtgcgcgctctttatcctcgcgcttttcggctacttcgtttgctggttcattccgagagccgttttacgcggtattgcgctcaaacgcatcattggcggactgatgcgccttgaagccggggcagacccggcgccgcttttcgagaagaataaagacctggcgcacctatggagtgagtacgacgagacgcttttcaagcaggagcggtttgattcacagcaacgcgactacgttttcgataaaaagcgctccaccgttcctgctgagatgttcttcaacactcaaacgaccgtggactcatatgtcggcgctgaattcttcaagcacgttccgggtatcctgacaggtatcgggattatcgggacgttctttggcattctgcacggactggacgcgttcaacgtgagcgcagacgccgcacaagtccgcgatagcttgaaggggctgctcggctccgtgtccgaagcgttcgcggtctccgccggcgcaattgcctgcgcgatgattattacgctgctggaaaaatggcttctagccaacctctataagaagagcgaggcactcgccattgaaatcgacaagctctacaaggcaggtgccggcgaggagatgcttcaggacctcgtgcagtcgtccgccgactatgtctccaacagcaagtccctcaaagatgcgctggtctctgacctgaagggcatcctcacgcagctaaccgaaagccagattcaggcgcagaggggctcgaccgaggacttgggacgccagattggggagcacattactcagggtctggagagggcgctggctgaaccgatgaaggccgtggctgccgtagttggagatgccgcaaaagagcgctccggtgccgttcattcgttgctctccgaggtagtgaaagagcttaatcagagcttacgcgacctgtttggcgaccaaattgcaggcatcaatacaatgcagcaacagacgattgcggcgcttcagtcggccgtcgtcaagatggaacagatgtccgcatctcttgccacggccggaacggatgcgaccgcgaagatggctgaacaacttgccgatgccgtcaccaagatggaagcgagccaggcgggcatgacccgccacatggcgcaaattgtcgaggaaatgaggtcgtcggtcgcgtcatcccagaacgcaacgaatgatggcatgctcactgccctcaagcaggtcagcactagcgtggagtcgcttgttggccagttgacggagaaagtgacgacctcgcaagacgcttccaacgagaaaatgcagcaggcgttcgcaagcgtcgctgagcgcatcgaactgcttatgagctcgatgacgcaaacaatgaacagttcgcaaaccgctaccaatgaccagcttcaaaaaacagtcgcggacgtgagcacgtctgtccgcgaactggtatcgggcttgtctgagtcggtcgtgaaaacacaggcggaaagcagcacgcatctgacgcaatcggtcgcaacggtcggagactcggtcaaatcgatggtcgcggacctcaaggaacaagcggcgggcgccgatgccgcgaatgaaaagcgccagcggcagctcgccgagaacgcacagaacgccgccgctgcgattaaggccgctgtcgagtcgctgacgtctgagattcacggactcgttgccggcacgaacaaggcggtcgaggtgatgcgctcgagcgtggacgcgatgcgcgctgtcacgaatgacacggtcagcaagatgaaccttggcgcggacacgcttcacggcgcttcgaccaagttcgaagaggcaggcaaggccgtgaccggcgcattcgaaaaggcgacgagcgtcacggacagcctcgcagcggccgccgggaatgtcggtgcggcctcgcaaaccatgcaggctgtggtgagcgactatcgcgcccgatgcgatgaattccagagcgaactcgaccagcttgaaactattgtcacgtttgcaaaggactcgcttagccaagatgttctgaagcaaatccaagaatctagcaaggcactcaataccgcgcagcttggggtgcaacagttcatgaacggtgttgctgatgtcttggcgacctcaagcaaggaattcaaagacaatatgacctccacgatggccgatgcggtaggcgagcttgtcaacagcaccagccgagttacaagcttgcttgggcgtaccattcaggagctggcggtttccgtgcgtccggtggtgcctgatgcggaggcctattga

SEQ ID NO: 11221 - DNA, 726 bp, Burkholderia sp. LMG 29323
atgttgagctcacgcatcgttctgaaacggggcggcaagggcgaagcagaaaagccgttctggataagctacgcggatttgatgactgcgcttatggtgctgtttctggtcaccatgtcggtcacgctcctcgcggtgactaagcaggtgagcgaggcggaacgacttaaagcggaacgggaccgcgaaattaccgaactcctcaagcgcgtccaggtcgccgcatcgaagtacccaggcatcaaggtcgatgccgaacgtaatgtcatcgactttggcgacaaagcgcatttcgacaagaacagctctggactgaaaccgcagcagcagaggttgttgcgttcatttgttccggaggtgctcaccatcgcgcgtgacccgctcgggcaaaagtggctgaaacagattgtcgtcgaagggttttcaagcccggaaggcgactatctgtacaacctgaatctgagcctacaacgcagccaacgcgtgctatgtgttcttttggcgaagcccccggcggacgagatgccgatgagccaagccgagcttgaacaggttcgcgacctgttcctcgtaggaggttattcgtttaacgctgcgaaatcgtcctacgaagatagccggcgtgtggagttgcgtcttgaatttttgggtattgccgaacaccgtccgtcgaacacgggagcggctcgcggtaactttggaagttgcgctctgggagcaaactga

SEQ ID NO: 11222 - DNA, 2241 bp, Burkholderia sp. LMG 29323
atgagcttcctcgaaatcttgcaggcccggcttgaatctcagcggaataacactgttcagatgagggtgtcaacggaacctctccaggaccaaattaacgagctgaccacgcaactcaaagggcgtctgcccaagacgccacccgacgccattgcgaacgcggtcgagcgttttcgccaagaccgcagaatacgggactcacacgacgcgcttttagtgagccacggctgcgaccgtccatttgggcagatgcgtttccgcctgattgaggaccgggagcgatttcccgccgtccgttcgagtattgaccgttttcgcaaataccggttggtgtttcgcgactgctacaaggggctcctcgacacatatcttggctaccaccccgagatgcgcggcgcctctggcaccggacgtcccaactgggagatgcttcgttcgtggctggacacgggcgccaagggcttgcgtgaccctgacggcatcgaggaagagtgggtgccggaacttgccgcgcaccccgagctcttttcgagcgcgccggtcgatgcgttcgcgcttcaagtgctcaaaggaaatgaacaagcattccttcagtttcagcaggcgctgcgaatcgagcgcacatcctggcttttggaacaggtcatattggcccaggtgagggcggccgcaaaggtcggcatcatgccctacatcgccaagttgctgccgcttctcgagcgcctcggaactcagaatccggccgtgttcaatcaaggtctggttgaagtgctcaccgcatactgcgcggacagcggcggggcgcttcacggcgccttgcgcgacttttccctgcatttctggggaaacccgctatccttgcaggcggagaaaaagaccggctgggcgaccgtgcctctgaagcctcggaacatggtcaaaaactggttcaacctgcatgtcatccagcaattctttgacgtgctggctaagcaagacaagagcgagcctagagacgttcgcaagaagcgcgaacgccgacgcgacttctggagcaagtatgcagacgtcgtaggagaggtgaagtttgcattgggaccggacgctcggtcgagccaagaccctgcgatggtcgaagtccgacagctgatggagggcatgacgcttaaccttcaaaatggaggtagctcccagaacaacgctttcttcatgcagttcaaggactgggtcgttgcggagttcgggcacgaaaataatgcctgctttatttatagggcaagtgacatcccttttgaggacggtgacacagcaatctcggcccaagccattcgacaccacatcaactcaagtttttcaaatggcccgcgcgggcctgtccggctgctgcacaaggacggcagctacgagaactgggaagacgttttcgagcaagccttgagagaccggggcacgcctatgcccgtgccgatgaggcaaagcgatgccgcctcgactcattggtcgcctcaagtatccggcgataagccgaagaagagggccgttgactccatggcggcccagcaagaagattttggttggccatctgccgataggtccgctgcacccgttatcgcggggaacccggtcgaacgggttgcggaccgtgtcagctctgccgggcagaacggcagcgcgcgcgcatggcgcaatccgtcgatttcgaggccgtcgaccggcgacaccggtagcccggcgtcagcgacgcccgctacttcggcttcgacctcgaatgggctcatcgataatttgccgttcggggcgacacaggaaaaagaactgttcaacgtctgccgcgagtacgacattcctgtccgagacatgcgcgagcggacgggccatctttgggtcgtgctggataggcccgatgacatccgaatgacgccgttgctgcaagcatacggcttcaagtaccgcccgggtcggggctggtggcgccaggccctgtcgagaccctcggccgacggaaccgctggctcgcaatcggcgcctgcgtctccggcggcctcgaatgttcctatcgctaatttgccgttcggggcgaaacaggaaaaggaactgttcaacctctgccgccactacgacatttttgtccgagacatgcgtgggcggacgagctatctgtgggtcgtcctggaccagcctgaagacagccgcataacgcccttgctgcaagcatacggcttcaagtaccgcccaggccaaggctggtggcgccaggcctaa

SEQ ID NO: 11223 - DNA, 3774 bp, Burkholderia sp. LMG 29323
atgttgaagtggctcaagaggaagacagataccggcggtgcagcccagtcgcaaaccgctgccgtgtggagggcgttcggaccggagggcgtcgacctcgggacattcgagaccgtgggctcacgtgcgggcgcggctgcgcttgccactccgaccgtccccgcgctcatcatgcaactgcacgacgagggcttcgccatcgggacggacgagaccgcccacctgtcgtgggagaacctgtacaaactgctcgacgagccggcgttctcccggagcctatcccaactggagctcccgccgaccgctggcatcgcgcccgaactccaaagccgccattcgctcatcaacccagacttctctattcgcatatcaggttggctcgacgacactcgccgttccatcgaagatgtgccgcgcaacggcgcgctcgtctcggtcaagggccagctacgcttgctttcccgggaggtttgggagacggtggagcaggtcgcccggtttcagacgcgcccagatgatgagcgcagcgaaagtgcgaaccggatgcgctggggtcaaattcgccgctccgcgctcacggcaaaagcaggcctcgaccaattcctgcacaagagcattgtcgtcacgccggacaccattgacatcatcccgcgaaaagcgggcgctgacaccacgcgaatggtcgagattatcccgaccttcgagggtgcacccgcgaactggctcgaggtcttcgattcgtacctgacggtgccgagccactatgacatcagcacgcccgagggcctagttcacgtagtcgtgacgcccgaagtacacaccgtgctgtccagcattcggaaaatgccggggcgtcttgtctccggcagccgcgccgaggcgtttctgctcaacccgttcgccgcactcggcgaggatgcgaaggcggtcatcgatgaagagcagttcgagcgcgcaaaggttgaggctggcatcttcttcgaccatttcacgtcggttatccgccgcgacgcgcttggatatccggaagccgtcggactgactatcgaggtgacgctggcggaccgcgtgactgctgaggagcggctcttttcagacgacgcggagctggagcacttcatccggggcgctgagcgcgccattgccgccgaacgtcagctctacgcgtgggaagggtacgatttcgagctgctcggagacagcgaagaccacctttcgctcttgaagacagctcttgaggagcgtcacactccccgcattctggttaggcacgctgacgtctacgacctgagcgcatacacctcacgagtcaacgatatcggcctcgagcaaccgtactactcgccgtacattgccaagaagggcgacgaatggtggccggagcacttggtcaacgtcatcgtgtacacgccggacggcagcactgaccccgttgcggtgcctatcacggatgacgtcaaggacgaactgagcgccaagcttaaggaggcggaggccaccggcaagccctcggttgaattgccagggttcccgcaacctatccctgtcaccgaagcgcgcgacatactcgacgcgttcattaacttcggaaaagatgttcgggagggctacgacaagccgccgaagacccgcgaccccaaggacaagcccgctcgactgaaggcgaagcaactgctattgaagcccaacgttgatgcagtggattacgaggaggtgcgcaaggagattctgaccaccttcgcgccggtacccgcactcccttcgggcttcaggccagagacaaagttgctggaacaccaggaaaagggcgtcgcgtggctccagcatctctttcagcacgcaccgaaccactgtcgcggctgcatcatcgcggacgacatgggcctgggaaagacgctccagttactaacgttcatggcgcgggcatttgaggacaatccggcgcttccgccggcgctcatcgtggcgccagtctccctgctcgaaaactgggcggaggaaatgggcaagtttttcaaggaaggcacgtttcggcctctcgtagcgtacggcgacaatctcgcgtcgcttcgtgtgccgcgctcggccatcgacgagaagctgcaacaggaaggcctcgttaagttcctgcaaccgggatgggtcggcgacgcgaacatcgtgctgacgacctacgagacgcttcgagacctcgagttctcgttcgctgcggtcaagtggtcgattatggcctgcgacgaagcgcagaaaatcaagaacccgagctcgatggtcactcgcgcggccaaaaagcagaatgtggtgttcaaggtggcctgtacgggaacgcctgtcgagaacacgctcgttgacctgtggtgcctgttcgacctcgttcaggcagggctgctgggcgcactcaatgagttcggccggcgctatcgcaaaccgattgaggcggaaacggacgaagagaaggcgcgggttaaggagttgcgtggtctgattgagccgcagatactgcgccgcatgaagaccgatgtcgcgcagttgccgcccaagcacatcgttcctgtgcttatcccgatgtcgaacctgcagcgcacgtactacacgagcgcagtcaatctgttcaagggtctcaagaagggcgacaaagaggcggcagcgtctccgttcaagaaccatcttggggtgctgcaatacttgcgctccatctgtaccgcgccgcacgcgccgggcctgggtcgtttctcgccgcagccaattgcacaggcacgcgcggaggcccccaaactcgggtggctcctcgacacgctgcgccagattgagggcaagggcgagaaggctatcgtttttgccgagttccgcgaagcgcagcagatgctcgcccattacatcaacgagacgttcggattccccccgcgcatcatcaatggcgacgtgacagcttcggcgaaacacgtggcaagccgccagaagcagattcgcgcttttcaggagaagccgggatttggcgtcatcatcttctcgccagtcgccgtcggctacggggtgaacgtccaggaggccaatcacgtcatccattacacgcgaaactggaatcctgcaaaggaagaccaggcgacagaccgcgcgtatcgcatcggccagaagcgggaagtcttcgtctacctgcccattgtgagcgcagaggatttcaagacgttcgaagttcgcttgaacgaattgctgaactctaagcgcaggctcgcgaacgacatgctcgacggctcaggcaccgtgatgccctcggactggaacatccaggacatcatcccggacggcgctaacgacgagaccttcaaccgcgcggtaacgctagacgatgtcctgcgcatggaatgggactatttcgaagcgtatgtcgcggcggtctggcagaagaagggcttccggaccgtgtaccggacaccggcccgcgacggcggtgtcgatgtggttgctttcaccggcaatgccggagacctcattcaatgcaaaagctcgggtgccatcaacgcctgcctgaacgacgagggcgtcaaagacgtggtgtgtgctgaagcggagtataggcttcggcacccgggtgtgcatttctcaaaatgggctgcgacgaaccagttcttcaacgagacagccagagaaaaggcgcgccgcaacaacgttacccttgccacacagaaggaggtcgacgcatggctcgagcgataccccgtcacaaacgctgacgtgcagcgattcctgcacctttactgggagcaggccgcttga

SEQ ID NO: 11224 - DNA, 2535 bp, Burkholderia sp. LMG 29325
atgtaccagaccttcgttcacgcgccggtcatcgcgaagctgtgcgcgctctccatccttgtgctcttcggctatttcctgttttggttcgtgccgagagctgtgattcgcggtctcgcactcaagcgagtcattgccggactcgcgcgcctcaaagagggcgaggacccggggccgctcttcgccaaaaataaagatttggctcacctttggagcgaatacgacgagacgctgttcaaacaggagcgctttgattctggtgagcgcggttatgtcttcgacaaaaaccgctcgacggttccggccgagatgtttttcaacacgcagacgaccgtggactcatatgtcggcgcggaattctttaagcacgttcccggcatcctgacgggtatcgggattatcggaaccttctttggaattcttcacggactggatgcattcaatgtgggcgccgatgccgcccaggttcgcgacagtctgaaaggactgctcggctccgtgtccgaagcgttcgcggtttccgccggcgccatcctgtgcgcgatgattatcacgttgttcgaaaagttgcttctcgccagcctttacaagaaaagcgaagcgctcgtcatcgaaatcgacaaactctacaaggccggtgcgggcgaagaaatgctccaggacttggtccaatcgtcggccgactatctgtctaacagcaagacgctaaaagacgcgctcgtcaatgacctcaaggccatcttggagtccgtcgcgtcgacacagattagcgagcataagcgcattatcgatgaccagatgacggcgcaggctgcgagcaccagagacctggggttgcaaatcgggcaggaaattagcgcggggctgcaaacggcgctagcggaacccatgaaagctatcggagaggctgtaaaagttgtcggcggggagcgcgaaggcgcggtccacaagctcctttcggaggtaatcaaagagctcaatcagagcttgcgcgacctctttggcgaccagattgcgggcatcaacacgatgcagcagcagaccatcgccgcgcttcaatccgccgtcgacaaaattgagcacttgtccaagacgctgactaccgccgggacagatgcgacgggcaagatgggcgaacagctggctgaagccatcaaaaatatggaagccagccagacgcgcatgaccactgaaatggcgcaagccgtggccgagatgaaaaatcttgttgccaactcacagacggcaaccaatgaaggcatgctcgccgcacttgagcgggtcagcaacaacgtcgaggcgctggtcaagcaactgacggaaaaggtcgaaacatcccagagcgcaaccagtgaggcgttgacgaaggcgctcgccgaggtgaccgaccgcgtgggcggcctcgtcacgtccctgacagccgatgtaacaacatcccagacgacgactaatgacgcactcaccaacgcgttggctaatgttgctgaccgcgtcggaagcttggtctcgtcgctgacgactgacgtaaaaacgtcgcaaacctcgaccaacgaagcgctcactaaagcgttgtctgacgtcactgagcgcgtcagcggccttgtctcgtcgctgacaagcgatgtgacaacctcgcagagcgcgaccaacgaacacttgcagaagtcagtgtcggacgtcagcgcgacggtcgctaatctggtgcaaggcctcacgcagtccgtgaccagtacccaagaagaaagcagcaagcagctgacacagtcggtcgcaaccgtcggagattccgttaaatcgctcgtcgacgacctcaagcaacaagccgagggtgctgacgtcgctcacgagaagcggcagcaacagttcgcagccgaagcgcaagccgccgccgctggaatcaagtcggcagtagacgttcttactgcggaagtcagccgacttgtgtccggcaccgggttcgcggtcgacaaaatgcgcgagagcgtggatacgatgcgccgggtgaccggcgacacggttacccagatgaaccagggggcaagcacgctgcatgcggcctcgaccgagtttggcaaggccggcacggcggtaaccggctcgctgcaacaagcgacgcagctgaccgacaagctcgctgcggcggcgggcaacgtgggcgcggcgtccgagacgatgcagcgtgtcgttaatgactataacgcccggagcggcgagttccagtcgatgctgttgcaccttaagaccatcgtcgagttggcagaagggtcgttgagccatgacgtgctcgctcaaattcaggaatcgaacaaggcgctgacggtcgcgcaactgaaggtggacgagttcatgaacggagtgaccgatgtgctccaggactccagcgacaagtttcaagccaacctcaccgatgcgatggagcgcgccgcatccaagctggtcgagacgaccggccgagtcacaggcctgttgaacggtctcatcgagaatcttgcaatggcactccgtccggtcgtgatggacgaggagggtgcttaa

SEQ ID NO: 11225 - DNA, 723 bp, Burkholderia sp. LMG 29325
atgttgagctctcgcatcgttctgaagcggggcggcaagggcgaggcggagaagcctttctggattagctacgcggacctgatgaccgcgctcatggtcctctttcttgtcacgatgtccgtgaccttgcttgccgtcacaaaacaagtgagcgaggccgagcgccaaaaagcagagcgcgaccgcgaaatcgcggagttgcttcaccgcgtacaagtcgccgcgaaaaacgcgggcatttcggtcgatatggaccggaacgtcatcgactttggcgacaaggcgcatttcgacaagaacagctccggactcaagcccgagcagcaaaaactgcttcgtgcgtttgtgcctcaggtgcttgccatcgcgcgcgacccgctcggccaaaagtggcttaagcagattgtggtggaggggttctcgagcccggagggagattacctctacaacctgaacctcagcctccaacgcagccaacgggtgctgtgtgttctactcgccaagccgccggtaggtgagagcgcgatgagcaatgacgaactggagcaagtgcgcgacctgtttcttgtcggtggctactcgttcaacgccgccaaggcatcctacgaggacagccggcgcgtggagttgcgccttgaattcctggggattggcgagcatcgcccgtcgaccaacggtgcgccacgcggcaacttcggcacctgcgctttaggagcagcctaa

SEQ ID NO: 11226 - DNA, 1977 bp, Burkholderia sp. LMG 29325
atgagttatctcgacgatttgcgcaagggactcactcgcctgcaaaaccagccgctctttttgcagacgccgatgggcgagctcgaagaacaactcgagaagctgaccgagaaacttgtaggccgcaccgcaaaagcgccggaagaggccgttgttaaagctgtggagcgattccaacaggagccgcgctttcggcattcccatgatgcgctactcgtgagccttggttgtgaccggcccattggaaaaatgcgctaccgcctcatcgaggacagcgtacggtttccggccgttctctcgggtgtggaccgctttcgcaagcatcgacccatcttccgcgactgctacaaggggctcttggacacgtacctcggctaccatcctgaaatgaagggtgcggcaaagacagggcggcccaattgggagctgcttcggtcatggctggacagtggcgccaataccctccgccgcccggatggcctggaggagacctgggtgtctgaactagtgttgcaccccgagcttttctcaaacgctcccgtcgatgcgtttgctcggcagatgcttcggggcgacgatagtgctttttttgagtttcagcaggcgcttcatatcgagcgcacctcgtggcttatggagcaggtggtcctcgcacaggtccgcgcggccgcgaaggccggcatcacgccgtacatccctaaattgttgccgctgctcgagcaactcgcgacccaaaaccccgtcgttttcaatcaaggcctggctgaggtgctgagcgcatattgcgaccatacgggcggcccgctgcacggagcgttacgcgatttttccttgcacttctggggcaacccgcttttcctgcgcaaggaaaacagcaccggctgggtcgccgtgccccgcgaacctagggacatggtcaaaaagtggttcaagctgcatgtcattcagcagttcttcaacgttctggccaagcaggaccagcgtgaacaggacgacgtccgactcaagcgcgagcggcgacgagacttttgggagaagtacgcggatgtcgtgggcgacgttaagttcgcactggggcccaacgctcgaaacagcgatgacacgaggatgctcgaagtcatcaagctgatggaagggatgacgcttgacctctatggcgcaggagacgggcagaacaacgccttcatcatgcgattcggcgactgggtcgtagccgaattcgggcacgagaataacgcttgcttcgtgtatcgcgcatcggacgtgccatttgagcacggcgacaccagcatctctgcgcaggccattcggcatcacattcaggcgtcggaccaactgggtgccgaaagccttccgcatcgagatagaaggcgagtcgggccggtcaaattgcaccaccgagacaaaggcggtcggttctgggaagatattttcgaggacgcattgagtggccggggcatcaccaggccggttgccgcgcgtgcgagcaagaactcggcaactacctggaagcccgaggtaccggcgcaggcagccaagcaaactccggctcgcgccgccgcatcttctgccgcgagccgcccgtcgaccacgcctagtatcgaccggcctccagaagcagcgaggcctgcgccacgccaagctcaagagcagcctgtaagttcgagtgcatggcgcaatccgtcgctttttcggccggcatctggtggcgcgagcactccgccgaccaaagcctccacgtccggagcggacaccccgtcgagcggaccgattgtttctctgccgtttggtgcaaagcaagagaaagagctccttaccatgtgccgtaaactcgacatctacgttcgggacatgcgtgaacggcagggcaatctatggattgcgttggacagcccggcggacaaccgtctgacgccgttgctccagtcgtacggcttcaaataccggcccggtcgcggctggtggtatcaggaataa

SEQ ID NO: 11227 - DNA, 3771 bp, Burkholderia sp. LMG 29325
atgctgaagtggctcaaaaagatgacgggtgccgagccgtcgcagcggcaaaccgccgccgtgtggcgcgcctttggagctgaagggctcgacttgggaacgttcgagtccgtgggcgcgcgcccgggtgcgacgccgcttgcgacacccacggtgcccgcgctcatcacgcaactgtacgatgaaggctatgccgtcggtgcagacgagagcgcccacttgtcgtgggagagcctgtacaacctgctggaagaaccggctttcgcacgcagcctcgaccaactggaactcccgcccatcggcgggctcacgccagagctccaaagccgcaactcgcttattgaccgcgactttacgattcgcgtctccggttggcgggatgaggaccggcgcccacttgaggcggtcacgcgcagcggcgcgcttgtctcgaccaacggccgacagcttttgctgtcgcggcaggcgtgggagaccgtggagcaggttgcacgttttcaggcgcgaccagaggaccagcgcaccgagaccgctcagcgcatgcgttgggggcagattcgacgcgccgcgcttgcggcgaacgcgagcctcgaccagttcctgtacaagagcattgtcgtcacgcccgacactatcgatatcatcccgcgaaagacgggcgccggcacgacacgaatggtcgaaatcattccgaccttcgaaggcgcccccgaaaactggctcgacgttttcgactcgtatcaggcggtccccaagcactatgacatcagcacgcccgaaggtatcgtgaacgtgctcgtcacgccagaggtgaacacggtgctttccagcatccgaaagatgccgggccgactcatcagcggaagccgggccgaagcgttcctgttgaacccgttcgccacgctcggtgaggacgcaaaagcggcaatcgacgaagagcagttcgagcgcgccaaagttgaagctggcattttcttcgaccacttcacctcgatagtccgccgcgacgcactgggattcccggagacggtcgggcttgctatcgaaacggcgctcgcggaccgggtgtctgcggaggagcggctcttttcagacgactcggagctggaacacttcgtccgaggcgccgaacgcgccatcgccgccgaacgtcagctctatgcatgggacggctacgacttcgagcttcttggcaacagcgaagagcatctggttctgctcaaggccgccctcgatgagcgcagcaagccgcgcattttaatacgacacactgacgtctacgacctgagcgcgtacacctcgcgcgtcaacggtatcggcctcgaacagccgtattactcgccgtacatcgcgaagaaaggcgacgagtggtggcccgagcacctggtcaacgtcatcgtgtacacgccggacggcagcaccgacccggttgccgtgcccatcacggatgacgtcaaagacgaattgagcgccaaactcaaagaggcggaaacctccggcaagcccacgattgaattgccggggttcccgcaacccattcccgttaccgaagcgcgcgacatcctcgacgcgttcatcaactttgggaatgatgtccgggaggggtacgacaagcccccgaaatccgtcgactcgaaggacaaggccgctcgtcagaaggcaaaacaactgttgctgaaaccgaatgttgatgcagtggactacgaggatgtgcgcaaggagattctgaccgccttcacgccctcgccggcgctgccgtcgggctttagactggagacgaagctactgccccaccaggaaaagggcgtcgcgtggcttcagcatctctttcagcacgcaccaaaccactgtcgcggctgcgtcatcgcagacgacatgggcctaggcaagacgctgcagttgctgacattcatggcgcgcgcattcgaggacaatccggaacttccaccggcactcatcgtcgcgcccgtctccctgctcgaaaactgggcagaggagatgggcaagttcttcaaggaaagcacgttccggccgctcgtcgcatacggcgacaacctggcttcgcttcgggtgccgcgttcggccattgatgaagagcttcgaaaggaaaaccttgtcaaattcctgcaaccgggatgggtcggcgacgcgaacattgtgctgacgacctatgagacgcttcgcgacctcgagttctcttttgccgccgtccaatggtcgattatggcctgcgacgaagcgcagaaaatcaaaaacccgaactcgatggtcacgcgttctgccaaaaaacagaatgtgatgttcgcggtcgcctgcaccggaacccctgtcgagaatacactcgtcgacctgtggtgtctgttcgacttggttcaggcgggattgcttggcgcgctcaatgagttcggacggtgctatcgcaagccaattgaagccgagacggaggaagagaaggtgcgcgtcgaggaattgcgcgggctgattgagccgcagatactgcgccgcatgaagagcgatgtcgcccagttgccgcccaagcgcatcatgccggtgctcatcccgatgtccaacctgcagcgcacgtactacacgagcgctatcaacctcttcaaaggcctcaagaagggcgacaaagaggccgcgtcgtctcccttcaagaatcacctcggggtgctgcaatatttgcgctccatctgtacagccccgcacgcacccggcctgggtcgtttcgcgccgcagccgctcgcgcaggcacgctccgaagcgcccaaactcggatggctgctggacacgctacgcgagattgaaggcaagggagagaaggccatcgtctttgctgagtttcgcgaggcgcagcagatgctcgcgtactacatcaaagagacgttcggcttcgagccgcgcatcatcaatggcgacgtcacggcctcagcgaaacatgtcgcgagccgtcagaaacagattcgcgcgtggcaagagaagcctggatttggcgtcatcatcctctcgccagttgccgtcggttacggggtgaacgtgcaggaggccaatcacgtcatccactacacgcgaaactggaatcccgcgaaggaagaccaggcgaccgaccgcgcgtaccgcatcggccagaaacgagaggtctgcgtctacctaccaatcgtgcgcgccgaagatttcaagaccttcgaggtgcggcttgacgaactgttgaaagagaagcgaaagcttgctggcgacatgctcaacggcacgggaacggtgatgccgaccgactggaacatccaggacatcgttccagacggtgcgaaagacccggcgtttacgcgtgcccttacgctagacgacgtgttgcgtatggagtgggacttcttcgaagcgtatgtcgcggcggtttggcagaagaaggggttcaagaccgtgtatcgcacaccagcacgcgatggtggcgtggacgtggttgcgttcactggcaacaagggcgacctcgttcagtgcaagagctcgggggtggtcaatgccagcctgaacgacgaaggtgttaaggacgtggtgtcggccgaagcggaataccggcttcgccaccccggtgtaaatttctcgaagtgggtggctaccaaccagttcttcaacgagacagctagagaaaaggcgcgccgcaacaacgttaccctcgccacgcagaaggaggttgacgcatggctcgaacgatatccggtcacgaacgctgacgtgcagcgatttctgcacctctactgggagcaggccgcttga

SEQ ID NO: 11228 - DNA, 1974 bp, Halobacteroidaceae bacterium T328-2
atgacaggtactggactttttataacaatctttattattgcaattatttttgctgcaatcaaaagttacaattattcaaatgaaaatttaaaagatgttacaagcgaagtagataagttaataaatgaaattgaagaaataaatattaggtcagttagtaatttagagcttattaataacttaattaaccaagaaggctctttattaaaggaagattggaataattattactttacaattaaaaatcaagctgatgttgataaacttttgaatccaagttattatttaggggaaagaaagctaataaataaatattcaaaaagagatattgctaatgctatgcctagtatattaactggcttagggatttttggaaccttcttaggattagttattggcttatttcaaatagataatctaggagccctacagttaaaagaagaaataccttatttgatcggaggtatgaagatttcttttctttcttctttaatggcgatagcttgttcattaacttggacttggtttgataaaaatttattagataagactgaaagaaagattaaaaaattaaatgatagattacatagagttttaccagttaggattgaaagtaacttattagatgaaataattgataatcaagaggaacaaatccaaactactaaagaatttgtaagtgacacattgattccagaattggttaatggaatgcaagaagcagtagataaatctctagctccttctattaataaaatggattcaaatatagataaatttgtgcgtgaatcagctgagagtaggaacgatttagtttctggtgtagaatcaattattaacgatacaatctctccacaaatttctgaaatgcatgagatcatggataaattagttaatgtttctgtagacaaacaagcagaaagtatagataagatggtcggtaaattcatggatacctttaatgatgcctttgaccatcaatttgaagctttgagagagactttagcaggagtaatcgagtggcagaagagtactagagaagaaatggagaagttgattaacacagttgcacagagtgcagaacgccaggaccaaatgttaggttcaacagaaaatttattagataatgttcaaggatatgttactgagttcgataaattaaatcaaaacttaaatgagaatattactaaattaaatgaagtaggttcccaactatcaagtttagaagaacagattagtcaaaaattacagactttaattgaaagtcaagaagaatttgaagaagtaaagaaagaacagattaataatatggttcaacagttagataatattaatgcctattgggtttctattagagataattttaatcaattaaataataacttaactggcgctatggaacaattcgcagaaaatactcatcaaggtttagaaaggacatttcaaagctttgataataatctagcagagatagctaatcgattaggagtaactattaatgaagttaatgatatggtagaagaaattccaaatacatttgcacagttagctaatctaattgaagagtttagtttagagagacaagaggtgctagagagaattgaaaatcaaaataatttaatagatgcggaatttaaagaaattaatactagtttaaaagagttagaagaagatgactacgaaaaagtaaaagagatattatatgaacagttaaaggataagttttctaaggaagacatagatgaattacaaattgaactatcagatattaaaaatttaattgaagaagatataaaagaactatctaataaaataaagaaagagaataaagatagtgatattaaatttaaaaagattttaactcaagtaaaagaagaaatagtagatgaaatagctgcaaaattagaggaagataatgtgaaagataaaactgatgataacggtggattattttctagatttgggagagggtaa

SEQ ID NO: 11229 - DNA, 738 bp, Halobacteroidaceae bacterium T328-2
atggacgtgtttagaagagatctaagtagagaggataaagaagagaaaccaaatttttggatttcatatgctgatattatggctggtttactcttaatgtttattctattactaatggttgttatcttcgattataaagatacattggcccaaaagaagacagaaattaagaaacaacaagtgaaaattgagcagaaacaaaacaaaatagaacagatgttaggagttcgtaaagacataattgaagctttaaaagacaaatttgcaaatactaatttaaaattagaaatagattctcaaacaggggctatccgaattcctggggaagtcttttttcaaattgatagtgtagaagttagtaaagaaggagttgaaaatttagctaaatttgtacctagttatattgaagttttattgagtgataactttaaaaagtatatatctcaaattattgtagaagggcatacagatgaccaagggagttatatgtataatttagaactctctcagggacgtgcattagaagtggtcaagcaaatttataaggaaaattttgttagtgaagattataaaaagcttttaagagattacttaacggctaatggtcgttcttatagtcaaccaattttaaatgaagctggtagtattgatcgaaagaaatcaagaagagtagaatttaaatttagattaaaagatgaacagatgattaaagagctacaaagaactttggaggaatga

SEQ ID NO: 11230 - DNA, 1176 bp, Halobacteroidaceae bacterium T328-2
ttgcgaaaattcaactttacatttactcctcaaaaattgacagaggctaataagaagatcaagcgaacatttccttcggctaatcaattaggaaaagagcgaaagaaaaagtatgaaaaccttgatcttgaacagttattagagaaaattagtaaaactgaagaagataagattaaagactttgctagtgggttaaaaaatcgtgatatatatgctttagcttataatttcaataatatttctaaaggcctaatgtataaggtaaaagagattttaacatatagatttaaaaaaagtatggttaaaataatgtggaataactttactaaagaccatgaaaatcaatatattatttctttttttaaagagaagataggtttaattaatagattgaaatttagaggttcaccatataatttattagttgatctttttagtaatgactcaccagttaaaggaataatagatcaaatagtttctttaaggttaaattatgaagaatggattaatcgatttcatttaaagcgagagagtaagttagcacaggcgattattagcaatctattcattcaacctaatatagatatttttaaacaagaagagaatgagttattagtaaagcttttttcttatttgaatggtaattctttcagcaaaattgctgaaaattatttagagttatttagtgttgaagaatttgaagaagagttaatgcaattaattaaagaaaaaatgggagacccagtagaagagtatagtgttacatggcagaatgttagtgatattgcttatgctagagcaaagcaatggtttaataataaagagatggaagagttttttattaatattgaagcggatgacgaagaaggtagaagaagatttaattattggaaaaaatatttagatactgtagaaaaagttaaatatattcgtgaagaattacagttgtttttaatatttaaagatattgttgttattgagtttggagaaataaataattctattttcatttatgatagaaattactttgaaaataaccttgttaaatatacagttgagaataataaagctgataataaaaagtttaaggatacatcaaagtgtattgattggattagacatagttcttcatgggaaacaaaaactgattccataattcaagatttgatcaagtga

SEQ ID NO: 11231 - DNA, 2345 bp, Halobacteroidaceae bacterium T328-2
gtgcttaattggttaaagaataagttaagtagtaatgagccagatattatagttaagtgtgaacttattaaagatggaattaaattcactatttataaagaagatgataatggtcgagaaagattgaattttccaattacttatactaaatattttaatttaaagaacttagttaaaaaagatttttatttgtctttacaggtcttagaagatttatggcatggcggtcaattgaaagaaagtgaagctaatagctattttatttcagtagataatatttatgagtttgaagatgaattaattaagttattaggttttgaaaatgataaagacttgcaacttaaaataaactctgatttagcagttgggtctaacaatttttctttaagttataagttatattatcctgagtacgggtatattagtaactttcatgatagacgaggtaacttttatcctattaataataaaagagcgatattattaaataaagctttagttaaattgcttaagttaattgaaaatcctccagtgaaacgtagtgaacatcctccttatgtagctaaagttaaatctttagctaaaaaattaggagcggaatttgatgactatttaaaaaatgaagagtactactttcctgaagaaatagatgtggaagttgaagagaaagcaatagatcacttacaattaaaacctagatttaatgatttagatgaaactttaaatcatgaagcaactaaatctttggagaatgatagtagttatggtattaagaaagataggagtggaaagaatagaagaatattttttgaagatgaaactaagaaagattataaacagataaaagataatgaagatatcaaaggagcagatgttcctaaattaattaataatccaacttctgttttaccggaatcagtagatttagagcgatttagtgatcgagtgaaaggattaagagagagagtttatgaggcgcaaccttatgttcgtggtaaaaaatctgatgatatgaattggtttgagctagatataggtgtggatttaaaaaatgaagttcaagacactgaggatgactctaaagacaccaaaaaggagactttggaacttgatgaatttgatagattggtaaaagaagcaaaagaagaaggagaagattatgtattatgggacaacaaatgggtcaagattcctgatgaaagtgaagattttatcaatgctactaaagaagtaaaagagattaagaaagatgacaaagttagtaatgataagttaccttatatttttgatatttatgaaaatgtaaataggttagagtataatcttgaattattgagacataaagaaaagctacgtaaagcgggagctttaacttatgaacgtccttctttattagatgatgaatatgagttatatccttatcaaaaacagggctatgtttggttaaatcgcttaaaattagcttcattaggaggattattagctgatgacatgggacttggaaagactcttcaggttatagcgttaatggctcagctaaaagagatagataaattaactccttctttagtagttgctcctgctagtctattagtgaactggaaagaagaagttaagaagttttgtcctactattaatgatatttatattcaccgtggctctaatcgatgtaaggatagtgaagtaattaaaaaatctgaaatagtacttactacctatcaaacattagtaagagatcaagttattttaggagaagttgattggcaagtcgttgtttgtgacgaggttcaacatattaagaataaatctactctagctacccatgcggtaaaagctcaaaaagctaaaattagattagctttaacaggaactcctattgaaaatggtcttagcgatctatggtcaatagtagactatattcaaccaggattattaaatagttataaagcatttaaagaagaatttgtaaagccaattgaagaggcaactagtcaagaagaatttgaagtgtatgagaaagagcttaagtctaaaataaaaccagtttatttacgaagaacaaaagaaggggaactaaaagatgagttgcctggtaagtataaacgagaacaaaaaatagaaatgagttcaaaacaagaaatgctctataatcaaataataattcaacaaaaagagagtgaaagccggaaccatcttgctacattacaaaagttattaaatctatgttcccatccaggtttagttgaaaagaactgggaagagaaaactgttgagcagttaattaaagaaggtcccaagcttaagaaggtaatagaaatcctaagtgagattaaaaataatggtga

SEQ ID NO: 11232 - DNA, 1941 bp, Ferrovum sp. Z-31
atgaatgttaccgcaattgttctgccgtatttaccacttgctgtcggcattgtccttctgatcgcaactggatttttcctcaaacagttttttctcccatccaagcgcctccaccaagaacttagcgtcgcgataaggaaactaaccgagatcaaacagcggttgggcgaaaaatctattgttgagattgatgaaatctatgatgtgatgatcacggacgaactaaagcacctatggagtgaatacgccgaaacacttcatccgcaaaaaaagctagacgaatttgggcaaataaaaatcggccgttaccgcgcaacggcaatggccgaggtattcttttccgaacaggcgttggtagagacgcctcttagaactgccttctacaaacaccttccaggtatcttgaccggcctgggcatcattggaacattctctggtttgatttatggactgaactcatttcatgttaccgacaatccaaatgcggttcgcgcatcccttggtacgctgattcaaggggtggggcacgcttttattatttcggctattgccatcgggttggcgatgctatgcacttggttgacgaaccgggagttgaccttgcgttacaggcaggtcgagaagctttgccaacttatcgacagcttcttcgatgcgggagctggtgaggaatatttgtcgcgactggtggaggcatccgaaacatcggcaacgcagtctattcagctcaaagatgcgctggtaacggacctgagagagatattgaccgagttgaccgaaaggcaaataagagaaatgtcttctgggattgggcaaaccttcgcagatagtatgcgggagccgatggagcgcatttcaagagctgttgagggcgttagcgcgaatcaaggtgatgccgttaacagaatgttgactgatgtgttgagcaacttctccactcgtatggaagaaatgttcggtgggcagttgcacggcatgaatgatttactaacaaagacagctcaatcaatgcaagctaccgccgatcgctttgataaactttcggacaatatgaatacggcaggacaaaatgctgccgaagcaatggccgaccgtctcaatcatgccatcacatctatggaagcccatcagagtgtacttaacaaacaaatgggtgagttcgtcgaacagattcgggaatcgataagtcagtcacaatccgagtcctcgcaaaagttgcaggaaactttgagcatgcttggagaacaggtggctggcgtgatcgggcagattcaagatcaagcaaagaagaacagcgatacgcaaaatgatacagtgaacaatctttccggccaagtggaatcgctcatttctcaattggtgaaaacgagtagtgatttacagaccagtatttcggcattgacctcggcgactacaagttctattgaaagaatgaactccggcgctgagatgctggcgattgcggcggatgatttcgccaaagctggacagggtgtggccggaaccatgaatgcttcagccgaggcaactggcaagatacagtcttcctctcaaacgttaagcaccgcgacaacatccgtccaacagatgtttgccgactaccggcgtaccagcgatgctttggcagctatgcttgcggacctcaagacaacgatggaaaccgctaaaaaggaagctggcttgacaacgcaactcgtcggtcagctcaaggctgccgccgatcagcttgggcaagcacaacaacaggcagatacttatctgcaaagcatcaacaaggttcttactgagacgcatcagagttttgctaacgaaatatcgaataccctgaagaaaggcaacagccagttccagcaggagttgtcgcaggcggttggattgttgcgtagcggcattcaggagcttggcgatacccttgatgatcttccaggcaggaaaggttga

SEQ ID NO: 11233 - DNA, 714 bp, Ferrovum sp. Z-31
gtgatagggctgaaactcccatccaggaaacgggcccgcgacgaagcggaaaagcccttttggatttcattcgcggacctgatgacggccttgatggtattgtttttggtttcggtaacagtggccttgtttgcggtgacacaaaaaccagatgaggttgcaaagcaacaagcacaacgagagcgcgatatccaagcgttgttgagccggatctcagaggcgaccaaggcttatcccggcatcgtcgtgcgcggccattccattgattttggatcccgagccaactttgaaactggtagctccgccctgtccgccgagcaggccaccactctacgtgcttttgttcccaaggtgttatccgtggtgcgcgacccgctggggcaaaaatggctcaagcgtattgtggtggaaggatttgccgatcagcgcgggacttatatttacaacttgaatctgagcttgcaacgttccgagcgagtgctctgtgtattgctggcatcaccaaaatcggcatccaatgctttgaccgatgcagaccgtttgcaaacccgtgaactatttctggtgggaggatcttctttcaacgcactgaaggcaagtctggaagagagccgccgcattgagttgaagctggagttcctggagctcgatgaaaatcgtctaactcctcgcgatgccccattagatgatgcatcttgcccgctggatttgtga

SEQ ID NO: 11234 - DNA, 1500 bp, Ferrovum sp. Z-31
atggcacaagttgttgcgacataccgccgatcacgcaaagtagcgggcctccatgatctgaaatatgtctgctatggtgtggcaatgccaatgcaggatggctggtgtgtgctgggtgacgacaagttgcgtgacgaacttcttgccgatgttgaaaacctaaacgaatccaggaagcgattcagatgctttcaggctttgttgagtagctattttgccttcacccgttacgatgggcagaccccaaaaactgcgcatgccggttgggaaatcttgcgcggctggctgtggcgtcaaagaacgctattccaatgggaaaataaaaccgaaaaactccgcacaccaggatggtttacagtattagccaaacatgaaaacttgttgaccgacaaaccttgcgaccgttacggcaaggatatgttgcgaggcgacaactcaaatcttgaagaggcaaggcaaggtttagggatccccagagattcgtgggtaatggaggagacgatcctttcacagatgagatctgcggcgaacttgggcgataccccattcaaatcacacattgatcaactgcttgatgtcatcaacggccaaacctctgtagatgtttctgaacttcttaagcaaaaatccattgccgtgctagtcagtcgatatgcacgttgtgacatcaagctggaacacccggcaatgcgggacgcgtcagtatctattatcgggaacccttggttgaaacgcacggcatgggatgcttgggttaaaaatttcagagatcaaccagatgaagaagcgcgggaaatggttaatggctggctcacgcgacaactcataactgattttttcgcgttgctcagttcggatggacaggcggatcagcgcaggcttaattactggttacggtttgtgcctgatattgaaggaactccttggctggcattagggcctgatgccatgcgaaacaatagtaagccctaccgagagttgagggatcgagcaaggggacgcctacttcggcttgataaccctggcgcgtcgaacaataacgccttcataatgaagatgggtgagcgactgattgttgagttcggtgtaacgggccacgcctgttatatctatccatcaacaccggtgcccttcaagttggaaggtttgtcgatttcgttgaatgacatgaaaaacaaatcgttgggtgaatcccttcgccacgcagatgggcatattctttgggagagaaactttgaccgagttattttcccgaacgtggggtattcctcatttacaacgagcagacccaaagccaaaccacaagcggctcaaaatgccggtcataacttttcttatgtagagcaatatgtgaagaagttttccattcgttcggaagatcataggcccaatggggcgttctgggtgcttgcaaaaaagggcttgaactcggaagttgacaataatcttgagtcatgggggttcaaatacaaagatggtcgtggatggtggaaacaatga

SEQ ID NO: 11235 - DNA, 3711 bp, Ferrovum sp. Z-31
atgaaaaatctctggcctttcaaaccagcaaatacgagtagccctgcgtcaactgtgctattggcacttcgcgctgaatatctcgaagcgggcgtaatattttcggccatgtccgctggctggttggacaccccgtatagttttagtgagcaaggcgaacaggcggcgcttctggcgcaactaactgaagaaggttttgccgaacgggacggcgatacgttgcgactgcggtggggttcgctatatcaactgctgaaaacagaaggctatcaagatagcctgccattgcttggattgcctccgctggaggcatggcgaccgaagctggaaagtctgggtggactgacagacaccaacttctcgatcctactcgccggatggatagattcagatgggaaccccgttcaaagcaataccgagattaaaggggcggtgctgaagtgcggccagcgtgaaatactgctgcccgaagaatcatggctggcggtgtgtgtcctgggcgagtttcacagaaggccacaggatcaacgtggtgctgatagcaatagacttgcttgggctggcatccgccgccacgctttgaccgcgaaggccgacctttccgatttcctacaaaaaacgattgtaataactcccgaacggctgaacatcattttgcgtaaaacacagtttggtgacagtaagaccgtggaggttatccctgggttcgaggggcaacccagcaactggatcgaacgattcgacagtttcaataccgtgttggagcgctaccaaataccaggtggagctggcttggttcatgtgattctttcgccagaggcacagaccgttttgcgcgagatcaagctgatgccagggcgtcgcgtagcaggcgaccgtgccgaggcattcttgcgaaacccgatagcagctttggggcccgatgctgctaaggttatcgaccccgagcagttcgagcaggctagagaggacgcggggatttcctatgcacgctttaccgccaaggtggcgcgagatgcgggaggtcttccggtcgaatgcgcgttattggtggaagaatccattgctgggaacttacatagcgaaaccctgcccctaacgggcgaagatgtgttgctggcattcatcgaaaagctgagggcacgaatagcccaaggggcgcagtgcttattctgggaaggctacgatctggagatcttgggcgacacgcccgatcagcttaccctgcttgaatcggcgttgagagatttacataggatgcagtggttcagcaccgcagaggtgtttgatctatcgcgttatgccgagggaaagatagaggggataggcgaagagcaaccctattattccgcgttcattgctcgtaaagatgatgagtcgagctggtttccagataacatcatatgcggattcagctttgttcctgaagatggcgcagcccctgttgatttgccgctcactgatgatggattaaaaaagatccggcatgtgtgtgaaaaggcgaaagcggatgggttgtcgagcttcgattttcctggttgcccgaaacccattccggtagtcgaagccgaacagatgatttctatcatcgataaggcaaaacaggatattggcaaaggcaatactccaaagactttgcaggacagaaatcctcgcaaggggctgatcctcaaaccgaatattgtgaaggtagattatgaagagcggcgtggtgtgcttgccatatccgcaggccaacaggccaagttgcctggctctctgaaaaaggggattgcgctgaaggaacaccagatttcgggtgttgcatggttacagcatctatggagcctgtctcctcaagaatgtcgtggcgctctgttggccgatgatatgggactgggcaagacagtacagctattgacttttattgccacctgcctggaagaaaaccaccaagccgatccttttttgattgttgctcccgtgtcgcttctggagaactggcaggaagaaatggagaagttttttgtacctggagccttcccgttgctgacactatatggctccgatctagcgaagttgcgtactccaaatgctgacttggacgatgaattggctgggatcagattgctgtgccgtaactggttaggcagcgccaaggtagtgttgactacatacgaaacgttgcgcgacttggagtttacgctggcagctcaaaaatggtcggcggtgatttgcgatgaagcacagaaaatcaagaatccgaatgcgatgatgacgcgagcggccaagaagcaaaatgtcagattcaaaatcgcctgtactgggacgccagttgaaaatagtctggctgatctttggtgtctgttcgatttcattcaacctgggctactgggggcgctcaacgagtttggttcaacctaccgcaagccgatcgaggcggaaaccgatgagcaaaaacagagagtggaagagttgcgatccattattgaaccgcaacttctgcgtcgcatcaaggcggatgtcgccaaagatctgccgaaaaaaatcatcgttgattcctgcaacaatctgccactttccaagcgtcagcgcacccactatgccaacgccattgcacaataccgcaaacaatccgtcgaaggcgtcggattgaagaatcacctcggactgctattctatctgcgccggctttgtgctgatccgcaaccgatggggcaatattcaaatttggctacaccgctggaggaaatcgaagaccactctccaaaaatgaaatggcttctggctgagttgggcaatattaagatggaaaatgagaaagtgattctgttctgcgagttgcgggatgtgcagcgattgcttcaacgagccatttcagagcgttttgacttggtgccagccatcatcaatggtgatacctcaaccagcaataaaagcacagtaagccgtcaaaaacagatacgtgcatttcaggaaaaatcaggttttggcgcgattatactgtctccgctggcggcagggttcggccttaacattcaggccgctaatcacgtcattcacttcacgcgcacatggaatccagccaaagaggatcaggccaccgatcgtgcttatcgaatcggccagaccaaggaggtttttgtttattgtccagtggtcgtggctgatgatttcacaacctttgatgccaaacttcatcgattattggaatggaaacgtaacctgtccggcgacatgcttaatggcgtcggtgatttgtcgcagaatgactttggggatctggaaaatgtcggcggtggagctgtgtttgacaacacaccaataacattatcagatgtcatcacgatgatgcctgatgcttttgaggttttctgtactgtgctatggagcaaactcggcttcaagaccaataaaatgggaggctcgggggatggtggtatcgatgttgtggcgatcaacggaaataaaggtgtgctgatccaatgtaagtcttcatccattgaggggcagtctcttgggtgggatgcggtcaaggaagtggttgctggagcggcagcctatgaaaggatgcacgtcggagtggtatttcaaaaggtggcagcaacgaatcagctctttaatggagcagccaaagaacaggcaaagctaaacaatgttgaactgcttgattgccatgttcttgaggaaatgctgaaaaaatatcccgtacccagaagccttatttcgtga

SEQ ID NO: 11236 - DNA, 2136 bp, Enterobacter sp. SST3
gtgcccttcagcgtaatctgcatcgtgagcctggccgttgcctgctttattttcttttatttattccgggccattaacattgttaacagcctgaaaaaatacacccaatcaattaatagcattgaaagcaattccccagaggaacagctcgcccatcttcaaaatctctttaagcgccctgaactcaaacacgcgtggaatgagtttgaagagtcgttacacccgcagagtgagctggaaggtggggaagaaaaaatcgtccgcattcgtgccacggcgccaagctcgagctacttctctgagcagcagttagtcgatattccactcaatacggaattcttcaaacacctgcccggtattctgaccggtgtggggattatcggtacgttttacggcctgatgattggcctcaaccacttcgaccccagcacgccggagcaggttaccagcagtgtcaataatttgctgcacgatgtgttgtacgcattccttggctctgccgtggctattgccgcctctattttcgtcacctggctggaaaaactgtccatcgccaagtgttataagtatctcgaaaaatttaccgccgctatcgacaagctctacgttagcggcgtgggggaggaatacctcgcctcgctggtgaaatccagcaacgaaagtgctacccaggcgcgtcacctgaaagagagcctggttaccgatcttcgtgacatgctgctgcatctcgccgaaagccagaaagttgaaaatgaacgcctcgcgaatacattaagcaacacctaccgagaatctggcgcacagtttgctgatcaggtgagtggcgcaatcgaaaatagcctgaagtcaccgctggataaaattgcgggtgcggttcagaccgccagcggcgatcaaagcggtatggtacagaacatgctgcaggatgtgctgaccgcatttatggcgaagctcgataccacctttggccagcagtttacgaatctcaacgaaatgatggggcaaaccgtcggggctatccagacgatgcaaagcggcttctccgctctgctgcaggatatgcgtcaggtcagcgacgattcccgccagggtagcgcgcagttaattgaacaactcctctctgaaatgaaatcgggccagcaggccatgcaggcaggcatgaatgacatgctgaccaatttacaagcctctgttgcgaaaataggcgctgagggtgaaggtgccggtgagcgcatggcacgacagcttgagaaaatgtttgccgatagcgaagcacgggaaaaagcccaggcagaacatatgtccgcctttattgaagctattcagaattcagtgcagcagggacaaagcgcaaccatggaaaaaatggcggcctctgtcgaagcactcggggagcagttgggcagtctgtttggccagatagataagggtcagcaacagatatcagcgaaccagcaggctaaccagcagtctctgcacgaacagacgcagcgtgtgatgagtgaagtagacgatcagatcaaacagctgattgaaaccgttgctagtcagcatcagggaaccaccgaaacgctgaacaaactcgcagaacagaccaaccgacagattcaggatatgcaaaatggcgcggataaaatgcgtgttgccgccgagcgttttgaacacgcaggcgataaggtgtcggaagcgaatcacctgacggctgacgtactgaataaagcgcaatcggcgggttcatcgctctcccttgccaccagcgaactcacttcagtagtgagcgattatcgtaacaatcgagaagccgtcagcaaatccattgccatgctcgaattgctcgcagcaaatacccagtctgaacaaaccacccgtagtcagttcatcaccgatcttaagcagcacgcagagcgcttgcagagctataaccgtgaagcccagacctttatggaaaatgtcagcgatgtgcttgggaaaggttttgaagacttctcagaaggtgtttcacgcagtctcgataagacgctgggcaaactggatgtcgaaatggcgaaagcctctaatctgcttgcgggctctgttgaacagatcggtgaaagcgtcagcgagcttgatgatgtactgtctcgcgtgcgtgcatga

SEQ ID NO: 11237 - DNA, 741 bp, Enterobacter sp. SST3; identical to SEQ ID NO: 10352

SEQ ID NO: 11238 - DNA, 1683 bp, Enterobacter sp. SST3; identical to SEQ ID NO: 10353

SEQ ID NO: 11239 - DNA, 3240 bp, Enterobacter sp. SST3
atgctgaaacgtctgttaagtaaactgacgggaaaccgtcagcagatagaacgccacctgaagcatcagtaccagactgaagaaaacgggctcagttttccgcaatcgttggttgatgacccagagctttgggctctggcatcctggcttgagcaactggcagaagaagactatctgatatcactaacagaccgatggttgttgagctgggaatctctgtatcgcctgctggaagatgaagaacatgccagcagtctgcctttgattggcgtgcctgaggttttgcccctacgtgcaagtttgagttcgcgaggagctttaagcgataataatttccgcgtctggattgctgaatgggctacgtttcccatgcgtcaatcgctccgccttagccgcaccggggctatttttattcatgaaaaccagcagtatctgttatcacgggaaaactgggcgctcttgcaggcaaccgagcagctaagcatgcagcaaactcaggctcccggcgagaccaccaaccaactgggatgggctgcaattcgcaaatgcgcgaaacaggctgctgcaaaatttgatgattatttagaaaaaacgcacgtcatcaaacccacttcattgtcgttacgcctgcgtaaggcgacggttgctgatactgccgttatcgagattgaaccccactttgaggaccaacccgctaactggctcggcagctttgacaagaactcacaggtccacgatagctatcgtattcccggagagaacggcgagctcagccatgtcatcatcccacctgaagtaaaagaagtcctgaattcaatacactccattcccggtcgccgggttgccggtagtgaagcgctttcctttgtacgcaatccctatactttcctgggtgaagatgccgccagtgttattgcccccgaggaacacgaacaggcattggttgatgcccatattttctttcatcacttccagcttcaaccccagattaatgatgagaataagatagagaatattacgctggtgctggagccggtctcacccctgccgcaaccggaggtatcattcctgttctcggctccatgggaactggaaaaatttgttcaggccgtagggataagtgttgccgcgcaaatgccagcaggttcctggcagggttacgagctggaactgagccaattcactgaacagcaatggcatgattgccagtcgctgttgtcgcgctggcagcaggaagtcgaaggtaaagaatttaatgatgttctggatctgggtaaatatggcgatcgcgtcattggcatcggtgagtttgaaaaaatatcctctccctggctgaccaaggcgcaaagtgaaaactggatccctgatggcgacttctccgaattttcggtagaaatgcttgatggttggcaacctgataacctgcagcatttcgatgaactgcaggaaagaatcacccaggcagaagcaactggcgaaacgcacatcatctccccatggaatgagactgaactgccgctggatgcagctaaaaccttcagtaagaactgggaaaaacagcaaaatgcagcacatgagtcagagggcaatgttgttgaaaaaacagcccgggcagtgctcaaaattgaacagaatattgaagaagctgtttacattaaaaagcgaagagactcacttctcaatgcacgccatgctgaacctgaaattccactgagcctgaaagagcacatccggcttaaagaccatcagcgcgaaggcgtggcctggcttcagcagcttttccttcgttcacctcaggaaaccgcaggttgcctgttagcggatgatatggggctggggaaaacgctgcaaatcctgagcttcctggtttggttcattgaaaaattccctgacgagccaccaagcctcatcgttgcccccgtttcacttttggataactgggaacgtgaactggacaatttcttctatacagccggaattcctgtgatgaaattgtatggtgacaccattaaagcggtgaaatacccgaaacaggctattcctgctcatctgcagtcccaggggatcaaaaatttgctaaaacccggctggcagggtgaggcgaaaatcattctgacaacctatgaaacgcttcgcgatcaggagttttcactggcgcgccagccatggtccatcatggtctgcgacgaggctcaaaaaataaagaacccggcagcattaatcactcatgcagctaatgcgattcaagcaagattcaaagtggcatgcaccggcacgcctgtcgaaaacacgcttgtagacctgtggagcctctttgatttcgcccagccgggcctgttaggtgcccttaatgaatttggcaaacattatgttcgccctatcgagaacgaggcgggtcgggatacagggcagcttgaaagtttacgcgcgttgattgaaccacagacattacgtcgaaccaaagaagaggtcgcgcgtgatttacctcaaaaaatcgaagtcgttagctgtaagcagctgccgctttctggtcctcaaaagcaactatatctctcttcgatagcaaactggcaacaacagcaggcacttagtgaaggaatgcagcaagcaggctcagggatgttggggctattacatcgtcttaaactcatctgtgcacacccggcagtcgttaaccctgagcctcgttatcaggaagggtcacctaagctaaactggatgttgaaaacactggatgaaattaagcattccagcaaagacaaagtgattatctttactgagctacgcgatctccagcgagaaattcagcgtgctgttcagcagcgattcggtttccgtccggtcatcatcaatggcgataccagcactaaaagtcagagccaaaaaagccgtcagcgattgattgatgatttccagtcccaacccggctttggcgtgattattctctccaccgtcgcagttggatttggggttaacgtgcagaaagcaaaccacgttattcatttcacccgctgctggaatccggccaaagaagatcaggcaactgaccgcgcttaccgtatcggccagacaaaggatgtgtatgtttattatccaacggtaatggactctgaaatcacgacgtttgaagaaacactagacgagctccttcagcgtcgtcggacattggccagagatatgttgtgttctacaccggatctaaccagcgctgattttgagaatattttaaaagggacataa

SEQ ID NO: 11240 - DNA, 2556 bp, Enterobacter cloacae EC_38VIM1; identical to SEQ ID NO: 10347

SEQ ID NO: 11241 - DNA, 738 bp, Enterobacter cloacae EC_38VIM1; identical to SEQ ID NO: 10348

SEQ ID NO: 11242 - DNA, 1794 bp, Enterobacter cloacae EC_38VIM1; identical to SEQ ID NO: 10349

SEQ ID NO: 11243 - DNA, 3240 bp, Enterobacter cloacae EC_38VIM1; identical to SEQ ID NO: 10350

SEQ ID NO: 11244 - DNA, 2136 bp, Enterobacter cloacae UCI 39; identical to SEQ ID NO: 11236

SEQ ID NO: 11245 - DNA, 741 bp, Enterobacter cloacae UCI 39; identical to SEQ ID NO: 10352

SEQ ID NO: 11246 - DNA, 1683 bp, Enterobacter cloacae UCI 39
atgacgcccgcgttgaattctctatcgcagcgcatcgcagcaaagctctcttccagccagcaggaggagcattatctgcgcaatgatttccacgcgctggcctctgctggccgcgagatggaaaaacgatttgataaagcagagaaaatccccacgcccccacatgaaatgcggctggcagcgctgcgtcgttttcgtcttgcggaagaactgagtgaacgtgaatggcggatggtgttttatggcctcgccgatagtgacccacaacatccaggccaaccggtattactcgaagatgatgcgttcttccccgaaataaacagtgcaatagaaaaaagaatagaaaccaagacgctgaaacgtcgggactgggcagcactctgttcaagctattttgcctacaggcatgagtctcctgaaacaaacccgcactggtgtgtgctacgcgggcatattgccaaaggctacttcgtggtgaaagcggctatccgcagagaaaaatcgtggatgaaaaccatcgagttttatcacgacatttttacgcctcaggctggcggtgtaatatcccaacagttgctttccggtgaaagtaactctttatcatcattagaaaaaatagcgcaaatccccgatagcagctggttgtggaaacgtattttcaccgtattgctggcgcagcttgatactctggacgatcctcattttctggaaaaaatcagttggctattaggcctggcggcgcaatgggtgcgttttcgtgatgacattatgacggcgacactgacccgctattaccattcaacctatcgcgatcaagcgcattccgccctgaaacaggccgccctcgaatactgggataaccctcagctcaagagtcagcagaataagtggcatcagtatgtttctgagcctgtcgctgcaatggtgcgtggctggttagcaaaacaggatctgatgcacttctttgaactgcttcgcggaaacggcgatgttgaccaggcgcgactgcactactggctgcgctttgcgaatcagatgggattcacccgtatcgtgatggggccagatgcctggcatgatcgtggaagcgattttgtgaaattccgcgaggaaaacaaaggacggttgagccagttacgaggcggacgtaatctggataacgccatgatcatgcaaatcaatgactatttgttcgttgagttttccggaaccggtaatgcaatgtatgcctacaggatcggccatgccccctttaacccggaatcacgaaccttggacatcaacatacatctaaaagatcagggacgctgtgcactccgaatgccacatatgccacgagccgaaggttataacaaagtccgcataaccggctggatgctgaaatacgatgatgagctgcgcaagctgggtatccgctggatggctgaagaacccgtcaaatttatagataaaaaagcgccctcacccgcctcggtatctgacatcaaaatcatcaatccattgcgggatacagcaatacagcgcctggttgaaaataccccatgcatcgtcagtgataaccgacaaaaaggcggcgtgctgtccgtccagctcaaagcacctgacgatataacagaaagagagttgcttcgacttgggttcacccctgtgactaaagaaccgcatcgctactggattaaataa

SEQ ID NO: 11247 - DNA, 3240 bp, Enterobacter cloacae UCI 39
atgctgaaacgtctgttaagtaaactgacgggaaaccgtcagcagatagaacgccacctgaagcatcagtaccagactgaagaaaacgggctcagttttccgcaatcgttggttgatgacccagagctttgggctctggcatcctggcttgagcaactggctgaagaagactatctgatatcactaacagaccgatggttgttgagctgggaatctctgtatcgcctgctggaagatgaagaacatgccagcagtctgcctttgattggcgtgcctgaggttttgcccctacgtgcaagtttgagttcgcgaggagctttaagcgataataatttccgcgtctggattgctgaatgggctacgtttcccatgcgtcaatcgctccgccttagccgcaccggggctatttttattcatgaaaaccagcagtatctgttatcacgggaaaactgggcgctcttgcaggcaaccgagcagctaagcatgcagcaaactcaggctcccggcgagaccaccaaccaactgggatgggctgcaattcgcaaatgcgcgaaacaggctgctgcaaaatttgatgattatttagaaaaaacgcacgtcatcaaacccacttcattgtcgttacgcctgcgtaaggcgacggttgctgatactgccgttatcgagattgaaccccactttgaggaccaacccgctaactggctcggcagctttgacaagaactcacaggtccacgatagctatcgtattcccggagagaacggcgagctcagccatgtcatcatcccacctgaagtaaaagaagtcctgaattcaatacactccattcccggtcgccgggttgccggtagtgaagcgctttcctttgtacgcaatccctatactttcctgggtgaagatgccgccagtgttattgcccccgaggaacacgaacaggcattggttgatgcccatattttctttcatcacttccagcttcaaccccagattaatgatgagaataagatagagaatattacgctggtgctggagccggtctcacccctgccgcaaccggaggtatcattcctgttctcggctccatgggaactggaaaaatttgttcaggccgtagggataagtgttgccgcgcaaatgccagcaggttcctggcagggttacgagctggaactgagccaattcactgaacagcaatggcatgattgccagtcgctgttgtcgcgctggcagcaggaagtcgaaggtaaagaatttaatgatgttctggatctgggtaaatatggcgatcgcgtcattggcatcggtgagtttgaaaaaatatcctctccctggctgaccaaggcgcaaagtgaaaactggatccctgatggcgacttctccgaattttcggtagaaatgcttgatggttggcaacctgataacctgcagcatttcgatgaactgcaggaaagaatcacccaggcagaagcaactggcgaaacgcacatcatctccccatggaatgagactgaactgccgctggatgcagctaaaaccttcagtaagaactgggaaaaacagcaaaatgcagcacatgagtcagagggcaatgttgttgaaaaaacagcccgggcagtgctcaaaattgaacagaatattgaagaagctgtttacattaaaaagcgaagagactcacttctcaatgcacgccatgctgaacctgaaattccactgagcctgaaagagcacatccggcttaaagaccatcagcgcgaaggcgtggcctggcttcagcagcttttccttcgttcacctcaggaaaccgcaggttgcctgttagcggatgatatggggctggggaaaacgctgcaaatcctgagcttcctggtttggttcattgaaaaattccctgacgagccaccaagcctcatcgttgcccccgtttcacttttggataactgggaacgtgaactggacaatttcttctatacagccggaattcctgtgatgaaattgtatggtgacaccattaaagcggtgaaatacccgaaacaggctattcctgctcatctgcagtcccaggggatcaaaaatttgctaaaacccggctggcagggtgaggcgaaaatcattctgacaacctatgaaacgcttcgcgatcaggagttttcactggcgcgccagccatggtccatcatggtctgcgacgaggctcaaaaaataaagaacccggcagcattaatcactcatgcagctaatgcgattcaagcaagattcaaagtggcatgcaccggcacgcctgtcgaaaacacgcttgtagacctgtggagcctctttgatttcgcccagccgggcctgttaggtgcccttaatgaatttggcaaacattatgttcgccctatcgagaacgaggcgggtcgggatacagggcagcttgaaagtttacgcgcgttgattgaaccacagacattacgtcgaaccaaagaagaggtcgcgcgtgatttaccgcaaaaaatcgaagtcgttagctgtaagcagctgccgctttctggtcctcaaaagcaactatatctctcttcgatagcaaactggcaacaacagcaggcacttagtgaaggaatgcagcaagcaggctcagggatgttggggctattacatcgtcttaaactcatctgtgcacacccggcagtcgttaaccctgagcctcgttatcaggaagggtcacctaagctaaactggatgttgaaaacactggatgaaattaagcattccagcaaagacaaagtgattatctttactgagctacgcgatctccagcgagaaattcagcgtgctgttcagcagcgattcggtttccgtccggtcatcatcaatggcgataccagcactaaaagtcagagccaaaaaagccgtcagcgattgattgatgatttccagtcccaacccggctttggcgtgattattctctccaccgtcgcagttggatttggggttaacgtgcagaaagcaaaccacgttattcatttcacccgctgctggaatccggccaaagaagatcaggcaactgaccgcgcttaccgtatcggccagacaaaggatgtgtatgtttattatccaacggtaatggactctgaaatcacgacgtttgaagaaacactagacgagctccttcagcgtcgtcggacattggccagagatatgttgtgttctacaccggatctaaccagcgctgattttgagaatattttaaaagggacataa

SEQ ID NO: 11248 - DNA, 1947 bp, Geobacillus sp. JS12
ttgtataccgtttttgagacgttgttttccttgattaacaaaatcggaaatgaaggttttactgatttgtttctttattttcagtttagtttgtttttggtgatggctgtttggcagtttgtccgcattcaaagggagattgcggtgatgaaccagttgaagccaaagcttttggaattaaaccgtcctttagatggaagcgtctacgagattgatcaggccattcacaatctttttgcccaagtgaaaaagtcgaaatataaagaactttgggagcgatattataatcgcgtatcgcagaaaaatgaggatgagcgcattaatgtagagccgttttttggatttgatgtgatgtaccatcatatgggctaccgaacattgatggacatgggggcgggcattcacgtcagtctcggtgttcttggcactttcgttggtctctcagtaggattggctcaattgcatgtcagtgatacagaaatgttgcggtctggaattgatagtttaataaatgggatgaaagtcgccttttacacttctgtatggggcgtgttgctttctttaatatggacgatgttcgaccgctggatcagtggcgtgcttgagcgcaatatcgactggcattccgagcggcttgactttttgcttagcaccgatgatgaggagctgtttcttaaccgtttagaaaagttatcacgccaccaggctgaccatctgaagacgctgctgactgatgcgcttgaaagggcgatgcagccgatcgctctatcgcttcagcagtcgcacggcagcctgcagcaagcgttcggtcagcttcatgaccagttcgcccagctgcatgaagggatggagacgcaggcgaagctgcttgagtcgcaaattgagttgacaaaaagtacaagcgccgatgtgacgagtcggcttgttgatgagattacaggcgggacacaacagtcgattggaaagtttagagagtttgtccaacaatcgcaagtgcttcactcagaaatgatgaaaacgattgagtcattcacaagccgttttgcttatacggaagagcggcaggcgatgacgcttgagcggacggaaaaaatgtttgcgcaatttgaaaagatggttggagaacttgagctgatgaaggacagctatcaaaaaacggcaggcataatgaacggattaggagaaacgttttatcagttgcagcagctgacaaaagaccatctcccagtccaacaagaagtgatgcggagcaaccagttgctcgctcaaaaatacgacgatctggtggagcgttttacccactttaatgcgcaggtcgaaacgcattacagccagttgctcgaacagcttgttcatgctgcatcttccctttccgcgtcctttcaaacgatggcgaacaagtttgaggagtctctccgcattcaaaaagaatcgctgcatgattcgcagcagctgctcggcgatgtccagtcggctgtggcggcgctgtcgccgcttgttcccgagttgcgtgaaacgtttgaccgtgttcgggagctgaaggagcagctgcttgaaatgcaggaagcgcaaaaacagcttcttccagagcttgtgcagctgcgcacgcaaacaaatgaaacggtggaggaagcattacaaacaacgaaagtgtacatgcatgagatgacagagcaaatcgcgacgctgcagcaaaactgggcgatgacgaaagaacagttggcgaagattacagaagcccttcatctttcaatgaaagattttgcggagaacattgacagcggtttgagcaaaacgtatcaacactttgatgagacgttgacaaaagccgttcaggaagtgagcgggctcgtttatcagttcagtgaagttcagagcgatttcattgagaatatggaagacttagtcgatcatctggataaatggaaagcaggggcttcaacatga

SEQ ID NO: 11249 - DNA, 672 bp, Geobacillus sp. JS12
atgaaatatcggagacggacggaagttaattattggatgtcctatgcggatttaatgagcgccatgttgatggtgtttgccttgttgttgatgtttgtcatccttgactaccgtgaattgttagaagagaaagaaaaacaaattgaagaggttgtcagcgtcaaaacggagatcattcgggctttaacagaagcgtttaagaagtcgaatctagccattgagattgatcagcaaacaggagccatccgctttcccggcagcattttgtttgaatcgaactcggcggaaatttctccggaggggaaggcgtttttgcaacaatttattcctaagtatatggggattttattgcaggatcggtttaaagatgaaatttcaagcatcattatcgaagggcataccgaccgaaatgggacgtacatgtacaacatgtctttgtcacagcgacgggcatacgccgttttagaatatatttatagcaaagagtttccgaattttaaagagcgggagctgtcgaaaaagtacattaccgcaaatggccggagcttcagcaatccgctgacggatgaaaacggcaagtatgatcctgaccgatcacgccgggttgaatttttattccgtcttaaggacgatgaagcaattaaagccattgaaaagttggtgaacgaatga

SEQ ID NO: 11250 - DNA, 1281 bp, Geobacillus sp. JS12
atgaagtatgagtatgaaccagtattgctgaaacgatggctgcgcgaagtgcgtccacctcttttggggaaaacaatggaaaacagcaatgagaaatatcggggcgtgcttgaacggttgtcggaccagtttgcagggctagtcgatgcaccggcttcggcattcgaacaatgggtcaaacagttgtcgaggcgggaaaagcttcttttgccaaacttatataaaaaagagcttccggaagagatgaaaaaagcgatgattgatgtgatccagcaacacgttcggcatgagcgccgcctttttcgtgtgttggtcgatgtggtgtatgaaacatgtgatttggatgaaatttggaagcttttacgctatgcttatgcctctcatatcgaaaaaattgaaaaaagaatggaaaaagaaaagagcgaaaaatggcggcgttatttgtcaagcaaagacccgattgtatatttggcgacgacggcatatgaaagcgagaaaggcattttagaggaattggagacgttttatttaacgaaaaatttcccgttgtttaaactcgtgctgatggaaattttccagctggccgatgaatcgttttttctcaaagaacaagagttgtaccgggatatgtttgtttcttcgacaaatgagcagcaacaaaaaatggcgaacgcattgatcaaaaagtgcaaactgaatcatgtcaagccgctcggaagattgatatttgaaaagttgcaaacgtatcacagaaaaccaatgctatggagatatgtcggggaagaggaaaagcggcggtttgcccagtggattatgaggttggaattgaaagacttttttggcggcgtgaataaaaaccatgaacggtttcaatattgggaaaagtttattccaaagctagaggatgtcgttgtgacggatgaacgcacgacgttgattatgtattttcgtgacgttgtcattatggaagtgctcggaactggggcggtttatatttaccgcaccgacgtattccagcgccattttcagccaaaaatcgaccggatgctcgccgaacgcgagcggtttgccaacaaggcgtggcgaaaagtgcgggaagtgaaacgaaccgagctgatggatagagatttgacaattccaggcggctggctgcgccataacggtgggtggcaatggaaatttgatgaatggcttcgccgcgaactcggctgggaggtaagaagggatgttcttcttcaaaaagaaacggaaaatgatgaaggcagttttgacgccgaatga

SEQ ID NO: 11251 - DNA, 2625 bp, Geobacillus sp. JS12
atgttcttcttcaaaaagaaacggaaaatgatgaaggcagttttgacgccgaatgaggatgggattcatttttcgtttcagttgcatgacggcaaaaccatcgccgaactgaagctgcctatggccaaagaagacatcgaaaaatattacaaagtgcaaggatttcagcagtatgtcgcttgggaggagctttacgactcgggcgtccttgtcgattcgactttgccgtacagcgagtattatgaattgcttaaagacgaaagcgccaaagaagtgctccaacatttagggcttcccgttgtcgaggagcacgtgagcggaaagctctcacttcgttcgttgccgcatgaagcggacttagttttgcaactgtttgatgcaggcgggcgcaacttagatcgggttgggaagcaggccggggcgatttatgtgctgccagaccgtctcatgctgctcccggaacgcgtatatcggctgaaacaagcgcttttgggatcgtacgaatcaggatatgaaaaaatcggcatttgccaacagctggccaacgaagcaggaattgaacttgaacactttttacaaaacgaaacgtatcacgtcgttgatgcgtacgatatagacgttgctgtgcaccgccatgaccatatcgagcttgtcgttaaaggacgaaatgaggaggaaacccgccatcttcaacgactgcaacgggtcagcagcataaaaaaaggccatgggcgcagccgtttcgtcagcacggagcaggttcatgctgatatgatgcatttgcagcaaaaacggcatattacgggagaagaagtgccgctgtttttggaaaatccggcggccgtcttgcctgagcatgattatttatttgatttggaccagttttcagaacgtgtccgcggccttatcccgattgaacgggttcgccctttttttcatgagcggaccggaatgcaatggtttgatgaggagagcgggcataccgttccgtacgatgagacgtttttgcgcgaactgatggaaaaatatccggatcagcaatatgtcgaatacaacggcaaatggatttacctagatcctttattgcgccggaagttgctgcagctgccgaaagacgccgatgaagcgttgaagcgccggtatattcttgatattaaagataacgaagaacaacttgaatacaagatggacagcgcccaaggggcaccatgccggcgctatccggttccatccgggctgcaagcggagctttttccgcatcaaatcgaaggctttgagtggctctgtcacttggcagagcaagaaaggggcggcctgcttgccgatgatatggggcttggaaaaacaattcaagtcattgcgtttttgctgcatcaaaaagcaaatgggcggttgaagccgacgttgatcgtcctgccgatagcccttattgagaactgggtggcggaaatcgaaaagtttgccccaagcttgttggacggtttatatattcataaaggaagagagcggttggcttcgtcgcagctcatttcacagtttgatatcgttttgacaagctatgacacgctcaaaatggaccagcttctgttggggaaaattgaatttcaggcgattatttgcgatgaggcgcaaaacattaaatctcatactagccagcgctcacgcgccattcgcgccatgcaaggacgtttccgtttagcgatgaccggcacgccggtcgaaaatagtttagacgaactttgggcgattatggactttgtccagcccggtgctttaggctctctaaaagaatttcgcttccgctatgcagaaacgtcggactatgatgcgttgcttgtggccctacaaccgtactatttgcgccgcacgaagcaacaaattctcgatggccgtttgcctaaaaaacaccttgttccgccgatttatgttgaagcttcacccatacagaaggaaattgcccggtcaatgttggccacaaaagagatgggtcaggtcgccattttgaatatgattacgagacttcgtcaactgtacggccatccgggtgcggttattccgaaatatgaacagctctcttatcaagaagtgccgaagctgaaagaaacgatgcacatcattgaaacgattcggcaaaagggagagaaagtgctcatctttactgaatttcgcaaactgcactttcttttaaaacgaatctttatggagacatacggcatttctgttccagtgattgatggcgatgcgaaaaatcggcaattgattgtccgacgttttaatgaaatgcaaggctttggcattatgattttatccccaaaagcggccggcgtcggcttgacgatcacaagtgccaaccatgtgattcattacacacgatggtggaatccagcggtcgaaaatcaagcaactgaccgtgcatatcgcatcggccagcaaaaggacgtgtatgtctaccatattattacgagggacagttcccactttccgcaggggacagtagaggaattgatgcatgaattgcttgaaagcaagcgccatttagccgaaaatgtcattattccgtttaatatgagcgagatccagcaagcggtcgctgagaaggtggtggggcgaagacagcttgtgtaa

SEQ ID NO: 11252 - DNA, 1419 bp, Spirosoma linguale DSM 74
atgactgaatttttattacctgccggttttctcggctcatggacaatttatagtatttattacctgagaaaagcttaccgtacgccttccaatgtaaatccctatgtactcgatttaatcccttcagtttttcctactattggtataatgtgtacagccataggcattgcctatggcttatcggactttgatgccaatgacattcagggaagcttacctcagctattaggtggcttgaaatctgcattttttgcaactgttttggggattgcgggcttgattattttccaaaaagtgttggcatccgtacagcaacacattgaccagtcgccagaccggccgcgaagctcaagtgatgaactatcagccctaaacttgattagcacacaggtagaaaatttagagcggactttccggactgaattggatatggtgaatgtatcggttaaagagaatagcacaacctttaaccaacaaattggaaagctaaacgacttgataacgactcaaacccgtcaagaagaggatcattatcaaattacatataggcaatcagaatcaattataaggaatttaacagagctaaagaaagcgcaggatacctatactaaagagcagcaaacaggagtcgatgccattgtaaaatcaatgcttgggaatcaaaaattgcttaccgccaagtttgatgagttttccgagctcttgcggaagaacaatactgaagcgttagtggaagtcatgcgggcatcgacagagcagttcaacgcacagatgagtgagcttatcgacaagctggttaaggagaacttcaaggaattgaacggcagtgtgcaaatgcttaacacctggcaaaaggaaaacaaggagcaggtcgccagactaagtgagcaagtcaagacaattattgagcaggtcgacattgccactaataatctgaaagtggcatcgaatgtcctaactacggtggctgatgtgaatcaggaattagtttcgggtgatggtaaactgatgacactggtttcggaactcgaaaaagtcatgattagcgatgggacgtttactgcgatcaccagcaaagttgagggtgctgtaagcacactggtgaaaactaccgatgccttcgacttgacaactcaaaagctaaacgtatgggtccgtaatcaaatgaatttcaatgagaaagcagaaatcttagtgacgcaactggaggagtttcggaatttaaatggatctgtttgggacaagtaccgggcagagatgagtaaagccgtaaatatcgtttcaaccacatcaaccgcattaaaaaatgatcttgagaatataaatcaagagttttatgaacggctgaatgataccctgcaaaatcttgatggactaatccaacgatttatgagtggtcaacctactaatcgacggtag

SEQ ID NO: 11253 - DNA, 669 bp, Spirosoma linguale DSM 74
atgagacagaaaaaagaatcattctggattccctatgccgatttaatgaccgtattgatggttatctttcttttcatcgccttagcctatatgggcttactgcaaaacaaagtggggcaggtagaagacgtcaaggcgaaaatttatacagatctgaaagctgaatttagtcaggtagcaactcaatggaatctagaaataaataatgatttatcgattcgctttaaagatgctgatggtttgttcgacggtggaaagggagtcccaaccggcaaatttgtcaacattttgaatcaatttataccaaaatatttggctataatatctaaacctgagtacgtgaaaagtatagaagaggttcgagtagaagggcatacggcaagtggggactaccagcaaactattgaattatcccaacaacgggcgaataatgttttatactatttggtaaaacatccttctttcttccgactaaatcaagagagtcaacggcacctgcaatatattctaacgaccagtggatatggatggagccgtgctttagatgccgatggaaagtattcaaagataacccggaaacagtacgatgttcaatcgcgtcgcgtcgagtttcgaatagtgaccaacagtgatcgagtcattgaagaactcaaccagataaagctatga

SEQ ID NO: 11254 - DNA, 783 bp, Spirosoma linguale DSM 74
atgaccctgtattctttcaatggtctgcagcaatacttagatcaaaaaggctttcctaaaacgagtgccggaacatttcagctattgaaacgtgacctgctgaaaggaatgcagcagggcgacatcgtaattcggtccgatgggatttattgtacgatagacggccaagaatacaaagggtacatttttaatcaaaaacccaatattagtcgctttggagagcccaaattccatacagcggattgtgagatagtagaaaagcgacagaagcttcatggagattatgtctttactacattagaaaatgtacaattgtatgattcagggcagggaggagctccttaccctaaaaaagatgtttatactattttaaaattgtgcggctattgtcgtcaactcataggcgcacaaaatgaagggattgtagacacagaagatttttatgctatgttggtcgagcagtatggttcagcagccgaacccgataacagtgtcgttgatatttttggatatacccccgatttttctttaatcagcaaaaaaatcagggaagcaaaggcatacaaatgtgagaagtgctcaattgatttgtctgccgtaatggatcgacacttcttgcatgtacatcaccggaacggacgcaaaactgataacagaccacagaatttacaatgtctatgtattcgttgccatgcttcagttgatgataggcacaaagagaattttgctactgttaacaaagaacgtgagttagctatatttataaagaagttcccaaaatag

SEQ ID NO: 11255 - DNA, 1299 bp, Campylobacter coli 7--1
atgtatgaactaccaatacttatctttaaaaatttatcaggacatattctagaaggaacaataattattatcttttttttcttattgtttttatttcttttgtataaaagaaaaagtcttcacaaatcctctacaagtctacttatcaccataggcatatgtttcactttttatggcatttccaaaggacttgctaactttgatgctaataatattgaagaaaatttaccgcaacttatagatggtatcaaaacagcttttttagtttccgtggaagctgttttctttgctattttacttaaagttattgcactttttatggaaaaacccttttctaatcaagatgaaattgaggaagatgttggaatagaggatataattattttacaaaaagaaaatattaaaataagtcaagaaactttagaaacctttaatcaatctttaaaagctacaaaagaaattaatgataatataaaattattaagagcagacaatgaacaaggttttgtaaatataaaaaatagctttgagggttttgccaaaactatggcagaaaataattctaaagcatttattcaagctttggaagaagttataaaggattttaataataaaataacagaacaatttggtgataatttcaagcaattaaatttagcagtcggtgctttattgacttggcaagaaaattacaaaaattatatagaaaaaagtgaatctattatagaaaatttactttcatcctttaaaaaaacagtggaggattattcggttgtagtagacaattctgaaagatttgttagctatgcaaaatcttttgaaaatattttaaaagaactatccgagcaaagaattcaaatacaaagcagtatagaaaatttagatatttttttaaaaaatacacaactttctatttcttctttgatgcaagaaatcaataactacaaagaacaaagtttaaatactgtagaaaatatttctaaattaagcgcgaatcttgaagaaagctatacaaaatccagcgaaaaactaataaatgatataagtgaatatgtaggtaaatttaatacagaattatcaacacataatgaaaaaattaacactcaacttattgagggattaaatagtgcttcagcatctattaactcacaaatcaaaacactagatcaagaattagaaaatgtattaaaaaatcttggatctaatctagcttcaatctctaccaaatttgtagatgattacaataccattctttcaaacctttcttccttaaatcaaaaaatgagtaatttaagatga

SEQ ID NO: 11256 - DNA, 708 bp, Campylobacter coli 7--1
atgatattttttaaaaaacataaaaaaacaagcgatgatgatgacttctttatagcactaagcgatataatgactgcattaatgttgctttttttacttattagtattgtatatatgattaaagtagaagatagtgttaaagtacctaaaatttttaaagaaacaacccaaggtttaagtgagcgattaaataaggaatttgataaagatttaaaaggctggggtgcagtgcttgacaaagatttaactatacgcttttatcaacctgatattttgtttaaaacaggttcttgggttttaagtccaaaatttaaagaaatacttaatgaattttttccaagatatttaaaaattatgatggatgaacaatttgttaataatatagaagaaattagaatcgaaggacatacaagttcattttggggaaatattaaaggtgatgttgcttatttaaacaatatggaactctctcaagctagaacaagagaagtaataaaatacttactaagcttggaattagatgaaaaagagaaagaatggctaaaaaaacacttcagagcaataggtttttcttcagcaaaaccgttaaatgacaaaagtcaaaccttacaaaaaggagaaaaagaaaatttcataaactctcaaagagtagaatttagagtaagaaccaatatagagaacaagatagcagaggttgttagtaagtga

SEQ ID NO: 11257 - DNA, 819 bp, Campylobacter coli 7--1
gtgaacatagaaagtatattaaaacctataatagacttaagaataaaaattggtgcaacattagaacacatagatctttcatatattaaaaattctatcagcgcagaagaaattaaactactagaaacacaaggtatcgatgttgaaataaatgatattaaagttgttagcgatggtacttttgcttataaaaatcgtagagtgttaatatacataagagatgtttcccctttatataaagaaaatgatatcaacagtactttgccaagataccacttgtgtcattgcaatgcttatcaaactatgctatccaacaatagaaaacatagatatgtagtaagcagtagggatgatggtgttttttggcttaatttttttggctttcaaggagatactatggtgaaaaccaaaagccaagaaagaaagttaaatgtttgtatgtattgtttaagaaaattaaattggtgtaacattaatcagtattcagacaaagatcgttcgataataagaaacaattttgatttaaaagatttttttaaaaaatatccaaaaaatattatcgatcctaaaaatcattttaatgataaaatagcacctttaaatatttattctaacgactggagggaaatttcatacaatacaagaaaaaaggctcaatggaaatgtcaaaaatgccataaagatttttcacaaaataaaacacaattagatgttcatcatattaatgggcaaaaaaatgataataattcaaataatttaatggtattatgtaaagagtgtcactctaaagaacctatgcatgaacactactataaatag

SEQ ID NO: 11258 - DNA, 1299 bp, Campylobacter coli 67-8
atgtatgaactaccaatacttatctttaaaaatttatcaggacatattctagaaggaacaataattattatcttttttttcttattgtttttatttcttttgtataaaagaaaaagtcttcacaaatcctctacaagtctacttatcaccataggcatatgtttcactttttatggcatttccaaaggacttgctaactttgatgctaataatattgaagaaaatttaccgcaacttatagatggtatcaaaacagcttttttagtttccgtggaagctgttttctttgctattttacttaaggttattgcactttttatggaaaaacccttttctaatcaagatgaaattgaggaagatgttggaatagaggatataattattttacaaaaagaaaatattaaaataagtcaagaaactttagaaacctttaatcaatctttaaaagctacaaaagaaattaatgataatataaaattattaagagcagacaatgaacaaggttttgtaaatataaaaaatagctttgagggttttgccaaaactatgacagaaaataattctaaagcatttattcaagctttggaagaagttataaaggattttaataataaaataacagaacaatttggtgataatttcaagcaattaaatttagcagtcggtgctttattgacttggcaagaaaattacaaaaattatatagaaaaaagtgaatctattatagaaaatttactttcatcctttaaaaaaacagtggaggattattcggttgtagtagacaattctgaaagatttgttagctatgcaaaatcttttgaaaatattttaaaagaactatccgagcaaagaattcaaatacaaagcagtatagaaaatttagatatttttttaaaaaatacacaactttctatttcttctttgatgcaagaaatcaataactacaaagaacaaagtttaaatactgtagaaaatatttctaaattaagcgcgaatcttgaagaaagctatacaaaatccagcgaaaaactaataaatgatataagtgaatatgtaggtaaatttaatacagaattatcaacacataatgaaaaaattaacactcaacttattgagggattaaatagtgcttcagcatctattaactcacaaatcaaaacactagatcaagaattagaaaatgtattaaaaaatcttggatctaatctagcttcaatctctaccaaatttgtagatgattacaataccattctttcaaacctttcttccttaaatcaaaaaatgagtaatttaagatga

SEQ ID NO: 11259 - DNA, 708 bp, Campylobacter coli 67-8; identical to SEQ ID NO: 11256

SEQ ID NO: 11260 - DNA, 819 bp, Campylobacter coli 67-8; identical to SEQ ID NO: 11257

SEQ ID NO: 11261 - DNA, 1299 bp, Campylobacter coli LMG 23341; identical to SEQ ID NO: 11255

SEQ ID NO: 11262 - DNA, 708 bp, Campylobacter coli LMG 23341; identical to SEQ ID NO: 11256

SEQ ID NO: 11263 - DNA, 819 bp, Campylobacter coli LMG 23341
gtgaacatagaaagtatattaaaacctataatagacttaagaataaaaattggtgcaacattagaacacatagatctttcatatattaaaaattctatcagcgcagaagaaattaaactactagaaacacaaggtatcgatgttgaaataaatgatattaaagttgttagcgatggtacttttgcttataaaaatcgtagagtgttaatatacataagagatgtttcccctttatataaagaaaatgatatcaacagtactttgccaagataccacttgtgtcattgcaatgcttatcaaactatgctatccaacaatagaaaacatagatatgtagtaagcagtagggatgatggtgttttttggcttaatttttttggctttcaaggagatactatggtgaaaaccaaaagccaagaaagaaagttagatgtttgtatgtattgtttaagaaaattaaattggtgtaacattaatcagtattcaggcaaagatcgttcgataataagaaacaattttgatttaaaagatttttttaaaaaatatccaaaaaatattatcgatcctaaaaatcattttaatgataaaatagcacctttaaatatttattctaacgactggagggaaatttcatacaatacaagaaaaaaggctcaatggaaatgtcaaaaatgccataaagatttttcacaaaataaaacacaattagatgttcatcatattaatgggcaaaaaaatgataataattcaaataatttaatggtattatgtaaagagtgtcactctaaagaacctatgcatgaacactactataaatag

SEQ ID NO: 11264 - DNA, 1299 bp, Campylobacter coli LMG 23342; identical to SEQ ID NO: 11255

SEQ ID NO: 11265 - DNA, 708 bp, Campylobacter coli LMG 23342; identical to SEQ ID NO: 11256

SEQ ID NO: 11266 - DNA, 819 bp, Campylobacter coli LMG 23342; identical to SEQ ID NO: 11263

SEQ ID NO: 11267 - DNA, 1299 bp, Campylobacter coli; identical to SEQ ID NO: 11255

SEQ ID NO: 11268 - DNA, 708 bp, Campylobacter coli
atgatattttttaaaaaacataaaaaaacaagcgatgatgatgacttctttatagcactaagcgatataatgactgcattaatgttgctttttttacttattagtattgtatatatgattaaagtagaagatagtgttaaagtacctaaaatttttaaagaaacaacccaaggtttaagtgagcgattaaataaggaatttgataaagatttaaaaggctggggtgcagtgcttgacaaagatttaactatacgcttttatcaacctgatattttgtttaaaacaggttcttgggttttaagtccaaaatttaaagaaatacttaatgaattttttccaagatatttaaaaattatgatggatgaacaatttgttaataatatagaagaaattagaatcgaaggacatacaagttcattttggggaaatattaaaggtgatgttgcttatttaaacaatatggaactctctcaagctagaacaagagaagtaataaaatacttactaagcttggaattagatgaaaaaaagaaagaatggctaaaaaaacacttcagagcaataggtttttcttcagcaaaaccgttaaatgacaaaagtcaaaccttacaaaaaggagaaaaagaaaatttcataaactctcaaagagtagaatttagagtaagaaccaatatagagaacaagatagcagaggttgttagtaagtga

SEQ ID NO: 11269 - DNA, 819 bp, Campylobacter coli; identical to SEQ ID NO: 11263

SEQ ID NO: 11270 - DNA, 1299 bp, Campylobacter coli CVM 41904; identical to SEQ ID NO: 11258

SEQ ID NO: 11271 - DNA, 708 bp, Campylobacter coli CVM 41904; identical to SEQ ID NO: 11256

SEQ ID NO: 11272 - DNA, 819 bp, Campylobacter coli CVM 41904
gtgaacatagaaagtatattaaaacctataatagacttaagaataaaaattggtgcaacattagaacacatagatctttcatatattaaaaattctatcagcgcagaagaaattaaactactagaaacacaaggtatcgatgttgaaataaatgatattaaagttgttagcgatggtacttttgcttataaaaatcgtagagtgttaatatacataagagatgtttcccctttatataaagaaaatgatatcaacagtactttgccaagataccacttgtgtcattgcaatgcttatcaaactatgctatccaacaatagaaaacatagatatgtagtaagcagtagggatgatggtgttttttggcttaatttttttggctttcaaggagatactatggtgaaaaccaaaagccaagaaagaaagttagatgtttgtatgcattgtttaagaaaattaaattggtgtaacattaatcagtattcaggcaaagatcgttcgataataagaaacaattttgatttaaaagatttttttaaaaaatatccaaaaaatattatcgatcctaaaaatcattttaatgataaaatagcacctttaaatatttattctaacgactggagggaaatttcatacaatacaagaaaaaaggctcaatggaaatgtcaaaaatgccataaagatttttcacaaaataaaacacaattagatgttcatcatattaatgggcaaaaaaatgataataattcaaataatttaatggtattatgtaaagagtgtcactctaaagaacctatgcatgaacactactataaatag

SEQ ID NO: 11273 - DNA, 1299 bp, Campylobacter coli CVM 41963; identical to SEQ ID NO: 11258

SEQ ID NO: 11274 - DNA, 708 bp, Campylobacter coli CVM 41963; identical to SEQ ID NO: 11256

SEQ ID NO: 11275 - DNA, 819 bp, Campylobacter coli CVM 41963; identical to SEQ ID NO: 11272

SEQ ID NO: 11276 - DNA, 1299 bp, Campylobacter coli; identical to SEQ ID NO: 11255

SEQ ID NO: 11277 - DNA, 708 bp, Campylobacter coli; identical to SEQ ID NO: 11256

SEQ ID NO: 11278 - DNA, 819 bp, Campylobacter coli; identical to SEQ ID NO: 11263

SEQ ID NO: 11279 - DNA, 1299 bp, Campylobacter coli; identical to SEQ ID NO: 11258

SEQ ID NO: 11280 - DNA, 705 bp, Campylobacter coli
atgatattttttaaaaaacataaaaaaacaagcgatgatgacttctttatagcactaagcgatataatgactgcattaatgttgctttttttacttattagtattgtatatatgattaaagtagaagatagtgttaaagtacctaaaatttttaaagaaacaacccaaggtttaagtgagcgattaaataaggaatttgataaagatttaaaaggctggggtgcagtgcttgacaaagatttaactatacgcttttatcaacctgatattttgtttaaaacaggttcttgggttttaagtccaaaatttaaagaaatacttaatgaattttttccaagatatttaaaaattatgatggatgaacaatttgttaataatatagaagaaattagaatcgaaggacatacaagttcattttggggaaatattaaaggtgatgttgcttatttaaacaatatggaactctctcaagctagaacaagagaagtaataaaatacttactaagcttggaattagatgaaaaagagaaagaatggctaaaaaaacacttcagagcaataggtttttcttcagcaaaaccgttaaatgacaaaagtcaaaccttacaaaaaggagaaaaagaaaatttcataaactctcaaagagtagaatttagagtaagaaccaatatagagaacaagatagcagaggttgttagtaagtga

SEQ ID NO: 11281 - DNA, 819 bp, Campylobacter coli; identical to SEQ ID NO: 11257

SEQ ID NO: 11282 - DNA, 1443 bp, Campylobacter hyointestinalis subsp. hyointestinalis
atgaatgaaacttctaccgacttttatcaatattttatatctaatttacacggtcatattgcagtaggaatattggctatagtattttttatgatatatttcatatatgcttcttggaagccaaaaaaagtacatccacaatcttctagtctgcttattacaatcggcattgcttttacattttttggaattgcacatgggcttatgcgttttgatgcgaatgatattgaaagaagtttgccggatttgattaatggtattaaaacggcatttttagtttctttagctggtgttactagtgctattatattaaaaattattgagcttgtatatggtattagctcaaaacaatccactagcagtattgaatttgatccggttagtttgctaaaaaatcaagaaacaaatttgaatatccaaaagcaaatatctatatctttagataagataaatgcctcaataactggagatgaaagttcatccttgattggtcaaattaaaaatttacgtactgacacaggagacaattttagtagacttataactaaatttgaaacatttgcaaaagagatgagtgaaaataattctaaagcactaatagaagcccttaatggagttatacgtgattttaatgaaaagctaactgaacaatttggagaaaattttaaagagctaaatatggctgtagaaaaacttgttatatggcaagataattataagttaattttagaacaaacccaaaatgcgtttgaaaatactcaatcttcacttgaggctacaactattgaatttgacaaagttaataatactgtatcaaaacaaatagatgattatcaaaaagttatattggcttctaaacattttactgaagaagctgcaaaagtatttgaattagtagaaaatatatcaattcaaagagatatgctatataaaaatatattaagtttaggtgattttatacaggcaaatagtacagcattgccacagattaatgatgctataagtacatttcaaaaaaatgcaatggataatatatcaaatattacaatacaaacaaaaaatatttctgatacttttgtaaaaaattcaaatgatatgttaagcgatacacgagatattataaaatcatttagtgacaatgtatcaaatgatattatttctaataataaaataatgaatgatagactttctgaatacatgagtagctttaatacagaactatcaaaatataataataggcttaatgagcaactcatagcttcattaaatcaagcgagtcaaagtataaaatctcaagttgatattttggacaaagagctcgaaaatgcattgagaaatattagcaataatcttgcctcaatatctgaaaaaattgcctctgactataattccattccaggaaggcttagaagcatgatagaaagcttaaacaggcatcaataa

SEQ ID NO: 11283 - DNA, 720 bp, Campylobacter hyointestinalis subsp. hyointestinalis
atgaaaaataataatatttttgtaaaacatcatagagatgatagtgattattggattgctttaagtgatattatgacggcattaatgttaatttttttgcttatgtcagtaatatatatgattaaggttgaagatagtgtaaaaataccaaaaatatttaaagaagtatctcaaggattaagccaaaaattaaataaagaatttcaagatgatttaaaatcatggggtgcagtaatagataaagatttaactatacgtttttctcaaccagatgtattatttaaaacaggctccagtgacttaagtgtcaaatttactgatattttaaacgactttttccctagatacttaaaaattataatgtctgatgaatttaaagataacattgaagaaattcgtatagagggtcacacaagctccatttggacaggagaagataagcaaaaagcctattttaaaaatatgaaactttctagcgatcgatctagaagtgtgctagaatatttgctagtaaatgcaaacgatatagaaaaagattttctaagaaagcattttagagccattggatttagttcatcaatgcctttggattctaatggaaatcaagtagcaaaatcagggcttaaagaggattttttgctgtctcaaagggttgaatttagggttagaacaaatattgaaaataaagtttcaaggataatagagcaaaatgaacgttga

SEQ ID NO: 11284 - DNA, 777 bp, Campylobacter hyointestinalis subsp. hyointestinalis
atgaacgttgagctaataatagaaaatttggtaaatcttagaaaaaaaataggtgcaaatttattagatttagagttcaaatttgagcataatgatactagagccaaaatgatagaagcattagaaaatggcggaatagaattagagaatttatctgagcttgaaatagctaatgatgatacatttatttatcatggaaggagggttatattacatataagagatgtctctatgtatcataatgattttaacctaccaaaatatcatttgatcaactgtcaaaagtatcaagagatggtaagtgctaatagaaaagggagatatgttattgcctctagagataatgggttgtttgatattaaaaaaattacaggtaatgatgttcaattatcacaagaaaagttagagttatgtaaatattgcctaaataaaataggaacaaatattcttggcagagataaaaatatgtatattaaacgtttttttgagcgttatcccaaagactacgaatttggtaatgggcatgaagatgataaaacggctaaaactaatgtttatgcagatgattggagtataataagtttaaaaaaaaggactcaagttggatttatatgtcaaaaatgccataagaatttttataataataagggtatgttagatgtacatcataagaatggacaaaagaatgataatcgggatgaaaatttgatagtgttatgcagagaatgtcattcaatggagccaatgcatgaacatatgaaatatttatacagttag

SEQ ID NO: 11285 - DNA, 1284 bp, Burkholderia cepacia JBK9
ctgtcgggaatcgcgtgggcgccgtacgtgttcgcgggtggccctatcggcacagtgctggcggacaaacagacacttgctttcatattgttgaacgcatgcctaacaatattcttcgccttcgtcagattcgaccgattttccgttgttcacggcccggaaatattgacaacagttggaattttcggttgttttctcggtattgccttggcgttactgcagttcgatgcatcaaatgtgtcggagagcgttccgcacctgctggaaggagtgaaaactgccttttgggcttcggtcagtggcgtttttggctcactggttatccgcgggaggcactatttctggaagacccccatcccgcagacgccgggcgcaccgaaagcagccaccctagacgacgtcgtggccgcgacacacgctctacagctcagcctgtcgggaaacgagcaaggcagccttctctcacagctcaagttgatgcgccaggaacaaggtgacgaacttcgtatgctccggacgtcgttcgacacgttcgcgcagcggatggcggaagacgggtcgaaggctcttatcgatgccctaaaggaagtgattcgcgacttcaacgcacaaatcaacgagcaattcggcgagaatttcaaacatctcaacgcagcagttgaaaagctcgtcgtctggcagcagcagtacaaggaagaactcgacaaactgcaagtgctccagaaatcgtcagcagacgacctcagaggcgcatcttcgggcctagcactttttgtcgaccgggcttctagcttcgctcacacagcagcagcgctcgaagacacgctcagaggtctggcgcagcaacatcagctcatcgaccagtcccaacgttcaataaccgacgttctttcccaaatgaaggatgtgacgccgcagttctcgcgtaaggtcgacgaaatgaccgaatcgatgaagcaaggtgttgctagggtgcaagcggaagttggcgacgtcgtcaagaatttcggtatccaggtacagtcctcgtcatcagaaatgaaacagcttctgaccgacacgcttcgcaaatcccagtccgaagtaaatgacgggctcgtgcgctcgatggacgcagtccgccaaagcgttgtcaccctggacaagggattgcaggaggaactcacgaagagcctcgaaacgcttgggcgtcagctcgcgtcgctatcagagaagttcgtcgcagactatacccctctgacggaccgcctgagagaagttgttcgcatagccggcactgcgtga

SEQ ID NO: 11286 - DNA, 693 bp, Burkholderia cepacia JBK9
atggatttcgagcatagcaaccaatctcactggataccaatggcggacctgatgacaggtctgatgatggtgttcatgctgctgactgcagcgttcatgctccgggttgagcagacgacaacgttggtcgtgaaagagtacgaaaccaccaaacgtgacatgcaactggccctgcagaaggaatttgcaaaggacctgaagcaatggaacgctgaaattctcggtgatatgactattcggttcaatgacccaacggtgcttttcgcaactggctcatccgagttgcggccgcgcttcaaacaggtacttggtcaattttttccacgttacgtggcgttgctgacatccggtcaatacaaggacgccgttaaggaaatccgcattgagggccacacaagcgcgttgtggacaggaacgacagacgaaaaaatcgcgtacttcaggaatatggaactatctcaggcacgtacgcgaagcgcgctcgaatatttgctgtcgctgcccgcagtgcagagcaacgagaaatggctcgttcagcacgtgacagcaaacggactttcgtcgtcacgtccactgactcaagactcgcaagccgcagtatcacagatagcgaatcaacgcgtcgagtttcgcatcgttaccaatgcaagcgaaaagatggacctcattgccgagaagctggcaaagaaatga

SEQ ID NO: 11287 - DNA, 849 bp, Burkholderia cepacia JBK9
atgagctttcagttacctaatttcctcaactggagctcgctgaacgcattgcggcaggagatgggtgcacctcttgccgccagctttgttccagaccataaattccgcgacatcgacctgcctgtcctcgaacgcctccaaagcaacggtgtcgacgttaagtttgacgaggtcgaggtgctcagcgacggcacgctcgcgtacaagggatatcgcgtcttgctgtatatcagggacatcacgtcaatcggacatcaggaaagcatgccccgctaccatctcgcatattgccgaactctcgacaagatgcgccggaacgctcgatttgaccgatacgttgtggcgaatggagacagcgggaaattccaggtcaacgtcatcgagaatgacgtaaagacccagcacgtcagactgaacgtatgtcagaactgtctggacgaaatccattggaacggattcgagatgaagatgccgcgtgatggacgtctcaccctcgtttccaagttctcccttcccgattttttcaagaaatacccgcgcgacctggtggcagtcaaaccaatgcactcctccgataccgcgccgctcaatgtttattcgcaggattggaatgaaatatcggagcgcactaagcgacaacgaggatatcgatgcgcctcgtgcaacactgtgctccggcaaacggattcaaaatttctacatgtccaccatcaaaatggccagaagtacgacaaccatgactcaaatctcgaggtgctctgtatagggtgtcatgcggaagaaccaatgcacggccatatgagggccttgcgtgagtatcaggagtacatcgagcgatatcgacgttag

SEQ ID NO: 11288 - DNA, 1644 bp, Pseudomonas fragi
atgattagccaataccttgagggtgccctgagatccgcctcagcggggacgatgactgagttgttcatctgggtaatgttggcactctttgccatggcaatcatccaaggcaaaactggcaagcacggcttttttgtagagcatgcgcccgcggtactggtatcgcttggtattttgggtaccttcataggtatcgttatcggtctgctggacttcaatgcgcacgacatcaaaagcagcattgaggacctcctcgatggtctgaagaccgcatttatcacaagtctggtcggtatgacgctgtcaattgtgctgaaggccttggatgcttggtggtttgagtccgtgcgcgggaaggcagagcagcctgactcagttacacctgagcatatctatggtgtgatgagccggcaggaaaagctgttagaggcgcttaatcactccctagcaggcagtgaggaaggctcggtagcggggcaactcaagttattacggtcagatatgggcgacttccggaatggcttggatcgtggacagcacgaatttcaggacaagctttttaaacagttggttatgtttagcgagatgctggcgcaatctgccacagagacggtgatcaatgcacttcgacaggtgattcaggactttaataagcacttggtggagcagtttggcgacaacttcaaggcacttaatgagtctgtcggcaagatggtcgactggcaggagcagtacaaacagcatgtagaagtgctggaggcacgtatcgaaacggctgttcgtgagcttgaacgtactgctacagctaatgaggctatcagtcgttcgttaacgacctctgaacaatccattggctcaattgataatcactgccagagcattccaaccgctatcggtcagcttgagccagtactgcaggtcaatcagcatcaaattcaggaactgcaacggcacctggatgtgttcattgctatgcgcgataaagctacaagcgcggtgccagaactgcagcagcatatggatactctctctaaggctctctcagatggcatgcagggggtcatatctaccatgcacgagggctcaatggagttcggacgctcagttgatctcaccaatacagctttgaccgaggcctcgcatgtgatcagcagccagacggagcagatcaacgagaatatgaaggatgccgcgcaggagttcggctcctctgtgcgcggcaccctagaaagtatgctgaataattcgaaggcactggagcagcaaatggggctggcgatcgagcaggcgtctggctcattgacggaaacatttaaacaagcgaccggtaagattcaagacagccttacatcgactgttgatgcctcgctgaatacgttgcgttcaaccgtagagggcaacctcagccaaactgagtccctaattcaaggttctgctaaccgcactatgggggctgtggaagctcaggtcagagaggccaccgagcgggcgaatgcatccctgcaggcgcagcttaatgcgatggatcaagccatcgggcgtgagttagagaaagtcttcaaagaaatgggatcggccctggccactatctctcgcaggattgctgatgatcatgcagaacttgttagcaggatgcgttcgtaa

SEQ ID NO: 11289 - DNA, 723 bp, Pseudomonas fragi
ctggataatttgttccgcggtcagcactcaaaaaaggaagatgccgagcactggattggcatttccgatttaatgtctggactaatgatgatgttcttattcatcgcagttgcctacatgtactacgtgcaggtcgagcgagaaaacatcaaggagatcgcggtcgcctataaggacacgcaggtagcaatttacaacgacctgaacaatgagtttcagagtgacctcccacgttggaacgcgtcgatagatcgcaatactctgcaagtgaccttcaacaaccccgaggttctgtttcgctcaggctcaccggagctaagtacacagttccaagcaatgctctccgacttttttccacgttatgtgactgtgctttcccgctacaggggggcgattgatgagatacgtatcgaagggcataccagtagtgattggggagcgctgcatggcgatgaagcctattttccaaacatggcactgtcacaggatcggacgcgctcagtgctgcagtacgtactatcgaagttgacatccggagcagatagggactgggttcgttcgagctttgcggcagtgggctactcctcgtcaaggcgccttgtggatgcaagtagcaccgctgaagacgccgcacgctcccgacgcgttaactttcgggtgatcactaattcagagctgcagatccgcacaatcattgagagactcgatggaaatcaacgttga

SEQ ID NO: 11290 - DNA, 516 bp, Pseudomonas fragi
atggaaatcaacgttgatttttccgggctgtgggctcaggtaaagcggctaaatgcggagacggttgatttcgattggacggccgccgcacagcttgaccccatcgatatagcgctgttggaggggcgcgaggttcggctcgacgatttgaatgtcattaacgggctgctgagtgtcgatgggcgtcaggtgttgctgtacatccctgaccagttctccccagttgacgtagtgcagctttctccagataaaggtaagcgtttccatgtggcggactgcaaaactctgaacgacatgcgcagcaaaggtcgatttgaacgctacgtggtgactaacaatctgagtgggatatttcccattagtggcaaaaacagccgaggtgtccgtgaggagctggattctcgtctgcttgtatgtaagaactgcctagaaaagctcaattaccagaattactgccatgagagcacacgctcgctgcaaaactctgaacgacatgcgcagcaaaggtcgatttga

SEQ ID NO: 11291 - DNA, 1497 bp, Legionella pneumophila
atgcctaaattttttgtattccttgctttatcgtttttttcttcgcttgctttggcttctgaaaaccatatggcagcgcctaatgttttttcactactgcaacagttctcggtgattgaattaggttggatatttctgactgtatgtatttttatattcttttttattaaattcgataaatttgcagtgacctatggtccagaaatattaacaacaatgggaattgtaggatgctttgcctgtattgcctacgctttattgcattttaacagcgaaaatataacagctagtatacctttcttattaaatgggattaaaactgctttttgctcgtcgtttattggcgtatctggtgctctacttatcagagggaaacatacatttagcaaagttgatttctataaaaaaaatgaatcggctcctgcttcaatggatgatttagtcaaggaaattgcctatttacgaagaaccttatcaggtgatgaagaaggttcactaatttcacagattaaaatgctgagacaagactccaatgaccaacaaaaaaaattgcaagaatcattcgacaattttgcaaaacatatggtcgaaaataaccaaaaagcgtttattgaagcattaaaggaggcgattagagattttaatcaaaatctaacagaacagtttggtgaaaactttaaacatctaaatcaatctgttgaaaaattggttgtttggcaaaagcaatatatgcaggagctagaaactataaaacggtatcaatctcaattttctaatgatatgagacaatcctccgatgcgtttgcaactgtgttagaacatgcaaaacaattcacagatatagctcaaaacttgaagatactccttaattcgatggataaacaaaaagatgtactttttgctcaagagaaggcattaagtgagcttttagccacaatgaaagaacatatccctgaattttcatcaagcactcaaaaaatgattactgaaatctctgaaggagtaaaattagttcaattagaaacaacaaaaataatttctaattacagtacagaaattaaattaattaatagtgagatgaaaagtgcattagcggatgttttgaaagaagcccaaaactctttctcaactggcatcaaagataatatggaaatgattcaagaagcgattattagtgtcgaatcacaaacaacagacgttataaaaaatcattctgctcaattacaatcaactcaggctgaaatgaaaaacgtgcttgtagatggtattaccaaatctcagcaagagataacagctggattacaagaaaacgcaaaaataattagagaaggtgtgcttgctttagataaggagcttgaaaagggccttactgattcattaacaagtttaggtaaacaacttgcatcattgtctgaaaaatttgtttctgattatttgcctcttactgaacgattacgagatattgttcgtttagctaaaaacagtgaggcagcataa

SEQ ID NO: 11292 - DNA, 693 bp, Legionella pneumophila
atggaaggtcataatcaatcttactggattccattaagtgatctaatgacaggcctcatgatggtttttatgctaatagcagtaacttttatgttgagagttgaacaaaccactacattagtcgttaaagagtttgaagaaacaaagagtgatttagctcaagctttgcaaaaggagtttgcaaaagatttaaagcagtggaatgctgaactacttggtgatatgactataagatttgataaccccgatgttctttttgatactggttcttccatcgttaagcctgcctttaaaaggattcttaatgatttcatacctcgatatatatcactggtctcatcagaaaaatacagaaattcaataaaagaaatacgcattgaaggccatacatcaaagaaatgggcattagatacggatgaaaaaaccgcttatattaaaaatatgcgcttgtcacaagagagagctcaatctatgttggagtatattttgagtttaccttctctgctggaacacgaaaaatggatgcgtaagtatttaacatcaagtggtttttcttcatcaaaaccagttttcaatcaattacatattgctgatgacaatcgttctcagcgtgtagagtttgtaatagttactaatgctgattcaaaattagatgaaatctctgaacagattagaagtatgaaaaatggttaa

SEQ ID NO: 11293 - DNA, 867 bp, Legionella pneumophila
atggttaagcttgtaaatttttttgaattctctgctttgaataatcttagacatatgatggaagcagagcttattaaagagtttaaatttgatacgggtatctcacttcttgatgaagattttataaaaaggcttggtgatgatggagttgaaatcgatagtctagacgaaatcgattttagaagtgatgcaactttaggtttcagaggacaaagagttctaatatatattcgagatgtatctgcttatagacatgaaataagcttacctaaatttcatgtatctacgtgtaagaccttggttgatatgtggcagagaaagcgatcagaacgttatgtattatatcaacgtgaaaatggaatttttcaaattaatctaatgagagatggcaaggttgaggtacgtcaggaaaaattaaatgtttgtcgtaattgtttggataatttaaattggaataattactctgaaaacaaactaattagaaataaaattgttgatgaattttctattagtcagttctttgaaaaatttcctaaatcattattatcggtaactccctcacatactgcagatacagcacctttaaatgattactctacaaattggactcatattagtaaagaagcaaaaagaaaagctggctacaaatgtcaaaacttgaattgccaaattgatttagctggtgcttatagtcagtatcttcatgtccaccatcttgacgggcaaaaaaataataatagaaaacaaaatttaaaagtcctatgtgttaagtgtcatgctgacgagccaaatcatggtcatatgaaacatggaagagattataagcagtttttgcgaatttatgagcaagttaaacagaataactaa

SEQ ID NO: 11294 - DNA, 1497 bp, Legionella pneumophila
atgtctaaattttttgtattccttgctttatcgtttttttcttcgcttgctttggcttctgaaaaccatatggcagcgcctaatgttttttcactactgcaacagttctcggtgattgaattaggttggatatttctgactgtatgtatttttatattcttttttattaaattcgataaatttgcagtgacctatggtccagaaatattaacaacaatgggaattgtaggatgctttgcctgtattgcctacgctttattgcattttaacagcgaaaatataacagctagtatacctttcttattaaatgggattaaaactgctttttgctcgtcgtttattggcgtatctggtgctctacttatcagagggaaacatacatttagcaaagttgatttctataaaaaaaatgaatcggctcctgcttcaatggatgatttagtcaaggaaattgcctatttacgaagaaccttatcaggtgatgaagaaggttcactaatttcacagattaaaatgctgagacaagactccaatgaccaacaaaaaaaattgcaagaatcattcgacaattttgcaaaacatatggtcgaaaataaccaaaaagcgtttattgaagcattaaaggaggcgattagagattttaatcaaaatctaacagaacagtttggtgaaaactttaaacatctaaatcaatctgttgaaaaattggttgtttggcaaaagcaatatatgcaggagctagaaactataaaacagtatcaatctcaattttctaatgatatgagacaatcctccgatgcgtttgcaactgtgttagaacatgcaaaacaattcacagatatagctcaaaacttgaagatactccttaattcgatggataaacaaaaagatgtgctttttgctcaagagaaggcattaagtgagcttttagccacaatgaaagaacatatccctgaattttcatcaagcactcaaaaaatgattactgaaatctctgaaggagtaaaattagttcaattagaaacaacaaaaataatttctaattacagtacagaaattaaattaattaatagtgagatgaaaagtgcattagcggatgttttgaaagaagcccaaaactctttctcaactggcatcaaagataatatggaaatgattcaagaagcgattattagtgtcgaatcacaaacaacagacgttataaaaaatcattctgctcaattacaatcaactcaggctgaaatgaaaaacgtgcttgtagatggtattaccaaatctcagcaagagataacagctggattacaagaaaacgcaaaaataattagagaaggtgtgcttgctttagataaggagcttgaaaagggccttactgattcattaacaagtttaggtaaacaacttgcatcattgtctgaaaaatttgtttctgattatttgcctcttactgaacgattacgagatattgttcgtttagctaaaaacagtgaggcagcataa

SEQ ID NO: 11295 - DNA, 693 bp, Legionella pneumophila
atggaaggtcataatcaatcttactggattccattaagtgatctaatgacaggcctcatgatggtttttatgctaatagcagtaacttttatgttgagagttgaacaaaccactacattagtcgttaaagagtttgaagaaacaaagagtgatttagctcaagctttgcaaaaggagtttgcaaaagatttaaagcagtggaatgctgaactacttggtgatatgactataagatttgataaccccgatgttctttttgatactggttcttccatcgttaagcctgcctttaaaaggattcttaatgatttcatacctcggtatatatcactggtctcatcagaaaaatacagaaattcaataaaagaaatacgcattgaaggccatacatcaaagaaatgggcattagatacggatgaaaaaaccgcttatattaaaaatatgcgcttgtcacaagagagagctcaatctatgttggagtatattttgagtttaccttctctgctggaacacgaaaaatggatgcgtaagtatttaacatcaagtggtttttcttcatcaaaaccagttttcaatcaattacatattgctgatgacaatcgttctcagcgtgtagagtttgtaatagttactaatgctgattcaaaattagatgaaatctctgaacagattagaagtatgaaaaatggttaa

SEQ ID NO: 11296 - DNA, 867 bp, Legionella pneumophila
atggttaagcttgtaaatttttttgaattctctgctttgaataatcttagacatatgatggaagcagagcttattaaagagtttaaatttgatacgggtatctcacttcttgatgaagattttataaaaaggcttggtgatgatggagttgaaatcgatagtctagacgaaatcgattttagaagtgatgcaactttaggtttcagaggacaaagagttctaatatatattcgagatgtatctgcttatagacatgaaataagcttacctaaatttcatgtatctacgtgtaagaccttggttgatatgtggcagagaaagcgatcagaacgttatgtattatatcaacgtgaaaatggaatttttcaaattaatctaatgagagatggcaaggttgaggtacgtcaggaaaaattaaatgtttgtcgtaattgtttggataatttaaattggaataattactctgaaaacaaactaattagaaataaaattgttgatgaattttctattagtcagttctttgaaaaatttcctaaatcattattatcggtaactccctcacatactgcagatacagcacctttaaatgattactctacaaattggactcatattagtaaagaagcaaaaagaaaagctggctacaaatgtcaaaatttgaattgccaaattgatttagctggtgcttatagtcagtatcttcatgtccaccatcttgacgggcaaaaaaataataatagaaaacaaaatttaaaagtcctatgtgttaagtgtcatgctgacgagccaaatcatggtcatatgaaacatggaagagattataagcagtttttgcgaatttatgagcaagttaaacagaataactaa

SEQ ID NO: 11297 - DNA, 1497 bp, Legionella pneumophila; identical to SEQ ID NO: 11291

SEQ ID NO: 11298 - DNA, 693 bp, Legionella pneumophila; identical to SEQ ID NO: 11292

SEQ ID NO: 11299 - DNA, 867 bp, Legionella pneumophila; identical to SEQ ID NO: 11293

SEQ ID NO: 11300 - DNA, 1497 bp, Legionella pneumophila; identical to SEQ ID NO: 11291

SEQ ID NO: 11301 - DNA, 693 bp, Legionella pneumophila; identical to SEQ ID NO: 11292

SEQ ID NO: 11302 - DNA, 867 bp, Legionella pneumophila; identical to SEQ ID NO: 11293

SEQ ID NO: 11303 - DNA, 1497 bp, Legionella pneumophila; identical to SEQ ID NO: 11291

SEQ ID NO: 11304 - DNA, 693 bp, Legionella pneumophila; identical to SEQ ID NO: 11292

SEQ ID NO: 11305 - DNA, 867 bp, Legionella pneumophila; identical to SEQ ID NO: 11293

SEQ ID NO: 11306 - DNA, 1497 bp, Legionella pneumophila; identical to SEQ ID NO: 11294

SEQ ID NO: 11307 - DNA, 693 bp, Legionella pneumophila; identical to SEQ ID NO: 11295

SEQ ID NO: 11308 - DNA, 867 bp, Legionella pneumophila; identical to SEQ ID NO: 11296

SEQ ID NO: 11309 - DNA, 1497 bp, Legionella pneumophila; identical to SEQ ID NO: 11291

SEQ ID NO: 11310 - DNA, 693 bp, Legionella pneumophila; identical to SEQ ID NO: 11292

SEQ ID NO: 11311 - DNA, 867 bp, Legionella pneumophila; identical to SEQ ID NO: 11293

SEQ ID NO: 11312 - DNA, 1497 bp, Legionella pneumophila; identical to SEQ ID NO: 11291

SEQ ID NO: 11313 - DNA, 693 bp, Legionella pneumophila; identical to SEQ ID NO: 11292

SEQ ID NO: 11314 - DNA, 867 bp, Legionella pneumophila; identical to SEQ ID NO: 11293

SEQ ID NO: 11315 - DNA, 1368 bp, Legionella longbeachae D-4968
atgtctctgacggtatgcttttttatattctttttcattaaattcgataaatttgcagtgacctatggccctgaaatattaaccacaatgggaattgtaggatgctttgcttgtattgcctgggctttattgcattttaacagcgaaaatataacagctagtatacctttcttattaaatggtattaaaactgctttttgttcgtcgtttattggcgtatctggtgctctacttattagagggaaacataaatttagcaaggttgattcccataaaaaaaatgaatcagctcctgcttctatggatgatttagtcaaggaaattactaatttacgaagaaccttatctggcgatgaagaaggttcattaatttcacagattaaaatgtttaggcaagactccaatgaccaacaaaaaaaattgcaagaatcattcgacaattttgcaaaacatatggtcgaaaataaccaaaaagcatttattgaagcattaaaagaggcgattagagattttaatcaaaacctaacagaacagtttggtgaaaactttaaacatctaaatcaatctgttgaaaaattaattatttggcaagagcaatacaagcacgagctagaaactataaaacagtatcaatctcaattttccaatgatatgaaacaatcctctgatgcttttgctactgtggtagaacatgcaaaacaattcacagatatagctcaaaacttgaagatactccttaattcgatggataaacaaaaagatgtactttttgctcaagagaaggcattaagtgagcttttagccacaatgaaagatcatatccctgaattttcatcaagcacacaaaaaatgattactgaaatctctgaaggagtaaaattagttcaattagaaacaacaaaaataatttctaattacagtacagaaattaaattaattaataatgagatgaaaagtgcattagcggatattttgaaagaagcccaaaactctttctcaactggcatcaaagataatatggaaatgattcaagaagcgattattagtgtcgaatcacaaacagcagacgttataaaaaatcattctgctcaattacaatcaactcaggctgaaatgaaaaacgtacttgtagatggtattaccaaatctcagcaagagataacagcaggattacaagaaaacgcaaaaataattagagaaggtgtgcttgccttagataaggagcttgaaaagggccttactgattcattaacaagtttaggtaaacaacttgcatcattgtctgaaaaatttgtttctgattatctgcctcttactgaacgattacgggatattgttcgtttagctaaaaacagtgaggcggcataa

SEQ ID NO: 11316 - DNA, 693 bp, Legionella longbeachae D-4968
atggaaggtcataatcaatcttactggattccattaagtgatctaatgacaggcctcatgatggtttttatgctaatagcagtaacttttatgttgagagttgaacaaaccactacattagtcgttaaagagtttgaagaaacaaagagtgatttagctcaagctttgcaaaaggagtttgcaaaagatttaagccagtggaatgctgaactacttggtgatatgactataagatttgataaccccgatgttctttttgatacgggatcttccgtcgttaagcctgcctttaaaaggattcttaatgatttcatacctcggtatatatcactggtctcatcagaaaaatacagaaattcaataaaagaaatacgcattgaaggccatacatcaaagaaatgggcattagatacggatgaaaaaaccgcttatattaaaaatatgcgcttgtcacaagagagagctcaatctatgttggagtatattttgagtttgccttctctgctggaacacgaaaaatggatgcgtaagtatttaacatcaagtggtttttcttcatcaaaaccagtattcaatcaattacatattgctgatgacaatcgttcgcagcgtgtagagtttgtaattgttaccaatgctgattcaaaattagatgaaatttctgaacaaattagaagtatgaaaaatggttaa

SEQ ID NO: 11317 - DNA, 813 bp, Legionella longbeachae D-4968
atgatggaagcagaacttattaaagagtttaaatttgatacgggtatctcacttcttgatgaagattttataaaaaggcttggtgatgatggagttgaaatcgatagtctggatgaaatcgattttagaagtgatgcaactctaggtttcagaggacaaagggttctaatatatattcgagatgtatctgcttataggcatgaaataagcttacctaaatttcatgtatctacatgtaagaccttggttgatatgtggcagagaaagcgatcagaacgttatgtattatatcaacgtgaaaatggaatttttcaaattaatctaatgagagatggtaatgttgatgtacgtcaggaaaaattaaacgtttgtcgtaattgtttggacaatttaaattggaataattactctgaaaacaaactaattagaaataaaattgttgatgaattttctattagtcagttctttgaaaaatttcctaaatcattattatcggtaactccttcgcatacagcagatactgcaccgttaaatgattattccacaaattggactcatattagtaaagaagcaaaaagaaaagctggctacaaatgccaaaattcaaagtgccacattgatttagctggtgcttatagtcagtatcttcatgtccaccatcttgacgggcaaaaaaataataatagaaaacataatttaaaagtcctatgtgttaagtgtcatgctgacgagccaaatcatggtcatatgaaacatggaagagattataagcagtttttgcgaatctatgagcaagttaaacagaataactag

SEQ ID NO: 11318 - DNA, 1398 bp, Moraxella catarrhalis BBH18
atgtctacttttgcacttttatttgatgccatcacggcacctattaatatggcatttttgttggtcatgttagggttatttatcatagggtgggttgctgtcggtcgtgatgatggtcataaacctaggcattttatcgacagtattcccacattgctgacatccatcggcattttgggaactttttttggtattgtattagctttacttgcctttgatgatagtgatatcaaatctcatatcaatgacatcatctcgggcatgaaaaccgcctttattactagcgtgacggggttattattatcaattatcctaaaaatttgggcatctattcatcaagataaaagcgaaaatcttgatttagaccaagtggatgccagcaatatacttaaatttattgaacaccatcttacagagcaaaccaacacacaaaaaaagactgctgttattcatgaagagttgttacaagcattaaccacgcatcatgaatatgtcaaacaaaataatcagcaatttgctgctaatttgtgggataaacttgagaaaactgcccaaattctgaccaaatctgccaccgaagaggtgattttggcactcaatcagcttatcaaagactttaatcatcagctaaccgaacagtttggtgaaaactttaagcagcttaatcatgccgtctttgagttgattcaatggcaagaaaattataaacaacagcttgaacaaatgcaggttcagtatcaaaatcataccaatgctgttgcagcaacacaacaagccattgacaatattcatgataatttatcacatattgcacatcatgctcagagcattccagattctatggaaaggcttgccgttgctattgagttgagccatacgcaaattgatactttgtatgatcacttggctgcttttgctgatatgaaagataaggcagttgctgctctaccgagcttaagtgagcaaatcgataccatgcttcagggcatggatgatgccagccaaaagctgaccgaacagtttcatcagattcatcaatctatcaaagcacagcctagcatcatgcaaagcaccactcaagagctaaaaaacacactggagcggctggttggtcaacttgagattgatatcaaaaatatcacagaaaagcacgccggcagtatcaaagagcagatgaatcagttatcaaatatcgctgcccaaaccttagaggacatcagtgacagcatagagggtcaaattaataattttaataccgctgaagccaaaaaaattgagtcagatttgcagcaaatgggtagcgccttaattagtatgacaagccaatttaccaaagattataaagagttggtcaatcatatgaataatatcattcgtcacggaagaccaatgcgatga

SEQ ID NO: 11319 - DNA, 687 bp, Moraxella catarrhalis BBH18
gtgctatcttcaagacagtcatcagaagagagtactcagtggttgcccatatcagatttgatgagtggattaatggtgttgtttttgttcattgccatcagcttaattttgcaagtgcggcaaatcgctgaagaatatcaggatacccaagagcaaatttataaagcattgttacacgaatttgcagacgatttgcccaaatggggagcaaagatagataaagatacattaaccatctcatttttgtctcctgatattttatttaaaacaggtcaatctgatttgcaggataattataaagaaattttatctgattttttcccacgctatatcaaagtcatcgaccgctataaagatagcattaacgaaatccgtatcgagggtcataccagcagcgaatgggcggcgggagtggatgctgatattgcttactttgagaacatgcggttatcacaagaccgcacccgtaccgttttacaatttgcttatgccatacctgaggtcagtcagtatcgtccatggataaagacacatttggcagcagtgggcttatcttctgccaaaaccatcaaaaatgagtctgggctagagaatgctggtgcatcaaaaagagtgacttttcgtattttgaccaatgccgatgaacaaatacaaaaaataagcaagagttcttatgaagaaaactaa

SEQ ID NO: 11320 - DNA, 717 bp, Moraxella catarrhalis BBH18
gtgcagattgatagtttatctgagctggcgactgatgaaacaggtgtgtttgcctatcatggcagaaaagtcgtgttatttattcctgaccatggctatgggaatagttttgatcaagttaaaaatggtgatttgaatgtaggtaaaaaagtacattttacccaatgtaagacacttgatgatatggctaacaatggtcggttgaatcgttatcacattaataaaaatcaaaatggcttatttgaaattgttaataatgttggcgatacgcatacaaccaagctgatgccatgtcataattgtttaaaaattcttaattataatgattatttatcaatcaaaacaccagcaatttttaggcaaaattttgactttttggcattttttaatggtgattatcagaccaaatttaccaaattgcccgaatatgtgggacaaaataagggtggttatacagaagattggtcgacaataagtcgtaattttaaaaaaagcaaagactatctttgtcaagtctgtggcgttaacttatctgggtatcagcatttggccgatgtgcatcatattgatggcgtaaaacagaataatagccaaaataatttgatgtgcctgtgtaaattatgccatgttaatcagccaaatcatgcccatatgagtatcggtgatgagatcaaaaaccagatacaacaactaagatggcagcagcgactgctgtga

SEQ ID NO: 11321 - DNA, 1398 bp, Moraxella catarrhalis 7169
atgtctacttttgcacttttatttgatgccatcacggcacctattaatatggcatttttgttggtcatgttagggttatttatcatagggtgggttgctgtcggtcgtgatgatggtcataaacctaggcattttatcgacagtattcccacattgctgacatccatcggcattttgggaactttttttggtattgtattagctttacttgcctttgatgatagtgatatcaaatctcatatcaatgacatcatctcgggcatgaaaaccgcctttattactagcgtgacagggttattattatcaattatcctaaaaatttgggcatctattcatcaagataaaagcgaaaatcttgatttagaccaagtggatgccagcaatatacttaaatttattgaacaccatcttacagagcaaaccaacacacaaaaaaagaccgctgttattcatgaagagttgttacaagcattaaccacgcatcatgaatatgtcaaacaaaataatcagcaatttgctgctaatttgtgggataaacttgagaaaactgcccaaattctgaccaaatctgccaccgaagaggtgattttggcactcaatcagcttatcaaagactttaatcatcagctaaccgaacagtttggtgaaaactttaagcagcttaatcatgccgtctttgggttgattaaatggcaagaaaattataaacaacagcttgaacaaatgcaggttcagtatcaaaatcataccaatgctgttgcagcaacacaacaagccattgacaatattcatgataatttatcacatattgcacatcatgctcagagcattccagattctatggaaaggcttgccgttgctattgagttgagccatacgcaaattgatactttgtatgatcacttggctgcttttgctgatatgaaagataaggcagttgctgctctaccgagcttaagtgagcaaatcgataccatgcttcagggcatggatgatgccagccaaaagctgaccgaacagtttcatcagattcatcaatctatcaaagcacagcctagcatcatgcaaagcaccactcaagagctaaaaaacacactggagcggctggttggtcaacttgagattgatatcaaaaatatcacagaaaagcacgccggcagtatcaaagagcagatgaatcagttatcaaatatcgctgcccaaaccttagaggacatcagtgacagcatagagggtcaaattaataattttaataccgctgaagccaaaaaaattgagtcagatttgcagcaaatgggtagcgccttaattagtatgacaagccaatttaccaaagattataaagagttggtcaatcatatgaataatatcattcgtcacggaagaccaatgcgatga

SEQ ID NO: 11322 - DNA, 615 bp, Moraxella catarrhalis 7169
atggtgttatttttgttcattgccatcagcttaattttgcaagtgcggcaaatcgctgaagaatatcaggatacccaagagcaaatttataaagcattgttacacgaatttgcagacgatttgcccaaatggggagcaaagatagataaagatacattaaccatctcatttttgtctcctgatattttatttaaaacaggtcaatctgatttgcaggataattataaagaaattttatctgattttttcccacgctatatcaaagtcatcgaccactataaagatagcattaacgaaatccgtatcgagggtcataccagcagcgaatgggcggcgggagtggatgctgatattgcttactttgagaacatgcggttatcacaagaccgcacccgtaccgttttacaatttgcttatgccatacctgaggtcagtcagtatcgtccatggataaagacacatttggcagcagtgggcttatcttctgccaaaaccatcaaaaatgagtctgggctagagaatgctggtgcatcaaaaagagtgacttttcgtattttgaccaatgccgatgaacaaatacaaaaaataagcaagagttcttatgaagaaaactaa

SEQ ID NO: 11323 - DNA, 852 bp, Moraxella catarrhalis 7169
atgaagaaaactaatgtatttgatgagctgataaataacaccaaaaggatggttgatcatcttgttgaatttaagcttcagccaagaggctctcttgatttacagttagatacgaagcttgccacaccaaagggagtgcagattgatagtttatctgagctggcgactgatgaaacaggtgtgtttgcctatcatggcagaaaagtcgtgttatttattcctgaccatggctatgggaatagttttgatcaagttaaaaatggtgatttgaatgtaggtaaaaaagtacattttacccaatgtaagacacttgatgatatggctaacaatggtcggttgaatcgttatcacattaataaaaatcaaaatggcttatttgaaattgttaataatgttggcgatacgcatacaaccaagctgatgccatgtcataattgtttaaaaattcttaattataatgattatttatcaatcaaaacaccagcaatttttaggcaaaattttgactttttggcattttttaatggtgattatcagaccaaatttaccaaattgcccgaatatgtgggacaaaataagggtggttatacagaagattggtcgacaataagtcgtaattttaaaaaaagcaaagactatctttgtcaagtctgtggcgttaacttatctgggtatcagcatttggccgatgtgcatcatattgatggcgtaaaacagaataatagccaaaataatttgatgtgcctgtgtaaattatgccatgttaatcagccaaatcatgcccatatgagtatcggtgatgagatcaaaaaccagatacaacaactaagatggcagcagcgactgctgtga

SEQ ID NO: 11324 - DNA, 1398 bp, Moraxella catarrhalis 103P14B1
atgtctacttttgcacttttatttgatgtcatcacggcacctattaatatggcatttttgttggtcatgttagggttatttatcatagggtgggttgctgtcggtcgtgatgatggtcataaacctaggcattttatcgacagtattcccacattgctgacatccatcggcattttgggaactttttttggtattgtattggctttacttgcctttgatgatagtgatatcaaatctcatatcaatgacatcatctcgggcatgaaaaccgcctttattactagcgtgacggggttattattatcaattatcctaaaaatttgggcatctattcatcaagataaaagcgaaaatcttgatttagaccaagtggatgccagcaatatacttaaatttattgaacaccatcttacagagcaaaccaacacacaaaaaaagactgctgttattcatgaagagttgttacaagcattaaccacgcatcatgaatatgtcaaacaaaataatcagcaatttgctgctaatttgtgggataaacttgagaaaactgcccaaattctgaccaaatctgccaccgaagaggtgattttggcactcaatcagcttatcaaagactttaatcatcagctaaccgaacagtttggtgaaaactttaagcagttaaatcatgccgtctttgagttgattcaatggcaagaaaattataaacaacagcttgaacaaatgcaggttcagtatcaaaatcataccaatgctgttgcagcaacacaacaagccattgacaatattcatgataatttatcacatattgcacatcatgctcagagcattccagattctatggaaaggcttgccgttgctattgagttgagccatacgcaaattgatactttgtatgatcacttggctgcttttgctgatatgaaagataaggcagttgctgctctaccgagcttaagtgagcaaatcgataccatgcttcagggcatggatgatgccagccaaaagctgaccgaacagtttcatcagattcatcaatctatcaaagcacagcctagcatcatgcaaagcaccactcaagagctaaaaaacacactggagcggctggttggtcaacttgagattgatatcaaaaatatcacagaaaagcacgccggcagtatcaaagagcagatgaatcagttatcaaatattgctgctcaaaccttagaggacatcagtgacagcatagagggtcaaattaataattttaataccgctgaagccaaaaaaattgagtcagatttgcagcaaatgggtagcgccttaattagtatgacaagccaatttaccaaagattataaagagttggtcaatcatatgaataatatcattcgtcacggaaggccaatgcgatga

SEQ ID NO: 11325 - DNA, 615 bp, Moraxella catarrhalis 103P14B1
atggtgttatttttgttcattgccatcagcttaattttgcaagtgcggcaaatcgctgaagaatatcaggatacccaagagcaaatttataaagcattgttacacgaatttgcagacgatttgcccaaatggggagcaaagatagataaagatacattaaccatctcatttttgtctcctgatattttatttaaaacaggtcaatctgatttgcaggataattataaagaaattttatctgattttttcccacgctatatcaaagtcatcgaccgctataaagatagcattaacgaaatccgtatcgagggtcataccagcagcgaatgggcggcgggagtggatgctgatattgcttactttgagaacatgcggttatcacaagaccgcacccgtaccgttttacaatttgcttatgccatacctgaggtcagtcagtatcgtccatggataaagacacatttggcagcagtgggcttatcttctgccaaaaccatcaaaaatgagtctgggctagagaatgctggtgcatcaaaaagagtgacttttcgtattttgaccaatgccgatgaacaaatacaaaaaataagcaagagttcttatgaagaaaactaa

SEQ ID NO: 11326 - DNA, 852 bp, Moraxella catarrhalis 103P14B1
atgaagaaaactaatgtatttgatgagctgataaataacaccaaaaggatggttgatcatcttgttgaatttaagcttcagccaagaggccctcttgatttacagttagatacgaagcttgccacaccaaagggagtgcagattgatagtttatctgagctggcgactgatgaaacaggtgtgtttgcctatcatggcagaaaagtcgtgttatttattcctgaccatggctatgggaatagttttgatcaagttaaaaatggtgatttgaatgtaggtaaaaaagtacattttacccaatgtaagacacttgatgatatggctaacaatggtcggttgaatcgttatcacattaataaaaatcaaaatggcttatttgaaattgttaataatgttggcgatacgcatacaaccaagctgatgccatgtcataattgtttaaaaattcttaattataatgattatttatcaatcaaaacaccagcaatttttaggcaaaattttgactttttggcattttttaatggtgattatcagaccaaatttaccaaattgcccgaatatgtgggacaaaataagggtggttatacagaagattggtcgacaataagtcgtaattttaaaaaaagcaaagactatctttgtcaagtctgtggcgttaacttatctgggtatcagcatttggccgatgtgcatcatattgatggcgtaaaacagaataatagccaaaataatttgatgtgcctgtgtaaattatgccatgttaatcagccaaatcatgcccatatgagtatcggtgatgagatcaaaaaccagatacaacaactaagatggcagcagcgactgctgtga

SEQ ID NO: 11327 - DNA, 1398 bp, Moraxella catarrhalis 46P47B1; identical to SEQ ID NO: 11318

SEQ ID NO: 11328 - DNA, 615 bp, Moraxella catarrhalis 46P47B1
atggtgttgtttttgttcattgccatcagcttaattttgcaagtgcggcaaatcgctgaagaatatcaggatacccaagagcaaatttataaagcattgttacacgaatttgcagacgatttgcccaaatggggagcaaagatagataaagatacattaaccatctcatttttgtctcctgatattttatttaaaacaggtcaatctgatttgcaggataattataaagaaattttatctgattttttcccacgctatatcaaagtcatcgaccgctataaagatagcattaacgaaatccgtatcgagggtcataccagcagcgaatgggcggcgggagtggatgctgatattgcttactttgagaacatgcggttatcacaagaccgcacccgtaccgttttacaatttgcttatgccatacctgaggtcagtcagtatcgtccatggataaagacacatttggcagcagtgggcttatcttctgccaaaaccatcaaaaatgagtctgggctagagaatgctggtgcatcaaaaagagtgacttttcgtattttgaccaatgccgatgaacaaatacaaaaaataagcaagagttcttatgaagaaaactaa

SEQ ID NO: 11329 - DNA, 717 bp, Moraxella catarrhalis 46P47B1; identical to SEQ ID NO: 11320

SEQ ID NO: 11330 - DNA, 1029 bp, Moraxella catarrhalis 12P80B1
gtggatgccagcaatatacttaaatttattgaacaccatcttacagagcaaaccaacacacaaaaaaagaccgctgttattcatgaagagttgttacaagcattaaccacgcatcatgaatatgtcaaacaaaataatcagcaatttgctgctaatttgtgggataaacttgagaaaactgcccaaattctgaccaaatctgccaccgaagaggtgattttggcactcaatcagcttatcaaagactttaatcatcagctaaccgaacagtttggtgaaaactttaagcagttaaatcatgccgtctttgagttgattcaatggcaagaaaattataaacaacagcttgaacaaatgcaggttcagtatcaaaatcataccaatgctgttgcagcaacacaacaagccattgacaatattcatgataatttatcacatattgcacatcatgctcagagcattccagattctatggaaaggcttgccgttgctattgagttgagccatacgcaaattgatactttgtatgatcacttggctgcttttgctgatatgaaagataaggcagttgctgctctaccgagcttaagtgagcaaatcgataccatgcttcagggcatggatgatgccagccaaaagctgaccgaacagtttcatcagattcatcaatctatcaaagcacagcctagcatcatgcaaagcaccactcaagagctaaaaaacacactggagcggctggttggtcaacttgagattgatatcaaaaatatcacagaaaagcacgccggcagtatcaaagagcagatgaatcagttatcaaatatcgctgcccaaaccttagaggacatcagtgacagcatagagggtcaaattaataattttaataccgctgaagccaaaaaaattgagtcagatttgcagcaaatgggtagcgccttaattagtatgacaagccaatttaccaaagattataaagagttggtcaatcatatgaataatatcattcgtcacggaagaccaatgcgatga

SEQ ID NO: 11331 - DNA, 615 bp, Moraxella catarrhalis 12P80B1; identical to SEQ ID NO: 11325

SEQ ID NO: 11332 - DNA, 852 bp, Moraxella catarrhalis 12P80B1; identical to SEQ ID NO: 11326

SEQ ID NO: 11333 - DNA, 1398 bp, Moraxella catarrhalis BC1; identical to SEQ ID NO: 11321

SEQ ID NO: 11334 - DNA, 615 bp, Moraxella catarrhalis BC1; identical to SEQ ID NO: 11322

SEQ ID NO: 11335 - DNA, 852 bp, Moraxella catarrhalis BC1; identical to SEQ ID NO: 11323

SEQ ID NO: 11336 - DNA, 1398 bp, Moraxella catarrhalis BC7
atgtctacttttgcacttttatttgatgtcatcacggcacctattaatatggcatttttgttggtcatgttagggttatttatcatagggtgggttgctgtcggtcgtgatgatggtcataaacctaggcattttatcgacagtattcccacattgctgacatccatcggcattttgggaactttttttggtattgtattggctttacttgcctttgatgatagtgatatcaaatctcatatcaatgacatcatctcgggcatgaaaaccgcctttattactagcgtgacggggttattattatcaattatcctaaaaatttgggcatctattcatcaagataaaagcgaaaatcttgatttagaccaagtggatgccagcaatatacttaaatttattgaacaccatcttacagagcaaaccaacacacaaaaaaagactgctgttattcatgaagagttgttacaagcattaaccacgcatcatgaatatgtcaaacaaaataatcagcaatttgctgctaatttgtgggataaacttgagaaaactgcccaaattctgaccaaatctgccaccgaagaggtgattttggcactcaatcagcttatcaaagactttaatcatcagctaaccgaacagtttggtgaaaactttaagcagttaaatcatgccgtctttgagttgattcaatggcaagaaaattataaacaacagcttgaacaaatgcaggttcagtatcaaaatcataccaatgctgttgcagcaacacaacaagccattgacaatattcatgataatttatcacatattgcacatcatgctcagagcattccagattctatggaaaggcttgccgttgctattgagttgagccatacgcaaattgatactttgtatgatcacttggctgcttttgctgatatgaaagataaggcagttgctgctctaccgagcttaagtgagcaaatcgataccatgcttcagggcatggatgatgccagccaaaagctgaccgaacagtttcatcagattcatcaatctatcaaagcacagcctagcatcatgcaaagcaccactcaagagctaaaaaacacactggagcggctggttggtcaacttgagattgatatcaaaaatatcacagaaaagcacgccggcagtatcaaagagcagatgaatcagttatcaaatatcgctgcccaaaccttagaggacatcagtgacagcatagagggtcaaattaataattttaataccgctgaagccaaaaaaattgagtcagatttgcagcaaatgggtagtgccttaattagtatgacaagccaatttaccaaagattataaagagttggtcaatcatatgaataatatcattcgtcacggaagaccaatgcgatga

SEQ ID NO: 11337 - DNA, 615 bp, Moraxella catarrhalis BC7; identical to SEQ ID NO: 11325

SEQ ID NO: 11338 - DNA, 852 bp, Moraxella catarrhalis BC7; identical to SEQ ID NO: 11326

SEQ ID NO: 11339 - DNA, 1137 bp, Moraxella catarrhalis CO72
atgaaaaccgcctttattactagcgtgacggggttattattatcaattatcctaaaaatttgggcatctattcatcaagataaaagcgaaaatcttgatttagaccaagtggatgccagcaatatacttaaatttattgaacaccatcttacagagcaaaccaacacacaaaaaaagaccgctgttattcatgaagagttgttacaagcattaaccacgcatcatgaatatgtcaaacaaaataatcagcaatttgctgctaatttgtgggataaacttgaagaaactgcccaaattctgaccaaatctgccaccgaagaggtgattttggcactcaatcagcttatcaaagactttaatcatcagctaaccgaacagtttggtgaaaactttaagcagttaaatcatgccgtctttgagttgattcaatggcaagaaaattataaacaacagcttgaacaaatgcaggttcagtatcaaaatcataccaatgctgttgcagcaacacaacaagccattgacaatattcatgataatttatcacatattgcacatcatgctcagagcattccagattctatggaaaggcttgccgttgctattgagttgagccatacgcaaattgatactttgtatgatcacttggctgcttttgctgatatgaaagataaggcagttgctgctctaccgagcttaagtgagcaaatcgataccatgcttcagggcatggatgatgccagccaaaagctgaccgaacagtttcatcagattcatcaatctatcaaagcacagcctagcatcatgcaaagcaccactcaagagctaaaaaacacactggagcggctggttggtcaacttgagattgatatcaaaaatatcacagaaaagcacgccggcagtatcaaagagcagatgaatcagttatcaaatattgctgctcaaaccttagaggacatcagtgacagcatagagggtcaaattaataattttaataccgctgaagccaaaaaaattgagtcagatttgcagcaaatgggtagcgccttaattagtatgacaagccaatttaccaaagattataaagagttggtcaatcatatgaataatatcattcgtcacggaaggccaatgcgatga

SEQ ID NO: 11340 - DNA, 615 bp, Moraxella catarrhalis CO72; identical to SEQ ID NO: 11325

SEQ ID NO: 11341 - DNA, 852 bp, Moraxella catarrhalis CO72
atgaagaaaactaatgtatttgatgagctgataaataacaccaaaaggatggttgatcatcttgttgaatttaagcttcagccaagaggccctcttgatttacagttagatacgaagcttgccacaccaaagggagtgcagattgatagtttatctgagctggcgactgatgaaacaggtgtgtttgcctatcatggcagaaaagtcgtgttatttattcctggccatggctatgggaatagttttgatcaagttaaaaatggtgatttgaatgtaggtaaaaaagtacattttacccaatgtaagacacttgatgatatggctaacaatggtcggttgaatcgttatcacattaataaaaatcaaaatggcttatttgaaattgttaataatgttggcgatacgcatacaaccaagctgatgccatgtcataattgtttaaaaattcttaattataatgattatttatcaatcaaaacaccagcaatttttaggcaaaattttgactttttggcattttttaatggtgattatcagaccaaatttaccaaattgcccgaatatgtgggacaaaataagggtggttatacagaagattggtcgacaataagtcgtaattttaaaaaaagcaaagactatctttgtcaagtctgtggcgttaacttatctgggtatcagcatttggccgatgtgcatcatattgatggcgtaaaacagaataatagccaaaataatttgatgtgcctgtgtaaattatgccatgttaatcagccaaatcatgcccatatgagtatcggtgatgagatcaaaaaccagatacaacaactaagatggcagcagcgactgctgtga

SEQ ID NO: 11342 - DNA, 1398 bp, Moraxella catarrhalis 101P30B1; identical to SEQ ID NO: 11324

SEQ ID NO: 11343 - DNA, 615 bp, Moraxella catarrhalis 101P30B1; identical to SEQ ID NO: 11325

SEQ ID NO: 11344 - DNA, 852 bp, Moraxella catarrhalis 101P30B1; identical to SEQ ID NO: 11326

SEQ ID NO: 11345 - DNA, 1398 bp, Moraxella catarrhalis RH4; identical to SEQ ID NO: 11321

SEQ ID NO: 11346 - DNA, 645 bp, Moraxella catarrhalis RH4
ttgcccatatcagatttgatgagtggattaatggtgttatttttgttcattgccatcagcttaattttgcaagtgcggcaaatcgctgaagaatatcaggatacccaagagcaaatttataaagcattgttacacgaatttgcagacgatttgcccaaatggggagcaaagatagataaagatacattaaccatctcatttttgtctcctgatattttatttaaaacaggtcaatctgatttgcaggataattataaagaaattttatctgattttttcccacgctatatcaaagtcatcgaccgctataaagatagcattaacgaaatccgtatcgagggtcataccagcagcgaatgggcggcgggagtggatgctgatattgcttactttgagaacatgcggttatcacaagaccgcacccgtaccgttttacaatttgcttatgccatacctgaggtcagtcagtatcgtccatggataaagacacatttggcagcagtgggcttatcttctgccaaaaccatcaaaaatgagtctgggctagagaatgctggtgcatcaaaaagagtgacttttcgtattttgaccaatgccgatgaacaaatacaaaaaataagcaagagttcttatgaagaaaactaa

SEQ ID NO: 11347 - DNA, 852 bp, Moraxella catarrhalis RH4; identical to SEQ ID NO: 11326

SEQ ID NO: 11348 - DNA, 1137 bp, Moraxella catarrhalis
atgaaaaccgcctttattactagcgtgacggggttattattatcaattatcctaaaaatttggtcatctattcatcaagataaaagcgaaaatcttgatttagaccaagtggatgccagcaatatacttaaatttattgaacaccatcttacagagcaaaccaacacacaaaaaaagaccgctgttattcatgaagagttgttacaagcattaaccacgcatcatgaatatgtcaaacaaaataatcagcaatttgcttctactttgtgggatgaacttgagaaaactgcccaaattctgaccaaatctgccaccgaagaggtgattttggcactcaatcagcttatcaaagactttaattatcagctaaccgaacagtttggtgaaaactttaagcagcttaatcataccgtctttgggttgattaaatggcaagaaaattataaacaacagcttgaacaaatgcaggttcagtatcaaaatcataccaatgctgttgcagcaacacaacaagccattgacaatattcatgataacttatcacatattgcacatcatgctcagagcattccagattctatggaaaggcttgccgttgctattgagttgagccatacgcaaattgatactttgtatgatcacttggctgcttttgctgatatgaaagataaggcagttgctgctctaccgagcttaagtgagcaaatcgataccatgcttcagggcatggatgatgccagccaaaagctgaccgaacagtttcatcagattcatcaatctatcaaagcacagcctagcatcatgcaaagcaccactcaagagctaaaaaacacactggagcggctggttggtcaacttgagattgatatcaaaaatatcacagaaaagcacgccggcagtatcaaagagcagatgaatcagttatcaaatatcgctgcccaaaccttagaggacatcagtgacagcatagagggtcaaattaataattttaataccgctgaagccaaaaaaattgagtcagatttgcagcaaatgggtagcgccttaattagtatgacaagccaatttaccaaagattataaagagttggtcaatcatatgaataatatcattcgtcacggaaggccaatgcgatga

SEQ ID NO: 11349 - DNA, 717 bp, Moraxella catarrhalis
atgacaataataaacaagatgagattaagtgcgccgtcttcaagacagtcatcagaagagagtactcagtggttgcccatatcagatttgatgagtggattaatggtgttgtttttgttcattgccatcagcttaattttgcaagtgcggcaaatcgctgaagaatatcaggatacccaagagcaaatttataaagcattgttacacgaatttgcagacgatttgcccaaatggggagcaaagatagataaagatacattaaccatctcatttttgtctcctgatattttatttaaaacaggtcaatctgatttgcaggataattataaagaaattttatctgattttttcccacgctatatcaaagtcatcgaccgctataaagatagcattaacgaaatccgtatcgagggtcataccagcagcgaatgggcggcgggagtggatgctgatattgcttactttgagaacatgcggttatcacaagaccgcacccgtaccgttttacaatttgcttatgccatacctgaggtcagtcagtatcgtccatggataaagacacatttggcagcagtgggcttatcttctgccaaaaccatcaaaaatgagtctgggctagagaatgctggtgcatcaaaaagagtgacttttcgtattttgaccaatgccgatgaacaaatacaaaaaataagcaagagttcttatgaagaaaactaa

SEQ ID NO: 11350 - DNA, 852 bp, Moraxella catarrhalis
atgaagaaaactaatgtatttgatgagctgataaataacaccaaaaggatggttgatcatcttgttgaatttaagcttcagccaagaggccctcttgatttacagttagatacgaagcttgccacaccaaagggagtgcagattgatagtttatctgagctggcgactgatgaaacaggtgtgtttgcctatcatggcagaaaagtcgtgttatttattcctgaccatggctatgggaatagttttgatcaagttaaaaatggtgatttgaatgtaggtaaaaaagtacattttacccaatgtaagacacttgatgatatggctaacaatggtcggttgaatcgttatcacattaataaaaatcaaaatggcttatttgaaattgttaataatgttggcgatacacatacaaccaagctgataccatgtcataattgtttaaaaattcttaattataatgattatttatcaatcaaaacaccagcaatttttaggcaaaattttgactttttggcattttttaatggtgattatcagaccaaatttaccaaattgcccgaatatgtgggacaaaataagggtggttatacagaagattggtcgacaataagtcgtaattttaaaaaaagcaaagactatctttgtcaagtctgtggcgttaacttatctgggtatcagcatttggccgatgtgcatcatattgatggcgtaaaacagaataatagccaaaataatttgatgtgcctgtgtaaattatgccatgttaatcagccaaatcatgcccatatgagtatcggtgatgagatcaaaaaccagatacaacaactaagatggcagcagcgactgctgtga

SEQ ID NO: 11351 - DNA, 1497 bp, Citrobacter freundii
atgggagcattaggcatactgggtacttttatcggtatcattattggattgcttaattttaatactgaaagcattgataccagcatccctgtattattaggaggtcttaagacagcattcattaccagtattgttggaatgtttttcgcaattttgtttaatggattagatgctttcttttttgccaataaacgtcgcctattggaggcgaatactccagcgtcggttactcctgagcatatccatcaagaattaaaagaacaaaataaacatttagtgaagttaatctctggcatgagtggtagcgaagagggttccattgttgcccaaataaaactactgcgtaatgaaatcagtgatgcctcccgggcacaaatatctaaccattctaatttcagtaataagctctgggaacaattacagcaatttgcagacctgatggcaaaaggagcaaccgaacaaattatcgatgcccttaggcaagttattattgatttcaacaataatttaactgaacaattcggtgagaatttcaaagcacttgatacttctgtaaaaaaacttgtcgactggcaggaaaactataaaaaccaagttgagcagatgggtgagcaataccaacaaagtgttgaatctttagtcgaaaccagaaaagctgtcgcagggatctgggaagaatgcaaagagattcctcttgcgatggctgagcttcgtgacgtgctgcaagtgaatcagcaccaaattggtgaactctcccgtcatctggaaacctttgtcgccatacgcgataaggcaactgatgttttacctgaaattcaaacaaaaatgtctgaagtgggtgaactcttaaaattaggtgccgcgaatgtcagcgcgtctcttgaacaaaccagtcagcagatacttatcaatgctgattcgatgcgagttgcccttgatgaaggcactgaaggtttcagacagtcagtgactcagacacagcaagcttttgcatcaatggcccatgatgtcagcaattcctctgaaactcttaccagcacgctaggagacactattacggagatgaaacaaagtggtgatgagttcctgaaatctctggaaacacactcaagagaattgcatcgaaatatggaacaaaatactactaatgttattgatatgttcagtaagacaggtgagaaatttaatcaacaattatccagcaatgccgataacatgtttggttcaatgcaatcttcgtttgataaagcaagcgcgggactgacatctcaggtgaaagagtcaattgagaaatttggtagttcaattaacgagcagttacatgcttttgagcaagcaacagagcgcgaaatgaatcgtgagatgcaatcactagggaatgctctgctctcaatcagcaaaggttttgtcggtaactacgagcgactactcaaagagtatcaagctgtcatgggacaactgcaaacattaatttctgctaatcaaaaacgaggataa

SEQ ID NO: 11352 - DNA, 708 bp, Citrobacter freundii
atggataaaatccttggcaagcaggcccctaaaaaagatcaagataatgaacattgggtttcaatgtcagatttaatggcaggtctgatgatggtatttatgtttatttctatcgcctacatgcactatgtgcgtattgaaaaagaaaaaattaaagaagtggctgtcgcctatgaaaatgctcaacttcaactctataatgcactagaaactgagtttacaaaggatttgccagcttgggatgctgaaattgacaaacaaactcttgaggtccgttttaaatcacccgatgtcttatttggtttaggtagcacagagcttaagccaaaatttaaacagatccttgataatttcttccctcgctaccttaaagttcttgataactaccaggaacatattactgaagtacgtattgagggacatacaagtactgactggactggagcgtccaattctgacatggcctattttaataacatggaactctcgcaagggcgaacacgagcagtactgcagtatgtctatggtttaaaagaaagcgcagcacaccagaagtgggtaaaaagtaaatttgctgccgttggatattcttccgcacaccctattcttgataaatctggtaaagaagatcccaatcgctctcgccgagtaacatttaaagttgtaacaaatgccgagttgcagattagaaaaataattcaggagtaa

SEQ ID NO: 11353 - DNA, 1092 bp, Citrobacter freundii
atgaaattatctatcgacatttctgaacttattcagttaggaagaaaaatgttgccggaaggcgttgattttttccttgacgaaacgcctgtagtttttgatccaattgatatcgaactttctgcaggtaaagaagttagaattgaagatcttgatcccggcagtggtcttatttcctaccaagggagacaggttcttttgtatattagagaccataccggacgttatgatgcggctattgaagatggagagaaagggaagcgatttcatattgcctggtgtagaacattagatgacatgcgccaaaaaaatcgatttgaacggtatcatgcaacaaatcgtgttgatggcttatttgaaattgatgatgggctcggtcggagccaagatgtcgctcttaaagtttgtatgaactgcctagaacgccttaattacaaaggaagtatagataaacaacagaaaagagtaatatttaaatcattttctttgaatgaatttttttcagattatagtacctgctttcgccatatgcctaaaggaatctatgataaatcaaatagcggctatgtagaaaattggaaggatatatccagaactactcgagaacaagctaactacaaatgtaatgattgtggtgtgaatttaatgtccatgaaaagtctatgcgatgttcaccacaaaaatggtattaaatatgataactcagctgaaaatctactcgtcttgtgtaaagattgccatagaaagcaacctttgcacgaaggaatatttgtcactcaggctgacatggcaatcattcaacgcttacgttcccaacaagggcttttgaaggctgaatcctggaaggatatttacgatctgacagatccatcgattcatggtgatataaacattatgcaacacaaaggatacccgccaccagttccgggattagacttacaaaacgcggagcatgaaattattgctaccgtagaagctgcctggccggtttcaaaaattgcagtaaatttaacaccggtaaaagtcgatggttggaaagtattctccgtgggagaactcgttaaagaaatacaatctggggttattttctaa

SEQ ID NO: 11354 - DNA, 1653 bp, Enterobacter cloacae
atgttagctcagctttttgaacatttgtttcaatcaattgattccacactcgtcacaaacatttttatttgggctgttatctttgtattttgtgctgcatggtggtgtgatcataaaaacattcataacaaattccgagagtatgctccaacattaatgggagcattaggcatactgggtacttttatcggtatcattattggattgcttaattttaatactgaaagcattgataccagcatcccggtattattaggaggtcttaaaacagcattcattaccagtattgttggaatgtttttcgcaattttgtttaatggattagatgctttcttttttgccaataaacgtcgtcaattggaggcggatattccagcgtcggttactcctgagcatatccatcaagaattaaaagagcaaaataagcatttagtgaaattaatcgctggcatgagtggtagcgaagagggttccattgttgcccaaataaaactactgcgtaatgaaatcagtgatacctcccgggcacaaatatctaaccattctaatttcagcaataagctctgggaacaattacagcaatttgcagacctgatggcaaaaggagcaaccgaacaaattatcgatgcccttaggcaagttattattgatttcaacaatgatttaactgaacaattcggtgagaatttcaaagcgcttgatacttctgtaaaaaaacttgttgactggcaggaaaactataaaaaccaagttgagcagatgggtgagcaataccaacaaagtgttgaatctttagtcgaaaccagaaaagctgtcgcagggatctgggaagaatgcaaagagattcctcttgcgatggctgagcttcgtgacgtgctgcaagtgaatcagcaccaaattggtgaactctcccgtcatctggaaatctttgtcgccatacgcgataaggcaactgatgttttacctgaaattcaaacaaaaatgtctgaagtaggcgaactcttaaagttaggtgccgcgaatgtcagcgcgtctcttgaacaaaccagtcagcagatacttagcaatgctgattcgatgcgagttgcccttgatgaaggtaccgaaggtttcagacaatcagtgactcagacacagcaagcttttgcatcaatggcgcatgatgtaagcaattcctctgaaactcttacaagcgcgctaggagacactattacggagatgaaacaaagtggtgatgagttcctgaaatctctggaaacgcactcaagagaattgcatcgaaatatggaacaaaacacgactaatgttattgatatgttcaataaaacaggcgagaaatttaatcaacaattatccagtaatgccgataacatgtttggttcaatgcaatcttcgtttgataaggcaagcgcggggctgacatctcaggtgaaagagtcaattgagaaatttggtagttcaattaacgaacagttacatgcctttgagcaagcaacagagcgcgaaatgaatcgtgagatgcaatcactagggaatgctctgctctcaataagcaaaggttttgtcggtaactacgagcggctactcaaagaatatcaagctgtcatgggacaactgcaaacattaatttctcctaatcaaaaacgaggataa

SEQ ID NO: 11355 - DNA, 708 bp, Enterobacter cloacae
atggataaaatccttggcaagcaagcccctaagaaagatcaagataatgaacactgggtttcaatgtcagatttaatggcaggtctgatgatggtatttatgtttatttctatcgcctatatgcactatgtgcgtattgaaaaagaaaaaattaaagaagtggctgtcgcctatgaaaatgcgcaacttcaactctataatgcactagaaactgaatttacaaaggatttaccagcttgggatgctgaaattgacaaacaaactcttgaggtccgttttaaatcacccgatgtcttatttggtttaggtagcacagagcttaagccaaaatttaaacagatccttgataatttcttccctcgataccttaaagttcttgataactaccaggaacatattactgaagtacgtattgagggacatacaagtactgactggactggagcatccaattctgacatggcctattttaataacatggaactctcgcaagggcgaacacgagcagtactgcaatatgtctatggtttaaaagatagcgcagcacaccaaaagtgggtaaaaagtaaatttgctgccgttggatattcttccgcacaccctattcttgataaatctggtaaagaagatcccaatcgctctcgtcgagtaacatttaaagttgtaacaaatgccgagttgcagattcgaaaaataattcaggagtaa

SEQ ID NO: 11356 - DNA, 1092 bp, Enterobacter cloacae
atgaaattatctatcgacatttctgaacttattcagttaggaagaaaaatgttgccggaaggcgtagatttttttcttgacgaaacacctgtagtttttgatccaattgatatcgaactttctgcaggtaaagaagttagaattgaagatcttgatcccggcagtggtcttatttcctaccgagggagacaggttcttttatatattagagaccataccggacgttatgatgctgctattgaagatggagagaaagggaagcggtttcatattgcctggtgtagaacattagatgacatgcgccaaaaaaatcgatttgaacggtatcatgcaacaaatcgtgttgatggcttatttgaaattgatgatgggctcggtcggagccaagatgtcgctcttaaagtttgtatgaactgtcttgaacgccttaattacaaaggaagcatagataagcaacagaaaagagtgatatttaaatcattttctttgaatgaatttttttcagattatagcacctgctttcgccatatgcctaaaggaatctatgataaatcaaatagtggctatgtggaaaattggaaggatatatccagaattactcgagaacaagctaactacaaatgtagtgattgtggtgtgaatttaatgtccatgaaaagtctatgcgatgttcaccataaaaatggtattaaatatgataactcagctgaaaatcttcttgtcttgtgcaaagattgccatagaaagcaacctttgcacgaaggaatatttgtcactcaggctgacatggcaatcattcaacgcttacgttcccaacaagggcttttgaaggctgaatcctggaaggatatttacgatctgacagatccatcgattcatggtgatataaacattatgcaacacaaaggatacccgccaccagttccgggattagacttacaaaacgcggagcatgaaattattgccaccgtagaagctgcctggccggtttcaaaaattgcagtaaatttaacaccggtaaaagtcgatggttggaaagtattctccgtgggagaactcgttaaagaaatacaatctggggttattttctaa

SEQ ID NO: 11357 - DNA, 544 bp, Pantoea ananatis
tttaaataatgcctcagcaggtttagccttgtttatcgacagggcatctaattttgctgatacagcagaagctttagagataactcttaaaggcctcgcttatcaacatgagcaaattgaaaattctcaggcctcattgacagaggtcttgttgcagatgaaaggtgtcatcccacaattttctcagaaaattgatgaaatggcagactcaatgtcaaaaggagtagcgaaagtacagaatgagattaatgaaataatgaaaggttttggcgttcaggtacaatctacgtcttcagaaatgaagcaacttttaactgagacgcttcgtaagtcgcaaaatgaattcaatgaaagccttaaagattcgatggattcagtccgtcaaagtgttattactcttgataaaggtttacaagaggaactgacgaaaagccttgagtcgcttggccgtcagctggcatctctatcagagaagtttgtatctgattatactcctttaaccgaacgcttgcgcgaagtagtgcaaatagctgctgttaagtga

SEQ ID NO: 11358 - DNA, 681 bp, Pantoea ananatis
atggattttgaacaaagtaatcagtcttattggataccattagcagatctcatgacaggtttgatgatggtatttatgttattaacagctgctttcatgcttcgtgtggaacaaacaacgacattggttgtaaaagaatatgagatgacgaaacaggatatgttgctcgctttgcaaaaagagttttcaaaggatttaaaacaatggaatgctgagattttgggagacatgacaattcgttttaatgacccctctgtactttttgcaacaggatcatcagatcttcgtccacgctttaaacaagtgcttagcgagttctttccacgctatatcgctcttttgaattctaagacgtttaagaatgcggtaaaggaaattcgtattgaaggacatacaagctcgttctggggtgttgccattgatgaaaaacaagcttatttcaagaatatggaattatctcaagcaaggacaagaagtgctcttgagtatctgatgtccttgccaaaagtaaaaaaagatgaaaaatggcttgtgcaacatatgactgctaatgggctttcctcttctcaccctctttcagaaaacggtgctgaagcagcaaatcagcgcgttgaatttcgcattgtaacaaatgcgagcgaaaaaatggatttaattgcagaaaaattatcaaaaaaatga

SEQ ID NO: 11359 - DNA, 861 bp, Pantoea ananatis
atgagctttaaacttcctgactttttaacctggtcgcttttaaattcattgcgtgaaataatgaaagcacctcttgcagaaaaattcacacaaaattctgattttgtgccgattgatttccctctaattgagcgcctacggagtgttggtatagatgtcaatttcgatgaggttcatgtagaggaagatggtactctaaattacaataaccaaagagtactactttatattcgagatgtgcctactataggcgataatactaatatgccaaaatatcatctcgctttctgtcggacccttgaaacaaaaaataaagaaaatcgttttgatcggtatgtggtggcaaatagtgatacaggcgattttcaggttaatgttttaggaggcggggttcaaagtcaatcagtacggttgaatgtttgccaaaactgccttgataaaatcatgtggaaagattttaatattcaagggatgtccaaagtcgtacggcaacggcttgtctcagagttctctttagctgatttttttgaaaaataccccagagatattatttcgataaaaccagcccacacatcatctactgcaccattaaatatctatagtaaagactggcgtgaaatatcaaaaaatataaggcaatggcgagattataaatgtgaggggtgtgaagttaaacttgctggcaataagtcacgatacctccatgttcatcatcgtaatggtctaaaatacgataataatatctcaaatcttgaagttctttgtattgcatgtcattcaaaaaaaccaaatcatcaacatataaaaacgctacctgaatacaatgaatatatgagttttagttttattgataaggattaa

SEQ ID NO: 11360 - DNA, 1380 bp, Pectobacterium carotovorum subsp. brasiliense
atgcttagtatattaccacttgaaacatggatttttattgctgtaatccttgcctacttcatttatagcaactggaattttaccgagaagaaagcccatgagtcgccagggatcctcattactataggaatattggcaaccttccttggaattgcgttaggcttggcatcattcgatatgaatgatgtggaaaatagcttacctacgctgattaatggcataaaaactgcattttgggcctctgttgtaggtgttgcttgcgcattaattataaaatggcgctatgcgttccgtggtgtaaggacaaaaaacaaccaaccgatacccacgaattcaacaattgatgatattgttcaccacttacagctctctacagaatcgattggccgattgcattatgctatagcaggaaacgaagatgcttctttactcacacagttaaaattaatgcgtggtgatcaaaatgataaactaaccaatattcataatgcatttactgaattctcgagaaatcaaactgaaaataactcaaaagcattaattgaagcattaaaagaagttattcatgattttaatgaaaaaattggtgaacaatttggcgacaatttcaaacagttaaatgaggctgtcggtaaaataaatgagtggcagcagcaatacagtctgcaaatacgagagatgattgagcaacaaactcaaacaacagaaaatatgcaacaagcgacccaatccttttctgaaataatgacacaatcggaatcatttactcaagttgcaaaagacattcatcaaacgattggtacggcctctagtttagaaaaaggcatagaagaaaatctgaaacaactcgctgaattaattgaatcatcaaaaacaggcatccccgaaatagaaaaaggaatcatggctattatagaggatgtgagaaacggagctacagcctctgccacagtcattggagatagtatttatactgtaacgcaaacattggaatcctcagcggccgactttaccagtcagatgataggtagttcgaaagctatgtccgatgctataaaaaatcaaaatcaggaaatgcaaaaatctgttcagcaaacagggacagagctacaagagcagataacacgcctttctcaagatctcactaaatacatacagcgacacaatgaagatgtaacgaataatattttcgagctgaataaaaaaacggagcaacaggttcaaacattagatgcagctctagcggctgcgttgaagaaatctctcgatagtctcggccaacaattaggtgcgctgtcttctaaatttgtacaggattacgatccgctaacagaaaagctaagagacgtcgtacgcctatccgagaatttaaggggatag

SEQ ID NO: 11361 - DNA, 735 bp, Pectobacterium carotovorum subsp. brasiliense
atgaataatccattactgactcgccaaaaagcagataaagaggatttttggatcagtctgagtgatttaatgacctctctaatgatgatctttttacttatttccgttgtctatatgataaaagtacaggagatggttaagatcccatctgtatatagaaataccttacaggggcttggtcaagccttacagcacgaattcaaggacgatctaaaacgctggcacgcaacaatcgacgaagatctaacagtacgattccaagagccaaatattttatttacgaccagttcctctgagctaaagccggaatttaaaagtatcttagatgaatttattcctcgctaccttagtattatgactgataaaaaatatatcaataatattgaggaaatacgcattgaaggacatacatcaacgatgtggcgaactggtgtaagtgaaaatgatgcttattttcataacatggaactgtctcagtcaagaactcggacaactctgtcatatattatgaatatgcccgcagtttcagactctaaaagtaccttaagttggtttaaaaatcacgttcgcgccattgggttttcttcagcaaagcccattgataaagaagggaaaacgatcacatccccagagcaggttgaagatagtgcgcgttctcaacgagtagaatttcgagtcaggacgaatgttgaacgccaggtagccaatattgtagaaaaagggagtaaaatataa

SEQ ID NO: 11362 - DNA, 876 bp, Pectobacterium carotovorum subsp. brasiliense
atggattcgtttctcgtctctcaacttcccgattttcttgaatccccaattttcaataagctacgcaaggaaatgaaagcggagattatcccaccaatcgctgatataaaaatggacgcacttgttcttgataaaatactttcaacaacaggaaaagacattgatatattagaaatagaaattaatagtgacaacacgattaattataaagataaacgcgttattcttcatataagagatgttgcatcttatggtgggagtatgagtttgccaaaatatcacttggcaaactgtaaaacattgcaaagaatgtgggaaaataataaaagtggaagatacgttgcagccacccgcagtgatggtctttttacaataaaatcacagaatactgaaaaaacagagtggatcactagagaggaaagtttagatgtatgtaaattttgtctcgaaacattaaattggaaaaactattctagaaaatatcaggatagagaaaatattttttctacttttgatctaaaagaattttttagcgtttatccaaattcagcaacgacgtacaatgccgagcataatgacgttaccgctccgattaatgattactccaaagatttccagataatatcaaaacaatatcgagagtcagttaattggcaatgtgcaatttgcaaaatagttcttgaacgtaaagatttaaataaatttttacatgtccaccaccgcgatggacaaaaaaataataataacagaaacaatttacaagcactttgcattgaatgtcattcaaatcaagacaatcacggccatatgaaaaataatccccaactaacatcattcattcaaataaaaggtgacatggccttcgctgcaagctaa

SEQ ID NO: 11363 - DNA, 1380 bp, Pectobacterium carotovorum subsp. brasiliense
atgcttagtatattaccacttgaaacatggatttttattgctgtaatccttgcctacttcatttatagcaactggaattttaccgagaagaaagcccatgagtcgccagggatcctcattactataggaatattggcaaccttccttggaattgcgttaggcttggcatcattcgatatgaatgatgtggaaaatagcttacctacgctgattaatggcataaaaactgcattttgggcctctgttgtaggtgttgcttgcgcattaattataaaatggcgctatgcgttccgtggtgtaaggacaaaaaacagccaaccgatacccacgaattcaacaattgatgatattgttcaccacttacagctctctacagaatcgattggccgattgcattatgctatagcaggaaacgaagatgcttctttactcacacagttaaaattaatgcgtggtgatcaaaacgataaactaaccaatattcataatgcatttactgaattctcgagaaatcaaactgaaaataactcaaaagcattaattgaagcattaaaagaagttattcatgattttaatgaaaaaattggtgaacaatttggcgacaatttcaaacagttaaatgaggctgtcggtaaaataaatgagtggcagcagcaatacagtctgcaaatacgagagatgattgagcaacaaactcaaacaacagaaaatatgcaacaagcgacccaatccttttctgaaataatgacacaatcggaatcatttactcaagttgcaaaagacattcatcaaacgattggtacggcctctagtttagaaaaaggcatagaagaaaatctgaaacaactcgctgaactaattgaatcatcaaaaacaggcatccccgaaatagaaaaaggaatcatggctattatagaggatgtgagaaacggagctacagcctctgccacagtcattggagatagtatttatactgtaacgcaaacattggaatcctcagcggccgactttaccagtcagatgataggtagttcgaaagctatgtccgatgctataaaaaatcaaaatcaggaaatgcaaaaatctgttcagcaaacagggacagagctacaagagcagataacacgcctttctcaagatctcactaaatacatacagcgacacaatgaagatgtaacgaataatattttcgagctgaataaaaaaacggagcaacaggttcaaacattagatgcagctctagcggctgcgttgaagaaatctctcgatagtctcggccaacaattaggggcgctgtcttctaaatttgtacaggattacgatccgctaacagaaaagctaagagacgtcgtacgcctatcagagaatttaaggggatag

SEQ ID NO: 11364 - DNA, 735 bp, Pectobacterium carotovorum subsp. brasiliense
atgaataatccattactgactcgccaaaaagcagataaagaggatttttggatcagtctgagtgatttaatgacctctctaatgatgatctttttacttatttccgttgtctatatgataaaagtacaggagatggttaagatcccatctgtatatagaaataccttacagggacttggtcaagccttacagcacgaattcaaggacgatctaaaacgctggcacgcaacaatcgacgaagatctaacagtacgattccaagagccaaatattttatttacgaccagttcctctgagctaaagccggagtttaaaagtatcttagatgaatttattcctcgctaccttagtattatgactgataaaaaatatatcaataatattgaggaaatacgcattgagggacatacatcaacgatgtggcgaactggtgtaagtgaaaatgatgcttattttcataacatggaactgtctcagtcaagaactcggacaactctgtcatatattatgaatatgcccgcagtttcagactctaaaagtaccttaagttggtttaaaaatcacgttcgcgccattgggttttcttcagcaaagcccattgataaagaagggaaaacgatcacatccccagagcaggttgaagatagtgcgcgttctcaacgagtagaatttcgagtcaggacgaatgttgaacgccaggtagccaatattgtagaaaaagggagtaaaatataa

SEQ ID NO: 11365 - DNA, 876 bp, Pectobacterium carotovorum subsp. brasiliense
atggattcgtttctcgtctctcaacttcccgattttcttgaatcgccaattttcaataagctacgcaaggaaatgaaagcggagattatcccaccaatcgctgatataaaaatggacgcacttgttcttgataaaatactttcaacaacaggaaaagacattgatatattagaaatagaaattaatagtgacaacacgattaattataaagataaacgcgttattcttcatataagagatgttgcatcttatggtgggagtatgagtttgccaaaatatcacttggcaaactgtaaaacattacaaagaatgtgggaaaataataaaagtggaagatacgttgcagccacccgcagtgatggtctttttacaataaaatcacagaatactgaaaaaacagagtggatcactagagaggaaagtttagatgtatgtaaattttgtctcgaaacattaaattggaaaaactactctagaaaatatcaggatagagaaaatattttttctacttttaatctaaaagaattttttagcgtttatccaaattcagcaacgacgtacaatgccgagcataatgacgttaccgctccgattaatgattactccaaagatttccagataatatcaaaacaatatcgagagtcagttaattggcaatgtgcaatttgcaaaataattcttgaacgtaaagatttaaataaatttttacatgtccaccaccgcgatggacaaaaaaataataataacagaaacaatttacaagcactttgcattgaatgtcattcaaatcaagacaatcacggccatatgaaaaataatccccaactaacatcattcattcaaataaaaggtgacatggccttcgctgcaagctaa

SEQ ID NO: 11366 - DNA, 1653 bp, Escherichia coli O157:H7 str. EDL933
atgttagcgcagctttttgagcagttgtttcaatcgatagactctacactgatcaccaatattttcatctgggctgttatattcgtatttttatcagcgtggtggtgtgacaaaaaaaatatacatagtaagtttagagaatatgctccaaccttaatgggggcattaggtattctgggtactttcattggtattattattggtttactcaattttaataccgaaagtattgataccagcatccccgtattattaggtggcctaaaaacagcattcattacaagcattgtaggtatgttttttgccattttatttaatggaatggatgctttcttttttgccaataaacgaagtgcgttagcagaaaataaccctgaatctgttacacctgaacatatctatcatgaattaaaagagcagaaccagactctgactaaattagtctcgggtattaacggtgatagtgaaggttctcttattgctcaaataaaattactacgtactgagattagcgattcctcgcaggcacaattagctaatcacactcatttcagtaataagctttgggaacaacttgaacaatttgcagatctaatggcaaaaggtgctacagaacaaattattgatgctttgcgacaagtcattattgattttaatcaaaatttaactgaacagtttggtgaaaactttaaagctcttgatgcctctgtaaaaaaacttgttgagtggcagggaaattataaaacgcaaattgagcagatgtcagaacaatatcaacaaagtgtcgagtccctggttgaaacaaaaactgcggttgcagggatttgggaagaatgtaaagaaattcctctggctatgtctgaactgcgtgaagtgcttcaggtgaaccaacatcaaatcagcgaactctcccgccatttagaaacctttgtcgccatccgcgataaagctacaaccgtattacctgaaatacagaacaaaatggctgaagtgggtgaactgctgaaatccggagctgcaaatgttagtgcatctcttgagcaaaccagccagcaaatacttcttaatgcagattcaatgcgcgttgccctggatgaaggtaccgaaggattcagacaatcggttacccaaacacaacaagcatttgcctcgatggcacatgatgtcagcaattcctccgaaaccctaaccagcacgttaggtgaaacaattactgaaatgaaacaaagtggtgaagaattcctgaaatcactagagtcgcactcgaaagaattgcatagaaatatggaacaaaatacgacgaatgtgattgatatgttcagtaagactggtgaaaagattaaccatcaactatccagtaatgccgataatatgtttgattcaatccagacatcatttgataaggcaagtgcagggctgacttctcaagtcagagaatcaattgaaaaatttgctctatccatcaacgagcagttacatgcttttgagcaagcaactgaacgtgaaatgaaccgtgaaatgcaatcattaggtaatgctctgctttcaatcagcaaaggttttgtcggtaactatgaaaaacttattaaagattaccaaatagttatggggcagttacaagcattaatttctgctaataaacatcgcgggtaa

SEQ ID NO: 11367 - DNA, 708 bp, Escherichia coli O157:H7 str. EDL933
atggataagattatagggaaacaattacctaaaaaagatcaagataatgaacattgggtatccatgtcggacctaatggctgggctgatgatggtttttatgttcatatctattgcttatatgcactacgtacgtattgaaaaagaaaaaattaaagaagttgccgtagcctacgagaatgctcagttacagctttataatgctctggatattgagtttgcaaaggatttacaagactgggatgcagagatcgataaacagactctggaggttcgatttaaatcaccggatgttttatttggcttaggaagcacagagctaaaaccaaagtttaaactcattcttgacgacttctttcctcgctacctaaaagttctagataattatcaggaacatattactgaagtccgcattgaaggtcacacaagtactgactggacaggaacaacgaatcctgatattgcttattttaataatatggcactatcgcaaggtcgtacacgtgcagtattacaatacgtttatgacataaaaaatatcgcgacacaccaacaatgggttaaaagtaaatttgccgcagtaggttattcatctgcacatcccattcttgataaaaccggcaaggaggatcctaatcgctctcgtcgtgtcaccttcaaagttgtaacaaatgccgagttgcagattagaaagattattcaggagtaa

SEQ ID NO: 11368 - DNA, 1104 bp, Escherichia coli O157:H7 str. EDL933
atgaaattatctatcgacatttcagaacttattcaattagggaagaaaatgttaccagaaggagtcgatttttttctggatgaatcccctattgactttgatcctatagatattgagttatccacgggtaaagaagttagtatcgaagatcttgaccctggtagcgggcttatctcttatcatggccgccaggttcttttatatattcgggaccattcagggcgttatgatgcggctatcgtagatggcgaaaaaggaaaacgttttcatattgcctggtgcagaactcttgatgaaatgcgccataaaaatcgatttgaaaggtatcatgcaactaaccgcatagatggtttattcgaaattgatgatggttcaggtcggagccaggatgttgatttacgggtatgtatgaattgcctcgaacgacttaattataaaggaagtattgataaacaacgaaaaagagagatttttaaatcattctcattaaatgagtttttttcagattatagtacttgttttcgtcatatgcctaagggtatctatgacaaaacaaatagtgggtatgtcgaaaactggaaggaaatatctaaagaaatacgagaaaaggcaaattatgtttgtaatgattgtggcgtgaatttatcaaccgccaaaaacttgtgccatgtccatcataaaaatggcatcaaatatgataatcaccatgaaaaccttcttgttctgtgcaaggattgccatcgaaaacagcccctccacgaaggtatattcgttacccaagcagagatggctatcattcaacgtttacgttcccaacaagggttattaaaagcagaatcctggaatgaaatatatgacctgactgatccatcagtgcatggtgatattaatatgatgcaacataaaggctttcaacctcctgttcctgggttagatcttccaaactcagaacatgaaattattgcaaccgtagaagctgcatggccaggccttaaaattgcagttaaccttactcccgccgaagtcgaaggatggagaatatataccgtgggtgagctggttaaagaaatacaaacaggagcctttacgccagcaaaattgtaa

SEQ ID NO: 11369 - DNA, 1653 bp, Escherichia coli O157:H7 str. Sakai; identical to SEQ ID NO: 11366

SEQ ID NO: 11370 - DNA, 708 bp, Escherichia coli O157:H7 str. Sakai; identical to SEQ ID NO: 11367

SEQ ID NO: 11371 - DNA, 1104 bp, Escherichia coli O157:H7 str. Sakai; identical to SEQ ID NO: 11368

SEQ ID NO: 11372 - DNA, 1653 bp, Escherichia coli ATCC 8739
atgttagcgcagctttttgagcagttgtttcaatcgatagactctacactgatcaccaatattttcatctgggctgttatattcgtatttttatcagcgtggtggtgtgacaaaaaaaatatacatagtaagtttagagaatatgctccaaccttaatgggggcattaggtattctgggtactttcattggtattattattggtttactcaattttaataccgaaagtattgataccagcatccccgtattattaggtggcctaaaaacagcattcattacaagcattgtaggtatgttttttgccattttatttaatggaatggatgctttcttttttgccaataaacgaagtgcgttagctgaaaataaccctgaatctgttacacctgaacatatctatcatgaattaaaagagcagaaccagactctgactaaattagtctcgggtattaacggtgatagtgaaggttctcttattgctcaaataaaattactacgtactgagattagcgattcctcgcaggcacaattagctaatcacactcatttcagtaataagctttgggaacaacttgaacaatttgcagatctaatggcaaaaggtgctacagaacaaattattgatgctttgcgacaagtcattattgattttaatgaaaatttaactgaacagtttggtgaaaactttaaagctcttgatgcctctgtaaaaaaacttgttgagtggcagggaaattataaaacgcaaattgagcagatgtcagaacaatatcaacaaagtgtcgagtccctggttgaaacaaaaactgcggttgcagggatttgggaagaatgtaaagaaattcctctggctatgtctgaactgcgtgaagtgcttcaggtgaaccaacatcaaatcagcgaactctcccgccatttagaaacctttgtcgccatccgcgataaagctacaaccgtattacctgaaatacagaacaaaatggctgaagtgggtgaactgctgaaatccggagctgcaaatgttagtgcatctcttgagcaaaccagccagcaaatacttcttaatgcagattcaatgcgcgttgccctggatgaaggtaccgaaggattcagacaatcggttacccaaacacaacaagcatttgcctcgatggcgcatgatgtcagcaattcctccgaaaccctaaccagcacgttaggtgaaacaattactgaaatgaaacaaagtggtgaagaattcctgaaatcactagagtcgcactcgaaagaattgcatagaaatatggaacaaaatacgacgaatgtgattgatatgttcagtaagactggtgaaaagattaaccatcaactatccagtaatgccgataatatgtttgattcaatccagacatcatttgataaggctggtgcagggctgacttctcaagtcagagaatcaattgaaaaatttgctctatccatcaacgagcagttacatgcttttgagcaagcaactgaacgtgaaatgaaccgtgaaatgcaatcattaggtaatgctctgctttcaatcagcaaaggttttgtcggtaactatgaaaaacttattaaagattaccaaatagttatggggcagttacaagcattaatttctgctaataaacatcgagggtaa

SEQ ID NO: 11373 - DNA, 708 bp, Escherichia coli ATCC 8739
atggataagattatagggaaacaattacctaaaaaagatcaagataatgaacattgggtatccatgtcagacctaatggcagggctgatgatggtttttatgttcatatctattgcttatatgcactacgtacgtattgaaaaagaaaaaattaaagaagttgccgtagcctacgagaatgctcagttacagatttataatgctctggatattgagtttgcaaaggatttacaagactgggatgcagagatcgataaacagactctggaggttcgatttaaatcaccggatgttttatttggcttaggaagcacagagctaaaaccaaagtttaaactcattcttgacgacttctttcctcgctacctaaaagttctagataattatcaggaacatattactgaagtccgcattgaaggtcacacaagtactgactggacaggaacaacgaatcctgatattgcttattttaataatatggcactatcgcaaggtcgtacacgtgcagtattacaatacgtttatgacataaaaaatatcgcgacacaccaacaatgggttaaaagtaaatttgccgcagtaggttattcatctgcacatcccattcttgataaaaccggcaaagaggaccctaatcgctctcgtcgtgtcaccttcaaagttgtaacaaatgccgagttgcagattagaaagattattcaggagtaa

SEQ ID NO: 11374 - DNA, 1104 bp, Escherichia coli ATCC 8739
atgaaattatctatcgacatttcagaacttattcaattagggaagaaaatgttaccagaaggagtcgatttttttctggatgaatcccctattgactttgatcctatagatattgagttatccacgggtaaagaagttagtatcgaagatcttgaccctggtagcgggcttatctcttatcatggccgccaggttcttttatatattcgggaccattcagggcgttatgatgcggctatcgtagatggcgaaaaaggaaaacgttttcatattgcctggtgcagaactcttgatgaaatgcgccataaaaatcgatttgaaaggtatcatgcaactaaccgcatagatggtttattcgaaattgatgatggttcaggtcggagccaggatgttgatttacgggtatgtatgaattgcctcgaacgacttaattataaaggaagtattgataaacaacgaaaaagagagatttttaaatcattctcattaaatgagtttttttcagattatagtacctgttttcgtcatatgcctaagggtatctatgacaaaacaaatagtgggtatgtcgaaaactggaaggaaatatctaaagaaatacgagaaaaggcaaattatgtttgtaatgattgtggcgtgaatttatcaaccgccaaaaacttgtgccatgtccatcataaaaatggcatcaaatatgataatcaccatgaaaaccttcttgttctgtgcaaggattgccatcgaaaacagcccctccacgaaggtatattcgttacccaagcagagatggctatcattcaacgtttacgttcccaacaagggttattaaaagcagaatcctggaatgaaatatatgacctgactgatccatcagtgcatggtgatattaatatgatgcaacataaaggctttcaacctcctgttcctgggttagatcttcaaaactcagaacatgaaattattgcaaccgtagaagctgcatggccaggccttaaaattgcagttaaccttactcccgccgaagtcgaaggatggagaatatataccgtgggtgagctggttaaagaaatacaaaccggagcctttacgccagcaaaattgtaa

SEQ ID NO: 11375 - DNA, 1653 bp, Escherichia coli SMS-3-5
atgttagcgcagctttttgagcagttgtttcaatcgatagactctacactgatcaccaatattttcatctgggctgttatattcgtatttttatcagcgtggtggtgtgacaaaaaaaatatacatagtaagtttagagaatatgctccaaccttaatgggggcattaggtattctgggtactttcattggtattattattgggttactcaattttaatactgaaagtattgataccagcatccccgtattattaggcggcctaaaaacagcattcattacaagcattgtaggtatgttttttgccattttatttaatggaatggatgctttcttttttgccaataaacgaagtgcgttagcagaaaataaccctgaatctgttacacctgaacatatctatcatgaattaaaagagcagaaccagactctgactaaattagtctcgggtattaacggtgatagtgaaggttctcttattgctcaaataaaattactacgtactgagattagcgattcctcgcaggcacaattagctaatcacactcatttcagtaataagctttgggaacaacttgaacaatttgcagatctaatggcaaaaggtgctacagaacaaattattgatgctttacgacaagtcattattgattttaatgaaaatttaactgaacagtttggtgaaaactttaaagcacttgatgcctctgtaaaaaaacttgttgagtggcaggaaaattataaaacgcaagttgagctgatgtcagaacaatatcaacaaagtgtcgagtctctggttgaaacaaaaactgcggttgccgggatttgggaagaatgtaaagaaattcctctggctatgtctgaactgcgtgaagtgcttcaggtgaaccaacatcaaatcagcgaactctcccgccatttagaaacctttgtcgccatccgcgataaagctacaaccgtattacctgaaatacagaacaaaatggctgaagtgggtgaactgctgaaatccggagctgcaaatgttagtgcatctcttgagcaaaccagccagcaaatacttcttaatgcagattcaatgcgcgtggccctggatgaaggtaccgaaggattcagacaatcggttacccaaacacaacaagcatttgcctcgatggcacatgatgtcagcaattcctccgaaactctaaccagcacgttaggtgaaacaattactgaaatgaaacaaagtggtgaagaattcctgaagtcactagagtcgcactcgaaagaattgcatagaaatatggaacaaaatacgactaatgtaattgatatgttcagtaagactggtgaaaagattaaccatcaactatccagtaatgccgataatatgtttgattcaatccagacatcatttgataaggcaagtgcagggctgacttctcaagtcagagaatcaattgaaaaatttgctctatccatcaacgagcagttacatgcttttgagcaagcaactgaacgtgagatgaaccgtgaaatgcaatcattaggtaatgctctgctttcaatcagcaaaggttttgtcggtaactatgaaaaacttattaaagattaccaaataattatggggcagttacaagcattaatttctgctaataaacatcgagggtaa

SEQ ID NO: 11376 - DNA, 708 bp, Escherichia coli SMS-3-5
atggataagattatagggaaacaattacctaaaaaagatcaagataatgaacactgggtatccatgtcagacctaatggcagggctgatgatggtttttatgttcatatctattgcttatatgcactacgtacgtattgaaaaagaaaaaattaaagaagttgccgtagcctacgagaatgctcagttacagctttataatgctctggatattgagtttgcaaaggatttgcaagactgggatgcagagatcgataagcagactctggaggttcgatttaaatcaccggatgttttatttggcttaggaagcacagagcttaaaccaaagtttaaactcattcttgacgacttctttcctcgctacctaaaagttcttgataattatcaagaacatattactgaagtccgcattgaaggtcacacaagtactgactggactggaacaacgaatcctgatattgcttattttaataatatggcactatcacaaggtcgtacacgtgcagtattacaatacgtttatgatataaaaaatatcgcgacacaccaacaatgggttaaaagtaaatttgccgcagtaggttattcatctgcacatcccattcttgataaaaccggcaaggaggatcctaatcgctctcgtcgtgtcaccttcaaagttgtaacaaatgccgagttgcagattagaaagattattcaggagtaa

SEQ ID NO: 11377 - DNA, 1104 bp, Escherichia coli SMS-3-5
atgaaattatctatcgacatttcagaacttattcaattagggaagaaaatgttaccagaaggagtcgatttttttctggatgaatcccctattgactttgatcctatagatattgagttatccacgggtaaagaagttagtatcgaagatcttgaccctggtagcgggctaatctcttatcatggccgccaggttcttttatatattagggaccattcagggcgttatgatgcggctatcatcgatggcgaaaaaggaaaacgttttcatattgcctggtgcagaactcttgatgaaatgcgccataaaaatcgatttgaaaggtatcatgcaactaaccgcatagatggtttattcgaaattgatgatggttcaggccggagccaggatgttgatttacgggtatgtatgaattgtctggaacgacttaattacaaaggaagtattgataaacaaaggaaaagagagatttttaaatcattctcattaaatgagtttttttcagattatagtacctgttttcgtcatatgcctaagggtatctatgacaaaacaaatagtgggtatgtcgaaaactggaaagatatatcaaaatcaatacgagaaaaggccaagtatacttgtaatgattgtggtgtgaatttatcaaccgccaaaaacttgtgccatgtccatcataaaaatggcatcaaatatgataatcaccatgaaaaccttcttgttctgtgtaaggattgccatcgtaaacagcccctccatgaaggtatattcgttacccaagctgagatggctatcattcaacgtttacgttcccaacaagggttattaaaagccgaatcctggaatgaaatatatgacctgactgatccatcagtacatggtgatattaatatgatgcaacataaaggctttcaacctcctgttcctgggttagatcttcaaaactcagaacatgaaattattgcaaccgtagaagcagcatggccaggccttaaaattgcagttaaccttactcccgccgaagtcgaaggatggagaatatataccgtgggtgagctggttaaagaaatacaaacaggagcctttacgtcagcaacgttgtaa

SEQ ID NO: 11378 - DNA, 1653 bp, Escherichia coli O157:H7 str. EC4115; identical to SEQ ID NO: 11366

SEQ ID NO: 11379 - DNA, 708 bp, Escherichia coli O157:H7 str. EC4115; identical to SEQ ID NO: 11367

SEQ ID NO: 11380 - DNA, 1104 bp, Escherichia coli O157:H7 str. EC4115; identical to SEQ ID NO: 11368

SEQ ID NO: 11381 - DNA, 1653 bp, Escherichia coli O157:H7 str. TW14359; identical to SEQ ID NO: 11366

SEQ ID NO: 11382 - DNA, 708 bp, Escherichia coli O157:H7 str. TW14359; identical to SEQ ID NO: 11367

SEQ ID NO: 11383 - DNA, 1104 bp, Escherichia coli O157:H7 str. TW14359; identical to SEQ ID NO: 11368

SEQ ID NO: 11384 - DNA, 1653 bp, Escherichia coli O55:H7 str. CB9615; identical to SEQ ID NO: 11366

SEQ ID NO: 11385 - DNA, 708 bp, Escherichia coli O55:H7 str. CB9615
atggataagattatagggaaacaattacctaaaaaagatcaagataatgaacattgggtatccatgtcggacctaatggcagggctgatgatggtttttatgttcatatctattgcttatatgcactacgtacgtattgaaaaagaaaaaattaaagaagttgccgtagcctacgagaatgctcagttacagctttataatgctctggatattgagtttgcaaaggatttacaagactgggatgcagagatcgataaacagactctggaggttcgatttaaatcaccggatgttttatttggcttaggaagcacagagctaaaaccaaagtttaaactcattcttgacgacttctttcctcgctacctaaaagttctagataattatcaggaacatattactgaagtccgcattgaaggtcacacaagtactgactggacaggaacaacgaatcctgatattgcttattttaataatatggcactatcgcaaggtcgtacacgtgcagtattacaatacgtttatgacataaaaaatatcgcgacacaccaacaatgggttaaaagtaaatttgccgcagtaggttattcatctgcacatcccattcttgataaaaccggcaaggaggatcctaatcgctctcgtcgtgtcaccttcaaagttgtaacaaatgccgagttgcagattagaaagattattcaggagtaa

SEQ ID NO: 11386 - DNA, 1104 bp, Escherichia coli O55:H7 str. CB9615
atgaaattatctatcgacatttcagaacttattcaattagggaagaaaatgttaccagaaggagtcgatttttttctggatgaatcccctattgactttgatcctatagatattgagttatccacgggtaaagaagttagtatcgaagatcttgaccctggtagcgggcttatctcttatcatggccgccaggttcttttatatattcgggaccattcagggcgttatgatgcggctatcgtagatggcgaaaaaggaaaacgttttcatattgcctggtgcagaactcttgatgaaatgcgccataaaaatcgatttgaaaggtatcatgcaactaaccgcatagatggtttattcgaaattgatgatggttcaggtcggagccaggatgttgatttacgggtatgtatgaattgcctcgaacgacttaattataaaggaagtattgataaacaacgaaaaagagagatttttaaatcattctcattaaatgagtttttttcagattatagtacctgttttcgtcatatgcctaagggtatctatgacaaaacaaatagtgggtatgtcgaaaactggaaggaaatatctaaagaaatacgagaaaaggcaaattatgtttgtaatgattgtggcgtgaatttatcaaccgccaaaaacttgtgccatgtccatcataaaaatggcatcaaatatgataatcaccatgaaaaccttcttgttctgtgcaaggattgccatcgaaaacagcccctccacgaaggtatattcgttacccaagcagagatggctatcattcaacgtttacgttcccaacaagggttattaaaagcagaatcctggaatgaaatatatgacctgactgatccatcagtgcatggtgatattaatatgatgcaacataaaggctttcaacctcctgttcctgggttagatcttcaaaactcagaacatgaaattattgcaaccgtagaagctgcatggccaggccttaaaattgcagttaaccttactcccgccgaagtcgaaggatggagaatatataccgtgggtgagctggttaaagaaatacaaacaggagcctttacgccagcaaaattgtaa

SEQ ID NO: 11387 - DNA, 1653 bp, Escherichia coli O157:H7 str. TW14588; identical to SEQ ID NO: 11366

SEQ ID NO: 11388 - DNA, 708 bp, Escherichia coli O157:H7 str. TW14588; identical to SEQ ID NO: 11367

SEQ ID NO: 11389 - DNA, 1104 bp, Escherichia coli O157:H7 str. TW14588; identical to SEQ ID NO: 11368

SEQ ID NO: 11390 - DNA, 1653 bp, Escherichia coli MS 187-1
atgttagcgcagctttttgagcagttgtttcaatcgatagactctacactgatcaccaatattttcatctggactgttatattcgtatttttatcagcgtggtggtgtgacaaaaaaaatatacatagtaagtttagagaatatgctccaaccttaatgggggcattaggtattctgggtactttcattggtattattattggtttactcaattttaataccgaaagtattgataccagcatccccgtattattaggtggcctaaaaacagcattcattacaagcattgtaggtatgttttttgccattttatttaatggaatggatgctttcttttttgccaataaacgaagtgcgttagcagaaaataaccctgaatctgttacacctgaacatatctatcatgaattaaaagagcagaaccagactctgactaaattagtctcgggtattaacggtgatagtgaaggttctcttattgctcaaataaaattactacgtactgagattagcgattcctcgcaggcacaattagctaatcacactcatttcagtaataagctttgggaacaacttgaacaatttgcagatctaatggcaaaaggtgctacagaacaaattattgatgctttgcgacaagtcattattgattttaatcaaaatttaactgaacagtttggtgaaaactttaaagctcttgatgcctctgtaaaaaaacttgttgagtggcagggaaattataaaacgcaaattgagcagatgtcagaacaatatcaacaaagtgtcgagtccctggttgaaacaaaaactgcggttgcagggatttgggaagaatgtaaagaaattcctctggctatgtctgaactgcgtgaagtgcttcaggtgaaccaacatcaaatcagcgaactctcccgccatttagaaacctttgtcgccatccgcgataaagctacaaccgtattacctgaaatacagaacaaaatggctgaagtgggtgaactgctgaaatccggagctgcaaatgttagtgcatctcttgagcaaaccagccagcaaatacttcttaatgcagattcaatgcgcgttgccctggatgaaggtaccgaaggattcagacaatcggttacccaaacacaacaagcatttgcctcgatggcacatgatgtcagcaattcctccgaaaccctaaccagcacgttaggtgaaacaattactgaaatgaaacaaagtggtgaagaattcctgaaatcactagagtcgcactcgaaagaattgcatagaaatatggaacaaaatacgacgaatgtgattgatatgttcagtaagactggtgaaaagattaaccatcaactatccagtaatgccgataatatgtttgattcaatccagacatcatttgataaggcaagtgcagggctgacttctcaagtcagagaatcaattgaaaaatttgctctatccatcaacgagcagttacatgcttttgagcaagcaactgaacgtgaaatgaaccgtgaaatgcaatcattaggtaatgctctgctttcaatcagcaaaggttttgtcggtaactatgaaaaacttattaaagattaccaaatagttatggggcagttacaagcattaatttctgctaataaacatcgcgggtaa

SEQ ID NO: 11391 - DNA, 708 bp, Escherichia coli MS 187-1
atggataagattatagggaaacaattacctaaaaaagatcaagataatgaacattgggtatccatgtcagacctaatggcagggctgatgatggtttttatgttcatatctattgcttatatgcactacgtacgtattgaaaaagaaaaaattaaagaagttgccgtagcctacgagaatgctcagttacagctttataatgctctggatattgagtttgcaaaggatttaaaagactgggatgcagagatcgataaacagactctggaggttcgatttaaatcaccggatgttttatttggcttaggaagcacagagctaaaaccaaagtttaaactcattcttgacgacttctttcctcgctacctaaaagttctagataattatcaggaacatattactgaagtccgcattgaaggtcacacaagtactgactggacaggaacaacgaatcctgatattgcttattttaataatatggcactatcgcaaggtcgtacacgtgcagtattacaatacgtttatgacataaaaaatatcgcgacacaccaacaatgggttaaaagtaaatttgccgcagtaggttattcatctgcacatcccattcttgataaaaccggcaaggaggatcctaatcgctctcgtcgtgtcaccttcaaagttgtaacaaatgccgagttgcagattagaaagattattcaggagtaa

SEQ ID NO: 11392 - DNA, 1104 bp, Escherichia coli MS 187-1
atgaaattatctatcgacctttcagaacttattcaattagggaagaaaatgttaccagaaggagtcgatttttttctggatgaatcccctattgactttgatcctatagatattgagttatccacgggtaaagaagttagtatcgaagatcttgaccctggtagcgggcttatctcttatcatggccgccaggttcttttatatattcgggaccattcagggcgttatgatgcggctatcgtagatggcgaaaaaggaaaacgttttcatattgcctggtgcagaactcttgatgaaatgcgccataaaaatcgatttgaaaggtatcatgcaactaaccgcatagatggtttattcgaaattgatgatggttcaggtcggagccaggatgttgatttacgggtatgtatgaattgcctcgaacgacttaattataaaggaagtattgataaacaacgaaaaagagagatttttaaatcattctcattaaatgagtttttttcagattatagtacctgttttcgtcatatgcctaagggtatctatgacaaaacaaatagtgggtatgtcgaaaactggaaggaaatatctaaagaaatacgagaaaaggccaattatgtttgtaatgattgtggcgtgaatttatcaaccgccaaaaacttgtgccatgtccatcataaaaatggcatcaaatatgataatcaccatgaaaaccttcttgttctgtgcaaggattgccatcgaaaacagcccctccacgaaggtatattcgttacccaagctgagatggctatcattcaacgtttacgttcccaacaagggctattaaaagcagaatcctggaatgaaatatatgacctgactgatccatcagtgcatggtgatattaatatgatgcaacataaaggctttcaacctcctgttcctgggttagatcttcaaaactcagaacatgaaattattgcaaccgtagaagctgcatggccaggccttaaaattgcagttaaccttactcccgccgaagtcgaaggatggagaatatataccgtgggtgagctggttaaagaaatacaaaccggagcctttacgccagcaactttgtaa

SEQ ID NO: 11393 - DNA, 1653 bp, Escherichia coli O157:H7 str. EC4196; identical to SEQ ID NO: 11366

SEQ ID NO: 11394 - DNA, 708 bp, Escherichia coli O157:H7 str. EC4196; identical to SEQ ID NO: 11367

SEQ ID NO: 11395 - DNA, 1104 bp, Escherichia coli O157:H7 str. EC4196; identical to SEQ ID NO: 11368

SEQ ID NO: 11396 - DNA, 1653 bp, Escherichia coli O157:H7 str. EC4113; identical to SEQ ID NO: 11366

SEQ ID NO: 11397 - DNA, 708 bp, Escherichia coli O157:H7 str. EC4113; identical to SEQ ID NO: 11367

SEQ ID NO: 11398 - DNA, 1104 bp, Escherichia coli O157:H7 str. EC4113; identical to SEQ ID NO: 11368

SEQ ID NO: 11399 - DNA, 1653 bp, Escherichia coli O157:H7 str. EC4076; identical to SEQ ID NO: 11366

SEQ ID NO: 11400 - DNA, 708 bp, Escherichia coli O157:H7 str. EC4076; identical to SEQ ID NO: 11367

SEQ ID NO: 11401 - DNA, 1104 bp, Escherichia coli O157:H7 str. EC4076; identical to SEQ ID NO: 11368

SEQ ID NO: 11402 - DNA, 1653 bp, Escherichia coli O157:H7 str. EC4401; identical to SEQ ID NO: 11366

SEQ ID NO: 11403 - DNA, 708 bp, Escherichia coli O157:H7 str. EC4401; identical to SEQ ID NO: 11367

SEQ ID NO: 11404 - DNA, 1104 bp, Escherichia coli O157:H7 str. EC4401; identical to SEQ ID NO: 11368

SEQ ID NO: 11405 - DNA, 1653 bp, Escherichia coli O157:H7 str. EC4486; identical to SEQ ID NO: 11366

SEQ ID NO: 11406 - DNA, 708 bp, Escherichia coli O157:H7 str. EC4486; identical to SEQ ID NO: 11367

SEQ ID NO: 11407 - DNA, 1104 bp, Escherichia coli O157:H7 str. EC4486; identical to SEQ ID NO: 11368

SEQ ID NO: 11408 - DNA, 1653 bp, Escherichia coli O157:H7 str. EC4501; identical to SEQ ID NO: 11366

SEQ ID NO: 11409 - DNA, 708 bp, Escherichia coli O157:H7 str. EC4501; identical to SEQ ID NO: 11367

SEQ ID NO: 11410 - DNA, 1104 bp, Escherichia coli O157:H7 str. EC4501; identical to SEQ ID NO: 11368

SEQ ID NO: 11411 - DNA, 1653 bp, Escherichia coli O157:H7 str. EC869; identical to SEQ ID NO: 11366

SEQ ID NO: 11412 - DNA, 708 bp, Escherichia coli O157:H7 str. EC869; identical to SEQ ID NO: 11367

SEQ ID NO: 11413 - DNA, 1104 bp, Escherichia coli O157:H7 str. EC869; identical to SEQ ID NO: 11368

SEQ ID NO: 11414 - DNA, 1653 bp, Escherichia coli O157:H7 str. EC508; identical to SEQ ID NO: 11366

SEQ ID NO: 11415 - DNA, 708 bp, Escherichia coli O157:H7 str. EC508; identical to SEQ ID NO: 11367

SEQ ID NO: 11416 - DNA, 1104 bp, Escherichia coli O157:H7 str. EC508
atgaaattatctatcgacatttcagaacttattcaattagggaagaaaatgttaccagaaggagtcgatttttttctggatgaatcccctattgactttgatcctatagatattgagttatccacgggtaaagaagttagtatcgaagatcttgaccctggtagcgggcttatctcttatcatggccgccaggttcttttatatattcgggaccattcagggcgttatgatgcggctatcgtagatggcgaaaaaggaaaacgttttcatattgcctggtgcagaactcttgatgaaatgcgccataaaaatcgatttgaaaggtatcatgcaactaaccgcatagatggtttattcgaaattaatgatggttcaggtcggagccaggatgttgatttacgggtatgtatgaattgcctcgaacgacttaattataaaggaagtattgataaacaacgaaaaagagagatttttaaatcattctcattaaatgagtttttttcagattatagtacttgttttcgtcatatgcctaagggtatctatgacaaaacaaatagtgggtatgtcgaaaactggaaggaaatatctaaagaaatacgagaaaaggcaaattatgtttgtaatgattgtggcgtgaatttatcaaccgccaaaaacttgtgccatgtccatcataaaaatggcatcaaatatgataatcaccatgaaaaccttcttgttctgtgcaaggattgccatcgaaaacagcccctccacgaaggtatattcgttacccaagcagagatggctatcattcaacgtttacgttcccaacaagggttattaaaagcagaatcctggaatgaaatatatgacctgactgatccatcagtgcatggtgatattaatatgatgcaacataaaggctttcaacctcctgttcctgggttagatcttccaaactcagaacatgaaattattgcaaccgtagaagctgcatggccaggccttaaaattgcagttaaccttactcccgccgaagtcgaaggatggagaatatataccgtgggtgagctggttaaagaaatacaaacaggagcctttacgccagcaaaattgtaa

SEQ ID NO: 11417 - DNA, 1653 bp, Escherichia coli TA143
atgttagcgcagctttttgagcagttgtttcaatcgatagactctacactgatcaccaatattttcatctgggctgttatattcgtatttttatcagcgtggtggtgtgacaaaaaaaatatacatagtaaatttagagaatatgctccaaccttaatgggggcattaggtattctgggtactttcattggtattattattgggttactcaattttaatactgaaagtattgataccagcatccccgtattattaggcggcctaaaaacagcattcattacaagcattgtaggtatgttttttgccattttatttaatggaatggatgctttcttttttgccaataaacgaagtgcgttagcagaaaataaccctgaatctgttacacctgaacatatctatcatgaattaaaagagcagaaccagactctgactaaattagtctcgggtattaacggtgatagtgaaggttctcttattgctcaaataaaattactacgtactgagattagcgattcctcgcaggcacaattagctaatcacactcatttcagtaataagctttgggaacaacttgaacaatttgcagatctaatggcaaaaggtgctacagaacaaattattgatgctttacgacaagtcattattgattttaatgaaaatttaactgaacagtttggtgaaaactttaaagcacttgatgcctctgtaaaaaaacttgttgagtggcaggaaaattataaaacgcaagttgagctgatgtcagaacaatatcaacaaagtgtcgagtctctggttgaaacaaaaactgcggttgccgggatttgggaagaatgtaaagaaattcctctggctatgtctgaactgcgtgaagtgcttcaggtgaaccaacatcaaatcagcgaactctcccgccatttagaaacctttgtcgccatccgcgataaagctacaaccgtattacctgaaatacagaataaaatggctgaagtgggtgaactgctgaaatccggagctgcaaatgttagtgcatctcttgagcaaaccagccagcaaatacttcttaatgcagattcaatgcgcgtggccctggatgaaggtaccgaaggattcagacaatcggttacccaaacacaacaagcatttgcctcgatggcacatgatgtcagcaattcctccgaaaccctaaccagcacgttaggtgaaacaattactgaaatgaaacaaagtggtgaagaattcctgaagtcactagagtcacactcgaaagaattgcatagaaatatggaacaaaatacgactaatgtgattgatatgttcagtaagactggtgaaaagattaaccatcaactatccagtaatgccgataatatgtttgattcaatccagacatcatttgataaggcaagtgcagggctgacttctcaagtcagagaatcaattgaaaaatttgctctatccatcaacgagcagttacatgcttttgagcaagcaactgaacgtgagatgaaccgtgaaatgcaatcattaggtaatgctctgctttcaatcagcaaaggttttgtcggtaactatgaaaaacttattaaagattaccaaatagttatggggcagttacaagcattaatttctgctaataaacatcgagggtaa

SEQ ID NO: 11418 - DNA, 480 bp, Escherichia coli TA143
ttgcaagactgggatgcagagatcgataagcagactctggaggttcgatttaaatcaccggatgttttatttggcttaggaagcacagagcttaaaccaaagtttaaactcattcttgacgacttctttcctcgctacctaaaagttcttgataattatcaagaacatattactgaagtccgcattgaaggtcacacaagtactgactggactggaacaacgaatcctgatattgcttattttaataatatggcactatcacaaggtcgtacacgtgcagtattacaatacgtttatgatataaaaaatatcgcgacacaccaacaatgggttaaaagtaaatttgccgcagtaggttattcatctgcacatcccattcttgataaaaccggcaaggaggatcctaatcgctctcgtcgagtcaccttcaaagttgtaacaaatgccgagttgcagattagaaagattattcaggagtaa

SEQ ID NO: 11419 - DNA, 1104 bp, Escherichia coli TA143
atgaaattatctatcgacatttcagaacttattcaattagggaagaaaatgttaccagaaggagtcgatttttttctggatgaatcccctattgactttgatcctatagatattgagttatccacgggtaaagaagttagtatcgaagatcttgaccctggtagcgggcttatctcttatcatggccgccaggttcttttatatattcgggaccattcagggcgttatgatgcggctatcgtagatggcgaaaaaggaaaacgttttcatattgcctggtgcagaactcttgatgaaatgcgccataaaaatcgatttgaaaggtatcatgcaactaaccgcatagatggtttattcgaaattgatgatggttcaggtcggagccaggatgttgatttacgggtatgtatgaattgcctcgaacgacttaattataaaggaagtattgataaacaacgaaaaagagagatttttaaatcattctcattaaatgagtttttttcagattatagtacctgttttcgtcatatgcctaagggtatctatgacaaaacaaatagtgggtatgtcgaaaactggaaagatatatctaaatcaatacgagaaaaggccaagtatacttgtaatgattgtggtgtgaatttatcaaccgccaaaaacttgtgccatgtccatcataaaaatggcatcaaatatgataatcaccatgaaaaccttcttgttctgtgtaaggattgccatcgtaaacagcccctccatgaaggtatattcgttacccaagctgagatggctatcattcaacgtttacgttcccaacaagggttattaaaagccgaatcctggaatgaaatatatgacctgactgatccatcagtacatggtgatattaatatgatgcaacataaaggctttcaacctcctgttcctgggttagatcttcaaaactcagaacatgaaattattgcaaccgtagaagcagcatggccaggtcttaaaattgcagttaaccttactcccgccgaagtcgaaggatggagaatatataccgtgggtgagctggttaaagaaatacaaaccggagcctttacgtcagcaacgttgtaa

SEQ ID NO: 11420 - DNA, 1653 bp, Escherichia coli O157:H7 str. EC4206; identical to SEQ ID NO: 11366

SEQ ID NO: 11421 - DNA, 708 bp, Escherichia coli O157:H7 str. EC4206; identical to SEQ ID NO: 11367

SEQ ID NO: 11422 - DNA, 1104 bp, Escherichia coli O157:H7 str. EC4206; identical to SEQ ID NO: 11368

SEQ ID NO: 11423 - DNA, 1653 bp, Escherichia coli O157:H7 str. EC4045; identical to SEQ ID NO: 11366

SEQ ID NO: 11424 - DNA, 708 bp, Escherichia coli O157:H7 str. EC4045; identical to SEQ ID NO: 11367

SEQ ID NO: 11425 - DNA, 1104 bp, Escherichia coli O157:H7 str. EC4045; identical to SEQ ID NO: 11368

SEQ ID NO: 11426 - DNA, 1653 bp, Escherichia coli O157:H7 str. EC4042; identical to SEQ ID NO: 11366

SEQ ID NO: 11427 - DNA, 708 bp, Escherichia coli O157:H7 str. EC4042; identical to SEQ ID NO: 11367

SEQ ID NO: 11428 - DNA, 1104 bp, Escherichia coli O157:H7 str. EC4042; identical to SEQ ID NO: 11368

SEQ ID NO: 11429 - DNA, 1653 bp, Escherichia coli O157:H7 str. G5101; identical to SEQ ID NO: 11366

SEQ ID NO: 11430 - DNA, 708 bp, Escherichia coli O157:H7 str. G5101; identical to SEQ ID NO: 11385

SEQ ID NO: 11431 - DNA, 1104 bp, Escherichia coli O157:H7 str. G5101; identical to SEQ ID NO: 11386

SEQ ID NO: 11432 - DNA, 1653 bp, Escherichia coli O157:H- str. 493-89
atgttagcgcagctttttgagcagttgtttcaatcgatagactctacactgatcaccaatattttcatctgggctgttatattcgtatttttatcagcgtggtggtgtgacaaaaaaaatatacatagtaagtttagagaatatgctccaaccttaatgggggcattaggtattctgggtactttcattggtattattattggtttactcaattttaataccgaaagtattgataccagcatccccgtattattaggtggcctaaaaacagcattcattacaagcattgtaggtatgttttttgccattttatttaatggaatggatgctttcttttttgccaataaacgaagtgcgttagcagaaaataaccctgaatctgttacacctgaacatatctatcatgaattaaaagagcagaaccagactctgactaaattagtctcgggtattaacggtgatagtgaaggttctcttattgctcaaataaaattactacgtactgagattagcgattcctcgcaggcacaattagctaatcacactcatttcagtaataagctttgggaacaacttgaacaatttgcagatctaatggcaaaaggtgctacagaacaaattattgatgctttgcgacaagtcattattgattttaatcaaaatttaactgaacagtttggtgaaaactttaaagctcttgatgcctctgtaaaaaaacttgttgagtggcagggaaattataaaacgcaaattgagcagatgtcagaacaatatcaacaaagtgtcgagtccctggttgaaacaaaaactgcggttgcagggatttgggaagaatgtaaagaaattcctctggctatgtctgaactgcgtgaagtgcttcaggtgaaccaacatcaaatcagcgaactctcccgccatttagaaacctttgtcgccatccgcgataaagctacaaccgtattacctgaaatacagaacaaaatggctgaagtgggtgaactgctgaaatccggagctgcaaatgttagtgcatctcttgagcaaaccagccagcaaatacttcttaatgcagattcaatgcgcgttgccctagatgaaggtaccgaaggattcagacaatcggttacccaaacacaacaagcatttgcctcgatggcacatgatgtcagcaattcctccgaaaccctaaccagcacgttaggtgaaacaattactgaaatgaaacaaagtggtgaagaattcctgaaatcactagagtcgcactcgaaagaattgcatagaaatatggaacaaaatacgacgaatgtgattgatatgttcagtaagactggtgaaaagattaaccatcaactatccagtaatgccgataatatgtttgattcaatccagacatcatttgataaggcaagtgcagggctgacttctcaagtcagagaatcaattgaaaaatttgctctatccatcaacgagcagttacatgcttttgagcaagcaactgaacgtgaaatgaaccgtgaaatgcaatcattaggtaatgctctgctttcaatcagcaaaggttttgtcggtaactatgaaaaacttattaaagattaccaaatagttatggggcagttacaagcattaatttctgctaataaacatcgcgggtaa

SEQ ID NO: 11433 - DNA, 708 bp, Escherichia coli O157:H- str. 493-89; identical to SEQ ID NO: 11385

SEQ ID NO: 11434 - DNA, 1104 bp, Escherichia coli O157:H- str. 493-89; identical to SEQ ID NO: 11386

SEQ ID NO: 11435 - DNA, 1653 bp, Escherichia coli O157:H- str. H 2687; identical to SEQ ID NO: 11432

SEQ ID NO: 11436 - DNA, 708 bp, Escherichia coli O157:H- str. H 2687; identical to SEQ ID NO: 11385

SEQ ID NO: 11437 - DNA, 1104 bp, Escherichia coli O157:H- str. H 2687; identical to SEQ ID NO: 11386

SEQ ID NO: 11438 - DNA, 1497 bp, Escherichia coli O55:H7 str. USDA 5905
atgggggcattaggtattctgggtactttcattggtattattattggtttactcaattttaataccgaaagtattgataccagcatccccgtattattaggtggcctaaaaacagcattcattacaagcattgtaggtatgttttttgccattttatttaatggaatggatgctttcttttttgccaataaacgaagtgcgttagcagaaaataaccctgaatctgttacacctgaacatatctatcatgaattaaaagagcagaaccagactctgactaaattagtctcgggtattaacggtgatagtgaaggttctcttattgctcaaataaaattactacgtactgagattagcgattcctcgcaggcacaattagctaatcacactcatttcagtaataagctttgggaacaacttgaacaatttgcagatctaatggcaaaaggtgctacagaacaaattattgatgctttgcgacaagtcattattgattttaatcaaaatttaactgaacagtttggtgaaaactttaaagctcttgatgcctctgtaaaaaaacttgttgagtggcagggaaattataaaacgcaaattgagcagatgtcagaacaatatcaacaaagtgtcgagtccctggttgaaacaaaaactgcggttgcagggatttgggaagaatgtaaagaaattcctctggctatgtctgaactgcgtgaagtgcttcaggtgaaccaacatcaaatcagcgaactctcccgccatttagaaacctttgtcgccatccgcgataaagctacaaccgtattacctgaaatacagaacaaaatggctgaagtgggtgaactgctgaaatccggagctgcaaatgttagtgcatctcttgagcaaaccagccagcaaatacttcttaatgcagattcaatgcgcgttgccctggatgaaggtaccgaaggattcagacaatcggttacccaaacacaacaagcatttgcctcgatggcacatgatgtcagcaattcctccgaaaccctaaccagcacgttaggtgaaacaattactgaaatgaaacaaagtggtgaagaattcctgaaatcactagagtcgcactcgaaagaattgcatagaaatatggaacaaaatacgacgaatgtgattgatatgttcagtaagactggtgaaaagattaaccatcaactatccagtaatgccgataatatgtttgattcaatccagacatcatttgataaggcaagtgcagggctgacttctcaagtcagagaatcaattgaaaaatttgctctatccatcaacgagcagttacatgcttttgagcaagcaactgaacgtgaaatgaaccgtgaaatgcaatcattaggtaatgctctgctttcaatcagcaaaggttttgtcggtaactatgaaaaacttattaaagattaccaaatagttatggggcagttacaagcattaatttctgctaataaacatcgcgggtaa

SEQ ID NO: 11439 - DNA, 708 bp, Escherichia coli O55:H7 str. USDA 5905; identical to SEQ ID NO: 11385

SEQ ID NO: 11440 - DNA, 1104 bp, Escherichia coli O55:H7 str. USDA 5905; identical to SEQ ID NO: 11386

SEQ ID NO: 11441 - DNA, 1497 bp, Escherichia coli O157:H7 str. LSU-61; identical to SEQ ID NO: 11438

SEQ ID NO: 11442 - DNA, 708 bp, Escherichia coli O157:H7 str. LSU-61; identical to SEQ ID NO: 11385

SEQ ID NO: 11443 - DNA, 1104 bp, Escherichia coli O157:H7 str. LSU-61; identical to SEQ ID NO: 11386

SEQ ID NO: 11444 - DNA, 1653 bp, Escherichia coli O157:H7 str. 1044; identical to SEQ ID NO: 11366

SEQ ID NO: 11445 - DNA, 621 bp, Escherichia coli O157:H7 str. 1044
atgatggtttttatgttcatatctattgcttatatgcactacgtacgtattgaaaaagaaaaaattaaagaagttgccgtagcctacgagaatgctcagttacagctttataatgctctggatattgagtttgcaaaggatttacaagactgggatgcagagatcgataaacagactctggaggttcgatttaaatcaccggatgttttatttggcttaggaagcacagagctaaaaccaaagtttaaactcattcttgacgacttctttcctcgctacctaaaagttctagataattatcaggaacatattactgaagtccgcattgaaggtcacacaagtactgactggacaggaacaacgaatcctgatattgcttattttaataatatggcactatcgcaaggtcgtacacgtgcagtattacaatacgtttatgacataaaaaatatcgcgacacaccaacaatgggttaaaagtaaatttgccgcagtaggttattcatctgcacatcccattcttgataaaaccggcaaggaggatcctaatcgctctcgtcgtgtcaccttcaaagttgtaacaaatgccgagttgcagattagaaagattattcaggagtaa

SEQ ID NO: 11446 - DNA, 1104 bp, Escherichia coli O157:H7 str. 1044; identical to SEQ ID NO: 11368

SEQ ID NO: 11447 - DNA, 1653 bp, Escherichia coli O157:H7 str. 1125; identical to SEQ ID NO: 11366

SEQ ID NO: 11448 - DNA, 621 bp, Escherichia coli O157:H7 str. 1125; identical to SEQ ID NO: 11445

SEQ ID NO: 11449 - DNA, 1104 bp, Escherichia coli O157:H7 str. 1125; identical to SEQ ID NO: 11368

SEQ ID NO: 11450 - DNA, 1653 bp, Escherichia coli O157:H7 str. EC1212; identical to SEQ ID NO: 11366

SEQ ID NO: 11451 - DNA, 621 bp, Escherichia coli O157:H7 str. EC1212; identical to SEQ ID NO: 11445

SEQ ID NO: 11452 - DNA, 1104 bp, Escherichia coli O157:H7 str. EC1212; identical to SEQ ID NO: 11368

SEQ ID NO: 11453 - DNA, 1653 bp, Escherichia coli O55:H7 str. RM12579; identical to SEQ ID NO: 11366

SEQ ID NO: 11454 - DNA, 708 bp, Escherichia coli O55:H7 str. RM12579; identical to SEQ ID NO: 11385

SEQ ID NO: 11455 - DNA, 1104 bp, Escherichia coli O55:H7 str. RM12579; identical to SEQ ID NO: 11386

SEQ ID NO: 11456 - DNA, 1653 bp, Escherichia coli DEC4A; identical to SEQ ID NO: 11366

SEQ ID NO: 11457 - DNA, 633 bp, Escherichia coli DEC4A
atggctgggctgatgatggtttttatgttcatatctattgcttatatgcactacgtacgtattgaaaaagaaaaaattaaagaagttgccgtagcctacgagaatgctcagttacagctttataatgctctggatattgagtttgcaaaggatttacaagactgggatgcagagatcgataaacagactctggaggttcgatttaaatcaccggatgttttatttggcttaggaagcacagagctaaaaccaaagtttaaactcattcttgacgacttctttcctcgctacctaaaagttctagataattatcaggaacatattactgaagtccgcattgaaggtcacacaagtactgactggacaggaacaacgaatcctgatattgcttattttaataatatggcactatcgcaaggtcgtacacgtgcagtattacaatacgtttatgacataaaaaatatcgcgacacaccaacaatgggttaaaagtaaatttgccgcagtaggttattcatctgcacatcccattcttgataaaaccggcaaggaggatcctaatcgctctcgtcgtgtcaccttcaaagttgtaacaaatgccgagttgcagattagaaagattattcaggagtaa

SEQ ID NO: 11458 - DNA, 1104 bp, Escherichia coli DEC4A; identical to SEQ ID NO: 11368

SEQ ID NO: 11459 - DNA, 1497 bp, Escherichia coli DEC4B; identical to SEQ ID NO: 11438

SEQ ID NO: 11460 - DNA, 231 bp, Escherichia coli DEC4B
atggcactatcgcaaggtcgtacacgtgcagtattacaatacgtttatgacataaaaaatatcgcgacacaccaacaatgggttaaaagtaaatttgccgcagtaggttattcatctgcacatcccattcttgataaaaccggcaaggaggatcctaatcgctctcgtcgtgtcaccttcaaagttgtaacaaatgccgagttgcagattagaaagattattcaggagtaa

SEQ ID NO: 11461 - DNA, 1104 bp, Escherichia coli DEC4B; identical to SEQ ID NO: 11368

SEQ ID NO: 11462 - DNA, 1497 bp, Escherichia coli DEC5A; identical to SEQ ID NO: 11438

SEQ ID NO: 11463 - DNA, 633 bp, Escherichia coli DEC5A
atggcagggctgatgatggtttttatgttcatatctattgcttatatgcactacgtacgtattgaaaaagaaaaaattaaagaagttgccgtagcctacgagaatgctcagttacagctttataatgctctggatattgagtttgcaaaggatttacaagactgggatgcagagatcgataaacagactctggaggttcgatttaaatcaccggatgttttatttggcttaggaagcacagagctaaaaccaaagtttaaactcattcttgacgacttctttcctcgctacctaaaagttctagataattatcaggaacatattactgaagtccgcattgaaggtcacacaagtactgactggacaggaacaacgaatcctgatattgcttattttaataatatggcactatcgcaaggtcgtacacgtgcagtattacaatacgtttatgacataaaaaatatcgcgacacaccaacaatgggttaaaagtaaatttgccgcagtaggttattcatctgcacatcccattcttgataaaaccggcaaggaggatcctaatcgctctcgtcgtgtcaccttcaaagttgtaacaaatgccgagttgcagattagaaagattattcaggagtaa

SEQ ID NO: 11464 - DNA, 1104 bp, Escherichia coli DEC5A; identical to SEQ ID NO: 11386

SEQ ID NO: 11465 - DNA, 1653 bp, Escherichia coli DEC5C; identical to SEQ ID NO: 11366

SEQ ID NO: 11466 - DNA, 621 bp, Escherichia coli DEC5C; identical to SEQ ID NO: 11445

SEQ ID NO: 11467 - DNA, 1104 bp, Escherichia coli DEC5C; identical to SEQ ID NO: 11386

SEQ ID NO: 11468 - DNA, 1497 bp, Escherichia coli DEC5D; identical to SEQ ID NO: 11438

SEQ ID NO: 11469 - DNA, 633 bp, Escherichia coli DEC5D; identical to SEQ ID NO: 11463

SEQ ID NO: 11470 - DNA, 1104 bp, Escherichia coli DEC5D; identical to SEQ ID NO: 11386

SEQ ID NO: 11471 - DNA, 1653 bp, Escherichia coli M919
atgttagcgcagctttttgagcagttgtttcaatcgatagactctacactgatcaccaatattttcatctgggctgttatattcgtatttttatcagcgtggtggtgtgacaaaaaaaatatacatagtaagtttagagaatatgctccaaccttaatgggggcattaggtattctgggtactttcattggtattattattggtttactcaattttaataccgaaagtattgataccagcatccccgtattattaggtggcctaaaaacagcattcattacaagcattgtaggtatgttttttgccattttatttaatggaatggatgctttcttttttgccaataaacgaagtgcgttagcagaaaataaccttgaatctgttacacctgaacatatctatcatgaattaaaagagcagaaccagactctgactaaattagtctcgggtattaacggtgatagtgaaggttctcttattgctcaaataaaattactacgtactgagattagcgattcctcgcaggcacaattagctaatcacactcatttcagtaataagctttgggaacaacttgaacaatttgcagatctaatggcaaaaggtgctacagaacaaattattgatgctttgcgacaagtcattattgattttaatcaaaatttaactgaacagtttggtgaaaactttaaagctcttgatgcctctgtaaaaaaacttgttgagtggcagggaaattataaaacgcaaattgagcagatgtcagaacaatatcaacaaagtgtcgagtccctggttgaaacaaaaactgcggttgcagggatttgggaagaatgtaaagaaattcctctggctatgtctgaactgcgtgaagtgcttcaggtgaaccaacatcaaatcagcgaactctcccgccatttagaaacctttgtcgccatccgcgataaagctacaaccgtattacctgaaatacagaacaaaatggctgaagtgggtgaactgctgaaatccggagctgcaaatgttagtgcatctcttgagcaaaccagccagcaaatacttcttaatgcagattcaatgcgcgttgccctggatgaaggtaccgaaggattcagacaatcggttacccaaacacaacaagcatttgcctcgatggcacatgatgtcagcaattcctccgaaaccctaaccagcacgttaggtgaaacaattactgaaatgaaacaaagtggtgaagaattcctgaaatcactagagtcgcactcgaaagaattgcatagaaatatggaacaaaatacgacgaatgtgattgatatgttcagtaagactggtgaaaagattaaccatcaactatccagtaatgccgataatatgtttgattcaatccagacatcatttgataaggcaagtgcagggctgacttctcaagtcagagaatcaattgaaaaatttgctctatccatcaacgagcagttacatgcttttgagcaagcaactgaacgtgaaatgaaccgtgaaatgcaatcattaggtaatgctctgctttcaatcagcaaaggttttgtcggtaactatgaaaaacttattaaagattaccaaatagttatggggcagttacaagcattaatttctgctaataaacatcgcgggtaa

SEQ ID NO: 11472 - DNA, 708 bp, Escherichia coli M919
atggataagattatagggaaacaattacctaaaaaagatcaagataatgaacattgggtatccatgtcagacctaatggcagggctgatgatggtttttatgttcatatctattgcttatatgcactacgtacgtattgaaaaagaaaaaattaaagaagttgccgtagcctacgagaatgctcagttacagctttataatgctctggatattgagtttgcaaaggatttacaagactgggatgcagagatcgataaacagactctggaggttcgatttaaatcaccggatgttttatttggcttaggaagcacagagctaaaaccaaagtttaaactcattcttgacgacttctttcctcgctacctaaaagttctagataattatcaggaacatattactgaagtccgcattgaaggtcacacaagtactgactggacaggaacaacgaatcctgatattgcttattttaataatatggcactatcgcaaggtcgtacacgtgcagtattacaatacgtttatgacataaaaaatatcgcgacacaccaacaatgggttaaaagtaaatttgccgcagtaggttattcatctgcacatcccattcttgataaaaccggcaaggaggatcctaatcgctctcgtcgtgtcaccttcaaagttgtaacaaatgccgagttgcagattagaaagattattcaggagtaa

SEQ ID NO: 11473 - DNA, 1104 bp, Escherichia coli M919; identical to SEQ ID NO: 11392

SEQ ID NO: 11474 - DNA, 1653 bp, Escherichia coli Xuzhou21; identical to SEQ ID NO: 11366

SEQ ID NO: 11475 - DNA, 708 bp, Escherichia coli Xuzhou21; identical to SEQ ID NO: 11367

SEQ ID NO: 11476 - DNA, 1104 bp, Escherichia coli Xuzhou21; identical to SEQ ID NO: 11368

SEQ ID NO: 11477 - DNA, 1653 bp, Escherichia coli FDA505; identical to SEQ ID NO: 11366

SEQ ID NO: 11478 - DNA, 633 bp, Escherichia coli FDA505; identical to SEQ ID NO: 11457

SEQ ID NO: 11479 - DNA, 1104 bp, Escherichia coli FDA505; identical to SEQ ID NO: 11368

SEQ ID NO: 11480 - DNA, 1653 bp, Escherichia coli EC1738; identical to SEQ ID NO: 11366

SEQ ID NO: 11481 - DNA, 621 bp, Escherichia coli EC1738; identical to SEQ ID NO: 11445

SEQ ID NO: 11482 - DNA, 1104 bp, Escherichia coli EC1738; identical to SEQ ID NO: 11368

SEQ ID NO: 11483 - DNA, 1653 bp, Escherichia coli EC1734; identical to SEQ ID NO: 11366

SEQ ID NO: 11484 - DNA, 609 bp, Escherichia coli EC1734
atgttcatatctattgcttatatgcactacgtacgtattgaaaaagaaaaaattaaagaagttgccgtagcctacgagaatgctcagttacagctttataatgctctggatattgagtttgcaaaggatttacaagactgggatgcagagatcgataaacagactctggaggttcgatttaaatcaccggatgttttatttggcttaggaagcacagagctaaaaccaaagtttaaactcattcttgacgacttctttcctcgctacctaaaagttctagataattatcaggaacatattactgaagtccgcattgaaggtcacacaagtactgactggacaggaacaacgaatcctgatattgcttattttaataatatggcactatcgcaaggtcgtacacgtgcagtattacaatacgtttatgacataaaaaatatcgcgacacaccaacaatgggttaaaagtaaatttgccgcagtaggttattcatctgcacatcccattcttgataaaaccggcaaggaggatcctaatcgctctcgtcgtgtcaccttcaaagttgtaacaaatgccgagttgcagattagaaagattattcaggagtaa

SEQ ID NO: 11485 - DNA, 1104 bp, Escherichia coli EC1734; identical to SEQ ID NO: 11368

SEQ ID NO: 11486 - DNA, 1653 bp, Escherichia coli TW09109; identical to SEQ ID NO: 11366

SEQ ID NO: 11487 - DNA, 633 bp, Escherichia coli TW09109; identical to SEQ ID NO: 11457

SEQ ID NO: 11488 - DNA, 1056 bp, Escherichia coli TW09109
atgttaccagaaggagtcgatttttttctggatgaatcccctattgactttgatcctatagatattgagttatccacgggtaaagaagttagtatcgaagatcttgaccctggtagcgggcttatctcttatcatggccgccaggttcttttatatattcgggaccattcagggcgttatgatgcggctatcgtagatggcgaaaaaggaaaacgttttcatattgcctggtgcagaactcttgatgaaatgcgccataaaaatcgatttgaaaggtatcatgcaactaaccgcatagatggtttattcgaaattgatgatggttcaggtcggagccaggatgttgatttacgggtatgtatgaattgcctcgaacgacttaattataaaggaagtattgataaacaacgaaaaagagagatttttaaatcattctcattaaatgagtttttttcagattatagtacttgttttcgtcatatgcctaagggtatctatgacaaaacaaatagtgggtatgtcgaaaactggaaggaaatatctaaagaaatacgagaaaaggcaaattatgtttgtaatgattgtggcgtgaatttatcaaccgccaaaaacttgtgccatgtccatcataaaaatggcatcaaatatgataatcaccatgaaaaccttcttgttctgtgcaaggattgccatcgaaaacagcccctccacgaaggtatattcgttacccaagcagagatggctatcattcaacgtttacgttcccaacaagggttattaaaagcagaatcctggaatgaaatatatgacctgactgatccatcagtgcatggtgatattaatatgatgcaacataaaggctttcaacctcctgttcctgggttagatcttccaaactcagaacatgaaattattgcaaccgtagaagctgcatggccaggccttaaaattgcagttaaccttactcccgccgaagtcgaaggatggagaatatataccgtgggtgagctggttaaagaaatacaaacaggagcctttacgccagcaaaattgtaa

SEQ ID NO: 11489 - DNA, 1653 bp, Escherichia coli PA22; identical to SEQ ID NO: 11366

SEQ ID NO: 11490 - DNA, 609 bp, Escherichia coli PA22; identical to SEQ ID NO: 11484

SEQ ID NO: 11491 - DNA, 1104 bp, Escherichia coli PA22; identical to SEQ ID NO: 11368

SEQ ID NO: 11492 - DNA, 1653 bp, Escherichia coli PA40; identical to SEQ ID NO: 11366

SEQ ID NO: 11493 - DNA, 633 bp, Escherichia coli PA40; identical to SEQ ID NO: 11457

SEQ ID NO: 11494 - DNA, 1104 bp, Escherichia coli PA40; identical to SEQ ID NO: 11368

SEQ ID NO: 11495 - DNA, 1653 bp, Escherichia coli TW06591; identical to SEQ ID NO: 11432

SEQ ID NO: 11496 - DNA, 633 bp, Escherichia coli TW06591; identical to SEQ ID NO: 11463

SEQ ID NO: 11497 - DNA, 1104 bp, Escherichia coli TW06591; identical to SEQ ID NO: 11386

SEQ ID NO: 11498 - DNA, 1653 bp, Escherichia coli TW10246; identical to SEQ ID NO: 11366

SEQ ID NO: 11499 - DNA, 633 bp, Escherichia coli TW10246; identical to SEQ ID NO: 11457

SEQ ID NO: 11500 - DNA, 1104 bp, Escherichia coli TW10246; identical to SEQ ID NO: 11368

SEQ ID NO: 11501 - DNA, 1653 bp, Escherichia coli TW11039; identical to SEQ ID NO: 11366

SEQ ID NO: 11502 - DNA, 633 bp, Escherichia coli TW11039; identical to SEQ ID NO: 11457

SEQ ID NO: 11503 - DNA, 1104 bp, Escherichia coli TW11039; identical to SEQ ID NO: 11368

SEQ ID NO: 11504 - DNA, 1653 bp, Escherichia coli TW10119; identical to SEQ ID NO: 11366

SEQ ID NO: 11505 - DNA, 621 bp, Escherichia coli TW10119; identical to SEQ ID NO: 11445

SEQ ID NO: 11506 - DNA, 1104 bp, Escherichia coli TW10119; identical to SEQ ID NO: 11368

SEQ ID NO: 11507 - DNA, 1653 bp, Escherichia coli EC1863; identical to SEQ ID NO: 11366

SEQ ID NO: 11508 - DNA, 633 bp, Escherichia coli EC1863; identical to SEQ ID NO: 11457

SEQ ID NO: 11509 - DNA, 1104 bp, Escherichia coli EC1863; identical to SEQ ID NO: 11368

SEQ ID NO: 11510 - DNA, 1653 bp, Escherichia coli EC1845; identical to SEQ ID NO: 11366

SEQ ID NO: 11511 - DNA, 633 bp, Escherichia coli EC1845; identical to SEQ ID NO: 11457

SEQ ID NO: 11512 - DNA, 1104 bp, Escherichia coli EC1845; identical to SEQ ID NO: 11368

SEQ ID NO: 11513 - DNA, 1653 bp, Escherichia coli EC4448; identical to SEQ ID NO: 11366

SEQ ID NO: 11514 - DNA, 621 bp, Escherichia coli EC4448; identical to SEQ ID NO: 11445

SEQ ID NO: 11515 - DNA, 1104 bp, Escherichia coli EC4448; identical to SEQ ID NO: 11368

SEQ ID NO: 11516 - DNA, 1653 bp, Escherichia coli EC4437; identical to SEQ ID NO: 11366

SEQ ID NO: 11517 - DNA, 618 bp, Escherichia coli EC4437
atggtttttatgttcatatctattgcttatatgcactacgtacgtattgaaaaagaaaaaattaaagaagttgccgtagcctacgagaatgctcagttacagctttataatgctctggatattgagtttgcaaaggatttacaagactgggatgcagagatcgataaacagactctggaggttcgatttaaatcaccggatgttttatttggcttaggaagcacagagctaaaaccaaagtttaaactcattcttgacgacttctttcctcgctacctaaaagttctagataattatcaggaacatattactgaagtccgcattgaaggtcacacaagtactgactggacaggaacaacgaatcctgatattgcttattttaataatatggcactatcgcaaggtcgtacacgtgcagtattacaatacgtttatgacataaaaaatatcgcgacacaccaacaatgggttaaaagtaaatttgccgcagtaggttattcatctgcacatcccattcttgataaaaccggcaaggaggatcctaatcgctctcgtcgtgtcaccttcaaagttgtaacaaatgccgagttgcagattagaaagattattcaggagtaa

SEQ ID NO: 11518 - DNA, 1104 bp, Escherichia coli EC4437; identical to SEQ ID NO: 11368

SEQ ID NO: 11519 - DNA, 1653 bp, Escherichia coli EC4436; identical to SEQ ID NO: 11366

SEQ ID NO: 11520 - DNA, 708 bp, Escherichia coli EC4436; identical to SEQ ID NO: 11367

SEQ ID NO: 11521 - DNA, 1104 bp, Escherichia coli EC4436; identical to SEQ ID NO: 11368

SEQ ID NO: 11522 - DNA, 1653 bp, Escherichia coli EC4439; identical to SEQ ID NO: 11366

SEQ ID NO: 11523 - DNA, 633 bp, Escherichia coli EC4439; identical to SEQ ID NO: 11457

SEQ ID NO: 11524 - DNA, 1104 bp, Escherichia coli EC4439; identical to SEQ ID NO: 11368

SEQ ID NO: 11525 - DNA, 1359 bp, Escherichia coli EC4402
atgttttttgccattttatttaatggaatggatgctttcttttttgccaataaacgaagtgcgttagcagaaaataaccctgaatctgttacacctgaacatatctatcatgaattaaaagagcagaaccagactctgactaaattagtctcgggtattaacggtgatagtgaaggttctcttattgctcaaataaaattactacgtactgagattagcgattcctcgcaggcacaattagctaatcacactcatttcagtaataagctttgggaacaacttgaacaatttgcagatctaatggcaaaaggtgctacagaacaaattattgatgctttgcgacaagtcattattgattttaatcaaaatttaactgaacagtttggtgaaaactttaaagctcttgatgcctctgtaaaaaaacttgttgagtggcagggaaattataaaacgcaaattgagcagatgtcagaacaatatcaacaaagtgtcgagtccctggttgaaacaaaaactgcggttgcagggatttgggaagaatgtaaagaaattcctctggctatgtctgaactgcgtgaagtgcttcaggtgaaccaacatcaaatcagcgaactctcccgccatttagaaacctttgtcgccatccgcgataaagctacaaccgtattacctgaaatacagaacaaaatggctgaagtgggtgaactgctgaaatccggagctgcaaatgttagtgcatctcttgagcaaaccagccagcaaatacttcttaatgcagattcaatgcgcgttgccctggatgaaggtaccgaaggattcagacaatcggttacccaaacacaacaagcatttgcctcgatggcacatgatgtcagcaattcctccgaaaccctaaccagcacgttaggtgaaacaattactgaaatgaaacaaagtggtgaagaattcctgaaatcactagagtcgcactcgaaagaattgcatagaaatatggaacaaaatacgacgaatgtgattgatatgttcagtaagactggtgaaaagattaaccatcaactatccagtaatgccgataatatgtttgattcaatccagacatcatttgataaggcaagtgcagggctgacttctcaagtcagagaatcaattgaaaaatttgctctatccatcaacgagcagttacatgcttttgagcaagcaactgaacgtgaaatgaaccgtgaaatgcaatcattaggtaatgctctgctttcaatcagcaaaggttttgtcggtaactatgaaaaacttattaaagattaccaaatagttatggggcagttacaagcattaatttctgctaataaacatcgcgggtaa

SEQ ID NO: 11526 - DNA, 633 bp, Escherichia coli EC4402; identical to SEQ ID NO: 11457

SEQ ID NO: 11527 - DNA, 1104 bp, Escherichia coli EC4402; identical to SEQ ID NO: 11368

SEQ ID NO: 11528 - DNA, 1653 bp, Escherichia coli EC4013; identical to SEQ ID NO: 11366

SEQ ID NO: 11529 - DNA, 633 bp, Escherichia coli EC4013; identical to SEQ ID NO: 11457

SEQ ID NO: 11530 - DNA, 1104 bp, Escherichia coli EC4013; identical to SEQ ID NO: 11368

SEQ ID NO: 11531 - DNA, 1653 bp, Escherichia coli EC4422; identical to SEQ ID NO: 11366

SEQ ID NO: 11532 - DNA, 633 bp, Escherichia coli EC4422; identical to SEQ ID NO: 11457

SEQ ID NO: 11533 - DNA, 1104 bp, Escherichia coli EC4422; identical to SEQ ID NO: 11368

SEQ ID NO: 11534 - DNA, 1653 bp, Escherichia coli EC4421; identical to SEQ ID NO: 11366

SEQ ID NO: 11535 - DNA, 633 bp, Escherichia coli EC4421; identical to SEQ ID NO: 11457

SEQ ID NO: 11536 - DNA, 1104 bp, Escherichia coli EC4421; identical to SEQ ID NO: 11368

SEQ ID NO: 11537 - DNA, 1653 bp, Escherichia coli TW14301; identical to SEQ ID NO: 11366

SEQ ID NO: 11538 - DNA, 633 bp, Escherichia coli TW14301; identical to SEQ ID NO: 11463

SEQ ID NO: 11539 - DNA, 1104 bp, Escherichia coli TW14301
atgaaattatctatcgacatttcagaacttattcaattagggaagaaaatgttaccagaaggagtcgatttttttctggatgaatcccctattgactttgatcctatagatattgagttatccacgggtaaagaagttagtatcgaagatcttgaccctggtagcgggcttatctcttatcatggccgccaggttcttttatatattcgggaccattcagggcgttatgatgcggctatcgtagatggcgaaaaaggaaaacgttttcatattgcctggtgcagaactcttgatgaaatgcgccataaaaatcgatttgaaaggtatcatgcaactaaccgcatagatggtttattcgaaattgatgatggttcaggtcggagccaggatgttgatttacgggtatgtatgaattgcctcgaacgacttaattataaaggaagtattgataaacaacgaaaaagagagatttttaaatcattctcattaaatgagtttttttcagattatagtacctgttttcgtcatatgcctaagggtatctatgacaaaacaaatagtgggtatgtcgaaaactggaaggaaatatctaaagaaatacgagaaaaggcaaattatgtttgtaatgattgtggcgtgaatttatcaaccgccaaaaacttgtgccatgtccatcataaaaatggcatcaaatatgataatcaccatgaaaaccttcttgttctgtgcaaggattgccatcgaaaacagcccctccacgaaggtatattcgttacccaagcagagatggctatcattcaacgtttacgttcccaacaagggttattaaaagcagaatcctggaatgaaatatatgacctgactgatccatcagtgcatggtgatattaatatgatgcaacataaaggctttcaacctcctgttcctgggttagatcttccaaactcagaacatgaaattattgcaaccgtagaagctgcatggccaggccttaaaattgcagttaaccttactcccgccgaagtcgaaggatggagaatatataccgtgggtgagctggttaaagaaatacaaacaggagcctttacgccagcaaaattgtaa

SEQ ID NO: 11540 - DNA, 1359 bp, Escherichia coli TW14313; identical to SEQ ID NO: 11525

SEQ ID NO: 11541 - DNA, 633 bp, Escherichia coli TW14313; identical to SEQ ID NO: 11457

SEQ ID NO: 11542 - DNA, 1104 bp, Escherichia coli TW14313; identical to SEQ ID NO: 11368

SEQ ID NO: 11543 - DNA, 1653 bp, Escherichia coli EC4196; identical to SEQ ID NO: 11366

SEQ ID NO: 11544 - DNA, 633 bp, Escherichia coli EC4196; identical to SEQ ID NO: 11457

SEQ ID NO: 11545 - DNA, 1104 bp, Escherichia coli EC4196; identical to SEQ ID NO: 11368

SEQ ID NO: 11546 - DNA, 1653 bp, Escherichia coli EC4203; identical to SEQ ID NO: 11366

SEQ ID NO: 11547 - DNA, 609 bp, Escherichia coli EC4203; identical to SEQ ID NO: 11484

SEQ ID NO: 11548 - DNA, 1104 bp, Escherichia coli EC4203; identical to SEQ ID NO: 11368

SEQ ID NO: 11549 - DNA, 1653 bp, Escherichia coli FDA517; identical to SEQ ID NO: 11366

SEQ ID NO: 11550 - DNA, 633 bp, Escherichia coli FDA517; identical to SEQ ID NO: 11457

SEQ ID NO: 11551 - DNA, 1104 bp, Escherichia coli FDA517; identical to SEQ ID NO: 11368

SEQ ID NO: 11552 - DNA, 1653 bp, Escherichia coli FRIK1996; identical to SEQ ID NO: 11366

SEQ ID NO: 11553 - DNA, 633 bp, Escherichia coli FRIK1996; identical to SEQ ID NO: 11457

SEQ ID NO: 11554 - DNA, 1104 bp, Escherichia coli FRIK1996; identical to SEQ ID NO: 11368

SEQ ID NO: 11555 - DNA, 1653 bp, Escherichia coli FRIK1985; identical to SEQ ID NO: 11366

SEQ ID NO: 11556 - DNA, 633 bp, Escherichia coli FRIK1985; identical to SEQ ID NO: 11457

SEQ ID NO: 11557 - DNA, 1104 bp, Escherichia coli FRIK1985; identical to SEQ ID NO: 11368

SEQ ID NO: 11558 - DNA, 576 bp, Escherichia coli TW09195
atgcgcgttgccctggatgaaggtaccgaaggattcagacaatcggttacccaaacacaacaagcatttgcctcgatggcacatgatgtcagcaattcctccgaaaccctaaccagcacgttaggtgaaacaattactgaaatgaaacaaagtggtgaagaattcctgaaatcactagagtcgcactcgaaagaattgcatagaaatatggaacaaaatacgacgaatgtgattgatatgttcagtaagactggtgaaaagattaaccatcaactatccagtaatgccgataatatgtttgattcaatccagacatcatttgataaggcaagtgcagggctgacttctcaagtcagagaatcaattgaaaaatttgctctatccatcaacgagcagttacatgcttttgagcaagcaactgaacgtgaaatgaaccgtgaaatgcaatcattaggtaatgctctgctttcaatcagcaaaggttttgtcggtaactatgaaaaacttattaaagattaccaaatagttatggggcagttacaagcattaatttctgctaataaacatcgcgggtaa

SEQ ID NO: 11559 - DNA, 609 bp, Escherichia coli TW09195; identical to SEQ ID NO: 11484

SEQ ID NO: 11560 - DNA, 119 bp, Escherichia coli TW09195
atgaaattatctatcgacatttcagaacttattcaattagggaagaaaatgttaccagaaggagtcgatttttttctggatgaatcccctattgactttgatcctatagatattgagtt

SEQ ID NO: 11561 - DNA, 1653 bp, Escherichia coli TW09098; identical to SEQ ID NO: 11366

SEQ ID NO: 11562 - DNA, 633 bp, Escherichia coli TW09098; identical to SEQ ID NO: 11457

SEQ ID NO: 11563 - DNA, 1104 bp, Escherichia coli TW09098; identical to SEQ ID NO: 11368

SEQ ID NO: 11564 - DNA, 1653 bp, Escherichia coli TW07945; identical to SEQ ID NO: 11366

SEQ ID NO: 11565 - DNA, 633 bp, Escherichia coli TW07945; identical to SEQ ID NO: 11457

SEQ ID NO: 11566 - DNA, 489 bp, Escherichia coli TW07945
atgaaattatctatcgacatttcagaacttattcaattagggaagaaaatgttaccagaaggagtcgatttttttctggatgaatcccctattgactttgatcctatagatattgagttatccacgggtaaagaagttagtatcgaagatcttgaccctggtagcgggcttatctcttatcatggccgccaggttcttttatatattcgggaccattcagggcgttatgatgcggctatcgtagatggcgaaaaaggaaaacgttttcatattgcctggtgcagaactcttgatgaaatgcgccataaaaatcgatttgaaaggtatcatgcaactaaccgcatagatggtttattcgaaattgatgatggttcaggtcggagccaggatgttgatttacgggtatgtatgaattgcctcgaacgacttaattataaaggaagtattgataaacaacgaaaagagagatttttaaatcattctcattaa

SEQ ID NO: 11567 - DNA, 1653 bp, Escherichia coli PA42; identical to SEQ ID NO: 11366

SEQ ID NO: 11568 - DNA, 609 bp, Escherichia coli PA42; identical to SEQ ID NO: 11484

SEQ ID NO: 11569 - DNA, 1104 bp, Escherichia coli PA42; identical to SEQ ID NO: 11368

SEQ ID NO: 11570 - DNA, 1653 bp, Escherichia coli PA41; identical to SEQ ID NO: 11366

SEQ ID NO: 11571 - DNA, 621 bp, Escherichia coli PA41; identical to SEQ ID NO: 11445

SEQ ID NO: 11572 - DNA, 1104 bp, Escherichia coli PA41; identical to SEQ ID NO: 11368

SEQ ID NO: 11573 - DNA, 1359 bp, Escherichia coli PA39; identical to SEQ ID NO: 11525

SEQ ID NO: 11574 - DNA, 633 bp, Escherichia coli PA39; identical to SEQ ID NO: 11457

SEQ ID NO: 11575 - DNA, 318 bp, Escherichia coli PA39
atggctatcattcaacgtttacgttcccaacaagggttattaaaagcagaatcctggaatgaaatatatgacctgactgatccatcagtgcatggtgatattaatatgatgcaacataaaggctttcaacctcctgttcctgggttagatcttccaaactcagaacatgaaattattgcaaccgtagaagctgcatggccaggccttaaaattgcagttaaccttactcccgccgaagtcgaaggatggagaatatataccgtgggtgagctggttaaagaaatacaaacaggagcctttacgccagcaaaattgtaa

SEQ ID NO: 11576 - DNA, 1653 bp, Escherichia coli PA33; identical to SEQ ID NO: 11366

SEQ ID NO: 11577 - DNA, 633 bp, Escherichia coli PA33; identical to SEQ ID NO: 11457

SEQ ID NO: 11578 - DNA, 1104 bp, Escherichia coli PA33; identical to SEQ ID NO: 11368

SEQ ID NO: 11579 - DNA, 1653 bp, Escherichia coli PA32; identical to SEQ ID NO: 11366

SEQ ID NO: 11580 - DNA, 633 bp, Escherichia coli PA32; identical to SEQ ID NO: 11457

SEQ ID NO: 11581 - DNA, 1104 bp, Escherichia coli PA32; identical to SEQ ID NO: 11368

SEQ ID NO: 11582 - DNA, 1653 bp, Escherichia coli PA31; identical to SEQ ID NO: 11366

SEQ ID NO: 11583 - DNA, 633 bp, Escherichia coli PA31; identical to SEQ ID NO: 11457

SEQ ID NO: 11584 - DNA, 1104 bp, Escherichia coli PA31; identical to SEQ ID NO: 11368

SEQ ID NO: 11585 - DNA, 1653 bp, Escherichia coli PA28; identical to SEQ ID NO: 11366

SEQ ID NO: 11586 - DNA, 621 bp, Escherichia coli PA28; identical to SEQ ID NO: 11445

SEQ ID NO: 11587 - DNA, 1104 bp, Escherichia coli PA28; identical to SEQ ID NO: 11368

SEQ ID NO: 11588 - DNA, 1653 bp, Escherichia coli PA25; identical to SEQ ID NO: 11366

SEQ ID NO: 11589 - DNA, 633 bp, Escherichia coli PA25; identical to SEQ ID NO: 11457

SEQ ID NO: 11590 - DNA, 1104 bp, Escherichia coli PA25; identical to SEQ ID NO: 11368

SEQ ID NO: 11591 - DNA, 1653 bp, Escherichia coli PA24; identical to SEQ ID NO: 11366

SEQ ID NO: 11592 - DNA, 633 bp, Escherichia coli PA24; identical to SEQ ID NO: 11457

SEQ ID NO: 11593 - DNA, 1104 bp, Escherichia coli PA24; identical to SEQ ID NO: 11368

SEQ ID NO: 11594 - DNA, 1653 bp, Escherichia coli PA15; identical to SEQ ID NO: 11366

SEQ ID NO: 11595 - DNA, 633 bp, Escherichia coli PA15; identical to SEQ ID NO: 11457

SEQ ID NO: 11596 - DNA, 1104 bp, Escherichia coli PA15; identical to SEQ ID NO: 11368

SEQ ID NO: 11597 - DNA, 1653 bp, Escherichia coli PA14; identical to SEQ ID NO: 11366

SEQ ID NO: 11598 - DNA, 633 bp, Escherichia coli PA14; identical to SEQ ID NO: 11457

SEQ ID NO: 11599 - DNA, 1104 bp, Escherichia coli PA14; identical to SEQ ID NO: 11368

SEQ ID NO: 11600 - DNA, 1653 bp, Escherichia coli PA10; identical to SEQ ID NO: 11366

SEQ ID NO: 11601 - DNA, 609 bp, Escherichia coli PA10; identical to SEQ ID NO: 11484

SEQ ID NO: 11602 - DNA, 1104 bp, Escherichia coli PA10; identical to SEQ ID NO: 11368

SEQ ID NO: 11603 - DNA, 1653 bp, Escherichia coli PA9; identical to SEQ ID NO: 11366

SEQ ID NO: 11604 - DNA, 633 bp, Escherichia coli PA9; identical to SEQ ID NO: 11457

SEQ ID NO: 11605 - DNA, 1104 bp, Escherichia coli PA9; identical to SEQ ID NO: 11368

SEQ ID NO: 11606 - DNA, 1653 bp, Escherichia coli PA5; identical to SEQ ID NO: 11366

SEQ ID NO: 11607 - DNA, 633 bp, Escherichia coli PA5; identical to SEQ ID NO: 11457

SEQ ID NO: 11608 - DNA, 1104 bp, Escherichia coli PA5; identical to SEQ ID NO: 11368

SEQ ID NO: 11609 - DNA, 1653 bp, Escherichia coli PA3; identical to SEQ ID NO: 11366

SEQ ID NO: 11610 - DNA, 633 bp, Escherichia coli PA3; identical to SEQ ID NO: 11457

SEQ ID NO: 11611 - DNA, 1104 bp, Escherichia coli PA3; identical to SEQ ID NO: 11368

SEQ ID NO: 11612 - DNA, 1653 bp, Escherichia coli 93-001; identical to SEQ ID NO: 11366

SEQ ID NO: 11613 - DNA, 633 bp, Escherichia coli 93-001; identical to SEQ ID NO: 11457

SEQ ID NO: 11614 - DNA, 1104 bp, Escherichia coli 93-001; identical to SEQ ID NO: 11368

SEQ ID NO: 11615 - DNA, 1653 bp, Escherichia coli FRIK1990; identical to SEQ ID NO: 11366

SEQ ID NO: 11616 - DNA, 609 bp, Escherichia coli FRIK1990; identical to SEQ ID NO: 11484

SEQ ID NO: 11617 - DNA, 1104 bp, Escherichia coli FRIK1990; identical to SEQ ID NO: 11368

SEQ ID NO: 11618 - DNA, 1653 bp, Escherichia coli FRIK920; identical to SEQ ID NO: 11366

SEQ ID NO: 11619 - DNA, 618 bp, Escherichia coli FRIK920; identical to SEQ ID NO: 11517

SEQ ID NO: 11620 - DNA, 1104 bp, Escherichia coli FRIK920; identical to SEQ ID NO: 11368

SEQ ID NO: 11621 - DNA, 1653 bp, Escherichia coli PA7; identical to SEQ ID NO: 11366

SEQ ID NO: 11622 - DNA, 621 bp, Escherichia coli PA7; identical to SEQ ID NO: 11445

SEQ ID NO: 11623 - DNA, 1104 bp, Escherichia coli PA7; identical to SEQ ID NO: 11368

SEQ ID NO: 11624 - DNA, 1653 bp, Escherichia coli 0.1304; identical to SEQ ID NO: 11366

SEQ ID NO: 11625 - DNA, 633 bp, Escherichia coli 0.1304; identical to SEQ ID NO: 11457

SEQ ID NO: 11626 - DNA, 1104 bp, Escherichia coli 0.1304; identical to SEQ ID NO: 11368

SEQ ID NO: 11627 - DNA, 1653 bp, Escherichia coli FRIK523; identical to SEQ ID NO: 11366

SEQ ID NO: 11628 - DNA, 633 bp, Escherichia coli FRIK523; identical to SEQ ID NO: 11457

SEQ ID NO: 11629 - DNA, 1104 bp, Escherichia coli FRIK523; identical to SEQ ID NO: 11368

SEQ ID NO: 11630 - DNA, 1653 bp, Escherichia coli NE098; identical to SEQ ID NO: 11366

SEQ ID NO: 11631 - DNA, 633 bp, Escherichia coli NE098; identical to SEQ ID NO: 11457

SEQ ID NO: 11632 - DNA, 1104 bp, Escherichia coli NE098; identical to SEQ ID NO: 11368

SEQ ID NO: 11633 - DNA, 1653 bp, Escherichia coli EC1870; identical to SEQ ID NO: 11366

SEQ ID NO: 11634 - DNA, 609 bp, Escherichia coli EC1870; identical to SEQ ID NO: 11484

SEQ ID NO: 11635 - DNA, 1104 bp, Escherichia coli EC1870; identical to SEQ ID NO: 11368

SEQ ID NO: 11636 - DNA, 1653 bp, Escherichia coli EC1869; identical to SEQ ID NO: 11366

SEQ ID NO: 11637 - DNA, 633 bp, Escherichia coli EC1869; identical to SEQ ID NO: 11457

SEQ ID NO: 11638 - DNA, 1104 bp, Escherichia coli EC1869; identical to SEQ ID NO: 11368

SEQ ID NO: 11639 - DNA, 1653 bp, Escherichia coli EC1868; identical to SEQ ID NO: 11366

SEQ ID NO: 11640 - DNA, 633 bp, Escherichia coli EC1868; identical to SEQ ID NO: 11457

SEQ ID NO: 11641 - DNA, 1104 bp, Escherichia coli EC1868; identical to SEQ ID NO: 11368

SEQ ID NO: 11642 - DNA, 1497 bp, Escherichia coli EC1866; identical to SEQ ID NO: 11438

SEQ ID NO: 11643 - DNA, 633 bp, Escherichia coli EC1866; identical to SEQ ID NO: 11457

SEQ ID NO: 11644 - DNA, 1104 bp, Escherichia coli EC1866; identical to SEQ ID NO: 11368

SEQ ID NO: 11645 - DNA, 1653 bp, Escherichia coli EC1864; identical to SEQ ID NO: 11366

SEQ ID NO: 11646 - DNA, 621 bp, Escherichia coli EC1864; identical to SEQ ID NO: 11445

SEQ ID NO: 11647 - DNA, 1104 bp, Escherichia coli EC1864; identical to SEQ ID NO: 11368

SEQ ID NO: 11648 - DNA, 1653 bp, Escherichia coli EC1862; identical to SEQ ID NO: 11366

SEQ ID NO: 11649 - DNA, 633 bp, Escherichia coli EC1862; identical to SEQ ID NO: 11457

SEQ ID NO: 11650 - DNA, 1104 bp, Escherichia coli EC1862; identical to SEQ ID NO: 11368

SEQ ID NO: 11651 - DNA, 1653 bp, Escherichia coli EC1856; identical to SEQ ID NO: 11366

SEQ ID NO: 11652 - DNA, 633 bp, Escherichia coli EC1856; identical to SEQ ID NO: 11457

SEQ ID NO: 11653 - DNA, 1104 bp, Escherichia coli EC1856; identical to SEQ ID NO: 11368

SEQ ID NO: 11654 - DNA, 1653 bp, Escherichia coli EC1850; identical to SEQ ID NO: 11366

SEQ ID NO: 11655 - DNA, 609 bp, Escherichia coli EC1850; identical to SEQ ID NO: 11484

SEQ ID NO: 11656 - DNA, 1104 bp, Escherichia coli EC1850; identical to SEQ ID NO: 11368

SEQ ID NO: 11657 - DNA, 1653 bp, Escherichia coli EC1849; identical to SEQ ID NO: 11366

SEQ ID NO: 11658 - DNA, 633 bp, Escherichia coli EC1849; identical to SEQ ID NO: 11457

SEQ ID NO: 11659 - DNA, 1104 bp, Escherichia coli EC1849; identical to SEQ ID NO: 11368

SEQ ID NO: 11660 - DNA, 1653 bp, Escherichia coli EC1848; identical to SEQ ID NO: 11366

SEQ ID NO: 11661 - DNA, 633 bp, Escherichia coli EC1848; identical to SEQ ID NO: 11457

SEQ ID NO: 11662 - DNA, 1104 bp, Escherichia coli EC1848; identical to SEQ ID NO: 11368

SEQ ID NO: 11663 - DNA, 1653 bp, Escherichia coli EC1847; identical to SEQ ID NO: 11366

SEQ ID NO: 11664 - DNA, 633 bp, Escherichia coli EC1847; identical to SEQ ID NO: 11457

SEQ ID NO: 11665 - DNA, 1056 bp, Escherichia coli EC1847; identical to SEQ ID NO: 11488

SEQ ID NO: 11666 - DNA, 1653 bp, Escherichia coli EC1846; identical to SEQ ID NO: 11366

SEQ ID NO: 11667 - DNA, 633 bp, Escherichia coli EC1846; identical to SEQ ID NO: 11457

SEQ ID NO: 11668 - DNA, 1104 bp, Escherichia coli EC1846; identical to SEQ ID NO: 11368

SEQ ID NO: 11669 - DNA, 1653 bp, Escherichia coli EC1737; identical to SEQ ID NO: 11366

SEQ ID NO: 11670 - DNA, 633 bp, Escherichia coli EC1737; identical to SEQ ID NO: 11457

SEQ ID NO: 11671 - DNA, 1104 bp, Escherichia coli EC1737; identical to SEQ ID NO: 11368

SEQ ID NO: 11672 - DNA, 1653 bp, Escherichia coli EC1736; identical to SEQ ID NO: 11366

SEQ ID NO: 11673 - DNA, 621 bp, Escherichia coli EC1736; identical to SEQ ID NO: 11445

SEQ ID NO: 11674 - DNA, 1056 bp, Escherichia coli EC1736; identical to SEQ ID NO: 11488

SEQ ID NO: 11675 - DNA, 1653 bp, Escherichia coli EC1735; identical to SEQ ID NO: 11366

SEQ ID NO: 11676 - DNA, 633 bp, Escherichia coli EC1735; identical to SEQ ID NO: 11457

SEQ ID NO: 11677 - DNA, 1056 bp, Escherichia coli EC1735; identical to SEQ ID NO: 11488

SEQ ID NO: 11678 - DNA, 1497 bp, Escherichia coli PA38; identical to SEQ ID NO: 11438

SEQ ID NO: 11679 - DNA, 633 bp, Escherichia coli PA38; identical to SEQ ID NO: 11457

SEQ ID NO: 11680 - DNA, 1104 bp, Escherichia coli PA38; identical to SEQ ID NO: 11368

SEQ ID NO: 11681 - DNA, 1653 bp, Escherichia coli PA34; identical to SEQ ID NO: 11366

SEQ ID NO: 11682 - DNA, 633 bp, Escherichia coli PA34; identical to SEQ ID NO: 11457

SEQ ID NO: 11683 - DNA, 1104 bp, Escherichia coli PA34; identical to SEQ ID NO: 11368

SEQ ID NO: 11684 - DNA, 1653 bp, Escherichia coli FDA506; identical to SEQ ID NO: 11366

SEQ ID NO: 11685 - DNA, 633 bp, Escherichia coli FDA506; identical to SEQ ID NO: 11457

SEQ ID NO: 11686 - DNA, 1104 bp, Escherichia coli FDA506; identical to SEQ ID NO: 11368

SEQ ID NO: 11687 - DNA, 1653 bp, Escherichia coli FDA507; identical to SEQ ID NO: 11366

SEQ ID NO: 11688 - DNA, 633 bp, Escherichia coli FDA507; identical to SEQ ID NO: 11457

SEQ ID NO: 11689 - DNA, 1104 bp, Escherichia coli FDA507; identical to SEQ ID NO: 11368

SEQ ID NO: 11690 - DNA, 1653 bp, Escherichia coli FDA504; identical to SEQ ID NO: 11366

SEQ ID NO: 11691 - DNA, 633 bp, Escherichia coli FDA504; identical to SEQ ID NO: 11457

SEQ ID NO: 11692 - DNA, 1104 bp, Escherichia coli FDA504; identical to SEQ ID NO: 11368

SEQ ID NO: 11693 - DNA, 1653 bp, Escherichia coli FRIK1999; identical to SEQ ID NO: 11366

SEQ ID NO: 11694 - DNA, 633 bp, Escherichia coli FRIK1999; identical to SEQ ID NO: 11457

SEQ ID NO: 11695 - DNA, 1104 bp, Escherichia coli FRIK1999; identical to SEQ ID NO: 11368

SEQ ID NO: 11696 - DNA, 1653 bp, Escherichia coli FRIK1997; identical to SEQ ID NO: 11366

SEQ ID NO: 11697 - DNA, 633 bp, Escherichia coli FRIK1997; identical to SEQ ID NO: 11457

SEQ ID NO: 11698 - DNA, 1104 bp, Escherichia coli FRIK1997; identical to SEQ ID NO: 11368

SEQ ID NO: 11699 - DNA, 1653 bp, Escherichia coli NE1487; identical to SEQ ID NO: 11366

SEQ ID NO: 11700 - DNA, 633 bp, Escherichia coli NE1487; identical to SEQ ID NO: 11457

SEQ ID NO: 11701 - DNA, 1104 bp, Escherichia coli NE1487; identical to SEQ ID NO: 11368

SEQ ID NO: 11702 - DNA, 1653 bp, Escherichia coli NE037; identical to SEQ ID NO: 11366

SEQ ID NO: 11703 - DNA, 633 bp, Escherichia coli NE037; identical to SEQ ID NO: 11457

SEQ ID NO: 11704 - DNA, 1104 bp, Escherichia coli NE037; identical to SEQ ID NO: 11368

SEQ ID NO: 11705 - DNA, 1653 bp, Escherichia coli FRIK2001; identical to SEQ ID NO: 11366

SEQ ID NO: 11706 - DNA, 633 bp, Escherichia coli FRIK2001; identical to SEQ ID NO: 11457

SEQ ID NO: 11707 - DNA, 1104 bp, Escherichia coli FRIK2001; identical to SEQ ID NO: 11368

SEQ ID NO: 11708 - DNA, 1653 bp, Escherichia coli PA4; identical to SEQ ID NO: 11366

SEQ ID NO: 11709 - DNA, 633 bp, Escherichia coli PA4; identical to SEQ ID NO: 11457

SEQ ID NO: 11710 - DNA, 1104 bp, Escherichia coli PA4; identical to SEQ ID NO: 11368

SEQ ID NO: 11711 - DNA, 1653 bp, Escherichia coli PA23; identical to SEQ ID NO: 11366

SEQ ID NO: 11712 - DNA, 633 bp, Escherichia coli PA23; identical to SEQ ID NO: 11457

SEQ ID NO: 11713 - DNA, 1104 bp, Escherichia coli PA23; identical to SEQ ID NO: 11368

SEQ ID NO: 11714 - DNA, 1653 bp, Escherichia coli PA49; identical to SEQ ID NO: 11366

SEQ ID NO: 11715 - DNA, 633 bp, Escherichia coli PA49; identical to SEQ ID NO: 11457

SEQ ID NO: 11716 - DNA, 1104 bp, Escherichia coli PA49; identical to SEQ ID NO: 11368

SEQ ID NO: 11717 - DNA, 1653 bp, Escherichia coli PA45; identical to SEQ ID NO: 11366

SEQ ID NO: 11718 - DNA, 633 bp, Escherichia coli PA45; identical to SEQ ID NO: 11457

SEQ ID NO: 11719 - DNA, 1104 bp, Escherichia coli PA45; identical to SEQ ID NO: 11368

SEQ ID NO: 11720 - DNA, 1653 bp, Escherichia coli TT12B; identical to SEQ ID NO: 11366

SEQ ID NO: 11721 - DNA, 633 bp, Escherichia coli TT12B; identical to SEQ ID NO: 11457

SEQ ID NO: 11722 - DNA, 1104 bp, Escherichia coli TT12B; identical to SEQ ID NO: 11368

SEQ ID NO: 11723 - DNA, 1653 bp, Escherichia coli MA6; identical to SEQ ID NO: 11366

SEQ ID NO: 11724 - DNA, 633 bp, Escherichia coli MA6; identical to SEQ ID NO: 11457

SEQ ID NO: 11725 - DNA, 1104 bp, Escherichia coli MA6; identical to SEQ ID NO: 11368

SEQ ID NO: 11726 - DNA, 1653 bp, Escherichia coli 5905; identical to SEQ ID NO: 11366

SEQ ID NO: 11727 - DNA, 633 bp, Escherichia coli 5905; identical to SEQ ID NO: 11463

SEQ ID NO: 11728 - DNA, 1104 bp, Escherichia coli 5905; identical to SEQ ID NO: 11386

SEQ ID NO: 11729 - DNA, 1653 bp, Escherichia coli CB7326
atgttagcgcagctttttgagcagttgtttcaatcgatagactctacactgatcaccaatattttcatctgggctgttatattcgtatttttatcagcgtggtggtgtgacaaaaaaaatatacatagtaagtttagagaatatgctccaaccttaatgggggcattaggtattctgggtactttcattggtattattattggtttactcaattttaataccgaaagtattgataccagcatccccgtattattaggtggcctaaaaacagcattcattacaagcattgtaggtatgttttttgccattttatttaatggaatggatgctttcttttttgccaataaacgaagtgcgttagcagaaaataaccctgaatctgttacacctgaacatatctatcatgaattaaaagagcagaaccagactctgactaaattagtctcgggtattaacggtgatagtgaaggttctcttattgctcaaataaaattactacgtactgagattagcgattcctcgcaggcacaattagctaatcacactcatttcagtaataagctttgggaacaacttgaacaatttgcagatctaatggcaaaaggtgctacagaacaaattattgatgctttgcgacaagtcattattgattttaatcaaaatttaactgaacagtttggtgaaaactttaaagctcttgatgcctctgtaaaaaaacttgttgagtggcagggaaattataaaacgcaaattgagcagatgtcagaacaatatcaacaaagtgtcgagtccctggttgaaacaaaaactgcggttgcagggatttgggaagaatgtaaagaaattcctctggctatgtctgaactgcgtgaagtgcttcaggtgaaccaacatcaaatcagcgaactctcccgccatttagaaacctttgtcgccatccgcgataaagctacaaccgtattacctgaaatacagaacaaaatggctgaagtgggtgaactgctgaaatccggagctacaaatgttagtgcatctcttgagcaaaccagccagcaaatacttcttaatgcagattcaatgcgcgttgccctggatgaaggtaccgaaggattcagacaatcggttacccaaacacaacaagcatttgcctcgatggcacatgatgtcagcaattcctccgaaaccctaaccagcacgttaggtgaaacaattactgaaatgaaacaaagtggtgaagaattcctgaaatcactagagtcgcactcgaaagaattgcatagaaatatggaacaaaatacgacgaatgtgattgatatgttcagtaagactggtgaaaagattaaccatcaactatccagtaatgccgataatatgtttgattcaatccagacatcatttgataaggcaagtgcagggctgacttctcaagtcagagaatcaattgaaaaatttgctctatccatcaacgagcagttacatgcttttgagcaagcaactgaacgtgaaatgaaccgtgaaatgcaatcattaggtaatgctctgctttcaatcagcaaaggttttgtcggtaactatgaaaaacttattaaagattaccaaatagttatggggcagttacaagcattaatttctgctaataaacatcgcgggtaa

SEQ ID NO: 11730 - DNA, 633 bp, Escherichia coli CB7326; identical to SEQ ID NO: 11457

SEQ ID NO: 11731 - DNA, 1104 bp, Escherichia coli CB7326; identical to SEQ ID NO: 11368

SEQ ID NO: 11732 - DNA, 1653 bp, Escherichia coli EC96038; identical to SEQ ID NO: 11366

SEQ ID NO: 11733 - DNA, 633 bp, Escherichia coli EC96038; identical to SEQ ID NO: 11463

SEQ ID NO: 11734 - DNA, 1104 bp, Escherichia coli EC96038; identical to SEQ ID NO: 11386

SEQ ID NO: 11735 - DNA, 1653 bp, Escherichia coli 5412; identical to SEQ ID NO: 11432

SEQ ID NO: 11736 - DNA, 633 bp, Escherichia coli 5412; identical to SEQ ID NO: 11463

SEQ ID NO: 11737 - DNA, 1104 bp, Escherichia coli 5412; identical to SEQ ID NO: 11386

SEQ ID NO: 11738 - DNA, 1653 bp, Escherichia coli 3.4870; identical to SEQ ID NO: 11366

SEQ ID NO: 11739 - DNA, 633 bp, Escherichia coli 3.4870; identical to SEQ ID NO: 11457

SEQ ID NO: 11740 - DNA, 1104 bp, Escherichia coli 3.4870; identical to SEQ ID NO: 11368

SEQ ID NO: 11741 - DNA, 1653 bp, Escherichia coli 8.0416; identical to SEQ ID NO: 11366

SEQ ID NO: 11742 - DNA, 633 bp, Escherichia coli 8.0416; identical to SEQ ID NO: 11457

SEQ ID NO: 11743 - DNA, 1104 bp, Escherichia coli 8.0416; identical to SEQ ID NO: 11368

SEQ ID NO: 11744 - DNA, 1653 bp, Escherichia coli 10.0821; identical to SEQ ID NO: 11366

SEQ ID NO: 11745 - DNA, 633 bp, Escherichia coli 10.0821; identical to SEQ ID NO: 11457

SEQ ID NO: 11746 - DNA, 1104 bp, Escherichia coli 10.0821; identical to SEQ ID NO: 11368

SEQ ID NO: 11747 - DNA, 1653 bp, Escherichia coli 5.2239; identical to SEQ ID NO: 11366

SEQ ID NO: 11748 - DNA, 621 bp, Escherichia coli 5.2239; identical to SEQ ID NO: 11445

SEQ ID NO: 11749 - DNA, 1104 bp, Escherichia coli 5.2239; identical to SEQ ID NO: 11368

SEQ ID NO: 11750 - DNA, 1653 bp, Escherichia coli 6.0172; identical to SEQ ID NO: 11366

SEQ ID NO: 11751 - DNA, 621 bp, Escherichia coli 6.0172; identical to SEQ ID NO: 11445

SEQ ID NO: 11752 - DNA, 1056 bp, Escherichia coli 6.0172; identical to SEQ ID NO: 11488

SEQ ID NO: 11753 - DNA, 1653 bp, Escherichia coli 8.0586; identical to SEQ ID NO: 11366

SEQ ID NO: 11754 - DNA, 618 bp, Escherichia coli 8.0586; identical to SEQ ID NO: 11517

SEQ ID NO: 11755 - DNA, 1104 bp, Escherichia coli 8.0586; identical to SEQ ID NO: 11368

SEQ ID NO: 11756 - DNA, 1653 bp, Escherichia coli 8.2524; identical to SEQ ID NO: 11366

SEQ ID NO: 11757 - DNA, 633 bp, Escherichia coli 8.2524; identical to SEQ ID NO: 11457

SEQ ID NO: 11758 - DNA, 1104 bp, Escherichia coli 8.2524; identical to SEQ ID NO: 11368

SEQ ID NO: 11759 - DNA, 1653 bp, Escherichia coli 10.0833; identical to SEQ ID NO: 11366

SEQ ID NO: 11760 - DNA, 633 bp, Escherichia coli 10.0833; identical to SEQ ID NO: 11457

SEQ ID NO: 11761 - DNA, 1104 bp, Escherichia coli 10.0833; identical to SEQ ID NO: 11368

SEQ ID NO: 11762 - DNA, 1653 bp, Escherichia coli 10.0869; identical to SEQ ID NO: 11366

SEQ ID NO: 11763 - DNA, 633 bp, Escherichia coli 10.0869; identical to SEQ ID NO: 11463

SEQ ID NO: 11764 - DNA, 1104 bp, Escherichia coli 10.0869; identical to SEQ ID NO: 11386

SEQ ID NO: 11765 - DNA, 1653 bp, Escherichia coli 88.0221; identical to SEQ ID NO: 11366

SEQ ID NO: 11766 - DNA, 633 bp, Escherichia coli 88.0221; identical to SEQ ID NO: 11457

SEQ ID NO: 11767 - DNA, 1104 bp, Escherichia coli 88.0221; identical to SEQ ID NO: 11368

SEQ ID NO: 11768 - DNA, 1653 bp, Escherichia coli 88.1467; identical to SEQ ID NO: 11366

SEQ ID NO: 11769 - DNA, 633 bp, Escherichia coli 88.1467; identical to SEQ ID NO: 11457

SEQ ID NO: 11770 - DNA, 1104 bp, Escherichia coli 88.1467; identical to SEQ ID NO: 11368

SEQ ID NO: 11771 - DNA, 1653 bp, Escherichia coli 88.1042; identical to SEQ ID NO: 11366

SEQ ID NO: 11772 - DNA, 633 bp, Escherichia coli 88.1042; identical to SEQ ID NO: 11457

SEQ ID NO: 11773 - DNA, 1104 bp, Escherichia coli 88.1042; identical to SEQ ID NO: 11368

SEQ ID NO: 11774 - DNA, 1653 bp, Escherichia coli 89.0511; identical to SEQ ID NO: 11366

SEQ ID NO: 11775 - DNA, 633 bp, Escherichia coli 89.0511; identical to SEQ ID NO: 11457

SEQ ID NO: 11776 - DNA, 1104 bp, Escherichia coli 89.0511; identical to SEQ ID NO: 11368

SEQ ID NO: 11777 - DNA, 1653 bp, Escherichia coli 90.0091; identical to SEQ ID NO: 11366

SEQ ID NO: 11778 - DNA, 609 bp, Escherichia coli 90.0091; identical to SEQ ID NO: 11484

SEQ ID NO: 11779 - DNA, 1104 bp, Escherichia coli 90.0091; identical to SEQ ID NO: 11368

SEQ ID NO: 11780 - DNA, 1653 bp, Escherichia coli 90.0039; identical to SEQ ID NO: 11366

SEQ ID NO: 11781 - DNA, 633 bp, Escherichia coli 90.0039; identical to SEQ ID NO: 11457

SEQ ID NO: 11782 - DNA, 1104 bp, Escherichia coli 90.0039; identical to SEQ ID NO: 11368

SEQ ID NO: 11783 - DNA, 1653 bp, Escherichia coli 90.2281; identical to SEQ ID NO: 11366

SEQ ID NO: 11784 - DNA, 633 bp, Escherichia coli 90.2281; identical to SEQ ID NO: 11457

SEQ ID NO: 11785 - DNA, 1104 bp, Escherichia coli 90.2281; identical to SEQ ID NO: 11368

SEQ ID NO: 11786 - DNA, 1653 bp, Escherichia coli 93.0055; identical to SEQ ID NO: 11366

SEQ ID NO: 11787 - DNA, 633 bp, Escherichia coli 93.0055; identical to SEQ ID NO: 11457

SEQ ID NO: 11788 - DNA, 1104 bp, Escherichia coli 93.0055; identical to SEQ ID NO: 11368

SEQ ID NO: 11789 - DNA, 1653 bp, Escherichia coli 93.0056; identical to SEQ ID NO: 11366

SEQ ID NO: 11790 - DNA, 633 bp, Escherichia coli 93.0056; identical to SEQ ID NO: 11457

SEQ ID NO: 11791 - DNA, 1104 bp, Escherichia coli 93.0056; identical to SEQ ID NO: 11368

SEQ ID NO: 11792 - DNA, 1653 bp, Escherichia coli 94.0618; identical to SEQ ID NO: 11366

SEQ ID NO: 11793 - DNA, 633 bp, Escherichia coli 94.0618; identical to SEQ ID NO: 11457

SEQ ID NO: 11794 - DNA, 1104 bp, Escherichia coli 94.0618; identical to SEQ ID NO: 11368

SEQ ID NO: 11795 - DNA, 1653 bp, Escherichia coli 97.0007; identical to SEQ ID NO: 11366

SEQ ID NO: 11796 - DNA, 633 bp, Escherichia coli 97.0007; identical to SEQ ID NO: 11457

SEQ ID NO: 11797 - DNA, 1056 bp, Escherichia coli 97.0007; identical to SEQ ID NO: 11488

SEQ ID NO: 11798 - DNA, 1653 bp, Escherichia coli 99.0678; identical to SEQ ID NO: 11366

SEQ ID NO: 11799 - DNA, 609 bp, Escherichia coli 99.0678; identical to SEQ ID NO: 11484

SEQ ID NO: 11800 - DNA, 1104 bp, Escherichia coli 99.0678; identical to SEQ ID NO: 11368

SEQ ID NO: 11801 - DNA, 1653 bp, Escherichia coli 99.0713; identical to SEQ ID NO: 11366

SEQ ID NO: 11802 - DNA, 633 bp, Escherichia coli 99.0713; identical to SEQ ID NO: 11457

SEQ ID NO: 11803 - DNA, 1104 bp, Escherichia coli 99.0713; identical to SEQ ID NO: 11368

SEQ ID NO: 11804 - DNA, 1497 bp, Escherichia coli 99.0672; identical to SEQ ID NO: 11438

SEQ ID NO: 11805 - DNA, 633 bp, Escherichia coli 99.0672; identical to SEQ ID NO: 11457

SEQ ID NO: 11806 - DNA, 1104 bp, Escherichia coli 99.0672; identical to SEQ ID NO: 11368

SEQ ID NO: 11807 - DNA, 1653 bp, Escherichia coli 97.1742; identical to SEQ ID NO: 11366

SEQ ID NO: 11808 - DNA, 621 bp, Escherichia coli 97.1742; identical to SEQ ID NO: 11445

SEQ ID NO: 11809 - DNA, 1104 bp, Escherichia coli 97.1742; identical to SEQ ID NO: 11368

SEQ ID NO: 11810 - DNA, 1653 bp, Escherichia coli 97.0003; identical to SEQ ID NO: 11366

SEQ ID NO: 11811 - DNA, 609 bp, Escherichia coli 97.0003; identical to SEQ ID NO: 11484

SEQ ID NO: 11812 - DNA, 1104 bp, Escherichia coli 97.0003; identical to SEQ ID NO: 11368

SEQ ID NO: 11813 - DNA, 1653 bp, Escherichia coli 96.0107; identical to SEQ ID NO: 11366

SEQ ID NO: 11814 - DNA, 633 bp, Escherichia coli 96.0107; identical to SEQ ID NO: 11457

SEQ ID NO: 11815 - DNA, 1056 bp, Escherichia coli 96.0107; identical to SEQ ID NO: 11488

SEQ ID NO: 11816 - DNA, 1653 bp, Escherichia coli 96.0939; identical to SEQ ID NO: 11366

SEQ ID NO: 11817 - DNA, 633 bp, Escherichia coli 96.0939; identical to SEQ ID NO: 11457

SEQ ID NO: 11818 - DNA, 1104 bp, Escherichia coli 96.0939; identical to SEQ ID NO: 11368

SEQ ID NO: 11819 - DNA, 1653 bp, Escherichia coli 96.0932; identical to SEQ ID NO: 11366

SEQ ID NO: 11820 - DNA, 633 bp, Escherichia coli 96.0932; identical to SEQ ID NO: 11463

SEQ ID NO: 11821 - DNA, 1104 bp, Escherichia coli 96.0932; identical to SEQ ID NO: 11539

SEQ ID NO: 11822 - DNA, 1653 bp, Escherichia coli 96.0427; identical to SEQ ID NO: 11366

SEQ ID NO: 11823 - DNA, 633 bp, Escherichia coli 96.0427; identical to SEQ ID NO: 11457

SEQ ID NO: 11824 - DNA, 1104 bp, Escherichia coli 96.0427; identical to SEQ ID NO: 11368

SEQ ID NO: 11825 - DNA, 1059 bp, Escherichia coli 95.0183
atggcaaaaggtgctacagaacaaattattgatgctttgcgacaagtcattattgattttaatcaaaatttaactgaacagtttggtgaaaactttaaagctcttgatgcctctgtaaaaaaacttgttgagtggcagggaaattataaaacgcaaattgagcagatgtcagaacaatatcaacaaagtgtcgagtccctggttgaaacaaaaactgcggttgcagggatttgggaagaatgtaaagaaattcctctggctatgtctgaactgcgtgaagtgcttcaggtgaaccaacatcaaatcagcgaactctcccgccatttagaaacctttgtcgccatccgcgataaagctacaaccgtattacctgaaatacagaacaaaatggctgaagtgggtgaactgctgaaatccggagctgcaaatgttagtgcatctcttgagcaaaccagccagcaaatacttcttaatgcagattcaatgcgcgttgccctggatgaaggtaccgaaggattcagacaatcggttacccaaacacaacaagcatttgcctcgatggcacatgatgtcagcaattcctccgaaaccctaaccagcacgttaggtgaaacaattactgaaatgaaacaaagtggtgaagaattcctgaaatcactagagtcgcactcgaaagaattgcatagaaatatggaacaaaatacgacgaatgtgattgatatgttcagtaagactggtgaaaagattaaccatcaactatccagtaatgccgataatatgtttgattcaatccagacatcatttgataaggcaagtgcagggctgacttctcaagtcagagaatcaattgaaaaatttgctctatccatcaacgagcagttacatgcttttgagcaagcaactgaacgtgaaatgaaccgtgaaatgcaatcattaggtaatgctctgctttcaatcagcaaaggttttgtcggtaactatgaaaaacttattaaagattaccaaatagttatggggcagttacaagcattaatttctgctaataaacatcgcgggtaa

SEQ ID NO: 11826 - DNA, 633 bp, Escherichia coli 95.0183; identical to SEQ ID NO: 11457

SEQ ID NO: 11827 - DNA, 1104 bp, Escherichia coli 95.0183; identical to SEQ ID NO: 11368

SEQ ID NO: 11828 - DNA, 1653 bp, Escherichia coli 95.1288; identical to SEQ ID NO: 11366

SEQ ID NO: 11829 - DNA, 609 bp, Escherichia coli 95.1288; identical to SEQ ID NO: 11484

SEQ ID NO: 11830 - DNA, 318 bp, Escherichia coli 95.1288; identical to SEQ ID NO: 11575

SEQ ID NO: 11831 - DNA, 1653 bp, Escherichia coli 95.0943; identical to SEQ ID NO: 11366

SEQ ID NO: 11832 - DNA, 633 bp, Escherichia coli 95.0943; identical to SEQ ID NO: 11457

SEQ ID NO: 11833 - DNA, 1056 bp, Escherichia coli 95.0943; identical to SEQ ID NO: 11488

SEQ ID NO: 11834 - DNA, 1653 bp, Escherichia coli 96.0428; identical to SEQ ID NO: 11366

SEQ ID NO: 11835 - DNA, 633 bp, Escherichia coli 96.0428; identical to SEQ ID NO: 11457

SEQ ID NO: 11836 - DNA, 1104 bp, Escherichia coli 96.0428; identical to SEQ ID NO: 11368

SEQ ID NO: 11837 - DNA, 1653 bp, Escherichia coli 96.0109; identical to SEQ ID NO: 11366

SEQ ID NO: 11838 - DNA, 633 bp, Escherichia coli 96.0109; identical to SEQ ID NO: 11457

SEQ ID NO: 11839 - DNA, 1104 bp, Escherichia coli 96.0109; identical to SEQ ID NO: 11368

SEQ ID NO: 11840 - DNA, 1497 bp, Escherichia coli 97.0010; identical to SEQ ID NO: 11438

SEQ ID NO: 11841 - DNA, 621 bp, Escherichia coli 97.0010; identical to SEQ ID NO: 11445

SEQ ID NO: 11842 - DNA, 1104 bp, Escherichia coli 97.0010; identical to SEQ ID NO: 11368

SEQ ID NO: 11843 - DNA, 1653 bp, Escherichia coli KTE125
atgttagcgcagctttttgagcagttgtttcaatcgatagactctacactgatcaccaatattttcatctgggctgttatattcgtatttttatcagcgtggtggtgtgacaaaaaaaatatacatagtaaatttagagaatatgctccaaccttaatgggggcattaggtattctgggtactttcattggtattattattgggttactcaattttaatactgaaagtattgataccagcatccccgtattattaggcggcctaaaaacagcattcattacaagcattgtaggtatgttttttgccattttatttaatggaatggatgctttcttttttgccaataaacgaagtgcgttagcagaaaataaccctgaatctgttacacctgaacatatctatcatgaattaaaagagcagaaccagactctgactaaattagtctcgggtattaacggtgatagtgaaggttctcttattgctcaaataaaattactacgtactgagattagcgattcctcgcaggcacaattagctaatcacactcatttcagtaataagctttgggaacaacttgaacaatttgcagatctaatggcaaaaggtgctacagaacaaattattgatgctttacgacaagtcattattgattttaatgaaaatttaactgaacagtttggtgaaaactttaaagcacttgatgcctctgtaaaaaaacttgttgagtggcaggaaaattataaaacgcaagttgagctgatgtcagaacaatatcaacaaagtgtcgagtctctggttgaaacaaaaactgcggttgccgggatttgggaagaatgtaaagaaattcctctggctatgtctgaactgcgtgaagtgcttcaggtgaaccaacatcaaatcagcgaactctcccgccatttagaaacctttgtcgccatccgcgataaagcgacaaccgtattacctgaaatacagaacaaaatggctgaagtgggtgaactgctgaaatccggagctgcaaatgttagtgcatctcttgagcaaaccagccagcaaatacttcttaatgcagattcaatgcgcgtggccctggatgaaggtaccgaaggattcagacaatcagttacccaaacacaacaagcatttgcctcgatggcacatgatgtcagcaattcctccgaaactctaaccagcacgttaggtgaaacaattactgaaatgaaacaaagtggtgaagaattcctgaagtcactagagtcgcactcgaaagaattgcatagaaatatggaacaaaatacgactaatgtaattgatatgttcagtaagactggtgaaaagattaaccatcaactatctagtaatgccgataatatgtttgattcaatccagacatcatttgataaggcaagtgcagggctgacttctcaagtcagagaatcaattgaaaaatttgctctatccatcaacgagcagttacatgcttttgagcaagcaactgaacgtgagatgaaccgtgaaatgcaatcattaggtaatgctctgctttcaatcagcaaaggttttgtcggtaactatgaaaaacttattaaagattaccaaataattatggggcagttacaagcattaatttctgctaataaacatcgagggtaa

SEQ ID NO: 11844 - DNA, 708 bp, Escherichia coli KTE125
atggataagattatagggaaacaattacctaaaaaagatcaagataatgaacactgggtatccatgtcagacctaatggcagggctgatgatggtttttatgttcatatctattgcttatatgcactacgtacgtattgaaaaagaaaaaattaaagaagttgccgtagcctacgagaatgctcagttacagctttataatgctctggatattgagtttgcaaaggatttgcaagactgggatgcagagatcgataagcagactctggaggttcgatttaaatcaccggatgttttatttggcttaggaagcacagagcttaaaccaaagtttaaactcattcttgacgacttctttcctcgctacctaaaagttcttgataattatcaagaacatattactgaagtccgcattgaaggtcacacaagtactgactggactggaacaacgaatcctgatattgcttattttaataatatggcactatcacaaggtcgtacacgtgcagtattacaatacgtttatgatataaaaaatatcgcgacacacaaacaatgggttaaaagtaaatttgccgcagtaggttattcatctgcacatcccattcttgataaaaccggcaaggaggatcctaatcgctctcgtcgtgtcaccttcaaagttgtaacaaatgccgagttgcagattagaaagattattcaggagtaa

SEQ ID NO: 11845 - DNA, 1104 bp, Escherichia coli KTE125
atgaaattatctatcgacatttcagaacttattcaattagggaagaaaatgttaccagaaggagtcgatttttttctggatgaatcccctattgactttgatccaatagatattgagttatccacgggtaaagaagttagtatcgaagatcttgaccctggtagcgggcttatctcttatcatggccgccaggttcttttatatattagggaccattcagggcgttatgatgcggctatcatcgatggcgaaaaaggaaaacgttttcatattgcctggtgcagaactcttgatgaaatgcgccataaaaatcgatttgaaaggtatcatgcaactaaccgcatagatggtttattcgaaattgatgatggttcaggtcggagccaggatgttgatttacgagtatgtatgaattgtctggaacgacttaattacaaaggaagtattgataaacaaaggaaaagagagatttttaaatcattctcattaaatgagtttttttcagattatagtacctgttttcgtcatatgcctaagggtatctatgacaaaacaaatagtgggtatgtcgaaaactggaaagatatatcaaaatcaatacgagaaaaggccaagtatacttgtaataattgtggtgtgaatttatcaaccgccaaaaacttgtgccatgtccatcataaaaatggcatcaaatatgataatcaccatgaaaaccttcttgttctgtgtaaggattgccatcgtaaacagcccctccatgaaggtatattcgttacccaagctgagatggctatcattcaacgtttacgttcccaacaagggttattaaaagccgaatcctggaatgaaatatatgacctgactgatccatcagtacatggtgatattaatatgatgcaacataaaggctttcaacctcctgttcctgggttagatcttcaaaactcagaacatgaaattattgcaaccgtagaagcagcatggccaggccttaaaattgcagttaaccttactcccgccgaagtcgaaggatggagaatatataccgtgggtgagctggttaaagaaatacaaacaggagcctttacgtcagcaacgttgtaa

SEQ ID NO: 11846 - DNA, 1653 bp, Escherichia coli 99.0815; identical to SEQ ID NO: 11366

SEQ ID NO: 11847 - DNA, 633 bp, Escherichia coli 99.0815; identical to SEQ ID NO: 11457

SEQ ID NO: 11848 - DNA, 1104 bp, Escherichia coli 99.0815; identical to SEQ ID NO: 11368

SEQ ID NO: 11849 - DNA, 1653 bp, Escherichia coli 99.0816; identical to SEQ ID NO: 11366

SEQ ID NO: 11850 - DNA, 633 bp, Escherichia coli 99.0816; identical to SEQ ID NO: 11457

SEQ ID NO: 11851 - DNA, 1104 bp, Escherichia coli 99.0816; identical to SEQ ID NO: 11368

SEQ ID NO: 11852 - DNA, 1497 bp, Escherichia coli 99.1793
atgggggcattaggtattctgggtactttcattggtattattattggtttactcaattttaataccgaaagtattgataccagcatccccgtattattaggtggcctaaaaacagcattcattacaagcattgtaggtatgttttttgccattttatttaatggaatggatgctttcttttttgccaataaacgaagtgcgttagcagaaaataaccctgaatctgttacacctgaacatatctatcatgaattaaaagagcagaaccagactctgactaaattagtctcgggtattaacggtgatagtgaaggttctcttattgctcaaataaaattactacgtactgagattagcgattcctcgcaggcacaattagctaatcacactcatttcagtaataagctttgggaacaacttgaacaatttgcagatctaatggcaaaaggtgctacagaacaaattattgatgctttgcgacaagtcattattgattttaatcaaaatttaactgaacagtttggtgaaaactttaaagctcttgatgcctctgtaaaaaaacttgttgagtggcagggaaattataaaacgcaaattgagcagatgtcagaacaatatcaacaaagtgtcgagtccctggttgaaacaaaaactgcggttgcagggatttgggaagaatgtaaagaaattcctctggctatgtctgaactgcgtgaagtgcttcaggtgaaccaacatcaaatcagcgaactctcccgccatttagaaacctttgtcgccatccgcgataaagctacaaccgtattacctgaaatacagaacaaaatggctgaagtgggtgaactgctgaaatccggagctgcaaatgttagtgcatctcttgagcaaaccagccagcaaatacttcttaatgcagattcaatgcgcgttgccctggatgaaggtaccgaaggattcagacaatcggttacccaaacacaacaagcatttgcctcgatggcacatgatgtcagcaattcctccgaaaccctaaccagcacgttaggtgaaacaattactgaaatgaaacaaagtggtgaagaattcctgaaatcactagagtcgcactcgaaagaattgcatagaaatatggaacaaaatacgacgaatgtgattgatatgttcagtaagactggtgaaaagattaaccatcaactatccagtaatgccgataatatgtttgattcaatccagacatcatttgataaggcaagtgcagggctgacttctcaagtcagagaatcaattgaaaaatttgctctatccatcaacgagcagttacatgcttttgagcaagcaactgaacgtgaaatgaaccgtgaaatgcaatcattaggtaatgctctgctttcaatcagcaaaggttttgtcggtaactatgaaaaacttattaaagattaccaaatagttatgggacagttacaagcattaatttctgctaataaacatcgcgggtaa

SEQ ID NO: 11853 - DNA, 633 bp, Escherichia coli 99.1793; identical to SEQ ID NO: 11457

SEQ ID NO: 11854 - DNA, 1104 bp, Escherichia coli 99.1793; identical to SEQ ID NO: 11368

SEQ ID NO: 11855 - DNA, 1332 bp, Escherichia coli 99.1805
atggatgctttcttttttgccaataaacgaagtgcgttagcagaaaataaccctgaatctgttacacctgaacatatctatcatgaattaaaagagcagaaccagactctgactaaattagtctcgggtattaacggtgatagtgaaggttctcttattgctcaaataaaattactacgtactgagattagcgattcctcgcaggcacaattagctaatcacactcatttcagtaataagctttgggaacaacttgaacaatttgcagatctaatggcaaaaggtgctacagaacaaattattgatgctttgcgacaagtcattattgattttaatcaaaatttaactgaacagtttggtgaaaactttaaagctcttgatgcctctgtaaaaaaacttgttgagtggcagggaaattataaaacgcaaattgagcagatgtcagaacaatatcaacaaagtgtcgagtccctggttgaaacaaaaactgcggttgcagggatttgggaagaatgtaaagaaattcctctggctatgtctgaactgcgtgaagtgcttcaggtgaaccaacatcaaatcagcgaactctcccgccatttagaaacctttgtcgccatccgcgataaagctacaaccgtattacctgaaatacagaacaaaatggctgaagtgggtgaactgctgaaatccggagctgcaaatgttagtgcatctcttgagcaaaccagccagcaaatacttcttaatgcagattcaatgcgcgttgccctggatgaaggtaccgaaggattcagacaatcggttacccaaacacaacaagcatttgcctcgatggcacatgatgtcagcaattcctccgaaaccctaaccagcacgttaggtgaaacaattactgaaatgaaacaaagtggtgaagaattcctgaaatcactagagtcgcactcgaaagaattgcatagaaatatggaacaaaatacgacgaatgtgattgatatgttcagtaagactggtgaaaagattaaccatcaactatccagtaatgccgataatatgtttgattcaatccagacatcatttgataaggcaagtgcagggctgacttctcaagtcagagaatcaattgaaaaatttgctctatccatcaacgagcagttacatgcttttgagcaagcaactgaacgtgaaatgaaccgtgaaatgcaatcattaggtaatgctctgctttcaatcagcaaaggttttgtcggtaactatgaaaaacttattaaagattaccaaatagttatggggcagttacaagcattaatttctgctaataaacatcgcgggtaa

SEQ ID NO: 11856 - DNA, 633 bp, Escherichia coli 99.1805; identical to SEQ ID NO: 11457

SEQ ID NO: 11857 - DNA, 1104 bp, Escherichia coli 99.1805; identical to SEQ ID NO: 11368

SEQ ID NO: 11858 - DNA, 1653 bp, Escherichia coli ATCC 700728; identical to SEQ ID NO: 11366

SEQ ID NO: 11859 - DNA, 633 bp, Escherichia coli ATCC 700728; identical to SEQ ID NO: 11457

SEQ ID NO: 11860 - DNA, 1104 bp, Escherichia coli ATCC 700728; identical to SEQ ID NO: 11368

SEQ ID NO: 11861 - DNA, 1653 bp, Escherichia coli PA47; identical to SEQ ID NO: 11366

SEQ ID NO: 11862 - DNA, 621 bp, Escherichia coli PA47; identical to SEQ ID NO: 11445

SEQ ID NO: 11863 - DNA, 1104 bp, Escherichia coli PA47; identical to SEQ ID NO: 11368

SEQ ID NO: 11864 - DNA, 1653 bp, Escherichia coli PA48; identical to SEQ ID NO: 11366

SEQ ID NO: 11865 - DNA, 633 bp, Escherichia coli PA48; identical to SEQ ID NO: 11463

SEQ ID NO: 11866 - DNA, 1104 bp, Escherichia coli PA48; identical to SEQ ID NO: 11386

SEQ ID NO: 11867 - DNA, 1653 bp, Escherichia coli 7.1982; identical to SEQ ID NO: 11366

SEQ ID NO: 11868 - DNA, 618 bp, Escherichia coli 7.1982; identical to SEQ ID NO: 11517

SEQ ID NO: 11869 - DNA, 1104 bp, Escherichia coli 7.1982; identical to SEQ ID NO: 11539

SEQ ID NO: 11870 - DNA, 1653 bp, Escherichia coli 99.1781; identical to SEQ ID NO: 11366

SEQ ID NO: 11871 - DNA, 633 bp, Escherichia coli 99.1781; identical to SEQ ID NO: 11457

SEQ ID NO: 11872 - DNA, 1104 bp, Escherichia coli 99.1781; identical to SEQ ID NO: 11368

SEQ ID NO: 11873 - DNA, 1653 bp, Escherichia coli 99.1762; identical to SEQ ID NO: 11366

SEQ ID NO: 11874 - DNA, 633 bp, Escherichia coli 99.1762; identical to SEQ ID NO: 11457

SEQ ID NO: 11875 - DNA, 1104 bp, Escherichia coli 99.1762; identical to SEQ ID NO: 11368

SEQ ID NO: 11876 - DNA, 1653 bp, Escherichia coli PA35; identical to SEQ ID NO: 11366

SEQ ID NO: 11877 - DNA, 609 bp, Escherichia coli PA35; identical to SEQ ID NO: 11484

SEQ ID NO: 11878 - DNA, 1104 bp, Escherichia coli PA35; identical to SEQ ID NO: 11368

SEQ ID NO: 11879 - DNA, 1653 bp, Escherichia coli 3.4880
atgttagcgcagctttttgagcagttgtttcaatcgatagactctacactgatcaccaatattttcatctgggctgttatattcgtatttttatcagcgtggtggtgtgacaaaaaaaatatacatagtaagtttagagaatatgctccaaccttaatgggggcattaggtattctgggtactttcattggtattattattggtttactcaattttaataccgaaagtattgataccagcatccccgtattattaggtggcctaaaaacagcattcattacaagcattgtaggtatgttttttgccattttatttaatggaatggatgctttcttttttgccaataaacgaagtgcgttagcagaaaataaccctgaatctgttacacctgaacatatctatcatgaattaaaagagcagaaccagactctgactaaattagtctcgggtattaacggtgatagtgaaggttctcttattgctcaaataaaattactacgtactgagattagcgattcctcgcaggcacaattagctaatcacactcatttcagtaataagctttgggaacaacttgaacaatttgcagatctaatggcaaaaggtgctacagaacaaattattgatgctttgcgacaagtcattattgattttaatcaaaatttaactgaacagtttggtgaaaactttaaagctcttgatgcctctgtaaaaaaacttgttgagtggcagggaaattataaaacgcaaattgagcagatgtcagaacaatatcaacaaagtgtcgagtccctggttgaaacaaaaactgcggttgcagggatttgggaagaatgtaaagaaattcctctggctatgtctgaactgcgtgaagtgcttcaggtgaaccaacatcaaatcagcgaactctcccgccatttagaaacctttgtcgccatccgcgataaagctacaaccgtattacctgaaatacagaacaaaatggctgaagtgggtgaactgctgaaatccggagctgcaaatgttagtgcatctcttgagcaaaccagccagcaaatacttcttaatgcagattcaatgcgcgttgccctggatgaaggtaccgaaggattcagacaatcggttacccaaacacaacaagcatttgcctcgatggcacatgatgtcagcaattcctccgaaaccctaaccagcacgttaggtgaaacaattactgaaatgaaacaaagtggtgaagaattcctgaaatcactagagtcgcactcgaaagaattgcatagaaatatggaacaaaatacgacgaatgtgattgatatgttcagtaagactggtgaaaagattaaccatcaactatccagtaatgccgataatatgtttgattcaatccagacatcatttgataaggcaagtgcagggctgacttctcaagtcagagaatcaattgaaaaatttgctctatccatcaacgagcagttacatgcttttgagcaagcaactgaacgtgaaatgaaccgtgaaatgcaatcattaggtaatgctctgctttcaatcagcaaaggttttgtcggtaactatgaaaaacttattaaagattaccaaatagttatgggacagttacaagcattaatttctgctaataaacatcgcgggtaa

SEQ ID NO: 11880 - DNA, 609 bp, Escherichia coli 3.4880; identical to SEQ ID NO: 11484

SEQ ID NO: 11881 - DNA, 1104 bp, Escherichia coli 3.4880; identical to SEQ ID NO: 11368

SEQ ID NO: 11882 - DNA, 1653 bp, Escherichia coli 99.0670; identical to SEQ ID NO: 11366

SEQ ID NO: 11883 - DNA, 633 bp, Escherichia coli 99.0670; identical to SEQ ID NO: 11457

SEQ ID NO: 11884 - DNA, 1104 bp, Escherichia coli 99.0670; identical to SEQ ID NO: 11368

SEQ ID NO: 11885 - DNA, 1653 bp, Escherichia coli 99.0814; identical to SEQ ID NO: 11366

SEQ ID NO: 11886 - DNA, 633 bp, Escherichia coli 99.0814; identical to SEQ ID NO: 11457

SEQ ID NO: 11887 - DNA, 1104 bp, Escherichia coli 99.0814; identical to SEQ ID NO: 11368

SEQ ID NO: 11888 - DNA, 1653 bp, Escherichia coli 99.0839; identical to SEQ ID NO: 11366

SEQ ID NO: 11889 - DNA, 633 bp, Escherichia coli 99.0839; identical to SEQ ID NO: 11457

SEQ ID NO: 11890 - DNA, 1104 bp, Escherichia coli 99.0839; identical to SEQ ID NO: 11368

SEQ ID NO: 11891 - DNA, 1653 bp, Escherichia coli 99.0848; identical to SEQ ID NO: 11366

SEQ ID NO: 11892 - DNA, 621 bp, Escherichia coli 99.0848; identical to SEQ ID NO: 11445

SEQ ID NO: 11893 - DNA, 1104 bp, Escherichia coli 99.0848; identical to SEQ ID NO: 11368

SEQ ID NO: 11894 - DNA, 1359 bp, Escherichia coli 99.1753; identical to SEQ ID NO: 11525

SEQ ID NO: 11895 - DNA, 708 bp, Escherichia coli 99.1753; identical to SEQ ID NO: 11367

SEQ ID NO: 11896 - DNA, 1104 bp, Escherichia coli 99.1753; identical to SEQ ID NO: 11368

SEQ ID NO: 11897 - DNA, 1653 bp, Escherichia coli 99.1775; identical to SEQ ID NO: 11366

SEQ ID NO: 11898 - DNA, 621 bp, Escherichia coli 99.1775; identical to SEQ ID NO: 11445

SEQ ID NO: 11899 - DNA, 1104 bp, Escherichia coli 99.1775; identical to SEQ ID NO: 11368

SEQ ID NO: 11900 - DNA, 1653 bp, Escherichia coli PA19; identical to SEQ ID NO: 11366

SEQ ID NO: 11901 - DNA, 609 bp, Escherichia coli PA19; identical to SEQ ID NO: 11484

SEQ ID NO: 11902 - DNA, 1104 bp, Escherichia coli PA19; identical to SEQ ID NO: 11368

SEQ ID NO: 11903 - DNA, 1653 bp, Escherichia coli PA2; identical to SEQ ID NO: 11366

SEQ ID NO: 11904 - DNA, 633 bp, Escherichia coli PA2; identical to SEQ ID NO: 11457

SEQ ID NO: 11905 - DNA, 1104 bp, Escherichia coli PA2; identical to SEQ ID NO: 11368

SEQ ID NO: 11906 - DNA, 1653 bp, Escherichia coli PA11; identical to SEQ ID NO: 11366

SEQ ID NO: 11907 - DNA, 633 bp, Escherichia coli PA11; identical to SEQ ID NO: 11457

SEQ ID NO: 11908 - DNA, 1104 bp, Escherichia coli PA11; identical to SEQ ID NO: 11368

SEQ ID NO: 11909 - DNA, 1653 bp, Escherichia coli PA13; identical to SEQ ID NO: 11366

SEQ ID NO: 11910 - DNA, 708 bp, Escherichia coli PA13; identical to SEQ ID NO: 11367

SEQ ID NO: 11911 - DNA, 1104 bp, Escherichia coli PA13; identical to SEQ ID NO: 11368

SEQ ID NO: 11912 - DNA, 1653 bp, Escherichia coli PA8; identical to SEQ ID NO: 11366

SEQ ID NO: 11913 - DNA, 633 bp, Escherichia coli PA8; identical to SEQ ID NO: 11457

SEQ ID NO: 11914 - DNA, 1104 bp, Escherichia coli PA8; identical to SEQ ID NO: 11368

SEQ ID NO: 11915 - DNA, 1653 bp, Escherichia coli 09BKT078844; identical to SEQ ID NO: 11366

SEQ ID NO: 11916 - DNA, 633 bp, Escherichia coli 09BKT078844; identical to SEQ ID NO: 11457

SEQ ID NO: 11917 - DNA, 1056 bp, Escherichia coli 09BKT078844; identical to SEQ ID NO: 11488

SEQ ID NO: 11918 - DNA, 1653 bp, Escherichia coli ONT:H33 str. C48/93
atgttagcgcagctttttgagcagttgtttcaatcgatagactctacactgatcaccaatattttcatctgggctgttatattcgtatttttatcagcgtggtggtgtgacaaaaaaaatatacatagtaagtttagagaatatgctccaaccttaatgggggcattaggtattctgggtactttcattggtattattattgggttactcaattttaatactgaaagtattgataccagcatccccgtattattaggcggcctaaaaacagcattcattacaagcattgtaggtatgttttttgccattttatttaatggaatggatgctttcttttttgccaataaacgaagtgcgttagcagaaaataaccctgaatctgttacacctgaacatatctatcatgaattaaaagagcagaaccagactctgactaaattagtctcgggtattaacggtgatagtgaaggttctcttattgctcaaataaaattactacgtactgagattagcgattcctcgcaggcacaattagctaatcacactcatttcagtaataagctttgggaacaacttgaacaatttgcagatctaatggcaaaaggtgctacagaacaaattattgatgctttacgacaagtcattattgattttaatgaaaatttaactgaacagtttggtgaaaactttaaagcacttgatgcctctgtaaaaaaacttgttgagtggcaggaaaattataaaacgcaagttgagctgatgtcagaacaatatcaacaaagtgtcgagtctctggttgaaacaaaaactgcggttgctgggatttgggaagaatgtaaagaaattcctctggctatgtctgaactgcgtgaagtgcttcaggtgaaccaacatcaaatcagcgaactctcccgccatttagaaacctttgtcgctatccgcgataaagctacaaccgtattacctgaaatacagaacaaaatggctgaagtgggtgaactgctgaaatccggagctgcaaatgttagtgcatctcttgagcaaaccagccagcaaatacttcttaatgcagattcaatgcgcgtggccctggatgaaggtaccgaaggattcagacaatcggttacccaaacacaacaagcatttgcctcgatggcacatgatgtcagcaattcctccgaaactctaaccagcacgttaggtgaaacaattactgaaatgaaacaaagtggtgaagaattcctgaagtcactagagtcgcactcgaaaaaattgcatagaaatatggaacaaaatacgactaatgtaattgatatgttcagtaagactggtgaaaagattaaccatcaactatccagtaatgccgataatatgtttgattcaatccagacatcatttgataaggcaagtgcagggctgacttctcaagtcagagaatcaattgaaaaatttgctctatccatcaacgagcagttacatgcttttgagcaagcaactgaacgtgagatgaaccgtgaaatgcaatcattaggtaatgctctgctttcaatcagcaaaggttttgtcggtaactatgaaaaacttattaaagattaccaaataattatggggcagttacaagcattaatttctgctaataaacatcgagggtaa

SEQ ID NO: 11919 - DNA, 708 bp, Escherichia coli ONT:H33 str. C48/93; identical to SEQ ID NO: 11376

SEQ ID NO: 11920 - DNA, 1104 bp, Escherichia coli ONT:H33 str. C48/93
atgaaattatctatcgacatttcagaacttattcaattagggaagaaaatgttaccagaaggagtcaatttttttctggatgaatcccctattgactttgatcctatagatattgagttatccacgggtaaagaagttagtatcgaagatcttgaccctggtagcgggcttatctcttatcatggccgccaggttcttttatatattagggaccattcagggcgttatgatgcggctatcatcgatggcgaaaaaggaaaacgttttcatattgcctggtgcagaactcttgatgaaatgcgccataaaaatcgatttgaaaggtatcatgcaactaaccgcatagatggtttattcgaaattgatgatggttcaggtcggagccaggatgttgatttacgggtatgtatgaattgtctggaacgacttaattacaaaggaagtattgataaacaaaggaaaagagagatttttaaatcattctcattaaatgagtttttttcagattatagtacctgttttcgtcatatgcctaagggtatctatgacaaaacaaatagtgggtatgtcgaaaactggaaagatatatcaaaatcaatacgagaaaaggccaagtatacttgtaatgattgtggtgtgaatttatcaaccgccaaaaacttgtgccatgtccatcataaaaatggcatcaaatatgataatcaccatgaaaaccttcttgttctgtgtaaggattgccatcgtaaacagcccctccatgaaggtatattcgttacccaagctgagatggctatcattcaacgtttacgttcccaacaagggttattaaaagccgaatcctggaatgaaatatatgacctgactgatccatcagtacatggtgatattaatatgatgcaacataaaggctttcaacctcctgttcctgggttagatcttcaaaactcagaacatgaaattattgcaaccgtagaagcagcatggccaggccttaaaattgcagttaaccttactcccgccgaagtcgaaggatggagaatatataccgtgggtgagctggttaaagaaatacaaacaggagcctttacgtcagcaacgttgtaa

SEQ ID NO: 11921 - DNA, 1653 bp, Escherichia coli O127:H27 str. C43/90; identical to SEQ ID NO: 11471

SEQ ID NO: 11922 - DNA, 708 bp, Escherichia coli O127:H27 str. C43/90; identical to SEQ ID NO: 11472

SEQ ID NO: 11923 - DNA, 1104 bp, Escherichia coli O127:H27 str. C43/90; identical to SEQ ID NO: 11392

SEQ ID NO: 11924 - DNA, 1653 bp, Escherichia coli KTE66
atgctggcacagctttttgaacaattgtttaaaacaacagaagcgctccttatcacgaatttttttatctgggttgttatatcggtttttttgtttgcgttgtggtgtgataagcgaaatatacatagtgagtttcgggagtatgctccgaccttgatgggggcattaggtatacttggcacctttaccggaattattattggattgcttaattttaataccgaaagtattgataccagtatccccgtattattagatggactgaaaacagctttcattacaagtattgtaggtatgttttttgccattttatttaatggaatggatgttttctttttcgccaataaacgaactgagttagcagaaaataccccggggtctgttacgcctgaacatatctatcgtgagttaaaagagcaaaaccaaacactggataaattagtctcaggaattaatggggatggtgaaggttctcttattgctcaaataaaattacttcgtactgaaattaacgatgtctcacaagaacaattagatagtcactctcattttagtaataaactttgggaacagttgcaacaatttgcagaccttatggcaaaaggtgctacagaacagattattgatgctttgcgacaagtcattattgattttaatgaaaatttaactgaacaatttggtgaaaattttaaagcacttgatgcttctgtaaagaaacttgttgagtggcagggaaattataaaacgcaagttgaacagatgtcagaacaatatcaacaatgtgtcgaatccctggttgaaacaaaaactgcggttgccgggatttgggaagaatgtaattttattcctctggctatgtcttcactgcgtgaagtgcttcaggtgaatcaacatcaaattagcgaactctctcgtcatctggaaacttttgctgccatccgggatagagctataaccgtgttacctgaaatacagaacaaaatggctgaagtaggtgaactgttgaaatccggagcggcaaatgttagtgcatctcttgaacaaaccagccagcaaatacttctcaatgcagattcaatgcgtgtggccttggatgaaggtacagaaggattcaggcaatcggttacccagacacaacaggcatttgcctcaatggcacatgatgtcagcaattcctccgaaaccctaaccagcacgttaggtgaaacaattaccgaaatgaaacaaagtggtgaagaattcctgaaatcactagagtcgcactcgaaagaattgcatagaaatatggaacaaaatacgactaatgtgattgatatgttcagtaagactggtgaaaagattaaccatcaactatccagtcatgccgataatatgtttgattcaatccagacatcatttgataaggcaagtgcagggctgacttctcaagtcagagaggcaattgaaaaatttgcactatcgatcaatgaacagttacatgcttttgaacaggcaactgagcgtgaaatgaatcgtgaaatgcaatcattaggtaatgctctgctttcgatcagcaaaggttttgttaataattatgaaaaacttattaaagattatcagatagttatggggcagttacaaacattgatttctgctaataaacatcgcgggtga

SEQ ID NO: 11925 - DNA, 708 bp, Escherichia coli KTE66
atggataaaattatagggaaacaattatccccaaaaaagcaagataatgaacactgggtatccatgtcagatttaatggcagggctgatgatggttttcatgtttatatctgttgcttatatgcattacgtgcgtattgaaaaagaaagaattaaagaagttgctgtagcctatgaaaatgctcaattacagctttataatgctctggatattgagtttgcaaaggatttacaagactgggatgcagagatcgataaacagactctggaagttcgatttaaatcaccggatgttttatttggcttaggaagcacagagctaaaaccaaagtttaaacttattcttgacgacttctttcctcgctatctaaaagttcttgataattatcaggaacatattactgaagtccgcattgaaggtcacacaagtactgactggacaggaacaacgaatcctgatatcgcttattttaataatatggcactatcgcaagatcgtacacgtgcagtattacaatacgtttatgacataaaaaatatcgcaacacaccaacaatgggttaaaagtaaatttgccgcagtaggttattcatctgcacatcccattcttgataaaacaggcaaggaggatcctaatcgctctcgtcgtgtcaccttcaaagttgtaacaaatgccgagttgcagattagaaagattattcaggagtaa

SEQ ID NO: 11926 - DNA, 1098 bp, Escherichia coli KTE66
atgaaattatctatcgacatttcagaacttattcaattagggaagaaaatgttaccagaaggagtcgatttttttctggatgaatcccctattgactttgatcctatagatattgagttatccacgggtaaagaagttagtatcgaagatcttgaccctggtagcgggcttatctcttatcatggccgccaggttcttttatatattcgggaccattcaggacgttatgatgcggctatcgtagatggcgaaaaaggaaaacgttttcatattgcctggtgtagaactcttgatgaaatgcgccataaaaatcgatttgaaaggtatcatgcgactaaccgcatagatggtttattcgaaattgatgatggttcaggtcggagccatgatgttgatttacgggtatgtatgaattgcctcgaacgacttaattataaaggaagtattgataaacaacgaaaaagagagatttttaagtcattctcattaaatgagtttttttcagattatagtacctgttttcgtcatatgcctaagggtatctatgataaaacaaatagtggatatgtcgaaaattggaaggaaatatctaaatcaatacgagaaaagaccaagtatacctgtaatgattgtggcgtgaatttatcaaccgctaaaaatttgtgccatgtccatcataaaaatggcatcaaatatgataatcaccatgaaaaccttcttgttctgtgcaaggattgccatcgaaaacagcccctccacgaaggtatattcgttacccaagctgagatggctatcattcaacgtttacgttcccaacaagggttattaaaagcagaatcctggaatgaaatatatgacctgactgatccatcagtgcatggtgatattaatatgatgcaacataaaggctttcagcttcctgttcttgggttagaacttcaaaactcagaacataaagttattgcgacagtagaggctgcatggccaggtcttaaaattgcagttaatcttattcctgctaaagttgagggatggaaaatatataccgcaggtgaacttattaaagatatacagtccgacatcttcaccgcggtgtag

SEQ ID NO: 11927 - DNA, 1653 bp, Escherichia coli KTE161; identical to SEQ ID NO: 11843

SEQ ID NO: 11928 - DNA, 708 bp, Escherichia coli KTE161; identical to SEQ ID NO: 11844

SEQ ID NO: 11929 - DNA, 1104 bp, Escherichia coli KTE161; identical to SEQ ID NO: 11845

SEQ ID NO: 11930 - DNA, 1653 bp, Escherichia coli KTE50; identical to SEQ ID NO: 11843

SEQ ID NO: 11931 - DNA, 708 bp, Escherichia coli KTE50; identical to SEQ ID NO: 11844

SEQ ID NO: 11932 - DNA, 1104 bp, Escherichia coli KTE50; identical to SEQ ID NO: 11845

SEQ ID NO: 11933 - DNA, 1653 bp, Escherichia coli KTE202; identical to SEQ ID NO: 11843

SEQ ID NO: 11934 - DNA, 708 bp, Escherichia coli KTE202; identical to SEQ ID NO: 11844

SEQ ID NO: 11935 - DNA, 1104 bp, Escherichia coli KTE202; identical to SEQ ID NO: 11845

SEQ ID NO: 11936 - DNA, 1653 bp, Escherichia coli P0304799.3
atgttagcacagttttttgagcagttgtttcaatcgatagactctacactgatcaccaatattttcatctgggctgttatattcgtatttttatcagcgtggtggtgtgacaaaaaaaatatacatagtaagtttagagaatatgctccaaccttaatgggggcattaggtattctgggtactttcattggtattattattgggttgctcaattttaataccgaaagtattgataccagtattcccgtattattaggtggcctaaaaacagcattcattacaagcattgtaggtatgttttttgccattttatttaatggaatggatgctttcttttttgccaataaacgaagcgcattagcagaaaataaccctgaatctgttacacctgaacatatctatcatgaattaaaagagcagaaccaggctctgactaaattagtctcgggtattaacggtgatagtgaaggttctcttattgctcaaataaaattactacgtactgagattagcgattcctcgcaagcacaattagctaatcacacttatttcagtaataagctttgggaacaacttgaacaatttgcagatctaatggcaaaaggtgctacagaacaaattattgatgctttgcggcaagtcattattgattttaatgataacttaactgaacagtttggtgaaaactttaaagcacttgatgcctctgtaaaaaaacttgttgagtggcaggaaaattataaaatgcaagttgagcagatgtcagaacaatatcaacaaagtgttgagtccctggttgaaacaaaaactgcagttgccgggatttgggaagaatgtaaagaaattcctctggctatgtctgaactgcgtgaagtgcttcaggtgaaccaacatcaaatcagcgaactctcccgccatttagaaacctttgttgccatccgcgataaagctacaaccgtattacctgaaatacaaaacaaaatggctgaagtgggtgaactgctgaaatccggagctgcaaatgtcagtgcatcccttgagcaaaccagtcagcaaatacttcttaatgcagattcaatgcgcgtggccctggatgaaggtaccgaaggattcagacaatcggttacccaaacacaacaagcatttgcctcgatggcacatgatgtcagcaattcctccgaaaccctgaccagcacgttaggtgaaacaattactgaaatgaaacaaagtggtgaagaattcctgaaatcactggagtcgcactcgaaagaattgcatagaaatatggaacaaaatacgactaatgtgattgatatgttcagtaagactggtgaaaagattaaccatcaactatccagtaatgccgataatatgtttgattcaatccagacatcatttgataaggcaagtgcagggctggcttctcaagtcagagaatcaattgaaaaatttgctctatccatcaacgagcagttacatgcttttgagcaggcaactgaacgtgagatgaaccgtgaaatgcaatcattaggtaatgctctgctttcaatcagcaaaggttttgtcggtaactatgaaaaacttattaaagattaccagatagttatggggcagttacaagctttaatttctgctaataaacatcgcgggtaa

SEQ ID NO: 11937 - DNA, 621 bp, Escherichia coli P0304799.3
atgatggtttttatgttcatatctattgcttatatgcactacgtacgtattgaaaaagaaaaaattaaagaagttgccgtagcctacgagaacgctcagttacagctttataatgctctgaatattgagtttgcaaaggatttacaagactgggatgcagagatcgataaacaaactctggaggttcgatttaaatcaccggatgttttatttggcttaggaagcacagagctaaaaccaaagtttaaactcattcttgacgacttctttcctcgctacctaaaagttcttgataattatcaggaacacataactgaagtccgcattgaaggtcatacaagtactgactggacaggaacaacaaatcctgatattgcttattttaataacatggcactatcacaaggtcgtacacgttcagtattacaatacgtttatgatataaaaaatatcgcgacacaccaacaatgggttaaaagtaaatttgccgcagtaggttattcatctgcacatcccattcttgataaaaccggcaaggaggatcctaatcgctcccgtcgagtcaccttcaaagttgtaacaaatgccgagttgcagattagaaagattattcaggagtaa

SEQ ID NO: 11938 - DNA, 516 bp, Escherichia coli P0304799.3
atgaaattatctatcgacatttcagaacttattcaattagggaagaaaatgttaccagaaggaggcgatttttttctggatgaatctcctgttgattttgagcctatagatattgagttatcttcgggtaaagaagttagtattgcagagcttgaccccggtagcagccttatctcttatcatggtcgccaggttcttttatatattcgggaccattcaggacgttatgacgctgctatcatggatggcgaaaaaggaaaacgttttcatattgcatggtgcagaactcttgatgaaatgcgacaaaagaatcgattcgaaagataccatgctactaaccgtatagatggtttattcgaaattgatgatggttccggtcgcagtcaggatactgatttacgggtatgtatgaattgtcttgagcgacttaattataaaggaagtattgacagacaaaaaagaagaggagtttttaattccttttccttaaaggagtttttttcagattatagtacc

SEQ ID NO: 11939 - DNA, 1653 bp, Escherichia coli HVH 43 (4-2173468); identical to SEQ ID NO: 11843

SEQ ID NO: 11940 - DNA, 708 bp, Escherichia coli HVH 43 (4-2173468); identical to SEQ ID NO: 11844

SEQ ID NO: 11941 - DNA, 1104 bp, Escherichia coli HVH 43 (4-2173468); identical to SEQ ID NO: 11845

SEQ ID NO: 11942 - DNA, 1653 bp, Escherichia coli HVH 44 (4-2298570); identical to SEQ ID NO: 11843

SEQ ID NO: 11943 - DNA, 708 bp, Escherichia coli HVH 44 (4-2298570); identical to SEQ ID NO: 11844

SEQ ID NO: 11944 - DNA, 1104 bp, Escherichia coli HVH 44 (4-2298570); identical to SEQ ID NO: 11845

SEQ ID NO: 11945 - DNA, 1653 bp, Escherichia coli HVH 182 (4-0985554); identical to SEQ ID NO: 11843

SEQ ID NO: 11946 - DNA, 708 bp, Escherichia coli HVH 182 (4-0985554); identical to SEQ ID NO: 11844

SEQ ID NO: 11947 - DNA, 1104 bp, Escherichia coli HVH 182 (4-0985554); identical to SEQ ID NO: 11845

SEQ ID NO: 11948 - DNA, 1653 bp, Escherichia coli HVH 193 (4-3331423)
atgttagcgcagctttttgagcagttgtttcaatcgatagactctacactgatcaccaatattttcatctgggctgttatattcgtatttttatcagcgtggtggtgtgacaaaaaaaatatacatagtaagtttagagaatatgctccaaccttaatgggggcattaggtattctgggtactttcattggtattattattggtttactcaattttaataccgaaagtattgataccagcatccccgtattattaggtggcctaaaaacagcattcattacaagcattgtaggtatgttttttgccattttatttaatggaatggatgctttcttttttgccaataaacgaagtgcgttagcagaaaataaccctgaatctgttacgcctgaacatatctatcatgaattaaaagagcagaaccagactctgactaaattagtctcgggtattaacggtgatagtgaaggttctcttattgctcaaataaaattactacgtactgagattagcgattcctcgcaggcacaattagctaatcacactcatttcagtaataagctttgggaacaacttgaacaatttgcagatctaatggcaaaaggtgctacagaacaaattattgatgctttgcgacaagtcattattgattttaatgaaaatttaactgaacaatttggtgaaaattttaaagcacttgatgcctctgtaaaaaaacttgttgagtggcagggaaattataaaacacaagttgagcagatgtcagaacaatatcaacaaagtgtcgactccctggttgaaacaaaaactgcggttgccgggatttgggaagaatgtaaagaaattcctctggctatgtctgaactgcgtgaagtgcttcaggtgaaccaacatcaaattagcgaactctcccgccatttagaaacctttgtcgccatccgcgataaagctacaaccgtattacctgaaatacaaaacaaaatggctgaagtgggtgaactgctgaaatccggagctgcaaatgttagtgcatctcttgagcaaaccagccagcaaatacttcttaatgcagattcaatgcgcgtggccctggatgaaggtaccgaaggattcagacaatcggttacccaaacacaacaagcatttgcctcgatggcacatgatgtcagcaattcctccgaaaccctaaccagcacgttaggtgaaacaattactgaaatgaaacaaagtggtgaagaattcctgaaatcactagagtcgcactcgaaagaattgcatagaaatatggaacaaaatacgacgaatgtgattgatatgttcagtaagactggtgaaaagattaaccatcaactatccagtaatgccgataatatgtttgattcaatccagacatcatttgataaggcaagtgcagggctgacttctcaagtcagagaatcaattgaaaaatttgctctatccatcaacgagcagttacatgcttttgagcaagcaactgaacgtgaaatgaaccgtgaaatgcaatcattaggtaatgctctgctttcaatcagcaaaggttttgtcggtaactatgaaaaacttattaaagattaccaaatagttatggggcagttacaagcattaatttctgctaataaacatcgcgggtaa

SEQ ID NO: 11949 - DNA, 708 bp, Escherichia coli HVH 193 (4-3331423)
atggataagattatagggaaacaattacctaaaaaagatcaagataatgagcattgggtatccatgtcagacctaatgacagggctgatgatggtttttatgttcatatctattgcgtatatgcactacgtacgtattgaaaaagaaaaaattaaagaagttgccgtagcctacgagaatgctcagttacagctttataatgctctggatattgagtttgcaaaggatttacaagactgggatgcagagatcgataaacagactctggaggttcgatttaaatcaccggatgttttatttggcttaggaagcacagagctaaaaccaaagtttaaactcattcttgacgacttctttcctcgctacctaaaagttcttgataattatcaggaacatattactgaagtccgcattgaaggtcacacaagtactgactggacaggaacaacgaatcctgatattgcttattttaataatatggcactatcgcaaggtcgtacacatgcagtattacaatacgtttatgacataaaaaatatcgcgacacaccaacaatgggttaaaagtaaatttgccgcagtaggttattcatctgcacatcccattcttgataaaaccggcaaggaggatcctaatcgctctcgtcgtgtcaccttcaaagttgtaacaaatgccgagttgcagattagaaagattattcaggagtaa

SEQ ID NO: 11950 - DNA, 1104 bp, Escherichia coli HVH 193 (4-3331423)
atgaaattatcaatcgacatttcagaacttattcaattagggaagaaaatgttaccagaaggagtcgatttttttctggatgaatcccctattgactttgatcctatagatattgagttatccacgggtaaagaagttagtatcgaagatcttgaccctggtagcgggcttatctcttatcatggccgccaggttcttttatatattcgggaccattcagggcgttatgatgcggctatcgtagatggcgaaaaaggaaaacgttttcatattgcctggtgcagaactcttgatgaaatgcgccataaaaatcgatttgaaaggtatcatgcaactaaccgcatagatggtttattcgaaattgatgatggttcaggtcggagccaggatgttgatttacgggtatgtatgaattgcctcgaacgacttaattataaaggaagtattgataaacaacgaaaaagagagatttttaaatcattctcattaaatgagtttttttcagattatagtacctgtttccgtcatatgcctaagggtatctatgataaaacaaatagtggatatgtcgaaaattggaagaaaatatctaaagaaatacgagaaaagaccaactatgtttgtaatgattgtggcgtgaatttatcaaccgccaaaaacttgtgccatgtccatcataaaaatggcatcaaatatgataatcaccatgaaaaccttcttgttctgtgcaaggattgccatcgaaaacagcccctccacgaaggtatattcgttacccaagctgagatggctatcattcaacgtttacgctcccaacaagggttattaaaagcagaatcctggaatgaaatatatgacctgactgatccatcagtgcatggtgatattaatatgatgcaacataaaggctttcaacctcctgttcctgggttagatcttcaaaactcagaacatgaaattattgcaaccgtagaagctgcatggccaggccttaaaattgcagttaatcttactcccaccgaagtcgaaggatggagaatatataccgtgggtgagctggttaaagaaatacaaaccggagcctttacgccagcaactttgtaa

SEQ ID NO: 11951 - DNA, 1653 bp, Escherichia coli UMEA 3144-1; identical to SEQ ID NO: 11843

SEQ ID NO: 11952 - DNA, 708 bp, Escherichia coli UMEA 3144-1; identical to SEQ ID NO: 11844

SEQ ID NO: 11953 - DNA, 1104 bp, Escherichia coli UMEA 3144-1; identical to SEQ ID NO: 11845

SEQ ID NO: 11954 - DNA, 1653 bp, Escherichia coli UMEA 3151-1
atgttagcgcagctttttgagcagttgtttcaatcgatagactctacactgatcaccaatattttcatctgggctgttatattcgtatttttatcagcgtggtggtgtgacaaaaaaaatatacatagtaagtttagagaatatgctccaaccttaatgggggcattaggtattctgggtactttcattggtattattattggtttactcaattttaataccgaaagtattgataccagcatccccgtattattaggtggcctaaaaacagcattcattacaagcattgtaggtatgttttttgccattttatttaatggaatggatgctttcttttttgccaataaacgaagtgcgttagcagaaaataaccctgaatctgttacacctgaacatatctatcatgaattaaaagagcagaaccagactctgactaaattagtctcgggtattaacggtgatagtgaaggttctcttattgctcaaataaaattactacgtactgagattagcgattcctcgcaggcacaattagctaatcacactcatttcagtaataagctttgggaacaacttgaacaatttgcagatctaatggcaaaaggtgctacagaacaaattattgatgctttgcgacaagtcattattgattttaatgaaaatttaactgaacagtttggtgaaaactttaaagctcttgatgcctctgtaaaaaaacttgttgagtggcagggaaattataaaacgcaaattgagcagatgtcagaacaatatcaacaaagtgtcgagtccctggttgaaacaaaaactgcggttgcagggatttgggaagaatgtaaagaaattcctctggctatgtctgaactgcgtgaagtgcttcaggtgaaccaacatcaaatcagcgaactctcccgccatttagaaacctttgtcgccatccgcgataaagctacaaccgtattacctgaaatacagaacaaaatggctgaagtgggtgaactgctgaaatccggagctgcaaatgttagtgcatctcttgagcaaaccagccagcaaatacttcttaatgcagattcaatgcgcgttgccctggatgaaggtaccgaaggattcagacaatcggttacccaaacacaacaagcatttgcctcgatggcgcatgatgtcagcaattcctccgaaaccctaaccagcacgttaggtgaaacaattactgaaatgaaacaaagtggtgaagaattcctgaaatcactagagtcgcactcgaaagaattgcatagaaatatggaacaaaatacgacgaatgtgattgatatgttcagtaagactggtgaaaagattaaccatcaactatccagtaatgccgataatatgtttgattcaatccagacatcatttgataaggctggtgcagggctgacttctcaagtcagagaatcaattgaaaaatttgctctatccatcaacgagcagttacatgcttttgagcaagcaactgaacgtgaaatgaaccgtgaaatgcaatcattaggtaatgctctgctttcaatcagcaaaggttttgtcggtaactatgaaaaacttattaaagattaccaaatagttatggggcagttacaagcattaatttctgctaataaacatcgagggtaa

SEQ ID NO: 11955 - DNA, 708 bp, Escherichia coli UMEA 3151-1
atggataagattatagggaaacaattacctaaaaaagatcaagataatgaacattgggtatccatgtcagacctaatggcagggctgatgatggtttttatgttcatatctattgcttatatgcactacgtacgtattgaaaaagaaaaaattaaagaagttgccgtagcctacgagaatgctcagttacagctttataatgctctggatattgagtttgcaaaggatttacaagactgggatgcagagatcgataaacagactctggaggttcgatttaaatcaccggatgttttatttggcttaggaagcacagagctaaaaccaaagtttaaactcattcttgacgacttctttcctcgctacctaaaagttctagataattatcaggaacatattactgaagtccgcattgaaggtcacacaagtactgactggacaggaacaacgaatcctgatattgcttattttaataatatggcactatcgcaaggtcgtacacgtgcagtattacaatacgtttatgacataaaaaatatcgcgacacaccaacaatgggttaaaagtaaatttgccgcagtaggttattcatctgcacatcccattcttgataaaaccggcaaagaggaccctaatcgctctcgtcgtgtcaccttcaaagttgtaacaaatgccgagttgcagattagaaagattattcaggagtaa

SEQ ID NO: 11956 - DNA, 1104 bp, Escherichia coli UMEA 3151-1; identical to SEQ ID NO: 11374

SEQ ID NO: 11957 - DNA, 1653 bp, Escherichia coli B26-2; identical to SEQ ID NO: 11366

SEQ ID NO: 11958 - DNA, 621 bp, Escherichia coli B26-2; identical to SEQ ID NO: 11445

SEQ ID NO: 11959 - DNA, 1104 bp, Escherichia coli B26-2; identical to SEQ ID NO: 11368

SEQ ID NO: 11960 - DNA, 1653 bp, Escherichia coli 09BKT076207; identical to SEQ ID NO: 11366

SEQ ID NO: 11961 - DNA, 633 bp, Escherichia coli 09BKT076207; identical to SEQ ID NO: 11457

SEQ ID NO: 11962 - DNA, 1104 bp, Escherichia coli 09BKT076207; identical to SEQ ID NO: 11368

SEQ ID NO: 11963 - DNA, 1653 bp, Escherichia coli B102; identical to SEQ ID NO: 11366

SEQ ID NO: 11964 - DNA, 633 bp, Escherichia coli B102; identical to SEQ ID NO: 11457

SEQ ID NO: 11965 - DNA, 1104 bp, Escherichia coli B102; identical to SEQ ID NO: 11368

SEQ ID NO: 11966 - DNA, 1653 bp, Escherichia coli B29-1; identical to SEQ ID NO: 11366

SEQ ID NO: 11967 - DNA, 609 bp, Escherichia coli B29-1; identical to SEQ ID NO: 11484

SEQ ID NO: 11968 - DNA, 1104 bp, Escherichia coli B29-1; identical to SEQ ID NO: 11368

SEQ ID NO: 11969 - DNA, 1653 bp, Escherichia coli B107; identical to SEQ ID NO: 11366

SEQ ID NO: 11970 - DNA, 618 bp, Escherichia coli B107; identical to SEQ ID NO: 11517

SEQ ID NO: 11971 - DNA, 1104 bp, Escherichia coli B107; identical to SEQ ID NO: 11368

SEQ ID NO: 11972 - DNA, 1653 bp, Escherichia coli B26-1; identical to SEQ ID NO: 11366

SEQ ID NO: 11973 - DNA, 618 bp, Escherichia coli B26-1; identical to SEQ ID NO: 11517

SEQ ID NO: 11974 - DNA, 1104 bp, Escherichia coli B26-1; identical to SEQ ID NO: 11368

SEQ ID NO: 11975 - DNA, 1653 bp, Escherichia coli B28-1; identical to SEQ ID NO: 11366

SEQ ID NO: 11976 - DNA, 633 bp, Escherichia coli B28-1; identical to SEQ ID NO: 11457

SEQ ID NO: 11977 - DNA, 1104 bp, Escherichia coli B28-1; identical to SEQ ID NO: 11368

SEQ ID NO: 11978 - DNA, 1653 bp, Escherichia coli B36-2; identical to SEQ ID NO: 11366

SEQ ID NO: 11979 - DNA, 633 bp, Escherichia coli B36-2; identical to SEQ ID NO: 11457

SEQ ID NO: 11980 - DNA, 1104 bp, Escherichia coli B36-2; identical to SEQ ID NO: 11368

SEQ ID NO: 11981 - DNA, 1653 bp, Escherichia coli B7-1; identical to SEQ ID NO: 11366

SEQ ID NO: 11982 - DNA, 618 bp, Escherichia coli B7-1; identical to SEQ ID NO: 11517

SEQ ID NO: 11983 - DNA, 1104 bp, Escherichia coli B7-1; identical to SEQ ID NO: 11368

SEQ ID NO: 11984 - DNA, 1653 bp, Escherichia coli B29-2; identical to SEQ ID NO: 11366

SEQ ID NO: 11985 - DNA, 633 bp, Escherichia coli B29-2; identical to SEQ ID NO: 11457

SEQ ID NO: 11986 - DNA, 1104 bp, Escherichia coli B29-2; identical to SEQ ID NO: 11368

SEQ ID NO: 11987 - DNA, 1653 bp, Escherichia coli B36-1; identical to SEQ ID NO: 11366

SEQ ID NO: 11988 - DNA, 621 bp, Escherichia coli B36-1; identical to SEQ ID NO: 11445

SEQ ID NO: 11989 - DNA, 1104 bp, Escherichia coli B36-1; identical to SEQ ID NO: 11368

SEQ ID NO: 11990 - DNA, 1653 bp, Escherichia coli T1282_01; identical to SEQ ID NO: 11366

SEQ ID NO: 11991 - DNA, 633 bp, Escherichia coli T1282_01; identical to SEQ ID NO: 11457

SEQ ID NO: 11992 - DNA, 1104 bp, Escherichia coli T1282_01; identical to SEQ ID NO: 11368

SEQ ID NO: 11993 - DNA, 1653 bp, Escherichia coli T924_01; identical to SEQ ID NO: 11366

SEQ ID NO: 11994 - DNA, 708 bp, Escherichia coli T924_01; identical to SEQ ID NO: 11367

SEQ ID NO: 11995 - DNA, 1104 bp, Escherichia coli T924_01; identical to SEQ ID NO: 11368

SEQ ID NO: 11996 - DNA, 1653 bp, Escherichia coli B15; identical to SEQ ID NO: 11366

SEQ ID NO: 11997 - DNA, 633 bp, Escherichia coli B15; identical to SEQ ID NO: 11457

SEQ ID NO: 11998 - DNA, 1104 bp, Escherichia coli B15; identical to SEQ ID NO: 11368

SEQ ID NO: 11999 - DNA, 1653 bp, Escherichia coli 14A; identical to SEQ ID NO: 11366

SEQ ID NO: 12000 - DNA, 621 bp, Escherichia coli 14A; identical to SEQ ID NO: 11445

SEQ ID NO: 12001 - DNA, 1104 bp, Escherichia coli 14A; identical to SEQ ID NO: 11368

SEQ ID NO: 12002 - DNA, 1653 bp, Escherichia coli 2886-75; identical to SEQ ID NO: 11366

SEQ ID NO: 12003 - DNA, 633 bp, Escherichia coli 2886-75; identical to SEQ ID NO: 11457

SEQ ID NO: 12004 - DNA, 1104 bp, Escherichia coli 2886-75; identical to SEQ ID NO: 11368

SEQ ID NO: 12005 - DNA, 1653 bp, Escherichia coli T1840_97; identical to SEQ ID NO: 11366

SEQ ID NO: 12006 - DNA, 633 bp, Escherichia coli T1840_97; identical to SEQ ID NO: 11457

SEQ ID NO: 12007 - DNA, 1104 bp, Escherichia coli T1840_97; identical to SEQ ID NO: 11368

SEQ ID NO: 12008 - DNA, 1653 bp, Escherichia coli 08BKT055439; identical to SEQ ID NO: 11366

SEQ ID NO: 12009 - DNA, 609 bp, Escherichia coli 08BKT055439; identical to SEQ ID NO: 11484

SEQ ID NO: 12010 - DNA, 1104 bp, Escherichia coli 08BKT055439; identical to SEQ ID NO: 11368

SEQ ID NO: 12011 - DNA, 1653 bp, Escherichia coli 08BKT77219; identical to SEQ ID NO: 11366

SEQ ID NO: 12012 - DNA, 633 bp, Escherichia coli 08BKT77219; identical to SEQ ID NO: 11457

SEQ ID NO: 12013 - DNA, 1104 bp, Escherichia coli 08BKT77219; identical to SEQ ID NO: 11368

SEQ ID NO: 12014 - DNA, 1653 bp, Escherichia coli 09BKT024447; identical to SEQ ID NO: 11366

SEQ ID NO: 12015 - DNA, 609 bp, Escherichia coli 09BKT024447; identical to SEQ ID NO: 11484

SEQ ID NO: 12016 - DNA, 1104 bp, Escherichia coli 09BKT024447; identical to SEQ ID NO: 11368

SEQ ID NO: 12017 - DNA, 1653 bp, Escherichia coli Bd5610_99; identical to SEQ ID NO: 11366

SEQ ID NO: 12018 - DNA, 708 bp, Escherichia coli Bd5610_99; identical to SEQ ID NO: 11367

SEQ ID NO: 12019 - DNA, 1104 bp, Escherichia coli Bd5610_99; identical to SEQ ID NO: 11368

SEQ ID NO: 12020 - DNA, 1653 bp, Escherichia coli T234_00; identical to SEQ ID NO: 11366

SEQ ID NO: 12021 - DNA, 633 bp, Escherichia coli T234_00; identical to SEQ ID NO: 11457

SEQ ID NO: 12022 - DNA, 1104 bp, Escherichia coli T234_00; identical to SEQ ID NO: 11368

SEQ ID NO: 12023 - DNA, 1653 bp, Escherichia coli B7-2; identical to SEQ ID NO: 11366

SEQ ID NO: 12024 - DNA, 621 bp, Escherichia coli B7-2; identical to SEQ ID NO: 11445

SEQ ID NO: 12025 - DNA, 1104 bp, Escherichia coli B7-2; identical to SEQ ID NO: 11368

SEQ ID NO: 12026 - DNA, 1653 bp, Escherichia coli B93; identical to SEQ ID NO: 11366

SEQ ID NO: 12027 - DNA, 633 bp, Escherichia coli B93; identical to SEQ ID NO: 11457

SEQ ID NO: 12028 - DNA, 1104 bp, Escherichia coli B93; identical to SEQ ID NO: 11368

SEQ ID NO: 12029 - DNA, 1653 bp, Escherichia coli B94; identical to SEQ ID NO: 11366

SEQ ID NO: 12030 - DNA, 621 bp, Escherichia coli B94; identical to SEQ ID NO: 11445

SEQ ID NO: 12031 - DNA, 1104 bp, Escherichia coli B94; identical to SEQ ID NO: 11368

SEQ ID NO: 12032 - DNA, 1653 bp, Escherichia coli B95; identical to SEQ ID NO: 11366

SEQ ID NO: 12033 - DNA, 633 bp, Escherichia coli B95; identical to SEQ ID NO: 11457

SEQ ID NO: 12034 - DNA, 1104 bp, Escherichia coli B95; identical to SEQ ID NO: 11368

SEQ ID NO: 12035 - DNA, 1653 bp, Escherichia coli B103; identical to SEQ ID NO: 11366

SEQ ID NO: 12036 - DNA, 621 bp, Escherichia coli B103; identical to SEQ ID NO: 11445

SEQ ID NO: 12037 - DNA, 1104 bp, Escherichia coli B103; identical to SEQ ID NO: 11368

SEQ ID NO: 12038 - DNA, 1653 bp, Escherichia coli B104; identical to SEQ ID NO: 11366

SEQ ID NO: 12039 - DNA, 633 bp, Escherichia coli B104; identical to SEQ ID NO: 11457

SEQ ID NO: 12040 - DNA, 1104 bp, Escherichia coli B104; identical to SEQ ID NO: 11368

SEQ ID NO: 12041 - DNA, 1653 bp, Escherichia coli B105; identical to SEQ ID NO: 11366

SEQ ID NO: 12042 - DNA, 621 bp, Escherichia coli B105; identical to SEQ ID NO: 11445

SEQ ID NO: 12043 - DNA, 1104 bp, Escherichia coli B105; identical to SEQ ID NO: 11368

SEQ ID NO: 12044 - DNA, 1653 bp, Escherichia coli B106; identical to SEQ ID NO: 11366

SEQ ID NO: 12045 - DNA, 633 bp, Escherichia coli B106; identical to SEQ ID NO: 11457

SEQ ID NO: 12046 - DNA, 1104 bp, Escherichia coli B106; identical to SEQ ID NO: 11368

SEQ ID NO: 12047 - DNA, 1653 bp, Escherichia coli B108; identical to SEQ ID NO: 11366

SEQ ID NO: 12048 - DNA, 633 bp, Escherichia coli B108; identical to SEQ ID NO: 11457

SEQ ID NO: 12049 - DNA, 1104 bp, Escherichia coli B108; identical to SEQ ID NO: 11368

SEQ ID NO: 12050 - DNA, 1653 bp, Escherichia coli B109; identical to SEQ ID NO: 11366

SEQ ID NO: 12051 - DNA, 645 bp, Escherichia coli B109
atgtcggacctaatggctgggctgatgatggtttttatgttcatatctattgcttatatgcactacgtacgtattgaaaaagaaaaaattaaagaagttgccgtagcctacgagaatgctcagttacagctttataatgctctggatattgagtttgcaaaggatttacaagactgggatgcagagatcgataaacagactctggaggttcgatttaaatcaccggatgttttatttggcttaggaagcacagagctaaaaccaaagtttaaactcattcttgacgacttctttcctcgctacctaaaagttctagataattatcaggaacatattactgaagtccgcattgaaggtcacacaagtactgactggacaggaacaacgaatcctgatattgcttattttaataatatggcactatcgcaaggtcgtacacgtgcagtattacaatacgtttatgacataaaaaatatcgcgacacaccaacaatgggttaaaagtaaatttgccgcagtaggttattcatctgcacatcccattcttgataaaaccggcaaggaggatcctaatcgctctcgtcgtgtcaccttcaaagttgtaacaaatgccgagttgcagattagaaagattattcaggagtaa

SEQ ID NO: 12052 - DNA, 1104 bp, Escherichia coli B109; identical to SEQ ID NO: 11368

SEQ ID NO: 12053 - DNA, 1653 bp, Escherichia coli B112; identical to SEQ ID NO: 11366

SEQ ID NO: 12054 - DNA, 633 bp, Escherichia coli B112; identical to SEQ ID NO: 11457

SEQ ID NO: 12055 - DNA, 1104 bp, Escherichia coli B112; identical to SEQ ID NO: 11368

SEQ ID NO: 12056 - DNA, 1497 bp, Escherichia coli B113; identical to SEQ ID NO: 11438

SEQ ID NO: 12057 - DNA, 633 bp, Escherichia coli B113; identical to SEQ ID NO: 11457

SEQ ID NO: 12058 - DNA, 1104 bp, Escherichia coli B113; identical to SEQ ID NO: 11368

SEQ ID NO: 12059 - DNA, 1653 bp, Escherichia coli B114; identical to SEQ ID NO: 11366

SEQ ID NO: 12060 - DNA, 633 bp, Escherichia coli B114; identical to SEQ ID NO: 11457

SEQ ID NO: 12061 - DNA, 1104 bp, Escherichia coli B114; identical to SEQ ID NO: 11368

SEQ ID NO: 12062 - DNA, 1653 bp, Escherichia coli B17; identical to SEQ ID NO: 11366

SEQ ID NO: 12063 - DNA, 633 bp, Escherichia coli B17; identical to SEQ ID NO: 11457

SEQ ID NO: 12064 - DNA, 1104 bp, Escherichia coli B17; identical to SEQ ID NO: 11368

SEQ ID NO: 12065 - DNA, 1653 bp, Escherichia coli B40-1; identical to SEQ ID NO: 11366

SEQ ID NO: 12066 - DNA, 618 bp, Escherichia coli B40-1; identical to SEQ ID NO: 11517

SEQ ID NO: 12067 - DNA, 1104 bp, Escherichia coli B40-1; identical to SEQ ID NO: 11368

SEQ ID NO: 12068 - DNA, 1653 bp, Escherichia coli B40-2; identical to SEQ ID NO: 11366

SEQ ID NO: 12069 - DNA, 609 bp, Escherichia coli B40-2; identical to SEQ ID NO: 11484

SEQ ID NO: 12070 - DNA, 1104 bp, Escherichia coli B40-2; identical to SEQ ID NO: 11368

SEQ ID NO: 12071 - DNA, 1497 bp, Escherichia coli B49-2; identical to SEQ ID NO: 11438

SEQ ID NO: 12072 - DNA, 633 bp, Escherichia coli B49-2; identical to SEQ ID NO: 11457

SEQ ID NO: 12073 - DNA, 1104 bp, Escherichia coli B49-2; identical to SEQ ID NO: 11368

SEQ ID NO: 12074 - DNA, 1653 bp, Escherichia coli B5-2; identical to SEQ ID NO: 11366

SEQ ID NO: 12075 - DNA, 621 bp, Escherichia coli B5-2; identical to SEQ ID NO: 11445

SEQ ID NO: 12076 - DNA, 1104 bp, Escherichia coli B5-2; identical to SEQ ID NO: 11368

SEQ ID NO: 12077 - DNA, 1653 bp, Escherichia coli B83; identical to SEQ ID NO: 11366

SEQ ID NO: 12078 - DNA, 633 bp, Escherichia coli B83; identical to SEQ ID NO: 11457

SEQ ID NO: 12079 - DNA, 1104 bp, Escherichia coli B83; identical to SEQ ID NO: 11368

SEQ ID NO: 12080 - DNA, 1653 bp, Escherichia coli B84; identical to SEQ ID NO: 11366

SEQ ID NO: 12081 - DNA, 633 bp, Escherichia coli B84; identical to SEQ ID NO: 11457

SEQ ID NO: 12082 - DNA, 1104 bp, Escherichia coli B84; identical to SEQ ID NO: 11368

SEQ ID NO: 12083 - DNA, 1653 bp, Escherichia coli B85; identical to SEQ ID NO: 11366

SEQ ID NO: 12084 - DNA, 633 bp, Escherichia coli B85; identical to SEQ ID NO: 11457

SEQ ID NO: 12085 - DNA, 1104 bp, Escherichia coli B85; identical to SEQ ID NO: 11368

SEQ ID NO: 12086 - DNA, 1497 bp, Escherichia coli B86; identical to SEQ ID NO: 11438

SEQ ID NO: 12087 - DNA, 618 bp, Escherichia coli B86; identical to SEQ ID NO: 11517

SEQ ID NO: 12088 - DNA, 1104 bp, Escherichia coli B86; identical to SEQ ID NO: 11368

SEQ ID NO: 12089 - DNA, 1653 bp, Escherichia coli B89; identical to SEQ ID NO: 11366

SEQ ID NO: 12090 - DNA, 633 bp, Escherichia coli B89; identical to SEQ ID NO: 11457

SEQ ID NO: 12091 - DNA, 1104 bp, Escherichia coli B89; identical to SEQ ID NO: 11368

SEQ ID NO: 12092 - DNA, 1653 bp, Escherichia coli B90; identical to SEQ ID NO: 11366

SEQ ID NO: 12093 - DNA, 633 bp, Escherichia coli B90; identical to SEQ ID NO: 11457

SEQ ID NO: 12094 - DNA, 1104 bp, Escherichia coli B90; identical to SEQ ID NO: 11368

SEQ ID NO: 12095 - DNA, 1653 bp, Escherichia coli Tx1686; identical to SEQ ID NO: 11366

SEQ ID NO: 12096 - DNA, 633 bp, Escherichia coli Tx1686; identical to SEQ ID NO: 11463

SEQ ID NO: 12097 - DNA, 1104 bp, Escherichia coli Tx1686; identical to SEQ ID NO: 11539

SEQ ID NO: 12098 - DNA, 1653 bp, Escherichia coli Tx3800; identical to SEQ ID NO: 11366

SEQ ID NO: 12099 - DNA, 609 bp, Escherichia coli Tx3800; identical to SEQ ID NO: 11484

SEQ ID NO: 12100 - DNA, 1104 bp, Escherichia coli Tx3800; identical to SEQ ID NO: 11368

SEQ ID NO: 12101 - DNA, 1653 bp, Escherichia coli ATCC 35150
atgttagcgcagctttttgagcagttgtttcaatcgatagactctacactgatcaccaatattttcatctgggctgttatattcgtatttttatcagcgtggtggtgtgacaaaaaaaatatacatagtaagtttagagaatatgctccaaccttaatgggggcattaggtattctgggtactttcattggtattattattggtttactcaattttaataccgaaagtattgataccagcatccccgtattattaggtggcctaaaaacagcattcattacaagcattgtaggtatgttttttgccattttatttaatggaatggatgctttcttttttgccaataaacgaagtgcgttagcagaaaataaccctgaatctgttacacctgaacatatctatcatgaattaaaagagcagaaccagactctgactaaattagtctcgggtattaacggtgatagtgaaggttctcttattgctcaaataaaattactacgtactgatattagcgattcctcgcaggcacaattagctaatcacactcatttcagtaataagctttgggaacaacttgaacaatttgcagatctaatggcaaaaggtgctacagaacaaattattgatgctttgcgacaagtcattattgattttaatcaaaatttaactgaacagtttggtgaaaactttaaagctcttgatgcctctgtaaaaaaacttgttgagtggcagggaaattataaaacgcaaattgagcagatgtcagaacaatatcaacaaagtgtcgagtccctggttgaaacaaaaactgcggttgcagggatttgggaagaatgtaaagaaattcctctggctatgtctgaactgcgtgaagtgcttcaggtgaaccaacatcaaatcagcgaactctcccgccatttagaaacctttgtcgccatccgcgataaagctacaaccgtattacctgaaatacagaacaaaatggctgaagtgggtgaactgctgaaatccggagctgcaaatgttagtgcatctcttgagcaaaccagccagcaaatacttcttaatgcagattcaatgcgcgttgccctggatgaaggtaccgaaggattcagacaatcggttacccaaacacaacaagcatttgcctcgatggcacatgatgtcagcaattcctccgaaaccctaaccagcacgttaggtgaaacaattactgaaatgaaacaaagtggtgaagaattcctgaaatcactagagtcgcactcgaaagaattgcatagaaatatggaacaaaatacgacgaatgtgattgatatgttcagtaagactggtgaaaagattaaccatcaactatccagtaatgccgataatatgtttgattcaatccagacatcatttgataaggcaagtgcagggctgacttctcaagtcagagaatcaattgaaaaatttgctctatccatcaacgagcagttacatgcttttgagcaagcaactgaacgtgaaatgaaccgtgaaatgcaatcattaggtaatgctctgctttcaatcagcaaaggttttgtcggtaactatgaaaaacttattaaagattaccaaatagttatggggcagttacaagcattaatttctgctaataaacatcgcgggtaa

SEQ ID NO: 12102 - DNA, 708 bp, Escherichia coli ATCC 35150; identical to SEQ ID NO: 11472

SEQ ID NO: 12103 - DNA, 1104 bp, Escherichia coli ATCC 35150
atgaaattatctatcgacctttcagaacttattcaattagggaagaaaatgttaccagaaggagtcgatttttttctggatgaatcccctattgactttgatcctatagatattgagttatccacgggtaaagaagttagtatcgaagatcttgaccctggtagcgggcttatctcttatcatggccgccaggttcttttatatattcgggaccattcagggcgttatgatgcggctatcgtagatggcgaaaaaggaaaacgttttcatattgcctggtgcagaactcttgatgaaatgcgccataaaaatcgatttgaaaggtatcatgcaactaaccgcatagatggtttattcgaaattgatgatggttcaggtcggagccaggatgttgatttacgggtatgtatgaattgcctcgaacgacttaattataaaggaagtattgataaacaacgaaaaagagagatttttaaatcattctcattaaatgagtttttttcagattatagtacctgttttcgtcatatgcctaagggtatctatgacaaaacaaatagtgggtatgttgaaaactggaaggaaatatctaaagaaatacgagaaaaggccaattatgtttgtaatgattgtggcgtgaatttatcaaccgccaaaaacttgtgccatgtccatcataaaaatggcatcaaatatgataatcaccatgaaaaccttcttgttctgtgcaaggattgccatcgaaaacagcccctccacgaaggtatattcgttacccaagctgagatggctatcattcaacgtttacgttcccaacaagggttattaaaagcagaatcctggaatgaaatatatgacctgactgatccatcagtgcatggtgatattaatatgatgcaacataaaggctttcaacctcctgttcctgggttagatcttcaaaactcagaacatgaaattattgcaaccgtagaagctgcatggccaggccttaaaattgcagttaaccttactcccgccgaagtcgaaggatggagaatatataccgtgggtgagctggttaaagaaatacaaaccggagcctttacgccagcaactttgtaa

SEQ ID NO: 12104 - DNA, 1653 bp, Escherichia coli B28-2; identical to SEQ ID NO: 11366

SEQ ID NO: 12105 - DNA, 621 bp, Escherichia coli B28-2; identical to SEQ ID NO: 11445

SEQ ID NO: 12106 - DNA, 1104 bp, Escherichia coli B28-2; identical to SEQ ID NO: 11368

SEQ ID NO: 12107 - DNA, 1653 bp, Escherichia coli 907672; identical to SEQ ID NO: 11375

SEQ ID NO: 12108 - DNA, 708 bp, Escherichia coli 907672; identical to SEQ ID NO: 11376

SEQ ID NO: 12109 - DNA, 1104 bp, Escherichia coli 907672; identical to SEQ ID NO: 11377

SEQ ID NO: 12110 - DNA, 1653 bp, Escherichia coli BIDMC 39; identical to SEQ ID NO: 11954

SEQ ID NO: 12111 - DNA, 708 bp, Escherichia coli BIDMC 39; identical to SEQ ID NO: 11955

SEQ ID NO: 12112 - DNA, 1104 bp, Escherichia coli BIDMC 39; identical to SEQ ID NO: 11374

SEQ ID NO: 12113 - DNA, 1653 bp, Escherichia coli HVH 136 (4-5970458); identical to SEQ ID NO: 11843

SEQ ID NO: 12114 - DNA, 708 bp, Escherichia coli HVH 136 (4-5970458); identical to SEQ ID NO: 11844

SEQ ID NO: 12115 - DNA, 1104 bp, Escherichia coli HVH 136 (4-5970458); identical to SEQ ID NO: 11845

SEQ ID NO: 12116 - DNA, 1653 bp, Escherichia coli ATCC BAA-2192; identical to SEQ ID NO: 11366

SEQ ID NO: 12117 - DNA, 708 bp, Escherichia coli ATCC BAA-2192; identical to SEQ ID NO: 11367

SEQ ID NO: 12118 - DNA, 1104 bp, Escherichia coli ATCC BAA-2192; identical to SEQ ID NO: 11368

SEQ ID NO: 12119 - DNA, 1653 bp, Escherichia coli P4-96; identical to SEQ ID NO: 11390

SEQ ID NO: 12120 - DNA, 168 bp, Escherichia coli P4-96
atggataagattatagggaaacaattacctaaaaaagatcaagataatgaacattgggtatccatgtcagacctaatggcagggctgatgatggtttttatgttcatatctattgcttatatgcactacgtacgtattgaaaaagaaaaattaaagaagttgccgtag

SEQ ID NO: 12121 - DNA, 1104 bp, Escherichia coli P4-96
atgaaattatctatcgacctttcagaacttattcaattagggaagaaaatgttaccagaaggagtcgatttttttctggatgaatcccctattgactttgatcctatagatattgagttatccacgggtaaagaagttagtatcgaagatcttgaccctggtagcgggcttatctcttatcatggccgccaggttcttttatatattcgggaccattcagggcgttatgatgcggctatcgtagatggcgaaaaaggaaaacgttttcatattgcctggtgcagaactcttgatgaaatgcgccataaaaatcgatttgaaaggtatcatgcaactaaccgcatagatggtttattcgaaattgatgatggttcaggtcggagccaggatgttgatttacgggtatgtatgaattgcctcgaacgacttaattataaaggaagtattgataaacaacgaaaaagagagatttttaaatcattctcattaaatgagtttttttcagattatagtacctgttttcgtcatatgcctaagggtatctatgacaaaacaaatagtgggtatgtagaaaactggaaggaaatatctaaagaaatacgagaaaaggccaattatgtttgtaatgattgtggcgtgaatttatcaaccgccaaaaacttgtgccatgtccatcataaaaatggcatcaaatatgataatcaccatgaaaaccttcttgttctgtgcaaggattgccatcgaaaacagcccctccacgaaggtatattcgttacccaagctgagatggctatcattcaacgtttacgttcccaacaagggctattaaaagcagaatcctggaatgaaatatatgacctgactgatccatcagtgcatggtgatattaatatgatgcaacataaaggctttcaacctcctgttcctgggttagatcttcaaaactcagaacatgaaattattgcaaccgtagaagctgcatggccaggccttaaaattgcagttaaccttactcccgccgaagtcgaaggatggagaatatataccgtgggtgagctggttaaagaaatacaaaccggagcctttacgccagcaactttgtaa

SEQ ID NO: 12122 - DNA, 1653 bp, Escherichia coli P4-NR; identical to SEQ ID NO: 11390

SEQ ID NO: 12123 - DNA, 708 bp, Escherichia coli P4-NR; identical to SEQ ID NO: 11391

SEQ ID NO: 12124 - DNA, 1104 bp, Escherichia coli P4-NR; identical to SEQ ID NO: 12121

SEQ ID NO: 12125 - DNA, 1497 bp, Escherichia coli O145:H28 str. RM13514
atgggggcattaggtattctgggtactttcattggtattattattggtttactcaattttaataccgaaagtattgataccagcatccccgtattattaggtggcctaaaaacagcattcattacaagcattgtaggtatgttttttgccattttatttaatggaatggatgctttcttttttgccaataaacgaagtgcgttagcagaaaataaccctgaatctgttacacctgaacatatctatcatgaattaaaagagcagaaccagactctgactaaattagtctcgggtattaacggtgatagtgaaggttctcttattgctcaaataaaattactacgtactgatattagcgattcctcgcaggcacaattagctaatcacactcatttcagtaataagctttgggaacaacttgaacaatttgcagatctaatggcaaaaggtgctacagaacaaattattgatgctttgcgacaagtcattattgattttaatcaaaatttaactgaacagtttggtgaaaactttaaagctcttgatgcctctgtaaaaaaacttgttgagtggcagggaaattataaaacgcaaattgagcagatgtcagaacaatatcaacaaagtgtcgagtccctggttgaaacaaaaactgcggttgcagggatttgggaagaatgtaaagaaattcctctggctatgtctgaactgcgtgaagtgcttcaggtgaaccaacatcaaatcagcgaactctcccgccatttagaaacctttgtcgccatccgcgataaagctacaaccgtattacctgaaatacagaacaaaatggctgaagtgggtgaactgctgaaatccggagctgcaaatgttagtgcatctcttgagcaaaccagccagcaaatacttcttaatgcagattcaatgcgcgttgccctggatgaaggtaccgaaggattcagacaatcggttacccaaacacaacaagcatttgcctcgatggcacatgatgtcagcaattcctccgaaaccctaaccagcacgttaggtgaaacaattactgaaatgaaacaaagtggtgaagaattcctgaaatcactagagtcgcactcgaaagaattgcatagaaatatggaacaaaatacgacgaatgtgattgatatgttcagtaagactggtgaaaagattaaccatcaactatccagtaatgccgataatatgtttgattcaatccagacatcatttgataaggcaagtgcagggctgacttctcaagtcagagaatcaattgaaaaatttgctctatccatcaacgagcagttacatgcttttgagcaagcaactgaacgtgaaatgaaccgtgaaatgcaatcattaggtaatgctctgctttcaatcagcaaaggttttgtcggtaactatgaaaaacttattaaagattaccaaatagttatggggcagttacaagcattaatttctgctaataaacatcgcgggtaa

SEQ ID NO: 12126 - DNA, 633 bp, Escherichia coli O145:H28 str. RM13514; identical to SEQ ID NO: 11463

SEQ ID NO: 12127 - DNA, 1104 bp, Escherichia coli O145:H28 str. RM13514; identical to SEQ ID NO: 12103

SEQ ID NO: 12128 - DNA, 1653 bp, Escherichia coli 1-110-08_S3_C1
atgttagcgcagctttttgagcagttgtttcaatcgatagactctacactgatcaccaatattttcatctgggctgttatattcgtatttttatcagcgtggtggtgtgacaaaaaaaatatacatagtaaatttagagaatatgctccaaccttaatgggggcattaggtattctgggtactttcattggtattattattgggttactcaattttaatactgaaagtattgataccagcatccccgtattattaggcggcctaaaaacagcattcattacaagcattgtaggtatgttttttgccattttatttaatggaatggatgctttcttttttgccaataaacgaagtgcgttagcagaaaataaccctgaatctgttacacctgaacatatctatcatgaattaaaagagcagaaccagactctgactaaattagtctcgggtattaacggtgatagtgaaggttctcttattgctcaaataaaattactacgtactgagattagcgattcctcgcaggcacaattagctaatcacactcatttcagtaataagctttgggaacaacttgaacaatttgcagatctaatggcaaaaggtgctacagaacaaattattgatgctttacgacaagtcattattgattttaatgaaaatttaactgaacagtttggtgaaaactttaaagcacttgatgcctctgtaaaaaaacttgttgagtggcaggaaaattataaaaagcaagttgagctgatgtcagaacaatatcaacaaagtgtcgagtctctggttgaaacaaaaactgcggttgccgggatttgggaagaatgtaaagaaattcctctggctatgtctgaactgcgtgaagtgcttcaggtgaaccaacatcaaatcagcgaactctcccgccatttagaaacctttgtcgccatccgcgataaagcgacaaccgtattacctgaaatacagaacaaaatggctgaagtgggtgaactgctgaaatccggagctgcaaatgttagtgcatctcttgagcaaaccagccagcaaatacttcttaatgcagattcaatgcgcgtggccctggatgaaggtaccgaaggattcagacaatcagttacccaaacacaacaagcatttgcctcgatggcacatgatgtcagcaattcctccgaaactctaaccagcacgttaggtgaaacaattactgaaatgaaacaaagtggtgaagaattcctgaagtcactagagtcgcactcgaaagaattgcatagaaatatggaacaaaatacgactaatgtaattgatatgttcagtaagactggtgaaaagattaaccatcaactatctagtaatgccgataatatgtttgattcaatccagacatcatttgataaggcaagtgcagggctgacttctcaagtcagagaatcaattgaaaaatttgctctatccatcaacgagcagttacatgcttttgagcaagcaactgaacgtgagatgaaccgtgaaatgcaatcattaggtaatgctctgctttcaatcagcaaaggttttgtcggtaactatgaaaaacttattaaagattaccaaataattatggggcagttacaagcattaatttctgctaataaacatcgagggtaa

SEQ ID NO: 12129 - DNA, 708 bp, Escherichia coli 1-110-08_S3_C1; identical to SEQ ID NO: 11844

SEQ ID NO: 12130 - DNA, 1104 bp, Escherichia coli 1-110-08_S3_C1; identical to SEQ ID NO: 11845

SEQ ID NO: 12131 - DNA, 1653 bp, Escherichia coli 1-110-08_S3_C2; identical to SEQ ID NO: 11843

SEQ ID NO: 12132 - DNA, 708 bp, Escherichia coli 1-110-08_S3_C2; identical to SEQ ID NO: 11844

SEQ ID NO: 12133 - DNA, 1104 bp, Escherichia coli 1-110-08_S3_C2; identical to SEQ ID NO: 11845

SEQ ID NO: 12134 - DNA, 1653 bp, Escherichia coli 1-110-08_S3_C3; identical to SEQ ID NO: 11843

SEQ ID NO: 12135 - DNA, 633 bp, Escherichia coli 1-110-08_S3_C3
atggcagggctgatgatggtttttatgttcatatctattgcttatatgcactacgtacgtattgaaaaagaaaaaattaaagaagttgccgtagcctacgagaatgctcagttacagctttataatgctctggatattgagtttgcaaaggatttgcaagactgggatgcagagatcgataagcagactctggaggttcgatttaaatcaccggatgttttatttggcttaggaagcacagagcttaaaccaaagtttaaactcattcttgacgacttctttcctcgctacctaaaagttcttgataattatcaagaacatattactgaagtccgcattgaaggtcacacaagtactgactggactggaacaacgaatcctgatattgcttattttaataatatggcactatcacaaggtcgtacacgtgcagtattacaatacgtttatgatataaaaaatatcgcgacacacaaacaatgggttaaaagtaaatttgccgcagtaggttattcatctgcacatcccattcttgataaaaccggcaaggaggatcctaatcgctctcgtcgtgtcaccttcaaagttgtaacaaatgccgagttgcagattagaaagattattcaggagtaa

SEQ ID NO: 12136 - DNA, 1104 bp, Escherichia coli 1-110-08_S3_C3; identical to SEQ ID NO: 11845

SEQ ID NO: 12137 - DNA, 1653 bp, Escherichia coli O157:H7 str. 2011EL-2288; identical to SEQ ID NO: 11366

SEQ ID NO: 12138 - DNA, 633 bp, Escherichia coli O157:H7 str. 2011EL-2288; identical to SEQ ID NO: 11457

SEQ ID NO: 12139 - DNA, 1104 bp, Escherichia coli O157:H7 str. 2011EL-2288; identical to SEQ ID NO: 11368

SEQ ID NO: 12140 - DNA, 1653 bp, Escherichia coli O157:H7 str. 2011EL-2114; identical to SEQ ID NO: 11366

SEQ ID NO: 12141 - DNA, 633 bp, Escherichia coli O157:H7 str. 2011EL-2114; identical to SEQ ID NO: 11457

SEQ ID NO: 12142 - DNA, 1104 bp, Escherichia coli O157:H7 str. 2011EL-2114; identical to SEQ ID NO: 11368

SEQ ID NO: 12143 - DNA, 1653 bp, Escherichia coli O157:H7 str. 2011EL-2286; identical to SEQ ID NO: 11366

SEQ ID NO: 12144 - DNA, 633 bp, Escherichia coli O157:H7 str. 2011EL-2286; identical to SEQ ID NO: 11457

SEQ ID NO: 12145 - DNA, 1104 bp, Escherichia coli O157:H7 str. 2011EL-2286; identical to SEQ ID NO: 11368

SEQ ID NO: 12146 - DNA, 1653 bp, Escherichia coli O157:H7 str. 2011EL-2312; identical to SEQ ID NO: 11366

SEQ ID NO: 12147 - DNA, 633 bp, Escherichia coli O157:H7 str. 2011EL-2312; identical to SEQ ID NO: 11457

SEQ ID NO: 12148 - DNA, 1104 bp, Escherichia coli O157:H7 str. 2011EL-2312
atgaaattatctatcgacatttcagaacttattcaattagggaagaaaatgttaccagaaggagtcgatttttttctggatgaatcccctattgactttgatcctatagatattgagttatccacgggtaaagaagttagtatcgaagatcttgaccctggtagcgggcttatctcttatcatggccgccaggttcttttatatattcgggaccattcagggcgttatgatgcggctatcgtagatggcgaaaaaggaaaacattttcatattgcctggtgcagaactcttgatgaaatgcgccataaaaatcgatttgaaaggtatcatgcaactaaccgcatagatggtttattcgaaattgatgatggttcaggtcggagccaggatgttgatttacgggtatgtatgaattgcctcgaacgacttaattataaaggaagtattgataaacaacgaaaaagagagatttttaaatcattctcattaaatgagtttttttcagattatagtacttgttttcgtcatatgcctaagggtatctatgacaaaacaaatagtgggtatgtcgaaaactggaaggaaatatctaaagaaatacgagaaaaggcaaattatgtttgtaatgattgtggcgtgaatttatcaaccgccaaaaacttgtgccatgtccatcataaaaatggcatcaaatatgataatcaccatgaaaaccttcttgttctgtgcaaggattgccatcgaaaacagcccctccacgaaggtatattcgttacccaagcagagatggctatcattcaacgtttacgttcccaacaagggttattaaaagcagaatcctggaatgaaatatatgacctgactgatccatcagtgcatggtgatattaatatgatgcaacataaaggctttcaacctcctgttcctgggttagatcttccaaactcagaacatgaaattattgcaaccgtagaagctgcatggccaggccttaaaattgcagttaaccttactcccgccgaagtcgaaggatggagaatatataccgtgggtgagctggttaaagaaatacaaacaggagcctttacgccagcaaaattgtaa

SEQ ID NO: 12149 - DNA, 1653 bp, Escherichia coli O157:H7 str. 2011EL-2287; identical to SEQ ID NO: 11366

SEQ ID NO: 12150 - DNA, 633 bp, Escherichia coli O157:H7 str. 2011EL-2287; identical to SEQ ID NO: 11457

SEQ ID NO: 12151 - DNA, 1104 bp, Escherichia coli O157:H7 str. 2011EL-2287; identical to SEQ ID NO: 11368

SEQ ID NO: 12152 - DNA, 1653 bp, Escherichia coli O157:H7 str. 2011EL-2113; identical to SEQ ID NO: 11366

SEQ ID NO: 12153 - DNA, 633 bp, Escherichia coli O157:H7 str. 2011EL-2113; identical to SEQ ID NO: 11457

SEQ ID NO: 12154 - DNA, 1104 bp, Escherichia coli O157:H7 str. 2011EL-2113; identical to SEQ ID NO: 11368

SEQ ID NO: 12155 - DNA, 1653 bp, Escherichia coli O157:H7 str. 2011EL-2289; identical to SEQ ID NO: 11366

SEQ ID NO: 12156 - DNA, 633 bp, Escherichia coli O157:H7 str. 2011EL-2289; identical to SEQ ID NO: 11457

SEQ ID NO: 12157 - DNA, 1104 bp, Escherichia coli O157:H7 str. 2011EL-2289; identical to SEQ ID NO: 11368

SEQ ID NO: 12158 - DNA, 1653 bp, Escherichia coli O157:H7 str. F7350; identical to SEQ ID NO: 11366

SEQ ID NO: 12159 - DNA, 633 bp, Escherichia coli O157:H7 str. F7350; identical to SEQ ID NO: 11457

SEQ ID NO: 12160 - DNA, 1104 bp, Escherichia coli O157:H7 str. F7350; identical to SEQ ID NO: 11368

SEQ ID NO: 12161 - DNA, 1653 bp, Escherichia coli O157:H7 str. 2010C-4979C1; identical to SEQ ID NO: 11366

SEQ ID NO: 12162 - DNA, 633 bp, Escherichia coli O157:H7 str. 2010C-4979C1; identical to SEQ ID NO: 11463

SEQ ID NO: 12163 - DNA, 1104 bp, Escherichia coli O157:H7 str. 2010C-4979C1; identical to SEQ ID NO: 11386

SEQ ID NO: 12164 - DNA, 1653 bp, Escherichia coli O157:H7 str. 2009EL1705; identical to SEQ ID NO: 11366

SEQ ID NO: 12165 - DNA, 633 bp, Escherichia coli O157:H7 str. 2009EL1705; identical to SEQ ID NO: 11457

SEQ ID NO: 12166 - DNA, 1104 bp, Escherichia coli O157:H7 str. 2009EL1705; identical to SEQ ID NO: 11368

SEQ ID NO: 12167 - DNA, 1653 bp, Escherichia coli O157:H7 str. 2009EL2109; identical to SEQ ID NO: 11366

SEQ ID NO: 12168 - DNA, 633 bp, Escherichia coli O157:H7 str. 2009EL2109; identical to SEQ ID NO: 11457

SEQ ID NO: 12169 - DNA, 1104 bp, Escherichia coli O157:H7 str. 2009EL2109; identical to SEQ ID NO: 11368

SEQ ID NO: 12170 - DNA, 1653 bp, Escherichia coli O145:NM str. 2010C-3507; identical to SEQ ID NO: 12101

SEQ ID NO: 12171 - DNA, 633 bp, Escherichia coli O145:NM str. 2010C-3507; identical to SEQ ID NO: 11463

SEQ ID NO: 12172 - DNA, 1104 bp, Escherichia coli O145:NM str. 2010C-3507; identical to SEQ ID NO: 12103

SEQ ID NO: 12173 - DNA, 1653 bp, Escherichia coli O145:NM str. 2010C-3509; identical to SEQ ID NO: 12101

SEQ ID NO: 12174 - DNA, 633 bp, Escherichia coli O145:NM str. 2010C-3509; identical to SEQ ID NO: 11463

SEQ ID NO: 12175 - DNA, 1104 bp, Escherichia coli O145:NM str. 2010C-3509; identical to SEQ ID NO: 12103

SEQ ID NO: 12176 - DNA, 1653 bp, Escherichia coli O145:NM str. 2010C-3510; identical to SEQ ID NO: 12101

SEQ ID NO: 12177 - DNA, 633 bp, Escherichia coli O145:NM str. 2010C-3510; identical to SEQ ID NO: 11463

SEQ ID NO: 12178 - DNA, 1104 bp, Escherichia coli O145:NM str. 2010C-3510; identical to SEQ ID NO: 12103

SEQ ID NO: 12179 - DNA, 1653 bp, Escherichia coli O145:NM str. 2010C-3511; identical to SEQ ID NO: 12101

SEQ ID NO: 12180 - DNA, 633 bp, Escherichia coli O145:NM str. 2010C-3511; identical to SEQ ID NO: 11463

SEQ ID NO: 12181 - DNA, 1104 bp, Escherichia coli O145:NM str. 2010C-3511; identical to SEQ ID NO: 12103

SEQ ID NO: 12182 - DNA, 1653 bp, Escherichia coli O145:NM str. 2010C-3516; identical to SEQ ID NO: 12101

SEQ ID NO: 12183 - DNA, 633 bp, Escherichia coli O145:NM str. 2010C-3516; identical to SEQ ID NO: 11463

SEQ ID NO: 12184 - DNA, 1104 bp, Escherichia coli O145:NM str. 2010C-3516; identical to SEQ ID NO: 12103

SEQ ID NO: 12185 - DNA, 1653 bp, Escherichia coli O145:NM str. 2010C-3517; identical to SEQ ID NO: 12101

SEQ ID NO: 12186 - DNA, 633 bp, Escherichia coli O145:NM str. 2010C-3517; identical to SEQ ID NO: 11463

SEQ ID NO: 12187 - DNA, 1104 bp, Escherichia coli O145:NM str. 2010C-3517; identical to SEQ ID NO: 12103

SEQ ID NO: 12188 - DNA, 1653 bp, Escherichia coli O145:NM str. 2010C-3518; identical to SEQ ID NO: 12101

SEQ ID NO: 12189 - DNA, 633 bp, Escherichia coli O145:NM str. 2010C-3518; identical to SEQ ID NO: 11463

SEQ ID NO: 12190 - DNA, 1104 bp, Escherichia coli O145:NM str. 2010C-3518; identical to SEQ ID NO: 12103

SEQ ID NO: 12191 - DNA, 1653 bp, Escherichia coli O145:NM str. 2010C-3521; identical to SEQ ID NO: 12101

SEQ ID NO: 12192 - DNA, 633 bp, Escherichia coli O145:NM str. 2010C-3521; identical to SEQ ID NO: 11463

SEQ ID NO: 12193 - DNA, 1104 bp, Escherichia coli O145:NM str. 2010C-3521; identical to SEQ ID NO: 12103

SEQ ID NO: 12194 - DNA, 1653 bp, Escherichia coli O145:NM str. 2010C-3526; identical to SEQ ID NO: 12101

SEQ ID NO: 12195 - DNA, 633 bp, Escherichia coli O145:NM str. 2010C-3526; identical to SEQ ID NO: 11463

SEQ ID NO: 12196 - DNA, 1104 bp, Escherichia coli O145:NM str. 2010C-3526; identical to SEQ ID NO: 12103

SEQ ID NO: 12197 - DNA, 1653 bp, Escherichia coli O157:H7 str. 2011EL-2101; identical to SEQ ID NO: 11366

SEQ ID NO: 12198 - DNA, 633 bp, Escherichia coli O157:H7 str. 2011EL-2101; identical to SEQ ID NO: 11457

SEQ ID NO: 12199 - DNA, 1104 bp, Escherichia coli O157:H7 str. 2011EL-2101; identical to SEQ ID NO: 11368

SEQ ID NO: 12200 - DNA, 1653 bp, Escherichia coli O157:H7 str. 2011EL-2103; identical to SEQ ID NO: 11366

SEQ ID NO: 12201 - DNA, 633 bp, Escherichia coli O157:H7 str. 2011EL-2103; identical to SEQ ID NO: 11457

SEQ ID NO: 12202 - DNA, 1104 bp, Escherichia coli O157:H7 str. 2011EL-2103; identical to SEQ ID NO: 11368

SEQ ID NO: 12203 - DNA, 1653 bp, Escherichia coli O157:H7 str. 2011EL-2104; identical to SEQ ID NO: 11366

SEQ ID NO: 12204 - DNA, 633 bp, Escherichia coli O157:H7 str. 2011EL-2104; identical to SEQ ID NO: 11457

SEQ ID NO: 12205 - DNA, 1104 bp, Escherichia coli O157:H7 str. 2011EL-2104; identical to SEQ ID NO: 11368

SEQ ID NO: 12206 - DNA, 1653 bp, Escherichia coli O157:H7 str. 2011EL-2105; identical to SEQ ID NO: 11366

SEQ ID NO: 12207 - DNA, 633 bp, Escherichia coli O157:H7 str. 2011EL-2105; identical to SEQ ID NO: 11457

SEQ ID NO: 12208 - DNA, 1104 bp, Escherichia coli O157:H7 str. 2011EL-2105; identical to SEQ ID NO: 11368

SEQ ID NO: 12209 - DNA, 1653 bp, Escherichia coli O157:H7 str. 2011EL-2106; identical to SEQ ID NO: 11366

SEQ ID NO: 12210 - DNA, 633 bp, Escherichia coli O157:H7 str. 2011EL-2106; identical to SEQ ID NO: 11457

SEQ ID NO: 12211 - DNA, 1104 bp, Escherichia coli O157:H7 str. 2011EL-2106; identical to SEQ ID NO: 11368

SEQ ID NO: 12212 - DNA, 1653 bp, Escherichia coli O157:H7 str. 2011EL-2107; identical to SEQ ID NO: 11366

SEQ ID NO: 12213 - DNA, 633 bp, Escherichia coli O157:H7 str. 2011EL-2107; identical to SEQ ID NO: 11457

SEQ ID NO: 12214 - DNA, 1104 bp, Escherichia coli O157:H7 str. 2011EL-2107; identical to SEQ ID NO: 11368

SEQ ID NO: 12215 - DNA, 1653 bp, Escherichia coli O157:H7 str. 2011EL-2108; identical to SEQ ID NO: 11366

SEQ ID NO: 12216 - DNA, 633 bp, Escherichia coli O157:H7 str. 2011EL-2108; identical to SEQ ID NO: 11457

SEQ ID NO: 12217 - DNA, 1104 bp, Escherichia coli O157:H7 str. 2011EL-2108; identical to SEQ ID NO: 11368

SEQ ID NO: 12218 - DNA, 1653 bp, Escherichia coli O157:H7 str. 2011EL-2109; identical to SEQ ID NO: 11366

SEQ ID NO: 12219 - DNA, 633 bp, Escherichia coli O157:H7 str. 2011EL-2109; identical to SEQ ID NO: 11457

SEQ ID NO: 12220 - DNA, 1104 bp, Escherichia coli O157:H7 str. 2011EL-2109; identical to SEQ ID NO: 11368

SEQ ID NO: 12221 - DNA, 1653 bp, Escherichia coli O157:H7 str. 2011EL-2111; identical to SEQ ID NO: 11366

SEQ ID NO: 12222 - DNA, 633 bp, Escherichia coli O157:H7 str. 2011EL-2111; identical to SEQ ID NO: 11457

SEQ ID NO: 12223 - DNA, 1104 bp, Escherichia coli O157:H7 str. 2011EL-2111; identical to SEQ ID NO: 11368

SEQ ID NO: 12224 - DNA, 1653 bp, Escherichia coli O157:H7 str. 2011EL-2112; identical to SEQ ID NO: 11366

SEQ ID NO: 12225 - DNA, 633 bp, Escherichia coli O157:H7 str. 2011EL-2112; identical to SEQ ID NO: 11457

SEQ ID NO: 12226 - DNA, 1104 bp, Escherichia coli O157:H7 str. 2011EL-2112; identical to SEQ ID NO: 11368

SEQ ID NO: 12227 - DNA, 1653 bp, Escherichia coli O157:H7 str. 2011EL-1107; identical to SEQ ID NO: 11366

SEQ ID NO: 12228 - DNA, 633 bp, Escherichia coli O157:H7 str. 2011EL-1107; identical to SEQ ID NO: 11457

SEQ ID NO: 12229 - DNA, 1104 bp, Escherichia coli O157:H7 str. 2011EL-1107; identical to SEQ ID NO: 11368

SEQ ID NO: 12230 - DNA, 1653 bp, Escherichia coli O157:H7 str. 2011EL-2090; identical to SEQ ID NO: 11366

SEQ ID NO: 12231 - DNA, 633 bp, Escherichia coli O157:H7 str. 2011EL-2090; identical to SEQ ID NO: 11457

SEQ ID NO: 12232 - DNA, 1104 bp, Escherichia coli O157:H7 str. 2011EL-2090; identical to SEQ ID NO: 11368

SEQ ID NO: 12233 - DNA, 1653 bp, Escherichia coli O157:H7 str. 2011EL-2091; identical to SEQ ID NO: 11366

SEQ ID NO: 12234 - DNA, 633 bp, Escherichia coli O157:H7 str. 2011EL-2091; identical to SEQ ID NO: 11457

SEQ ID NO: 12235 - DNA, 1104 bp, Escherichia coli O157:H7 str. 2011EL-2091; identical to SEQ ID NO: 11368

SEQ ID NO: 12236 - DNA, 1653 bp, Escherichia coli O157:H7 str. 2011EL-2092; identical to SEQ ID NO: 11366

SEQ ID NO: 12237 - DNA, 633 bp, Escherichia coli O157:H7 str. 2011EL-2092; identical to SEQ ID NO: 11457

SEQ ID NO: 12238 - DNA, 1104 bp, Escherichia coli O157:H7 str. 2011EL-2092; identical to SEQ ID NO: 11368

SEQ ID NO: 12239 - DNA, 1653 bp, Escherichia coli O157:H7 str. 2011EL-2093; identical to SEQ ID NO: 11366

SEQ ID NO: 12240 - DNA, 633 bp, Escherichia coli O157:H7 str. 2011EL-2093; identical to SEQ ID NO: 11457

SEQ ID NO: 12241 - DNA, 1104 bp, Escherichia coli O157:H7 str. 2011EL-2093; identical to SEQ ID NO: 11368

SEQ ID NO: 12242 - DNA, 1653 bp, Escherichia coli O157:H7 str. 2011EL-2094; identical to SEQ ID NO: 11366

SEQ ID NO: 12243 - DNA, 633 bp, Escherichia coli O157:H7 str. 2011EL-2094; identical to SEQ ID NO: 11457

SEQ ID NO: 12244 - DNA, 1104 bp, Escherichia coli O157:H7 str. 2011EL-2094; identical to SEQ ID NO: 11368

SEQ ID NO: 12245 - DNA, 1653 bp, Escherichia coli O157:H7 str. 2011EL-2096; identical to SEQ ID NO: 11366

SEQ ID NO: 12246 - DNA, 633 bp, Escherichia coli O157:H7 str. 2011EL-2096; identical to SEQ ID NO: 11457

SEQ ID NO: 12247 - DNA, 1104 bp, Escherichia coli O157:H7 str. 2011EL-2096; identical to SEQ ID NO: 11368

SEQ ID NO: 12248 - DNA, 1653 bp, Escherichia coli O157:H7 str. 2011EL-2097; identical to SEQ ID NO: 11366

SEQ ID NO: 12249 - DNA, 633 bp, Escherichia coli O157:H7 str. 2011EL-2097; identical to SEQ ID NO: 11457

SEQ ID NO: 12250 - DNA, 1104 bp, Escherichia coli O157:H7 str. 2011EL-2097; identical to SEQ ID NO: 11368

SEQ ID NO: 12251 - DNA, 1653 bp, Escherichia coli O157:H7 str. 2011EL-2098; identical to SEQ ID NO: 11366

SEQ ID NO: 12252 - DNA, 633 bp, Escherichia coli O157:H7 str. 2011EL-2098; identical to SEQ ID NO: 11457

SEQ ID NO: 12253 - DNA, 1104 bp, Escherichia coli O157:H7 str. 2011EL-2098; identical to SEQ ID NO: 11368

SEQ ID NO: 12254 - DNA, 1653 bp, Escherichia coli O157:H7 str. 08-3037; identical to SEQ ID NO: 11366

SEQ ID NO: 12255 - DNA, 633 bp, Escherichia coli O157:H7 str. 08-3037; identical to SEQ ID NO: 11457

SEQ ID NO: 12256 - DNA, 1104 bp, Escherichia coli O157:H7 str. 08-3037; identical to SEQ ID NO: 11368

SEQ ID NO: 12257 - DNA, 1653 bp, Escherichia coli O157:H7 str. 08-3527; identical to SEQ ID NO: 11366

SEQ ID NO: 12258 - DNA, 633 bp, Escherichia coli O157:H7 str. 08-3527; identical to SEQ ID NO: 11457

SEQ ID NO: 12259 - DNA, 1104 bp, Escherichia coli O157:H7 str. 08-3527; identical to SEQ ID NO: 11368

SEQ ID NO: 12260 - DNA, 1653 bp, Escherichia coli O157:H7 str. 08-4169; identical to SEQ ID NO: 11366

SEQ ID NO: 12261 - DNA, 633 bp, Escherichia coli O157:H7 str. 08-4169; identical to SEQ ID NO: 11457

SEQ ID NO: 12262 - DNA, 1104 bp, Escherichia coli O157:H7 str. 08-4169; identical to SEQ ID NO: 11368

SEQ ID NO: 12263 - DNA, 1653 bp, Escherichia coli O145:NM str. 08-4270; identical to SEQ ID NO: 12101

SEQ ID NO: 12264 - DNA, 633 bp, Escherichia coli O145:NM str. 08-4270; identical to SEQ ID NO: 11463

SEQ ID NO: 12265 - DNA, 1104 bp, Escherichia coli O145:NM str. 08-4270; identical to SEQ ID NO: 12103

SEQ ID NO: 12266 - DNA, 1653 bp, Escherichia coli O157:H7 str. 2011EL-2099; identical to SEQ ID NO: 11366

SEQ ID NO: 12267 - DNA, 633 bp, Escherichia coli O157:H7 str. 2011EL-2099; identical to SEQ ID NO: 11457

SEQ ID NO: 12268 - DNA, 1104 bp, Escherichia coli O157:H7 str. 2011EL-2099; identical to SEQ ID NO: 11368

SEQ ID NO: 12269 - DNA, 1653 bp, Escherichia coli O157:H7 str. K5806; identical to SEQ ID NO: 11366

SEQ ID NO: 12270 - DNA, 633 bp, Escherichia coli O157:H7 str. K5806; identical to SEQ ID NO: 11457

SEQ ID NO: 12271 - DNA, 1104 bp, Escherichia coli O157:H7 str. K5806; identical to SEQ ID NO: 11368

SEQ ID NO: 12272 - DNA, 1653 bp, Escherichia coli O145:NM str. 06-3484; identical to SEQ ID NO: 12101

SEQ ID NO: 12273 - DNA, 633 bp, Escherichia coli O145:NM str. 06-3484; identical to SEQ ID NO: 11463

SEQ ID NO: 12274 - DNA, 1104 bp, Escherichia coli O145:NM str. 06-3484; identical to SEQ ID NO: 12103

SEQ ID NO: 12275 - DNA, 1653 bp, Escherichia coli O55:H7 str. 06-3555; identical to SEQ ID NO: 11366

SEQ ID NO: 12276 - DNA, 633 bp, Escherichia coli O55:H7 str. 06-3555; identical to SEQ ID NO: 11463

SEQ ID NO: 12277 - DNA, 1104 bp, Escherichia coli O55:H7 str. 06-3555; identical to SEQ ID NO: 11386

SEQ ID NO: 12278 - DNA, 1653 bp, Escherichia coli O157:H7 str. 06-3745; identical to SEQ ID NO: 11366

SEQ ID NO: 12279 - DNA, 633 bp, Escherichia coli O157:H7 str. 06-3745; identical to SEQ ID NO: 11457

SEQ ID NO: 12280 - DNA, 1104 bp, Escherichia coli O157:H7 str. 06-3745; identical to SEQ ID NO: 11368

SEQ ID NO: 12281 - DNA, 1653 bp, Escherichia coli O157:H7 str. 07-3091; identical to SEQ ID NO: 11366

SEQ ID NO: 12282 - DNA, 633 bp, Escherichia coli O157:H7 str. 07-3091; identical to SEQ ID NO: 11457

SEQ ID NO: 12283 - DNA, 1104 bp, Escherichia coli O157:H7 str. 07-3091; identical to SEQ ID NO: 11368

SEQ ID NO: 12284 - DNA, 1653 bp, Escherichia coli O157:H7 str. 06-4039; identical to SEQ ID NO: 11366

SEQ ID NO: 12285 - DNA, 633 bp, Escherichia coli O157:H7 str. 06-4039; identical to SEQ ID NO: 11457

SEQ ID NO: 12286 - DNA, 1104 bp, Escherichia coli O157:H7 str. 06-4039; identical to SEQ ID NO: 11368

SEQ ID NO: 12287 - DNA, 1653 bp, Escherichia coli O157:H7 str. 07-3391; identical to SEQ ID NO: 11366

SEQ ID NO: 12288 - DNA, 633 bp, Escherichia coli O157:H7 str. 07-3391; identical to SEQ ID NO: 11457

SEQ ID NO: 12289 - DNA, 1104 bp, Escherichia coli O157:H7 str. 07-3391; identical to SEQ ID NO: 11368

SEQ ID NO: 12290 - DNA, 1653 bp, Escherichia coli O145:NM str. 2010C-4557C2; identical to SEQ ID NO: 12101

SEQ ID NO: 12291 - DNA, 633 bp, Escherichia coli O145:NM str. 2010C-4557C2; identical to SEQ ID NO: 11463

SEQ ID NO: 12292 - DNA, 1104 bp, Escherichia coli O145:NM str. 2010C-4557C2; identical to SEQ ID NO: 12103

SEQ ID NO: 12293 - DNA, 1653 bp, Escherichia coli O157:H7 str. K4405; identical to SEQ ID NO: 11366

SEQ ID NO: 12294 - DNA, 633 bp, Escherichia coli O157:H7 str. K4405; identical to SEQ ID NO: 11457

SEQ ID NO: 12295 - DNA, 1104 bp, Escherichia coli O157:H7 str. K4405; identical to SEQ ID NO: 11368

SEQ ID NO: 12296 - DNA, 1653 bp, Escherichia coli O157:H7 str. K1420; identical to SEQ ID NO: 11366

SEQ ID NO: 12297 - DNA, 633 bp, Escherichia coli O157:H7 str. K1420; identical to SEQ ID NO: 11457

SEQ ID NO: 12298 - DNA, 1104 bp, Escherichia coli O157:H7 str. K1420; identical to SEQ ID NO: 11368

SEQ ID NO: 12299 - DNA, 1653 bp, Escherichia coli O157:H7 str. F6749; identical to SEQ ID NO: 11366

SEQ ID NO: 12300 - DNA, 633 bp, Escherichia coli O157:H7 str. F6749; identical to SEQ ID NO: 11457

SEQ ID NO: 12301 - DNA, 1104 bp, Escherichia coli O157:H7 str. F6749; identical to SEQ ID NO: 11368

SEQ ID NO: 12302 - DNA, 1653 bp, Escherichia coli O157:H7 str. F7384; identical to SEQ ID NO: 11366

SEQ ID NO: 12303 - DNA, 633 bp, Escherichia coli O157:H7 str. F7384; identical to SEQ ID NO: 11457

SEQ ID NO: 12304 - DNA, 1104 bp, Escherichia coli O157:H7 str. F7384; identical to SEQ ID NO: 11368

SEQ ID NO: 12305 - DNA, 1653 bp, Escherichia coli O157:H7 str. F6142; identical to SEQ ID NO: 11366

SEQ ID NO: 12306 - DNA, 633 bp, Escherichia coli O157:H7 str. F6142; identical to SEQ ID NO: 11457

SEQ ID NO: 12307 - DNA, 1104 bp, Escherichia coli O157:H7 str. F6142; identical to SEQ ID NO: 11368

SEQ ID NO: 12308 - DNA, 1653 bp, Escherichia coli O157:H7 str. G5303; identical to SEQ ID NO: 11366

SEQ ID NO: 12309 - DNA, 633 bp, Escherichia coli O157:H7 str. G5303; identical to SEQ ID NO: 11457

SEQ ID NO: 12310 - DNA, 1104 bp, Escherichia coli O157:H7 str. G5303; identical to SEQ ID NO: 11368

SEQ ID NO: 12311 - DNA, 1653 bp, Escherichia coli O157:H7 str. F7377; identical to SEQ ID NO: 11366

SEQ ID NO: 12312 - DNA, 633 bp, Escherichia coli O157:H7 str. F7377; identical to SEQ ID NO: 11457

SEQ ID NO: 12313 - DNA, 1104 bp, Escherichia coli O157:H7 str. F7377; identical to SEQ ID NO: 11368

SEQ ID NO: 12314 - DNA, 1653 bp, Escherichia coli O157:H7 str. H2495; identical to SEQ ID NO: 11366

SEQ ID NO: 12315 - DNA, 633 bp, Escherichia coli O157:H7 str. H2495; identical to SEQ ID NO: 11457

SEQ ID NO: 12316 - DNA, 1104 bp, Escherichia coli O157:H7 str. H2495; identical to SEQ ID NO: 11368

SEQ ID NO: 12317 - DNA, 1653 bp, Escherichia coli O157:H7 str. F6751; identical to SEQ ID NO: 11366

SEQ ID NO: 12318 - DNA, 633 bp, Escherichia coli O157:H7 str. F6751; identical to SEQ ID NO: 11457

SEQ ID NO: 12319 - DNA, 1104 bp, Escherichia coli O157:H7 str. F6751; identical to SEQ ID NO: 11368

SEQ ID NO: 12320 - DNA, 1653 bp, Escherichia coli O157:H7 str. H2498; identical to SEQ ID NO: 11366

SEQ ID NO: 12321 - DNA, 633 bp, Escherichia coli O157:H7 str. H2498; identical to SEQ ID NO: 11457

SEQ ID NO: 12322 - DNA, 1104 bp, Escherichia coli O157:H7 str. H2498; identical to SEQ ID NO: 11368

SEQ ID NO: 12323 - DNA, 1653 bp, Escherichia coli O157:H7 str. F6750; identical to SEQ ID NO: 11366

SEQ ID NO: 12324 - DNA, 633 bp, Escherichia coli O157:H7 str. F6750; identical to SEQ ID NO: 11457

SEQ ID NO: 12325 - DNA, 1104 bp, Escherichia coli O157:H7 str. F6750; identical to SEQ ID NO: 11368

SEQ ID NO: 12326 - DNA, 1653 bp, Escherichia coli O157:H7 str. K1796; identical to SEQ ID NO: 11366

SEQ ID NO: 12327 - DNA, 633 bp, Escherichia coli O157:H7 str. K1796; identical to SEQ ID NO: 11457

SEQ ID NO: 12328 - DNA, 1104 bp, Escherichia coli O157:H7 str. K1796; identical to SEQ ID NO: 11368

SEQ ID NO: 12329 - DNA, 1653 bp, Escherichia coli O157:H7 str. K1845; identical to SEQ ID NO: 11366

SEQ ID NO: 12330 - DNA, 633 bp, Escherichia coli O157:H7 str. K1845; identical to SEQ ID NO: 11457

SEQ ID NO: 12331 - DNA, 1104 bp, Escherichia coli O157:H7 str. K1845; identical to SEQ ID NO: 11368

SEQ ID NO: 12332 - DNA, 1653 bp, Escherichia coli O157:H7 str. K1795; identical to SEQ ID NO: 11366

SEQ ID NO: 12333 - DNA, 633 bp, Escherichia coli O157:H7 str. K1795; identical to SEQ ID NO: 11457

SEQ ID NO: 12334 - DNA, 1104 bp, Escherichia coli O157:H7 str. K1795; identical to SEQ ID NO: 11368

SEQ ID NO: 12335 - DNA, 1653 bp, Escherichia coli O157:H7 str. K1921; identical to SEQ ID NO: 11366

SEQ ID NO: 12336 - DNA, 633 bp, Escherichia coli O157:H7 str. K1921; identical to SEQ ID NO: 11457

SEQ ID NO: 12337 - DNA, 1104 bp, Escherichia coli O157:H7 str. K1921; identical to SEQ ID NO: 11368

SEQ ID NO: 12338 - DNA, 1653 bp, Escherichia coli O157:H7 str. K1927; identical to SEQ ID NO: 11366

SEQ ID NO: 12339 - DNA, 633 bp, Escherichia coli O157:H7 str. K1927; identical to SEQ ID NO: 11457

SEQ ID NO: 12340 - DNA, 1104 bp, Escherichia coli O157:H7 str. K1927; identical to SEQ ID NO: 11368

SEQ ID NO: 12341 - DNA, 1653 bp, Escherichia coli O157:H7 str. K2188; identical to SEQ ID NO: 11366

SEQ ID NO: 12342 - DNA, 633 bp, Escherichia coli O157:H7 str. K2188; identical to SEQ ID NO: 11457

SEQ ID NO: 12343 - DNA, 1104 bp, Escherichia coli O157:H7 str. K2188; identical to SEQ ID NO: 11368

SEQ ID NO: 12344 - DNA, 796 bp, Escherichia coli O157:H7 str. K2191
gtctgaactgcgtgaagtgcttcaggtgaaccaacatcaaatcagcgaactctcccgccatttagaaacctttgtcgccatccgcgataaagctacaaccgtattacctgaaatacagaacaaaatggctgaagtgggtgaactgctgaaatccggagctgcaaatgttagtgcatctcttgagcaaaccagccagcaaatacttcttaatgcagattcaatgcgcgttgccctggatgaaggtaccgaaggattcagacaatcggttacccaaacacaacaagcatttgcctcgatggcacatgatgtcagcaattcctccgaaaccctaaccagcacgttaggtgaaacaattactgaaatgaaacaaagtggtgaagaattcctgaaatcactagagtcgcactcgaaagaattgcatagaaatatggaacaaaatacgacgaatgtgattgatatgttcagtaagactggtgaaaagattaaccatcaactatccagtaatgccgataatatgtttgattcaatccagacatcatttgataaggcaagtgcagggctgacttctcaagtcagagaatcaattgaaaaatttgctctatccatcaacgagcagttacatgcttttgagcaagcaactgaacgtgaaatgaaccgtgaaatgcaatcattaggtaatgctctgctttcaatcagcaaaggttttgtcggtaactatgaaaaacttattaaagattaccaaatagttatggggcagttacaagcattaatttctgctaataaacatcgcgggtaa

SEQ ID NO: 12345 - DNA, 633 bp, Escherichia coli O157:H7 str. K2191; identical to SEQ ID NO: 11457

SEQ ID NO: 12346 - DNA, 1104 bp, Escherichia coli O157:H7 str. K2191; identical to SEQ ID NO: 11368

SEQ ID NO: 12347 - DNA, 1497 bp, Escherichia coli O157:H7 str. K2581; identical to SEQ ID NO: 11438

SEQ ID NO: 12348 - DNA, 633 bp, Escherichia coli O157:H7 str. K2581; identical to SEQ ID NO: 11457

SEQ ID NO: 12349 - DNA, 1104 bp, Escherichia coli O157:H7 str. K2581; identical to SEQ ID NO: 11368

SEQ ID NO: 12350 - DNA, 1653 bp, Escherichia coli O157:H7 str. K2622; identical to SEQ ID NO: 11366

SEQ ID NO: 12351 - DNA, 633 bp, Escherichia coli O157:H7 str. K2622; identical to SEQ ID NO: 11457

SEQ ID NO: 12352 - DNA, 1104 bp, Escherichia coli O157:H7 str. K2622; identical to SEQ ID NO: 11368

SEQ ID NO: 12353 - DNA, 1653 bp, Escherichia coli O157:H7 str. K2845; identical to SEQ ID NO: 11366

SEQ ID NO: 12354 - DNA, 633 bp, Escherichia coli O157:H7 str. K2845; identical to SEQ ID NO: 11457

SEQ ID NO: 12355 - DNA, 1104 bp, Escherichia coli O157:H7 str. K2845; identical to SEQ ID NO: 11368

SEQ ID NO: 12356 - DNA, 1653 bp, Escherichia coli O157:H7 str. K2854; identical to SEQ ID NO: 11366

SEQ ID NO: 12357 - DNA, 633 bp, Escherichia coli O157:H7 str. K2854; identical to SEQ ID NO: 11457

SEQ ID NO: 12358 - DNA, 1104 bp, Escherichia coli O157:H7 str. K2854; identical to SEQ ID NO: 11368

SEQ ID NO: 12359 - DNA, 1653 bp, Escherichia coli O157:H7 str. K4396; identical to SEQ ID NO: 11366

SEQ ID NO: 12360 - DNA, 633 bp, Escherichia coli O157:H7 str. K4396; identical to SEQ ID NO: 11457

SEQ ID NO: 12361 - DNA, 1104 bp, Escherichia coli O157:H7 str. K4396; identical to SEQ ID NO: 11368

SEQ ID NO: 12362 - DNA, 1653 bp, Escherichia coli O157:H7 str. K4406; identical to SEQ ID NO: 11366

SEQ ID NO: 12363 - DNA, 633 bp, Escherichia coli O157:H7 str. K4406; identical to SEQ ID NO: 11457

SEQ ID NO: 12364 - DNA, 1104 bp, Escherichia coli O157:H7 str. K4406; identical to SEQ ID NO: 11368

SEQ ID NO: 12365 - DNA, 1653 bp, Escherichia coli O157:H7 str. K2324; identical to SEQ ID NO: 11366

SEQ ID NO: 12366 - DNA, 633 bp, Escherichia coli O157:H7 str. K2324; identical to SEQ ID NO: 11457

SEQ ID NO: 12367 - DNA, 1104 bp, Escherichia coli O157:H7 str. K2324; identical to SEQ ID NO: 11368

SEQ ID NO: 12368 - DNA, 1653 bp, Escherichia coli O157:H7 str. K4527; identical to SEQ ID NO: 11366

SEQ ID NO: 12369 - DNA, 633 bp, Escherichia coli O157:H7 str. K4527; identical to SEQ ID NO: 11457

SEQ ID NO: 12370 - DNA, 1104 bp, Escherichia coli O157:H7 str. K4527; identical to SEQ ID NO: 11368

SEQ ID NO: 12371 - DNA, 1653 bp, Escherichia coli O157:H7 str. K5418; identical to SEQ ID NO: 11366

SEQ ID NO: 12372 - DNA, 633 bp, Escherichia coli O157:H7 str. K5418; identical to SEQ ID NO: 11457

SEQ ID NO: 12373 - DNA, 1104 bp, Escherichia coli O157:H7 str. K5418; identical to SEQ ID NO: 11368

SEQ ID NO: 12374 - DNA, 1653 bp, Escherichia coli O157:H7 str. K5448; identical to SEQ ID NO: 11366

SEQ ID NO: 12375 - DNA, 633 bp, Escherichia coli O157:H7 str. K5448; identical to SEQ ID NO: 11457

SEQ ID NO: 12376 - DNA, 1104 bp, Escherichia coli O157:H7 str. K5448; identical to SEQ ID NO: 11368

SEQ ID NO: 12377 - DNA, 1653 bp, Escherichia coli O157:H7 str. K5449; identical to SEQ ID NO: 11366

SEQ ID NO: 12378 - DNA, 633 bp, Escherichia coli O157:H7 str. K5449; identical to SEQ ID NO: 11457

SEQ ID NO: 12379 - DNA, 1104 bp, Escherichia coli O157:H7 str. K5449; identical to SEQ ID NO: 11368

SEQ ID NO: 12380 - DNA, 1653 bp, Escherichia coli O157:H7 str. K5453; identical to SEQ ID NO: 11366

SEQ ID NO: 12381 - DNA, 633 bp, Escherichia coli O157:H7 str. K5453; identical to SEQ ID NO: 11457

SEQ ID NO: 12382 - DNA, 1104 bp, Escherichia coli O157:H7 str. K5453; identical to SEQ ID NO: 11368

SEQ ID NO: 12383 - DNA, 1653 bp, Escherichia coli O157:H7 str. K5467; identical to SEQ ID NO: 11366

SEQ ID NO: 12384 - DNA, 633 bp, Escherichia coli O157:H7 str. K5467; identical to SEQ ID NO: 11457

SEQ ID NO: 12385 - DNA, 1104 bp, Escherichia coli O157:H7 str. K5467; identical to SEQ ID NO: 11368

SEQ ID NO: 12386 - DNA, 1653 bp, Escherichia coli O157:H7 str. K5602; identical to SEQ ID NO: 11366

SEQ ID NO: 12387 - DNA, 633 bp, Escherichia coli O157:H7 str. K5602; identical to SEQ ID NO: 11457

SEQ ID NO: 12388 - DNA, 1104 bp, Escherichia coli O157:H7 str. K5602; identical to SEQ ID NO: 11368

SEQ ID NO: 12389 - DNA, 1653 bp, Escherichia coli O157:H7 str. K5607; identical to SEQ ID NO: 11366

SEQ ID NO: 12390 - DNA, 633 bp, Escherichia coli O157:H7 str. K5607; identical to SEQ ID NO: 11457

SEQ ID NO: 12391 - DNA, 1104 bp, Escherichia coli O157:H7 str. K5607; identical to SEQ ID NO: 11368

SEQ ID NO: 12392 - DNA, 1653 bp, Escherichia coli O157:H7 str. K5460; identical to SEQ ID NO: 11366

SEQ ID NO: 12393 - DNA, 633 bp, Escherichia coli O157:H7 str. K5460; identical to SEQ ID NO: 11457

SEQ ID NO: 12394 - DNA, 1104 bp, Escherichia coli O157:H7 str. K5460; identical to SEQ ID NO: 11368

SEQ ID NO: 12395 - DNA, 1653 bp, Escherichia coli O157:H7 str. K7140; identical to SEQ ID NO: 11366

SEQ ID NO: 12396 - DNA, 633 bp, Escherichia coli O157:H7 str. K7140; identical to SEQ ID NO: 11457

SEQ ID NO: 12397 - DNA, 1104 bp, Escherichia coli O157:H7 str. K7140; identical to SEQ ID NO: 11368

SEQ ID NO: 12398 - DNA, 1653 bp, Escherichia coli O157:H7 str. 2011EL-2290; identical to SEQ ID NO: 11366

SEQ ID NO: 12399 - DNA, 633 bp, Escherichia coli O157:H7 str. 2011EL-2290; identical to SEQ ID NO: 11457

SEQ ID NO: 12400 - DNA, 1104 bp, Escherichia coli O157:H7 str. 2011EL-2290; identical to SEQ ID NO: 11368

SEQ ID NO: 12401 - DNA, 1653 bp, Escherichia coli O157:H7 str. 2011EL-2313; identical to SEQ ID NO: 11366

SEQ ID NO: 12402 - DNA, 633 bp, Escherichia coli O157:H7 str. 2011EL-2313; identical to SEQ ID NO: 11457

SEQ ID NO: 12403 - DNA, 1104 bp, Escherichia coli O157:H7 str. 2011EL-2313; identical to SEQ ID NO: 11368

SEQ ID NO: 12404 - DNA, 1653 bp, Escherichia coli O157:H7 str. 2009C-4258; identical to SEQ ID NO: 11366

SEQ ID NO: 12405 - DNA, 633 bp, Escherichia coli O157:H7 str. 2009C-4258; identical to SEQ ID NO: 11457

SEQ ID NO: 12406 - DNA, 1104 bp, Escherichia coli O157:H7 str. 2009C-4258; identical to SEQ ID NO: 11368

SEQ ID NO: 12407 - DNA, 1653 bp, Escherichia coli O157:H7 str. 2009EL1449; identical to SEQ ID NO: 11366

SEQ ID NO: 12408 - DNA, 633 bp, Escherichia coli O157:H7 str. 2009EL1449; identical to SEQ ID NO: 11457

SEQ ID NO: 12409 - DNA, 1104 bp, Escherichia coli O157:H7 str. 2009EL1449; identical to SEQ ID NO: 11368

SEQ ID NO: 12410 - DNA, 1653 bp, Escherichia coli O157:H7 str. 2009EL1913; identical to SEQ ID NO: 11366

SEQ ID NO: 12411 - DNA, 633 bp, Escherichia coli O157:H7 str. 2009EL1913; identical to SEQ ID NO: 11457

SEQ ID NO: 12412 - DNA, 1104 bp, Escherichia coli O157:H7 str. 2009EL1913; identical to SEQ ID NO: 11368

SEQ ID NO: 12413 - DNA, 1653 bp, Escherichia coli O145:NM str. 2010C-3508; identical to SEQ ID NO: 12101

SEQ ID NO: 12414 - DNA, 633 bp, Escherichia coli O145:NM str. 2010C-3508; identical to SEQ ID NO: 11463

SEQ ID NO: 12415 - DNA, 1104 bp, Escherichia coli O145:NM str. 2010C-3508; identical to SEQ ID NO: 12103

SEQ ID NO: 12416 - DNA, 1653 bp, Escherichia coli O157:H7 str. K5852; identical to SEQ ID NO: 11366

SEQ ID NO: 12417 - DNA, 633 bp, Escherichia coli O157:H7 str. K5852; identical to SEQ ID NO: 11457

SEQ ID NO: 12418 - DNA, 1104 bp, Escherichia coli O157:H7 str. K5852; identical to SEQ ID NO: 11368

SEQ ID NO: 12419 - DNA, 1431 bp, Escherichia coli O157:H7 str. K6590
gaaagtattgataccagcatccccgtattattaggtggcctaaaaacagcattcattacaagcattgtaggtatgttttttgccattttatttaatggaatggatgctttcttttttgccaataaacgaagtgcgttagcagaaaataaccctgaatctgttacacctgaacatatctatcatgaattaaaagagcagaaccagactctgactaaattagtctcgggtattaacggtgatagtgaaggttctcttattgctcaaataaaattactacgtactgagattagcgattcctcgcaggcacaattagctaatcacactcatttcagtaataagctttgggaacaacttgaacaatttgcagatctaatggcaaaaggtgctacagaacaaattattgatgctttgcgacaagtcattattgattttaatcaaaatttaactgaacagtttggtgaaaactttaaagctcttgatgcctctgtaaaaaaacttgttgagtggcagggaaattataaaacgcaaattgagcagatgtcagaacaatatcaacaaagtgtcgagtccctggttgaaacaaaaactgcggttgcagggatttgggaagaatgtaaagaaattcctctggctatgtctgaactgcgtgaagtgcttcaggtgaaccaacatcaaatcagcgaactctcccgccatttagaaacctttgtcgccatccgcgataaagctacaaccgtattacctgaaatacagaacaaaatggctgaagtgggtgaactgctgaaatccggagctgcaaatgttagtgcatctcttgagcaaaccagccagcaaatacttcttaatgcagattcaatgcgcgttgccctggatgaaggtaccgaaggattcagacaatcggttacccaaacacaacaagcatttgcctcgatggcacatgatgtcagcaattcctccgaaaccctaaccagcacgttaggtgaaacaattactgaaatgaaacaaagtggtgaagaattcctgaaatcactagagtcgcactcgaaagaattgcatagaaatatggaacaaaatacgacgaatgtgattgatatgttcagtaagactggtgaaaagattaaccatcaactatccagtaatgccgataatatgtttgattcaatccagacatcatttgataaggcaagtgcagggctgacttctcaagtcagagaatcaattgaaaaatttgctctatccatcaacgagcagttacatgcttttgagcaagcaactgaacgtgaaatgaaccgtgaaatgcaatcattaggtaatgctctgctttcaatcagcaaaggttttgtcggtaactatgaaaaacttattaaagattaccaaatagttatggggcagttacaagcattaatttctgctaataaacatcgcgggtaa

SEQ ID NO: 12420 - DNA, 633 bp, Escherichia coli O157:H7 str. K6590; identical to SEQ ID NO: 11457

SEQ ID NO: 12421 - DNA, 1104 bp, Escherichia coli O157:H7 str. K6590; identical to SEQ ID NO: 11368

SEQ ID NO: 12422 - DNA, 1653 bp, Escherichia coli O157:H7 str. K6676; identical to SEQ ID NO: 11366

SEQ ID NO: 12423 - DNA, 633 bp, Escherichia coli O157:H7 str. K6676; identical to SEQ ID NO: 11457

SEQ ID NO: 12424 - DNA, 1104 bp, Escherichia coli O157:H7 str. K6676; identical to SEQ ID NO: 11368

SEQ ID NO: 12425 - DNA, 1653 bp, Escherichia coli O157:H7 str. K6687; identical to SEQ ID NO: 11366

SEQ ID NO: 12426 - DNA, 633 bp, Escherichia coli O157:H7 str. K6687; identical to SEQ ID NO: 11457

SEQ ID NO: 12427 - DNA, 1104 bp, Escherichia coli O157:H7 str. K6687; identical to SEQ ID NO: 11368

SEQ ID NO: 12428 - DNA, 1653 bp, Escherichia coli O157:H7 str. K5609; identical to SEQ ID NO: 11366

SEQ ID NO: 12429 - DNA, 633 bp, Escherichia coli O157:H7 str. K5609; identical to SEQ ID NO: 11457

SEQ ID NO: 12430 - DNA, 1104 bp, Escherichia coli O157:H7 str. K5609; identical to SEQ ID NO: 11368

SEQ ID NO: 12431 - DNA, 1653 bp, Escherichia coli O157:H7 str. 08-4529; identical to SEQ ID NO: 11366

SEQ ID NO: 12432 - DNA, 633 bp, Escherichia coli O157:H7 str. 08-4529; identical to SEQ ID NO: 11457

SEQ ID NO: 12433 - DNA, 1104 bp, Escherichia coli O157:H7 str. 08-4529; identical to SEQ ID NO: 11368

SEQ ID NO: 12434 - DNA, 1653 bp, Escherichia coli O157:NM str. 08-4540; identical to SEQ ID NO: 11366

SEQ ID NO: 12435 - DNA, 633 bp, Escherichia coli O157:NM str. 08-4540; identical to SEQ ID NO: 11457

SEQ ID NO: 12436 - DNA, 1104 bp, Escherichia coli O157:NM str. 08-4540; identical to SEQ ID NO: 11368

SEQ ID NO: 12437 - DNA, 1653 bp, Escherichia coli 1-250-04_S3_C1; identical to SEQ ID NO: 11954

SEQ ID NO: 12438 - DNA, 618 bp, Escherichia coli 1-250-04_S3_C1
atggtttttatgttcatatctattgcttatatgcactacgtacgtattgaaaaagaaaaaattaaagaagttgccgtagcctacgagaatgctcagttacagctttataatgctctggatattgagtttgcaaaggatttacaagactgggatgcagagatcgataaacagactctggaggttcgatttaaatcaccggatgttttatttggcttaggaagcacagagctaaaaccaaagtttaaactcattcttgacgacttctttcctcgctacctaaaagttctagataattatcaggaacatattactgaagtccgcattgaaggtcacacaagtactgactggacaggaacaacgaatcctgatattgcttattttaataatatggcactatcgcaaggtcgtacacgtgcagtattacaatacgtttatgacataaaaaatatcgcgacacaccaacaatgggttaaaagtaaatttgccgcagtaggttattcatctgcacatcccattcttgataaaaccggcaaagaggaccctaatcgctctcgtcgtgtcaccttcaaagttgtaacaaatgccgagttgcagattagaaagattattcaggagtaa

SEQ ID NO: 12439 - DNA, 1104 bp, Escherichia coli 1-250-04_S3_C1
atgaaattatctatcgacatttcagaacttattcaattagggaagaaaatgttaccagaaggagtcgatttttttctggatgaatcccctattgactttgatcctatagatattgagttatccacgggtaaagaagttagtatcgaagatcttgaccctggtagcgggcttatctcttatcatggccgccaggttcttttatatattcgggaccattcagggcgttatgatgcggctatcgtagatggcgaaaaaggaaaacgttttcatattgcctggtgcagaactcttgatgaaatgcgccataaaaatcgatttgaaaggtatcatgcaactaaccgcatagatggtttattcgaaattgatgatggttcaggtcggagccaggatgttgatttacgggtatgtatgaattgcctcgaacgacttaattataaaggaagtattgataaacaacgaaaaagagagatttttaaatcattctcattaaatgagtttttttcagattatagtacctgttttcgtcatatgcctaagggtatctatgacaaaacaaatagtgggtatgtcgaaaactggaaggaaatatctaaagaaatacgagaaaaggcaaattatgtttgtaatgattgtggcgtgaatttatcaaccgccaaaaacttgtgccatgtccatcataaaaatggcatcaaatatgataatcaccatgaaaaccttcttgttctgtgcaaggattgccatcgaaaacagcccctccacgaaggtatattcgttacccaagcagagatggctatcattcaacgtttacgttcccaacaagggttattaaaagcagaatcctggaatgaaatatatgacctgactgatccatcagtgcatggtgatattaatataatgcaacataaaggctttcaacctcctgttcctgggttagatcttcaaaactcagaacatgaaattattgcaaccgtagaagctgcatggccaggccttaaaattgcagttaaccttactcccgccgaagtcgaaggatggagaatatataccgtgggtgagctggttaaagaaatacaaaccggagcctttacgccagcaaaattgtaa

SEQ ID NO: 12440 - DNA, 1497 bp, Escherichia coli 1-182-04_S3_C2
atgggggcattaggtattctgggtactttcattggtattattattggtttactcaattttaataccgaaagtattgataccagcatccccgtattattaggtggcctaaaaacagcattcattacaagcattgtaggtatgttttttgccattttatttaatggaatggatgctttcttttttgccaataaacgaagtgcgttagcagaaaataaccctgaatctgttacacctgaacatatctatcatgaattaaaagagcagaaccagactctgactaaattagtctcgggtattaacggtgatagtgaaggttctcttattgctcaaataaaattactacgtactgagattagcgattcctcgcaggcacaattagctaatcacactcatttcagtaataagctttgggaacaacttgaacaatttgcagatctaatggcaaaaggtgctacagaacaaattattgatgctttgcgacaagtcattattgattttaatgaaaatttaactgaacagtttggtgaaaactttaaagctcttgatgcctctgtaaaaaaacttgttgagtggcagggaaattataaaacgcaaattgagcagatgtcagaacaatatcaacaaagtgtcgagtccctggttgaaacaaaaactgcggttgcagggatttgggaagaatgtaaagaaattcctctggctatgtctgaactgcgtgaagtgcttcaggtgaaccaacatcaaatcagcgaactctcccgccatttagaaacctttgtcgccatccgcgataaagctacaaccgtattacctgaaatacagaacaaaatggctgaagtgggtgaactgctgaaatccggagctgcaaatgttagtgcatctcttgagcaaaccagccagcaaatacttcttaatgcagattcaatgcgcgttgccctggatgaaggtaccgaaggattcagacaatcggttacccaaacacaacaagcatttgcctcgatggcgcatgatgtcagcaattcctccgaaaccctaaccagcacgttaggtgaaacaattactgaaatgaaacaaagtggtgaagaattcctgaaatcactagagtcgcactcgaaagaattgcatagaaatatggaacaaaatacaacgaatgtgattgatatgttcagtaagactggtgaaaagattaaccatcaactatccagtaatgccgataatatgtttgattcaatccagacatcatttgataaggctggtgcagggctgacttctcaagtcagagaatcaattgaaaaatttgctctatccatcaacgagcagttacatgcttttgagcaagcaactgaacgtgaaatgaaccgtgaaatgcaatcattaggtaatgctctgctttcaatcagcaaaggttttgtcggtaactatgaaaaacttattaaagattaccaaatagttatggggcagttacaagcattaatttctgctaataaacatcgagggtaa

SEQ ID NO: 12441 - DNA, 621 bp, Escherichia coli 1-182-04_S3_C2
atgatggtttttatgttcatatctattgcttatatgcactacgtacgtattgaaaaagaaaaaattaaagaagttgccgtagcctacgagaatgctcagttacagctttataatgctctggatattgagtttgcaaaggatttacaagactgggatgcagagatcgataaacagactctggaggttcgatttaaatcaccggatgttttatttggcttaggaagcacagagctaaaaccaaagtttaaactcattcttgacgacttctttcctcgctacctaaaagttctagataattatcaggaacatattactgaagtccgcattgaaggtcacacaagtactgactggacaggaacaacgaatcctgatattgcttattttaataatatggcactatcgcaaggtcgtacacgtgcagtattacaatacgtttatgacataaaaaatatcgcgacacaccaacaatgggttaaaagtaaatttgccgcagtaggttattcatctgcacatcccattcttgataaaaccggcaaagaggaccctaatcgctctcgtcgtgtcaccttcaaagttgtaacaaatgccgagttgcagattagaaagattattcaggagtaa

SEQ ID NO: 12442 - DNA, 1104 bp, Escherichia coli 1-182-04_S3_C2
atgaaattatctatcgacatttcagaacttattcaattagggaagaaaatgttaccagaaggagtcgatttttttctggatgaatcccctattgactttgatcctatagatattgagttatccacgggtaaagaagttagtatcgaagatcttgaccctggtagcgggcttatctcttatcatggccgccaggttcttttatatattcgggaccattcagggcgttatgatgcggctatcgtagatggcgaaaaaggaaaacgttttcatattgcctggtgcagaactcttgatgaaatgcgccataaaaatcgatttgaaaggtatcatgcaactaaccgcatagatggtttattcgaaattgatgatggttcaggtcggagccaggatgttgatttacgggtatgtatgaattgcctcgaacgacttaattataaaggaagtattgataaacaacgaaaaagagagatttttaaatcattctcattaaatgagtttttttcagattatagtacctgttttcgtcatatgcctaagggtatctatgacaaaacaaatagtgggtatgtcgaaaactggaaggaaatatctaaagaaatacgagaaaaggcaaattatgtttgtaatgattgtggcgtgaatttatcaaccgccaaaaacttgtgccatgtccatcataaaaatggcatcaaatatgataatcaccatgaaaaccttcttgttctgtgcaaggattgccatcgaaaacagcccctccacgaaggtatattcgttacccaagcagagatggctatcattcaacgtttacgttcccaacaagggttattaaaagcagaatcctggaatgaaatatatgacctgactgatccatcagtgcatggtgatattaatatgatgcaacataaaggctttcaacctcctgttcctgggttagatcttcaaaactcagaacatgaaattattgcaaccgtagaagctgcatggccaggccttaaaattgcagttaatcttactcccgccgaagtcgaaggatggagaatatataccgtgggtgagctggttaaagaaatacaaaccggagcctttacgccagcaaaattgtaa

SEQ ID NO: 12443 - DNA, 1653 bp, Escherichia coli 1-182-04_S3_C3
atgttagcgcagctttttgagcagttgtttcaatcgatagactctacactgatcaccaatattttcatctgggctgttatattcgtatttttatcagcgtggtggtgtgacaaaaaaaatatacatagtaagtttagagaatatgctccaaccttaatgggggcattaggtattctgggtactttcattggtattattattggtttactcaattttaataccgaaagtattgataccagcatccccgtattattaggtggcctaaaaacagcattcattacaagcattgtaggtatgttttttgccattttatttaatggaatggatgctttcttttttgccaataaacgaagtgcgttagcagaaaataaccctgaatctgttacacctgaacatatctatcatgaattaaaagagcagaaccagactctgactaaattagtctcgggtattaacggtgatagtgaaggttctcttattgctcaaataaaattactacgtactgagattagcgattcctcgcaggcacaattagctaatcacactcatttcagtaataagctttgggaacaacttgaacaatttgcagatctaatggcaaaaggtgctacagaacaaattattgatgctttgcgacaagtcattattgattttaatgaaaatttaactgaacagtttggtgaaaactttaaagctcttgatgcctctgtaaaaaaacttgttgagtggcagggaaattataaaacgcaaattgagcagatgtcagaacaatatcaacaaagtgtcgagtccctggttgaaacaaaaactgcggttgcagggatttgggaagaatgtaaagaaattcctctggctatgtctgaactgcgtgaagtgcttcaggtgaaccaacatcaaatcagcgaactctcccgccatttagaaacctttgtcgccatccgcgataaagctacaaccgtattacctgaaatacagaacaaaatggctgaagtgggtgaactgctgaaatccggagctgcaaatgttagtgcatctcttgagcaaaccagccagcaaatacttcttaatgcagattcaatgcgcgttgccctggatgaaggtaccgaaggattcagacaatcggttacccaaacacaacaagcatttgcctcgatggcgcatgatgtcagcaattcctccgaaaccctaaccagcacgttaggtgaaacaattactgaaatgaaacaaagtggtgaagaattcctgaaatcactagagtcgcactcgaaagaattgcatagaaatatggaacaaaatacaacgaatgtgattgatatgttcagtaagactggtgaaaagattaaccatcaactatccagtaatgccgataatatgtttgattcaatccagacatcatttgataaggctggtgcagggctgacttctcaagtcagagaatcaattgaaaaatttgctctatccatcaacgagcagttacatgcttttgagcaagcaactgaacgtgaaatgaaccgtgaaatgcaatcattaggtaatgctctgctttcaatcagcaaaggttttgtcggtaactatgaaaaacttattaaagattaccaaatagttatggggcagttacaagcattaatttctgctaataaacatcgagggtaa

SEQ ID NO: 12444 - DNA, 621 bp, Escherichia coli 1-182-04_S3_C3; identical to SEQ ID NO: 12441

SEQ ID NO: 12445 - DNA, 1104 bp, Escherichia coli 1-182-04_S3_C3; identical to SEQ ID NO: 12442

SEQ ID NO: 12446 - DNA, 1653 bp, Escherichia coli 1-182-04_S3_C1; identical to SEQ ID NO: 12443

SEQ ID NO: 12447 - DNA, 708 bp, Escherichia coli 1-182-04_S3_C1; identical to SEQ ID NO: 11955

SEQ ID NO: 12448 - DNA, 1104 bp, Escherichia coli 1-182-04_S3_C1; identical to SEQ ID NO: 12442

SEQ ID NO: 12449 - DNA, 1653 bp, Escherichia coli O157: str. 2010EL-2044; identical to SEQ ID NO: 11366

SEQ ID NO: 12450 - DNA, 633 bp, Escherichia coli O157: str. 2010EL-2044; identical to SEQ ID NO: 11457

SEQ ID NO: 12451 - DNA, 1104 bp, Escherichia coli O157: str. 2010EL-2044; identical to SEQ ID NO: 11368

SEQ ID NO: 12452 - DNA, 1653 bp, Escherichia coli O157: str. 2010EL-2045; identical to SEQ ID NO: 11366

SEQ ID NO: 12453 - DNA, 633 bp, Escherichia coli O157: str. 2010EL-2045; identical to SEQ ID NO: 11457

SEQ ID NO: 12454 - DNA, 1104 bp, Escherichia coli O157: str. 2010EL-2045; identical to SEQ ID NO: 11368

SEQ ID NO: 12455 - DNA, 1497 bp, Escherichia coli O145:H28 str. RM12581; identical to SEQ ID NO: 12125

SEQ ID NO: 12456 - DNA, 633 bp, Escherichia coli O145:H28 str. RM12581; identical to SEQ ID NO: 11463

SEQ ID NO: 12457 - DNA, 1104 bp, Escherichia coli O145:H28 str. RM12581; identical to SEQ ID NO: 12103

SEQ ID NO: 12458 - DNA, 1653 bp, Escherichia coli 2-005-03_S3_C2; identical to SEQ ID NO: 11843

SEQ ID NO: 12459 - DNA, 645 bp, Escherichia coli 2-005-03_S3_C2
atgtcagacctaatggcagggctgatgatggtttttatgttcatatctattgcttatatgcactacgtacgtattgaaaaagaaaaaattaaagaagttgccgtagcctacgagaatgctcagttacagctttataatgctctggatattgagtttgcaaaggatttgcaagactgggatgcagagatcgataagcagactctggaggttcgatttaaatcaccggatgttttatttggcttaggaagcacagagcttaaaccaaagtttaaactcattcttgacgacttctttcctcgctacctaaaagttcttgataattatcaagaacatattactgaagtccgcattgaaggtcacacaagtactgactggactggaacaacgaatcctgatattgcttattttaataatatggcactatcacaaggtcgtacacgtgcagtattacaatacgtttatgatataaaaaatatcgcgacacacaaacaatgggttaaaagtaaatttgccgcagtaggttattcatctgcacatcccattcttgataaaaccggcaaggaggatcctaatcgctctcgtcgtgtcaccttcaaagttgtaacaaatgccgagttgcagattagaaagattattcaggagtaa

SEQ ID NO: 12460 - DNA, 1104 bp, Escherichia coli 2-005-03_S3_C2; identical to SEQ ID NO: 11845

SEQ ID NO: 12461 - DNA, 1497 bp, Escherichia coli 2-011-08_S1_C1
atgggggcattaggtattctgggtactttcattggtattattattgggttactcaattttaatactgaaagtattgataccagcatccccgtattattaggcggcctaaaaacagcattcattacaagcattgtaggtatgttttttgccattttatttaatggaatggatgctttcttttttgccaataaacgaagtgcgttagcagaaaataaccctgaatctgttacacctgaacatatctatcatgaattaaaagagcagaaccagactctgaataaattagtctcgggtattaacggtgatagtgaaggttctcttattgctcaaataaaattactacgtactgagattagcgattcctcgcaggcacaactagctaatcacacttatttcagtaataagctttgggaacaacttgaacaatttgcagatctaatggcaaaaggtgctacagaacaaattattgatgctttgcggcaagtcattattgattttaatgataacttaactgaacagtttggtgaaaactttaaagcacttgatgcctctgtaaaaaaacttgttgagtggcaggaaaattataaaacgcaagttgagcagatgtcagaacaatatcaacaaagtgttgagtccctggttgaaacaaaaactgcggttgccgggatttgggaagaatgtaaagaaattcctctggctatgtctgaactgcgtgaagtgcttcaggtgaaccaacatcaaatcagcgaactctcccgccatttagaaacctttgttgccatccgcgataaagctacaaccgtattacctgaaatacaaaacaaaatggctgaagtgggtgaactgctgaaatccggagctgcaaatgtcagtgcatcccttgagcaaaccagtcagcaaatacttcttaatgcagattcaatgcgcgtggccctggatgaaggtaccgaaggattcagacaatcggttacccaaacacaacaagcatttgcctcgatggcacatgatgtcagcaattcctccgaaaccctgaccagcacgttaggtgaaacaattactgaaatgaaacaaagtggtgaagaattcctgaaatcactggagtcgcactcgaaagaattgcatagaaatatggaacaaaatacgactaatgtgattgatatgttcagtaagactggtgaaaagattaaccatcaactatccagtaatgccgataatatgtttgattcaatccagacatcatttgataaggcaagtgcagggctggcttctcaagtcagagaatcaattgaaaaatttgctctatccatcaacgagcagttacatgcttttgagcaggcaactgaacgtgagatgaaccgtgaaatgcaatcattaggtaatgctctgctttcaatcagcaaaggttttgtcggtaactatgaaaaacttattaaagattaccagatagttatggggcagttacaagctttaatttctgctaataaacatcgcgggtaa

SEQ ID NO: 12462 - DNA, 633 bp, Escherichia coli 2-011-08_S1_C1
atggcagggctgatgatggtttttatgttcatatctattgcttatatgcactacgtacgtattgaaaaagaaaaaattaaagaagttgccgtagcctacgagaacgctcagttacagctttataatgctctggatattgagtttgcaaaggatttgcaagactgggatgcagagatcgataaacagactctggaggttcgatttaaatcgccggatgttttatttggcttaggaagcacaaagcttaaaccaaagtttaaactcatacttgacgacttttttcctcgctatctaaaagtccttgataattatcaggaacacataactgaagtccgcattgaaggtcatacaagtactgactggacaggaacaacaaatcctgatattgcttattttaataacatggcactatcacaaggtcgtacacgttcagtattacaatacgtttatgatataaaaaatatcgcgacacaccaacaatgggttaaaagtaaatttgccgcagtaggttattcatctgcacatcccattcttgataaaaccggcaaggaggatcctaatcgctcccgtcgagtcaccttcaaagttgtaacaaatgccgagttgcagattagaaagattattcaggagtaa

SEQ ID NO: 12463 - DNA, 1098 bp, Escherichia coli 2-011-08_S1_C1
atgaaattatctatcgacatttcagaacttattcaattagggaagaaaatgttaccagaaggagtcgatttttttctggatgaatctcctgttgattttgagcctatagatattgagttatcttcgggtaaagaagttagtattgcagagcttgaccccggtagcagccttatctcttatcatggtcgccaggttcttttatatattcgggaccattcaggatgttatgacgctgctatcatggatggcgaaaaaggaaaacgttttcatattgcttggtgcagaactcttgatgaaatgcgacaaaagaatcgattcgaaagataccatgctactaaccgtatagatggtttattcgaaattgatgatggttccggtcgcagtcaggatactgatttacgggtatgtatgaattgtcttgagcggcttaattataaaggaagtattgacagacaaaaaagaagaggagtttttaattccttttccttaaaggagtttttttcagattatagtacctgtttctgccatatgcctaaggagaactatgataaaacaaacagtgggtatgtcgaaaactggaaagatatatctaaatcaatgcgagaaagtgctaattatatttgtaatgattgtggtgtgaatttatcgaccgcaaaaaatttatgccatgttcatcataagaacggtatcaaatatgataactcccctgaaaatctgcttgttttgtgtaaggattgtcatcgaagacaacctctccatgaaggtatatttgttacccggacagagatgtcggtaattcagcgcttacgctctcagcaagggttattaatggcagcatcctggagtgaaatatatgagcttactgattcatcagttcatggcgatataagcatgatgcaatataaaggttattgcccgcctgtaccgggattagagattcgaaactcagaacatgaaattattgcaactgtagaagcagcgtggccagagatcaaaattgcagttaatgttactcctgtcgaagttgatggatggaaaatatataccgtgggtgagcttgttaaagatgtacagggcggtattttcattacggcgtag

SEQ ID NO: 12464 - DNA, 1653 bp, Escherichia coli O145:H28 str. 4865/96; identical to SEQ ID NO: 12101

SEQ ID NO: 12465 - DNA, 633 bp, Escherichia coli O145:H28 str. 4865/96; identical to SEQ ID NO: 11463

SEQ ID NO: 12466 - DNA, 1104 bp, Escherichia coli O145:H28 str. 4865/96; identical to SEQ ID NO: 12103

SEQ ID NO: 12467 - DNA, 1653 bp, Escherichia coli; identical to SEQ ID NO: 12101

SEQ ID NO: 12468 - DNA, 633 bp, Escherichia coli; identical to SEQ ID NO: 11463

SEQ ID NO: 12469 - DNA, 1104 bp, Escherichia coli; identical to SEQ ID NO: 12103

SEQ ID NO: 12470 - DNA, 1653 bp, Escherichia coli 3-475-03_S1_C1; identical to SEQ ID NO: 11954

SEQ ID NO: 12471 - DNA, 708 bp, Escherichia coli 3-475-03_S1_C1; identical to SEQ ID NO: 11955

SEQ ID NO: 12472 - DNA, 1104 bp, Escherichia coli 3-475-03_S1_C1; identical to SEQ ID NO: 11374

SEQ ID NO: 12473 - DNA, 1497 bp, Escherichia coli 2-177-06_S3_C2; identical to SEQ ID NO: 12461

SEQ ID NO: 12474 - DNA, 708 bp, Escherichia coli 2-177-06_S3_C2
atggataagattatagggaaacaattacctaaaaaagatcaagataatgaacactgggtatccatgtcagacctaatggcagggctgatgatggtttttatgttcatatctattgcttatatgcactacgtacgtattgaaaaagaaaaaattaaagaagttgccgtagcctacgagaacgctcagttacagctttataatgctctggatattgagtttgcaaaggatttgcaagactgggatgcagagatcgataaacagactctggaggttcgatttaaatcgccggatgttttatttggcttaggaagcacaaagcttaaaccaaagtttaaactcatacttgacgacttttttcctcgctatctaaaagtccttgataattatcaggaacacataactgaagtccgcattgaaggtcatacaagtactgactggacaggaacaacaaatcctgatattgcttattttaataacatggcactatcacaaggtcgtacacgttcagtattacaatacgtttatgatataaaaaatatcgcgacacaccaacaatgggttaaaagtaaatttgccgcagtaggttattcatctgcacatcccattcttgataaaaccggcaaggaggatcctaatcgctcccgtcgagtcaccttcaaagttgtaacaaatgccgagttgcagattagaaagattattcaggagtaa

SEQ ID NO: 12475 - DNA, 1098 bp, Escherichia coli 2-177-06_S3_C2; identical to SEQ ID NO: 12463

SEQ ID NO: 12476 - DNA, 1653 bp, Escherichia coli 2-316-03_S1_C2; identical to SEQ ID NO: 11843

SEQ ID NO: 12477 - DNA, 708 bp, Escherichia coli 2-316-03_S1_C2; identical to SEQ ID NO: 11844

SEQ ID NO: 12478 - DNA, 1104 bp, Escherichia coli 2-316-03_S1_C2; identical to SEQ ID NO: 11845

SEQ ID NO: 12479 - DNA, 1653 bp, Escherichia coli 2-316-03_S1_C1; identical to SEQ ID NO: 11843

SEQ ID NO: 12480 - DNA, 633 bp, Escherichia coli 2-316-03_S1_C1; identical to SEQ ID NO: 12135

SEQ ID NO: 12481 - DNA, 1104 bp, Escherichia coli 2-316-03_S1_C1; identical to SEQ ID NO: 11845

SEQ ID NO: 12482 - DNA, 1653 bp, Escherichia coli 6-175-07_S4_C3; identical to SEQ ID NO: 11954

SEQ ID NO: 12483 - DNA, 633 bp, Escherichia coli 6-175-07_S4_C3
atggcagggctgatgatggtttttatgttcatatctattgcttatatgcactacgtacgtattgaaaaagaaaaaattaaagaagttgccgtagcctacgagaatgctcagttacagctttataatgctctggatattgagtttgcaaaggatttacaagactgggatgcagagatcgataaacagactctggaggttcgatttaaatcaccggatgttttatttggcttaggaagcacagagctaaaaccaaagtttaaactcattcttgacgacttctttcctcgctacctaaaagttctagataattatcaggaacatattactgaagtccgcattgaaggtcacacaagtactgactggacaggaacaacgaatcctgatattgcttattttaataatatggcactatcgcaaggtcgtacacgtgcagtattacaatacgtttatgacataaaaaatatcgcgacacaccaacaatgggttaaaagtaaatttgccgcagtaggttattcatctgcacatcccattcttgataaaaccggcaaagaggaccctaatcgctctcgtcgtgtcaccttcaaagttgtaacaaatgccgagttgcagattagaaagattattcaggagtaa

SEQ ID NO: 12484 - DNA, 1104 bp, Escherichia coli 6-175-07_S4_C3; identical to SEQ ID NO: 11374

SEQ ID NO: 12485 - DNA, 1653 bp, Escherichia coli 6-537-08_S4_C1; identical to SEQ ID NO: 11954

SEQ ID NO: 12486 - DNA, 633 bp, Escherichia coli 6-537-08_S4_C1; identical to SEQ ID NO: 12483

SEQ ID NO: 12487 - DNA, 1104 bp, Escherichia coli 6-537-08_S4_C1; identical to SEQ ID NO: 11374

SEQ ID NO: 12488 - DNA, 1653 bp, Escherichia coli 6-537-08_S4_C2; identical to SEQ ID NO: 11954

SEQ ID NO: 12489 - DNA, 633 bp, Escherichia coli 6-537-08_S4_C2; identical to SEQ ID NO: 12483

SEQ ID NO: 12490 - DNA, 1104 bp, Escherichia coli 6-537-08_S4_C2; identical to SEQ ID NO: 11374

SEQ ID NO: 12491 - DNA, 1497 bp, Escherichia coli 2-177-06_S3_C3; identical to SEQ ID NO: 12461

SEQ ID NO: 12492 - DNA, 708 bp, Escherichia coli 2-177-06_S3_C3; identical to SEQ ID NO: 12474

SEQ ID NO: 12493 - DNA, 1098 bp, Escherichia coli 2-177-06_S3_C3; identical to SEQ ID NO: 12463

SEQ ID NO: 12494 - DNA, 1653 bp, Escherichia coli 1-250-04_S3_C2; identical to SEQ ID NO: 11954

SEQ ID NO: 12495 - DNA, 708 bp, Escherichia coli 1-250-04_S3_C2; identical to SEQ ID NO: 11955

SEQ ID NO: 12496 - DNA, 1104 bp, Escherichia coli 1-250-04_S3_C2; identical to SEQ ID NO: 12439

SEQ ID NO: 12497 - DNA, 1653 bp, Escherichia coli 3-475-03_S1_C2; identical to SEQ ID NO: 11843

SEQ ID NO: 12498 - DNA, 708 bp, Escherichia coli 3-475-03_S1_C2; identical to SEQ ID NO: 11844

SEQ ID NO: 12499 - DNA, 1104 bp, Escherichia coli 3-475-03_S1_C2; identical to SEQ ID NO: 11845

SEQ ID NO: 12500 - DNA, 1653 bp, Escherichia coli 4-203-08_S3_C3; identical to SEQ ID NO: 11954

SEQ ID NO: 12501 - DNA, 708 bp, Escherichia coli 4-203-08_S3_C3; identical to SEQ ID NO: 11955

SEQ ID NO: 12502 - DNA, 1104 bp, Escherichia coli 4-203-08_S3_C3; identical to SEQ ID NO: 11374

SEQ ID NO: 12503 - DNA, 1653 bp, Escherichia coli 4-203-08_S3_C2; identical to SEQ ID NO: 11954

SEQ ID NO: 12504 - DNA, 621 bp, Escherichia coli 4-203-08_S3_C2; identical to SEQ ID NO: 12441

SEQ ID NO: 12505 - DNA, 1104 bp, Escherichia coli 4-203-08_S3_C2; identical to SEQ ID NO: 11374

SEQ ID NO: 12506 - DNA, 1653 bp, Escherichia coli 6-175-07_S4_C1; identical to SEQ ID NO: 11954

SEQ ID NO: 12507 - DNA, 708 bp, Escherichia coli 6-175-07_S4_C1; identical to SEQ ID NO: 11955

SEQ ID NO: 12508 - DNA, 1104 bp, Escherichia coli 6-175-07_S4_C1; identical to SEQ ID NO: 11374

SEQ ID NO: 12509 - DNA, 1653 bp, Escherichia coli 6-175-07_S4_C2; identical to SEQ ID NO: 11954

SEQ ID NO: 12510 - DNA, 708 bp, Escherichia coli 6-175-07_S4_C2; identical to SEQ ID NO: 11955

SEQ ID NO: 12511 - DNA, 1104 bp, Escherichia coli 6-175-07_S4_C2; identical to SEQ ID NO: 11374

SEQ ID NO: 12512 - DNA, 1653 bp, Escherichia coli O157:H7 str. SS17; identical to SEQ ID NO: 11366

SEQ ID NO: 12513 - DNA, 708 bp, Escherichia coli O157:H7 str. SS17; identical to SEQ ID NO: 11367

SEQ ID NO: 12514 - DNA, 1104 bp, Escherichia coli O157:H7 str. SS17; identical to SEQ ID NO: 11368

SEQ ID NO: 12515 - DNA, 1653 bp, Escherichia coli O157:H7 str. EDL933; identical to SEQ ID NO: 11366

SEQ ID NO: 12516 - DNA, 618 bp, Escherichia coli O157:H7 str. EDL933; identical to SEQ ID NO: 11517

SEQ ID NO: 12517 - DNA, 1104 bp, Escherichia coli O157:H7 str. EDL933; identical to SEQ ID NO: 11368

SEQ ID NO: 12518 - DNA, 1653 bp, Escherichia coli; identical to SEQ ID NO: 11366

SEQ ID NO: 12519 - DNA, 708 bp, Escherichia coli; identical to SEQ ID NO: 11472

SEQ ID NO: 12520 - DNA, 1104 bp, Escherichia coli; identical to SEQ ID NO: 11392

SEQ ID NO: 12521 - DNA, 1653 bp, Escherichia coli
atgctggcacagctttttgaacaattgtttaaaacaacagacgcgctccttatcacgaatttttttatctgggttgttatatcggtttttttgtttgcgttatggtgtgataagcgaaatatacatagtgagtttcgggagtatgctccgaccctgatgggggcattaggtatacttggcacctttaccggaattattattggattgcttaattttgataccgaaagtattgataccagtatccccgtattattagatggcctgaaaacagctttcattacaagtattgtaggtatgttttttgccattttatttaatggagtggatgttttctttttcgccaataaacgaactgagttagcagaaaataccccgggggctgttacgcctgaacatatctatcgtgagttaaaagagcaaaaccaaacactggataaattagtctcaggaattaatggggatggtgaaggttctcttattgctcaaataaaattacttcgtactgaaattaacgatgcctcacaagaacaattagatagtcactctcattttagtaataaactttgggaacagttgcaacaatttgcagaccttatggcaaaaggtgctacagaacagattattgatgctttgcgacaagttattattgattttaatgaaaatttaactgaacaatttggtgaaaactttaaagcacttgatgcttctgtaaagaaacttgttgagtggcagggaaattataaaacgcaagttgaacagatgtcagaacaatatcaacaatgtgtcgaatccctggttgaaacaaaaactgcggttgccgggatttgggaagaatgtaattttattcctctggctatgtcttcactgcgtgaagtgcttcaggtgaatcaacatcaaattagcgaactctctcgtcatctggaaacttttgctgccatccgggatagagctataaccgtgttacctgaaatacagaacaaaatggctgaagtaggtgaactgttgaaatccggagcggcaaatgttagtgcatctcttgaacaaaccagccagcaaatacttctcaatgcagattcaatgcgtgtggccctggatgaaggtacagaaggattcaggcaatcggttacccagacacaacaggcatttgcctcgatggcacatgatgtcagcaattcctccgaaaccctaaccagcacgttaggtgaaacaattactgaaatgaaacaaagtggtgaagaattcctgaaatcactagagtcgcactcgaaagaattgcatagaaatatggaacaaaatacgactaatgtgattgatatgttcagtaagactggtgaaaagattaaccatcaactatccagtcatgccgataatatgtttgattcaatccagacatcatttgataaggcaagtgcagggctgacttctcaagtcagagaggcaattgaaaaatttgcactatcgatcaatgaacagttacatgcttttgaacaggcaactgagcgtgaaatgaatcgtgaaatgcaatcattaggtaatgctctgctttcgatcagcaaaggttttgttaataattatgaaaaacttattaaagattatcagatagttatggggcagttacaaacattgatttctgctaataaacatcgcgggtga

SEQ ID NO: 12522 - DNA, 708 bp, Escherichia coli
atggataaaattatagggaaacaattatccccaaaaaagcaagataatgaacactgggtatccatgtcagatttaatggcagggctgatgatggttttcatgtttatatctgttgcttatatgcattacgtgcgtattgaaaaagaaagaattaaagaagttgctgtagcctatgaaaatgctcaattacagctttataatgctctggatattgagtttgcaaaggatttacaagactgggatgcagagatcgataaacagactctggaagttcgatttaaatcaccggatgttttatttggcttaggaagcacagagctaaaaccaaagtttaaactcattcttgacgacttctttcctcgctatctaaaagttcttgataattatcaggaacatattactgaagtccgcattgaaggtcacacaagtactgactggacaggaacaacgaatcctgatatcgcttattttaataatatggcactgtcgcaaggtcgtacgcgagcagtattacaatacgtttatggcataaaaaatatcgtggcacaccaacagtgggttaaaaacaaatttgccgcagtgggttattcatcagcacatccgattcttgataagaccggcaaggaggatcctaaccgctctcgtcgtgtcaccttcaaagttgtaacaaatgccgagttgcagatcagaaagattattcaggagtaa

SEQ ID NO: 12523 - DNA, 1098 bp, Escherichia coli
ttgaagttatctatcaacatttcagaacttattcaattagggaagaaaatgttaccagaaggagtcgatttttttctggatgaatctcctgttggtcttgagcccatagatattgagttatccacaagtaaagaagttagtattgctgatcttgatcccggtagcggccttatatcttatcatggtcggcaggttcttttatatattcgtgatcattcggggtgttatgatgcgaccatcgtagatggcaaaaaaggaaaacgttatcatattgcctggtgcagaactcttgatgaaatgcggcagaagaatcgattcgaaagatatcatgccactaaccgtatagatggtttatttgaaattgacgatggctcaggccgaagccaggatgcagatttacgggtatgtatgaattgtctggagcgacttaattataaaggaagtgttgacagacaaaaaagaagagagaatttcaattcattttctttaaatgattttttttcagattatagtgtctgttttcgtcatatgccaaagggaatttatgataaaacaaatagtggatatgttgaaaactggaaagatatatctaaattaatgcgagaaaaggctaattatatttgtaatgactgtggtgtaaatttatcaacagctaaaaacttatgtcatgttcaccataaaaatggtattaaatatgataatcaccatgaaaatttgtgtgtcctgtgtaaggattgtcatcgtaaacagccccttcacgaaggcatgtttgttacccaaagtgagatggttatcattcaacgtttgcgttcccaacaagggctattaaaagccgaatcctggaatgagatatatgatctaactgatccatccgttcatggtgatattaatatgatgcaacataaaggctttcagcttccggttcttgggttagatcttcaaaactcagaacataaagttattgcaactgtagaggctgcatggccaggtcttaaaattgcagttaatcttattcctgctaaagttgagggatggaaaatatataccgcaggtgaacttattaaagatatacagtccggcatcttcaccgcagtgtag

SEQ ID NO: 12524 - DNA, 1653 bp, Escherichia coli; identical to SEQ ID NO: 11471

SEQ ID NO: 12525 - DNA, 708 bp, Escherichia coli; identical to SEQ ID NO: 11472

SEQ ID NO: 12526 - DNA, 1104 bp, Escherichia coli; identical to SEQ ID NO: 11392

SEQ ID NO: 12527 - DNA, 1653 bp, Escherichia coli O157:H7 str. SS52; identical to SEQ ID NO: 11366

SEQ ID NO: 12528 - DNA, 708 bp, Escherichia coli O157:H7 str. SS52; identical to SEQ ID NO: 11367

SEQ ID NO: 12529 - DNA, 1104 bp, Escherichia coli O157:H7 str. SS52; identical to SEQ ID NO: 11368

SEQ ID NO: 12530 - DNA, 1653 bp, Escherichia coli; identical to SEQ ID NO: 11366

SEQ ID NO: 12531 - DNA, 708 bp, Escherichia coli; identical to SEQ ID NO: 11472

SEQ ID NO: 12532 - DNA, 1104 bp, Escherichia coli
atgaaattatctatcgacctttcagaacttattcaattagggaagaaaatgttaccagaaggagtcgatttttttctggatgaatcccctattgactttgatcctatagatattgagttatccacgggtaaagaagttagtatcgaagatcttgaccctggtagcgggcttatctcttatcatggccgccaggttcttttatatattcgagaccattcagggcgttatgatgcggctatcgtagatggcgaaaaaggaaaacgttttcatattgcctggtgcagaactcttgatgaaatgcgccataaaaatcgatttgaaaggtatcatgcaactaaccgcatagatggtttattcgaaattgatgatggttcaggtcggagccaggatgttgatttacgggtatgtatgaattgcctcgaacgacttaattataaaggaagtattgataaacaacgaaaaagagagatttttaaatcattctcattaaatgagtttttttcagattatagtacctgttttcgtcatatgcctaagggtatctatgacaaaacaaatagtgggtatgtcgaaaactggaaggaaatatctaaagaaatacgagaaaaggccaattatgtttgtaatgattgtggcgtgaatttatcaaccgccaaaaacttgtgccatgtccatcataaaaatggcatcaaatatgataatcaccatgaaaaccttcttgttctgtgcaaggattgccatcgaaaacagcccctccacgaaggtatattcgttacccaagctgagatggctatcattcaacgtttacgttcccaacaagggctattaaaagcagaatcctggaatgaaatatatgacctgactgatccatcagtgcatggtgatattaatatgatgcaacataaaggctttcaacctcctgttcctgggttagatcttcaaaactcagaacatgaaattattgcaaccgtagaagctgcatggccaggccttaaaattgcagttaaccttactcccgccgaagtcgaaggatggagaatatataccgtgggtgagctggttaaagaaatacaaaccggagcctttacgccagcaactttgtaa

SEQ ID NO: 12533 - DNA, 1653 bp, Escherichia coli; identical to SEQ ID NO: 11366

SEQ ID NO: 12534 - DNA, 708 bp, Escherichia coli; identical to SEQ ID NO: 11367

SEQ ID NO: 12535 - DNA, 1104 bp, Escherichia coli; identical to SEQ ID NO: 11368

SEQ ID NO: 12536 - DNA, 1653 bp, Escherichia coli; identical to SEQ ID NO: 11366

SEQ ID NO: 12537 - DNA, 708 bp, Escherichia coli; identical to SEQ ID NO: 11367

SEQ ID NO: 12538 - DNA, 1104 bp, Escherichia coli; identical to SEQ ID NO: 11368

SEQ ID NO: 12539 - DNA, 1653 bp, Escherichia coli; identical to SEQ ID NO: 11432

SEQ ID NO: 12540 - DNA, 708 bp, Escherichia coli; identical to SEQ ID NO: 11385

SEQ ID NO: 12541 - DNA, 1104 bp, Escherichia coli; identical to SEQ ID NO: 11386

SEQ ID NO: 12542 - DNA, 1653 bp, Escherichia coli
atgttagcacagctttttgagcagttgtttcaatcgatagactctacactgatcaccaatattttcatctgggctgttatattcgtatttttatcagcgtggtggtgtgacaaaaaaaatatacatagtaagtttagagaatatgctccaaccttaatgggggcattaggtattctgggtactttcattggtattattattggtttactcaattttaataccgaaagtattgataccagcatccccgtattattaggtggcctaaaaacagcattcattacaagcattgtaggtatgttttttgccattttatttaatggaatggatgctttcttttttgccaataaacgaagtgcgttagcagaaaataaccctgaatctgttacacctgaacatatctatcatgaattaaaagagcagaaccagactctgactaaattagtctcgggtattaacggtgatagtgaaggttctcttattgctcaaataaaattactacgtactgatattagcgattcctcgcaggcacaattagctaatcacactcatttcagtaataagctttgggaacaacttgaacaatttgcagatctaatggcaaaaggtgctacagaacaaattattgatgctttgcgacaagtcattattgattttaatcaaaatttaactgaacagtttggtgaaaactttaaagctcttgatgcctctgtaaaaaaacttgttgagtggcagggaaattataaaacgcaaattgagcagatgtcagaacaatatcaacaaagtgtcgagtccctggttgaaacaaaaactgcggttgcagggatttgggaagaatgtaaagaaattcctctggctatgtctgaactgcgtgaagtgcttcaggtgaaccaacatcaaatcagcgaactctcccgccatttagaaacctttgtcgccatccgcgataaagctacaaccgtattacctgaaatacagaacaaaatggctgaagtgggtgaactgctgaaatccggagctgcaaatgttagtgcatctcttgagcaaaccagccagcaaatacttcttaatgcagattcaatgcgcgttgccctggatgaaggtaccgaaggattcagacaatcggttacccaaacacaacaagcatttgcctcgatggcacatgatgtcagcaattcctccgaaaccctaaccagcacgttaggtgaaacaattactgaaatgaaacaaagtggtgaagaattcctgaaatcactagagtcgcactcgaaagaattgcatagaaatatggaacaaaatacgacgaatgtgattgatatgttcagtaagactggtgaaaagattaaccatcaactatccagtaatgccgataatatgtttgattcaatccagacatcatttgataaggcaagtgcagggctgacttctcaagtcagagaatcaattgaaaaatttgctctatccatcaacgagcagttacatgcttttgagcaagcaactgaacgtgaaatgaaccgtgaaatgcaatcattaggtaatgctctgctttcaatcagcaaaggttttgtcggtaactatgaaaaacttattaaagattaccaaatagttatggggcagttacaagcattaatttctgctaataaacatcgcgggtaa

SEQ ID NO: 12543 - DNA, 708 bp, Escherichia coli; identical to SEQ ID NO: 11472

SEQ ID NO: 12544 - DNA, 1104 bp, Escherichia coli; identical to SEQ ID NO: 12103

SEQ ID NO: 12545 - DNA, 1653 bp, Escherichia coli; identical to SEQ ID NO: 12101

SEQ ID NO: 12546 - DNA, 708 bp, Escherichia coli; identical to SEQ ID NO: 11472

SEQ ID NO: 12547 - DNA, 1104 bp, Escherichia coli; identical to SEQ ID NO: 12103

SEQ ID NO: 12548 - DNA, 1653 bp, Escherichia coli O157:H7; identical to SEQ ID NO: 11366

SEQ ID NO: 12549 - DNA, 708 bp, Escherichia coli O157:H7; identical to SEQ ID NO: 11367

SEQ ID NO: 12550 - DNA, 1104 bp, Escherichia coli O157:H7
atgaaattatctatcgacatttcagaacttattcaattagggaagaaaatgttaccagaaggagtcgatttttttcttgatgaatcccctattgactttgatcctatagatattgagttatccacgggtaaagaagttagtatcgaagatcttgaccctggtagcgggcttatctcttatcatggccgccaggttcttttatatattcgggaccattcagggcgttatgatgcggctatcgtagatggcgaaaaaggaaaacgttttcatattgcctggtgcagaactcttgatgaaatgcgccataaaaatcgatttgaaaggtatcatgcaactaaccgcatagatggtttattcgaaattgatgatggttcaggtcggagccaggatgttgatttacgggtatgtatgaattgcctcgaacgacttaattataaaggaagtattgataaacaacgaaaaagagagatttttaaatcattctcattaaatgagtttttttcagattatagtacttgttttcgtcatatgcctaagggtatctatgacaaaacaaatagtgggtatgtcgaaaactggaaggaaatatctaaagaaatacgagaaaaggcaaattatgtttgtaatgattgtggcgtgaatttatcaaccgccaaaaacttgtgccatgtccatcataaaaatggcatcaaatatgataatcaccatgaaaaccttcttgttctgtgcaaggattgccatcgaaaacagcccctccacgaaggtatattcgttacccaagcagagatggctatcattcaacgtttacgttcccaacaagggttattaaaagcagaatcctggaatgaaatatatgacctgactgatccatcagtgcatggtgatattaatatgatgcaacataaaggctttcaacctcctgttcctgggttagatcttccaaactcagaacatgaaattattgcaaccgtagaagctgcatggccaggccttaaaattgcagttaaccttactcccgccgaagtcgaaggatggagaatatataccgtgggtgagctggttaaagaaatacaaacaggagcctttacgccagcaaaattgtaa

SEQ ID NO: 12551 - DNA, 1653 bp, Escherichia coli O157:H7; identical to SEQ ID NO: 11366

SEQ ID NO: 12552 - DNA, 708 bp, Escherichia coli O157:H7; identical to SEQ ID NO: 11367

SEQ ID NO: 12553 - DNA, 1104 bp, Escherichia coli O157:H7; identical to SEQ ID NO: 11368

SEQ ID NO: 12554 - DNA, 1653 bp, Escherichia coli; identical to SEQ ID NO: 11366

SEQ ID NO: 12555 - DNA, 708 bp, Escherichia coli; identical to SEQ ID NO: 11367

SEQ ID NO: 12556 - DNA, 1104 bp, Escherichia coli; identical to SEQ ID NO: 11368

SEQ ID NO: 12557 - DNA, 1653 bp, Escherichia coli O157:H7; identical to SEQ ID NO: 11366

SEQ ID NO: 12558 - DNA, 708 bp, Escherichia coli O157:H7; identical to SEQ ID NO: 11367

SEQ ID NO: 12559 - DNA, 447 bp, Escherichia coli O157:H7
atgaaattatctatcgacatttcagaacttattcaattagggaagaaaatgttaccagaaggagtcgatttttttctggatgaatcccctattgactttgatcctatagatattgagttatccacgggtaaagaagttagtatcgaagatcttgaccctggtagcgggcttatctcttatcatggccgccaggttcttttatatattcgggaccattcagggcgttatgatgcggctatcgtagatggcgaaaaaggaaaacgttttcatattgcctggtgcagaactcttgatgaaatgcgccataaaaatcgatttgaaaggtatcatgcaactaaccgcatagatggtttattcgaaattgatgatggttcaggtcggagccaggatgttgatttacgggtatgtatgaattgcctcgaacgacttaattataaaggaagtatt

SEQ ID NO: 12560 - DNA, 1653 bp, Escherichia coli; identical to SEQ ID NO: 12101

SEQ ID NO: 12561 - DNA, 708 bp, Escherichia coli; identical to SEQ ID NO: 11472

SEQ ID NO: 12562 - DNA, 1104 bp, Escherichia coli; identical to SEQ ID NO: 12103

SEQ ID NO: 12563 - DNA, 1653 bp, Escherichia coli; identical to SEQ ID NO: 12101

SEQ ID NO: 12564 - DNA, 708 bp, Escherichia coli; identical to SEQ ID NO: 11472

SEQ ID NO: 12565 - DNA, 1104 bp, Escherichia coli; identical to SEQ ID NO: 12103

SEQ ID NO: 12566 - DNA, 1653 bp, Escherichia coli; identical to SEQ ID NO: 12101

SEQ ID NO: 12567 - DNA, 708 bp, Escherichia coli; identical to SEQ ID NO: 11472

SEQ ID NO: 12568 - DNA, 1104 bp, Escherichia coli; identical to SEQ ID NO: 12103

SEQ ID NO: 12569 - DNA, 1653 bp, Escherichia coli; identical to SEQ ID NO: 12101

SEQ ID NO: 12570 - DNA, 708 bp, Escherichia coli; identical to SEQ ID NO: 11472

SEQ ID NO: 12571 - DNA, 1104 bp, Escherichia coli; identical to SEQ ID NO: 12103

SEQ ID NO: 12572 - DNA, 1653 bp, Escherichia coli; identical to SEQ ID NO: 12101

SEQ ID NO: 12573 - DNA, 708 bp, Escherichia coli; identical to SEQ ID NO: 11472

SEQ ID NO: 12574 - DNA, 1104 bp, Escherichia coli; identical to SEQ ID NO: 12103

SEQ ID NO: 12575 - DNA, 1653 bp, Escherichia coli
atgttagcgcagctttttgagcagttgtttcaatcgatagactctacactgatcaccaatattttcatctgggctgttatattcgtatttttatcagcgtggtggtgtgacaaaaaaaatatacatagtaagtttagagaatatgctccaaccttaatgggggcattaggtattctgggtactttcattggtattattattgggttactcaattttaatactgaaagtattgataccagcatccccgtattattaggcggcctaaaaacagcattcattacaagcattgtaggtatgttttttgccattttatttaatggaatggatgctttcttttttgccaataaacgaagtgcgttagcagaaaataaccctgaatctgttacacctgaacatatctatcatgaattaaaagagcagaaccagactctgactaaattagcctcgggtattaacggtgatagtgaaggttctcttattgctcaaataaaattactacgtactgagattagcgattcctcgcaggcacaattagctaatcacactcatttcagtaataagctttgggaacaacttgaacaatttgcagatctaatggcaaaaggtgctacagaacaaattattgatgctttacgacaagtcattattgattttaatgaaaatttaactgaacagtttggtgaaaactttaaagcacttgatgcctctgtaaaaaaacttgttgagtggcaggaaaattataaaacgcaagttgagctgatgtcagaacaatatcaacaaagtgtcgagtccctagttgaaacaaaaactgcggttgccgggatttgggaagaatgtaaagaaattcctctggctatgtctgaactgcgtgaagtgcttcaggtgaaccaacatcaaatcagcgaactctcccgccatttagaaacctttgtcgccatccgcgataaagctacaaccgtattacctgaaatacagaacaaaatggctgaagtgggtgaactgctgaaatccggagctgcaaatgttagtgcatctcttgagcaaaccagccagcaaatacttcttaatgcagattcaatgcgcgtggccctggatgaaggtaccgaaggattcagacaatcggttacccaaacacaacaagcatttgcctcgatggcacatgaggtcagcaattcctccgaaactctaaccagcacgttaggtgaaacaattactgaaatgaaacaaagtggtgaagaattcctgaagtcactagagtcgcactcgaaagaattgcatagaaatatggaacaaaatacgactaatgtaattgatatgttcagtaagactggtgaaaagattaaccatcaactatccagtaatgccgataatatgtttgattcaatccagacatcatttgataaggcaagtgcagggctgacttctcaagtcagagaatcaattgaaaaatttgctctatccatcaacgagcagttacatgcttttgagcaagcaactgaacgtgagatgaaccgtgaaatgcaatcattaggtaatgctctgctttcaatcagcaaaggttttgtcggtaactatgaaaaacttattaaagattaccaaatagttatggggcagttacaagcattaatttctgctaataaacatcgagggtaa

SEQ ID NO: 12576 - DNA, 708 bp, Escherichia coli
atggataagattatagggaaacaattacctaaaaaagatcaagataatgaacactgggtatccatgtcagacctaatggcagggctgatgatggtttttatgttcatatctattgcttatatgcactacgtacgtattgaaaaagaaaaaattaaagaagttgccgtagcctacgagaatgctcagttacagctttataatgctctggatattgagtttgcaaaggatttgcaagactgggatgcagagatcgataagcagactctggaggttcgatttaaatcaccggatgttttatttggcttaggaagcacagagcttaaaccaaagtttaaactcattcttgacgacttctttcctcgctacctaaaagttcttgataattatcaggaacatattactgaagtccgcattgaaggtcacacaagtactgactggacaggaacaacgaatcctgatattgcttattttaataatatggcactatcgcaaggtcgtacacgtgcagtattacaatacgtttatgacataaaaaatatcgcaacacaccaacaatgggttaaaagtaaatttgccgcagtaggttattcatctgcacatcccattcttgataaaaccggcaaggaggatcctaatcgctctcgtcgtgtcaccttcaaagttgtaacaaatgccgagttgcagattagaaagattattcaggagtaa

SEQ ID NO: 12577 - DNA, 1104 bp, Escherichia coli
atgaaattatctatcgacatttcagaacttattcaactagggaagaaaatgttaccagaaggagtcgatttttttctggatgaatcccctattgactttgatcctatagatattgagttatccacgggtaaagaagttagtatcgaagatcttgaccctggtagcgggcttatctcttatcatggccgccaggttcttttatatattcgggaccattcagggcgttatgatgcggctatcgtagatggcgaaaaaggaaaacgttttcatattgcctggtgcagaactcttgatgaaatgcgccataaaaatcgatttgaaaggtatcatgcaactaaccgcatagatggtttattcgaaattgatgatggttcaggtcggagccaggatgttgatttacgggtatgtatgaattgcctcgaacgacttaattataaaggaagtattgataaacaacgaaaaagagagatttttaaatcattctcattaaatgagtttttttcagattatagtacctgttttcgtcatatgcctaagggtatctatgacaaaacaaatagtgggtatgtcgaaaactggaaagatatatctaaatcaatacgagaaaaggtcaagtatacttgtaatgattgtggtgtgaatttatcaaccgccaaaaacttgtgccatgtccatcataaaaatggcatcaaatatgataatcaccatgaaaaccttcttgttctgtgtaaggattgccatcgtaaacagcccctccatgaaggtatattcgttacgcaagctgagatggctatcattcaacgtttacgttcccaacaagggttattaaaagccgaatcctggaatgaaatatatgacctgactgatccatcagtacatggtgatattaatatgatgcaacataaaggctttcaacctcctgttcctgggttagatcttcaaaactcagaacatgaaattattgcaaccgtagaagcagcatggccaggccttaaaattgcagttaaccttactcccgccgaagtcgaaggatggagaatatataccgtgggtgagctggttaaagaaatacaaaccggagcctttacgtcagcaacgttgtaa

SEQ ID NO: 12578 - DNA, 1653 bp, Escherichia coli; identical to SEQ ID NO: 11366

SEQ ID NO: 12579 - DNA, 708 bp, Escherichia coli; identical to SEQ ID NO: 11367

SEQ ID NO: 12580 - DNA, 1104 bp, Escherichia coli; identical to SEQ ID NO: 11368

SEQ ID NO: 12581 - DNA, 1653 bp, Escherichia coli; identical to SEQ ID NO: 11366

SEQ ID NO: 12582 - DNA, 708 bp, Escherichia coli; identical to SEQ ID NO: 11367

SEQ ID NO: 12583 - DNA, 1104 bp, Escherichia coli; identical to SEQ ID NO: 11368

SEQ ID NO: 12584 - DNA, 1653 bp, Escherichia coli; identical to SEQ ID NO: 11432

SEQ ID NO: 12585 - DNA, 708 bp, Escherichia coli; identical to SEQ ID NO: 11385

SEQ ID NO: 12586 - DNA, 1104 bp, Escherichia coli; identical to SEQ ID NO: 11386

SEQ ID NO: 12587 - DNA, 1653 bp, Escherichia coli; identical to SEQ ID NO: 11366

SEQ ID NO: 12588 - DNA, 708 bp, Escherichia coli; identical to SEQ ID NO: 11367

SEQ ID NO: 12589 - DNA, 1104 bp, Escherichia coli; identical to SEQ ID NO: 11368

SEQ ID NO: 12590 - DNA, 1653 bp, Escherichia coli; identical to SEQ ID NO: 11366

SEQ ID NO: 12591 - DNA, 708 bp, Escherichia coli; identical to SEQ ID NO: 11367

SEQ ID NO: 12592 - DNA, 1104 bp, Escherichia coli; identical to SEQ ID NO: 11368

SEQ ID NO: 12593 - DNA, 1653 bp, Escherichia coli; identical to SEQ ID NO: 11366

SEQ ID NO: 12594 - DNA, 708 bp, Escherichia coli; identical to SEQ ID NO: 11367

SEQ ID NO: 12595 - DNA, 1104 bp, Escherichia coli; identical to SEQ ID NO: 11368

SEQ ID NO: 12596 - DNA, 1653 bp, Escherichia coli; identical to SEQ ID NO: 11366

SEQ ID NO: 12597 - DNA, 708 bp, Escherichia coli; identical to SEQ ID NO: 11367

SEQ ID NO: 12598 - DNA, 1104 bp, Escherichia coli; identical to SEQ ID NO: 11368

SEQ ID NO: 12599 - DNA, 1653 bp, Escherichia coli; identical to SEQ ID NO: 11366

SEQ ID NO: 12600 - DNA, 708 bp, Escherichia coli; identical to SEQ ID NO: 11367

SEQ ID NO: 12601 - DNA, 1104 bp, Escherichia coli; identical to SEQ ID NO: 11368

SEQ ID NO: 12602 - DNA, 1653 bp, Escherichia coli; identical to SEQ ID NO: 11366

SEQ ID NO: 12603 - DNA, 708 bp, Escherichia coli; identical to SEQ ID NO: 11367

SEQ ID NO: 12604 - DNA, 1104 bp, Escherichia coli; identical to SEQ ID NO: 11368

SEQ ID NO: 12605 - DNA, 1653 bp, Escherichia coli; identical to SEQ ID NO: 11366

SEQ ID NO: 12606 - DNA, 708 bp, Escherichia coli; identical to SEQ ID NO: 11367

SEQ ID NO: 12607 - DNA, 1104 bp, Escherichia coli; identical to SEQ ID NO: 11368

SEQ ID NO: 12608 - DNA, 1653 bp, Escherichia coli; identical to SEQ ID NO: 11366

SEQ ID NO: 12609 - DNA, 708 bp, Escherichia coli; identical to SEQ ID NO: 11367

SEQ ID NO: 12610 - DNA, 1104 bp, Escherichia coli; identical to SEQ ID NO: 11368

SEQ ID NO: 12611 - DNA, 1653 bp, Escherichia coli; identical to SEQ ID NO: 11366

SEQ ID NO: 12612 - DNA, 708 bp, Escherichia coli; identical to SEQ ID NO: 11367

SEQ ID NO: 12613 - DNA, 1104 bp, Escherichia coli; identical to SEQ ID NO: 11368

SEQ ID NO: 12614 - DNA, 1653 bp, Escherichia coli; identical to SEQ ID NO: 11432

SEQ ID NO: 12615 - DNA, 708 bp, Escherichia coli; identical to SEQ ID NO: 11385

SEQ ID NO: 12616 - DNA, 1104 bp, Escherichia coli; identical to SEQ ID NO: 11386

SEQ ID NO: 12617 - DNA, 1653 bp, Escherichia coli; identical to SEQ ID NO: 11366

SEQ ID NO: 12618 - DNA, 708 bp, Escherichia coli; identical to SEQ ID NO: 11367

SEQ ID NO: 12619 - DNA, 1104 bp, Escherichia coli
atgaaattatctatcgacatttcagaacttattcaattagggaagaaaatgttaccagaaggagtcgatttttttctggatgaatcccctattgactttgatcctatagatattgagttatccacgggtaaagaagttagtatcgaagatcttgaccctggtagcgggcttatctcttatcatggccgccaggttcttttatatattcgggaccattcagggcgttatgatgcggctatcgtagatggcgaaaaaggaaaacgttttcatattgcctggtgcagaactcttgatgaaatgcgccataaaaatcgatttgaaaggtatcatgcaactaaccgcatagatggtttattcgaaattgatgatggttcaggtcggagccaggatgttgatttacgggtatgtatgaattgcctcgaacgacttaattataaaggaagtattgataaacaacgaaaaagagagatttttaaatcattctcattaaatgagtttttttcagattatagtacttgttttcgtcatatgcctaagggtatctatgacaaaacaaatagtgggtatgtcgaaaactggaaggaaatatctaaagaaatacgagaaaaggcaaattatgtttgtaatgattgtggcgtgaatttatcaaccgccaaaaacttgtgccatgtccatcataaaaatggcatcaaatatgataatcaccatgaaaaccttcttgttctgtgcaaggattgccatcgaaaacagcccctccacgaaggtatattcgttacccaaacagagatggctatcattcaacgtttacgttcccaacaagggttattaaaagcagaatcctggaatgaaatatatgacctgactgatccatcagtgcatggtgatattaatatgatgcaacataaaggctttcaacctcctgttcctgggttagatcttccaaactcagaacatgaaattattgcaaccgtagaagctgcatggccaggccttaaaattgcagttaaccttactcccgccgaagtcgaaggatggagaatatataccgtgggtgagctggttaaagaaatacaaacaggagcctttacgccagcaaaattgtaa

SEQ ID NO: 12620 - DNA, 1653 bp, Escherichia coli; identical to SEQ ID NO: 11432

SEQ ID NO: 12621 - DNA, 708 bp, Escherichia coli; identical to SEQ ID NO: 11385

SEQ ID NO: 12622 - DNA, 1104 bp, Escherichia coli; identical to SEQ ID NO: 11386

SEQ ID NO: 12623 - DNA, 1653 bp, Escherichia coli; identical to SEQ ID NO: 11432

SEQ ID NO: 12624 - DNA, 708 bp, Escherichia coli; identical to SEQ ID NO: 11385

SEQ ID NO: 12625 - DNA, 1104 bp, Escherichia coli; identical to SEQ ID NO: 11386

SEQ ID NO: 12626 - DNA, 1653 bp, Escherichia coli; identical to SEQ ID NO: 11432

SEQ ID NO: 12627 - DNA, 708 bp, Escherichia coli; identical to SEQ ID NO: 11385

SEQ ID NO: 12628 - DNA, 1104 bp, Escherichia coli; identical to SEQ ID NO: 11386

SEQ ID NO: 12629 - DNA, 1653 bp, Escherichia coli; identical to SEQ ID NO: 11366

SEQ ID NO: 12630 - DNA, 708 bp, Escherichia coli; identical to SEQ ID NO: 11367

SEQ ID NO: 12631 - DNA, 1104 bp, Escherichia coli; identical to SEQ ID NO: 11368

SEQ ID NO: 12632 - DNA, 1653 bp, Escherichia coli; identical to SEQ ID NO: 11366

SEQ ID NO: 12633 - DNA, 708 bp, Escherichia coli; identical to SEQ ID NO: 11367

SEQ ID NO: 12634 - DNA, 1104 bp, Escherichia coli; identical to SEQ ID NO: 11368

SEQ ID NO: 12635 - DNA, 1653 bp, Escherichia coli; identical to SEQ ID NO: 11366

SEQ ID NO: 12636 - DNA, 708 bp, Escherichia coli; identical to SEQ ID NO: 11367

SEQ ID NO: 12637 - DNA, 1104 bp, Escherichia coli; identical to SEQ ID NO: 11368

SEQ ID NO: 12638 - DNA, 1653 bp, Escherichia coli
atgttagcgcagctttttgagcagttgtttcaatcgatagactctacactgatcaccaatattttcatctgggctgttatattcgtatttttatcagcgtggtggtgtgacaaaaaaaatatacatagtaagtttagagaatatgctccaaccttaatgggggcattaggtattctgggtactttcattggtattattattggtttactcaattttaataccgaaagtattgataccagcatccccgtattattaggtggcctaaaaacagcattcattacaagcattgtaggtatgttttttgccattttatttaatggaatggatgctttcttttttgccaataaacgaagtgcgttagcagaaaataaccctgaatctgttacacctgaacatatctatcatgaattaaaagagcagaaccagactctgactaaattagtctcgggtattaatggtgatagtgaaggttctcttattgctcaaataaaattactacgtactgagattagcgattcctcgcaggcacaattagctaatcacactcatttcagtaataagctttgggaacaacttgaacaatttgcagatctaatggcaaaaggtgctacagaacaaattattgatgctttgcgacaagtcattattgattttaatcaaaatttaactgaacagtttggtgaaaactttaaagctcttgatgcctctgtaaaaaaacttgttgagtggcagggaaattataaaacgcaaattgagcagatgtcagaacaatatcaacaaagtgtcgagtccctggttgaaacaaaaactgcggttgcagggatttgggaagaatgtaaagaaattcctctggctatgtctgaactgcgtgaagtgcttcaggtgaaccaacatcaaatcagcgaactctcccgccatttagaaacctttgtcgccatccgcgataaagctacaaccgtattacctgaaatacagaacaaaatggctgaagtgggtgaactgctgaaatccggagctgcaaatgttagtgcatctcttgagcaaaccagccagcaaatacttcttaatgcagattcaatgcgcgttgccctggatgaaggtaccgaaggattcagacaatcggttacccaaacacaacaagcatttgcctcgatggcacatgatgtcagcaattcctccgaaaccctaaccagcacgttaggtgaaacaattactgaaatgaaacaaagtggtgaagaattcctgaaatcactagagtcgcactcgaaagaattgcatagaaatatggaacaaaatacgacgaatgtgattgatatgttcagtaagactggtgaaaagattaaccatcaactatccagtaatgccgataatatgtttgattcaatccagacatcatttgataaggcaagtgcagggctgacttctcaagtcagagaatcaattgaaaaatttgctctatccatcaacgagcagttacatgcttttgagcaagcaactgaacgtgaaatgaaccgtgaaatgcaatcattaggtaatgctctgctttcaatcagcaaaggttttgtcggtaactatgaaaaacttattaaagattaccaaatagttatggggcagttacaagcattaatttctgctaataaacatcgcgggtaa

SEQ ID NO: 12639 - DNA, 708 bp, Escherichia coli; identical to SEQ ID NO: 11367

SEQ ID NO: 12640 - DNA, 1104 bp, Escherichia coli; identical to SEQ ID NO: 11368

SEQ ID NO: 12641 - DNA, 1653 bp, Escherichia coli O157:H7; identical to SEQ ID NO: 11366

SEQ ID NO: 12642 - DNA, 708 bp, Escherichia coli O157:H7; identical to SEQ ID NO: 11367

SEQ ID NO: 12643 - DNA, 1104 bp, Escherichia coli O157:H7; identical to SEQ ID NO: 11368

SEQ ID NO: 12644 - DNA, 1653 bp, Escherichia coli; identical to SEQ ID NO: 11366

SEQ ID NO: 12645 - DNA, 708 bp, Escherichia coli; identical to SEQ ID NO: 11367

SEQ ID NO: 12646 - DNA, 1104 bp, Escherichia coli; identical to SEQ ID NO: 11368

SEQ ID NO: 12647 - DNA, 1653 bp, Escherichia coli; identical to SEQ ID NO: 12101

SEQ ID NO: 12648 - DNA, 708 bp, Escherichia coli; identical to SEQ ID NO: 11472

SEQ ID NO: 12649 - DNA, 1104 bp, Escherichia coli; identical to SEQ ID NO: 12103

SEQ ID NO: 12650 - DNA, 1653 bp, Escherichia coli; identical to SEQ ID NO: 12101

SEQ ID NO: 12651 - DNA, 708 bp, Escherichia coli; identical to SEQ ID NO: 11472

SEQ ID NO: 12652 - DNA, 1104 bp, Escherichia coli; identical to SEQ ID NO: 12103

SEQ ID NO: 12653 - DNA, 1653 bp, Escherichia coli; identical to SEQ ID NO: 11366

SEQ ID NO: 12654 - DNA, 708 bp, Escherichia coli; identical to SEQ ID NO: 11367

SEQ ID NO: 12655 - DNA, 1104 bp, Escherichia coli; identical to SEQ ID NO: 11368

SEQ ID NO: 12656 - DNA, 1653 bp, Escherichia coli; identical to SEQ ID NO: 11366

SEQ ID NO: 12657 - DNA, 708 bp, Escherichia coli; identical to SEQ ID NO: 11367

SEQ ID NO: 12658 - DNA, 1104 bp, Escherichia coli; identical to SEQ ID NO: 11368

SEQ ID NO: 12659 - DNA, 1653 bp, Escherichia coli; identical to SEQ ID NO: 11366

SEQ ID NO: 12660 - DNA, 708 bp, Escherichia coli; identical to SEQ ID NO: 11367

SEQ ID NO: 12661 - DNA, 1104 bp, Escherichia coli; identical to SEQ ID NO: 11368

SEQ ID NO: 12662 - DNA, 1653 bp, Escherichia coli; identical to SEQ ID NO: 11366

SEQ ID NO: 12663 - DNA, 708 bp, Escherichia coli; identical to SEQ ID NO: 11367

SEQ ID NO: 12664 - DNA, 1104 bp, Escherichia coli; identical to SEQ ID NO: 11368

SEQ ID NO: 12665 - DNA, 1653 bp, Escherichia coli; identical to SEQ ID NO: 11366

SEQ ID NO: 12666 - DNA, 708 bp, Escherichia coli; identical to SEQ ID NO: 11367

SEQ ID NO: 12667 - DNA, 1104 bp, Escherichia coli; identical to SEQ ID NO: 11368

SEQ ID NO: 12668 - DNA, 1653 bp, Escherichia coli; identical to SEQ ID NO: 11366

SEQ ID NO: 12669 - DNA, 708 bp, Escherichia coli; identical to SEQ ID NO: 11367

SEQ ID NO: 12670 - DNA, 1104 bp, Escherichia coli; identical to SEQ ID NO: 11368

SEQ ID NO: 12671 - DNA, 1653 bp, Escherichia coli; identical to SEQ ID NO: 11879

SEQ ID NO: 12672 - DNA, 708 bp, Escherichia coli; identical to SEQ ID NO: 11367

SEQ ID NO: 12673 - DNA, 1104 bp, Escherichia coli; identical to SEQ ID NO: 11368

SEQ ID NO: 12674 - DNA, 1653 bp, Escherichia coli; identical to SEQ ID NO: 11366

SEQ ID NO: 12675 - DNA, 708 bp, Escherichia coli; identical to SEQ ID NO: 11367

SEQ ID NO: 12676 - DNA, 1104 bp, Escherichia coli; identical to SEQ ID NO: 11368

SEQ ID NO: 12677 - DNA, 1653 bp, Escherichia coli O157:H7; identical to SEQ ID NO: 11366

SEQ ID NO: 12678 - DNA, 708 bp, Escherichia coli O157:H7; identical to SEQ ID NO: 11367

SEQ ID NO: 12679 - DNA, 1104 bp, Escherichia coli O157:H7; identical to SEQ ID NO: 11368

SEQ ID NO: 12680 - DNA, 1653 bp, Escherichia coli
atgttagcgcagctttttgagcagttgtttcaatcgatagactctacactgatcaccaatattttcatctgggctgttatattcgtatttttatcagcgtggtggtgtgacaaaaaaaatatacatagtaagtttagagaatatgctccaaccttaatgggggcattaggtattctgggtactttcattggtattattattggtttactcaattttaataccgaaagtattgataccagcatccccgtattattaggtggcctaaaaacagcattcattacaagcattgtaggtatgttttttgccattttatttaatggaatggatgctttcttttttgccaataaacgaagtgcgttagcagaaaataaccctgaatctgttacacctgaacatatctatcatgaattaaaagagcagaaccagactctgactaaattagtctcgggtattaacggtgatagtgaaggttctcttattgctcaaataaaattactacgtactgagattagcgattcctcgcaggcacaattagctaatcacactcatttcagtaataagctttgggaacaacttgaacaatttgcagatctaatggcaaaaggtgctacagaacaaattattgatgctttgcgacaagtcattattgattttaatcaaaatttaactgaacagtttggtgaaaactttaaagctcttgatgcctctgtaaaaaaacttgttgagtggcagggaaattataaaacgcaaattgagcagatgtcagaacaatatcaacaaagtgtcgagtccctggttgaaacaaaaactgcggttgcagggatttgggaagaatgtaaagaaattcctctggctatgtctgaactgcgtgaagtgcttcaggtgaaccaacatcaaatcagcgaactctcccgccatttagaaacctttgtcgccatccgcgataaagctacaaccgtattacctgaaatacagaacaaaatggctgaagtgggtgaactgctgaaatccggagctgcaaatgttagtgcatctcttgagcaaaccagccagcaaatacttcttaatgcagattcaatgcgcgttgccctggatgaaggtaccgaaggattcagacaatcggttacccaaacacaacaagcatttgcctcgatggcgcatgatgtcagcaattcctccgaaaccctaaccagcacgttaggtgaaacaattactgaaatgaaacaaagtggtgaagaattcctgaaatcactagagtcgcactcgaaagaattgcatagaaatatggaacaaaatacgacgaatgtgattgatatgttcagtaagactggtgaaaagattaaccatcaactatccagtaatgccgataatatgtttgattcaatccagacatcatttgataaggctggtgcagggctgacttctcaagtcagagaatcaattgaaaaatttgctctatccatcaacgagcagttacatgcttttgagcaagcaactgaacgtgaaatgaaccgtgaaatgcaatcattaggtaatgctctgctttcaatcagcaaaggttttgtcggtaactatgaaaaacttattaaagattaccaaatagttatggggcagttacaagcattaatttctgctaataaacatcgagggtaa

SEQ ID NO: 12681 - DNA, 708 bp, Escherichia coli; identical to SEQ ID NO: 11955

SEQ ID NO: 12682 - DNA, 1104 bp, Escherichia coli; identical to SEQ ID NO: 11374

SEQ ID NO: 12683 - DNA, 1653 bp, Escherichia coli; identical to SEQ ID NO: 12680

SEQ ID NO: 12684 - DNA, 708 bp, Escherichia coli; identical to SEQ ID NO: 11955

SEQ ID NO: 12685 - DNA, 1104 bp, Escherichia coli; identical to SEQ ID NO: 11374

SEQ ID NO: 12686 - DNA, 1653 bp, Escherichia coli; identical to SEQ ID NO: 11843

SEQ ID NO: 12687 - DNA, 708 bp, Escherichia coli; identical to SEQ ID NO: 11844

SEQ ID NO: 12688 - DNA, 1104 bp, Escherichia coli; identical to SEQ ID NO: 11845

SEQ ID NO: 12689 - DNA, 1653 bp, Escherichia coli; identical to SEQ ID NO: 11375

SEQ ID NO: 12690 - DNA, 708 bp, Escherichia coli; identical to SEQ ID NO: 11376

SEQ ID NO: 12691 - DNA, 1104 bp, Escherichia coli; identical to SEQ ID NO: 11377

SEQ ID NO: 12692 - DNA, 1653 bp, Escherichia coli; identical to SEQ ID NO: 11843

SEQ ID NO: 12693 - DNA, 708 bp, Escherichia coli; identical to SEQ ID NO: 11844

SEQ ID NO: 12694 - DNA, 1104 bp, Escherichia coli; identical to SEQ ID NO: 11845

SEQ ID NO: 12695 - DNA, 1653 bp, Escherichia coli; identical to SEQ ID NO: 11375

SEQ ID NO: 12696 - DNA, 708 bp, Escherichia coli; identical to SEQ ID NO: 11376

SEQ ID NO: 12697 - DNA, 1104 bp, Escherichia coli; identical to SEQ ID NO: 11377

SEQ ID NO: 12698 - DNA, 1653 bp, Escherichia coli; identical to SEQ ID NO: 11843

SEQ ID NO: 12699 - DNA, 708 bp, Escherichia coli; identical to SEQ ID NO: 11844

SEQ ID NO: 12700 - DNA, 1104 bp, Escherichia coli; identical to SEQ ID NO: 11845

SEQ ID NO: 12701 - DNA, 1653 bp, Escherichia coli; identical to SEQ ID NO: 11843

SEQ ID NO: 12702 - DNA, 708 bp, Escherichia coli; identical to SEQ ID NO: 11844

SEQ ID NO: 12703 - DNA, 1104 bp, Escherichia coli; identical to SEQ ID NO: 11845

SEQ ID NO: 12704 - DNA, 1653 bp, Escherichia coli; identical to SEQ ID NO: 11843

SEQ ID NO: 12705 - DNA, 708 bp, Escherichia coli; identical to SEQ ID NO: 11844

SEQ ID NO: 12706 - DNA, 1104 bp, Escherichia coli; identical to SEQ ID NO: 11845

SEQ ID NO: 12707 - DNA, 1653 bp, Escherichia coli; identical to SEQ ID NO: 11843

SEQ ID NO: 12708 - DNA, 708 bp, Escherichia coli; identical to SEQ ID NO: 11844

SEQ ID NO: 12709 - DNA, 1104 bp, Escherichia coli; identical to SEQ ID NO: 11845

SEQ ID NO: 12710 - DNA, 1653 bp, Escherichia coli; identical to SEQ ID NO: 11843

SEQ ID NO: 12711 - DNA, 708 bp, Escherichia coli; identical to SEQ ID NO: 11844

SEQ ID NO: 12712 - DNA, 1104 bp, Escherichia coli; identical to SEQ ID NO: 11845

SEQ ID NO: 12713 - DNA, 1653 bp, Escherichia coli; identical to SEQ ID NO: 11843

SEQ ID NO: 12714 - DNA, 708 bp, Escherichia coli; identical to SEQ ID NO: 11844

SEQ ID NO: 12715 - DNA, 1104 bp, Escherichia coli; identical to SEQ ID NO: 11845

SEQ ID NO: 12716 - DNA, 1653 bp, Escherichia coli; identical to SEQ ID NO: 11843

SEQ ID NO: 12717 - DNA, 708 bp, Escherichia coli; identical to SEQ ID NO: 11844

SEQ ID NO: 12718 - DNA, 1104 bp, Escherichia coli; identical to SEQ ID NO: 11845

SEQ ID NO: 12719 - DNA, 1653 bp, Escherichia coli; identical to SEQ ID NO: 11375

SEQ ID NO: 12720 - DNA, 708 bp, Escherichia coli; identical to SEQ ID NO: 11376

SEQ ID NO: 12721 - DNA, 1104 bp, Escherichia coli; identical to SEQ ID NO: 11377

SEQ ID NO: 12722 - DNA, 1653 bp, Escherichia coli; identical to SEQ ID NO: 11366

SEQ ID NO: 12723 - DNA, 708 bp, Escherichia coli; identical to SEQ ID NO: 11367

SEQ ID NO: 12724 - DNA, 1104 bp, Escherichia coli; identical to SEQ ID NO: 11368

SEQ ID NO: 12725 - DNA, 1653 bp, Escherichia coli; identical to SEQ ID NO: 11417

SEQ ID NO: 12726 - DNA, 708 bp, Escherichia coli
atggataagattatagggaaacaattacctaaaaaagatcaagataatgaacactgggtatccatgtcagacctaatggcagggctgatgatggtttttatgttcatatctattgcttatatgcactacgtacgtattgaaaaagaaaaaattaaagaagttgccgtagcctacgagaatgctcagttacagctttataatgctctggatattgagtttgcaaaggatttgcaagactgggatgcagagatcgataagcagactctggaggttcgatttaaatcaccggatgttttatttggcttaggaagcacagagcttaaaccaaagtttaaactcattcttgacgacttctttcctcgctacctaaaagttcttgataattatcaagaacatattactgaagtccgcattgaaggtcacacaagtactgactggactggaacaacgaatcctgatattgcttattttaataatatggcactatcacaaggtcgtacacgtgcagtattacaatacgtttatgatataaaaaatatcgcgacacaccaacaatgggttaaaagtaaatttgccgcagtaggttattcatctgcacatcccattcttgataaaaccggcaaggaggatcctaatcgctctcgtcgagtcaccttcaaagttgtaacaaatgccgagttgcagattagaaagattattcaggagtaa

SEQ ID NO: 12727 - DNA, 1104 bp, Escherichia coli; identical to SEQ ID NO: 11419

SEQ ID NO: 12728 - DNA, 1653 bp, Escherichia coli
atgttagcgcagctttttgagcagttgtttcaatcgatagactctacactgatcaccaatattttcatctgggctgttatattcgtatttttatcagcgtggtggtgtgacaaaaaaaatatacatagtaagtttagagaatatgctccaaccttaatgggggcattaggtattctgggtactttcattggtattattattgggttactcaattttaatactgaaagtattgataccagcatccccgtattattaggcggcctaaaaacagcattcattacaagcattgtaggtatgttttttgccattttatttaatggaatggatactttcttttttgccaataaacgaagtgcgttagcagaaaataaccctgaatctgttacacctgaacatatctatcatgaattaaaagagcagaaccagactctgactaaattagtctcgggtattaacggtgatagtgaaggttctcttattgctcaaataaaattactacgtactgagattagcgattcctcgcaggcacaattagctaatcacactcatttcagtaataagctttgggaacaacttgaacaatttgcagatctaatggcaaaaggtgctacagaacaaattattgatgctttacgacaagtcattattgattttaatgaaaatttaactgaacagtttggtgaaaactttaaagcacttgatgcctctgtaaaaaaacttgttgagtggcaggaaaattataaaacgcaagttgagctgatgtcagaacaatatcaacaaagtgtcgagtctctggttgaaacaaaaactgcggttgccgggatttgggaagaatgtaaagaaattcctctggctatgtctgaactgcgtgaagtgcttcaggtgaaccaacatcaaatcagcgaactctcccgccatttagaaacctttgtcgctatccgcgataaagctacaaccgtattacctgaaatacagaacaaaatggctgaagtgggtgaactgctgaaatccggagctgcaaatgttagtgcatctcttgagcaaaccagccagcaaatacttcttaatgcagattcaatgcgcgtggccctggatgaaggtaccgaaggattcagacaatcggttacccaaacacaacaagcatttgcctcgatggcacatgatgtcagcaattcctccgaaactctaaccagcacgttaggtgaaacaattactgaaatgaaacaaagtggtgaagaattcctgaagtcactagagtcgcactcgaaagaattgcatagaaatatggaacaaaatacgactaatgtaattgatatgttcagtaagactggtgaaaagattaaccatcaactatccagtaatgccgataatatgtttgattcaatccagacatcatttgataaggcaagtgcagggctgacttctcaagtcagagaatcaattgaaaaatttgctctatccatcaacgagcagttacatgcttttgagcaagcaactgaacgtgagatgaaccgtgaaatgcaatcattaggtaatgctctgctttcaatcagcaaaggttttgtcggtaactatgaaaaacttattaaagattaccaaataattatggggcagttacaagcattaatttctgctaataaacatcgagggtaa

SEQ ID NO: 12729 - DNA, 708 bp, Escherichia coli; identical to SEQ ID NO: 11376

SEQ ID NO: 12730 - DNA, 1104 bp, Escherichia coli; identical to SEQ ID NO: 11920

SEQ ID NO: 12731 - DNA, 1653 bp, Escherichia coli; identical to SEQ ID NO: 12521

SEQ ID NO: 12732 - DNA, 708 bp, Escherichia coli; identical to SEQ ID NO: 12522

SEQ ID NO: 12733 - DNA, 1098 bp, Escherichia coli; identical to SEQ ID NO: 12523

SEQ ID NO: 12734 - DNA, 1653 bp, Escherichia coli; identical to SEQ ID NO: 12521

SEQ ID NO: 12735 - DNA, 708 bp, Escherichia coli; identical to SEQ ID NO: 12522

SEQ ID NO: 12736 - DNA, 1098 bp, Escherichia coli; identical to SEQ ID NO: 12523

SEQ ID NO: 12737 - DNA, 1653 bp, Klebsiella oxytoca G54
atgttagctcagctttttgaacatttgtttcaatcaattgattccacactcgtcacaaacatttttatttgggctgttatctttgtattttgtgctgcttggtggtgtgatcataaaaatattcataacaaattccgagagtatgctccaacattaatgggagcattaggtatactgggtacttttatcggtatcattattggattgcttaattttaatactgaaagcattgataccagcatccctgtattattaggaggtcttaagacagcattcattaccagtattgttggaatgtttttcgcaattttgtttaatggattagatgctttcttttttgccaataaacgtcgcctattggaggcgaatactccagcgtcggttactcctgagcatatccatcaagaattaaaagaacaaaataaacatttagtgaagttaatctctggcatgagtggtagcgaagagggttccattgttgcccaaataaaactactgcgtaatgaaatcagtgatgcctcccgggcacaaatatctaaccattctaatttcagtaataagctctgggaacaattacagcaatttgcagacctgatggcaaaaggagcaaccgaacaaattatcgatgcccttaggcaagttattattgatttcaacaataatttaactgaacaattcggtgagaatttcaaagcacttgatacttctgtaaaaaaacttgtcgactggcaggaaaactataaaaaccaagttgagcagatgggtgagcaataccaacaaagtgttgaatctttagtcgaaaccagaaaagctgtcgcagggatctgggaagaatgcaaagagattcctcttgcgatggctgagcttcgtgacgtgctgcaagtgaatcagcaccaaattggtgaactctcccgtcatctggaaacctttgtcgccatacgcgataaggcaactgatgttttacctgaaattcaaacaaaaatgtctgaagtgggtgaactcttaaaattaggtgccgcgaatgtcagcgcgtctcttgaacaaaccagtcagcagatacttatcaatgctgattcgatgcgagttgcccttgatgaaggcactgaaggtttcagacagtcagtgactcagacacagcaagcttttgcatcaatggcgcatgatgtcagcaattcctctgaaactcttaccagcacgctaggagacactattacggagatgaaacaaagtggtgatgagttcctgaaatctctggaaacacactcaagagaattgcatcgaaatatggaacaaaacactactaatgttattgatatgttcagtaagacaggtgagaaatttaatcaacaattatccagcaatgccgataacatgtttggttcaatgcaatcttcgtttgataaagcaagcgcgggactgacatctcaggtgaaagagtcaattgagaaatttggtagttcaattaacgagcagttacatgcttttgagcaagcaacagagcgcgaaatgaatcgtgagatgcaatcactagggaatgctctgctctcaatcagcaaaggttttgtcggtaactacgagcgactactcaaagagtatcaagctgtcatgggacaactgcaaacattaatttctgctaatcaaaaacgaggataa

SEQ ID NO: 12738 - DNA, 708 bp, Klebsiella oxytoca G54; identical to SEQ ID NO: 11352

SEQ ID NO: 12739 - DNA, 1092 bp, Klebsiella oxytoca G54
atgaaattatctatcgacatttctgaacttattcagttaggaagaaaaatgttgccggaaggcgttgattttttccttgacgaaacgcctgtagtttttgatccaattgatatcgaactttctgcaggtaaagaagttagaattgaagatcttgatcccggcagtggtcttatttcctaccaagggagacaggttcttttgtatattagagaccataccggacgttatgatgcggctattgaagatggagagaaagggaagcgatttcatattgcctggtgtagaacattagatgacatgcgccaaaaaaatcgatttgaacggtatcatgcaacaaatcgtgttgatggcttatttgaaattgatgatgggctcggtcggagccaagatgtcgctcttaaagtttgtatgaactgcctagaacgccttaattacaaaggaagtatagataaacaacagaaaagagtaatatttaaatcattttctttgaatgaatttttttcagattatagtacctgctttcgccatatgcctaaaggaatctatgataaatcaaatagcggctatgtagaaaattggaaggatatatccagaactactcgagaacaagctaactacaaatgtagtgattgtggtgtgaatttaatgtccatgaaaagtctatgcgatgttcaccacaaaaatggtattaaatatgataactcagctgaaaatctactcgtcttgtgtaaagattgccatcgaaagcaacctttgcacgaaggaatatttgtcactcaggctgacatggcaatcattcaacgcttacgttcccaacaagggcttttgaaggctgaatcctggaaggatatttacgatctgacagatccatcgattcatggtgatataaacattatgcaacacaaaggatacccgccaccagttccgggattagacttacaaaacgcggagcatgaaattattgctaccgtagaagctgcctggccggtttcaaaaattgcagtaaatttaacaccggtaaaagtcgatggttggaaagtattctccgtgggagaactcgttaaagaaatacaatctggggttattttctaa

SEQ ID NO: 12740 - DNA, 1653 bp, Klebsiella oxytoca 10-5249
atgttagctcagctttttgaacatttgtttcaatcaattgattccacactcgtcacaaacatttttatttgggctgttatctttgtattttgtgctgcttggtggtgtgatcataaaaatattcataacaaattccgagagtatgctccaacattaatgggagcattaggtatactgggtacttttatcggtatcattattggattgcttaattttaatactgaaagcattgataccagcatccctgtattattaggaggtcttaagacagcattcattaccagtattgttggaatgtttttcgcaattttgtttaatggattagatgctttcttttttgccaataaacgtcgcctattggaggcgaatactccagcgtcggttactcctgagcatatccatcaagaattaaaagaacaaaataaacatttagtgaagttaatctctggcatgagtggtagcgaagagggttccattgttgcccaaataaaactactgcgtaatgaaatcagtgatgcctcccgggcacaaatatctaaccattctaatttcagtaataagctctgggaacaattacagcaatttgcagacctgatggcaaaaggagcaaccgaacaaattatcgatgcccttaggcaagttattattgatttcaacaataatttaactgaacaattcggtgagaatttcaaagcacttgatacttctgtaaaaaaacttgtcgactggcaggaaaactataaaaaccaagttgagcagatgggtgagcaataccaacaaagtgttgaatctttagtcgaaaccagaaaagctgtcgcagggatctgggaagaatgcaaagagattcctcttgcgatggctgagcttcgtgacgtgctgcaagtgaatcagcaccaaattggtgaactctcccgtcatctagaaacctttgtcgccatacgcgataaggcaactgatgttttacctgaaattcaaacaaaaatgtctgaagtgggtgaactcttaaaattaggtgccgcgaatgtcagcgcgtctcttgaacaaaccagtcagcagatacttatcaatgctgattcgatgcgagttgcccttgatgaaggcactgaaggtttcagacagtcagtgactcagacacagcaagcttttgcatcaatggcgcatgatgtcagcaattcctctgaaactcttaccagcacgctaggagacactattacggagatgaaacaaagtggtgatgagttcctgaaatctctggaaacacactcaagagaattgcatcgaaatatggaacaaaacactactaatgttattgatatgttcagtaagacaggtgagaaatttaatcaacaattatccagcaatgccgataacatgtttggttcaatgcaatcttcgtttgataaagcaagcgcgggactgacatctcaggtgaaagagtcaattgagaaatttggtagttcaattaacgagcagttacatgcttttgagcaagcaacagagcgcgaaatgaatcgtgagatgcaatcactagggaatgctctgctctcaatcagcaaaggttttgtcggtaactacgagcgactactcaaagagtatcaagctgtcatgggacaactgcaaacattaatttctgctaatcaaaaacgaggataa

SEQ ID NO: 12741 - DNA, 708 bp, Klebsiella oxytoca 10-5249; identical to SEQ ID NO: 11352

SEQ ID NO: 12742 - DNA, 1092 bp, Klebsiella oxytoca 10-5249; identical to SEQ ID NO: 12739

SEQ ID NO: 12743 - DNA, 1653 bp, Klebsiella pneumoniae MGH 18
atgttagctcagctttttgaacatttgtttcaatcaattgattccacactcgtcacaaacatttttatttgggctgttatctttgtattttgtgctgcttggtggtgtgatcataaaaatattcataacaaattccgagagtacgctccaacattaatgggagcattaggcatactgggtacttttatcggtatcattattggattgcttaattttaatactgaaagcattgataccagcatccctgtattattaggaggtcttaagacagcattcattaccagtattgttggaatgtttttcgcaattttgtttaatggattagatgctttcttttttgccaataaacgtcgcctattggaggcgaatactccagcgtcggttactcctgagcatatccatcaagaattaaaagaacaaaataaacatttagtgaagttaatctctggcatgagtggtagcgaagagggttccattgttgcccaaataaaactactgcgtaatgaaatcagtgatgcctcccgggcacaaatatctaaccattctaatttcagtaataagctctgggaacaattacagcaatttgcagacctgatggcaaaaggagcaaccgaacaaattatcgatgcccttaggcaagttattattgatttcaacaataatttaactgaacaattcggtgagaatttcaaagcacttgatacttctgtaaaaaaacttgtcgactggcaggaaaactataaaaaccaagttgagcagatgggtgagcaataccaacaaagtgttgaatctttagtcgaaaccagaaaagctgtcgcagggatctgggaagaatgcaaagagattcctcttgcgatggctgagcttcgtgacgtgctgcaagtgaatcagcaccaaattggtgaactctcccgtcatctggaaacctttgtcgccatacgcgataaggcaactgatgttttacctgaaattcaaacaaaaatgtctgaagtgggtgaactcttaaaattaggtgccgcgaatgtcagcgcgtctcttgaacaaaccagtcagcagatacttatcaatgctgattcgatgcgagttgcccttgatgaaggcactgaaggtttcagacagtcagtgactcagacacagcaagcttttgcatcaatggcccatgatgtcagcaattcctctgaaactcttaccagcacgctaggagacactattacggagatgaaacaaagtggtgatgagttcctgaaatctctggaaacacactcaagagaattgcatcgaaatatggaacaaaacactactaatgttattgatatgttcagtaagacaggtgagaaatttaatcaacaattatccagcaatgccgataacatgtttggttcaatgcaatcttcgtttgataaagcaagcgcgggactgacatctcaggtgaaagagtcaattgagaaatttggtagttcaattaacgagcagttacatgcttttgagcaagcaacagagcgcgaaatgaatcgtgagatgcaatcactagggaatgctctgctctcaatcagcaaaggttttgtcggtaactacgagcgactactcaaagagtatcaagctgtcatgggacaactgcaaacattaatttctgctaatcaaaaacgaggataa

SEQ ID NO: 12744 - DNA, 708 bp, Klebsiella pneumoniae MGH 18; identical to SEQ ID NO: 11352

SEQ ID NO: 12745 - DNA, 1092 bp, Klebsiella pneumoniae MGH 18
atgaaattatctatcgacatttctgaacttattcagttaggaagaaaaatgttgccggaaggcgttgattttttccttgacgaaacgcctgtagtttttgatccaattgatatcgaactttctgcaggtaaagaagttagaattgaagatcttgatcccggcagtggtcttatttcctaccaagggagacaggttcttttgtatattagagaccataccggacgttatgatgcggctattgaagatggagagaaagggaagcgatttcatattgcctggtgtagaacattagatgacatgcgccataaaaatcgatttgaacggtatcatgcaacaaatcgtgttgatggcttatttgaaattgatgatgggctcggtcggagccaagatgtcgctcttaaagtttgtatgaactgcctagaacgccttaattacaaaggaagtatagataaacaacagaaaagagtaatatttaaatcattttctttgaatgaatttttttcagattatagtacctgctttcgccatatgcctaaaggaatctatgataaatcaaatagcggctatgtagaaaattggaaggatatatccagaactactcgagaacaagctaactacaaatgtaatgattgtggtgtgaatttaatgtccatgaaaagtctatgcgatgttcaccacaaaaatggtattaaatatgataactcagctgaaaatctactcgtcttgtgtaaagattgccatcgaaagcaacctttgcacgaaggaatatttgtcactcaggctgacatggcaatcattcaacgcttacgttcccaacaagggcttttgaaggctgaatcctggaaggatatttacgatctgacagatccatcgattcatggtgatataaacattatgcaacacaaaggatacccgccaccagttccgggattagacttacaaaacgcggagcatgaaattattgctaccgtagaagctgcctggccggtttcaaaaattgcagtaaatttaacaccggtaaaagtcgatggttggaaagtattctccgtgggagaactcgttaaagaaatacaatctggggttattttctaa

SEQ ID NO: 12746 - DNA, 1653 bp, Klebsiella pneumoniae MGH 74
atgttagctcagctttttgaacatttgtttcaatcaattgattccacactcgtcacaaacatttttatttgggctgttatctttgtattttgtgctgcttggtggtgtgatcataaaaatattcataacaaattccgagagtacgctccaacattaatgggagcattaggcatactgggtacttttatcggtatcattattggattgcttaattttaatactgaaagcattgataccagcatccctgtattattaggaggtcttaagacagcattcattaccagtattgttggaatgtttttcgcaattttgtttaatggattagatgctttcttttttgccaataaacgtcgcctattggaggcgaatactccagcgtcggttactcctgagcatatccatcaagaattaaaagaacaaaataaacatttagtgaagttaatctctggcatgagtggtagcgaagagggttccattgttgcccaaataaaactactgcgtaatgaaatcagtgatgcttcccgggcacaaatatctaaccattctaatttcagtaataagctctgggaacaattacagcaatttgcagacctgatggcaaaaggagcaaccgaacaaattatcgatgcccttaggcaagttattattgatttcaacaataatttaactgaacaattcggtgagaatttcaaagcacttgatacttctgtaaaaaaacttgtcgactggcaggaaaactataaaaaccaagttgagcagatgggtgagcaataccaacaaagtgttgaatctttagtcgaaaccagaaaagctgtcgcagggatctgggaagaatgcaaagagattcctcttgcgatggctgagcttcgtgacgtgctgcaagtgaatcagcaccaaattggtgaactctcccgtcatctggaaacctttgtcgccatacgcgataaggcaactgatgttttacctgaaattcaaacaaaaatgtctgaagtgggtgaactcttaaaattaggtgccgcgaatgtcagcgcgtctcttgaacaaaccagtcagcagatacttatcaatgctgattcgatgcgagttgcccttgatgaaggcactgaaggtttcagacagtcagtgactcagacacagcaagcttttgcatcaatggcccatgatgtcagcaattcctctgaaactcttaccagcacgctaggagacactattacggagatgaaacaaagtggtgatgagttcctgaaatctctggaaacacactcaagagaattgcatcgaaatatggaacaaaacactactaatgttattgatatgttcagtaagacaggtgagaaatttaatcaacaattatccagcaatgccgataacatgtttggttcaatgcaatcttcgtttgataaagcaagcgcgggactgacatctcaggtgaaagagtcaattgagaaatttggtagttcaattaacgagcagttacatgcttttgagcaagcaacagagcgcgaaatgaatcgtgagatgcaatcactagggaatgctctgctctcaatcagcaaaggttttgtcggtaactacgagcgactactcaaagagtatcaagctgtcatgggacaactgcaaacattaatttctgctaatcaaaaacgaggataa

SEQ ID NO: 12747 - DNA, 708 bp, Klebsiella pneumoniae MGH 74
atggataaaatccttggcaagcaggcccctaaaaaagatcaagataatgaacattgggtttcaatgtcagatttaatggcaggtctgatgatggtatttatgtttatttctatcgcctacatgcactatgtgcgtattgaaaaagaaaaaattaaagaagtggctgtcgcctatgaaaatgctcaacttcaactctataatgcactagaaactgagtttacaaaggatttgccagcttgggatgctgaaattgacaaacaaactcttgaggtccgttttaaatcacccgatgtcttatttggtttaggtagcacagagcttaagccaaaatttaaacagatccttgataatttcttccctcgctaccttaaagttcttgataactaccaggaacatattactgaagtacgtattgagggacatacaagtactgactggaatggagcgtccaattctgacatggcctattttaataacatggaactctcgcaagggcgaacacgagcagtactgcagtatgtctatggtttaaaagaaagcgcagcacaccagaagtgggtaaaaagtaaatttgctgccgttggatattcttccgcacaccctattcttgataaatctggtaaagaagatcccaatcgctctcgccgagtaacatttaaagttgtaacaaatgccgagttgcagattagaaaaataattcaggagtaa

SEQ ID NO: 12748 - DNA, 1092 bp, Klebsiella pneumoniae MGH 74
atgaaattatctatcgacatttctgaacttattcagttaggaagaaaaatgttgccggaaggcgttgattttttccttgacgaaacgtctgtagtttttgatccaattgatatcgaactttctgcaggtaaagaagttagaattgaagatcttgatcccggcagtggtcttatttcctaccaagggagacaggttcttttgtatattagagaccataccggacgttatgatgcggctattgaagatggagagaaagggaagcgatttcatattgcctggtgtagaacattagatgacatgcgccaaaaaaatcgatttgaacggtatcatgcaacaaatcgtgttgatggcttatttgaaattgatgatgggctcggtcggagccaagatgtcgctcttaaagtttgtatgaactgcctagaacgccttaattacaaaggaagtatagataaacaacagaaaagagtaatatttaaatcattttctttgaatgaatttttttcagattatagtacctgctttcgccatatgcctaaaggaatctatgataaatcaaatagcggctatgtagaaaattggaaggatatatccagaactactcgagaacaagctaactacaaatgtaatgattgtggtgtgaatttaatgtccatgaaaagtctatgcgatgttcaccacaaaaatggtattaaatatgataactcagctgaaaatctactcgtcttgtgtaaagattgccatcgaaagcaacctttgcacgaaggaatatttgtcactcaggctgacatggcaatcattcaacgcttacgttcccaacaagggcttttgaaggccgaatcctggaaggatatttacgatctgacagatccatcgattcatggtgatataaacattatgcaacacaaaggatacccgccaccagttccgggattagacttacaaaacgcggagcatgaaattattgctaccgtagaagctgcctggccggtttcaaaaattgcagtaaatttaacaccggtaaaagtcgatggttggaaagtattctccgtgggagaactcgttaaagaaatacaatctggggttattttctaa

SEQ ID NO: 12749 - DNA, 1653 bp, Klebsiella pneumoniae
atgttagctcagctttttgaacatttgtttcaatcaattgattccacactcgtcacaaacatttttatttgggctgttatctttgtattttgtgctgcttggtggtgtgatcataaaaatattcatatcaaattccgagagtatgctccaacattaatgggagcattaggcatactgggtacttttatcggtatcattattggattgcttaattttaatactgaaagcattgataccagcatccctgtattattaggaggtcttaagacagcattcattaccagtattgttggaatgtttttcgcaattttgtttaatggattagatgctttcttttttgccaataaacgtcgcctattggaggcgaatactccagcgtcggttactcctgagcatatccatcaagaattaaaagaacaaaataaacatttagtgaagttaatctctggcatgagtggtagcgaagagggttccattgttgcccaaataaaactactgcgtaatgaaatcagtgatgcctcccgggcacaaatatctaaccattctaatttcagtaataagctctgggaacaattacagcaatttgcagacctgatggcaaaaggagcaaccgaacaaattatcgatgcccttaggcaagttattattgatttcaacaataatttaactgaacaattcggtgagaatttcaaagcacttgatacttctgtaaaaaaacttgtcgactggcaggaaaactataaaaaccaagttgagcagatgggtgagcaataccaacaaagtgttgaatctttagtcgaaaccagaaaagctgtcgcagggatctgggaagaatgcaaagagattcctcttgcgatggctgagcttcgtgacgtgctgcaagtgaatcagcaccaaattggtgaactctcccgtcatctggaaacctttgtcgccatacgcgataaggcaactgatgttttacctgaaattcaaacaaaaatgtctgaagtgggtgaactcttaaaattaggtgccgcgaatgtcagcgcgtctcttgaacaaaccagtcagcagatacttatcaatgctgattcgatgcgagttgcccttgatgaaggcactgaaggtttcagacagtcagtgactcagacacagcaagcttttgcatcaatggcgcatgatgtcagcaattcctctgaaactcttaccagcacgctaggagacactattacggagatgaaacaaagtggtgatgagttcctgaaatctctggaaacacactcaagagaattgcatcgaaatatggaacaaaacactactaatgttattgatatgttcagtaagacaggtgagaaatttaatcaacaattatccagcaatgccgataacatgtttggttcaatgcaatcttcgtttgataaagcaagcgcgggactgacatctcaggtgaaagagtcaattgagaaatttggtagttcaattaacgagcagctacatgcttttgagcaagcaacagagcgcgaaatgaatcgtgagatgcaatcactagggaatgctctgctctcaatcagcaaaggttttgtcggtaactacgagcgactactcaaagagtatcaagctgtcatgggacaactgcaaacattaatttctgctaatcaaaaacgaggataa

SEQ ID NO: 12750 - DNA, 708 bp, Klebsiella pneumoniae
atggataaaatccttggcaagcaggcccctaaaaaagatcaagataatgaacattgggtttcaatgtcagatttaatggcaggtctgatgatggtatttatgtttatttctatcgcctacatgcactatgtgcgtattgaaaaagaaaaaattaaagaagtggctgtcgcctatgaaaatgctcaacttcaactctataatgcactagaaactgagtttacaaaggatttgccagcttgggatgctgaaattgacaaacaaactcttgaggtccgttttaaatcacccgatgtcttatttggtttaggtagcacagagcttaagccaaaatttaaacagatccttgataatttcttccctcgctaccttaaagttcttgataactaccaggaacatattactgaagtacgcattgagggacatacaagtactgactggactggagcgtccaattctgacatggcctattttaataacatggaactctcgcaagggcgaacacgagcagtactgcagtatgtctatggtttaaaagaaagcgcagcacaccagaagtgggtaaaaagtaaatttgctgccgttggatattcttccgcacaccctattcttgataaatctggtaaagaagatcccaatcgctctcgccgagtaacatttaaagttgtaacaaatgccgagttgcagattagaaaaataattcaggagtaa

SEQ ID NO: 12751 - DNA, 1092 bp, Klebsiella pneumoniae
atgaaattatctatcgacatttctgaacttattcagttaggaagaaaaatgttgccggaaggcgttgattttttccttgacgaaacgcctgtagtttttgatccaattgatatcgaactttctgcaggtaaagaagttagaattgaagatcttgatcccggcagtggtcttatttcctaccaagggagacaggttcttttgtatattagagaccataccggacgttatgatgcggctattgaagatggagagaaagggaagcgatttcatattgcctggtgtagaacattagatgacatgcgccaaaaaaatcgatttgaacggtatcatgcaacaaatcgtgttgatggcttatttgaaattgatgatgggctcggtcggagccaagatgtcgctcttaaagtttgtatgaactgcctcgaacgccttaattacaaaggaagtatagataaacaacagaaaagagtaatatttaaatcattttctttgaatgaatttttttcagattatagtacctgctttcgccatatgcctaaaggaatctatgataaatcaaatagcggctatgtagaaaattggaaggatatatccagaactactcgagaacaagctaactacaaatgtaatgattgtggtgtgaatttaatgtccatgaaaagtctatgcgatgttcaccacaaaaatggtattaaatatgataactcagctgaaaatctactcgtcttgtgtaaagattgccatcgaaagcaacctttgcacgaaggaatatttgtcactcaggctgacatggcaatcattcaacgcttacgttcccaacaagggcttttgaaggctgaatcctggaaggatatttacgatctgacagatccatcgattcatggtgatataaacattatgcaacacaaaggatacccgccaccagttccgggattagacttacaaaacgcggagcatgaaattattgctaccgtagaagctgcctggccggtttcaaaaattgcagtaaatttaacaccggtaaaagtcgatggttggaaagtattctccgtgggagaactcgttaaagaaatacaatctggggttattttctaa

SEQ ID NO: 12752 - DNA, 1653 bp, Klebsiella pneumoniae; identical to SEQ ID NO: 12743

SEQ ID NO: 12753 - DNA, 708 bp, Klebsiella pneumoniae; identical to SEQ ID NO: 11352

SEQ ID NO: 12754 - DNA, 1092 bp, Klebsiella pneumoniae; identical to SEQ ID NO: 12745

SEQ ID NO: 12755 - DNA, 1653 bp, Serratia marcescens
atgttagcgcaactttttgaacatctgttccgttctattgattcgatgtttgtcactaatttttttatctgggcagttgtatttatatttttttctgcctggtggtgtgactacaaaaacattcacagtaaatttagggagtatgctccaacactcatgggagcattaggtatattaggcacattcattggcataataattggattgcttaattttaacactgagagtattgataccagcatcccacttctattaggtggtctaaaaacagcatttatcaccagtattatagggatgttcttcgctattttatttaacgcacttgatgcttttttcttcgcaaacaaacgagataatttaacagagagtgtgcctgaaaccataacgcctgaacatattcatcacgaattaaaagaaaacaaccaatacttggaaaagatgatttcaggtttgagtggcaatgaagaagggtccttagttgctcaggtgaaactattgcgcaatgaaataaatgatgcttctcgtgcacaactctctcatcacactgagtttagcaataagctctgggaacaattgaaacagtttgctgatttaatggcaaagggtgcaacagaacagataattgatgcacttaaacaagttattatcgattttaacaataatttaaccgaacagtttggtgaaaattttaaagctcttgatgcttcggtaaaaaaacttgtcgattggcaggataattacaagaaccaaattgagaatatgagtgaacaatatcaacaaagtgtcgactcattagttgaaacccgcggagctgttgcaggtatctgggaggaatgtaaagaaattccacttgcaatggctacattacacgatgtgttaaaagttaaccaacatcaaatcaacgagctctctcaacatcttgatgcctttgttttattacgtgataaagctacagatgcggttcctgttatccatgaaaaattggacgaggtaggcgaattgcttaaagcaggggcattgagtgtcagttcatctctggaccaaacaggggctgaattactcgccaatgcaaatgctatgcggattgctcttgatgaaggctctgaagggttcaggcagtcggttacacagactcagcaagcatttgcatcaatggctcatgatgtaagtaactcttctgaaactttaacctcaacactgggtgaaactattaccgagatgaaacaaagtggtgatgatttcctcaagtctctggaggcacattctaaagaactgcatcgtaatatggaaaaaaatacaaccgatgtgatcgagctctttagtaaaactggcgataaatttaatcaacaattatctagtaatgcagaaaatatgtttggaacaatgcaatcgtcctttgacaaggcaagtgctggtttaacctcacaggttaaagagtctgttgaacgctttggtggtgcaattaacgaacagctacatgcctttgaacaagcgactgagcgtgaaatgaatagggaaatgcaatctctagggaatgctctcctgtcaatcagccaaggatttgtcaagaactacgaccatttgattaaagagtatcaaagtgttcttgggcaactgcagccattaattaactcaagacaacaccgtggataa

SEQ ID NO: 12756 - DNA, 618 bp, Serratia marcescens
atggtatttatgtttatatccatcgcttatatgcattatgtccgtattgaaaaagaaaaaataaaggaagtggcagtcgcctatgaacaggcccagcaacaactttataatgcattaaatgttgagttctcaaaggatttgcccgattgggatgcagaaatagataaacaaactctcgaagtaagatttaaatcaccggatgttctttttggtttgggtagttcggaattgaaaccaaagtttaaagagattcttaacaatttcttcccacgatacttgaaggtactagatcagtataaagaacatatcactgaggttagaattgagggacataccagtacagattggacaggggcggctaatcaagatgaagcctactttaataatatggaattgtctcaaggacgaacccgagctgtattgcaatacgtacacagtttgaaagagtcttctgcacaccaaaagtgggtgaaaagtaagttttctgcagtgggatattcgtcttcacatccaattcttaatgcaatgggcaaagaagaccaaaaccgctcacgtcgagtaacgtttaaagtaattacaaatgccgagttgcaaattcgtcgcataattcaggaatag

SEQ ID NO: 12757 - DNA, 1092 bp, Serratia marcescens
atgaagctaactgttgatttttctgaattgattgcgttgggaaaaaaaatgcttccttccggcgctgaattttctcttgctgaagcacctgtcgtcttcgaccctattgatattgaattatccgcaggtaaagaagtcagtattgacgacctagatcctggcagtggtttaatttcctatcaaggacgccaagtccttctatatatcagggatcataccggacgctatgatgcagctattgaagatggtgagaatgggaagcgatttcatattgcctggtgtagaaaattggatgagatgcgccagaaaaaccgttttgagcgttatcatgcgacaaaccgcgttgatggtttttttgaaatagatgatggtgctggacgctatcaggatgcagacctaaaagtctgtaagttttgtttagaaagattaaattataaaggaagtattgattatcgtaccagacaaaaaatatttactcaattcaccttggatgatttcttctctcactatagcacttgctttcgccatatgccaaaaggtatttatgacaaagcaaacagtggctatgtagacaattggaaagatatttcccgctccattcgcgaacatgcaaattataaatgtaatgattgcggtgttaatttaacttcctcacgccatctctgcgacgttcatcataaaaatggggttaaatacgacaactcagcagaaaacctccatgttgtttgcaaagattgtcatcgtaaacaacctttccatgaaggtatgtttataagccaggctgacatggaaactattcaacacttgcgatctcaacaagggttattaaaggttgactcctggaaagatatttatgatctcaccgatgcatctattcacggtgatattaatattatgcagcataaaggatacccacttccggtgctaagatttgatttacaaaactccacacataagactattacaaccgtagaagcggcttggccaaaatttaaaatcgcaattaatctcacggaagtaaaagtcgagggttggaaaatattcaccgtaggtgagctcgtaaaaagcatacagtccggagttgttttctga

SEQ ID NO: 12758 - DNA, 1653 bp, Serratia marcescens; identical to SEQ ID NO: 12755

SEQ ID NO: 12759 - DNA, 618 bp, Serratia marcescens; identical to SEQ ID NO: 12756

SEQ ID NO: 12760 - DNA, 1092 bp, Serratia marcescens; identical to SEQ ID NO: 12757

SEQ ID NO: 12761 - DNA, 1653 bp, Serratia marcescens; identical to SEQ ID NO: 12755

SEQ ID NO: 12762 - DNA, 618 bp, Serratia marcescens; identical to SEQ ID NO: 12756

SEQ ID NO: 12763 - DNA, 1092 bp, Serratia marcescens; identical to SEQ ID NO: 12757

SEQ ID NO: 12764 - DNA, 1653 bp, Serratia marcescens; identical to SEQ ID NO: 12755

SEQ ID NO: 12765 - DNA, 618 bp, Serratia marcescens; identical to SEQ ID NO: 12756

SEQ ID NO: 12766 - DNA, 1092 bp, Serratia marcescens; identical to SEQ ID NO: 12757

SEQ ID NO: 12767 - DNA, 1653 bp, Serratia marcescens; identical to SEQ ID NO: 12755

SEQ ID NO: 12768 - DNA, 618 bp, Serratia marcescens; identical to SEQ ID NO: 12756

SEQ ID NO: 12769 - DNA, 1092 bp, Serratia marcescens; identical to SEQ ID NO: 12757

SEQ ID NO: 12770 - DNA, 1653 bp, Serratia marcescens; identical to SEQ ID NO: 12755

SEQ ID NO: 12771 - DNA, 618 bp, Serratia marcescens; identical to SEQ ID NO: 12756

SEQ ID NO: 12772 - DNA, 1092 bp, Serratia marcescens; identical to SEQ ID NO: 12757

SEQ ID NO: 12773 - DNA, 1653 bp, Serratia marcescens
atgttagcgcaactttttgaacatctgttccgttctattgattcgatgtttgtcactaatttttttatctgggcagttgtatttatatttttttctgcctggtggtgtgactacaaaaacattcacagtaaatttagggagtatgctccaacactcatgggagcattaggtatattaggcacattcattggcataataattggattgcttaattttaacactgagagtattgataccagcatcccacttctattaggtggtctaaaaacagcatttatcaccagtattatagggatgttcttcgctattttatttaacgcacttgatgcttttttcttcgcaaacaaacgagataatttaacagagagtgtgcctgaaaccataacgcctgaacatattcatcacgaattaaaagaaaacaaccaatacttggaaaagatgatttcaggtttgagtggcaatgaagaagggtccttagttgctcaggtgaaactattgcgcaatgaaataaatgatgcttctcgtgcacaactctctcatcacactgagtttagcaataagctctgggaacaattgaaacagtttgctgatttaatggcaaagggtgcaacagaacagataattgatgcacttaaacaagttattatcgattttaacaataatttaaccgaacagtttggtgaaaattttaaagctcttgatgcttcggtaaaaaaacttgtcgattggcaggataattacaagaaccaaattgagaatatgagtgaacaatatcaacaaagtgtcgactcattagttgaaacccgcggagctgttgcaggtatctgggaagaatgtaaagaaattccactagcaatggctgcattacacgatgtgatgaaagttaaccaacatcaaatcaacgagctatctcaacatcttgatgcctttgttttattacgtgataaagctacagatgcggttcccgttatccatgaaaaattggatgaggtaggcgaattgctcaaagcaggggcattgagtgtcagttcatctctggaccaaacaggggctgaattactcgccaatgcgaatgctatgcgaattgctcttgatgaaggctctgaagggttcaggcagtcggttacacagactcagcaagcatttgcatcaatggcccatgatgtaagtaactcttctgaaactttaacctcaacactgggtgaaactattaccgaaatgaaacaaagtggtgatgacttcctcaaatctctggaggcacattctaaagaactgcatcgtaatatggaaaaaaatacaactgatgtgatcgaactctttagtaaatccggcgataaatttaatcaacaattgtctagtaatgcagaaaatatgtttggagcgatgcaatcgtcctttgacaaagcaagtgctggtttaacttcacaggttaaagagtctgttgatcgctttggtggtgcaattaacgaacagctacatgcttttgaacaagcgactgagcgtgaaatgaatagggaaatgcaatctctggggaatgctctcctgtcaatcagccaaggatttgtcaagaactacgaccatttgatcaaagagtatcaaagtgttcttgggcagctgcagccattaattaactcaagacaacaccgcgggtaa

SEQ ID NO: 12774 - DNA, 618 bp, Serratia marcescens
atggtatttatgtttatatccatcgcttatatgcattatgtccgtattgaaaaagaaaaaataaaggaagtggcagttgcctatgaacaggcccaacaacagctttataatgcattaaatattgaattctccaatgatctacctgattgggatgcggaaatagataaacaaactctcgaagtaagatttaaatcaccggatgttctttttggtttgggcagctcggaattgaaaccaaagttcaaagagattcttaacaatttctttcctcggtacttgaaggtactagatcagtacaaagaacatatcactgaggttcgaattgaaggacataccagcacagattggacaggggcggctaaccaagatgaagcctattttaataatatggaattgtctcaaggacgcacccgagctgtattgcaatacgtacacagtttgaaagaatcttctgcgcaccaaaagtgggtgaaaagtaaattttctgcagtggggtattcgtcttcacatccaattcttaatacaatgggtaaagaagaccaaaaccgctcacgtcgagttacgtttaaagtaattacaaatgccgaattgcaaattcgtcgcataattcaggaatag

SEQ ID NO: 12775 - DNA, 1092 bp, Serratia marcescens
atgaagctaactgttgatttttctgaattgattgcgttgggaaaaaaaatgcttccttccggcgctgaattttctcttactgaagcacctgtcgtcttcgaccctattgatattgaattatccgcaggtaaagaagtcagtattgacgacctagatcctggcagtggtttaatttcctatcaaggacgccaagtccttctatatatccgggatcataccggacgctatgatgcagctattgaagatggtaagaatgggaagcgatttcatattgcctggtgtagaaaattggatgagatgcgccagaaaaaccgttttgagcgttatcatgcgacaaaccgcgttgatggtttttttgaaatagatgatggtgctggacgctatcaggatgcagacctaaaagtctgtaagctttgtttagaaagattaaattacaaaggaagtattgattatcgtaccagacaaaaaatatttactcaattcaccttgaatgatttcttctctcactatagcacttgcttccgccatatgccaaaaggtattcatgacaaagccaatagtggttatgtagacaattggaaatatatttcccgctctgttcgcgaacatgcaaattataaatgtaatgattgcggtgttaatttaacttcctcacgccatctctgcgacgttcatcataaaaatggggttaaatacgacaactcagcagaaaacctccatgttgtttgcaaagattgtcatcgcaagcaacctttccatgaaggtatgtttataagccaggctgacatggcaactattcaacacttgcgatctcaacaagggttattaaaggttgattcctggaaagatatttatgatctcaccgatgcatctattcacggtgatattaatattatgcagcataaaggatacccacttccggtgctaagatttgatttacaaaactccacacataagactattacaaccgtagaagcggcttggccaaaatttaaaatcgcaattaatctcacggaagtaaaagtcgaggattggaaaatattcaccgtaggtgagctcgtaaaaagcatacagtccggagttgttttctga

SEQ ID NO: 12776 - DNA, 1653 bp, Serratia marcescens
atgttagcgcaactttttgaacatctgttccgttctattgattcgatgtttgtcactaatttttttatctgggcagttgtatttatatttttttctgcctggtggtgtgactacaaaaacattcacagtaaatttagggagtatgctccaacactcatgggagcattaggtatattaggcacattcattggcataataattggattgcttaattttaacactgagagtattgataccagcatcccacttctattaggtggtctaaaaacagcatttatcaccagtattatagggatgttcttcgctattttatttaacgcacttgatgcttttttcttcgcaaacaaacgagataatttaacagagagtgtgcctgaaaccataacgcctgaacatattcatcacgaattaaaagaaaacaaccaatacttggaaaagatgatttcaggtttgagtggcaatgaagaagggtccttagttgctcaggtgaaactattgcgcaatgaaataaatgatgcttctcgtgcacaactctctcatcacactgagtttagcaataagctctgggaacaattgaaacagtttgctgatttaatggcaaagggtgcaacagaacagataattgatgcacttaaacaagttattatcgattttaacaataatttaaccgaacagtttggtgaaaattttaaagctcttgatgcttcggtaaaaaaacttgtcgattggcaggataattacaagaaccaaattgagaatatgagtgaacaatatcaacaaagtgtcgactcattagttgaaacccgcggagctgttgcaggtatctgggaggaatgtaaagaaattccacttgcaatggctacattacacgatgtgttaaaagttaaccaacatcaaatcaacgagctatctcaacatcttgatgcctttgttttattacgtgataaagctacagatgcggttcctgttatccatgaaaaattggacgaggtaggcgaattgcttaaagcaggggcattgagtgtcagttcatctctggaccaaacaggggctgaattactcgccaatgcaaatgctatgcggattgctcttgatgaaggctctgaagggttcaggcagtcggttacacagactcagcaagcatttgcatcaatggctcatgatgtaagtaactcttctgaaactttaacctcaacactgggtgaaactattaccgagatgaaacaaagtggtgatgatttcctcaagtctctggaggcacattctaaagaactgcatcgtaatatggaaaaaaatacaaccgatgtgatcgagctctttagtaaaactggcgataaatttaatcaacaattatctagtaatgcagaaaatatgtttggaacaatgcaatcgtcctttgacaaggcaagtgctggtttaacctcacaggttaaagagtctgttgaacgctttggtggtgcaattaacgaacagctacatgcctttgaacaagcgactgagcgtgaaatgaatagggaaatgcaatctctagggaatgctctcctgtcaatcagccaaggatttgtcaagaactacgaccatttgattaaagagtatcaaagtgttcttgggcaactgcagccattaattaactcaagacaacaccgtggataa

SEQ ID NO: 12777 - DNA, 618 bp, Serratia marcescens; identical to SEQ ID NO: 12756

SEQ ID NO: 12778 - DNA, 1092 bp, Serratia marcescens; identical to SEQ ID NO: 12757

SEQ ID NO: 12779 - DNA, 1653 bp, Serratia marcescens; identical to SEQ ID NO: 12755

SEQ ID NO: 12780 - DNA, 618 bp, Serratia marcescens; identical to SEQ ID NO: 12756

SEQ ID NO: 12781 - DNA, 1092 bp, Serratia marcescens; identical to SEQ ID NO: 12757

SEQ ID NO: 12782 - DNA, 1653 bp, Serratia marcescens; identical to SEQ ID NO: 12755

SEQ ID NO: 12783 - DNA, 618 bp, Serratia marcescens; identical to SEQ ID NO: 12756

SEQ ID NO: 12784 - DNA, 1092 bp, Serratia marcescens; identical to SEQ ID NO: 12757

SEQ ID NO: 12785 - DNA, 1653 bp, Serratia marcescens
atgttagcgcagctttttgaacatcttttccgttctattgactcgatgtttgtcactaatttttttatctgggcagttgtatttatatttttttctgcctggtggtgtgactacaaaaacattcacggtaaatttagagaatatgctccaacactcatgggagcattaggtatattgggtacattcattggcataataattggattgcttaattttaacactgagagtattgataccagtattccacttctattaggtggtctaaaaacagcatttatcaccagtattatagggatgttcttcgccattttatttaacgcacttgatgcttttttcttcgcaaacaaacgagataatttaacagagagtgtgcctgaaaccataacgcctgaacatattcatcacgaattaaaagaaaataaccaatacttggaaaagctgatttcaggtttgagtggcaatgaagaagggtccttagtcgctcaggtgaaactattacgtaatgagataaatgacgcttctcgtgcacaactctctcatcataccgagtttagcaataagctctgggaacaattgaaacagtttgctgatttaatggcccaaggtgcaactgaacagataattgatgcacttaaacaagttattatcgattttaataataatttaaccgaacaatttggtgaaaactttaaagctcttgatgcttcggtaaaaaaacttgtcgattggcaggataattacaagaaccaaattgagaatatgagtgaacaatatcaacaaagtgtcgactctttagttgaaacccgcggagctgttgcaggtatctgggaagaatgtaaagatattccactagcaatggctgcattacacgatgtgatgaaagttaaccaacatcaaatcaacgagctatctcaacatcttgatgcctttgttttgttacgtgataaagctacagatgcggttcctgttatccatgaaaaattggacgaggtaggcgaattgctcaaagcaggggcattgagtgtcagttcatctctggaccaaacaggggctgaattactcgccaatgcgaatgctatgcgaattgctcttgatgaaggctctgaagggttcaggcagtcggttacacagactcagcaagcatttgcatcaatggcccatgatgtaagtaactcttctgaaactttaacctcaacactgggtgaaactattaccgaaatgaaacaaagtggtgatgacttcctcaaatctctggaggcacattctaaagaactgcatcgtaatatggaaaaaaatacaactgatgtgatcgaactctttagtaaatccggcgataaatttaatcaacaattgtctagtaatgcagaaaatatgtttggagcgatgcaatcgtcctttgacaaagcaagtgctggtttaacttcacaggttaaagagtctgttgatcgctttggtggtgcaattaacgaacagctacatgcttttgaacaagcgactgagcgtgaaatgaatagggaaatgcaatctctggggaatgctctcctgtcaatcagccaaggatttgtcaaaaactacgaccatttgatcaaagagtatcaaagtgttcttgggcagctgcagccattaattaactcaagacaacaccgcgggtaa

SEQ ID NO: 12786 - DNA, 618 bp, Serratia marcescens
atggtatttatgtttatatccatcgcttatatgcattatgttcgtattgaaaaagaaaaaataaaagaagttgcagttgcctatgaacaggcccaacaacagctttataatgcattaaatattgaattctccaatgatctacctgattgggatgcggaaatagataaacaaactctcgaagtaagatttaaatcaccggatgttctttttggtttgggcagctcggaattgaaaccaaagttcaaagagattcttaacaatttctttcctcggtacttgaaggtactagatcagtacaaagaacatatcactgaggttcgaattgaaggacataccagcacagattggacaggggcggctaaccaagatgaagcctattttaataatatggaattgtctcaaggacgcacccgagctgtattgcaatacgtacacagtttgaaagaatcttctgcgcaccaaaagtgggtgaaaagtaaattttctgcagtggggtattcgtcttcacatccaattcttaatgcaatgggtaaagaagaccaaaaccgctcacgtcgagttacgtttaaagtaattacaaatgccgaattgcaaattcgtcgcataattcaggaatag

SEQ ID NO: 12787 - DNA, 1092 bp, Serratia marcescens
atgaagctaactgttgatttttctgaattgattgcgttgggaaaaaaaatgcttccttccggcgctgaattttctcttactgaagcacctgtcgtcttcgaccctattgatattgaattatccgcaggtaaagaagtcagcattgacgacctagatcctggcagtggtttaatttcctatcaaggacgccaagtccttctatatatccgggatcataccggacgctatgatgcagctattgaagatggtaagaatgggaagcgatttcatattgcctggtgtagaaaattggatgagatgcgccagaaaaaccgttttgagcgttatcatgcgacaaaccgcgttgatggtttttttgaaatagatgatggtgctggacgctatcaggatgcagacctaaaagtctgtaagttttgtttagaaagattaaattacaaaggaagtattgattatcgtaccagacaaaaaatatttactcaattcaccttgaatgatttcttctctcactatagcacttgcttccgccatatgccaaaaggtattcatgacaaagccaatagtggttatgtagacaattggaaatatatttcccgctctgttcgcgaacatgcaaattataaatgtaatgattgcggtgttaatttaacttcctcacgccatctctgcgacgttcatcataaaaatggggttaaatacgacaactcagcagaaaacctccatgttgtttgcaaagattgtcatcgcaagcaacctttccatgaaggtatgtttataagccaggctgacatggcaactattcaacacttgcgatctcaacaagggttattaaaggttgattcctggaaagatatttatgatctcaccgatgcatctattcacggtgatattaatattatgcagcataaaggatacccacttccggtgctaagatttgatttacaaaactccacacataagactattacaaccgtagaagcggcttggccaaaatttaaaatcgcaattaatctcacggaagtaaaagtcgaggattggaaaatattcaccgtaggtgagctcgtaaaaagcatacagtccggagttgttttctga

SEQ ID NO: 12788 - DNA, 1653 bp, Serratia marcescens; identical to SEQ ID NO: 12755

SEQ ID NO: 12789 - DNA, 618 bp, Serratia marcescens; identical to SEQ ID NO: 12756

SEQ ID NO: 12790 - DNA, 1092 bp, Serratia marcescens; identical to SEQ ID NO: 12757

SEQ ID NO: 12791 - DNA, 1653 bp, Serratia marcescens; identical to SEQ ID NO: 12755

SEQ ID NO: 12792 - DNA, 618 bp, Serratia marcescens; identical to SEQ ID NO: 12756

SEQ ID NO: 12793 - DNA, 1092 bp, Serratia marcescens; identical to SEQ ID NO: 12757

SEQ ID NO: 12794 - DNA, 1653 bp, Serratia marcescens; identical to SEQ ID NO: 12755

SEQ ID NO: 12795 - DNA, 618 bp, Serratia marcescens; identical to SEQ ID NO: 12756

SEQ ID NO: 12796 - DNA, 1092 bp, Serratia marcescens; identical to SEQ ID NO: 12757

SEQ ID NO: 12797 - DNA, 1653 bp, Serratia marcescens; identical to SEQ ID NO: 12755

SEQ ID NO: 12798 - DNA, 618 bp, Serratia marcescens; identical to SEQ ID NO: 12756

SEQ ID NO: 12799 - DNA, 1092 bp, Serratia marcescens; identical to SEQ ID NO: 12757

SEQ ID NO: 12800 - DNA, 1653 bp, Serratia marcescens
atgttagcgcaactttttgaacatctgttccgttctattgattcgatgtttgtcactaatttttttatctgggcagttgtatttatatttttttctgcctggtggtgtgactacaaaaacattcacagtaaatttagggagtatgctccaacactcatgggagcattaggtatattaggcacattcattggcataataattggattgcttaattttaacactgagagtattgataccagcatcccacttctattaggtggtctaaaaacagcatttatcaccagtattatagggatgttcttcgctattttatttaacgcacttgatgcttttttcttcgcaaacaaacgagataatttaacagagagtgtgcctgaaaccataacgcctgaacatattcatcacgaattaaaagaaaacaaccaatacttggaaaagatgatttcaagtttgagtggcaatgaagaagggtccttagttgctcaggtgaaactattgcgcaatgaaataaatgatgcttctcgtgcacaactctctcatcacactgagtttagcaataagctctgggaacaattgaaacagtttgctgatttaatggcaaagggtgcaacagaacagataattgatgcacttaaacaagttattatcgattttaacaataatttaaccgaacagtttggtgaaaattttaaagctcttgatgcttcggtaaaaaaacttgtcgattggcaggataattacaagaaccaaattgagaatatgagtgaacaatatcaacaaagtgtcgactcattagttgaaacccgcggagctgttgcaggtatctgggaggaatgtaaagaaattccacttgcaatggctacattacacgatgtgttaaaagttaaccaacatcaaatcaacgagctatctcaacatcttgatgcctttgttttattacgtgataaagctacagatgcggttcctgttatccatgaaaaattggacgaggtaggcgaattgcttaaagcaggggcattgagtgtcagttcatctctggaccaaacaggggctgaattactcgccaatgcaaatgctatgcggattgctcttgatgaaggctctgaagggttcaggcagtcggttacacagactcagcaagcatttgcatcaatggctcatgatgtaagtaactcttctgaaactttaacctcaacactgggtgaaactattaccgagatgaaacaaagtggtgatgatttcctcaagtctctggaggcacattctaaagaactgcatcgtaatatggaaaaaaatacaaccgatgtgatcgagctctttagtaaaactggcgataaatttaatcaacaattatctagtaatgcagaaaatatgtttggaacaatgcaatcgtcctttgacaaggcaagtgctggtttaacctcacaggttaaagagtctgttgaacgctttggtggtgcaattaacgaacagctacatgcctttgaacaagcgactgagcgtgaaatgaatagggaaatgcaatctctagggaatgctctcctgtcaatcagccaaggatttgtcaagaactacgaccatttgattaaagagtatcaaagtgttcttgggcaactgcagccattaattaactcaagacaacaccgtggataa

SEQ ID NO: 12801 - DNA, 618 bp, Serratia marcescens; identical to SEQ ID NO: 12756

SEQ ID NO: 12802 - DNA, 1092 bp, Serratia marcescens; identical to SEQ ID NO: 12757

SEQ ID NO: 12803 - DNA, 1653 bp, Serratia marcescens; identical to SEQ ID NO: 12755

SEQ ID NO: 12804 - DNA, 618 bp, Serratia marcescens; identical to SEQ ID NO: 12756

SEQ ID NO: 12805 - DNA, 1092 bp, Serratia marcescens; identical to SEQ ID NO: 12757

SEQ ID NO: 12806 - DNA, 1653 bp, Yersinia enterocolitica
atgttagcccagctttttgaacacttgtttcactctgttgattcaatgcttgtaaccaatatttttatttgggccgtaattttaatcttctttagtgcctggtggtgtgactataaaaatatccatagtaaattcagggaatatgcgccaacactaatgggtgcgttaggtatattaggtacctttatcggcataattattggcttattgaattttaatacagaaagtattgatactagtattcccgtattgcttggtggtttaaaaacagctttcatcacaagtattgtcggtatgtttttcgctattgcatttaatgcacttgatgcatttttctttgcgaataaacgaaataaatcagcaactaatgaaccagaaatcatcactccagatcatattcaccatgaattgaaagaacaaaaccaatttttggaaaagttagtatcgggaatgagtggcagcgaagaaggctcgttggttgtacagataaaattattacgtaatgaaataaatgatacatctcgcacccaactttctcatcataatgaatttagtaataaactatgggaacaacttcaacaatttgcagatttgatggccaagggcgcgactgagcaaataattgatgcactgagacaagttattattgattttaataataacttaacagaacaattcggtgagaactttaaagctcttgatgcttcggtaaaaaaacttgtcgattggcaagaaaactataaaacccaagtcgaacaaatgggcgcacagtaccaacaaagtgtcgaatcattagttgaaacacgtggtgcagtcgctggcatctgggaggagtgcaaagagataccacttgcaatggctgagttacgcgatgttttgcaggttaaccaacatcaaataggcgagttatctcagcaccttgatgcttttgttttgttacgtgataaagcaaccgatgcagttccggctatccatgaaaaactgaatgaagtaggtgaattgcttaaagcaggtgccttgagtgtcagcacctccctggggcaaacaggagaggagctacttaccaatgcaaatgccatgcgcattgccctggatgaaggctcagaaggtttcagacagtcggttactcagactcagcaagcatttgcatcaatggcacatgatgtaagtaattcttctgagactttgacatcaactttgggtgaaaccattactgaaatgaagcaaagtggtgatgagttcttgaagtctcttgaatcacattctaaagatcttcaccgtaatatggagcaaaacacagccagtgttattgacctcttcacgaaaaccggtgataagtttaatcaacagttatctaataatgcagataatatgtttggaaccatccagtcaacatttgacaaagcaagtgcaggtttgaattcacaggtaaaagaatcagttgagcgctttggtagttccatcaacgaacaactgcacgcttttgaacaagctactgaacgtgaaatgaatagggaaatgcaagcactaggaaattcattactggcaatcagccagggatttgttaaaaactacgatcatctaataaaagaatatcaaagtgttcttggccaactacaaccattaattaactcaagacaaaaccgtgggtaa

SEQ ID NO: 12807 - DNA, 708 bp, Yersinia enterocolitica
atggataaaattataggcaaacctaccccgaagaaaacccaagataatgaacactgggtttctatgtcagacctaatggccggactgatgatggtatttatgtttatttctattgcttatatgcattatgtgcgtattgaaaaagaaaaaataaaagaagtggctgttgcctatgagcaagctcaacagcagctttataatgctttagaggttgagttttcgaaagacctaccatcctgggatgccgaaatcgataagcaaacccttgaagtaagatttaaatcccctgatgttctttttggattaggcagctcagacttaaaaccaaaattcaaagaaattcttaacgacttttttccacgctatttgaaagtattagatgagtataagcagcatattactgaggtacgtatagagggacatactagtacagattggacgggtgcagccaatcaagatattgcctattttaataatatggagttatctcaaggaagaactcgtgcagtattacaatatgtatattctttaaaagaatcagctgctcaccaaaaatgggtgaaaagtaaattttctgcggtaggatattcatcttcacatccaattcttacccctgaaggaaaagaagacccaagccgttcacgacgagtcacgtttaaagttattacaaatgccgaattacaaattcgtcgtattattcaggaatag

SEQ ID NO: 12808 - DNA, 1092 bp, Yersinia enterocolitica
atgaagttaactcttgatttttctgaattgattgcgctaggaaaaaaaatgcttccttctggtgctaaattttctcttgatgaagcgcttgttgtattcgatcctattgatattgaattgtctgcaggaaaggaagtcagtattgctgaccttgatcctggtagtggtttaatttcctaccagggtcgtcaagttcttctatatattcgggatcactccggacgatatgatgctgctattgaggatggtgagaaaggaaaaagatttcatatcgcatggtgtcgaactcttgacgaaatgcgccagaaaaatcgttttgaacgctaccatgcaacaaaccgtgttgatggtttatttgaaattgacgatggtttaggtcgcagtcaagatgctgacttgagagtttgcatgaattgccttgaacgactaaattataaaggtagcattgataagatacaaaagagaataatatttaaatcgttctccttaaataattttttctctcactacagtacttgtttccgtcatatgccaaaaggtattcatgataaagcaaatagtggctatgtagataattggagagatatttcacgatctgtacgtgaacaatcaagctataaatgtaatgattgcggtgttgatttaagctccacacgccagctctgcgatgttcatcataaaaatggtgttaaatacgataattcagcagaaaacttgcatgttctttgcaaggattgccatcgcaaacaacctctccacgaagggatatttgtcactcaagctgaaatggcaattattcaacgcttgcgatctcagcaggggttattaaaggctgattcttggaaagatatttatgagctaactgacccatctgtgcacggtgatattaatattatgcagcacaaaggatatcaacctccggttccaggattagacttacagaactctgcacatgagattattgcaactgtagaagctgcatggcccacattaaaaattgcagtgaatttaaccgaaatacaagtagaaggttgggaaatattcacagttggtgaactcgtaaaacagatacaatctggggttatattttaa

SEQ ID NO: 12809 - DNA, 1641 bp, Yersinia intermedia
atgttagcccagctttttgaacatttgtttcactctgttgattcaatgcttgtaaccaatatttttatttgggccgtaattttaatcttctttagtgcctggtggtgtgactataaaaatatccatagcaaattcagggaatatgcgccgacactaatgggtgcattaggtatattaggtacctttatcggcataattattggcttattgaattttaatacagaaagtattgatactagtatccccgtattgcttggtggtttaaaaacagctttcatcacaagtattgtcggtatgtttttcgctattgcatttaatgcacttgatgcatttttctttgcaaataaacgaaataaatcggcaactaatgaaacagaaattatcactccagatcatattcaccatgaattgaaagaacaaaaccaatttttggaaaagttagtatcgggaatgaatggcagcgaagaaggttcgttggttgcacagataaaattattacgtaatgaaataaatgatacatctcgcatccaactttctcatcataatgaatttagtaataaactatgggaacaacttcaacaatttgcagatttgatggccaagggcgcgactgagcaaataattgatgcactgagacaagttattactgattttaataataacttaacagaacaattcggtgagaactttaaagcccttgatgcttcggtaaaaaaacttgtcgattggcaagaaaactataaaacccaagtcgaacaaatgggcgcacagtaccaacaaagtgtcgaatcattagttgaaacacgtggtgcagtcgctggtatctgggaggagtgcaaagagataccacttgcaatggctgagttacgcgatgttttgcaggttaaccaacatcaaataggcgagttatctcagcaccttgatgcttttgttttgttacgtgataaagcaaccgatgcagttccggctatccatgaaaaactgaatgaagtaggtgaattgcttaaagcaggtgccctgagtgtcagtacctccctggggcaaacaggagaggaactacttaccaatgcaaatgccatgcgcattgccctggatgaaggctcagaaggtttcagacagtcggttactcagactcagcaagcatttgcatcaatggcacatgatgtaagtaattcttctgagactttgacatcaactttgggtgaaaccattactgaaatgaagcaaagtggtgatgagttcttgaagtctcttgaatcacattctaaagatcttcaccgtaatatggaaaaaaacacagccagtgttattgacctcttcactaaaaccggtgataagtttaatcaacagttatctaataatgcagataatatgtttggaaccatccagtcaacatttgacaaagcaagtgcaggtttgaattcacaggtaaaagaatcagttgagcgctttggtagttccatcaacgaacaactgcacgcttttgaacaagctactgaacgtgaaatgaatagggaaatgcaagcactaggaaattcattactggcaatcagccagggatttgttaaaaactacgatcatctaataaaagaatatcaaagtattcttggccaactacaaccattaattaactcaagataa

SEQ ID NO: 12810 - DNA, 708 bp, Yersinia intermedia
atggataaaattataggcaaacctaccccgaagaaaacccaagataatgaacactgggtttctatgtcagacctaatggccggactgatgatggtatttatgtttatttctattgcttatatgcattatgtgcgtattgaaaaagaaaaaataaaagaagtggctgttgcctatgagcaagctcaacagcagctttataatgctttagaggttgagttttcgaaagacctaccatcctgggatgccgaaatcgataagcaaacccttgaagtaagatttaaatcccctgatgttctttttggattaggcagctcagacttaaaaccaaaattcaaagaaattcttaacgactttttcccacgctatttgaaagtattagatgagtataagcagcatattactgaggtacgtatagagggacataccagtacagattggacgggtgcagccaatcaagatattgcctattttaataatatggagttatctcagggaagaactcgtgcagtattacaatatgtatattctttaaaagaatcagctggtcaccaaaaatgggtgaaaagtaaattttctgcggtaggatattcatcttcacatccaattcttgcccctgaaggaaaagaagacccaaaccgttcacgacgagtcacgtttaaagttattacaaatgccgaattacaaattcgtcgtattattcaggaatag

SEQ ID NO: 12811 - DNA, 1092 bp, Yersinia intermedia
atgaagttaactcttgatttttctgaattgattgcactaggaaaaaaaatgcttccttctggtgctaaattttctcttgatgaagcgcttgttgtattcgatcctattgatattgaattgtctgcaggaaaggaagtcagtattgctgaccttgatcctggtagtggtttaatttcctaccggggtcgtcaagttcttctatatattcgggatcactccggacgatatgatgctgctattgaggatggtgagaaaggaaaaagatttcatatcgcatggtgtcgaacacttgacgaaatgcgccagaaaaatcgttttgaacgctaccatgcaacaaaccgtgttgatggtttatttgaaattgacgatggtttaggtcgcagtcaagatgctgacttgagagtttgcatgaattgccttgaacgactaaattataaaggtagcattgataagatacaaaagagaataatatttaaatcgttctccttaaataattttttctctcactacagtacttgtttccgtcatatgccaaaaggtattcatgataaagcaaatagtggctatgtagataattggaaagagatttcacggtctgtacgtgaacaatcaagctataaatgtaatgattgcggtgttgatttaagctccacacgccagctctgcgatgttcatcataaaaatggtgttaaatacgataattcagcagaaaacttgcatgttctttgcaaggattgccatcgcaaacaacctctccacgaagggatatttgtcactcaagctgaaatggcaattattcaacgtttgcgatctcagcaggggttattaaaggctgattcttggaaagatatttatgagctaactgacccatctgttcacggtgatattaacattatgcagcacaaaggatatcaacctccggttccaggattagacttacagaactctgcacatgagattattgcaactgtagaagctgcatggcccacattaaaaattgcagtgaatttaaccgaaatacaagtagaaggttgggaaatattcacagttggtgaactcgtaaaacagatacaatctggggttatattttaa

SEQ ID NO: 12812 - DNA, 1773 bp, Vibrio alginolyticus
atgacgaattcaattgcttacttcattgcatcattctctgctgatgctatttctaatgcttttatatatttaatcactgctttgcttgtcgtttcatttatcctggcagcctttggtaaagcaagtcgctttactgcagctaccacgaacatacttacgtccttgggtatcttaggtacgtttgcaggtattgtcgttggtttgatggactttgatccaaccaatatagatggaagtattgaatcactactgagtggtttgaaaacagccttccttaccagccttgtaggtatggctgcctcgattctctataaggctatcttaggggcgttacccaaaaaagccatagatgaacagcaagcgataggacctgaggaaattttttcagttatgtcgcaacaattaaaggcttctactgaccagttaaatacgtcaaacgagcttcttgctgcgattagaggagacgaagactcttcattgacgtctcagataaaaaatctacgtacagatatcaatgatgggtggcgctcgctaaatgaacaattaaagcaagtaaacgaaaaccataatgagtttagagcaactttatgggcaaaaatggatgagtttggtgaattgttgtctaagtctgccacagagcaagttattaatgcgcttaaagaagtaattgttgaattcaatgacaagctaactgaacagtttggtgaaaactttaagcgtttagatgagtcggtgaaaaagctggttgattggcaagaaaattacaaaaatcagttagaagatatgtcaaacaaataccaactaggagttgatgcaatttcttcgacggaaaaatcagttgctagcatcaatgagcgtgctgaatctatccctgcaacaatggaaaaacttcatcaagttatggagttaggtcatgggcaagttactgagcttgaacacagacttgaggcatttaaagatttgagggacaaagcagtagaagcaatgcctcaaataaaagagcagatggatacaactatgtccgtgattggagaatccgtaaaagctgcttctactcattatgaatcgatgcttgtagagtctcaaaaaattatcgataacttcagttctaccgcccaccaaagtgtggagaccatgcgtactaatttagaagatggcgcgaaaaaagtttctactgagcttgaaacaagagcggtagaaattggaggacgcttggcagaagcatcaaatgatattactgacaacgtgactacagcatcgggtgcattgcaaaatagtgccacatacctgacagacaacgccgagcaagttaagcaacaattggaagattcaattgttgagcttaacagccagttacgcgtgctcgttgccgacattaaggatgatgcgcgtgaaacgggtaatgtgctgaaagaagcaaatcaagagctgctaggcagcacgaaagaaattcagacagaaacaatgtcagcaattaccaaacttcatgaccgtttggaaaccacattagaagatatattccaagtgcaggcgcaagctatacgaagaacatttgatagtttggaagatcaagtaacgcagtctgtaggaaaggctggcagcgcagttgaaaaacaagtggaagtcttagacctgcaaatgcagcaggaaattaatcgaacaatgaatgaaatgggcgaagcacttgcgacgatcacgcaacagtttactcgtgattatcaaaagctaactcgtgaaatgtctaatgttgttaatagtaaaattgcagtctag

SEQ ID NO: 12813 - DNA, 708 bp, Vibrio alginolyticus
atggaaaagttattcggaaaagctaaaacaacgggtgacagtggcgaacactggatgtcggtttcagaccttatggctggtttgatgatggtgtttttgtttatatcggttgctctaatgcgtgatgcaatgttagaacgcgacaaaataaaagaagtagctgaaacatatcaaaaaacacagcaagctatttatatttcattgctggaagagttcgctaaagacctggataagtggggggctgaaatcgacagagatacgctgagcgttaactttactgctccggaagtactatttgctaatggtgaagcgaatttaactgagcagtttcagatcatcttggacgattttttccctcgttaccttaaagttcttgagcagtacaaaccaattatccaagaaataaaaattgaaggtcatacttctagtcgttggaatcatgattcaagtgactacgaggcttatttcaataacatgcgattatcacaatcaagaactcgtgccgttcttggttacgtaatgaatctcgaagaagtaagtcgcgaacattacgggtgggtaaaaaataacgtagcggcggtaggttattcatcttccaaagcagttgtgcatgatggtgttgaagatgagaagcgatcccgtcgggtttctttccgcgtaattacgaatgcagaagagcagatcttaaagatcttgggggagggatga

SEQ ID NO: 12814 - DNA, 1086 bp, Vibrio alginolyticus
atgaagttaacgcttaaccttagctctttaatgcacgcgatagaagtgatggagccggaaaaaaaaggtgcgttcaccttggatcttcaagaaagtcatatcgataagatttctgcagagttagaacagggtaaggacgttgagcttaaggatgttgagcttgaatctggccttctaagttataaagggcgtcacgtaaccctttatatcaaagcgaacggttcaagtgctcgattccacgtctcagactgtaaaacacttcagtcaatgagagctagtggccgttttgagcgctatgttgtcactaacaatacttccggtgaatttattgttgactcaggctatggggaaactaaagccaggttgaaagtctgtcagaactgtttacgtaagctcaactataaaggttgcaacaccactacagatatcagttcaatcgtaagaacctttgatatgggggaattcttttctacatacagttcgtttttcccacatatgccatcacgccaagctgagaccgcagaaacaggttatagcgaagattggactaaggtatcttctcactatcgtgtcgaaaaggattttacttgtgagcaatgcaacgtgaagcttagagcacatcgacactttctacatgttcatcatatcagtggggtgaaatctgataatcggccgaaaaacctcaaagctttatgcatcgattgccacagtaaacagcctatgcactctcgtatggcggtaagccattcggaaaggcagctcattaataagctcagaaatgaacagggattacttgaggatatcggtagttggaaaaggttatttgaatatgctgaccctggtgttcatggtgtacttcatgcttgtaaagactttgggacgaagttgccagaagttggttactacgtgggcgatggctttggcgacattgttgcaaaaattgaattggcttggcctgctcataagtttggtattgctatctcacaaaatgatattgatgaagcgatccaagaaggctggcacgtcctaacgattagtgagtttttggctgactaccgaactcaagcacataacttacgttggtaa

SEQ ID NO: 12815 - DNA, 1752 bp, Vibrio harveyi
atgactgattttcttgcttctatcatcgcttcttatagtgctgcatctatttcggacgcattcatctataccatccttttgttacttgtagcttctagtatcttggcttttctaggaaaagcacccagatttacggcaagtacaaccaacatccttacctctttgggtatcctaggtacttttgcaggcattgttgtaggtttgatggaattcaatccaacagatatcgatggaagtatcgaatctctgcttgcgggcttgaagactgcgtttctaaccagtctagttggtatggctgcatcgattatttataaggcaattctagggaccattcctcagaaaggtgaagatgcaattaaaggcgtgggtcctgaagaaatcttccaggttatgtcccaacagctaagatcgtcgaatgagttgttagcctccatcaaaggtgaggaggatacctcattagtttcccagctaaagaaactgcgaacggacatcaatgatgggcaaaaggagcaaaccgcttatcagaacctaaagattactcagacagaaaagttccaagcaacgctctgggaaaagatggatgagtttggtgagctactatctaaatcagcgacagagcaagtcattaatgctctgaaagaagtaatcgtagagtttaatgacaaactgacagagcagtttggtgagaactttaagcgattagatgagtcagtgaagaaactcgttgattggcaagaaaactataaagaccaactagaagacatggccacgaagtatcagctaggtgtagatgcaatatcttcgacagaaaagtcagtcgctagcatcaatgaacgtgctgaagctatcccagcgacgatggaaaaacttcaccaagtgatggagttaggtcatggccaagtgacggagcttgagcatcgcttagaagcatttaaagatcttcgtgataaagcggtagaagcaatgccacaaattcgtgagcagatggacaacaccatgtctgtaattggtgaatcagttaaagcggcatcgacacattacgagtcaatgctgcaagaatcacaaagtatcattgataacttcagttcgactgctactcaaagtgtagaagtcatgagagtaaacctagaagagggtgcggttaaggtatcgaatgagcttgaaaatagagctgtagagatcggaggtcgtctcgcggaggcttcaaatgatatccaagaacaagtgggtaccgcgacgggtggtttgcataatatgacaaactatctgactgatacgacggagcaggtacgacaacaccttgaagactcaattactgagttgaatggccagcttcgcgtactagtggctgatattaaagacgatgcacgagaaacgggtaatgttctaaaagaagccaaccaagagttgctaaatagcacgaaagaaattcagtcagaaacgacgtctgctatttctaaactacacgatcgcttagaaacgactctagaagaggtgttccaaattcaagcacaagctgtgcgccggacctttgatagtttggaagaccaaattactcaggccgtagctcaaacgggtagtgcggtagagaaacaagttgaaatattggacctgcagatgcagcaagaaatcaaccgaaccatgaatgaaatgggtgaagcgcttgcgacgattactcaacaatttacccgcgattaccaagcattaacgcgtgaaatgtcgaatgttgtaaacagtaaaattgcagtgtaa

SEQ ID NO: 12816 - DNA, 708 bp, Vibrio harveyi
atggaaaagctattcggaaaaaccaaatctacgggtgatggtggtgaacattggatgtcagtatcagatctaatggcaggtctgatgatggtgttcttgttcatttctgttgcgctaatgcgtgatgctatggttgagcgtgacaaaataaaagaagtcgcagaaacttatcagaaaacccagcaggccatctatattgcgctgttggaagagtttgctaaagatcttgatacgtggggcgctgaaattgatcgagatacattgagtgtcaactttacagcgcccgaagtattgttcggcaatggtaaggcgaacttaactcagcaatttcaagtaattttgaatgatttctttcctcgttatctggaagtactagagcaatacaaaccgattattcaagaaatcaaaattgaagggcatacatctagccgttggaaccacgattctagcgattacgaggcttactttaataatatgcgtttatcacagtcacggacgcgtgcagtacttggctacgtaatgaagcttgatgatgttcgagaacaacattatggctgggtaaaaaataacgtagcagcagtagggtattcttcatctaaagcagtcgttaaagataatgtagaagacgaaaaacgttctcgtcgagtatcttttcgtgtaatcactaacgctgaagagcagatattgaagatcttgggggcggaatga

SEQ ID NO: 12817 - DNA, 1116 bp, Vibrio harveyi
atgaagctgaatatcagttttaagtcgttattgaaagctgttgaaattatggaaccagaagagaaaggaaaatttcgcgtagaatcaacccttgagcctttacagacatcacctgttgttcttatcaataaggaagttgaacttaaagatgttgatgttgatggttgtcttctaagttatcaagggcgacaagttcttctatatatcaaagatcatggtcaatcggcacagtctgcaattaatatcccttattcagggaaaaagttccatatagccgactgcgcgacactcaaaaacatgcgcgaacaaggacgctttgaacgatacgtcgcaacgaatgatacttctggcgaatttgtaatttcgggctttggtgtagaaggaaaagcggttttgagagtgtgtcaaaactgtctaaatgctttgaactataaaggttggtcgtcaggcacttctcgaactgagattcttcacaagttcaacatgccagagttctttgctacctatagctctttcttccctcacatgccgtctcgacgagctgagaccgctgagagtggctacagtgatgattggtcgaaaatatcctcccactatcgagtagaaaaaaactttgagtgtgaacaatgtaaagtgaatatgcgttctaaccgatcacttctgcatgttcatcatgttaatggtgttaaatcagataacaggccgtcaaaccttcgtgcactgtgtatcgactgtcacagcaaacaacccatgcatgagcatatggctctcagccacagagagcgtcagacaataaatgatctgcgtaaacaacaaggtttacttgaggacctcggtgagtggcaagagttgtttgattactcagatccaggtgtacatggcgtattgcatgcttgtcgacaagcgtatctgaaactccccgacattaactattttgttgaagacagtttcggagggttagctgcacggcttgaacttgcgtggccgaagcacaaatttggtgttgcaatatcaatgaacgatattgaagatgcaaacagtaatggttggcaggtcgtgggtattaatgactttttggaaaattacaaatcacaagcttataacttaaggcactaa

SEQ ID NO: 12818 - DNA, 1752 bp, Vibrio harveyi
atgactaactttcttgcttccataattgcctcttatagtgctacatcaatctcagatgtattcatctatacaatcttttttctacttatagcttctagtattttggcctttctgggaaaagctccaagatttacggcaagtacaactaacatacttacctctttaggtattttaggtacatttgcaggtatcgtcgtaggtttgatggagttcgacccctccaatattgatggcagcattgagtccttgttggctggcttaaaaacagcatttttgacgagcttagttggcatggctgcttcgattatctacaaagcaattcttggggctattccacagaaaggtgactctactgcaaaatccgtaggtccagaagaaattcactctgttatgtcggctcaacttaatgcttctaatgagctgctatctgcaataaaaggggacgaggactcatcattaacttcacaaattaaaaatttacgaatcgatattaatgacggaaataaatcattagctcgtcatatggaaaaggctgttgagggtaatgaaaaattccaatttaagctttggcaaaagatggatgagttcggtgagcttttgtctaaatctgcaacagagcaagtcattaatgcactgaaagaagtcattgttgagtttaatgacaaactgactgagcagtttggagagaactttaaacgcttagatgagtcagtgaaaaagcttgttgattggcaagaaaactataaagaccaactagcagatatggccacgaagtatcagctaggtgtagatgctatatcttcgacagagaagtcagtagctagcatcaatgaacgtacagaagccatcccagcgactatggaaaaacttcatcaagttatggagttaggtcatggtcaagtgacggagctcgagcatcgcttagaagcatttaaagatcttcgtgataaagcagtagaagcaatgccgcaaattcgcgagcaaatggataataccatgtcggtaattggtgaatcagttaaagcggcttcgacacattacgaatcaatgctgcaagagtcacaaaacattattgataacttcagttcgactgcgactcagagtgttgaacatatgcgtacaaacttggaagcgggagccgagaatgtatcgagccaactaattgaaagctctcaaacgttgggtgggcaattattggaagcatcaacgacgttccaagatcaagtgggcacagcgacaggtggtctaagtaatgtgaccagtcatctaactgatacgacagagcagatcaggcaacaccttgaagactcaattactgagctgaatggacagcttcgcgtactggttgccgatattaaagacgatgcacgagaaacaggtaatgttctaaaagaagccaaccaagagttactaaatagcacgaaagaaattcagtcagaaacgacatcagcgatcaaaaaacttcacgatcgcttagaaaccactctagaagaagtgttcaaagtgcaggcagaggcagtacgtagaacattcgatagcttagaagaccagatcacgcagtcagtaggtagaactggtagcgcagttgagaaacaagtggaagtgcttgatctacaaatgcagcaagaaatcaaccgaactatgaatgaaatgggtgaagcgcttgcgacgattactcaacaatttacccgcgattaccaagcgttaacgcgtgaaatgtcgaatgttgtaaacagtaaaattgcagtgtaa

SEQ ID NO: 12819 - DNA, 708 bp, Vibrio harveyi
atggaaaagctattcggaaaaaacaaatctatgggtgatggtggtgaacattggatgtcagtatcagatctaatggcaggtctgatgatggtgttcttgttcatttctgttgcgcttatgcgtgatgctatggttgagcgcgacaaaatcaaagaggtcgcagaaacttatcagaaaacccagcaggccatctatattgcgctgttggaagagtttgctaaagatcttgatacgtggggcgctgaaattgatcgagatacattgagtgtcaactttactgcgcctgaagtattgttcggtaatggtaaggcgaacttaactcagcaatttcaagtaattttgaatgatttttttcctcgttaccttgaagtgttagaccagtacaagccgattattcaagaaattaaaattgaagggcatacctctagccgttggaaccacgattccagcgattacgaggcttacttcaataatatgcgtttatcacagtcacggacgcgtgcagtacttggttacgtaatgaagcttgatgatgttcgtgcacaacattatggctgggtaaaaaataacgtagcggcagtagggtattcttcatctaaagcagttgttaaagatggtgtagaagacgaaaaacgttctcgtcgagtatcttttcgtgtaatcactaacgcagaagagcagatattgaagatcttgggggcggaatga

SEQ ID NO: 12820 - DNA, 1137 bp, Vibrio harveyi
atgaaactaacgcttaatcttcattcccttatgcgtgcgattgaaattatggagccagaaaaaaaaggtgtatttgtctgggaccatcaaataactgaaaaaagcaaaattgatatagagcttgctcagggcaaagacgttgagctcaaagatgtcgatattgattctggtttacttagctacaaaggaagacaagttctcctgtatataaaagatcatggtagtgccgttcagtcagttattaaaaaaccgtcgactggcaataaatatcatgtggctgattgttctaagttgaaatctatgcgtgcggaagggcgattcgaaagatatgtagttaccaatgatacatctggtgagtttcctatatctggtggcgggtattatggtcaaagtagggaagagggctatgcaagattaaacatttgcaaattatgcttagggcaattgaattataagggctatagcagtggtgcccatcgttcgaatatatttaatgaatttgatatgtcagaattctttgctacctatagctctttcttcccgcatatgccgtctcgacgagctgagaccgctgagagtggctacagtgatgattggtcgaaaatatcctcccactatcgcgtcgaaagaaactttgagtgtgaagaatgtaaagtgaatatgcgttctaatcgatcacttctgcatgttcatcatgtgaatggtgttaaatcagataacagaccttcaaaccttcgtgcactgtgtatcgactgccacagcaaacaacccttgcatgagcatatggctctcagccatagagagcgtcagacaataaatgatctgcgtaaacaacaaggtttacttgatgacctcggtgagtggcaagagttgtttgattactcagatccaggtgtacatggcgtattgcatgcttgtcgacaagcgtatctgaaactccccgacattaactattttgttgaagatagtttcggagggttagccgcacggcttgaacttgcgtggccaaatcacaaatttggtgtcgcaatatcaatgaacgatattgaagatgcaaatagtaatggttggcaggtcgtgggtattaatgactttttggaaaattacaaatcacaagcttataacttaaggcgctag

SEQ ID NO: 12821 - DNA, 1752 bp, Vibrio parahaemolyticus
atgactaactttcttgcgtccatgattgcctcgtatagtgctgcatcaatctcagatgcattcatctatacaatcttttttctacttatagcttctagtattttggcctttctaggaaaagctccaagatttacggcaagtacaactaacattcttacctctttaggtattttaggtacctttgcaggtatcgtcgtaggtttgatggaattcgatccctccaatattgatggcagcattgagtccttgttatcgggcttaaaaacagcatttttgacgagcttagttggcatggctgcttcgatcatctacaaagcaattcttgggactattccacagaaaggtgagtctgttgcaaaatccgtaggtccagaagaaattcactctgttatgtcggctcaactgaatgcttctaatgagctcttatctgcaataaaaggggacgaggactcatcgttaacttcacaaattaaaaacctacgaaccgatattaatgacggaaataaatcattagttcgtcatatggaaaaggctgttgagggcaatgaaaaattccaatttaagctttggcaaaagatggatgagttcggtgaacttttgtctaaatctgcaacagagcaagtcattaatgcattgaaagaggtcattgttgagtttaatgacaaactcacagagcagtttggagagaactttaaacgcttagatgagtcagtgaaaaagcttgttgattggcaagaaaactataaagaccaactagcagatatggccacgaagtatcagctaggtgtagatgctatatcttcgacagagaagtcagtagctaacatcaatgaatgtacagaagccatccctgcgactatggaaaaacttcaccaagttatggagttaggtcatggtcaagtgacggaactcgagcatcgcttagaagcatttaaagatcttcgtgataaagcagtagaagcaatgccgcaaattcgcgagcaaatggataataccatgtcggtaattggtgaatcagttaaagcggcttcgacacattacgaatcaatgctgcaagagtcacaaaatattattgataacttcagttcgactgcgactcagagtgttgaacatatgcgtacaaacttggaagcgggagccgagaatgtatcgagccaactaattgaaagttctcaaacgttgggtgggcaattattggaagcatcaacgacgttccaagatcaagtaggcacagcgacaggtggcctaagcaatgtgactagtcatctaactgatacgacagagcagatcagacaacaccttgaagactcaattactgagctgaatggacagcttcgcgtactggttgccgatattaaagacgatgcacgagaaacgggtaatgttctaaaagaagccaaccaagagttgctaaatagcacgaaagaaattcagtcagaaacgacatcagcgatcaaaaaacttcacgatcgcttagaaaccactctagaagaagtgttcaaagtgcaggcagaggcagtacgcagaacattcgatagcttagaagaccagatcacgcagtcagtaggtagaactggtagcgcagttgagaaacaagtggaagttcttgatctacaaatgcagcaagaaatcagccgaactatgaatgaaatgggtgaagcgcttgcgacgattactcaacaatttacccgcgattaccaagcgttaacgcgtgaaatgtcgaatgttgtaaacagtaaaattgcagtgtaa

SEQ ID NO: 12822 - DNA, 708 bp, Vibrio parahaemolyticus
atggaaaagctattcggaaaaaccaaatctatgggtgatggtggtgaacattggatgtcagtatcagatctaatggcaggtctgatgatggtgttcttgttcatttctgttgcgcttatgcgtgatgctatggttgagcgcgacaaaatcaaagaggtcgcagaaacttatcagaaaacccagcaggccatctatattgcgctgttggaagagtttgctaaagatcttgatacgtggggcgctgaaattgatcgagatacattgagtgtcaactttactgcgcctgaagtattgttcggtaatggtaaggcgaacttaactcagcaatttcaagtaattttgaatgatttttttcctcgttatcttgaagtgttagatcagtacaagccgattattcaagaaattaaaattgaagggcatacctctagccgttggaaccacgattccagcgattacgaggcttacttcaataatatgcgtttatcacaatcacggacgcgtgcagtacttggttacgtaatgaagcttgatgatgttcgtgcacaacattatggctgggtaaaaaataacgtagcggcagtagggtattcttcatctaaagcagttgttaaagatggtgtagaagacgaaaaacgttctcgtcgagtatcttttcgtataatcactaacgcagaagagcagatattgaagatcttgggggcggaatga

SEQ ID NO: 12823 - DNA, 1137 bp, Vibrio parahaemolyticus
atgaaactaacgcttaatcttcattcccttatgcgtgcgattgaaattatggagccagaaaaaaaaggcgtatttgtctgggaccatcaaataacagaaaaaagcaaaattgatatagagcttgctcagggcaaagacgttgagctcaaagatgtcgatattgattctggtttacttagctatcaaggaagacaagttctcctgtatataaaagatcatggtagtgctgttcaatcagttattaaaaaaccatcaactggcaataaatatcatgtggctgattgttctaagttgaaatctatgcgtgcggaagggcgattcgaaagatatgtagttatcaatgatacatccggtgagtttcctatatctggtagcgggtattgtggtcaaagtaaggaagagggctatgcaagattaaacatttgcaaattatgcttagggcaattgaattataagggctatagcagtggcggtcatcgttcgaatatcttcaatgaatttgatatgccagaattctttgctacttatagctctttcttcccgcatatgccatctcgacgagctgagactgctgagagtggctacagtgatgattggtcgaaaatatcctcccactatcgcgtagaaagaaactttgagtgtgaagaatgtgaagtgaatatgcgctctaaccgagcacttctgcatgttcatcatgttagtggtgttaaatcagataacaggccgtcaaaccttcgagcactgtgcatcgactgtcacagcaaacaacctatgcatgagcatatggctctcagccatagagagcgtcagacaataaatgatctgcgtaaacaacaaggtttacttgatgacctcggtgagtggcaagagttgtttgattactcagatccaggtgtacatggtgttttgcatgcttgtcgacaagcatatttgaaactcccccaaattaactattttgttgaagacagttgcggaggtatagcagctcggcttgaacttgcgtggccgaagcacaaatttggtgtcgcaatatcaatgaacgatattgaagatgcaaacagtaatggttggcaggtcgtgggtattaatgactttttggaaaattacaaatcacaagctcataacttaaggcgctag

SEQ ID NO: 12824 - DNA, 1752 bp, Vibrio parahaemolyticus
atgacagaattatttgcaacgttcatagcgtcctatacggctggttctatttcagatgccttcatatacgtgatcttactgcttctagcattgtcgagtgttcttgcatttctaggcaaggcccccaggttcactgcaagtaccaccaacattcttacctctctcggcatccttggtactttcgcgggcattgttgttggtttgatggagttcaatccgtcggatattgatggaagcattgagtcattacttgcggggttaaagactgcctttttgaccagtttggtcggtatggctgcctccatagtttacaaagcgattcttggtgcaattccgcaaaaagaggaatctgctgtcaagagtgttgggccagaagaaatctattctgttatgtctgctcagctagatgcatctaatgagctgttatcagcaatcaaaggtgatgaagattcatcgttgacctctcagattaagaaccttcgcacagacatcaatgatgggcaaaagtctttaggtagacatctggaaagagccgcagagaacagcgaacagtttcaacttaaattgtggcaaaagatggatgagtttggcgagctactatcgaaatcagcgacagagcaagttattaatgcgcttaaagaagtaattgttgaattcaatgacaagctaactgaacagtttggtgaaaactttaagcgtttagatgagtcggtgaaaaagctggttgattggcaagaaaattacaaaaatcagttagaagatatgtcaaacaaataccaactgggagttgatgcaatttcttcgacggaaaaatcagttgctagcatcaatgagcgtgcagaatctatccctgcaacaatggaaaaacttcatcaagttatggagttaggtcatgggcaagttactgagcttgaacacagacttgaggcatttaaagatttgagggacaaagcagtagaagcaatgcctcaaataaaagagcagatggatacaactatgtccgtgattggagaatccgtaaaagctgcttctactcattatgaatcgatgcttgtagagtctcaaaaaattatcgataacttcagttctaccgcccaccaaagtgtggagaccatgcgtaccaatttagaagatggcgcgaaaaaagtttctactgagcttgaaacaagagcggtagaaattggaggacgattggcagaagcatcaaatgatattactgacaacgtgactacagcatcgggtgcattgcagaatagtgccacgtaccttacagacaacgccgagcaggttaagcaacaattggaagattcaattgtcgagcttaacagccagttacgcgtacttgttgccgacattaaggatgatgcgcgtgaaacgggcaatgtgctgaaagaagcaaatcaagagctgctaagcagcacgaaagaaattcagacagaaacaacgtcagctattaccaaacttcatgaccgtttggaaaccacattagaagatatattccaagtgcaggcgcaagctatacgaagaacatttgatagtttggaagatcaagtaacgcagtctgtaggaaagactggcagcgcagttgaaaaacaagtggaagtcctagacctgcaaatgcaacaggaaattaaccgaacaatgaatgaaatgggcgaagcacttgcgacgatcacgcaacagtttactcgtgattatcaaaagctaacgcgtgaaatgtctaatgttgttaatagtaaaattacagtctag

SEQ ID NO: 12825 - DNA, 708 bp, Vibrio parahaemolyticus
atggaaaagttattcggaaaagctaaaacaacgggtgacagtggcgaacactggatgtcggtctcagaccttatggctggtttgatgatggtgtttttgtttatatcggttgctctaatgcgtgatgcaatgttagaacgcgacaaaataaaagaagtagctgaaacatatcaaaaaacacagcaagctatttatatttcattgctggaagagttcgctaaagacctggataagtggggggctgaaatcgacagagatacgctgagcgttaactttaccgcaccggaagtactatttgcgaatggtgcagcaaatttaactgagcagtttcagatcatcttggacgattttttccctcgttaccttaaagttctcgaacagtacaagccaattattcaagaaataaaaattgaaggacatacttcgagtcgttggaatcatgattcgagcgactacgaggcttatttcaataacatgcgattatcacaatcgagaactcgtgccgttcttggttacgtaatgaatctcgaagaagtaaaccgcgaacactacgggtgggtaaaaaacaacgtagcagcggtaggttactcatcctctaaagcagtagtgcatgatggcgttgaagatgagaagcgatcccgtcgggtttctttccgcgtaattactaatgcagaagagcagatcttaaagatcctgggggcgggatga

SEQ ID NO: 12826 - DNA, 1086 bp, Vibrio parahaemolyticus
atgaagttaacgctcaatcttagctctttaatgcatgcgatagaagtaatggagccggaaaaaaaaggtacgttcgccctggatctccaagaaagtcatatcgataaaatttctgctgagttagaacagggtaaggacgttgagcttaaggatgttgagcttgaatctggccttctaagttataaagggcgtcacgtaaccctttatatcaaagcgaacggttcaagtgctcgcttccacgtctcagactgtaaaacgctccagtcaatgagagctagcggccgttttgagcgttatgttgtcactaacaatacttccggtgaatttattgttgactcaggccatggggaaactaaagccagattgaaagtctgtcagaactgtttacgtaagctcaactataaaggttgcaacaccactacagatatcagttcaatcgtgagaacctttgatatgggggagttcttctctacatacagttcgtttttcccacatatgccctcacgtcaagctgagaccgcagaaacaggttatagcgaagattggacgaaggtatcttctcactatcgtgtcgaaaaggattttacttgtgagcaatgcaacgtgaagcttagagcacatcgacaccttctacatgttcatcatatcaatggggtaaaatctgataatcggcctaaaaacctcaaagctttatgtatcgattgccatagtaaacagcctatgcactctcgtatggcggtaagccattcggaaaggcagctcatcaacaagctcagaaatgaacagggcttgcttgaggatataggtagttggaaaagattatttgaatatgctgaccctggagttcatggtgtacttcacgcttgtaaagactttggaacaaagttaccagaagttggttactacgtggacgatggctttggcgacattgttgcaaaaattgaattggcttggcctgctcataagtttggtattgctatctcacaaaatgatattgatgacgcgatccaagaaggctggcacgtcctaacgattagtgagtttttggctgactaccgaactcaagcacataacttacgttggtaa

SEQ ID NO: 12827 - DNA, 1461 bp, Vibrio parahaemolyticus EN9701072
atggctgcttcgatcatctacaaagcaattcttgggactattccacagaaaggtgagtctgttgcaaaatccgtaggtccagaagaaattcactctgttatgtcggctcaactgaatgcttctaatgagctcttatctgcaataaaaggggacgaggactcatcgttaacttcacaaattaaaaacctacgaaccgatattaatgacggaaataaatcattagttcgtcatatggaaaaggctgttgagggcaatgaaaaattccaatttaagctttggcaaaagatggatgagttcggtgaacttttgtctaaatctgcaacagagcaagtcattaatgcattgaaagaggtcattgttgagtttaatgacaaactcacagagcagtttggagagaactttaaacgcttagatgagtcagtgaaaaagcttgttgattggcaagaaaactataaagaccaactagcagatatggccacgaagtatcagctaggtgtagatgctatatcttcgacagagaagtcagtagctaacatcaatgaatgtacagaagccatccctgcgactatggaaaaacttcaccaagttatggagttaggtcatggtcaagtgacggaactcgagcatcgcttagaagcatttaaagatcttcgtgataaagcagtagaagcaatgccgcaaattcgcgagcaaatggataataccatgtcggtaattggtgaatcagttaaagcggcttcgacacattacgaatcaatgctgcaagagtcacaaaatattattgataacttcagttcgactgcgactcagagtgttgaacatatgcgtacaaacttggaagcgggagccgagaatgtatcgagccaactaattgaaagttctcaaacgttgggtgggcaattattggaagcatcaacgacgttccaagatcaagtaggcacagcgacaggtggcctaagcaatgtgactagtcatctaactgatacgacagagcagatcagacaacaccttgaagactcaattactgagctgaatggacagcttcgcgtactggttgccgatattaaagacgatgcacgagaaacgggtaatgttctaaaagaagccaaccaagagttgctaaatagcacgaaagaaattcagtcagaaacgacatcagcgatcaaaaaacttcacgatcgcttagaaaccactctagaagaagtgttcaaagtgcaggcagaggcagtacgcagaacattcgatagcttagaagaccagatcacgcagtcagtaggtagaactggtagcgcagttgagaaacaagtggaagttcttgatctacaaatgcagcaagaaatcagccgaactatgaatgaaatgggtgaagcgcttgcgacgattactcaacaatttacccgcgattaccaagcgttaacgcgtgaaatgtcgaatgttgtaaacagtaaaattgcagtgtaa

SEQ ID NO: 12828 - DNA, 708 bp, Vibrio parahaemolyticus EN9701072; identical to SEQ ID NO: 12822

SEQ ID NO: 12829 - DNA, 1137 bp, Vibrio parahaemolyticus EN9701072; identical to SEQ ID NO: 12823

SEQ ID NO: 12830 - DNA, 1461 bp, Vibrio parahaemolyticus 3644; identical to SEQ ID NO: 12827

SEQ ID NO: 12831 - DNA, 678 bp, Vibrio parahaemolyticus 3644
atgggtgatggtggtgaacattggatgtcagtatcagatctaatggcaggtctgatgatggtgttcttgttcatttctgttgcgcttatgcgtgatgctatggttgagcgcgacaaaatcaaagaggtcgcagaaacttatcagaaaacccagcaggccatctatattgcgctgttggaagagtttgctaaagatcttgatacgtggggcgctgaaattgatcgagatacattgagtgtcaactttactgcgcctgaagtattgttcggtaatggtaaggcgaacttaactcagcaatttcaagtaattttgaatgatttttttcctcgttatcttgaagtgttagatcagtacaagccgattattcaagaaattaaaattgaagggcatacctctagccgttggaaccacgattccagcgattacgaggcttacttcaataatatgcgtttatcacaatcacggacgcgtgcagtacttggttacgtaatgaagcttgatgatgttcgtgcacaacattatggctgggtaaaaaataacgtagcggcagtagggtattcttcatctaaagcagttgttaaagatggtgtagaagacgaaaaacgttctcgtcgagtatcttttcgtataatcactaacgcagaagagcagatattgaagatcttgggggcggaatga

SEQ ID NO: 12832 - DNA, 1137 bp, Vibrio parahaemolyticus 3644; identical to SEQ ID NO: 12823

SEQ ID NO: 12833 - DNA, 1752 bp, Vibrio parahaemolyticus; identical to SEQ ID NO: 12821

SEQ ID NO: 12834 - DNA, 708 bp, Vibrio parahaemolyticus; identical to SEQ ID NO: 12822

SEQ ID NO: 12835 - DNA, 1137 bp, Vibrio parahaemolyticus; identical to SEQ ID NO: 12823

SEQ ID NO: 12836 - DNA, 1752 bp, Vibrio parahaemolyticus; identical to SEQ ID NO: 12821

SEQ ID NO: 12837 - DNA, 708 bp, Vibrio parahaemolyticus; identical to SEQ ID NO: 12822

SEQ ID NO: 12838 - DNA, 1137 bp, Vibrio parahaemolyticus; identical to SEQ ID NO: 12823

SEQ ID NO: 12839 - DNA, 1752 bp, Vibrio parahaemolyticus
atgactaactttcttgcgtccatgattgcctcgtatagtgctgcatcaatctcagatgcattcatctatacaatcttttttctacttatagcttctagtattttggcctttctaggaaaagctccaagatttacggcaagtacaactaacattcttacctctttaggtattttaggtacctttgcaggtatcgtcgtaggtttgatggaattcgatccctccaatattgatggcagcattgagtccttgttatcgggcttaaaaacagcatttttgacgagcttagttggcatggctgcttcgatcatctacaaagcaattcttgggactattccacagaaaggtgagtctgttgcaaaatccgtaggtccagaagaaattcactctgttatgtcggctcaactgaatgcttctaatgagctcttatctgcaataaaaggggacgaggactcatcgttaacttcacaaattaaaaacctacgaaccgatattaatgacggaaataaatcattagttcgtcatatggaaaaggctgttgagggcaatgaaaaattccaatttaagctttggcaaaagatggatgagttcggtgaacttttgtctaaatctgcaacagagcaagtcattaatgcattgaaagaggtcattgttgagtttaatgacaaactcacagagcagtttggagagaactttaaacgcttagatgagtcagtgaaaaagcttgttgattggcaagaaaactataaagaccaactagcagatatggccacgaagtatcagctaggtgtagatgctatatcttcgacagagaagtcagtagctagcatcaatgaatgtacagaagccatccctgcgactatggaaaaacttcaccaagttatggagttaggtcatggtcaagtgacggaactcgagcatcgcttagaagcatttaaagatcttcgtgataaagcagtagaagcaatgccgcaaattcgcgagcaaatggataataccatgtcggtaattggtgaatcagttaaagcggcttcgacacattacgaatcaatgctgcaagagtcacaaaatattattgataacttcagttcgactgcgactcagagtgttgaacatatgcgtacaaacttggaagcgggagccgagaatgtatcgagccaactaattgaaagttcccaaacgttgggtgggcaattattggaagcatcaacgacgttccaagatcaagtaggcacagcgacaggtggcctaagcaatgtgactagtcatctaactgatacgacagagcagatcagacaacaccttgaagactcaattactgagctgaatggacagcttcgcgtactggttgccgatattaaagacgatgcacgagaaacgggtaatgttctaaaagaagccaaccaagagttgctaaatagcacgaaagaaattcagtcagaaacgacatcagcgatcaaaaaacttcacgatcgcttagaaaccactctagaagaagtgttcaaagtgcaggcagaggcagtacgcagaacattcgatagcttagaagaccagatcacgcagtcagtaggtagaactggtagcgcagttgagaaacaagtggaagttcttgatctacaaatgcagcaagaaatcaaccgaactatgaatgaaatgggtgaagcgcttgcgacgattactcaacaatttacccgcgattaccaagcgttaacgcgtgaaatgtcgaatgttgtaaacagtaaaattgcagtgtaa

SEQ ID NO: 12840 - DNA, 708 bp, Vibrio parahaemolyticus
atggaaaagctattcggaaaaaccaaatctatgggtgatggtggtgaacattggatgtcagtatcagatctaatggcaggtctgatgatggtgttcttgttcatttctgttgcgcttatgcgtgatgctatggttgagcgcgacaaaatcaaagaggtcgcagaaacttatcagaaaacccaacaggccatctatattgcgctgttggaagagtttgctaaagatcttgatacgtggggcgctgaaattgatcgagatacattgagtgtcaactttactgcgcctgaagtattgttcggtaatggtaaggcgaacttaactcagcaatttcaagtaattttgaatgatttttttcctcgttatcttgaagtgttagatcagtacaagccgattattcaagaaattaaaattgaagggcatacctctagccgttggaaccacgattccagcgattacgaggcttacttcaataatatgcgtttatcacaatcacggacgcgtgcagtacttggttacgtaatgaagcttgatgatgttcgtgcacaacattatggctgggtaaaaaataacgtagcggcagtagggtattcttcatctaaagcagttgttaaagatggtgtagaagacgaaaaacgttctcgtcgagtatcttttcgtataatcactaacgcagaagagcagatattgaagatcttgggggcggaatga

SEQ ID NO: 12841 - DNA, 1137 bp, Vibrio parahaemolyticus
atgaaactaacgcttaatcttcattcccttatgcgtgcgattgaaattatggagccagaaaaaaaaggcgtatttgtctgggaccatcaaataacagaaaaaagcaaaattgatatagagcttgctcagggcaaagacgttgagctcaaagatgtcgatattgattctggtttacttagctatcaaggaagacaagttctcctgtatataaaagatcatggtagtgctgttcaatcagttattaaaaaaccatcaactggcaataaatatcatgtggctgattgttctaagttgaaatctatgcgtgcggaagggcgattcgaaagatatgtagttatcaatgatacatccggtgagtttcctatatctggtagcgggtattgtggtcaaagtaaggaagagggctatgcaagattaaacatttgcaaattatgcttagggcaattgaattataagggctatagcagtggcggtcatcgttcgaatatcttcaatgaatttgatatgccagaattctttgctacttatagctctttcttcccgcatatgccatctcgacgagctgagactgctgagagtggctacagtgatgattggtcgaaaatatcctcccactatcgcgtagaaagaaactttgagtgtgaagaatgtgaagtgaatatgcgctctaaccgagcacttctgcatgttcatcatgttagtggtgttaaatcagataacaggccgtcaaaccttcgagcactgtgcatcgactgtcacagcaaacaacctatgcatgagcatatggctctcagccatagagagcgtcagacaataaatgatctgcgtaaacaacaaggtttacttgatgacctcggtgagtggcaagagttgtttgattactcagatccaggtgtacatggtgttttgcatgcttgtcgacaagcgtatttgaaactcccccaaattaactattttgttgaagacagttgcggaggtatagcagctcggcttgaacttgcgtggccgaagcacaaatttggtgtcgcaatatcaatgaacgatattgaagatgcaaacagtaatggttggcaggtcgtgggtattaatgactttttggaaaattacaaatcacaagctcataacttaaggcgctag

SEQ ID NO: 12842 - DNA, 1752 bp, Vibrio parahaemolyticus
atgacagaattatttgcaacgttcatagcgtcctatacggctggttctatttcagatgccttcatatacgtgatcttactgcttctagtattgtcgagtgttcttgcatttctaggcaaggcccctaggttcactgcaagtaccaccaacattcttacctctctcggcatccttggtactttcgcgggcattgttgttggtttgatggagttcaatccgtcggatattgatggaagcattgagtcattacttgcggggttaaagacggcctttttaaccagtttggtcggtatggctgcctccatagtttacaaggcgattcttggagcaattccgcaaaaagatgaatccgcagtcaagagtgttgggccagaagaaatctattctgttatgtctgctcagctaaatgcatctaatgagttgctatctgcaatcaagggtgatgaagattcatcgttgacctctcagattaagaacctccgcacagacatcaatgacggacaaaagtcattaggtagacatcttgaaagagctgcagagaacagcgaacagtttcaacataaattgtggcaaaagatggatgagtttggcgatctactatcgaaatcagcgacagagcaagttattaatgcgcttaaagaagtaattgttgaattcaatgacaagctaactgaacagtttggtgaaaactttaagcgtttagatgagtcggtgaaaaagctggttgattggcaagaaaattacaaaaatcagttagaagatatgtcaaacaaataccaactaggagttgatgcaatttcttcgacggaaaaatcagttgctagcatcaatgagcgtgctgaatctatccctgcaacaatggaaaaacttcatcaagttatggagttaggtcatgggcaagttactgagcttgaacacagacttgaggcatttaaagatttgagggacaaagcagtagaagcaatgcctcaaataaaagagcagatggatacaactatgtccgtgataggagagtccgtaaaagctgcttctactcattatgaatcgatgcttgtagagtctcaaaaaattatcgataacttcagttctaccgcccaccaaagtgtggagaccatgcgtaccaatttagaagatggcgcgaaaaaagtttctactgagcttgaaacaagagcggtagaaattggaggacgcttggcagaagcatcaaatgatattactgacaacgtgactacagcatcgggtgcattgcagaatagtgccacatatctgacagacaacgccgagcaagttaagcaacaattggaagattcaattgtcgagcttaacagccagttacgcgtgctcgttgccgacattaaggatgatgcgcgtgaaacgggtaatgtgttgaaagaagcaaatcaagagctgctaagcagcacgaaagaaattcagacagaaacaacgtcagcaattaccaaacttcatgaccgtttggaaaccaccttagaagatatattccaagtgcaggcgcaagctatacgaagaacttttgatagcttggaagatcaagtaacgcagtctgtaggaaagactggtagcgcagttgaaaaacaagtagaagtcctagacctgcaaatgcagcaggaaattaaccgaacaatgaatgaaatgggcgaagcacttgcgacgatcacgcaacagtttactcgtgattatcaaaagctaacgcgtgaaatgtctaatgttgttaatagtaaaattgcagtctag

SEQ ID NO: 12843 - DNA, 708 bp, Vibrio parahaemolyticus
atggaaaagttattcggaaaagctaaaacaacgggtgacagtggcgaacattggatgtcggtttcagaccttatggctggtttgatgatggtgtttttgtttatatcggttgctctaatgcgtgatgcaatgttagaacgcgacaaaataaaagaagtagctgaaacatatcaaaaaacacagcaagctatttatatttcattgctggaagagttcgctaaagacctggataagtggggagctgaaatcgacagagatacgctgagcgttaactttactgctccggaagtactatttgcaaatggtgaagcgaatttaactgagcagtttcagatcatcttggacgattttttccctcgttaccttaaagttcttgagcagtacaagccaattattcaagaaataaaaattgaaggtcatacttcgagccgttggaatcatgactcaagtgactacgaggcttatttcaataacatgcgattatcacaatcaagaactcgtgccgttcttggttacgtaatgaatctcgaagaagtaagtcgcgaacattacgggtgggtaaaaaataacgtagcggcggtaggttattcatcttccaaagcagttgtgcatgatggtgttgaagatgagaagcgatcccgtcgggtttctttccgcgtaattacgaatgcagaagagcagatcttaaagatcttgggggagggatga

SEQ ID NO: 12844 - DNA, 1086 bp, Vibrio parahaemolyticus
atgaagttaacgcttaaccttagctctttaatgcacgcgatagaagtgatggagccggaaaaaaaaggtgcgttcaccttggatcttcaagaaagtcatatcgataagatttctgcagagttagaacagggtaaggacgttgagcttaaggatgttgagcttgaatctggccttctaagttataaagggcgtcacgtaaccctttatatcaaagcgaacggttcaagtgctcgattccacgtctcagactgtaaaacacttcagtcaatgagagctagcggccgttttgagcgctatgttgtcactaacaatacttccggtgaatttattgttgactcaggctatggggaaactaaagccaggttgaaagtctgtcagaactgtttacgtaagctcaactataaaggttgcaacaccactacagatatcagttcaatcgtaagaacctttgatatgggggagttcttttctacatacagttcgtttttcccacatatgccatcacgccaagctgagaccgcagaaacaggttatagcgaagattggactaaggtatcttctcactatcgtgtcgaaaaggattttacttgtgagcaatgcaacgtgaagcttagagcacatcgacaccttctacatgttcatcatatcagtggggtgaaatctgataatcggccgaaaaacctcaaagctttatgcatcgattgccacagtaaacagcctatgcactctcgtatggcggtaagccattcggaaaggcagctcattaataagctcagaaatgaacagggattacttgaggatatcggtagttggaaaaggttatttgaatatgctgaccctggtgttcatggtgtacttcatgcttgtaaagactttgggacgaagttaccagaagttggttactacgtgggcgatggctttggcgacattgttgcaaaaattgaattggcttggcctgctcataagtttggtattgctatctcacaaaatgatattgatgacgcgattcaagaaggctggcacgtcctaacgattagtgagtttttggctgactaccgaactcaagcacataacttacgttggtaa

SEQ ID NO: 12845 - DNA, 1548 bp, Vibrio parahaemolyticus
atgctatgcgtttcactagccgttctatttatggggtttatgtggggtgtttttttagtcaataaaaggaacccttcaaatttcgtggtcacagtgccggggttactgacgtcaggaggtgttttttttacgttctttggaattgctcttggcctgtatgactttgacccagataatcttaatagcagcatatctactttgttgagtggtttaacattagctttctggtcaagtattgttggcatgggtttctctatgcttttcaaaatgtgttacctacctaagtactacagcaagcaatcgcaattaacggccgaagatatgcagaatgtcctttgttctcagctatccgaatccaaagcccatcaccagagtagccaacacttactctctgaacttgttagtgaaatacaactgctaagagcttattcatcgcaagagcacgctcaaagccaagagagtttcaataaattgactagcgaaattaatcagtttgcttcctctgtatcgtcacaagcctcacaacaaattgcggagtcactgcaaagctcaattgaaggctttaatcaaggtttaatggggcaatttggggcaaactttcaacgtttagatgagtccgttctcaaaatgttgcaatggcaacagcaatataaacttcaggtagagcaattgaccagtgcgtttgaacatgctgtggaaagtgtcgtggctactgaacaaagcttaagtttgataagcaaccatactcaaacgattcccgatgctatggatcagctatctgagaccactgatacgtggaaccaacaaattacggaactggatctgcgcttagaagcttttagcactattcgtgataaagcggtgcaagccatgccagaacttcagaagcaactggatgaattatgtcagcgagttgataagtctattttgaacacctgtgaaagcctagaaaaaggtgtacttaaagcttcaacagaacttcaagacaaagctttggcattgagcgaaaagctggtagaagcgacggatggtataggtggtgatttgagtaatgcttcagggcaaatagaatctatgaccaaccacttagctgcgtcttctgacaagattaaaggaactttgcatgattcaattagtcagctagaagataggttgaatagtttggttaatggaactaaagaagatgttcttgatatttcgaaaacgctgtcaaatgtgaatgagagtttaatagaaaagcaccgtgaacagttagataaaagcgaacaactgttgactaaagcacatgactcaattgataagcggattgaggagacgatgaatcagcaaatgatgggctcacttcaagtgcagaatacgataaaaagccacttggttgaaagctctgccgtattccaccaaaacattcagcttgaattggaaagtatattgactgacttgggtaaaggtttactcgatatcacggcagagtattcaaaagcagcaaaacgattgaacaaagagctacatcgatttgagcttggtgaagtattagaagaggcgagctga

SEQ ID NO: 12846 - DNA, 714 bp, Vibrio parahaemolyticus
atgcacaatgggcttttccaatcgaggactgcatcttctggtgaggagcattggctttctgtgaccgatttgatggctggactgatggtgatttttttgttgatcagtgtggcgttgatgaacagaacagatattgaaaaaagggctattgagcgcattgccgtaaaaataagcgaaaagcagctagagattcatagggcattggctgaagagtttgaggaagattttaaacgttgggaaatagattttaatgagcagagaccgttgattattgatttcaatgcagaacgttataaattcactaaaggtaaatctgctcttcctgaggaactaacttttgttttaggtgagtttttccctcgctatttgagtgtactggaacgctataggaacgacatcaaggccatacaaattgaagggcatacttcttctggatggaataacgatgattcagagtttgatgcgtattataaaaatatgaatctttcacaaaatcgttcaaagcagctttttgatcacgttatgtctcaaggtgaaccacttcaaaagcatctatattggttgagaaccaagctgtcagcaatgggctatggcccttctaagctcatacttactgagaatgggtatgaagataaggagcggtcacgtcgcatttcatttcgcgttatagctgactccgatattatcatgaaagatattttagaggcccaatga

SEQ ID NO: 12847 - DNA, 840 bp, Vibrio parahaemolyticus
atgaagctaaacgttgacctaagtgaatttaataaactagttgatgaaaatgtctcagagcgcctgagccagttttcaatcagtttagactcttttagctttgatagacttgatgagcagaggaaagtcccacatttggttacagatttcgacttagacatttctttaaatgggcaattgcttagttatgatggtcacggagtcattgtatatatcaaagagcactctgacttatctaaagctgtagctgacccatataacgaagcaaagcgatatcatttgaccgactgtaaaactattcaagatgaaaagaaagacaaacgttttggtcgtttagtggctctccgttatacggaaggaggtattcctatctgtgacgacaaagacaatacagatgatgctaagcttgttgtctgtgggcgctgtttgcgtaaagtgaaataccttccgtatataaaagctggtagtgatgaagagaaaaagcgtgttcaaatggcgttcagtttgcgtggattccttaaaaaacaatacagcttcccagaggaaagtttaccttttcgacatgccgaatttagcaacttttcctacacaagtgactggaagagcgtaagcgaggtatacaagttaagtcacaactacagttgtgaggaatgtggcgtagggttaaaacaacgaaaagaattgctccatacacatcatattgatggggtgaaatctaacaatcatccttcaaacttgatggcattatgtgttgagtgccatagcaaacagcccaagcataagcacttaaagcctaacgctggagtattacgctacctcaaggaaaagcgcacggtatga

SEQ ID NO: 12848 - DNA, 1752 bp, Vibrio parahaemolyticus; identical to SEQ ID NO: 12821

SEQ ID NO: 12849 - DNA, 708 bp, Vibrio parahaemolyticus; identical to SEQ ID NO: 12822

SEQ ID NO: 12850 - DNA, 1137 bp, Vibrio parahaemolyticus; identical to SEQ ID NO: 12823

SEQ ID NO: 12851 - DNA, 1752 bp, Vibrio parahaemolyticus; identical to SEQ ID NO: 12821

SEQ ID NO: 12852 - DNA, 708 bp, Vibrio parahaemolyticus; identical to SEQ ID NO: 12822

SEQ ID NO: 12853 - DNA, 1137 bp, Vibrio parahaemolyticus; identical to SEQ ID NO: 12823

SEQ ID NO: 12854 - DNA, 1245 bp, Vibrio mimicus CAIM 602
atgaatcgttatttggagcaagcagccatagacagtagcaattttcaaagcaaattgtggcagaagatggatgagtttggtgaccttttatcaaaatcagcaacggaacaagttattaacgctttgaaagaagtaatagttgagtttaatgacaaattgacagaacagtttggtgaaaacttcaagcgtttagatgagtccgtcaagaagctagttgactggcaagaaaattacaaagcacagctagcagatatggcaatcaaatatcagatgggagttgatgccatttcatttactgaaaaatcggttgcaagtattcgtgaacgtacagaagcgatcccagcaacgatggaaaaactacaacaagtgatggagtttggtcacgagcaagttattgagcttgaacatagattagaagctttcaaagatcttcgtgataaagctattgaagcaatgcctcaaattcgtgaacagatggataataccatgtcggttatcactgaatctgttcaagctgcatcaagccactacgtagcgatgctgcatgagtcgcaaaacataatcgagcaatttacttcaactgcgaatcaaagtgttgaacatctacgcatgaatttagaaactggtgctgaaaaggtatctcaacagctaattgaaagctcccatactttaagtggcaaactagcagaagcgtcattagatattcaggaacaagtcggtactgccactggtggtttaagcaatgttacgagtcacttgactgatacaacagaacagatccgccaacatcttgaagattccatcactgagctaaatggtcaattacgtgtacttgttgcggacatcaaagatgatgctcgtgaaacaggtaaagttttgaaggatgctaatcaagaactaatcattagtacgaaagaggttcaatctgaaatggcttcggctaccactaagctacatgaacgcttggaaacaacgttggatgaaatattcaaggtacaagctcaagcagtgcgtagaacattcgatagtcttgaagatcagattacacaatcggtaagtaaaacaggcagtgcagtcgaaaagcaggttgaaattttagatctacagatgcaacaagaaattaatagaaccatgaatgaaatgggagaggctctggcaacaatcacccagcaatttactagagattaccaaaagctggttagagaaatgtcaaacgtggtcaatgcaagtatagctgcagtgtaa

SEQ ID NO: 12855 - DNA, 708 bp, Vibrio mimicus CAIM 602
atggaaaaattatttggtgtttctaaaactgccgagcaaggtggtgaacattggatgtcagtatcagatctcatggctggtttgatgatggttttcctctttatatccgtagctttaatgcgagatgcagtggttgaacgtgacaaaataaaagacgttgctgaagcttatcaaaaaactcaacatgcgatttatgtttcactattagacgaattttctaaagatcttgaaaagtggggagctgagatagatagagatacgctaagtgtaaattttacagctcctgaagtgctttttgctaatggtaaagctgatttgacacagcaatttcaagtcattctcaatgacttttttcctcgttaccttgaagtccttgaacagtataagccaacaattcaagaaattaagattgaagggcatacctctagtcgttggaaccatgattcaagcgattatgaagcctatttcaataatatgggattgtctcagtcacgtacgcgtgctgttcttagctatgttatggctattgataaagtgagaataaatcattacggatgggtaaagaataacgttgctgctgttggttattcatcatcgaaagcagttattaaaaatggtttagaagatgaaaaacgctcccgtagagtatcgtttcgagtgatcacaaatgcggaggcacagatcttgaaaatactgggggcagaatga

SEQ ID NO: 12856 - DNA, 1119 bp, Vibrio mimicus CAIM 602
atgaagttaattctcaatctactctctctgaaaaatgctatcgccgaaatgaagcctgatgaaaaaggcatattcgcgtgggtacgcgaagtcacaccgataaataagattgattatgagttagcacaaggtaaggatgtcgaactcaaagatgttgatattgattcggggctactcagttacaaaggtagacaggttcttttatatataaaggatcatggttcaatgactcaatctgcaattaatattccatattcaggtaataaattccatgttgcagattgttcagccttgaagaaaatgagatctaaaggacgatttgaaaggtacgttgcaactaatgatacctcaggagagtttttgatttctggagatggaattgaaggaaaagcgatattgagagtctgcaaaagttgtctcagtgctttgaactatagagggtggtctacaggtgaagaacgtaacaaaatactgaataattttagcatgacagagttcttttcaacctacagttccttttttcctcacatgccttcaaggattgctgaaacagcggaaagcggctacccaagtgattgggccaaaatatcttctcattatagagttgagaaaaattttgaatgtgaacaatgcggcgtgaacatgcgttctcatagagcacttttacatgttcatcatataaatggtgttaaatctgacaataggccttcgaatttaaaagcactttgtattgattgtcatagtaaacagcctatgcatgaacatatgactctgagtcatcgtgagcgccaaactattaatgatttgcgtaagcaacaaggccttttagatagattaatgacatggaaagaattgttcgattatgctgatcccggtttacacggcgttatacatgcatgtagagatgctggtttaaaattacctgtggttaattatttagtaaaagatagctctggtaaattagccgctcatctggagttagcatggccgaaacataagtttggtattgctatatcagaaaatgatattaatgatgctaggagtaatggttggagtgttgttggaatgaatgagtttttagatggctacaagttacagtcttataacctcaaattctaa

SEQ ID NO: 12857 - DNA, 1752 bp, Vibrio campbellii HY01
atgactgattttcttgcttctatcatcgcttcttatagtgctgcatctatttcggacgcattcatctataccatccttttgctacttgtagcttctagtattttggcttttcttggaaaagcgccgagatttacggcaagtacaactaacatccttacctctttgggtatcctaggtacttttgcaggcattgttgtaggtttgatggtattcaatccaactgatatcgatggaagcatcgaatctctgcttgcgggcttgaagactgcatttttaaccagtctagttggtatggctgcatcgatcatttataaggcaattctagggaccattcctcagaaaggtgaagatgcaattaaaggtgtgggccctgaagaaatcttccaagttatgtctcaacagttaagatcgtctaacgagttgttagcatccattaaaggtgaggaagatacctcgttagtatcccagctaaagatactacgaacagaccttaatgatgctcaaaaagagcaaactgcttaccagaatctaaaagtggcacaaaccgaaaagttccaagtaacgctctgggataaaatggatgagttcggtgaccttttatctaaatcagccacagagcaggttattaatgcactgaaagaagtcattgttgagtttaatgacaaactgacagagcagtttggtgagaactttaagcgattagatgagtcagtgaagaaactcgttgattggcaagaaaactataaagaccaactagaagacatggccacgaagtatcagctaggtgtagatgcaatatcttcgacagagaaatcagtagctagcatcaatgaacgtgcagaagccatccctgcgacgatggaaaaacttcaccaagtgatggagttaggtcatggacaagttactgaacttgaacatcgactagaggcatttaaagatcttcgagataaagcagttgaagcaatgccgcaaataaaagagcagatggactcaacaatgtctgttattggtgaatcggttaaagcagcgtcaactcattacgagtcaatgctacaagagtcgcaaaatattattgataacttcgcttcaaccgctactcaaagtgtggaagtcatgagagtaaatctagaggaaggtgcgaataaggtatcgagtgagcttgaaaatagagcggtggaaatcggtagtagcctcgcagccgcgtctaatgatattacagataatgttacaaccgcgtctggagcgcttcaaaatagcgcatcatacataacagacaattcagaacagatcaaacagcatttagaagacgcgatggttgaattaaatggccacttacgtgttcttgttgctgatatcaaagatgacgctcgcgaaacaggcaaagttttaaaagaggccaaccaagagctactttcgagcactaaagaaatccagtcagaaacaacctcagcaattgcgaaactgcatgatcgtttagaaaccacgctcgaagaagttttccaagttcaggcgcaagcagtgcgtagaacgtttgatagcttagaagatcaaatcacccagtcagttggcagaaccggaagtgcggtagagaagcaagtagaagtacttgaccttcaaatgcagcaagaaatcaaccgaaccatgaatgaaatgggtgaagcgcttgcgacgattactcaacaatttacccgcgattaccaagcgttaacgcgtgaaatgtcgaatgttgtaaacagtaaaattgcagtgtaa

SEQ ID NO: 12858 - DNA, 708 bp, Vibrio campbellii HY01
atggaaaagctattcggaaaaacaaaatctacgggtgatagcggtgaacattggatgtcagtatcagatctaatggcaggtctgatgatggtgttcttgttcatttctgttgcgcttatgcgtgatgctatggttgagcgtgacaaaataaaagaagtcgcagaaacttatcagaaaacccagcaggccatctatattgcgctgcttgaagagtttgcaaaagatcttgatacgtggggcgctgaaattgatcgagatacattgagtgtcaactttactgcgcctgaagtattgtttggtaatggtaaagcgaacttaactcagcagttccaaattattttgaacgatttctttcctcgttaccttgaagtattagagcagtacaagccgattattcaagagattaaaattgaagggcatacctctagccgttggaaccacgactctagcgattacgaggcttacttcaataatatgcgtttgtcacagtcacggacgcgtgcagtacttggctacgtgatgaagcttgatgatgttcgtgcacaacattatggttgggtaaaaaataacgtagcggcagtagggtattcttcatctaaagcagtcgttaaagataatgtagaagacgaaaaacgttctcgtcgagtatcttttcgtgtaatcactaacgcagaagagcagatattgaagatcttgggggcggaatga

SEQ ID NO: 12859 - DNA, 1137 bp, Vibrio campbellii HY01
atgaaactaacgcttaatcttcattcccttatgcgtgcgattgaaattatggagcccgaaaaaaaaggtgtatttgtctgggaccctcaaattactgaaataagcaaaattgatatagagcttgctcagggcaaagacgttgagctcaaagatgtcgatattgattctggtttacttagctatcaagggagacaagttcttctgtatataaaagaccatggtagtgcggttcagtcagttattaaaaacccatcaactggcaataaatatcatgtggctgattgttctaagttgaaatctatgcgagcggaaggacgcttcgaaagatatgtagttatcaatgatacatccggtgagtttcctatatctggtagcgggtattatggtcaaagtaaggaagagggctatgcaagattaaacatttgcaaattatgcttagggcaattgaattataagggttatagcagtggcggtcatcgttcgaatatcttcaatgaatttgatatgccagagttctttgctacctatagctctttctttccgcacatgccgtctcgacgcgctgagaccgctgagagtggctacagcgatgattggtcaaaaatatcttcccactatcgtgtagaaaagaactttgagtgtgaagaatgtaaagtgaacatgcgttctaaccgtgcgcttctgcatgttcatcatgttaatggtgttaaatcagataacaggccgtcaaaccttcgtgcactgtgtatcgactgccacagcaaacaacctatgcatgagcatatggctctcagccacagagagcgtcaaacaataaatgatctgcgtaaacagcaaggtttacttgatgatctcggtgagtggcaagagttgtttgattactcagatccaggtgtacatggcgtattgcatgcttgtcgacaagcgtatctgaaactccccgacattaactattttgttgaagacagtttcggagggttagccgcacggcttgaacttgcgtggccgaagcacaaatttggtgtcgcgatatcaatgaacgacattgaagatgcaaactgtaatggttggcaggtcgtgggtattaatgactttttggaaaattacaaatcacaagcttataacttaaggcactaa

SEQ ID NO: 12860 - DNA, 1659 bp, Actinobacillus pleuropneumoniae serovar 1 str. 4074
atgatcacctttattgaaaattatttaaaaagccttcctgcagaaagtattactaactactttttctatctaatgcttggtattactacttttaatctttttttattctttgcattacctaatattcgagaaagtttccgttctagaattcttgattacgccccaacacttttaacttcattggggatattaggaacattcacagggattgtgtcagggttactaaattttgatattgagaatatcgataacagtattactgaattactatcaggaatgaaaacagcttttttaaccagtgtaatcggggttacgctctctatttccctcaaagtaatctttactctatttaagaaaaagaataagaaaagtgatgaaaataattcaatggatattaagagtattgttaatacgctattcaagcaaacagaatacttaaaattgcaaacagaaaaatcagatgtattagccgataatttgcaagcaatggtaaaaatgttaggcagtgagtcagatggtagcctacttggacaagtcaaattattaagaagtgatttatccgaccaacaaaaatcattgcaaaaaacgtttactccaatggcagaaaatttagaaaaaattctaaattcatttaacgatcaaaaacaaatattctcaaattttgaaaataagttatggattaaattacaagactttgcggatatgatgtctaaatctgctacggaagcagttattgatgctctaaaaaaagtaatccaagacttcaataataatttaactgaacaatttggtgagaattttaaacaattaaatttggctgttattaatttggttgaatggcaagagaattacaaaaatcaattaaatgaaatgatctctttgtataattcaggaatacaatctttaacaaccacagaaactgcaatttcaaatattgaaaattcaactcagtctattccaactacgatggaaaaattagatatgataattcgttctaatcaacaacaaattgatcagctcgatgggcatttaaagagctttgcacagttgcgtgacaaagctgtcgaagcaattccagaagttcagaaacaaatttcagcaatgttggagaatgtaaacaaagcaaattcagatttaactcaaggtttaaaagagagtggggaaaaattacaacaacatattgcaaatacgtcggataaattaggacaatcaataacagaaacttcgcagaaactaggcgaaacagctaatttaatttcaacacaaaataaagaattaacagcatatcaaaaacaattatttgagcaaattacgcaatttgcgagtcgttggaatcatgaattcaacgataatgtaaagcgtattcatgaagcatttaaccattctgttgaagaaatgattaagtcgcaagtttcagaaaaccgtaagctaatgctttcactcgaaaaagaaagtgaaaatgccttgaaatctactgctgaaagtgtacagaaacaattagatttaattgataagtcaatgcaagaagaaataaatcgagtaatgaaagaaatgggaggagcccttgccgcaattgctaataagtttactgatgactatgtccgtttaacagaacaaatggcaaaagtagttcagcaaaataatcgaggtagattctaa

SEQ ID NO: 12861 - DNA, 693 bp, Actinobacillus pleuropneumoniae serovar 1 str. 4074
atgcagattgatttttctaaattgaaattacagcaacaagaatctgaagattctcaatggttacctgtttccgatttaatgtctggtttaatgattttatttctctttattgcggtgagttttatcttaaacgccaagcgtgttgccgataattaccaagataatcaagaaaaaatctatcaggcattgcaaacagaattctctcctaaactgaaagactggaaggcaaaaattgataaagatacactaacttttatttttactgatccagaagttctatttgaaacagggcgttctgatctcaatgcaccatttaagaaaattttagatgattttttccctcggtatatgaaagtggttgataattataaaacatcaattagcgaaattcggattgaagggcataccagcactgaatgggatcataaatcaagtgatgatatggcttatttcttaaatatgcaactttcccaagatagaactcgctcagtgttaatttatttatatcaactagaaaacattgctcaataccgcgattggataaaaagcaatttatctgccgtaggattatcatcatctaaaaccattaaaaatacccaaggtatagaagataaagaggcttctaagcgagtaacttttagaattatcactaacgctgaagaacaattaagaaaactttctgagataaaataa

SEQ ID NO: 12862 - DNA, 810 bp, Actinobacillus pleuropneumoniae serovar 1 str. 4074
atgaaattgtcagtagattttagagccttatttacagcagtaaagaaaatgggggtggagaaaatcacacctatttccttattaccaaccaaccaagcgataaaaacagattttgaagttcaaatcaattctcgatctggttttgaagtatcaaacattgaagatgttgaggtaaaatttggtgtatttacttataacggctggcacgttctgctatttatacctgaccatagctatggctctacttttgatagaacaatagaagattcaagccaaggaaataaatatcatttaacagattgtagtactttggaaaatatgcgacaaagagggagattccaacgctaccacgcaacgaataatactgaaggaatatttactatttttgatgcttatgggcgagaagctgaagttgcgttgcatgcttgtaagaattgcttacgccaattaggatattatccatacaacacatttaatttagttggtttttttgaaaaatatgactcccatttttgcaatttacccaaagcaattaatcaggataaagcaggctatcatcaagactgggaaaatatttctcgacaatatcgtgaaagccaccagtattgttgtgagcaatgtggagtaaatttaacatctcataagcatctattagatgtacatcataaaaatggtgtaaagcaagacaaccgaaaagataatttaattgcactatgtaaaatttgccatagcgagcaggatagccatggtcattattatgttagtttaatggatagacaaatcattgaatcattacgttctccattttaa

SEQ ID NO: 12863 - DNA, 1659 bp, Actinobacillus pleuropneumoniae serovar 9 str. CVJ13261; identical to SEQ ID NO: 12860

SEQ ID NO: 12864 - DNA, 693 bp, Actinobacillus pleuropneumoniae serovar 9 str. CVJ13261; identical to SEQ ID NO: 12861

SEQ ID NO: 12865 - DNA, 810 bp, Actinobacillus pleuropneumoniae serovar 9 str. CVJ13261; identical to SEQ ID NO: 12862

SEQ ID NO: 12866 - DNA, 1659 bp, Actinobacillus pleuropneumoniae serovar 11 str. 56153; identical to SEQ ID NO: 12860

SEQ ID NO: 12867 - DNA, 693 bp, Actinobacillus pleuropneumoniae serovar 11 str. 56153; identical to SEQ ID NO: 12861

SEQ ID NO: 12868 - DNA, 810 bp, Actinobacillus pleuropneumoniae serovar 11 str. 56153; identical to SEQ ID NO: 12862

SEQ ID NO: 12869 - DNA, 1770 bp, Haemophilus somnus 129PT
atgctggcgtttattgaaaactttctgaagtcgctttcttcatcaactattaccgagtatttcttttggattttacttggtattgctgttttgggtttgttgacgtttttaatctctcgtaaacattatcatagccaatttacgaaatttgcagagtatactccagttctgttaacttctgttggtattcttggtacatttactggcattgtagcaggtttattaaattttgatattcatcaaattgataatagcattagttcattgttggagggaatgaaaactgcattttttaccagtgtaattggcgtggcactttctatactgttgaaaatcatttatacactggttggtaaagtaaagaatgaaaagaaacgtgatgttgatattgaagaaattgctgctgcgatttgccgtcaagcggaagaaaatgagaaacaatcagcaagtttactgttgctgacagattggagtaaagatcaggctatcacacaaaacggagctttaaccgcattacaaagcattgcgagaacattgggtagtgaagctgaaagtagtttattggggcagataaaattactccgtgctgattttaatgatgcgttcaaagagctcaaaaatcagaaaatacaagcgatcggatttttacaaaaaatgactgaacaaagcgaagaaaatcaagttcagttcacgaaatttgaagaaaaactttctcagcgattacatgattttgctcagattttatctaaatctgcaacggaaactgtgattgaagcattaagacaggtcattgtggaatttaatcaaaatttaatggaacagttcggtgaaaatttcaaagaattaaaccgtgcagtgaaggacttggttcaatggcaagaaaattacaaaacacaattaaatgagatgattgtactttatcatgcaggggtgcagtcgctggaaagtacggaaaaatctgttttgtcgatagagcagaaatctcaagtaattccacaaacgatggaaaaattgggagaagtgattgaggtgaatcaacatcaaattgaacatcttaatgcgcatttaagtggttttgccgaattgagggataaagcgattgatgcgattccacaaactcagcaacaggtgaaactaatgctgaataatgtagaaactgcgaaccaaagcttaactgaagcgttgaagaaatcagcgacacaaatggaagccgatttaaccagcacagcaagaacctttgctaataaatcagtggagttaacagagaatttagcgaacgttattcgtgatagtgcaaataattttgcaacacagagcttacagggactgcaagcgttaaatgaaagtagtaaagaattaaaggagactgctcatagtattgcacttcaccaaaaagagttgaatgccgaacaacagaaaaccatcaatcaagttattaaatttgtagaaaattggcagaaaacgtttgaacaacagagtcaagaaattttccaaaacttcgtccgaaaagtagaagatatgagtcgccagcaagtagctgagaatgaacgtttaatgcgtagtttgcaggaagagggtgaaaaaacagtaaaaggcacagctgaatatgtcaacgcacagttgaaacttattgatgattcaatgcaaagagaagttgagcgggtaatgaaagagatgggtagtgcgttagcgactattagtcgccaatttacacaggattacactaaactagttgaggcgatgagtaacattgtacggagtcgtatttga

SEQ ID NO: 12870 - DNA, 690 bp, Haemophilus somnus 129PT
ttgatgattgatttagagaaaatttctagtaaagaggacggtgaagatacgcaatggttgcctatgtctgatttaatgtccggtttgatgatgctatttctctttattgccgtgagttttatcttgaatactaaacgggtagctgaaaagtatgatgataatcagcaaaaaatttatcaagcgttgcaatctgaatttcaaagtaatttaacaaattggaaagcaaaaattgataaagaaagtttaacctttatttttactgatcccgaggtgctttttcaaacaggacgtgctgatttacaatcaaaattcaaggaaatcctcacagcatttttccctcgttatatgaaagttatcgatcaatatcgggattttattagcgaagtaaggattgagggtcatacgagtagtgattggagtcgcttagtctcagccgatgtggcctattttgaaaatatgagactatcgcaagaacgcactcgctcagtattggaatatacttattatttgcccgaagtagaaaattatcgtggctggataaaaaagaacgtttctgctgtaggactatcttcttcaaaaattgtattaaacactgatggaagtgaaaatagagaggcttctaagcgcgtaacttttcggattattaccaatgctgaggcacaattacgccgtttgtcggaactaaaataa

SEQ ID NO: 12871 - DNA, 810 bp, Haemophilus somnus 129PT
atgcgattaaatgttgatttgagcgaactatggcaatctgtcaaacagatttccaagataaaaattgatattgatttggaaaaattgacggcattaaatccgatcaataccactgtcgggcttgaaattccgattgacgaaattacctttactccgttgccgacttatcaaggtaaacaggttatcctatttattcccgatcatagctataatacgctttttgaggagactttatgtgatccgacaaaaggcaataaatatcatctgacggattgtactacattagaatcaatgcgacagagaaatcgttataaacgctattttgcaacaactaacttaagtggcgaatttacaatttcgaatggtgcggggcaaagtgctgaagtgcgattacaggtttgtcaaaattgcttaaaaaaattgaattataaacaatttaaccgaaatcgctggctggtgctaaatatgtttgatttagctgaattctttgctcactatcgaacctcattccgccgagatattgaaacacagaatatggttgcagaggaagctggatcgtacagtactgattggcggttaatttctcaacgttatcgagaaggacagaaatggtgctgcgagaattgtggcttgaatatgcaatcttacccgcatctacttgatgtacatcaccgtaatggtaacaaacgggacaattcagatcaaaatttacaagctctttgtcgagagtgccatattcagcaagatatgcacacgcatatgcaattgagtgaagaggaaaggcgaactttttcgtatttgagaagatag

SEQ ID NO: 12872 - DNA, 1590 bp, Bacteroides fragilis str. 3719 T6
atggacttttcacttgacaaatcaacaatcatatggcttatagcaattgttgctggtacctgttctctatatctatatatcaaaaagctaaaggacaaaaacaaattaatatcaaatcgtcgcttagtcgaaaacatcccttcaattatttctacaatcggtgtactaggtactttctatgggattaccagtggacttctttcatttaattctgatgaccttgatacaagtattcccgcattattagatggtttaaaaacagccttctttacttcgattgctggtatggtatgttcattaattatgtctaagataatcaattcttattttgataaagctgatgatggcatttcagatgcaaatcaagctgcatcacaaatatgtaaagcagtacaagaaatgagccaaaagaacatagctatccttaatgccttaaaagaacaatccgaaaaccaagctaaaaatcaaacagccttttatcgttcagttggtgatatccttattgcccttcaaacatcccataccaacactgaatctgctattaattctatggtgattctatcacgtagtcaagaaactacagtcaatgatctgagaagcaaagttgaaagtatgactctatcccttggagcggtagaagaaaactctaccattcaaacagccactctttcaaacattcaacaacaaacaaaagaactatccaatacagatcgtaatatcagtgaaatgcttgacattctttctggtatgagtaatatacaagaggaaatatcagaagagaccaaggcttttggtggaaaactccattctgaagttgtcgagattgaagataagatggatgctactaatcaactcttaacttccaaatttgacgaattttctgagcttctgaaaaaaagcaatactgaagctcttgttgaagtaatgaagactgtgactgaagagttccaaaaacagatgaactcacttattaataaacttattcaagagaactttgatcaacttaacaagagtgtagaaaaacttaatacttggcaacaagagaacaaagcaatgatttcttcactcactcaacagtataaagaaatggctagtaactttgagagtacttctactacactctcacaagttggtgacgatacaaggactcttgttagtgaaggtggtaaactcaaacaacttattgattctcttaatcaagttatcgttgaagaccaaaaattcattgatgtttccaacaaactccaagaaacagcaaacatatcaaaagaaaatatggagaaatttgatgaatcaacgaaaattcttaatgattgggttcgtaaacaacgtaattttgtggatggcgtccaacttctcattgagaaactagatgaattaaataaaatccgtgattatagtgaacagttttggaaaggtacaaaagaaaagatggaagaaggagttagtataataacacagggttctcagacccttaactcccaattaacttcacttgatcgtcaattttataatcgattaggcgctacgcttgctgagcttgataactgtatcactaaaatggtcgaacacgtaaataatcgcaaataa

SEQ ID NO: 12873 - DNA, 702 bp, Bacteroides fragilis str. 3719 T6
atggctaagtctaatgtttggatgtcagtttccgaccttatgacgggtcttatggttatatttctttttatagccattgcttacattagtcgtgtaaaacagaatcaaactgtattaactgactatattgaaaccaagaatgaacttcataacaagcttgttaatgagtttgcaggagataccttacaatggcaaatggccattggcaaagatctttctatgaaattcaaagagcctactgttcttttcgcctcaggatcagctgatcttactcctcgattctgtcaaatcctcaacaatttcttaccaagatacttcaacatcttacttaatgatagtttgcgtacaaacattcgagaaattcgtatcgaaggacatacagataatgtgccaatgcctagttatgatacagactcctatattgccaatgtcattttatctcaaaagcgttcacttagtgttctaaagtattttcgtaaaatggaagttttcaaaaaatacacatcagaacaacaacgacttcttgagttctggtttacagctaatgggctttcgtatggaaaatcacttgacaacaatggtgattacacaattgtaacgggaaatgatattgataaaaataaatccagacgtgttgaatttcgaatagtgacgagtggtgatgagatacttgaaaatttcgtaaataagaataaaaactaa

SEQ ID NO: 12874 - DNA, 804 bp, Bacteroides fragilis str. 3719 T6
atggacagtgaggatcctatttatcagtttgaccatttcaaatctttactttcaactatggggattgaagttggagaagcctcagcttggtctcctgtcggtacaatcgaagttctttctgaaaatatcggtaagaaaataaaatttgaaagtaatggcatattttacattgatgacaatggaagtgaacatcaaggttttatgtataaaagagatttttattttcacgattatggagagagaatgcccaaattccatataagatactgccatacacttgagtgttttggaaaagaagcttatcgctttgctaataatgaacctatcaaagtttttgcacgagataaagcaatacgtcatgaagtagaagtctccggattgcatctatgtacctattgttctcaaatacttgcaaatgaacttgagaatgaaattcataattctacagatttcgtagaattcttaaaacaagcagaaggaatcgatcccaatgataacagagatactgaaattgatattttcgggtataccaaaaattgggaacaaataagtcaagcatacagatccattcaccaatttacatgtgaacgttgtggtctccagatcactgaaccttttgatcaacattttatgcacacacaccataaaaatggaaacaaaacagataatcgagaagctaaccttgaatgcctttgcgttcgctgccattcagaagtggatgaccgacataaaaaacgtctttgcacaggagcaaataggattatactagaagacttcaacgagaaatacccttcctttatttaa

SEQ ID NO: 12875 - DNA, 1590 bp, Bacteroides fragilis str. S24L26
atggacttttcacttgacaaatcaacaatcatatggcttatagcaattgttgctggtacctgttctctatatctatatatcaaaaagctaaaggacaaaaacaaattaatatcaaatcgtcgcttagtcgaaaacatcccttcaattatttctacaatcggtgtactaggtactttctatgggattaccagtggacttctttcatttaattctgatgaccttgatacaagtattcccgcattattagatggtttaaaaacagccttctttacttcgattgctggtatggtatgttcattaattatgtctaagataatcaattcttattttgataaagctgatgatggcatttcagatgcaaatcaagctgcatcacaaatatgtaaagcagtacaagaaatgagccaaaagaacatagctatccttaatgccttaaaagaacaatccgaaaaccaagctaaaaatcaaacagccttttatcgttcagttggtgatatccttattgcccttcaaacatcccataacaacactgaatctgctattaattctatggtgattctatcacgtagtcaagaaactacagtcaatgatctgagaagcaaagttgaaagtatgactctatcccttggagcggtagaagaaaactctaccattcaaacagccactctttcaaacattcaacaacaaacaaaagaactatccaatacagatcgtaatatcagtgaaatgcttgacattctttctggtatgagtaatatacaagaggaaatatcagaagagaccaaggcttttggtggaaaactccattctgaagttgtcgagattgaagataagatggatgctactaatcaactcttaacttccaaatttgacgaattttctgagcttctgaaaaaaagcaatactgaagctcttgttgaagtaatgaagactgtgactgaagagttccaaaaacagatgaactcacttattaataaacttattcaagagaactttgatcaacttaacaagagtgtagaaaaacttaatacttggcaacaagagaacaaagcaatgatttcttcactcactcaacagtataaagaaatggctagtaactttgagagtacttctactacactctcacaagttggtgacgatacaagaactcttgttagtgaaggtggtaaactcaaacaacttattgattctcttaatcaagttatcgttgaagaccaaaaattcattgatgtttccaacaaactccaagaaacagcaaacatatcaaaagaaaatatggagaaatttgatgaatcaacgaaaattcttaatgattgggttcgtaaacaacgtaattttgtggatggcgtccaacttctcattgagaaactagatgaattaaataaaatccgtgattatagtgaacagttttggaaaggtacaaaagaaaagatggaagaaggagttagtataataacacagggttctcagacccttaactcccaattaacttcacttgatcgtcaattttataatcgattaggcgctacgcttgctgagcttgataactgtatcactaaaatggtcgaacacgtaaataatcgcaaataa

SEQ ID NO: 12876 - DNA, 702 bp, Bacteroides fragilis str. S24L26
atggctaagtctaatgtttggatgtcagtttccgaccttatgacgggtcttatggttatatttctttttatagccattgcttacattagtcgtgtaaaacagaatcaaactgtattaactgactatattgaaaccaagaatgaacttcataacaagcttgttaatgagtttgcaggagataccttacaatggcaaatggccattggcaaagatctttctatgaaattcaaagagcctactgttcttttcgcctcaggatcagctgatcttactcctcgattctgtcaaatcctcaacaatttcttaccaagatacttcaacatcttacttaatgatagtttgcgtacaaacattcgagaaattcgtatcgaaggacatacagataatgtgccaatgcctagttatgatacagactcctatattgccaatgtcattttatctcaaaagcgttcacttagtgttctaaagtattttcgtaaaatggaagttttcaaaaaatacacatcagaacaacaacgacttctcgagttctggtttacagctaatgggctttcgtatggaaaatcacttgacaacaatggtgattacacaattgtaacgggaaatgatattgataaaaataaatccagacgtgttgaatttcgaatagtgacgagtggtgatgagatacttgaaaatttcgtaaataagaataaaaactaa

SEQ ID NO: 12877 - DNA, 837 bp, Bacteroides fragilis str. S24L26
atggacagtgaggatcctatttatcagtttgaccatttcaaatctttactttccactatggggattgaagttggagaagcctcagcttggtctcctgtcggtacaatcgaagttctttctgaaaatatcggtaagaaaataaaatttgaaagtaatggcatattttacattgatgacaatggaagtgaacatcaaggttttatgtataaaagagatttttattttcacgattatggagagagaatgcccaaattccatataagatactgccatacacttgagtgttttggaaaagaagcttatcgctttgctaataatgaacctatcaaagtttttgcacgagataaagcaatacgtcatgaagtagaagtctccggattgcatctatgtacctattgttctcaaatacttgcaaatgaacttgagaatgaaattcataattctacagatttcgtagaattcttaaaacaagcagaaggaatcgatcccaatgataacagagatactgaaattgatattttcgggtataccaaaaattgggaacaaataagtcaagcatacagatccattcaccaatttacatgtgaacgttgtggtctccagatcactgaaccttttgatcaacattttatgcacacacaccataaaaatggaaacaaaacagataatcgagaagctaaccttgaatgcctttgcgttcgctgccattcagaagtggatgatcgacataaaaaacgtctttgcacaggagcaaataggattatactagaagatttcaacgagaaatacccttcctttaataaagatagtttagaggataatgatttagctttctaa

SEQ ID NO: 12878 - DNA, 1585 bp, Bacteroides fragilis str. S24L15
cttttcacttgacaaatcaacaatcatatggcttatagcaattgttgctggtacctgttctctatatctatatatcaaaaagctaaaggacaaaaacaaattaatatcaaatcgtcgcttagtcgaaaacatcccttcaattatttctacaatcggtgtactaggtactttctatgggattaccagtggacttctttcatttaattctgatgaccttgatacaagtattcccgcattattagatggtttaaaaacagccttctttacttcgattgctggtatggtatgttcattaattatgtctaagataatcaattcttattttgataaagctgatgatggcatttcagatgcaaatcaagctgcatcacaaatatgtaaagcagtacaagaaatgagccaaaagaacatagctatccttaatgccttaaaagaacaatccgaaaaccaagctaaaaatcaaacagccttttatcgttcagttggtgatatccttattgcccttcaaacatcccataacaacactgaatctgctattaattctatggtgattctatcacgtagtcaagaaactacagtcaatgatctgagaagcaaagttgaaagtatgactctatcccttggagcggtagaagaaaactctaccattcaaacagccactctttcaaacattcaacaacaaacaaaagaactatccaatacagatcgtaatatcagtgaaatgcttgacattctttctggtatgagtaatatacaagaggaaatatcagaagagaccaaggcttttggtggaaaactccattctgaagttgtcgagattgaagataagatggatgctactaatcaactcttaacttccaaatttgacgaattttctgagcttctgaaaaaaagcaatactgaagctcttgttgaagtaatgaagactgtgactgaagagttccaaaaacagatgaactcacttattaataaacttattcaagagaactttgatcaacttaacaagagtgtagaaaaacttaatacttggcaacaagagaacaaagcaatgatttcttcactcactcaacagtataaagaaatggctagtaactttgagagtacttctactacactctcacaagttggtgacgatacaagaactcttgttagtgaaggtggtaaactcaaacaacttattgattctcttaatcaagttatcgttgaagaccaaaaattcattgatgtttccaacaaactccaagaaacagcaaacatatcaaaagaaaatatggagaaatttgatgaatcaacgaaaattcttaatgattgggttcgtaaacaacgtaattttgtggatggcgtccaacttctcattgagaaactagatgaattaaataaaatccgtgattatagtgaacagttttggaaaggtacaaaagaaaagatggaagaaggagttagtataataacacagggttctcagacccttaactcccaattaacttcacttgatcgtcaattttataatcgattaggcgctacgcttgctgagcttgataactgtatcactaaaatggtcgaacacgtaaataatcgcaaataa

SEQ ID NO: 12879 - DNA, 702 bp, Bacteroides fragilis str. S24L15; identical to SEQ ID NO: 12876

SEQ ID NO: 12880 - DNA, 837 bp, Bacteroides fragilis str. S24L15; identical to SEQ ID NO: 12877

SEQ ID NO: 12881 - DNA, 1590 bp, Bacteroides fragilis str. S24L34; identical to SEQ ID NO: 12875

SEQ ID NO: 12882 - DNA, 702 bp, Bacteroides fragilis str. S24L34; identical to SEQ ID NO: 12876

SEQ ID NO: 12883 - DNA, 837 bp, Bacteroides fragilis str. S24L34; identical to SEQ ID NO: 12877

SEQ ID NO: 12884 - DNA, 1590 bp, Bacteroides fragilis; identical to SEQ ID NO: 12875

SEQ ID NO: 12885 - DNA, 702 bp, Bacteroides fragilis; identical to SEQ ID NO: 12876

SEQ ID NO: 12886 - DNA, 837 bp, Bacteroides fragilis; identical to SEQ ID NO: 12877

SEQ ID NO: 12887 - DNA, 1548 bp, Parabacteroides distasonis str. 3776 Po2 i
atgaacttgtctatttcaacagatacttgggtttgcttgagtattattgtcgttgcctttatcgtttgtcttatccttgtactcaagttcaagaacagcgaaaaaatggaggctaaccgcagaataatagaatactttccaacattggtttccaccctcggggtgttgggtactttttgggggatcacaaaaggtttgatggcttttgacacatccgatcttgaccaatccattcctggcttgcttgatggtttgaaaacggctttctttacttcattggcaggtatgattggttctatgttcctctctgcttttatcagtaagaaacaggacgaaagagatggtggcatttccgacattaatcaagcagcaggagaaattactaagtctgtaaaggcaatgagcgatgctaataccgaaactatgcgctcaattcagcaacaactcactgaacaggaagcggaccgcaaggcgttttaccgcactgtgggagaagtgatgtctaagatatccgatacgcaaaagtccattacttccgccattgattcgttggtggtgttacaacgtagccaagaaaattcccttgccgatattaaagaagctactacgcaacaatccgtggctatcaattctgtggctaagtattcgcaagaggttagcgaatacacgcatcatctcggcgaaatccttgatgttatttctggcatgagcggaacggaagacgaaatcaatgaaaaggttggcaaacttaaagagattattcacggagaggttatcgagattgaagataatatggcgaagaccaataaacttttggaaagcaaattcgatgaatttaccgagctgctcaaaaagagcaatacggaagcccttgtggaagtgatgaaaaaagtcaccgaggaattccaaaagcaaatgaactcgcttattaacaagctcattcaagaaaatttcgaccaactcaacacgtcggtggaaaaactcaatcaatggcagcaggagaacaaggagatgattgcttcgctcactcatcagtacagggaaatgtccgacaacttcgaggctacgtctacttcgcttactcgtgtcaaggacgacacggcttcgcttgtcagcgagggtggcaagcttcgtcagcttgttgatgcgcttaatcaagttatcatcgaggacgaacatttcatagaagttacgaaggaactccatgaaactgccaatctctccaaatccaatatggaatcgttcaatgaatccaccaagacactcaatgagtgggtacgcaaacagcgcaactttgtagacggtgtgcaactccttatcgccaagttggaggaacttaacaaaatccgtgattacggtgaccagttctggaaaggtacgaaagataaaatggaggaaggtgtcggaatccttacacgtgggtcgcagacgctcaattcgcagctcacttctcttgaccgtcagttctatggtcgcttgagcgcaactcttgctgaacttgacaactgtattactaagatggtggaacaagtcggtaaacgtagataa

SEQ ID NO: 12888 - DNA, 702 bp, Parabacteroides distasonis str. 3776 Po2 i
atggcaaaacctaatgtatggatttctgtttccgacctgatgacggggttaatggtgatattcctttttatcgccattgcctatattagtcgtgtgcagaaaaaccagtctgtacttacagactatgtggaaacaaagaacgaacttcataataaacttgtgaaagaatttgcgggcgatacgctcaaatggcaaatggctatcggtaaagacctcactatgaaattcaaagaaccgaccgtgctttttgccaccggctcatcagaactaactccgcgcttcaaagaaatccttgatgaatttctccctcgctatttcagtattctcttgaatgacagcttgcgctctaacattcaagaaatacgcattgagggacacactgatgatgtgcctatgccaatatacgatgctgacccgtatattgctaatgccaagctttcgcaagagcgtgctttgtctgttctaaaatacttccgttctatgtcgcagtttactaaatactcggataaacagaagcagttgcttgaatattggttcactgcaaacggtctttcttatggtaaggctcttgatgcggacggagatttcatcatccgctccaacaaaccgattgaccgtgctttttctcgccgtgtagagttccgtattgtcacttctggcgatgagatacttgaaaactttgtaaaggagaacaccaaatga

SEQ ID NO: 12889 - DNA, 921 bp, Parabacteroides distasonis str. 3776 Po2 i
atgagtttcgattttgacatagatgctgaagaagaatggttcgatgactccgcccccatttatgacttccccaatctaaaaaaacgcctgaccgatatgggcgtacagattggactagcgggagcatggcgttctgtcggaacggtcgatgtgctgcccgaagacatcggtgaacgcattctttttgaagacggaggcatcttctatattgatgacgagggggtgaaacgccgtggctttatgtataaggctgctttctatttcgagtggcagggacgcataagtcaacccaagtttcacgtctgtaaatgcaccgccattgaaaacttcggtcgtgatgcctatcgttttaccaatgcagagcctattaaagtttattcgcgtaatgctcacaaagaagtggaagttgagggcatggagctatgcggttattgcaaacgtatgttgatggacgaagaagcggaacgggtgaacgattcaaccgactttgtggaaatcctgaaagaagcgggtgatgtgaaagaacccacggagtatgatgtggatattttcggctatgtcaaaaattgggagcaaatttcacttgcttaccgtacaaagaaacaatttacttgcgaacgatgtggcacacaagtggaggacggcttcgaccattactatatgcaaacccaccacaaaaatggagttaagaccgacaatcgtgagggcaaccttgaatgtctgtgtattaaatgtcactccgaagtggacgatacccaccgccgtaatttttcttctggggcgcaaaaagtcatgattgacgaatatatgcgcaaatactacggaaaagaatcaggctctattatttctcgtcttataaaggcggtgcataatcgacaagagcctcctattatagtgaatgatgacgacattcctttttaa

SEQ ID NO: 12890 - DNA, 1548 bp, Parabacteroides distasonis str. 3776 D15 i; identical to SEQ ID NO: 12887

SEQ ID NO: 12891 - DNA, 702 bp, Parabacteroides distasonis str. 3776 D15 i; identical to SEQ ID NO: 12888

SEQ ID NO: 12892 - DNA, 921 bp, Parabacteroides distasonis str. 3776 D15 i; identical to SEQ ID NO: 12889

SEQ ID NO: 12893 - DNA, 1548 bp, Parabacteroides distasonis str. 3776 D15 iv; identical to SEQ ID NO: 12887

SEQ ID NO: 12894 - DNA, 702 bp, Parabacteroides distasonis str. 3776 D15 iv; identical to SEQ ID NO: 12888

SEQ ID NO: 12895 - DNA, 921 bp, Parabacteroides distasonis str. 3776 D15 iv; identical to SEQ ID NO: 12889

SEQ ID NO: 12896 - DNA, 1932 bp, Fusobacterium nucleatum subsp. animalis
atggggtatatttttaaatttttggcttttaatattggacaatatattggaatttctttaacaatatctgatttaattatttattttgtgatggcttacattgtaatacatattataaacaataataaaattaatgataaagaaaaaagaaatttttatataaatttactgcctatattaggtgtaatagggacatttgctggtatttgtattggactagctgattttaattctaatgaaattgaaaaaagtgttccattattactacaaggtttaaaaactgcattctggacttctttaattggaacttccttagcagttttctttaatgtctggtattcttttaaagataaaaaagatttagacgatgaagatgaagaagttcctctattaaaattacaaataaaagaattacaagaaattagtaaaaaatttaataatttcttagaaaaccaactaataaacaataaaaatttaaaagaacttgaattaatcaaagatgaattaaaaatacttaataaaagtcaagagcaaaataatactttctatgaaaattcattattaaaattagaaatattagaagatattaataaaaaatatgataagaataatgaacaactgttaatatgtactaataatattactgatttaaaagattatatagctttaaatttagaagaaactaaaaaattaaatgctacttattctgatacttttaataaattaaattcactagaagaaataaatactgatatttttaataaaaattctgaaatttctgaaaattctgaattattattagaagatttaaaagattataaaaacctattctctaatttttctgaggagtcaaaaaatcagagtaaagaattaattactgccttcaaagagtttgctacttatatggctgaggaaaatagtaaggctttcattgaggcattaaataaaacaataagagattttaacaataatttaatagaatcatttggttcaaactttaaacaattaaatgaagctgttataaaattggttgattggcaagaacaatataaacaaattatagaagcaacaacagaaaatcaaaaagttatctttgacagttttaatggaatagaaaaagaattgcaaacttttacatctgaaacaaaaaatgtaaattctattgtttcagagttatctactcttacaaaagaaagtatggaacaaaatataaaactaaatgaaactttaaatatgttctctgaactaaatagccaagcaaaagaattgattccaaatcttatagaaattaataataatgtagataataatattaaaacttttagcaattattctaatgaattaataagtaatttagatagttttacaaataatttacaaactaatttctctcaatatatagatgatataaataaaggggtcaaagggtcaactgataatataatcggaataatagaagattctataaaaaaaatagaaactaattttgataaatcactagaaaatacagatttaaaattaaaagaaacatctgaaaatatatttgtaggaattgaaaaatttaatttagatttctctaacaatatgaaagaacaattagataaatttataaataataatgaaaactactctaatgaaatcaataaattattaaagaatacaatagaaacaatagaggataatgaaagaaataattcaagaataatagaagaaaacataaaacaaattgaaaaattaaataatactttaagtaatgttttaaaggaacatgttgataatattgaaaaagaattagctgaatcattaaatacttctttaaattcactaggtgaagttatggctaaaatatctgatagatttgccaaagattatggtcctcttgctgataaattaaaagaaattgttgaattacctaataagagggtgagataa

SEQ ID NO: 12897 - DNA, 705 bp, Fusobacterium nucleatum subsp. animalis
ttggctaagaaacataatgaagatcacttttctccaagagttgcagatttaatgtctgctttaacattaatttttttatttatttcagttgtctatatgttacaagtaaacaaagaaaaagaacatatagaaataatagccaaagattttaaaaatacaaaacatgatatatattctgatttaaataaagaatttaaagaagatttaaaaaagtggaatgcttatatagatgaagataccttatctataacttttaaagaacctgatgtcttttttgatataggaagtagtaacataaataaaaaatttaaagacattttagatgatttttttcctagatatataaatatactttttactaaatataaaaatgaaattgaagaaataagaatagaaggacatacttcaagcgaatggaataaaaatgatgacagtttacaagcttattttaaaaatatgactttgtctcaggaaagatcaaaaagtgttttagaatactgtatgttattaaatacaatgaaaccatatagagaatttcttatcagtaaagctactgcaaatggtttatcatatagtcatagaattatagaaaatggtaaagaaaattttagtaaatcaaggagagttgaatttaaaataaagacaacagctgaggcacatataaacgatattttaaaagcaggtggttttgatgaagctaattaa

SEQ ID NO: 12898 - DNA, 822 bp, Fusobacterium nucleatum subsp. animalis
atgaagctaattaattttttagattttaaaccttttaaagatattatggaaaaaatgaaaataaataaggatgaaaaaatagatattgaaagaattaaaataatagaaaaagttagaatttggaaacaacttagtagtttatctggtttagatatagatatcaatgaaactgttgcctcagaaaatggttttatcaaatataatgaatttgataaattagttgcatatataagagatcaaaaatattttggagaaaagttttctttaagaaaatttcatattgcctataattgtaaaactttaagtgattctagaaaatcaagagatgctagcaaatataaaatagttcaaaataaaagtcctgaatttacaattaatatattatcagaagatgcaaaaactgttattgaagctaatgttattaaaaaattagaagtttgtaccaattgtttaaaagcattaaattataaaaattttttaaatgtaagtaaatctgaacaagataaaataaaaaatgaattttcttttgaagaatttttaggaactgaatttgataaaaatgaagaattaataaaaagttataatttagatgatatagaaaatgatagacttagattatatcctaaaaattgggaagaaatttcttataattacagaaaatcaaaaaactggatttgtgaagaatgcaggaaagattgttctaaaaataaggaagaattagaaactcaccatattgaccataatccgagtaattgtagcttttctaatttaaaagccttatgtaaaacttgtcatgctaaaatacatcctcatatgcaataa

SEQ ID NO: 12899 - DNA, 1932 bp, Fusobacterium nucleatum
atggggtatatttttaaatttttggcttttaatattggacaatatattggaatttctttaacaatatctgatttaattatttattttgtgatggcttacattgtaatacatattataaacaataataaaattaatgataaagaaaaaagagatttttacataaatttactgcctatattaggtgtaatagggacatttgctggtatttgtattggacttgctgattttaattctaatgaaattgaaaaaagtgtcccattattactacaaggtttaaaaactgcattctggacttctttaattggaacttccttagcagttttctttaatgtctggtattcttttaaagataaaaaagatttagacgatgaagatgaagaagttcctctattaaaattacaaataaaagaattacaagaaattagtaaaaaatttaataatttcttagaaaaccaactaataaacaataaaaatttaaaagaacttgaattaatcaaagatgaattaaaaatacttaataaaagtcaagagcaaaataatactttctatgaaaattcattattaaaattagaaatattagaagatattaataaaaaatatgataagaataatgaacaactgttaatatgtactaataatattactgatttaaaagattatatagctttaaatttagaagaaactaaaaaattaaatgctacttattctgatacttttaataaattaaattcactagaagaaataaatactgatatttttaataaaaattctgaaatttctgaaaattctgaattattattagaagatttaaaagattataaaaacctattctctaatttttctgaggagtcaaaaaatcagagtaaagaattaattactgccttcaaagagtttgctacttatatggctgaggaaaatagtaaggctttcattgaggcattaaataaaacaataagagattttaacaataatttaatagaatcatttggttcaaactttaaacaattaaatgaagctgttataaaattggttgattggcaagaacaatataaacaaattatagaagcaacaacagaaaatcaaaaagttatctttgacagttttaatggaatagaaaaagaattgcaaacttttacatctgaaacaaaaaatgtaaattctattgtttcagagttatctactcttacaaaagaaagtatggaacaaaatataaaactaaatgaaactttaaatgtgttctctgaactaaatagccaagcaaaagaattgattccaaatcttatagaaattaataataatgtagataataatattaaaacttttagcaattattctaatgaattaataagtaatttagatagttttacaaataatttacaaactaatttctctcaatatatagatgatataaataaaggggtcaaagggtcaactgataatataatcggaataatggaagattctataaaaaaaatagaaactaattttgataaatcactagaaaatacagatttaaaattaaaagaaacatctgaaaatatatttgtaggaattgaaaaatttaatttagatttctctaacaatatgaaagaacaattagataaatttataaataataatgaaaactactctaatgaaatcaataaattattaaaaaatacaatagaaacaatagaggataatgaaagaaataattcaagaataatagaagaaaatataaaacaaattgaaaaattaaataatactttaagtaatgttttaaaggaacatgttgataatattgaaaaagaattagctgaatcattaaatacttctttaaattcactaggtgaagttatggctaaaatatctgatagatttgccaaagattatggtcctcttgctgataaattaaaagaaattgttgaattacctaataagagggtgaaataa

SEQ ID NO: 12900 - DNA, 705 bp, Fusobacterium nucleatum
ttggctaagaaacataatgaagatcacttttctccaagagttgcagatttaatgtctgctttaacattaatttttttatttatttcagttgtctatatgttacaagtaaacaaagaaaaagaacatatagaaataatagccaaagattttaaaaatacaaaacatgatatatattctgatttaaataaagaatttaaagaagatttaaaaaagtggaatgcttatatagatgaagatactttatctataacttttaaagaacctgatgtcttttttgatataggaagtagtaacataaataaaaaatttaaagacattttagatgatttttttcctagatatataaatatactttttactaaatataaaaatgaaattgaagaaataaaaatagaaggacatacttcaagtgaatggaataaaaatgatgacagtttacaagcctattttaaaaatatgactttgtctcaggaaagatcaaaaagtgttttagaatactgtatgttattaaatacaatgaaaccatatagagaatttcttatcagtaaagctactgcaaatggtttatcatatagtcatagaattatagaaaatggtaaagaaaattttagtaaatcaaggagagttgaatttaaaataaagacaacagctgaggcacatataaacgatattttaaaagcaggtggttttgatgaagctaattaa

SEQ ID NO: 12901 - DNA, 822 bp, Fusobacterium nucleatum
atgaagctaattaattttttagattttaaaccttttaaagatattatggaaaaaatgaaaattaataaggatgaaaaaatagatattgaaagaattaaaataatagaaaaagttagaatttggaaacaacttagtagtttatctggtttagatatagacatcaatgaaactgttgcctcagaaaatggttttatcaaatataatgaatttgataaattagttgcatatataagagatcaaaaatattttggagaaaagttttctttaagaaaatttcatattgcctataattgtaaaactttaagtgattatagaaaatcaagagatgctagcaaatataaaatagttcaaaataaaagtcctgaatttacaattaatatattatcagaagatgcaaaaactgttattgaagctaatgttattaaaaaattagaagtttgtaccaattgtttaaaagcattaaattataaaaattttttaaatgtaagtaaatctgaacaagataaaataaaaaatgaattttcttttgaagaatttttaggaactgaatttgataaaaatgaagaattaataaaaagttataatttagatgatatagaaaatgatagacttagattatatcctaaaaattgggaagaaatttcttataattacagaaaatcaaaaaactggatttgtgaagaatgcaggaaagattgttctaaaaataaggaagaattagaaactcaccatattgaccataatccgagtaattgtagcttttctaatttaaaagccttatgtaaaacttgtcatgctaaaatacatcctcatatgcaataa

SEQ ID NO: 12902 - DNA, 2136 bp, Fusobacterium periodonticum 1_1_41FAA
atgtttgggatagtattttttaaagttataaaatacaataaattagataataaggaaaaaagaaatttttatataaatttattacctatattaggggttattggaacatttttaggaatatgtttagggcttgctaattttgattctactgaaattgaaagtagcgttcctcaattattacaaggtttaaagacagccttttggacttcatttataggaagttcttgggccgtatttttgaatatgagatattcttcaaaagataaggaagaagctgatgatgaggaagaagaaatttctctattaaagttacaaattaatgagttacaaaagctaaataataacttttatattttatttgaagaaaataaaaaggaaaaagagactcttcatcaaataaataaagaaatattagaaggtataaaagctaataatattatgaaagagcagctatcgcaaatggaagagttaaaagatattaaacaagaattagttttaatgaatcaaaaagaagataataaaactgagcttttaaataaagttttggatagtttaaatagctcagaaacagttttaggagatataagttcttttaaagaaatattaaattcaatatttgaaaaagaaaatgataaagatgaatacatgaataaaatattagataatatggataattctaaacatattttagaaaatatactttcttttaaagagatattgaacttaagatttgaaaaagaagcaagtaaggatgaacaactaaaaatgattttagagaaatttgaaaaaatagaagaaacttctaacttacaagttgaaatattgaaaaaaatagaagatgagactttcttattagacgatatacataatgacttagaaaatttaaatgagaaagcaaatagtcaaataagtcaattagaaagtttggaaaaattaaatgttttagatgagttaaataataatattgatagtcaattagaagagatttcggtagtcaatgctaatattttaacaaaattagatagtttaaatgttttagaagaaattaaaaataatatcaattctcaactagaaaaaatttctgtaataaatactaatatgtttgcaaaattagataatttagaaaaatatgactccaatatatttgctaattcttcaaaatctattgactttatttcttcaatatatggagaaatagaagaatataaaaatagatttaatagctttatagataattcaacaagagaaaattcagaattagtaatggcatttaaagaattttctaattatatgcttgaagaaaatagtaaggtatttattgaagcattaaataaaactataagagattttaatattaatttagtagaaactttcggttctaattttaagcaactaaatgaagcagtttcaaaactattagattggcaagaacattataaagacactattgaattaacaacagaaaatcaaaaaattatatttgatagttttagaaatattgaaacagagttagataattttaatcaaaaagctaaaggagtaaatactatagtttcagaattagcattatcaacaaaagaagctttagaacaaaattatagattaaatgacagtttagaagttcttgctcagttagatagtcaagtaaaagaattgttacctaattttatgaagattaattctaatcttgatgataatttaaaaacttttaacgaggaaaccaataagataactaaggaattgaaagaatttacagataatttaagctcaagtcttgataaatctaaaaatcaagttagtaaattgttggaagatacaataaaaaatttctcttcaataatagaaaaaagtgaggaaaataacaaggaaattgtaagaagtacatcagaaaaaataaaatccttaaatgaagatttggataaacatataagagaaaaaataactaaaattgataaaattctaaaagaaaaaattcaagaaactgatgattctttaaaagataatttgaacgatataattaaaatgctaggaaatatatcagagaaatttgctgaggattatgaacctttagctaataaattgagagaaattgtgcaattacctaatttaattgaaaatgataagaaggtgaaataa

SEQ ID NO: 12903 - DNA, 699 bp, Fusobacterium periodonticum 1_1_41FAA
atgaaaaaaaagcactatgaagatcatttttcaccaagagtagctgacttaatgtcagctttaactatgatatttctttttatttcagttacctacatgttacaagtaaataagcaaaaagagcatattgaagtaatagctaaagattttagaaatacaaaacaatctatttataaagatttaaataaggaatttgaagaggatttaaaaagatggaatgcctatatagacaaggatacactatctataacatttaaagaaccagatgtattttttgatgttgggagtagcgaaattaatagtaattttaagctgatattaaaagacttttttcctagatatatagagatgctctataaaaattatagagatgaaattgaggaaataagaatagaaggtcataccagtagcgagtggaataaagatgatgatgacttacaagcatattttaaaaatatgtctttatcacaagcaagatcaaaaagtgttttagaatattgtatgttattagactcaatggaggaatatagagattttcttattgagaaagcaactgctaatggtttatcatatagtcataggataatagaaaatgggaaagaaaattataataagtcaagaagagttgaatttaaaataaaaacaactgctgaagcacatatagaccaaataatagaagcaggaggcctaaatgaataa

SEQ ID NO: 12904 - DNA, 579 bp, Fusobacterium periodonticum 1_1_41FAA
atgaataaattaaattttattcctctaaaagaagttatgaataaaatggggatagatgaaagtatcaagcctaatatagagatgttagaaaaaagaaaaataatttggagaaagattagtgatttttcaggtttggatgtagatataaataaagttacttgttcgaaagaaggatatatagaatatgaaggtttttctaaattaatagcttatattaaagaacaaaatttttctaataatatagattttaataatccaaataatttaaaaaaatttcatattgcatataattgtaaagtattaaatagagctagagaaaataaagataacaaatatcagatagttttaaataagaaacctaaatttttaattgatatttttgtaaagaaaaatttaatagaaaaagatgtagaaaaagaactaaaagtttgccaattttgtcttgatgccttacattataagggatatgattataataaaatggcatataagattagagaagaattcgttaataacttttcttttgaagaattcttaggagaagaatttgataaaaatgaaaaagattttaaagattaa

SEQ ID NO: 12905 - DNA, 1308 bp, Herbaspirillum seropedicae SmR1
atgctactgaaatcagctatagcgttcggaattgcgatcgtttcaccttttgcattcgcagcgaatggattcgagtctatcctgcatgatggaatcacgatgacatttatcgcgattaacctatctctaacggtgtatttcacttgctttcgcttcaaccgctttgctgttcaacacggccccgaaatacttacgactgttggcatattcgggtgttttctaggtatagcccttgcgctattgcactttgactcagcaaaagtgtcttcaagcgttccacacttattagagggtgtaaagacggcattttgggcttccgtcagcggggtttttggctctttatgtattcgttttcggcatcaccaacaaaagagccccattccacacagtattggcgcccctaaagcggcgagcttagatgacgtagtggccgctactcaagctttgcagaggagcctatcgggtactgaagacggcagcctgctctctcaactaaaactgatgagacaagaacaaaatgatcaactaactgcgctgcgcggctctttcgacgcgttcgccagcaagatggcagaagatggatcgaaagcgttaatcgaagctttaaaagaagtgattcgagattttaacgctcaaatcaacgagcaattcggacaaaatttccagcatctaaatatggctgtggaaaaactagtagtttggcaagttcaatatcgcgaggagttagataagctacaagccgtacaacagtcttcagcgacagatcttcaaaacgcagccaatggaatgtccctaatggtgagccgcgctgatggtttcactgaaacagcctcaagactcgagcaattgcttcgaggactttcccagcaatacgccgccattgaagattcgcagcgctctctttccgccgtactgattgaaatgaaggatgtcaccccagtgttcgcaaaaaaaatggaagaactcgccgatgcaataaagctgggtgtttctagagtccaatcagatgtcagcgatatagtgaagaattttggtgtgcaaatacaaggatcgtcggccgaaatgaagcaattgctctctgagacgatcaaatcatcgcaaaagcaagtgaacgatgaaatgcagaaggggctagataccatcagacaaggtgtggtgtccctagacaaaggactgcaagaggaattgactaaaagcttggaatcacttggacgtcagttggcgtccttgtccgagaagttcgtagctgactatagtcctctaacagataagctgcgcgatgttgtccggatcgctagcgcccaatag

SEQ ID NO: 12906 - DNA, 699 bp, Herbaspirillum seropedicae SmR1
atggatattgagcaaagcaaccaatcatactggatcccactagctgacctcatgacaggtctaatgatggtattcatgctcctaactgcagcttttatgctgcgtgtggagcaaacgactacgctggtcgtgaatgagtttgaagaaacaaagagcgatatgttgcaagcacttcaaaaggagttttcacgagatttgaaacagtggaatgcagaactgctcggcgacatgacgatccgttttaatgaccctaccgtgctgtttgccacaggctctgctgaacttaggccaaaattcaagcaaattcttagagattttttcccccgatacgtaacgatgcttacgtcagataagtatcgagatgcaataaaagaaataagaattgagggtcacaccagccgaagctggacaaatagcaccgacacgaaaaccgcgtactttcttaacatggagctctctcaagcgcgaaccagaagtgcactcgaatttttacttaggcttcccgcagtagaacgacagcaagactggctagtgggacatgtcacagccaatggcctctcatcttctaagcctatatcaccagacgacaactcagcagctgcacaactagctaaccaacgagtggagtttcgtattgtcacaaatgctagcgacagaatggatcaaatcgctcgcgatttgaaggcagagcagccttga

SEQ ID NO: 12907 - DNA, 882 bp, Herbaspirillum seropedicae SmR1
ttgaagctaccaaattttcttctagcctctgatctaaatgcgttgcgtcacgaaatgggcgcatcgttagccgtaggctttaaaatcgaaaacatatataagccgatagatcttcgtgatcagttgaggcaagacggcatagaagttaaattcgatgaagttcaggttctgcaagatggaacactagcctataaagggtaccgcgttcttctatacatccgtgatgtatccaatttcgggcaacgcgaggaaatgcccaaatttcatctcgctttttgcggcacgctcgacaaaatgaagcgaaatcatcgattcgctcgctacgtcgtggccaatcgagacgatggtatgttccaagtgaatattatggagcacggggcgaaaccaaaaatcgttgagctaaacgtttgccaaatgtgcctcgcgtcgatttcctggaagggatttcaactggacctcgatcgcacccttcgtattgaccgcgtaaagaattttctactgaaggatttttttaatcagtacccacaagatctaattctcgaaaagccagttcatacatctgagacagctccgcttaatgattactcggtcgattggggagatatatccgagcggattaaacagacgcggggatatcgctgcagtaagtgccgcattgcgctgggtatacgcgagtcaaaatatatgcacgtccatcacataaatggaatgaaaaatgataattccgatgctaatctttcggtactatgtattcgatgtcacgcggacgaaccgatgcatgagcatatgaaatctctcccagcgtatgttgattttgtttcgcgctatccgaataggccagtactcacgcgacaaagcagtgtaaaaaggggaaagctttaa

SEQ ID NO: 12908 - DNA, 1497 bp, Legionella birminghamensis
atgcctaaattttttgtatttctagtgttgtcatttttttcttcgcttgcgttggcttctgaaaatcagatattagcaccaggcggcttttctctactccaacaattctcgataattgaattatgttggatgtctctgacggtatgcttttttatattcttttttattaaattcgataaatttgcagtgacctatggccctgaaatattaaccacaatggggattgtaggatgctttgcttgtattgcctgggctttattgcattttaacagcgaaaatataacagctagtatacctttcttattaaatggtattaaaactgctttttgttcgtcgtttattggcgtatctggtgctctacttattagagggaaacataaatttagcaaggttgatttccataaaataaatgaaacagctcctgcttctatggatgatttagtcaaggaaattgccaatttacgaagaaccttatcaggtgatgaagagggttcattaatttcacagatcaaaatgttgaggcaagactcaaatgatcaacagaaaaaattgcaagaatctttcgataattttgcaaaacatatggtcgaaaataaccaaaaagcgttcattgaagccttaaaggaggcgattagagattttaatcaaaacttaactgaacagtttggtgaaaactttaaacatctaaatcaatctgttgaaaaattaattatatggcaagagcaatataagcatgaactagaaactataaaacagtatcaatctcaattttccaatgatatgaaacaatccgctgacgcttttgctactgtggtagaacatgcaaaacaattcacagatatagctcaaaacttgaagatactccttaattcgatggataaacaaaaagatgtactttttgttcaagaaaaagcattaagtgagcttttatccacaatgaaagatcatatccctgaattttcatcaagcactcagaaaatgattactgaaatctctgaaggggtaaaattagttcaattagaaacaaccaaaataatctctaattacggtacagaaattaaatcaattaataatgagatgaaaaatgcattagcggatgtgttgaaagaagcccaaaactctttctcggttggtatcaaaaataatatggaaatgattcaagaagcgataattaatgtcgagtcacaaacaacagacattataaaaaatcactctgttcaattgcaatcaactcaggctgaaatgaaaaacgtgcttgtagatggtataaccaaatctcaacaagaggtgacagcagggttacaagaaaacgcaaaaataatcagagagggtgttcttgcattggataaggagcttgaaaaaggacttacagactcattaacaagtctaggtaaacaacttgcatcattgtctgaaaaatttgtttctgattatttaccattaactgaacgattacgagaagttgttcgtttagctagaaacaatgaggctgcataa

SEQ ID NO: 12909 - DNA, 693 bp, Legionella birminghamensis
atggagggtcataatcaatcatattggattccattaagtgatctaatgacaggcctcatgatggtttttatgctaatagcagtaacttttatgttgagagttgaacaaaccactacattagtcgttaaagagtttgaagaaacaaagagtgatttagctcaagctttgcaaaaggagtttgcaaaagatttaaggcagtgggatgctgaactacttggtgatatgacaataagatttgataaccccgatgttctttttgatacgggatcttccgtcgttaagcctgcctttaaaaggattcttaatgatttcatacctcggtatatatcacttgtctcatcagaaaaatacagaaattcaataaaagaaatacgcattgaaggtcatacatcaaagaaatgggcattagatacggatgtaaaaactgcatatattaaaaatatgcgcttgtcacaagagagagctcaatcaatgttggagtatattttgagcttgccttctctgctggaacacgaaaaatggatgcgtaagtttttaacatcaagtggtttttcttcatcaaaaccagtattcaatcaattacatattgctgatgacaatcgttcacagcgcgtagagtttgtaattgttactaatgctgattcaaaattagatgaaatctctgaacagattagaagtatgaaaaatggttaa

SEQ ID NO: 12910 - DNA, 432 bp, Legionella birminghamensis
atggttaagcttgtaaatttttttgaattctctgctttgaataatcttagacatatgatggaagcagagcttattaaagagtttaaatttgatacgggtatttcacttcttgatgaagattttataaaaaggcttggtgatgatggagttgaaatcgatagcctggatgaaatcgattttagaagtgatgcaactttaggtttcagaggacaaagagttctaatatatattcgagatgtatctgcttatagacatgaaataagcttacctaaatttcatgtatctacttgtaagaccttggttgatatgtggcagagaaaacgatctgaacgttatgtattatatcaacgtgaaaatggaatttttcaaattaatcttatgagagatggtaatgttgagagttatagtcgaaagtggtgtatgacaaaataa

SEQ ID NO: 12911 - DNA, 1797 bp, Alteromonas macleodii str. 'Balearic Sea AD45'
atggaatttttgaacctcaataacgagcaggcgcttagcttcgctttgacacttaccattatcatctgttcttttttgtttgcggcttttcttttttctctcttagcgccgcgaagattcaagtctgcagaattcgtatcttacacacctgcgttacttacttccctcggtatctttggaacctttgctggtatcgttgtaggcctgatggcatttgatgtgaataatatcgatggcagcatacaaggcctattgactggacttaagaccgcattttttactagtttagttggtattttactatctattctgtttaaagttattcagtctgccggctttggcaaaggcaatgacgtggaagaggcaagtcacgcaacacctgaggctatcttgggtgcaattaaccaacagcgtaactctcttgatgcccttgttggcgccatcgggggggaaagtgatggttctatcttaagccagatgaagttgttaagaggcgatttgaacgacagccacaagctggcgttaaaatcgcagcaagagaccgcagaaactcttaataaaattacagagcagctggctactcaaaaagaatcgtttgatgtgtttactgacaagctttggataaagatgcaggatttcgccgacatgttatccaaatcagcaacagaaacagtgatagaagcactcaagcaggtcattactgattttaataacaatcttactgagcaatttggcgaaaacttcaaacagttaaacgaggcggtaaaagagttggtggtatggcaagacaactataaagttcaaattgccgatatgactgagcaatacaaacttggtgtagagtctatctcagctacagaacagtcagttgccaaaatcagtactgagtcaaaagtcattcctgaaagcatgaccaacttgaaagaggttatggaggtcaaccagcatcagcttgcagagctagaacgacacttagatgcgtttaaagatatcagagacagagcggttgaagctgtgccagaaattcgtaagcaagtcgacgaaaccgttaaaacgatcgctgattctgtagaggctgcaagcacgcattataatgtactgctctctgagtcggataagtacattcaaactcatatagcgtcgtcaaatgatttattaagtagttttgtttctaatacgcgtgagggtattgaaactattgctgacaagcttgatgagagcgtgaaactcgttcagcaaagtattacacagacttcagatgaattcagagataacattgaccgagctaatggcggattacaaaattcaagtagtcgcttagaagaaggtacagaggcaatacgactacaactaaaagatactgtagaggatcttaatgaaacagttcgttcattaatcaatggattagttgaggacgcaaaatcaatgtcatctacattaagtgacgccaataaagcgctcgttaccgatacatcgtcagccagagattccgtaacgcaaagtatagaagcgatgcagaagcgccttgaagcatcattggaagatgctaccgcgtctcaaactcagcacatgcaacgtgtgttttcaaatttggatgcagggttaaaagagcaggttggaaagactggagaggccgtacaggaacagttgaatctcatcgaccaatccatgcagcgcgagctgaattcagtcatgaacaccatgggtaaaaaccttggccaaatagcaaatcaatttgtgaaggattattcatatctcaccgaacagatgagtatagttgtaaagaaggctagctag

SEQ ID NO: 12912 - DNA, 708 bp, Alteromonas macleodii str. 'Balearic Sea AD45'
atggattcaatactaggaaagcctaaaggcaatgaagacggtgaacattggttaaccgtttctgatctcatggctggattgatgatggtgtttctctttatagcaatcgcctttatgcgccacgtttctattgagagagataaaataaaagatgttgctgttgcttatcaacagaaccaagtcgctatttttgatgcattgaacgaagagttcagaaatgatcttagtcaatggaaagcttcaatcgatgaagaaacactgtcttttcagtttaattctccagaagtgctatttgcttctggcgaaagtgctttaaaaccagagtttgaacaaattctcgccgacttcatacctcgctatcttagagtgctagaggcttatcgagaaagcattgatgaagtacgaattgaaggtcatacatcgtcagagtggggaatcgatacacatccggatgatgcgtatttctttaatatgtcgctttcacaaaatcgaactcggtcagtgcttaactatgcatatctcatatcaagcctatcaacagagcagagaggatggattaagtcatcatttgctgcagtcggattagcttcctctcgactaaaacttaatgaagatgggtctgaaaataaggaaaagtcacgacgcgtttcctttagggtaattaccaacgccgatattcaaattcgcaaaatagttgaagggctgtaa

SEQ ID NO: 12913 - DNA, 1095 bp, Alteromonas macleodii str. 'Balearic Sea AD45'
atgggtgcttcacagatagaattcgacatcacgaatgatgtaactcccattgagcctttagatataaagcttaatcaaggttttgaagtaaactttgaagatattgagtttgatactggcttagctagctatgaaggacgacaggtccttctttacatcaaagatcatagctatggtgataaaatacatagagttttacaagatggttcccagggcaataagtatcatgtttcgttttgctcaacgcttgaaagcatgagaaataaaggccgattcgatcgttatgttgtgaccaataaattagatggcatatttccagtatcaggtacagatactgtttcaagagagtatatagagggtgatacgcgattggcagtatgtcaggtgtgtctaaaaggcattaactatactaagtttacatctctcggctctcaatccgaaagaaagctcttcgccaagaacttcaaccttgctgatttctttgaaacctacagctctttcttcaaatatatgccgacaggtgttgctggtaatagcaaaaatcaatattccgaaaattgggatgaagtctctaggcgtattcgtgagaagtacgatttccaatgccagcaatgcggcctaggtttacacacgcacaaacgattacttcacgttcaccacatcaacggggttaaatcagataactctagtagcaacctcactccgctgtgttgtgattgtcaccgaaagcagccaaatcatcagcacatcaacgtgcgacacgaagattcaaagttaattgctcagttacgtaacgagcaggggcttaacaccagggaaagctggaaagacatctatgatttagctgaccctggtatgcatggtgttatagatctactcgaaaaacatcacgtgtcattaccagaagttggtgaagagattcaaaatgataatactgaagtagttgctgagttagaattggcgtggccgttgaaaaaaattggtgtcgcagtcagcaaagacgatgcaaaagcagcttacaggcaaggttggaaagtctacagtatgcgcttagccataaaagaaatagagcaattagttggaagtctgagataa

SEQ ID NO: 12914 - DNA, 1752 bp, Vibrio metschnikovii CIP 69.14
atgtctgattttatttcttcctttatagcctcgtacagcgcggcattaatctccgatgcatttatttatactatagtaatattatttatagtttcgttgtacttcgctttcaaagggaagtttcctcggcttactgctagttcgacgaacattctcacctctttgggtattttaggtacttttacaggcatcgtcgttggcctaatggagtttgaccctacaaatattgatggcagtatagaatcgttattggctggtttgaaaactgcttttctaacaagtttggttggtatggctgcatcgattatctataaagcggccatcggtgctattccgcaaaaatctgaagagacggttaaatctatagggccagacgaaatttattctgttatgtcagcacagctgaaagcatctaatgaattgttatctgccatcaaaggtgatgaagattcatctctgacttcgcaaattaaaaatttacgtatagacatcaatgatggcaataggtcactagttctgcatatggaaaaagccgcagacagccgtgatcaattccaaattagactttggcaaaaaatggatgagttcggtgaactcttatctaaatctgccacggaacaagtgatcaatgctctaaaggaagtcattgtagaatttaatgataagctaacagaacaatttggtgagaactttaaacgtctagatgaatcagtgaagaaactcgtcgactggcaagagaattacaaaaatcaactggaagatatgagtcttaaatatcaactaggagttgaggcaatagcttcaacagaaaaatcagtcgcgagtattaaccaacgcgccgaaacaattccagcgactatggaaaagcttcatcaagttatgacgctaggccatgaacaagtgacagagctagaacacagacttgaggcatttaaagatttaagagataaggctgtagaagccatgccgttaattaaagagcagatggattcaactatgaccgttattggtgactctgtgaaagcagcctctattcattatgaatctatgttggaagaatcacagaaagttattgataattttagttctacagcgaatcaaagtgttgaactaatgcgcacaaatcttgaaagtggtgcagaaacagtatctaaacaattgattgaaagttcgcagactttaggtggaaaacttgtagaagcatcgtctgatattcaagagcaagtaggcacggccacaggtggcttgagtaatgtgactagtcatttaaccgacaccacggaacagattcgtcaacatctagaagattcaatcacggaacttaacagtcagcttcgggtactagttgctgatattaaagatgatgcacgtgaaacaggtaaagtgctgaaagaggctaaccaagatctacttaacagtacaaaagagattcagtcagaaaccacttcgtcgatagctaaacttcacgatcgtttggaaacaacactggaagaagttttccaagttcaagcacaagctgtacgtaggactttcgatagtttagaagatcaaattacccaatcagtcggaaaaactggtagtgcagttgaaaaacaggtggaagtgctcgatttgcaaatgcagcaggaaattaatcgcactatgaatgaaatgggtgaggcgttagcgacgataactcagcagtttactcgtgactatcagatattaacacgcgaaatgtctaacgttgtaaatacaaaagttgctgtttaa

SEQ ID NO: 12915 - DNA, 708 bp, Vibrio metschnikovii CIP 69.14
atggataaattattcgggaaaacaaaattgaccagtgacagcggtgagcattggatgtctgtatcagatttaatggctggtctgatgatggtttttctttttatatccgttgctttaatgcgtgatgcaatgcttgagcgtgacaagataaaagatgttgctgaaacttatcagcaaacacagcaagccatttatttatctttacttgaagcttttgcaaaggatcttgataagtggggggctgaaatagatagagaaacgctgagtgttaattttacggcacctgaagtgctatttggtaacggtgacgcaaatttaactgtacaatttcaaatgattctaagtgattttttccctcgttatctcaatgttttggatcagtacaggccaattattcaagaaatcaaaattgaaggacatacttctagccgttggaaccaagattctagtgactatgaggcgtattttaataatatgaatttatctcaagcaaggactcgaactgtgcttggttatgtgatgaagcttgattcagttggtagtgaacattatgactgggtaaaaaataatgtagcagccgttggttactcttcatctaaagcagtggtaaaaaacggtattgaagatgaaaagcgctctcgtcgagtagcatttcgagtcattacgaacgctgaacatcagatattgaagatattggtggctgaatga

SEQ ID NO: 12916 - DNA, 1086 bp, Vibrio metschnikovii CIP 69.14
atgaaactgacgctgaatctccattctctgatgcaggcgattgaagtgatgaagccagaaaaaaaagggaggtttactcttgaacttcaagaaagccacattgataaagtttctgctgagctagaaaaaggtaaagatgtagaactaaaggatatagaggttgaatcaggtcttttaagctataaaggtcgtcatgtcacactctacataaaagcaaacggaactagtgctcgttttcatgtttctgattgttcgacattgcaagggatgagagcaaatggaagatttgagcgttatgtcgtgacaaacaacattactggggagtttttggttgatacctcctttggcgagacaaaggcaagattgaaggtgtgccaaaattgtttgcgtaagcttaactataaaggatgtaatacaacatcaaaaattagcactgtagttcaatccttcgacatggcggagtttttttcaacttatagttctttctttccacatatgccatcacgacaagctgaaacggcaaagagtggttataccgctgattggccaaaaatatcttctcattatcgggcagagaaaaattttgactgtgaagagtgtaaagtcaatatgcgttcaaacagagcgttgctccatgtacaccatatcaatggggtcaagtctgacaatcgggtgattaacttaaaatcattgtgcatagattgtcatagtaagcagccaatgcatcaacatatggttttgagccacagagaacgtcagacgatcagtgatctacgtaaagagcaaggtttgttagaaaatagacttggttggcaggaactatttgaactttctgatccgggtgtccatggtgtattacatgcctgccgtgaggcgcatttaaagtttccagagataaactattttgttgaggatgatttgggcggcttagctgctaggcttgagcttgcttggcctaaaaataagtttggtatagcgatatcaaacaatgatattgcagatgcacgtagtaatgggtggcaggttgtcggtattagcgactttttagataactataaatttcaagcaactaatttaaggtactga

SEQ ID NO: 12917 - DNA, 1779 bp, Vibrio nigripulchritudo SO65
atgactgagctgctttctacttttattgcgtctttttctgcagaatctgtatctaacgttttcatcaatcttattgttgtaattctagtaatttctagcattttagcttttcttggaaaagcccctcgattctcttcaaatacctcaaacttacttacttctctaggaatactgggaacattcgcgggtattgttgttggtttaatggagttcgatccaaagaacatagatggaagtatcgaaagcttgttaagtggcttaaaaacagcatttctgacaagtttggttggtatggctgcgtccattatctacaaatcaattcaagggttcattcctgccaaaaaaaatgatggtgaaaatactgaagcgagtccaaacgatattcttgcggtcatgaacaaacagctagagatgacaaacaagcaaacagaagttagctacgaaatcctaaagtcattaaaaggtgatgaagattcttctataacttctcaagtgaagatgcttcgtacagatcttatcgataaccacaaagatcttacacaatatctaaaaaatacttcggaattaaacgagaagtttcaagataagctttggcaaaagatggatgaatttggagagctattgtccaagtcagccacggaacaggttatcaatgcattgaaagaggtgatcgttgatttcaatgataagttgactgaacaatttggagagaacttcaaacgattagatgaatctgtaaagaaactggttgactggcaagagaactaccgccatcagttggaagatatggcagctaaatatcagttaggtgtagaagccatttcatctactgagcaatctgtcgcgcacattaatgagcgggcggaagctatccctgtgactatggaaaaactccatcaagtaatggagcttggtcacggtcaagtcactgaacttgaagagcgtttggaggcattcaaagatctacgtaataaagctattgaagcaatgccacagattcgcgagcaaatggataccacaatgaatgttattggtgattcagttaaggcggcttctacacactatgaattgatgcttaacgagtcacagacgatcatagacaactttagctctaccgcgtcgcagagtgtagatctaatgcgcactaaccttgaaagtggcgctgaaaatatctccaaccagctaatcgaaagttcacatacattaggtggcaagcttgcagaggcatcatctgatatccaagaacaagtaggcacggcaactggaggtttgagcaatgtaactagccatctcacggataccactgaacagattcgtcaacatttagaggactccatcacagacttgaatggtcagttacgagtactagtggctgatattaaagatgactcaaaagaaactggacgagtgcttaaagaagcgaaccaagaccttcttacaagcactaaagaaattcagcaggaaataacaaacgctatttctaagcttcatgaacgtttagaaacaacactagaagatgtcttccaagtacaagctcaagcagtgcgcagaacctttgatagtttagaagaccaaattacagactctatcggcaagacaggcagtgctgtagagaagcaagttgaagtgcttgaccttcaaatgcagcaagagattaaccgaaccatgagtgaaatgggtgaagctctggcgacgatcactcagcagttcactcgtgattaccaaaaacttgttcgtgaaatgaacaacgttgttacgactagcaaagtggcagtgtaa

SEQ ID NO: 12918 - DNA, 711 bp, Vibrio nigripulchritudo SO65
atggataaggttttcggaagttcgaaaaagcacagcgatagcgatgaacattggatgtctgtatctgatctaatggcaggtttgatgatggtcttcctttttatctccgttgctctgatgcgggatgcaatgatggagcgtgacaaaattaaagaagttgctgaaacttatcaacaaacccagcacgcaatttacgttgccctttaccaagagttcgaaaaagacttgataaagtggggggctgagatagatcgagagacattaagcgtaaactttactgctcctgatgtgctgtttgcaaacggtagagccgacctaaatgaaaacttccaattgatcttgaataatttcattcctcgatatctgtcggttttagatagctacaagccaatcattcaagagatcaaaatagaaggtcacacttccagccgatggaatcaggactcgactgattatgaagcgtactttaacaatatgcgtctctctcaatctcgaacacgagcagtattgggttacatcatgagcttggaaccggttgtcgtagaacattaccattgggtaaagcagaacgtagcagcggttgggtactcttcttcaaagctcaccctagataagcttggcaatgaagatgaacagaaatcgcgacgtgtatcgttccgcgttataactaacgcagaagaacaaattcgtaagatcttggaagaggtttaa

SEQ ID NO: 12919 - DNA, 1086 bp, Vibrio nigripulchritudo SO65
ttgaaactgagtattagcttcaaaaacctaaatgctgccattgagttaatggagcccaaaaagaaaggcgagtttaatctagcgtttgtcgaaagcagcattgaaaagctggatttggagctggctaaaggtaaagacgttgagttaaaagatgtcgatgttgactctggtctcctcagctataaagggcgtaatgtttctttatacattaaagataatggtacatccgcacgtttccacgtagctgattgccgtactcttcagggtatgagggctaacgggaggtttgaacgttatgttgtgacaaatgacgcctctggcgaatttactattgcgacagcttatggtgaacgtaaagcgccgttaaaagtttgtcagaactgtctacgaatgttgaactataaaggttgtaatacaacgaccaatattcaatcaatagtcaatgagtttgatatgggggagtttttcgcaacatacagctctttctttcctcatatgccttcacgtcaggcagagacggcggaaacaggttacaccgaagactggacgaaagtgtcttcacattatcgtgttgataagaatttcacgtgcgaacaatgtgatgtaaatcttcgctcacatcgtcatcttcttcatgtgcaccacgtaagcggagtgaagtctgacaaccgtcccaaaaaccttaaagctctatgtatagattgtcacagcaagcagcctatgcactcgcatatggctgtaagccactcagaaaggcagttaattaacaaactacggaacgaacaaggattactagaagatctaggtaattggcaaaggctatttgatttcgcagaccctggcttacatggtgttttgcatgcttgtaaagactttggaacaacattgccagaggtcgggttctatatctccgattctttcggtgacctagccgcaaaaattgagctagcttggcctaaacacaagtttggcattgctatatcaacgaatgatattgaagatgcaaacaatgaaggttggtatgtactcacgaccaatgaatttttagcagactatcggtctcaagcgggaaatttacgttggtag

SEQ ID NO: 12920 - DNA, 1779 bp, Vibrio nigripulchritudo AM115; identical to SEQ ID NO: 12917

SEQ ID NO: 12921 - DNA, 711 bp, Vibrio nigripulchritudo AM115; identical to SEQ ID NO: 12918

SEQ ID NO: 12922 - DNA, 1086 bp, Vibrio nigripulchritudo AM115; identical to SEQ ID NO: 12919

SEQ ID NO: 12923 - DNA, 1779 bp, Vibrio nigripulchritudo FTn2; identical to SEQ ID NO: 12917

SEQ ID NO: 12924 - DNA, 711 bp, Vibrio nigripulchritudo FTn2; identical to SEQ ID NO: 12918

SEQ ID NO: 12925 - DNA, 1086 bp, Vibrio nigripulchritudo FTn2; identical to SEQ ID NO: 12919

SEQ ID NO: 12926 - DNA, 1779 bp, Vibrio nigripulchritudo Pon4; identical to SEQ ID NO: 12917

SEQ ID NO: 12927 - DNA, 711 bp, Vibrio nigripulchritudo Pon4; identical to SEQ ID NO: 12918

SEQ ID NO: 12928 - DNA, 1086 bp, Vibrio nigripulchritudo Pon4; identical to SEQ ID NO: 12919

SEQ ID NO: 12929 - DNA, 1797 bp, Colwellia psychrerythraea
atggaagtcgtaaatttaccaaatgaacaagctgcaatactagctagctctttaacagcagtggtttgcatgttcataatcattgcattcttcttggcactatttaacctcaaacgagggcgggcttcagattatgtttcatataccccagcattacttacatcattagggatttttggtacctttgcggggatcgttattggtcttatggcattcgatgctaataacattgatggcagtatcgaagggcttttaaacggtctgaaaacagcgttcttaactagcttagttggaattatactctctatagtatttaaggtgcttcaaacatctggagttatatctgcaccacgaaatattgaagaagtatcatccgcaacacctgaagatatactaggggctattcagcaccaagggaaatcaatagagagcctggttactgcaatagggggcgatagtgatggttcaatattaagccagctaaaacttctgcgtggagatatcaatgataaccaaaagatagcgataaaatctcagcaagaagctgctgaaactcttaaagtaatgaatgaacaactctcatttcagcaggaaaacttcattaacttttccgataagctctggattaaaatgcaagattttgcagacatgctttctaaatctgcgactgaaacagtaatagaagcgcttaagcaagttataactgatttcaataataatttgactgagcaatttggtgaaaacttcaaacaacttaatgaatctgttaaagagttagttgtgtggcaggaaaattacaaagtccaaattggagaaatgacagaacagtataagttgggggttacctccatcacagcaacagaagcttcagttactgcgattagccaagaatctaaggccattcctgaaactatgactgacttaaagcagattatggaagtaaataaccatcaattatcagagcttgaaaatcatttagccgcatttaaagatattcgagataaagcagttgaagcagtacctgaaattcgtaaacagattgatgatacggttaaaacaatagctgaatctgtagagtctgcgagcagccattataatgctttattaacagagtctgacaaatatattcaaagccacatctctgcatcaaatgacttgcttgataagtttgtatcaaacagtaaagagggtgtagaaataataggtgagaagctagcggagagtgctattaaggttgaaaaagttattactggtggtgcggaggaattcgagacacaagttaaattaactaatgaaagcttacaagcaacgacccatgaggttagtgataatacggtgaaaattagagaggaattagaccatacggttaaagagctaagtattaatgttagagatatggttaatggccttattgatgattcgaagatgatggctaaaaccttaaccgatgcgaataatgcgttaatagctgatacctcatcagttagagatagtgttactcaaagtattgaaaatatgcaaaagcgacttgagtcatcattagaagatgtctttgcttcacaaacacagcatatgagtaaagttttctcaaatattgatgtaagtcttaaggatcaagttggaaaaactggcgaggcagttgaaaaacaattaggtatgattgatcaatctatgcagcaagagcttaaccgtgtgatgagtgaaatgggcaaagcactcggtcaaataagtaaccaatttgtaaaagactattcgaagttagtaaaccaaatgaattcagtagtacaggcagcatag

SEQ ID NO: 12930 - DNA, 717 bp, Colwellia psychrerythraea
atgtcttcacttgactctatttttggttcgtcacaacacaaagaagatggcgaacattggttaactgtgtcagatcttatggcaggtttgatgatggttttcttatttatagccattgcatttatgcgtcatgtatcaattgaacgggataaaataaaagatgttgctgtagcctatcaacaaaaccaagttgccatattcgatgctctaaattcagaattcgaaaatgatttagtatcttggcaagcatctatagacaaagaaaccttgtcatttcagtttgattcacctgaagtgttatttgctagtggtgaaagctctttaaaagttaaatttgaacaaatattatctgactttatccctcgttatttacatgtcttagacaaatatcaaagcagcattgatgaagtgcggattgaaggtcatacatcctccgagtggggcgttggtactcatccagatgatgcttacttctttaacatgtatctgtctcaaaatagaaccggcagtgtactgaactattcgtattttctttctaaattatctagtgagcaaagagcatggattaaatcttcttttgcggcggtaggtttagcttcttcacatttaaagctgaacaaagacggcacagaaaataaacaaaaatctcgtcgggtatcttttcgtgttattaccaatgccgacatccaaatccgcaaaattgttgaaggcttataa

SEQ ID NO: 12931 - DNA, 1122 bp, Colwellia psychrerythraea
atgaggctaactgttgatttatcttcacttcaacaagcagtgaaagccatgggggcagagcgcattgattttgagctttcaagtgaactgaccccaattgaacctatagatactcaattgggagaagggcttgaagtaaacctggaggaaatagagtttgaaactgggcttgctagttaccagggcagacaagtattgctttatattagagatcatggaggccgggtatcaacagctcttaatgatggctctaaaggaaataaataccatattgcagattgtggaactctagctgaaatgagagcaaaaggtaggtttgacaggtatgttgtaactaataaactatcagggcagtttcatatttcaggagatgattgggaaactaatcaacataccgaaggtgaagcgaatctcaaagtgtgtaaaaactgtttggcccacttgaactatcaaggatataaaaacaaggttaggggaccaattttcaacgcttttgatttaacagacttttttgatacatacagctcatttttcaagtttatgccgtcaggtgctgcaaataaaaatatcggctacagtaaggattgggatgttttgtctagaaaaacacgtgaaaaatttaactatcaatgtcaacaatgtgctcttgatcttaatcagcataaaaggctactgcatgttcatcatattaatggcgttaagtcagataatagcagtagtaacctgaccccattgtgctgtgactgtcaccggaaacagccccttcatcaacacatgtttattaaacatgaagatagtaaacgaatttcgcaattaagacggtcacaagggcttaacattaacaaaagctggcaagatgtttatgaccatgcagatccgggtatgcacggtgttataggtttacttgaaaaatattatgtttctctacctgaagtaggagaagatattaagaataacaaacaatatactgtagcaggattagaattagcatggccgttaaagaaagtaggtatagctattgacaagcctgaagctattgctgcaacaaagcaaggctggaaaatctacagtatgcgtcatgcactgagccaaattgagcaactagtgagtagtttgcggtaa

SEQ ID NO: 12932 - DNA, 1308 bp, Burkholderia pseudomallei MSHR346
atgaaaaccaaaactctccttctcctgtcgggaatcgcgtgggctccgtacgtgttcgcgggtggtcctatcggcacagtgctggcagacaaacagacactttctttcatattgctgaacacatgcctaacaatattcttcgccttcgtcagattcgaccgcttctccgttgttcacggcccagaaatattgacgaccgttgggattttcggttgttttctcggtattgccctggcgttactgcagttcgatgcatcaaatgtgtcggagagcgtgccgcatctgctggaaggagtgaaaaccgccttttgggcttcggtcagtggcgtgtttggctcattagttatccgcgggaggcactatttctggaagacccccatcccgcagacaccgggcgcaccgaaagcagccaccctagacgacgtcgtggccgcgacacacgctctacagctcagcctgtcggggaacgaacaaggcagccttctctcacagctcaaattgatgcgccaggaacaaggcgacgaacttcgtatgctccggacgtcgttcgacacgttcgcgcagcggatggcggaagacggctcgaaggctcttatcgaggctctgaaggaagtgattcgcgacttcaacgcacaaatcaacgagcaattcggcgagaatttcaaacatctcaacgcagccgttgaaaagcttgtcgtctggcagcagcaatacaaggaagagctcgacaaactgcaagcgctccagaaatcgtcagcagacgacctcaggggcgcatcttcgggcctagcactttttatcgaccgggcttctagcttcgctcaaacagcaacagcgctcgaaggcacgctcagaggtctggcgcagcaacatcagctcatcgaccagtctcaacgttcaatagccgacgttctttcccaaatgaaggatgtgacgccgcagttctcgcgtaaggtcgacgaaatgaccgaatcgatgaagcaaggtgtggctagggtgcaggcggaagttggcgatgtagtcaagaatttcggtgtccaggtgcagtcctcgtcatcagaaatgaaacagcttctgacggacacgcttcgcaaatcccagtccgaggtaaatgacgggctcgttcgctcgatggacgcagtccgccaaagcgttgtcacgctggacaagggattgcaggaggaactcacgaagagcctcgaaacgcttgggcgtcagctcgcgtcgctatcagagaagttcgtcgcagactataccccgctgacggaccgcctgagagaagttgttcgcatagctggcactgcgtga

SEQ ID NO: 12933 - DNA, 693 bp, Burkholderia pseudomallei MSHR346
atggatttcgagcatagcaaccaatctcactggataccaatggcggacctgatgaccggtctgatgatggtgttcatgctgctgactgcagcattcatgctccgggttgagcagacgaccacgttggtcgtgaaagagtacgaaaccaccaaacgtgacatgcaactggccctgcagaaggagtttgcgaaggacctgaagcaatggaacgctgaaattctcggcgatatgaccattcgtttcaatgacccaactgtgcttttcgcaaccggctcatccgaattgcggccgcgcttcaaacaggtacttggtcagttttttccacgttacgtggcgttgctgacatccgctcaatacaaggacgccgttaaggaaatccgcattgaaggccacacaagcgcgttgtggacaggaacgacagacgaaaaaatcgcgtacttcaggaacatggagctatctcaggcacgtacgcgaagcgcgctcgaatatttgctgtcgctaccggcggtgcagggcaacgagaaatggctcgttcagcacgtgacagcaaatggactctcgtcgtcacgtccactggctcaggattcgcaatcctcagcatcgcagatagcgaatcaacgcgtcgagtttcgcatcgttaccaacgcaagcgaaaagatggacctcattgccgagaagctggcaaagaaatga

SEQ ID NO: 12934 - DNA, 849 bp, Burkholderia pseudomallei MSHR346
atgagctttcagttacctaatttcctcaactggagctcgctgaacgcgttacggcaggagatgggcgcgcctcttgccgccagctttgttcctgaccataaattccgcgacattgaactacctgtcctcgaacgcctccaaaataacggtgtcgacgttaagtttgacgaagtcgaagtgctcagcgacggcacgctcgcgtacaagggatatcgcgtcttgctttacatcagggacatcacgtcaatcggccatcaggaaagtatgccccgctaccatctcgcatattgccgaactctcgacaagatgcgccggaatgctcgatttgaccgatatgttgtggcgaatggagacagtgggaaattccaggtcaacgtcattgagaatgacgtaaagacccagcacgtcagactgaacgtatgccagaactgtctggacgaaatccattggaacggattcgacatgaagatgccgcgtgacggacgtctcacccttgtttccaagttcgcccttcccgatttcttcaagaaatacccgcgcgacctgatggcagtcaaaccaatgcactcctccgataccgcgccactcaatgtttattcgcaggattggaacgaaatatcggaacgtaccaaacggcaacgaggctatcgatgcgccacgtgcaacactgtgctccggcaatttgattcaaaattcctgcatgtccaccatcgaaatggtcagaagtacgacaaccgcgactcaaatctcgaggtgctctgtatagggtgtcatgcagaagaaccgatgcacggacatatgagggccttgcgtgagtatcaggagtacatcgagcgatatcatcgttaa

SEQ ID NO: 12935 - DNA, 1308 bp, Burkholderia pseudomallei; identical to SEQ ID NO: 12932

SEQ ID NO: 12936 - DNA, 693 bp, Burkholderia pseudomallei; identical to SEQ ID NO: 12933

SEQ ID NO: 12937 - DNA, 849 bp, Burkholderia pseudomallei; identical to SEQ ID NO: 12934

SEQ ID NO: 12938 - DNA, 1308 bp, Burkholderia pseudomallei; identical to SEQ ID NO: 12932

SEQ ID NO: 12939 - DNA, 693 bp, Burkholderia pseudomallei; identical to SEQ ID NO: 12933

SEQ ID NO: 12940 - DNA, 849 bp, Burkholderia pseudomallei
atgagctttcagttacctaatttcctcaactggagctcgctgaacgcgttacggcaggagatgggcgcgcctcttgccgccagctttgttcctgaccataaattccgcgacattgaactacctgtcctcgaacgcctccaaaataacggtgtcgacgttaagtttgacgaagtcgaagtgctcagcgacggcacgctcgcgtacaagggatatcgcgtcttgctttacatcagggacatcacgtcaatcggccatcaggaaagtatgccccgctaccatctcgcatattgccgaactctcgacaagatgcgccggaatgctcgatttgaccgatatgttgtggcgaatggagacagtgggaaattccaggtcaacgtcattgagaatgacgtaaagacccagcacgtcagactgaacgtatgccagaactgtctgaacgaaatccattggaacggattcgacatgaagatgccgcgtgacggacgtctcacccttgtttccaagttcgcccttcccgatttcttcaagaaatacccgcgcgacctgatggcagtcaaaccaatgcactcctccgataccgcgccactcaatgtttattcgcaggattggaacgaaatatcggaacgtaccaaacggcaacgaggctatcgatgcgccacgtgcaacactgtgctccggcaatttgattcaaaattcctgcatgtccaccatcgaaatggtcagaagtacgacaaccgcgactcaaatctcgaggtgctctgtatagggtgtcatgcagaagaaccgatgcacggacatatgagggccttgcgtgagtatcaggagtacatcgagcgatatcatcgttaa

SEQ ID NO: 12941 - DNA, 1308 bp, Burkholderia pseudomallei MSHR1153
atgaaaaccaaaactctccttctcctgtcgggaatcgcgtgggctccgtacgtgttcgcgggtggtcctatcggcacagtgctggcagacaaacagacactttctttcatattgctgaacacatgcctaacaatattctttgccttcgtcagattcgaccgcttctccgttgttcacggcccagaaatattgacgaccgttgggattttcggttgttttctcggtattgccctggcgttactgcagttcgatgcatcaaatgtgtcggagagcgtgccgcatctgctggaaggagtgaaaaccgccttttgggcttcggtcagtggcgtgtttggctcattagttatccgcgggaggcactatttctggaagacccccatcccgcagacaccgggcgcaccgaaagcagccaccctagacgacgtcgtggccgcgacacacgctctacagctcagcctctcggggaacgaacaaggcagccttctctcacagctcaaattgatgcgccaggaacaaggcgacgaacttcgtatgctccggacgtcgttcgacacgttcgcgcagcggatggcggaagacggctcgaaggctcttatcgaggctctgaaggaagtgattcgcgacttcaacgcacaaatcaacgagcaattcggcgagaatttcaaacatctcaacgcagccgttgaaaagcttgtcgtctggcagcagcaatacaaggaagagctcgacaaactgcaagcgctccagaaatcgtcagcagacgacctcaggggcgcatcttcgggcctagcactttttatcgaccgggcttctagcttcgctcaaacagcaacagcgctcgaaggcacgctcagaggtctggcgcagcaacatcagctcatcgaccagtctcaacgttcaatagccgacgttctttcccaaatgaaggatgtgacgccgcagttctcgcgtaaggtcgacgaaatgaccgaatcgatgaagcaaggtgtggctagggtgcaggcggaagttggcgatgtagtcaagaatttcggtgtccaggtgcagtcctcgtcatcagaaatgaaacagcttctgacggacacgcttcgcaaatcccagtccgaggtaaatgacgggctcgttcgctcgatggacgcagtccgccaaagcgttgtcacgctggacaagggattgcaggaggaactcacgaagagcctcgaaacgcttgggcgtcagctcgcgtcgctatcagagaagttcgtcgcagactataccccgctgacggaccgcctgagagaagttgttcgcatagctggcactgcgtga

SEQ ID NO: 12942 - DNA, 693 bp, Burkholderia pseudomallei MSHR1153
atggatttcgagcatagcaaccaatctcactggataccaatggcggacctgatgaccggtctgatgatggtgttcatgctgctgactgcagcattcatgctccgggttgagcagacgaccacgttggtcgtgaaagagtacgaaaccaccaaacgtgacatgcaactggccctgcagaaggagtttgcgaaggacctgaagcaatggaacgctgaaattctcggcgatatgaccattcgtttcaatgacccaactgtgcttttcgcaaccggctcatccgaattgcggccgcgcttcaaacaggtacttggtcagttttttccacgttacgtggcgttgctgacatccgctcaatacaaggacgccgttaaggaaatccgcattgaaggccacacaagcgcgttgtggacaggaatgacagacgaaaaaatcgcgtacttcaggaacatggagctatctcaggcacgtacgcgaagcgcgctcgaatatttgctgtcgctaccggcggtgcagggcaacgagaaatggctcgttcagcacgtgacagcaaatggactttcgtcgtcacgtccactggctcaggattcgcaatcctcagcatcgcagatagcgaatcaacgcgtcgagtttcgcatcgttaccaacgcaagcgaaaagatggacctcattgccgagaagctggcaaagaaatga

SEQ ID NO: 12943 - DNA, 849 bp, Burkholderia pseudomallei MSHR1153
atgagctttcagttacctaatttcctcaactggagctcgctgaacgcgttacggcaggagatgggcgcgcctcttgccgccagctttgttcctgaccataaattccgcgacattgaactacctgtcctcgaacgcctccaaaataacggtgtcgacgttaagtttgacgaagtcgaagtgctcagcgacggcacgctcgcgtacaagggatatcgcgtcttgctttacatcagggacatcacgtcaatcggccatcaggaaagtatgccccgctaccatctcgcatattgccgaactctcgacaagatgcgccggaatgctcgatttgaccgatatgttgtggcgaatggagacagtgggaaattccaggtcaacgtcattgagaatgacgtaaagacccagcacgtcagactgaacgtatgccagaactgtctggacgaaatccattggaacggattcgacatgaagatgccgcgtgacggacgtctcacccttgtttccaagttcgcccttcccgatttcttcaagaaatacccgcgcgacctgatggcagtcaaaccaatgcactcctccgataccgcgccactcaatgtttattcgcaggattggaacgaaatatcggaacgtaccaaacggcaacgaggctatcgatgcgccacgtgcaacactgtgctccggcaatttgattcaaaattcctgcatgtccaccatcgaaatggtcagaagtacgacaaccgcgactcaaatctcgaggtgctctgtatagggtgtcatgcaaaagaaccgatgcacggacatatgagggccttgcgtgagtatcaggagtacatcgagcgatatcatcgttaa

SEQ ID NO: 12944 - DNA, 1308 bp, Burkholderia pseudomallei MSHR543
atgaaaaccaaaactctccttctcctgtcgggaatcgcgtgggctccgtacgtgttcgcgggtggtcctatcggcacagtgctggcagacaaacagacactttctttcatattgctgaacacatgcctaacaatattctttgccttcgtcagattcgaccgcttctccgttgttcacggcccagaaatattgacgaccgttgggattttcggttgttttctcggtattgccctggcgttactgcagttcgatgcatcaaatgtgtcggagagcgtgccgcatctgctggaaggagtgaaaaccgccttttgggcttcggtcagtggcgtgtttggctcattagttatccgcgggaggcactatttctggaagccccccatcccgcagacaccgggcgcaccgaaagcagccaccctagacgacgtcgtggccgcgacacacgctctacagctcagcctgtcggggaacgaacaaggcagccttctctcacagctcaaattgatgcgccaggaacaaggcgacgaacttcgtatgctccggacgtcgttcgacacgttcgcgcagcggatggcggaagacggctcgaaggctcttatcgaggctctgaaggaagtgattcgcgacttcaacgcacaaatcaacgagcaattcggcgagaatttcaaacatctcaacgcagccgttgaaaagcttgtcgtctggcagcagcaatacaaggaagagctcgacaaactgcaagcgctccagaaatcgtcagcagacgacctcaggggcgcatcttcgggcctagcactttttatcgaccgggcttctagcttcgctcaaacagcaacagcgctcgaaggcacgctcagaggtctggcgcagcaacatcagctcatcgaccagtctcaacgttcaatagtcgacgttctttcccaaatgaaggatgtgacgccgcagttctcgcgtaaggtcgacgaaatgaccgaatcgatgaagcaaggtgtggctagggtgcaggcggaagttggcgatgtagtcaagaatttcggtgtccaggtgcagtcctcgtcatcagaaatgaaacagcttctgacggacacgcttcgcaaatcccagtccgaggtaaatgacgggctcgttcgctcgatggacgcagtccgccaaagcgttgtcacgctggacaagggattgcaggaggaactcacgaagagcctcgaaacgcttgggcgtcagctcgcgtcgctatcagagaagttcgtcgcagactataccccgctgacggaccgcctgagagaagttgttcgcatagctggcactgcgtga

SEQ ID NO: 12945 - DNA, 693 bp, Burkholderia pseudomallei MSHR543
atggatttcgagcatagcaaccaatctcactggataccaatggcggacctgatgaccggtctgatgatggtgttcatgctgctgactgcagcattcatgctccgggttgagcagacgaccacgttggtcgtgaaagagtacgaaaccaccaaacgtgacatgcaactggccctgcagaaggagtttgcgaaggacctgaagcaatggaacgctgaaattctcggcgatatgaccattcgtttcaatgacccaactgtgcttttcgcaaccggctcatccgaattgcggccgcgcttcaaacaggtacttggtcagttttttccacgttacgtggcgttgctgacatccgctcaatacaaggacgccgttaaggaaatccgcattgaaggccacacaagcgcgttgtggacaggaacgacagacgaaaaaatcgcgtacttcaggaacatggagctatctcaggcacgtacgcgaagcgcgctcgaatatttgctgtcgctaccggcggtgcagggcaacgagaaatggctcgttcagcacgtgacagcaaatggactttcgtcgtcacgtccactggctcaggattcgcaatcctcagcatcgcagatagcgaatcaacgcgtcgagtttcgcatcgttaccaacgcaagcgaaaagatggacctcattgccgagaagctggcaaagaaatga

SEQ ID NO: 12946 - DNA, 846 bp, Burkholderia pseudomallei MSHR543
atgagctttcagttacctaatttcctcaactggagctcgctgaatgcgttacggcaggagatgggcgcgcctcttgccgccagctttgttcctgaccataaattccgcgacattgaactacctgtcctcgaacgcctccaaaataacggtgtcgacgttaagtttgacgaagtcgaagtgctcagcgacggcacgctcgcgtacaagggatatcgcgtcttgctgtacatcagggacatcacgtcaatcggccatcaggaaagtatgccccgctaccatctcgcatattgccgaactctcgacaagatgcgccggaatgctcgatttgaccgatatgttgtggcgaatggagacagtgggaaattccaggtcaacgtcattgagaatgacgtaaagacccagcacgtcagactgaacgtatgccagaactgtctggacgaaatccattggaacggattcgacatgaagatgccgcgtgacggacgtctcacccttgtttccaagttcgcccttcccgatttcttcaagaaatacccgcgcgacctgatggcagtcaaaccaatgcactcccccgataccgcgccactcaatgtttattcgcaggattggaacgaaatatcggaacgtaccaaacggcaacgaggctatcgatgtgccacgtgcaacactgtgctccggcaatttgattcaaaattcctgcatgtccaccatcgaaatggtcagaagtacgacaaccgcgactcaaatctcgaggtgctctgtatagggtgtcatgcagaagaaccgatgcacggacatatgagggccttgcgtgagtatcaggagtacatcgagcgatatcgttaa

SEQ ID NO: 12947 - DNA, 1308 bp, Burkholderia pseudomallei MSHR4503; identical to SEQ ID NO: 12932

SEQ ID NO: 12948 - DNA, 693 bp, Burkholderia pseudomallei MSHR4503; identical to SEQ ID NO: 12945

SEQ ID NO: 12949 - DNA, 849 bp, Burkholderia pseudomallei MSHR4503; identical to SEQ ID NO: 12934

SEQ ID NO: 12950 - DNA, 1308 bp, Burkholderia pseudomallei MSHR3951; identical to SEQ ID NO: 12932

SEQ ID NO: 12951 - DNA, 693 bp, Burkholderia pseudomallei MSHR3951; identical to SEQ ID NO: 12933

SEQ ID NO: 12952 - DNA, 849 bp, Burkholderia pseudomallei MSHR3951; identical to SEQ ID NO: 12934

SEQ ID NO: 12953 - DNA, 1308 bp, Burkholderia pseudomallei MSHR3964; identical to SEQ ID NO: 12932

SEQ ID NO: 12954 - DNA, 693 bp, Burkholderia pseudomallei MSHR3964; identical to SEQ ID NO: 12933

SEQ ID NO: 12955 - DNA, 849 bp, Burkholderia pseudomallei MSHR3964; identical to SEQ ID NO: 12934

SEQ ID NO: 12956 - DNA, 1308 bp, Burkholderia pseudomallei MSHR3960; identical to SEQ ID NO: 12932

SEQ ID NO: 12957 - DNA, 693 bp, Burkholderia pseudomallei MSHR3960; identical to SEQ ID NO: 12933

SEQ ID NO: 12958 - DNA, 849 bp, Burkholderia pseudomallei MSHR3960; identical to SEQ ID NO: 12934

SEQ ID NO: 12959 - DNA, 1308 bp, Burkholderia pseudomallei TSV5; identical to SEQ ID NO: 12932

SEQ ID NO: 12960 - DNA, 693 bp, Burkholderia pseudomallei TSV5; identical to SEQ ID NO: 12945

SEQ ID NO: 12961 - DNA, 849 bp, Burkholderia pseudomallei TSV5; identical to SEQ ID NO: 12934

SEQ ID NO: 12962 - DNA, 1308 bp, Burkholderia pseudomallei TSV32; identical to SEQ ID NO: 12932

SEQ ID NO: 12963 - DNA, 693 bp, Burkholderia pseudomallei TSV32; identical to SEQ ID NO: 12945

SEQ ID NO: 12964 - DNA, 849 bp, Burkholderia pseudomallei TSV32; identical to SEQ ID NO: 12934

SEQ ID NO: 12965 - DNA, 1308 bp, Burkholderia pseudomallei MSHR840
atgaaaaccaaaattctccttctcctgtcgggaatcgcgtgggcgccgtacgtgttcgcgggtggccctatcggaacagtgctggcggacaaacagacacttgctttcatattgttgaacgcatgcctaacaatattcttcgccttcgtcagattcgaccgcttttccgttgttcacggcccggaaatattgacgacagttggaattttcggttgttttctcggtattgccctggcgttactgcagttcgatgcatcaaatgtgtcggagagcgtgccgcacctgctggaaggagtgaaaaccgccttttgggcttcggtcagtggcgtttttggctcactagttatccgggggaggcattatttctggaagacccctatcccgcagacacccggcgcacccaaagcagccaccctcgacgacgtcgtggccgcgacacacgctctacagctcagcctgtcgggaaacgagcaaggcagccttctctcacagctcaagttgatgcgccaggaacaaggcgacgaacttcgtatgctccggacgtcgttcgacacgttcgcgcagcggatggcggaagacgggtcgaaggctcttatcgatgccctgaaggaagtgattcgcgacttcaacgcacaaatcaacgagcaattcggcgagaatttcaaacatctcaacgcagcagttgaaaagctcgtcgtctggcagcagcagtacaaggaagaactcgacaaactgcaagtgctccagaaatcgtcggcagacgacctcagggacgcatcatcgggcctggcactttttatcgaccgggcatctagctttgctcaaacagcaacagcgctcgaaggcacgctcagaggtctggcgcagcaacatctgctcatcgaccagtctcaacgttcaatagccgacgttctttcccaaatgaaggatgtgacgccgcagttctcgcgtaaggtcgatgaaatgaccgaatcgatgaagcaaggtgtggctagggtgcaggcggaagttggtgatgtagtcaagaatttcggtgtccaggtgcagtcctcgtcatcagaaatgaaacaacttctgactgacacgcttcgcaaatcccagtccgaagtaaatgacgggctcgttcgctcgatggacgcaatccgccaaagcgttatcaccctggacaagggattgcaggaggaactcacgaagagcctcgaaacgcttgggcgtcagctcgcgtcgctatcagagaagttcgtcgcagactataccccgctgacggaccgcctgagagaagttgttcgcatagccggcactgcgtga

SEQ ID NO: 12966 - DNA, 693 bp, Burkholderia pseudomallei MSHR840
atggatttcgagcatagcaaccaatctcactggataccaatggcggacctgatgacaggcctgatgatggtgttcatgctgctgactgccgcgttcatgctccgggttgagcagacgaccacgttggtcgtgaaagagtacgaaaccaccaaacgtgacatgcaactggccctgcagaaggaatttgcgaaggacctgaagcaatggaacgctgaaattctcggtgatatgaccattcgtttcaatgacccaacggtgctcttcgcaaccggctcatccgagttgcgaccgcgcttcaaacaggtacttggtcagtttttcccacgttacgtggcgttgctgacatccggtcaatacaagaacgccgttaaggaaatccgcattgaaggccacactagcgctttgtggacaggaacgacagacgaaaaaatcgcgtacttcaggaacatggaactatctcaggcacgtacgcgaagcgcgctcgaatatttactgtcgctgccggcagtgcaggccaacgagaaatggctcgttcagcacgtgacagcaaacggactttcgtcgtcacgtccactgactcaggactcgcaatccgcagcatcgcagatagcgaatcaacgcgtcgaatttcgcatcgttaccaacgcaagcgaaaaaatggacctcattgccgagaagcttgcaaagaaatga

SEQ ID NO: 12967 - DNA, 849 bp, Burkholderia pseudomallei MSHR840
atgagctttcagttacctaatttcctcaactggagctcgctgaacgcgttgcggcaggagatgggcgcgcctcttgcagccagctttgttcctaaccataaattccgcgacattgacctgcctgtcctcgaacgcctccaaaacaacggtgtcgacgttaagtttgacgaggtcgaggtgctcagcgacggcacgctcgcgtacaagggatatcgcgtcttgctgtatatcagggacatcacctcaatcggccatcaggaaagcatgccccgctaccatctcgcatattgccgaactctcgacaagatgcgccggaacgctcgatttgaccgatacgttgtggcgaatggagacagcgggagatttcaggtaaacgtcatcgagaatgacgtaaagacccagcacgtcagactgaacgtatgtcaaaactgtctggacgaaatccattggaacggattcgacatgaagatgccacgcgatggacgtctcacccttgtttccaaatttgcccttccagatttcttcaagaaatacccgcgcgacctgatggcagtcaaaccagtgcactcctccgatacagcgcctctcaatgtctattcgcaggattggaacgaaatatcggaacgtaccaaacggcaacgaggctatcgatgcgccgcgtgcaacactatgctccgacaaacggattcaaaatttctacatgtccaccatcgaaatggccagaagtacgacaaccgtgactcaaatctcgaggtgctctgtatagggtgtcatgcggaagaaccgatgcacggccatatgagggcgttgcgtgagtatcaggagtacgtcgagcgatatcgacgctag

SEQ ID NO: 12968 - DNA, 1380 bp, Pectobacterium atrosepticum
atgcttagtatattaccacttgaaacatggatttttattgctgtaatccttgcctacttcatttatagcaactggaattttaccgagaaaaaatcccatgagtcgccaggtatcctcattactataggaatattggcaaccttccttggcattgcgttaggtttgtcgtcattcgatatgaatgatgtggaaaatagcttacctacgctgattaatggcataaaaaccgcattttgggcttctgtcgcgggtgtcgcttgcgcattaattataaaatggcgctatgccatctggggtgtaagaacaaaaaacaaccaaccaacacccactgattcaacaattgatgatattgttcaacacttacagatctctacagaatcgattggccgattgcattatgctatagcaggaaatgaagatgcttctttactcacacagttaaagttaatgcgcggcgatcaaaacgataaactcaccaatattcataatgcatttactgaatttgcaaaaattcaaactgaaaataactcaaaagcattaattgaagcattaaaagaagttattcatgactttaacgaaaaaatcggtgagcaatttggcgaaaattttaaacagctaaatgaagctgtcggtaaaataaatgagtggcagcaacaatacagcctgcaaatacgagagatgattgagcaacaaactcaaacaacagaaaatatgcaacaagcgacccaatccttttctgaaataatgacacaatcggaatcatttactcaagttgcaaaagacattcatcaaacgattggcacggcctctagtttagaaaaaggcatagaagaaaatctaaaacaactcgctgaactaattgaatcctcaaaaacaggcatccccgaaatagaaaaaggaatcatggctattatagaggatgtgagaaacggggctaaagcctctgccacagtcattggagatagtatttatactgtcacacgcacattggaatcctcagcggctgactttaccagtcagatgataggtagttcgaaagcgatgtccgatgcaataaaaaaccaaaatcaggaaatgcaaaaatctgttcagaaaacaggtactgagctacaagagcagataacccgcctttctcaagatctcactaaatatatgcagaaacacaatgaagacgtcaccaataatattgtcgaactaaataaaaaaacagaacaacaagttcagacattggatgctgctttagctgctgcgttgaagaaatctctcgatagcctaggccaacaattaggagcactatcttctaaatttgtacaggattacgatcctctaacagaaaaactaagagacgtcgtacgcctatccgagaatttgaggagatag

SEQ ID NO: 12969 - DNA, 735 bp, Pectobacterium atrosepticum
atgaataatccattactgactcacaaaaaagcagataaagaggatttttggatcagcctgagtgatttaatgacctctctgatgatgatatttttacttatctccgttgtctatatgataaaagtacaggagatggttaagattccatcagtatataaaaataccctacaggggcttggtcaagcattacagctcgaattcaaggatgatctaaaacgttggcacgcaacaatcgacgaggatctaacagtacggttccaggagccaaatattttatttacaaccagttcctctgagctaaagccggaatttaaaagtatcttagatgaatttatccctcgctaccttggtattatgactgataaaaaatatatcgataacattgaggaaatacgtattgagggacatacatcaacgatgtggcgaactggtgtaagtgaaaatgatgcttactttcataacatggaactgtctcagtcaagaactcgaacaactctgtcatatattatgaatatgcctgctgtttcagactctaaaaacaccttaagctggtttaaaaatcatgttcgagccattgggttttcttcagcaaaacccattgataaagaaggaaaaacgattacatccccaacgcaaattgaagacagtgcacgctctcaaagagtggagtttcgtgtcaggacaaatgttgaacgtcaggtggccaatattgttgagaaagggaataaaatataa

SEQ ID NO: 12970 - DNA, 876 bp, Pectobacterium atrosepticum
atggattcgtttctcgtctctcaacttcccgattttcttgagtcgtcaattttcaataatctacgcaaggaaatgaaagcagaaattatcccaccaatcaccgaaataaaaatggatgctcttgttcttgataaaatactgtcaacaactggaaaagatgttgatatattagaaatagaaattaatagtgatcatactattaattataaagataaccgagttatccttcatataagagatgtcgcttcctacagtgggaacatgagtttgccaaaatatcatttggcaaactgtaaaacattacagagaatgtgggaaaataacaaaagtggaagatacgttgcagccactcgtagtgatggaatttttacgataaaatcacagaatactgaaaaaacagagtgggtcaccagagaagaaaacttagatgtatgtaagttttgtctcgaaacgctaaattggaaaaattactctagaaaatatcaggatagagaaaatattttttctacttttgatctaagagaattctttactgtttatccgaactcagcaacaacatacaatgctgagcataatgatattactgctccaattaatgattactccaaaaatttccaaataatatcaaaacaatatcgagagtcagttaactggcaatgtgaaatttgcaacataaaccttacacgtaaagatttaaataaatttttacatgtccaccaccgtgatgggcaaaaaaataataataacaacaaaaatttacaggcactctgtattgaatgtcattctaatcaggacaaccatgggcatatgaaaaacaatccccaacttacaccatttattcaaataaaaaacagtatggttctttcagaaagctaa

SEQ ID NO: 12971 - DNA, 1380 bp, Pectobacterium atrosepticum; identical to SEQ ID NO: 12968

SEQ ID NO: 12972 - DNA, 735 bp, Pectobacterium atrosepticum; identical to SEQ ID NO: 12969

SEQ ID NO: 12973 - DNA, 876 bp, Pectobacterium atrosepticum; identical to SEQ ID NO: 12970

SEQ ID NO: 12974 - DNA, 1380 bp, Pectobacterium atrosepticum ICMP 1526; identical to SEQ ID NO: 12968

SEQ ID NO: 12975 - DNA, 735 bp, Pectobacterium atrosepticum ICMP 1526; identical to SEQ ID NO: 12969

SEQ ID NO: 12976 - DNA, 876 bp, Pectobacterium atrosepticum ICMP 1526
atggattcgtttctcgtctctcaacttcccgattttcttgagtcgtcaattttcaataatctacgcaaggaaatgaaagcagaaattatcccaccaatcaccgaaataaaaatggatgctcttattcttgataaaatactgtcaacaactggaaaagatgttgatatattagaaatagaaattaatagtgatcatactattaattataaagataaccgagttatccttcatataagagatgtcgcttcctacagtgggaacatgagtttgccaaaatatcatttggcaaactgtaaaacattacagagaatgtgggaaaataacaaaagtggaagatacgttgcagccactcgtagtgatggaatttttacgataaaatcacagaatactgaaaaaacagagtgggtcaccagagaagaaaacttagatgtatgtaagttttgtctcgaaacgctaaattggaaaaattactctagaaaatatcaggatagagaaaatattttttctacttttgatctaagagaattctttactgtttatccgaactcagcaacaacatacaatgctgagcataatgatattactgctccaattaatgattactccaaaaatttccaaataatatcaaaacaatatcgagagtcagttaactggcaatgtgaaatttgcaacataaaccttacacgtaaagatttaaataaatttttacatgtccaccaccgtgatgggcaaaaaaataataataacaacaaaaatttacaggcactctgtattgaatgtcattctaatcaggacaaccatgggcatatgaaaaacaatccccaacttacaccatttattcaaataaaaaacagtatggttctttcagaaagctaa

SEQ ID NO: 12977 - DNA, 1752 bp, Vibrio navarrensis
atgaccgactttcttgcttccatcatagcttcttatagcgcagcatcaatctcagatgcattcatctataccatcgtattactacttataatttctagtgttttagcttttttaggaaaacatccgaggtttactgcaagtacgactaacattctaacttctttaggtattcttggtacttttgcgggcatcgtagtgggtttgatggaatttgacccatctaatatcgacggtagcatagagtcattgctggctggtttaaaaacggcttttctaactagtttggttggtatggcagcctcgattctttacaaggcaattctaggagtgatcccgcataaagatgaattaaccatccaggctgttggtccagaagaaatttattctgtaatgtcagctcaattgaacgcatcaaacgatcttttatcagcaattaaaggtgacgaagactcatcattaacttctcagataaagaatctacgtacagatattaatgatgggaacaaatcacttggccgtcatttagaaaaagcagctaatagtagcgagcagttccagtttaagctgtggaataagatggatgaatttggtgagcttttatctaaatccgctacagagcaagtaattaatgctcttaaagaggtaattgttgaatttaatgacaaactcactgagcagtttggagaaaattttaaacgcttagatgagtcggtgaaaaaacttgttgattggcaagaaaactataaaaaccaactagaagatatggctacgaaatatcagctaggcgtggatgccatttcttcaactgagaagtcagtagctagtatcaatgagcgagcagaatcaatcccagcaacgatggaaaagctccatcatgttatggagctaggtcatgggcaagttactgaactagagcatagacttgaggcatttaaagacttgagggacaaagcgatagaagcaatgcctcaaattaaagagcagatggattccactatgtcggtgattggagagtctgtaaaggcggcttctagtcactatgagtcgatgctcgccgagtcacaaaatattattgataactttagctatactgctactcaaggtgtagaacttatgcgtacaaatctggaaagtggtgcggagagcgtatctaagcagttaattgaaagttcacatactataggcggtaagcttgcagaagcatcgtctgatattcaagagcaagtaggaactgcaactggtggtttgagcaatatgaccaaccatttgacgaacacgactgagcagattcgccaacatctagaagattcaatcactgagttaaatagtcaacttcgtgtattggttgctgatattaaagatgacgcacgcgaaacaggtaatgttttaaaagaagccaaccaagagttacttaatagtactaaagaaatccagtcacaaactacatcagcgataactaaacttcatgatcgattggaaaccactttggaagaagtgttccaagttcaagctcaagcggttcgcagaacatttgatagtttggaagatcaaattacccagtccgtagcgcaaacaggtagtgcagttgaaaaacaggtggaaattcttgatctacaaatgcagcaagaaattaatcgtacgatgaatgaaatgggtgaagctcttgcaactatcactcagcaatttactcgcgattaccagaagctaacgcgtgaaatgtcaaatgtaatcaatactagggttgctgtttaa

SEQ ID NO: 12978 - DNA, 708 bp, Vibrio navarrensis
atggaaaagctgtttggtagtcctccatcgagaggtgaaggtggtgagcactggatgtctgtatcagatctgatggctggcttgatgatggtgttcctttttatctctgtagcactaatgcgtgatgcaatagttgaacgtgacaaaatcaaagatgttgctgaaacttatcagcaaacacagcaagcgatctatatctctttgctggaagagtttgcaaaggatcttgataaatggggagctgagatagatagagacacattgagtgtcaactttacagcacccgaagttctgtttgctaatggcaaagctagtttaacagatcagtttcaacgtattttgaatgatttttttcctcgttaccttgaagttctagaacagtacaaaccgatcatccaagaaattaaaatcgaagggcatacatctagtcgttggaaccacgattctagcgattacgaggcatattttaataatatgagtttgtcccaatcgagaactcgtacagtccttggatatgtgatgaggcttagtgatgttcgcgcgaaacactatggctgggtaaagaataatgtagcggcagttgggtattcgtcatcaaaagcggtagtgattgaaggtgttgaagatgaaaaacgctctcgtagagtatcttttcgtgtgattaccaatgccgaagagcaaatactgaagattttgggggcggaatga

SEQ ID NO: 12979 - DNA, 1137 bp, Vibrio navarrensis
atgaaattaacactaaacctccactctttgatgtatgcggtagaaattatggagccagagaagaggggagtttttcagtgggagcatcagataacagaaaaaagcaagattgatgttgaactagcttacggtaaagatgttgaacttaaagatgttgatattgactcaggtttactgagttataaaggaagacaagtactgctctatataaaagatcatggtaacgcagttcaatcagtaataaataatccatcaatgggaaacaaatatcatgttgcggattgttctaaattgaaatccatgcgttctgaaggacgctttgagagatacgtagtaatcaatgatacgtcaggtgagtttcctatatctggtagtcactcttatggacaaggtcgagaagatggctatgcaagactgaatgtttgtaaactatgcctcggccaattgaactataagggctacggtagtggtgggagtcgctcgaatattttcgacaagttcaatatggcagagtttttctctacgtatagctctttttttccgtatatgccatctcgacgaggtgaaaccgcagagagtggctatacagccgattggtcaaaaatatcatctcattatagagttgagaagaactttgagtgtgaggaatgtcaagtcgacatgcgttcaaacagatctcttttgcatgttcatcacgtaaatggagtaaagtcagataatcgttcgtcaaatctgcgagctctttgtgtcgattgccacagtaagcagccaatgcatcaacatatggctttaagtcatagagaacgtcagaccataaactgtttgcgtaaagaacaaggattattggatgatttagttgattgggagaagttgtttaacctttcagatcctggagtgcatggagtattacatgcttgtcgtcaggcgtatctaagacttccagagattaactatgtgatagagaatggcactgacgatttagctgcacatcttgagcttgcttggcctaaacataagtttggcattgcaatatcggagaacgatctagatatagcgaatcgacatggttggcacgcagtgggagttaatgagtttttagaaaactataaaacacaggcgtacaatttaagatactag

SEQ ID NO: 12980 - DNA, 1821 bp, Nitrococcus mobilis Nb-231
atgcccttcggttattgcgtcctacctggtttaatcgagggcacgcgggattgcggcagtgcctgggccgccttcgaacacgagataagaatccttattggagtgcccatgttggatttggccagcattatcgagaccgcattacagcaggtctcagcggcagagatcacgaacggtgtccttttcctgctgttcgctattttcttcttggctgttattgcggcaatatgggggaaaatgccgagatttggccattacacgccgaacctgcttacctccttaggcatcctcggtacatttgtggggattgttgtcgggttgttggctttcaaggtcaacgacatcgatgccagcatcggtccgcttctggaaggtctgaaaacagcgttcatcaccagtatcgcgggcatgtgcctagcgatcgtctttaaggtgctcgatagcatcggcatgaccagcatgttccggcgcgataaggacgcagttcccgagcacatcggtccgagcgagatccatgcggagttgcgtggccagcgtgaggcgacggagcggttgagttgggccatcgcgggcgacgaggactccgccttgattagtcagatccggctgttgcgaagcgacgcacaggatcaatcgaaaagctcattggagcagttgagggctcaaagcgaactacaggcttccctgtccagaaatagcaagttgcaacagcagagcttcaacgaattcaccgacgcgctatggaacaagctcgacgactttgccgagatgctctccaagtccgcgacggaacaggttatcaacgctctgaaagaagtcgttgccgatttcaaccgcaatctgaccgaacagtttggagataacttcaaaaagctcaacgcggcggtggacgagctggtccaatggcaggagaactaccgtaatcagctggccgagatgaacgagcagtatgcgcagggcgtgcaggcgatcactcaaacggcgaactcagttaccgagatcagcgagcaatcccggcagatcccggagacgatgagcgagctcaaggccgtgatggagacggccaatcatcagatccgggagctggaacggcatttggaagcattccgggatatgcgcgatcgcgccgtggaagcggtgccgcagatccgccagcagatggaccagatggtgcaggacgtatccgcggccgtgaaggacgccggccagcagatcatgatggccactcaagcgacccataaggccatcgtcgaaggcgccaaggacttcgagaaccgcgtgagccgcacgaacgagggactgaccaatacatccgaccagctcgcgaacaacagtgagcggattcgcgagcaattggctgccaccgttaaagatatcaatgcaagcgtccgggccatgatcgcggaggtgacggatagctcgaaggccatcggcaacaatcttgtcgacgccaacaagcgtttggagacgagcatcaaggaggttcagtaccaggtgaccgattccatcgactccatgcagaagcggctggagagtgcgttggaacaggtgtttcaggcccagactcgggaaatcgctcgaacgtttggcgcgttggacgaggagttgcgcaaatccgtacgcaccaccagcgaggcagtcaacacccagctcgaagccattgacaaggcgatgctcaacgaaatcgagcgggtaatgcaagcaatgggcagggaactcgccggtatcactcagcgctttactagcgattacaaggatcttacatcgcaaatgggtcaagtcgttgagcaaaatcggcagtttgtgcgcatggcccgttag

SEQ ID NO: 12981 - DNA, 714 bp, Nitrococcus mobilis Nb-231
atggaaaaggtgttcggcaagtatcgcgcgggcggcgagggacaggaggcccactggctatcggtagccgacttgatggccgggctaatgatggtttttatgtttatcgccattgctttgatgcgcaacgcatttcaagaacgtgaccagattcgggagattgccgttgcataccaagagaaccaggttgccatctacaacgcattgatgaaggagttcaaagacgatctcgcgcactggaacgcgagcattgaccgggacagtctggcgtttcgattcaagtcgccggacgtgctgttcgaggtaggatcagcggaaatcaggccgcgcttcaaggacatcctcgaggatttcttcccgcgttacctcggcatcttgaagggcttcaaagattccatcgacgaggtacgcattgaagggcatacgagtagcacttggaatcagcgggttacggataccaaagcctattttctcaacatggaactgtcgcaggggcggacacgctcggttttgcagcatgtttatcggatgccttcgattcggggggatcaaccgtgggtgcagcggcagttcgccgccgtcggtttttcatcctcacgccctatactccggcctgacgggaaagaagatcgtgcccactctcgtcgggtaacttttcgggtcataacgaacgctgagatccagatccggaagattctcgaggaatcgggatga

SEQ ID NO: 12982 - DNA, 1107 bp, Nitrococcus mobilis Nb-231
atgaaacggttgaacgtggatctttctggcctgcaggaagccgcaaggctcatgggcgccgagccggtggagttgtccattgaaagagaaatgccaccgccacccataattggttgtgagctcgagaagggggtcgagcttcccgatcttgcggaggtggaaagcgacaatgggctgcttggttacaagggacggcagatccttttgtatatccaggatcacggtccaaatgtcgcggtggcgcttgaagacggctatcagggcagaagattccatgtcgccgattgcaagacgttgaaaaacatgcgggcgaaaggacggtatgaacgctttgtggttaccaaccggcgcgacggtgagttttatgtttttgggaaggactggtacacaggccagaaaaatgaaggctacgcgcgtctttgggtatgccagaattgcttaaattcactgaattacaaaggtgctcagcggcgtaatgtgcgcgacattgcgcaatccttcgatattgaagaattcttctcgatctacagctcgttttttgcgcacctcccgagccgatacgcgggggatgggacgcaagaagattacacacaggactggcatcgggtagccgcccgctacaaggccgatcaggattttcggtgccagtcctgcaaggtcgatttgagtacgcagaaacgtttactccatgtccaccacgaaaatggagtcaagagcgacaatcgtcgcgcgaaccttagaacgctctgcgcggcgtgccaccgggagcaagccgatcatggtcatatgttcgtcgctcacaaagatatgcgcacgatcaaccgtctccggcagaggcagggtgtcatggaggatctcggctggagcgaagtgttcaaattctgtgatccggcgctacacggggttttggatgcgtaccgcgctcgcggagtaaaaatgccggaagtgagctacgacgtgcaggatgccaccaaggctgtcgtcgcgaatctcgagatcgcctggccacgggagaagatgggcgttgcaatatcagccgctgatcgggacgccgcgcgcaaggctggatggaaagcattcagtatgattgatgctttgagaacgtga

SEQ ID NO: 12983 - DNA, 1176 bp, Pseudoalteromonas citrea DSM 8771
ttggcaacaaatcttattttcatctcgattattactacagctgtagcagttttgttttttatctatgaggcaagaaaatcaacttctaaagttgcaactattacaccctctctatgtgtaaccattggcatattctttacatttgttggcattgctgtctcattacagtcattggcaccctccagcaatagccaagaggcatttgaggcgttattggttgggttgaaaagtgccttttggtctagtgttattggcttaggtggttcaatactttgtcgttggcagtcaactaaatatggaaaagatccatatgatgaatatgcaaagcaaacgaaccatattgttgtggcgctgcgagaaaatagccgtagtgtaattcatgcaatcaataacaatagtaaaacaatagctactatattatcggagcagcttttcaaagattctgaaagcttaagtcagcaatttcaagaaagtactaatgttattttgaagaaattcgctgccaatattgaaattttaatctctcaatcaaatactctattaaatgatgtgaatacttctgttcagtcgaatcaggttatattaaatacgatggtcacttcatctcaggaatttaacgaaaataatagaatcgctatgcgaaatagtgcgaatttattacgtaattgcgttatgcactttaatactattttagaatctacagaaaagtcacttattagttttgaagtgcaaaatgaaaagttgcaaaaagggatggaagatgtttcttctgccataatgagtgacttttctaaggtacaaacattataccattcgttaagtcatgatataaatcgagtagagtcagcaatgaaatctgtgtctcagctagttatagatttaaaacaggttcaagagttgttagaaaaagatcacaaagagagcatggtagcggctattactgattttaaggttcaatttcaaaatgttagtaaagaatttgatgcattaaatctggcgcaaatgaaagcggcgcatgctttctttgagaacttagatcttacagttgaaaaaggactcaccgaagtagtcgatgtttacactagtggcctcaaaactatcctcaaagataataacactgtgttgataaagagcaaagccaaagaaactgatcttcagttagatgaagtggagtaa

SEQ ID NO: 12984 - DNA, 654 bp, Pseudoalteromonas citrea DSM 8771
atgctattcaatgcgcaaggcacggaagattcaggtttagcgatttcagatcttatgacggcactaacggccgtatttttattaggcacattattagccatcgaaaaacgtgatttaagaagtgaatatgaagctttcaacaatacttcttttgagaataacttattaaatgagaagcggagagtaggtaagctgttagaaacagtgagcaataataagtcaaaattacattgggacgaaagtcgacatgcattaacagtttggctgcaatttgaaaagaatgattcaaagttgactgagtctgcgaaggcaactctaaatatgttgtgcccaaaactaataagtattgtgggcaatcatggtagctcaattggtaaagtgatcatacggggacatacagatagaagttggagtggaaaaggtaatgattttgttggcaatatgcgtgtttcttatgaaagggcaatgaatacaacagattattgcttagcgtcattgccaaagaaggaggtggtcattgcttctaagtttgctgctgaaggggtgtcatttctgtacgctgacagttcgttgactaaaggacaggaaaatttacagcggcgagtagaaattttgtttgattacactcagcaagcgagacaagaaaatgactaa

SEQ ID NO: 12985 - DNA, 789 bp, Pseudoalteromonas citrea DSM 8771
atgactaaatttaacggttttcgttcatcttggtatgaagtattgggcaatgttagagagagtgttgaccgaaagatattgtttaactaccggagagaccctggtttttttaaagatggtagacctgtttttgcttataaaaaagagtttcaaatagcacgttatgatgaattaacagcggataatataatgagtaaaacacccaaagtgcatttgacttactgtcaaaatatacaaagggcaccagggaaatatcaggtaacaagccgtgcagatggtttttttcatgttaacttaaaagctgagagcggcgaaattcaagaagaggaagtactattacctatggcggcttgtcagttttgcatccgaatgctgttccctgattatttaccgccacttggaaaaaataaggccaaatgtgatgaattagcgagcaatttcaattttgcagattttgtgatagaaggtgttgtgttaagccatatcgcttttgatgagtcaaatatactcaataggtttttgggggagagaaattggtcagaattcagcagggatatgcgtgcaaaaaataattggtgttgtcagttgtgcaaaatctcatttaaaagctataagcatctactacatgttcatcatatcaaccatagtcaatactggaattcacccgctaattgtatggtgttgtgtataggttgtcatgctaagcaaccccatcatcagcatcttaagcagaataaactttatagtctatatgaagaatacattaagaaagttacattgacatattag

SEQ ID NO: 12986 - DNA, 1800 bp, Pseudoalteromonas citrea DSM 8771
atggatattataaatttacaaaacgatgaagcattacgttatgcaagttcactcacaataatagtttgctcgtttattgttattgcattttttattgcagtgcgaaattccaaagccggtaaatcaaatgaatttgtgtcctatacgcctgctttattaacgtcattaggaatctttggtacttttgctggcatagtaataggcctcatggcattcgatgcaacgaatattgatggaagtattgaggggttacttaacggtttaaaaacagcgtttttaacaagcttagtcggtatattactttcaataatatttaaggtgttacaaacctctggagttatttcaaaacctgatagtgctgaatctattactggggcaacaccagaagatatattaagcgccattaacaaccaaagacaatcaatcgatacattagtaactgccatcggtggcgatagtgatggctcaattctaagtcagttgaaacttcttagaggtgatatcaatgacaatcaaaagctaacgattaaatccagccaagaaacagctgaaacattaaaaacaataaatgagcaattaacgaatcaaaaagaagccttcaccaaattctcagataagctttggataaaaatgcaagactttgcagatatgctttctaagtctgctactgaaaccgtcattgaagcattaaaacaggtaattaccgattttaataataacctaacggaacaatttggtgagaacttcaaacagcttaatgaggctgtgaaagagttagtaacttggcaagaaaattacaaagttcaaatttcagaaatgaccgagcaatataaacttggtgttgcatctatttctgccacagaagagtctgtatcaaaaataagtacagaatcgaaagctatacctgaaacgatgaataacttaaaagaaattatggacgttaatcaacatcaattaaatgaattagagcgacaccttgaagcatttaaggatattcgcgatagagccgttgaggccgtccctgaaattagaaaacaaattgacgaaaccgttaaaactattgctgattctgtagaatctgcaagttctcattataaagagttacttacagagtctgataaatacattcaaacgcatataacttcgtcaaatgagttacttgaaaagtttgttaataacaccaaagacggagtagagactataggtgaaaagctagcagatagcgcgtcgaaggttgaaaaagtaatatcagaaggagctaatgaatttactgacaaagtacaccaaaccaatgcaggtcttcaaacaacagccgatcacgtaacaagtcaaactgaagttatcaaaaatcacttaaaagacaccgttgaagacttaaacgatcacgtacgtcaaatgatccacgcattggttgatgactcaaaagcattggcaagcacattgactgacgctaataaggctcttgtaacagataccacatccgtaagagataatgtcactcaaagtattgaatcaatgcagaagcgcttggaaagctctctcgaagatgtatttgaatctcaaactcagcatatgacgaaagtgttttctaatattgatgcaagcttacgcgaacaggtcagtaaaactggtgataaggtggaaggtcaactcgatatgcttgaccaagctatgcagcaagaattgaataaagtcatgagtgtaatgggcactaagctaggccaaattgcaaaccaattcgttaaagactactcgcgtttaactgagcaaatgaacgctgtggtaaggaaggctagctaa

SEQ ID NO: 12987 - DNA, 708 bp, Pseudoalteromonas citrea DSM 8771
atgaactcgatttttgggacatctcgaaatatagaagatggagaacattggttaaccgtttcagatctaatggcgggactaatgatggttttcttattcattgcaatagcgtttatgcgacacgtttcgatagaaagagacaaaataaaggatgtcgctgtagcttaccagcaaaatcaggtagcgatatatgatgctcttaatcaagagtttgaaaaagatctctcaaggtgggtagcatcaattgataaagagacgttatcatttcagtttgactctccagatgtccttttcgataccggtgaaagtacattaaaagcagagtttaaggaaatattagaaacatttattcctcgataccttaaagtcctagacgaatacagagatagcatcgatgaagtaagaattgagggccatacttcttccgaatggggtaatgatacgcaccctaatgacgcttatttttttaatatgacgctttctcaaaatagaactcgctctgttttgaattacgcatattttctgtccaatttgtcagacgaacagcgtgcatgggtaaagtcatcttttgcagcggttgggctagcctcctcacggttgaagctcaaccaagatggttcagagaataaagaaaagtcacgtcgagtttcattcagagtaataactaacgcggatatacaaattcgtaaaattgttgaaggcctataa

SEQ ID NO: 12988 - DNA, 1149 bp, Pseudoalteromonas citrea DSM 8771
atggcattcaaactaaccgtcgatttttcatcgctagatcaagccgtaagccaaatgggtgctgaacttattgagtttgatttggaaagtaaagtcattccgattgagccgattgacaggaagcttaatgaaggcttcgaagttaactttgaggatattgaatttgacactggtcttgctagttaccaaggcagacaggttcttctatatatcaaagatcatagttacaacaacaagatatatacagttctagaagatggtagcaaaggcaacaggtttcatgttgcagactgtgaaatgctcgagcgaatgagacaaaaaggtcgatttgaccgttatgttgttacaaataagttagatggaatgtttcctgtatctggaactgataatagaacgaatgaattagtggaaggcgaaaccgatttaagcgtatgtcaatactgtctagaagcgactaacttccaaaaatttgcgtctttaaaaagaggtgcgccaaggcgagattttgttcaaaactttaagttggcagacttcttcgacacatacagttcattttttaagtttatgcctactggcgtagctagtaatcaaacaagtcactacacaaaagactgggaaacggtttccaagagaattcgtgaaaagtttaattatcaatgtcagcaatgtggattggatttagcccaacataagcgtttattgcatgtccaccatatcaatggcgttaagtctgataatagtgatagcaacttaacccctctatgttgtgattgtcatcgtaaacagcctgatcaccaacacatgtttattaaacatgaagaaaccaagttaatttcgcacttacgtaatgctcaaggattaaatgttaaagaaaattggcaagacgtatacgacttagccgatccgggcatacacggtgttattgatttattagaaaaatatcatgtttctttacctgaagttggcgaagaaattcaaaatgaaaagaaagaagttgttgccgaaatggaattggcatggccactaaaaaaggtcgggattgccattgataaaccagaagcaatagaagcaactaagctcggatggaaagtatacagcatgcgtcacgcgctgagtcagatagatcaactagcaagtagtttgagataa

SEQ ID NO: 12989 - DNA, 1767 bp, Pseudoalteromonas piscicida JCM 20779
atgcaacctgtagtacaaacctcattcgtagaatctaactctggcatgataacgatggtgattggtgttattctcatcgcaatttgtatcactagtctttttcatgccaaaaacaaaaagcacattgagtttgttaactacacccccacactattaacaaccataggcatattcggtacctttcttggtgtagtgattggcctatttaatttcgatcatactaaaattgacttaagtatttcggctttattatttggtttaaaaactgcgttcataactagcttgctgggcttatttctatctattttgtttaaaacatgtcaaacaactctattttttgaaaaagaggaaattagcatttctgaagcctctcctgaggcaatattgtcggcaataaaagaacagactaaagcgactagtgatttaaaagactcgcttgtaggtaatgacgagagtacattgctaggtcaattaaaaattattcgcgctgacagcaacgataactttaaacaagcctttaaccttcaaaaagatcagtttgatgcgcaaactttaaaacaacaagagtttgcagacaagttatggataaaattacaagactttgctgacactctttccaaatctgcgacggaggaaataattgcagctctaaacaatgtgattgctgactttaatcaaaaaattaccgagcaatttggagataactttaaacaactgaacgaggctgtttttaagcttgtagagtggcaagaaaactatcgagttcaactagaagaaatgaaagctcaatacaatcacggtgttgaagctatcgtaaaaactgaaggctcagttgcaagcattaatgagcatgcaaaatcaatccctcagtcgatggacactttgaccgaagttatggaagttaaccagcatcaattagctgaattagaaaggcatttggaagcattcgaacaaatgcgtaacaaggctatcgaggccgtcccacagattcagcagcaggttgaaaaaacagttcaggatataggtgcagctgttaatgctgcaagtactcattacacctccctattaacccattcagatgaatatataaacaaacatattgctagttcagaagcactgttagataaatttgtgaactctacagagcgaggtattgatgccgtcggtactaagttaataagtagctctgaaaatatgggtaaagcgttagatttagcgagtactgaatttactaataatgcctcaagaacaaatgagagtttgcaaagcagttccgattaccttgccgatggtagcgataaaatgaagctgcacatctctgatgctgtttcagatctcaacaataacatgagagatcttattgaaaaagttgtcgtagaaacgcgtacgatgagcaccacttttaaagatgcaaatagtgagcttgctcaagatacaaaacaagctagagataccttcttatcaacaaactctgaagtgagagagcaaattaaacgcgtaattgagcaagctgctcaagagcaaatgcagcaaactcaacgaacttttgtagctattgaagaatcagcgaagcaacaattagaaaaaacgcatgagacagttgaacatcagttgagaatgattgaccaatccatgcaagaagagttaactcgcgcattacagcttatggctaactctttaggtcaaatttcaaataaatttgccgaagattaccaagtattaactcagcaaatgaggagagttgttgagcaaggagcaacagcttaa

SEQ ID NO: 12990 - DNA, 705 bp, Pseudoalteromonas piscicida JCM 20779
atggaagatatttttggaaaacgtaagcgttctgaagaaggtggagagcattggttatcaatttctgatctgatggctggactcatgatggtgtttttgtttatcgccatagtatttatgcgtcacaccatgaaagaaaatgaaaaaatcaaaaatgtggctgttgcttttcaggaaaatcaagttgctatttacgagtctttaatgagtgagtttgataaagatttagacacttggggagctgagatagataaagaaacattggctttcaactttaagtcacctgatgtgctctttgataacggtgatatagatattaaaccagcttttgcgataattctcgatgatttttttccgcgttatttaaaagtcctaaagccatttagaagctcaatagatgaagtccgcattgaaggccacactagcagtgaatggaacaaagatagcactgatgaagaagcctactttaagaatatgaaactttcccaaggtcgaacacgctcggtgctctcatatttgtatacgctcgtgcctgaagaaactccttggataaagcgcaatattgctgcggttggcttttcttcttcacgtttagttttgacagagcaaggcactgaagactatgaaaaatcaagacgtgttagttttcgagcgataacaaacgcacatatacaaataaaacgtattctagaggcacaagagtaa

SEQ ID NO: 12991 - DNA, 660 bp, Pseudoalteromonas piscicida JCM 20779
atgaagattgaaattgattttagtactctgcaaactgccactttaaaaatgggggccccaaataagcatattaaactcgactcccccctcgggaaaataaatccaatagacaatgggttaggtataggcctagtgctaggagaagatctacaactctctgaaattgataacaccaataaccttctgtcttataaagggcggcaaataatgctctacattccagagcaaggcagccaaatcgaagaagtaattaaagacggcaaaattgatggtgctaagcgcttacatgttgctgaatgcaaaacattagaaaatatgcgtaatcagggccgatttgaaaggtattacgttaccaatgatattagtggaagctaccctgtaatgggtcatcatcattatcggggggatgttattgagggtaaagctaaattaggcgtctgcaaaaactgcttaagaatcctaaattataaaggatatgctgatcacagtcatattaagaagtctagaatataccaagaatttaacttagctgaattctttgaaacttatagctcttactttaaacactacccgaatcaaaacaagtcaattggtagttacaccaaagattgggaacaagtatcaagccaatatagacaaacgcaaaactatactttgtag

SEQ ID NO: 12992 - DNA, 1485 bp, Legionella lansingensis
atgaataaaatatttgctttattgttagccctagtttcctgccctgttttagcgtctgaaagtaatactcccgtacctaccctattttcattgttgcaacagttttcgtctatcgaattatgttggatggctctaacaatatgctttcttattacctttttagttaggtttgatcggtttgcagtaacttatggccctgaaatattaacgacaatggggatcgtgggatgttttgcctgtatagcgtgggcgttattacattttaacagtaataatataacggcaagtatcccctcattgttaaatggcattaaaacggctttttgctcatcttttattggggtatttggggcattactaattagaggtaggcataagttgagtaaaaatgtctctcatcaaaccaaagaatcagctccagcatcaatggatgatttagtaaaggaaattactaatctgcgaaaaacgttatctggtgacgaagaaggatctctgctctcacaagtcaagatgttaagacaagactctaatgatcaacagaaaaaattgcaggaatcatttgataattttgcaaataagatgctagagaataaccaaaaagcctttattgaagcactcaaagaagcaattcaggattttaaccaaaatttaacagaacagtttggtgagaatttcaaacatctaaaccaagctgttgaaaaattggttatttggcaagagcaatataagcaagaattagaaacgataaaacagtatcagtcacaattttcaaatgacatgaagcaatcctctgaggcattcgctactgtagtagaacatgcaaagcagtttactgatattgcccaaaacttgaagttattgcttgaatcgatggataaacaaaaggatgtgctttttgttcaagaaaaagctctaagcgaacttttagtcacaatgaaagattacatccctgaattttcagtgagcacacagaaaatgattactgaaatatctgatggtgtgaagttcgttcaatctgaaacagcaaagctcatttctgattacagtgcagaagttaagtctgtaaataacgagatgcgaagttcactaactgatgtaattaaacaaacgcaggattcattaaccagcggtattcaaaataatctgaaggctattcaagaagctattatcacagttgaagctcaaacatcagagattatcagaaaccactcggcgcaactgcaatcaacacaagcagaaatgaaaaatgtgcttgtagatggtattaccaaatctcaacaagagctaacatcggggctacaagagaatggcagaattattagggaaggagttttagctttagataaagagcttgaaaaaagtttgactgattcccttacaagtttaggtaaacagcttgcttcattatcggaaaaatttgtttctgattatatgcctcttactgagcgcttgcgtgagatcgtacgcttaggtgaggcagcataa

SEQ ID NO: 12993 - DNA, 693 bp, Legionella lansingensis
atggaagatcataaccaatcttactggattccgttaagcgatcttatgacgggtctcatgatggtatttatgttaatagccgtctctttcatgttgcaagttgaacaaactacaacattggttgttaaagagtttgaagaaaccaagagcgatctcactcaagctttacaaaaggaatttgcgaaagatctaaagcagtggaatgctgaattacttggtgatatgacgatacgatttgataatcctgatgtactttttgatacaggatcatctattgtaaaacctgcattcaaagaaattcttaatgattttataccacgatacatatcgttggtctcatcagataaatacaggaaatcgatcaaggagattcgtattgaaggacatacttcaaaaaaatgggcatccgatactgatgaaaaaacagcctatataaagaacatgcgtttatcccaggaaagagctcaatccatgctggaatatattttgggcttatcttctttgtctgaacatgaaatatggatgcgtaaatacctaacatccagcggtttttcttcttcaaaacctatattaaatcaatttcatgctatagatgatggccgttcccaacgagtagagtttgtgattgtcaccaatgctgattcaaaactagatgaaatttctagtgaaatgaagaagataaaaaatggttaa

SEQ ID NO: 12994 - DNA, 819 bp, Legionella lansingensis
atgggtgctgagcttgttaaggagtttaagtttgataccggaatatcgctgttaggtgaggattttattaaacggcttgatggtgatggtgttgaaatagaaagtcttgatgaaattgatttattcagacatgacaaaacactggcatgtaaagggcaacgagttttgatctacattagagacgtgaatatttatggggaagatagagaacttcctaagtatcatatttcatcttgtagaaccttagtcgacatgtggcgaaaaaaacgatcggaacgttacgttatacaaaatagggaagatggtgtttttcaagtacgtataacgaaagacgggcaaactaaagtacggcatgaaaaattaaatgtatgccgtaattgtttaaccaatttaaattggcaagattacagtgaaagagaaaaatctcataaaaatagaattgtagccgattttttaatcgctgaatttttcaaaaaatttcccaagtctttattgtctgtgactccgagctatgatgctgatacagcacctctaaatgagtatccttcaaattggcctgagatcagtaaaaatgctaaaaaaaaggcaggctaccagtgccagaacaaaagctgccaaatctatctggctggtgctcatgttcagtatctccatgttcatcatatcgatggacagaaaaataataataagaaatacaatttgaaggttttatgcgtgaaatgccatgctaacgaacctagtcatgggcatatgaaaagtactcgtgactacaaacagtttttgtccttgtatgcgcaaataaaaaagaataaattttaa

SEQ ID NO: 12995 - DNA, 1761 bp, Actinobacillus minor NM305
gtggtttatttctttgaatcttttctaaaaaatctctctaccgatggaataacaaatgcgttcttttttattcttattattgttgcactattaggcataagtgcttttttaacatctcgctttaaaaaatcaaaacgatttactagttttgcagaatatacgcctgttttacttacttcattaggtattctcgggacatttaccggaatagtttccgggttattaaacttcgatattgaacatattgatacgagtattagctctttattaggcggaatgaaaacggccttcttaagtagcgtatttggtgtttttttatctattttattaaaaataatctataccattttttctaaaaataaagaaaataatgcactagatgcacaagcaattgtagataatttttacgagcaaacagaacaattaaaaaaacaaaatcaatatactgaatcattaatttcacatattgaaaatcttgttaaaagtttagggagtgattcagatagcagtgttttagggcaacttaaattgttacggggagatttatcagatcgtcaaacacaatttagacatttaattgagcctatggctacaaatttattatctatccaatccttagtacaggataatcaacaagtatttgaacgttttgaaaataaactttggattaaattacaagactttgctgacatgatgtctagatctgcaacggaggctgtaattgaagccctaaaacaggtaatccaagacttcaatcataatttaactgagcagtttggtgaaaactttaaagaactcaataaagcagtaactttattagttgagtggcaagaaaattacaaaaaacagctgaatgaaatgatctctctttatcatgcaggtgttcaaagcctctcaacaacagaaatgtctgttgcaaatattgaaaattcgacaaaatcgatcccaactacaatggaacatttaagcaaagttatttcaacaaaccaaaatcaaattgataatttagaaaatcatttaaatacttttgctcaagtgcgtgataaagctgttgaagctttaccagaaattcaaaaacaaatttcgttgatgttagaaaatacggaaaaagccaatgtagaactagttgatggcttaaaacaaagtggagaaaaattagcctctgatattgtttctatttctaatgattttaaagaaaaaacattggaaacctctaacaaactagcgaaatcatttattgagaatggcgaaatgtttacctcaaaactaacacaagcaacagagcctttagtagtatcaattacgaaaaaccatagcgcccttgttgaaagtgcagctgttttagaaaaaacagcaacagcaatgaatgatgagcaaaaagcgtttttagcacaacaaaatcagatttcaacgcaaattacagattttattatgcgttggcaacagcaatttgaacaaaatacacaacaaattcagcaacaatttactcgctctttagaatcatttatgcaggaacatatgcaagaaagccgtaaactaatggctaaattagaaaaagaaagtgaaacagcattaagtagaactggcgaaagtattgataaacaaatcaaagcgcttgatagcgctcttgaaactgaattatctcgtgttattggtaatatgggacaagcattaacctctatcagtcgtcgatttacagatgattattcggaactagttgaggcaatgaaacgaattacaacgaaaggtagaaacttctaa

SEQ ID NO: 12996 - DNA, 690 bp, Actinobacillus minor NM305
atgaacattgatttgtctaaattcattgataaaaaaagtaatggggacgattcccaatggttacctatggctgatttaatgtctgggttaatgatgctttttttatttattgctgtaagttttgttttaaacaccaaaaaagtggctgaaaactatcgagatacccaaaatgaaatttaccaagccttaaaagatgaatttgagcctaatttagaaacttggaaagcaagaattgataaagatactttaacctttatttttaccgatcccgaagtactatttaaaactggtgattcaactcttcaagaacgtttcaaaactacattaaatgaatttttccctcgttatatgagagtgatcaatgattataaagattctatcaatgaagtaagagttgaaggacatactagcagtgagtggaatttaaattcagacgaagatactgcatattttgaaaatatgcggttatctcaagaacggacaagagaagtattatattatatttatcatttaaatacggtaaaggaatatcgccaatggattaaggctaatatttcttccgttggattatcatcctctaaagttatactgaataatggtatagaagataaacaggcatcaaagcgcgttacctttagaattattacaaatgctgaggagcaacttcagaaattatcggagatgaaataa

SEQ ID NO: 12997 - DNA, 843 bp, Actinobacillus minor NM305
atggagattaaagctgatttttctgcgctattttcgtctatccgaaaaatggggatcacagagctagtacctttttccattgattttaattctaaaccagtagaaattgttgtcgaagggctatcatcatcaaaaggtattgaagttcctattgctgatgttaagcctgatccagatagtggtgtttttacctatcaaggagaacacgttgtgttatttataccagatcatagctttaaatatgatgaggcgatcctagatcctaaaaataacggaaataaatatcatcttactgattgtcgtacactagagcaaatgagaaaaagtgggcgatttgaacgttatcacgcaacaaataatcgtaaaggaatctttcacatttcaggaagcttaactacacaagaagctgaggttgagctatctgtttgtaaaaactgtctagccgcactgaattatcggaactataccctaaatcgcatcagagtattcaatgaatttaacctagaagatttttttaaccattatgagactttttttagaaaaattccaaatgataaaaaaccaagcaaacctggctatgtagatgattgggaagaaatatcaaagcactatcgagaaagcgtaaactttacctgtgaagagtgtcatgtaaatttagagctatatcgatatttactggatgttcatcataaaaatggcgttaaacaagataataaagaagaaaatcttaaagcaatgtgtaaactttgtcacagccaagaagcctttcatagccatatgattgtaaagcaagaagatgagttgttaataaaaaaattgagacgggaacaaggtattttttag

SEQ ID NO: 12998 - DNA, 1653 bp, Enterobacter asburiae
atgttagctcagctttttgaacatttgtttcaatcaattgattctacactcgtcacaaacatttttatttgggctgttatctttgtattttgtgctgcatggtggtgtgatcataaaaatattcataacaaattccgagagtatgctccaacattaatgggagctctgggcatactgggtacttttatcggcattattattggattgcttaattttaatactgaaagcattgataccagcatcccggtattattaggaggtcttaaaacagcattcattaccagtattgttggaatgtttttcgcaattttgtttaatggattagatgctttctttttcgccaataaacgtcgtctattggaagtgaatattccaacatcggttactcctgagcatatccatcaagaattacaagaacaaaataagcatttggtgaaattaatctctggcatgagtggtagtgaagagggttccattgttgcccaaataaaactactgcgtaatgaaatcagtgatgcctcaagggcacaaatatctaaccattctaatttcagtaataagctctgggaacaattacaacaatttgcagacctaatggcaaaaggagcaaccgaacaaattatcgatgcccttaggcaagttattattgatttcaacaataatttaactgaacaattcggtgagaatttcaaagcgcttgatatttctgtaaaaaaacttgtcgactggcaggaaaactataaaaaccaagttgagcagatgggtgagcaataccaacaaagtgttgaatctttagtcgaaaccagaaaagctgtcgcagggatctgggaagaatgcaaagggattcctcttgcgatggctgagcttcgtgatgtgctgcaagtgaatcagcaccaaattggggaactctcccgtcatctggaaacctttgccgccatacgcgataaagcaactgatgttttacctgaaattcaaacaaaaatgtctgaagtaggtgaactcttaaaattaggtgccgcgaatgtcagctcgtctcttgaacaaaccagtcagcagatacttatcaatgctgattcgatgcgagttgcccttgatgaaggcactgaaggtttcagacaatcagtgactcagacacagcaagcttttgcagcaatggcgcatgatgtaagcaattcctctgaaactcttactagcacgctaggagacactattacggagatgaaacaaagtggtgatgagttcctgaaatctctggaaacgcactcaagagaattgcatcgaaatatggaacaaaacacggctaatgttattgatatgttcagtaagacaggcgagaaatttaatcaacaattatccagcaatgccgataacatgtatggttcaatgcaatcttcgtttgataaagcaagcgcgggactgacatctcaggtgaaagagtcaattgagaaatttggtagttcaattaacgagcagttacatgcttttgagcaagcaacggagcgcgaaatgaatcgtgagatgcaatcactagggaatgctctgctctcaatcagcaaaggttttgtcggtaactacgagcggctactcaaagaatatcaagctgtcatgggacaactgcaaacattaatttctgctaatcaaaaacgaggataa

SEQ ID NO: 12999 - DNA, 708 bp, Enterobacter asburiae
atggataaaatccttggcaagcaggcccctaagaaagatcaagataatgaacactgggtttcaatgtcagatttaatggccggtctgatgatggtatttatgtttatttctatcgcctatatgcactatgtgcgtattgaaaaagaaaaaattaaagaagtggctgtcgcctatgaaaatgctcaacttcaactctataatgcactagaaactgaatttacaaaggatttgccagcttgggatgctgaaattgacaaacaaactcttgaggtccgttttaaatcacccgatgtcttatttggtttaggtagcacagagcttaagccaaaatttaaacagatccttgataatttcttccctcgctaccttaaagttcttgataactatcaggatcatattactgaagtacgtattgagggacatacaagttctgactggactggagcatccaattctgacatggcctattttaataacatggaactctcgcaagggcgaacacgagcagtactgcaatatgtctatggtttaaaagatagcgcagcacaccagaagtgggtaaaaagtaaatttgctgccgttggatattcttccgcacaccctattcttgataaatctggtaaagaagatctcaatcgctctcgtcgagtaacatttaaagttgtaacaaatgccgagttgcagattcgaaaaataattcaggagtaa

SEQ ID NO: 13000 - DNA, 1092 bp, Enterobacter asburiae
atgaaattatcaatcgacatttctgaacttattcagttaggaagaaaaatgttgccggaaggcgtaggtttttttcttgacgaaacacctgttgtatttgatccaattgatatcgaactttctgcaggtaaagaagttagaattgaagatcttgatcccggtagtggtcttatttcctaccaggggagacaggttcttttatatattagagaccataccggacgttatgattctgccattgaagatggagagaaagggaagcggtttcatattgcctggtgtagaacattagatgacatgcgccaaaaaaatcgatttgaacggtatcatgcaacaaatcgtgttgatggtttattcgaaattgatgatgggctcgatcggagccaagatgtcgctcttaaagtttgtatgaactgtcttgaacgccttaattacaaaggaagtatagataaacaacagaaaagattaatatttaaatcattttctttgaatgaatttttttcagattatagtacctgctttcgccatatgccgaaaggtatctatgataaatcaaatagcggctacgtagaaaattggaaggatatatccaaagctactcgagaacaagctaactacaaatgtagtgattgtggtgtgaatttaatgcccatgaaaaatctatgcgatgttcaccacataaatggtattaaatatgataactcagctgaaaatctactcgtcttgtgtaaagactgccatcgaaaacaaccttttcacgaaggaatatttgttactcaggctgacatggcaatcattcaacgcttacgttcccaacaagggcttttgaaggttgaatcctggaaggatatttatgatctgacagatccatcgattcatggcgatataaatattatgcaacacaaaggatacccgccaccaattccggggttagacttacaaaactcggagcatgaaattattgccaccgtagaagctgcctggccggttgcaaaaattgcagtaaatttaacaccgataaaagtcgatggttggaaagttttctccgtgggtgaactcgttaaagaaatacaatctggggttattttctaa

SEQ ID NO: 13001 - DNA, 1653 bp, Enterobacter asburiae; identical to SEQ ID NO: 12998

SEQ ID NO: 13002 - DNA, 708 bp, Enterobacter asburiae; identical to SEQ ID NO: 12999

SEQ ID NO: 13003 - DNA, 1092 bp, Enterobacter asburiae; identical to SEQ ID NO: 13000

SEQ ID NO: 13004 - DNA, 1653 bp, Enterobacter asburiae; identical to SEQ ID NO: 12998

SEQ ID NO: 13005 - DNA, 708 bp, Enterobacter asburiae
atggataaaatccttggcaagcaggcccctaagaaagatcaagataatgaacactgggtttcaatgtcagatttaatggccggtctgatgatggtatttatgtttatttctatcgcctatatgcactatgtgcgtattgaaaaagaaaaaattaaagaagtggctgtcgcctatgaaaatgctcaacttcaactctataatgcactagaaactgaatttacaaaggatttgccagcttgggatgctgaaattgacaaacaaactcttgaggtccgttttaaatcacccgatgtcttatttggtttaggtagcacagagcttaagccaaaatttaaacagatccttgataatttcttccctcgctaccttaaagttcttgataactatcaggatcatattactgaagtacgtattgagggacatacaagttctgactggactggagcatccaattctgacatggcctattttaataacatggaactctcgcaagggcgaacacgagcagtactgcaatatgtctatggtttaaaagatagcgtagcacaccagaagtgggtaaaaagtaaatttgctgccgttggatattcttccgcacaccctattcttgataaatctggtaaagaagatctcaatcgctctcgtcgagtaacatttaaagttgtaacaaatgccgagttgcagattcgaaaaataattcaggagtaa

SEQ ID NO: 13006 - DNA, 1092 bp, Enterobacter asburiae; identical to SEQ ID NO: 13000

SEQ ID NO: 13007 - DNA, 1302 bp, Pantoea stewartii
atgaatataaaaaattttttatttttagtggtacttgtgccttgggccgccaatgccggaactatgagtgcaattttttctgataccattacgaatatttttatctttataaatatagttttaacaattttctttgcatttatacgctttgatagattttctgtggttcatgggcctgaagtactcaccaccattggaattctcggatgttttgtaggaattgcttcttctttattacattttgatgcttcgaatgtttctgaaagcgttccacatttacttgagggtgtaaaaacggcgtttctggcttcgcttagcggtgtatttggctctcttgttattcgggcgagacattattttcaaaaaaaaccaatacagcaaagttctggtgctcccaaagcggcaactctggatgatgtagtttcagcgacacaagagctgcagcggagtttgtcaggcaacgcagaaggtagtctcctttcacagcttaaattgattcgtcaggagcaaagtgacgaattacttgccttaaggaaatcctttgagagtttttccgagaaaatggctaaagatagttcagaaacattgattgaggctcttaagggagttattaaagacttcaatgaaaaaattggtgagcaatttggtgagaattttaaacatttaaatgcgggtgttgagaaactagttgtctggcagcagcaatacaaagaagaattagacaagctccaaatattacaaaaatcttctgcagatgatttaaataatgcctcagcaggtttagccttgtttatcgacagggcatctaattttgctgatacagcagaagctttagagataactcttaaaggcctcgcttatcaacatgagcaaattgaaaattctcaggcctcattgacagaggtcttgttgcagatgaaaggtgtcatcccacaattttctcagaaaattgatgaaatggcagactcaatgtcaaaaggagtagcgaaagtacagaatgagattaatgaaataatgaaaggttttggcgttcaggtacaatctacgtcttcagaaatgaagcaacttttaactgagacgcttcgtaagtcgcaaaatgaattcaatgaaagccttaaagattcgatggattcagtccgtcaaagtgttattactcttgataaaggtttacaagaggaactgacgaaaagccttgagtcgcttggccgtcagctggcatctctatcagagaagtttgtatctgattatactcctttaaccgaacgcttgcgcgaagtagtgcaaatagctgctgttaagtga

SEQ ID NO: 13008 - DNA, 681 bp, Pantoea stewartii
atggattttgaacaaagtaatcagtcttattggataccattagcagatctcatgacaggtttgatgatggtatttatgttattaacagctgctttcatgcttcgtgtggaacaaacaacgacattggttgtaaaagaatatgagatgacgaaacaggatatgttgctcgctttgcaaaaagagttttcaaaggatttaaaacaatggaatgctgagattttgggagacatgacaattcgttttaatgatccctctgtactttttgcaacaggatcatcagatcttcgtccacgctttaaacaagtgcttagcgagttctttccacgctatatcgctcttttgaattctaagacgtttaagaatgcggtaaaggaaattcgtattgaaggacatacaagctcgttctggggtgttgccattgatgaaaaacaagcttatttcaagaatatggaattatctcaagcaaggacaagaagtgctcttgagtatctgatgtccttgccaaaagtaaaaaaagatgaaaaatggcttgtgcaacatatgactgctaatgggctttcctcttctcaccctctttcagaaaacggtgctgaagcagcaaatcagcgcgttgaatttcgcattgtaacaaatgcgagcgaaaaaatggatttaattgcagaaaaattatcaaaaaaatga

SEQ ID NO: 13009 - DNA, 861 bp, Pantoea stewartii; identical to SEQ ID NO: 11359

SEQ ID NO: 13010 - DNA, 1302 bp, Pantoea stewartii; identical to SEQ ID NO: 13007

SEQ ID NO: 13011 - DNA, 681 bp, Pantoea stewartii; identical to SEQ ID NO: 13008

SEQ ID NO: 13012 - DNA, 861 bp, Pantoea stewartii; identical to SEQ ID NO: 11359

SEQ ID NO: 13013 - DNA, 1563 bp, Dickeya paradisiaca Ech703
atgatcaatatacatccttacgatacttatattgctattggcttgattatctgtttttggttttacttcaataaaaacttcacagaaaaaaatgcacaagaaggcccagggctattaattactattggtattggtgcgacattttttggcattaccattggtttgctctcttttgatatgaacgatgtcgaaaaaagcctgcctgaattaattaatgggataaaaacggctttcgttgcatcattcgctggtgtttttgctgcactcataataaaaataagacacatttttattaaagtaaataaaaccgatgatacgtctgaagaaggtgcaaccatcgatgatatcgtcagacaactaaaaaaatctgacacctctcttgataaacttcattattcattggttggtaatgaagaagcctcgctgctaacacagctcaaactaatacgtactgaccagaatgaccaactcggaaatttacataaagcattcatcgaatttgcacaaaaacaagcggaaaacaactcgaaagcgttaattgatgcattaagagaggtcattcgagatttcaacgaaaaaatcagtgatcagtttggcgagaattttaaacaactcaacgacgcagttggtaaaataaatgactggcaagagcaatatcgtcaacagatgcaagagatgatcgaacaacagaaacagacaaccatcaacatgcaacaagcaagtgaaggatttacccagattgttcagcagtcgcaatcattcggtcaggtagcggaagatattcacaataccataggcatgatttcaatactggagcaaacattacgagaaaacttgaccttattagcatccgtcattgatgccactaaaaatggcctgccagaaatcgaacagaaagtgatagcgatggtgagtgatatcagcaatggtgcccaagcttcaaccagcttgattacccagcatatacaggatgtatctcacacactgcaatcctcagcgaatgattttagcttacagctcaatagcagtgccgaaaatatggcatctgcggtagtgaagcaaaactctgaaataaatcaaaccatacatgaaattagtattgacctgaaacagcaagtttctgacattgccaaagatctggttcatcatcaagatgatattacccaaacacttaaattatcaacgagtcaattcactcaacagctcaatagtagtgctgaaaatatggctcatgcagtgactaaacagagtaatgaaatgcaccaggcagtgcagaaaacctcttcagaattaaatcaactgattactggccttgagcaggagctgacaaagtatattcaacggcataatgaatccattactggtcaccttagtgaaatgacaaaaaatacggcacagcaagtcacggttcttgataaagaactatcagaggcactcaaaaaatcccttgatacgcttggacaacaattaggatcactttccaccaaatttgcccaggattacaccccgctaaccgagaagttaaaagaagtggttcgtttagctgaaacactaaaggcataa

SEQ ID NO: 13014 - DNA, 747 bp, Dickeya paradisiaca Ech703
atggcaaatcgattattggcatcggcaaaaagcagtaaaagtaaagaagactactggattagcctgagcgatctcatgacgtccctgatgatgatctttctccttatttcattaatttatatgattaaagtacaggatatggttaagatcccaacggtgtataaaaatacattacagggcttaggccaggcattgcagcatgaatttaaagatgacctaaaacgttggcacgctaccattgatgaagacctgacggtacgttttcaggaaccgaatattttattcaacaacaattctgctgatcttaaaccagaattcaaagccatactcgatgaatttatccctcgctaccttaatataatcactaacccgaaatacattgacaatatagaagaaatacgcattgaggggcatacatcaaccgtgtggcgcgcgggtgtcagcgaaaaagaagcctatatccataatatggagttgtcacaatctcgaactcgatccaccttagaatatattatgaacatgtctgtcgtttccgaacctgaatcaatgtttagctggttcaaagggcatgttcgggcaatcggtttttcttctgcacgacctgtggattcagaaggtaaggtgattatcagtgcggataaaatagaagatcgggcgcgctcacaacgagtcgaatttcgtgtcagaaccaatgttgaacgtcaggtcgctaacatcgttgaaaaaggaaagaatactcatgaataa

SEQ ID NO: 13015 - DNA, 864 bp, Dickeya paradisiaca Ech703
atgaataaatttcgtgttgctgaattacccgatttcctgaaggtgaaaaagcttaatgaattacgccattctatgcaggcggaaattatcccacccatttctgatataaaaataaagacactggatattgatgaactccttgcgacaacaggcattgatacctctatcgaagatataaaagtaaaccaagacaacacttttgattacaacaataaaaaagtcattttacacattcgagatgtgaatacctatggcaaagaaataacattacccaaataccatctagccaattgtagaacattacaaggaatgtggagaagaaaccgcagcggaagatatgttgtggcaacaagaagcgacggtttatttattattaaacatcttgatgcatcaggcacagaatgggaaacaaaagaaactcgacttaatgtctgcaagtcatgcctggaaacgctaaactggaaaggctattcatcaaaaagctatcaggaaagaatgactatttttaaccagtttagcctgaaagagttttttgaaaaatacccaaactctaaaaccacttacagagcagaacatacggatatttctgcccctaccaatacttattctaatgattttaataccatatcaaagcagtatcgagaatccatacactggcattgtgaacaatgtggcattaaccttaaagaaaaaaacttaaataaatatctccatgttcatcatcgtgatgggcagaaaaataataaccaacgtagtaatctacaagcactttgcattgaatgccattcaaaacaagataatcatggacacatgaactcacatcatgatctggcaatatttctcacactcaaagaagcgttatag

SEQ ID NO: 13016 - DNA, 1758 bp, Photobacterium profundum 3TCK
atgaccgaatatctatcattaattatttcaacgttaaacgctaatatcatatcagattcttttatttacctgattttattggtttttattgtttctattgcattgagtctcaaaggagtggctgatgactttacagccaatacacccaacttacttacatcgttaggcatcttagggacattcgctggtattgttgttggtttaatggatttcgatcctaagaatattgatggaagtattgaattattacttaacggcttaaaaacggcatttttgacgagcttgatgggtatggctacctctattgtttacaaaggattatctggtgttatcagccgaaagggtaatgaggatgatatcggtgaaatcgggccagaagaaattcataccgttatggctaagcagttagaagcatcagaagaaattattaaatcaataaaaggtgatgaagagtcctcattatcatcacagattaagttattgagacaagattttaatgatggaaataaagtgatgcttgagcatgctaagtctgttgatcgccgtcatgatgattttcaaattaagctatggcaaaaaatggatgaatttggtgacttattgtcgaagtcagctacagagcaagtcattaatgcattgaaggaagtcattgtagattttaatgaaaagttgacagagcaatttggtgagaactttaaacgtcttgatgagtcagtgaaaaaactggttgattggcaggaaaactaccgccatcaacttgaagatatggctgataaatatcaactgggtgttgatgcaatatcttcaactgaaaagtcagtggcaagtattaatgagcgtgcagaagcgattccagcaacaatggaaaaacttcatacagttatggagctaggccatggtcaagttaccgagctggaagtacgcctagaagctttcaaagatctgcgtgataaagcagtagaagctatgccccaaatccgtgaacacatggatgaaacaatttcgacgattggtcaatcagtgcaagctgcgtcaaagcattacgaagatatgttagttgaatctcaacgtgttattgataattttagtcagacagccgataccagtatcaatacaatgaaaactgaaatcgaaggtggcgctagtaaggtttcagaagaactgatgcgtggggctcaagatattagtggcaagctagctgaaagtgctcaagacattacaacgaatgttggcagtgcatcaggcactcttaatcagatggcaaataatatttcagataccactgataatgttcgccaaaatctagaagatatgatggttgaactgaatggtgaaatacgagcattagtttcaggcattaaagaagactcagcagaaaccggtaagatactcacaacagcaaataatgaactcgcgcgtgacacgaaagccgcccaagatgcttcagttgcagcgattaatcagatgcagcaacgtttagaaacctcattagaagaagtattccaaatccaagcgcaagctgtgaagcgcacgttcgatagccttgaagagcaaattacgacaagtgtcggtcaaactggcagcgctgttgaaaaacaggtcgagtatcttgattcgcaaatgcagcaagagattaaccgtaccatgaatgaaatgggacaagcgcttgcgactattactcaacagtttacacgtgattaccagaaattggttcgcgaaatgaataatgtcgttagttcatctcgtatggcgagttaa

SEQ ID NO: 13017 - DNA, 714 bp, Photobacterium profundum 3TCK
atgatgaagaaagtttttggaagtagatcgaagcagcagtctgatactggtgagcattggatgtcagtatctgatttgatggctggtttgatgatggttttcttgtttatctctgtggcattaatgcgtgatgcaatgattgagcgcgataaaataaaagaagtcgcggtgacttatgaagaaaatcagcaagcaatttatcttgcgttgcttgatgaatttgaatctgatttaaacaaatggggagcagagattgatcgtgaaagtctaagctttaactttactgctccagaggttctttttgctaacggaagagcatctttaacgcctcaatttcaagtgatcttagatgattttttcccacggtatttacaggctttgaatacctataagccaagtattcaagaagtcagaatcgaaggccatacctcaagtcgttggaacaatggctcaacagacagtgaagcctatttcaacaatatgcgtttatcacagtctcgaacacgaactgttttaagctatgtaatggcgttagaacccgtaaaaataaatcattatgactgggtaaaagggcatgtagctgctgtaggctattcgtcttcgaaaacaattgtaaatacagatggcatcgaagatgagaaaaaatctcgacgcgtatcatttagggttatcactaatgctgaaactcaaattcgcaagattttggggggctaa

SEQ ID NO: 13018 - DNA, 1092 bp, Photobacterium profundum 3TCK
atgaagttatcagttaatttttcaggcctgcttgctgcagtacagcttatggaaccagaagaaaaaggtggtttctccttagagtatgagccgacaaatatcgataaattagaccttgagctaagcgtaggtaaagatgtcgagttaaaagatgttgaaattgactcaggtttattgagttataaaggccgtcaggtcttgttgtacattaaagcaaatggtaatagtgctcgttttcatgtttcagattgtagtacgctcaaaagtatgagatcgagtggtaggttcgaacgatacgttgtaacgaatgatacatctggagagtttattgtatctaatggctctggcagaggagaaacaaaagctcgattaaaggtatgccaaaactgtttacgtcaattgaactataaagggtgtaatactggctctagtatttaccctattgttcaaaactttgaccttaataagttcttttcaacatatagctcattctttcctcacatgccacagcgtcaagctgcatctgcacaaactggctataccgatgattggcagcgcgtctcatcacattataaagttgaaaaagaatttaagtgtgaagaatgcttggtagacatgagcaagcatcgccttcatcttcatacacatcatattaatggtgttaaatccgataataagccttctaacctaaaagtactatgtgtcgattgtcatagtaagcaagcaaaacacgatcacatgtttgtcgcgcatgacatacgtcaattgattaatgacttacgccaagaacaaggcttactcaatcagcttagtgggtggaatgcattacttgctgttgcagaccctggtttacatggtgctattcatgcttgtcagcagtttggtacgaagttaccagatgtaggttattacgttggtgatgagtttggcgaacttgtcgcaaagcttgaattggcctggccaaaacacaagtttggaattgcggtttctaatcatgatagagaagaagctaataatgaaggttggaatgttgttagtgcagatgaatttttagctaactataaatcacaagcaagcaatttacgctggtaa

SEQ ID NO: 13019 - DNA, 1308 bp, Paraburkholderia caribensis
atgaaaatcagaactctccttctgctatcgggcatagcatgggctgcgcgtgccagtgctgctggccccgtcagtacagtgcttgccgatacgccaactatggcattcatactcgtcaacctgggcttaacgatattcttcgcgtttatccgatttgacaggttctctgtcgttcatggtccggaggtgctgacgacaatcggcatcctcggatgtttttctgggattgctatggcgttgctgcacttcgacgcctcaaatgtatccgaaagcgtgccgcacctgctggagggagtgaaaacggctttcctcgcgtccgtgagcggagtgttcggctcgctggtcatccgagggcggcactatttccggaaaacacctattccccagaccgagggggccccgaaggccgccaccctggatgatgtagtcgcggccactcaggcgcttcaactgagtctttcaggtaacgaacagggcagccttctgtctcaactcaaactgatgcgacaggagcaaggggacgagttgcgtatgctgcggatgtcgtttgacacgtttgctcagaagatgacagaggatggatcgaaagccctcatcgaggcgttgaaggaagtcattcgcgatttcaacgcgcagatcaacgaacagtttggtgagaactttaagcatttgaacgcagctgtggaaaagctcgtgatctggcagcagcagtacaaggaagagctcgacaagttgcaatcgttacaaaaagcatccgccgacgatatgcgaagtgccgcagctggcctggcgctgttcattgacagagcttctgccttcgcccaaacggcgacggcgctcgaggagacgctcaaggggcttgcgcatcaacaccagcagatcgaccagtcccagcgttcgatggttgatgttctatcgcagatgaaagatgttacgccacagttttcgcgtaaggtcgacgagatgaccgaatcgatgaaacaaggggttgccaaggtgcaggcagacgtcagcgatgtggtcaagaattttggagttcaggtgcagtcttcgtcgtcagagatgaagcagcttctaaccgatacgcttcgcaagacgcagtctgaagttaatgagagcctcgttcgctcaatggattctgtccgccagagcgttgtcacgttggacaaggggttgcaggaagagctcacgaaaagcctccagacgcttggtcgtcagctcgcatcgctttcagaaaaatttgtgtcggactacacgccgctcacagatcgtctgagagaagtggttcgaattgctggtaccgcttga

SEQ ID NO: 13020 - DNA, 693 bp, Paraburkholderia caribensis
atggatttcgagcatagcaaccaatcttattggataccaatggcggacctgatgacaggtctgatgatggtattcatgctactcaccgctgcgttcatgctgcgggtcgaacagacgacaacgctcgtggtcaaagagtatgaagcaaccaaacgagacatgcagctcgcgttacagaaagaattcgcaaaggatttgaagcagtggaacgctgagatacttggcgatatgaccatccgtttcaacgacccgaccgttctcttcgccactggctcctccgagctgcggccgcgcttcaagcaggtgcttgctcagttctttccgcgctatgtagcgttgctgacatcagggcagtacaaggacgcagtcaaagaaattcgaattgaaggccacacaagcgcgttgtggaccggcactaccgatgagaagacagcttactttaagaacatggagctatctcaggcacgtaccagaagtgctctcgaataccttctatcacttccgtcggtccagggaaacgagaaatggctcgtacagcatgtcacagcgaacggtttatcgtcttcgcgtccagtatctcaggagacgtcatctgaaaggtcgccggttgcaaatcaacgcgttgagtttcgcatcgttaccaatgcaagcgaaaagatggaccttatagcggacaagctggccaggaaatga

SEQ ID NO: 13021 - DNA, 849 bp, Paraburkholderia caribensis
atgagcttcgagctaccggattttcttgaatggagttcgttgaacgcactgcggcgggagatgcgagcgccgcttgctgccaacttcgtccctgaccacagattcaaggacatcgatctccccgtgcgcgagcggctcgagagtgccggggtcgacgtcaattttgacgaggtcgaggtacttgacgacggcaccttggcttacaagggcttccgggtcttgctctatatcagagacattggatcaattgggcatcaggagagcatgccccgctatcatcttgcgtactgccgaaccctcgacaagatgcgtcggaattccagatttgaccgatatgtagttgcgaatggggacagcggaagtttccaggttaatgtaatagagaataatgtacgaacccagcacgtacgattgaacgtatgccagaattgtcttgatgaagtgcattgggatggattcgatatggcgatgtcgcgcgaagatcgcatgcgactggtatccgggttcgcgctcccagactttttcagaaaatatccacgcgacctgatggcagtaaaaccagcgcattctgctgatactgctccgctcaacgtctacgcacaggactggcctgaggtgtcggagcggaccaagcagcagcgcggctatagatgcggtacctgtagcatcgtgcttagacagactgattcacggttcctgcacgtacatcatcgtaacggacagaagcacgacaatcgtgattcaaaccttgacgtgctatgtatcggttgtcacgccgaagagccgatgcacgcacatatgaaacgcttatctgactataagacatatatcgagcgatatcgtcgatag

SEQ ID NO: 13022 - DNA, 1338 bp, Burkholderia cenocepacia
atgcaggatacagagaccatatcccataatatgaaaaccaaagttcttcttctcctatcgggaatcgcgtgggcgccgtacgcgttcgcgggtggccctattggcacagttctggcagacaaacagacatttacgttcatattgttgaacacatgtctaacaatattcttcgctttcgtcagattcgaccgcttttccgttgttcacggcccggaaatattgacgacagttggaattttcggttgttttctcggtattgccctggcgttactgcagttcgatgcatcaaatgtgtcggagagcgtgccgcacctcctggaaggggtgaaaaccgccttttgggcttcagtcagtggtgtttttggctcactagttatccgagggaggcattatttctggaagaccccaatcccgcagacacctggcgcacccaaagctgccaccctcgacgacgtcgtggccgcgactcacgctctacagctcagcctgtcgggaaacgagcaaggcagccttctctcacagctcaagttgatgcgccaggaacaaggcgacgaacttcgtatgctccggacgtcattcgacacgttcgcgcagcggatggcggaagacggctcgaaggctcttatcgaggccctgaaggaagtgattcgcgacttcaacgcacaaatcaacgagcaattcggcgagaatttcaaacatctcaacgcagccgttgaaaagctcgtcgtctggcagcagcagtacaaggaagagctcgacaaactgcaagcgctccagaaatcgtcagcagacgacctcaggggcgcatcttcgggcctagcactgtttatcgaccgggcttctagcttcgctcaaacagcaacagcgctcgaaggtacgctcagaggtctggcgcagcaacatcagctcatcgaccagtctcaacgttcaatagccgacgttctttcccaaatgaaagatgtgacgccgcagttctcacgtaaggtcgacgaaatgaccgaatcgatgaagcaaggtgtggctagggtgcaggcggaagttggcgacgtagtcaagaatttcggtgtccaggtgcagtcctcgtcatcagaaatgaaacagcttctgacggacacgcttcgcaaatcccagtccgaggtaaatgacgggctcgttcgctcgatggacgcagtccgccaaagcgttgtcaccctggacaagggattgcaggaggaactcacgaagagcctcgaaacgcttgggcgtcagctcgcgtcgctatcagaaaagttcgtcgcagactataccccgctgacggaccgcctaagagaagttgttcgcatagctggcactgcgtga

SEQ ID NO: 13023 - DNA, 693 bp, Burkholderia cenocepacia
atggatttcgagcatagcaaccaatctcactggataccaatggcggacctgatgacaggtctgatgatggtgttcatgctgctgactgcagcattcatgctccgggttgagcagacgaccacgttggtcgtgaaagagtacgagaccaccaaacgtgacatgcaactggccctgcagaaggagtttgcgaaggacctgaagcaatggaacgctgaaattctgggcgatatgaccattcgtttcaatgatccaactgtgcttttcgcaaccggttcatccgaattgcggccgcgcttcaaacaggtacttggtcagttttttccacgttacgtggcgttgctgacatccgctcaatacaaggatgccgttaaggaaatccgcattgaaggccacacaagcgcgttgtggacaggaacgacagacgaaaaaatcgcgtacttcaggaacatggaactatctcaggcacgtacgcgaagcgcgctcgaatatttgctgtcgctaccggcggtgcaaggcaacgaaaaatggctcgttcagcatgtgacagcaaatggactttcgtcgtcacgtccactggctcaggattcgcaatccgcagcatcgcagatagcgaatcaacgtgtcgagtttcgcatcgttaccaacgcgagcgaaaagatggacctcattgccgagaagctggcaaagaaatga

SEQ ID NO: 13024 - DNA, 849 bp, Burkholderia cenocepacia
atgagctttcagttacctaatttcctcaactggagcttgctgaacgcgttacggcaggagatgggcgcgcctcttgccgccaactttgttcctgaccataaattccgcgacattgaactgcctgtcctcgaccgcctccaaagcaacggtgtcgacgttaagtttgacgaagtcgaagtgctcagcgacggcacgctcgcgtacaagggatatcgcgtcttgctgtacatcagggacatcatgtcaatcggccatcaggaaagtatgccccgctaccatctcgcatattgccgaactctcgacaagatgcgccggaacgctcgatttgaccgatacgttgtggcgaatggagacactggaaaattccaggtcaacgtcattgagaatgacgtaaagacccagcacgtcagactgaacgtatgccagaactgtctggacgaaatccattggaacggattcgacatgaagatgccgcgtgacggacgtctcacccttgtttccaagttcgcccttcccgatttcttcaagaaatacccgcgcgacctgatggcagtcaaaccaatgcactcctccgataccgcgccactcaatgtttattcgcaggattggaacgaaatatcggaccgtaccaaacggcaacgaggctatcgatgcgccgcgtgcaacactatgctccgacaaacggattcaaaatttctacatgtccaccatcgaaatggccagaagtacgacaaccgtgactcaaatcttgaggtgctctgcatagggtgtcatgcggaagaaccaatgcacggccatatgaaggcgttgcgtgagtatcaggagtacgtcgagcgatatcgacgttag

SEQ ID NO: 13025 - DNA, 1485 bp, Legionella drozanskii LLAP-1
atgcgttattttttcgcctttattttttcgttattcactgcatcgagcggatttgcggccgatgcttctaaccatgctttatctattttatcctcaccagagctgatagtgtttctgggtcttatttcaacttctactgtctatttctttttcaaatcagatcgtttttcaattatacatgggccagaaatattaactacgcttggaatattgggatgttttttagggatagctttagctttattagaatttaatagtaataacataaccagcagcgttcctgcattgcttgaaggaattaaaacagcattttggtcttctgttgctggtatttctggtgctttgattgtaagagttagacataagttttcaaaaaacttcacacagcaaacaggcaagggcgccaaacaagaccctatggattctttaattaaagagatagttaatttaagaaaaacactatcaggcgatgaagacggttctttgctctcacaagttaaaatgttaagacaagactccaatgatcagcaaaagaaattgcaagattcatttgataattttgccaagcatatgattgaaaataatcaaaaagcacttatagaagcattgaaagaagttattaaggattttaatcaaaatctcacagaccaatttggtgaaaatttcaaacagcttaatcaggccgttgagaagttagttatttggcagcaacaatataaagaagagcttgatgtaatcaagcgatatcaatctcagtttgcaaatgatatgaagcaatcgtcagaagcatttgcaaccgttgtagagcatgccaaagaatttacagatatagctcaaaacttaaagttactgcttgaatcaatggataagcaaaaagatgtgcttttcattcaggaaaaagcgttaagcgaacttttaagtactatgaaggatctcattcctgaattttctgaaaatacttcaaaaatgttatctgaaatagctaatggtgtgaagcatgttcaactggaaacagtaaaagtaatttcagattacagttcggagataaaaaacgtaaataatgagatgaaaaatactttaactgatgtaattaaaggcacacacaactctctcgctgatggccttaaagatagtgtgaaaataattcaagaaagcgtccaagaagttcaatcacaaacagccgaagtaattaaaaatcatggctcacaattacaatctacgcaagctgaaatgaaaaacgtacttattgacggcattaataaagctcagcaagaagtaactgctggtttgcaagagaacgcaaagattattagagagggggtacttgcgttagataaagagctggaaaaaagccttactgattctttaactagcttagggaaacagcttgcgtctttatctgaaaaatttgttcaagattatttgcctttgacggaaagactgcgtgaagtggtgcgattagctaaaaagagtgaggcgacctaa

SEQ ID NO: 13026 - DNA, 693 bp, Legionella drozanskii LLAP-1
atggatagttctaaccaatcttattggatccctttaagcgatttaatgacaggattaatgatgatatttatgttaattgctgtcacctttatgttacgagttgaacagactactacattagttgttaaagagtatgaagaaacaaaaagcgatcttgctcaggccttacaaaaagagtttgccatgaacttgaagcaatggaacgctgaaatactaggtgatatgactatccgatttgatgatcctaatgtgttatttgatacgggttctgctgttgtaaaaccagcatttaaagaaattctaaatgattttattcctcgctatattgagttggtaacatcaaaaaaatatagccattctattaaggaaatccgtattgagggacatacctcaaaaaaatgggcagcagatacagatgaaaaaacagcttttattaaaaatatgcgcttatcacaagaaagagcacaatcaatgcttgagtacattcttaacctatcaaccctcagcccccatgaaaaatggatgcgtgaatatcttacttccagtggcttctcttcttcaaagccaatatttgatgagcaacatttagtagatgatgagcggtctcaacgagtcgagtttgtgattgtcacaaatgctgaatctaaaatggatgcaatttctaaagaaattctaagtttgaaaaatggttaa

SEQ ID NO: 13027 - DNA, 813 bp, Legionella drozanskii LLAP-1
atggttgctgagcttgtgcaagaatttaagtttgatacaggcatctcattgttagaagacgattttataaaaatgttagatggagatggcattgagatcgagagcctggaggagattgattttagaggagacaaaactttaggatataagggacaacgagttttaatttatattcgtgacgttcactcctttagagaagaaataaggatgcctaaatttcatatatcaacttgtgataccttggtaacaatgtggaaaaaaaggcgttctgaaagatacgttttataccgtaaagaaaatggaatttttccagtgaatatattcaaggctggtaaagctgatattcgacatgaaaagctaaatgtgtgtagaaactgtttaactaacctcaactggaataattacacccaaaagagacatgcgcgggatagccttgtatcggagttttctattgccaaattttttgaaatattccctaagtcattattatcagtcaaacccacttatgatgcggataatgcacctttaaatgactatactgctaactggaatgagatcagtaaggatgcgaaaagaaaagcagggtatcgttgtgaaaatacaatttgtcgcattgatctaacggggcgacatagtcaatatttgcatgttcatcatattgatggtcagagaaacaataataaaaaacataatttgaaagtgttgtgtgtgaagtgccatgctcatgaaccagatcatgggcatatgaaaagcggccaagactataagaaatttgttgctatgtatgaagatttaaaagaacaaaattattaa

SEQ ID NO: 13028 - DNA, 1308 bp, Burkholderia ubonensis
atgatactcagaatattgctttgtcttctaggcgtcgctttgtcgccttccgtctttgctagcgactctgcagctgacatcctgaccgacggaccaacaatgttttttatcggggtgaacgtcctgctgacgtggtacttcggttttcgtaaatttgacagatttgctgtttcccacggcccggaagtgttgacgacggtgggcatcttggggtgctttttcagcatcgcgctcgctctcttgcattttgatgcgtccaacgtttcagacagcgttccgcatcttctggagggagtgagaactgccttctgggcgtcggtgagtggcgtcgcgggctcgctgattcttcgttaccggcactacactcgaaagactccgatacctcaaaccgaagggataccgaagtcggccacactcgacgatgtcgtcgcggcgacacagggtttgcagcggagtctgtcggggaccgaagaaggcagtcttctgtcacaacttaagctgatgcgccaggagcaaggcgacgagctgcgctcgctccgctcatcattcgacacgttcgctcagcgcatgtcggaagatggttcgaaagcgctcatcgatgcgctgaaagaggtcattcgagacttcaacacaaaaattggcgagcagtttggcgaaaacttccggcatctcaatgcggctgtcgagaagcttgtcgtttggcaacagcagtacaaggaggaactggataagctacaggccctccagaagacctcggcggaagacttgcgaaacgcttcggccggtctcggcgtcttcattgacagggctggcggatttgcagataccgcagcagcgctagagagcacgttgcgaggactcgcgcagcagcatcaccagattgaccagtcacagcgctcgatggccgaagtgttgctccagatgaaggatgtcacgccgcaattctcgcgcaagatcgatgagatgactgagtcgatgaaactaggcgtggccaaggtgcaagctgacatgtcggatgtcgtaaagagcttgggcacccagatgcaggcctcgtcgtctgaaatgaagcagctccttaccgacaccctgaggaaatcgcagacagaggtaaacgatagcctgacccattctatggaggcggtgcgtcagagcgttgttgctctcgacaagggcttgcaagaagaactcaataagagtcttgagtcgcttggccgacaacttgcatcgctgtcggagaagtttgtggcggactacactcccctcaccgaccgcctccgcgaggtcgttcgtattgctggcgcgacgtga

SEQ ID NO: 13029 - DNA, 699 bp, Burkholderia ubonensis
gtggactcggaacagagcaaccagtcctattggataccgatggccgacctgatgaccggcctgatgttggttttcatgcttttaaccgcagcgttcatgcttcgtgtcgagaagaccacaacgttggtcgtcaaagagtatgagacgacaaagaatgacatgcagctagcactgcagaaggagttccagaaagacctcaagcaatggaacgcggaaatccttggcgacatgaccattaggttcaatgacccaacagtgctgttcacaacaggatcgtcggagcttcgcccgcggtttaaggaagtgttgggacggttcttcccccgctacgtggcgctactcacatccccgcagtttaaggacgccgtcaaggaaatccgtattgaggggcatacgagcgcggcatggactggcaccactgacgagaggaccgcatacttcaaaaacatggagctatctcaggcacgtacgcgcagcacgctcgaatatctgttatcgctgcaagcagtgcggccgagggagaagtggctgattcagcacgtgactgcaaatgggctgtcatcgtcgcatccgatatcacccgatgcgcattcgactgccgtgcaactcgccaaccaacgcgtcgagtttcgcattgtcaccaatgcgagcgacaagatggacctcattgctcaaaagctgcagaagaatggccattaa

SEQ ID NO: 13030 - DNA, 855 bp, Burkholderia ubonensis
atggccattaagctaccggacttcttgacgtggtccacactcaatgggttgcggcagaagatgcgcgcacccctagtcgagcgatttggtgcaaagctggaagtcaccgagattgagttgcccatcattgagcgtctgcgaggcgagggcatcgacgttactgctgaccaaattcaggtgctgaatgacggcacgctcgagtataagggctatcgcgtcttggtctacatcagagacattccggccatcggaaatcgcgagagtatgcccaagtatcattttgcgtactgtcgaacgcttgagaccatgtacagaaataagcgggccgagcgatacgttgtagccaattcggattcaggtctgttccaagtgaatatgatggacagtggcgtgcgggccgagcaagtgcgactgagcgtctgccagaactgcttggcccacatccgctggaaaggttttgacatgcaaatggcgcgtccgaaccgtcttgcaattgtcgggcagttcacgctcacggagttcttcgccaaattcccacgtgatttgatggcggtgacaccgagatattcgtcagatacagcaccaattaacacatacaccgaggactggggcgaagtgtccgccagaacgcgtagccggcgcggtttcacgtgtgagaagtgcggcatcgtcttggcgggcgccgagtccaagtatctacatgtgcatcaccggaatggacagaagcatgataacagtgacggaaatctcgaggtcttatgcattgattgtcacgcggatgagcctctgcatgcgcacatgaaggggctcccggagtatcgcgaattttttcatcgacatcgaggacaatcctaa

SEQ ID NO: 13031 - DNA, 1308 bp, Burkholderia ubonensis
atgatactcagaatattgctttgtcttctaggcgtcgctttgtcgccttccgtctttgctagcgactctgcagctgacatcctgaccgacggaccaacaatgttttttatcggggtgaacgtcctgctgacgtggtacttcggttttcgtaaatttgacagatttgctgtttcccacggcccggaagtgttgacgacggtgggcatcttggggtgctttttcagcatcgcgctcgctctcttgcattttgatgcgtccaacgtttcagacagcgttccgcatcttctggagggagtgagaactgccttctgggcgtcggtgagtggcgtcgcgggctcgctgattcttcgttaccggcactacactcgaaagactccgatacctcaaaccgaagggataccgaagtcggccacactcgacgatgtcgtcgcggcgacacagggtttgcagcggagtctgtcggggaccgaagaaggcagtcttctgtcacaacttaagctgatgcgccaggagcaaggcgacgagctgcgctcgctccgctcatcattcgacacgttcgctcagcgcatgtcggaagatggttcgaaagcgctcatcgatgcgctgaaagaggtcattcgagacttcaatacaaaaattggcgagcagtttggcgaaaacttccggcatctcaatgcggctgtcgagaagcttgtcgtttggcaacagcagtacaaggaggaactggataagctacaggccctccagaagacctcggcggaagacttgcgaaacgcttcggccggtctcggcgtcttcattgacagggctggcggatttgcagataccgcagcagcgctagagagcacgttgcgaggactcgcgcagcagcatcaccagattgaccagtcacagcgctcgatggccgaagtgttgctccagatgaaggatgtcacgccgcaattctcgcgcaagatcgatgagatgactgagtcgatgaaactaggcgtggccaaggtgcaagctgacatgtcggatgtcgtaaagagcttgggcacccagatgcaggcctcgtcgtctgaaatgaagcagctcctcaccgacaccctgaggaaatcgcagacagaggtaaacgatagcctgacccattctatggaggcggtgcgtcagagcgttgttgcactcgacaagggcttgcaagaagaactcaataagagtcttgagtcgcttggccgacaacttgcatcgctgtcggagaagtttgtggcggactacactcccctcaccgaccgcctccgcgaggtcgttcgtattgctggcgcgacgtga

SEQ ID NO: 13032 - DNA, 699 bp, Burkholderia ubonensis; identical to SEQ ID NO: 13029

SEQ ID NO: 13033 - DNA, 855 bp, Burkholderia ubonensis
atggccattaagctaccggacttcttgacgtggtccacactcaatgggttgcggcagaagatgcgcgcacccctagtcgagcgatttggtgcaaagctggaagtcaccgagatcgagttgcccatcattgagcgtctgcgaggcgagggcatcgacgttactgctgaccaaattcaggtgctgaatgacggcacgctcgagtataagggctatcgcgtcttggtctacatcagagacattccggccatcggaaatcgcgagagtatgcccaagtatcattttgcgtactgtcgaacgcttgagaccatgtacagaaataagcgggccgagcgatacgttgtagccaattcggattcaggtctgttccaagtgaatatgatggacagtggcgtgcgggccgagcaagtgcgactgagcgtctgccagaactgcttggcccacatccgctggaaaggttttgacatgcaaatggcgcgtccgaaccgtcttgcaattgtcgggcagttcacgctcacggagttcttcgccaaattcccacgtgatttgatggcggtgacaccgagatattcgtcagatacagcaccaattaacacatacaccgaggactggggcgaagtgtccgccagaacgcgtagccggcgcggtttcacgtgtgagaagtgcggcatcgtcttggcgggcgccgagtccaagtatctacatgtgcatcaccggaatggacagaagcatgataacagtgacggaaatctcgaggtcttatgcattgattgtcacgcggatgagcctctgcatgcgcacatgaaggggctcccggagtatcgcgaattttttcatcgacatcgaggacaatcctaa

SEQ ID NO: 13034 - DNA, 1308 bp, Burkholderia ubonensis; identical to SEQ ID NO: 13031

SEQ ID NO: 13035 - DNA, 699 bp, Burkholderia ubonensis; identical to SEQ ID NO: 13029

SEQ ID NO: 13036 - DNA, 855 bp, Burkholderia ubonensis; identical to SEQ ID NO: 13033

SEQ ID NO: 13037 - DNA, 1308 bp, Burkholderia ubonensis; identical to SEQ ID NO: 13031

SEQ ID NO: 13038 - DNA, 699 bp, Burkholderia ubonensis; identical to SEQ ID NO: 13029

SEQ ID NO: 13039 - DNA, 855 bp, Burkholderia ubonensis; identical to SEQ ID NO: 13033

SEQ ID NO: 13040 - DNA, 1308 bp, Burkholderia ubonensis; identical to SEQ ID NO: 13028

SEQ ID NO: 13041 - DNA, 699 bp, Burkholderia ubonensis; identical to SEQ ID NO: 13029

SEQ ID NO: 13042 - DNA, 855 bp, Burkholderia ubonensis; identical to SEQ ID NO: 13030

SEQ ID NO: 13043 - DNA, 1308 bp, Burkholderia ubonensis; identical to SEQ ID NO: 13028

SEQ ID NO: 13044 - DNA, 699 bp, Burkholderia ubonensis; identical to SEQ ID NO: 13029

SEQ ID NO: 13045 - DNA, 855 bp, Burkholderia ubonensis; identical to SEQ ID NO: 13030

SEQ ID NO: 13046 - DNA, 1308 bp, Burkholderia ubonensis; identical to SEQ ID NO: 13028

SEQ ID NO: 13047 - DNA, 699 bp, Burkholderia ubonensis; identical to SEQ ID NO: 13029

SEQ ID NO: 13048 - DNA, 855 bp, Burkholderia ubonensis; identical to SEQ ID NO: 13030

SEQ ID NO: 13049 - DNA, 1308 bp, Burkholderia ubonensis; identical to SEQ ID NO: 13028

SEQ ID NO: 13050 - DNA, 699 bp, Burkholderia ubonensis; identical to SEQ ID NO: 13029

SEQ ID NO: 13051 - DNA, 855 bp, Burkholderia ubonensis; identical to SEQ ID NO: 13030

SEQ ID NO: 13052 - DNA, 1308 bp, Burkholderia ubonensis; identical to SEQ ID NO: 13031

SEQ ID NO: 13053 - DNA, 699 bp, Burkholderia ubonensis; identical to SEQ ID NO: 13029

SEQ ID NO: 13054 - DNA, 855 bp, Burkholderia ubonensis; identical to SEQ ID NO: 13033

SEQ ID NO: 13055 - DNA, 1308 bp, Burkholderia ubonensis; identical to SEQ ID NO: 13031

SEQ ID NO: 13056 - DNA, 699 bp, Burkholderia ubonensis; identical to SEQ ID NO: 13029

SEQ ID NO: 13057 - DNA, 855 bp, Burkholderia ubonensis; identical to SEQ ID NO: 13033

SEQ ID NO: 13058 - DNA, 1308 bp, Burkholderia ubonensis; identical to SEQ ID NO: 13028

SEQ ID NO: 13059 - DNA, 699 bp, Burkholderia ubonensis; identical to SEQ ID NO: 13029

SEQ ID NO: 13060 - DNA, 855 bp, Burkholderia ubonensis; identical to SEQ ID NO: 13030

SEQ ID NO: 13061 - DNA, 1308 bp, Burkholderia ubonensis; identical to SEQ ID NO: 13031

SEQ ID NO: 13062 - DNA, 699 bp, Burkholderia ubonensis; identical to SEQ ID NO: 13029

SEQ ID NO: 13063 - DNA, 855 bp, Burkholderia ubonensis; identical to SEQ ID NO: 13033

SEQ ID NO: 13064 - DNA, 1308 bp, Burkholderia ubonensis; identical to SEQ ID NO: 13028

SEQ ID NO: 13065 - DNA, 699 bp, Burkholderia ubonensis; identical to SEQ ID NO: 13029

SEQ ID NO: 13066 - DNA, 855 bp, Burkholderia ubonensis; identical to SEQ ID NO: 13030

SEQ ID NO: 13067 - DNA, 1467 bp, Porphyromonas gulae
atgaacgaaatactccatgaagaaactcttacaactatactggttgtaggtatctttcttgcttttatattcttactcatagaaacaagacgatctaagtcaaaggggaacttggcgaacaagtatcgaacgatttcagcatttcctggcttcatttccactcttggagtattgggaactttcattgggattaccaaaggcctgatgttttttgacaccaacgatctcgacaatagtatcccgaaattgctaagtggtttgaaattggcttttataacctcccttatgggtatgatcgggtctttgatattgtctcgtattatcaatcatttatatgataaacaagaaagagaatcagggcaagaagataatgctttgtctgctctgaataaactcgtcaatgtcatgaaagactcgatagatagacaggaaaaaagagccgtgaaacaagaagagaatacttctgctatactacacaaaatcgaagaaatacatcttggcttattgtgttcaagcgaacaacaatcagatagaatgacaaggctaacagatattattagtgattatacagactccaaaaatactttcgaccaaattacagtcatacttgacagtatccatcaggaagtgaccggaggaagcctttctatgagacagctagcaagtcttatccaagaagagactaccataatatcaaaaggcttagagcaaatagagaatagtattgctaattctaatgaactgatgggagagaaatttggagagttctcggagctcctcaaaaaaagtaatacggaagctcttgtcgaggtgatgaaacgcgtgacaaccgaattccagaaacagatgaatgctcttatcggaaagctaatacaagagaatttttcaaagttaaatgatagtgttgagagtcttaacacatggcaacaagagaataaatcaatgatatcgagtctcacagaacaatataatgaaatggccgatcgattttcaacaacctcgacgacactctcacaagtatgtagtgatacggagacaatggttggcagtggaggaaaactacatcaaatcgttgtagccctcaaccaggtaattgtagaagacaaacactttatagagacttctgagaatcttctgagtgcttcaaaactcactcaagagaatatggaaaactacagcgaggccactcgtaaattgaataattgggtgaccaaacaacgcaattttgtcgatgccgtacaacttctcatagaaaagctagatgagatcaataagataaaagattacaacgaaagtttttggaaagacacaaagcatagcttagaagatggtatttcgattctctcaacgggttcgaaaacactcgagaaagaactaaagtccattgacgaatatttctataatcgtctgaaccagactttggtaaatctggatgcttgtatacaagcaatggtcaggggaaaataa

SEQ ID NO: 13068 - DNA, 702 bp, Porphyromonas gulae
atggatatgaataataatgtatggatatctgtatcagatttgatgaccggcttgatggttatttttctttttgtttctatcgcatatatcaagagagtacaagacaatcagaccgttcttaccgactatgtggagacaaaaacagaattacacgagaaatttgtttcagaatttaaaggagatacggcaaagtggcagatgtctattggaagagatctatccatgaaatttaaaaacccctctgttttattcgcgcaaggaagctacgaacttaccactgattttcaacagattctcaatgattttcttcctcgatacttagatattttactcagagattctttgcgcaacaacatcaaggaaattcggattgaaggacatacagatgacgttcctataccttcatatgatcaagatccatatatcgccaacgtaattctatcacaacaaagagctctaagtgttttgcgttacctgagaacatccgcttcttttcaacattattcagactacgaaaaacaacttttagagttttggtttacatctaatggcttgtcatttggacgtgctcttgatgctcatggtcaatacacgttagagtcagggcaagaaatagataaagccaaatctcgacgagtggaatttcgcattgttaccaaaggagatgaagtccttgaaaattttgtaaatgaaaacaaataa

SEQ ID NO: 13069 - DNA, 780 bp, Porphyromonas gulae
atggaaagagaaatactacccattcatgattttgcaggactaaaacaattgctgaaaaagattggatataaagtaattaccgaaagttattctgccataaaaactcaagacatcacattagatggaaagaacaatgaaattgaatttaccaatgatggtatttatctccactgtagtgatggtattagaagaaaagttttcctctataagccggactatcatcttatagagcacggaaagcctagattccatatccgagaatgtcaaacaattcaggatttaggaagaaagcgatatagagttgccaacacgaatcgcgtagaagtagaaaacaaagacaattttgggaaaactgaaatagtagaagatttacctctatgcaaaaactgtcttgagatggttagtgagtcttacaaaaccagttcggattatgtacagtatcttaaagacgagggggagtgtgaagaagatacagaagtaacattggatggttatacgtacaattgggaggctataagtatcggtattcgtcgcgagagaaagtattcttgtgaacggtgtaagatcattttagataagcctcccggtttatattttttacatgtacatcatcgcaatggtaggaaaacagataatcgatcagagaaccttgaatgtctttgtgtcgcttgtcatgccgatgtagatgaaaggcatagagaaaacttctctaagaaagaaggacaacgcatattaaaagaatttaaaaggttcctttcagaaagagaaaactttctataa

SEQ ID NO: 13070 - DNA, 1821 bp, Nitrosococcus halophilus Nc 4
atgtataacttgggaggaatgatcgaggagcaattacgccagtggtctgcgcccttggtgaccgatggtgttctcttcgttctgaacactatatttataatcgccttcatcattttgattgctaaccgattcagggttgggcttgggggcgttgggtttgtgcattacacgccaaacctgttgacctcactcggtatcctcggcaccttcgcgggcattgtcattggcctgctgaatttcaatgtcagcaacatcgacggtagtatcgaccccctgctcgaaggcctcaagactgcctttattaccagcttgtggggtatgctgctcgccatatctttcaaaatgctggatagcatcattcctcggatgaggaaaaagaaggagggctctgttgaacaggtgggccctggggaaatttatgctgaattacaggcccagcgggaatccatggagcggctgggccgagccatctctggcgatgaagattccaccctgattagccagatccgcctcttgcggagtgacggccaggagcagtccaagagcgcattggagcagcttcgcaaacaaagtgaccggcaggaagttattgccgaggccattgcctctcaacacgagcagttcaaccagttcagcaccgatctgtggaagaaattagatgagttcgcggagatgctttccaagtcggccaccgagcaggtggttaatgcgctgaaggaggtcatcgccgacttcaatcggaatcttaccgagcagtttggtgagaacttcaaggcactaaacgccgccgtggagaagctggtccagtggcaggagaactaccgagagcaaatcggccagatgatcgaccagtacgaccagggcgtgcgggccatcacccaaaccgaaactgccgtgacccgcatcagcgaggagtccaaacaaatcccggtggccatgggcgaactcaaaaccgtgctcgacactacccagcatcagctcaccgagcttgaacggcacctggaggccttccgggatatgcgcgaccgtgcagtagaagccgtcccccagatccgcgagcaaatggacaccatggtcaatgaggtctcctcggcggtcaaaggcgcgggcgagcaaatcgtgaccgccagccaggtggtcaaccaggccatcgtggaaggcgccaaggagttcgaggaccgggtgcaccgaaccaacgaaggcctcacaagcgcctcggaccaactggctaacaatagcgaacgcatccgcgaacagttggaggacacggtcaaggaaatcaatgaccaggttcggaacatggcggcgggagtaacagaaaacaccaagacggtcggtgacaccctggtgaatgctaacaaggcgttagagaccagcatcaaagaggtgcaacaccaagttaccgattcgatggaaacgatgcaaaagcgtttggaagaatcggttcagagtaccaatcagcatgttcgggacacgatggcaggcgcggcagaaaacgtcaaagagatcaccactaccctggggaacgcccacaaggacctccaatctagcctcaaggagtcacagcgccaggttaccgattctatggaaacgatgcagaagcgcctagagggcgcactagaagagatcttccagaaacagctcgaggccatcgataggactatgcaacaagaggtggagcgggtcatgaatgagatgggtaaagccctggcggcgatcagtaaccagttcacggacgactattcccggctcaccgaccagatggtccaagtggtctcccaagcgcgggcttttagcaatcagcaaagattgagtaactga

SEQ ID NO: 13071 - DNA, 714 bp, Nitrosococcus halophilus Nc 4
atggaaaccatattcggcaaaccacgggtcagtggcgagggcgagggggctcactggctctcggtctccgatttgatggccgggctgatgatagtgttcatgttcattgctattgccctgatgcgaaatgcttttctggagcgcgaccggatcaaggagatcgcggtggcctatcaggaaaaccaggttgctatctatgaggcgctgatgaaggagttcgaaaaggatctcgagcgctgggacgcccgaatcgattccgatactctggcctttgagttccagtccccggaggtccttttcgccacggggtcgacggaaatacggcagcgcttcaaggaaatccttgcagacttcttccctcgctatctggtcattctaaaacattacaaggactccattgacgagatccgcatcgagggtcataccagcagtgtctggaataaccaagttagcgaaactgaggcttatttcctcaatatgttgctgtctcagggcagaacgcggtcggtgctgcactacgtgtatgagctaccaaaggtggaaagcgatcggggctgggtcaagcggcactttgccgctgtcggcttctcctcttcacgactggtgctggatgatcaaggcaacgaagaccgcgcccgctcccgccgggttagcttccgggtgatcaccaatgccgagatgcaaatccgcaaaattatcgaggagccgtcatag

SEQ ID NO: 13072 - DNA, 1134 bp, Nitrosococcus halophilus Nc 4
gtgcgcttgaatgtggacttgagcgctctgcatgctgccgttcggcgcatgggcgcggagcctgtagcattttcactggagcatcaagccgaacccctggacccgattgatataaagctggaagaaggtattgagctactcaaccttaaggaagttgaaagcaataacggcctgcttagctacaagggacggcagatactgttatatatccaagaccaaggcaattcgataaagaaggtactagaggatggttcgcaaggaagaaaatttcatgtcgccgattgcaaaacgcttaaaaatatgagggcaaaaggtagattcgaacgctacgtggtaacacatagacttaatggccaattttatatcgtcggacgtgattggcacactaggcagaacatggaggggtacgtccggcttcaggtttgtcagaactgtcttgaggcactgaattacaagggcgctcagcacaggaggaaaatcgagattgcccaaagcttcgatatccaagaattttattcgacctacagttcattcttcagccacttgccgcggcgttgggctgggcggaaagaggaagaagattacactgctgattggcctcaagtgacggctcgctacaaggacagcaaaaaattcacctgcgagtcctgcggcgtcaacttaagatcgtgcaaggagcttctccatagtcatcaccgcaacggcgtcaaaagtgataaccgagaaagcaaccttatggcgctgtgtgcggcctgccatcggcaacagccccatcatgggcatttgtgtgtatcccatgagggtatgcaaacgatcaatcgtctgcgccgagagcaaggtttgctgcataacgtcggatggaacaaaatatttgagctttgtgaccctggcctgaggggggtgctggatgcctgctgccattggaaaacgaatgtcccggaggtgggcttcgatgtacaggataccaaggatgcagtagtggctaaccttgagctcgcatggcctcaaaagcgggtggggctcgccatttcagacgaagatagagacactgcacggaaagccggatggcgcatttggcggatgcacgagacgctcgaagacatagggcggttcgccgctgagatcgaagattga

SEQ ID NO: 13073 - DNA, 1137 bp, Sulfuricurvum kujiense DSM 16994
gtgattcataatatggcctatttcggagtcggtttaattacactgatgtttctcatttttgtaatgaaccgaagaaacaaatccattcaagaattagccccgggtattttaatcactaccggaattttttttacgtttgtagggattgctatcggtttagtgcactttaatgccgataatgtcgacgacagcttgcctacactgctcaacgggataaaaacagcattttgggcatcggcaaccggtgtattttttgctttaatcatcaaaattttggatattttcgatttaacccgtaccaatgaatcttccgctgtcgagggaatgagcattgatgatatcgtcacctatcaagccaaacaaaccgatgtattagtcgaaatcctcagaagcatcaagaatatgcactcttcgattgccgcacaggacgactcttccctcgtgagccaaatcgctttgttacgggatgactcaaataaaaaaagcgacgctttgcgtcaagagtttcgcgatttcgctgctaccatggcagaaaacaattcaaaaatatttatcgaagcgctcaaagacgttataaaaaatttcaacgacaaaataagcgaacagttcggagataattttaagcagttgaatcaagccgttgaaaaaacggtgatttggcaggaaaattatagaaatcaaatggcacaatcgatcgaaacgatgactttaatcgcctctatgttggaatctcaagctcacgattacagtataatcgtctcgaacagtgccgaattcgagtcgcatgtctcggctatgggacgttcattggaagagataactttccagcgcgaacagctccagagtatgatccattccctcgtcaattttctggaatccgcgtccgattcactcccgcttatcggtcaaaaagttgacgatatgacggagcgtttggtcaaagggatgaatgaggctacagaagaggtccaaaaacaggtgacgatcctcgatcatgagcttgaaattgccctcaagcggtcattggaaggtttaggacagcaattggcgtctctttcaaataaatttgtgcaggactatacaccgttgaccgagaaattgcgagaagtggttgcattagcggctaaacagcgatga

SEQ ID NO: 13074 - DNA, 717 bp, Sulfuricurvum kujiense DSM 16994
atgagcagcctaccgcaaaaaaaacaccatcacaaagaagattactggatcagtctgagcgatatgatgacttcgctgatgatgctctttttactgatctccgtcatctatatgatcaaagtccaagatagcgttaaagttccccaaatctacaaagagacgacccaaggacttaatcatgccctcaaaaaagagttcgataaagatctgatgaaatggggagccgtcatcgacaaagatttaacggtacgttttcaacagcccgatatactctttgcaaccggatcatccgccctcaccccaagattcaaagaaattttggatgatttttttatccgatatttgaaaataatgatgtcaaagccatttatcaacaatattgaagagatcaggattgaggggcatacctcctctatgtgggaaggtgaatccgaccggggaaaagcctattttaaaaatatgaccctttctcaagaacggacgcgggctactttggaatacatcatgacgtccgataaaatcaatctaacgggagagcaaaaagagtggctgatgagacatttcagcgctatcggattttcttcgggtcaccctttaaccaacaaagggacataccttgttgatggagaaagcgaagattctcagttatcccaaagggtagaattcagagttcggaccaacattgaacgtaaagtcgccgatatagtagaaaaataa

SEQ ID NO: 13075 - DNA, 519 bp, Sulfuricurvum kujiense DSM 16994
atgaagctcatcaattttttggattttaaaccgctcgaaaatctccgaaccgaaatgaaagctccgttagtcaaaccgatttttatccacccttttcacagtcacagcaaaccggttaaaagtgatcgaatagagattgaatctcttgacacattgacgattcatcccgatggaacactcatcttcgacaatacccgcatcattctctacattgcagataatactttacagtatctcaatgaggccccgattatctcggaatttcatatcagttcctgtcctacgatacaagagcttgttaccagaggtcgccgcctgcgctattttgtcaccgctgccgatgacgagcaatttgtagtagatgataccaatgaggttaaaaggttaacggtctgcaaagattgcttattatttctcaattggtcgcaattcgctgatgtcgatcaaaaaaggaaaaaagagatagtcgcgacatttaccgtctcgtctttttttgaaaaatatccgaggcatctgtaa

SEQ ID NO: 13076 - DNA, 1308 bp, Cedecea davisae DSM 4568
atgaaaaaaagacttctgcttccgctgttattcattccctgcgtgtcgtatgccgcagcgacggtaacgtttaactctattacctcagatcctatcactaacggatttgtattaattaacctggccctgacggtatttttcacatttatgcgtttcgacaggtttgccattgttcacggcccagagatactcactactgtcggtattctcggttgttttgcaggcattgcaacttcgttactgcattttgactcggctaacgtggcagaaagcgtgcctcatctgcttgaaggcgtgaagacggcttttcttgcttcgttaagtggtgttggtggttcacttgttattcgtgcaagacactatttccagaaaaagcccattcctcaggcttctggtacgcccaaggcggcaagtctggatgatgttgttgctgccacttatgcgctccagcaaagccttgccggtaacgaggacagtagtcttctgacacagctcaaactcatgcgccaggaacaggcagatgaattacgtgcattgcgcagtgcctttgatactttttctcagaaaatggctgaggacggctctaaggcacttattgatgccttgaaagaggtgctcagcgattttaatgcgcaaataaatgagcagtttggagagaacttcaaacacctgaacgcaagtgtggaaaaactggtcatctggcagaaacaatataaagaagagttggacactttgcagagtttgcaaaagtcctcagctgacgatctcaaagaggcttcactgggacttgcttcgtttatcggccaggcatccagttttgcccggaccgcggacgcgctggaaaacacgcttgagggcctggcccggcagcatgaggatatcgatctgtctcagcgctctatgtgtgaagtgttgtcgcaaatgaaagatgtcacgccacagttctcacacaaaattgatgaaatgacagtatcaatggccctgggggtagcaaaactacagggtgaggtcggtgatattgtgaaagattttagtactcaggcacaaactttctccggggaaataaaacagtttttgacggagacgctcactaagtcgcagtcggaagttaatgccgggctcacccagtcagtggacaaaatccaccagagtgtcgtcgctctggatacggggttgcaggaggaacttacaaagagtctcgaaacccttggccgacagcttgcatcactttccgagaaattcgtcgctgattacacccctttgaccgaacgcctgagagaagttgtgcggatcgcttctgcgacgtga

SEQ ID NO: 13077 - DNA, 681 bp, Cedecea davisae DSM 4568
atgaatttagaacagagcaaccaatcttactggatacctcttgcagaccttatgacggggttaatgatggtattcatgctactgactgctgcatttatgcttcgtgtagagcagacaacgacgctggttgtaaaagagtatgaaattacgaaacgtgatttgcagttggctctgcaaaaagagttcgcgaaagatctgaagcaatggaatgcagaaatattgggcgatatgactatccgttttaacgacccatccgttctttttgccaccggttcgtcagaattacgtcctcggttcaaggtagtgcttggtgagtttttcccccgttatatcgctctgctgacctcagaaaaatacaggggtgccgttaaggaaatacgcatagaagggcataccagcgccttctggagtggggctgaaaatgaaaaacaagcttatttcagaaatatggagctttcccaggcaaggacccgcagcacgctggaatatctaatgtcattgccaaaggtgctgggcgatgaaaaatggcttgttcagcatgtgacagcgaatggattgtcatcctctcatccacttttaaatgaatcatcgcaggcggcaaaccagcgcgtggagtttcgcatcgtcacgaatgccagcgagaagatggatcttattgcggggaagttatctaaaaaatga

SEQ ID NO: 13078 - DNA, 846 bp, Cedecea davisae DSM 4568
atgagctttaagttaccagattttctcacctggccatcactggacattttacggcataaaatgggagccccgcttacggataactttgtgttggttcccgtatattctgaaatatccatcatggagcagttgaataccggtggagtcgaaattgatcttgatgagattagtgtccatgaagatggaacattgctctacaggggttatcgggggttgctccatatccgggatatctcttctatttcgggtgaagccaggatgccaaaatttcatctggcctattgccagactcttgaaaaaatgcagaaaaactcgcgctttgaccgatacgttgttgcacaaacgacttcaggtgagtttaaagtcaacatgattgaccgtgaagtggtgtctcaaaccgtaagattaaatgtgtgtcagcactgtctcgataagattcgctggaagggtttcagtatgtccggtatatcacggttggaacggcagaatcgagttgagggcttttcactgcctgagttttttgaggtataccctcgcgacttgatcgggaaaaaacctttatatacttcaacgtctgcaccccttaatgattattcacaaaactgggctgaattgtcgaaggcgctcagacataaacgtgggtatcaatgtgaatcgtgtagggaatctttcaatcaagcggattctcgatatctccatgtgcaccatcgcaatggtttgaagcatgataacagagactcgaatcttgaagtgctttgtattgcctgtcatgcaaaacagcctcaacatgggcatattaaggctcatcctgattacaaggtatttatgacgcgttatccgcattga

SEQ ID NO: 13079 - DNA, 1764 bp, Pseudoalteromonas spiralis
gtgttatcaaatgtactgccattttttatttcatcttctacgggaatattaactttaatttttataggcgtactgttacttattttcggcattggttacaagcaagcaaaaaaaaataatactccttttgtaaattatgtgccgacacttctaacaaccgcaggtatattcggtacatttttaggtattgtaattggcttgttttactttgatcatacaaagatagatgaaagcattactgaattattgctaggtttgaaaacagcatttataactagtcttattggcttgatgctatcaattgcatttaagatattacaaacaactacttttataaatgaagaagtaataagtaatgaggatgcctcacctgaaaacattttagctgccataaaagctcaggcgaatgctactagtgagctacaagttgcgattgttggtgatggggacaatacaatcctaggccagttaaaattattacgttcagacgctaatgctaattcaacaaaagcacataatcttagtgttgaacagtacaacaagaagcttgaaaagcaagatgaatttgctgacaaactttggattaaattacaagattttgccgatacgttatctaaatccgcaacagaagagattattgcagccttaaataatgtaatagctgactttaatcaaaaacttaccgaacaatttggcgaaaactttaaaaagcttaatgaggcagtttttaaattagttgagtggcaagaaaactaccgcattcaactagaggaaatgaaagctcaatatagtcatggcgtagaggctattgttaaaactgaagggtcagtggcaagtattaatgagcatgctaagtctattcctcagtcaatggataccttaactgaagttatggaagttaaccaacatcaattagctgagcttgaaagacatttagaagcattcgaacaaatgcgggataaagctgttgaagcagtacctcaaatacaacaacatgttgagaatacagtaaaagatatcggtgctgcagtagaagctgcaagtacacattacacgtctttattaacccactctgatgagtacattaacaagcatattgcaagctcagaagctttgttggataaatttgtgaatactactgagcaaggtatcgatgcagtaggtaataagctaataaatagctctgaaaacatgggtaaagcattagatttagctagtactgagtttactaataatgcttcaagaacaaatgaaagtttgcaatctagctctgattatttagcagatggtagtgataagatgaaacagcatatttcagatactgtttcagatttaaataataacatgagagatctcatcgagaaggttgtcgttgaagcgcgcacaatgagcactactttcaaagatgcaaacagtgaattatctcaagatactaaacaagctagagatattttcttgtcaacaaattcagaagtaagagagcaaataaagcgcgtaattgagcaagcggctcaagaacaaatgcagcaaactcaacgtacttttatagccattgaagagtcggctaaacaacaattaacgaaaacacatgaaactgtagagcaccaattaaaaatgattgaccaatcaatgcaagaggagctaactcgtgcattacagcttatggctaattccttaggtcaaatttctggtaaatttgctgaggattatcaagtgctaacacaacaaatgagaaaagtcgttgagcaaggagcaacggtttaa

SEQ ID NO: 13080 - DNA, 705 bp, Pseudoalteromonas spiralis
atggagcatatttttggtaaacgtaaacagtcagatgaaggtggggagcattggttatccatttcagatttaatggctgggctgatgatggtgtttttgtttattgccattgtttttatgcgccacacaatgaaagaaaatgaaaaaattaaaagtatagctgttgcctaccaagagaaacaagtcgctatatatgagtccttgataaaagagtttgatgaagatttagaaaaatggggtgctgaaatagatagggaaactttggcttttaattttaaatcaccagatgttttatttgataatggtgatattgatattaaacctgcttttgcaaatattctagatgattttttcccgcgctatttaaaggtacttaaaccatttagaagctcaattgacgaagtgagaattgaggggcataccagtagtgagtggaataaggatagtagcgatgaagaggcttacttcaaaaatatgaggctatcacaaggcagaactcgatctgtactatcttatttatattcacttgtgccaaaagaaacaccatggataaaacgaaatatcgcagcagttggcttctcttcatcacgcttaattatgacggaacagggcattgaagatacagagaaatcgagacgtgtgagtttcagagctattacaaacgcccatatacaaattaaacgcattctagagtcacaagagtaa

SEQ ID NO: 13081 - DNA, 1140 bp, Pseudoalteromonas spiralis
atgaagattgaaataaacttcaaagctttgcaatctgcagccataaaaatgggggcctcaaataagcatactaagctcgactctagcctcggtcagttaaatgcaatagacagtggtttaggcgagggcttggtattaggggaagatttacagctttctgaaatagataacacgaatagtcttttgtcatacaaaggacggcaaataatgctctacattccagaacaaaggagcaacatagaagaggtcataaaaaatggcaagataacagaggctcgacgtttgcatgttgcagaatgcagcacaattgaggatatgaggaataaaggtttttttgatcgctaccaagtgactaatgatattagcggtagctatccggtagtcggccgacagagttaccggggtgagtggatagaaagcaaagctgagcttggtgtatgcaaaaactgcctgaggattttaaactacaaaggttatgctgatcttaaaggtgatgcaaagcaaaaggtatttttagaactcaaactttcagaattgtttgatacttatagctcttgcttcaaatattaccccacgcgattaaaaacgattggcagttacactaaagactgggacaaaatatcttcaagttatcgagaacagcaaaactatacttgtgaacaatgtggtgtagagctatcaagatacaagcgacttttacatacacatcatattaatgccgtaaaaacagataattcattgaataatttaaagtctctgtgcgcagattgtcatactaagcaacctaaccatgaccatatgcatgtacttcatgatgatcgtctgctcataaatcaacttagaagagagcagcataaatttgattgcagtgattaccgtgaggtattgaattatgcagattctgcactcgaaggcttgttgttaaagtgtaaaaagtacagtttacctacacctgagttaggtataagcgttagaaatggggatgattttgtttctattgatttagcatggccgagaaaaaagttcgcagtagtgattgaaaaagaacagattcaacttttaagaacgcagggctggacggtttatttagcgagtgagtgccttaataattttaccaatatgcaacgtatgatacgttaa

SEQ ID NO: 13082 - DNA, 1767 bp, Pseudoalteromonas translucida KMM 520
atggatatactagaaagtttactacgcagttttgatacaaatgttgttagcggtgctgtattaattttaatgttttttgtttttggttcaggtttgttttacaccaaaaaggctaggcaagttgagtttgttcagtttgttccaacactattaactactatgggtatatttggtacttttttaggtatagttcttggtttattagaatttaaccaaaatgatatagaagccagtattccgttgttgctagcgggcttaaaaactgcatttattacaagtttagcgggtatatttttatctttagtgtttaaaacactgtctacgttctcatttttaaaacctaagcaaccagaagatagcatttctcatgcaacacctgaggcgatattaggtgctatgcaagcgcaggttgcagaaacaaaagttttaaaagaagcgattgttggtaatgaagagtcaacactgtttggtcaattaaaaatattacgtggtgatataaatgacaatgcaaaaacatcgataaatattgcccaagaacaagctgtaaaacaacaagagagctttgaggcgtttagtgaaaagctatggcttaaactacaagactttgcagatactttatcaaagtcagctacagagcaagttattgaagcattaaagcaggtgattagtgattttaataacaacttaacagagcagtttggtgataactttaaacaattaaatgaagcggtaattaaattagttgaatggcaagaaaactataaaattcagcttaaagaaatgagtgaccaatacgctcatggtgttgcttctatttctgctactgaatcatctgttgctcatattagtgagcaaagccaaataattcctcaatcaatgggtgaactaaaaggtgttatggaagttaatcagcatcaattagctgagcttgaacgccatctagaggcctttaaagatatgcgcgacaaagctgttgaagccgtcccgcaaattcaaaagcaagtcgaagctacagtaaacgatatatcggctgctgtaacaacagcgagtgaccattataaaacccttcttacacaatcagacgattacataaaaactcacgttcagacatctaatgatttattagacaagtttgctcatgaaacagagaaaggcattaatagtgttggtgagcgtttgattgaaagctcagacaagattgctacagaagtagataatgctggcactgatttcataaatcgtacaagcagaacaaatgaaagtttacaagttagctctgatgctttatcaaaaaatagtaaagagatacagtatcacttagagggtaccgttagcgacctaaacaatcatatgcgtgacatgattgaaaaactagtagatgacgctaaagatattacttcaactatgaagcaagctaatcaaaaccttgtgaccgatacagagcaggtgcgtgacactgtggttaagtctgcagaaaaacttcagcaacgccttaacgaagttattgacgatgcagctacacagcaaattaatcaagctaaacgtacctttgacgcaatggaagatgaggttaaaaagcaggttggtatgactggggaagctgtagactcgcaactaaaacttattgatactgcgatgcagcaagaaataaaccgtgtaatgaacgaaatgggtaaggcacttgcacaggtaagcggtaaatttgttgatgattatattaagctaactaaagcgatgaatgaagttgtaagtcagcgagtaatgtaa

SEQ ID NO: 13083 - DNA, 699 bp, Pseudoalteromonas translucida KMM 520
atggaaaagatatttggctctcaaaacacctcacaagatagtggtgaccattggttaactgtatcagatttgatggctggtctaatggttgtattcttgtttatagctattgtttttatgatgataactcaaaaagaaaacgacaagattaaagatgttgctgttgcttaccaacaaaaccaagttgctatatatgaagctctagaaagcgagtttgaaaaagaccttgataagtggggagcaacaatagacaaagaaacgttagcgtttaactttcaatctccagatgtgttatttgctaataatgaaactagattaagcgacgcatacaaagaaatattaaacgactttttcccccgttatatcaacgtgcttgccccgtttagggactctttagatgaaattcgtattgagggtcatacctcaagtgttggtttaagaggctctacagaggcgcaagcatacttttataatatgcgattatctcaggggcgaacacgttctgtattagagtatggctatgcacttatgcctaatgagtctgattggattaaagctaatattgctgcagttggtttttcatcttcacgcttgattaaagagaatggagtggaagatgctgcaaggtcaaggcgtgtatcctttagggctattactaatgctgatattcaaataaaacggatactggaggcgcagtaa

SEQ ID NO: 13084 - DNA, 1137 bp, Pseudoalteromonas translucida KMM 520
atgaagctaacagttgattttagtgcgttacatagagcggtagcacccttagggcaagttgttacagacttttctattaccagtgatgcttctgaacttgagagcattggcagtcatcttaatcaagggatgattttaggtaaagatgtacagttagatgaaattgatgggtcaaacggtgtactaaactatgatggtcatcaggttatgctatatataccagatcaaggagatgacattgaagcagtgttgtctaatggtaaattgggacgacgtatccatgtggcagagtgttctactcttgagttgatgcgagaaacaggccggtttaaacgctatgatgtaattaatcgcgttgatggtttttttcctgtatttggctctagctacagaggagggcctaatacagagggggaggctgatttaggtgtatgcaaaaactgcttaaaaattcttaattacaagggttattctactcaaagttctcaagttaaaaaccaagtatttaatagtttttcatttgaacaatttttcgaagtttatagctcctactttaaaagtttacctgttaacagtaaaaaaagcacaagcggttatacgtcagattggccatcaatttcggctaagttaagaagcgatttaaattactcatgtgagcaatgcggcattgatcttaaatctgaaaaaaggctcttacatactcatcatatcaatgggaataaagcagataatgaacgagataatttgagagtactttgtgcagattgccataaaaagcaaccacatcatgaccatatatatgtaagtaactcagatattctcaaaattaaccagcttagacgagaacaacataagtttgacgtgtttaattacgataatctgcgagagtgtgcagatacagcattagatggccttttacaaaaatgtgagtcgactagattaccaggtgctgagctagggattgttattcaagataaagaaacatttgtttcaatcgatctttgctggccaaggcgtaaagtagcggtgcttattaatatgagtaattctaatatattaagaaaacacggctggactgtatttactgcattcgacgccttgaataactttgagaattttcagcgccaaattagataa

SEQ ID NO: 13085 - DNA, 1752 bp, Vibrio xuii
atgactgattttcttgcttctatcatcgcttcttatagtgctgcatctatttcggatgcatttatctacaccattattatattactcttagtttctagtgcacttgcctataaaagaaaagctcctaggtttacagcaagcactactaatattctaacatccctaggtatcctaggtacttttgcaggcattgttgtaggtttgatggaattcaatccaacagatatcgatggaagtatcgaatctctgcttgcggggttgaagactgcatttttaaccagtctagttggcatggctgcatcgatcatttataaggcaattctagggaccatttctcagaaaggtgaggatgcaattaaaggtgtgggccctgaagaaatcttccaagttatgtcccaacagttaagatcgtcgaatgagttgttagcgtccattaaaggtgaggaagatacctcgttggtttcccagctaaagatactgcgaactgacattaatgatggccaaaaggagcaaatcgcttatcagaacttaaaaattgctcagacagaaaagttccaagcaacgctctgggaaaagatggatgagtttggtgagcttttatctaagtctgcaacagagcaagtcattaatgcactgaaagaagtcattgttgagtttaatgacaaactgacagagcagtttggtgagaactttaagcgattagacgagtcagttaaaaagcttgttgattggcaagaaaactataaagaccaactagcagatatggccacgaagtatcagctaggtgtagatgcaatctctttgaccgagaagtcagtagctagcatcaatgaacgtgccgaagctatcccagcgacgatggaaaaacttcaccaagttatggagttaggtcatggctacgtgacggagctcgaacatcgcttagaagcatttaaagatcttcgtgataaagcggtagaagcaatgccgcaaattcgcgagcaaatggacaataccatgtctgtcattggcgaatcggttaaagcagcatctacgcattacgagtcaatgctacaagaatcgcaaaatattattgataacttcagttcaacagcaactcaaagcgttgagctcatgcgtactaatctagaaagtggtgcggaaaatgtatcacttcagttaattgagagctcgcaaacattaagcggaaaactggctgaggcatcatctgatattcaagaacaagtgggtaccgcaactggtggtttgagtaatgtgaccagtcacctaaccgataccacggaacagattcgtcaacatcttgaagattccatcactgagttaaatagccaacttcgtgtactagttgccgatattaaagacgatgctcgtgaaaccggcaatgttctaaaagaagccaaccaagagctgctaaatagcacgaaagaaattcagtcagaaacgacgtctgctatttctaaacttcacgatcgcttagaaaccactctagaagaagtgtataaagtgcaggcagaggcagtgcgcagaacatttgatagcttagaagaccagatcacgcagtcagtaggcagaactggtagtgcagtagagaagcaagtggaagtgcttgatctacaaatgcagcaagaaatcaaccgaaccatgaatgaaatgggtgaagcacttgcgacgattactcaacaatttacccgcgattaccaagcgttgacgcgtgaaatgtcgaatgttgtaaacagtaaaattgcagtgtaa

SEQ ID NO: 13086 - DNA, 708 bp, Vibrio xuii
atggaaaagttattcggaaaaaccaaatctacgggtgatggtggtgaacactggatgtcagtatcagatctaatggcaggtctaatgatggtgttcttgtttatttctgttgcgctaatgcgtgatgcgatggtagagcgtgacaaaataaaagaagtggcggaaacttatcaaaaaacccaacaggccatctatattgcgttgttagaagagtttgctaaagatcttgatacttggggggctgaaattgatcgggatacactgagtgtaaactttactgcgccagatgtgctatttgctaatggtaaagcggacttaacccaccaatttcaaattatcttgaacgacttctttccacgttatcttgaggtattagatcagtacaagccaattattcaagagattaaaatagaagggcatacctccagtcgttggaaccacgattcgaccgattatgaagcctattttaataatatgcgattgtctcagtcacgaacgcgggccgttttaagttacgtaatgaaactcgatgaagtacgcatcgagcactatggttgggtaaaaaataacgtagcggctgtaggctattcctcttcaaaagcagtggttgaacatggcgtagaagacgaaaaacgttctcgtcgagtatcttttcgtgtaatcactaacgctgaagagcagatattgaagatcttgggggcggaatga

SEQ ID NO: 13087 - DNA, 1116 bp, Vibrio xuii
atgaagctgaatatcagttttaagtcgttattgaaagctgttgaaattatggagccagaagagaaaggaaaatttcgcgtagaaccaacccttgagcctttacagacatcacctgttgttcttatcaataaggaagttgaacttaaagatgttgatgttgatggtgaccttctaagttatcaagggcgacaagttcttttatatatcaaagatcatggtcaatcggcacagtctgcaattaatatcccttattcagggaaaaagttccatatagccgactgcgcgacactcaaaaacatgcgcgaacaaggacgctttgaacgatacgtcgcaacgaatgatacttccggcgaatttgtaatttcgggctttggtgtagaaggaaaagcggttttgagagtgtgtcaaaactgtctaaatgctttgaactataaaggttggtcgtcaggcacttctcgaactgagattcttcacaagttcaacatgccagaattctttgctacctatagctctttcttcccgcacatgccatctcgacgagctgagaccgctgagagtggctacagcgatgattggtcaaaaatatcctcccactatcgagtagaaaaaaactttgagtgtgaagaatgtaaagtgaacatgcgttctaaccgtgcgcttctgcatgttcatcatgttaatggtgttaaatcagataacaggccgtcaaaccttcgtgcactgtgcatcggctgccacagcaaacaacccatgcatgagcatatggcactcagccacagagagcgtcagacaataaatgatctgcgtaaacagcaaggtttacttgatgacctcggtgagtggcaagagttgtttgattactcagatccaggtgtacatggcgtattgcatgcttgtcgacaagcatatttgaaactccccgatattaactattttgttgaagacagtttcggagggttagccgcacggcttgaactagcgtggccgaagcacaaatttggtgtcgcaatatcaatgaatgatattgaagatgcaaacagtaatggttggcaggtcgtgggtattaatgactttttggaaaattacaaatcacaagcttataacttaaggcactaa

SEQ ID NO: 13088 - DNA, 1164 bp, Leptospirillum ferriphilum
atgcaaccagctgcactttttctgtcacacgttccctggtatacggccatcatgattttcctgatgatccttgtgtttttgtatttcaatctcacaggcttcacggaaaagttcgtccgacagggaccgactctttttacaacggccgggatcctggtgacgtttctcggcatttccatcggcctctaccagttcgaccccacccacatccagaaaagtctccccgcctttctggcgggcatgcgaaccgccttctgggtctcccttgtcggagtgggggcgtcacttttgatcaagatccgctattctctctgggggattcctcccgacatgcaaaaacaggagcctcccgagccggcggaggaacttctccgccacacccaaatccttcagcatctcatcggcggcaagagtccggaaggggcctctctcgccgaacatttccaggctcttcgaaaggaaaacggggagatgctcggggccatccgcaccgacctttcccactttctcgaaaacatggcctccaacaatacccgggctctggtggaagcccttgagcgggtggtcaagggcttcgatgcccagctcaattcaatgacttcggaaagcttccggaagctcgccggagcgattgacaaaatggtggaatggcaggaggcctaccgggacgcgatgccccggatcaccgaagagttgattcgcgcggtggacatcattcgagaatccggacgacagcatgctgcgtttgtggagcagtcggaaaaattcggaaagatcctgtcccatcagggcgaaatcctgaaatccctgaatgcggaacgcgaccggatggaggagtccctgacagcgcttggggaactccttgcctccaaccggacggctctgccggagatcagtgagcagattctgtccatgacgcggggactgaccgatgcggtggcgaagacaacgggagagatgagcgaacagctgggagccatggtacgaaagacccatgaacaggtcgcctctcttgacgccggtctcgagcgggagctgacccggtctctccagggacttgggcagcagctgacagctctctcccagaaattcgtccaggactattcccccctgaccgacaggttgcgggaagtggtcgaactggcaagccggacaggacgatag

SEQ ID NO: 13089 - DNA, 717 bp, Leptospirillum ferriphilum
atgttcaagcgtgggaaagggcacggccccgaggatcaggaagatcactggatcccgttgtcagacctcatgacgggcctcatgatgatctttctgctggtggccgtgtcttatatgacggacatggagctggccaactaccggatcaagcggattgccgtccggtacaacgaagtgcacgatgctctctaccgcgatctcgaaaaggaattcaaaaatgatcttccccgatggggagcggaaattcaccgggatctgtcgatccggttccgtgaaccggacgttctgttcgcgaccggttccgatgccctgaaaccccgtttccaggcaatattaaacgatttcttcccgcggtatgtcgcgattctctcctctccgaaatatcgaaaatccatttccgagatccggatcgaagggcatacctcaagcttctggaaccggtcggtctccgcctcttccgacgatgcctacttccgcaacatggcgctttcccaggcccggacgcgcaccaccctggcatacgttttgggcctgccgtcggtctccggcaaaaagggatggctgaaggggcttctgacagcgaacggcctgtcgtcctcccggctgatctatgataaaaacggagaagaagatcccgctctttcgcagcgggttgaattccgggtccggaccgacgccgcttcccgcatcgcgaggattctggaggtcagtcggtga

SEQ ID NO: 13090 - DNA, 588 bp, Leptospirillum ferriphilum
gtgaaacttccggattttcttgtctcccctgccctcaaccgtctgagggagaggatggaccacgcccccctgggaaatttcgtttccgttcccggacaaacccttctgtcggctgccgatcttcagagcctttccggggaaggactcgaagttgcctcggacgaggtggaggttctgcccgattccacgctggcatatcggggccggagagtccttctctatattcgggaatcccatctggcagcgcgaggagaattgctcctccggacttccggcaacgatacgcttccggaaggcgaggaaagccttccccgttttcatgtggcccactgtcggacacttgaagcgatgcggtattcggggcgaagccaccggtacgtggttgcgacccgggaagacggtctcttcgatcttgttttgtatggccggcctgtccggcgacgcctttgggtctgcaagaactgtctggagacactcgactggaagggattttcctcccggcccggagcgaaggatcggtctcaggcggtccaggatttccggatcgacgaattcttccggggtttcggaaatacggtcgcatcctga

SEQ ID NO: 13091 - DNA, 1719 bp, Oleispira antarctica RB-8
atgctagcgcaacctattgaatcatttatttctggcatgggcgccagcgccatgaccgatggctttattgtcataatagcaattacctttatcgcagccattgtcgctaaacgttctgatcgagcacacggctttactcaatacgttcctacgctattaacatcattagggattctaggtactttttgcggcattgttgcagggctactagggttcgatgccaataacatcgacggcagtatcggtagtttattggaaggtatgaaaacagcctttaccaccagtttggtcggtatgagttcatccattatctacaaggtactcgccagctctggcatgctaacgcctaaaggtgatgatattattgatgaagaccaaataggtattcttgagctgtacaccgtaatgaaagaccagaaagacggtattaacgatctacaagtcgttatgaaagaacaagccagtggtatgaccctgcttcagcaagctattggtggcgataatgattcaagtcttaccagccaaatgaaattaatgcgcagtgataataatgaccaaaataaattagcgttacaaagcgataacgacaatcataaggaattattagcaacgattgcagagcaaaagatcgcttttgaaagcttccaagacaagctatggattaagttgcaagactttgcggatatgctctctaaatcagccactgaaaccgtcatcgaagctttgaaacaagtcattggggactttaataaaaatctgaccgagcagtttggcgaaaacttcaaacagctaaatgaagcctgtaaagaactagtaacttggcaagaccaatacaaaggccagttagacgacatgggcaaaaaatatagcctaggcgttgaatccatcggcgtaaccgcaacagctgtcggatcaataaccgagcatactgcccaaatccctgctcacatggaaaaccttaaagatattaccgaggttaaccagcatcaaattaaagagttagaacgccacttagaagcctttaaagacattcgcgataaagccgtggaagccgtaccagaaattcgtgcacaaattgatgccacactagaaggtgttaaaacagcttcagatgaactggccaaaggcattaaagaaagcagtgattccatgggtaatgcaatcattcaaggtactcaagaatttgtagataactctgccaaggttaacggatctcttcagtcaacctcagacgttatggtggctcataacgaaaaagcgattacacattattcagatttagaagaaggcatgaatgccaactatcgtgatctttcagtacgcatgcaggatgaagctaaaaaaattactgaagaatacggcaaagccggtacccaacttgttcaagagctcagtcaaagtaaagacgcttttaataccggtttagaaacgatgagagatcaacttaatagcactctagaatccatggctagccgtcaatcagacgaggctaacaaaatatttaatggcctaacgacgcaaatagagaactccctttctagcacaggcgatgctgtggataaacaagtggggatgatcgacaaggccttagagcatgaaattgaaaaagtaatgacagaaatgggatctgcacttgccagtatctcacgtcaattcactaacgattacactcagttagttaacgctatgcaaaatatagttgaaacttctaatgcctaa

SEQ ID NO: 13092 - DNA, 705 bp, Oleispira antarctica RB-8
atgcctaattttttaaaccctagagcgacagagcaagacgagagccactggctctctgtatcagacctgatggcaggtttgatggtcgtgtttttatttatcgctatcgcgttaatgcgaaatgttatgatcgaacgtgaccaaattaaagaagtcgctgttgcctaccaagaaaaccaagtggctatttttgatgcgttgaataatgttttttccaaagatctcgatcgctggaatgcaagcattgataaagatacgttaacgtttaattttaactcaccccacattttgtttaaaaccggtaataaagatctaaatcccgaatacaagcacctacttcaggattttttcccacgatacatgaccgtattatccccatttaaagactctattaacgaaatccgtattgaaggccataccagcagcgtttggaatgaatacacaaatgatacttctgcatattttcttaacatgaagttatcgcaaggacgcacccgcagcgtattggaatatatattccgcttagacagcataaaaacacaacggccttggattaagaagcatattgccgcagttgggttttcatcggcaaaaaacatagtcaatgagcaaggtgtcgaagatcttaatcgttctcgacgagtctcgttccgcataatcactaacgccgacatcaagattcagcagattcttaaggctaattaa

SEQ ID NO: 13093 - DNA, 1110 bp, Oleispira antarctica RB-8
atggagattaacgtcaactttactgctctttgggcagcggctaaaaaaatgggggacggtaaggccacgttctcttataaagcgaatacttataatgccttcgagtcagagaaaactattttaaggcgtgatatcacgcttgaagatgtagactcgcatggtggtttattagaagttgatggtaatcaggtattactctatatcgaggatcatagttttagagtacaagatgtgattactggtaataaagaaggtaataaatatcatattgctgattgctcaaaattgggtgagatgcgaaagaaacatcgttttgatcgatatgtagtcactaacgatgtgtctggtatatttcctgtttcaggcaaggaatccgatagccagctattagttgaaggtgaagcagagctacatgtttgcaagctgtgcttaggctttttaaattacagaagttacaagtctgaccgaactaatgtattcaaacaattcacattggatgaattcttttctcattactcaaccctattcaattcttttcctaaaacaattgcagacaagcgtggtggctatgctgatgattgggagacagtatcgctgaattatcgcagtaagaagaatttctgctgtgaggcatgtcatgtcgacttatccagctatcaacacctacttcacacgcaccatgttaacggtgttaaacgtgataacgttgccagtaatttaagagcgctgtgtatagattgccaccgtaaagagccattacacgaacatatgcgtgtgcgtagtaatgaagtacataccattaataaacttcgacgcagccaaagtattttgtctagtcaagattgggatgatgctttggcttttgccgatacgtcttatcatggtttgttggatttatatcgcaataaaaacatggcagtacctgaaattggttacgatgttactgatgaagatgatgcagtcgtcgccactgctgagctggcttggccaaaaagcaaaagagccattattcaccaaagcgctgacattcccagcttagagaaagcaggatgggtagtgaaaatgcttggtgatgcccttagtgaagcacacgaacttaagcaaaggtaa

SEQ ID NO: 13094 - DNA, 1773 bp, Vibrio tasmaniensis LGP32
atgaccgaccagatagcttctttcattgcatcatttagtgcaaatgcaatatccgacgcatttatcctgattattgcagcattaatgatagtttccattgttctttctgctattggaaaagctcctagattgacaggtagtacagccaacctattaacttctctcggtatcttaggtacttttgcgggaatcgtggttgggttaatggactttgaccctaagaacattgatggcagtatagaatccctgttatccggccttaagactgcgtttttaacaagcttagttggtatggctggatcgatcgtgtacaaagcaatattgggtgtcttgcctaaacgtgtagagtcaatggagaaagctgtaggaccagatgaaatctacgccgtgatgtctcagcaattagaatcgtcaaataagcaattggaatcttcttcagagttattgtctgccatcaggggagacagtgattcatctctaacatctcaaatcaagaacttacgaacagatgtcaccgatggcaacagacaactcaatagtcatttggaaaactttttgcaatcaaatgaaaagtttagaagcgagctatgggtaaaaatggatgaatttggcgagctactttcgaagtctgcaacagagcaagttattaatgcgctgaaagaagttattgtcgagtttaacgataagctgactgagcagtttggtgagaacttcaagcgcctggatgagtcggtgaaaaaactagtggattggcaagaaaactacaagcttcagctagaagatatggcaaacaagtatcagcttggtgtagacgcaatttcttcaactgagaaatctgtagctagcattaatgaacgagctgagtccattccacagacaatggaaaaacttcaccatgtaatggagatcgggcacggtcaagttacggagctggagcatcgcctagaggcatttaaggacttacgtgacaaggctgtcgaagcaatgcctcagattcgtgagcaaatggacagcactatggctgtgattggaaactcggttaaggctgcttctacgcactacgagtcgatgttagtcgagtctcagaaaatcattgataactttagtactacagccaatcagagcgttgagactatgcgcaccaacttggaagaaggagctgttaaagtatcgagtgagcttgagaccagagcggttgaaattggtgggcgtcttgcagaagcttcaaacgatatcacggacaatgttactagtgcatctggtgcgcttcaaaacagtgcatcttatctaaccgataactcagatcgaatcaaagaacagcttgaagatgccattacagaattaaactctcaattacgcgtcctcgttgctgacatcaaagacgacgctaaagaaacgggtaatgtcctcaagtctgcgaaccaagagctactatcgagcacgcgtgatattcaaactgagacgactcaagcgattacaaaactccacgatcgcttagagaccactctcgaagatgtcttccagatccaagctcaagctgttaagcgtacatttgatagtttggaagaccaaattgttgattcagtcggtaaaactggtaacgcagtagagaagcaagtcgaagtgcttgatatccaaatgcagcaggaaattaaccgcactatgaacgaaatgggtgaggctttggcaacgatcacgcagcagttcactcgagattatcagaagcttgttcgagaaatgtctaatgtggtcaacgctggagcaacagtttaa

SEQ ID NO: 13095 - DNA, 711 bp, Vibrio tasmaniensis LGP32
atggaaaagttgtttggttctcaaaagcccaatgaaggaagtggtgaacattggatgtctgtgtccgaccttatggctggactcatgatggttttcctatttatttcggttgctctgatgcgtgatgctatggttgaacgtgacaagattaaagatgttgctgaaacctacaagcaaactcagcaagctatttatgtcgcgcttcttgaagagttcgcgaaggatctagatcactggggagcagaaattgaccgcgatactttgagtgttaactttaccgctccagatgtactttttgctaatggtaaggccaatcttactgaccagtttcaatcaatacttgatgactttttccctcgctatttagctgttcttgaaaaataccagccaattattcaggaaatcaaaattgaaggtcacacctcaagtcgctggaatcatgattcaacagactatgaagcctacttcaataatatgcgactctctcagtcacgtacccgagctgtcttagggtatgtgatggctttggaacaggttaaaaacgactactatgagtgggttaaaggtaatgttgcagcagttggttactcctcttcaaaacttgcattagatgtagctggtgtagaagatgaaaaacgctcacgtagagtgtctttccgaatcattaccaatgctgaacaacagatactcaagattttggggacagaatga

SEQ ID NO: 13096 - DNA, 1089 bp, Vibrio tasmaniensis LGP32
atgaagctgactctcaacttgggctcactgatgacagctatcaatatcatgcaacccgagaaaaaaggttccttcaacttggcctatgaagaaacgaatatagcgaaagtagataaagaattagagcaaggaaaagatgtagagcttaaagatgtagaaattgaatcaggtcttttaagttaccaaggacgaaatgtcagcctatacatcaaggctaacggttcgagtgctcgtttccacgtctctgattgtaaaactcttcaatcgatgagagccaatggacgctttgaacgctatgtagtgacgaacaatacctcaggggagtttgttgttgactctggttatggagaaaccaaagctagactgaaagtctgccagaactgcttgagaaagcttaactatagaggttgtaactcttccaacgacattcgctcaatagttgttgaatttaacatggcagaattctttgcgacatatagctcgtttttcccacatatgccttctagaagcgcagaaacggcagagacaggatataccgacgactggtctagagtgtcttcacgttatcgcgtagacaagaactttaaatgtgaggactgtaaggtgaacttgcgcacgaaccgttcactactgcatgtgcatcacatcaatggcgttaaatcagataacaatgaggaaaacctaagatctctatgtatcgactgccacagtaaacaaccgaaacatcaacacatggttttgagccaccgagaaagacaattgattaacgatcttcgcaaggatcaaggccttttggatgaccttggaggttggcaagagcttttcgagttatcagaccctggcgtgcatggtgtattacatgcttgtcgtgaagtgcacctattgctgccggaagttaattactatgtgatggatagtttgggtgatatagcttctcgtattgagctagcttggcctaaaagtcggtttggcgtagcgatttcaccaaatgatatcaatgatgcgctgaaacaaggttggcaagtaataacaataaatgagtttctgagtgattatagaagccatgctcacacgttgaggcatctatga

SEQ ID NO: 13097 - DNA, 1473 bp, Bathymodiolus azoricus thioautotrophic gill symbiont
atgttcattgaaaatgaaaacattgctgtaatttccatcacttttttactaatgttttggctattttggaaagacctttcaagttataaaagcgataatcaccaagattttaaatctatccttgttagtactggtgttttaggaacatttataggtatttttattggcttacttggttttgatagttatagtgttgcagatagtgttccaaaattattagatggattaaaaactgcattcgttacttctattgttggcatgggtttggcaatattactttctattattcaaaaaaataaaagtgggggtggtgctgaaaatgaaattacagccttaaataatattggcaaacaattggaaaggttgagttctattgatgataaattaacatctttagatgatgttaaaaagaatactgaaatattgcctcttatcaacacaaagttagattcaattgataccaatataaaatctttatcttccgatatatcaagtgttaaagatgagttaaaaataaatcaaaaagccttgtttgaatttttaaaagaaaagttatctgaaattgacaactccctgaaagaagcagttcaaactttatcaaaaggtgctactgaagaaattattaaagcattacaagatgttatccaagattttaatactaaccttacagagcaatttggtgataattttaaacagttaaatgaggctgtcttaaaaatgattgaatggcaaaatacttataaagattctgtgcaagaatttgaaaaacagttaaaaaccaccgcggaaaatacaaatgaaagccatcagaatacaacggcactggtaaaagaatttgctgaaactaatttaaaaagtttacaagattttgttaataaaaacaatcaagtattgttagaaagcatagataaaattaacatcaccacaaatcaaaataccgatgcacttattacaaaagtgggagagttttctagtgaaataaataactctttaaaagaaagtgttgagcagaatcaacaagctaacgaaaaaataaaagaaagtttaattcaattatttgaacaaattaaaaatgctgtttcaatcacagaaaacaatgcaaaaataattagtgaaatgacaggtaattatgccaagattgcaggtgttagtgacaaattagaaatcgtcattagcactaatcaaaatcaaatacaaaatttagaaaatcatctaaaaacttttgcagaaattagcggtgaggcaaaaggtattactaaagagttaaaaactttttctgatgaaatacagaaatctttaacaagacaatcggaggcattgacaaaactaactcaagagattgaaaatcaattacccgcttcattagatacattaaataaatcacttacttctttgaccacgcaatttgccattgattatgaaagctttttagagcaagtttctaaactaatgaaaataaataatattaattaa

SEQ ID NO: 13098 - DNA, 591 bp, Bathymodiolus azoricus thioautotrophic gill symbiont
atgagcgaagtgcaaaaagaacaaaaggctattaaagaaatagcagagagttatcaaaatattcagcaacaattatttaaagatttaagtgaagaatttaaacaagaccttaaagtgtgggatgcagaaattttatctgataatacaattaggttcaaatctccagagattttatttgataccaacagtagcgacctcaaagcactgttcatagctgtgttagatgatttcttcccaagatatttggacatcttaaccaacaataaatataaaaaacaaattaaagaaattagggttgagggtcatacatcatcaatatggaataacacaacaagagagcaatcatatataaataatatgtctttatctcaaaatagagcaaagtctgttttggcttatagttataacattacaaattcagcaaacaataaaatatttttagaaaatgtttttcgtgctaatggcatgtcattttctaatttaattaaaaacaatggagaagaagatatacaagcctctcaaagagttgaatttagagtaataaccaaggcagaagaaaaaatttatgaaatcattaacaaattacagtaa

SEQ ID NO: 13099 - DNA, 786 bp, Bathymodiolus azoricus thioautotrophic gill symbiont
atgagaattacagattttagcgaactttggcgagcagttaataaggtaaaaattgatattattgccaaaacagaaataacactgtttgaaaatgagggtctagatactgatttaagtgatgtttatactagcccagaaggtgagttatttacagttttaaaagatggttcaattagaaaaacgattgtgcatatttgtgatatttcaaactataaaacagaatggcttttgccaaaatttcatatttttgaatgtacaactttaacaacaatgaggggtgctaataaaggccatagatataaaaaagcgtccagagatgatgggcaattttggatgattcacgcttcaggcggacgatatgaatatttaaatatttgtaagaataattgcttgacacaacacaattcattatatgatcatcaaacagtagcaagttttaatgtcaaatcttatttagataaaccaatccagcacactcaaccttacattaccaacgaattagatatggcaaccattccaagtagttatgccgacaattggtcaagcatttcaaaagagagaaagcagtattacaaatggatatgtcaagagtgtttttatgatttgaatgattataaaaaatatttacatactcatcatataaattcagatgtaacaaacaataaacatgagaatttaaaagttttgtgcattaagtgccatgcagaagagtttcagcacgagcatattaaggaaaaaccagaatataaacaatttttacaaataaaagaaaaccatgcaagctaa

SEQ ID NO: 13100 - DNA, 1704 bp, Vibrio crassostreae
atgttagaacaattagagatgattcttttaagcctcagtgctggggttgtaagcaccctagtagcagtgctaatcattggtgtattctttgtagcaatctggctaggaaagaaaggcagaaacagagatttcgttaactacgcaccaacacttttaaccacattgggtatattcggtacgttcttcgggattgtgcttggcttgttagagttcgatcaaaacaatatcgaaacaagcatacctccacttctagcaggtcttaagacagcgttcataacgagtctgatggggatcttcgcatctctattacttaagacgctcagcactattcctctcttcaaacccaaaaaagcgaaagagcaaaaacttggcgcgacaccggaagatattctttctgcaatacagtctcaatccacagaaacaacggctttgaaagatgctctagtcggtaacgaagagtctacgttgcttggtcaattcaagatgattcgcagcgacataaacgacaatgccaagctatcccgaaagacgcttgatgaaagggccgaaactgaagaagagagatttaaagagttttccacgaatctgtggctcaagatgcaggagtttgccgatgtcttgtcgaaatctgcgacagagcaggttatagaggcgcttaagcaggttattactgacttcaatagcaatctgacagagcagtttggcgataacttcaaacagctaaacgaggcagtgttgcttctcgttaggtggcaagaagattacaaaaaccaactcgagcaaatgcagagccagtatgagctgggcgtaaaatcaatagcctctaccgagtcttcggtcgcaacaatcagcgagcacagtaaagtgattcctgaagctatgattcaacttaaagaaatcatggaggtctgcaatcaccaaatatctgagcttgagagtcatcttggtgcattcagggatatgagagacaaagcggttgaagccgtgccggagattcaaagccagatagagaatgtggtgagtagtatatctaaatcagtcgagactgctaatacccactatgctgatatgctcactgaagccgagaaaggcataaacaatgtcagcgaaaagctaatagagagctctgaaactatcggcaagtctatagatttggctgcaactgaatttacagataatgcagctagaacgaacgaaagcctcaagacaagctccgactaccttcaagaccaaactggaattatcaagcagcacctagaagacgctgtttctgatctgaataacactatgcgcggcatgattgacatgctagttactgatgccaagcagatgtcagaaacgatgaccaccgctaaccagaacttagttaccgataccaacaaagtgtctgatgcgattgttaattcggcagataagttgcaacagaggttgtctgacgttatcgacgaggcatcaactcagcaaattaaccaagctagacgcacgttcgaggcgatggaagagagtattcgaaaccaagtagggttaactggcgaggcggtagattctcagctcaagttgattgatgagtctatgcagcaagagattaaccgtgttattaccgagatgggacgagctcttactcaagtgacaggcaagtttgtagaggactatgtgaagctgactcaggcaatgaatgagatcgttaacgagcgagttgcctaa

SEQ ID NO: 13101 - DNA, 702 bp, Vibrio crassostreae
atggacaagatattcggtaaaagcaatgccgctgaagaggagaatggagagcattggctttccatctcagacctaatggccggcttaatgatggtgtttttatttatcgccatcgtattcatgctcaagactcagaaagaaagccagaagataaaagatgtagcagttgcctatcaagagaaccaagtcgccatttacgatgctttagtgaatgaattcaaaggcgatttagatatatggggagcagagattgataaggaaactctgtcattcaacttcaagtcacctgacgtactgttcgcaaacaaccagacaaagattaaacctgcttacaagaagatcttaaatcagttcttcccacgctatatcgaggttcttaagccgtttcgtgactcgattgatgaagtgagaattgaggggcacacatctagcgcaggtcttagaggctcaaccaaagagcaggcttacttttacaatatgaggttgtcacaaggtagaacgcgctccgttttgcaatacggttacagcttaatgccggaagagtcagattggataacttccagagtagctgcggttgggttctcttcatcgaggttggtcaaagtagacggggtagaagacccagagaaatcacgtcgagtctcgtttagagccattacaaacgctgacatacagataaaacaaattcttggtgagaactga

SEQ ID NO: 13102 - DNA, 1152 bp, Vibrio crassostreae
atgaagttaaatatcgactttggcgccctgtataaagctattgccccgttgggtgcagtgagatctgattttaccttaacaaggcgctcagacaatctagagagcgttactcgtggtctagttcaaggcaaggtactaggtaaagacattcagttagatgagattgacggctcaaatggtgtactaagttacgacggtcatcaggtaatgctctacatacccgaccaggggccaagcataagcgaagttattagtaacggtaagtgtaagtctgcaaggcgtgttcatgtcgcagagtgtaaaacaataattgatatgcgcgaaaaagggcgttttcacaatagatatgtggtgacaagtcgaattgatggcaagtttccggtctttggtcgttcttttcactcaggtcaggactcaaagggtgaatctgatttatcaccatgcattatgtgtatgaaggaactgaatgtagaaggctatactgagaagacatacgaggagcagaaatcgttcattgccaatttctcgttcgtgaggttgtttgagtcatacagttcccacttcgagacaataccaacctctactaccgattactacagtggtgggtactctcctgattgggcatcgatatcatcgagcttcagaagcgaactgaattacacctgtcaacattgcagtgtttgcctaaaagatcacaaaaagctacttcacactcaccatgttaacgggaacaaggcagacaacaagagggcgaaccttagagccttgtgtgctgactgtcacaggaaacaacctcatcatggtcacttgtgcgtgagcaacgagacaactttgaccatcaacaggctaagggaagagcagggcgttgtaactccgtttgacagctaccaagatctaatgctttatgccgatcctgctcttgttggcttgatatcaaagtgtcaaaagaatcgacttccctgtggcaaggttggcgtaagtaagaacataaagggaaatgaagtctctattgacttgtgttgggataatcagaaagtggcggtggtgattaatcacaagagttctagagagcttaaaggcgcaggatggtcggtatatacagttcaagacgcattagatagatttgatttgtttcaaggcgaggttagatag

SEQ ID NO: 13103 - DNA, 1704 bp, Vibrio crassostreae
atgctagaacaattagagatgattcttttaagcctcagtgctggggttgtaagcaccctagtagcagtgctaatcatcggtgtattctttgtagcaatctggctaggaaagagaggcagaaacagagatttcgttaactacgcaccaacacttttaaccacattgggtatatttggtacgttcttcgggattgtgcttggcttgttagagttcgatcaaaacaatatcgaaacaagcatacctccacttctagcaggtcttaagacagcgttcataacgagtctgatggggatcttcgcatctctattacttaagacgctcagcactattcctctcttcaaacccaaaaaagcgaaagagcaaaaacttggcgcgacaccggaagatattctttctgcaatacagtctcaatccacagaaacaaaggctttgaaagatgctctagtcggtaacgaagagtctacgttgcttggtcaattcaagatgattcgcagcgacataaacgacaatgccaagctatcccgaaagacgcttgatgaaagggccgaaactgaagaagagagatttaaagagttttccacgaatctgtggctcaagatgcaggagtttgccgatgtcttgtcgaaatctgcgacagagcaggttatagaggcgcttaagcaggttattactgacttcaatagcaatctgacagagcagtttggcgacaacttcaaacagctaaacgaggcagtgttgcttctcgttaggtggcaagaagattacaaaaaccaactcgagcaaatgcagagtcagtatgagctgggcgtaaaatcaattgcctctaccgagtcttcggtcgcaacaatcagcgagcacagtaaagtgatccctgaagctatgattcaacttaaagaaatcatggaggtctgcaatcaccaaatatctgagcttgagagtcatcttggtgcattcagggatatgagagacaaagcggttgaagccgtgccggagattcaaaaccagatagagaatgtggtgagtagtatatctaaatcagtcgagactgctaatacccactatgctgatatgctcactgaagccgagaaaggcataaacaatgtcagcgaaaagctaatagagagctctgaaactatcggcaagtctatagatttggctgcaactgaatttacagataatgcagctagaacgaacgaaagcctcaagacaagctccgactaccttcaagaccaaactggaattatcaagcagcacctagaagacgctgtttctgatctgaataacactatgcgcggcatgattgaaatgctagttactgatgccaagcagatgtcagaaacgatgaccactgctaaccagaacctagttaccgataccaacaaagtgtctgatgcgattgttaattcggcagataagttgcaacagaggttgtctgacgttatcgacgaggcatcaactcagcaaattaaccaagctagacgcacgttcgaggcgatggaagagagtattcgaaaccaagtagggttaactggcgaggcggtagattctcagctcaagttgattgatgagtctatgcagcaagagattaaccgtgtcattaccgagatgggacgagctcttactcaagtgacaggcaagtttgtagaggactatgtgaagctgactcaggcaatgaatgagatcgttaacgagcgagttgcctaa

SEQ ID NO: 13104 - DNA, 702 bp, Vibrio crassostreae
atggacaagatattcggtaaaagcaatgccgctgaagaggagaatggagagcattggctttccatctcagacctaatggctggcttaatgatggtgtttttatttatcgccatcgtattcatgctcaagactcagaaagaaagccagaagataaaagatgtagcagttgcctatcaagagaaccaagtcgccatttacgatgctttagtgaatgaattcaaaggtgatttagatatatggggagcagagattgataaggaaactctgtcattcaacttcaagtcacctgacgtactgttcgcaaacaaccagacaaagattaaacctgcttacaagaagatcttaaatcagttcttcccacgctatatcgaggttcttaagccgtttcgtgactcgattgatgaagtgagaattgaggggcacacatctagcgcaggtcttagaggctcaaccaaagagcaggcttacttttacaatatgaggttgtcacaaggtagaacgcgctccgttttgcaatacggttacagcttaatgccggaagaatcagattggataacttccagagtagctgcggttgggttctcttcatcgaggttggtcaaagtagacggggtagaagacccagagaaatcacgtcgagtctcgtttagagccattacaaacgctgacatacagataaaacaaattcttggtgagaactga

SEQ ID NO: 13105 - DNA, 1152 bp, Vibrio crassostreae
atgaagttaaatatcgactttggcgccctgtataaagctattgccccgttgggtgcagtgagatctgattttaccttaacaaggcgctcagacaatctagagagcgttactcgtggtctagttcaaggcaaggtactaggtaaagacattcagttagatgagattgacggctcaaatggtgtactaagttacgacggtcatcaggtaatgctctacatacccgaccaggggccaagcataagcgaagttattagtaacggtaagtgtaagtctgcaaggcgtgttcatgtcgcagagtgtaaaacaataattgatatgcgcgaaaaagggcgttttcacaatagatatgtggtgacaagtcgaattgatggcaagtttccggtctttggtcgttcttttcactcaggtcaggactcaaagggtgaatctgatttatcaccatgcattatgtgtatgaaggaactgaatgtagaaggctatactgagaagacatacgaggagcagaaatcgttcattgccaatttctcgttcgtgaggttgtttgagtcatacagttcccacttcgagacaataccaacctctactgccgattactacagtggtgggtactctcctgattgggcatcgatatcatcgagcttcagaagtgaactgaattacacctgtcaacattgcagtgtttgcctaaaagatcacaaaaagctacttcacactcaccatgttaacgggaacaaggcagacaacaagagggcgaaccttagggccttgtgtgctgactgtcacaggaaacaacctcatcatggtcacttgtgcgtgagcaacgaaacaactttgaccatcaacaggctaagggaagagcagggcgttgtaactccgtttgacagctaccaagatctaatgctttatgccgatcctgctcttgttggcttgatatcaaagtgtcaaaagaatcgacttccctgtggcaaggttggcgtaagtaagaacataaagggaaatgaagtctctattgacttgtgttgggataatcagaaagtggcggtggtgattaatcacaagagttctagagagcttaaaggcgcaggatggtcggtatatacagttcaagacgcattagatagatttgatttgtttcaaggcgaggttagatag

SEQ ID NO: 13106 - DNA, 1590 bp, Bacteroides salyersiae CL02T12C01
atgaacttgtccatttcaattgatacatgggtttgcttatgtagcatttttattgttttcattttctgttccattattgtatttagatatagaaacagtgagaaattagtggctaatcgccggatggtggaattttttccctctttggtttctacccttggtgtattgggtacattttggggaataaccaaaggtttgatggctttcgacaccacagatcttgatcgttctatccctgatttacttgatggcttgaaaacagccttctttacatctttagcaggtatggttggttctatgattttatctgcttttattagtaggaaacaagatgaaaaagacggaggtgtttccgacataaatcaagccgctggtgaaataaccaaagcggtaaaagcaatgagcgatgccaatacagaaacgatacactctattcagaaacaactgacagaacaagaagctgaccgcaaggctttttaccgaacagttggtgaggtaatgtctaagatgtcggaaacacaaaaaacaatgacctcagctattgactcgttggttgttttacaacgtagccaagagaacactcttgctgatataaaggaagcaaactcttctatgcttgtttcatttgggaatcttgaagaagccacgaatgaacaaactgtgtctattaattctgtattgaaatatacacaagaagttagcgagtatacgcatcatcttggagaaatttttgatgtaatctctggtataagtggtacagaaaacgaaattaatgaaaaggttggaaaactaaaggaaataatacacggcgaggtcattgaaatagaagataatatggccaaaacaaatgagttattagaaaggaaattcaatgaatttaccgaactcctcaagaagagtaatactgaagctcttgtcgatgtaatgaaaaaagtgaccgaagagtttcaaaaacaaatgaatgcgcttattaacaaactcattcaagaaaattttgatcaacttaataaatcagtggagaaactcaatctttggcaacaggagaataaagaaatgataatttcgctcactcgtcagtacaaagatatgtctgataatttcgaggctacttcttcttcacttactcgcgtaaaggatgatacgtctattcttgttagtgaaggtggtaaattacaccaacttgtcgatgcgcttaaccaagttattattgaggacaagaggttcattgaagtcaccaaggaactgcatgaaactgccaatctttccaaatctaatatggaatcgtttaacgaatctactcaaaaacttaacgaatgggtacgcaaacaacgtaatttcgtggatggagtacagcttctcattgcgaaacttgaagaacttaacaaaatacgagattatggggaacaattttggcaaggtacaaaagataaaatggaagagggagttggtatcataacaaaggggtcacaaacactcaattctcagcttacttcgcttgaccgtcaattctatggtcgcctaagtgctactcttgccgaacttgataattgtattactaagatggtagaacaaataggtaaacgcagatag

SEQ ID NO: 13107 - DNA, 702 bp, Bacteroides salyersiae CL02T12C01
atggctaaaacgaatgtatggttgtctgtttcagaccttatgacaggattgatggtgatttttctttttgttgcaatcgcctacattagccgtgtacaaaagaatcaatccgtccttactgattatgtggaaaccaagaatgagttgcacaataaacttgtcaaagagtttgaaggtgacactctcaaatggcaaatgacaataggcaaggaccttactatgaaatttaaagaaccgacagttctttttgctacagggtcatcagaattgacacctcgtttcaaggaaattctggaagagtttttaccgcgctatttcaatattctgttaaatgacagtttacgttctaatatccaagaaattcgtattgagggacatacagatgatgtaccgatgccaagtcgacatccagacccctatatagccaatgccatgctttcccaagatagagcattggcggtggttaaatactttcgctctatgtcacagtttgaaatgtattcggataaacagaaacaattactcgaatattggtttactgccaatgggctttcttatggaaaagctcttgatgcagatggagattttattattcgttctggtaaacctatagaccgtacttcttcacgacgtgtggagtttcgaatagttacttccggcgatgaaattcttgagaattttgtaaaagagaataccaaatga

SEQ ID NO: 13108 - DNA, 891 bp, Bacteroides salyersiae CL02T12C01
atgagcttcgattttgacatagacgcagaggaagattggttcttcaatactgacccgatttgtggctttccaaattttaagaaaagtcttactgatatggggatacagattggaactgctggtgcttggcgttcagtcggtacagttgatgtactgcctgaagacatcggtgagcgcattctctttgaagatggtggaattttttatattgatgatgagggagttaaacgccgtggttttatgtataaggctcgtttctattttgaatggcagggacgtgtcagccaacctaagtttcacgtttgtaaatgcacagctatcgaaaattttggacgggaagcttaccgttttgccaatgccgaaccaataaaagtgtattctcgaaatgctcataaagaagtggaagttgagggaatggaactatgtggttactgcaagcgtttgttgatggatgaagaagcaattcgagtgaatgattcaaccgattttgtagaaattctaaaagaagcaggggatgtagaagaacctactgagtacgatgtcgatatttttggttatgttaaaaattgggaagaaatatctctcaaatatcgcaccaaaaagaattttacttgtgaacgctgtggaacccatgttgagaacggtttcgaccatttttatatgcaaacacaccataagaacggtgtaaaaacagataatcgagaaggtaatcttgaatgcctgtgtatcagatgtcattcggaagtggatgatacccatcgccgtaatttttcttctgctgctcaaaaggttttaatagaagattatatgcgcaagtatcatgggaaagaatctgattcgcttatttctcgtcttatgaaagacgtaatcggcaagagccgccaacaataa

SEQ ID NO: 13109 - DNA, 1320 bp, Desulfovibrio alkalitolerans DSM 16529
gtgcccaatgactggacttcactgtttactcctgtgaacaacgttttttttatcttaattttagtctgtcttgggggcggactcttacatggaggaaagtctaggggacgtctcgtgtcatcgctccccagcattgccatatcaattggcatccttggaacattttatggaatatcgataggacttatgaagttcgatgagagcgacatatcaaatagcattccccaacttattggaggtatgaagaccgcatttgcaacatcgctactcggcatgtttgcctcgatatccctaaaggcatattactcaaggcaggatgataaaaacattggtggctctgaaaacccaattgactgccttaggaacattgaaaaagcaattgtttcgtgctttaaatctgaagaagaatactctcttgtctctcaagtaaaactaattcggcaagagcttatagacagtcgccgggagacgaaagctgccttccaggactttgcagatcatttttctaaaatggcatctgaatctcttgttaaagagctacagcaggtcgttgataaattcaacgccatgcttaacgatttggtgagcgaatcattcaaagatctttcagaatcaacaactcgcctaaatcaatggcagcatgactacaaaggtgtaatcgagaaaaaccagtcacagctagctgacacaatcacgcatgtcgacaaattgatatcgttgcttgaagattcggttgcaagaatcaaggagttcgatgttacccttaaaagcattgactcaagcctttctacaatctctacttcgagcacagaacttgacgagcacacaaagatgatttccagcaataacatgcttcttgagtcttctatgcgttctattcgtgatattggtgttgaagcatcaaaagttgtacccgagatttcatccaagatgaacctgcttatcgatgagataaaaattcttcaaaacaacacaaccagctttgttgacagaacaacaaaaaaccttgaggatagtatcagattgataattgctaccttgtcagacaaccaagaaaccttgcacaaggcgaccaatgactttgtctcatcaacaacaaatgagttgaagaataattttgaaactctgtcgatccatacgaaagacaatatacaggccatcgaaaaatctcttgaagaagagttgaccaaatctttgaattcgcttgccggagcgctgaccgcgttatcaaaccagtttgtttccgactacacacctctcacggaacgcctccgtgaagtgatcaagctcgcggagaacagcaatgctaaccggaactag

SEQ ID NO: 13110 - DNA, 708 bp, Desulfovibrio alkalitolerans DSM 16529
atgctaaccggaactagcgacaagacagaggagtattggccctctatctctgacctaatgtcaggtttgatgcttgtatttttattgatagctattgcatacatgcacaacgtcgaagaagggcaaaagcgcataaaaaaagttgctgtggcgtatcaggagacgcaagttagcttatataacaaacttatggaagaatttgacaaagaccttccaaaatggaaggctcggatcgataaagaaacactgtctgtccaatttatggagccggaagtcctgtttcacacaggcagctttgaagttacagactccttcaaagcaatccttgacgacttttttcctcgctacctccgtataatatttgccaaagaatatgaagaaagtattgatgaaatcaggatagagggacacacatcatcagaatggggaaacggcgaaacgccacagcatattgcatattttaataatatgaacctatctcaagacagaactcggtctgttcttcagtattgcttcagcataattgatgacgctggattagaagcaaagatgcgcaagcatattacagcaaacggtttgtcttcaagtcgcttggtcctagacagtgaagggcgcgagcagaaacaactctcgcgtcgagtagaattccgtacgcgtacaaacgcagaacagaaaattgtagagatactagagcagtttgaaaaatga

SEQ ID NO: 13111 - DNA, 882 bp, Desulfovibrio alkalitolerans DSM 16529
atgaatcttcctgactaccttaggtgcgtagaaataaaagaactccttttgaaaatgggaatacatagtattccagatcttaagcctgtagtttttgaacgagaagtatcttcgactaaaactgtggaaatacaaaatcctcaacttgcttttgcagaaaaactcaaacttgaagctgtcgcgcttgatcaagttgatgtcgccatcggaaaagatggaataattgaagtcaacggcataaaagcgtgtgcttacattaagaaacaaaaacaaggcgtgaaccgctacaataaaacgtctacataccgctatcacctgtgcaaatgtcaaacaatcgaaggcatgattgctagcgggagaaaagatagatatgtttctacgacgcgaagcgatggaacgtttcccgtcatcgatcaatctgtttaccccgcctgtgagatcgaagtcacacttgagttatgcaagaattgcaaaattttactagaaagcaaagggatgatgccaaagccttattctttaaaagttttttttgatagatttcagcctgagattccttcaaaaataagaaaaacagagcaagttattgtcaaagagccttatgccccaaaccaccgagaaattgcagatcgatacaaagagcaagcgaatttcatatgccaaatttgtggggttgacggaagctcaaagcgcttttgcattcaccttcaccacaaagacggagatggaaacaataacaacaactccaaccttagcgttctctgcacagactgccactccaagcagccccatcaccctcatatgctaaagaaccctacgtttgtaatgcaaatacaagagattaaaatattgagaagagaacaaggtattccgcaacttggctag

SEQ ID NO: 13112 - DNA, 1599 bp, Thauera sp. 28
gtgacggagctgtttatctggatcatggtggccatcttcgtcgttgccgtgcttcagggcaagaagggtaagcatgggcaatttctcgagcatgctccagcggtgctcgtatcgctcgggattctcggaaccttcatcggcatcgtgattggtctgctggatttcgatgcgcacgacatcaagaacagcatcgaaggattgctcgatggcttgaagacggcgttcatcaccagccttgtcgggatgtctctctcgctggtcttgaaggcgctcgatgcatggtggttcgcgcctgcgcgcagcaaggctgcggttgtgcctgacactgtcaccccggaacacatttatagcgcgatgactcgccaggttcagttgctcgagacgctgaaccagtcgctttcgggcaacgaggagggatcggtgtcggggcagctcaagttgctgcgcaccgacatgaacgatttccgccaagggctggcgagggatcagcaggagttcaggcaggccctgttcacccagctcacgcagttcgccgagatgctgtcgcgctcggccacggaagtcgtgatcgaggccttgcggcaggtgatccaggacttcaaccggaacctcgttgagcagtttggcgacaacttcaaggcgctcaatgagtcggtcgtgaagatgatcgactggcaggagcagtacaaacagcatgtggaaacgctggaggcccgcatcgaaacggcggtgcgcgagcttgagcgcacggcgacggccaacgaggccatcagcaagtcgcttgccacgtcggagcagtccatcggctcgatcgagaaccattgccagagcattccgtctgccatcgggcagctaacgcccgtgttgcagaccaaccagcatcagattcaggagctgcagcggcacttggaagcctttgtcgcgctgcgtgaccaggccgtgcgtgccgtacccgagatgcaacagcatatggatgcgatcacgaaacagctctcggaaaagatgcacgaggtagcaaccaagatgcacgagggcgcacaagagtttggccgctcggtcgaccacaccaacacggcgctcaccgaggcgtctcacgtgatcagttctcacaccgaacagatcagcaccaacatgaaggacgcctccgaggagttcgccacttcggtccgcgacacgatggaggtcatgctgcggaacgcgaagacgctcgaacagcagatggggcaggctgtggaacagaccacgcttgcgctgagcaacgagttcaagcgtgtcgccgagcacatccaaagcagcttcaccgcgtcggttgatgcgaccctgacctcattgaagaactcggtagaagcgagcttgagccacacggagacgcagctccaaggctctgcgaaccgtaccttgggcgctgttgaggcgcaggtgcgcgaggcgacagatcgggcaaacgcctccctgcatgcgcagctcggtgcaatggacaaggcgatcgagcgcgaactggaaaaggtgttcagagaaatgggttcggcgctcgccacgatttcgcggcgaattgccgatgaccatgccgagctgacccagaggatgcgtgtgcaatga

SEQ ID NO: 13113 - DNA, 732 bp, Thauera sp. 28
atgagcgcgttgaacagcttgttcaggtctcggcgcacgaacaaggaggacgccgagcactggatcggcatctccgacatgatgtccggcctgatgatggtcttcctgttcatggccgtggcctacatgtactacgtgcaggtcgagcgggagaacatcaaagagatcgcggtggcctacaaggacacccaggttgcgatctacaacgacctgatgaaggagtttcaggaggacctgcctcgttggaacgccgagatcgagcgcaacacgctcgagatcaccttcaacaacccggaagtcctgttccgcgccggttcgcctgagctgaacgggcagttcaagaacatcctttcggacttcttcccgcgctatgtggcggtgctttcccgctatcgcagtgcgatcgaagagattcgcatcgaagggcacaccagcagtgactggggcggcttgcatggcgagaaggcctacttccccaacatggcgttgtctcaggatcggacacggtcggtgctcgagtatgtgatggctttgttgccggaagcgtcggagagggactgggtacgctcgaacttcgcggcggtgggctactcctcctcgcgccgtgtcatggacgctgataagcaggtcgagaatgccgcccggtcccggcgcgtgaattttcgggtgatcaccaattccgagctgcagatccgcaacatcattgagaggctcgatggaaatcaagtttga

SEQ ID NO: 13114 - DNA, 1089 bp, Thauera sp. 28
atggaaatcaagtttgatttttccgggctgtgggcgcaggcaaagcggataggtgcagagagggtcgagacgatcgactggaccgcagcgacgcaactcgacccggtcgatatcgaactgctccagggccgtgaggtcaagctagaggatctggatgtcatcaatggcttgttgagcgttgatggacgtcaggttctgctttacatcccggatcaattcaagccggtcgaggtcgttcaaagaaccccggaggaggggaagcgttttcacgttgctgattgcaagacactggctgacatgcgtgccaaggggcgcttcgatcgctacgtcgtcacgaacaacctgagcggggtttttccgatcagtgggaggaactcgcgaggtcagccggcggagctggattcgcgattactcgtgtgcaagaattgtcttgagaagctgaactaccagaactattgccacgagacgcgacgtacgtcgatttggaaggcgttcgagatcggcaagttctttgaaacatacagcacaagtttccgctacctgccgcgcaccctctcaaaccggtcactggccaacgagtacacgcaggactggggggagatctccgccaacgtgcgtcgccgctgtggtttcgtctgcaatgagtgtcgtgtaaacctctcggagcaccggcatctgcttcatgttcaccatgtaaacggcttgaagtccgacaacgcggcgagcaacctacgagccttgtgcgccgactgtcatcgaaagcagcccctgcacgactggatgttcatttcattggctgacatgcagatactgacccgcctgcgtcgcgagcagagcattgttgccgacgactgggaacaggccattgcgctggccgacctgtccgttcatggagctcttttgcacgcgaagcacaaaggcttcgagttgccggaggtagggtatgagttcaccagtgctaaaggcgtggtggttgccgaagtgcagcttgcctggccctcacagcgcttggcggttcatgtctcggaaggagtcgacttccctggatggaaggtgatgactccgattgagttcatcgaacagtgctag

SEQ ID NO: 13115 - DNA, 1560 bp, Vibrio sp. MED222
atgtttatagagtttttattgagcctcgatccaaacacagtgttaaagatatcgtgtggtattttggtggtaacatttggtatgggatttcggctgatatatcaggaaaagccttctaacttagttcgccaatttccaagctatttaaccactggtggggtgttttttaccttcttagggatcgcgatagggttactttcgtttgacccgaacgatctaaacaatagtatttcttccttactagatggtcttagtctcgccttttggtccagtatctttggtatgcttggttcaatagtattgaaggggatcattcatttaaagcttgataaaaaccgtagtgttgtcacagcaaaccaaatgcatcaggtattaaaagaaggaaacaaaaataatgactctagccaaaatgcgattttgtctgagttaaaaaaaatgacaagagcgactgagcaaggaaataaagagagtcaacagaatttcgacttactcagccaagaattacgcgacttttcctcctctctttcacagcaaacttctcagcaaattgctgagtcgttaaatgaagcgattaaagattttaacaaagggcttgttggacagtttggttcaaatttccaaaggctcgatgattcggttgtaaagctactcgaatggcaaagtaactataaacaacaagtggcgcaactgacggatgcatttgagagcgctgtcgagagtgtaagtgcgacagaagtagcgctagagaatattgcatcacacactcaagtcataccgagtgcgatgagcaacttagagaatacgacggatgtctggcagaaccaattgaatgaactagacgagcggatatccgtatttgctgaaatgcgtcaacatgcactttccgctatacctgatattgaggggaagatggatgaattgtgcaaaacagtcaatagctctttagacaaggtgtgtactagcatggaaagtggtgctcgttcagcttcttctactttgcaaaacaatgcgaaacagcttagtagtgatttttcaaatgtttctaatgagataaagggtgaaattaacgatgcgcataggcaagtagcgacgattagtcacgagttctcttcagctgctgagtcgattaagaatacgctaaaagattcggttgatgatctaaatagccagctgagttcattagttaaaggtacaaagagtgatgttaagaacattggtgacacattagtacacgttgacaaagaacttatgaaaaagcatcgagaacagctttccaaaagtagcgactttgcaagtgagcatcacgagttgttaattgagcaaatcaaacagttagtggagatgcaaaccaaatctgcgttaaaagtgggtgagcacatcaatcaaagtttgcttgataactcaaaggagtttgagcaagggattcaggataagctgagtcgagtgttgacggatttaggtagtggtttggttcaaattactcagcaattttctgaaaactatcgccaatatgagcaagaatttactcgtaaaagtattgaacatgaagagatggtatag

SEQ ID NO: 13116 - DNA, 711 bp, Vibrio sp. MED222
atgcatcaagatttatttagtccagacgcagaaagttcagaatcgagtcattggctctcggtatctgatctaatggcaggtttgatggtgatcttcttgcttattagtgtcgccttgatgaatcgtattgatgtggaaaaacgcgtgataaaggcaatggacataactattagtgaagcccaagttcgtattcaccaagctctagaaaaggaattcacgcaagatttcgataaatggcaagtggagcttgcggcggataaatcgcttagtattgatttttatgctaaaccctatcactttgtatcttcagaatccgaattatctcccgcgttactgagtactctgaaagtgttcttccctcgttacattaatgtgctagagcaataccaagatgatattcaagcaattcagattgaaggacatacttcttcttattgggagggtttgaactcatttgaggcatacaaacagaatatgatgttatctcagaatagagcgagtgctgtattcgaaaaggtagtgaactttgacgggatattggagcagcatggcagttgggtgatgaaaaagctcgcggcattaggttatgggcctgctcaactgcgttttcatgcaactggtaaagaagattcaagtcgttctcgaagagtgtcatttaaggtcataactaaatcggaaatcaaagccaaagagattttggagaagctataa

SEQ ID NO: 13117 - DNA, 849 bp, Vibrio sp. MED222
atgctggatttggatttgagagagtttagtgccctcgttgaaggaattacttcttcaccgcccaaaaagttagtatcgataagctttgagcctgtcgattattcgagagtattagaaaactatcagcacgcgcgagtgatcggagaatttgataaagaggtttccgtttacaacgacttatttcattacgatggacatggagtaattgtttatataaaggagcatgttgatctggaacttgtaactaaagacccctatacgcatggaaaaaaataccatttaactaattgctctacagtccaaatcgaaaaaaaacagaatcgatttggtcgatttgttgcgttgcaatataccaacgagcttatgccaatttctgatagtaaggggaaacaagctgaagccatgctttgcgtgtgtaagtcgtgtatgagggagttaaaattcagaccttatttgttagcgaaaggtgagagtgaaaaggaacgtatttgtcgcgagtttgatcttgttgagtttttaaaaaagcgtgattgctactttcccgatgaatatctaccgataaggctcgctgaatacagttcattctcttatgcggggaattggcgcgagatgagcattagctatagagcgagccagcaatactgctgtgagcaatgtagagtctctttagtaacgcgtaaaacgttgctgcatacccatcatatcgatggtgtgaagtcgaataattctgttagaaatctgatggcactttgcaaggagtgccacagtaaacaacctaaccacggcaatataaagctttcagaggaagagttgtctgacctgaaagaactaaggtgcgcaagtacttag

SEQ ID NO: 13118 - DNA, 1767 bp, Pseudoalteromonas sp. BSi20495
atggatatactagaaagtttactacgcagttttgatccaaacgttgttagcggtgcagtattaattttaatgctttttgtttttggttcaggtttgttttacaccaaaaaggctaggcaagttgaatttgttcagtttgttccaacactattaactactatgggtatttttggtacttttttaggtatagttcttggtttattagaatttaaccaaaatgatatagaagccagtattccgttattattagcaggtttaaaaacggcatttattacaagtttagcgggtatatttttatctttagtgtttaaaacactgtctacgttttctttcttaaaacctaagcaactagaagatagcatttctcatgcaacacctgaggcgatattaggtgctatgcaagcgcaggttgtagaaacaaaagttttaaaagaggcgattgttggtaatgaagagtcaacactgtttgggcaattaaaaatattacgtggtgatattaatgataatgcaaaaacatcgataaatattgcccaagagcaagccgtaaaacaacaagagaactttgaagcgtttagtgaaaagctatggcttaagctacaagattttgcagatactttatcaaagtcagctacagagcaagttattgaagcgctaaaacaggtgattagtgattttaataacaacttaacagaacagtttggtgataactttaaacaattaaatgaagcggtaattaaattagttgaatggcaagaaaactataaagttcagcttaaagaaatgagtgatcaatacgctcatggtgttgcttctatttctgctactgaatcatctgttgcacatattagtgagcaaagccaaataattcctcaatctatgggtgaattaaaaggcgttatggaggttaatcaacatcaattagctgagcttgaacgccatctagaggcctttaaagatatgcgcgataaagctgttgaagccgtcccgcaaattcaaaaacaagttgaagctacagtgaatgatatatcggctgccgtaacaacagcgagtgaccattataaaacccttcttacacaatcggacgattacataaaaactcacgttcagacatctaatgatttattagacaagtttgctcatgaaacagagaaaggcattaatagtgttggtgagcgtttgattgaaagctcagacaagattgctacagaagtagataatgctggcactgattttataaatcgtacaagcaggacaaatgaaagtttacaggttagttctgatactttatcaacaaatagtaaagaaattcagaattatttacaggatacagtaagtgatctaaacaatcatatgcgtgacatgattgaaaaactagtagatgacgctaaagatattacttcaactatgaagcaagctaatcaaaaccttgtgacagatacagagcaggtgcgtgacactgtggttaagtctgcagaaaaacttcagcaacgccttaatgaagtgattgatgatgcagctgcacagcaaattaaccaagctaaacgtacctttgatgcaatggaaaatgaggttaaaaagcaggttggtatgactggtgaagccgtagactcgcaactaaaacttattgatactgcgatgcagcaagaaataaaccgtgtaatgaacgaaatgggtaaggcacttgcacaggtaagcggtaaatttgttgatgattatattaagctaactaaagcgatgaatgaagttgtaagtcagcgagtaatgtaa

SEQ ID NO: 13119 - DNA, 699 bp, Pseudoalteromonas sp. BSi20495
atggaaaagatatttggctctcaaaacacctcacaagatagtggtgaccattggttaactgtatcagatttgatggctggtctaatggttgtattcttgtttatagctattgtttttatgatgataactcaaaaagagaacgacaagattaaagatgttgctgttgcttaccaacagaatcaagttgctatatatgaagctctagaaagcgaatttgaaaaagatcttgatgagtggggagcaacaatagacaaagaaacgctagcgttcaattttcaatctcctgatgttttatttgctaataatgaaactagattaagtgacgcatataaagaaatattaaacgactttttccctcgatatatcaacgtgcttgctccgtttagggactctttagatgaaattcgtattgagggtcatacttcgagtgttggtttaagaggctctacagaagcgcaagcatatttttataatatgcgactatctcagggtcgaacacgttctgtattagagtatggctatgcacttatgcctaatgagtctgattggattaaagctaatattgctgcagttggtttttcatcttcacgtttaattaaagagaatggagtggaagatgctgcaaggtcaaggcgtgtatcctttagggctattactaatgctgacattcaaataaaacggatactggaggcgcagtaa

SEQ ID NO: 13120 - DNA, 1137 bp, Pseudoalteromonas sp. BSi20495
atgaagctaacagttgattttagtgcgttacatagagcggtagcacctttagggcaagttgttacagacttttctattaccagtgatgcttctgaacttgagagcattggcagtcatcttaatcaagggatgattttaggtaaagatgtacagttagatgaaattgatgggtcaaacggtgtattaaactatgatggccatcaggttatgctttatataccggatcaaggagatgatattgaagctgtgttgtctaatggtaaattagggcgacgtatccatgtggcagagtgttctactcttgagttgatgcgagaaacaggccggtttaaacgctatgatgttattaatcgggttgatggctttttccctgtattcggctcaagctacagaggtggccctaatacagagggagaggctgatttaggtgtatgtaaaaactgcttaaaaattcttaattacaagggttactctactcagagtcctcaagttaaaaaccaagtatttaatagtttctcgtttgaacaattcttcgaagtttatagctcctactttaaaagtttacctgttaacagtaaaaaacatacaagtggttatacgtcagattggccatcaatttcagctaagttaagaagcgatttgaattatacatgtgagcaatgcggcgttgaccttaaatctgaaaaaaggctcttacatactcatcatatcaatgggaataaagcagataatgaacgagataatttgagagtactttgtgcagattgtcataaaaagcagccacatcatgatcatatatatgtaagcaactcagatattcttaaaattaaccagctaagacgagaacaacataagtttgacgtgtttaattacgataatctgcgagagtgtgcagatacagcattagatggccttctgcaaaaatgtgagtcgactagattaccaggtgctgagctagggattgttattcaagataaagaaacatttgtttcaatcgatctttgctggccaagacgaaaggtagctgtgcttattaacatgagtaattctaatatattaagaagacacggctggactgtatttactgcattcgacgccttaaataactttgagaattttcaacgccaaattagataa

SEQ ID NO: 13121 - DNA, 1800 bp, Methylophaga thiooxydans DMS010
atgatagtcgagtacatcgaaagtttattgttaggaacaactgcaagctctgtttccgaaatagtttgcatatcaattttcatatttttagctataggtctaatttcgctaaggcttggtactggacgcaactttgttgcctacacaccggcactactaaccaccttaggtatttttggaacatttgttggcattgttattggcctactggagtttgatgcatccaatatcgatgacagcattgaaggtcttctcgctgggctaaaaacagcattcttaacaagtttgttaggcatcattacatcaatactattcaagatcattcaaacttcaggactgatttcagcaagagtatctgaagaacaacaaatttcagcctcaccggaagaaatacttacttcaattaataagcaacgagaggcaattacaagtttagtaactgccgttggcggtgattcagatagttccatactgagtcagatcaagcttcttcgtggcgatataaatgataatcagaaaatagaaatcaatactcagcaagagatactcgctacccttggtgtgatttcaacccacgtctcccagcagagtgaagatttcaagcatttttcagacaagttatggatcaaaatgcaggactttgcagatatgctgtcaaagtcggcaacagagacagttattgaggcattgaaacaagtaataaccgacttcaataacaatttaactgagcagtttggtgataatttcaaacagttaaatgatgctgttaaagagctcgtagtttggcaagataattacagagtacagatcagcgatatgattgagcagtacaagcaaggcgttatttcaattaatgccactgaagcctctgtgcttgcaattagtaatgagtcgaaagtcatacctcaaaccatgctggatttgaagcaagtaatggaagttaaccagcaccaacttacagagcttgagcaacatcttgaggcttttaaagatattcgtgataaagcagttgaagccgtccctgaaattagaaagcaaatcgatgaaactgtttcagcaatctcaaaatctgtgactactgcgagtgagcattactcaacattattatccgaatctgataaatacattcagtcacatattgcatcttcaaatgagttgttagataagttcgtaacaaaaacatcagatggtgttgatgtaataagcaaaaaactatccgaaagtgcaattcaagttgagaaagtgatcactgagggagcaaatgagtttactgataaagttcatcagacaaatactagtcttcaaacgacagccgatcatttggatagtcaaacggaagtaataaagaattaccttaaagatgcggttgatgacttgaacaaccatgtgcgagatatggttaatggtttggttgaggactcaaaaactttgtctacaaccttaattgaagctaataagtcactagtacaagagactggttcagtgagagattcagttgttgattcaataaatggtatgcagagcagatttgaatcatcgcttgatgagctatctgaagctcaacgacgacagatgaataatgttttttcaaacctagactcagccttaaaagagcaggtcggtcaatctgggcaagcagtagaaaagcaacttagcattttagatcaagccgttcagcaagaattgaatacggtcatgaacggaatggggacggcgctagggcgtataagtaatcagtttgtacaggattacgggcggttaactgctcaaatggatcttattgtcagaaaagctagttaa

SEQ ID NO: 13122 - DNA, 639 bp, Methylophaga thiooxydans DMS010
atggctggcttaatgatggtctttctatttatcgcaattgtatatatgcgtgatatttccttggaaagagataaaattaaggatgtagcagttgcctaccaacaaaaccaagtagcaatctatgatgcattgaatagtgagttttctcatgaattggtttcatggaaagcatctgttgacaaggaaactctatcttttcaatttaattctccagaggtcctttttgactcgggagatagcaacctgaagtctgagtttgaagaaatattaatcacatttatccctagatatttgagtgtcttagagaaatttaaagatagtattgatgaagtccgaattgaaggacatacatcatcagagtggggtaatgatacaccgccagacgcagcatacttcttgaatatggcgctgtcccaaaatagaactcgaagcgtcctaaattttgcgtaccaagatactggtttgagtaagaacgaacaaaactgggtaaaaaaaacattttcggcagtaggtcttgcttcagctaaagctaaattaaatatagatggcagcgagaataaagagctcagtcgcagagtttctttccgagttataactaatgctgatattcaaataagaaaaattatagagggtatttaa

SEQ ID NO: 13123 - DNA, 414 bp, Methylophaga thiooxydans DMS010
atgaaactcagcgttgattttagcttgttacaagatgcagttcgtactatgggagcgggtgaggttgagttcgacatctccgatgagattgttccaatacaacctattgatgctcagctgggcgaagggtttgaagtcaactttgaagacattgtctttgacgatgggctcgcaagctatcaaggtaggcaagtccttttatacattaaggatcacggtaacaagatattagatgccttagatgatggtagcaaagggaaaagatttcatgttgcagattgcagaacactagatgagatgcgtcgtaaaggacgctcagaacgatatgttgtgacgaatgatttgagtggaaacttttcaatatccggacaagattggaaaacacgtcgtggtatgaagagaagcggtacttaa

SEQ ID NO: 13124 - DNA, 1308 bp, Burkholderia latens
atgaaaaccaaaactctccttctcctgccgggaatcgcgtgggctccgtacgtgttcgcgggtggtcctatcggcacagtgctggcagacaaacagacacttgctttcatattgttgaacacatgcctaacaatattcttcgccttcgtcagattcgaccgcttttccgttgttcacggcccagaaatattgacgacagttgggattttcggttgttttctcggtattgctctggcgctactgcagttcgatgcatcaaatgtgtcggagagcgtgccgcacctgctggaaggagtgaaaaccgccttttgggcttcggtcagtggcgtgtttggctcattagttatccgcgggaggcactatttctggaagacccccatcccgcagacaccgggcgcaccgaaagcagccaccctagacgacgtcgtggccgcgacacacgctctacagctcagcctgtcggggaacgaacaaggcagccttctatcacagctcaaattgatgcgccaggaacaaggcgacgaacttcgtatgctccggacgtcgttcgacacgttcgcgcagcggatggcggaagacggctcgaaggctcttatcgaggccctgaaggaagtgattcgcgacttcaacgcacaaatcaacgagcaattcggcgagaatttcaaacatctcaacgcagccgttgaaaagcttgtcgtctggcagcagcaatacaaggaagagctcgacaaactgcaagcgctccagaaatcgtcagcagacgacctcaggggcgcatcttcgggcctagcactttttatcgaccgggcttctagcttcgctcaaacagcaacagcgctcgaaggcacgctcagaggtctggcgcagcaacatcagctcatcgaccagtctcaacgttcaatagccgacgttctttcccaaatgaaggatgtgacgccgcagttctcgcgtaaggtcgacgaaatgaccgaatcgatgaagcaaggtgtggctagggtgcaggccgaagttggcgatgtagtcaagaatttcggtgtccaggtgcagtcctcgtcatcagaaatgaaacagcttctgacggacacgcttcgcaaatcgcagtccgaggtaaatgacgggctcgttcgctcgatggacgcagtccgccaaagcgttgtcacgctggacaagggattgcaggaggaactcacgaagagcctcgaaacgcttgggcgtcagctcgcgtcgctatcagagaagttcgtcgcagactataccccgctgacggaccgcctgagagaagttgttcgcatagctggcactgcgtga

SEQ ID NO: 13125 - DNA, 693 bp, Burkholderia latens
atggatttcgagcatagcaaccaatctcactggataccaatggcggacctgatgaccggtctgatgatggtgttcatgctgctgactgcagcattcatgctccgggttgagcagacgaccacgttggtcgtgaaagagtacgaaaccaccaaacgtgacatgcaactggccctgcagaaggagtttgcgaaggacctgaagcaatggaacgctgaaattctcggcgatatgaccattcgtttcaatgacccaactgtgcttttcgcaaccggctcatccgaattgcggccgcgcttcaagcaggtacttggtcagttttttccacgttacgtggcgttgctgacatccgctcaatacaaggacgccgttaaggaaatccgcattgaaggccacacaagcgcgttgtggacaggaacgacagacgaaaaaatcgcgtacttcaggaacatggaactatctcaggcacgtacgcgaagcgcgctcgaatatttgctgtcgctaccggcggtgcagggcaacgagaaatggctcgttcagcacgtgacagcaaatggactttcgtcgtcacgtccactggctcaggattcgcaatcctcagcatcgcagatagcgaatcaacgcgtcgagtttcgcatcgttaccaacgcaagcgaaaagatggacctcattgccgagaagctggcaaagaaatga

SEQ ID NO: 13126 - DNA, 846 bp, Burkholderia latens
atgagctttcagttacctaatttcctcaactggagctcgctgaatgcgttacggcaggagatgggcgcgcctcttgccgccagctttgttcctgaccataaattccgcgacattgaactacctgtcctcgaacgcctccaaaataacggtgtcgacgttaagtttgacgaagtcgaagtgctcagcgacggcacgctcgcgtacaagggatatcgcgtcttgctgtacatcagggacatcacgtcaatcggccatcaggaaagtatgccccgctaccatctcgcatattgccgaactctcgacaagatgcgccggaatgctcgatttgaccgatatgttgtggcgaatggagacagtgggaaattccaggtcaacgtcgttgagaatgacgtaaagacccagcacgtcagactgaacgtatgccagaactgtctggacgaaatccattggaacggattcgacatgaagatgccgcgtgacggacgtctcacccttgtttccaagttcgcgcttcccgatttcttcaagaaatacccgcgcgacctgatggcagtcaaaccaatgcactcctccgataccgcgccactcaatgtttattcgcaggattggaacgaaatatcggaacgtaccaaacggcaacgaggctatcgatgtgccacgtgcaacactgtgctccggcaatttgattcaaaattcctgcatgtccaccatcgaaatggtcagaagtacgacaaccgcgactcaaatctcgaggtgctctgtatagggtgtcatgcagaagaaccgatgcacggacatatgaaggccttgcgtgagtatcaggagtacatcgagcgatatcgttaa

SEQ ID NO: 13127 - DNA, 1752 bp, Vibrio azureus NBRC 104587
atgactgactttattgcttccatcattgcttcctatagcgctgcatcaatctcagatgcatttatctataccatccttttgctacttgtcgcttctagtattttggcttttctaggaaaagcgccaagatttacggcaagtacaactaacatccttacctctttgggtatcctcggtacctttgctggtattgtcgtgggtttgatggagtttgagccgaccaatatcgatggcagcattgaatccttgctggctggtttgaagactgcgtttttaaccagtttagttggtatggcagcttcgattatttataaggcaattcttggagtcattccgcaaaaaggcgaagatgcagtaaagggaatagggcctgaagaaatttactctgttatgtcggctcaactgaatgcttctaatgagctgctatctgcgatcaaaggcgatgaagattcatcattgacttctcaaattaaaaacctgcgtgtagatatcaacgatggaaacaaatcactagttcgccatatggaaaaagcagttgagggaagtgaacaattccagtttaaattgtggcaaaagatggatgagttcggtgaccttttatctaaatcagctacagagcaggtcattaatgcactgaaagaagtcattgttgagtttaatgacaaactgacagagcagtttggtgagaactttaagcgattagacgagtcagtgaagaaactcgttgattggcaggaaaactataaagaccaactagcagatatggccacgaagtatcagctaggtgtagatgctatatcttcgacagagaagtcagtagctagcatcaatgaacgtacagaagccatcccagcgactatggaaaaacttcatcaagttatggagttaggtcatggtcaagtgacggagctcgagcatcgcttagaagcatttaaagatcttcgtgataaagcagtagaagcaattccgcaaattcgcgagcaaatggataataccatgtcggtaattggtgaatcagttaaagcggcttcgacacattacgaatcaatgctgcaagagtcacaaaacattattgataacttcagttcgactgcgactcagagtgttgaacatatgcgtacaaacttggaagcgggagccgagaatgtatcgagccaactaattgaaagctctcaaacgttaggtgggcaattattggaagcatcaacgacgttccaagatcaagtgggcacagcgacaggcggcctaagcaatgtgaccagtcatctaactgatacgacagagcagatcaggcaacaccttgaagactcaattactgagctgaatggacagcttcgcgtactggttgccgatattaaagacgatgcacgagaaacaggcaatgttctaaaagaagccaaccaagagttactaaatagcacgaaagaaattcagtcagaagcgacatcagcgatcaaaaaactacacgatcgcttagaaacgactctagaagaggtgttccaaattcaagcacaagctgtacgccggacctttgatagcttggaagaccaaattactcaggccgtagctcaaacgggtagtgcggtagagaaacaagttgaaatattggacctgcagatgcagcaagaaatcaaccgaaccatgaatgaaatgggtgaagcgcttgcgacgattactcaacaatttacccgcgattaccaagcgttaacgcgtgaaatgtcgaatgttgtaaacagtaaaattgcagtgtaa

SEQ ID NO: 13128 - DNA, 708 bp, Vibrio azureus NBRC 104587
atggaaaagttattcggaaaaacaaaatctacgggtgatagcggtgaacattggatgtcagtatcagatctaatggcgggtttgatgatggtgttcttgttcatttctgttgcacttatgcgtgatgctatggttgagcgtgacaaaataaaagaagtcgcagaaacttatcagaaaacccagcaggccatctatattgcgttgctagaagagtttgctaaagatcttgatacgtggggggctgaaattgatcgagatacgttgagtgtcaactttacttcacctgaagtactgttcggaaatggtaaggcgaatttaactcagcaatttcaggtaattttgaatgatttctttcctcgttaccttgaagtattagagcagtacaagccgattattcaagagattaaaattgaagggcatacctctagccgttggaatcacgattctagcgattacgaggcttacttcaataacatgcgtttatcacagtcacggacgcgtgcagtacttggctatgtaatgaagcttgatgatgttcgtgaacaacattatggctgggtaaaaaataacgtagcggcagtagggtattcttcatctaaagcagttgttaaagatggtgcagaagacgaaaaacattctcgtcgtgtgtcttttcgcgtgataactaatgctgaagagcaaatcttgaagattttgggggcggaatga

SEQ ID NO: 13129 - DNA, 1137 bp, Vibrio azureus NBRC 104587
atgaagctgacgcttaatcttcgctctctgatgggggccatagaaatgatggagccagaaaagaaaggcgtatttgtctgggaccatcaaatcactgaaaaaagcaaaatagatatagagcttgctcagggcaaagacgtagagctcaaagatgttgatattgattctggtttactaagctatcaaggaagacaagttctcctgtatataaaagaccatggtagcgccgttcagtcagttattaaaaacccatcaactggcaataaatatcatgtggctgattgttctaagttgaaatctatgcgtgcagaagggcgatttgaaagatatgtagttatcaatgatacatccggtgagtttcctatatctggtagcgggtattatggtcaaagtaaggaagagggttatgcaagattaaacatctgcaaattatgcttagggcaattgaattataagggctatagcagtggcggtcatcgttcgaagatattcaatgaatttgatatgccagaattctttgctacctatagctctttctttccgcatatgccgtctcgtctagctgagaccgctgagagtggctacagcgatgattggtcaaaaatatcctcccactatcgtgtagaaaagaactttgagtgtgaagaatgtaaagtgaacatgcgttctaaccgtgcgcttgtgcatgttcatcatgttaatggtgttaaatcagataacaggccgtcaaaccttcgtgcactgtgtatcgactgtcacagcaaacaacctatgcatgagcatatggctcttagccatagagagcgtcaaacaattaacgatttgcgtaaacagcaaggtttacttgatgacctcggtgagtggcaagagttgtttgattactcagatccaggtgtacatggcgtattgcatgcttgtcgacaagcgtatctgaaactccccgatattaactattttgttgaagacagtttcggagggttagctgcacggcttgaacttgcgtggccgaagcacaaatttggtgtcgcaatttcggccaatgatattgaagatggatttaaaaatggttggcaggttgtgagtgtgagtgactttttaaatgactataaatcacaagcacataacttgcggtactaa

SEQ ID NO: 13130 - DNA, 1653 bp, Pantoea sp. aB
atgctagcccagctttttgaacatttgtttcactctgttgattcaatgcttgtcactaatatttttatttgggccgttattttcgtatttttcagtgcctggtggtgtgaccataaaaatattcatagtaaatttcgtgagtatgccccaacacttatgggcgcattaggtatattgggtacctttatcggtattattattggattgcttaattttaatacagagagcattgataccagtattccagtattacttggaggtctgaagacagcgtttatcaccagtatcatcgggatgttttttgccattctattcaatggattagatgcttttttctttgccaataaacgtagcaaacatcagggaacacaaccagattctgtcactccggaacatatacaccgtgaattaaaagaacaaaatcagcatcttgaaaaactaatatcagggatgagtggtagcgaagagggctctcttgttgcacaaatgaaattattacgtaatgaaattaatgactcatctcgtgcacaaattacgaaccatgctgagtttagtaataagctatgggaacaattacaacaatttgctgatttaatggctaaaggtgcaaccgaacaaattattgatgccctccgacaagttattattgattttaacaataacctaacggaacagtttggcgaaaactttaaagcgttagatgcttctgttaaaaaactcgtcgactggcaagataattacaaaaatcaaattgaacaaatgagcgcgcaatatcaacaaagtgtcgaatcattagttgaaactcgtggggctgttgcaggtatctgggaagagtgcaaagaaatcccacttgctatggctgaattgcgtgatgtcgtgcaggttaatcaacatcagataagtgagctatctcggcatcttgatgctttcgttttgttacgcgataaagcaactgatgcggttcccgctatccatgaaaaactggaggaagtaggtgaactacttaaagctggtgcgctgagtgtaagttcctccttgggacaaacaggggctgaactactcaccaatgcgaatgctatgcggattgcactggatgaaggctctgaaggattcaggcagtcagttactcagacccaacaagcatttgcgtcaatggcacatgatgtaagcaactcttctgagaccttaacatcaacactgggtgataccattactgaaatgaaacaaagtggtgatgaattcttgaaatcccttgaatcacattctaaagaacttcaccgcaatatggagcaaaatacaaccagtgtgattgatctctttagtaaaacaggtgataaatttaatcagcaattatccaataatgcagacaatatgttcggaaccatgcagtcaacctttgacaaagcaagtgctggtttgaattcacaggtcaaagaatcagtagaacgttttggtagttccatcaatgaacagctacacgcttttgaacaagctactgagcgtgaaatgaatagggaaatgcaatcgttaggtaatgcgctactggcaattagccaaggttttgtcaaaaactatgatcaattgataaaagaatatcaaagtgtccttggccaattacaaccattaattaactcaagacaaaatcgtggataa

SEQ ID NO: 13131 - DNA, 708 bp, Pantoea sp. aB
atggataaaattattggtaagcagacccaaaaaaacacccaggataatgagcactgggtttccatgtcagacctgatggcaggtctgatgatggtatttatgtttatttctattgcttatatgcattatgttcgcattgaaaaagaaaaaataaaagaagttgctgttgcctatgaacaggcacagcaacagctttataatgctttagaaatcgagttttcaaaagatctaccttcttgggatgctgaaatcgataaacaaactcttgaagtaagatttaaatcaccagatgttctttttggattgggtagttcagaattaaaaccaaaatttaaagaaattcttaacgatttctttcctcgttatttgagagtgttagaccagtataagcaacatatcactgaagtacgtatagaagggcataccagtactgactggacgggcgctgctaaccaagatgtggcctattttaataatatggaattatctcaaggaagaactcgtgcagttttacaatacgtatacagtttaaaagaatcagaaactcaccaaaaatgggtaaaaagtaaatttgctgcagtgggatactcatcttcacatccaattcttgatgcagcagaaaaagaagatccaaatcgctcacggcgggttacgtttaaagttattacaaatgcagaattgcaaattcgtcgtattattcaggaatag

SEQ ID NO: 13132 - DNA, 1092 bp, Pantoea sp. aB
atgaagttaactattgatttttctgagttgattgcgttaggaaaaaaaatgcttccttctggtgctaaattttcccttgctgaagcacctgttgtcttcgacccaattgatattgaattatctgctggtaaagaagtcagtattgccgaccttgaccctggcagtggcttaatttcctaccagggtcgtcaagttcttttatatatccgtgatcataccggtcgctatgatgcggccactgaagatggtgagaaagggaaacgttttcatattgcttggtgtcgaacacttgacgaaatgcgacagaaaaatcgttttgagcgctaccatgcaacaaaccgtgttgatggtttatttgaaattgatgacggtttaggccgcagtcaagatgctgacttaagagtttgcatgaattgccttgagcgccttaattacaaaggtagtattgataaactacaaaaaagagtagtatttaaatcgttctcattgaataactttttctctcactacagtacttgcttccgtcatatgccaaaaggtattcatgataaagcaaacagtggttatgtagataattggaaagatatttctcgttctgttcgtgaacaggcagcttataaatgtaatgattgcggagttaatttaatctcctcacgccagctctgcgatgttcatcataaaaatggtgttaaatacgataattcaacagaaaacttgcatgttctttgcaaggattgccatcgcaagcaacctctccacgaaggaatatttgtcactcaagctgaaatggcaattattcaacgcttgcgatctcagcaggggttattaaaggctgattcttggaaagatatttatgagctaactgatccatctgttcacggtgatattaacattatgcagcacaaaggatatcaacctccggtgccaggattagacttacagaactctgcacatgagattattgcaacggtagaagcagcatggcccacattaaaaattgcagtgaatttaaccgaaatacaagtagaaggttgggaaatattcacagttggtgaactcgtaaaacagatacaatctggggttatattttaa

SEQ ID NO: 13133 - DNA, 1752 bp, Photobacterium leiognathi
atgaccgatatactcgctgacatcattgcctcatttagcgctgctgcaatttcagatgcatttatctacagcattttctttctattagtactctctggtgtactcgcctatgtggggagagcacctaggtttaccgcgagcactacaaatcttcttacctcactaggaatattgggtacttttgcaggtattgttgttggtttgatggagtttaatccaaccgatattgatggcagtatcgaatctttgcttgctggtcttaaaacagcgtttttaacaagccttgtcggtatggcgagctcaatcatatataaagctattcttggcactatcccgcaacgcgataaagaagtagttaaaaatgtaggaccggaagagattttctcagttatgtctgctcaacttaatgcttcacatgaattgttgtcggcgatcaagggtgatgaagactcttccttaacgtcgcagattaagaatcttcgaacagatatcaacgatggacaaaaatcacttagccgatacatggagagaacagcagataatagagaccaattccaaaagatgttatggcagaagatggatgagtttggtgatctgctatctaaatcagcaacagagcaagttattaatgcgcttaaagaagtaattattgagtttaatgacaaactaactgaacagtttggtgaaaattttaagcgtttagatgagtctgtgaagaagctagtcgattggcaagaaaactataaaaatcaacttgaagatatggcaaccaaatatcaattaggtgttgacgctatttcattaacagaaaagtcagtggcaagtatcaatgagcgcacagagtcaattccagcaacgatggaaaagcttcaccaagtgatggagttaggtcatggtcaagtaacggagttagaacatcgcttagaagcattcaaagatcttcgtgataaagcagtagaagcaatgccgcaaattcgcgagcaaatggataataccatgtctataattggtgaatcagttaaagcagcatcgacacattatgagtcaatgctgcaagagtcacaaaatattattgacaactttagtttaactgctgctcaaagtgtagaagtcatgagagtaaacctagaggaaggtgcggttaaagtatcgcatgagcttgaaaatagagcagtagagatcggtagtagcctcgccgcagcgtcaaatgatattactgaaaacgttacaactgcgtctggtgctcttcaaaacagcgcatcatatatagcgaacaattcagagcagatcaaacagcacttagaagatgcaatggtggaactaaatggtcatttacgtgttcttgttgcagacattaaagacgatgcacgagaaacgggtaatgttctaaaagaagcgaaccaagagttgctaaatagtacgaaggaaattcagtcagaaacaacatcagcgatcgcaaaacttcatgatcgcttagaaaccactttagaagaagtgttcaaggtgcaggctgaggcggtacgtagaacatttgatagcttagaagatcagatcactcagtcagtaggtagaactggcagtgcggtagagaaacaagtggaagtacttgatctgcaaatgcagcaagaaatcaaccgaaccatgaatgaaatgggtgaagcgcttgcgacgattactcaacaatttacccgcgattaccaagcgttaacacgtgaaatgtcgaatgttgtaaatagtaaaactgcagtgtaa

SEQ ID NO: 13134 - DNA, 708 bp, Photobacterium leiognathi
atggaaaagttattcggaaaaaacaaatctacgggtgatagcggtgaacattggatgtcagtatcagacttgatggcaggcctgatgatggtgttcttgttcatttctgttgcgctaatgcgtgaagctatggttgagcgtgacaaaataaaagaagtcgcagaaacttatcagaaaacccagcaggccatctatattgctctgctagaagagtttgctaaagatcttgatacatggggagctgaaattgatcgagatacattgagtgtcaactttactgcgcctgaagtactgttcggcaatggtaaggcgaacttatctgagcaatttcaagtaattttgaatgatttctttcctcgttaccttgaagtgctagaacaatacaaaccgattattcaagagatcaaaattgaagggcatacttctagtcgttggaaccaagattctagtgattacgaggcttacttcaataatatgcgtttatcacagtcacggacgcgtgcagtacttggctatgtaatgaagcttgatgatgttcgtgcacaacattatggctgggtaaaaaataacgttgcggcagtaggttattcttcatctaaagcagttgttaaagatggtgtagaagacgaaaaaagctctcgtcgagtgtcttttcgtgtaatcactaacgctgaagagcagatattgaagatcctgggggcggaatga

SEQ ID NO: 13135 - DNA, 1086 bp, Photobacterium leiognathi
atgaaactaacgcttaatcttcattcccttatgcgtgcgattgaaattatggagccagagagaagtggtaaattcactctggaacttcacgagactcacatcgataaaataacggcagaactagagaaaggtaaggatgtagagcttaaggatgtagagatagaatcaggtcttttaagttataaaggacgtcatgtcacactctatataaaagcgaatggaaccagtgctcgttttcatgtttctgactgttcaacattgcaaggtatgagggcaagtggaagatttgagcgttacgtggtcacaaacaatacttcaggagaattcctagttgatacctcctatggagagaaaaaggcgaggctaaaggtatgtcaaaactgtctacgtaagcttaattataaaggttgtaatacgacaacaaacataacgtcgatagttcagagctttaacatggcggaattttttgctacctatagttctttctttccgcacatgccgtcgcgacgagctgagaccgctgagagtggctacagtgatgattggtcaaaaatatcctcccactatcgagtagaaaaaaactttgagtgtgaagaatgtaaagtgaacatgcgttctaaccgtgcgcttctgcatgttcatcatgttaatggtgttaaatcagataacaggccgtcaaaccttcgtgcactgtgcatcgactgccacagcaaacaacccatgcatgagcatatggcactcagccacagagagcgtcagacaataaatgatctgcgtaaacagcaaggtttacttgatgacctcggtgagtggcaagagttgtttgattattcagatccaggtgtacatggcgtactgcatgcttgtcgacaagcgtatttgaaactccctgaaattaacttttttgttgaagacagtttcggagggttagccgcacggcttgaacttgcgtggccgaagcacaaatttggtgtcgcaatatcaatgaatgatattgaagatgcaaacagtaatggttggcaggtcgtgggtattaatgactttttggaaaattacaaatcacaagcttataacttaaggcactaa

SEQ ID NO: 13136 - DNA, 1527 bp, Parabacteroides gordonii MS-1
atgaatgattttataatatctttggcacactacattacgttgccaatttgtattggaacaatttcattggcattaatagtctgtattgcattaattttcttttggaagaaaaaaaatgagctacaaaagcggaagcggacagtggacctattcccgacttttttgtcaaccttaggagtattaggcactttttggggaattacaattgggttgtctgagtttaacactcaagatttagataaaagcattcccgtattattggaaggactgaaaaccgctttttatacttctctattaggtatgatttcatctatgattaccaattttatcatcaataaaatttacgataaatacgaagcagggcaaccaagtaatcaagatgaagcaacggctcgcatatgtgatgcagttgaatctatgaaccggcagaacgttgaagctatgcaggctttacttcaatccatgaatcagcaaacacagaatcaaacggctttttataacactttgttaaatcagattaatgtatttaatacagtcaaaatagatgaaatgacacttttaattcgctcacaagaaactcatctatctgcaattgcaagtaatggtcaacaaactataaataaattagatacacttaatgccaatatagaacatattgatgatcgcataggagagcaattggatatttcatccgcttcagcctctatcttacaagagacgcaagatgcgaccaagaaacttagcgaagttcttcgtgccgaagttgatgaaatagaaataaaaatgggagaaaccaaccatttgctaacgcaaaaatttgatgaatttgctgaattgctaaagaaaagtaatactgaagccttagttgaggtaatgaaacaagcaactttagaatttcaaaaccaaatgaatgcaatagtcagcaaattgataaaggaaaatttcgaacaattaaatcagagcgttgaaaaattgaatatttggcaacaagaaaataaacaaatgatttctgatttgacacaccaatatacaaagatggttacagaatttgaaaggacgtctaccgttctcactaatgttgcagaatatgcagctcaattaagtggaacaagtggtatgttggcaaaactgattaccgaattgcagaaagtaatgatagaagacactaaattctcaacgataacgactaaactatctgaaaccgtagatttgacaaaagataatatgattaagttcgatgattctacatcaaaactaaatgaatgggtaaggaagcaaaggaattttgttgatggtgtacagcttttaattaagaaattggaggaattaagttctatacgtgattacaataaagagttttggcaagatactaaaaaacagctggaagaaggggttgggttcattaaaaaaggtagtgacagtctgaatgcccaattaacggatttggataaacaattctattctaggctaagtgcaacattagctgaattagattcttgtatacaggcaatgattaaaagaaaataa

SEQ ID NO: 13137 - DNA, 702 bp, Parabacteroides gordonii MS-1
atggcaaagcataatgtttggatgtctgtgtctgacttgatgactggactaatggttatattcttatttgttgctattgcatatattagcagggtgaacaaaaacgcagatgtattagcacaatatatagaggcccgtcaaaatttgcatgataaattagtagacaaatttaaaactgatacagcaaggtgggaaatgacaataggaaaagatttatcattacgttttactaatccgaccgttctcttccaaacaggttcgtgggatttaactcctgcattctgtaatatattagaagaatttctacccaagtactttgatattttactaacagattcattaaagaataatattagcgaaattagaatagagggacatacagacccgacaccatttcctacattatcatctgacccgtacattgcaaatgtgattttatcacaacgccgttcattgagcgtattacagtattttcgttccatgcctacatttcaaaaatatacatcagaccaacaacggatgttggaatattggtttacagccaatggactatcttatggcaggacattggatagtcaaaaccatttgacgtatgagtccggcaattctattaattatgaaaaatcccggagagttgaattccggattattacaacaagcgaaaaaatgatagaagaatttgtgaagaaaattgctaaataa

SEQ ID NO: 13138 - DNA, 789 bp, Parabacteroides gordonii MS-1
atggagaaagaaaatccaatttatacattcccgaaattgaaaaacactttagaagagttgggatatcaaatagagaaagttgaggtctatcgtcctattaaacctgttgatgtttctataaaagacatcaaagatggaactatcgagattacggatggaggtattttttttaaaactcctgacggacaaaagcatgggggatttatgtataaaagggaatatcatttagcacaatatgggaaaccacgttttcacattcgtaattgcagaaccattcaagagtttaaggcacgaggttcgtttactgctgaatatcgttggagtaatgatgataaagtgcaagtttgcgatatggatgacaactatatagataagacggttaattttcttccgctatgtaaatattgtgccgaaattctaagaagcgaacaaagtgatgtctataaggataacgaagattttgtaaatgaattaaagaaagccactccacaagaaacagtgacagatgttgatgttttgggttacacaaaagagtggcaggatgtcagtaaacgttatagagaaaagcacaaatacacttgtgaacgatgtggcatccatattacaaatatttttgattatggctacatccattgccaccatcgtaatggcaataaaacagacaatcgtgaagaaaatctggaatgcttatgtgtaaagtgccactctaaagtggataagattcacgagattcgtttctctaaaggagcaaattatatttggttacaagactttttgaagaaatattag

SEQ ID NO: 13139 - DNA, 870 bp, Nitritalea halalkaliphila LW7
atgctgaaagcaataggaaaggacgaggaaactagcctcttaacacagcttcaaaaattacgcgcggaacagaatgagcatgcgaaagcacatgatgaacatattaaatggatcattgtatccatggcgaataatagagaaatcgttgagaaaaagtttaatgagttttcacagctacttgctaaaaataataccgaggcattagttgatgtcatgaaaaaagctactgaggagtttaataatcagatgtctgctttaataaacaaattggtgcaagaaaatttcgcagagttgaacaacagcgtaaagatgctaaatatatggcaggcagaaaataaagaaatgattcaagagcttacccatcaatttaaggtagtctcaaataatttctccatttcctcaatagctttaaaagaaatcacacacaatacgagcacattaacagacaaaaatagccagctggcgcaaattgtagaatcccttaaaaaagtaatggtagatgattccaaattctctgaaatcacgaatagtttagcaactacagttgaaacgttaaaaactaacacagaagccttcgatgaaacaacccaaaaacttaatcaatgggttaaaaaacaaagggacttttcggacagtgtagccaagttgcttgtccgattggaggatgtagaaaaaatcaaagacatcaatgagatattctggaaaaatctaaagtcacaacttcatgacgccattagcattattgaaaaatcaataaaagatttagacaatgaggtccagaccatacatggccatttctacaccaaactcaatgacacattccagaatctagataatcttatccagagaattatggccaagcataaatga

SEQ ID NO: 13140 - DNA, 750 bp, Nitritalea halalkaliphila LW7
atgaaaactatgtccctatcaaagagaagtaccaaaacagaggaaagcaactgggtatcattttctgatatcatgaccggcttgatggttatctttatgtttatcgccatctcctacattttagaggttcagaaaagacaggaagaacgaaatgaattatttgaagaatttcaagccacgaaagaaagtctatactttgctttggatagtgccttccgagatgattttaagaaatggaaagtagagctagacaaggatctatccatcaaattcactaatccagaagtcttatttgcttcggggcaaacagatatcagaccctattttagagaaatacttgatgagtttttaccacgatattttgatattattctgcaaaaaaaatatgtcgacaggatttccgaagtcaggattgaaggtcataccgaccaagtcccagcatttaactttgatgcggatccttacatagggaatattaagttgtcccaacttcgatctgctcaagtcttaaagcattttagaaatatgccctattttaagacactgccagacgagtcggtcagtctcttacagtactggttaaccgctaacggactatcctatggaagaacactggacgataataagcgcttgacaagtgaatcaggaatgcctgccaataatgagttttctagaagggtggagttcagaatcgtcacgacaagtgataaactcgtggaaaaagttattcaagagttaagagagaaatga

SEQ ID NO: 13141 - DNA, 789 bp, Nitritalea halalkaliphila LW7
atgagaaaagacctcaaagatatcgatctgtataagtttgaaaagctttcgaaagccttagatgaatggggctttcccaagatagacttcgaaagtggatttgaagtagtcaagggagtagactttgagcgtgcctataaggcaaacaatatacggtttgaggaagatggtatttacctagactataacggctactccattaaaggatacatgttcattcaggaaccatatttagaaaagtatcatatgcgcttacctaaatttcatgtggtcaagtgtaaggtgatttcagactttcttgataaagggcagttcaaagagcgataccatttctcaaattctgaaaaaaatgacctcactgacatcctgagtaaaaaggtgtaccctgatcaagaacttacactttgcgggtactgtaaaaaaataatcacacaggatatccagacaactaaggatttttatgatttactgggggattttgagcgaccaaaagatctagaagtagatattttcgggtatccaaaaggttgggatcaattaagttacgcctaccgccagaaacacgatttcacctgtcaggagtgtgggtttaagcccaagtccgcactggatcgccgttttatccacactcatcatattgatggatctaagaccaacaatgcagaacacaacttaaagtgtctgtgtattaaatgccattcgaatcaagatgagaaacacatgcagaacttcggatcgggaagtagagcactggacttaaaggagtttgaaaggaaatatcatatttaa

SEQ ID NO: 13142 - DNA, 1245 bp, Vibrio sp. RC341
atgaatcgttatttggagcaagcagccatagacagtagcaattttcaaagcaaactgtggcagaagatggatgagtttggtgaccttttatcaaaatcagcaacagaacaagttattaacgctttgaaagaagtaatagttgagtttaatgacaaattgacagaacagtttggtgaaaacttcaagcgtttagatgagtccgtcaagaagctagttgactggcaagaaaattacaaagcacagctagcagatatggcaatcaaatatcagatgggagttgatgccatttcatttactgaaaaatcggttgcaagtattagtgaacgtacagaagcgatcccagcaacgatggaaaaactacaacaagtgatggagtttggtcacgagcaagttattgagcttgaacatagattagaagctttcaaagatcttcgtgataaagcgattgaagcaatgcctcaaattcgtgaacagatggataataccatgtcggttatctctgaatctgttcaagccgcatcaagccactacgtagcaatgctgcatgagtcgcaaaacataatcgagcaatttacttcaactgcgaatcaaagtgttgaacatctacgcatgaatttagaaactggtgctgaaaaggtatcccaacagctaattgaaagctcacatactttaagtggcaaactagcagaagcgtcattagatattcaggaacaagtcggtactgccactggtggtttaagcaatgttacgagtcacttgactgatacaacagaacagatccgccaacatcttgaagattccatcactgagctaaatggtcaattacgtgtacttgttgcggacatcaaagatgatgctcgtgaaacaggtaaagttttgaaggatgcgaatcaagaactaatcattagtacgaaagaggttcaatctgaaatgacttcggctaccactaagctacatgaacgcttggaaacaacgttggatgaaatattcaaggtacaagctcaagcagtgcgtagaacattcgatagtcttgaagatcagattacacaatcggtaagtaaaacaggcagtgcagtcgaaaagcaggttgaaattctagatctacagatgcaacaagaaattaatagaaccatgaatgaaatgggagaggctctggcaacaatcacccagcaatttactagagattaccaaaagctggtcagagaaatgtcaaacgtggtcaatgcaagtagagctgcagtgtaa

SEQ ID NO: 13143 - DNA, 654 bp, Vibrio sp. RC341
atgtcagtatcagatctcatggctggtttgatgatggttttcctctttatatctgtagctttaatgcgagatgcagtggttgagcgtgacaaaataaaagatgttgctgaagcttatcaaaaaactcaacatgcgatttatgtttcactattagacgaattttccaaagatcttgaaaagtggggagcggagatagatagagatacgctaagtgtaaattttacagctcctgaagtgctttttgctaatggtaaagctgatttgacgcagcaatttcaaatcattctcaatgacttttttcctcgttatcttgaagtccttgaacagtataagccaacaattcaagaaattaagattgaagggcatacctctagtcgttggaaccatgattcaagcgattatgaagcctatttcaataatatgggtttgtctcagtcacgaacgcgtgctgttcttagctatgttatggctattgataaagtgagaataaatcattacggatgggtaaagaataacgttgcagctgttggttattcatcatcgaaagcagttattaaaaatggtttagaagatgaaaaacgctcccgtagagtatcgtttcgagtgatcacaaatgcggaggcgcagatcttgaaaatactgggggcagaatga

SEQ ID NO: 13144 - DNA, 1119 bp, Vibrio sp. RC341
atgaagttaactctcaatctactctctttgaaaaatgctatcgccgaaatgaagcctgatgaaaaaggcatatttgcgtgggtacgcgaagtcacaccgataagtaagattgattatgagttagcacaaggtaaggatgtcgaactcaaagatgttgatattgactcggggctgctcagttacaaaggtagacaggttcttttatatataaaggatcatggttcaatgactcaatctgcaatcaatattccatattcaggtaagaaattccatcttgcagattgttcaaccttgaagaacatgagatcgaaaggactatttgaaaaatacgttgcgactaatgatacatcaggggaatttttgatttctggagatgggattgaagggaaagcgatattgagggtctgccaaaattgtcttagcactttgaactacaaaggatggtctacaggtgaagagcgtagcaaaatacttaataattttagtatggcagaattcttttcaacctacagttcgttttttcctcacatgccttcaaggattgctgaaacagcagaaagcgactatgcaagtaattgggccaaaatttcttctcattatagagttgaaaaaaattttgaatgtgaacaatgcggcgtgaatatgcgttctcatagagcacttttacatgttcatcatataaatggtgttaaatctgacaataggccttcgaatttaaaagcactttgtattgattgtcatagtaaacagcctatgcatgaacatatgactctgagtcatcgtgagcgccaaactatcaatgatatgcgtaagcagcaaggccttttagatagattaacgacatggaaagaattgttcgattatgctgatcccggtttacacggtgttatatatgcatgtagagatgctggtttaaaattaccggaagttaattatttaataaaagatagttctggtaaattagccgcccatctggagttagcatggcccaaacataagtttggtattgctatatcagaaaatgatattaatgatgctagaagcaatggttggagtgttgtgggaatgaatgagtttttagataactacaagtcacagtcttacaacctcaaattctaa

SEQ ID NO: 13145 - DNA, 1755 bp, Vibrio sp. RC586
atgacaaacgcattggcaagctttatagcatcatactccgcagcagcaatttcagacgcatttattattctcattgtacttcttttggttttgtcgacggcattggcttacaaagggaaagcaccaagatttacctcaagtacgacaaacattttaacatcacttggtatccttggtacttttgctggaatagttgtcggcttaatggagttcaatccgtcgaatattgatgaaagcatagagtctctattagcaggtcttaaaactgctttcttgacaagcctcgtgggcatggcggcttcaatactatacaaagctttcttaggcttgatttcacagaaagagaaagaagttataaaaagtgttgggcctgaggaaatctattccgttatgtctgcacaactgaactcgtcacaagaactgttgacagcgataaaaggggatgaggactcatcattgacatcgcagataaaaaatctccggattgacattaatgatggacaaaagtctatgaatcgttatttggagcaagcagccatagacagtagcaattttcaaagcaaactgtggcagaagatggatgagtttggtgaccttttatcaaaatcagcaacagaacaagttattaacgctttgaaagaagtaatagttgagtttaatgacaaattgacagaacagtttggtgaaaacttcaagcgtttagatgagtccgtcaagaagctagttgactggcaagaaaattacaaagcacagctagcagatatggcaatcaaatatcagatgggagttgatgccatttcatttactgaaaaatcggttgcaagtattcgtgaacgtacagaagcgatcccagcaacgatggaaaaactacaacaagtgatggagtttggtcacgagcaagttattgagcttgaacatagattagaagctttcaaagatcttcgtgataaagcgattgaagcaatgcctcaaattcgtgaacagatggataataccatgtcggttatctctgaatctgttcaagccgcatcaagccactacgtagcaatgctgcatgagtcgcaaaacataatcgagcaatttacttcaactgcgaatcaaagtgttgaacatctacgcatgaatttagaaactggtgctgaaaaggtatcccaacagctaattgaaagctcacatactttaagtggcaaactagcagaagcgtcattagatattcaggaacaagtcggtactgccactggtggtttaagcaatgttacgagtcacttgactgatacaacagaacagatccgccaacatcttgaagattccatcactgagctaaatggtcaattacgtgtacttgttgcggacatcaaagatgatgctcgtgaaacaggtaaagttttgaaggatgcgaatcaagaactaatcattagtacgaaagaggttcaatctgaaatgacttcggctaccactaagctacatgaacgcttggaaacaacgttggatgaaatattcaaggtacaagctcaagcagtgcgtagaacattcgatagtcttgaagatcagattacacaatcggtaagtaaaacaggcagtgcagtcgaaaagcaggttgaaattctagatctacagatgcaacaagaaattaatagaaccatgaatgaaatgggagaggctctggcaacaatcacccagcaatttactagagattaccaaaagctggtcagagaaatgtcaaacgtggtcaatgcaagtagagctgcagtgtaa

SEQ ID NO: 13146 - DNA, 654 bp, Vibrio sp. RC586
atgtcagtatcagatctcatggctggtttgatgatggttttcctctttatatctgtagctttaatgcgagatgcagtggttgaacgtgacaaaataaaagatgttgctgaagcttatcaaaaaactcaacatgcgatttatgtttcactattagacgaattttccaaagatcttgaaaagtggggagcggagatagatagagatacgctaagtgtaaattttacagctcctgaagtgctttttgctaatggtaaagctgatttgacgcagcaatttcaaatcattctcaatgacttttttcctcgttatcttgaagtccttgaacagtataagccaacaattcaagaaattaagattgaagggcatacctctagtcgttggaaccatgattcaagcgattatgaagcctatttcaataatatgggtttgtctcagtcacgaacgcgtgctgttcttagctatgttatggctattgataaagtgagaataaatcattacggatgggtaaagaataacgttgcagctgttggttattcatcatcgaaagcagttattaaaaatggtttagaagatgaaaaacgctcccgtagagtatcgtttcgagtgatcacaaatgcggaggcacagatcttgaaaatactgggggcagaatga

SEQ ID NO: 13147 - DNA, 1119 bp, Vibrio sp. RC586
atgaagttaactctcaatctactctctttgaaaaatgctatcgccgaaatgaagcctgatgaaaaaggcatatttgcgtgggtacgcgaagtcacaccgataagtaagattgattatgagttagcacaaggtaaggatgtcgaactcaaagatgttgatattgattcggggctgctcagttgtaaaggtagacaggttattttatatataaaggatcatggttcaatgactcaatctgcaatcaatattccatattcaggtaagaaattccatcttgcagattgttcaaccttgaaggacaagagatcgaaaggacgatttgaaaggttcgttgcaactaatgatacatcaggggaatttttgatttctggagatgggattgaaggaaaagcgatattgaggatctgccaaaattgtcttagcactttgaactacaaaggatggtctacaggtgaagagcgtagcaaaatacttaataattttagtatggcagaattcttttcaacctacagttcgttttttcctcacatgccttcaaggattgctgaaacagcagaaagcgactatgcaagtaattgggccaaaatctcttctcattatagagttgaaaaaaattttgaatgtgaacaatgcggcgtgaatatgcgttctcatagagcacttttacatgttcatcatataaatggtgttaaatctgacaataggccttcgaatttaaaagcactttgtattgattgtcatagtaaacagcctatgcatgaacatatgactctgagtcatcgtgagcgccaaactatcaatgatatgcgtaagcagcaaggccttttagatagattaacgacatggaaagaattgttcgattatgctgatcccggtttacacggtgttatatatgcatgtagagatgctggtttaaaattaccggaagttaattatttaataaaagatagttctggtaaattagccgcccatctggagttagcatggcccaaacataagtttggtattgctatatcagaaaatgatattaatgatgctagaagcaatggttggagtgttgtgggaatgaatgagtttttagataactacaagtcacagtcttacaacctcaaattctaa

SEQ ID NO: 13148 - DNA, 1278 bp, Bilophila sp. 4_1_30
atgacagatatagaaatttttttagctgcaggtgcatcacctagtaatatcattttttcattaatgattggtggaattgcgataactggtattattctttctgtttttcgaaagctagagcgagttcgcgattttttaccttcactctcggtatcctgtggcatttttggaacattttggggaatttttataggactttctggttttgatacagcacatatttcagaaagtattccaacgctacttgagggaatgaaaacagccttttttacttcccttattgggatgtctgtgtctttatttttaaaatttatttataatctacgtgatgatataggtgagaaaggttctacagatcctgcaaaatgccttcaaaatatagaaatttattcatctgaaatcagagaaagtataaacaagcttgaggaaacgataggaagatgcttccgctctgacgaagaatattctttagtttcacaagttaaattaattcgtcaagaattaatagatagtcgtaaagaaactaaaaaagcttttgaagagtttgctgaaaagttttcaaaaatggcatcagaatcattaattgacgaattaaaacgtgtagtagataaattcaatacaatgctaaatgatttagtaagccaatcttttcaagatttgaaggattcaacagaacgattgaatacttggcagtctgaatataaagaaataatcacacaaaaccatgaaaatctttcctctgttcttatacagctttcttcattaaatactgtttacaatcaatctattgacagaattatggaactttcagagcagattgctactataaatacaaaactccattctatatctatttcaggtcaagagctttctcttcatagtagtcaattaacagagcaaaaccaacttctggatgcatccattcatgccatcaaggatgcaggagaaaaggctgcaactgtcgttcctgaaatttccaaaaatatgaatgcgatcacagatcaaattcaaagattacaagaagaaactaacgacttcatacgtaaggcgactatggagcttcaggcacacgcttcagaactctcgcaagcttcacaaaaacaaattgaatcgattgaaaagtcattggaagaagaattgcgaaaatcccttgaatcctttgcaggtgcaatgatagctctttcaaacaaatttgccagtgattataccccattgacggatcgtttgcgtgaggttgtcaggatagcggagaggatgaacaatgcttcgcttaactaa

SEQ ID NO: 13149 - DNA, 711 bp, Bilophila sp. 4_1_30
atgcttcgcttaactaaaatagaagatggagaacattggtcatctatttcagatcttatggccggactgatgatgatttttttgctaattgccattgcctatatgcataatatcgcacaagggcagcaaaaaataaaaaagatcgctgtgacttatcacgaagcacaagtcgctttatatgaaaaattgaatgaagaattcaaggaagatctccccaaatggcaagcgatcattgataaagaaactctttctatacaattttttgagccagatatacttttccaaacaggtaaagctgatgttactccaaaatttaaagacatactagataatttttttcctagatatttaaatatcattttttctgacgagtttaaagacacaattgctgaagttcgtattgaaggacatacatcttctgaatggagtacaggaacaagttctccagatgaagcatactttaacaatatgcaactttctcaagaaagaacgcgctctgtattggtttattgttattctataacacaaaaaaataactataaaaatttaatgcaacagcatgtaacagcgaatgggctttcatcaagcaaacttgtttataatgatgatggtacagaggataaagcccgctctcggcgtgttgaatttcgaacaagaacaaacgccgaaaatagaatcgttcaaattcttgatgagttgaaaaatgattaa

SEQ ID NO: 13150 - DNA, 882 bp, Bilophila sp. 4_1_30
atgattaaattacctgatttctctgcatgtgttgaagtaaaacatcttctacaaaaaatgggggtcatcaaaattcctgaattacctgacgtagagtttgttaaaactcgtgttaaaatcgtagagacaattgtacctaatacagagcaattgcaatttgctgaaaaaatcaaactaaaagctgtttcacttgcacatgaaacttttacagtagttaaagatgagacacttgaagttaatggcgtaaaatgttgtatttacattaaaaaccaaagccaaggcgtaaatccttataataaaacatcaacatataaatttcatttatgtaattgtaaaacaattcaagatatggtcttaaaaggtagaaaggatagatatgttgctacatctcgtgcagatggtatattccctgtaaatgctcagaattattacaaagaaattctagtatctttagaactttgtaaaaattgtagagatattttaattcataatgggatgtataaagaacctttttccttaaaaaatttctatgaagaatatcaacctgatatcccaaaaacatttaggcgaacagaacaagtaccaataacagaaaaatatgctccggatcacactgaacgcgctaataaatacaaacaatctattcactataaatgtcaaggatgtggtgtcgactgctctcaacaccgctcttatcttcatatgcatcatgtgaatggagaaggtacagataataagcgaagcaatttaaaaattctttgtgtgatatgtcatatggaacaaccctttcatgatcatatgaaagggaatcctcgatttcaaaaagaagcccaaatcgtaaggcaactccaaaaagaacaagggatatttaccgtaatctga

SEQ ID NO: 13151 - DNA, 2040 bp, Vibrio caribbeanicus
atgacaaattcaattgcttctttcattgcatcattctctgctgatgcaatctcaaatgcttttatctacttaattctttctctacttgctgtctcagttgtattggccgctgtaagtaaggccagtcgctttaccgctgccaccacaaacatactcacttcattgggtattttaggtacctttgcaggtattgtggttggtttgatggactttgatccaacgaatattgatggaagtattgaatcactgttgagcggtttgaaaactgcgttcctaactagtcttgtgggtatggctgcgtcaattctatataaagctattttaggggcgttacctaaaaaggatgtagacgcccagcaggcggtgggcccagaagagattttttcagtcatgtcacagcagctaaaggcttcaacggatcaactgaatgcttctaatgaactcattgccgctattaaaggtgatgaagattcttcactgacatctcaaattaagaacctacgtactgatatcaatgacggtcagcgtgcattgaacgagcagttcaagcaggttaacgataatcacaatgagtttaaagagacgctatgggccaagatggatgagtttggtgacttattgtctaagtctgcaactgagcaggttattaacgcgctaaaagaggtgattgttgagttcaacgataagttgacagaacagtttggcgaaaacttcaagcgattagatgagtcggtgaaaaagctagtggattggcaagaaaattaccgagttcagttggaagatatggcgaccaaatatcagcttggtgtggatgcaatttcttcgacagaaaagtctgtagcgaacatcaatgagagagctgaatctatccctgcaacaatggagaaactgcatcaagttatggagctaggtcatggccaagtaaccgagttagaacacagacttgaggcatttaaggacttaagagataaagctgttgaagcgatgcctcagattcgtgagcaaatggatactactatgtcagttattggtgactcagtaaaagcggcatcatcacactacgagaatatgcttcatgaatcacaaacaatcattgataactttagttctactgcgaaccaaagtgttgaagttatgcgtactaaccttgaagagggcgcaactaaactagcgaaagaattgactacaagcgcagaaaaaattagccaccagctagccgatgcgggtgaagactttgttcaagttactgaagacggtgttgaaggcattaaggagagcttcgaagtaggcgttaagaaaattgcggaagaattggatagtactaccaaagaaatttcgaccacgttaagttcttcttctgagcagttcgcagcatctacagaagaaagcatgaatacgatgagaagcaatctagagtcaggtgctcaggatatttctgctcagttaaaagagagtgctcaagacatcggtggtaagcttgctgaggcatcatctgatatccaggaacaagtaggcactgctacaggcggtttaagcaatgtcactaatcatcttacagacaccactgaacagattcgtcaacatttagaggattctataaccgagttgaatggtcagttgcgagttttagtagcagacattaaagatgactcaaaagaaactggacgagtgctgaaagaagcaaaccaagatctgcttgcaagcactaaagaaattcagcaggaaacaacaaatgctattactaagcttcatgaacgtttagaaacaacgctagaagatgtcttccaagtacaagcccaagcagtacgcagaacctttgatagtttagaagaccaaattacggatgctgtcggtaagacaggcagtgcagtagagaaacaagtagaagtgcttgaccttcaaatgcagcaagagattaaccgcacaataagtgaaatgggtgaagcactcgcaacagttacgcagcagtttacacgtgattataaggctctggtacgtgaaatgaataacgttgttacaagtagcaaaatggcagtgtaa

SEQ ID NO: 13152 - DNA, 711 bp, Vibrio caribbeanicus
atggataaggttttcggaagttccaaaaagcacagcgatagtggtgagcattggatgtctgtatcagacctaatggcaggtttgatgatggtattccttttcatctccgttgctctgatgcgagatgcaatggtcgagcgcgataaaattaaagaagttgctgaaacttatcaacaaacccagcaagcaatttacgttgcactctacgaagagtttgaaaaagatttaataaagtggggggcagagatagatcgagagacactgagcgtaaactttacagctcctgatgtactgtttgcaaacggtcgagctgatctaaatgaaaacttccaacagatcttggatgatttcatccctcgctatttgtcggtgttagatagctataagccaattatccaagaaattaagatagaaggtcacacgtcaagtcgatggaatcatgattcgaccgattatgaagcgtactttaacaatatgcgtctatctcaatcacgaacacgagcagtattaggttacatcatgagcttggaaccagttgtggtagaacattaccactgggttaagcaaaacgtagcggcggttgggtactcttcctcaaagctaaccttggataaactgggcaatgaagatgaacagaagtcccgacgtgtatcgttccgcgttataactaacgcagaagaacaaattcgtaagatcttggaagaggtttaa

SEQ ID NO: 13153 - DNA, 1137 bp, Vibrio caribbeanicus
ttgaaactgagtattagcttcaaaaacctaaatgctgccattgagttaatggagccaaaaaagaaaggcgactttaacctagagtttgtcgaaaccagtattgagaagctggacttggagctggctaaaggtaaagacgttgagctaaaagatgttgatgtagattcagggttactgagttataaagggcgtcaggttcttctgtatatcaaggaccacggttcggttgttcagaatgtaattcgcaaacctgaaacaggcaataagtttcacgtagccgattgttcaaaacttaaatcgatgcgttcagaagggcgttttgaacgatatgttgtgataaatgatacatcgggtgagtttcctatttcaggggcgtcatactatggtggccatcaagaagaaggaaaagctaagcttaagatttgtaaattctgcctaggtcaactgaactatcagggatactcgtctggcaacgatcgacatgcaatctttgatggattcgatatggctgagtttttttctacttacagctcattctttcctcatttaccttcacgtcaggctgagacggcagaaactggttatagtgaagattggtctaaggtttcgtctcattaccgtgtagataaaattttcacttgtgagcaatgcaatgtgagtttaaaggcacatcgtcacttattgcacgtccaccatatcaatggtgttaaatcggacaacaggcccaagaacttaaaagccttgtgtatcgactgtcatagtaaagagccattgcactcacatatggctgtgagccatacggaaaggcagttaataaataagcttagaagtgagcaaagcttgttagaagatttgggtaattggcaaagtctatttgattatgcagatcctggtgtgcacggtgttctacatgcttgtaaacattcacatttgcgtatgcctgaaataaaccactttgttaccgaccgatttggtgacttttcggcaaggcttgagttagcttggcctgatgttaagtttggcgttgcaatttctgaacacgatattgaagacgcaagggaatctgggtgggaagccgtaacagttaatgattttcttctgaactatcgtacacaagccaactacctgagagcttaa

SEQ ID NO: 13154 - DNA, 1977 bp, Photobacterium aphoticum
atgacagaaatcattgcatcacttatttcaaatctagactccgatatgatctcggatttgtttatttatttgattttattcttatttgtcttttcgataatgctcgggattaaaggtaaaggcggtgcttttaccgcgaacacacctaacttacttacttctttaggtatccttggtacgttcgttggtattgtttctggtttgatggatttcgatcctaaaaatattgatggcagtattgagtcattgttaggggggctaaaaacggctttcttaaccagtttaatggggatggcgacgtctattctgtataagggggtagatggtttcattaatcggaaagaagaaactgaagatgttcatgatattgggccagaacagattcaccgtgtcatgatgaagcaacttgaagcctcggaagaaattattaaatccatccgtggtgaagaagagtcttctcttgggtcgcaaattcgtttgctacgttcagatttaaatgacggtaataaacagttagttaagttagcccaatcagcagaagtaaaacatgatgaatttcagttaaagctttggcaaaagatggaagagtttggtgatttgttgtcgaagtctgcgactgagcaagttatcaacgcactgaaagaagtgattgttgagttcaacgataaactcacagagcagtttggtgaaaactttaaacgtcttgatgaatcagtgaaaaagctggtggactggcaggaaaattaccgtcatcagctagaagatatggctgaaaaatatcagttgggcgtggatgcgattgctttgactgaaaaatcagtggcgagtattaatgagcgtgctgagtcgatccctgtaacgatggaaaaactgcatcaagtaatggagttaggccacggccaggtgacggagctggaagagcgcttggaagctttcaaagatttgcgtgataaagcggttgaagcaatgccacagatccgtgaacacatggatgagacgatctctactatcggtcaatctgtgcaagctgcatctactcactatgaaagtatgttggcagagtcgcagcgtgttatcgacagctttagtcaaactgctgataccagtatcaacaccatgaaaactgagattgaaagtggtgccaataaggtatcagaagaactagtacgtggcgcacaggaaattggcggtaagcttgtagaaagtgctacggaagttaccacgactatcggtcaatcagtagaagctgcgtcaacgcattatgaaggcatgctgactgaatctcagcgtgtgattgataacttcagccaagctgcggacaccagtatccataccatgaagactgaaattgagagtggtgcaaataaggtttctgaagagctaatgcgtggtgcacaagacatcagcggtaaattgactgaaagtgcgcaggacatcaccacaaacgtaggtagtgcatcgggtgcactgaatgaaacggctaaccatatttcaaataccactgaacaagttcgtcaacatctagaagatatgatggttgaactaaacggtgagattcgagccctcgtttcaggcataaaagaagattcagctgaaaccggtcgtattctgacaacagcaaataatgatttagtgcgagatacgaaagccgttcaagacgcaacacagtatgccattacacaaatgcagcagcgtcttgaaacgtcgctggaagaagtcttccagattcaagcgaaggcagttcaacgtacttttgacagtttagaagaccaaattacctcaagtgtcggcaaaaccggtagtgctgtagagaagcaagtggaatatcttgatgaacaaatgcagcaagaaattaaccgcacgatgaatgaaatgggccaagctttggccacaattacacagcagttcacgcgtgattatcagaagctggttcgtgaaatgaataatgtcgttagttcagcacagatggctaattaa

SEQ ID NO: 13155 - DNA, 708 bp, Photobacterium aphoticum
atgaaacaggtatttggagcaccgacaaaaacatcggaaggggatgagcattggatgtccgtgtcagatttgatggcaggactcatgatggttttcctgtttatctctgtcgcactgatgcgtgatgccatgttagagcgcgataaaatcaaagaagtcgcggtgacttatgaagaaaaccagcaggcgatttacctcgccttgctggatgaatttgaaagcgacttacaagagtggggcgcagagattgatcgtgacagtttgagttttaacttcacggcacctgaggtgctgtttgcgaatggtcgagcttcgttgactgtgcaatttcaggatattttgaatgacttttttccgcgttatttacacgtgttgaatgcctataagccaagtattcaagaggtgcgtatagagggacatacgtccagtcgttggaatcatggctcatcagacagtgaagcgtactttaacaacatgcgtttatcgcaatcccgaacgcgaacggtattgagttatgtgatggatttaacgcctgtgaaaacggaacactatgattgggtgaaaggccatgttgcggcggtaggttactcctcatcaaaaatcattattgatgatcatggcgtagaagatgaaaaaaaatctcgccgggtatcattccgtgtcattaccaatgctgaaacccaaattcgtaaaattctgggggggtaa

SEQ ID NO: 13156 - DNA, 822 bp, Photobacterium aphoticum
atgcgtgcgagtggacgctttgaacgctacgtagtgactaatgatacctcaggtgaatttaccgtcgccaatagctatggtgaggaaacgcgtgcgcgcctaaaagtgtgccaaaactgtttgcgtcagttgaattataaaggctgtaacacaggggtaagtatttacccgattgtgcaaaattttgacttgaatgagttcttttcgacgtacagttcctttttccctcatatgcctcagcgacaagccgagcatgcacaaactggctacaccgatgactggcagcgggtatcgtcacattacaaggtctctcaggcatttacttgtgagtcttgtcatgtcgacttgaggaaacatcgtttgtatttacatacgcaccatattaatggcgtgaaatcagataatcgaccgactaatttacaagcattgtgtattgactgtcacagtaagcagcctttccattcgcatatgatacttagtcatgccgagcggcagttgataaaccaattacgtcgtgatcaagggatcttagacgatcttggtgagtggagagagctgtttgaatatgttgacccaggtatccatggtgtgctgcacgcttgccgcacagagcattatcaattacctgaagtggggtattacatagagaatgactttggtgaaattggagcaaaaatcgaacttgcgtggccagggcacttttttggtatcgctatttcggcagatgatatagccgacgcgcaaagttgcggttggacggtagtcagtgccgcagagtttttggcaaattataagcggttagcgcataacctaaggtattga

SEQ ID NO: 13157 - DNA, 1686 bp, Moraxella macacae 0408225
atgaaaatatttgatgcgatgattagtggctataacttgccatttaccatcattatgcttgctttatttctaggggcggttggtattgttttcaagcgcaatgcaagtaaaacatgggtagattttgccaatgccatgccagccatattaacttccattggtatttttggtacgttttttggtattgtcattgcactgcttgattttagcgacaataacattcgtgagcaaattcacgtgattattagtggcatgcaaacagcctttatcaccagtgtgcttggcatatttttatctattttactaaaaattattttgatttttaaaaacaatcaaaacgaagatgttgataatatcaacgccgaagaattgctccagcggtttataaaacagaccaataccaccgataaaatattaacccaacacgaaattactgtcaaaaaattagacgaacttatcaatgccatcgggcgtgatggtgataatagcatggttgggcaaattcgcctgatgcgtgccgatttttcggataatcataaagccaattatacgctttttgataagcaaacaaaagctttggtgtatttgtataatattgcaaagcaaaatcagcaggaaaaacaagcttttgaacaaaaactttggcaacaaatggagtggatgaatgaaaatcttgccaaatccgccactgaaaaaattgctgaatcgctgaacaaagccttgatggtattggttgaaattgcagagaaaaatcatgaagaaagacaggtttttgagcgaaaactttggcaacaaatgcaccaagttaccgaaagtctttctaaatccgctaccgaacaaatcattgaatcgcttaatcaagttattcgtgattttaacgacaaaatcaccgagcaatttggcgagaattttaaacagcttaatcaagcggttggtcatttattgcagtggcaagaaaattataaacagcaaattgagcaaatgattgcccagtacgagttgggggtaaaagccattgatttgactaaaaattccgttgccaatattgaacaatccacaagtgtgattccaaatcacatgaatgaattaaacgccgtcattcaattaaaccaaaccaatctaaacgcattaaccaatcacctacaagcattttctgacatgcgtgaaaatgcggtgcaaagtttgccggaaattcaaagtcatatcgcccttatgttagataatatgcaagaaggaagcaattatgtaacccacgcctttgatgaagtccaaaatactttaacagacaccgcccaaacttttgccaaagagacgcaaaacagcaacaatcaagtgaaagccgtggcaaatatgattgaaaattggcatcaagattttgctcattcattacaattgctgcaagataattttagcgaaacgctgcaaaatatggtcaaagagcaacaaaaatccaatcaaaccatacaacataaccttgaacaaatttctgaacaatcatggaatgacactgccgaaaaaattgaaggcatcttaagcgaaagccacaaaggcgtgcaacaacagcaaaatgaagccttaaaatccatgggtcaatcactcatttctatcacccgtcaatttaccgatgattatgcaagattggtgaatgccatgaatgatgtgattaacagaaatgggggcagataa

SEQ ID NO: 13158 - DNA, 693 bp, Moraxella macacae 0408225
atgttaaacgccctgttaggtaaaatcacagataaaaaagatgacggcgagcagtggttacccatttcagatttaatgagtgggctgatgattttgtttttctttattgccatttcattgattttggaaacccaaaaagtggtgatttcttatgaagaaaatcaacgagccatttataatgccttaatgcaagaatttcaaaaagatttacccactttaggggcggaaattgacccaaaaactttgacctttatttttaaaaatcctgaaattttatttgaaacgggcaaatctaatttaaagccaagttatcaacaaaccctgaataatttttttccacgctatatgaaagtggtttatcaatacaaacacgccattcaagaaattcgcatcgaagggcataccagcagtgaatggacagcaggcgttgatgagcatacggcgtattttgaaaatatgcgcttatcgcaagacagaacacgagcggtgttgcaatatgtgtattatatccgtggcattgaacaatatcgtccatggattaaacaaaatttggcttcggtgggtttgtcatcttcaaaagccattgtgattaacaagcaagaagataaagaacaatccaaacgggttacttttcgcattatcaccaatgctgatgaacaattgcaaaatttggctaaggaatatgcacggtga

SEQ ID NO: 13159 - DNA, 846 bp, Moraxella macacae 0408225
gtgaatttggcagagattcttgataaattacaacaaaatgccttaaaagtaagccaaaatttggtggattatgagccgatggtgaatagcgagctggatattaccattaaacagctaaaaagccggagtggtattgagatatcgcttgaagacattgaattacaaggcaatgtttggacttataaagggcatcatgttttattgttcattcctgatcagggttttggtgttgataaagtcattgctggtaacaaagagggcagaaaatatcatttaaccgattgtaaaaagatagatgagatgaaaacagaggggcgttttggccgctataaagttaccaataacaccgaggggatttttgcagtgtatggcagacactctgaaactggagaaaccatgcatgccgaagtgcgattaaatgtttgtaaactctgccttggacgtttaaattatcaaggttatcctaaaaacaaagttcaagtttataataactttgacttagatgaatttcttgaaacttatcgcacgcattttaaaaccacccccgccaatattggacaagacaaagcaggttatgccaataattgggaagagatttctcaccgataccgcgaacgtcaagcctggcgttgtgaacagtgtcaagttgatcttagcaatcacaaaagtttattgcacacgcatcacattgacggcgtaaaacatcacaataaagatgccaatctaaaagcactgtgcatagaatgccacagcaaacagcccagtcatggacatatgcgtgtttcttacaaagatgggcagttattacaagacttgcgtcgtcagcaaggcatttttagatactaa

SEQ ID NO: 13160 - DNA, 1224 bp, Lacinutrix sp. 5H-3-7-4
atgcacgaaataggaatatttgaaatagaaaataatactttaatatttatttgtaagaaattaccttggtatatattaatagcttggtttttatacgctacactagtagtgatattttcaaataggttaaaaaaaattagtaactattatcttatcgagagcataccatctatgttcgttactttaggtttattaggtacatttttaggtataagttatggcctaataaattttaatacagatcctggtgctattaaggatagtataaaagatttattagaaggtttaaaaacagctttttatacttcgatatttggtattacattttctctaatttttaaaatgataataaattataaacttaattcgggtagtgttgcgcatcctgatgatttgaaagaacaggatttatactcaagtatgaacaataatttaattgctatcagagagcaaacaaaaagctccttaatttctctaaatgacataaaagacaataagcttaaaaatatatctgaaggcactgaaggattagctctcaaattagatcaattttttaatgatatggccacacaaagtgcaggagcaatacaagaagctttaatggaaataattgaagattttaacggtacatttaaaaattttattggcgaattagtagagaaaaacttcgataaacttacgcagtcaatagatcaattaattacttggcaatctgactataaagaagacattacaaaaattaaagaagcttatgagagattagctattaaccataaagattttgttggtaatacagaagattgggtttcaaagcttgataaaattgcaggcagcagtagtcaattgcaattaattataaatgattttcaatctgcttttgatgatgagtctcgttttagtgatgtaattactaaaattaatgaatctgtaattaatttacacaatacaagtgaagttgttaataaacatacaaatcaattaaatgatacaactgtggctttaacagttacaaaagatgaaataacaaagtggctaaacaaagaggaaagtgtacaagctatggttactgcattaggcgatagtttaaaagagttaagacaatttgatattacccaaatagaaagtttggacaaagcttttattaaaagattagaaaacacattcaaaggattggatgatataatgggagctcaactaaggctaattattaacaagagtaaataa

SEQ ID NO: 13161 - DNA, 705 bp, Lacinutrix sp. 5H-3-7-4
atgtcaagaagaggaacacaagagtcatattggatttcattttcggatattatgacaggcttaatggtcatttttatgtttattgcattaaactatataatccagattattgaatataaatttgtagaacaagatatttataactctctagaacttaaccttaaacaagagattgaaaatgaggttatagagttgtctccagatggtacagtaaaatttaatttgcaaactaaagataaggagctttttccatcagatcgatatacaatgacttatgagtttgaaaaaactttaaacgagtttactcctaaatatcttaaaattattactgcttcaaattatctaaataatatttcagaagttagaatagaaggtcatacagatacaattcctccaagaagaagtagaaatagggatagttatgattataacctagaactatcttcaaatagagcaagatcagtgttaaattatataagaaatcatgaatcttatttaaattatccagatagtattaaaactagattggattttttatttacagctaatgggttgtcatactctagggcattgaacagtggtaaggaagtgtcttatttatcatcagacaaatctgtggataatgatttgtctagacgagtagaattcaaaattgtaacttcaaatgaagagttagctgaaaaaattataaataaaaaggagtag

SEQ ID NO: 13162 - DNA, 795 bp, Lacinutrix sp. 5H-3-7-4
atgatttataattttttaaaaggcacaacggcaaataaaataaaggaaattactaaatctgaaatagaaagaactagtcagtattttattgaaccaattgaaaatataaattacagtaaaatagaatataccgataaacgttttttctttaccaaaggagaagatacgtttttaatgtttgcatataaaagtacttatcgaacgctacattacaacagtttgcctaaatatcatgtttgtcaatgtaaaacacgagaagaatatgccggttttacttatgcatcagcaatgccagttgaaatttattgccgagatcaaaatcaaactctagacaaatttcaatatctagagctgtgctctaattgcgctactgccagtcagaatgctttttatggttttttagcaaaaggaaaaccttggtatgattatgtaatccaatacgctaactctaaaaatgaaatagcgaccaagacaaaacaaaatggctatgttataatgtggaagcaaatatctcaagccattagagagcgtgtagatttttgttgtgaaaattgtcacatcaatcttgttcaggaaagtttttttttagaggttcaccataaggattataataaaaaaaataattccgataacaacttaattgcgctttgtgtactttgtcatgctacggttgatgataaacatttaagaaactttaaatcagtaccattaaaagtagagacttttatagattcctatctatcttatatagataatcataacaagcaacgtttattaatttggcaacaaaaatga

SEQ ID NO: 13163 - DNA, 1776 bp, Vibrio sp. HENC-03
atgaccgaactattagcatcacttatcgcttcattttctgcagagtccatttcaaatggttttatctaccttattttattgttgctagttggttcgatcttattggcaatattagggaaagcaccacgctttactgcaagtacaactaatattttaacatcattgggtattcttggtacgtttgcaggcatcgtagttggtctgatggacttcgatccccaaaacattgatggcagtatcgaatcactgcttggtggcctaaagactgcattcctgacaagtttagcaggtatggctggttctattttttataaagctgcgttaggtttaattcctcaaaaagaacgcgaagaaacgaagtctgtaggtcctgaggaaatcttctcagttatgtcacaacaactgaaggcttctacagagcagttaaacgcttcgaatgagttgctatctgcgattaaaggtgacgaggattcgtcattgacctcacaaattaagaacctcagaacagacattaatgacggtcaaagaacattaaacgaccagtttaagcaaacaacagagcgtaatgctgaattccagagcacactatggaagaaaatggatgagttcggtgaacttctgtctaagtctgcaacagaacaagtaatcaatgctctaaaagaagtaattgttgatttcaacgagaagttgacggagcaatttggtgagaactttaagcgtttggatgaatcagttaagaaattagtcgattggcaagaaaactaccgccatcaactagaggatatggcgaccaaataccagttgggcgttgatgcaatttcatccactgagaaatctgtagcgcacatcaatgagcgagcggaagccattcctgtaacaatggagaagctgcatcaagttatggaactaggtcatggtcaggtaaccgagttagaacacagacttgaggcatttaaagacttgagagataaggctgttgaagctatgcctcagattcgtgagcaaatggataccacaatggcagtaattggtgactcagtaaaagcggcctcaacgcactacgagtcaatgttggttgaatctcaaaagatcattgataattttagcgcgacagcgaaccagagtgttgaatcaatgcgaactaaccttgaggaaggcgcgactaaggtttcacatgagctagagagtcgagcagtagaaattggtggccgcttggctgaagcatctaacgatattacggacaacgtaacaacagcctcaggggcacttcagaatagtgctacctacctcacagacaacgctgaacaaattaagcaacagcttgaagactctattgttgagctaaatagtcagcttcgtgttctagtggctgagattaaagatgatgcaaaagatacgggaacagtattaaaagaagcaaaccaagagcttctggcaagcactaaagaaattcaacaggaaacaacaaacgctatttctaagcttcatgaacgtctagaaacaacgttagaagatgtcttccaggtacaagctcaagcggtgcgtagaacctttgatagtttagaagaccaaattacagactctgttggtaagacaggcagcgcggtagagaagcaagttgaagtgcttgaccttcaaatgcagcaagagattaaccgtaccatgagtgaaatgggtgaagctttagcaacgatcactcaacagttcactcgtgattaccaaaaacttgttcgtgaaatgaacaacgttgtcacgactagcaaaatggcagtgtaa

SEQ ID NO: 13164 - DNA, 711 bp, Vibrio sp. HENC-03
atggataaggttttcggaagctcgaaaaagcacagcgacagcggtgagcattggatgtcggtgtcagacttaatggcaggtttgatgatggtattccttttcatctccgttgctctgatgcgagatgcaatggtcgagcgcgacaaaattaaagaagttgctgaaacttatcaacaaacccaacaagcaatttacgttgccctctacgaagaattcgaaaaagatttgataaagtggggggctgagatagatcgagagacattgagcgtaaactttacagctcctgatgtactattcgcaaatggtagagctgatctaaatgaaaacttccaattgatcttggatgatttcattcctcgttatctttcggttctggatagctataagccaatcattcaagagatcaagatagaaggtcacacttccagtcgatggaatcacgattcgacagattatgaggcgtatttcaacaatatgcgattatcgcaatcacgaacgcgagcggtactaggttacatcatgagcttggagcctgttgttgacgaacattaccattgggttaaacagaacgtagctgcggttggttactcttcatcaaagttgacgcttgatgagcttggtaatgaagatgagcagaaatctcgacgtgtatctttccgcgttataactaacgcagaagaacaaattcgtaagatcttggaagaggtttaa

SEQ ID NO: 13165 - DNA, 1137 bp, Vibrio sp. HENC-03
ttgaaactgagtattagcttcaaaaacctaaatgctgccattgagttaatggagcccaaaaagaaaggcgagtttaatctagcgtttgtcgaaaccagtattgaaaagctggacttggagctggctaaaggtaaagacgttgagctcaaagatgttgatgtagattcaggattactgagctacaaagggcgtcaggttcttttgtatataaaggaccatggttcagctgttcagaacgtaattcgaaaaccagaaacaggtaataaattccacgtagccgattgttcaaaacttaaatcgatgcgttcagaaggtcgttttgaacgatatgttgtgataaatgatacctcgggcgagtttcctatttcaggggcgtcatactatggtggccatcaagaagaaggaaaagcaaagcttaagatttgtaaattctgtctaggtcaactgaactatcagggatactcgtctggcaacgaccgacatgcaatctttgacggattcgatatggctgaatttttttctacttacagctcattctttcctcatttaccttcacgtcaggcggagacggcagaaactggttatagtaaagattggtctaagatttcgtctcattatcgtgtagataaaaatttcaattgtgagcaatgcaatgtgagtttaaaagcacatcgtcacctattgcacgtccaccatatcaatggtgttaaatcggacaacagactcaagaacttaaaagccttgtgtatcgactgtcatagcaaagagccattgcactcacatttggctttgagccatacggaaaggcagttaataaataagcttagaagtgagcaaagtttgttagaagatttgggtaattggcaaagtctatttgattatgcggatcctggtgtgcacggtgttctacatgcttgtaaacattcacatttgcgtatgcctgaaattaaccactttgttactgaccgatttggtgacctttcggcaaggcttgagttagcttggcctgatgttaagtttggcgttgcaatttctgaacacgatattgaagacgcaaaggaatctgggtgggaagccgtaacagttaatgattttcttctgaactatcgcacacaagcaaactacctgagagcttaa

SEQ ID NO: 13166 - DNA, 1752 bp, Grimontia indica
atgacaaactttctcgcatctttaatcgcttcatttagtgctgagggcatttcaaatgcctttatttattctatttttctgttgatgctgatatcgacagtacttgccttcaaaggtaaagcccaacgattcacaaccaatacaactaaccttctaacatcactaggcattttaggtacttttgccggtattgtggttggtctgatggagtttaatccaactgatattgatggaagtattgaagcgctgctagcgggtttaaaaacggcatttttgaccagtctagttggtatggcgggttctatcatctacaaaggcattgttggcctgatccccgaaaaagaagagacagcggcacaagccatcgggccggaagatatcttcagtgttatgtcaaaacagttagccgcatcaacagaattactttctgctataaaaggggatgaagattcgtctcttacctctcaaatcaaaatgctccgcaccgacatcagtgatgcgaacaagtctcagacggcatttcaggacttacagctagctaaaggcgaaacttttcagacacagctttggaagaagatggatgagtttggtgaggtgttgtcgaagtctgcaactgagcaagttattaatgctcttaaggaagtcatcgtcgagtttaacgagaagctcaccgagcaatttggtgaaaacttcaagcgtcttgatgagtcggtgaaaaaactcgtcgactggcaggaaaactatcgtcatcagctagaggatatggcgaacaagtatcaactgggtgttgatgctatctcctccactgaaaaatcagtagccagtatcaatgaacgggctgagtctattcctgcaaccatggaaaaactccaccaagtaatggaactgggccatggtcaggtaactgagcttgagcaccgcctagaagcgttcaaggaccttcgcgacaaagctgttgaagcgatgcctcaaatccgagagcaaatggatagcaccatgtccgttattggtgactccgtgaaagctgcgtcaaaccactacgaaacaatgctcatcgagtcccaaaaggtcattgatcatttcggcgctactgcgacagatagtgtcgagaaactccgtacgaatatcgaaggtggagccgagaaagtttcaaatcagctgatcgaaagttctcaaacactgagtggaaaactcgccgaggcgtcttcggatattcaagaccaggtcagcacagcgaccgggggtttacgcaatgtgactgaccatctctcggaatcgactgaaatgattcgacagcaactcgaagatgcatttactgagctcaatgcagaaatgcgagtgctggttgctgatattaaagatgatgcaaaacagactggcacagtgcttaaagatgcaaatcaagaactgcttgctagtacgcgtgaaattcagactgaaacgacagaagcgattcgaaaactgcatgaccgcctagaaacaacactggaagaggtatttaaaatccaagcgcaacatgtaaggcgaacctttgatagcctcgaagatcaaattacacaatccgttggtaaaaccggtagtgcagttgaaaaacaagtggaagtgcttgatttgcagatgcaacaagaaatcaacagaaccatgaatgaaatgggagaagcgcttgcaaccatcacccagcaattcacccgtgactaccaaaaactaacacgagaaatgtcaaacgtcgttaacaccaaggttgcggtttaa

SEQ ID NO: 13167 - DNA, 711 bp, Grimontia indica
atggaaaaattgtttggtaacaccaaagcaagaagtgaagggggagaacactggatgtcagtgtcagacctcatggcaggcttgatgatggtgtttttgtttatttccgtcgcgctaatgcgcgatgcaatgaatgaacgagacaaaattaaagaggtcgctgttacctacgagaaaactcaagaggcgatatatctagcattggttgatgagttttcctctgatctcgaccgttggggagctgaaattgatcgaaatactttgagtttaaacttcactgcgccggatgtgctctttgccaatggtaaagcgaatttaacggacaaatttgaagttattcttgatgacttcttccctcgatacttggaagtactagatagttttaagccctcattacaggagataaggatcgaaggccatacctccagccgttggaaccatgggtcttcagattatgaggcttactttaacaatatgagtctatctcaagctcgtactcgagcagtacttagctatgtgatgggcttagagccagtgcgcattgaacactatggatgggttaaagaaaacgttgcagcggtgggatattcttcgtccaaactgattacaaacaaatttggcgttgaaaatgaaaaacgctctcgccgggtttcatttcgtgtgattacaaacgctgaagagcaaatactcaagatattgggggctgaatga

SEQ ID NO: 13168 - DNA, 1086 bp, Grimontia indica
atgaagttagcgcttaacattcgctcactcatgaatgccgtagatatgatggagccagagaaaaaaggcaagttcacaatagagttccagacaagccacattgacaaaatatctgcagagttagaaaaaggcaaagatgttgaactaaaagacgttgaaattgaatctggtcttctcagctaccaaggacgtcacgtcaccctctatataaaagcaaacggcattagcgcgcgctttcacgtctcagattgttcaacgctacaaagtatgcgctcaagtggccgctttgagcgctacgtggtgacgaataacacgtcaggcgagttctcagttgatacgcaacatggtgagaagaaagctcggctaaaggtctgtcaaaactgcttacgaaaactcaattacaaagggtgtaatacaacagcaccgatcgctccgatagttcagaactttaacatggcagagttttttgctacttacagttcgtttttccctcacatgccatctcgcctcgccgaaacagcagatagtggatacacagatgactggtccaagatttcctctcactacagggtggacaaaaactttgagtgtgaagggtgcaaggtgaacatgcgcagccaaagggcgctgttacacgtgcaccacataaacggcgtgaagtcagacaataggcctgccaatctcaaagcactgtgtattgattgtcacagcaagcaacctatgcatgagcatatggtattgagtcacagagagcgtcaaacaatcaacgacttaaggaaacagcaagggctacttgaggatctgggtgattggcaagaactcttcgaattgtccgatcctggcgttcacggtgttttacatgcttgccggcaggcttacttaaaggttccggaaatcaactactttgttgaggattcttttggtgatttagcggctcgcttagagcttgcttggcctaagcatcggtttggtgtggcaatctctttgaacgatattgaagatgccaacaaaaatggctggcatgtcgttggtatcaatgactttttggaaagctataaatcgcaagcttacaatttaaggtattag

SEQ ID NO: 13169 - DNA, 2028 bp, Endozoicomonas numazuensis
atggaatccattggatattttgtaactgctgtttttgtatttttcatcgtagctattgctatccgttcttttcaatggaaaaagaaaggtcaatatccgcagtttgttgaatatgccccaacattactaacgactataggtatctttggtactttcttgggcatagtactgggtctgttggcgtttgatcagaataatattgaaaccagtattgcaccgcttctgggcgggttgaaaactgcttttataaccagcttggcaggtatgttgagttcgctggtattgaaggttctgtacactactatgtttaaggattctcatgacagcatggactctgtcagtgatgcctctcccgaagcaattctaagaactatgcaggcacagctttctgcaactgaaagcttgaaatcaactttggtgggtgagcaagaatcaactcttttgagccaaattaaaatcatgcgtggtgttttgcagtcacagctgaatgcgaccgagaatctgaaagagtcattggtagggaatgaagaaactacgctgtttggtcagttaaagatttttcgaggcgatatcaatgatcagatgaagatgtctcgcaatttgaccactgaattgtttgatgcgcagcaggcacaattttcagcatttacagaaaaactctggctgaagctacaggactttgtggacactatgtccaagtcggctacagagcaggttattgaagccctgaagcaagtcattcaggactttaacaacaacctgactgaacagtttggtgaaaactttaagcacttaaatgaggctgtccacaaactggtggaatggcaggaaagttataagttgcaactggagcagatgaaccagcaatacgaacagggtgttcaggctattacagcgactgagtcatcggttgctcatatcagcgaaaagactcagcttattccgcagactatgcatgatctgcatagtgtgatgaccgttaaccagcaacagctgtcagagttggagagtcatctagaagcgtttaaagagatgcgtgatagggcggttgaggccgtgcctgaaattcgcaggcaggtagaagagactgtgacggatatttctgcagcggtcagtacggctaatcaacactacagcgagctgctggttgagtctgaccgctatatccagaaccatgttcagacatctgaagaactgctgaataagtttgcgacagaaacagagaaaggtatagatgccgtcggctctcgtttgatagaggggtcgaaagctataggtgagagtttggatactgcgtcgacagactttaccgaaagcgtggttcgtactaatgaaaacttgctgggcagtattcaggggcatatggaaagctctgaaacactgatgagcaaggtggtgacagagaccgagaaaggtattgatcaagcgggtacacgtttagtagaaagttcagtcgctattggccagagcatagataccgccgctactgaatttaccaacaatacagcccgtactaatgaaagcttgcaaaccagctctgactatttgcaaacacaaacggagatcatcaagcagcatttggcggatacggtaagcgacctgaataatacgctccgggatatgatcgaaaaactggtaaatgatgcccagagcatgaataagaccatgcatgatgccaatcagaacctggtggctgataccagtcaggtgagagatagctttgtgaaagctactgagcagcttcagaagcagttggctgatgtagtggaagatgcggccatgcaacaggtaaatcaggctcgaagaacctttgaagcgatggaagagcaagttcgccagcaggtcggcttgacgggtgaggcggtagacagccagctgaaactgattgatcagtccatgcagcaggaagtcactcgagtcatgacagaaatggggcaggcgctggcgcaggtaactggaaagttcactaatgattacatcaagctgactcaagctatggataaaattgtcagacagcaggctgcatga

SEQ ID NO: 13170 - DNA, 705 bp, Endozoicomonas numazuensis
atggaacagatttttggaaaacgcagggagcctgttgaaagtggtgagcactggttaactatctctgatctgatggctggtttgatgatggtttttctgtttatagcgattgtttttatgctggatactcagaaagagaacgagaaaataaaaaatgtcgctgtcgcctatcaggaaaatcaggtggccatttatgatgccttgatgatggagtttgaaggtgatcttgataagtggggggcagaaattgacagagagacgctatcattcaatttcaaatcaccagaagtgctgtttgatgttggtaagatcagtctgaaacccggtttccaaaacatattggatgacttctttccccgctatctatccgtgctgaaacccttcagggactcattggatgaagtcagaatagaagggcacaccagcagtgactggaatgcaaacagctcagagaaagaggcctattttaaaaatatgtcgttgtctcaggggcgcacgagagctgtattgtattatctctacggtgtcatcccttctgaaactgactggattaaaaagaatattgcggcagttggcttctcttcctcccgcttggttctcaatgaaaagggccaggaagatgcccatcgttcaagacgagtctcattcagggctatcaccaatgcggatatccagataaagcgtattctggaggctgagtcttga

SEQ ID NO: 13171 - DNA, 1143 bp, Endozoicomonas numazuensis
ttgaaactgaagattgattttagtgcgttgcaccgggcagtggctccgctcaaacatacggtggctgaattcgagataattagtcaatccgatgagctggtttcagtagcttctgagctgcttcaggggttggtgcttggacaagatattcagctagaagagattgatggctctcagggcatactgaactataacgggcatcaggtgatgctctatatcaccgatcagggggatgatgttgaagcagttcttcaggatggtaaacaggggcgcaggatacatattgctgaatgttcaacattagagttgatgagaaatgcagggcggtttggtcgctatggagtcatcagtagaatggatggtatgtttcctgtttcgggtataaatcctgataatggtaaagaagtgcatggtgagtccgatttaggtgtctgtaaaaattgtctgaaagtattgaactataagtcgtatgaggatttacccaaggctgcgaaaagtgagatttttatcaattttgagtatgagagcttctttgaaacctatagctcctatttcaagagcttgccggcaaccagcaaaaaacaattaggggctgtagactacacggctgattggacatcaatctccacaaaatttcggcaaaacctgaattattgttgtgagcactgtggcgttgatatgagccaatataaacatctcatgcatgtccaccatatcaatggtattaaaaatgacaacagcttggagaatttgcgaggactttgtgctgattgtcataagaaacagccccatcatggtcatttgcatgtgagccgggaaaatatacttcttatcaacaaccttagacgtgagcagaagaaatttgatgctttcgattatgacaagctagatcaatatgctgatacggcgttaggaggtttgatcagtaagtgtcgaaaatttaggttacccacggctgaccttggggtaatggttcagagtggaagcagtgttgtttctattgaccttgcctggccgaggtctaaggtggcagttttgattgactctgccgagcaggctttacttgagtcggcaggctggactgttttttctgtgggttcctcgatgaaacattttgaacagtttcagaaaggggttcgataa

SEQ ID NO: 13172 - DNA, 1536 bp, Thiovulum sp. ES
atgaatactacagatttattaactacaataattataggaattattgtaattctattttttgcagaaattttatatttttacaaaagaaacacaagcattaaatctaccgtaacaattgttggggttcttggaacttttatcggaattgttataggactttggggctttgattatgtaaatgttgaaaaatctttgccaactcttttaggtggattgacaacagcatttttgacttctgttgcaggaatggttgcatttctatttttaacaattattgaaaaatggagagaaaagccatctacgaatagtgaaaattttgttgatattctttcagatattcgtgaagaattgaaaaatttaaatggtcgtgttgaaaatactgaaaataaactttcagaaattgcaaaagattctaaaaagcttgattctctgaaagaacttggcgaaaaactttacggtttaaaagatttagcaaatcaattaggaaaactagaagaacttgataaattacaaaatcttgaaaaatcaaataattcaattgtaaaaaaactagattctcttgaaaaacttgaaaaatcaaattcagatatttctacaaaacttacaaaactagattctcttcataatttaagtaaattggataatttggaaactttaaatacaaagttagaaactagcaatgaagctcttgcaaagcttccagaaatcacaaatgcaattacagatttaaaaacaaatcaaaatgagcaaaacaaaactttaattgagagttttggaaagaattttgaagatatgaatttgcttttagataagactttccaaaaaatttcagaaggtgcttcaaaagatattatcgaggctcttcaacaagttattcaagatttcaatgacgaattaactacacagtttggagaaaatttcaaagagttaaataaggctgtttttgatttagttacttggcaagaaaactacaaaagttctgttgaggcaatggagagtaatctaaaaacttcaatggattcaatggaaaaatcaaaaacttcacttgaaactatttcagctcgaaatggagaagttgttgagacttacgacaaattaaaagagacaatcgaaacttataaattccaaatcgatgaggtcaatcgacacttaacaacttatgctgaactttctgaaaaagcaaaagaggttttcccaaatattgagaaaagtattaaagatgttggttcaaatttccaaatggcaacctcatcgatacaaacggacttgggaactttaataactgatattgattccgcaatcactcaaaacggtgaaaaaatcacaaatactttaaatactgtttctactgaatttgaaaatcagaaaactcaaatttctgaaactttacaacagcactctgaaacaattatcaaaatctcaaatgagttaccaacacaattacaagattttggagatggaatttctgcgataactggcgaattcacaaaagactacaacatgttcttagagaatgctaaaaagttgatgaaataa

SEQ ID NO: 13173 - DNA, 738 bp, Thiovulum sp. ES
atgcaaaatagtgaaaatgaaaatggtgaggagtggctctcaatttcagatttgatgtctggattaatgttgatttttcttcttattgcaattacttttatgtatcaagtgaataagcgacttgaaacaacaattgactacaaaaagaaacttgaagagatttcaaaagaatatgcacttgttgaagagaatttgtatcaggctttgagagatgaatttagaaaagaagagttggaaaaatggaatgtaattatattaccaaataatacaattcgttttaattctccagatgttttatttgaaagtggggaagattatgtttctgatgaatttaagggaattttggtagatttttttccaagatatgttggtgttttgacaagagacgattttgtgaattttgtagaagaggttcgagtcgaaggacacacttcctcaatttggaacggttacactggaattaatgcttatttaaaaaatttagatttatctcaaagacgagcaaaaaatgttctcgattttgcaattcgtatcgataaggtctatccaaaatttgagtggttgaaattgaaatttcgtgcaaacggactttcgtcagcaattccaattcgagatgaaaatggaaatgaagatacggaaatgtcaaaaagagttgaattccgaatcaccacaaatgctcgtgatgctttacaaaaattggaaactttgagaaaagagatggaatcaaaagagaagtga

SEQ ID NO: 13174 - DNA, 975 bp, Thiovulum sp. ES
atgcttaattttggtagtagttttaaaaagttagttcaggattctggaattgagattattgagagaattaccataaaaacggcaaatggtgaaaaacgaattaagcttggaggatcacaagaagagaatcaagttattgctaatgcactttcaaaaaatttgagtgccgatgaggtcagaattcttgaaaaaagtggtgttgaaattgaatttacaaatgaaaatggttgtgccttatattctgaagatttgatacgaacagacaacggacttttttacaaaggtcgtcgtgttcttcttcacattgcacaaagaacttcagttaaaaaaaattctccagataatttaccaaaatatcatttgcactattgtaaagctcttgaaatgcaaaagaataatggaaacttagaaaaatatcgagtttcactttctcaagatggaacttttcatttctcttttggtgataagtttatttcagatcagaaattacatgtttgtaaaacttgtgtaaaagaactctatccaaattataaggaaatgggagtttctgatgaaagaaaattttataaaggtgaatatagaaatactttaaatgtctcttactttagtttaaaaaaacattttcaaactcgacctgaaactgttattgatggagactctccgaaacttgtttttgatggtcttgatgtttctggtatggatatggactatcaagaagtctcaaatgaatacagaaaagagtggagaaaaatttcaattgagagaaaaaaagcacaaaattatacttgtcaagagtgtaattggaaaccaagaaatgcaaatgagaaaaaatatattcacactcaccacatggataaaaacaagggaaataatttaagttctaatttgaaagttctttgcatggaatgtcattacaataatcacccaactttaaaagagaaacaaccatacaaagattttttaaaaatcaaataa

SEQ ID NO: 13175 - DNA, 2034 bp, Vibrio toranzoniae
atgaccggactattagcttcatttattgcttcattttctgcagagtccatttcaaatagctttatctacctaatcttattgttattggttagttcgattttattggctgtattggggaaggctcctagatttacggcaagcacgactaatattttaacatcgttaggtatccttggtacgtttgcgggcatcgtggttggtcttatggacttcgatccacaaaacattgatggcagtatcgaatcactacttggtggtctaaaaacggcgttcttgacaagtttagcgggtatggcaggctctattttttacaaagctgcattaggtttgatccctcaaaaagaactagaagaatcaaaagcagtgggcccagaagaaatattttctgttatgtctcaacagcttcaggcatcgaccgaacagctgaacgcttcaaacgagttgctatcggcgattaaaggtgatgaagactcatcattgacctcccaaattaagaacctaagaactgacattaatgatggtcaaagaacattaaatgaacagtttaagcaaacgacagagcgcaatgctgaattccagagcacactatggaagaaaatggatgagttcggtgaacttctgtctaagtcagcaacagaacaagtaatcaatgcgctaaaagaagtaattgttgatttcaacgagaagttgacggagcaatttggtgagaactttaagcgtttggatgaatcagttaagaaactagtcgattggcaagagaactatcgtcatcagcttgaagatatggcgactaagtaccagctgggagttgatgctatttcatctactgagaaatctgttgctcatataaatgagcgagcggaggcaatcccggtaactatggaaaaactgcaccaggtaatggagcttggccatggtcaagtgactgagcttgaacagcgtttggaagcgttcaaagatctacgtgataaagcagttgaagctatgccacaaatccgtgagcaaatggatactacaatgaatgttattggtgattcagttaaagcggcttcaacacattatgaatcaatgtttaatgaatcacagacaatcatcgacaactttagctctaccgcaaaccaaagtgttgatgctatgcgtactaacttggaagagggcgcaaccaaactagctcaggaactcacaacaagcgcagagaaaattagtacccagttagcagatgctagcgaagactttacacaggtaactgaagaaggcgttgaagacattaaagtgagctttgaagctggcgtgaagaaaattgctgaagacttagatacaacaacgaaagaaatctcaacgacactaagcgcttcttctcagcagtttacggcaacgactgaagaaagtatgaacaccatgagaactaatctggaatcgggtgctcaggatatctctactcagttaagagaaagcgctcaagatatcggcggcaaacttgcagaagcttcatctgatattcaggagcaagtaggcacggcgactggtggtttaagtaatgtaacaagtcacttaactgatacaacagaacaaatccgccaacaccttgaagattcgattacagaattgaatggtcagttacgagttttagtcgcagatattaaagatgattcaaaagaaacaggccgcgtacttaaggaggctaatcaagagctaatttcaagtactaaagaacttcaggtagaaacgacttcagctatctccaagctgcatgaccgattggaaaccacattagaggatgttttccaagttcaagcccaagctgtaagacgtacattcgatagcttagaagatcaaatcacagagtcggtaggtaagactggcagcgctgtagagaagcaggtggaagttcttgatttacagatgcaacaagaactgaaccgtacaataagcgaaatgggcgaagctctagcgactgttactcaacagttcactcgcgattacaaagatcttgtgcgtgaaatgaataacgtagttagcagtcgagtagcgtaa

SEQ ID NO: 13176 - DNA, 711 bp, Vibrio toranzoniae
atggaaaagctatttggttcttcaaaacgccctagtgatagcggtgaacattggatgtcagtttcagatttgatggctggcttaatgatggtctttcttttcatctctgttgcgcttatgcgagacgcgatggttgagcgcgataagattaaagaggtcgcagagacttatcagcaaacacaagaagctatctatgttgctctttttaaagagttcgaggttgatttaaaaaagtggggggctgagattgaccgcgatacattgagcgtcaacttcacagctcctgacgttttgtttgctaatggtaaagcgaaccttacaggtaactttcaaactatcttagatgatttctttccacgctatttgaaagtgctcgacagctacaagcctattattcaagagataaaaattgaagggcatacatcaagtaagtggaatcatgattctacggactatgaagcctatttcaataacatgcgcttgtctcaatcgcgaacccgcgcagttttaggttatgtaatgttgttgcctaacgttgctgaacagcattatagctgggtaaaagctaacgtagcagcagtaggttattcatcttctaagttggcaacaaatgaagaaggccttgaagacgaagatcgttctaggcgcgtgtctttccgtgtcatcactaatgctgaagaacagatccgtaagattttgggtgcttcatga

SEQ ID NO: 13177 - DNA, 1086 bp, Vibrio toranzoniae
atgaagttgagtataagttttggcagtttgaaaaatgcgattaacttgatggagcctgatcaaaaaggcgaattcaagcttgagttacaagagacgcaaatggaaaagctcgatatagagcttgctgaaggtaaagacgttgaattaaaagacgttgatgtagattcgggattattgagttacaaagggcgaaatgtttctctctatattaaagcaaacggcagcagtgctcgtttccacgtggctgattgtaaaacgttacagagtatgagagcgaacggtcgctttgaacgctatgtcgttactaatgatacatccggtgagtttatagtagcttctggctatggagagacgaaggctaagcttaaagtctgtcagaactgtttaagacagttgaattacaaagggtgcaatacaggcacactgataagttcgattgttcaacaattcgacatggctcaattttttgcaacctacagttcattctttccccatctaccttctaggcaagctgaaaccgcagaaaccggttatacagaagattgggcgaaagtatcttcacactatcgtgtcgagcgagattttacttgtcagcagtgtcatttgaaacttagagcacaccgaaatttgttacatgtccaccatattagcggagttaaatctgacaaccgccccaaaaatctaaaagcgctctgtattgattgtcatagcaaacaacctatgcattcccacatggctcttagccacgccgaaaggcagttgatcaacaatttacgtcaagaacaagggttactagatgatctaagtggttggcaagaactatttgattattcggatccaggggtccatggtgtgcttcacgcatgtaaaaaagcctatttgaatcgccctgagataaatcacttcataattgatagatttggtgattttgctgcaagacttgaattagcttggcctgaaaacaaatttggaattgcgatttcagagaatgatattgaagacgcacaagaagccgggtgggaggtcgtatcggtcaatgacttcttgcaaaattatcgtacgcgagcacatcatttaagagcataa

SEQ ID NO: 13178 - DNA, 1308 bp, Mumia flava
atgaaaaccaaaactctccttctcctgtcgggaatcgcgtgggcgccgtacgtgttcgcgggtggtcctatcggcacagtgctggcagacaaacagacgcttgctttcatattgttgaacacatgcctaacaatattcttcgccttcgtcagattcgaccgcttttccgttgttcacggcccagaaatattgacgaccgttgggattttcggttgttttctcggtattgccctggcgttactgcagttcgatgcatcgaatgtgtcggagagcgtaccgcacctgctggaaggagtgaaaaccgccttttgggcttcggtcagtggcgtgtttggctcattagttatccgcgggaggcactatttctggaagacccccatcccgcaggcaccgggcgcaccgaaagcggccaccctagacgacgtcgtgtccgcgacacacgctctacagctcagcctgtcgggcaacgagcaaggcagccttctctcacagctcaaattgatgcgccaggaacaaggcgacgaacttcgtatgctccggacgtcgttcgacacgttcgcgcagcggatgtcggaagacggctcgaaggctcttatcgaggccctgaaggaagtgattcgcgacttcaacgcacaaatcaacgagcaattcggcgagaatttcaaacatctcaacgcagccgttgaaaagctcgtcgtctggcagcagcagtacaaggaagagctcgacaatctgcaagcgctccagaaatcgtcagcagacgacctcaggggcgcatcttcgggcctagcactgtttatcgaccgggcttctagcttcgctcaaacagcaacagcgctcgagggcacggtcagaggtctggcgcagcaacatcagctcatcgaccagtctcaacgttcaatagccgacgtcctttcccaaatgaaggatgtgacgccgcagttctcgcgtaaggtcgacgaaatgaccgaatcgatgaagcaaggtgtggccagggtgcaggcggaagttggcgacgtagtcaagaatttcggtgtccaggtgcagtcctcgtcatcagaaatgaaacagcttctgacggacacgcttcgaaaatcccagtccgaggtaaatgacgggctcgttcgctcgatggacgcagtccgccaaagcgttgtcaccctggacaagggattgcaggaggagctcacgaagagcctcgaaacgcttgggcgtcagctcgcgtcgctatcagagaagttcgtcgcagactataccccgctgacggaccgcctgagagaagttgttcgcatagctggcactgcgtga

SEQ ID NO: 13179 - DNA, 693 bp, Mumia flava
atggatttcgagcatagcaaccaatctcactggataccaatggcggacctgatgacaggtctgatgatggtgttcatgctgctgactgcagcattcatgctccgggttgagcagacgaccacgttggtcgtgaaagagtacgaaaccaccaaacgtgacatgcaactggccctgcagaaggagtttgcgaaggacctgcagcaatggaacgctgaaattctcggcgatatgaccattcgcttcaatgacccaactgtgcttttcgcaaccggctcatccgaattgcggccgcgcttcaaacaggtacttggtcagttttttccacgttacgtggcgttgctgacatccgctcaatacaaggacgccgttaaggaaatccgcattgaaggtcacacaagcgcgttgtggacaggaacgacagacgaaaaaatcgcgtacttcaggaacatggaactatctcaggcacgtacgcgaagcgcgctcgaatatttgctgtcgcttccggcggtgcaaggcaacgagaaatggctcgttcagcacgtgacagcaaatggactttcgtcgtcacgtccactggctcaggattcgcaatccgcagcatcgcagatagcgaatcaacgcgtcgagtttcgcatcgttaccaacgcgagcgaaaagatggacctcattgccgagaagctggcaaagaaatga

SEQ ID NO: 13180 - DNA, 849 bp, Mumia flava
atgagctttcagttacctaatttcctcaactggagcttgctgaacgcgttacggcaggagatgggcgcgcctcttgccgccagctttgttcctgaccataaattccgcgacattgaactgcctgtcctcgaacgcctccaaaacaacggtgtcgacgttcagtttgacgaagtcgaagtgctcagcgacggcacgctcgcgtacaagggatatcgcgtcttgctgtacatcagggacatcatgtcaatcggccatcaggaaagtatgccccgctaccatctcgcatattgccgaactctcgataagatgcgccggaacgctcgatttgaccgatacgttgtggcgaatggagacagcgggagatttcaggtcaacgtcatcgagaatgacgtaaagacccagcacgtcagattgaacgtatgtcaaaactgtctggacgaaatccattggaacggattcgacatgaagatgccacgcgatggacgtctcacccttgtttccaaattttcccttccagatttcttcaagaaatacccgcgcgacctgatggcagtcaaaccagtgcactcctccgatacagcgccgctcaatgtctattcgcaggattggaacgaaatatcggaacgtaccaaacggcaacgaggctatcgatgcgccgcgtgcaacacaatgctccgacaaacggattcaaaatttctacatgtccaccatcgaaatggccagaagtacgacaaccgtgactcaaatctcgaggtgctctgtataggatgtcatgcggaagaaccgatgcacggccatatgagggccttgcgtgagtaccaggagtacgtcgagcgatatcgacgctag

SEQ ID NO: 13181 - DNA, 1521 bp, Basilea psittacipulmonis DSM 24701
atgggtaataatttttttattgaaaatagagagtttattatcaactctgtttattttttattggctctttggtttgttgtcagtgtttttttaattgcaaaacttgctatttataaaaatttagatcaacacaatccttatatttatgaagccataccatcggtatttaccaccattggcgttttgggtacatttgttgggatatattttggtctcatcgattttaacgtttatgatattaactcgagtattcccaccctattagaaggcctaaaacacgctttttccacctcaatcgtaggtattgtactatcgttaattttttctaaaatatcggaatttgttctatttcgtgttgaaaaaagaaacgctgtcatacatgatgacaattacgatcaaaaaattatcgaagaattaaaagaactcaatgaggttcaacataaaattttatcgacaatcaatgaaagagatactcacatcgatgatgtcaaggactattatcatgaaagtattcagctatttaatcaaatcgtagcctcacaaaatcgactagaaaaattacagacggaagaaaatcagataatcaccaacacccaagaaatgatggtttctcaacatcaagaaaccatggaaaaatcaacacagtttgagtctcgtttcactgaagcagtgcaaatcattcatcaaatggctgaacattacaaagaacagaataagttaattcaagacattgccagagagaaacaagagatactatctttgttcatgattgaaattaagcagaagtttgaagaattctcagaactactaagccaaaataacacggaagcattggtcagtgtcatggaaaaagtcactgaagaatttaaccagcagatgaatacattgattagtcgtctcgttcaagaaaactttgaacagcttaaccacagtgttatgcaactgaatcaatggcaacaagaaaacaaagcaatgatcgcctcattaacggaacagtttaatcaagccgcaacaggacttgacagcaatcataatacattaaaagaaatcacccatcatacagaaaaacttgtttctgatgcaggttatttacaaaaattaatcagtgaattacaaagagtcatcattgatgataataagtttgaaaaaataagcacagacttaagcaataccgccgatctcattaagaaaaacacgaatgcttttgatgaaacaacaaacaaattaaacaaatgggttgaaaatcaaatgtacttctctgatagtgtggaacgtcttttgagccgcttagaagaaatcgacaaaataaaagacatcaatgaaattttctggaaaaacaccaaagaacaaatgaatgaaggtgtcaacctcttacataatgcgagtgaatcattagcaaaagatttggatacactcaaccaaacttaccaagatcagctcaataacgttttgatgagtctagacatgctaattcaacgtattatcatcaattatgacggacaatatgaaaagaataaatag

SEQ ID NO: 13182 - DNA, 669 bp, Basilea psittacipulmonis DSM 24701
attgtagaacaattgaaaaaaagtgaagaagcactaaaaagaagtcaagagcaacaaaaattaatttttgagaacttcacaaatagcaaactatcgatttatcaagccttaaagaatgagttctcagatgatatagaaaaatggcatatcgaactaggcgaagatctttcgattaagtttaccaatcctgaggtacttttcgatctaggaaaaaccaccattaaaccgcatttcaaaacaatattagatgattttctgccccgctattttaatattattctatacccccaatatcgaggaacgattagcgaaattcgtatagaaggacataccgataccgtacccgcattgcgttacgataatgacccatatattggaaacgtgattttgtctcaactacgttctacagccgtactcaaatatttccatgaatcagaatattatcaaagtttatcgccagaacaacagcagcaacttgcttttttacttactgcaaatggtctatcttatggcagaacactagatagtaacaaaaagcttacgtacctcactggcaaaccaattagtccagaactatctcgacgcgtagagtttcgcattattaccaacagtgccaatgtaattgagaaagtactccgtaaaatggaatcagaaaatgaaaaatattga

SEQ ID NO: 13183 - DNA, 807 bp, Basilea psittacipulmonis DSM 24701
atgaaaaatattgaactttatcaatttagcaaactagaacaatggctgaataaacaaaactttccacaattatctgattacaatcaaatcactgttgattttgaaaaagtttataaaaaaggacgtatctcttttgaaagtcaaattcgtccagatgaagaaggtatttttctgcgttatttagacaaagaatatcccggctttatgtatatcaaagaagcttttatcaactatgaaggaaaatttcagtttcctaaatttcatatttacaaatgcaagacgattcaatcttttatcgataaaggaaattttcatcaacgatatgtattttcaacgagtaatatttgtgatctcatcgataaaacaacacatcaagtattcaaaaatgttacattagaactatgccactattgtcgcactttttctgaaaacagtaacttcaaagaagttaaaacaactcaagattttgtggaattactaaaaaaatatagcattgacactgaattaaaagttgatgtctttggttatgtatttagatgggataaagttagtcaagcgttcagggagagcgtagattatacatgcgccaaatgtggattaaaacctaataatccaagggatcgatatttttggcatgttgaccacattgatggagacaaattaaataatcaagcgagtaatctacaatgtttatgtatcgcttgtcatagtaagaaagacaatgctcaccgaaaacaattcagtacgttaagaatgcaaaaactattagaagattttgaaaaaatttacccaactgcaaaagaatga

SEQ ID NO: 13184 - DNA, 1200 bp, Sulfurovum sp. FS06-10
  modified_base (409)..(409): a, c, t, g, unknown or other
  modified_base (471)..(471): a, c, t, g, unknown or other
atgtttagttgtgtagagaggtatgcatttattggtatttttatgggcttacaagactttaatccagccaatatgaaaaatagcattgagactattttaattggtttaaaaactgctttttttacctctattgcaggaatgggtacggctcttgctttatcaatatttcaaaaattatttaatcgaaatttggatgatgctgaaaatcaagagagaatattatcggaaatttcagagaaattaaatcatcttgaaaaactcaaccaaacacaagagaccgataaaattataggcgaacttgaacgcttacgaaccgtacaatctgataccagagatgagaccaaaaaagttgctatctcaattgatgaattaagagccaattccaacaaagaaaatcgagagttaattnacattttaaatatcaactttgatcaaatgaatagatcccttgaaatagccattgaaaagctntctaaaggtgcaaccgaagagataatgaatgcattaaaacaggtgattgaagagtttaatcaagagttacaaacccaatttggagaaaattttgttaaactcaatgaatcggttattaatttggtggagtggcaaaacaactataaaagccacattgaacatattgaagaaaatttacaaatttctagtgcttctatcgaaaaatctaaagagagtttagacgttatctcttctaaaaatcaagaaattttaaacgtgtatactaatttaaaacatatcattaaaatttatgatatagagataaaagacctcaccagacatttagaaacatacgcaaaattaagtctcagtgctgaaagtatgttctctacgattacacataatatatcccaaaccaaagaagagtttacctatttaaccgaacatattaaaaaagaaaatgctaaacagataaatgattctaaagaaagtacagcaagaatagccaacgatattaaaattaaaaccaccgagattaaatccaattttgatgaagtcacccacagttttgagaaaaataaaaaagagttagaacttatttcaaaccactttaaaaatttgggggaacagataccaaaatcattacaaatttcactaaacgcattaaatcaagggttaacttctctcacttcaacctttcaaaaagattacaaagagattatggacaactacagaaaaggtcttagataa

SEQ ID NO: 13185 - DNA, 693 bp, Sulfurovum sp. FS06-10
atgaaatcaaacagtgaatggatgagtatatcggacatgatgtcaggattgatgcttattttcatgtttattgccattagttttatgatacagattcaaaccgataaagataaaatgaaagagatagccattacctacaacaaagataaaaaggaactcaacaaagatttaaacctagaattctctaaagatttaaccaaatgggaagcccaaatcagtcaagataatatcattacatttaactctcctgatgtcctttttgaaggaggagaaagtcaaattaaagaagaatttaaaaatattttaaatgatttctttccacgatatatcaaagttttatcatcaaaaaaatatatacatgaaattgatgaaatacgcatagaaggacacacctctgataattggaatggaacaacaaacgctaaggacatttatctaaacaatatgaaattatcacaagagagagccaacaatgtattgtcatattgttatacgattgatgccccttttattcaaaataatagagtatggttagaacaacattttagagccaatggtatggcattttctaaattgaaatacatggataaaaaccaaaccatccctgatattctaaaatcaagacgggttgaatttaaagtacaaatgaaaacagaagagaagatttataagattctaaaggcatcggaataa

SEQ ID NO: 13186 - DNA, 657 bp, Sulfurovum sp. FS06-10
atggaattaattttttcaaattttcaaacttttttaaatgcagtgcaatccattaccgaggaaaaattagcccaagcaaaaaaaatattagagacccatggtaaagatattgaaaatatttctgatatttttgttaatgataatggtgagttgtttgatttattacctgatggaacattggttagagttaatctatatattgcaaccaaagagatagatagatacgctttaaataccatacaaagtgaagatttatacaaatatcacatttatcaatgcagtaccatatcaaccatgtttaactcaggaagaaaacatcgttataaacttaatacccgagaggatggtacatttttttataactttcatgattataatggaaaagtattgggtataaaagataatcaaaaactcgatatttgtaaaaattgtctcaaaaaatttttaggtaaaagccctttatctgattatgatgtagcacattttaacttaaaaaagtttcatcaacaaaatagtggattttttgattttgatacctcttctatcgaaaaaggtgaagatgcaaagcccaatgtatatcatcgtaagtggacacaaatatcaaaccaaataaaaacaggcatgaaaagggtcgataatggtcagtttggcaggtaa

SEQ ID NO: 13187 - DNA, 1323 bp, Sulfurovum sp. FS08-3
atgaatgactttgagaagttgctaagtatgctagaaagtgatattaatctagcgatagttgtaattattgggatattagcattgattgatgtagtctttaaaaaagatttaaaaagtcaaattgttagtttgggagtattgggtacatttattggtatctttatgggcttacaagactttaatgaagttgacataaaaaacagtgtcagtaatattttagttggattgaaaactgctttttttacttcgattgttgctatgggtacagctcttgttttggcaattattcaaaaaacgctctataaaaatatagatgatgaaaataatcaagagaatcttttgaaagagatatctgacaaactaaatcatcttgaaaagcttaatcaaacacaagagaccgataaaattattggtgagcttgaacgattgcgtatagtacaaacagatacaagagaagagaccaaaaaagtggctgttgccatagatgaactaaaaacgaactcaaatcaagaaaatcaaaaactcatctctatattggatacaaattttgaaaagatgaataattcccttgaaattgccattgaaaagctctcaaaaggggcaacagaagagattatgaaagcattagaaaccgttatcaaagagtttaaccaagagttacaaagctcttttggtgataactttgtacaacttaatgaagccgtgattaatctattaaaatggcaagagaattataaaacccatattgaaaccttagatgaaaaactagagttatcgaccacttcaattgaaaaatcaaaagagagtttagaggtcatatcctccaaaaacaaagaagtcttaaatgtatatggagagttaaagcgtattattgatgtttatgatagacagatacaaaacctcacacaacatcttcaaacatatgcaactctgagcagtagtgctgaaaatatgtttgcaaccattactaccaatatttcaaaaacaaaagaagaatttagtgatttaagtgaacatatcaaaaaagagaatactaaacaattggataatgctaccgaaataacatctaaaatagccaatgatattaaactaaaaacaacagaaattaaatctaattttaacgacttaacgagcagttttgaaaaaaataaaaaagagttggagcttatttcaaatcactttaaaaatctaggagaagagatacccaaagcattaaaagtttcacttgagtcgcttaatagcggattaacctctttgaccaataattttcaaaaagattataaagatattatggataattataaaaatggcattagacaatga

SEQ ID NO: 13188 - DNA, 753 bp, Sulfurovum sp. FS08-3
atgaaagcttctgatagtgaatggatgagcatctccgatatgatgtcggggcttatgatgatttttatgtttattgcaattagttttatgattcaagtacaaaacgataaggacaaggtggaagagagtaataaaaaactaaaagttttaatgcaagaggcagaaaaagccaaaaagaggattaaaaatattgcaattacctataacaaagataaaacagaactcaatgaagatttgcatcaagagttttctaaaaatttaaataaatgggaagctgaaataacacaagataatatcattgtttttcactctcctactgtactttttgataatggagaggctcttctcaaaaaagattttcaggctattttggatgatttttttcctcgttatataaaaattctcgcatctgataaatatcaaaatgagattgatgaaattagaattgaggggcatacctccaatagttggagtcaaaaaatttcatcggatgacatctatctaaacaatatgacactctcacaatcacgagcgaataatgtcttatcgtactgctatacgattgataatataacaattaatcaaaataaaaaatggttagaaaaacactttcgagcaaatggaatggcattttcaaaattaaagtttatgaacgataccaacactcctgatgataacaaatcaagacgagttgagtttaaagtccaaatgaaaacagaagaaaaaatatataagattttagaagcatcctaa

SEQ ID NO: 13189 - DNA, 399 bp, Sulfurovum sp. FS08-3
ttgaataaacaatatacctcaaatgatgatgtagaaaattttgatttaaaaaaatttcatgaaagtaatagtagcttttttgattttgacacctcctctatggaaaaaggtgaagatgccaaattcaatgtctactctcaccaatggacacaaatttccaatcaaattaaaacaaaatacgactatatatgccagggatgcggatggagacctaacaccgatgataagaaaaagtttatccatacccatcatcaaaatggagataaaacaaataatagtgaagacaatttaaaggttttatgtattgagtgtcatgctaatatagatggttatcacgcaagaatcaaatcaatgaatggatatcaagaatttttgaaacttaaaaatatatcaaactaa

SEQ ID NO: 13190 - DNA, 1980 bp, Fusobacterium hwasookii ChDC F128
atggagtatatttttaaatttttagcttttaatattggtcaatatattggggtttctttgacaatttctgatttgattatttattttgtaatgggctatattatagttcatattataaaaaataataaaatcaatgataaggaaaaaagaaatttctatataaatttattacctatattgggagtaattggtacatttgctggtatttgtattggacttgctgatttcaattcaaatgaaattgaaaaaagtgttcccttattattacaaggtttaaaaactgctttttggacttctttaattggaacttctttagctgttttctttaatgtctggtactcatttaaagataaaaaagatatagaggatgaagaggatgaaattcctttattgaagttacaaataaaagaacttcaatcaattagtgaaaaatttaatagttttttagagaatcaagcaataaataataatagtttaaaaaatttaactgaattttttaataataatgaagataaaaatcttaaaaaatttgaagaaattaagaatgaattaaaagtacttaatgataaacaagaaaaaactaatagtttttatgaaacttctttattaaaattagaaatattagatgaaattaataaaaaatatgataaaaatatagaaaattttgcattatgtaatgaaaatatttctgtcttaaaagaaaattctatactaaatttagaagagaataaaaaattaaatagcaatactactgaaactttaagtaaattagagttaatagaaaaaataaatactgatactcttaacaaaaattctagtatttttgaaaatattgaattattactagataattttaaaaactacaaagatgaattttctaatttctttaaagcttcagaaagtcaaagtagagaattaattactgcttttaaagagtttgcaacttatatggctgaagagaatagtaaagcttttattgaagcattaaataaaacaataaaggattttaacaataatttaattgagtcatttggatcaaactttaaacaattaaatgaagcagttataaaattagtagattggcaagaacactataaagaaacaatagaaagtacaacagaaaatcaaagagtgatttttgatagtttcactggaatagaaaaagaactacaaactttctcatctgaaacaaagaatataaattctattgttacagaattatctactattacaaaagaaagtgtggaacaaaatattaaattaaatgaaactttatcagtattctctgagttaaatagtcatgcaaaagaattgattccaaatcttgtagaaattaataataatattgataaagatatcaagacttttaatagttattctaatgagttgatagataatttaaataatttcacaaataacttacaaaataatttctctcaatatatagatgatataaatagaggagtaaaaagttcaactgatagtataatgggaataatggaagattctttaaagaaaatagagaataattttgataaatctttggaaaacacaaatcttaaattaaaagaaacttctgaaaatatatttacagaaattgaaaaattcaatacagatttttctaataatatgaaagagcaactagatatctttataagtaataatgaaaattattcagctggaataaacagactagtaaaaggtacattagaagcaatagatgaaagtgaaaaaaataattcaaagatgatagatgaaaatctaaaacaaattgaaaaattaaatattgaactaaataatcatttaaaagtgcatgttgaaaatattgaaaaaggattacaagactctttaaatagttctttagattcattaggtgaagtaatggcaaaaatatctgatagatttgcaaaagactatggtccacttgctgataaattaagagaaattgttgaattatctaataataagagggtgagatag

SEQ ID NO: 13191 - DNA, 705 bp, Fusobacterium hwasookii ChDC F128
ttgactaaaaaacatcatgaagatcatttctcaccaagagttgctgatttaatgtcagccttaacattaatttttttatttatttcagttgtctatatgctacaggtaaataaggaaaaagagcgtatagaaatgatagctaaggactttaaaaatacaaaatatgaaatttatactgatttaaatgaggaattcaaagatgatttaaaaaaatggaatgcttatattgataaagacactttgtctataacttttaaagaacctgatgtattttttgatgttggtagtagtaatataaatcaaaaatttaaagatattttagatgatttttttccaagatatgtagagatactttttactaaatataacaatgaaattgaggaaataagaatagaagggcatacttcaagtgaatggaataaaaatgatgatagcttacaagcttattttaaaaatatgactctatctcaagaaagatctaagagtgttttagaatattgtatgttattgaataagatgagaccttatagagaatttcttatcagtaaagctactgcaaatggtttatcatacagtcatagagttatagaagatggtaaagaaaattttagtaaatcaagaagagttgaatttaaaataaaaacaacagctgaagcacatataaatgatattcttgaagcaggaggttttaatgaaactaattaa

SEQ ID NO: 13192 - DNA, 822 bp, Fusobacterium hwasookii ChDC F128
atgaaactaattaactttttagattttgaacctttgaaagagattatggaaaaaatgaaagtagatagaaatgaaaagatagaaattgagagaatcaaaaaaatagaaatagctagaatctggaaagagttaagtagtttatcaggactagatatagatattaatgaaactgacccttcagaaaaaggttatattaagtacagggaatttgataaattagtagcatatataagagatcaaaaatattttggagaaaagttttctttaagaaaatttcatattgcctataattgtaaaactttaagtgattctagaaaatcaagagatgctagcaaatataaaatagttcaaaataaaagtcctgaatttacaattaatatattatcagaagatgcaaaaactgttattgaggctaatgttattaaaaaattagaagtttgtaccaattgtttaaaagcattaaattataaaaattttttaaatgtaagtaaatctgaacaagataaaataaaaaatgaattttcttttgaagaatttttaggaactgaatttgataaaaatgaagagttaataaaaagttataatttagatgatatagaaaatgataaagttagactatatcctaaaaactgggatgaaatttcttataattatagaaaatctaaaaaatgggtttgtgaagaatgtggtaaagattgttcaaaaaataactcagaattagaagttcatcatattgatcataatccaagtaattcaaatttctataatttaaaagccttgtgtaaaacttgtcattctaaaatacatcctcatatggaataa

SEQ ID NO: 13193 - DNA, 1392 bp, Myroides sp. A21
atgattgaattaattattgcattaatagtatttactatcgcatattcatttggatatgtgttttttaggagatttagaaagaatcaaataaatgatccttctaagaaaggtttttttaataataaatatatttttgaaacgattccatcaacttttcctactcttggtattttttgtactgcattaggaattactatggggatatggaactttaatacagatgatatccaaaatagtatgcctgagttgttaaatggtttgaaacttgcctttttagcgactatgttaggtatagttggaatgattatttttcagaaagtagcagctgttattcagcgtgaaatagatgatgttaatcagaatgtagtaaatgaatctaacgaattaggagctttaaatgttattattaaaaaactaaatgagtcaactgaaagaaatgatattaataccaagcttctagttgatgcaataagaggaatgaatgaaacgataggaagtaactctagtaatttagaaaatatactaaaaaatgaattgaccaaagtttgtgaagtagtaacttcaatgtcagtagatattaaagatagtatagaacgaaactataatgtagaattactatctatagggaaaagcgatgagataatagcgtctttaaaagacaatcagacagaaatgagtaagaaatttgatactttttctgtattgttagctaaaaataatactgaggctctagtggaagtgatgaaaaatgtaactgaaacgtttagtcaacagatgaatcaaattatcgaaaagctagtcaaagaaaattttgatgcattaaataatagtgttttaaatatggttagctggcaagaggaaaacaaaactcaaatacagacgttaagtgatgggtacacctcgttgacttctaattttgaaaagaatgctgtgttgctaacagatattacaaatagtgtcaacggtttagtaggggatagttccaaattgaatgagttagttttaataatgagtgaggcgttaatggatgataataattttacccaaacgactaaaaaacttgtgcatacaatagagatgattgagaaaagtactgaggacttctcaaatacaacagataaacttaatgaatgggttaataaggaaaagaattttaatgattcagtggagttattaattgataaattagaagagtttagagatttaaatagtgatgtgtggagtagatatagaaatgaaatggattcagctgtaggtattatagaaaagacatctttaactattagtaaagagttatcagctattgacgatgagttttataatagattacacacaacactcgagaatttagatatgtgtattcaacgtgcaatagtaaaatacgaaaaataa

SEQ ID NO: 13194 - DNA, 708 bp, Myroides sp. A21
atgagtaagaaagaatcgttttggttaccatatgctgatttgatgactgtgttaatgattgtctttttatttatttcagttggatatatggccatattacagaaaaaggaaaaagaacggactaatattattgatacctatattgttttaaaggaagatctctataatgatcttaaacatgagtttaaagatgattttaaaaaatgggatttagaattagatcgtgatttatctatcaagtttacaaatcctgaaatcctttttcaatcagggaaggcagagttaactactaagtttgaagatatattgaatgagtttgtacctaattatttaaatatagttttggataaaaagtataaaggtagaattgcagaagtgagaatagaaggacatacagatgatgttaagtatttgtatacaaaagatagttatattagaaatgtagagctgtcacaagaaagatcacgaaatgtattagcttatataagatctttagaatattataaagaattgtcaagtgaggaagaatctttattacaatttttattgacagctaatgggttatcatatggaagaactttagataaaaataaagaacttacttttactactaaaaaagagatagatagagttaattcaagacgggtagagtttaagattgtgattgcatcagatgatattttaaacgaagtcattaataaaaaataa

SEQ ID NO: 13195 - DNA, 798 bp, Myroides sp. A21
atggagaaaaatagattatatgatttttctgaattaattaaatttttagataaaaaaggctttcctaatgtagagaagcctactttagaaattattcgagaagatcttacgcaaaagcaaaaggaaggaaaggtagagtttaaagaggatggtatatatttattacataataatatttggcataaagggtatatgtacattaagaatgcagatgttaatcaatatggtttacctaagtatcatatattagaatgcaaaactattaaagatcaaaaaagtagagataagtttgataatcattattattggagtaatgaatcccatgttgatgtaagacaacgtaattctaatcaagaatataaagaggaggtcttggatttatgtaaaaattgtgcaaaagaagcaaaagaaatttattataacactacagagctctttcataactctttaaatttagatgttaattattctaaaaaggtcattaagattgatattaatggttatgatgtagattggcataatataaagagaaaacatcaagaagagaagaattttttatgtgaagaatgtggcattgatttgcaaaatgataaaaggtttatagaagttattcataaagacgatgataaaacaaataatatgttatctaatttaaggtgtctatgtttagggtgtttagcaaatagtgtttcaaaaagtaaattaagtaaagcaaaattggaacaagtaaaagcttttaagaacaaatatgatggtttttataaaagtaaaaatatttttactagaacaaaaatgtag

SEQ ID NO: 13196 - DNA, 1494 bp, Coxiellaceae bacterium HT99
atgagtagaatttttgccttaacattaacgatgctttccttccctgtattagcttctgaaaataccaatgcgcctactatcatttcaatgctgcaacagttctcatctttggagcttttctggatggggcttactgtttgtttgttagtatttttcttgatcaaatttgatcgatttgctgtgacctatggaccagaaatcttaacaacgatgggaattgtaggatgtttcgcttgtatagcttggtccttattacattttaatagcaataatatcactgcgagcattccatcattacttgatgggattaaaaccgctttttgctcttcttttattggtgtggtcggtgctctaggtattaggattaagcacaaattttgtaaagatactcttcatcaagcaagcaaagaaattgcgtcaacaccctttgaacctttgttaaaagaaataattaatttaagaaagacattgtcaggagatgaagaaggttctctactttcacaggtgaaaatgctgagacaagactctaacgatcagcaacgtaagttacaggaatcctttgataaatttgctaagcacatggtggaaaataaccaaaaagcgtttatagaggcattgcaacaagcaattagagattttaatcaaaatttgacagaacaatttggcgagaatttcaaacatctcaatcaagcggttgaaaagctggtcacttggcaggaacaatacaaagatgagctcgatactataaaagaatatcaatcgcaatgttcaagcgatatgaaacaagcgtcagaagcctttacgtcagttgttgaacacgcaaaacagttttcagacattgcccaaaatttaaagactctgcttgaatccatggataaacaaaaagacgtactttttatccaagaaaaagccttaagtgagcttttaagtacaatgaaagaccatattcctggtttctcaacaaatacccaaaaacttatttctgagatatctgaaggtgttaagctagtacaaactgaaacagtaaaaatcatttctgattacactactgaaataacagtagcaaatgatggaatgagagacttgttatttgatattgtgaaaaaaactcaagactcattatacaatggcattaatgatagcgttaaaaccattagagatacagtagcgaatgttgaagcgcaaacttctgaagttataaaaaatcatggtgtgcaattacaatcaacgcaagctgaaattaaaaatctgctagtggatggaattactaaatcacagcaagaagtatccgctggtttgcaagaaaatgctcgaatcattaaagaaggcgtacttgcattagacaaagaattggaaaagggtttaacagattcacttactagccttggtaaacagcttgcttctttatcagaaaaattcgtttctgattacatgcctttgaccgagcgtttgcgtgatcttgtgcgcttagctaaaaatagcgaacccgcataa

SEQ ID NO: 13197 - DNA, 645 bp, Coxiellaceae bacterium HT99
atgactggcctgatgatggtttttatgttaattgccgtaacgttcatgctaagagttgagcaaactacaactctagtcgttaaggagtatgaagaaactaagaacgacctcgctcaagcgttgcaaaaggagtttgctaaagatcttaaacaatggaatgctgaacttcttggtgatatgacaatacggtttgatgatcctgatgttttgtttgacactggatcttatgaggttaaacctgcttttaaagaaatattaaaagactttatcccacgttacattgcacttacatcctcaaaaaagtatagaagttcgattaaagaaattcgtatcgaagggcatacatcaaagaaatggtcatcaggtcaagataagaaaactgcttacataaaaaacatgcgtttgtcacaagaaagagctcaatctatgcttgaatatattttaagcttgccatcgttggttaaacatgaagaatggatgcaaaagcattttacatctagcggtttttcttcatcaagacctattttaaatgataataagtctgtaaatgatgatagatctcagcgtgttgaatttgtaatcgtaacaaatgctgaatctagaatggatgaaatagctaaagagattaaaaatataaatggttaa

SEQ ID NO: 13198 - DNA, 867 bp, Coxiellaceae bacterium HT99
atggttaagcttgtcgatttttataaatttgcgcagttcaacacactcagaaagttaatgcaggctgaacttatacaagaatttaaatttgatagtggtatttctcttttagaagaagatttcatttctaggctagacaatgaaggaattgaaattgaaagtcttaatgaaattgagtttagagatgataaaactcttgggtataaaggccaacgagttttgatttacattcgagatgttaatcactatagggaagaaataaaattacctaagtttcatattgcaacatgtgagacattagaaaaaatgtggaagaacaaacgttctgagcgatatgtattgtatcgtagagaaaatggggtttttcaagttaatgtaatgaaagacagtaagattgacatacgatatgagaaattaaatgtgtgtcgcaattgtttaactcatttaaattgggaaaactatactcaggaaagaacatctagaaatgctattgttgctgatttttctatttcagttttttttaagagattctctaaatctttgctaacctcactgccgtctcatgattctgatactgctccagtaaatgattatcctgatgattgggatgtcacaagtaagcaattaagaattaaagcaggctaccgatgtgagagctgtaaggtatgtttagaagatgctggtcttcgtcaatatctacatgttcatcatatagatggtcaaaaaaacaataatacaaaacataatttgaaagtgttgtgtgcgaagtgtcatgcagatgagcctgatcatggacatatgaaaagtagtcatgattacaaacaatttctgtcgatgtatctacaattaaaatcgaaaaaatattaa

SEQ ID NO: 13199 - DNA, 1653 bp, Vibrio sp. VPAP30
atgcttacatcaatattcgaagcactattgaagggtgctagtgcaacagcaataacggatgtgttcctgatagcgttagctatgatttttttattgtctatgtggtggaggcaatctggtaagcaccattcgtttacaaattacacaccaactttattgacctctttgggaatactcgggactttcactgggatcatctcaggtttgctagatttcaatactactgacattaacaatagtgtcggccccttgttagaggggttgaaaacagcatttatcacaagtttggctggaatgttgttgtctattatctacaaggtagttatctcttcaggcgtattcagcaaggtggttgaaggtggtgaggtggaagaggatatagatgttgtagatctatacaaagcaatgaccctacaagttgaaagcatcaatcagttacgtaaatcaatatctgagaacgacgaatctagtttagttggtcagattaaacttactcgggcagatctaaatgagaatcataaatctgcggaaaaactactttcaagtgtttcagggacccagcaggaaacattcagtcagtttgagaaagaactttggaacaagttggatgagttcgcagatatgatgtctaaatcggcaacggaacaagttgttgacgctttaaatcaagttatacaagactttaataataatcttacggaacagtttggtagtaacttccagaaactcaatgatgctgtgcttgagttggtcacatggcaagagaactacaaaactcaactgatggatatgaagcaccagtatgaccaaggagtcttggcaatatccaaaacagaagaatctgtatccaatatcagtgaagatgccaaagttattccagatacgatgaacatactgaaagaagtcatgcaggtgaatcaacatcaaattcaagaactagataaacacctaaatgcatttaaagatgtaagagataaagcggtagaagcggtgcctgaaattcgagagcaaattgaaaatgcaattgcaggtgctaaagaagcgaatgacaaactagctgttgggatagttgagagtagtgagcatatcagaactgttatatcagaaggtgcggatagttatcgtgatactgtggatcagacacgggcggctttaacagaatctgctcaagcaacagcaaactcgagtgaggaaattaaggataggttagcttcagccttagaagatataaatacccagatgcatggacttattattgagctacaacaagggaatcaaactcttacgagtaattataaggaagctagtcaacaaatactttctgatactgacagagttagagatacgtttactgagagtatggatttaatgaagaaaagtttatcttccacaattgaagaacaagcgatagagcataaaaggcaggcagataaagtttttgcaggcttagaaaaaaccatcgaagaaacactctcacagacaggtgaatcggttcagaaacaggtcaatatgattgatcagacaatgggagaagaaattgaaaaagttatgcaatctatgggtacagctctgacttcaatcagcggtcgatttaccgaagactatagtcggttagtgaagagaatgtcggatatcgtgactcagcaagtttag

SEQ ID NO: 13200 - DNA, 708 bp, Vibrio sp. VPAP30
atgaattcaattttcgaacgtaagcaaactgaacaagacgaatcccattggttatctgtgtctgacttgatggcaggcttaatgatggtattcctattcatagctattgctttaatgcagagtgcttttaaagaaagagacaaaattagagaggttgctgtagcttatcaggaaaatcaagtcgctatttttgatgctttaatgctggagttcaatgacgatctgaaaaggtggaacgcagatatcgacgaggaaactctaacatttactttcaaggctcctgaagtgttatttagtggggggagctctgagttaagtttagcttatcaggagcttctggatgagttttttccgagatacatggaggttttaatgccatttaaggagtctatcaatgaggttaggatagaggggcatacaagtagtgactggaagggactgacaaaagatcaagcttattttgagaacatgcgattgtcacaagaaaggactagaacagttcttaactacgtttataaacttgatagtacaaaaaactatgcgtcttggctcaaaagtcatttttctgctgttggcttatcttcgtcaaagttactttataacgatgatggtacagagaatcagtctaagtcgagacgagtcagtttgcgagtgcttacaaatgctgatattcagattaagcaaatcctacaaggtggatcaacatga

SEQ ID NO: 13201 - DNA, 1131 bp, Vibrio sp. VPAP30
atgaagttaaatgttgatttgtcttcactttggacgaaagtgaatgaaatgggagcagagattaccgactttgatatcggggttgtatggaaagacagtgatatcgagttcgatgatgagctagagagtggtgtcgatattgacatattagatctttcttctgaagctggcatacttagtgttaaaggaagacaagttatactctttatccctgaccatactttcagaatagagaaagcactcattaatggtgctgatggtaataagtttcatatagctgattgtcaaaagctagatgagatgcgtcgaaaaaatcgttttaaagaacgatataaaatcacgaacaatctatcaggaagtttccctatttacggtgactccaactacaaaggtaggttggagggtgaggctcagctcaatgtgtgtaaatggtgtttgagccaactcaattatcaaggtgcagctaatgctagctcgaaagaaagggatgccatagtagaacgatttagtattgaagaattctttaaaacttatagctcactatttaggaaactacccaagcaatatgttgagttagctaaaaaaggttattctgaagattggggggctgtttcttcaaaagtaaggaagaaagccgactatgtttgccagtattgttctgtagatttgaaatcggccaaaagattgctgcatgtacaccatcgcaatggagacaagtctgataactctcccgacaatctcgttgctctatgtgcggattgccataggaaagagccatttcacggacatatgtttgtgaaacatgaagatatggtaaaaataaaccaattacgaagtgatcaagctgtttatgctcaatgtgactggaacacagtaaaaagaaaagcagatctatcgttacaaggggttttagatcattgtgaaaaaggtggctatacagccccagaagtgggttatcaccttaaaacgaataatcaccttgaagcattgatactggagctagcttggcctaaacggaagtttggtattgttctttccgaaccagtagaggttgatgattggactattttgtctttgaaagaagccttagaattttttgggaaaagaagcaatcgcaagcgtaagcgataa

SEQ ID NO: 13202 - DNA, 1683 bp, Photobacterium galatheae
atgttaacttctatttttgaattttatttgaaaggtgtgaatgcatcttcgattactgatttttttctggttactttagtttttattttttgcttatctttactatggaagaaatcagataagcatcatgcattcacaaattacacgcctactttacttacatccttaggtatattgggtactttcacagggattatctcaggattactcgactttgatacaagtgatattgataatagtgttggtccgctactagaaggattaaaaacggcatttataactagtctagcggggatgttactttctattatttataaagttttcatctcgtcgggtgtactaagtaaagttgaagatggtggaaccattgaagaagatatagatattgttgacctttataaagttatgaatcaacaattggatggtatatcactgctaagaaagtctatctcagagaatgatgaagcaagcttagtcggtcagataaaactaacccgatctgatattaacgaaaattataaaaataatggggtttttcttgatctaataacaaaaaacacgacagaattactatctatttccaaatcacagcagaacacatttaatgaatttgaaaaagaactatggctgaagttacaagaatttgctgatatgatgtctaaatcggcgacagaacaagttattgatgcattaaagcaagtgattcaggacttcaatagcaagctcaccgaacaatttggaaagaatttttcagatctaaatgaagcagtgaaagaactggttatttggcaagagaattacaaaaatcaattgaacgacatgaaattacaatacgatctgggagttttagctattgctaaaactgaggaatcagtttcaaatatcagtcgagaagcccaaaatataccagagactatgagtgtccttaagcaaattatggaagtgaatcaacaccaaattcaagaacttgatagtcatttaaatgcctttaaagatgttagagataaagcagtagaagctgtgccagaaatcagaggacaaattgaattagcgatttcaggagcaagagaggcaagtgataagttagccgtcggaattgttgaaagtagcgagcacataaaggctgttatatctgaaggcgctgaaaattatagagatacggtcgatcgaacacgtgcggcattaacagaatcagcccaggcgacagcaaattcgagtgaagagattaaagagaggtttgcaaaaactttagaagatataaacagtcaaatgcatagcttgattttagaaattcagcaaggtagcaaaacacttaatagtaattatagagaagcaagcgaacaaatcattcaggatacggaaaaggtaaggatttcattttctgacagtatggaacaaatgaaaaacagtttatcatctaccattgaagaacaagcattagaacatagaaaacaagctgaccgaatattcgctggattggaaaaaacaatagaagaagctctatctaacaccggagagtcggttcaaaaacaagtgaacatgattgaccaaacaatgggagaagaaatcgagaaagtattgcagtcaatggggacagcattgacctcgattagtggacgttttacagaggactatagccggttggtcaaaaaaatgtctgatatcgttgctcaacaagcgtag

SEQ ID NO: 13203 - DNA, 708 bp, Photobacterium galatheae
atgtcaacagtatttgatagaaagagttcagaacaggatgagtcccattggttatctgtgtcagatctaatggccggactaatgatggttttcttatttattgctattgcgttgatgcagaacgcattcaaggagagagataaaataaaggaagtcgcagtagcatatcaagacaatcaggtggctatatatgaagcattgcagacggagtttagccaagacttatctaggtggaatgctgatattgatgaagacacattgacatttacttttaaagccccggaagtcttatttaaggaaggaagttcaatgcttagccccgattataggagtctactcgatgaatttttcccaagatatatgactatcttaatgccatttaaagaatctattaatgaaattaggatagaagggcatacgagcagtgattggaactctttaaacgctgatgatgcatattttgaaaatatgcgtttatctcaagaaagaactaggtcagtgcttagatatgtgtatagtttaaaaatcaccagtaattatagtgtttgggtgaaaagtcatttttcagcagttggcttatcctcttcaaagttaatttatgatgaaaatggtacagagaataaagtgagatcacgaagggtaagctttcgtgtgttaactaatgcggatattcagattaaacagattttacaaggggaagagtcatga

SEQ ID NO: 13204 - DNA, 1128 bp, Photobacterium galatheae
atgaaactcaacgtcgatttatcttctctttgggcgcgtgttcatcaaatgggggctgaagttacagattttgacattggaacagtttggcaagatggagatatagagtttgatgatgaactcgaaagtgggattgacgttgatatagaggatttaacttctgaggaaggaattcttagtgtaaaaggacgacaagttatactttttattcctgatcatggctttaaagttgaaaaagctttacttgatggttcagagggtaacaagtttcatgtggcagattgtacaaagttagatgaaatgagaagaaaaaatagttttgaagaacgctataaaatcacgaataatttttctggtgaatttcctatttatggtcatggtgcgaacaaacaatttctagagggaacggctggattaaatgtatgtaagctttgtttgaatcatttgaattaccaaggttctgctaatgcaacagttagtgaaagaaacgaaatagttaatcaatttgacattgaagagttcttttccacctatagctctttgtttagaaagctgcccaaacagtatgcttctttagcaaaaaaaggatactcagaagactgggaaagcgtgtcagcggatatcagaaaaaaatcaaactatgtttgtcaatattgttcagttgatttaaaagaagctaaaagattactacatgtacatcatcgcaatcgtgaaaagtcagataattcacctcaaaatcttatagcactctgtgctgattgtcataggaaagaaccatttcatggccatatgtttattaaacatgaagatatgttaacaataaatcgtttacgaggtgagcagaatgtctatgcaaattgtgactggaatacggtgaagagaaaagcagacctctctttgcatggtgttttaaatcattgtgaaaagaaaggttatacagttcctgaagttgggtacttactaaatgtacctgatcgcacctcacctcttcttttggagctggcttggcttcaaaggaagttcggtatcgttttgtctgatccagtggaggtggctggttggactattttgtctttagaggaagcattaagcttttttggaaagaacaaaaagtccactactagataa

SEQ ID NO: 13205 - DNA, 1653 bp, Serratia sp. TEL
atgttagcgccgctttttgaacatttgttccgttctattgactcgatgcttgtcactgatgtttttatcttggcaattattttaacttttatttctgcttggtggtgtgatcacagaaatattcacagtaaatttagagagtatgctccaacgctaatgggagcattaggtatattgggtacattcactggtataataattgggttgctcaactttaatacagaaagtattgatactagtattccacttctattaggtggtttaaaaacagcatttatcaccagtattatagggatgttcttcgctattttatttaacgcacttgatgcttttttcttcgcaaacaaacgagataatttaacagatagtgtgcctgaaaccataacacccgaacatattcatcacgaattaaaagaaaacaaccaatacttggaaaagctgatttcaggtttgagtggcaatgaagaagggtccttagtcgctcaggtaaaactattacgcaatgagataaatgatgcttctcgtgcacaactctctcatcacactgagtttagcaataagctctgggaacaattaaaacagtttgctgatttaatggccaagggtgcaactgaacagataattgatgcacttaaacaagttattatcgattttaataataatttaaccgaacagtttggtgaaaattttaaagctcttgatgcttcggtaaaaaaacttgtcgattggcaggataattacaagaaccaaattgagaatatgagtgaacaatatcaacaaagtgtcgactctttagttgaaacccgcggagctgttgcaggtatctgggaagaatgtaaagaaattccacttgcaatggctgcattacacgatgtgttgaaagttaatcaacatcaaatcaacgagctatctcaacatcttgatgcctttgttttgttacgtgataaagctacagatgcagttcccgttatccatgaaaaattggatgaggtaggcgaattgctcaaagcaggggcattgagtgtcagttcatctctgggccaaacagggactgaattactcgccaatgcgaatgctatgcgaattgctcttgatgaaggctctgaagggttcaggcagtcggttacacagactcagcaagcatttgcatcaatggctcatgatgtaagtaactcttctgaaactttaacctcaacactaggtgaaactattaccgaaatgaaacaaagtggtgatgacttcctcaaatctctagaggcacattctaaagaactgcatcgtaatatggaaaaaaatacaaccgatgtggtcgagctctttagtaaaaccggcgataaatttaatcaacaattatctagtaatgcagaaaatatgtttggaacgatgcaatcgtcctttgacaaagcaagtgctggtttaacttcacaggttaaagagtctgttgaacgctttggtggtgcaattaacgaacagctacatgcttttgaacaagcgactgagcgtgaaatgaatagggaaatgcaatctctggggaatgctctcctgtcaatcagccaagggtttgtcaagaactacgaccatttgataaaagagtatcaaagtgttcttgggcagctgcagccattaattaactcaagacaacaccgcgggtaa

SEQ ID NO: 13206 - DNA, 708 bp, Serratia sp. TEL
atggataaaataattggtaaacaaatacccagccagaatcaggacaatgaacactgggtttcaatgtcagatctaatggcaggactgatgatggtatttatgtttatatccatcgcttatatgcattatgtccgtattgaaaaagaaaaaataaaagaagttgcagtcgcctatgaacaggcccagcaacagctttataatgcattaaatattgagttctccaatgatctacctgattgggatgcggaaatagataaacaaactctcgaagtaagatttaaatcaccggatgttctttttggtttgggtagttcggaattgaagccaaagtttaaagagattcttaacaatttcttccctcggtacttgaaggtactagatcagtataaagaacatatcactgaggttcgaattgaggggcataccagtacagattggacaggggcagctaaccaagatgaagcctattttaataatatggaattgtctcaaggacgcacccgagctgtattgcaatacgtacacagtttgaaagaatcctctgcacaccaaaagtgggtgaaaagtaaattttctgcagtggggtattcgtcttcacatccaattcttaatgcaatgggcaaagaagaccaaagccgctcacgtcgagtgacgtttaaagtcattacaaatgccgaattgcaaattcgtcgcataattcaggagtag

SEQ ID NO: 13207 - DNA, 1092 bp, Serratia sp. TEL
atgaagataaagattgatctcactgagttgatagcattaggaaaaaaaatgctcccttctggagctgattttttcctagatgaagaaagtatcatttttgaccccattgaccttgaattatctgaagggaaagaagttagcattgacgatcttgaccctggaagtggattaatatcttatcgtggtcgccaagtacttttatatatccgtgatcatactgcctgctatgatgctgcagttgaaaatgctgagaaaggtaaacgtttccacatcgcgtggtgtcgaacccttgataatatgaggaagaaaaatagatttgagcgttaccacgcaacaaatcgtgttgatggattattcgagattgatgatggtttaggtcgtagccaagaggtagatctaagagtttgtatgaattgcctagagcggctaaattacaaaggtagcattgacaaaaatcaaaaaagaataattttcaaatcattctcaatgagtgattttttttctcattacagcacttgctttcttcatatgccaaaaggcatctatgagaaatcaaatagtggatatactaaaaattggaaagaaatatctcgctcaacacgagaggttgctgattatcactgtagtgactgtggtgtaaatatgagatcagcacgccatctatgtgatgtgcatcataaaaatggggtaaaatatgataactcacctcagaatttatgtgttttatgcagagattgccatcgaaagcagccattccactctggaattttcgttaaacgtaatgaaatggctgctattcaaaatttacgttcccagcaaggtttattaaaatcacaaagctggtcggagatttatgcgttggtcgatccttccgtaaaaggggatatcgagatgatggaatttaagagataccctatgccaactctaggatttgatttaaagaacaaaaataatgaggtagtagctatcgttgatgcggcatggccactattgaaaatagcagtaagccttgattctgtagaggtcgaaggctgggagatattttctgtcggagagttagtacatcaaattcaatctggtagagtgttctaa

SEQ ID NO: 13208 - DNA, 1767 bp, Pseudoalteromonas sp. P1-25
atgaatatactagaaagtttactacgcggttttgatacaaacgttgttagtggtgttgttttaattttaatgctttttgtttttggtttaggtttgttttacaccaaaaaagctaagcaagttgagtttgttcagtttgttccaacactattaactactatgggtatatttggtacttttttaggtatagttcttggtttattagaatttaaccaaagtgatatagaagccagtattccgttgttgctagcgggtttaaaaacggcatttattacaagtttagcgggtatatttttatctttagtgtttaaaacactgtctacgttttcatttttaaaacctaagcaactagaagatagcatttctcatgcaacgcctgaggcgatattaggtgctatgcaagcgcaggttgcagaaacaaaagttttaaaagaagcgattgttggtaatgaagagtcaacactgtttgggcaattaaaaatattacgtggtgatattaatgataatgcaaaaacatcgattaatattgcccaagaacaagctgtaaaacaacaagagaactttgaggcgtttagtgaaaagctatggcttaaactacaagactttgcagatactttatcaaagtcagctacagagcaagttattgaagcgctaaaacaggtaattagtgattttaataataatttaacagagcagtttggtgataactttaaacaattaaatgaagcggtagttaaattagttgaatggcaagaaaactataaagttcagcttaaagaaatgagtgaccaatacgctcatggtgttgcttctatttctgctactgaatcatctgttgcccatattagtgagcaaagccaaataattcctcaatctatgggtgaattgaaaggtgttatggaggttaatcaacatcaattagctgagcttgaacgccatctagaggcctttaaagatatgcgcgataaagctgttgaagccgtcccgcaaattcaaaaacaagtggaagctacagtaaacgatatatcggctgccgtaacaacagcaagtgatcattataaaacccttcttacgcaatcagacgattacataaaagctcacgttcagacatctaatgatttattagacaagtttgctcatgaaacagagaaaggcattaatagtgttggcgatcgtttgattgaaagctcagacaagattggtaaagaaatccaaactgcaggtaatgagtttacagataatacagctcgaaccaacgaaagcttaaagacaacatctgatcatttacagtcgcaaactgaagtaattaagcagcacttacaagatacagtgactgacttaaataacaatatgcgagacatgattgaaaaattagtcgatgacgctaaagatattacttcaactatgaagcaagctaatcaaaaccttgtgacagatacagagcaggtgcgtgatactgtagttaagtcggctgaaaaactacagcaacgccttaatgaagtgattgatgacgctgcgacacagcaaattaatcaagctaaacgtacttttgacgcaatggaaaatgaggttaaaaagcaggtcggtatgacaggggaagctgtcgactcgcaactaaaacttattgatacagcgatgcagcaagaaataaaccgtgtaatgaacgaaatgggtaaagcacttgcacaggtaagcggtaaatttgttgatgattacattaagctaactaaagcgatgaatgaagttgtaagtcagcgagtaatgtaa

SEQ ID NO: 13209 - DNA, 699 bp, Pseudoalteromonas sp. P1-25
atggaaaagatatttggctctcaaaacaactcacaagatagtggtgatcattggttaactgtatcagatttgatggctggtttaatggttgtattcttgtttatagctattgtttttatgatgataactcaaaaagaaaatgacaaaattaaagatgttgctgttgcttaccaacaaaatcaagttgctatatatgaagctctagaaagcgaatttgaaaaagatcttgataagtggggagcaacaatagacaaagaaacgctagcgttcaattttcaatctcctgatgttttatttgctaataatgaaactagattaagcgacgcatataaagaaatattaaacgactttttcccccgttatatcaacgtgcttgccccgtttagagactctttagatgaaattcgtattgagggtcatacttcaagtgttggtttaagaggctctacagaggcgcaagcatatttttacaatatgcgattatctcaaggacgaacacgttctgtattagagtatggttacgcacttatgcctgatgagtctgattggattaaagctaatattgctgcagttggtttttcatcttcgcgcttgattaaaaagaatggtgtggaagatgctgcaaggtcaaggcgtgtatcatttagggctattactaatgctgatattcaaataaaacggatactggaggcgcagtaa

SEQ ID NO: 13210 - DNA, 1137 bp, Pseudoalteromonas sp. P1-25
atgaagctaacagttgattttagtgcgttacatagagcggtagcacctttagggaaaatagtaactgacttttctattaccagtgatgcttctgaactcgaaagcattggcagtcatcttaatcaagggatgattttaggtaaagatgtacagttagatgaaatcgatgggtcaaacggtgtattaaactatgatggccatcaggttatgctatacataccagatcaaggagatgacattgaagcagtgttgtctaatggtaaattagggcgacgtatacatgtggcagagtgttctactcttgagttgatgcgagaaacaggccggtttaaacgctatgatgtaattaatcgggttgatggctttttccctgtattcggctcaagctacagaggtggacctaatacagagggagaggctgatttaggtgtatgtaaaaactgcttaaaaatacttaattacaagggttactctactcaaagtcctcaagttaaaaatcaagtatttaatagtttttcgtttgaacaatttttcgaagtttatagctcctactttaaaagtttacctgttaacagtaagaaacacacaagtggttatacgccagattggccatcaatttcagctaagttaagaagcgatttgaattatacatgtgagcaatgcggcgttgaccttaaatctgaaaaaaggctcttacatactcatcatatcaatgggaataaagcagataatgaacgagataatttgagagtactttgtgcagattgccataaaaagcagccacatcatgatcatatatatgtaagcaactcagatattctcaaaattaaccagctaagacgagaacaacataagtttgacgtgtttaattacgataatctgcgagagtgtgcagatacagcattagatggccttttacaaaaatgtgagtcgactaggttaccaggtgctgagctagggattgttattcaagataaagaaacatttgtttcaatcgatctttgctggccaaggcgtaaagtagcggtgcttattaatatgagtaattctaatatattaagaagacacggctggactgtatttactgcattcgatgccttaaataactttgagaattttcagcgccaaattagataa

SEQ ID NO: 13211 - DNA, 1644 bp, Pseudomonas sp. Leaf48
atgattagccaataccttgagggtgcactgagatccgcctcagcggggacgatgactgagttgttcatctgggtaatgttggcaatctttgccatggcaatcattcaaggcaaaactggcaagcacggcttttttgtcgagcatgcgcccgcggtactggtatcgctgggtattttgggtaccttcataggtatcgttatcggtttgctggacttcaatgcacacgacatcaaaagcagcattgaggacctcctcgatggtctgaagaccgcatttatcacaagcctggtcggcatgacgctgtcaattgtgctgaaggctttggatgcttggtggtttgagcccgcgcgcgggaagacagagcagcctgactcagttacacctgagcatatctacggcgtgatgagccggcaggaaaagctgttagaggcgcttaatcactccctagcgggcagtgaggaaggctcggtagcggggcaactcaagttattacggtcagatatgggcgacttccggaatggcttggatcgtggacagcacgagtttcaggacaagctttttaaacacttggctctgtttagcgagatgctggcgcaatctgccacagagacggtgatcaatgcacttcgacaggtgattcaggacttcaataagcacttggtggagcagtttggcgacaacttcaaggcacttaatgagtctgtcggtaagatggtcgactggcaggagcagtacaagcagcatgtagaagtgctggaggcacgtatcgaaacggctgtccgtgagcttgaacgtactgctacagctaatgaggctatcagtcgttcgttaacgacctctgaacaatccattggctcaattgataatcactgccagagcattccaactgctatcggccagctagagccagttctgcaggtcaatcagcaccaaattcaggagctgcaacggcatctggatgtgttcattgctatgcgcgataaagccacaagcgcggtgccagaactgcaacagcatatggatactctctctaaggcgctctcagatggcatgcagggcgtcatatctaccatgcacgagggctcaatggagttcgggcgctcagttgatctcaccaatacagccttgaccgaggcctcgcatgtgatcagcagccagacggaacagatcaacgagaatatgaaggatgcggcgcaggagttcggctcctctgtacgcggcaccctagaaagcatgctgaataattcgaagtccctggagcagcaaatggggctggcgatcgagcaggcgtctggctcattgacggaaacatttaaacaagcgaccggtaagattcaagacagccttacatcgacagttgatgccgcgctgaatacgttgcgttcaaccgtagaaggcaacctcagccaaactgagtccctaattcaaggctctgctaaccgcactatggggtccgtggaagctcaggtcagagaggccaccgagcgggcgaacgcatccctgcaggcgcagcttaatgctatggatcaagccatcgggcgtgagttagagaaagtcttcagggaaatgggatcggccctggccactatctctcgcaggattgctgatgatcatgcagaacttgttagcaggacgcgttcgtaa

SEQ ID NO: 13212 - DNA, 723 bp, Pseudomonas sp. Leaf48
ctggataatttgttccgcagtcggcactcgaaaaaggacgatgccgagcactggattggtatttccgatcttatgtccggactaatgatgatgttcttgttcatcgctgttgcctacatgtactacgtgcaggtcgaacgagaaaacatcaaggagatcgcggtcgcctataaggacacgcaggtagcaatttacaacgacctgaacaatgagtttaagagtgacctcccacgttggaatgcgtcgatagatcgcaatactctgcaagtgaccttcaacaaccccgaggtactgtttcgctcaggctcaccggagctaagtacacagttccaagcaatgctctccgacttctttccacgttatgtggctgtgctttcccgctacaggggggcgattgatgagatacgtatcgaagggcataccagcagtgattggggaacgctgcatggcgatgaagcctattttccgaacatggcgctgtcacaggatcggacgcgctcagtgctgcagtacgtactatcgaagttgacatccggagcagatagggactgggttcgttcgagctttgcggcagtgggctactcctcgtcaaggcgacttgtggatgcaagtagcaccgctgaagacgccgcacgctcccgacgcgttaactttcgggtgttcactaattccgagctgcagatccgcacaatcattgagagactcgatggaaatcaacgttga

SEQ ID NO: 13213 - DNA, 1086 bp, Pseudomonas sp. Leaf48
atggaaatcaacgttgatttttccgggctgtgggctcaggtcaagcggctaaatgcggagacggttgatttcgattggacggccgccgcacagcttgaccctatcgatatcgcgctgttggaggggcgcgaggttcggctcgacgatttaaatgtcattaatgggctgctgagtgtcgatgggcgtcaggtgttactgtacatccctgaccagttctccccagttgacgtagtgcagctttctccagataaaggtaagcgtttccatgtggcggactgcaaaacgctgaacgacatgcgcagcaaaggtcgatttgaacgctacgtggtgactaataatctgagcgggattttccccattagtggcaagagcagccgaggtgtccgtgaggaactggattctcgtctgcttgtatgtaagaactgcctagaaaagctcaattaccagaattactgccatgagagcgcacgctcgactatctggaatggttttgagattggcaaattctttgaaacttacagtacgagctttcgccacctaccgcgcagcttgacgcagcgtgctctcgggaatgattacaccaaggactgggctgaaatttctgcggatgtgaggcggcgttgtggattcacttgcgaggcatgtgctgtgagcctcacagagcatcgtcatttactgcacgttcaccacgtcaacggcgtaaaacaggacaacagcaccgtaaaccttcgccccctctgtgctgactgtcaccgtaaacagccgctgcacgaccacatgtttatctcgactcaaaacatgcagatacttaatcgtttgcgtcgtgagcagagcatcgttgctgacgactggaagcaggctatagcactagccgatcttgcagtgcatggcgggcttatgcacggtcgacacaaaggttttggggttcccgtgattggttacgaagtcatgaatgcccaggaactggtggtcgcagaggtcgcagctgcgtggcccgatcatcgtatagcgatgtatgttgccgacgcccctgccattgagggttgggctgtactaaatccggttgagtttattgataaatattga

SEQ ID NO: 13214 - DNA, 1308 bp, Burkholderia sp. LMG 29321
atgaaagcacgagcagttctcgcagtctcctgcgcagctctgtcgccctatgcggtggcagcaagtccgttttcagcggtgttttctgacacaacgacactgttttttattctcctgaacgctgtactgacgtgctatttcgtcttctatagatttaaccgctttgcggtggtccacgggccggagatactgacgaccgtcggcatcctcggctgtttcctgggcatcgccctcgcgctgcttcattttgacgcgtcgaacgtctcggagagcgttccgcacctgctggaaggtgtcaaaacagctttctgggcatcagtcagcggcgtcttcgggtcacttcttatccgggcgaggcatggtcttcagaaaaggccaattccacaggccgatggagctccgaagtccgcgacattggacgatgtagtcgcggcaacgcacgccttgcaacgcagtctctctgggaccgaagagggcagcctcttgtcgcagttgaagctgatgcgccaagagcaaggggacgagctcaagcaactacggacatcgttcgatacgttcgctaagcgaatgtcggaagacggctcgaaggcactcatcgaagcgctcaaggaagtgattcgggacttcaacacacaaatcaacgagcagttcggcgagaacttcaagcatctgaactctgcggtcgagaagctagtggtctggcagcagcagtacaaggaggaactggacaagctacaggtgctccagaagtcgtcggctgacgacctccgcaatgcatcgtccggactggcgctcttcatcgatagagcatcgggcttcgctagcacggcggaagcgctcgagcggaccttgaagggtttggcgcagcaacaccaggcgatagaccagtctcagcgttcaatggctgaggtgttgcttcagatgaaggatgtcacaccacaattctcgcgcaaggtcgatgagatgactgaggcgatgaagcaaggcgtcgcgaaggttcactctgatacggcggaggttgtgaagacatttggcacgcagttgcaatcgtcgtcggccgagctgaagcagttgctcacggacacaatgaagaaatcgcagactgaggtaagcgacaacctgaccaggtcaatggagtcaatcaggcagagtgtcgtcgccttggacaagggactgcaggaagagctttcgaagagccttgaatcgctcgggcgccaactggcatccctctcggagaagttcgtctcggattacacgcctctgaccgaccgtctgcgcgaagtcgtccgaatcgcgaaatcagcctaa

SEQ ID NO: 13215 - DNA, 693 bp, Burkholderia sp. LMG 29321
atggatttcgagcacagcaaccagtcatactggattccgatggccgacttgatgaccggattgatgatggtcttcatgttgttgacggccgccttcatgctccgagtcgaacagactacaacgcttgtggtgaaagaatacgagacgaccaagcgcgacatgcaactcgctctgcagaaggagttcgcgaaagacttgaaacagtggaacgctgagattcttggggacatgactatccggttcaatgaccccacggtgttgttcgcaaccggctcctcggaacttcgcccgaaattcaaggaggtactgggtcaattcttccctcggtacgttcgtttgcttacgtcgcagcagtacaagagcgcagtcaaagagattcgaatcgagggccacacgagcgccgcgtggactggaacttccgacgagaaggtagcgtatttccgaaatatggaactatcgcaggcgcgcacgcggagcaccctcgagtaccttctttcactgtcggcgcttcgcgacaacgagaagtggctggtacaacacgtcactgccaacgggctctcgtcgtcgcggccgctgtctgcggatgagcagacgtcaaaggcacagcttgccaatcagcgggtcgagttccgcatcgtaacgaacgctagcgagaagatggacgctatcgctgagaaactgcaaaagcaatga

SEQ ID NO: 13216 - DNA, 846 bp, Burkholderia sp. LMG 29321
atgagcatccagctacctgattttctcgcttggggagcgttcaacacgctccgacaccacatgggcgcgccgcttatcgaccggttctgccccaagcggcccatcaaagagattgagctaccccttggtgagcgtctcaaggacggcggcgtcgacgtcagcgtcgaccaaattgaaatccttgacgaccgcacgctcgcatacaagggtttccgcgttctggtctacatcagagatgtgccgaacttgggccatagagaggagatgccgcgatatcatctcgcctactgccacaccctcgaaatgatgtaccgcaacaagcggtcagagcgatacgtcgtcgcaaactccgactcgggccttttccaggtaaatgtcatcgatggcgcggtaaactcgaagctcgttgcgctcaacgtctgccagaactgtctcgccggcatctcgtggaaggggtttgacatgcagcagccccgaccgcatcgactggacctggtctcgagcttcaggcttccggagtttttcgcgaagtacccgcgtgacctgatggcgaacaagccgggccacacgtctgacactgcccctctcaacgattacccatctggctggaccgaaatctccgctcagacgaagcgaaaccgcgggttctgctgcggaaaatgtcggacgacattggtgcaaacggatgcgaagttcctccatgtccaccaccggaatggacagaagaatgacaatcgtgacgagaaccttgacgttctctgcatcggatgtcatgcggaagagccgttccactcacatatgaagcgcctgcctgactataaagttttcatcgagagatacaggtag

SEQ ID NO: 13217 - DNA, 1653 bp, Serratia sp. 2880STDY5682895; identical to SEQ ID NO: 12755

SEQ ID NO: 13218 - DNA, 618 bp, Serratia sp. 2880STDY5682895; identical to SEQ ID NO: 12756

SEQ ID NO: 13219 - DNA, 1092 bp, Serratia sp. 2880STDY5682895; identical to SEQ ID NO: 12757

SEQ ID NO: 13220 - protein, 478 aa, Enterococcus faecium DO
MDKKVLIKRFSEAIEKGNAAIFAGAGLSMSQGYVSWPELLNDPATEIGLDSKKETDLVTLAQYYKNENGGSRGILNQILMDNFGEELEISENHRILASLPIETYWTTNYDHLIEKSIREAYKNPQVKKNYTQLATTNPNVDTIVYKMHGDIDDVSSTVITRDDYEKYDDDSYALFKETLKGDLLTKTFLFLGFSFTDPNLERILSDIRWVLRENQRPHYCIMRKILKENFVDSEDFFDQERYNYELTKRRLQINDLSRFSINVVEVDDYSEITDILKSIRKKYLRKTIFISGSAVDYTPFTSESKGLKFVEKLAYRLSESGYRIVSGYGLGIGNSIVSGVLKQRRNLRKNNIQDVLSLRPLPLDMPHEWRRYRENIIAESGISIFVFGNKLESGEIVTADGMIEEFELSVQNENIVVPIGFTKGASKVLFDKIQENFSDYFDDSLKSKFQALEKLDTEGEVDKKVEQIVSLINSIQED

SEQ ID NO: 13221 - protein, 161 aa, Enterococcus faecium DO
MVRRVFFSFHYADVTRAMVVRNSWTLRGTKEAGFVDKAEFEKVKRNGDIAIKNWIDNQLIGTSVTVVLIGKETLDREYVKYEIQESYKRGNAILAVNIGKIKDFNQMTTTSQSVIKIIGQKPDGEYLWFDEIIDGQYDYISDDGYNNLGTWIDSAAYKKGK

SEQ ID NO: 13222 - protein, 283 aa, Enterococcus faecium DO
MYKAYELDFTNADLNAFSSSSQSYTHVVNQIDHNQKSINKRIENLFESENDLVDYYSKDSKILDADEIIKDWFPTIKADIFISHSHADEKLAIRFASWLFENFGLTAFIDSSVWGYSSDLLKKIDQKYCYKEQTKTYDYDKRNVTTSHVHMMLSTALNNMIDSTECLFFLNTPNSISLSNEITNEQKFTYSPWLYSELTTASIVEKKNPRLESNPQMSTEDVRSIIKHYSSQENLQIKYSLNLSELTYLRKADLKKWALDAVECTKGSNTLDILYKNTIFTNL

SEQ ID NO: 13223 - protein, 477 aa, Bacillus sp. B14905
MYTTQINRFIKTYTKEIEDSNAAIFAGAGLSQPAGYVNWKELMRDIAEDLNLDIELESDLVALAQYHVNESGGRGKVNQILIDEFTKGVKETENHKILADLSIDTYWTTNYDSLIEDTLETIGKKVDTKRVPENLANSVSKTDAIVYKMHGDKSLPHKAVLTKDDYEGYNIERQLFSSALQGDLISKTFLFIGFSFDDPNLTYILSRIRLLLGENSRTHYCFMKQIERKDYKTEEEFHYAQIKQELRINDLKRYSISVLLVNSYNQITEILQKVHDNVKRGNIFISGSATVFDNWEEEKALQFSTNLSKAIIQSGHNIVSGFGLGIGSCIVSGALEELYQTGNRKIEERLRARPFPQNTTGDLPLKDLWTKYRDDMLSSVGIAIFIFGNKKNESEEKIEANGMIKEFEIAIGKGVIPIPIGATGDAALTIWTRVKENFEDYVGLPSLIELYDQLGDTNKSPEELITTILQIIKQLKR

SEQ ID NO: 13224 - protein, 226 aa, Bacillus sp. B14905
MGRKIFVSYKYADSNVYPLENQKYSTTVRSYVDELQDKLKDEDHINKGEADGDDLSDFKDETIWTKLKDKIFDSTLTIVLISPNMKEIFTSEEDQWIPWEISYSLKAHTRNGKVSGTNAMLAIVLPDQNNSYSYYIEDNTCEYCKCRTLKTNTLFTILKKNMFNIKSPTFSDCSNHSEYNKVYLGEESYIRSVKWCDFINDVEGYIQAAYGIKEKIDDYEIYKKVL

SEQ ID NO: 13225 - protein, 478 aa, Enterococcus faecium E1162; identical to SEQ ID NO: 13220

SEQ ID NO: 13226 - protein, 161 aa, Enterococcus faecium E1162; identical to SEQ ID NO: 13221

SEQ ID NO: 13227 - protein, 283 aa, Enterococcus faecium E1162; identical to SEQ ID NO: 13222

SEQ ID NO: 13228 - protein, 478 aa, Enterococcus faecium U0317; identical to SEQ ID NO: 13220

SEQ ID NO: 13229 - protein, 161 aa, Enterococcus faecium U0317; identical to SEQ ID NO: 13221

SEQ ID NO: 13230 - protein, 283 aa, Enterococcus faecium U0317; identical to SEQ ID NO: 13222

SEQ ID NO: 13231 - protein, 461 aa, Peptoniphilus lacrimalis 315-B
MIREIEKAIKSDELGAFIGAGLSIPAGFSSWKELLREPAEEIGLDVEKENDLVNLAQYYSNSKNRTSIDDLIKERFSQLAKPTENHKLLSQLPISTFWTTNYDKLIEKALENNMKKPYVKIKDEHLRGTNHNFDAIVYKLHGDVEAPEDAVITRSDYEEFGYNKRKLFREVLEGDLLTKTFLFLGFSFEDPNFNYVIGRLRVLLDEKNTRKHYCIMKRIQDTDEDYEYKKVRQELQIEDLNRYGIFTYLVNKYDEITEILSTLVDRFRRKTIFISGSAYSYSTYSQKIGENFIHKLSFELSKNGYHIVNGYGKGVGEFVLNGVADYCLAHKSKINDFLTLMPFPQNSSLGIDLDKLYKENREQMIENCGIAIFIFGNKETEDIAHGVMDEFELCKKHGLVCLPIEHTGGAAKEIYNQTTQEITDENIITAIGQANNQCHGDIDMSIKNIVQAVKILNKEEF

SEQ ID NO: 13232 - protein, 165 aa, Peptoniphilus lacrimalis 315-B
MAKRQVFFSFHYDNDNWRAVQVRNMGKVDSSSTFSDNDWEEVKEKTDTKIETWIDEQVNKRSCLVVLIGEKTANRKWINYEIKKAYELNKGIVGIYIHKLENSLGEQDDKCNNPFDYLILEGKKLSKYVKCFDSVYLSSKNVYSDIKDNIEDLIEYGIEHKPPTW

SEQ ID NO: 13233 - protein, 474 aa, Peptostreptococcus stomatis DSM 17678
MFTIIKGEVSKKDLIREVEKAIKGDGLGAFIGAGLSITAGFCSWKELLREPAEEIGLDVEKESDLVNLAQYYSNSKKRTSIDDLIKDQFSQLVKPTENHKLLSQLPISTFWTTNYDRLIEKALENNMKKPYVKTKDEQLRGTNHNFDAIVYKLHGDVGTPEDAVITRSDYEEFGYNKRKLFREVLEGDLLTKTFLFLGFSFEDPNFNYVIGRLRVLLDEKNTRKHYCIMKRVQDTVENSEYEKAKQELRIEDLNRYGIFTCLVNDYNEITEILSTLVDKYRRKTIFISGSAYCYPGYSHEIARTFIHKLSFELSKNGYRIVNGYGKGIGEFVLNGVADYCLTHNSKINDFLTLMPFPQNSSLGIDLDTLYKENREQMIENCGIAIFIFGNKETENIASGVLEEYELSKEHGLACLPIEYTGGSSKEIYDKAIQEISDKNTIKAIEQANKQCDGDIDMSVRNIMQAVKILNKEDF

SEQ ID NO: 13234 - protein, 165 aa, Peptostreptococcus stomatis DSM 17678
MTKRQVFFSFHYDNDNWRAGQVRKMGKVDSSSTFSDNDWEEVKEKSESKIKEWIDEQLNKRSCLVVLIGEKTANRKWINYEIKKAYELNKGIVGIYIHKLKNSSGEQDNKGENPFDYLILKGEKLSKNVKCFDSGYSSSKYVYSDIKDNIEDLIEHGIEHKPPTW

SEQ ID NO: 13235 - protein, 471 aa, Bacteroides ovatus SD CMC 3f
MPINKNVFIKNYLSALNNGDAAIFAGAGLSAPSGCVNWKQLLREIAEELELDIEKESDLVAIAQYYYNKNGCNRTKLNDTIKDAFQTGKQPNVNHNILAKLPIFTYWTTNYDKLIEKALENNGKICDIKTCCANLTTTLKGRNVVVYKMHGDVDHPEDAVLIRDDYESYNQEKAPFINTLSGDLMTKTFLFIGFSFTDPNFYYICAHLRARLKGNMREHYCFLKDVSKTDYKDEDEFKYEKRKLSYFIDDLKRFNIKTVLIQEYSEITEILQSIKRVYNGRTVYLSGAAAEYNPDGKDAYEKFISKLSGRLIYEGYKIVSGYGLGVGSAVISGALSEIYYNQKKSLTDQLILRPFPQGDDAKEMWETYRQDMISYSGISIFLLGNKKESGTIVPSNGMRSEYEISKEQGNFLIPIGRTGYISKELWNELLEERQDDHTFDIYRHDIESLGDDTKTLDEVIEIVIELIKKVK

SEQ ID NO: 13236 - protein, 182 aa, Bacteroides ovatus SD CMC 3f
MTKRQVFYSFHFKNDSWRAGQVRNIGVVEGNMPVSSNDWEEVKRKGDDSIKRWIDTHMDYRSCVIVLIGSDTASREWCRYEIKHAWKEGKGVVGIYVHNLKNIEGEQDIKGDNPFKLFCIDKTFNYIIEHKHPADSNEINLSEICKTYDPPYKISTNVYDYIKEHINEWVEEAIRIRNQYPK

SEQ ID NO: 13237 - protein, 203 aa, Bacteroides ovatus SD CMC 3f
MAHKTFISYKYSEAQDLRDRIIKALGDDASYYQGETSDSPDLTDTSTENIKKNLKDMMYDTSVTIVIISPHIKESKWIDWEIEYCLKNITRKNRTSHTNGVVGVIMKVNGGYDWFKYTSTKPDGCSVTNYYDSKVYDIINNNRYNQYPKVYSCNQCKCVNALTGSYIAFVEEDEFLSNPQKYINNAYDKSEKDAEGYNLTKQR

SEQ ID NO: 13238 - protein, 500 aa, Bacillus cereus ATCC 14579
MTVIERDKKNFVNSYVRALNNGRAAIFAGAGVSIPSGGISWSDLLREEAESIGLDISKENDLISVAQYIYNESGTKQTITNLLKNKIAREGKINKNHEIIRSLPIRKIWTTNYDDFLEKAYLDDNKVIDVKKSIEDMATEIDFSETTIYKMHGDIGIPSSTVLLKDDYEIYDKKNELFTKTLQTDLLSNTFLFIGFSFDDPNLESILSKVRIMLEGNPRRHYCLLKKISEGDPEFDQFDDPKEKARELEYRINKQRLRVADLLRYGIKAILVDSYDEMTQLLDSIKRKYLSTKVFVSGAYEEVDNFLGKTGNDALKQADKFCVRLGEALFTEGFEISSGFGLGVGRNVVTGVLIQESLLNHTRVGSQLVIRPFPTQQTVPEKRAYREKILSECGVTICVFGNKKVSGSNELQNSPGVEEEARIAGELGQLVLSIGSTGYVAKKIWEDQLGKITTTFSENSQILESYHNLNSPNRSIDQLIDDILIILKEYKTNPKKFKIV

SEQ ID NO: 13239 - protein, 206 aa, Bacillus cereus ATCC 14579
MGTNVFISFRFSDGNDLKEELEELIESSTEVFNRSENEDRSTMSEDTIQKYLYDKLKQTSVTIVLLTPKAVSYKKDIWGAYDDWLYDELRYSLEDRNENRTNGVVAVYTNESKDLILSKSSHTCSVCNQESNCEVILDFDNLVRKNVLNIKTAYKSNPCNNLFDEDKDSYISLVHIDDFKKDYVKYIEAAKEKRDRKDEFELVKKM

SEQ ID NO: 13240 - protein, 473 aa, Paenibacillus curdlanolyticus YK9
MASKQELVREFVRAVSEGYAAIFAGAGLSRGSGYINWKELVRPLASEIGLNVDKEHDLIAIAQYYRNERGTRYAINQRILNEFTRGAVDNENIEILTRLPISTYWTTNYDELLEENLRRNNRKADVKTTQESLANNIYDRDAVVYKMHGDVRSPENAVLTKDDYELYGNERPLFRTALQGDLISKTFLFIGFSFEDPNLDYVLSQIRVLLGESQRDHYCFFQKISKQNGESEADYQYNLARQDLRIKDLRRYGIQAVILDSYDEITEILQDIEHGYLLKNIFISGSIAEFGEEWTRERVNFFTHNLAKKLVLEDYRIVSGFGFGIGSTIINGALEEIMRSKYKHVDEHLCLRPFPQYSSGEMPMNELIKEYRVDMIQQAGIAVFIFGNKKDENGDITVADGMIEEFKIAKKQGKIIIPVCSTGGASAIIYNEVIKNSEQYPYLDGYLDKLAEVTEADSLIDLIYSIIKNQQII

SEQ ID NO: 13241 - protein, 166 aa, Paenibacillus curdlanolyticus YK9
MAKRQVFFSFEYNKDAWRASQIKEMGKVDGSSTFSANDWEEVKEKSDAKIKEWIDSQMVMRSCLVVLIGATTSGRKWIKYEIEKAYELNKGIVGIHIHNLKDSQGKQTTKGSNPFYNIFIGENNERLSKYVTCFDSVYSSSKYVYDDIKDKIEQLIEDAIANKAPQ

SEQ ID NO: 13242 - protein, 203 aa, Paenibacillus curdlanolyticus YK9
MAHKTFISYKYSEARSLRDLIIQSLGEDATYYQGETSDSPDLTDTSTENIKRKLTDMMYDTSVTIVIISPNIKKSEWIEWEIEYSLKNISRKGRTSHTNGVVGVIMKHNGGYSWFKTSSDKSDGCSSSSYDENKVYGIINNNRFNQNPKVYSCDTCKTVDALTGSYIAYVEEETFLSNPEKYINNAFDKSENNAKGYDIVKTR

SEQ ID NO: 13243 - protein, 466 aa, Aggregatibacter actinomycetemcomitans serotype b str. SCC1398
MNKKQLIKELVNELSANNLAIFAGAGLSVSAGFVDWKILLRDLADEMNLDIDKEESNLVSLAQYYVNSKCGKRSKINQLILDEFSQSATLTENHKILARLPIDTFWTTNYDSMIETALKEAGKVVDVKHCVEQLPISIHKRDVVVYKMHGDASLPNQTVLIKDDYEKFHLTRNDFFNALRGDLLTKRFLFLGFSFSDPNIDYILSRIRASYSENQKEHFCILRKVQKNENEPQDEFEYRQRKQQFFISDLERVGISALLIDDYSEITEILMEIEQAQKRKTIFISGAAENYSPYSQQEVEQFVSSLSQEILKLGYRIVTGFGLGIGSSVISGAIKHLTEQNLKIDEDYLILRPFPQNKEGKELWSAWREDMISYAGISIFLFGNKLQNGNLILSNGMQEEFDISKRNGNVLIPVAATGYMAKQLWDNEMNKESAKEVENEMQALSKENISLDELRSNILSILKKVK

SEQ ID NO: 13244 - protein, 160 aa, Aggregatibacter actinomycetemcomitans serotype b str. SCC1398
MKRNVFYSFHYEKDVLRVQQVRNIGKLEGNPPATPNTWEEIKRKGDKEIQKWIDENLSGKSCLVVLIGEDTSKRKWVKYEIQKAWNDGKGVLGIYIHNLKDPKSGECRKGDNPFEQFTFENGSKLSSIVKCYNPKSSDAYNDIADNIEKWIEEAISIRKK

SEQ ID NO: 13245 - protein, 214 aa, Aggregatibacter actinomycetemcomitans serotype b str. SCC1398
MGNKIFISYKYSDNAVKQLKEPNNLFSFYSQYKTTARDYVDIIKNKFERDDIHINKGENDNESLAGFKTETIRSKLAEKIFDSSVTIVLISPNIKNSWKSEKDQWIPWEIAYSLRSKRRPDNRSKRNAILLVVLPDRYGYYDYVNSYGFYFDIIQRNLNNLHTPYTTYKLRNGCSNSYMLQCNWDKFISNPNAWIEAAIEIRDKGNNYNIVIRP

SEQ ID NO: 13246 - protein, 466 aa, Aggregatibacter actinomycetemcomitans serotype b str. I23C
MNKKQLIKELVNELSANNLAIFAGAGLSVSAGFVDWKILLRDLADEMNLDIDKEESNLVSLAQYYVNSKCGKRSKINQLILDEFSQSATLTENHKILARLPIDTFWTTNYDSMIETALKEAGKVVDVKHCVEQLPISIHKRDVVVYKMHGDASLPNQTVLIKDDYEKFHLTRNDFFNALRGDLLTKRFLFLGFSFSDPNIDYILSRIRASYSENQKEHFCILRKVQKNENEPQDEFEYRQRKQQFFISDLERVGISALLIDDYSEITEILMEIEQAQKRKTIFISGAAENYSPYSQQEVEQFVSSLSQEILKLGYRIVTGFGLGIGSSVISGAIKHLTEQNLKIDEDYLIIRPFPQNKEGKELWSAWREDMISYAGISIFLFGNKLQNGNLILSNGMQEEFDISKRNGNVLIPVAATGYMAKQLWDNEMNKESAKEVENEMQALSKENISLDELRSNILSILKKVK

SEQ ID NO: 13247 - protein, 160 aa, Aggregatibacter actinomycetemcomitans serotype b str. I23C
MKRNVFYSFHYEKDVFRVQQVRNIGKLEGNPPATPNTWEEIKRKGDKEIQKWIDENLSGKSCLVVLIGEDTSKRKWVKYEIQKAWNDGKGVLGIYIHNLKDPKSGECRKGDNPFEQFTFENGSKLSSIVKCYNPKSSDAYNDIADNIEKWIEEAISIRKK

SEQ ID NO: 13248 - protein, 214 aa, Aggregatibacter actinomycetemcomitans serotype b str. I23C
MGNKIFISYKYSDNAVKQLKEPNNLFSFYSQYKTTARDYVDIIQNKFERDDIHINKGENDNESLAGFKTETIRSKLAEKIFDSSVTIVLISPNIKNSWKSEKDQWIPWEIAYSLRSERRPDNRSKRNAILLVVLPDRYGYYDYVNSYGFYFDIIQRNLNNLHTPYTTYKLRNGCSNSYMLQCNWDKFISNPNAWIEAAIEIRDKGNNYNIVIRP

SEQ ID NO: 13249 - protein, 478 aa, Enterococcus faecium E4452; identical to SEQ ID NO: 13220

SEQ ID NO: 13250 - protein, 161 aa, Enterococcus faecium E4452; identical to SEQ ID NO: 13221

SEQ ID NO: 13251 - protein, 283 aa, Enterococcus faecium E4452; identical to SEQ ID NO: 13222

SEQ ID NO: 13252 - protein, 473 aa, Rhizobium grahamii CCGE 502
MNRDVSRFIDDYFGEMIAGNAAILAGAGLSVPAGFVDWRELVRPLADELELDIDRETDLVAVAQFHVNANGNNRNRLHRAVIEALSADNPPTVNHGLLARLPIVTWWTTNYDKLIETALKDAGKIVDVKTSVAQLANTRPRRDAIVYKMHGDVDRPDEAIVTRDDYERYNRDRGAFINALAGDLVSKTFLFLGFSFTDPNLDQVLARLRLTFESNQRRHYAIFKKRTRLSTEDAASFEHAKIRQALVIEDLKRFNVKVVLVDDYGDITEILQEFERRYRRQTVFVSASAASFEPWGEAAVTNFMRTLGKKLVAKNMKIATGLGLGVGNSLFTGALEQIMEARTGHIEDYLVIRPFPQAIPDARQRQQVWEQYRREILGKAGIAVFLFGNKLAGTDVVNADGMEKEFNIAAELGLITLPIGATGYMAETLSGRALIGLTDSQKAQLDQIQVPVDDLNDLIDPIVKLVSALREGK

SEQ ID NO: 13253 - protein, 162 aa, Rhizobium grahamii CCGE 502
MARKVFFSFHYQRDVMRVMQVRNSWVVRSKGEATPFYDKAEFEQVKKKAGGIERWIEEQMNGTSVTVVLYGRETFDRPWVLHEIRRSYELGKGLIAIAIHNVKDPRNGTDYAGKNPLSYFTTTRNGVKFDLSQLYPSYDWVNNDGYTNLPAWIESAAKAAGK

SEQ ID NO: 13254 - protein, 217 aa, Haemophilus pittmaniae HK 85
MCRCMLHILFKKLEKVLFIYISRKVIKQKNEERIMNKKQFIRELVNELSANNLAIFAGAGLSVAAGFVDWKGLLKDLAEELDLNIDKEENDLISLAQYYINEKQGNRSKINQIILNEFSQQAVLTENHKILARLPIDTFWTTNYDSMIENALKDAGKVVDIKHCIEQLPTSVHKRDVVVYKMHGDASLPNQTVLIKDDYEKFHLTRNDFLLLCVEIY

SEQ ID NO: 13255 - protein, 208 aa, Haemophilus pittmaniae HK 85
MGNKVFISYKYSDDSVQQLRPYEFFHVTTARDYVDIIQNKFDRDGIHINKGEKDDESLTEFKSETIRSKLADKIFDSSVTIVLLSPNMKDSWKLEKDQWIPWEIAYSLRSKRRLDNRSKRNAILLVVLPDRCGNYDYVNSYGFYFDIIKNNLNNLHTPYIADKLINGCSNSYILKCNWAQFISNPNAWIDAAIEIRDKGDKYNIVVRP

SEQ ID NO: 13256 - protein, 164 aa, Haemophilus pittmaniae HK 85
MARKVFYSFHFDNDAWRAGQVRNIGVVDGSEPLKGNRWEDVKAKSDKEIEKWINDNLKDKSCLVVLIGSETSEKKWVKYEIETAWKLGKAVCGIYVHKLKDANGEQSDEGNNPFYCFTIGDKNLSEIAPVFKSSYLSSKYVYDDIAENIEDLVEEAISVREEYK

SEQ ID NO: 13257 - protein, 469 aa, Streptococcus pneumoniae GA47502
MEKELFIKKYTKVIQEGNAAVFAGAGTSVDAGFVNWKELVRPFSEEINLDIDKETDLIGVAQYYINSKMGNRGTVNQKIINQFSSSDAETDVMNILTRLPISTYWTTNYDEVIENGLEKNNRRGDIKRKVDDLAINIYDSDAIVYKMHGDIRSPQDAVISKDDYERYGEKNSLFVTALRGDLVSKTFLFVGFSFEDPNLESILGKVNVLLGDNKREHYCIQRTVLRKDYKTKKEYDYAKIKQGLKIIDLKRYGIETVLVNDYTEIPQLLLEIEREYFKNTIFISGSISDYNENWSEEKVNQYCYDLSSFLISKDYKIISGFGLGIGSSVINGALDQIYKTKYRHVAEHLGLFPFPQNANGEKSLKECWTENREQMISESGVCIFLFGNKLVDGKVELASGMMEEFQIAKEKGKIIIPIASTGFAAKEIYDEMKQSGEYSYLDNYWETLETEKDFTKVFSTIDKIVNEVR

SEQ ID NO: 13258 - protein, 206 aa, Streptococcus pneumoniae GA47502
MATKIFISFRFSDGKEIKDELVDLFDESTEVINRSEDVDRGQMSENIIKEYLYEKLKDTSVTIVLLTPEAVSYRKNWIGNYDDWLYDELRYSLEDRKNNRTNGVIAVYTDEAKDKVLDDSTHYCQHCQQTKSCRSLKYFDNLARKNMLNIKSVYKKNPCNDLYDDEHDSYISLVSLNDFKEDYSRYIQNAKDKRERLDEFNIAKRM

SEQ ID NO: 13259 - protein, 310 aa, Streptococcus pneumoniae GA47502
MSLETNDFILETSKYIRRRVRKNILSIEERKTQADEIRKKSLVKLKLQTIKRKKSLDYIQEINPSYLEHYRKRFFKTHDLHERFEIIRELSKYDSKEVHNFFYAINGHVRNQSLKKEVQSYFQSLSLPFRLSRKKKGKTNFIDNEIVTNRKGPEELKKRLYIDDLEKIKKFDIFLSHNSQDEEKIITFYKNLNKNGQVVYIDWVNDKYDLKREWCNTSTVDIIKERIKQSDVFVLYFSSKTLNSQWCAWELGYADGIGKKICIYFSEKIDRTIIPKFYSIYPELHLSENITIEVDKQSSIIFNDWKNRSS

SEQ ID NO: 13260 - protein, 375 aa, Staphylococcus aureus subsp. aureus 21331
MTIDKKKFIEKYVKALESNTAAIFAGAGLSCGAGYVNWKTLLNEAAEELELNIDKEEHDLVGLAQHYINKKRSRGNLNTVIMEQFSTRAELTENHKLLAKLPIDTYWTTNYDCMIEKALDSEGRIVDVKRNQNQLTVSVADKDATVYKMHGDIDSIDKIILTRDDYEKYNLTHPKFREILEGDLLSKTFLFIGFSFTDPNISYILSRIRLVLEDNTRPHYCILKEVEEKEYDNTEEFMYAKIKQQLHIEDLSRFSIETLLVKDYIEITEILESIYKRYRRKTIFISGSATEYLPFNSETGKYFLHQLSKKLVENDFKLVTGFGLGVGSYVINGVADYINSNKKSKLQNHLNILPFSQDSSGDLDLKEVWKKIAWK

SEQ ID NO: 13261 - protein, 202 aa, Staphylococcus aureus subsp. aureus 21331
MARKTFISYKYSEAKDLRDKIVESLGEDAKYYQGETSDSPDMSDRITEYIKKELKNKIYSTSVTIVVISPNMKESNWIDWEIEYSVKQMKRGDRTSSTNGVVGVVMKHNGDYSWLRNSVINSEGHTAIHTDNSYLYDIIVKNRFNQEPIEYTCDECKNIDALTGSFISLVEEDEFLGNPTKYIENAYEKSKKATNYNICRRK

SEQ ID NO: 13262 - protein, 308 aa, Staphylococcus aureus subsp. aureus 21331
MERQQTYKEKAQHLYKVKKIKNRYNTKSAEEYFFSIPQVKYILSAGRMKKHKENYNASEIKIKKAALEKSRKNKNWKIEERLIKAKRYTQKVDPEYLNIYMKAYHKKDITTEEKLEILTELKKFDTENIVRFFRKLNDAEQNKMIRNLAFKYLQDYGHYVKLRKNFKGKKKVYQTERASLDTKKPEDLYNDLTNKNIQSQKVYDIFISHSTKDKKTVEDIIRVFNEQNKTCYCDWTMDQDYLKRKYVGEYTKQVLKARMEQSKMLVLLRTENSVQSDWVSFEIEYFENLKKPIYIVESLEELLEAFSD

SEQ ID NO: 13263 - protein, 466 aa, Aggregatibacter actinomycetemcomitans RhAA1; identical to SEQ ID NO: 13243

SEQ ID NO: 13264 - protein, 69 aa, Aggregatibacter actinomycetemcomitans RhAA1
MGIYIHNLKDPKSGECRKGDNPFEQFTFENGSKLSSIVKCYNPKSSDAYNDIADNIEKWIEEAISIRKK

SEQ ID NO: 13265 - protein, 214 aa, Aggregatibacter actinomycetemcomitans RhAA1
MGNKIFISYKYSDNAVKQLKEPNNLFSFYSQYKTTARDYVDIIQNKFERDDIHINKGENDNESLAGFKTETIRSKLAEKIFDSSVTIVLISPNMKNSWKSEKDQWIPWEIAYSLRSKRRPDNRSKRNAILLVVLPDRYGYYDYVNSYGFYFDIIQRNLNNLHTPYTTYKLRNGCSNSYMLQCNWDKFISNPNAWIEAAIEIRDKGNNYNIVIRP

SEQ ID NO: 13266 - protein, 489 aa, Staphylococcus aureus subsp. aureus 112808A
MNGDGKMTIDKKKFIEKYVKALESNTAAIFAGAGLSCGAGYVNWKTLLNEAAEGLELNIDKEEHDLVGLAQHYINKKRSRGNLNTVIMEQFSTRAELTENHKLLAKLPIDTYWTTNYDCMIEKALDSEGRIVDVKRNQNQLTVSVADKDATVYKMHGDIDSIDKIILTRDDYEKYNLTHPKFREILEGDLLSKTFLFIGFSFTDPNISYILSRIRLVLEDNTRPHYCILKEVEEKEYDNTEEFMYAKIKQQLHIEDLSRFSIETLLVKDYIEITEILESIYKRYRRKTIFISGSATEYLPFNSETGKYFLHQLSKKLVENDFKLVTGFGLGVGSYVINGVADYINSNKKSKLQNHLNILPFSQDSSGDLDLKEVWKKNRLEMISECGMALFLFGNKEKDGKIVLADGLEEEYKIAERQELVRLPINVTGYKTKNLSEQYNEEINIQFKEKILKMYNEINEYKCDFSNKQSIDELVQKIVNLVIEIKKTK

SEQ ID NO: 13267 - protein, 202 aa, Staphylococcus aureus subsp. aureus 112808A
MARKTFISYKYSEAKDLRDKIVESLGEDAKYYQGETSDSPDMSDRITEYIKKELKNKIYSTSVTIVVISPNMKESNWIDWEIEYSVKQMKRGDRTSSTNGVVGVVMKHNGDYSWLRNSVINSDGHTAIHTDNSYLYDIIVKNRFNQEPIEYTCDECKNIDALTGSFISLVEEDEFLGNPTKYIENAYEKSKKATNYNICRRK

SEQ ID NO: 13268 - protein, 344 aa, Staphylococcus aureus subsp. aureus 112808A
MKYPIRQVAEVLPEKYTRYILLKEFQRLFPYQWNIIVERQQTYKEKAQHLYKVKKIKNRYNTKSAEEYFFSIPQVKYILSAGRMKKHKENYNASEIKIKKAALEKSRKNKNWKIEERLIKAKRYTQKVDPEYLNIYMKAYHKKDITTEEKLEILTELKKFDTENIVRFFRKLNDAEQNKMIRNLAFKYLQDYGHYVKLRKNFKGKKKVYQTERASLDTKKPEDLYNDLTNKNIQSQKVYDIFISHSTKDKKTVEDIIRVFNEQNKTCYCDWTMDQDYLKRKYVGEYTKQVLKARMEQSKMLVLLRTENSVQSDWVSFEIEYFENLKKPIYIVESLEELLEAFSD

SEQ ID NO: 13269 - protein, 470 aa, Streptococcus mitis SK616
MRKEQFIKKFTKAVQDSNAAVFAGAGTSVDAGFVNWKKLVKPFADEIDLDIDKESDLVGLTQYYINSKMGNRGSVNQEIVYQFSSQEAETKVTNLLTRLPISTYWTTNYDNVIENGLKKNNRRGDIKRKIDDLAISIRDSDAIVYKMHGDVDSPNDAVISKDDYERYSDKNSLFVTALRGDLVSKTFLFVGFGFEDPNLESILGKVNVLLGDNKREHYCIQKQVLERDYDADIEGYNYAKIKQDLKIKDLQRYGIETVLVDDYSEISDLIQKIEEEYLKNTIFISGSISDYNENWSEEKVNQYCYDLSSFLISKDYKIISGFGLGIGSSVINGALDQIYKTKYRHVAEHLGLFPFPQNANGEKSLKERWTENREQMISESGVCIFLFGNKLVDGKVELASGMMEEFEIAKEKGKIIIPIASTGFAAKEIFDEMKQSGEYSYLDNYWETLETEKDFTKVFSTIDKIVNEVR

SEQ ID NO: 13270 - protein, 206 aa, Streptococcus mitis SK616
MATKIFISFRFSDGKEIKDELVDLFDESTEVINRSEDVDRSQMSENIIQEYLYEKLKDTSVTIVLLTPEAVSYRKNWIGNYDDWLYDELRYSLEDRKNNRTNGVIAVYTDEAKDKVLDNSTHYCQHCQQTKSCRSLKYFDNLARKNMLNIKSAYKKNPCNDLYDDEHDSYISLVSLSDFKEDYSQYIQNAKDKRERLDEFNIAKKM

SEQ ID NO: 13271 - protein, 388 aa, Streptococcus mitis SK616
MGKVMRQYNEFYIKLQKEFKPAHNMVIETMPEKFSNKDYVDKFTYMFPDKISKLEKERNYWYGKCIIKKNLVKIRRKRMSLEIYDFILETSKHIRKRTRKNFLSNEERKNRVDEIRKKSLEKLKLQSIKRKKVLDYIQEIDPPYLNHYRKRFFRTHDLHERLEIIRELSKYDSKKVHNFFYAINGHVRNQSLKKEVQSYFQSLSLPFRLSRKKKGKTNFIDNEIVTNRKGPEELKKRLYINDLEKVKKFDIFLSHNSQDEDKIITFYKKLNKDGQVVYIDWVNDKYDLKREWCNTSTVDIIKERIKQSDVFVLYFSSKTLNSQWCAWELGYADAIGKKICIYFSEKINKSIIPKFYFKYPKLIFSEDFMVKNHGQSDIQFTKWKENKK

SEQ ID NO: 13272 - protein, 381 aa, Staphylococcus aureus subsp. aureus DR10
MNGDGKMTIDKKKFIEKYVKALESNTAAIFAGAGLSCGAGYVNWKTLLNEAAEELELNIDKEEHDLVGLAQHYINKKRSRGNLNTVIMEQFSTRAELTENHKLLAKLPIDTYWTTNYDCMIEKALDSEGRIVDVKRNQNQLTVSVADKDATVYKMHGDIDSIDKIILTRDDYEKYNLTHPKFREILEGDLLSKTFLFIGFSFTDPNISYILSRIRLVLEDNTRPHYCILKEVEEKEYDNTEEFMYAKIKQQLHIEDLSRFSIETLLVKDYIEITEILESIYKRYRRKTIFISGSATEYLPFNSETGKYFLHQLSKKLVENDFKLVTGFGLGVGSYVINGVADYINSNKKSKLQNHLNILPFSQDSSGDLDLKEVWKKIAWK

SEQ ID NO: 13273 - protein, 202 aa, Staphylococcus aureus subsp. aureus DR10; identical to SEQ ID NO: 13261

SEQ ID NO: 13274 - protein, 344 aa, Staphylococcus aureus subsp. aureus DR10; identical to SEQ ID NO: 13268

SEQ ID NO: 13275 - protein, 159 aa, Lachnoanaerobaculum saburreum F0468
MRLSEKGYHIINGYGRGVGEYLLSGVAEYCLINGKNILDYLTVMPFPQSNISHIDIGKLYKENRKQMIEKCGIAIFVFGNKNGKIANGVLEEFSISKEKGLVCLPIGYTEGAAKEIFESLSSNDNSEAVIIANEKVDGDISSTAENIIKAVNLMNKEDN

SEQ ID NO: 13276 - protein, 122 aa, Lachnoanaerobaculum saburreum F0468
MARRVFFSFHYDNDVWRANTIRNSWVTQEKEAAGFIDKAEFEKVRRAGDRAVKNWIDEQLIGTSVMVVLIGSETLDRPFVQYEIEASRRRGNAIIGVTIGGIKNQYQNTSQSQSKYTQINGV

SEQ ID NO: 13277 - protein, 476 aa, Burkholderia sp. SJ98
MAFSKEIEAFIREYVKDIAEDNAAIFAGAGMSKSSGYVDWAELLRDIADEIGLKVEIEHDLIALAQFHVNEHKGYAKLSRKIIEEFSEQAEPSETHAVLARLPIRTYWTTNYDTLIEDALKNAYKVPDVKHSIEQLNTTRPKRDAVVHKMHGDVTHPNSAVLYKEQYERYHQTHAPFVTALSGDLVSKTFLFIGFSFTDPNLDYVLSRLHTTTKRHHYCFMRREQVHAGDDEDVKKYKRRKQELRVDDLKRFGIQTLLIDDYKEVPQILAAIESRFLKRTIFVGGSAEEFGTWDKKEALDFIHSLSSSLVKKNYRVVNGFGWGVGSAIINGALDAIYSNPGKYSEDQLVMRPFPQFASNDQDLATLWEDYRQRMIGLAGICIFLFGNKRNDAGEIVIASGMIREFEISRELNRIPIPVASTGYAAQEIWNQISPHVTEIYHGVEWAIPLIKEICDVGVDRTLIIDKLVAILNRLGK

SEQ ID NO: 13278 - protein, 162 aa, Burkholderia sp. SJ98
MTKIKRKVFYSFHFDNDVMRVQQVRNMGVLDGNTPVSPNEWEEVKRKGKSNIEQWIEDNMHGKSCVVVLIGTKTAERPWVKYEIEKAWKDGKGLLGIHVHNLTCPNNGKCLQGVDPFAQYTFRIGERIVKPKTYNPKSSDAYGDIAANLDDWVEEAIKIRNS

SEQ ID NO: 13279 - protein, 466 aa, Aggregatibacter actinomycetemcomitans serotype b str. SCC4092; identical to SEQ ID NO: 13243

SEQ ID NO: 13280 - protein, 214 aa, Aggregatibacter actinomycetemcomitans serotype b str. SCC4092; identical to SEQ ID NO: 13245

SEQ ID NO: 13281 - protein, 160 aa, Aggregatibacter actinomycetemcomitans serotype b str. SCC4092; identical to SEQ ID NO: 13244

SEQ ID NO: 13282 - protein, 466 aa, Aggregatibacter actinomycetemcomitans serotype b str. S23A; identical to SEQ ID NO: 13246

SEQ ID NO: 13283 - protein, 214 aa, Aggregatibacter actinomycetemcomitans serotype b str. S23A; identical to SEQ ID NO: 13248

SEQ ID NO: 13284 - protein, 160 aa, Aggregatibacter actinomycetemcomitans serotype b str. S23A; identical to SEQ ID NO: 13247

SEQ ID NO: 13285 - protein, 465 aa, Haemophilus parahaemolyticus HK385
MNKKQFIRELVNELSANNLAIFAGAGLSVAAGFVDWKGLLKDLAEELDLDIDKEENDLISLAQYYINEKQGNRSKINQIILNEFSHQAVLTENHKILARLPIDTFWTTNYDSMIENALKDVGKVVDIKHCVGQLPISIHKRDAVVYKMHGDASLPDQTVLIKDDYEKFHLTRNDFFTALRGDLLTKRFLFLGFSFSDPNIDYILSRIRSSYNENQKEHFCILRKVQQLPKENQADFEYRKRKQELFINDLKRVGISVLLVNQYEEITEILREVEQAQKRKTVFVSGAAEDYSPYSQQEVEQFVSSLSQEILKLGYRIVTGFGLGIGSSVISGSIKYLTEKNLKIDEDYLILRPFPQNKEGKELWSAWREDMISYAGISIFLFGNKSQNGEIILSNGMQEEFDISKRNNNVLIPVASTGYMAKKLWEKDMNKECSKNIETEMQALSKENVTLDKLKSNILSILKKD

SEQ ID NO: 13286 - protein, 164 aa, Haemophilus parahaemolyticus HK385
MVRKVFYSFHFDNDAWRAGQVRNIGVVDGSEPLKGNRWEDVKAKSDKEIEKWINDNLKDKSCLVVLIGSETSERKWIKYEIETAWKLGKAVCGIYVHKLKDANGEQSDEGNNPFDYFTIGDKNLSEIAPVFKSSYLSSKYVYDDIAENIEDLVEKAISVREEYK

SEQ ID NO: 13287 - protein, 208 aa, Haemophilus parahaemolyticus HK385
MGNKVFISYKYSDNSVQQLSPYEFFHVTTARDYVDIIQSKFDRDGIHINKGEKDNESLADFKSETIRSKLADKIFDSSVTIVLLSLNMKDSWKAEKDQWIPWEIAYSLKSKRRLDNRSKRNAILLVVLPDRCGNYGYVNSYGFYFDIIQKNLNNLHTSYIPYKLRNGCSNSYMLQCNWDQFISNPNAWIAAAIEIRDKGDKYNIVVRP

SEQ ID NO: 13288 - protein, 208 aa, Escherichia coli 75
MSISPLFRWPNSVNHFTGSAEEYGAWDKQEALNFVHILSSSLVKNGYRVVNGFGWGIGSAVINGALEAIYSKPDKYSEEQLIMRPFPQHSSNDKALSELWDEYRQRMIGLSGIAIFLFGNKLHDGRIVNADGVRREFQIAQETGVVVLPLGVTGYMAKELADEMLTDPSKHFVRYPWLEKEVAQLADLSANRANIEMKVLEILKKLGG

SEQ ID NO: 13289 - protein, 155 aa, Escherichia coli 75
MKRKVFYSFHFDNDVMRVQQIRNMGVLEGDEPVSPNTWEQIKRTEQGVKNWINQSLNGKSCLVVLIGSQTANRPWVKYEIERAWKEGKAVVGIYIHRLKCPRNGYGTKGPNPFDQFTFKRGDRVIKPLVYEPNFNDAYSDIKNNLATWIENAIKQ

SEQ ID NO: 13290 - protein, 477 aa, Vibrio cholerae HE-45
MKEEHEHFVQRFVEELEENNVAIFAGAGLSSSAGYVNWKELIRPLAKELRLDVDQEHDLVGIAQYYFNENGRYRISQQLMDEIASAKSPTENHRILSSLPISTYWTTNYDKLIEKSLEENGKIVDVKYSNNHLSLTKKKRDAVVYKMHGDIDHPDTAVLTKDDYEKYSVRKAPYITALSGDLVSKTFLFLGFSFTDPNLDYIMSRVRAYFEDHLRQHYCIFKKCSKSDYSNEDELKNALVKQNLLIKDLQRFRVKTLLVDDYSEITVILKRIDNLYRRRTIFLSGSASDFGKWAKEDVESFLCKLGAILVERNYKISSGIGLGIGNAFITGAIQSVYSYHNGKVSDYLNMKPFPQFIDDANLRKSTWTKYRREIIGSSGIALFFMGNKFVNNEIVNADGMEEEFDIARELGLQIVPIGCSGYKAKEIWDRVKSHPDNYFELISDEFIQALDDLGREVEKPEHLISKILHFLDLISKE

SEQ ID NO: 13291 - protein, 97 aa, Vibrio cholerae HE-45
MHINAIKSKSQETKKKGPNPFEYVGVTFSDSGKTVTLWEKINGEWIKYDKIDGSASYQLDTPVKQEMRGNGYNLSHFYNVYCWVDDSGYQNFSNWVG

SEQ ID NO: 13292 - protein, 473 aa, Streptococcus agalactiae GB00679
MLIIKGEVSKKDLIREIEKAIKSDEIGAFIGAGLSIPAGFCSWKELLKEPAEEIGLDVEKENDLVNLAQYYSNSKKRTSIDDLIKGQFSQLVKPTENHKLLSQLPISTFWTTNYDKLIEKALETNMKKPYVKTKDEQLRGTNYNFDVIVYKLHGDVESPEDAVLTRSDYEEFGYNKRKLFREVLEGDLLTKTFLFLGFSFEDPNFNYVIGRLRVLLDEKNTRKHYCIMKRVQDTDEDYEYKKVRQELQIEDLNRYGIFTYLVNDYNEITDILSILVDRYRRKTIFISGSAYCYPGYSHETGKNFIHNLSFELSKNGYRIVNGYGKGVGEFILNGVADYCLNHNSKISDFLTLMPFPQNSSLGIDLDKLYKENREQMIDNCGTAIFIFGNKETENTASGVIDEFELCKKHGLVCLPIEHTGGSAKEIFNKITREITDKNTISAIEQANKQCDGDIDMSVKNIVQAVKILNKEEF

SEQ ID NO: 13293 - protein, 165 aa, Streptococcus agalactiae GB00679
MAKRQVFFSFHYDNDNWRAGQVRNMGKVDSSSTFSDNDWEEVKEKTESKIKEWIHEQLNKRSCLVVLIGEKTANRKWINYEIKKAYELNKGIVGIYIHKLENSLGEQDDKGNNPFDYLTLEGEKLSKYVKCFDSNYSSSKYVYSDIKDNIEDLIEYGINHKPSTW

SEQ ID NO: 13294 - protein, 499 aa, Sorangium cellulosum So ce56
MSTLMDNANTVSAEVDAAVIEALHEALESGELVLFVGGGISAAAGLPTWRQLVDLLVERVREQTSDEVAIAEVAALARSQRYSEALGAAEQALGPAEFNAFVEDALDDEGLEPPRIAIAIAALRDKLRAVLTTNLNHLLERAFGFEWDTMWRVTDEVAWRRRFILKLHGTLKEPHSWVFARERFLASIAPPDVRKSLTTVLSRCPVLFIGFGRADGNFDEMLADIHALSGASPPPRFVIAPGSSLTPLRRKTLADMGFLLLPYDTPDGSHDRVLAILDRTCAPRPRAITSRGRSILPPPIPDLELPPSSSPLGAPYDLPPDSAAYDDTVTMTGALEASRRERVSEPPASPIEVFFSYSESNRELRDKLETHLAILKRKGVIRGWHDGEIGAGEERDTALAEHLETAKVILLLISADFLASDFCYDVEMQKAIERHERGEARVIPVILDACDWEGAPFGRLASLPRGGRPVTSWVNQSEAFTDIAKGIRKQVEQLTQNPS

SEQ ID NO: 13295 - protein, 956 aa, Sorangium cellulosum So ce56
MVALATSPADVFFSYSPRDEDLRPKIETHLDALKRQGVIRNYQGFALGGGRERREASAARLREARVVLLLVSADFLSTDAWLSPEMREAIARHEAGECRVIPVILRPCAWEKTLLGELQPLPSRARPVTSYPNQSEAFTEIAKGIRSAVRETEPPTQRPAARRPSSSPDAEPHIKKLPPRNPGFTGRDQLLSELRSTLTTGGPAALTQSISGLGGVGKTQLVAEYAHRYASQYNVVWWIRAEEPATAAEDFARLAAALDLPEQNEADQRIAIEAARSWLSRNDKWLLIFDNVNDPQDVAPYLPHPRTGHILITSRNPSFRGIATPLTVPALDRADSVKFLLDRTGQGDARAAEKLAETLGDLPLALVQAAATIKETGSSIATYHAAFGDHQRGLLLRGMPMDYPTPIATTWGLAFQEAQRFSPVAVDLLSLCAYLAPDDIPREGLADAAPHLPAALAEALSDPLSLDEAVAALRRYSFIDVHEGALSVHRLVQAVVRDRLSPEDRKVWAEAAVRLVDHAFPESSDEVETWPFCARWLPHALAAASQAEAHDVAREVRGRLLARFAVYLQGRAAFAEAKGYLERALALHEAVFGHDDPKVAAVLRSLGSVLHDLGDLGGARAHLERALAIDIASFGPDHPDVARDVNDLGSVLMDQGDLPGARKHLERALAIDEATYGPDDPSVAIRLNNLGALFRDLGDFAGARVHLERALAIDIRAYGPDHPTVAIGRTNLGRLLHDLGDLKGARDQFEEALKIDEHSYGLYHPRFALALNNRGRVLRDLGDLAGARADFERALAIVEDTYGPDHPDVARDINNLGSVLRDLGDLEGARANFARVLKIAEATYGPDHPAVAIGCNNLGSVLQALGELPGAREQLERALGIAQATYGPDHPVVASIVNNLGRVLQALGDLSGAWQQIERAVAIATKALGPSHPSVQIFSRNLARLGDALGSSAEAT

SEQ ID NO: 13296 - protein, 483 aa, Staphylococcus aureus subsp. aureus ST398
MTIDKKKFIEKYVKALESNTAAIFAGAGLSCGAGYVNWKTLLNEAAEELELNIDKEEHDLVGLAQHYINKKRSRGNLNTVIMEQFSTRAELTENHKLLAKLPIDTYWTTNYDCMIEKALDSEGRIVDVKRNQNQLTVSVADKDATVYKMHGDIDSIDKIILTRDDYEKYNLTHPKFREILEGDLLSKTFLFIGFSFTDPNISYILSRIRLVLEDNTRPHYCILKEVEEKEYDNTEEFMYAKIKQQLHIEDLSRFSIETLLVKDYIEITEILESIYKRYRRKTIFISGSATEYLPFNSETGKYFLHQLSKKLVENDFKLVTGFGLGVGSYVINGVADYINSNKKSKLQNHLNILPFSQDSSGDLDLKEVWKKNRLEMISECGMALFLFGNKEKDGKIVLADGLEEEYKIAERQELVRLPINVTGYKTKNLSEQYNEEINIQFKEKILKMYNEINEYKCDFSNKQSIDELVQKIVNLVIEIKKTK

SEQ ID NO: 13297 - protein, 202 aa, Staphylococcus aureus subsp. aureus ST398; identical to SEQ ID NO: 13267

SEQ ID NO: 13298 - protein, 308 aa, Staphylococcus aureus subsp. aureus ST398; identical to SEQ ID NO: 13262

SEQ ID NO: 13299 - protein, 482 aa, Nitratireductor indicus C115
MAIVGRTRFLKEFPAALHEGSAAVFIGAGVSMAAGYPSWASLLREIGDELGINSSDIHDLAALAQWHIRESGGATGVRNVIKHEIGKDRKVPETLETLARLPLRHIWTTNYDRLTERAFVAVNRPIDVVSGAKDLSLRATPGAARLYKMHGSVDRLDDIVISTDDYELYRSRRGAFSTLLQAHLSSMSMLFVGLSLTDPNIRHVLSLIRESFTDAPPEHFALLRPPRKDDFASNKEYRARAAQHRLWAKDLSRYGLLAVEIDDYDEVPALLREVERRVAALRVWVSGSWPLDIPDPHTASLYRFSENVGRLIGTSGRDLVSGSGMLVGPAAIAGFIESLREGGGWDVDRRLIVRAFPQPLAGDSADKARWTALRTELARLAGVVVFVGGGKMTGGLITPADGVMEEYALAKEAGAFLLPIGATGGAAGRIADELMGSAIASSGPDAQRPKDEELQILANSAADLEQLTSLIADILKRLAETD

SEQ ID NO: 13300 - protein, 162 aa, Nitratireductor indicus C115
MARKVFFSFHYDRDVHRVVQVRNSWVVRANGEAPPFYDKAEFEQAKKRVGGIEKWIEEQMKGTSVTVVLFGAETYEREWVRHEIKRSYELGKGLLAIDIHNVRHPQTGADNQGKNPLSYWQVDRGGQKVPLSSIYSEYDWVRDDGYTNMPSWIEAAARAAGR

SEQ ID NO: 13301 - protein, 184 aa, Nitratireductor indicus C115
MPEFITRDELRQIAAKRTPSERASIRKTASERPLEGSTFLSHSTKDEDLVIGSTIILENHGAKVYTDKVDPEMPPYTTEKTASLLKTRIRQTKRFVLLASKNSKESRWVPWELGVADGFKSIDKIALFPSADDTNDMTWATWEYLGLYPRIVWGPMRGKEKPLWMVWDHKTNTATPLSDWLAGW

SEQ ID NO: 13302 - protein, 477 aa, Bacillus thuringiensis serovar aizawai str. Leapi01
MYSPKIKEFIRTYVKAIEGSNAAVFAGAGLSQPAGHVNWKELMRELADDLGLNVDLETDLVALAQYHVNEFDGRGKINQILIEEFTKGVQTTENHTLLADLPISTYWTTNYDSLIETTLKNMGKKVDTKIVPENLAHTTPKTDAVIYKMHGDSSLPHQAVLTKDDYEGYNITRQLYSTALQGDLVSKTFLFVGFSFDDPNLTYILSRIRLLLGENSRTHYCFMKQIEREDYESEGEFHYAQIKQQLRINDLKRYKITVLLVDSYQQITEILKKVHDIVKRGGIFISGSATFFDNWEEQQALQFSTNLSKSIIQSDYNIVSGFGLGIGSCIISGALEELYKTPNRKVEERLKARPFPQQTTGDLSLGELWTKYRNDMLSSVGIAIFIFGNKKGASGEKIDANGMIEEFEIALTKGVIPIPIGATGDASLTIWTKVMENFDDYVGITELKGLYEQLGDTNKTPEELITITIQIIKHLKK

SEQ ID NO: 13303 - protein, 226 aa, Bacillus thuringiensis serovar aizawai str. Leapi01
MGRKIFVSYKYADSDVYPLEGLDYTTTVRNYVDELQGKLKDEDHINKGEADGDDLSDFKDETIWTKLKDKIFDSTLTIVLISPNMKGIFTNEEDQWIPWEISYSLKSQTRNGKVSGTNAMLAIVLPDQNNSYTYFIEDNSCQSCNCRTLKTNTLFTILKKNMFNIKSPTFNDCDNHSDDNKVYLGEASYIRSVKWEDFINNVEGNIQSAYDIKDNIDNYEIHKKVL

SEQ ID NO: 13304 - protein, 477 aa, Bacillus thuringiensis serovar aizawai str. Hu4-2; identical to SEQ ID NO: 13302

SEQ ID NO: 13305 - protein, 226 aa, Bacillus thuringiensis serovar aizawai str. Hu4-2; identical to SEQ ID NO: 13303

SEQ ID NO: 13306 - protein, 479 aa, Lactobacillus paracasei subsp. paracasei CNCM I-4649
MPIKIDEFVNEYVESLRCGEAGLFVGAGLSFDSGMPSWKELLKKPAEKIGMDVSKEEDLVTLAQYFVNENHNTRTAINAELKSKFGELSNINHNQEIIAQLPIDTVWTTNYDNLLEKAFQKNNKICDVKRNKDDFTSSPKNSSVTFYKMHGDVSNFNDTVITRRQYEEYDRNFEIYVTALKSDLVRKTFLFIGYSFQDPNLRYILSQLRLLLGNSPRKHYFLIKKPEKESEESQEDFRYRLNKQRLQIEDLELYNIEAVEVDSYGQISKVLEKIKSKIKLNHVFLSSAQSVDKEIDKASLNQLLMCLSYKLVKNDNVIVNGYGWNAGNAIVKGALMAIMEDSSKSIDEYLKVYPFPQPDAGVDRESMHNDWTKIRNKMLDNSGIAIFISGNKIEEGKAVLSKGMLEEFDIAKQKNVIPISIGYTGGASKKISSLISENYKRYYGDDQRLIEMSKKMSSNFMDSDTTVDLIISMICKIQQ

SEQ ID NO: 13307 - protein, 210 aa, Lactobacillus paracasei subsp. paracasei CNCM I-4649
MVHKTFISYKYSEARDLRDKIIHHLGVDQAKYYEGETSESPNLTNEKTESIRHLLKEMIYDTSVMIVIISPNMKQSNWIDWEIEYALKSIKHGNYTSHSNGVVGVIMNDPDESWFRYTEKKPDGDTCYAYNSEYACRIINANRFNQKRKQYACETCGTIDSLTGSYISFVTEDDFISNPKRYIDNAFDKSCEIDEYEITKYVDKNHMETL

SEQ ID NO: 13308 - protein, 478 aa, Escherichia coli KTE113
MTFSNEIEVFIKDFVKDLENDCAAIFSGAGMSKSQGYVDWKELLSDIAEELSLDINKEDDLISLAQFHVNEKKGATKLTRKIIEEFSEQAEPSEVHNIIARLPIKTFWTTNYDTLIEDSLRKVYKIADVKRNIDDLNTTRPKRDAIVYKMHGDISSPSKAILYKEQYEKYYRTHASFITALSGDLISKTFLFIGFSFTDPNLDYILSRLYTHSGDKRTHYCFMKNEANNSLDDEETVNYKIRKQKLRIDDLKRFGIQVLLIDEYSDIPKILAKIEQSFKKKTIFISGSAEKYGDLERPKALDFIHTLAYEIIKNNYRIVNGFGWGVGSSVINGALDAIYSRPDKLSEEQLIVRPFPQTVSKGKDIQELWEEYRQRMIPLGGIALFIFGNKQEENNDIVNARGVFREFEIAVQHGLVPIPLPNTGYMSKYIFEQISQDPKKYYGSNEWIYNDLSELTEKDFSVKKTIEVVIKIINKLNK

SEQ ID NO: 13309 - protein, 203 aa, Escherichia coli KTE113
MAHETFISYKYSEAQDLRDKIVKALGDDAVYYKGETSESPDISNTTVDNIKNNLKNMIFGTSVLIVIISPNMIKSKWIDWEIEYALKEYKRGGTTSRTNGIVGVIMKVNNSYDWLVSSSIKPDGCSSRTIDTTKLYDIINNNRFNLTSEDKYCCPECKSYDQLTGSYISLIEEDRFLADVSLYIENAYEKSKKLSSYDLYKQK

SEQ ID NO: 13310 - protein, 478 aa, Escherichia coli KTE168; identical to SEQ ID NO: 13308

SEQ ID NO: 13311 - protein, 203 aa, Escherichia coli KTE168; identical to SEQ ID NO: 13309

SEQ ID NO: 13312 - protein, 472 aa, Rhodococcus qingshengii BKS 20-40
MGATSQQVRNRFLREYVHAVENGSAAFFAGAGLSRDAGFVDWRGLLREFAEELGLDIEVESDLPLVAQYFIDSSTSQRARLNQKLRDEFDQSTGVTSAYRALSRLPIKSVWTTNYDRGVEEAYAAVGSIVDVKSSGNKASWTTVKPKSTLTVYKMHGDIGDPSNVVLSKDDYDRYARDHPYVLDALKSQLAEKTFLFSGFSFTDPNLDHVFAQVRANHGDNARTHWAVMKRAEGDREGIRQGLWIKTMHRYGLEVVLVDDYDDIPELLTEVQQRLRRRHVFVGGSALTAVPFGTPRLDNFCKSVGQLIIDEGFNLVSGFGLGIGSAVLAGAAESVYRGDIDPARRLRLFPFPQPPEGEPRDQPLDEQWRQSMMQSAGFAIFLSGNKKGPDGDPIDASGAVREYEIAVANGARPLPVGATGWVAKNLHAKVSDRFDELLPGASRTAFDELGRDDATNEELLTALRTLLSDMTP

SEQ ID NO: 13313 - protein, 160 aa, Rhodococcus qingshengii BKS 20-40
MPKSVFYSFHYQRDAFRVQQVINMGALERQTILNAQEWETVKRRGDTAIEDWIHKQMAYKSAVIVLVGAETSTRRWVRHEIAKAWDDRRPMIGVRIHGLSDARGTDTAGANPFEKVSLKSGGTVSNYVPLFSPQGSTSQAVYADIKNNLPTWVDSAYKRD

SEQ ID NO: 13314 - protein, 194 aa, Rhodococcus qingshengii BKS 20-40
MALISRQEALSAGRRVVYNSSVTARDLLIKSASAAPQQKFDVFLSHSIHDAETILGVRAILQADGLSVYVDWIDDPQLDRRSVSRATANVLRERMKKCSSLIFVTSDSSPTSKWMPWELGFFDGMQGPRIAIMPLEDSTPGSQGQEYLELYPAVERLPSTLAGHSALFAVRGTYYREYLSLKELAAGSQTFRRT

SEQ ID NO: 13315 - protein, 484 aa, Serratia marcescens VGH107
MFNRDIELFIRDYVNDIKAGSAALFAGAGLSIPAGFVSWKELIGDIAYELELDIEKESDLISLAQYHLNEKGNRHKINQKIITEFAEQAEETENHRIIARLPIASLWTTNYDDLIEKTYARYNRVCDVKTTPESLTNNIHKRDVVLYKMHGDYRNPNQAIITREQYETYSRTHLPFINMLMAELTAKTFLFIGFSFEDPNLQYVLSRLYAQYAEGKRNHYCIMRRVQLGDSGSEDQASCDYNSRKQSLMINDLRRYGIQTLLVDDYRQITDLLYAIETQFKKSTVFISGSADNYHPYAREESIQFIHRLARLLIRKQHRIVNGFGWGVGTAVINGALEAIYDSQGKISESQLVLRPFPQFASGGIALPELWREYRQNMISLSGIAIFLFGNKRNAEGEYVLADGLLQEFQIATEQGCVCIPIGCTGSASAEIYRKIKEEMKETLYHCHPAAMNLLDQLNEPGSLAEKKKCLLALIDIITKDNPR

SEQ ID NO: 13316 - protein, 163 aa, Serratia marcescens VGH107
MTRKCFYSFHYEPDNWRASQVREMGALDGNRPATDNDWEEVKKGGDAAIAAWIKGQLDNRSCAVILAGKDTANRKWINFEICEAWKKGMGVLVVYIHNLKDSAGDQTTKGKNPLDHIKLGETKLSAIAKAYDPPYLTSTNVYNHIKENLAEWVEEAIRIRENY

SEQ ID NO: 13317 - protein, 484 aa, Serratia marcescens SM39
MPERDIELFIRDYVNDIKAGSAALFAGAGLSIPAGFVSWKELIGDIAYELGLDIEKESDLISLAQYHLNEKGNRHKINQKIITEFAEQAEETENHRIIARLPIASLWTTNYDDLIEKTYARYNRVCDVKTTPESLTNNIHKRDVVLYKMHGDYRTPNQAIITREQYETYSRTHLPFINMLMAELTAKTFLFIGFSFEDPNLQYVLSRLYAQYGEGKRNHYCIMRRVQPGDSGSEDQASYDYNSRKQSLMINDLRRYGIQTLLVEDYRQITDLLYAIETQFKKSTVFISGSADNYHPYAREESIQFIHRLARLLIRKQYRIVNGFGWGVGTAVINGALEAIYASGGKISESQLVLRPFPQFASGGITLPALWHEYRQNMISLSGIAVFLFGNRRNAEGECVLADGLLKEFHIAAEQGCVCIPIGCTGGASAEIYRKIKEEMKDTLYHRHPVAMNLLDQLNEPGSLAEKKTCLLALIDIITKDNPR

SEQ ID NO: 13318 - protein, 163 aa, Serratia marcescens SM39
MTRKCFYSFHYEPDNWRASQIREMGSLEGNRPATDNDWEEVKKGGDDAIAAWIKGQLDNRSCAVILAGKDTANRKWINFEICEAWKKGMGVLVVYIHNLKDSAGEQARKGNNPLDHIKLGDRKLSGIAKAYDPPYLTSANVYNHIKENLAEWVEEAIRIRENY

SEQ ID NO: 13319 - protein, 560 aa, Burkholderia sp. RPE67
MTTKYLQYFPRPLLDDLVSGRWLPVVGAGMSLNAKLPAGKKMPLWPDLGSTLQGEFLEYSSSGTLDAISAYEHEFGRAKLIERLSEILYIRHAHPGDAHKAFCSIPFDIVCTTNFDFLLEEQYKAIPSHVYPVIDEEQLSINGSAAGTLLLKLHGDLHHPSRLVVTEEDYDAFLMRYPLLATFLSNQLITKTAVLIGYSLDDPDFRQLWSVVTERLGKTRRVAYSVMVNAKASDIARFERRGVKVVNLPGTRERYGAILAQAFSELREYMRDNVISVSQVTEEEPLRELMLPRDAASRLCFFSIPVERLSLYRSRVFPVVEEIGFVPVTADDVISPGDNINAKIDSLIDRASVMVVEMTSPWTRAEFEMAIARNKATDGSGSKRHKLEIIVVDGDVESRPPGLQVYRVVKRSDLLTDDIEDFVDSLVSELRSISENRGAFLAEEAQRLFNAREYRVAVISAISSLEAWLRQNIDGASNFTSPIAPSISRFSTPHRPTPFRGLLDLALQNEVLQLTDVEKILAWSKIRNDAVHNNSPVSRAVAKEIVDGVRAIFAGPTMSG

SEQ ID NO: 13320 - protein, 485 aa, Burkholderia sp. RPE67
MAKHRLLYLHRRHFGLDGPDAMMGKLLYEALKTDLDAAVTSHMIIPDSVSEGLPQSILDDVITQSEFHRSGVNVVYLEGGLDSHCLTGFDGSDWKMSAPMIEEFARRGGIVVVADLDINIAQSIDEDRFGRLFKAWFRREDGRQGNPIEIVDPGRCENSYWSEIWVDCEAARTHCAEWLQPIYNGLSTILVGGPLELGNSQSWLANIVSHTMGTMCQDCWWEPPETGFDTHRLRYHPQSPMGGGSFGPFASVCQLGRGYLVAIAARVSSDYVTKKSHGNIEWIINIIRHLRSAVENHERLGSIARFRGACLFLSHRSVDKPVVEAISDNLFKTGISTWLDKERMLPSDSLGLSLNAGLTESSHFTIFWSRHCKDAPWVHFELGSAISACIERRKPILVVALDDTPPPDSLAQFIRINGKGTPQETSRLIYDALAALVDRESLNRVKEAAAVEQTDVGDAIAGEKLNRRASTEVVGPFRRRRRKPR

SEQ ID NO: 13321 - protein, 482 aa, Pseudomonas sp. Os17
MRKKFSAEIEIFIRRYVRDLNEGVAAVFAGAGLSRDCGYVNWPELMREVAEELGLSVDKEHDLVSLAQFHVNERSGSGGLARRIIDEFSEHAEPSDSHQILARLPIRTYWTTNYDQLIENTLRKNQRVPDVKHQVSDLLTTRPKRDAVVYKMHGDALSSTEAILYKSQYEQYYKTHEAFVTALSGDLISKTFLFIGFSFTDPNLDYVLSRLHVPPHARREHYCFLRREPSTPYENEDAEAVRYRQRKQELHIRDLKRFGIQTLLVEDYKDIPKVLRAIEEQFLKKTIFIAGSAEEYGDWEKNDALNFIHSLSSSLIRAGYRVVNGFGWGVGSAVINGALDAIYSNPEKYSEDQLVMRPFPQVASQGQDLGVLWQQYRERMISLSGIALFIFGNKAGQNGIENAGGVQKEFDIAVAKGVVPVPIGATGYMAKELADKVIADPGSYIPEDLWLADELKKLNESSTDAKVIEDIVLGIVKKLAGV

SEQ ID NO: 13322 - protein, 158 aa, Pseudomonas sp. Os17
MKRNVFYSFHFGQDVLRVQQIRNMGVIDGDEPVSPNRWEEIKRSDEGVKRWINENLQRKTCLVVLIGAETASRKWVRYEIMRAWELGIPVLGVRIHNLRCPNAGIGVYGTNPFSSLTLKRANGTVYTPKVYDPRSNDAYGVIKANLPTWIETAIKECA

SEQ ID NO: 13323 - protein, 134 aa, Pseudomonas sp. Os17
MAGAIEVIASHGGVPYIDEVDPAMPSHTSEETAELLKKRIVECKRFVLLTSPNSKDSRWVPWELGVADGKKGIHKIAIFGASDSAGLDGWSSWEYMGLYPRIIWGKLQGYSNELWMVYSQKTDSAVTLESWLRS

SEQ ID NO: 13324 - protein, 177 aa, Pseudomonas sp. Os17
MAFFTKEQAKAAARRSENMLDQVAGLESYSDERFDVFLSHSMLDQDLVVGVAMLLKEQGYSVYIDWVEDEELDREHVDKETAERLRQRMRNCSSLIYIATDRSGQSKWMPWELGYFDGYKDGGVAILPLVDTVNSGFDGQEYLGLYPLVNQVNQRLYVEDASKVHSDFWAFVNDPSR

SEQ ID NO: 13325 - protein, 282 aa, Pseudomonas sp. Os17
MYLGFEIEHYKPFEMISNAAIDDYRKQARDAAVNDLANYVIGQIDKKDVIDAKELAKKIFPQQDAHVFLSHSHRDEREAIEFALSLEKRGVKVFVDSCVWGYVGDLLLKINAHYSDKEEVGGTTNFSYDKCNDVAASLFLMLNEELHRMIDASECFIFFNTQNSVSIKGHEGFAEGDRTFSPWIYSELAFSAKTRYTLRPRKRLPRGIVGAMESHKVHRAMASASFAFEIINLHLPKLSGNDVKSLADKTPHVGFFWLDALYYEHDLENEFKDHCQAAILNG

SEQ ID NO: 13326 - protein, 480 aa, Caulobacter crescentus OR37
MSRNRTRFLKEFPKAISDENAAVFIGAGVSVGAGYPSWKELLREIGDELGVKSDDVYDLAALAQWSVSDTGGATRIRQVIRDQIAVDHDIPAPLNILARMPIRHLWTTNYDRLIERALLAIRRPCSVISAQGDLALKVTAGAARVYKMHGTVDQLDEIVISTDDYELFRSRRGAFLPLLQAHLSSFSMLFLGLSFTDPNLRHVLSLIRESFTDAPPAHFAIVRPPQKGDFRSAEEFEARLAQHNLWAKDLQRYGLFAIEIEDYDEVPGLLAEVERRVARNRVWISGSWPLDEATTPEVSFVHDVAERVGGVVGSSGLTLVSGSGLLVGSGSMSGFLSSLQKTGAWDLERRLIVRPFPQPIEGGEPDRAQWDLLRAELARLAGHVVFIGGLKAEAGALVDSSGVHAERAIAQAKGAYLLPIGATGGAAATIAAELIGSDLRFDGPDALRPSDEQLASLGDASVGAAELANRVLKILKSRML

SEQ ID NO: 13327 - protein, 163 aa, Caulobacter crescentus OR37
MARKVFFSFHYDGDSQRASQVRNMGVLEGNQTVSDNDWETVKKGGDKAIQTWIDNQFAGRSCALVLVGAGTAGRKWINYEIQKAWDSGKGLLGIRIHGLKNLAGQTSYAGNNPFDGFNVAGKSLSSIVNLHTPSGFDSKGVYDNIKTNIDSWVETAIEIRKKY

SEQ ID NO: 13328 - protein, 194 aa, Caulobacter crescentus OR37
MAFYSAEQLYAAARDLRQRANKTNDQLLREARETAKDMFDVFLSHSSRDKDLVLGAKKVIEDAGYTVYVDWIDDAQVNVVADRALADRLRRRMGQCSSLFYLHTPNAALSKWCPWELGYFDGLRSPEAAVFVFPVLSTGQRYKGQEYLDLYDTVDLPNWRPPRRSPRSRRPGAIDERLFDGAPGMLWRPGGRIF

SEQ ID NO: 13329 - protein, 480 aa, Sphingobium sp. HDIP04
MVKAAMRRFLEDFPTALNDGVGAVFVGAGMSMAAGYPSWAKLLHDIGEELGVSSRGIHDLAALAQWSIQESGSATRVRNVIKEKIGKAYPTPSTLEVIARLPVAHIWTTNYDRLIESAFAEIDRPLDSISGASDLALKPTPGAVRLYKMHGSIDRLDDIVISTDDYELFRKKRGAFLPLLQAHLTSMSMLFVGLSFTDPNIRHVLSLIREAFTDAPPEHFAIVRPPHPDDYDSEEEYKARLAQHNLWAKDLRRYGLIAVEIDDYEEVPDLLLQIERRVAARRIWVSGSWPIDDGGAAASDIYRLSEDVGRWIGRSGRDLVSGAGLLVGSAAISGFLEALRDGGGWDLNRRLIARPFPQPLAGAEPDAAKWTELRKELARQAGGIIFIGGVKQEGDKLVPARGVLEEYEAAREVGAFLLPIGATGGAAQEIAEKLIGSDVEATGPKAMRPTDDELKILLDPATKRQAVLECIDAVVTRLTK

SEQ ID NO: 13330 - protein, 155 aa, Sphingobium sp. HDIP04
MAETKNVFISHVHKDDHGLQKLKDLLAPKGMDVRDSSIHTGKFNNATDPAYIKTQILAPAINWAGVFICYVTPETKNSEWVNWEIEYAAKQGKRIVGIWEHGEKECDLPEALEEYADAMVGWNGEAIIDAINGADTWEKPDGGPCAPVPLKRHPC

SEQ ID NO: 13331 - protein, 476 aa, Pseudomonas sp. CFII64
MAFDHEIEAFIKEFVKDIAEKNVAIFAGAGMSKSSGYVDWKELLRDIADELGLKIDDEHDLISLAQYHVNHRASKAGITKKILEEFSEQAESSINHKILARLPIPTYWTTNYDTLIEDSLKEALKVVDIKHEIDQLANTKPKRDVVVYKMHGDASSPSKAIIAKEQYEEYYKTHEQFITALSGDLISKTFLFIGFSFTDPNLDYVLSRLRTSSNKQHYCFMKRESRLSNDCDEAFKYKTRKQELKINDLKRYKIQTVLVDEYETITEILKEIEIRFRKKTIFISGSAEEYGDWQRSEAQSFIHELSKKLIITNLRIVNGFGWGVGSAVINGALEAIYSAPEKFSEDQLIVRPFPQFETNNKNLADLWEDYRQRMIALTGIALFIFGNKKSDNGSIIPANGVMREFEIAVSNGVIPIPIGATGYMAKIITSQLEENPTKYFGTNTWIYPLIKELNNEKLTQHEIIKKTINIIQRLGK

SEQ ID NO: 13332 - protein, 160 aa, Pseudomonas sp. CFII64
MAKTKVFYSFHFDNDVMRTQLVRNIGALESNQPVEANDWETVKKKGDKAIEDWIDSKMKDCDCVVVLVGEKTSERPWVKHEIKKAWNDKKGLLAIHVNDLKDPNDGVGKKGKNPLDHFTYKRNGASKTPPCITPKASDAYNDIKNNIEDWISDAIKISKG

SEQ ID NO: 13333 - protein, 480 aa, Sphingobium chinhatense IP26; identical to SEQ ID NO: 13329

SEQ ID NO: 13334 - protein, 155 aa, Sphingobium chinhatense IP26; identical to SEQ ID NO: 13330

SEQ ID NO: 13335 - protein, 483 aa, Staphylococcus aureus S1; identical to SEQ ID NO: 13296

SEQ ID NO: 13336 - protein, 202 aa, Staphylococcus aureus S1; identical to SEQ ID NO: 13267

SEQ ID NO: 13337 - protein, 344 aa, Staphylococcus aureus S1; identical to SEQ ID NO: 13268

SEQ ID NO: 13338 - protein, 483 aa, Staphylococcus aureus S130; identical to SEQ ID NO: 13296

SEQ ID NO: 13339 - protein, 202 aa, Staphylococcus aureus S130; identical to SEQ ID NO: 13267

SEQ ID NO: 13340 - protein, 344 aa, Staphylococcus aureus S130; identical to SEQ ID NO: 13268

SEQ ID NO: 13341 - protein, 483 aa, Staphylococcus aureus S123; identical to SEQ ID NO: 13296

SEQ ID NO: 13342 - protein, 202 aa, Staphylococcus aureus S123; identical to SEQ ID NO: 13267

SEQ ID NO: 13343 - protein, 344 aa, Staphylococcus aureus S123; identical to SEQ ID NO: 13268

SEQ ID NO: 13344 - protein, 375 aa, Staphylococcus aureus S100; identical to SEQ ID NO: 13260

SEQ ID NO: 13345 - protein, 202 aa, Staphylococcus aureus S100; identical to SEQ ID NO: 13261

SEQ ID NO: 13346 - protein, 344 aa, Staphylococcus aureus S100; identical to SEQ ID NO: 13268

SEQ ID NO: 13347 - protein, 375 aa, Staphylococcus aureus S94; identical to SEQ ID NO: 13260

SEQ ID NO: 13348 - protein, 202 aa, Staphylococcus aureus S94; identical to SEQ ID NO: 13261

SEQ ID NO: 13349 - protein, 308 aa, Staphylococcus aureus S94; identical to SEQ ID NO: 13262

SEQ ID NO: 13350 - protein, 231 aa, Lactobacillus fermentum MTCC 8711
  MOD_RES (221)..(222): Any amino acid
MADIIGEISKEDFVKSYALSIQKKEAAIFVGAGTSIPSGNLSWTKLIKPLADTLEININSYNDLVDITQYFLNDQAGNRSFINDRILDSMSDQQNNNQTLRAISELSVSTFWTTNYDHLLENYLEKSGKKVDIKRNEASLTNNIRGRDATVFKMHGDKDDVNNTVITRDDFMNYTENHPNMSTALRGDFINKTFLFIGYSFNDPNLNYILGKIKRTNATNXXRDRLKLGRL

SEQ ID NO: 13351 - protein, 165 aa, Lactobacillus fermentum MTCC 8711
MVKHQVFFSFEYNKDNWRASQVKEMGVVSSSSTFSSNDWEEVKEKDDKAIKKWIDDQMAMRACVVVLVGTTTSSRKWVKYEIEHAMSLNKGIVGVYIHGLKDKSGNQTTKGANPFDNVKTINGDRLSKYVQCYDTAYSTSKYVYSDIEESLPDLIDEAINNRFDY

SEQ ID NO: 13352 - protein, 473 aa, Peptoclostridium difficile DA00065
MLIIKGEVSKKDLIREIEKAIKSDELGAFIGAGLSIPAGFCSWKELLKEPAEEIGLDVEKENDLVNLAQYYSNSKKRTSIDDLIKGQFSQLVKPTENHKLLSQLPISTFWTTNYDKLIEKTLEDNMKKPYVKTKDEQLRGTNHDFDAIVYKLHGDVESPEDAVLTRSDYEEFGYNKRKLFREVLEGDLLTKTFLFLGFSFEDPNFNYVIGRLRVLLDEKNTRKHYCIMKRVQDTDEDYEYKKAKQELQIEDLNRYGIFTYLVNRYDEITELLSTLVDRFRRKTIFISGSAYNYPGYSHETAQNFIHKLSFELSKNGYRIVNGYGKGVGEFILNGVADFCLTHKAKINDFLTLMPFPQNSSLEIDLDTLYKENREQMIENCGIAIFVFGNNETENIASGVMDEYELSKEHGLVCLPIENTGGASKEIYDKTTQEISDKNTISAIEQANKQCDGDIDISVKNIVQAVKILNKEDF

SEQ ID NO: 13353 - protein, 141 aa, Peptoclostridium difficile DA00065
MGKVDSSSTFSDNDWEEVKEKTDSKIKEWIDEQLNKRSCLVVLIGEKTANRKWINYEIKKAYELNKGIVGIYIHKLENSSGEQDDKGNNPFDYLTLEGEKLSKYVKCFDSSYASSKYVYNDIKDNIEDLIEYGIEHKPSTW

SEQ ID NO: 13354 - protein, 473 aa, Peptoclostridium difficile P71; identical to SEQ ID NO: 13352

SEQ ID NO: 13355 - protein, 165 aa, Peptoclostridium difficile P71
MSKRQVFFSFHYDNDNWRAGQVRNMGKVDSSSTFSDNDWEEVKEKTDSKIKEWIDEQLNKRSCLVVLIGEKTANRKWINYEIKKAYELNKGIVGIYIHKLENSSGEQDDKGNNPFDYLTLEGEKLSKYVKCFDSSYASSKYVYNDIKDNIEDLIEYGIEHKPSTW

SEQ ID NO: 13356 - protein, 482 aa, Acinetobacter baumannii CI78
MFEHEQKIMIDRIVKELEENNFAIFAGAGLSAPAGYVNWKELLRPLSIELNLDIDKETDLVSLAQYYVNENHGRNRLTERLIDEVGVAREPTANHKILAKLPISTYWTTNYDDLIEKALDNEGKIADKKFTKNHLSQTKKGRSAVVYKMHGDASLPDQAIITKDQYESYPLHFAPFVTALSGDLVSKTFLFLGFSFNDPNLDYILSRIRIHFEQNQRQHYCIFRKVNRTDYSNDEDFSYNLLKQQFVIKDLARFSIKVVLIDAWNDLTRILEEITKKFRCKNVFLSGSAHEFGPWGQTATELFLSKLGEVLIQEGFKITSGLGLGIGNAFISGAIKEIYNRKYTKIDDYLTMKVFPQFVADPTERKSIWTAWRKDLLSQTGIALFFMGNKIIKDPESGKQTIVLADGMDEEFHIAHELGLKLIPIGASGYKAKELFNLIISDFDRYYPNSTPKFREAFEKLNEEVDEPIKLLSKIHDVIKLI

SEQ ID NO: 13357 - protein, 164 aa, Acinetobacter baumannii CI78
MARRTFFSFHYSGDICRIGIVRNSWLTKKNRDDAGFWDSAKWEQVRKESDLAIKRWINSQLENTSVTVVLIGADTSTRDWVNYEIEKSIERGNALLGIYIHKINGLGKGISRKGRNPLDDHYIPCTDGKSYKASSIYATYDWVDDGGYENLGIWIEAAAKRAGK

SEQ ID NO: 13358 - protein, 385 aa, Acinetobacter baumannii CI78
MAGIIKRKYMSENIQIYKKMTNQLNFINKILPETYDGNILFDLYVEYFYSTIQMLDERYEYYRSKDIFLRSVGKKQRYKILNSKDFFFSSQKVKHMLSYGQRLRHKQQYNEESKTESLIKLEKKLNKSLNKKLVIAKKNEHIQDIEPIYIDIFIKIYHRSNHLEKILIFNELKKFNSNKTITFFYKLNDSEHNNQIRMMAFQHLQNLGKYVKLRKKFKGKKKTYHSDSTLPTYSPEELVKFLNSNSVESKKKYDIFISHSYLDKDLVNSLKNALNLQNLLCYYDWTSDQDFLKRTLISNYTKEVLKKRIEQSEIFLLLLTQNVIAEDKIISEWIDMEIEYAKSLGKTILCINLINAKHKFIDLNFELRENSIYLTEVLSSFLIKA

SEQ ID NO: 13359 - protein, 111 aa, Acinetobacter baumannii CI78
MYVDWLDSSMPDSPNRETAVKIQQKIQEADYFFFLATPNSVKSRWCPWEIGYADGVKEYESIFVIPTQDRYGSYYGNEYLQLYQRIEESQQGPLAFWKPNTTTSGRYMSSL

SEQ ID NO: 13360 - protein, 392 aa, Acinetobacter baumannii CI78
MSEKYYQIILLGKVDERLASIQKSLMDRFNDLKINPSFIKFIHSDNYLSRDPKYPTIAIYFGGDKSNILYLSNLIEESVVIIPVVQSNELVPIELPDEIIRINALPINQTNNNTERLVSIICENFRFLRKERKVFISYRRIDSQGTADKLYDILDANGFDVFLDTRSVPPAHNFQDQLWHRMTDSDAIILLDTPRFRTSRWTKEELMFANEHNIHILHILWPQQKEEGIASFNEFIKLTSKDFKMKSLGRKGIPYTGKNITKKTLRNIVIKTEQLRARAISLRYKYLVDNFCDAARDAGYKPNVQIDQWISIADWKDNGLAVIPAIGVPTADRINDIYNAVSNSKFKNSEKWIIYDNRGILKQWLDHLDWLDEHLPIKAVNMTKAPSLLENK

SEQ ID NO: 13361 - protein, 258 aa, Acinetobacter baumannii CI78
MYKSIQVEDFDFSIFPSISYLDVSKYREKNENRLIEIQDYLLDRKNTLSVDKISKNLFLDIKPDIFLSHSHADENDAIRLAILIEKELKLNVFIDSCIWGNAFKLLREIDNIYSLDGDTFDYHIRNHTTSNVFMILNSALHRIIDNCEAFIFLGTDQSIPITDTFEDKKYLSSPWIYSELQFAKLVRRTKPRRIPFESRDIKTESAFDSAVDFAYSIPMTDATLRNQKLKSWIENSKNSFINENTHSLDSLYNIVTYR

SEQ ID NO: 13362 - protein, 481 aa, Vibrio parahaemolyticus VP2007-095
MKRKFPNETEAFIRTFVKDLEEGAAAIFAGAGLSKNCGFVDWSELLSDIAEELGLSVELEHDLISVAQYHVNKQNSANGLARKILEEFSEQAEISESHKILARLPIKTYWTTNYDTLIEDSLKENYRVADVKRKTDDLVNTKPKRDAVVYKMHGDVGSPSEAVLYKSQYEQYYKTHEAFITALSGDLISKTFLFIGFSFSDPNLDYILSRLHVPNSYRRNHYCFLRKEPSELMCGEDEHGAEYRQRKQEHHIRDLKRFGIQAILVDKYDDIPLILKEIENRFLRKTIFISGSAEEYGHWDKQLALDLIHSLSSSLVKAGYRVVNGFGWGVGSAVINGALEAIYSNPEKYSEEQLVMRPFPQHPSNGKDLAQLWREYRQRMISQSGVAVFLFGNKLQESKVVNADGVRKEFEISIENGLSVIPIGCTGYMAKELSETILSDKEKYFPNSSWLEKEILELNDISNNSEDIVRKVLSIIRKVGK

SEQ ID NO: 13363 - protein, 104 aa, Vibrio parahaemolyticus VP2007-095
MTVHIHNLKDKNGYTTSKGIDPLSCIGVYKSGENIYFAEKNGAKWEKYGDYQSPIPAKDLWFSEPKDNGVLPLSRFYSNYDFVNNKGRENISKWIDSAAKQVGR

SEQ ID NO: 13364 - protein, 191 aa, Vibrio parahaemolyticus VP2007-095
MAYFTKSEARNASARVRGYRSAKSFLSESVKKYKQSESFDVFLSHSIEDYDLVLGVMVLLEQQGLKVYVDWVVDEQLDRSYVSKDTAEVLRYRMKSSASLMYIATENSSNSKWMPWELGYFDGLKSDKVAILPLQDSENQRFEGQEYLGLYPLVTKYLQNGRVNHYVEEHGSRWSSLGNFTRASSNIWNKY

SEQ ID NO: 13365 - protein, 484 aa, Serratia marcescens EGD-HP20
MFNRDIELFIRDYVNDIKAGSAALFAGAGLSIPAGFVSWKELIGDIAYELELDIEKESDLISLAQYHLNEKGNRHKINQKIITEFAEQAEETENHRIIARLPIASLWTTNYDDLIEKSYARYNRVCDVKTTPESLTNNIHKRDVVLYKMHGDYRNPNQAIITREQYETYSRTHLPFINMLMAELTAKTFLFIGFSFEDPNLQYVLSRLYAQYAEGKRNHYCIMRRVQLGDSGSEDQASCDYNSRKQSLMINDLRRYGIQTLLVDDYRQITDLLYAIETQFKKSTVFISGSADNYHPYAREESIQFIHRLARLLIRKQHRIVNGFGWGVGTAVINGALEAIYDSQGKISESQLVLRPFPQFASGGITLPALWHEYRQNMISLSGIAIFLFGNKRNAEGEYVLADGLLKEFQIATEQGCVCIPIGCTGSASAEIYRKIKEEMKETLYHRHPAAMNLLDQLNEPGSLAEKKKCLLALIDIITKDNPR

SEQ ID NO: 13366 - protein, 163 aa, Serratia marcescens EGD-HP20
MTRKCFYSFHYEPDNWRASQIREMGTLEGNRPATDNDWEEVKKGGDKAIADWIKSQLDNRSCAVILAGKDTANRKWINFEICEAWKKGMGVLVVYIHNLKDSAGDQTTKGKNPLDHIKLGDTKLSAIAKAYDPPYLTSTNVYNHIKENLAEWVEEAIRIRANY

SEQ ID NO: 13367 - protein, 473 aa, Megasphaera sp. BV3C16-1
MLIIKGEVSKKDLIREIEKAIKSDELGAFIGAGLSIPAGFCSWKELLKEPAEEIGLDVEKENDLVNLAQYYSNSKKRASIDDLIKGQFSQLVKPTENHKLLSQLPISTFWTTNYDKLIEKALETNMKKPYVKTKDEQLRGTNHDFDAIVYKLHGDVESPEDAVLTRSDYEEFGYNKRKLFREVLEGDLLTKTFLFLGFSFEDPNFNYVIGRLRVLLDEKNIRKHYCIMKRVQDTDEDYEYKKVRQELQIEDLNRYGIFTYLVNDYSEITDILSILVDRYRRKTIFISGSAYCYPGYSHETGKNFIHKLSFELSKNGYRIVNGYGKGVGEFILNGVADYCLNHNSKISDFLTLMPFPQNSSLGIDLDKLYKENREQMIDNCGTAIFIFGNKETENIASGVIDEFELCKKHGLVCLPIEHTGGSAKEIFNKITREITDKNTISAIEQANKQCDGDIDMSVKNIVQAVKILNKEEF

SEQ ID NO: 13368 - protein, 165 aa, Megasphaera sp. BV3C16-1
MAKRQVFFSFHYDNDNWRAGQVRNMGKVDSSSTFSDNDWEEVKEKTESKIKEWIDEQLNKRSCLVVLIGEKTANRKWINYEIKRAYELNKGIVGIYIHKLKNVFGKQDSKGANPFDYYNINGVPMSKYVKCFESNWSSSENVYNDIKDHIEDLIEYGIEHKPSTW

SEQ ID NO: 13369 - protein, 487 aa, Peptoniphilus sp. BV3C26
MNNIIKKKELIEIVEQALYSDELAIFAGAGLSINAGYYNWEKLLEKPAKELELDISKEKHDLISLAQFYCNKKKRSAINELLSASFPSNKKPTENHNILSQLPISTYWTTNFDTLIEDALKENNKNVSVRKDDKDLQLSYKNYDAVVYKMHGDIQSPSDAVITRDDYEEYGINSRKLFRDVLEGTLLTKTFLFLGFSFSDPNFNFVLSKMRVLLEDDNRPHYYILKKIAEPNRNKFEDEKEYKKAMDEYKYDLIKQSLQIADLDRYGIKICLIDSYEEITEILKIILNRYKRKTVFISGSAETYTPLDAQEAKEFIRKLSFELVKNGYKVVNGYGLGVGTYVINGITEYCYDHRDIKIEDSLKLMPFPLSAINSEQLRTTWEKYRDEMISQCGIAIYMFGNKQKDGEIIKADGVKQEFNIAESYQLVNIPLAFTGFISQELYSENSDMVKNILNDEEIQYITKFCDIDTNVDAIIKIINRLNSKEEC

SEQ ID NO: 13370 - protein, 163 aa, Peptoniphilus sp. BV3C26
MARRVFFSFHYDEDINRSMIVRNSWVTQGKEAAGFIDKAEFEKIKRNGENAVCKWIDKQLEGTSITIVLIGKETLNRPFVQYEIRKSIERGNAIIGIHIHNLRDMITQRTTVKGNPHTIIGYYNDGTPAYFDYICDDLYDYLEDNGYYNLGSWIEKAALKKGK

SEQ ID NO: 13371 - protein, 376 aa, Peptoniphilus sp. BV3C26
MGKTARQFNKIYIDYKKKFKKSIQQVLKLMPYTFSDDDIVNTFKELYPHLWDDLNKQYNFWHNKNMVLLKYGKKSRYNFIKPYNFILDCSFHSVKKLRKDKNRIILGKDDMENLKNEIKQISKSKFDKRKQKVDGTLRFIQEIEPQYTSFFIDKYFKTYDLHQKLEIMRELSKYKSSNITEFFYKVNSCTRNFSLKEEAQNYIQSIGLPFMLRRKKKGKKNYIDNEIVKNNSGPEVLKQRLYVDDLEKVKRFDVFISHNSNDMNQIVEFYKTLNTKGYVAYIDWVNDKYDLKREWCNASTSEIIKLRIHQSKIFIIFLTELTFKSQWCPWELGYADALDKKIYVYNSPNLKNEDIPIFYKGYTEIKSVDEIIIENY

SEQ ID NO: 13372 - protein, 473 aa, Peptoniphilus sp. BV3C26
MFIIKGEVSKKDLIREIEKAIKSDELGAFIGAGLSIPAGFCSWKELLREPAKEIGLNVEKENDLVSLAQYYANSKKRTSIDDLIKVQFSQLLKPTDNHKLLSQLPISTFWTTNYDKLIEKALEDNMKKPYVKTTDEQLRGTNHDFDAIVYKLHGDVETPEDAVLTRSDYEEFGYNKRKLFREVLEGDLLTKTFLFLGFSFEDPNFNYVIGRLRVLLDEKNTRKHYCIMKRIQDTDEDYEYKKARQELQIEDLNRYGIFTYLVNKYDEITEILSTLVDRFRRKTIFISGSAYSYSTYSQETGENFIHKLSFELSKNGYHIVNGYGKGVGDFVLNGVADYCLTHKSKINDFLTLMPFPQNSSLGIDLDKLYKENREQMIENCGIAIFIFGNKKTEDIAHGVMDEFELCKKHGLVCLPIEYTGGAAKEIFKQTTQEILDKHIISAIEQANKQSNGDIDMSIKNIVQAVKILNKEEF

SEQ ID NO: 13373 - protein, 165 aa, Peptoniphilus sp. BV3C26
MAKRQVFFSFHYDNDNWRAGQVRNMGKVDSSSTFSDNDWEEVKEKTESKIKEWIDEQLNKRSCLVVLIGEKTANRKWINYEIKKAYELNKGIVGIYIHKLENALGEQDDKGNNPFDYLTLEGEKLSKYVKCFDSVYLSSKNVYSDIKDNIEDLIEYGIEHKPSTW

SEQ ID NO: 13374 - protein, 482 aa, Pseudomonas putida SJ3
MRKKFSPEIEIFIRRYVRDLNEGVAAVFAGAGLSRNSGFVNWPELMREVAEEVGLSVDKEHDLVALAQFHVNERSGSGGLARRIIEEFSEHAEPSTSHQILARLPIRTYWTTNYDQLIEDSLRKHQRVPDVKHKIDDLLTTRPKRDAVVYKMHGDALSPTQAILYKSQYEQYYKTHEAFVTALSGDLISKTFLFIGFSFTDPNLDYVLSRLHVPQHARREHFCFLRREPSSLYENEDEEAARYRRRKQELHIQDLKRFGIQTLLVDEYADIPAILRAIEEQFLKKTIFISGSAEEYGDWKKDEALDFIHSLSSSLVKHGYRVVNGFGWGVGSAVINGALDAIYSNPEKFSEDQLVMRPFPQVASQGQDLKVLWQQYRERMIALSGIALFVFGNKTEGGEIVSAPGVEREFDIAVRQGVVPVPIGATGYKAKELAEKVMADPAKYAPDDQWLAESLKNLNDPAAGAKSIEAAVLTIIKKLEGV

SEQ ID NO: 13375 - protein, 158 aa, Pseudomonas putida SJ3
MKRNVFYSFHFGKDVLRVQQIRNMGVIDGDEPVSPNHWEEIKRSEEGVKRWITENLKRKTCLVVLIGEETASRKWVKFEIMKAWELGIPVVGVRIHNLKCPNAGTGAYGLNPFDYVTLKRANGTVYSPRVYDPRADDAYGSIKANLPAWIETAIKECA

SEQ ID NO: 13376 - protein, 179 aa, Pseudomonas putida SJ3
MVRNVTKSELRNISSQATQNRTFAKSMASTYNMTFISHSSKDKDLVMGAIEVIANHGGMPYIDEVDPEMPKHTSEETAELLKKRITDCKRFVLLTSPNSKDSRWVPWELGVADGKKGVNRIAIFAASDYESDDSWSSWEYMGLYPRIVWGKLKGYPNELWMVYTEKTNTAETLESWLRR

SEQ ID NO: 13377 - protein, 183 aa, Pseudomonas putida SJ3
MAFFTKEQARAAAKRTKVTLGSVTGTQSYSSEQYDPTQRFDIFLSHSIADKDLVLGVKELLEEKHYTVYVDWVNDEELDRTQVNKETADLLRNRMQHCSSLVYIATDNAENSKWMPWELGYFDGQKAGGVAIMPLVESERSGYNGQEYLGLYPLVIEDDSQIYVEGVSEGRIGLYAFVNDTSR

SEQ ID NO: 13378 - protein, 284 aa, Pseudomonas putida SJ3
MYIGFELENYKPFEMISGSAVNNFRDQARDVVVNDLADYVIGQIDNKDIIDVKELTLRIFPQQDAQIFLSHSHRDERKAIEFALSLEKRGVSVFVDSCVWGYVGDLLLKVNKHYSDSEVVGDFTNFSYEKCNEVAASLYLMLNEELHRMIDAAECFIFFNTKNSIPIKGHEGFAEGDRTLSPWIYSELAFSAKVRYRPLVRKRLRRKIVGAMESYLVEKAFGSASFAFEVVNEHLPKLDGSTLRTLAQTTPETGDFWLDALYYAYELEAKFKGLCEARALEPIA

SEQ ID NO: 13379 - protein, 487 aa, Pseudomonas aeruginosa VRFPA05
MTKAALNRFLNEYPDALNDGVGAIFVGAGVSMAAGYPSWSELLSDIAVELEVDSKNVHDLAALAQWSILENGGATRVRNVIKNEIGPDKPIPETVEIISRLPVRHIWTTNYDRLIERAFESISRPLNPISGSKDLALRVTPGAALLYKMHGSVDRLDDVVISTDDYELFRSKRGQYLPLFQAHLTSMSMLFIGISFTDPNVRHVLSLIRESFTDAPPEHFAIVRAPQKADFTTEGEFAARNAQHKLWAKDLKRYGLLAVEVSDYAEIPALLRQIEKRVAARRIWVSGSWPLERGGSESADIHALAEDIGRQIGETGRHLVTGAGLLVGSASLSGFLGALRQGGGWDLERRLIARPFPQPLAGAQPNNEEWAALRLELARQAGIAIFIGGAKLAGDKLEVAQGVEQEFEVAKAAGVFLLPVGASGGAAQKISDLLLGSELSSSGQDAVRPTDKELKVLSAPGFLDSKVGRRKLVSLVFEIIDRIAHAT

SEQ ID NO: 13380 - protein, 167 aa, Pseudomonas aeruginosa VRFPA05
MARNVFFSFHFKNDFWRTQQVRNIGALDGQKLYTPNEWEEVKKKGNAAIEKWIDDSLVGKSCVVVLVGSETASRPWVVNEIIKGWNAGKGVVGIRINKLLDTNGNSSVAGSNPFDLVTLKNGTVNLSNYAKLITPVGVDSKAVYASIQESIEQWIEDAIAVRKNYKP

SEQ ID NO: 13381 - protein, 183 aa, Pseudomonas aeruginosa VRFPA05
MARNVTTAELRAFTANRSQSGREQLLRSNASSSGTSTFLSHSSKDHELLEGAMEVLHNHGARVYIDEIDPEMPPYTSAETAALLKQRISQTRRFVLLTTEKSKDSRWVPWELGIADGEKGLMKIALFPASDSTYDDNWTNWEYLGLYHRIAWGKLSGYEKELWMVLDAKANTAVTLRDWLSGY

SEQ ID NO: 13382 - protein, 480 aa, Enterococcus faecalis NY9
MKKQLVLTHDQKMFIKDFVKAIKNDNAAIFAGAGLSIPSGTMSWPDLLKDVAEELKLSNDTTTDMATMAQYYENLKGSRAEISEIITSSFEEYIVPNINQELIAQLPIKTIWTTNYDDLLEQAYKKEYKKVLVKRSPTDFSLKGKNSDLIIYKMHGDVQQPTKAIITKNDYETYNDTHSVYTTALKGDLVEKKFLFIGFSFDDPNLNYVLARIRALVGEHKPNHYFFIEKIKQANNESEADFDLRKTKQNLKIKDLKRYGINAVLLESYAEITQILEVIKRMVNLNNIFISGAKVTDREMESLADQLIETVSGKLVTEGNMLTSGFGVGVGSRVIDAVIETVSNNPWDKLDEHLKVYPFPQIKDTNWTLYRKEMLENVGISIFFFGTKIEKKKCVVSTGMIEEFELAHEAGVKIVPVGCTGGASKQIFDTVMQNPKEYYGENQKLIEQINKLGSHTFKDGKDIDELAQLILDTVSEMQKI

SEQ ID NO: 13383 - protein, 141 aa, Enterococcus faecalis NY9
MGIVDGSSTFSSNEWEEVKEKSDQKIKEWIDSQLDKRSCIVVLVGTTTASRKWVKYEIEKAYQLNKGIVGIYVHNLKDVLGNQATKGTNPFYNIFTNNGSRLSSYVTCYESSYATSTYVYNDIEEKLPNLIENAILNKAPK

SEQ ID NO: 13384 - protein, 206 aa, Enterococcus faecalis NY9
MAINVFISFRFSDGKELKEELIELFDSSTEVYNRSEDKDRSDMSEKTIQKYLYEKLKKTSVTIVLLTPKAVDYRKDIYGIYDDWLYDELRYSLEDRSDNRTNGVIAVYTDESKDLIRESSTHRCDVCGEEKTCTTILDFDNLVRKNMLNVKNDYKSNQCMGLYDRNKDSYISLVHIDDFKADYATYITNAKNKRDRKEEFDLVKRM

SEQ ID NO: 13385 - protein, 479 aa, Enterococcus faecalis NY9
MNKKTFIKNYSKAVHEGYAAVFAGAGTSVGAGFVDWKTLVAPFAEELNLDIDKEKDLVKVTQYYHNSKRNRGNINQQIINAFSSQEEITETVKILTRLPISTYWTTNYDQVLEEGLKRNNRKADIKISENNLANNIYDRDAVIYKMHGDVRFPETAVLTKDDYELYNETHSLFTIALKGDLISKTFLFVGFSFEDPNLDDILAKIRILLGENTREHYCFLKKIAQSDYINSNGVINDSDYLNDEIRQKLRIEDLKRYGIETVLLDSYDEIPRILSQIEKLHLNNSMFISGSISSYNDYWTESKVNSLCYNLSKKLVSRDYKVVSGFGLGIGSSIINGALDEIYKSKFKHINEHLSLHPFPQISDGKMNLKESWSKYRRNIISEAGICIFLFGNKLVNGEVVIADGMMEEFDIAKELNKIIIPVGGTGGSTKEIFDLMEKENNQYEYLEGYWEQLESIDEEKIISTILTIVTNNQKQLEE

SEQ ID NO: 13386 - protein, 206 aa, Enterococcus faecalis NY9
MATKVFISFRFSDGKELKDELIELFDSSTEVINRSEDVDRSEMSEDTIQEYLYEKLKNTSVTIVILTPEAVDYRKNLWGGYDDWLYDELRYSLEDRISNRTNGVIALYTDDSESLILKSSSHTCNKCNETRTCRTLTNFDNLARKNMLNVKEKYKANKCDNLYDDDKDSYISLVHFDDFKKDYEKYINSAKEKRDRKEEFRLVKRM

SEQ ID NO: 13387 - protein, 474 aa, Rhodobacter capsulatus B6
MKIEHVVLRVVQALRQGNLSVFAGAGLSMPAGYVDWKGLLQPLASELGVDIDRETDLVAIAQFYYNSKGQNRTRLSQRIIDEIGVSVFPTKNHEILAGLPIGKYWTTNYDALIEKALERAGKVADVKHDIGQIATTKANRDSVVYKMHGDASLPQKAVLIKDDYERYAEERGPFVTALSGDLVEQTFLFLGFSFSDPNIDYILSRVRLRLQGNQREHYAIFRERSKGDGESEEDFSHFKARQDLVIADLKRFNIQVVLVKEYSDITLFLERVEALFRSPRWFLSAGCSNFEPWGESEVSNFMRKLGAILIDNGIHIHCGLGLGIGNALLTGALEQVYRSSEPRVEKHLTLRPFPRFIDDDVKRAELWTAYRKQLISGCGYAIFIFGNKIQDQTTLVANGMIEEFEICLKSGVIPLPIGATGWASREIMRRLRGLPTWKLMPSTIQAAVEGLQHEVESLELLLHPITELIKSIER

SEQ ID NO: 13388 - protein, 165 aa, Rhodobacter capsulatus B6
MRNVFFSFHFQNDFWRTQQVRQMGNLLGQPLCRPNEWEEVKRKGDASIERWIDESLDRKTCVIVLVGSETSERKWVRREIEKGWNAGKGVLGIRIHQLLDQNSTASAAGANPFESFTFGAQKRNLASIVPLVSPSGFDSKQVYASIRDGIEDWIEQAISVRASVR

SEQ ID NO: 13389 - protein, 489 aa, Blastomonas sp. CACIA14H2
MIGEGDMVAATTRRFLKDFPEALIGGGGAVFVGAGVSMSAGYPSWASLLTEVGEELGVKSGELHDLAALAQWSIQENGSATRVRNVIKEQIGVEHAVPATLEIIARLPVKFIWTTNYDRLVERAFGVVNRPLDTVSGAADLALRATPGATRLFKMHGSVERLDDVVISTDDYELYRSKRGAFLPLLQAHLSSMSMLFLGISFTDPNIRHVLSLIRESFTSAPPEHFAIVRPPQRDDYKTDAEFEARSTQHKLWSRDLKRYGLVVVEIEDYAEVPDLLRQVERRVAARRVWVSGSWPPEAGDEIAKVYNVAQAIGQLVGDRNRDLVSGAGLVVGSASIAGFLEALRSSGGWDLDRRLIARPFPQPIPGEAPDKAQWAALRAELARIAGVVIFVGGVKIDPSSGLRLIAGGVLDEFEAAKAANCFVIPIGSTGGAAAQITDSLIGSDVETSGQGAMRPTDDELRELARADITVEEIVKLVAEILTRIDKRA

SEQ ID NO: 13390 - protein, 168 aa, Blastomonas sp. CACIA14H2
MENCMARRVFFSFHFDNDFWRTQQVRNMGALEGQSLCTPNAWEEVKRKGKASIEQWIADNMHGKSCVVVLVGSQTASRPWVQHEIVKAWNDKRGVVGIRIHKLLDRNSQPSVAGANPFEGITFNSGKKLSEVVQLITPTGNDSKAVYASISNGIEKWIEDAIAIRGRN

SEQ ID NO: 13391 - protein, 184 aa, Blastomonas sp. CACIA14H2
MVEYITREELRGYATRMGLVETARVRKAAASRSLAGSTFLSHSSKDDDLVAGAIRILEDHGAKVYVDEIDPEMPPYTSDKTAELLKTRIRETSRFVLLASKNSKESKWVPWELGIADGEKGMSKIALFPASDSRYEKAWASWEYLGLYRRIVWGGHQSYNGNIWMVLEEKKNTATELSKWLKGY

SEQ ID NO: 13392 - protein, 478 aa, Eubacterium nodatum ATCC 33099
MASKEEFIREYTTAITQGYAALFSGAGLSRAMGFVSWKELVKPLAEDIELNVDKEHDLIAVAQYYKNEKGGNAGINRQILNSFNKDVELNENIKILTKLPIQTYWTTNYDHLLEEALKFNNRKADVKITKESLANNIYDRDAIVYKMHGDCSMPENAVLTKDDYDLYSESHPLFRAALRGDLVSKTFLFVGFSFEDPNLDYILSQIKVLLGENRRDHYCFFEKSIKITGETERDYENRRVRQKLKINDLKRYGIQAVLLDSYDEITEILKEVEKAHLLKNIFISGSLSDRLDKINDSWNRERIASFANNLSKRLVKEDYRIISGFGNTIGSLIINGALEEIFKSKYKHVDEHLYLRPFPQVELETDSKEEIWQKYREDMIGESGIAIFIFGNKCENEDVKIADGMIKEFYIACEQNKLIIPVGSTGGAARVIYDTVKNNMGEYSYLNEYIDALGTETEPDKLVELICKIIKAQQKIRR

SEQ ID NO: 13393 - protein, 203 aa, Eubacterium nodatum ATCC 33099
MAHKTFISYKYSEAQGLRDDIIKKLGDDASYYKGETSESPDLTDTSTENIKKNLTDMMYDTSVTIVIISPNMKKSKWIDWEIEYCLKNISRKNRTSHTNGIVGVIMKYNDGYDWFKNTHKNSDGCTSSNYEESKVYDIINDNRFNQNPKVYSCNTCKTVDALTGSYIAYVEEETFLSNPQKYIDNAYDKSENDAYGYNITKKR

SEQ ID NO: 13394 - protein, 221 aa, Aggregatibacter actinomycetemcomitans serotype e str. SA2149
FISDLERVGISALLIDDYSEITEILMEIEQAQKRKTIFISGAAENYSPYSQQEVEQFVSSLSQEILKLGYRIVTGFGLGIGSSVISGAIKHLTEQNLKIDEDYLILRQFPQNKEGKELWSAWREDMISYAGISIFLFGNKLQNGNLILSNGMQEEFDISKRNGNVLIPVAATGYMAKQLWDNEMNKESAKEVENEMQALSKENISLDELRSNILSILKKVK

SEQ ID NO: 13395 - protein, 160 aa, Aggregatibacter actinomycetemcomitans serotype e str. SA2149; identical to SEQ ID NO: 13247

SEQ ID NO: 13396 - protein, 214 aa, Aggregatibacter actinomycetemcomitans serotype e str. SA2149
MGNKIFISYKYSDNAVKQLKEPNNLFSFYSQYKTTARDYVDIIQNKFERDDIHINKGENDNESLAGFKTETIRSKFAEKIFDSSVTIVLISPNIKNSWKSEKDQWIPWEIAYSLRSKRRPDNRSKRNAILLVVLPDRYGYYDYVNSYGFYFDIIQRNLNNLHTPYTTYKLRNGCSNSYMLQCNWDKFISNPNAWIEAAIEIRDKGNNYNIVIRP

SEQ ID NO: 13397 - protein, 468 aa, Lachnoanaerobaculum sp. MSX33
MFTIKGEVSKKNLIREIEKAIKSDELGAFIGAGLSIPAGFCSWKELLREPAEEIGLDVEKESDLVNLAQYYSNSKKRTSIDDLIKGQFSQLVKPTENHKLLSQLPISTFWTTNYDKLIEKALENNMKKPYVKTKDEQLRGTNHNFDAIVYKLHGDVENPEDAVITRSDYEEFGYNKRKLFREVLEGDLLTKTFLFLGFSFEDPNFNYVIGRLRVLLDEKNTRKHYCIMKKVQNTVENSEYKKAKQELQIEDLNRYGIFTCLVNDYNEITEILSILVDRYRRKTIFISGSADNYGDFSDEEGKIFLHTLSMRLSEKGYHIINGYGRGVGEYLLSGVAEYCLINGKNILDYLTVMPFPQSNISHIDIGKLYKENRKQMIEKCGIAIFVFGNKNGKIANGVLEEFSISKEKGLVCLPIGYTEGAAKEIFESLSSNDNSEAVIIANEKVDGDISSTAENIIKAVNLMNKEDN

SEQ ID NO: 13398 - protein, 166 aa, Lachnoanaerobaculum sp. MSX33
MARRVFFSFHYDNDVWRANTVRNSWVTQGKEAAGFIDKAEFEKIRRTGDRAVKNWIDEQLIGTSVTVVLIGSETLDRPFVQYEIEASRRRGNAIIGVTIGGIKNQYQNTSQSQSKYTQINGVWFDEIIDGFYDYVSENGYSNMGTWIESAARKKGNKSNSILKGCN

SEQ ID NO: 13399 - protein, 456 aa, Bacillus wakoensis JCM 9140
MVNWKELLRRPAARLGLDVDKESDLVSLAQYIYNDSKTKTPLTELINNHFSQTGRINRNHEIIAELPIRTYWTTNYDKLIEQALIQAGKKPDVKKRVNDLAVIKSKRDAIIYKMHGDVEVADEAVLIKNDYELYEKNNQMFTIALKGDLVSKTFLFIGFSFEDPNLEHILSRIKILLDDHTRTHYYFIKEVAEEDYPNNAEGKEQFQYDKIRQELKCADLERYSIKPLIVKKYEDITAILETITERYNRNNLLISGSAHEFNDYKVSGINAEDFIHKLSKTLNQKEFKVATGFGLGVGSAVINGVLEGMEESGTRNINEHLIMRPFPQYATNGKEIGQLWEEYRQQLISECGIVIFMFGNKLTKKEESDEDIVVEANGVIREFDIAVDKNAKVIPIGVTGYASRKLWEQVINDFQRYYPEFPYLKDKFIKLGEDGIEFNQLIKIVTDIVIEIRGGE

SEQ ID NO: 13400 - protein, 161 aa, Bacillus wakoensis JCM 9140
MARKTFFSFHFEKDSWRAGQVRNSGLFKGDKSGFIDKADWEEVKRKGDQAIKNWINKQLEGTSTTVVLIGSETSERKYVGYEIEQSAKRGNGLIGVYIHRVKDVNGRTDAKGKNPFDNWYYERNGKNVYFSEIYPTYDWVNDNGRDNLGKWIEAAAKKAGK

SEQ ID NO: 13401 - protein, 451 aa, Sphingomonas parapaucimobilis NBRC 15100
MAAGYPSWKGLLQEIAGDLGLEIEDVDDLTAVAQWAIGADHSNRTTVLNAIREQIEPDHAIPSALLSLARLPIREVWTTNYDRLIERAFGELGRPIDVRANQEQLALRKRRAGAVRIYKMHGTIDAVDDLVISTEDYELYRQRRGAFLGLLHAHLTGMTFLFVGMSLTDPNVRHVLALLREHFPTTPPRHFMIARRPQRADFGSNDAHAARLKRHDYWVRDLRRYGLVVVEIDAFAEIDELMDELERRVARRRIWVSGSWPLDAGDTSAGFVHDVARAIGRRIGSTDLFMLSGAGLLVGSASLSGFLETMQGRGEWDFDRRLVVRPFPQPVGDAEPDRQHWAELRGELARLAGIVVFVGGAKIESGGLVSATGVFEERALADGRGAFLLPVGATGGAASVIANELLTSALPSAGSNARRPTDDELRILSDASATPDQLADAVLKIIKRIAR

SEQ ID NO: 13402 - protein, 143 aa, Sphingomonas parapaucimobilis NBRC 15100
MSQVRNAWMLPGSRDSNTIVDHASWEEIMRKGPQAIQNWIDTQMNGSSVVAVLIGRDTHTRPWVEYEIRKAHREGRGILGVHLAGMKDSNGTVDPAGADPIAKLALTDRFGTRVTYPTYSWLQGDGRKNFSSWVEAAAQRAGR

SEQ ID NO: 13403 - protein, 186 aa, Sphingomonas parapaucimobilis NBRC 15100
MSYVTESEVRAAAARAKAATFKSAGILLRESRDTYQSSFDVFLSHSFMDQELVLGAKQLLEEKGLSVYVDWIDDPLLDRTAVTRATAEKIRGRMRQCRTLLYLHSANATKSKWCPWELGYFDAFTHPSRRVFIFPVTAADRSYTSQEYLNLYDTVDMASIGVATRRRDDIRVKGADSSFRAWSVAA

SEQ ID NO: 13404 - protein, 477 aa, Bordetella bronchiseptica RB50
MKREYLRLVDSLSKELAEGNLAIFAGAGLSRAAGFVDWKSLLKPIADDLDLDVEKEWDLVTLAQYHANANATNRSKLNQMLVTEFSSGVAPTENHEILTRLPIQTYWTTNYDKLIESSLERNGKVPDVKYTNKQLATTRSKRDAVVYKMHGDVDHASEAVLIRDDYERYHVKMQPFITALSGDLIAKTFLFLGFSFTDPNLEYILSRVRIQFAQDQRQHYCILRKASRMEGEGQADFEYRQRKEDLFKHELLRVGIKAVYVDEFSEITDILREIEHRHKRKTIFISGAAHDYSPWTKTEAEQFVYSLSKAISKEQYRVISGFGLGVGSAVITGVLEQTIMNGGRLDSDQLVLRPFPQSQSGTRPLPELWTEYRRNMLAHAGIALFLFGNKLDKTGRVVPSSGMREEFEIAIANGLFVIPVGITGSISAELWNEVIQSYDESKFEHGKKIGPLLHELGATNTDLARAHDIILTLLSLI

SEQ ID NO: 13405 - protein, 193 aa, Bordetella bronchiseptica RB50
MAKRVFFSFHYQDVIDFRANVVRNHWLTKPDREAAGYFDASVWETAKKQGEVALKRLINGALENTSNNCILVGSQTYMRPWVRYEIMKSFRRGNHLLAVHVNSVKGKDGRTKPVGPNPFEHLGVTYSEDGKTGTLWEKNGGTWSKYERIDGSANFAVQAGPEHRGKGFNLSRFYRIYDWVANDGYNNFSGWLK

SEQ ID NO: 13406 - protein, 165 aa, Bordetella bronchiseptica RB50
MPIRQSDLLAEGKRRSTQGRFTKSFGQPTAFLSHSHADATLALGLQEMLKNQGWDVYIDWQDQTMPEKPDTETAFNIKAAIVRADWFLFLATQNSMASRWCPWEIGFADGRKPHERIVIVPTQDSYGRFYGNEYLNLYNKIDVASGTLGLALYDTRGSGKWVRTL

SEQ ID NO: 13407 - protein, 477 aa, Stenotrophomonas maltophilia RA8
MNNDQTKLVDRLYKELVAGNLGIFAGAGFSQSAGYVNWKELLRPIALDLDLDIEQETDLVALAQYHLTRHEGRNKLNQELVEAFSAKLKPTENHRILARLPISTYWTTNYDQLIERSLEDAHKIPDIKHSRDHLPVTKYKRDAIVYKMHGDVGSPNEAVLTRDDYERYHVKMAPFIDALKGDLVSKTLLFLGFSFTDPNLDYILSRVRVMYEKNRRQSECILRHVTREEDEAPEQFEYRKRKQEFFQRELIRYGLRVTYVDEFSEITDILRALETKYRHRSIFISGAAHDYSLLPFPKEESERFVFELAKELSKKDKRILSGFGLGIGGAVISGVVEATAMGGSALDEDRLLVRPFPQDKVGNMSRDDLWRAYRDDILKRAGIAIFVFGNKLEGGEVILSTGMRHEFEIGLENKVFPIPVGRTGGMAEELWGELMRKIADGSFVVDPKVAPLIQELGDSSKSLDEIKATILNIVSLI

SEQ ID NO: 13408 - protein, 146 aa, Stenotrophomonas maltophilia RA8
MARKVFFSFQYTDVQRVMNVRNSNVVASNQGVGFIDKAEFEKVEREGDTAIRNWINKQLEGTSVTVVLVGATTNQSKWVKYEIEASKARGNGILTVNISQIRDLAQQTSGYCGMTVPGYSNYNWVTQDGRTNLGIWVEAAAKAAGR

SEQ ID NO: 13409 - protein, 307 aa, Stenotrophomonas maltophilia RA8
MSRRERQWDFHYPKLGRHNLHVAATDRGNRGGQRLSYPKFTSAWKFTVIRAFNMVCESASQYSAWHPQGKAHFDRKWPKSSRDLDQFINGGEIAGDALKKHWFSDVSPHAFISHSHKDEALAVGLAGYLLDMGIEPFVDSLVWGNSNSLLQNIDNNFCLDDDKKHYIYQSRNYSTSHVHMMLASALAETIDRADAVIFLNTPNSIEAKSAKNAGDEVTASPWIYHELVTTKLVRRQGFGGRARVKPALEHVFDHVSVEKHAQASLKVLHKPPMDHLVDLTHSSLAQIKAQGMRGLPALDSLYTLTDP

SEQ ID NO: 13410 - protein, 480 aa, Neorhizobium galegae bv. officinalis
MNHEIEAFVDEYLGEMIEGNAAVFAGAGLSMPAGFVDWRNLIAPLMKELQLNVTLESDLVAAAQFHVNANGKNRHKLHQAVIEALSPDKPPTRNHQLLSRLPIKTWWTTNYDKLIENALREAGLIVDVKSATQQLATTRPGRDVTLFKMHGDVDRPDEAVATKDDYEKYEKERGAFTAALAGDLTSKTFLFLGFSFSDPNLDHVLTRVRLTFRENQRRHYAIFKNRTKQQGETDEVFDHHRVRQALVIEDLKRFNVRVLLVDDYAEITKILEELQRRHSRRTIFVSGSAADFSPWGEQAISSFCRALGRALVSKGSRVATGLGSGIGDGILSGALTELLETKRRVDDGLVLRPFPQAIEDAEKRKEVWEVYRREILSHCGIAIFLFGNKADGNNIVLAEGVIREFEIAVESGVVAIPIGATGAAAAELAGTLLKDPEGLGKSLEPDDIKALGKLAEAVDNLNELIEPLLDLVHKLQAGRK

SEQ ID NO: 13411 - protein, 159 aa, Neorhizobium galegae bv. officinalis
MAVRRVFFSFHYERDVRRIQQVRNSWVVRERGTAQPFYDHADFEEVKRRSGGIAKWIDEQLEGSSVTAVLFGAETYDREWVKYEVRKSYELKKGIVAIDIHRIRDPLRGTDVQGRNPLSHFTAAGIPFTSLFRTYDWVTHDGYNNIGRWIEEAARNAGR

SEQ ID NO: 13412 - protein, 468 aa, Lactococcus garvieae
MRQELFIKKFSKAIQEGNAAVFAGAGTSVDAGFVNWKKLVAPFADEIDLDIEKETDLVGLTQYYINKKRNRGSVNQEIINKFSSQYAETEVMNLLTRLPISTYWTTNYDKVIENGLKNNNRRGDIKRKTDDLAISIRDSDAIVYKMHGDVDSPNDAVISKDDYERYSEKNSLFVTALRGDLVSKTFLFVGFGFEDPNLESILGKIKNLLGERTRDHYCIQKKVLKKDYKNREEYSYAKIKQELKIEDLKRYGIDTVLVDDYSEIPKLILKIEEEYFKNTIFISGSISDYNENWSQEKVNQFCYNLSRSLVSKNYKIISGFGLGVGSSVINGALDEIYKTKYRHVSEHLGLFPFPQHDAGEKSLAKRWTENREQMISEAGICIFIFGNKLVNGEVVLASGMMEEFRIAKERGKVIIPIGSTGFAAKEIFDEMKESGDYSYINDYWNDLENEEDVIKVFNTINEIIEGVR

SEQ ID NO: 13413 - protein, 153 aa, Lactococcus garvieae
MKKRLYINDLEKIKRFDIFVSHNSRDEEKIIEFYKKFNKKGQVVYIDWINDKYDLRREWCNASTVDIIKERIKQSDVFVLYFSGETLNSQWCTWELGYADALGKKICVYFSEDINRKGIPKFYVAYPELQMSKNIYVKIRGNEDILLKEWKKL

SEQ ID NO: 13414 - protein, 237 aa, Streptococcus pneumoniae
MIDKPGDKNFQLFIDDLGKRYNIKVLLVQTPEDIKEILREIKEKTISKNIYISGSLDDALEETRAYNLSKSLVEKLIDGGYNIVTGFGKNIGYYISGSSIQKLYSINEANIEKRLIMRPFAHDMSLDEDTSYRRNLISDTKFTIVMYGQAINSKGDIVTSRGVWEEIKISKEQGNYIIPIASTGFAAAELGEKIKSSITEYPYLENYIEKLCSENSPDKLAELVLHIIEEISFNFID

SEQ ID NO: 13415 - protein, 248 aa, Streptococcus pneumoniae
MEDRVFFCFSGKDRLVYAQSLNFHLKNLGIEVWYDYEKLYLGDDGDYVNIEEGVEQSKIFLLFISTQLFQSTGAMLELDAIKTKIDKYQEIVIIPILCEITSSQIPKKYNWISKYIYGEMKLDISSGTYDLSIDILKRLLYEQLKSVEIKNLLTLENITTDKFINAIVDKYNYIDKNCFSIRITMLYTLILYCLEKYNINDNISYYSSSFIFNKVKFNIQPTLKEIACMESIILVLINKIEGYFFNNM

SEQ ID NO: 13416 - protein, 500 aa, Bacillus cereus BDRD-Cer4; identical to SEQ ID NO: 13238

SEQ ID NO: 13417 - protein, 206 aa, Bacillus cereus BDRD-Cer4; identical to SEQ ID NO: 13239

SEQ ID NO: 13418 - protein, 476 aa, Bacillus cereus AH1272
MKMNPIVELFIKDFTKEVMEENAAIFAGAGLSMSVGYVSWAKLLEPIAQEIGLDVNKENDLVSLAQYYCNENQGNRGRINQIILDEFSRKVDLTENHKILARLPIHTYWTTNYDRLIEKALEEENKIADVKYTVKQLATTKVKRDAVVYKMHGDVEHPSEAVLIKDDYEKYSIKMDPYIKALSGDLVSKTFLFVGFSFTDPNLDYILSRVRSAYERDQRRHYCLIKKEERRPDELEADFEYRVRKQELFISDLSRFNIKTIVLNNYNEITEILQRIENNIKTKTVFLSGSAVEYNHWETEHAEQFIHQLSKELIRKDFNIVSGFGLGVGSFVINGVLEELYMNQGTIDDDRLILRPFPQGKKGEEQWDKYRRDMITRTGVSIFLYGNKIDKGQVVKAKGVQSEFNISFEQNNYVVPVGATGYIAKDLWNKVNEEFETYYPGADARMKKLFGELNNEALSIEELINTIIEFVEILSN

SEQ ID NO: 13419 - protein, 192 aa, Bacillus cereus AH1272
MAKRVFFSFHYQDVIDFRVNVVRNHWVTKLNQSAAGVFDASLWEDAKKTSDIALKRLINGGLNNTSVTCVLIGSQTFNRRWVRYEIMKSIEKGNKIIGIHINAFKDKYGNIKSKGPNPFDYLGYQYSSDGKQLHLYEWTGGKWEEYKDLAPYRVNQIAPESLRGKFYSLSSVYRVYDWVADDGYNKFSSWVN

SEQ ID NO: 13420 - protein, 139 aa, Bacillus cereus AH1272
MDARKILGLKNYIEGLGYSVYVDWIEDKQLDRSKVSKETAGILRERMQSCKSLFFAISENSDHSLWMPWELGYFDGIKQKVAILPVLKSSYDDSYNGQEYLGLYPYVAKGTIINSTQEEIWIHSSQKQYVRFRNWLQQN

SEQ ID NO: 13421 - protein, 476 aa, Bacillus cereus AH1273; identical to SEQ ID NO: 13418

SEQ ID NO: 13422 - protein, 192 aa, Bacillus cereus AH1273; identical to SEQ ID NO: 13419

SEQ ID NO: 13423 - protein, 139 aa, Bacillus cereus AH1273; identical to SEQ ID NO: 13420

SEQ ID NO: 13424 - protein, 473 aa, Finegoldia magna ATCC 53516
MFIIKGEVSKKDLIREIEKAIKSDELGAFIGAGLSIPAGFCSWKELLREPAKEIGLNVEKENDLVSLAQYYANSKKRTSIDDLIKVQFSQLLKPTDNHKLLSQLPISTFWTTNYDKLIEKALEDNMKKPYVKTTDEQLRGTNHDFDAIVYKLHGDVETPEDAVLTRSDYEEFGYNKRKLFREVLEGDLLTKTFLFLGFSFEDPNFNYVIGRLRVLLDEKNTRKHYCIMKRIQDTDEDYEYKKARQELQIEDLNRYGIFTYLVDKYDEITEILSTLVDRFRRKTIFISGSAYSYSTYSQETGENFIHKLSFELSKNGYHIVNGYGKGVGDFVLNGVADYCLTHKSKINDFLTLMPFPQNSSLGIDLDKLYKENREQMIENCGIAIFIFGNKKTEDIAHGVMDEFELCKKHGLVCLPIEYTGGAAKEIFKQTTQEILDKHIISAIEQANKQSNGDIDMSIKNIVQAVKILNKEEF

SEQ ID NO: 13425 - protein, 165 aa, Finegoldia magna ATCC 53516
MAKRQVFFSFHYDNDNWRAGQVRNMGKVDSSSTFSDNDWEEVKEKTESKIKEWIDEQLNKRSCLVVLIGEKTANRKWINYEIKKAYELNKGIVGIYIHKLENALGEQDDKGNNPFDYLTLEGEKLSKYVKCFDSVYLSSKNVYSDIKDNIEDLIEYGIEHKPSTL

SEQ ID NO: 13426 - protein, 486 aa, Listeria innocua FSL S4-378
MDLIKEQGNMIKDYVSSIREGKASIFAGAGLSIPSGAPSWKDLLRDIAHELELNVDKETDLISLVQYYINKRGKAQIGDLISNHFGNHLKCRINQQLIAQLPIDTIWTTNYDELLENAFKNEHKKIAVKRSVKDFSIVGTRNDATIYKMHGCVTQATDVIISKKDYERYNDTHSVYTTALKGDLVSRTFLFIGFSFEDPNLDYVLGRISFLMGENKPKHYFFVKELQKEEGESEEDFSYRKVRQNLKIGDLSSRYGIYAVVIKEYEDITTILKIINLKVRINNIFISGAIEVFDILGEKSTHDFISSLASRLIENNNKLVSGFGVGVGSDVINGVLSKISSHPSMRLDEHLKVYPFPQTVSTKDRKQVWQEYREHIMEEVGINIILFGNKIIDGKRTVSDGVIEEFEIAHNRGIKIIPVGCTGDAAKHINDIVLKEPEKYYGNNEKLIGMIKSLNEYQLTQENINSIIDDIISIIIEIQNKEYGVN

SEQ ID NO: 13427 - protein, 202 aa, Listeria innocua FSL S4-378
MAHKTFISYKYSESKDLRNTILDSLGEDAKYYKGETASSPDLSSTTVENIKSSLKDMIYSTTVTIVIISPQMINSRWIEWELEYSLKSIKRGDTNSSTNGILGVIKKVDDGYDWLKTLSKGSDGCTSTSYITDKMFPIINNNRFNQDPQLYSCDNCKTVNRLSGSYISLIPEEEFLNDPNHYIENAYKKSKTLTGYKIKKEA

SEQ ID NO: 13428 - protein, 487 aa, Pseudomonas fluorescens SS101
MTKVAMNRFLTEYPDALNDGLGAVFIGAGVSMAAGYPSWSGLLSDIADELEINSRNVHDLAALAQWSIQESGGATRVRNVIRKEIGPDKPIPETLDILARLPVRHIWTTNYDRLVERAFAAISRPLNSISAPKDLALRTTPGAALLYKMHGSVDRLDDIVISTDDYELFRSRRGQYLPLFQAHLTSMSMLFIGISFTDPNVRHVLSLIRESFTESPPEHFAIVRAPKRSDFKTRDEFSARLAQHNLWTKDLKRYGLLAVEIDNYDEVPALLRQIERRVAARRIWVSGSWPLEHGGTEPANIYALAEEVGRKVGETNRYLVTGAGLLVGSASLSGFLAALRNGGGWDLDRRLIARPFPQPLKGGVPKDKEWAALRQELARQAGIAIFIGGAKLANGLPIPAEGVEREFEFAKAAGVFVLPIGATGGAAEKICNQLQGSALSYKGSSPMRPTDKELKALADINALATAEGRKSLVNLVFQIIDRVARVG

SEQ ID NO: 13429 - protein, 167 aa, Pseudomonas fluorescens SS101
MARNVFFSFHFANDFWRTQQVRNIGALEGQKLYTANEWEEVKKKGDAAIRKWIDDSLVGKSCVVVLVGSETATRPWVLEEVIKGWNAGKGVVAIRINRLLDNHQNTSVAGSNPFDSVTLKNGTVRLSGYAKLMTPAGNDSKEVYASIQANIESWIEDAITIRKNYKP

SEQ ID NO: 13430 - protein, 192 aa, Pseudomonas fluorescens SS101
MISLSQERSMARNVTTAELRNISANSSQATRDHVFKSLAATASMSTFLSHSSKDKEVLPGAIQVLQNHGASVYIDEIDPEMPPYTSEETAALLKQRIAQTKRFVLLTTKNSKESRWVPWELGIADGAKGLSKIAIFPASDSAYDDSWVSWEYLGLYQRVVWGLLQGHPQELWMVLDTKANTAVPLKDWLAGY

SEQ ID NO: 13431 - protein, 481 aa, Thiomicrospira crunogena XCL-2
MEPTSDKQKQRFVTELLKDLSEDNLAIFAGAGLSAPAGFVSWPELLRPIADELELEIEKETDLVALAQYHCNANQANRGRLNQILVDDLSHDAKITDNHKVIARLPISTFWTTNYDKLIERSLVEVGKVPDVKHRVKQLSFTKRGRDAVVYKMHGDIEHPDEAVLTKDDYESYHVKMQPFINALSGDLVSKTFLFMGFSFTDPNLDYILSRVRVAYTKDQRQHYCIQKLVSALPGESAADTEYRQRKQELFIQDLLRFGIKTILVSDYSEITDLLLSLESSYRRKSIFISGAAHLYGRWDKEEAEKFIYKLAKELSAKDFRVVSGFGLGVGSSVISGVLENVYMNGSKLDSEQLILRPFPQNQVGQRPRDELWHDYRNDMISYAGIAIFLFGNKLVKDEVIESDGLIKEFEIAREKGLVLLPIGATGFASEFLYKRLIDEGYFHSDVIPDGMDSEIQVIGNESSDLEAITNSLLKIIDALK

SEQ ID NO: 13432 - protein, 146 aa, Thiomicrospira crunogena XCL-2
MARKVFFSFKYEDVKRSMVVRNSWVAQDKQSAGFIDKADFEKVKRKGDSAIKKWIDNQLNGTSVTVVLVGAKTCSSRWVKYEIEQSIARGNGILGIDISKIKGLDGVTTERCGQIPKGYPFYLWNKEKGYKNMGVWIEKAAEAASK

SEQ ID NO: 13433 - protein, 180 aa, Thiomicrospira crunogena XCL-2
MVLGIKAVFEKLGYSVYIDWINDRLLSREKVTKDTASVLQKRMRQSKSLIYVTSESSSHSKWMPWEAGFFDGIRDRMIAILPITDEEQSEKPFIGQEYLGLYPYLALDSLDKNFINKPMFMEPTAFESMLNQYRSSYKLFVFRDYQSYVLFENWINGEKPLSRLEIMNETLDKLNKLRNK

SEQ ID NO: 13434 - protein, 262 aa, Thiomicrospira crunogena XCL-2
MPAYDVVISFAGEDRAVAESIASNLVTRGINVFYDEYEKANLWGKDLYVHLTKIYRDDSKFCLMVISEDYVKKQWTNHERKAAQARAFNENREYILPLRLDDAEIDGILGTTGYIDYRNTSVDHIIDLLTEKVIQYNKENGIAYKIVKAETVFQQAIDFKGNSAFRDSDMNTECPACCTQQKLSEATLSLDGDDTIYTCKNGCQPLVVISRPGIVAWPGRGVRLQDYVIRNVREITIKTESMGMPMLIPASKAALMKMRSSR

SEQ ID NO: 13435 - protein, 480 aa, Rhodoferax ferrireducens T118
MVKCLTRLSDIQRPKLMPNYAQYQQEMTVDIANILKTAQCQPILFVGSGFSRRYANGPSWEILLTELAANCPFIDKDFAYYKQKYDGDLCKVGSVFAEQYFEWAWSPAGKKNFPPHLFAAGVPRDAYIKHAAADKLGSLAISDTDALNAELSALKAMGPHAIITTNYDTLLEQIFPKYEVVVGQNVFRTSPLVIGEIFKIHGSISDPGSLVLTQDDYCVFEEDKKYLSAKLLTYFAEHPLLFVGYSASDANIRNVLHDMSRMFKPSTLLIPNIYILQWDEMQNDQSYPPREHVLEVGHDVNVRIKSITANSYEWVYKAFGSGGAMEKVDLKALRSLMARMVNLIRTDIPTKNVQINYEALEQAISDGDSFANLFGVTNLNDPAAVNANHPYTSSMLAKKVGLKHWTGSNQLINRVEKETGFDMKASDNVFHVRIKSGEAEGSGVRKYSDAAVALLNKVKNGEIYTLPTHLLSGAANAEAV

SEQ ID NO: 13436 - protein, 157 aa, Rhodoferax ferrireducens T118
MVRHIKNVFISHVHADDAGLGKLKTLLAKSGMDIRDSSINSSNPNNAKSPDYIKSEILAPQINWAGTLLVYVSPKTKDSDWVNWEIEYAVKQGKRIVGVWEHGTKDCEVPSALAEYADAMVGWNGNSIIDAIVDEVDKWETPDGGTCSPVALKRHPC

SEQ ID NO: 13437 - protein, 479 aa, Janthinobacterium sp. Marseille
MDREIELFIQDYLKEIREDNAAIFAGAGLSAPAGFVNWRDLLRPIAEELRLDVDKEHDLVAVAQYHCNENGGNRHKLNQLLIEQLTVGAVPTNNHRILARLPISTYWTTNYDQLIETALKDTGKIADVKYITEQLATTKARRDAVVYKMHGDVEHPHDAVLIKDDYEKYHIKRGAFINALSGDLVSKTFLFIGFSFTDPNLDYVLSRVRVNFRENQRRHYCIFKKRTKQSNESDAEFENAQIKQRLAIADLKRFNIKTLLIDEYTQITEILARIERQYRQRTIFISGSAEEYGAWTKADTEEFLRDLSRALVQQGFRIATGVGLGVGDAVITGAIEEVYRARTGHIEDALIMRPFPRANPDPAIRKQLWESYRQELISSAGVCILVLGNKKVGDDIALADGVRREFEIAVDHGLSVVPIGATGYMARELWNQVVGSIETYYPGKNGDLKGKFDQLGNEVEKPAELISRILDFITLITKE

SEQ ID NO: 13438 - protein, 163 aa, Janthinobacterium sp. Marseille
MARRVFFSFHYDRDIRRVVQVRNSWIVRAGNETQPFMDKAEWESIKRTGAQAIEKWIDKQLNGTSVTVVLIGAETYDREWVKHEIKRSYELGKGMIGIYIHNVKDPQNGTDTKGKNPFDHWSVKKNGRDILFSELYKTYDWVRDNGYSNFASWIEGAAVAAGR

SEQ ID NO: 13439 - protein, 197 aa, Janthinobacterium sp. Marseille
MAFLTNSEVRQAAQGRLQKSFSSSASQVLREAVRASSTEDKFDIFLSHASEDSEIVLGVREILVGLGLTVYIDWIDDPQMDRGSVTAENADMLRRRMRASKSLILLTTKNSATSRWIPWELGYFDGHKTGFIGILPVVDYSGGAFAGQEYLGLYPLVEKLPLTGGGTKFCVVERAGKGYRFLDDFAHGQSTIRSFSG

SEQ ID NO: 13440 - protein, 477 aa, Shewanella sp. MR-7
MTKEQEQFIQRFLSELEEDNVAIFAGAGMSCSAGYVNWRELLRPLAKELNLDIDNEQDLVGVAQFYLNENGRNRISQQLIDEIATAKKPTENHSILARLPIRTYWTTNYDKLIERSLEEQGKVVDVKYTNNHLAVTKKKRDAIIYKMHGDIEHADSAVITKDDYERYPLLKKPYITALSGDLVSKTFLFLGFSFTDPNLDYIMSRVRAYFEEHQRQHYCIFKQCNKDDFRDIPTYENAVIKQGLLIKDLSRFQVKTILVESYSDVTLILSRIERTFRRKTIFLSGSASDFGKFNQADIETFLCQLGRVLIERNYKISSGIGLGIGNVFITGAIQGVYARHNGRINDYLNMKPFPQHIDDINQRNETWSKYRHEIIGSAGIAIFFMGNKIVDGKIVSADGVRKEFEIAHKLGLALIPIGCSGFMAQEIWTEVMNNLTVYYDESNTELISALQKLGEPVDKPEQLIEKILTVVDLMSQE

SEQ ID NO: 13441 - protein, 164 aa, Shewanella sp. MR-7
MDSFKEGKMTDIRNVFISHVHEDDAGLKKLKDLLSPKGVEVRDSSIHTGKFNDAKEPNYIKTGILAPAIKWAGVFICYVSPQTKNSDYVNWEIEYAAKQGKRIVGVWAHGEKECDLPAALTEYADAVVGWNGDSIIDAINGKDSWEKPDGESYDKVGIKRHPCS

SEQ ID NO: 13442 - protein, 160 aa, Shewanella sp. MR-7
MSRKPVFFSFHFDNDVMRVQQIRNIGALEGNNPVSANEWETVKRGGAKSIENWINENFKYKQCVIVLIGEETASRPWVQYEIKKAWNDGKPIFGIYIHNIKCPRNGTSTKGRNPFEQFTLEDGRKLSSVVRCYDLSTNDAYNDLARNMQQWVETAIAQRK

SEQ ID NO: 13443 - protein, 466 aa, Actinobacillus pleuropneumoniae serovar 5b str. L20
MDKKQFIKELVNELSANNLAIFAGAGLSVSAGFVNWKELLTDLAKELSLDINKEENDLVSLAQYYVNSKCGKRSKINYLILNEFSRKAEITENHRILARLPIDTFWTTNYDPVIETALKEAGKVVDVKHNVEQLPVSIHKRDAVVYKMHGDYTLPNQAVLIKDDYEKYHLTRNDFFTALRGDLLTKRFLFLGFSFADPNIDYILSRIRASYSENQKEHYCILRKVQKFDNEDQADFEYRQRKQQLFISDLERVGVNTLLIDEYSEITEILREVELAQKRRTVFISGAAEDYAPYSQEDVEKFVSSLAQDVLKLGYRIVTGFGLGIGSSVISGSIKYLTEQRLKIDEDYLILRPFPQNKEGKELWSAWRKDMISYAGISIFLFGNKSEDGNIVLSNGMQEEFDLSKRNGNILIPVASTGYMAKQLWEENSNQEHNEKFKEEMEILSQENVELDELKSNILSILRKVK

SEQ ID NO: 13444 - protein, 165 aa, Actinobacillus pleuropneumoniae serovar 5b str. L20
MTRKVFYSFHFDNDAWRAGQVRNMGVIEGNQPVNGNEWEEVKKSENSIKKWIDDNLKNKSCLVVLIGKQTSEREWVKYEIKRAWELGKAVCGIYIHKLKDSDEKQSSKGKNPFSQFTLGKDKKNFADIVPVFESSYSDSKDVYDDISENLENLVEKAISIRNEYK

SEQ ID NO: 13445 - protein, 214 aa, Actinobacillus pleuropneumoniae serovar 5b str. L20
MGNKVFISYKYSDDSVKQLTNPNDLFAAYRQVKTTARDYVDIIQKKFERDGIHINKGENDNESLADFKTEYIRSKLADKIFDSSVTIVLISPNMKDVWKSENDQWIPWEIAYSLKNKTRSDNRSKRNAILAVILPDRYGRYDYVNSYGFYFEIIQRNLDNLHTRYDAYKLKNGCSDSYILRCNWDNFISNPNGWIEAAIEIRNKGDKYNIVVRP

SEQ ID NO: 13446 - protein, 549 aa, Methanococcus maripaludis C5
MEILENLLKELNFHELHDHELSFFVGSGISVNSGMPLVSELINTILKTVMDSKKHVDKISNQKIPFEVFMNIFGEYSKELLDIYSGGIPNTNHKLIAKLAREGHVCSIYTTNFDELIELALNNEGLSENIDYKVYRTEKEIENSFKDSELLKIYKIHGCISKINSLRHTIRNVAFRENILIREKILKKMLNETSKLIIMGYSFSDFYDINPIFEQNQNIKKEIIVVNHDLRNDVKIDKSVTKPMLNNNCWDITINTDDFVKVLWKIHLKDKYILDNINHDWKNNIKNWFEKIHFGYKEYISTILFIQQGQIELGNYYCNKGMSKADSEFLKLELYLLKLLIIRSLKKIEKSDRYIKKAKKCIELLNNQDIAAYGSVNIAEFYLLVENYPKFEEEYHNLNVIMDSITNNIIISKYHRLGIQYCIIKGQYAEVLTLCDRLLDFQLKNGLIIDIPVTMHLKFKAYLELNDIVGAQNSLFELKNIPGLTNLTYQPFIELSEIEYMVKCKKINISEINHEIEKIWFKNENFQNNFVFDVFDKHADYLLKKYNKD

SEQ ID NO: 13447 - protein, 171 aa, Methanococcus maripaludis C5
MVRTKLFLSYYHKDDQYYKNRFEELFGHLFINKSVKDGDIAEDLSTNYIKRLIQEGYLKDTSVIVVLLGENTQKRKHVDWEISGAIDKMVGNYSGLIGLCLPTHPAYGKKNYTPDSIPPRLEDNLNSGYARMYDWTENPSTIKRLVNEAFTRKNNNSDLIDNSRNQFQRNR

SEQ ID NO: 13448 - protein, 484 aa, Rhodobacter sphaeroides ATCC 17025
MVTAARTNRFLKDYPEALIGGCGAVFVGAGVSMGAGYPSWATLLTEVGEELGVKSGELHDLAALAQWSIQENGSATRVRNVIKAQIGVEYAVPETLEIIARLPVKFIWTTNYDRLIERAFGGVNRPIDTVSGAADLVLRATPGATRLFKMHGSVERLDDVVISTDDYELYRSKRGAFLPLLQAHLSSMSMLFLGISFTDPNIKHVLSLIRESFTSAPPEHFAIVRPPQREDFKTDTEFDARSTQHKLWSRDLKRYGLVVVEIDDYAEVPELLKQIERRVAARRVWVSGSWPPDASGEIARVYNVAQAIGQLVGDRGLDLVTGAGLVVGSASIAGFLDSLRSSGGWDLERRLIARPFPQPIPGELPDRVQWAALRAELARIAGVVIFVGGMKINPATDLPMVAGGVLDEFEAAKAAKCFVIPIGSTGGAAAQIADGLIGSAIDASGHNAMRPTDDELKEFTRADITIEEIVKLITGILTRIDKRD

SEQ ID NO: 13449 - protein, 165 aa, Rhodobacter sphaeroides ATCC 17025
MARRVFFSFHFDNDYWRTQQVRNMGALEGQPLCSPNAWEEVKRKGKASIEKWIADNMHGKSCVVVLVGSQTASRPWVIHEIIKAWNDKRGVLGVRVHGLLDSNGQTSVAGANPFDSITIGGTSRKLSSVVPLITPTGNDSKAVYASISNGIEKWIEDAISIRGRN

SEQ ID NO: 13450 - protein, 183 aa, Rhodobacter sphaeroides ATCC 17025
MAQYITRDALRRVATELGIVETARIRRTAASRSLEGSTFLSHSSKDDDLVAGAIRILENHGAKVYVDEIDPEMPPYTSEKTAALLKYRIRETSRFVLLASKNSKESKWVPWELGIADGVKGTSKIALFPASDSNYDKAWASWEYLGLYDRIVWGKLANYQEEVWMVIDEKNNTATELSKWLKA

SEQ ID NO: 13451 - protein, 478 aa, Clostridium beijerinckii NCIMB 8052
MKKELIHFADRYLKDIKDENAAIFAGAGLSVGTGLVNWKGLLKDTADELGLNVDKEYDLIALAQYYENEKGGRGSINEQLISEFTKDVEISENHKILASLPIKTYWTTNYDKLIEKTLEYYGKTVDTKICSANLAVNIPRRDAVVYKMHGDISLPHDAVITKDDYENYNEKRQVFTTALQGDLITKTFLFIGFSFDDPNLEYILSRIRILLGNNTRDHYCFLKRVDKEEFVDEKDYVYEKTKQDLKVKDLKRYRIQALLIDDFSEITDVLLLIKSKLKRSNIFISGAAHEYGKWSKDRAENIVYNLSKRLSEEKFKIISGFGLGIGSSVINGVLSHVYSNIKKHTDDFLILRPFPQNIKDENERVALWNKYREEMISDAGIAVFFFGNKIKDGNIIDSDGVFKEFEIAIRKGLKVIPVGCTGYVSNKLWNRVIDAMDDYYPQDEELYAAIKSLGKDTEDDSFIINNIIKSINILQGKN

SEQ ID NO: 13452 - protein, 229 aa, Clostridium beijerinckii NCIMB 8052
MGRKIFISYKYADNDVNHIVGEWYENNTVRDYVDKLEEYLKDKSDNIYKGESDDEDLSKLSEDTIWEKLKDRIYDSTLTIVMISKNMREFYKVDKNQWIPWEISYSLKEVSRKNSSGNSVTSKTNAMIAIIVPDLNNSYEYYTYNKNCCDSGCRVLKTNTLFDILKNNMFNIKDTDTKDCSDGSKIYYGNSSYINSVKWDDFINDIESYIDSAYELQDNMDKYKIVKEV

SEQ ID NO: 13453 - protein, 202 aa, Clostridium beijerinckii NCIMB 8052
MSHKTFISYKYSEAQKLRDDIIKALGDDAQYYKGETSDSPDLTDTTTENIKRHLKDMMWGTSVTIVIISPNIKKSKWIDWEIEYSLKEIMRSDKTSRSNGIVGVIMKYNGGYSWLRTKTIKKDGHFLINIDKCKLYSIIINNRSNQNPKQYFCEECKTIDVLTGSYIALVDEEEFLSDPQKYINNAFDKSQNISGYIIEKTR

SEQ ID NO: 13454 - protein, 166 aa, Clostridium beijerinckii NCIMB 8052
MAKRQVFFSFEYNKDCWRAGQVRNMGKVDSSSTFSDNDWEEVKEKTDTKIKEWIDDQMAKRSCLVVLIGSTTSGRKWINYEIEKAYELNKGIVGIYIHNLKDSDGNQTNKGSNPFYQIYIGDKNERLSKYVTCFDSTYKSSQYVYDDISQNIEQLIEDAIANKNNY

SEQ ID NO: 13455 - protein, 397 aa, Clostridium beijerinckii NCIMB 8052
MGETARQFNSIYIKYKQQFKRPIQNVANLMHRGFSDDDFIRKFKEIYPDLWLDLNSQYEYWHKKNEYIISKGKKSRYNFRKPYNFILDCGFHTIPNIRKKHELGKILPLYEQVKLSKDIVEKSKNKLKKKIDKKVSIMKYLQEIHPQYADYFIDSYFKTYDLHTKLEIMRELSKYKSEKIVEFFYKVNAGTRNFSLKQEAMKYIQALQLPFVLRRKKEGKTNYIDNEIVKNNNSPEILLQRIFVDDLEVHKKYDVFISHNSRDEEYVIDIYKNFNKYGLVAYVDWVSDKFDLKRTWCNASTSKVIKERIRQCQCIVYIWSENVLKSQWCPWELGYADALGKPICILGLTDESNIPQFYLSYPKLIQLNGKYCIENNEKISFKDWLKTGSTSILKGKN

SEQ ID NO: 13456 - protein, 1197 aa, Sinorhizobium medicae WSM419
MRLHHLGPDFPEALVYELLEGNVVFLCGAGVSAPQLPNFRDLVLNVYARLGEERTPAEDHAFQASRYEEVLGALSRRLVRSEDVIDAAAAELQVPANPDTAHHDVILRLSRDQVGRPIIVTTNFDTLFERSLMVSHSAAFATEESAAGQDIPAPGSARFTGVVHIHGRLTDVELNLSKTELVLTSAQYGEAYLRAGWAARFLFDLMRCRTLVLVGYTANDAPVRYILNVLEGDRERFTDLRRVYALSSSNGDPRAAAAPWQALAVEPLLFEPEGGNPYGPLWSSLEGLANLVENPDVRRREMIAAIVSGPVFETTDHDIRTLKWALGARADLFEHFITRCEDAAWFDTLAVEIRAFGERARAWMLARWFARGWDDRVRYLTAIKHLGRGSQELSDAVFRELDQNRPQDATWEKAWRLLAEAAAAASHDSLRDYQLHHRLNRGPVVESDLGRLVNAIGPHLTIEAPFRDEDPSEHPNQLSDIARFSMESQHQEFLQDVLASLVGNAENILRLLERASQRLACQLRTARDAELIGEVRDVTDFGVPSVVNHPQNQHRRGFVPLTVLITSAVPMAAQANLEGTKRVIDGWRAEPFNLTTRLWMHALTHQALFTADEAIDALATSSEVAFWSFALEFVAIVRARIAQASGESVQRLVRRLLVEGPQRYADQEQSADGIDWQDRARDRDIWVRLTGIGEHVVLPQEAETLLHEIRERRTYLSREIDERDLFRTWSSGVRAVRGRTAQIVSAQPSERLTIADRLEESSDIEDREGWGEYCREDPVGAYAALRSRPLEMGVVARWATWLEIIPSRANMTSPEWLRVIQEAVGLLGEADDEIVNVLVGPLARITEHARQLQLALPANWWDRLWQAAEGEPEVDWGDDVETYDRVINSTGGSLAEALLQAISSQRENGDDVNAADLHRLQRMIVSTTYSGEMARGACVRYLSFVFSVSHEITLNHLRPFISADNDEGRRLRGVLVEYNSFVADAEISFADLILQGVRESRQKDISAANAASHLVRAVVASFDEPNVARGISPQQARQTLREAAADIRVGALKIMTNWLEEAPVDNRAAAWTDLYGPTFQAIWPRDRSYLSNAVSKDVFSLATAAGAAFDAAVEALLPYVSTFEDDWLSLHDLERNNAELATRFPVAALRLVWAACGPPCKGRTSDIAAILDAIAAANPALVIDRRMHKLRLLAVSH

SEQ ID NO: 13457 - protein, 641 aa, Sinorhizobium medicae WSM419
MKFDFSTLSPDDFENLSRDLVGAETGVRFEAFTVGADEGMDGRHAKADGSIILQAKHYLRSGFSKLKSKMREERVSIDELAPQRYILTTSVPLTPANKATLSEIIGPSLAGPGDIFGADDLNGLLRSYPEVVKAHEGLWAHSTPVLEEVVTNAVRKAMAPAEVPKTLARLMPPLGAATDAQIEPVKRDTIFIIKASPSDDEFTLWLAPKLEAEGYQVFADVLTLMPGERWRREITSALRHRAVKVLLLCRDSSLGDSSIQDDLDIALETGKELGDQRFVIPLRMETFRKIKGLGDTVAVDFVRNWGEGLLKLIDTLQRQKVPRSVDTMINPYWEIYRRRGAVPIIDVPERLTSNWLLVAEAPDFIRYFECSGAINKGRLQGAIDSYGHPCALVGGSGFLAFGGVPEIEMAFEAVGRFKLKHEIPLVEFTEGGFQRLRIDRQTASNLVVAMLKKAWFNYCKRHGFVEHGYSNGIGFHASPEQAPTGKRIPWGNQAEKKRSSMLRNSAKGHIWQFGVTAMPAFWPFWHFKLKSRVLFAQDNGTPAGLVVDDPKKRHRLRRSVCKGWRNKQWYGRLLAFLELLSGESAFVRLPLSETETFVLEASPMLFSSPVSTVLPNDLDDEDEELDESTLGRPDSDEEGGE

SEQ ID NO: 13458 - protein, 482 aa, Pseudomonas putida W619; identical to SEQ ID NO: 13374

SEQ ID NO: 13459 - protein, 158 aa, Pseudomonas putida W619; identical to SEQ ID NO: 13375

SEQ ID NO: 13460 - protein, 179 aa, Pseudomonas putida W619; identical to SEQ ID NO: 13376

SEQ ID NO: 13461 - protein, 183 aa, Pseudomonas putida W619; identical to SEQ ID NO: 13377

SEQ ID NO: 13462 - protein, 284 aa, Pseudomonas putida W619; identical to SEQ ID NO: 13378

SEQ ID NO: 13463 - protein, 476 aa, Burkholderia ambifaria MC40-6
MGFSREIEAFIKEYVKDLAEDNAAVFAGAGMSKAVGFVDWSELLRDIADEIGLKVEIEHDLIALAQFHVNELKGTAKLSRKIIEEFSEQAEPSETHAILARLPIRTYWTTNYDTLIEDALRRAYKVPDVKHNVEQLNTTRPKRDAVIYKMHGDVSLPQQAVLYKEQYERYFKTHEPFVTALSGDLVSKTFLFIGFSFTDPNLDYVLSRLHTATKRNHYCFMRRESILPGDDEEVLRYKRRKQELRVDDLKRFGIQTLLIDDYKDVPLILNAIEARFLKKTIFVAGSADDFGTWSRSEAQDFIHSLSGSLLKHNYRVVNGFGWGVGSAVINGALEAIYSNPGRYSEDQLVMRPFPQFQSKGQDLKILWEEYRQRMIALAGVSLFLFGNKRNDTGQIVLANGMMREFEITVEAGRIPIPVGVTGFAAQAIWEQIAPHANDIYHGIEWIIPMIGEICDANADRALIVDKIIKILNRLGK

SEQ ID NO: 13464 - protein, 135 aa, Burkholderia ambifaria MC40-6
MGVIEGNTPVSPNTWEEVKRKGDASVEKWIDDNMKGKSCVVVLIGSETSKRPWVKYEIEKAWKDGKGVVGIHIHNLKCPNTGTCAMGADPLAMFTFKVGDKIVTPKTYNPKFDAYNNIAENLDKWVEEAIKIRAG

SEQ ID NO: 13465 - protein, 197 aa, Burkholderia ambifaria MC40-6
MPTFYTKAEARAFASRTLQKSFTTDSKRVLREAVRSTASHDRFDIFLSHASKDAELILGVKALLEDQGFKVYVDWVEDAQADRTKVDRENADLLRHRMRQSNSLIWVATSAASESKWMPWELGYFDGFKPGQVAVMPLVENPGATFKGQEYLALYPVVGKDRYTDGRQDVFVEDLGRQWSTLRSFGKGTNTWSRYTG

SEQ ID NO: 13466 - protein, 342 aa, Aggregatibacter actinomycetemcomitans D11S-1
MDVKHCVEQLPISIHKRDVVVYKMHGDASLPNQTVLIKDDYEKFHLTRNDFFNALRGDLLTKRFLFLGFSFSDPNIDYILSRIRASYSENQKEHFCILRKVQKNENEPQDEFEYRQRKQQFFISDLERVGISALLIDDYSEITEILMEIEQAQKRKTIFISGAAENYSPYSQQEVEQFVSSLSQEILKLGYRIVTGFGLGIGSSVISGAIKHLTEQNLKIDEDYLILRQFPQNKEGKELWSAWREDMISYAGISIFLFGNKLQNGNLILSNGMQEEFDISKRNGNVLIPVAATGYMAKQLWDNEMNKESAKEVENEMQALSKENISLDELRSNILSILKKVK

SEQ ID NO: 13467 - protein, 214 aa, Aggregatibacter actinomycetemcomitans D11S-1
MGNKIFISYKYSDNAVKQLKEPNNLFSFYSQYKTTARDYVDIIQNKFERDDIHINKGENDNESLAGFKTETIRSKLAEKIFDSSVTIVLISPNIKNSWKSEKDQWIPWEIAYSLRSKRRPDNRSKRNAILLVVLPDRYGYYDYVNSYGFYFDIIQRNLNNLHTPYTTYKLRNGCSNSYMLQCNWDKFISNPNAWIEAAIEIRDKGNNYNIVIRP

SEQ ID NO: 13468 - protein, 160 aa, Aggregatibacter actinomycetemcomitans D11S-1; identical to SEQ ID NO: 13247

SEQ ID NO: 13469 - protein, 479 aa, Sebaldella termitidis ATCC 33386
MDRKILKFIDKYVKEINESNAAIFLGAGFSVDSGCINWKELLEDIAEDLGLDIEKESDLISLAQYHKNTLGNRSQINQLILNSYGGKDISENHRILARLPISTFWTTNYDSLIEDSLKEIKKIPDVKYTNAHLSQTEPKRDSIIYKMHGDRNHSNDTIILKEDYEEYHVKYAPFITALNGDLITKTFLFIGFSFSDPNLNYILSRMKVDYGNDTQKTHYALMKKVAKEQNEDEGDFIYRETKQKLLIDDLRRYNIQVLEIDSYKTITNILRNIEKKINRNNVFISGSAVDYGDFKEEKSVNFIENLSKQLIRKGYNIVSGFGLGVGSYVIKGALEEIYLKSKTINDNRLLLRPFPQGIENEKSRVELWKKYRKDMISRVGISIFIFGNKIGENTEIIEASGVLEEFKIAHDNNNIIIPIGCTGGASKTIWNIINNDFESYFKNSSNKLKQLFQKFNHNYEKEDELINDIINFIDITVKK

SEQ ID NO: 13470 - protein, 202 aa, Sebaldella termitidis ATCC 33386
MARKTFISYKYSEACDLRDKILDSLGEDAKYYNGETSDSPDLTDKKTETIKEILKDMIYGTSVLIVILSPKIKESEWIDWELEYSLKEIKREDRTSKSNGIVAVVMKYNKSYDWFITNSENCHGTSTLKYDDSKLYSIISENHFNSIPPKYHCSECKTYEADLGSYISYIKEDDFLLDPNKYIEKAYEKSNRLSDFKLKKQK

SEQ ID NO: 13471 - protein, 325 aa, Geodermatophilus obscurus DSM 43160
MLPRCCGPIRLRRLIDLVAAPYLHDVGDPWVYEQLRAVRDRHDLILFAGAGLSAQARNQDGQRPPLWRPCIEQMLAWCETEGLIASSHGDEIRELLALGFLPEAAQEIEDAVKPVSVGALQRCLAEVLLYDSAETSLAHRRAARAGFRAFITTNYDDLLETAYVRTQRKVLPKYYEDTLDNVLDSWRSRQPFILKMHGDVSRPGLLVLGNRSYERAIHTNGAFSRVVETLIGASSILFVGYGAGDPNLEGLLTRGALFDGRSKRHWLLAPAASMPALRAKRLWADKGINVVTYKGSHVHVERFFQRLGAPVTSPATLRIPAALVI

SEQ ID NO: 13472 - protein, 421 aa, Geodermatophilus obscurus DSM 43160
MFTGGASRIFISYRRQEANFLAGHLYDKLANHFGKQRVFIDVEMGPGLKWREVIASKVGACDVLLAVIGPQWLRMTDSQGQRRLEDPDDFVRLEIEAALQRDVRVIPVLTNGAVMPRRSELPKSLAKLADRHAFTIHFEGLHHDVARLISEIDPGLRWRGLSLTAGLLLILAAGSFIAESFLSVTGAFREWLPTLIADSIAAVAVGAVGVGILAARTRPSIAIGGGILLGASPFIGLRMWRSAQVRDPFGWGSESVPVLAIVVALGLVALLLAVNPDERFGYQRPTDRAGPMLILVGAFAPVALSLVGSTIPTSDSDFGTLKFSDPMVLAYSVILAALVAFTQGALQGAILAGWAGGAAFVLANTVWLRIYSDPPLAPILNAQLLLCGFTVAILAATARLALRGDRPFASSAGAPNPHKTP

SEQ ID NO: 13473 - protein, 793 aa, Geodermatophilus obscurus DSM 43160
MTSQGQAARFDCFVSYTLADRAWGEWLAWQLREAGYTVFLDPWDITPGVDLIDSFRGVTEAADVVLVVLSDVDPELAVFSRAELSARALRVGGLGAILPVRVSGDNPSGIFAGLRYLDLVGLDEANARDALLDALYGIEAAHSTRGAARVSIDDEAPAYPSHAPSFSVPLAPSSRFVGRDDDMLRLDRALATRPRRMVALSGVGGIGKTRLAVEYAYSRRWNYEVVWWLRGESQASLMEDLGKLATEGPAAGPSRTQSSTLEQRAKRARAWLAANRGWLLIADDLKDPRTLTDLLPEPIEGDVIITTRTQSLTGGVTAVDLEPLNHEGAAKLLESEALPSGISRADFERLTAHLGGHPLSLKLAAAQLTHTRMSVDSFIFQLEKADADAVSGAERSLELAVGNSLRMLKQEVPVAHALLMLCSFLDASPLPTGLVVENRRSLPSALRRGLADPSSYVAAVEHLQSVGLITARGNGLLVHPMVAAIARRQLSGRDRRRWAQASVRLMDACLRIDASRPKDWSLVGQLIPNAVGASEYASRESVGLEEATRLLSWAGSYLHTRGDTTRALPLLRRAADLATRLSAPGNAGAESPWGNLGVVLFAQGDYEEARRHLVRALHVAEEAYGPEASETARRREDLALVLRALGERAASLDQLHMVLGIRERTMGPDDPETGKAHVNLAAVLRESDDSTGSMDHLRVALGVFERALGPESREVAAVRSSMAVLLREQGELEGARANFEAALRIYERVLGPRHENWGRVHQALAEIYRELGDLSRAEEHAVTGRNAIADPGR

SEQ ID NO: 13474 - protein, 481 aa, Agrobacterium sp. H13-3
MVVRSGITRFLKEFPTSLHEGTGAVFLGAGVSMAAGYPSWSSLLREIGEELGLSSGDIYDLAALAQWHIRESGGATRVRNVIKTEIGKDLPVPEALEIIARLPVRHIWTTNYDRLVERAFEAIRRPVDVVSGSKDLSLKAKAGAVRLYKMHGSVDRLDDIVISTDDYELYRSKRGAFLPLLQAHLTGMSMLFVGLSLTDPNVRHVLSMIRESFSDAPPEHFAIVKPPKADDFKNRDEYKARAAQHALWAKDLQRYGLIAAEIDDYDEVPALLKQVERRVAKHRIWVSGSWPIEAGDTKAATLYRLSEAIGRIIGANGLSLVTGSGVLVGSASISGFLEALRADGGWDIDQRLVSRPFPQPAPGDTTDKALWSAHRTELARNSGTAVFLGGSKMSGGSAVVADGVLEEFEKAKAAGVFLLPVGSTGGAAKQIAETLRGSHWPSTGADARRPTDDELAALSDETKTNDALLAIIEKIITRQQK

SEQ ID NO: 13475 - protein, 162 aa, Agrobacterium sp. H13-3
MARKVFFSFHYDRDVHRVVQVRNSWVIRASGDAPPFYDKAEFETVKKRAGGIENWIEEQLRGSSVTVVLFGAETYDRPWVRHEIKRSYELKKGILAIDIHNVKHPQLGGDVQGKNPLSYWEITQAGRKVPFSSLYRTYDWVRDDGYDNIAAWIEAAATAAGR

SEQ ID NO: 13476 - protein, 130 aa, Agrobacterium sp. H13-3
MVLENHGALVYTDEKDPEMPPYTTAETAALLKTRIRQTKRFVLLTSKNSKESKWVPWELGVADGSKGMNPIALFPSADSPTDMSWASSEYLGLYQRIVWGKIRGREKEEWIVWDERPHTAVTLRHWLTSS

SEQ ID NO: 13477 - protein, 465 aa, Agrobacterium sp. H13-3
MLLQTIFISHAKPEDNDFVRWLSARLTGAGYKVWAELIDSTGGSPFWADIEVAIREHSAKFISVVSKASVASDRRGFRNELSIADSRGRTLKDSRFIVPIRLDDVTLDEFPAQLHQLHHIDFSSNWGEGYLDLIRSLEKMGVTKDASADSTLFEDWRRISESASNIVEVASEPALTNLVQIVKLPRAVNVFSYQGDQDKFSAALRKTGVPCAQFYRLVITFSDIVSLQESLPEHFRLSEHSSYGFEEFIDGTDKGATRPKKADARNMATAMLRANIERHLSSRGLREFSGKQAAYFFPRDLLPNNKVFYQLAQGKRTWKAVVGRSEKMGVFWHLAMKVNVTISEDPIVRFKPYICWSEDGVTPITDPKRTSAMRKRFCKNWWNPQWRGLQEAFIAFLADDKPTIEIEIGAGEAFSLDRDLFSIDLARRMPTDLLVYDEPDPPQEEPDDDVEDLDGDNLNGEGDEE

SEQ ID NO: 13478 - protein, 293 aa, Frankia sp. EuI1c
MDDRAWDKLVTQLRNGDCTPFLGTGACYPALPADGDLSAEWADRYGYPFPESARDLPRVMQYAATVERDPIFVKGQVREALLARGYPNLGDATQAHGLLARLPLAVYVTTSYDDFMVTALRQEGRQPRALVCPWDGQRPDADAPDTELGPADPDRPVVFHLQGSLAEARSMVLTEDDHLDFMATLAENRTTVSRMIPTSVIAALKNRPLLFVGYSFEDWTFRMLLHGVLRTLAPVHLRRHVSVQLTPSPNGDGSLETQVKAYFERYFDEKHVTVFWGSTSEFCIRLMSLLALT

SEQ ID NO: 13479 - protein, 535 aa, Frankia sp. EuI1c
MAVAGDRTGPEAADFFISYGPSDQAWAEWVAWQLEAADYRVLLQAWDSVAGSNWSVRMDEGIRTAHRTIAILSEAYLGSVFGVGEWHAARAADPTGFDRRLVPVRVENCPRPGLLRTIVSIDLFGLGPDAARTRLLGAIRGAIAGRDKPATPPLFPASSRAVAPAFPVTANDAAPRSVASAPISAGGDPPQGLTDQPAVGRSRPGQTPLTGPRHPGQRLAGPDDLVYAVAFAAGGRLLAGASRGGAGPENGGTIRLWDVTEPPRPGPWKKSLVGHTDWVLAVTAALGGQLLASAGADGTVRLWDMAEPGPPRPCGAPLDGHQDWVLSVAFSGDGRILASAGHDGTVRLWDVAEPRSPKPCGAPLVGHAGWVRSVAFSGRGDVLASGSRDGTVRLWDVAEPSRARAAGQPLADHGTSVQAVVFSPREQLLASGGGDGAVRLWDVSAPARPRPAGPPIQGHAGAVLAAAFAPDGRLLASGGADGTVWLWDVTEPASPLPVGPPLADHGAAVRAVAFSPNGEFLASAGNDHTVRLWRL

SEQ ID NO: 13480 - protein, 345 aa, Carnobacterium sp. 17-4
MTQQSLADNIYDRDAVVYKMHGDSKLPAQAVLTKDDYEIYENERPLFRTVLQGDLVSKTFVFIGFSFEDPNLNYVLGQIRVLLKESTRDHYCFFEKVKQEKGEIQEDFLYRKAKQKLRIEDLQRYGIQAITLDSYSEITNLLSEIENGYLRKNIFISGSASIFSEPWTKEKCESLAYLLSKELVCKNYKVISGFGLGIGSSVVNGALEEIMSSKFKHIDEHLSLRPFPQTINGLIPKEDKWKKYRTDMISQSGIAIFMFGNKLKDENPEIARGVLDEYEIAKKNNVALIPIGSTGWAAREIFNEVSQNISDYPYLEEHIDILSKSNDQTQLINTILKIIDSLQVF

SEQ ID NO: 13481 - protein, 182 aa, Carnobacterium sp. 17-4
MAIRQVFFSFHFSNDVWRTGQIRNIGVVESQPIFSDNGWEKVRLKSDTSIKSWIDNEMKKRSCLVVLIGSETSSRKWVRYEIEQAWKQGKGIVGIYIHNLEDIEGKQSSKGANPFKNFCIDKTFNYIAQHDLPADSNEIRLSSICSTYESSYQTSKYVYKDIKDNIELLIEEAIQIRNRYPK

SEQ ID NO: 13482 - protein, 194 aa, Carnobacterium sp. 17-4
MKKIFEQGEFKNYSQHNLNEARASIKKSYQFSETKTTIFISHKHDELENLKDILGFLEKNFDVKVYIDSKDPSLPTITSGETASRIKKRINDCDKFILLATNGAIESKWCNWELGFGDAKKFEKNIALFPMKPAETSDWSYKGSEYMSIYPYITFFDGSETDIDGNFVPKGYYIFTDKKDGTYITSFKEWLLEK

SEQ ID NO: 13483 - protein, 482 aa, Burkholderia gladioli BSR3
MTKAAMTRFLKEYPDALNDGAGAVFVGAGVSMAAGYPSWSTLLQEIGDELGVSSKNIQDLAALAQWSIQESGGATRVRNVIKEHIGVDHPLPEALQIVARFPVRHIWTTNYDRLIERAFREIDRPIDPVSAAKDLALKATPGATRLYKMHGSVDRLDDVVISTDDYELFRSRRGAYLPLLHAHLTSMSMLFIGLSFTDPNIRHVLSLIRESFTDAPPEHFAIVRPPKREDFDSDDEFRARITQHKLWAKDLRRYGLAAVEIDDYDEVPDLLRQIERRVAARRVWISGSWPVDTGGPEAANIYSLAEDIGRRIGHAGLDLVSGAGLIVGSAAISGFLDALRYGGGWDLDRRLIARPFPQPITGEQAPDAQWTALRRELARQAGIVIFLGGAKAKDGKLIPASGVLEEFSLAEAAGAFLLPIAVTGGAAKEIADRLLGSSLPATGANATRPTDAELRLLSDPAVPHDALVKNIFDILKRIAKPA

SEQ ID NO: 13484 - protein, 161 aa, Burkholderia gladioli BSR3
MTRKVFYSFHYQRDGWRASKVRNIGVVEGNPPASDNKWEEVLRGGDAGIQRWIDAQLENRTCTIVLIGAETANRRWVKYEIEKSWNSGKGLFGIRIYKILDHNQQTSIAGANPFDGFSLKDGRKLSTLAKVYDPPYASSADVYNYVSKNLAGWIETAIADR

SEQ ID NO: 13485 - protein, 193 aa, Burkholderia gladioli BSR3
MAKRVFFSFHYKDVIDFRANVVRKHWVLKDDREEAGYFDASIWEEAKKQNEIGLKRLINGALEGTSTTCVLIGSSTYARPWVRYEIIRSIYRGNRVFGVHINQIKGKDQLIKTNGPNPFDYLALKYSDDGTKVEVFEAVNGKWVTYTKFPNYTLKKTASAQRWGKLFKLSSLGCKIYCWSTDDGYNNFATWVG

SEQ ID NO: 13486 - protein, 155 aa, Burkholderia gladioli BSR3
MAEQRNVFISHVHEDDAGLQKFKDLLAPKGIDVRDSSIHTGKFNNATDEHYIKTQILAPAINWAGVFVCYVSPRTKDSEWVNWEIEYAAKQGKRIVGVWEHGEKECDLPEALKQYADAMVGWNGDAIIDAINGKDTWEKPDGGPCEPVPLKRHPC

SEQ ID NO: 13487 - protein, 185 aa, Burkholderia gladioli BSR3
MIQYITKSELRDFASQLAPNERANLRKSASSRDLTGSTFLSHSSKDDDLVVGAIRVLEGHGARVYVDEIDPEMPPYTSEETAALLRKRIHQTSRFVLLASKNSKDSRWVPWELGIADGDKGLERLALFPALDSSYDNDWASWEYLGLYRRIVWGNLEGYKDPVWMVLDEKRNTAIALRRWLTAGS

SEQ ID NO: 13488 - protein, 380 aa, Burkholderia gladioli BSR3
MSVLYQLAVLGEPSDEQVNELEQIVAHAVQLFGLRLGHEVGWEVRPTTFNPDQQKSSAAVFYGAANAPQANVDQLLKRGIPILPVASETERVTEEIPELLRPLNCFAYNAGGAQRVATALLECAGLLPRQRRVFVSYRRGEAREAALQLFDAFSARLFDVFLDTHGIAPAEDFQAMLWHRLCDSDVLVMLDTPGYFESRWTSAEFGRALAKGISVLRIGWPDSTPSVRTATASRAELLPEEVNGDTGRLADTAIERICLQLEAVRSQSQAVRSVNLVSNLRNAVETIGGSVAGVGLNKAVYIQLPDGKEVVVYPTVGVPTSTTLHDASINSPDRSVAVVFDHVGLHPRWLGHLDWLGDHIQTARWVKASEAGWQFADWEA

SEQ ID NO: 13489 - protein, 381 aa, Staphylococcus aureus subsp. aureus 71193; identical to SEQ ID NO: 13272

SEQ ID NO: 13490 - protein, 202 aa, Staphylococcus aureus subsp. aureus 71193; identical to SEQ ID NO: 13261

SEQ ID NO: 13491 - protein, 344 aa, Staphylococcus aureus subsp. aureus 71193; identical to SEQ ID NO: 13268

SEQ ID NO: 13492 - protein, 466 aa, Aggregatibacter actinomycetemcomitans ANH9381; identical to SEQ ID NO: 13246

SEQ ID NO: 13493 - protein, 214 aa, Aggregatibacter actinomycetemcomitans ANH9381; identical to SEQ ID NO: 13248

SEQ ID NO: 13494 - protein, 160 aa, Aggregatibacter actinomycetemcomitans ANH9381; identical to SEQ ID NO: 13247

SEQ ID NO: 13495 - protein, 500 aa, Bacillus cereus F837/76
MTVIERDKKNFVNSYVRALNNGRAAIFAGAGVSIPSGGISWSDLLREEAESIGLDISKENDLISVAQYIYNESGTKQTITNLLKNKIAREGKINKNHEIIRSLPIRKIWTTNYDDFLEKAYLDANKVIDVKKSIEDMATEIDFSETTIYKMHGDIGIPSSTVLLKDDYEIYDKKNELFTKTLQTDLLSNTFLFIGFSFDDPNLENILSKVRIMLEGNPRRHYCLLKKISENDPEFDQFDDPKEKARELEYRINKQRLRVADLLRYGIKAILVDSYDEMTQLLDSIKRKYISTKVFVSGAYEGVDNFLGKTGDDALKQADKFCEKLGEALFTEGFEISSGFGLGVGRNVVTGVLIQESLLNHTRVGSQLVIRPFPTQQTVPEKSAYREKILSECGVTICVFGNKKVSDSNELQNSPGVEEEARIAGELGQLVLSIGSTGYVAKKIWEDQLGKITTTFSENLKFLESYNNLNNPNQSIDQLIDDILIILKEYKTNPEKFKSV

SEQ ID NO: 13496 - protein, 206 aa, Bacillus cereus F837/76
MGTNVFISFRFSDGNDLKEELEELFDSSTEVFNRSENEDRSTMSEDTIQKYLYEKLKQTSVTIVLLTPKAVSYKKDVFGSYDDWLYDELRYSLEDRNENRTNGVVAVYTNESKDLILSTSSHTCSVCNQESNCEVILDFDNLVRKNVLNVKTAYKSNPCNNLFDEDKDSYISLVHIDDFKKDYVKYIEAAKEKRDRKDEFELVKKM

SEQ ID NO: 13497 - protein, 504 aa, Tistrella mobilis KA081020-065
MDRATFVERWTKSLELGSAAAFIGAGLSQRAGYPGWRRLLRDIAKELGLDIEEEHDLAAVAQYSVNRAVGKRNQLARLIAEEFPPKAEAPEPFRILARLPLRHVWTTNYDALPETAWRNERKLLDVKSRNEDLGIDKPWAHTVLYKMHGSVDHPADVVIAKDDYELYRSMRPGFLQVLTGHLVSKQILFLGFSFTDPNLGHLFGSIREAFKENGPEHYAIVRKPALGGGKNAKKRLETELIRHRLWVEDLQRYGIQCVEIDEYEEVDDILREVEMTLARRSVMISGSFPDVLDPAELDRRRRIEAVARGIGRLVAERSKRLVSGFGLVVGSASISGALGVVLKEDAPNLEKSLMLRPFPQEAPPGIKDADFKRRYREGLVQQAGVCIVIAGEKDVQKGGRAERVLADGVLDECEAARRIGRAVVPVGATGGAAAEVWRQLDAEFDDHWPKALRKDFDLLNDPKRSPEDLVEAVGRFLDHLDKPAPQASPKRKKGRSSSANKGAL

SEQ ID NO: 13498 - protein, 151 aa, Tistrella mobilis KA081020-065
MIIMARRVFFSFHYQRDIWRINQIRNLHEIVGCAAAGFQDASLWEEAKKKGDAEIKKMIDGALERTTVTVVFIGAKTAGRKFINYEIEKSIARGNGLVGIQIHHLKDKDGNTDTPGDTPALLTKHGVPVYRYVDGDKLAARIEEAAKKAGK

SEQ ID NO: 13499 - protein, 206 aa, Tistrella mobilis KA081020-065
MAILSEGAIRARARQRAQREGVSVDEALRRVSRRQATRYDIFLSQTIRDAEVVLGVYDLLVEMGFVVFCDWLDAPEADRAEVTPANAEFIRSVMSVSDTLLFLDTANADQSLWMCWELGWFDGAKGHVAVLPVLPEGQGYYRGREFLGLYPYVEIDAEGHLKVVRPAAVNSQGMMLFESPNSRSFERWREGTPAFMRPKIIEHWRL

SEQ ID NO: 13500 - protein, 285 aa, Tistrella mobilis KA081020-065
MPIFISHSQKDRAFVDTLAANLVQNKHHIWMDRWELKVGDSLLDKVQSALTDSSAILVVLSKNSVESAWCKRELNAGLMRELEERKTLLMPCVIDDCTIPLFLRDKVYADFRANPDEALEQVNRALAGISNPLQGRSETPRFNTDWSLDWKSIDDTHIMEWTFVDHGHDWPYVILSQCVIVCNEEASRRFAQAMARDEEDIFMRDVLALLVASLPPDGLTVRIEDARERGVSAQLSRPGGEAFAVRFSYRRLGQDNGFDTVVYLDNNLKIALEHMTNVTRQPAGP

SEQ ID NO: 13501 - protein, 484 aa, Serratia sp. SCBI
MFNRNIELFIRDYVNDIKAGSAALFAGAGLSIPAGFVSWKELISDIAYELGLDIEKESDLISLAQYHLNEKGNRHKINQKIITEFAEQAEETENHRIIARLPIASLWTTNYDDLIEKTYARYNRVCDVKTTPESLTNNIHKRDVVLYKMHGDYRNPNQAIITREQYETYSRTHLPFINMLMAELTAKTFLFIGFSFEDPNLQYVLSRLYAQYGEGQRNHYCVMRRVQLGDNGSEEKASCDYNSRKQGLMINDLRRYGIQTLLVDDYRQITDLLYAIETQFKKSTVFISGSADNYQPYAREESIQFIHRLARLLIRKQYRIVNGFDWGVGTAVINGALEAIYDSQGKISESQLVLRPFPQFASGGITLPVLWHEYRQNMISLSGIAIFLFGNKRNAEGEYVLADGLLKEFQIATEQGCVCIPIGCTGSASAEIYRKIKEEMKETLYYRNPAAMNLLDQLNEPGSLAEKKKSLLALIDIITKDNPR

SEQ ID NO: 13502 - protein, 163 aa, Serratia sp. SCBI
MTRKCFYSFHYEPDNWRASQVREMGSLEGNRPATDNDWEEVKKGGDAAIAAWIKGQLDNRSCAVILAGKDTANRKWINFEICEAWKKGMGVLVVYIHNLKDSAGDQTTKGKNPLDYIKLGDAKLSTIAKAYDPPYLTSTNVYNHIKENLAEWVEEAIRIRKNY

SEQ ID NO: 13503 - protein, 476 aa, Rhodanobacter denitrificans
MAGFSREIEAFIKDFVGQIANGTGAIFAGAGMSRGAGYVDWKELLHDIAEELGLELQLEHDLIAVAQYHYNLKKGPAGLVRKIIEEFSHQAEETESHRILARLPIPTWWTTNYDALIEKALERAFRIADVKFNVDQLSNTRPRRDAVIYKMHGDASDPKKAILYKSQYEQYHKTHEGFITALRGDLVTKTFLFIGFSFTDPNLDYVLSRLPAEPSREHYCFVRKVVAEEGESEASVNYRTRREKLRNDDLHRYGITALEVDEYEDIPRILAAIEERYRMKTVFISGSAHEFGDWAMEEAQGLLHRLSAALIRGGYRVITGFGWGVGSAVINGALETIYLEPAKYSEDQLVMRPFPQFASNGKDLPVLWDSYRRRMIALAGTAIFVFGNKVVDGKVVKAGGVRAEYDIARELGVVPLPIAATGFVAADLAGDVLADVAHVYGQRGWIADSVKELEAAGKDAEALIGVVLKFMERIGK

SEQ ID NO: 13504 - protein, 158 aa, Rhodanobacter denitrificans
MSKPDVFYSFHFDNDVMRVQMIRNMGVVTGDEPVEPNVWETLKKTDSGVEAWIEKNMKNKDVVIVLIGAATAGRKWVKYEMKRAWELGKPIFGIHIHNLKSMNDGASTKGSNPFDAFNFSHNGVVIKPLVYDPKSSDAYNDIKDNIESWIAAAKRQRI

SEQ ID NO: 13505 - protein, 478 aa, Enterococcus faecium DO; identical to SEQ ID NO: 13220

SEQ ID NO: 13506 - protein, 161 aa, Enterococcus faecium DO; identical to SEQ ID NO: 13221

SEQ ID NO: 13507 - protein, 283 aa, Enterococcus faecium DO; identical to SEQ ID NO: 13222

SEQ ID NO: 13508 - protein, 443 aa, Pseudomonas putida DOT-T1E
MNWPELMREVAEEVGLSVDKEHDLVTLAQFHVNERSGSGGLARRIIEEFSEHAEPSRSHDILARLPIRTYWTTNYDQLIENTLKKHQRVPDVKHQVSDLLSTRPKRDAVVYKMHGDALSPTQAILYKSQYEQYYKTHEAFVTALSGDLISKTFLFIGFSFTDPNLDYVLSRLHVPPHARREHFCFLRREPSTPYEKEDADAVRYRQRKQELHIQDLKRFGIQTLLVENYSDIPEILRAIEEQFLKKTIFISGSAEEYGDWEKNDALNLIHSLSSSLVKAGYRVVNGFGWGVGSAVINGALDAIYANPEKLSEDQLVMRPFPQVASQGQDLGVLWHQYRQRMIGLSGISLFVFGNKLGKDGIENAGGVEKEFDIAVEQGVVPVPIGATGYMAKALAEKVIADTAKYAPDDLWLAEELTKLSDLSLGAKGIERTVLAIIKKLEGA

SEQ ID NO: 13509 - protein, 133 aa, Pseudomonas putida DOT-T1E
MGAMEIIANHGGVPYIDEVDPAMPKHTSEETADLLKSRITECKRFVLLTSPNSKDSRWVPWELGVADGKKGVNRIAIFAASDNVDDDKWSSWEYMGLYPRIVWGRLQGYPNELWMVYTEKTNSAVTLRSWLAS

SEQ ID NO: 13510 - protein, 177 aa, Pseudomonas putida DOT-T1E
MAFITKDQARAAARRGEDIFGQVAGMESFEGERFDIFLSHSIKDRELVYGVKVLLEEMHYSVYVDWVDDEQLDRERVDRETAEKLRQRMRSCSSLIYIATEQSSTSRWMPWELGYFDGYKPGAVAVFPLVDTERSTFHGQEYLGLYPAVDWHDSNPYVDGVPEGRADLWAFVNDTSR

SEQ ID NO: 13511 - protein, 282 aa, Pseudomonas putida DOT-T1E
MYIGLEVEHYKSFEMISDSAIDAYREKAREATVGEVAKYVIGQIDKKDIIDAKELARKIFPQQHAHVFLSHSHRDEREAIEFALSLEKRGVKVFVDSCVWGYVGDLLWEINAHYSEKKEVGSFTNFSYDKCNEAAASLYLMLNEELHRMIDACECFIFFNTKNSVRIKGHEGFAEGDRTLSPWIYSELAFSAKTRYHQLTRKRLPRGIVESMESHRELAVASASFAFEVINLHLPKMSGEELKSLARKSPHESEFWLDSLYYEYNLESKFKDQCRASRLQST

SEQ ID NO: 13512 - protein, 483 aa, Staphylococcus aureus 08BA02176; identical to SEQ ID NO: 13296

SEQ ID NO: 13513 - protein, 202 aa, Staphylococcus aureus 08BA02176; identical to SEQ ID NO: 13267

SEQ ID NO: 13514 - protein, 344 aa, Staphylococcus aureus 08BA02176; identical to SEQ ID NO: 13268

SEQ ID NO: 13515 - protein, 551 aa, Rhodococcus opacus PD630
MSRPFPLERWSDGLFRATVAGRDSAPPSKHGTDGYHTLRDAGSMKESREPSEPTGGNSGHVFVVRGRIELVAWDAVIVPTSNLFWPREIWWPALGITRFDASAVSGAGRVRSFATDDGRPAWLLDVARYKNSSVGWLIDGLCAALSAIAAHRPTPGGGRVKPLVALPTLGVGQGGYGGVRGEVVQTLLATTGAFAAENDIDVVFVVADAADYAAFQSLRRERAQTGATETLIDDLATKIRRGEVSLLLGAGVSIPAGLPTWSQLLGTLKAEMLQDISHDDFESLSVLDRAQLLSKSASPGTLGERVAKVAGAALRPTLAHCLLASLKTAKVVTTNYDTLYEDAFKAAHGDDAISVLPREDADAERSWVLKMHGDVADPASIVLSRRDFVRYDAERRPLGSIVQSLMATGHLLVIGASMTDDNVLRLAHEVLALNERNNRHRTLGTVITLRSDEIRSALWRHDFDYVGVSTSLDDATAARDLEIFLDRIAMSASDEAPFLLDARYRELLDDEEVDLAATLRASAQKVRALSSKGRDRWRMLETILEGLGAGQ

SEQ ID NO: 13516 - protein, 377 aa, Rhodococcus opacus PD630
MTISEQPAGFWSYVHADNDAEDGRVLRLCERIEAEYSLITGNEIHMFVDRDDISWGGRWRETIDDALAATTFFIPIVTARYLKRPECRRELIQFAQHAERRGVKELLLPILYTVVPNLKEDSDDEVNAIVASTQYEDWTALRLEDEQGPLYRAAVNKLALRLAEIADTISERPEVLTAVAEDAALTEEVSDDAPGLLDDMAEVEVLFPTWTKTIETLSSEITEIGDLFTDYAPKLGTAGRSSGAAAKLAVARRLASELDPMADRILDTATEYADQALRMDSAISGILLNIADDFSNVGDDGEFEKFAEGIRGLRDGGEKAVQGLDGMNDSAQRAGSMSRDLRKPLAKISRALQRFMDGQGLFDEWVRRIDAIEAARG

SEQ ID NO: 13517 - protein, 484 aa, Serratia marcescens WW4; identical to SEQ ID NO: 13365

SEQ ID NO: 13518 - protein, 163 aa, Serratia marcescens WW4; identical to SEQ ID NO: 13366

SEQ ID NO: 13519 - protein, 307 aa, Pseudomonas mandelii JR-1
MKMQPFITALSGDLIAKTFLFLGFSFTDPNLDYILSRVRIQYGKHQRQHYCILRKVSQEKDEEQADFEYRERKEELFKQELLRFGIKAIYVDDFPQITDILREIEHRHKRKTIFISGAAHDYSPWTEAESEQFVYKLSKAISKEQYRVISGFGLGIGSAVITGVVEQTIMNGHRLDSDQLILRPFPQSQSGERPLKELWTEYRRDMLAHAGIALFLFGNKLEKDGEVVPSNGMREEFDIAVANGVFVIPIGITGSISADLWKEVIKTYDETKYEHGKNITPLLHELGSKGTDLARAHDIILQLLPLI

SEQ ID NO: 13520 - protein, 146 aa, Pseudomonas mandelii JR-1
MARKVFFSFQYEDVQRAMNVRNSNVIASDDKVGFIDKAEFEEVERKGEAAIKKWINDQLYGTSVTVVLVGATTDKSKWVKYEIEQSIERGNGILTIDISSISDFNGNPTTCCALRVPGAPHYLWKNNGREDLGKWIETAAKAAGKP

SEQ ID NO: 13521 - protein, 165 aa, Pseudomonas mandelii JR-1
MPIRQSDLLSTSFNRSAQGQIGPRSGQPTAFLSHSHQDAPLALGLQEMLKRQGWDVYIDWQDQAMPATPDGETAFNIKVAIVKADWFLFLATQNSMVSRWCPWEIGFADGKKAHDRIAIIPTSDSRGQFYGNEYLSLYNKIDVPSNGLGLALFDTRGNGTWVRNL

SEQ ID NO: 13522 - protein, 275 aa, Pseudomonas mandelii JR-1
MYLGFEIEHYEPTNHFRNYRIDRYVDDAETRIDDLARFLIGTYNRRSLLDAEALAAAIFPEAHYDVFLSHSHADQRNAIDFALALGNRGLKVFVDSTVWGFYGDLVRKIIDQTSPHNDETKAEHIHRIHADVHMMLAGALHRTIARAETFVFVRSKESVPLNFGDKARTLSPWIYSELQFSFQVQHATPKRIQDRIQGATLDDVKGFNNMSLESMQHLMAFRAFNDHLPPVRGSDLREWLVELPASIQGNGMLDLLYSRFDLPGQYRRRRESLKL

SEQ ID NO: 13523 - protein, 103 aa, Aeromonas hydrophila ML09-119
MIGLSGIALFLFGNKLNEDSNVINAGGVRKEFEIAQGTGVAVLPIGVTGYMAKELAEEMLREPGKSFTQYPWLEKEVARLLDPAIDRTKINQDILSILKKLGG

SEQ ID NO: 13524 - protein, 155 aa, Aeromonas hydrophila ML09-119
MKRKVFYSFHFDNDVMRVQQIRNMGLLEGDEPVSANTWEEIKRSEQGVKNWINKNIEGKSCLVVLIGSQTANRPWVKYEIERAWSQGKAVVGIYIHRLNCPRNGYDKKGANPFDKFTFKRGDKVITPLVYEPNYNDAYNDIKNNLATWIENAIKQ

SEQ ID NO: 13525 - protein, 479 aa, Lactobacillus plantarum ZJ316
MPVNIDEFVNEYVDSLRCGEAGLFVGAGLSLASGMPSWKKLLQKPAESIGMNVDKEEDLVTLAQYYVNESHDARTKINTELKSQFGCLSKINDNQKIIAQLPIDTIWTTNYDNLLEKAFEDNDKICDVKRSKDDFTSSPKNSSVTFYKMHGDISNVNEAVITRRQYEEYDRNFELYVTALKSDLVRKTFLFIGYSFQDPNLKYILSQLRLLLGNNPREHYFLIKKPEKYSGESTENFEYRVNKQRLQIEDLEQYCIKAVEVDNYEQITTVLEEIKSKVKQNHVFLSSAQVADQGISQENLKKLLTTLSYKLIQNNNVIVNGYGWHAGNAIVKGALMAIMEDPSKSIDEYLKISPFPQPDKGMSRESMGKEWTKIRQEMLDNSGIAIFISGNKNDQGKTILSSGMLEEFQIAQQKNVIPIPIGYTGGASQEIFSKINEGYESYYGNNNALIEGAKKLSKTGLKNKETIDTVLSMICNIQK

SEQ ID NO: 13526 - protein, 209 aa, Lactobacillus plantarum ZJ316
MAHKTFISYKYSEARDLRDKIISHLGEDAQYYKGETADSPDLTDEKTDSIRKYLKDMIYDTSVMIVIISPNMKYSNWIDWEIEYALKNIKHGDQTSHSNGILGIIMNNPNENWFRYEEKKPDGDNCYAYNTDYVYEIINDNRFNQNPKEYSCEVCKTVDSLTGSYISFITEDDFFSDSNKYIDNAFDKSQKIDNYDIKKYVNEDHIATL

SEQ ID NO: 13527 - protein, 484 aa, Serratia plymuthica 4Rx13
MFSRDIELFIRDYVNDIKAGSAALFAGAGLSIPAGFVSWKELISDIAYELELDIEKESDLISLAQFHLNEKGNRHKINQKIVTEFAEQAQETENHRAIARLPISSLWTTNYDDLFEKTYARYNRVCDIKTTPIGLTNNIHKRDVVLYKMHGDYRTPNEAIITRQQYEAYPRSHAPFINMLMAELTAKTFLFIGFSFEDPNLQYVLSRLYMQHGEGNRNHYCVMRRVQLGDNGSEDQAACDYNSRKQTLMINDLRRYGIQTLLVDDYQDITRLLLAIETQFKKSTVFISGSAESYAPYTREESIQCLHRLAGQLIRKQFRIVNGFGWGIGTAVINGALEAIYGSQGKITESQLILRPFPQFASGGTALPELWHEYRQRMISLSGIAVFLFGNKKDAQGALTDADGLLKEFAIANEQGCICIPVGCTGYVSAVLYQIIKEEMTDTFYHRNPAAMALLDQLNEPGKLAEKKTRLLELIDIIAKENPS

SEQ ID NO: 13528 - protein, 163 aa, Serratia plymuthica 4Rx13
MTRRCFYSFHYQPDNWRVSQVRSIGSLEGNPPARDNDWEEVTKGGDAAIADWIQTQLTNRSCIIVLAGEDTANRKWINHEICEAWKKGMGVLVVYIHNLKDSTGKQAAKGNNPLDYIKLGENKLSAIAKAYDPPYSTSTKVYEYIEENLADWVEEAIRIRNDY

SEQ ID NO: 13529 - protein, 464 aa, Psychrobacter sp. G
MKKNVLVKKLVKELSANNLAIFAGAGLSVGAGYIDWKGLLKELAEEIDLDVDREEHDLVSLAQYYINEKGGSKHTINELILNEFSQKAILTDNHKILARLPIDTFWTTNYDPMIEKALEDSGKIVDVKHNTDQLPNSIRGRDAVVYKMHGDASDSTNAVLTKDDYEQYNLNRNGFFTALKGDLITKKFLFIGFSFSDPNIDYILSRVRLSHGNNKPEHYCILKHVVKIDNEEQADFEYRQRKQQLFIGDLKRFGIQTVLIEKYEEITEILLEVEKVQKQKTIFISGAAEDYAPYSQLEVEVFVSSLTQEILKLGYRVVTGFGLGIGSSVISGAVKYLLENRLKINEDHLVLRPFPQNAEGKQLWTAYRKDMISYAGISIFLFGNKLNENGELVLSNGIQEEFDISNNNSNFLLPVGGTGYIAEKLWKDLTEDSRNESLDILSPDINDLNTLKQNILKILKEIQK

SEQ ID NO: 13530 - protein, 158 aa, Psychrobacter sp. G
MTRKVFYSFHYDNDVFRVQQIRNIGILEGNPPTTANQWEHLKQKGEKAVQKWIDDNIHGKSCLIVLIGEETASRKWVQYEIVKAWNDGKGVLGIYVHNLKDPNTGIGKKGLNPFDKIKLDNGEKLSKYVRCFNPSSNNTYSNIASKIDGLIEEAINLR

SEQ ID NO: 13531 - protein, 259 aa, Psychrobacter sp. G
MYRSIEVTDFHLFNPPENISDFDVMLYKSRKKEALNDLKDYLLIDGSSLDGSEIQKYLFPDDDVDIFLSHSHSDADEAIKLAIALESKGLKVFIDSCIWGNAFDLLKVIDDQYCRNFDDSMYDYNKRNHSTSHAYMMLNTALHKMIDRCEIFLFLGTPNSISVKHGIENQESLKSPWIFSELAFIQHVRRKSSLKSTSLTESLESREKMAMDSLEVHYDKPRLDYKIESYVLENLLAGYYSGSKLVLQHLYNHLSSRFN

SEQ ID NO: 13532 - protein, 478 aa, Clostridium beijerinckii ATCC 35702; identical to SEQ ID NO: 13451

SEQ ID NO: 13533 - protein, 229 aa, Clostridium beijerinckii ATCC 35702; identical to SEQ ID NO: 13452

SEQ ID NO: 13534 - protein, 202 aa, Clostridium beijerinckii ATCC 35702; identical to SEQ ID NO: 13453

SEQ ID NO: 13535 - protein, 166 aa, Clostridium beijerinckii ATCC 35702; identical to SEQ ID NO: 13454

SEQ ID NO: 13536 - protein, 397 aa, Clostridium beijerinckii ATCC 35702; identical to SEQ ID NO: 13455

SEQ ID NO: 13537 - protein, 480 aa, Pandoraea sp. RB-44
MANQEIELFIKDFLKEIREDNAAIFAGAGLSAAAGFVNWRELLRPIADELRLDIDRETDLVAVAQYHCNENAGNRHRLNQSIIDQLTFGATPTANHRILARLPISTYWTTNYDQLIESALREAGKIPDVKYTTEQLATTKARRDAVVYKMHGDVEHPHDAVLIKDDYEKYHIKRGPFINALAGDLVSKTFLFIGFSFTDPNLDYVLSRVRVTFRENQRRHYCIFKTRTRQDGESDAEFENAQIKQRLAIEDLKRFNIKTLLIDEYAQITEILARIERQHRKKTIFISGSAEEYGAWTKQAAEEFLRDLSRALVQQGYRVATGVGLGVGDAIITGAIEEVYRARTGHIEDSLIVRPFPRANPDEAVRQRLWEEYRQELISAAGICLIVLGNKRVDNQIVPAGGSRREFEIACQHGLSVVPIGATGYMANEIWTEMSSVLDTHYPDAKADLREKFSRLGEAVEKPAELISRTLEFIGLITKE

SEQ ID NO: 13538 - protein, 163 aa, Pandoraea sp. RB-44
MARRVFFSFHFERDVWRAGQVRNSWVTKTDRESAGFWDAADWEEVKKKGDAAIKKWIDKQLDGTSVTAVLIGAETSEREYVGYEISESHKRGNGLLGIYINKVKDSSSKTDTKGKNPFDNWYITENGRRRYFSEMYKTYDWADDDGYNNLSKWVEAAAKAAGR

SEQ ID NO: 13539 - protein, 253 aa, Pandoraea sp. RB-44
MYRGFNLDIAEVDLSKWFDIGNRMHKNNKAQVERKLESFKDNNGNLLASRIIASWFPPVEADVFLSHSHRDAKQVIGLSGWLLQELGLTSFIDSCIWGYSEDLLRIIDKEYCYRPTTNTYSYEKRNRSTSHVHMMLSTALAKMINGCECIIFVNTPQSISPAEYIEDDDTTNSPWIYSEIAMTSLVQKRTPAEHRGIMIKARMALDEAVKPLNIRYPVDMMHLTPMSVDNLNTWAELGKRKSEALDALYGIMV

SEQ ID NO: 13540 - protein, 240 aa, Mycoplasma capricolum subsp. capripneumoniae 87001
MKRVSKQENETNEDFGYRLVKQNLQIQDLRRYGIFTCLVDEYDKITEILQTLVDMYKRKTIFISGSADKYYGFRNENDAKLFLHTLAYKLAENNYHIVNGYGKGIGDFLLSGITEFCLKNNKKISDHLTVAPFPQNKISKANIEELYIKNREQMIEKCGIAIFVFGNKDNNNAEGIIKEYQLTNQKKLIPIPIKITGGSAKQIFDLEYSNDIDEIKNAIEKANSETTDNINKIVENILES

SEQ ID NO: 13541 - protein, 156 aa, Mycoplasma capricolum subsp. capripneumoniae 87001
MARKSFFSFHYDNDVWRVNVVRNSWVIRGKKKAGFIDKAEFEKTKLENELAIKKWIDKQLMGTSVTVALIGSETLNRKFVQYEIQESIKRKNGIIGISIGRIKNQNRLTSISQSPYTIVNEYRFIDICDGFYDYVLDDGYSNMGKWIEQAAKKKGK

SEQ ID NO: 13542 - protein, 474 aa, Pseudomonas monteilii SB3078
MKFNGEINSFIRDFVKDLSENNAAIFAGAGLSKSSGYVNWKELLTDIAEELELKIDLESDLISLAQYHVNKTKGPAKLTRKIVEEFSHQAEPSENHKILARLPIRTFWTTNYDTLIEDSLKQAYKVADVKHKLSQLNITRPKRDAVVYKMHGCVSDATHAILYKNQYETYHRDYAPFVTALSGDLVSKTFLFIGFSFSDPNLDYVLSRLHTSTIKTHYCFVKREDAEPGDDEEMHQYKRRKQEFRVEDLRRYGIQPIMVDKYSDITEILREIERRYLKKTVFISGSAEVYGEWGRDKSLKFIHALASELVLKDRRVVNGFGWGVGSAVINGALDAIYKYPEKYSEDQLVMRPFPQFPSAGQDLKQLWEEYRQRMIGLSGVSIFIFGNKIDNEQLVIANGVVREAEIAIEQGRIVIPVAATGFAAAEVYNLIKAKPELYDAHKWLLVVIDELADPALSCEEIVKKIADAIVKLDK

SEQ ID NO: 13543 - protein, 163 aa, Pseudomonas monteilii SB3078
MARKCFFSFHYVPDNWRASTIRQIGAIEGNQPALDNDWETVTKGGDAAIQKWIDSQMEGRTCAVILIGENTAKRKWIDYEIKKAWKNGMGVLGIHIHGIKNSAGNTSLKGANPFAHLSLGDKVFSSVVKVYDPQGLDSKAKYNYISDNIDAWIEEAIKIRKSN

SEQ ID NO: 13544 - protein, 136 aa, Pseudomonas monteilii SB3078
MFLSHSHKDHTLALGFAQLLQDAGCRVYIDWLDGEMPERPNKETAARIQLKIKENDYFVYLATENSSKSRWCPWEIGYADGVKITDRIVIAPTRDRSATYGQEYLGLYRHIDLASDGQLAVFDPNMSNGRYAKTIW

SEQ ID NO: 13545 - protein, 474 aa, Pseudomonas monteilii SB3101; identical to SEQ ID NO: 13542

SEQ ID NO: 13546 - protein, 163 aa, Pseudomonas monteilii SB3101; identical to SEQ ID NO: 13543

SEQ ID NO: 13547 - protein, 136 aa, Pseudomonas monteilii SB3101; identical to SEQ ID NO: 13544

SEQ ID NO: 13548 - protein, 420 aa, Aggregatibacter actinomycetemcomitans HK1651
MNLDIDKEESNLVSLAQYYVNSKCGKRSKINQLILDEFSQSATLTENHKILARLPIDTFWTTNYDSMIETALKEAGKVVDVKHCVEQLPISIHKRDVVVYKMHGDASLPNQTVLIKDDYEKFHLTRNDFFNALRGDLLTKRFLFLGFSFSDPNIDYILSRIRASYSENQKEHFCILRKVQKNENEPQDEFEYRQRKQQFFISDLERVGISALLIDDYSEITEILMEIEQAQKRKTIFISGAAENYSPYSQQEVEQFVSSLSQEILKLGYRIVTGFGLGIGSSVISGAIKHLTEQNLKIDEDYLILRPFPQNKEGKELWSAWREDMISYAGISIFLFGNKLQNGNLILSNGMQEEFDISKRNGNVLIPVAATGYMAKQLWDNEMNKESAKEVENEMQALSKENISLDELRSNILSILKKVK

SEQ ID NO: 13549 - protein, 214 aa, Aggregatibacter actinomycetemcomitans HK1651
MGNKIFISYKYSDNAVKQLKEPNNLFSFYSQYKTTARDYVDIIQNKFERDDIHINKGENDNESLAGFKTETIRSKLAEKIFDSSVTIVLISPNIKNSWKSEKDQCIPWEIAYSLRSKRRPDNRSKRNAILLVVLPDRYGYYDYVNSYGFYFDIIQRNLNNLHTPYTTYKLRNGCSNSYMLQCNWDKFISNPNAWIEAAIEIRDKGNNYNIVIRP

SEQ ID NO: 13550 - protein, 160 aa, Aggregatibacter actinomycetemcomitans HK1651; identical to SEQ ID NO: 13247

SEQ ID NO: 13551 - protein, 466 aa, Aggregatibacter actinomycetemcomitans HK1651
MNKKQLIKELVNELSANNLAIFAGAGLSVSAGFVDWKILLRDLADEMNLDIDKEESNLVSLAQYYVNSKCGKRSKINQLILDEFSQSATLTENHKILARLPIDTFWTTNYDSMIETALKEAGKVVDVKHCVEQLPISIHKRDVVVYKMHGDASLPNQTVLIKDDYEKFHLTRNDFFNALRGDLLTKRFLFLGFSFSDPNIDYILSRIRASYSENQKEHFCILRKVQKNENEPQDEFEYRQRKQQFFISDLERVGISALLIDDYSEITEILMEIEQAQKRKTIFISGAAENYSPYSQQEVEQFVSSLSQEILKLGYRIVTGFGLGIGSSVISGAIKHLTEQNLKIDEDYLILRPFPQNKEGKELWSAWREDMISYAGISIFLFGNKLQNGNLILSNGMQEEFDISKRNGNVLIPVAATGYMAKQLWDNEMNKEFAKEVENEMQALSKENISLDELRSNILSILKKVK

SEQ ID NO: 13552 - protein, 214 aa, Aggregatibacter actinomycetemcomitans HK1651; identical to SEQ ID NO: 13248

SEQ ID NO: 13553 - protein, 160 aa, Aggregatibacter actinomycetemcomitans HK1651; identical to SEQ ID NO: 13247

SEQ ID NO: 13554 - protein, 478 aa, Yersinia frederiksenii Y225
MDLNKQAFLRDVGKELSEENVAVFAGAGMSVSSGFVNWAELLRPIADELGLDVDKESDLVALAQFHCNDNANNRSHLNQRLIDEFSRKTQETENHKILCRLPVRTYWTTNYDKIIETALDNSGKIADVKYTKEHLSTTKLKRDAIVYKMHGDVEHASQAVLTKDDYERYHVKMDQYLANLKGDLISKIFIFIGFSFTDPNLDYILSRVRIAYEGNQRRHYCFIKNIEQETSEDFVDFEYRKRKQDYFVKDLGRFNIKTILVDAFSEITDLLRRLEKNYKSKTIFISGAAHEYGHMGERNALEFVYKLSRTLVSKNMRVVSGFGLGVGSSVISGVLEQTFTSPKAKIEDQLVLRPFPQSTEGKLSLSVLWTKYREDMISHAGIALFLFGNKLSENNISLSNGMREEYEIAKRKGLFLIPVGATGYMAEQLWLEQNIEVQNSPNVSSEMKKLFAKLGDSDTSAADIIDVVMGVIKLMDRE

SEQ ID NO: 13555 - protein, 160 aa, Yersinia frederiksenii Y225
MARKPVFFSFHYGNDVMRVQQVRNIGSLEGNTPVSANDWETVKRGGDSSIKRWIDENMKYKQCIIVLVGEETANRPWVKYEIEKAWSDGKPIFGIYIHNLKCPRTGNSRRGKNPFDQFTLNNGVKLSSMVSCHDPLSYDAYNDISRNMETWVNAAVAQRR

SEQ ID NO: 13556 - protein, 360 aa, Yersinia frederiksenii Y225
MVLPFDYDNNTILNLFKELYPFQWRDLIQRYELYNSKDRHLQSIGKKKRYYHDEPESFFFNLDKVKHLVSSGQRAKHKQSFDLYKSREAYEKLASNRSRKIKIHIEKINTENKLAQNVEPLYIDVFISAYHKRGVTTKDKIEIFNELIKFNCTKTIDFLQKINDCEHNDQVRKMAFKHLQKIGVFVRLRRNHQGKIKSFTKEHDNFNVTPRDLFERIEANSIQNKKTYDIFISHCFLDSDLVLKLKSHLNEHNLTVYCDWTSDNDFLKRSLAGKYTEIVLKKRIEQSNVVLFLKTDNSMNYNGKILSKWVEMEMEFAKKITKPVCCLNLNGGESPFESIPFDMKNGVLFLSEFDIDKFRI

SEQ ID NO: 13557 - protein, 472 aa, Paenibacillus odorifer
MFKTAIEESNAAVFAGAGLSKPAGFVNWKDLLRDIAEEINLNIDKESDLIAVAQYHVNENGGNRGKINQALIDEFTKDAEITENHKILSRLPIDTYWTTNYDALIEDALKAEGKRIDSKITTENLAVTKPNSDAKIYKMHGDISLPHEAVLTKDDYENYNNKRQLFTTALQGDLVSKTMLFIGFSFDDPNLEYILSRIRILLGQNQRTHYCFMKQVQRDDFKEESDFLYAEIKQKLKVNDLKRYSIKVLLVSQYEDITAILKEVEQQYKRRNLFVSGSASNYGNWGEQRCLEFASNLSKKIIQNGNNIVTGFGLGVGSCVISGALEEIYKTRSQRVEDRLISRPFPQNTTGQIPIKELWTKHRNNMIQNVGISIFMFGNKIDASSGAVIEANGIIEEFEISVNHGAIPIPIGATDFTARKIWGTVISDFGRYVPQAGLEDKYQLLGDVNQTDEALINTVIEIVNMLEKRKRQ

SEQ ID NO: 13558 - protein, 214 aa, Paenibacillus odorifer
MARKTFISYKYSEAQHTRDRIIKALGTDARYYQGETSTSPNLTDRKTETIKNHLKSMIFDTSVTIVVISPNMKQSNWIDWEIEYSLKEITREDRTSRSNGIVGVIQKDYYFGGYGWILSSVTNSDGCKSRSIDESKLYEIIIKNRTNQKNPVYACLNCQSVDSLNGSYISLVTEDDFVASPDTYLENAYEKSKRINDFEITKTIKTQQNWLSPW

SEQ ID NO: 13559 - protein, 234 aa, Paenibacillus odorifer
MARCTAPVNGHRSASAAANCPACRGRYGRYGSGGGYNSYSPSSYSSSLTSGGGRSSGGGSVRSSKPRWSGVGSSILYTSEEIRSLTPIRNSVETLAKQPDLRDVFLCHAWDDRKGAAKELHDLLESHGVSVWFSEKDVSLGVPLLRAIDKGLANSRVGIVLVTPALLRRLPAEGIADKELSALLAGDRLVPIVHDTTYEALRDVSPLLGSRSGLNTAEEPMADVAAKLAELVAL

SEQ ID NO: 13560 - protein, 480 aa, Cellulophaga baltica NN016038
MKFSNEIEVFINDYVKDLNEGTASIFAGAGLSIPAGFVNWSELMSEIAQDLGLDINQEKDFVSIAQYHVNENLTRSKLNRKILEEFTEDSEETENHRVIARLPVSSVWTTNYDELIEKTYLKENKVVDVKYRNNQLLTTKPKRDLVIYKMHGDVNHPDQAILTKQEYEQYHQTHEPFINALSGELTTKTFLFIGFSFTDPNLDYVLSRLNFRFSKHKRQHFCFIKKHELGDSINPDQATLDYNNRRQSLTMNDLKRYGIKSLLIDKYSDITDVLKEIENRYKKRTIFISGSAETYEPHNRDNAIGFVHNLSKIIIESDFRIVNGFGWGIGSSVINGALESIHSNPNKYSESQLILKPFPQFETGSKDLKELWADYREKMISQCGISFFVFGNKLAGDKIVEAAGVISEFEIAHKNGCICIPVGLTKYASKTICNIIADEPEKFYKKPDLMMPILMELADENTTFTQAIKIIKGLLKTLKI

SEQ ID NO: 13561 - protein, 203 aa, Cellulophaga baltica NN016038
MARETFIAYKYSEAQDLRDEIIEKLGADASYYQGETAESPDMTGETIDRIKNGLKNMIFGTSVTIVIISPNLKQSAWVDWEIEYSLKEYKRQTITSRTNGIVGVIMKYNGSYDWLIGRSQNSDGCTTRYIDDSKLYNIVKGNRYNLETDDKYSCPNCKSFDQLNGSYIALVEEESFLNNPSHYIENAYDKSKATGNYNLTKKR

SEQ ID NO: 13562 - protein, 478 aa, Yersinia kristensenii; identical to SEQ ID NO: 13554

SEQ ID NO: 13563 - protein, 160 aa, Yersinia kristensenii; identical to SEQ ID NO: 13555

SEQ ID NO: 13564 - protein, 360 aa, Yersinia kristensenii; identical to SEQ ID NO: 13556

SEQ ID NO: 13565 - protein, 443 aa, Pseudomonas plecoglossicida
MNWPELMREVAEEVGLSVDKEHDLVALAQFHVNERSGSGGLARRIIEEFSEHAEPSTSHQILARLPIRTYWTTNYDQLIEDSLRKHQRVPDVKHKIDDLLTTRPKRDAVVYKMHGDALSPTQAILYKSQYEQYYKTHEAFVTALSGDLISKTFLFIGFSFTDPNLDYVLSRLHVPQHARREHFCFLRREPSSLYENEDEEAARYRRRKQELHIQDLKRFGIQTLLVDEYADIPAILRAIEEQFLKKTIFISGSAEEYGDWKKDEALDFIHSLSSSLVKHGYRVVNGFGWGVGSAVINGALDAIYSNPEKFSEDQLVMRPFPQVASQGQDLKVLWQQYRERMIALSGIALFVFGNKTEGGEIVSAPGVEREFDIAVRQGVVPVPIGATGYKAKELAEKVMADPAKYAPDDQWLAESLKNLNDPAAGAKSIEAAVLTIIKKLEGV

SEQ ID NO: 13566 - protein, 158 aa, Pseudomonas plecoglossicida; identical to SEQ ID NO: 13375

SEQ ID NO: 13567 - protein, 183 aa, Pseudomonas plecoglossicida; identical to SEQ ID NO: 13377

SEQ ID NO: 13568 - protein, 480 aa, Geobacter sulfurreducens
MANREVELFIKDFLKEIREDNAAIFAGAGLSASAGFVNWRELLRPIADELRLDIDRETDLVAVAQYHCNENAGNRHRLNQSIIDQLTVGVKPTANHRILARLPISTYWTTNYDQLIESALREAGKIPDVKYTTEQLATTKARRDAVVYKMHGDVEHAHDAVLIKDDYEQYHIKRGAFINALAGDLVSKTFLFIGFSFTDPNLDYVLSRVRVTFRENQRRHYCIFKTRTRQDGESDAEFENAQIKQRLAIEDLKRFNIKTLLVDEYAQITEILARIERQYRQKTIFISGSAEEYGAWTKQATEEFLRDLSRALVQQGYRVATGVGLGVGDAIITGAIEEVYRARTGHIEDSLIMRPFPRANPDEAVRQRLWEEYRQELISAAGICLVVLGNKRVDGRIVPAGGVRREFEIACQHGLNVVPIGATGYMANEIWTEMSSTLDAYYPDAKADLREKFSRLGDAVEKPAELISRTLEFIGLITKE

SEQ ID NO: 13569 - protein, 163 aa, Geobacter sulfurreducens
MARRVFFSFHFERDVWRAGQVRNSWVTKADRESAGFWDAADWEEVKKKGDEAIKKWIDKQLEGTSVTAVLIGAETSEREYVGYEISQSHKRGNGLLGIYINKVKDSFGKTDAKGKNPFDNWYVTENGQRRYFSEMYKTYDWVDDDGYNNLAKWVEAAAKAAGR

SEQ ID NO: 13570 - protein, 196 aa, Geobacter sulfurreducens
MAYITKDEARLAARARLQKSYGSSATQILREEVRASAAAESFDIFLSHSSEDAEIVLGVREILVGLGLKVYIDWIDDPQLDRGNVTAENADILRRRMRASKSLVYLTTKSSSTSRWMPWELGYFDGLRNGFIGILPVVDAGGTFSGQEYLGLYPLVERLPLTGGGTKFCVVEKAGKGYRFLDDFARGQSSIRAFSN

SEQ ID NO: 13571 - protein, 591 aa, Pseudomonas fluorescens
MTVATPDPTAQIAFSIFENKGVYAVLLGSGVSRSAGIPTGWEITLELVKRWGIAMGAGEQDDWVAWYVGQTGEEPNYSTLLERLATTQTERRAIIQGFLEPSDEELEDGLKLPTRAHRAIAAMVKAGHVRVIVTTNFDRLMENALRDVGVEPTVVSSEDTLAGAEPLTHASCYILKIHGDYKDARILNTDVELGEYPAAFNALLDRIIDEFGLIVAGWSGEWDHALRAAFLRAPSRRYPTYWLSRGRLSERGQELITHRRATTVTGMDADTFFDGLNLKLETIQQSRLPNPAGIELTLAMAKRFMARPEHRIQLDDLVTSQAHQAISHLAPLFAARPQGSTSKDFTDLVEIYEAAIEPLARLCAVLGRWGAAAEHTIVLDTIKGLHAASQVEQSGWVAGLALKSYPLALVTYAYGMGLVRADRLAELSELFNMTLINRREMPFHVGVDLSPFYVEGANGLFELWKSFEDQSRALTPLCNRLHDLLTPKWAPDFAGLHDHGLLYERFEFLSFLFFCEQRGISEESLADAVKNHGFRKIALGRISWHSETIHRFAHEYATEEYKTPVIAAGFALGSESYLELMLDGLKRLSRY

SEQ ID NO: 13572 - protein, 322 aa, Pseudomonas fluorescens
MPNVFFSYCHTDEALRDQLEKQLSMLKRQGVIETWHDRRIGAGQEIDAAIDDHINSDEIILLLVSPDFIASEYCYNIEMTRAMERHGAGEAIVIPVILRPSDWHHAPFGKLLGTPQDGKPVTLWPDRDEAFLQVAKEVRKAAERCSRDRPNSAPRAERNDFTGGSAPSPMAPAGPRSSNLRMTKTYTQLDKDRFLLDSFEYIARYFENSLEELQARNPGYEGVFRRVDANRFSASVYKDGHDVAKATVFTGGQLGAGIYYSHGDSFGGGSYNEALTVETDDQSMYLKTFGMAFHTRQDQKLSQEGGAETFWSLLIAPLQRNR

SEQ ID NO: 13573 - protein, 481 aa, Alteromonas australica
MTPITDQQCQRVVSDLLRDLAEDNLAIFAGAGLSAPAGYVSWSELLRPIAEDLELEIEKETDLVALAQYHCNSNLANRGKLNQLLINELSDKADITENHKILARLPISTYWTTNYDRLIENALADAGKVPDTKYRIKQLSFTKRGRDAVVYKMHGDIEHPDEAVLTKDDYEAYHLKMEPFINALSGDLVSKTFLFLGFSFTDPNLDYILSRVRVAYSKDQRQHYCIQKIVEPEVGESDADAEYRKRKQELFIQDLLRFGIKTILVSDYSQITNILSQLEWAFRRKTIFISGSAYEYGKWDSSEAGHFIYSLAKEIANLGFRIVSGFGLGVGSSVITGVLESVYMSGRRLDSEQLILRPFPQNEVGSRPIQQVWHEYREEMISYSGIVIFLFGNKLKDGEVVLADGLMSEFEIAKSKGLLLLPVGATGYASRNIYTQLLQEGYFDSTAFPKNCKEHITTICDDKSDLAQIQRGLINLLSSLK

SEQ ID NO: 13574 - protein, 166 aa, Alteromonas australica
MPKRNCFYSFHYLPDNWRAATVRSIGAIDGNKPTSDNNWETVKKSGDPAIKKWISEQMSGKSCVVVLVGSSTANRKWINHEIVKGWDDGKGVVGIYIHGLKDSSGNTTSKGENPFDYIGYGNTGKKLSSIVKCYNPSGSSSQEKYNWISKHLANAVEEAIEIRKNN

SEQ ID NO: 13575 - protein, 487 aa, Pseudomonas chlororaphis
MTKVAMNRFLTEYPDALNDGLGAVFIGAGVSMAAGYPSWSGLLSDIADELEINSRNVHDLAALAQWSIQESGGATRVRNVIRKEIGPDKPIPETLDILARLPVRHIWTTNYDRLVERAFAAISRPLNSISAPKDLALRTTPGAALLYKMHGSVDRLDDIVISTDDYELFRSRRGQYLPLFQAHLTSMSMLFIGISFTDPNVRHVLSLIRESFTESPPEHFAIVRAPKRSDFKTKDEFSARLAQHNLWTKDLKRYGLLAVEIDNYDEVPALLRQIERRVAARRIWVSGSWPLEHGGTEPANIYALAEEVGRKVGETNRYLVTGAGLLVGSASLSGFLAALRNGGGWDLDRRLIARPFPQPLKGGVPKDKEWAALRQELARQAGIAIFIGGAKLVNGLPIPAEGVEREFEFAKAAGVFVLPIGATGGAAEKICNQLQGSALSYKGSSPMRPTDKELKALADTNALATAEGRTSLVNLVFQIIDRVARVG

SEQ ID NO: 13576 - protein, 167 aa, Pseudomonas chlororaphis
MARNVFFSFHFANDFWRTQQVRNIGALEGQKLYTANEWEEVKKKGDAAIRKWIDDSLVGKSCVVVLVGSETATRPWVLEEVIKGWNAGKGVVAIRINRLLDNHQNTSVAGSNPFDAVTLKNGTVRLSGYAKLMTPAGNDSKEVYASIQANIESWIEDAITIRKNYKP

SEQ ID NO: 13577 - protein, 183 aa, Pseudomonas chlororaphis
MARNVTTEELRNISANSSQATRDHVFKSLAASASMSTFLSHSSKDKEVLPGAIQVLQNHGASVYIDEIDPEMPPYTSEETAALLKQRIAQTKRFVLLTTKNSKESRWVPWELGIADGAKGLSKIAIFPASDSAYDDSWVSWEYLGLYQRVVWGLLQGHPQELWMVLDTKANTAVPLKDWLAGY

SEQ ID NO: 13578 - protein, 487 aa, Sneathia amnii
MNNIIDEKELIEIVEQALYNNELAIFVGAGLSIDAGYYDWRRLLEKPANDLKLDISKEKHDLISLAQFYCNKNKRSAINELLSASFSSNKKPTENHNILSQLPIFTYWTTNFDTLIEDALKENNKNVSVRKCDNDLQLSYKNYDAVVYKMHGDIQNPAEAVITRDDYEEYGINSRKLFRDVLEGKLLTNTFLFLGFSFSDPNFNFVLSKMRVLLGDNNRPHYYVLKKITKPNKDKFEDEKEYKKALDEYEYDTIKQNLEIADLGRYGIKICLIDSYEKITEILKNILNRYKRKTVFLSGSAETYAPLDTQVAKDFIRKLSLELVKNGYKVVNGYGLGVGTYVINGIAEYCYNDSNIKIEDRLKLMPFPLSAKNNEQLRATWRKYRKEMISQCGIAIYMFGNKKKDGKNINANGIKEEFNIAESYQLVNIPLAFTGSMAQKLYSENGDMVEKILNNDEIEYITKFYDIDTNVDKIIKMINRLNNKEEC

SEQ ID NO: 13579 - protein, 163 aa, Sneathia amnii
MARRVFFSFHYEEDINRSMTVRNSWVTRGKEAAGFIDKAEFEKVKRNGENAVYKWIDKQLEGTSVTVVLIGKETLNRQFVQYEIRKSIERGNAIIGIYIHNIRDVRTQRTSVKGNSHTVIGYYNDCTPMYFDSICDGLYDYSEDYGYYNLGSWIEKAAQKKGK

SEQ ID NO: 13580 - protein, 175 aa, Sneathia amnii
MNNLQKSKCAIKESFAFFEEKVPIFISHKHEDLDDLKGIIGFLEKNFNVIAYIDSSDLSMPKITSGETAKKIKDRIKKCKMFILLATDGAVESKWCNWELGFADAIKGKKVVLFPMKEKGSNYKGNEYMEIYSYITYFYGREKYNSGKKVNAGYYVMTKSKGKKSIISLSSWLKE

SEQ ID NO: 13581 - protein, 376 aa, Sneathia amnii
MGKTKRQFNKIYIKYKKKFKNPIQQVLMLMPQTFSGDNIVNTFKELYPYMWDDLNKQYKFWHNKNVLLLRHCRKSRYNFRKPYNFILDCAYHSAKKLRKDKNRIILEKDEVGNLKNEIKKLSKSKFNKRKQKVDGTLRFIQEIEPSYTSFFIDRYFNTYDLHQKLEIMRELSKYKSSNITEFFYKVNSCTRNFSLKIEAQNYIQSIGLPFMLRRKKKGKKNYNDNEIIKNNSGPEVLKQRLYVDDLEKVKRFDIFISHNSSDMNQVVELYKKLNTKGYVVYIDWVNDKYDLKREWCNASTSEIIKLRIHQSKNFIIFLTESTLKSQWCSWELGYADALNKKIYVYISPTFKNKDIPILYKSYTEIKSVDEIIIENY

SEQ ID NO: 13582 - protein, 288 aa, Marinobacter psychrophilus
MISWDNSIINAIARRRCVIVLGAGVSRNSTNAKGKRPDTWEDFLKNCVSNLTDVDHINTLISQKDFLTACELIKERMGADDFTEKVQQEYQRSGYRHASIHEQIYKLDSSIVASPNFDNIYDTYASSESASSVVIKDHTSSDIANYLLGGDKRLIIKTHGSANNPTEIIFTRNDYAEARTKYVLFYEILKSLALTHTFLFLGCGTDDPDIRQLFEDLQFTHGRMPYHYMTLPKGEVHNDVLEVASASMRIKFVEYSSDNGHEELSLSLADLVTDVEGVRFELTRNGQW

SEQ ID NO: 13583 - protein, 478 aa, Marinobacter psychrophilus
METPKLFISYSWSNPTHEQWVIELANELTESGIHVILDKWDLKEGHDSVAFMEKMVTDPEISKVAIVCDEVYASKADGRSGGVGTETQIISREVYENQEQGKFVAIIPEKDDQGKAFLPTYYKSRIYIDLSEPDNYADNFEKLLRWIYDKPLYTRPEVGKRPSFLEESEGISLGTTATHKRALSAIKENKPFLSGVLDEYLTTFVSNLEKFRITDKDGEFDDQVIDSLEKFIPYRNEAISLFVALAQYAPTEENISKLHRFFEALIPYMNKPESVNSWSKWDFDNFKFIAHELFLYLVAILIKHEKFSEVNLLLNQEYYVPGQSDYGKDVMVGYDAFRAHLRSLEHRNTRLKLNRLSLHADLLEQRSKHSGIEFRHLMQADFILFMRAEVQQSDFYSRWFPDTLVYIGRFHSALEVFARSSSKSYFEKSKCLLGIDKPTDLNELMEAYKTDRNRLPRWQFDSFSPSVLLGYEQLATKA

SEQ ID NO: 13584 - protein, 472 aa, Marinobacter sp. CP1
MVSIENFIKKFSREVDENNAAIFAGAGLSVGAGFVNWSDLLREIADELNLDVDKEHDLVSLAQYHLNDRGANRDGLNRAIIDHFFNENTVTENHRILARLPITTFWTTNYDDLIERSLRDAGKIPDVKQAKEDLPRTIRNRDAVVYKMHGDAQHPNDAVIAKDDYQTYMQTRGSFVTALAGELVSKTFLFLGFSFSDPNLDHVLGRIRSEMGSCQRTHYCILRKEQKLDSDSPGDFEYRKIKQEHFINDLKCRYNIQTVLIDSYAQITDILTKIERVHKQRTIFVSGAADDYSPWAEADALDLCANISALIVKKGFRIVNGLGLGVGSAIVEGALREIYRNQRSKLTDQLQIRPFPQSDDAKKMWSRYREDMLDYAGVAVFVFGNKASENGLVLSNGMREEFDIAIAKGVTPLPLGFTGSMADELWREVVNSFEKIIPKSLHGIKPDFVSLGDKTKSGQEHLKTLERILDSL

SEQ ID NO: 13585 - protein, 195 aa, Marinobacter sp. CP1
MAYFTKDEARQAARSRMNKSYQFNAKSILESEARSTTSYESFDVFLSHSSKDAELVLGVKEILSRMGIKVYVDWHDDPQANRENVTVETAELLRTRMKQSKSLIFLATDNASGSKWMPWELGYFDGFSGGSVAVLPIVDYEGATFKGQEYLGLYPLVDKGRYTNGQSDTFVKKQGAWLTLDSFRKGSTAWNRYSY

SEQ ID NO: 13586 - protein, 484 aa, Serratia marcescens
MPERDIELFIRDYVNDIKAGSAALFAGAGLSIPAGFVSWKELIGDIAYELGLDIEKESDLISLAQYHLNEKGNRHKINQKIITEFAEQAEETENHRIIARLPIASLWTTNYDDLIEKTYARYNRVCDVKTTPESLTNNIHKRDVVLYKMHGDYRTPNQAIITREQYETYSRTHLPFINMLMAELTAKTFLFIGFSFEDPNLQYVLSRLYAQYGEGKRNHYCIMRRVQAGDSGSEDQASYDYNSRKQSLMINDLRRYGIQTLLVEDYRQITDLLYAIETQFKKSTVFISGSADNYHPYAREESIQFIHRLARLLIRKQYRIVNGFGWGVGTAVINGALEAIYASGGKISESQLVLRPFPQFASGGITLPALWHEYRQNMISLSGIAVFLFGNKRNAEGECVLADGLLKEFHIAAEQGCVCIPIGCTGGASAEIYRKIKEEMKDTLYHRHPVAMNLLDQLNEPGSLAEKKTCLLALIDIITKDNPR

SEQ ID NO: 13587 - protein, 163 aa, Serratia marcescens
MTRKCFYSFHYEPDNWRASQIREMGSLEGNRPATDNDWEEVKKGGDDAIATWIKGQLDNRSCAVILAGKDTANRKWINFEICEAWKKDMGVLVVYIHNLKDSAGEQARKGNNPLDHIKLGDRKLSGIAKAYDPPYLTSTNVYNHIKENLAEWVEEAIRIRENY

SEQ ID NO: 13588 - protein, 485 aa, Brevundimonas sp. DS20
MPTSSRNRFLKDFPAALHEGVGAVFVGAGVSKAAGYPTWAELLKDIGEELGVRSSDIQDLAALAQWHISESGAATGVRNVIRQEIGKDRPVPPTLEVLARLPVRQIWTTNYDRLVERAFAVINRPVDVVSGAADLSLRARPGAARLYKMHGSVDRMDDIVISTDDYELYRSKRGAFLPLLQAHLSSMSVLFIGLSLTDPNVRHVLSLIRESFTEAPPEHFAIVKPPSLADCSSEDEFRARTAQHKHWAKDLRRYGLRTIEVEHYDEIPELMRQVERRVAAMRVWVSGSWPLDGDDGRAGDLYRLSEAVGGLIADTGRDLVSGSGLLVGPAVIGGFIDRLRQDGGWDLDRRLIVRPFPQPLTDREPDQKRWTALRAEMARQAGIVIFLGGAKLEGGSQIVADGVLKEFEVAREAGAFILPIGATGGAAEQIAQDLTGSAIPSQGASAARPTDEELAVLSNQATTPDKLLKLVREILQRLAKPQDDN

SEQ ID NO: 13589 - protein, 148 aa, Brevundimonas sp. DS20
MARRVFFSFHYQRDIWRVNQIRNIGEIVGTAAVGFHDASLWEEAKKKGDTAIKKMIDDALLNTSVTVVCIGAASAGRKYIDYEISQSIARGNGIVGIQIHELKDRLGNTDLAGATPALLTRAGAPVYKYADHARLAARIEEAAKRAGR

SEQ ID NO: 13590 - protein, 175 aa, Brevundimonas sp. DS20
MLAFALALDSALSALTDRFDIFLSHSVRDASLVMGVKRILEEAGKTVYVDWISDPNLDRNAVTGATAERLRHRMRKCDACFYLFSRHSRRSRWMPWELGFFDGHNGNVAILPLIPPTGELDFTGEEYLEIYPKIDFANLSGSPSIFVNQVRRTEMGSYKSYDEWRRGADKLRPTT

SEQ ID NO: 13591 - protein, 184 aa, Brevundimonas sp. DS20
MTRFVTRAELRGFAANITLTEQASVLRTASARSPAGSTFLSHSSKDQDLVVGATIVLQNHGAVVYIDEIDPEMPPYTTDETANLLKSRIKQSSRFVLLTSKNSKESRWVPWELGVADGYKGLGQIALFPSSDDLHDSTWASWEYLGLYRRIVWGQMKGSDQDIWMVLNHKANTATPLRKWLTGG

SEQ ID NO: 13592 - protein, 466 aa, Aggregatibacter actinomycetemcomitans; identical to SEQ ID NO: 13246

SEQ ID NO: 13593 - protein, 161 aa, Aggregatibacter actinomycetemcomitans
MMKRNVFYSFHYEKDVFRIQQVRNIGKLEGNPPATPNTWEEIKRKGDKEIQKWIDENLSGKSCLVVLIGEDTSKRKWVKYEIQKAWNDGKGVLGIYIHNLKDPKSGECRKGDNPFEQFTFENGSKLSSIVKCYNPKSSDAYNDIADNIEKWIEEAISIRKK

SEQ ID NO: 13594 - protein, 214 aa, Aggregatibacter actinomycetemcomitans; identical to SEQ ID NO: 13248

SEQ ID NO: 13595 - protein, 482 aa, Caulobacter henricii
MADAARKRFLKEFPLALHEGNGVVFVGAGVSKAAGYPTWAELLKDIGEELGVRSSDIHDLAALAQWHISENGGAGVRNVIKAEIGQDRDIPEALQVLTRLPIRHIWTTNYDRLVERAFGAINRPIDTVSGAQDLSLKPKPGATRFYKMHGSVDRLDDIVISTDDYELYRSKRGAFLPLLQAHLSSMSLLFIGLSLTDPNIRHVLSLIRESFTDAPPEHFAIVRPPSRDDCASDEEYAARSAQHKHWAKDLRRYGLVTVEVEKYSEVPDLLRQVERRVASMRVWVSGSWPIEASDAKTRDLYRLAEEVGHLVGRTKRDLVSGSGLLVGSAAIAGFIDALRADGGWDLDRRLIVRPFPQPLGDQQPDKAHWTALRSEMARQAGIVIFLGGAKLDGKDLVTAGGVMEEFEAAKAAGAFLLPVGATGGAAKAISDALLGSETPWQGADAARPTDEELATLSDETSGPADLLKVIAAILGRLARVTA

SEQ ID NO: 13596 - protein, 148 aa, Caulobacter henricii
MARRVFFSFHYQRDIWRVNQIRNIGEIVGTSAAGFHDASLWEEAKKKGDTAIKAMIDEALKNTSVTVVCIGAATAGRKYIDYEIQQSIARGNGILGVQIHGLKNQAGVVDIVGATPARLSAAGAPIYKYVDHATLGICIEQAARAAGR

SEQ ID NO: 13597 - protein, 183 aa, Caulobacter henricii
MAEFITRSELRAFAASRSLTEQAELRKSTRQRASEGSTFLSHSSKDEDLVVGATIVLENHGARVYTDEVDPEMPPYTTDETANLLKKRIQQTKKFVLLVTKNSKESKWVPWELGLADGYKGLSRIALFPSADSAHDTTWAESEYLGLYDRIVWGRMKDYREPLWMVLDHKANTATPLSNWLAA

SEQ ID NO: 13598 - protein, 103 aa, Aeromonas hydrophila; identical to SEQ ID NO: 13523

SEQ ID NO: 13599 - protein, 155 aa, Aeromonas hydrophila; identical to SEQ ID NO: 13524

SEQ ID NO: 13600 - protein, 192 aa, Aeromonas hydrophila
MAYFTKSEARAAAASARGYKAANTVLKEGMEKYTVHDKFDVFLSHSMDDADLVLGVMTLLQKQGLRVYVDWVVDRQLNRDSVNKETAAVLRERMKSSSSMMYIATDNASSSKWMPWELGFFDGYKPNQVAILPLVDFENQSFEGQEYLGLYPVVTKHLQNNSLNHYVEDRGQRWSNLNNFARGTPSWNRYSS

SEQ ID NO: 13601 - protein, 499 aa, Staphylococcus aureus
MNGDGKMTIDKKKFIEKYVKALESNTAAIFAGAGLSCGAGYVNWKTLLNEAAEELELNIDKEEHDLVGLAQHYINKKRSRGNLNTVIMEQFSTRAELTENHKLLAKLPIDTYWTTNYDCMIEKALDSEGRIVDVKRNQNQLTVSVADKDATVYKMHGDIDSIDKIILTRDDYEKYNLTHPKFREILEGDLLSKTFLFIGFSFTDPNISYILSRIRLVLEDNTRPHYCILKEVEEKEYDNTEEFMYAKIKQQLHIEDLSRFSIETLLVKDYIEITEILESIYKRYRRKTIFISGSATEYLPFNSETGKYFLHQLSKKLVENDFKLVTGFGLGVGSYVINGVADYINSNKKSKLQNHLNILPFSQDSSGDLDLKEVWKKNRLEMISECGMALFLFGNKEKDGKIVLADGLEEEYKIAERQELVRLPINVTGYKTKNLSEQYNEEINIQFKEKILKMYNEINEYKCDFSNKQSIDELVQKIVNLVIEIKKQNNSWGFNALER

SEQ ID NO: 13602 - protein, 202 aa, Staphylococcus aureus; identical to SEQ ID NO: 13267

SEQ ID NO: 13603 - protein, 344 aa, Staphylococcus aureus; identical to SEQ ID NO: 13268

SEQ ID NO: 13604 - protein, 489 aa, Staphylococcus aureus
MNGDGKMTIDKKKFIEKYVKALESNTAAIFAGAGLSCGAGYVNWKTLLNEAAEELELNIDKEEHDLVGLAQHYINKKRSRGNLNTVIMEQFSTRAELTENHKLLAKLPIDTYWTTNYDCMIEKALDSEGRIVDVKRNQNQLTVSVADKDATVYKMHGDIDSIDKIILTRDDYEKYNLTHPKFREILEGDLLSKTFLFIGFSFTDPNISYILSRIRLVLEDNTRPHYCILKEVEEKEYDNTEEFMYAKIKQQLHIEDLSRFSIETLLVKDYIEITEILESIYKRYRRKTIFISGSATEYLPFNSETGKYFLHQLSKKLVENDFKLVTGFGLGVGSYVINGVADYINSNKKSKLQNHLNILPFSQDSSGDLDLKEVWKKNRLEMISECGMALFLFGNKEKDGKIVLADGLEEEYKIAERQELVRLPINVTGYKTKNLSEQYNEEINIQFKEKILKMYNEINEYKCDFSNKQSIDELVQKIVNLVIEIKKTK

SEQ ID NO: 13605 - protein, 202 aa, Staphylococcus aureus; identical to SEQ ID NO: 13267

SEQ ID NO: 13606 - protein, 344 aa, Staphylococcus aureus; identical to SEQ ID NO: 13268

SEQ ID NO: 13607 - protein, 489 aa, Staphylococcus aureus; identical to SEQ ID NO: 13604

SEQ ID NO: 13608 - protein, 202 aa, Staphylococcus aureus; identical to SEQ ID NO: 13267

SEQ ID NO: 13609 - protein, 344 aa, Staphylococcus aureus; identical to SEQ ID NO: 13268

SEQ ID NO: 13610 - protein, 482 aa, Rheinheimera sp. F8
MLKAITDQQRQRLLNELLKDLAEDNLAIFAGAGLSAPAGFVSWSELLRPIAEELELEIERETDLVALAQYHCNSNLANRGKLNQLLINELSANADVTDNHKILARLPISTYWTTNYDKLIEKSLIENGKNPDVKHRVKQLSFTKRGRNAIVYKMHGDIEHPDEAVLTKDDYESYHINMQPFITALSGDLVSKTFLFLGFSFTDPNLDYILSRVRVAYSKDQRQHYCIQKIVDPKPDEAEADTEYRRRKQELFTQDLLRFGIKTIFVTSYLEITNILRQLEWAYRRKTIFISGSAHEYARWNSSTAENFIYSLAKDIAKLDFKIVSGFGLGVGSSVITGVLEHVYMNGQRLDSEQLILRPFPQSAVGARPIAEVWHDYRTDMISHAGIAIFLFGNKLKDGEVVIADGLLKEFEIAKFHGLLLLPIGATGYASKQIYTKLLDEGYFDSDNFPKEARAYIDQICDEQSDLTTIQHALFSVLASLK

SEQ ID NO: 13611 - protein, 155 aa, Rheinheimera sp. F8
MSDLRNVFISHVHKDDHGLQKLKDLLSPKGIYMRDSSIHTGKFNNATDEHYIKTQILAPAINWAGIFICYVTPETKNSEWVNWEIEYAAKQGKRIIGVWEHGQKDCELPEALKEYADAMVGWSGDSIVNAINGVDRWEKTDGGDYGAVPLKRHPC

SEQ ID NO: 13612 - protein, 103 aa, Aeromonas hydrophila; identical to SEQ ID NO: 13523

SEQ ID NO: 13613 - protein, 155 aa, Aeromonas hydrophila; identical to SEQ ID NO: 13524

SEQ ID NO: 13614 - protein, 192 aa, Aeromonas hydrophila; identical to SEQ ID NO: 13600

SEQ ID NO: 13615 - protein, 478 aa, Enterococcus faecium; identical to SEQ ID NO: 13220

SEQ ID NO: 13616 - protein, 161 aa, Enterococcus faecium; identical to SEQ ID NO: 13221

SEQ ID NO: 13617 - protein, 283 aa, Enterococcus faecium; identical to SEQ ID NO: 13222

SEQ ID NO: 13618 - protein, 475 aa, Clostridium propionicum DSM 1682
MSKKEIDSFINKFVKEMKDDNVAIFAGAGFSKSGGFVDWKNLLKGVADELDLDIIKEYDLVTLAQYYVNRNGNRSTLNDIIFEEFTKDAEISENHKILARLPISTFWTTNYDSLLEDALKETHRVVDVKYTNKHLSITMPRRDAVVYKMHGDKSHPDDVILIKDDYENYYRKHSQYITTLSGMLISKTFLFVGFSFTDPNIDYILSRVKIDYSQENQRQHYSIMRKISANDFTDNAEFEYVKRKQTFFVEDLKRYNIKTILVDEYDDITKILSTIEKKLIVNNIFISGSAHEYGDFEEKEAKEFISKLSNSLIKSDFNVVSGFGVGIGSAVISGALEEIYMKGGTIKEDRLLLRPFPQGEDYKLLWQAYREDMISRAGVSIFLFGNKLVDGEIKLADGIQNEFLIAKNKGHSLLPLGYTGYKALELWNEINDNFEKYYPNDDKLKTVFQQFNLKKSTLENIQDVLHFIKLLKEKM

SEQ ID NO: 13619 - protein, 165 aa, Clostridium propionicum DSM 1682
MAKRQVFFSFEYNKDVWRASQIRNMGKVSNSSTFSDNDWEEVKEKTDSKIKEWIDEQIALRSCLVVLVGKTTSSRKWVKYEIEKAYELGKGIVGVYVHGLKDSQGNQTDQGSNPFYSLLNKDGKRLSNFITCYESPYKSSKYVYDDIESKIEELIENAIDDRGTY

SEQ ID NO: 13620 - protein, 164 aa, Clostridium propionicum DSM 1682
MARKVFYSFHYDNDIMRVMTVRNRWVTQGGQLASEVIDKAEFEKIKRQGDTAVNRWIDKQLEGTSVTVVLLGEKTLSRPFVKYEICQSINRGNAIIGIHINNIRDARTMSISKKADVHQMVGTYNDGKPVYFDEICDGIFNYLNNDGYNNLGKWVENAAQKKGK

SEQ ID NO: 13621 - protein, 190 aa, Clostridium propionicum DSM 1682
MKTIFEQGTFNAYQERSLQHAMNEVVRFSAQTTVFISHKHDDLGDLQGVLGFLEKHYNVKVYIDSRDSSMPAITSEVTANNIKSRIEKCDKFILLATNGAIESKWCNWELGFGDAKKYKNHIALFPMKPQGTYDSSYKGNEYMRIYPYICYFDGTERYTNGTSISKGYYIGEFKETGNYITPLSEWFNSK

SEQ ID NO: 13622 - protein, 470 aa, Streptococcus mitis
MRKEQFIKKFTKAVQDSNAAVFAGAGTSVDAGFVNWKKLVKPFADEIDLDIDKESDLVGLTQYYINSKMGNRGSVNQEIVYQFSSQEAETKVTNLLTRLPISTYWTTNYDNVIENGLKKNNRRGDIKRKIDDLAISIRDSDAIVYKMHGDVDSPNDAVISKDDYERYSDKNSLFVTALRGDLVSKTFLFVGFGFEDPNLESILGKVNVLLGDNKREHYCIQKQVLERDYDADIEGYNYAKIKQDLKIKDLQRYGIETVLVDDYSEISDLIQKIEEEYLKNTIFISGSISDYNENWSEEKVNQYCYDLSSFLISKDYKIISGFGLGIGSSVINGALDQIYKTKYRHVDEHLGLFPFPQNANGEKSLKERWTENREQMISESGVCIFIFGNKLVDGKVELASGMMEEFQIAKEKGKIIIPIASTGFAAKEIFDEMKQSGEYSYLDNYWETLETEKDFTKVFSMIDKIVNEVR

SEQ ID NO: 13623 - protein, 206 aa, Streptococcus mitis
MATKIFISFRFSDGKEIKDELVDLFDESTEVINRSEDVDRSQMSENIIQEYLYEKLKDTSVTIVLLTPEAVSYRKNWLGNYDDWLYDELRYSLEDRKNNRTNGVIAVYTDEAKDKVLDDSTHYCQHCQQTKSCRSLKYFDNLARKNMLNIKSAYKKNPCNDLYDDEHDSYISLVSLSDFKENYSQYIQNAKDKRERLDEFNIAKRM

SEQ ID NO: 13624 - protein, 388 aa, Streptococcus mitis
MGKVMRQYNEFYIKLQKEFKLAHNMTIEAMPAKFSNKDYVKKFIYMFPDKISRLIIERNYWYGKRIIKKNLVKIQSKRRSLETNDFILETSKYIRRRVRKNILSIEERKTQADEIRKKSLAKLKLQTIKRKKSLDYIQEINPSYLEHYRKRFFKTHDLHERLEIIRELSKYDSKEVHNFFYAINGHVRNQSLKKEVQSYFQSLSLPFRLSRKKKGKTNFIDNEIVTNRKGPEELKKRLYIDDLEKIKKFDIFLSHNSKDEEKIITFYKKLNKNGQVVYIDWVNDKYDLKREWCNTSTVDIIKERIKQSDVFVLYFSSKTLNSQWCAWELGYADAIGKKICIYFSEKIDRTIIPKFYFKYPKLLFSEDFMVKNHGQSDIPFTKWKENKK

SEQ ID NO: 13625 - protein, 477 aa, Pseudomonas putida
MKKEHLRLIDNLSKELAEGNLAIFAGAGMSRAAGFVDWKSLLKPIADDLDLDVEKEWDLVTLAQYHANANATNRSKLNQMLVTEFSSGVAPTENHEILARLPIQTYWTTNYDKLIESSLERNGKVPDVKYTNKQLATTRPKRDAVVYKMHGDVDHASEAVLIRDDYERYHVKMQPFITALSGDLIAKTFLFLGFSFTDPNLEYILSRVRIQFAQDQRQHYCILRKASKMEGEEQADFEYRQRKEDLFKHELLRVGIKVVYVDEFSEITDILREIEHRHKRKTIFISGAAHDYSPWTESEAEQFVYKLSKAISKEQYRVISGFGLGVGSAVITGVLEQTIMNGGRLDSDQLVLRPFPQSQSGERPLPELWTEYRRNMLAHAGVALFLFGNKLDQTGAVVPSNGMREEFEIAVANGLFVIPVGITGSISADLWNEVIQVYDESKHEHGKKITPLLHELGASDTDLVRAHDIILTLLPLI

SEQ ID NO: 13626 - protein, 101 aa, Pseudomonas putida
MPETPDAETAFNIKAAIVRADWFLFLATQNSMASRWCPWEIGFADGKKAHERIAIVPTQDTQGHFYGNEYLNLYNKIDVPAGTAGLAFYDTRGNGKWVRTL

SEQ ID NO: 13627 - protein, 1269 aa, Yersinia nurmii
MRFHPEGPAIPDILLERCDTGRVVFLCGAGVSLPSGMPTFVDLTQYVIEYFDPPHDSEIMAAFRPWLHDQSSANVPLDQIFNLLHLEYGKDEVNALVTKRLSASWTDREVGHEHALIKRISSNQSGIPQIVTTNFDRLFEVNQGQDNLTRYVPPAFSDLNFGSTIEGITYLHGRLVDANATSHPYVLSSADFGRAYLSEGWATNFIKLLLERYIVVLVGYQAEDPPVKYLLQGLNHDGQYDRSRLYAFDCGLAEEIEAKWRDRGVTAIAYPDHPVLWKSMEAWAERADDPRRWRASMIAKSQQDPKIMAPYERGQVAHILRTAQGARLFSEAIPRPHPEWLCVMDANIRSVKQKKRYNEFADNDAETFDPQEAYGLDDDLQDISDDERKRGVSNDNLLEWHDEDDNPADYHRFAGGFGSAPRRLGHLMTWFSESLDSPVMAWWAMRKSCLHPLLLQKIEHHIEFSVSTHKRARHLWGLILEHHKDSRNRRYDVDWYDLKARINTQGWTTGVLREFRKVMTPRLEMKSPYGLGEFRPPSGSWKEIQLSELGQFEVVFTDRHDDDLDIPDNVLLRVFSALEEQLLTASGLLEDIETFYFPSPSCYPVRAVEGEEHFAKGADVLTWFVPLFDRVAGKWPELANAHVTTWPVTEPFFFRKLRLYAFSKTSVFGADRVAEEVLSLEQNGFWDTNVTRELLFLLTDRWEEFSQDNQNRIIDRILTGPYQLPYLSEEELPKEREVLTAKYARYLELHGCELTTIHSDRLTAIINRIPDWNDSWATSVVISWGSRSGWVRTDEKPDVILDLPANEIIPKVKDVLKREDDSFTSRQPFVGLIKENPRKALSALTISGKIGDYPKEFWSPMISELPADLKPRLRRVFLNRIARLPVTALVELRHTLSSWLEQNLVATLKFDDDLGWAVYDHVIEGILSGGANATQSGFGEVIRNGEVVIQSRRTFSHAINGPVGKCTRALYQAIPGEEAEAGSLIPCSIKSRIERLFTAPGEGADHAIAITASNLNWLMLVDPSWTKERLIPILDFKHTAAEPAWNGYLHSDAMPSIAVAELIKPCFLNLIPWIKNLSWEKDFSVRASQWLGLMRMFHPDEPSSPSGNEMRSILRSISDEVRNRFISWLGLVGQKNESGWANYVIPLIREDWPKERQYRTTGSVKAWIGLLDDTYDNFPVVYDAVKTLLVPIETFDHQFYRFTREFGGKKPITMLFPSATLDLMDRITPQRLTRPPDELQKILGLIEETEPSLIKDSRYLRLIELVEKN

SEQ ID NO: 13628 - protein, 197 aa, Yersinia nurmii
MARCTAPRNGHRTASGAAACPACSSRYGGYRSYSSYSVPSYPSSGNSVSGSGSDGGSSSSSKPGWSRTGSSAVYTPAEVRTLTPVRENVEKRAAVPDLRDVFLCHAWDDRKGAAKELHDQLESRGVSVWFSEKDVLLGATLLREIDKGLAKSRVGIVLVTPALLKRLAGEGIADKELSALLARDLLVPIVHDTNYEA

SEQ ID NO: 13629 - protein, 477 aa, Yersinia pseudotuberculosis
MKREHLRLIDSLSKELAEGNLAAFAGAGLSRSAGFVDWKSLLKPIADDLDLDVEREWDLVTLAQYHANANATNRSKLNQILVTEFSLGVAPTENHEILTRLPIQTYWTTNYDKLIENALERNGKVPDVKYTNKQLATTRPKRDAVVYKMHGDVDHSSEAVLIRDDYERYHVKMQPFITALSGDLIAKTFLFLGFSFTDPNLEYILSRVRIQFAQDQRQHYCILRKASRLEGEDLAEFEYRQRKEDLFKHELLRVGIKAVYVDEFSEITDILREIERRHKRKTIFISGAAHDYSPWTESEAEQFVYKLSKAISKEHYRVISGFGLGVGSAVISGVLEQTIMNGGRLDNDQLVLRPFPQSQSGERSLPELWTEYRRNMLAHAGVALFLFGNKLDRSGAVVPSSGMREEFDIAVANGLFVIPVGITGSISADLWKELIITYDESKHDQGKKITSLLHELGTQGTDLERAHDIILSLLPLI

SEQ ID NO: 13630 - protein, 146 aa, Yersinia pseudotuberculosis
MARKVFFSFQYEDVQRAMNVRNSNVIASDTKAGFIDKADFEEVERKGDAAIKKWINDQLHGTSVTVVLIGATTNKSKWVKYEIEQSIERGNGILTIDISKIADLKGNTTDCCSLRVPGTTHYLWNNGNGRENIGKWVEAAAKTAGK

SEQ ID NO: 13631 - protein, 161 aa, Yersinia pseudotuberculosis
MPIRQSDLLNAGQRGQFAKRFGQPTAFLSHSHKDAQLALGLQALLNDQGWDVYIDWQDQTMPDKPETETALNIKSAIVRADWFLFLATQYSTTSRWCPWEIGFADGKKVYDRIAIIPTQDNLGHFYGNEYLNLYNKIDVSSGHTGLAFFDTRGNGKWVHHL

SEQ ID NO: 13632 - protein, 477 aa, Yersinia frederiksenii
MKREHLRLIDSLSKELAEGNLAVFAGAGLSRSAGFVDWKSLLKPIADDLDLDVEREWDLVTLAQYHANANATNRSKLNQILVTEFSLSVAPTENHEILTRLPIQTYWTTNYDKLIENALERNGKVPDVKYTNKQLATTRPKRDAVVYKMHGDVDHSSEAVLIRDDYERYHVKMQPFITALSGDLIAKTFLFLGFSFTDPNLEYILSRVRIQFAQDQRQHYCILRKASRLEGEDLAEFEYRQRKEDLFKHELLRVGIKAVYVDEFSEITDILREIERRHKRKTIFISGAAHDYSPWTESEAEQFVYKLSKAISKEHYRVISGFGLGVGSAVISGVLEQTIMNGGRLDNDQLVLRPFPQSQSGERSLPELWTEYRRNMLAHAGVALFLFGNKLDRSGAVVPSSGMREEFDIAVANGLFVIPVGITGSISADLWKELIITYDESKHDQGKKITPLLHELGTQGSDLERAHDIILSLLPLI

SEQ ID NO: 13633 - protein, 146 aa, Yersinia frederiksenii; identical to SEQ ID NO: 13630

SEQ ID NO: 13634 - protein, 161 aa, Yersinia frederiksenii
MPIRQSDLLNAGQRGQFSKRFGQPTAFLSHSHKDAQLALGLQALLNDQGWDVYIDWQDQTMPDKPDTETALNIKSAIVRADWFLFLATQHSTTSRWCPWEIGFADGKKVYDRIAIIPTQDNLGHFYGNEYLNLYNKIDVSSGHTGLAFFDTRGNGKWVRNL

SEQ ID NO: 13635 - protein, 477 aa, Yersinia similis; identical to SEQ ID NO: 13629

SEQ ID NO: 13636 - protein, 146 aa, Yersinia similis; identical to SEQ ID NO: 13630

SEQ ID NO: 13637 - protein, 161 aa, Yersinia similis; identical to SEQ ID NO: 13631

SEQ ID NO: 13638 - protein, 475 aa, Paraliobacillus sp. PM-2
MLEKAILKELKNNNLAVFAGAGLSRGSGFVDWKELLRDIADELELDVDKEMDLVSVAQYHYNANGRQTINEAIIEEFQRTSEKNKNMDILSRLPINTYWTTNYDSIIEDTLSSVKKVTDVKISQSQMKNYKPDRDAVVYKMHGDKEFPDETVITRDDYERYDSDRRMFTTQLKGELISKTFLFIGFSFEDPNLEQILSRIRVELLGKSPKNHYCFFRKVNQSDERYKNSDGSFNEEEFKYDKVKQDLKVKDLKRYGINSVLIDEYVEITRILENIEKKFKINKVFISGSAKEYGKYSNEEAKNLLHNLSKSLISRNHHVISGFGLGVGSYVINGSLEEIFNNKNKRTNDYLTLRPFPQNESGGKTLKELWTEYRKDMINDAGVMLFLFGNKESDGKTVEANGMIEEFQIAKELNKFIIPIGSTGYATEKIFNEVKKDLKKYWYLKESINILEVEKDESRIIDEIHKIFEKIRRSL

SEQ ID NO: 13639 - protein, 160 aa, Paraliobacillus sp. PM-2
MARKVFFSFHYEKDAWRAGQVRNSNITQEVKGYLDAAEWEEVKKKGNKSIKDWIDGQLKGTSVTVVLIGQETSQRKWVQYEIEQSLEKGNKLLGIYIHRLKNQKGEKATRGDNPLDNYTVEVDGKIKKASNVFKTYFWDLDNGYENFSDWIEEAAKISYK

SEQ ID NO: 13640 - protein, 475 aa, Yersinia enterocolitica
MPFSNEIEAFIKDYVKDLSEDSAAIFAGAGMSKSQGFVDWPELLSDIADELGLSIDKEKDLISLAQFHVNTKKNANKLTRKIIEEFSEQADASETHCILSRLPIRTYWTTNYDSLIEDSLEKSYKIPDVKYNIEQLNNNRPKRDAVIYKMHGDVKEATKAVLYKEQYERYYKTHAPFITALSGDLISKTFLFIGFSFTDPNLDYILSRLYTTNTLNKRTHYCFMKEETDQDQETLNYKKRKQNFRIDDLKRFGIETLLIDDYREIPKILSEIEFRYLKKTVFISGSAEEFGKYPRQEAQNFIHDLASSLVKNNYRVVNGFGWGVGSAVINGALEAVYSNPKKYSEEQLVMKPFPQSPSKNHDLKTLWEEYRQRMISLAGIALFIFGNKYSDGKVINAQGVRREFEIAKDKGLILIPIAPTGYISQELYAEIEKNPSEYYGDNEWVFAMVKDICSEDNKPSEIIKKIIDLINRLNK

SEQ ID NO: 13641 - protein, 163 aa, Yersinia enterocolitica
MSNEIKKNVFVSHHHKDDASVDGVSRLAAAKGYQLRNSSVRMKPENQRRADENKVSDKTIARLLRMKMRWAGQVIVVIGKETHTRPWVNWEIQAAHQLGKPIIGVYENGLKGDVKLPENLEKYATSIVAWRGEAIINALEGKTSFEKPDGTDRGKSQGGNVEC

SEQ ID NO: 13642 - protein, 200 aa, Yersinia enterocolitica
MPRRTFFSFHYKPDIWRAWNVRNSWVVKDANEIDQGFFDSSVFEASKKENDDALKTFLRKGLENTSVTCVLAGTQTWTRRWVRYEIARSVIKGNGLLTVYIHGVQNNDKETSIKGANPLDQMGLYRTEQGIFLAEWKGKKWVKYTDYTLAIPEGDLWFTAPKTNDVVQLSTHCLSYDFTSQDGRKNIGGWIETAAGMAGR

SEQ ID NO: 13643 - protein, 205 aa, Yersinia enterocolitica
MARETFISYKYSEAQDLRDVILERLGDAAVYYRGETADSPDISNTTVENIKIKLKDMIFGTSVTILIVSPEMISSKWIDWEIKYSMREVTRDETTSRCNGIVGVIMKINDSYDWLVSKETNEDGCTVRSIKNKKLLKILNENRYNLITENHFSCPNCKTYSQLEGSFISLIDEDDFLKNPDKYIENAFNKANKIKDYNIVKVDVE

SEQ ID NO: 13644 - protein, 395 aa, Yersinia enterocolitica
MNNTSSIRSPYQVIVLGAVNGHDNRLRHNIDLALEGLGIPTSVIKYLSAHSASTRCLKSPTMAVYFGSLANTDDTALVAELIDDSIVIAPVVSDLSQVPVEIPPQLRHVNAIVLGTDDEGIARLVTLVLETFHLLRRERRLFISYKRTGSQPLADRLYDALDARGFDVFIDVRSVPPAADFQSQLWHRMSDSDVVVLIDTPGFREGRWTAEELARANATNIQILHLLWPGQKEDPASSFSHFMKLRRRDFVGFIPMRGRWATKGLVKRICDEVERLRAPAIAARHRYLVDNFCDAARDEGLYPSIQIEGWISLKVNSKRVLAIVPAVGIPTSDRINEVFEAITDHADETREIWVIYDNRGILKTWLSHLDWLDSYLPIRAVQMSKAAQLLQESIR

SEQ ID NO: 13645 - protein, 488 aa, Stenotrophomonas maltophilia
MARKAKRAFSPEIGAFIERYVDELVNGKASVFVGAGMSVAAGFVNWKGLLKEVAAELGLDVDRETNLVALAQYHLNERNNRSVLNQKILAEFTEDQQLTTSHHVLARLPIGHYWTTNYDRLIETALVQEQRRPDVKFSVEQMKLGKPGHDAIVYKMHGDVEHPESAILTKDDYEGYFREHEHFVTALSGDLVQTTMLFLGFSFTDPNIDYVLSRVRVTLRKKPKNHYCVLCKLQRAAREKLENFEYRKRQQEYLIKDLSRIGIQSLMIDDYSEVPLLLSAIESRYRQRTVFVSGAAHTFPAPWDPARAHQFLSGLSAALIRKRLNVVTGFGLGVGTSIVSGALETILGNPGRYREKQLQASPFPVSADSRTRRPLFRQHREKILAKCGIAIFAFGTKLEGKKVVEAKGMREEFDIARQDGLIVIPVGATGGVAKELWVQAAARFDEFYPNASPAFARNFKTLGREAAAPEDLIRALTSMIDELRRQTF

SEQ ID NO: 13646 - protein, 160 aa, Stenotrophomonas maltophilia
MTRRVFYSFHYQPDAWRAAMIRKIGAVEGNISANDNDWETIKRGGDSAITRWINGQLDGRSCTVVLVGAETAQRRWVQYEIEQSWRKGMGVFGIRIHRLLNANRLPSDRGANPFDTVQIGGQPLSTIVPLYDPPGQDSQAVYGSISANLQNWIERAVNAR

SEQ ID NO: 13647 - protein, 224 aa, Stenotrophomonas maltophilia
MGRKIFVSYKYADSQVQPVRGHLLGTTVRHYVDMLQAKLEQADHINKGEDDGESLVAFAEETIASKLRDRIYDSTMTLVMVSPGMHDSTKPEKDQWMPWEISYSLRKKTRNDRQSGPNAMLGIVLPDTTGSYNYFFEEKNCPHCASVTWRTSKTFSIIGRNVFNARKLEMASCDNHSGGKSYRGNHSYIKFVRWSDFYADYGKHLDQAYEIQKSIDDYKISCDV

SEQ ID NO: 13648 - protein, 168 aa, Stenotrophomonas maltophilia
MAISVSSLRQASYRSSVALASTSMEARSRGIRTVFLCHSHKDQELVKGFVRMLHDSGWSVYVDWADSSMPSTPNPETARKIREKIVQLDYFIFLATENAMASRWCPWELGYADGKKSNDRILVVPTVEHGREHGNEYVGLYKRLDSNSLGHVQVFNPGSSYGTAVRSL

SEQ ID NO: 13649 - protein, 472 aa, Roseburia faecis
MITISEFKKAYSKAIQEGYAAIFAGAGLSKASGFVNWKELLNDLAQEIQLDVEKEPDLVEVAQYYCNEKRSRNEINEKILNRFVTESQESESIRILADLPIRVFWTTNYDHLLEDTLKKYGKRIDIKMTIESLATNLSGNDAVVYKMHGDYLDPSSCVILKDDYEIYNDKRQLFTTTLQGDLVSKTFLFIGFSFEDPNLKYILSRIRILLDKNRRTHYLFLKKIQKDDYKKRSKNYYYDLNKQELQIHDLKRYGIETVLIDSYDQIPAILKEIKTASKCKNIFISGAAHEYGKDWETTAPLFIKKLVSSLCQKDYRIITGHARGIGSYVISSVIEECQSNIGKLEKHLMIKAFPYEDKNRFDYIQLKKEYRKGIYKYAGIAIFMFGNKESDAGTILADGVYEEYKIALESGAYIIPIGSTGYMAKKIWDEVSLHINDFPYLKEEENILQNCTNPNKVIDAVLTVVNIIQTKY

SEQ ID NO: 13650 - protein, 260 aa, Roseburia faecis
MNNTKEIFDFFISHSKETKQLIVIPLAQCLKSIGIDVWIDRKEILVGNHIYSEIQDAITRSKFCIAVIDQSFLKRTWPMKELELFNKKNNTSIIPIFVDLEKAIVYNEIPWLDGIAFEKMHTEPFDLNVHMSIFCRIISRLFKDNNTNKNSIEKTFESITKYDFPCKETLSSLIYFSKYNSSNLRLASIDLCNIGGIIYAISKTYSIPNNVITQMFLFSNILRDYCFNVNFIPDYNIYIGMYNAIVASLTQLDLLIQTIV

SEQ ID NO: 13651 - protein, 473 aa, Streptococcus equi subsp. equi
MFIIKGEVSRKDLIREIEKAIKSDELGAFIGAGLSIPAGFCSWKELLREPAEEIGLDVEKESDLVNLAQYYSNSKKRTSIDDLIKGQFSQLVKPTENHKLLSQLPISTFWTTNYDKLIEKALENNMKKPYVKTKDEQLRGTNHNFDAIVYKLHGDVETPEDAVITRSDYEEFGYNKRKLFREVLEGDLLTKTFLFLGFSFEDPNFNYVIGRLRVLLDEKNTRKHYCIMKRVQDADEDYEYKKARQELQIEDLNRYGIFTYLVNKYDEITEILSTLVDRFRRKTIFISGSAYSYSAYSQKTGENFIHKLSFELSKNGYHIVNGYGKGVGEFVLNGVADYCLTHKSKINDFLTLMPFPQNSSLGIDLDKLYKENREQMIESCGIAIFLFGNKEAEDIASGVMDEYELSKKHGLVCLPIEYTGGASKEIYDQTTQEISDKNTISAIEQANKQCDGDIDMSVKNIVQAVKILNKEEF

SEQ ID NO: 13652 - protein, 165 aa, Streptococcus equi subsp. equi
MAKRQVFFSFHYDNDNWRAGQVRNMGKVDSSSTFSDNDWEEVKEKTESKIKEWIDEQLNKRSCLVVLIGEKTANRKWINYEIRKAYELNKGIVGIYIHKLENSLGEQDDKGNNPFDYLTLEGEKLSKYVKCFDSNYSSSKYVYSDIKDNIEGLIEYGINHKPSTW

SEQ ID NO: 13653 - protein, 473 aa, Streptococcus equi subsp. equi; identical to SEQ ID NO: 13651

SEQ ID NO: 13654 - protein, 165 aa, Streptococcus equi subsp. equi; identical to SEQ ID NO: 13652

SEQ ID NO: 13655 - protein, 473 aa, Streptococcus equi subsp. equi; identical to SEQ ID NO: 13651

SEQ ID NO: 13656 - protein, 165 aa, Streptococcus equi subsp. equi; identical to SEQ ID NO: 13652

SEQ ID NO: 13657 - protein, 473 aa, Streptococcus equi subsp. equi; identical to SEQ ID NO: 13651

SEQ ID NO: 13658 - protein, 165 aa, Streptococcus equi subsp. equi; identical to SEQ ID NO: 13652

SEQ ID NO: 13659 - protein, 473 aa, Streptococcus equi subsp. equi; identical to SEQ ID NO: 13651

SEQ ID NO: 13660 - protein, 165 aa, Streptococcus equi subsp. equi
MAKRQVFFSFHYDNDNWRAGQVRNMGKVDSSSTFSDNDWEEVKERTESKIKEWIDEQLNKRSCLVVLIGEKTANRKWINYEIRKAYELNKGIVGIYIHKLENSLGEQDDKGNNPFDYLTLEGEKLSKYVKCFDSNYSSSKYVYSDIKDNIEGLIEYGINHKPSTW

SEQ ID NO: 13661 - protein, 473 aa, Streptococcus equi subsp. equi; identical to SEQ ID NO: 13651

SEQ ID NO: 13662 - protein, 165 aa, Streptococcus equi subsp. equi; identical to SEQ ID NO: 13652

SEQ ID NO: 13663 - protein, 473 aa, Streptococcus equi subsp. equi; identical to SEQ ID NO: 13651

SEQ ID NO: 13664 - protein, 165 aa, Streptococcus equi subsp. equi; identical to SEQ ID NO: 13652

SEQ ID NO: 13665 - protein, 473 aa, Streptococcus equi subsp. equi; identical to SEQ ID NO: 13651

SEQ ID NO: 13666 - protein, 165 aa, Streptococcus equi subsp. equi; identical to SEQ ID NO: 13652

SEQ ID NO: 13667 - protein, 473 aa, Streptococcus equi subsp. equi; identical to SEQ ID NO: 13651

SEQ ID NO: 13668 - protein, 165 aa, Streptococcus equi subsp. equi; identical to SEQ ID NO: 13652

SEQ ID NO: 13669 - protein, 473 aa, Streptococcus equi subsp. equi; identical to SEQ ID NO: 13651

SEQ ID NO: 13670 - protein, 165 aa, Streptococcus equi subsp. equi; identical to SEQ ID NO: 13652

SEQ ID NO: 13671 - protein, 473 aa, Streptococcus equi subsp. equi; identical to SEQ ID NO: 13651

SEQ ID NO: 13672 - protein, 165 aa, Streptococcus equi subsp. equi; identical to SEQ ID NO: 13652

SEQ ID NO: 13673 - protein, 473 aa, Streptococcus equi subsp. equi; identical to SEQ ID NO: 13651

SEQ ID NO: 13674 - protein, 165 aa, Streptococcus equi subsp. equi; identical to SEQ ID NO: 13652

SEQ ID NO: 13675 - protein, 473 aa, Streptococcus equi subsp. equi; identical to SEQ ID NO: 13651

SEQ ID NO: 13676 - protein, 165 aa, Streptococcus equi subsp. equi; identical to SEQ ID NO: 13652

SEQ ID NO: 13677 - protein, 473 aa, Streptococcus equi subsp. equi; identical to SEQ ID NO: 13651

SEQ ID NO: 13678 - protein, 165 aa, Streptococcus equi subsp. equi; identical to SEQ ID NO: 13652

SEQ ID NO: 13679 - protein, 473 aa, Streptococcus equi subsp. equi; identical to SEQ ID NO: 13651

SEQ ID NO: 13680 - protein, 165 aa, Streptococcus equi subsp. equi; identical to SEQ ID NO: 13652

SEQ ID NO: 13681 - protein, 473 aa, Streptococcus equi subsp. equi; identical to SEQ ID NO: 13651

SEQ ID NO: 13682 - protein, 165 aa, Streptococcus equi subsp. equi; identical to SEQ ID NO: 13652

SEQ ID NO: 13683 - protein, 473 aa, Streptococcus equi subsp. equi; identical to SEQ ID NO: 13651

SEQ ID NO: 13684 - protein, 165 aa, Streptococcus equi subsp. equi; identical to SEQ ID NO: 13652

SEQ ID NO: 13685 - protein, 473 aa, Streptococcus equi subsp. equi; identical to SEQ ID NO: 13651

SEQ ID NO: 13686 - protein, 165 aa, Streptococcus equi subsp. equi; identical to SEQ ID NO: 13652

SEQ ID NO: 13687 - protein, 473 aa, Streptococcus equi subsp. equi; identical to SEQ ID NO: 13651

SEQ ID NO: 13688 - protein, 165 aa, Streptococcus equi subsp. equi; identical to SEQ ID NO: 13652

SEQ ID NO: 13689 - protein, 473 aa, Streptococcus equi subsp. equi; identical to SEQ ID NO: 13651

SEQ ID NO: 13690 - protein, 165 aa, Streptococcus equi subsp. equi; identical to SEQ ID NO: 13652

SEQ ID NO: 13691 - protein, 473 aa, Streptococcus equi subsp. equi; identical to SEQ ID NO: 13651

SEQ ID NO: 13692 - protein, 165 aa, Streptococcus equi subsp. equi; identical to SEQ ID NO: 13652

SEQ ID NO: 13693 - protein, 473 aa, Streptococcus equi subsp. equi; identical to SEQ ID NO: 13651

SEQ ID NO: 13694 - protein, 165 aa, Streptococcus equi subsp. equi; identical to SEQ ID NO: 13652

SEQ ID NO: 13695 - protein, 473 aa, Streptococcus equi subsp. equi; identical to SEQ ID NO: 13651

SEQ ID NO: 13696 - protein, 165 aa, Streptococcus equi subsp. equi; identical to SEQ ID NO: 13652

SEQ ID NO: 13697 - protein, 473 aa, Streptococcus equi subsp. equi; identical to SEQ ID NO: 13651

SEQ ID NO: 13698 - protein, 165 aa, Streptococcus equi subsp. equi; identical to SEQ ID NO: 13652

SEQ ID NO: 13699 - protein, 473 aa, Streptococcus equi subsp. equi; identical to SEQ ID NO: 13651

SEQ ID NO: 13700 - protein, 165 aa, Streptococcus equi subsp. equi; identical to SEQ ID NO: 13652

SEQ ID NO: 13701 - protein, 473 aa, Streptococcus equi subsp. equi; identical to SEQ ID NO: 13651

SEQ ID NO: 13702 - protein, 165 aa, Streptococcus equi subsp. equi; identical to SEQ ID NO: 13652

SEQ ID NO: 13703 - protein, 473 aa, Streptococcus equi subsp. equi; identical to SEQ ID NO: 13651

SEQ ID NO: 13704 - protein, 165 aa, Streptococcus equi subsp. equi; identical to SEQ ID NO: 13652

SEQ ID NO: 13705 - protein, 473 aa, Streptococcus equi subsp. equi; identical to SEQ ID NO: 13651

SEQ ID NO: 13706 - protein, 165 aa, Streptococcus equi subsp. equi; identical to SEQ ID NO: 13652

SEQ ID NO: 13707 - protein, 473 aa, Streptococcus equi subsp. equi; identical to SEQ ID NO: 13651

SEQ ID NO: 13708 - protein, 165 aa, Streptococcus equi subsp. equi; identical to SEQ ID NO: 13652

SEQ ID NO: 13709 - protein, 473 aa, Streptococcus equi subsp. equi; identical to SEQ ID NO: 13651

SEQ ID NO: 13710 - protein, 165 aa, Streptococcus equi subsp. equi; identical to SEQ ID NO: 13652

SEQ ID NO: 13711 - protein, 473 aa, Streptococcus equi subsp. equi; identical to SEQ ID NO: 13651

SEQ ID NO: 13712 - protein, 165 aa, Streptococcus equi subsp. equi; identical to SEQ ID NO: 13652

SEQ ID NO: 13713 - protein, 473 aa, Streptococcus equi subsp. equi; identical to SEQ ID NO: 13651

SEQ ID NO: 13714 - protein, 165 aa, Streptococcus equi subsp. equi; identical to SEQ ID NO: 13652

SEQ ID NO: 13715 - protein, 473 aa, Streptococcus equi subsp. equi; identical to SEQ ID NO: 13651

SEQ ID NO: 13716 - protein, 165 aa, Streptococcus equi subsp. equi; identical to SEQ ID NO: 13652

SEQ ID NO: 13717 - protein, 473 aa, Streptococcus equi subsp. equi; identical to SEQ ID NO: 13651

SEQ ID NO: 13718 - protein, 165 aa, Streptococcus equi subsp. equi; identical to SEQ ID NO: 13652

SEQ ID NO: 13719 - protein, 473 aa, Streptococcus equi subsp. equi; identical to SEQ ID NO: 13651

SEQ ID NO: 13720 - protein, 165 aa, Streptococcus equi subsp. equi; identical to SEQ ID NO: 13652

SEQ ID NO: 13721 - protein, 473 aa, Streptococcus equi subsp. equi; identical to SEQ ID NO: 13651

SEQ ID NO: 13722 - protein, 165 aa, Streptococcus equi subsp. equi; identical to SEQ ID NO: 13652

SEQ ID NO: 13723 - protein, 473 aa, Streptococcus equi subsp. equi; identical to SEQ ID NO: 13651

SEQ ID NO: 13724 - protein, 165 aa, Streptococcus equi subsp. equi; identical to SEQ ID NO: 13652

SEQ ID NO: 13725 - protein, 473 aa, Streptococcus equi subsp. equi; identical to SEQ ID NO: 13651

SEQ ID NO: 13726 - protein, 165 aa, Streptococcus equi subsp. equi; identical to SEQ ID NO: 13652

SEQ ID NO: 13727 - protein, 473 aa, Streptococcus equi subsp. equi; identical to SEQ ID NO: 13651

SEQ ID NO: 13728 - protein, 165 aa, Streptococcus equi subsp. equi; identical to SEQ ID NO: 13652

SEQ ID NO: 13729 - protein, 473 aa, Streptococcus equi subsp. equi; identical to SEQ ID NO: 13651

SEQ ID NO: 13730 - protein, 165 aa, Streptococcus equi subsp. equi; identical to SEQ ID NO: 13652

SEQ ID NO: 13731 - protein, 473 aa, Streptococcus equi subsp. equi; identical to SEQ ID NO: 13651

SEQ ID NO: 13732 - protein, 165 aa, Streptococcus equi subsp. equi; identical to SEQ ID NO: 13652

SEQ ID NO: 13733 - protein, 473 aa, Streptococcus equi subsp. equi; identical to SEQ ID NO: 13651

SEQ ID NO: 13734 - protein, 165 aa, Streptococcus equi subsp. equi; identical to SEQ ID NO: 13652

SEQ ID NO: 13735 - protein, 473 aa, Streptococcus equi subsp. equi; identical to SEQ ID NO: 13651

SEQ ID NO: 13736 - protein, 165 aa, Streptococcus equi subsp. equi; identical to SEQ ID NO: 13652

SEQ ID NO: 13737 - protein, 473 aa, Streptococcus equi subsp. equi; identical to SEQ ID NO: 13651

SEQ ID NO: 13738 - protein, 165 aa, Streptococcus equi subsp. equi; identical to SEQ ID NO: 13652

SEQ ID NO: 13739 - protein, 473 aa, Streptococcus equi subsp. equi; identical to SEQ ID NO: 13651

SEQ ID NO: 13740 - protein, 165 aa, Streptococcus equi subsp. equi; identical to SEQ ID NO: 13652

SEQ ID NO: 13741 - protein, 473 aa, Streptococcus equi subsp. equi; identical to SEQ ID NO: 13651

SEQ ID NO: 13742 - protein, 165 aa, Streptococcus equi subsp. equi; identical to SEQ ID NO: 13652

SEQ ID NO: 13743 - protein, 473 aa, Streptococcus equi subsp. equi; identical to SEQ ID NO: 13651

SEQ ID NO: 13744 - protein, 165 aa, Streptococcus equi subsp. equi; identical to SEQ ID NO: 13652

SEQ ID NO: 13745 - protein, 473 aa, Streptococcus equi subsp. equi; identical to SEQ ID NO: 13651

SEQ ID NO: 13746 - protein, 165 aa, Streptococcus equi subsp. equi; identical to SEQ ID NO: 13652

SEQ ID NO: 13747 - protein, 473 aa, Streptococcus equi subsp. equi; identical to SEQ ID NO: 13651

SEQ ID NO: 13748 - protein, 165 aa, Streptococcus equi subsp. equi; identical to SEQ ID NO: 13652

SEQ ID NO: 13749 - protein, 473 aa, Streptococcus equi subsp. equi; identical to SEQ ID NO: 13651

SEQ ID NO: 13750 - protein, 165 aa, Streptococcus equi subsp. equi; identical to SEQ ID NO: 13652

SEQ ID NO: 13751 - protein, 473 aa, Streptococcus equi subsp. equi; identical to SEQ ID NO: 13651

SEQ ID NO: 13752 - protein, 165 aa, Streptococcus equi subsp. equi; identical to SEQ ID NO: 13652

SEQ ID NO: 13753 - protein, 473 aa, Streptococcus equi subsp. equi; identical to SEQ ID NO: 13651

SEQ ID NO: 13754 - protein, 165 aa, Streptococcus equi subsp. equi; identical to SEQ ID NO: 13652

SEQ ID NO: 13755 - protein, 473 aa, Streptococcus equi subsp. equi; identical to SEQ ID NO: 13651

SEQ ID NO: 13756 - protein, 165 aa, Streptococcus equi subsp. equi; identical to SEQ ID NO: 13652

SEQ ID NO: 13757 - protein, 473 aa, Streptococcus equi subsp. equi; identical to SEQ ID NO: 13651

SEQ ID NO: 13758 - protein, 165 aa, Streptococcus equi subsp. equi; identical to SEQ ID NO: 13652

SEQ ID NO: 13759 - protein, 473 aa, Streptococcus equi subsp. equi; identical to SEQ ID NO: 13651

SEQ ID NO: 13760 - protein, 165 aa, Streptococcus equi subsp. equi; identical to SEQ ID NO: 13652

SEQ ID NO: 13761 - protein, 473 aa, Streptococcus equi subsp. equi; identical to SEQ ID NO: 13651

SEQ ID NO: 13762 - protein, 165 aa, Streptococcus equi subsp. equi; identical to SEQ ID NO: 13652

SEQ ID NO: 13763 - protein, 473 aa, Streptococcus equi subsp. equi; identical to SEQ ID NO: 13651

SEQ ID NO: 13764 - protein, 165 aa, Streptococcus equi subsp. equi; identical to SEQ ID NO: 13652

SEQ ID NO: 13765 - protein, 473 aa, Streptococcus equi subsp. equi; identical to SEQ ID NO: 13651

SEQ ID NO: 13766 - protein, 165 aa, Streptococcus equi subsp. equi; identical to SEQ ID NO: 13652

SEQ ID NO: 13767 - protein, 473 aa, Streptococcus equi subsp. equi; identical to SEQ ID NO: 13651

SEQ ID NO: 13768 - protein, 165 aa, Streptococcus equi subsp. equi; identical to SEQ ID NO: 13652

SEQ ID NO: 13769 - protein, 473 aa, Streptococcus equi subsp. equi; identical to SEQ ID NO: 13651

SEQ ID NO: 13770 - protein, 165 aa, Streptococcus equi subsp. equi; identical to SEQ ID NO: 13652

SEQ ID NO: 13771 - protein, 473 aa, Streptococcus equi subsp. equi; identical to SEQ ID NO: 13651

SEQ ID NO: 13772 - protein, 165 aa, Streptococcus equi subsp. equi; identical to SEQ ID NO: 13652

SEQ ID NO: 13773 - protein, 473 aa, Streptococcus equi subsp. equi; identical to SEQ ID NO: 13651

SEQ ID NO: 13774 - protein, 165 aa, Streptococcus equi subsp. equi; identical to SEQ ID NO: 13652

SEQ ID NO: 13775 - protein, 473 aa, Streptococcus equi subsp. equi; identical to SEQ ID NO: 13651

SEQ ID NO: 13776 - protein, 165 aa, Streptococcus equi subsp. equi; identical to SEQ ID NO: 13652

SEQ ID NO: 13777 - protein, 473 aa, Streptococcus equi subsp. equi; identical to SEQ ID NO: 13651

SEQ ID NO: 13778 - protein, 165 aa, Streptococcus equi subsp. equi; identical to SEQ ID NO: 13652

SEQ ID NO: 13779 - protein, 473 aa, Streptococcus equi subsp. equi; identical to SEQ ID NO: 13651

SEQ ID NO: 13780 - protein, 165 aa, Streptococcus equi subsp. equi; identical to SEQ ID NO: 13652

SEQ ID NO: 13781 - protein, 473 aa, Streptococcus equi subsp. equi; identical to SEQ ID NO: 13651

SEQ ID NO: 13782 - protein, 165 aa, Streptococcus equi subsp. equi; identical to SEQ ID NO: 13652

SEQ ID NO: 13783 - protein, 473 aa, Streptococcus equi subsp. equi; identical to SEQ ID NO: 13651

SEQ ID NO: 13784 - protein, 165 aa, Streptococcus equi subsp. equi; identical to SEQ ID NO: 13652

SEQ ID NO: 13785 - protein, 473 aa, Streptococcus equi subsp. equi; identical to SEQ ID NO: 13651

SEQ ID NO: 13786 - protein, 165 aa, Streptococcus equi subsp. equi; identical to SEQ ID NO: 13652

SEQ ID NO: 13787 - protein, 473 aa, Streptococcus equi subsp. equi; identical to SEQ ID NO: 13651

SEQ ID NO: 13788 - protein, 165 aa, Streptococcus equi subsp. equi; identical to SEQ ID NO: 13652

SEQ ID NO: 13789 - protein, 473 aa, Streptococcus equi subsp. equi; identical to SEQ ID NO: 13651

SEQ ID NO: 13790 - protein, 165 aa, Streptococcus equi subsp. equi; identical to SEQ ID NO: 13652

SEQ ID NO: 13791 - protein, 473 aa, Streptococcus equi subsp. equi; identical to SEQ ID NO: 13651

SEQ ID NO: 13792 - protein, 165 aa, Streptococcus equi subsp. equi; identical to SEQ ID NO: 13652

SEQ ID NO: 13793 - protein, 473 aa, Streptococcus equi subsp. equi; identical to SEQ ID NO: 13651

SEQ ID NO: 13794 - protein, 165 aa, Streptococcus equi subsp. equi; identical to SEQ ID NO: 13652

SEQ ID NO: 13795 - protein, 473 aa, Streptococcus equi subsp. equi; identical to SEQ ID NO: 13651

SEQ ID NO: 13796 - protein, 165 aa, Streptococcus equi subsp. equi; identical to SEQ ID NO: 13652

SEQ ID NO: 13797 - protein, 473 aa, Streptococcus equi subsp. equi; identical to SEQ ID NO: 13651

SEQ ID NO: 13798 - protein, 165 aa, Streptococcus equi subsp. equi; identical to SEQ ID NO: 13652

SEQ ID NO: 13799 - protein, 473 aa, Streptococcus equi subsp. equi; identical to SEQ ID NO: 13651

SEQ ID NO: 13800 - protein, 165 aa, Streptococcus equi subsp. equi; identical to SEQ ID NO: 13652

SEQ ID NO: 13801 - protein, 473 aa, Streptococcus equi subsp. equi; identical to SEQ ID NO: 13651

SEQ ID NO: 13802 - protein, 165 aa, Streptococcus equi subsp. equi; identical to SEQ ID NO: 13652

SEQ ID NO: 13803 - protein, 473 aa, Streptococcus equi subsp. equi; identical to SEQ ID NO: 13651

SEQ ID NO: 13804 - protein, 165 aa, Streptococcus equi subsp. equi; identical to SEQ ID NO: 13652

SEQ ID NO: 13805 - protein, 473 aa, Streptococcus equi subsp. equi; identical to SEQ ID NO: 13651

SEQ ID NO: 13806 - protein, 165 aa, Streptococcus equi subsp. equi; identical to SEQ ID NO: 13652

SEQ ID NO: 13807 - protein, 473 aa, Streptococcus equi subsp. equi; identical to SEQ ID NO: 13651

SEQ ID NO: 13808 - protein, 165 aa, Streptococcus equi subsp. equi; identical to SEQ ID NO: 13652

SEQ ID NO: 13809 - protein, 473 aa, Streptococcus equi subsp. equi; identical to SEQ ID NO: 13651

SEQ ID NO: 13810 - protein, 165 aa, Streptococcus equi subsp. equi; identical to SEQ ID NO: 13652

SEQ ID NO: 13811 - protein, 473 aa, Streptococcus equi subsp. equi; identical to SEQ ID NO: 13651

SEQ ID NO: 13812 - protein, 165 aa, Streptococcus equi subsp. equi; identical to SEQ ID NO: 13652

SEQ ID NO: 13813 - protein, 473 aa, Streptococcus equi subsp. equi; identical to SEQ ID NO: 13651

SEQ ID NO: 13814 - protein, 165 aa, Streptococcus equi subsp. equi; identical to SEQ ID NO: 13652

SEQ ID NO: 13815 - protein, 473 aa, Streptococcus equi subsp. equi; identical to SEQ ID NO: 13651

SEQ ID NO: 13816 - protein, 165 aa, Streptococcus equi subsp. equi; identical to SEQ ID NO: 13652

SEQ ID NO: 13817 - protein, 473 aa, Streptococcus equi subsp. equi; identical to SEQ ID NO: 13651

SEQ ID NO: 13818 - protein, 165 aa, Streptococcus equi subsp. equi; identical to SEQ ID NO: 13652

SEQ ID NO: 13819 - protein, 473 aa, Streptococcus equi subsp. equi; identical to SEQ ID NO: 13651

SEQ ID NO: 13820 - protein, 165 aa, Streptococcus equi subsp. equi; identical to SEQ ID NO: 13652

SEQ ID NO: 13821 - protein, 473 aa, Streptococcus equi subsp. equi; identical to SEQ ID NO: 13651

SEQ ID NO: 13822 - protein, 165 aa, Streptococcus equi subsp. equi; identical to SEQ ID NO: 13652

SEQ ID NO: 13823 - protein, 473 aa, Streptococcus equi subsp. equi; identical to SEQ ID NO: 13651

SEQ ID NO: 13824 - protein, 165 aa, Streptococcus equi subsp. equi; identical to SEQ ID NO: 13652

SEQ ID NO: 13825 - protein, 473 aa, Streptococcus equi subsp. equi; identical to SEQ ID NO: 13651

SEQ ID NO: 13826 - protein, 165 aa, Streptococcus equi subsp. equi; identical to SEQ ID NO: 13652

SEQ ID NO: 13827 - protein, 473 aa, Streptococcus equi subsp. equi; identical to SEQ ID NO: 13651

SEQ ID NO: 13828 - protein, 165 aa, Streptococcus equi subsp. equi; identical to SEQ ID NO: 13652

SEQ ID NO: 13829 - protein, 473 aa, Streptococcus equi subsp. equi; identical to SEQ ID NO: 13651

SEQ ID NO: 13830 - protein, 165 aa, Streptococcus equi subsp. equi; identical to SEQ ID NO: 13652

SEQ ID NO: 13831 - protein, 473 aa, Streptococcus equi subsp. equi; identical to SEQ ID NO: 13651

SEQ ID NO: 13832 - protein, 165 aa, Streptococcus equi subsp. equi; identical to SEQ ID NO: 13652

SEQ ID NO: 13833 - protein, 473 aa, Streptococcus equi subsp. equi; identical to SEQ ID NO: 13651

SEQ ID NO: 13834 - protein, 165 aa, Streptococcus equi subsp. equi; identical to SEQ ID NO: 13652

SEQ ID NO: 13835 - protein, 473 aa, Streptococcus equi subsp. equi; identical to SEQ ID NO: 13651

SEQ ID NO: 13836 - protein, 165 aa, Streptococcus equi subsp. equi; identical to SEQ ID NO: 13652

SEQ ID NO: 13837 - protein, 473 aa, Streptococcus equi subsp. equi; identical to SEQ ID NO: 13651

SEQ ID NO: 13838 - protein, 165 aa, Streptococcus equi subsp. equi; identical to SEQ ID NO: 13652

SEQ ID NO: 13839 - protein, 473 aa, Streptococcus equi subsp. equi; identical to SEQ ID NO: 13651

SEQ ID NO: 13840 - protein, 165 aa, Streptococcus equi subsp. equi; identical to SEQ ID NO: 13652

SEQ ID NO: 13841 - protein, 473 aa, Streptococcus equi subsp. equi; identical to SEQ ID NO: 13651

SEQ ID NO: 13842 - protein, 165 aa, Streptococcus equi subsp. equi; identical to SEQ ID NO: 13652

SEQ ID NO: 13843 - protein, 473 aa, Streptococcus equi subsp. equi; identical to SEQ ID NO: 13651

SEQ ID NO: 13844 - protein, 165 aa, Streptococcus equi subsp. equi; identical to SEQ ID NO: 13652

SEQ ID NO: 13845 - protein, 473 aa, Streptococcus equi subsp. equi; identical to SEQ ID NO: 13651

SEQ ID NO: 13846 - protein, 165 aa, Streptococcus equi subsp. equi; identical to SEQ ID NO: 13652

SEQ ID NO: 13847 - protein, 473 aa, Streptococcus equi subsp. equi; identical to SEQ ID NO: 13651

SEQ ID NO: 13848 - protein, 165 aa, Streptococcus equi subsp. equi; identical to SEQ ID NO: 13652

SEQ ID NO: 13849 - protein, 473 aa, Streptococcus equi subsp. equi; identical to SEQ ID NO: 13651

SEQ ID NO: 13850 - protein, 165 aa, Streptococcus equi subsp. equi; identical to SEQ ID NO: 13652

SEQ ID NO: 13851 - protein, 473 aa, Streptococcus equi subsp. equi; identical to SEQ ID NO: 13651

SEQ ID NO: 13852 - protein, 165 aa, Streptococcus equi subsp. equi; identical to SEQ ID NO: 13652

SEQ ID NO: 13853 - protein, 473 aa, Streptococcus equi subsp. equi; identical to SEQ ID NO: 13651

SEQ ID NO: 13854 - protein, 165 aa, Streptococcus equi subsp. equi; identical to SEQ ID NO: 13652

SEQ ID NO: 13855 - protein, 473 aa, Streptococcus equi subsp. equi; identical to SEQ ID NO: 13651

SEQ ID NO: 13856 - protein, 165 aa, Streptococcus equi subsp. equi; identical to SEQ ID NO: 13652

SEQ ID NO: 13857 - protein, 473 aa, Streptococcus equi subsp. equi; identical to SEQ ID NO: 13651

SEQ ID NO: 13858 - protein, 165 aa, Streptococcus equi subsp. equi; identical to SEQ ID NO: 13652

SEQ ID NO: 13859 - protein, 473 aa, Streptococcus equi subsp. equi; identical to SEQ ID NO: 13651

SEQ ID NO: 13860 - protein, 165 aa, Streptococcus equi subsp. equi; identical to SEQ ID NO: 13652

SEQ ID NO: 13861 - protein, 473 aa, Streptococcus equi subsp. equi; identical to SEQ ID NO: 13651

SEQ ID NO: 13862 - protein, 165 aa, Streptococcus equi subsp. equi; identical to SEQ ID NO: 13652

SEQ ID NO: 13863 - protein, 473 aa, Streptococcus equi subsp. equi; identical to SEQ ID NO: 13651

SEQ ID NO: 13864 - protein, 165 aa, Streptococcus equi subsp. equi; identical to SEQ ID NO: 13652

SEQ ID NO: 13865 - protein, 473 aa, Streptococcus equi subsp. equi; identical to SEQ ID NO: 13651

SEQ ID NO: 13866 - protein, 165 aa, Streptococcus equi subsp. equi; identical to SEQ ID NO: 13652

SEQ ID NO: 13867 - protein, 473 aa, Streptococcus equi subsp. equi; identical to SEQ ID NO: 13651

SEQ ID NO: 13868 - protein, 165 aa, Streptococcus equi subsp. equi; identical to SEQ ID NO: 13652

SEQ ID NO: 13869 - protein, 473 aa, Streptococcus equi subsp. equi; identical to SEQ ID NO: 13651

SEQ ID NO: 13870 - protein, 165 aa, Streptococcus equi subsp. equi; identical to SEQ ID NO: 13652

SEQ ID NO: 13871 - protein, 473 aa, Streptococcus equi subsp. equi; identical to SEQ ID NO: 13651

SEQ ID NO: 13872 - protein, 165 aa, Streptococcus equi subsp. equi; identical to SEQ ID NO: 13652

SEQ ID NO: 13873 - protein, 473 aa, Streptococcus equi subsp. equi; identical to SEQ ID NO: 13651

SEQ ID NO: 13874 - protein, 165 aa, Streptococcus equi subsp. equi; identical to SEQ ID NO: 13652

SEQ ID NO: 13875 - protein, 473 aa, Streptococcus equi subsp. equi; identical to SEQ ID NO: 13651

SEQ ID NO: 13876 - protein, 165 aa, Streptococcus equi subsp. equi; identical to SEQ ID NO: 13652

SEQ ID NO: 13877 - protein, 473 aa, Streptococcus equi subsp. equi; identical to SEQ ID NO: 13651

SEQ ID NO: 13878 - protein, 165 aa, Streptococcus equi subsp. equi; identical to SEQ ID NO: 13652

SEQ ID NO: 13879 - protein, 473 aa, Streptococcus equi subsp. equi; identical to SEQ ID NO: 13651

SEQ ID NO: 13880 - protein, 165 aa, Streptococcus equi subsp. equi; identical to SEQ ID NO: 13652

SEQ ID NO: 13881 - protein, 473 aa, Streptococcus equi subsp. equi; identical to SEQ ID NO: 13651

SEQ ID NO: 13882 - protein, 165 aa, Streptococcus equi subsp. equi; identical to SEQ ID NO: 13652

SEQ ID NO: 13883 - protein, 473 aa, Streptococcus equi subsp. equi; identical to SEQ ID NO: 13651

SEQ ID NO: 13884 - protein, 165 aa, Streptococcus equi subsp. equi; identical to SEQ ID NO: 13652

SEQ ID NO: 13885 - protein, 473 aa, Streptococcus equi subsp. equi; identical to SEQ ID NO: 13651

SEQ ID NO: 13886 - protein, 165 aa, Streptococcus equi subsp. equi; identical to SEQ ID NO: 13652

SEQ ID NO: 13887 - protein, 473 aa, Streptococcus equi subsp. equi; identical to SEQ ID NO: 13651

SEQ ID NO: 13888 - protein, 165 aa, Streptococcus equi subsp. equi; identical to SEQ ID NO: 13652

SEQ ID NO: 13889 - protein, 473 aa, Streptococcus equi subsp. equi; identical to SEQ ID NO: 13651

SEQ ID NO: 13890 - protein, 165 aa, Streptococcus equi subsp. equi; identical to SEQ ID NO: 13652

SEQ ID NO: 13891 - protein, 473 aa, Streptococcus equi subsp. equi; identical to SEQ ID NO: 13651

SEQ ID NO: 13892 - protein, 165 aa, Streptococcus equi subsp. equi; identical to SEQ ID NO: 13652

SEQ ID NO: 13893 - protein, 473 aa, Streptococcus equi subsp. equi; identical to SEQ ID NO: 13651

SEQ ID NO: 13894 - protein, 165 aa, Streptococcus equi subsp. equi; identical to SEQ ID NO: 13652

SEQ ID NO: 13895 - protein, 473 aa, Streptococcus equi subsp. equi; identical to SEQ ID NO: 13651

SEQ ID NO: 13896 - protein, 165 aa, Streptococcus equi subsp. equi; identical to SEQ ID NO: 13652

SEQ ID NO: 13897 - protein, 473 aa, Streptococcus equi subsp. equi; identical to SEQ ID NO: 13651

SEQ ID NO: 13898 - protein, 165 aa, Streptococcus equi subsp. equi; identical to SEQ ID NO: 13652

SEQ ID NO: 13899 - protein, 473 aa, Streptococcus equi subsp. equi; identical to SEQ ID NO: 13651

SEQ ID NO: 13900 - protein, 165 aa, Streptococcus equi subsp. equi; identical to SEQ ID NO: 13652

SEQ ID NO: 13901 - protein, 473 aa, Streptococcus equi subsp. equi; identical to SEQ ID NO: 13651

SEQ ID NO: 13902 - protein, 165 aa, Streptococcus equi subsp. equi; identical to SEQ ID NO: 13652

SEQ ID NO: 13903 - protein, 473 aa, Streptococcus equi subsp. equi; identical to SEQ ID NO: 13651

SEQ ID NO: 13904 - protein, 165 aa, Streptococcus equi subsp. equi; identical to SEQ ID NO: 13652

SEQ ID NO: 13905 - protein, 473 aa, Streptococcus equi subsp. equi; identical to SEQ ID NO: 13651

SEQ ID NO: 13906 - protein, 165 aa, Streptococcus equi subsp. equi; identical to SEQ ID NO: 13652

SEQ ID NO: 13907 - protein, 473 aa, Streptococcus equi subsp. equi; identical to SEQ ID NO: 13651

SEQ ID NO: 13908 - protein, 165 aa, Streptococcus equi subsp. equi; identical to SEQ ID NO: 13652

SEQ ID NO: 13909 - protein, 473 aa, Streptococcus equi subsp. equi; identical to SEQ ID NO: 13651

SEQ ID NO: 13910 - protein, 165 aa, Streptococcus equi subsp. equi; identical to SEQ ID NO: 13652

SEQ ID NO: 13911 - protein, 473 aa, Streptococcus equi subsp. equi; identical to SEQ ID NO: 13651

SEQ ID NO: 13912 - protein, 165 aa, Streptococcus equi subsp. equi; identical to SEQ ID NO: 13652

SEQ ID NO: 13913 - protein, 473 aa, Streptococcus equi subsp. equi; identical to SEQ ID NO: 13651

SEQ ID NO: 13914 - protein, 165 aa, Streptococcus equi subsp. equi; identical to SEQ ID NO: 13652

SEQ ID NO: 13915 - protein, 473 aa, Streptococcus equi subsp. equi; identical to SEQ ID NO: 13651

SEQ ID NO: 13916 - protein, 165 aa, Streptococcus equi subsp. equi; identical to SEQ ID NO: 13652

SEQ ID NO: 13917 - protein, 473 aa, Streptococcus equi subsp. equi; identical to SEQ ID NO: 13651

SEQ ID NO: 13918 - protein, 165 aa, Streptococcus equi subsp. equi; identical to SEQ ID NO: 13652

SEQ ID NO: 13919 - protein, 473 aa, Streptococcus equi subsp. equi; identical to SEQ ID NO: 13651

SEQ ID NO: 13920 - protein, 165 aa, Streptococcus equi subsp. equi; identical to SEQ ID NO: 13652

SEQ ID NO: 13921 - protein, 473 aa, Streptococcus equi subsp. equi; identical to SEQ ID NO: 13651

SEQ ID NO: 13922 - protein, 165 aa, Streptococcus equi subsp. equi; identical to SEQ ID NO: 13652

SEQ ID NO: 13923 - protein, 473 aa, Streptococcus equi subsp. equi; identical to SEQ ID NO: 13651

SEQ ID NO: 13924 - protein, 165 aa, Streptococcus equi subsp. equi; identical to SEQ ID NO: 13652

SEQ ID NO: 13925 - protein, 473 aa, Streptococcus equi subsp. equi; identical to SEQ ID NO: 13651

SEQ ID NO: 13926 - protein, 165 aa, Streptococcus equi subsp. equi; identical to SEQ ID NO: 13652

SEQ ID NO: 13927 - protein, 473 aa, Streptococcus equi subsp. equi; identical to SEQ ID NO: 13651

SEQ ID NO: 13928 - protein, 165 aa, Streptococcus equi subsp. equi; identical to SEQ ID NO: 13652

SEQ ID NO: 13929 - protein, 473 aa, Streptococcus equi subsp. equi; identical to SEQ ID NO: 13651

SEQ ID NO: 13930 - protein, 165 aa, Streptococcus equi subsp. equi; identical to SEQ ID NO: 13652

SEQ ID NO: 13931 - protein, 473 aa, Streptococcus equi subsp. equi; identical to SEQ ID NO: 13651

SEQ ID NO: 13932 - protein, 165 aa, Streptococcus equi subsp. equi; identical to SEQ ID NO: 13652

SEQ ID NO: 13933 - protein, 473 aa, Streptococcus equi subsp. equi; identical to SEQ ID NO: 13651

SEQ ID NO: 13934 - protein, 165 aa, Streptococcus equi subsp. equi; identical to SEQ ID NO: 13652

SEQ ID NO: 13935 - protein, 473 aa, Streptococcus equi subsp. equi; identical to SEQ ID NO: 13651

SEQ ID NO: 13936 - protein, 165 aa, Streptococcus equi subsp. equi; identical to SEQ ID NO: 13652

SEQ ID NO: 13937 - protein, 473 aa, Streptococcus equi subsp. equi; identical to SEQ ID NO: 13651

SEQ ID NO: 13938 - protein, 165 aa, Streptococcus equi subsp. equi; identical to SEQ ID NO: 13652

SEQ ID NO: 13939 - protein, 473 aa, Streptococcus equi subsp. equi; identical to SEQ ID NO: 13651

SEQ ID NO: 13940 - protein, 165 aa, Streptococcus equi subsp. equi; identical to SEQ ID NO: 13652

SEQ ID NO: 13941 - protein, 473 aa, Streptococcus equi subsp. equi; identical to SEQ ID NO: 13651

SEQ ID NO: 13942 - protein, 165 aa, Streptococcus equi subsp. equi; identical to SEQ ID NO: 13652

SEQ ID NO: 13943 - protein, 473 aa, Streptococcus equi subsp. equi; identical to SEQ ID NO: 13651

SEQ ID NO: 13944 - protein, 165 aa, Streptococcus equi subsp. equi; identical to SEQ ID NO: 13652

SEQ ID NO: 13945 - protein, 473 aa, Streptococcus equi subsp. equi; identical to SEQ ID NO: 13651

SEQ ID NO: 13946 - protein, 165 aa, Streptococcus equi subsp. equi; identical to SEQ ID NO: 13652

SEQ ID NO: 13947 - protein, 473 aa, Streptococcus equi subsp. equi; identical to SEQ ID NO: 13651

SEQ ID NO: 13948 - protein, 165 aa, Streptococcus equi subsp. equi; identical to SEQ ID NO: 13652

SEQ ID NO: 13949 - protein, 473 aa, Streptococcus equi subsp. equi; identical to SEQ ID NO: 13651

SEQ ID NO: 13950 - protein, 165 aa, Streptococcus equi subsp. equi; identical to SEQ ID NO: 13652

SEQ ID NO: 13951 - protein, 473 aa, Streptococcus equi subsp. equi; identical to SEQ ID NO: 13651

SEQ ID NO: 13952 - protein, 165 aa, Streptococcus equi subsp. equi; identical to SEQ ID NO: 13652

SEQ ID NO: 13953 - protein, 473 aa, Streptococcus equi subsp. equi; identical to SEQ ID NO: 13651

SEQ ID NO: 13954 - protein, 165 aa, Streptococcus equi subsp. equi; identical to SEQ ID NO: 13652

SEQ ID NO: 13955 - protein, 473 aa, Streptococcus equi subsp. equi; identical to SEQ ID NO: 13651

SEQ ID NO: 13956 - protein, 165 aa, Streptococcus equi subsp. equi; identical to SEQ ID NO: 13652

SEQ ID NO: 13957 - protein, 473 aa, Streptococcus equi subsp. equi; identical to SEQ ID NO: 13651

SEQ ID NO: 13958 - protein, 165 aa, Streptococcus equi subsp. equi; identical to SEQ ID NO: 13652

SEQ ID NO: 13959 - protein, 473 aa, Streptococcus equi subsp. equi; identical to SEQ ID NO: 13651

SEQ ID NO: 13960 - protein, 165 aa, Streptococcus equi subsp. equi; identical to SEQ ID NO: 13652

SEQ ID NO: 13961 - protein, 473 aa, Streptococcus equi subsp. equi; identical to SEQ ID NO: 13651

SEQ ID NO: 13962 - protein, 165 aa, Streptococcus equi subsp. equi; identical to SEQ ID NO: 13652

SEQ ID NO: 13963 - protein, 473 aa, Streptococcus equi subsp. equi; identical to SEQ ID NO: 13651

SEQ ID NO: 13964 - protein, 165 aa, Streptococcus equi subsp. equi; identical to SEQ ID NO: 13652

SEQ ID NO: 13965 - protein, 473 aa, Streptococcus equi subsp. equi; identical to SEQ ID NO: 13651

SEQ ID NO: 13966 - protein, 165 aa, Streptococcus equi subsp. equi; identical to SEQ ID NO: 13652

SEQ ID NO: 13967 - protein, 473 aa, Streptococcus equi subsp. equi; identical to SEQ ID NO: 13651

SEQ ID NO: 13968 - protein, 165 aa, Streptococcus equi subsp. equi; identical to SEQ ID NO: 13652

SEQ ID NO: 13969 - protein, 473 aa, Streptococcus equi subsp. equi; identical to SEQ ID NO: 13651

SEQ ID NO: 13970 - protein, 165 aa, Streptococcus equi subsp. equi; identical to SEQ ID NO: 13652

SEQ ID NO: 13971 - protein, 473 aa, Streptococcus equi subsp. equi; identical to SEQ ID NO: 13651

SEQ ID NO: 13972 - protein, 165 aa, Streptococcus equi subsp. equi; identical to SEQ ID NO: 13652

SEQ ID NO: 13973 - protein, 473 aa, Streptococcus equi subsp. equi; identical to SEQ ID NO: 13651

SEQ ID NO: 13974 - protein, 165 aa, Streptococcus equi subsp. equi; identical to SEQ ID NO: 13652

SEQ ID NO: 13975 - protein, 473 aa, Streptococcus equi subsp. equi; identical to SEQ ID NO: 13651

SEQ ID NO: 13976 - protein, 165 aa, Streptococcus equi subsp. equi; identical to SEQ ID NO: 13652

SEQ ID NO: 13977 - protein, 473 aa, Streptococcus equi subsp. equi; identical to SEQ ID NO: 13651

SEQ ID NO: 13978 - protein, 165 aa, Streptococcus equi subsp. equi; identical to SEQ ID NO: 13652

SEQ ID NO: 13979 - protein, 473 aa, Streptococcus equi subsp. equi; identical to SEQ ID NO: 13651

SEQ ID NO: 13980 - protein, 165 aa, Streptococcus equi subsp. equi; identical to SEQ ID NO: 13652

SEQ ID NO: 13981 - protein, 473 aa, Streptococcus equi subsp. equi; identical to SEQ ID NO: 13651

SEQ ID NO: 13982 - protein, 165 aa, Streptococcus equi subsp. equi; identical to SEQ ID NO: 13652

SEQ ID NO: 13983 - protein, 473 aa, Streptococcus equi subsp. equi; identical to SEQ ID NO: 13651

SEQ ID NO: 13984 - protein, 165 aa, Streptococcus equi subsp. equi; identical to SEQ ID NO: 13652

SEQ ID NO: 13985 - protein, 473 aa, Streptococcus equi subsp. equi; identical to SEQ ID NO: 13651

SEQ ID NO: 13986 - protein, 165 aa, Streptococcus equi subsp. equi; identical to SEQ ID NO: 13652

SEQ ID NO: 13987 - protein, 473 aa, Streptococcus equi subsp. equi; identical to SEQ ID NO: 13651

SEQ ID NO: 13988 - protein, 165 aa, Streptococcus equi subsp. equi; identical to SEQ ID NO: 13652

SEQ ID NO: 13989 - protein, 473 aa, Streptococcus equi subsp. equi; identical to SEQ ID NO: 13651

SEQ ID NO: 13990 - protein, 165 aa, Streptococcus equi subsp. equi; identical to SEQ ID NO: 13652

SEQ ID NO: 13991 - protein, 473 aa, Streptococcus equi subsp. equi; identical to SEQ ID NO: 13651

SEQ ID NO: 13992 - protein, 165 aa, Streptococcus equi subsp. equi; identical to SEQ ID NO: 13652

SEQ ID NO: 13993 - protein, 473 aa, Streptococcus equi subsp. equi; identical to SEQ ID NO: 13651

SEQ ID NO: 13994 - protein, 165 aa, Streptococcus equi subsp. equi; identical to SEQ ID NO: 13652

SEQ ID NO: 13995 - protein, 473 aa, Streptococcus equi subsp. equi; identical to SEQ ID NO: 13651

SEQ ID NO: 13996 - protein, 165 aa, Streptococcus equi subsp. equi; identical to SEQ ID NO: 13652

SEQ ID NO: 13997 - protein, 473 aa, Streptococcus equi subsp. equi; identical to SEQ ID NO: 13651

SEQ ID NO: 13998 - protein, 165 aa, Streptococcus equi subsp. equi; identical to SEQ ID NO: 13652

SEQ ID NO: 13999 - protein, 473 aa, Streptococcus equi subsp. equi; identical to SEQ ID NO: 13651

SEQ ID NO: 14000 - protein, 165 aa, Streptococcus equi subsp. equi; identical to SEQ ID NO: 13652

SEQ ID NO: 14001 - protein, 473 aa, Streptococcus equi subsp. equi; identical to SEQ ID NO: 13651

SEQ ID NO: 14002 - protein, 165 aa, Streptococcus equi subsp. equi; identical to SEQ ID NO: 13652

SEQ ID NO: 14003 - protein, 473 aa, Streptococcus equi subsp. equi; identical to SEQ ID NO: 13651

SEQ ID NO: 14004 - protein, 165 aa, Streptococcus equi subsp. equi; identical to SEQ ID NO: 13652

SEQ ID NO: 14005 - protein, 473 aa, Streptococcus equi subsp. equi; identical to SEQ ID NO: 13651

SEQ ID NO: 14006 - protein, 165 aa, Streptococcus equi subsp. equi; identical to SEQ ID NO: 13652

SEQ ID NO: 14007 - protein, 473 aa, Streptococcus equi subsp. equi; identical to SEQ ID NO: 13651

SEQ ID NO: 14008 - protein, 165 aa, Streptococcus equi subsp. equi; identical to SEQ ID NO: 13652

SEQ ID NO: 14009 - protein, 473 aa, Streptococcus equi subsp. equi; identical to SEQ ID NO: 13651

SEQ ID NO: 14010 - protein, 165 aa, Streptococcus equi subsp. equi; identical to SEQ ID NO: 13652

SEQ ID NO: 14011 - protein, 473 aa, Streptococcus equi subsp. equi; identical to SEQ ID NO: 13651

SEQ ID NO: 14012 - protein, 165 aa, Streptococcus equi subsp. equi; identical to SEQ ID NO: 13652

SEQ ID NO: 14013 - protein, 473 aa, Streptococcus equi subsp. equi; identical to SEQ ID NO: 13651

SEQ ID NO: 14014 - protein, 165 aa, Streptococcus equi subsp. equi; identical to SEQ ID NO: 13652

SEQ ID NO: 14015 - protein, 473 aa, Streptococcus equi subsp. equi; identical to SEQ ID NO: 13651

SEQ ID NO: 14016 - protein, 165 aa, Streptococcus equi subsp. equi; identical to SEQ ID NO: 13652

SEQ ID NO: 14017 - protein, 473 aa, Streptococcus equi subsp. equi; identical to SEQ ID NO: 13651

SEQ ID NO: 14018 - protein, 165 aa, Streptococcus equi subsp. equi; identical to SEQ ID NO: 13652

SEQ ID NO: 14019 - protein, 473 aa, Streptococcus equi subsp. equi; identical to SEQ ID NO: 13651

SEQ ID NO: 14020 - protein, 165 aa, Streptococcus equi subsp. equi; identical to SEQ ID NO: 13652

SEQ ID NO: 14021 - protein, 473 aa, Streptococcus equi subsp. equi; identical to SEQ ID NO: 13651

SEQ ID NO: 14022 - protein, 165 aa, Streptococcus equi subsp. equi; identical to SEQ ID NO: 13652

SEQ ID NO: 14023 - protein, 473 aa, Streptococcus equi subsp. equi; identical to SEQ ID NO: 13651

SEQ ID NO: 14024 - protein, 165 aa, Streptococcus equi subsp. equi; identical to SEQ ID NO: 13652

SEQ ID NO: 14025 - protein, 473 aa, Streptococcus equi subsp. equi; identical to SEQ ID NO: 13651

SEQ ID NO: 14026 - protein, 165 aa, Streptococcus equi subsp. equi; identical to SEQ ID NO: 13652

SEQ ID NO: 14027 - protein, 473 aa, Streptococcus equi subsp. equi; identical to SEQ ID NO: 13651

SEQ ID NO: 14028 - protein, 165 aa, Streptococcus equi subsp. equi; identical to SEQ ID NO: 13652

SEQ ID NO: 14029 - protein, 473 aa, Streptococcus equi subsp. equi; identical to SEQ ID NO: 13651

SEQ ID NO: 14030 - protein, 165 aa, Streptococcus equi subsp. equi; identical to SEQ ID NO: 13652

SEQ ID NO: 14031 - protein, 473 aa, Streptococcus equi subsp. equi; identical to SEQ ID NO: 13651

SEQ ID NO: 14032 - protein, 165 aa, Streptococcus equi subsp. equi; identical to SEQ ID NO: 13652

SEQ ID NO: 14033 - protein, 473 aa, Streptococcus equi subsp. equi; identical to SEQ ID NO: 13651

SEQ ID NO: 14034 - protein, 165 aa, Streptococcus equi subsp. equi; identical to SEQ ID NO: 13652

SEQ ID NO: 14035 - protein, 473 aa, Streptococcus equi subsp. equi; identical to SEQ ID NO: 13651

SEQ ID NO: 14036 - protein, 165 aa, Streptococcus equi subsp. equi; identical to SEQ ID NO: 13652

SEQ ID NO: 14037 - protein, 473 aa, Streptococcus equi subsp. equi; identical to SEQ ID NO: 13651

SEQ ID NO: 14038 - protein, 165 aa, Streptococcus equi subsp. equi; identical to SEQ ID NO: 13652

SEQ ID NO: 14039 - protein, 473 aa, Streptococcus equi subsp. equi; identical to SEQ ID NO: 13651

SEQ ID NO: 14040 - protein, 165 aa, Streptococcus equi subsp. equi; identical to SEQ ID NO: 13652

SEQ ID NO: 14041 - protein, 473 aa, Streptococcus equi subsp. equi; identical to SEQ ID NO: 13651

SEQ ID NO: 14042 - protein, 165 aa, Streptococcus equi subsp. equi; identical to SEQ ID NO: 13652

SEQ ID NO: 14043 - protein, 473 aa, Streptococcus equi subsp. equi; identical to SEQ ID NO: 13651

SEQ ID NO: 14044 - protein, 165 aa, Streptococcus equi subsp. equi; identical to SEQ ID NO: 13652

SEQ ID NO: 14045 - protein, 473 aa, Streptococcus equi subsp. equi; identical to SEQ ID NO: 13651

SEQ ID NO: 14046 - protein, 165 aa, Streptococcus equi subsp. equi; identical to SEQ ID NO: 13652

SEQ ID NO: 14047 - protein, 473 aa, Streptococcus equi subsp. equi; identical to SEQ ID NO: 13651

SEQ ID NO: 14048 - protein, 165 aa, Streptococcus equi subsp. equi; identical to SEQ ID NO: 13652

SEQ ID NO: 14049 - protein, 473 aa, Streptococcus equi subsp. equi; identical to SEQ ID NO: 13651

SEQ ID NO: 14050 - protein, 165 aa, Streptococcus equi subsp. equi; identical to SEQ ID NO: 13652

SEQ ID NO: 14051 - protein, 473 aa, Streptococcus equi subsp. equi; identical to SEQ ID NO: 13651

SEQ ID NO: 14052 - protein, 165 aa, Streptococcus equi subsp. equi; identical to SEQ ID NO: 13652

SEQ ID NO: 14053 - protein, 473 aa, Streptococcus equi subsp. equi; identical to SEQ ID NO: 13651

SEQ ID NO: 14054 - protein, 165 aa, Streptococcus equi subsp. equi; identical to SEQ ID NO: 13652

SEQ ID NO: 14055 - protein, 473 aa, Streptococcus equi subsp. equi; identical to SEQ ID NO: 13651

SEQ ID NO: 14056 - protein, 165 aa, Streptococcus equi subsp. equi; identical to SEQ ID NO: 13652

SEQ ID NO: 14057 - protein, 473 aa, Streptococcus equi subsp. equi; identical to SEQ ID NO: 13651

SEQ ID NO: 14058 - protein, 165 aa, Streptococcus equi subsp. equi; identical to SEQ ID NO: 13652

SEQ ID NO: 14059 - protein, 473 aa, Streptococcus equi subsp. equi; identical to SEQ ID NO: 13651

SEQ ID NO: 14060 - protein, 165 aa, Streptococcus equi subsp. equi; identical to SEQ ID NO: 13652

SEQ ID NO: 14061 - protein, 473 aa, Streptococcus equi subsp. equi; identical to SEQ ID NO: 13651

SEQ ID NO: 14062 - protein, 165 aa, Streptococcus equi subsp. equi; identical to SEQ ID NO: 13652

SEQ ID NO: 14063 - protein, 473 aa, Streptococcus equi subsp. equi; identical to SEQ ID NO: 13651

SEQ ID NO: 14064 - protein, 165 aa, Streptococcus equi subsp. equi; identical to SEQ ID NO: 13652

SEQ ID NO: 14065 - protein, 473 aa, Streptococcus equi subsp. equi; identical to SEQ ID NO: 13651

SEQ ID NO: 14066 - protein, 165 aa, Streptococcus equi subsp. equi; identical to SEQ ID NO: 13652

SEQ ID NO: 14067 - protein, 473 aa, Streptococcus equi subsp. equi; identical to SEQ ID NO: 13651

SEQ ID NO: 14068 - protein, 165 aa, Streptococcus equi subsp. equi; identical to SEQ ID NO: 13652

SEQ ID NO: 14069 - protein, 473 aa, Streptococcus equi subsp. equi; identical to SEQ ID NO: 13651

SEQ ID NO: 14070 - protein, 165 aa, Streptococcus equi subsp. equi; identical to SEQ ID NO: 13652

SEQ ID NO: 14071 - protein, 473 aa, Streptococcus equi subsp. equi; identical to SEQ ID NO: 13651

SEQ ID NO: 14072 - protein, 165 aa, Streptococcus equi subsp. equi; identical to SEQ ID NO: 13652

SEQ ID NO: 14073 - protein, 473 aa, Streptococcus equi subsp. equi; identical to SEQ ID NO: 13651

SEQ ID NO: 14074 - protein, 165 aa, Streptococcus equi subsp. equi; identical to SEQ ID NO: 13652

SEQ ID NO: 14075 - protein, 473 aa, Streptococcus equi subsp. equi; identical to SEQ ID NO: 13651

SEQ ID NO: 14076 - protein, 165 aa, Streptococcus equi subsp. equi; identical to SEQ ID NO: 13652

SEQ ID NO: 14077 - protein, 473 aa, Streptococcus equi subsp. equi; identical to SEQ ID NO: 13651

SEQ ID NO: 14078 - protein, 165 aa, Streptococcus equi subsp. equi; identical to SEQ ID NO: 13652

SEQ ID NO: 14079 - protein, 473 aa, Streptococcus equi subsp. equi; identical to SEQ ID NO: 13651

SEQ ID NO: 14080 - protein, 165 aa, Streptococcus equi subsp. equi; identical to SEQ ID NO: 13652

SEQ ID NO: 14081 - protein, 473 aa, Streptococcus equi subsp. equi; identical to SEQ ID NO: 13651

SEQ ID NO: 14082 - protein, 165 aa, Streptococcus equi subsp. equi; identical to SEQ ID NO: 13652

SEQ ID NO: 14083 - protein, 473 aa, Streptococcus equi subsp. equi; identical to SEQ ID NO: 13651

SEQ ID NO: 14084 - protein, 165 aa, Streptococcus equi subsp. equi; identical to SEQ ID NO: 13652

SEQ ID NO: 14085 - protein, 473 aa, Streptococcus equi subsp. equi; identical to SEQ ID NO: 13651

SEQ ID NO: 14086 - protein, 165 aa, Streptococcus equi subsp. equi; identical to SEQ ID NO: 13652

SEQ ID NO: 14087 - protein, 473 aa, Streptococcus equi subsp. equi; identical to SEQ ID NO: 13651

SEQ ID NO: 14088 - protein, 165 aa, Streptococcus equi subsp. equi; identical to SEQ ID NO: 13652

SEQ ID NO: 14089 - protein, 473 aa, Streptococcus equi subsp. equi; identical to SEQ ID NO: 13651

SEQ ID NO: 14090 - protein, 165 aa, Streptococcus equi subsp. equi; identical to SEQ ID NO: 13652

SEQ ID NO: 14091 - protein, 473 aa, Streptococcus equi subsp. equi; identical to SEQ ID NO: 13651

SEQ ID NO: 14092 - protein, 165 aa, Streptococcus equi subsp. equi; identical to SEQ ID NO: 13652

SEQ ID NO: 14093 - protein, 473 aa, Streptococcus equi subsp. equi; identical to SEQ ID NO: 13651

SEQ ID NO: 14094 - protein, 165 aa, Streptococcus equi subsp. equi; identical to SEQ ID NO: 13652

SEQ ID NO: 14095 - protein, 473 aa, Streptococcus equi subsp. equi; identical to SEQ ID NO: 13651

SEQ ID NO: 14096 - protein, 165 aa, Streptococcus equi subsp. equi; identical to SEQ ID NO: 13652

SEQ ID NO: 14097 - protein, 473 aa, Streptococcus equi subsp. equi; identical to SEQ ID NO: 13651

SEQ ID NO: 14098 - protein, 165 aa, Streptococcus equi subsp. equi; identical to SEQ ID NO: 13652

SEQ ID NO: 14099 - protein, 481 aa, Escherichia coli
MSVQFSAEVEAFIRTYVKDLEEGVAAVFAGAGLSRTSGFVNWSELLREIAEELGLSVELEHDLISVAQYHVNKNNSSTGLARKILEEFSEQAEPSEAHKILARLPIRTYWTTNYDTLIEDSLKENYRVADIKRRTDDLISTRPKRDAVVYKMHGDVSSPGDAILYKAQYEQYYKTHEGFVTALSGDLISKTFLFIGFSFTDPNLDYILSRLHVPEKHRRRHYCFLRKEPSLPQGNEDEAGAMYRQRRQEHHIRDLLRFGIQAVLVNEYDDIPLILKEIESRFLKKTIFISGSAEEYGAWDKQEALNFVHILSSSLVKNGYRVVNGFGWGIGSAVINGALEAIYSKPDKYSEEQLIMRPFPQHSSNDKALSELWDEYRQRMIGLSGIAIFLFGNKLHDGRIVNADGVRREFQIAQETGVVVLPLGVTGYMAKELADEMLTDPSKHFVRYPWLEKEVAQLADLSANRANIEMKVLEILKKLGG

SEQ ID NO: 14100 - protein, 155 aa, Escherichia coli; identical to SEQ ID NO: 13289

SEQ ID NO: 14101 - protein, 481 aa, Escherichia coli; identical to SEQ ID NO: 14099

SEQ ID NO: 14102 - protein, 155 aa, Escherichia coli; identical to SEQ ID NO: 13289

SEQ ID NO: 14103 - protein, 491 aa, Bacillus pumilus
MKTKKLNLTQNQKIFVRDFVSALKNNDAAIFAGAGLSIPSGMMSWNELLHDAAEELELKKDSITDLATLAQYYQNHRGTRLDVAQLIMDSISQYAEPNENQKLIAQLPIETVWTTNYDDLLERAYRSAYKSTSVKISPEDFSLSNGKKDVTIYKMHGDRTQPTKAVITKNDYETYNDTHLVYTTALKGDLVEKKFLFIGFSFEDPNLDYILARIKALVGENQPTHYFFIEEVKQKKDESENDFNLRKKIQELKIIDLKRYGIRAVLLNSYNDISEILSIIKRMSSVNNIFLSGAKEFPDGEVDSDSEQLFNKLVKKITKGIVSKRNKIISGFGQGVGSLVINTVLEEVSNNQWFKLDDKLKIYPFPQNKNTNWTMYRKEILKNAGISIFLFGEKKSKNGDIVISDGMLEEFQIAHEYGIKILPLGCTGGASKKIFEMVLEKPHEYYGNDLELIEMIRNLGNHDLKNTDDVTSVANLTLEIVSKIQKLKGDS

SEQ ID NO: 14104 - protein, 165 aa, Bacillus pumilus
MVKRQVFFSFEYNKDNWRAAQVKNMGLVDGSSTFSANEWEEVKEKSDKKIKEWIDSQLSKRSCLIVLIGATTSSRKWIKYEIEKAYELNKGIVGVYVNKLNDSAGNQTQRGDNPFYNILTNDGTRLSSHVTCYESPSFTSKFVYSDIKENLPNLIEDALNNKAPQ

SEQ ID NO: 14105 - protein, 482 aa, Achromobacter sp. 2789STDY5608606
MTKAAMTRFLKEYPDALNDGVGAVFVGAGVSMAAGYPSWSTLLQEIGDELGVSSKNIQDLAALAQWSIQESGGATRVRNVIKEHIGVDHPLPEALQIVARFPARHIWTTNYDRLIERAFREIDRPIDSVSAAKDLALKATPGATRLYKMHGSVDRLDDVVISTDDYELFRSRRGAYLPLLHAHLTSMSMLFIGLSFTDPNIRHVLSLIRESFTDAPPEHFAIVRPPKREDFDSDDEFRARITQHKLWAKDLRRYGLAAVEIDDYDEVPDLLRQIERRVAARRVWISGSWPVDTGGPEAANIYSVAEDIGRRIGHAGLDLVSGAGLIVGSAAISGFLDALRYGGGWDLDRRLIARPFPQPITGEQAPDAQWTALRRELARQAGIVIFLGGAKAKDGKLIPASGVLEEFSLAEAAGAFLLPIAVTGGAAKEIADRLLGSSLPATGANATRPTDAELRQLSDPSVPHDTLVKNIFDILKRIAKPA

SEQ ID NO: 14106 - protein, 161 aa, Achromobacter sp. 2789STDY5608606
MTRKVFYSFHYQRDGWRASKIRNIGVVEGNPPASDNKWEEVLRGGDAGIQRWIDAQLENRTCTIVLIGAETANRRWVKYEIEKSWNSGKGVFGIRIHKILDHKQQTSIAGANPFDGLSLKDGRKLSTLAKVYDPPYASSADVYDYISKNLAGWIETAIADR

SEQ ID NO: 14107 - protein, 193 aa, Achromobacter sp. 2789STDY5608606
MAKRVFFSFHYKDVIDFRANVVRKHWVLKDDREEAGYFDASIWEEAKKQNEIGLKRLINGALEGTSTTCVLIGSDTYARPWVRYEIIRSIYRGNRVFGVHINQIKGKDQLIKTNGPNPFDYLALKYSDDGTKVEVFEAVNGKWVTYTKFPNYTLKKTASVQRWGKLFKLSSLGYKIYCWSADDGYNNFATWVG

SEQ ID NO: 14108 - protein, 155 aa, Achromobacter sp. 2789STDY5608606
MAEQRNVFISHVHADDAGLQKFKDLLAPKGIDVRDSSIHTGKFNNATDEHYIKTQILAPAINWAGVFVCYVSPRTKDSEWVNWEIEYAAKQGKRIVGVWEHGEKECDLPEALKQHADAMVGWNGDAIIDAINGKDTWEKPDGGPCDPVPLKRHPC

SEQ ID NO: 14109 - protein, 380 aa, Achromobacter sp. 2789STDY5608606
MSVLYQLAVLGEPTDEQVNELEQVVAHAVQLFGLRLGHEVGWEICPTLFNPDQQKSSAAVFYGAANAPRANVEQLLKRGIPILPVASETERVTAEIPELLRPLNCLAYNAGGAQRVATALLECAALLPRQRRVFVSYRRGEAREAALQLFDAFSARLFDVFLDTHGIAPAEDFQAMLWHRLCDSDVLVMLDTPGYFESRWTSAEFGRALAKGISVLRIGWPDSTPSVRTATASRAELLPEEVNGDTGRLADTAIERICLQLEAVRSQSQAVRSVNLVSNLRNAIETIGGSVAGVGLNKAVYIQLPDGKEVVVYPTVGVPTSTTLHDASINSPDRSAAVVFDHVGLHPRWLGHLDWLGNHIQTARWVKASEAGWQFADWEA

SEQ ID NO: 14110 - protein, 473 aa, Achromobacter sp. 2789STDY5608615
MSPQHVINGFIKEFVQDLHNGSAAIFAGAGMSKGSGYVDWPELLRDIANELGLDVAKEHDLISLAQFHVNNKRTADGLSKKILREFSEQAEPSEVHDIIARLPIYSFWTTNYDTLIEDSLRRAYRVPDIKSQVDQLSLSRPKRDAIVYKMHGDVQMAQDAVIYKEQYEKYYLTHASFITALSGDLVSKTFLFIGFSFTDPNLDYVLSRLHGGATKRTHYCFMREAHRDVGDDDELFRYKIRKQELRIEDLKRFGIQTLLVDNYSDINDILKKVEALYRKRTVFFSGSAEDYGEWARQDAQNFIHDVAANCVRANCRVVNGFGWGVGSAVINGALEAIYGDPQKYSEAQLIVRPFPQHGSNLKDLWEQYRQRMISLAGVTLFFFGNKRDGGKVVNANGVRREFEIALEHHLLPIPVGATGFMAEELWNEISADLDKYYGGYKWVIPMVQKLVDAKTPPNEMVKTITEIIKQLNK

SEQ ID NO: 14111 - protein, 146 aa, Achromobacter sp. 2789STDY5608615
MARKVFFSFKYDDVHRAMNVRNSNVIGGIMKSGFIDKADFEKVEREGNRAIQTWIDNQLNGTSVTVVLVGANTHKSKWVKYEIDQSIARGNGVLTIDISKIADMQGVTTDCCSLRVPGYKHYYWNNDNGRANLGAWVDAAAKAAGK

SEQ ID NO: 14112 - protein, 113 aa, Achromobacter sp. 2789STDY5608615
MELYIDWQDPHMPDLPDGTTADRIRTVIKRAEIFLFLATNDSMSSRWCPWELGFADGVKRNEQIALIATRDTSGNYYGNEYLHLYRRIDQATASNALQWFPKGSQSPQNLTSF

SEQ ID NO: 14113 - protein, 486 aa, Listeria monocytogenes
MDLTREQENMIKDYVSSIREGKASIFAGAGLSIPSGAPSWKDLLRDIAYELELNVDKETDLISLAQYYINKRSKAQIGDLISSNFGNHLKCTINQQLIAQLPIDTIWTTNYDELLENAFKNEHKKIAVKRSVKDFSIVGTRNDATIYKMHGCVTQATDVIISKKDYERYNDTHSVYTTALKGDLVSRTFLFIGFSFEDPNLDYVLGRISFLMGENKPKHYFFVKELEKEVGESEEDFSYRRVRQKLKIDDLSSRYGIYAVMVKEYEDITTILKIINLKVRINNIFISGAIETFGILEEKCTHDFISSLASKLIEKNYKLVSGFGVGVGSDVIHGVLSKISSDPSMRLDDHLKVYPFPQTVATKDRKQVWQEYREHILEEVGINIILFGNKIIDGKCIISDGVIEEFEIACNRGIKIIPVGCTGDAAKHINDIVLNEPEKYYGNNEKLIGMIKSLNEYQLTQENINSIIDDIINIIIEIQNKEYGVN

SEQ ID NO: 14114 - protein, 202 aa, Listeria monocytogenes
MARKTFISYKYSESRDLRDTILDSLGEDARYYSGETASSPDLSSTTVENIKSSLKDMIYSTTVTIVIISPQMINSRWIEWELEYSLKSIKRGDNNSSTNGIVGVIKKVDGNYDWLKTLSKGSDGCTSTSYITDKMFPIINNNRFNQDPPLYSCDNCKTVNRLSGSYISLIPEGEFLNNPNYYIENAYAKSKALTGYKIKKEA

SEQ ID NO: 14115 - protein, 486 aa, Listeria monocytogenes; identical to SEQ ID NO: 14113

SEQ ID NO: 14116 - protein, 202 aa, Listeria monocytogenes; identical to SEQ ID NO: 14114

SEQ ID NO: 14117 - protein, 486 aa, Listeria monocytogenes; identical to SEQ ID NO: 14113

SEQ ID NO: 14118 - protein, 202 aa, Listeria monocytogenes; identical to SEQ ID NO: 14114

SEQ ID NO: 14119 - protein, 461 aa, Eubacterium ventriosum ATCC 27560
MFIGAGFSKSVGYVDWKNLLKDVADDLGLDIDKEYDLVSLAQYCYNKNRNRSIINDLILDEFNKEKGIDENHRIIARLPIFTYWTTNYDSLIEDALEEAQRIVDIKYNNKQLSLTKQHRDAVIYKMHGDKNNPDEAILIKDDYEKYYREHAQFITALSGDLISKTFLFIGFSFSDPNIDYILSRVRIDYGEQNNRQHYAIMRKVNEKDYDNRAEYEYAQRKYDFFIEDLKRYNIRVLLIDEYEEITDILNEIDKRLNHNNVFISGSAQEYGEYTEKEALEFIESLSKELILQDFNIISGFGLGVGSSVIIGALQEIYMKRKSINEDRLLLRPFPQGIEDNNSRQILWKKYREDMISRSGVSIFLFGNKLVDGEIVLANGVESEFEIALERHCLIVPVGCTGYMAKEIWKKVDSNMSDFYTNVDDVLIEAFKKLNSKSSKSELIPDILSFIKLFENGKYSPR

SEQ ID NO: 14120 - protein, 203 aa, Eubacterium ventriosum ATCC 27560
MAHKTFISYKWSEAQDLRDDIITALGEDATYYKGETSESPDLTDTSTENIKKNLKDMMYDTSVTIVILSPNMKESKWIDWEIEYCLKDITRKDRTSHTNGVVAVIMKVDNSYEWFKKSGTNCHGSSTVSYELDKVFDIISQNHFNSNPEQWHCDKCKTYDWLNGSYITFVEEETFLDDPEKYINNAYDKSENDASGYDLVKQR

SEQ ID NO: 14121 - protein, 188 aa, Eubacterium ventriosum ATCC 27560
MGKKIFVSYKYKDNNVKELPNVTQPTWPCDYVDYIRNNVLKDDDIYKGENSDEDISAWSEDKIWNHLKGKIYDSTITIVLVSPNMKEDCKWQRSQWIPWEISYSVKETTRNNRMSHRNALLVVVLPDKLGSYKYYDKKNLFPILKSNIDNGYAYVVTWEDFLKYASTDISIAFGHKDSTPSYEIVKSL

SEQ ID NO: 14122 - protein, 282 aa, Eubacterium ventriosum ATCC 27560
MFAGFNLEINEHFFCSQKKTFSEYQKIGKEHLASQGKGVEKALSEYIKNNIVDGSEIQKDWFPEIEADIFLSHSSKDTELVNAIAGWLYDSFGLKCFVDSNVWCYAGNIADMLNSDYSNKRSDVDGGYLYDHKKCLKVSEHVNTMLNVALQKMIDKSESVFLINTDKSIHINRDSNSIDLTYSPWIYMELVCSEIVRKKPLSFYRYDKKVCHAISEKYQFDEINNDLTISYNAPTQYLIKINQDVLKKWKNQFNGKHPFPLDILYNDYFESEVEKNKKYFKY

SEQ ID NO: 14123 - protein, 484 aa, Serratia marcescens
MPERDIELFIRDYVNDIKAGSAALFAGAGLSIPAGFVSWKELIGDIAYELGLDIEKESDLISLAQYHLNEKGNRHKINQKIITEFAEQAEETENHRIIARLPIASLWTTNYDDLIEKTYARYNRVCDVKTTPESLTNNIHKRDVVLYKMHGDYRTPNQAIITREQYETYSRTHLPFINMLMAELTAKTFLFIGFSFEDPNLQYVLSRLYAQYGEGKRNHFCIMRRVQPGDSGCEDQASYDYNSRKQSLMINDLRRYGIQTLLVEDYRQITDLLYAIETQFKKSTVFISGSADNYHPYAREESIQFIHRLARLLIRKQYRIVNGFGWGVGTAVINGALEAIYASGGKISESQLVLRPFPQFASGGITLPALWHEYRQNMISLSGIAVFLFGNKRNAEGECVLADGLLKEFHIAAEQGCVCIPIGCTGGASAEIYRKIKEEMKDTLYHRHPVAMNLLDQLNEPGSLAEKKTCLLALIDIITKDNPR

SEQ ID NO: 14124 - protein, 163 aa, Serratia marcescens
MTRKCFYSFHYEPDNWRASQIREMGSLEGNRPATDNDWEEVKKGGDDAIAAWIKGQLDNRSCAVILAGKDTANRKWINFEICEAWKKGMGVLVVYIHNLKDSAGEQARKGNNPLDHIKLGDRKLSGIAKAYDPPYLTSTNVYNHIKENLAEWVEEAIRIRENY

SEQ ID NO: 14125 - protein, 484 aa, Serratia marcescens
MPVRDIELFIRDYVNDIKAGSAALFAGAGLSIPAGFVSWKELIGDIAYELGLDIEKESDLISLAQYHLNEKGNRHKINQKIITEFAEQAEETENHRIIARLPIASLWTTNYDDLIEKTYARYNRVCDVKTTPESLTNNIHKRDVVLYKMHGDYRTPNQAIITREQYETYSRTHLPFINMLMAELTAKTFLFIGFSFEDPNLQYVLSRLYAQYGEGKRNHYCIMRRVQPGDSGSEDQASYDYNSRKQSLMINDLRRYGIQTLLVEDYRQITDLLYAIETQFKKSTVFISGSADNYHPYAREESIQFIHRLARLLIRKQYRIVNGFGWGVGTAVINGALEAIYASGGKISESQLVLRPFPQFASGGITLPALWHEYRQNMISLSGIAVFLFGNKRNAEGECVLADGLLKEFHIAAEQGCVCIPIGCTGGASAEIYRKIKEEMKDTLYHRHPVAMNLLDQLNEPGSLAEKKTCLLALIDIITKDNPR

SEQ ID NO: 14126 - protein, 163 aa, Serratia marcescens
MTRKCFYSFHYEPDNWRASQIREMGSLEGNRPATDNDWEEVKKGGDDAIAAWIKGQLDNRSCAVILAGKDTANRKWINFEICEAWKKGMGVLVVYIHNLKDSAGEQARKGNNPLDHIKLGDTKLSAIAKAYDPPYLTSTNVYNHIKENLAEWVEEAIRIRENY

SEQ ID NO: 14127 - protein, 484 aa, Serratia marcescens
MPERDIELFIRDYVNDIKAGSAALFAGAGLSIPAGFVSWKELIGDIAYELGLDIEKESDLISLAQYHLNEKGNRHKINQKIITEFAEQAEETENHRIIARLPIASLWTTNYDDLIEKTYARYNRVCDVKTTPESLTNNIHKRDVVLYKMHGDYRTPNQAIITREQYETYSRTHLPFINMLMAELTAKTFLFIGFSFEDPNLQYVLSRLYAQYGEGKRNHYCIMRRVQPGDSGSEDQASYDYNSRKQSLMINDLRRYGIQTLLVEDYRQITDLLYAIETQFKKSTVFISGSADNYHPYAREESIQFIHRLARLLIRKQYRIVNGFGWGVGTAVINGALEAIYASGGKISESQLVLRPFPQFASGGITLPALWHEYRQNMISLSGIAVFLFGNKRNAEGECVLADGLLKEFHIAAEQGCVCIPIGCTGGASAEIYRKIKEEMKDTLYHRHPVAMNLLDQLNEPGSLAEKKTCLLALIDIITKDNPR

SEQ ID NO: 14128 - protein, 163 aa, Serratia marcescens; identical to SEQ ID NO: 14126

SEQ ID NO: 14129 - protein, 484 aa, Serratia marcescens
MPERDIELFIRDYVNDIKAGSAALFAGAGLSIPAGFVSWKELIGDIAYELGLDIEKESDLISLAQYHLNEKGNRHKINQKIITEFAEQAEETENHRIIARLPIASLWTTNYDDLIEKTYARYNRVCDVKTTPESLTNNIHKRDVVLYKMHGDYRTPNQAIITREQYETYSRTHLPFINMLMAELTAKTFLFIGFSFEDPNLQYVLSRLYAQYGEGKRNHYCIMRRVQPGDSGSEDQASYDYNSRKQSLMINDLRRYGIQTLLVEDYRQITDLLYAIETQFKKSTVFISGSADNYQPYAREESIQFIHRLARLLIRKQYRIVNGFGWGVGTAVINGALEAIYASGGKISESQLVLRPFPQFASGGITLPALWHEYRQNMISLSGIAVFLFGNKRNAEGECVLADGLLKEFHIAAEQGCVCIPIGCTGGASAEIYRKIKEEMKDTLYHRHPVAMNLLDQLNEPGSLAEKKTCLLALIDIITKDNPR

SEQ ID NO: 14130 - protein, 163 aa, Serratia marcescens; identical to SEQ ID NO: 14126

SEQ ID NO: 14131 - protein, 484 aa, Serratia marcescens
MPERDIELFIRDYVNDIKSGSAALFAGAGLSIPAGFVSWKELISDIAYELGLDIEKESDLISLAQYHLNEKGNRHKINQKIITEFAEQAEETENHRIIARLPIASLWTTNYDDLIEKTYARYNRVCDVKTTPESLTNNIHKRDVVLYKMHGDYKTPNQAVITREQYETYSRSHQPFVNMLMAELTAKTFLFIGFSFEDPNLQYVLSRLYAQYGEGKRNHYCIMRRVQLGDSGSEEQASCDYNSRKQGLMINDLRRYGIQTLLVNDYREITDLLYAIETQFKKSTVFISGSADNYQPYAREESIQFIHRLARQLIRKQYRIVNGFGWGIGTAVINGALEAIYDSQGKISESQLVLRPFPQFASGGITLPALWHEYRQNMISLSGIAVFLFGNKRNTEGECVLADGLLKEFHIAAEQGCVCIPIGCTGGASAEIYRKIKEEMKETLYHRNPTAMNLLDQLNEPGSLAEKKKCLLALIDIITKDNPR

SEQ ID NO: 14132 - protein, 163 aa, Serratia marcescens
MTRKCFYSFHYEPDNWRASQIREMGTLEGNRPATDNDWEEVKKGGNDAIADWIKGQLDNRSCAVILAGKDTANRKWINFEICEAWKKGMGVLVIYIHNLKDSAGEKTQKGNNPLDHIKLGDAKLSTIAKAYDPPYSTSTNVYNHIKENLAEWVEEAIRIRKNY

SEQ ID NO: 14133 - protein, 484 aa, Serratia marcescens
MPERDIELFIRDYVNDIKAGSAALFAGAGLSIPAGFVSWKELIGDIAYELGLDIEKESDLISLAQYHLNEKGNRHKINQKIITEFAEQAEETENHRIIARLPIASLWTTNYDDLIEKTYARYNRVCDVKTTPESLTNNIHKRDVVLYKMHGDYRTPNQAIITREQYETYSRTHLPFINMLMAELTAKTFLFIGFSFEDPNLQYVLSRLYAQYGEGKRNHYCIMRRVQPGDSGSEDQASYDYNSRKQSLMINDLRRYGIQTLLVEDYRQITDLLYAIETQFKKSTVFISGSADNYHPYAREESIQFIHRLARLLIRKQYRIVNGFGWGVGTAVINGALEAIYASGGKISESQLVLRPFPQFASGSITLPALWHEYRQNMISLSGIAVFLFGNKRNAEGECVLADGLLKEFHIAAEQGCVCIPIGCTGGASAEIYRKIKEEMKDTLYHRHPVAMNLLDQLNEPGSLAEKKTCLLALIDIITKDNPR

SEQ ID NO: 14134 - protein, 163 aa, Serratia marcescens
MTRKCFYSFHYEPDNWRASQIREMGSLEGNRPAMDNDWEEVKKGGDDAIAAWIKGQLDNRSCAVILAGKDTANRKWINFEICEAWKKGMGVLVVYIHNLKDSAGEQARKGNNPLDHIKLGDRKLSGIAKAYDPPYLTSTNVYNHIKENLAEWVEEAIRIRENY

SEQ ID NO: 14135 - protein, 484 aa, Serratia marcescens; identical to SEQ ID NO: 14125

SEQ ID NO: 14136 - protein, 163 aa, Serratia marcescens; identical to SEQ ID NO: 14126

SEQ ID NO: 14137 - protein, 484 aa, Serratia marcescens; identical to SEQ ID NO: 14133

SEQ ID NO: 14138 - protein, 163 aa, Serratia marcescens; identical to SEQ ID NO: 13318

SEQ ID NO: 14139 - protein, 484 aa, Serratia marcescens; identical to SEQ ID NO: 14125

SEQ ID NO: 14140 - protein, 163 aa, Serratia marcescens; identical to SEQ ID NO: 14126

SEQ ID NO: 14141 - protein, 484 aa, Serratia marcescens; identical to SEQ ID NO: 14125

SEQ ID NO: 14142 - protein, 163 aa, Serratia marcescens; identical to SEQ ID NO: 14126

SEQ ID NO: 14143 - protein, 484 aa, Serratia marcescens; identical to SEQ ID NO: 14129

SEQ ID NO: 14144 - protein, 163 aa, Serratia marcescens; identical to SEQ ID NO: 14126

SEQ ID NO: 14145 - protein, 484 aa, Serratia marcescens; identical to SEQ ID NO: 14133

SEQ ID NO: 14146 - protein, 163 aa, Serratia marcescens; identical to SEQ ID NO: 14124

SEQ ID NO: 14147 - protein, 484 aa, Serratia marcescens; identical to SEQ ID NO: 14125

SEQ ID NO: 14148 - protein, 163 aa, Serratia marcescens; identical to SEQ ID NO: 14126

SEQ ID NO: 14149 - protein, 484 aa, Serratia marcescens; identical to SEQ ID NO: 14123

SEQ ID NO: 14150 - protein, 163 aa, Serratia marcescens; identical to SEQ ID NO: 14124

SEQ ID NO: 14151 - protein, 484 aa, Serratia marcescens; identical to SEQ ID NO: 14125

SEQ ID NO: 14152 - protein, 163 aa, Serratia marcescens; identical to SEQ ID NO: 14126

SEQ ID NO: 14153 - protein, 484 aa, Serratia marcescens; identical to SEQ ID NO: 14125

SEQ ID NO: 14154 - protein, 163 aa, Serratia marcescens; identical to SEQ ID NO: 14126

SEQ ID NO: 14155 - protein, 484 aa, Serratia marcescens; identical to SEQ ID NO: 14127

SEQ ID NO: 14156 - protein, 163 aa, Serratia marcescens; identical to SEQ ID NO: 14126

SEQ ID NO: 14157 - protein, 484 aa, Serratia marcescens; identical to SEQ ID NO: 14131

SEQ ID NO: 14158 - protein, 163 aa, Serratia marcescens; identical to SEQ ID NO: 14132

SEQ ID NO: 14159 - protein, 484 aa, Serratia marcescens; identical to SEQ ID NO: 14133

SEQ ID NO: 14160 - protein, 163 aa, Serratia marcescens; identical to SEQ ID NO: 14124

SEQ ID NO: 14161 - protein, 484 aa, Serratia marcescens; identical to SEQ ID NO: 14131

SEQ ID NO: 14162 - protein, 163 aa, Serratia marcescens; identical to SEQ ID NO: 14132

SEQ ID NO: 14163 - protein, 484 aa, Serratia marcescens; identical to SEQ ID NO: 14133

SEQ ID NO: 14164 - protein, 163 aa, Serratia marcescens; identical to SEQ ID NO: 13318

SEQ ID NO: 14165 - protein, 484 aa, Serratia marcescens; identical to SEQ ID NO: 14129

SEQ ID NO: 14166 - protein, 163 aa, Serratia marcescens; identical to SEQ ID NO: 14126

SEQ ID NO: 14167 - protein, 484 aa, Serratia marcescens; identical to SEQ ID NO: 14133

SEQ ID NO: 14168 - protein, 163 aa, Serratia marcescens; identical to SEQ ID NO: 13318

SEQ ID NO: 14169 - protein, 484 aa, Serratia marcescens; identical to SEQ ID NO: 14133

SEQ ID NO: 14170 - protein, 163 aa, Serratia marcescens; identical to SEQ ID NO: 13318

SEQ ID NO: 14171 - protein, 484 aa, Serratia marcescens; identical to SEQ ID NO: 14125

SEQ ID NO: 14172 - protein, 163 aa, Serratia marcescens; identical to SEQ ID NO: 14126

SEQ ID NO: 14173 - protein, 306 aa, Serratia marcescens
MLMAELTAKTFLFIGFSFEDPNLQYVLSRLYAQYGEGKRNHYCIMRRVQAGDSGSEDQASYDYNSRKQSLMINDLRRYGIQTLLVEDYRQITDLLYAIETQFKKSTVFISGSADNYHPYAREESIQFIHRLARLLIRKQYRIVNGFGWGVGTAVINGALEAIYASGGKISESQLVLRPFPQFASGSITLPALWHEYRQNMISLSGIAVFLFGNKRNAEGECVLADGLLKEFHIAAEQGCVCIPIGCTGGASAEIYRKIKEEMKDTLYHRHPVAMNLLDQLNEPGSLAEKKTCLLALIDIITKDNPR

SEQ ID NO: 14174 - protein, 163 aa, Serratia marcescens; identical to SEQ ID NO: 14124

SEQ ID NO: 14175 - protein, 484 aa, Serratia marcescens; identical to SEQ ID NO: 14123

SEQ ID NO: 14176 - protein, 163 aa, Serratia marcescens; identical to SEQ ID NO: 14124

SEQ ID NO: 14177 - protein, 484 aa, Serratia marcescens
MFNRDIELFIRDYVNDIKAGSAALFAGAGLSIPTGFVSWKELIGDIAYELGLDIEKESDLISLAQYHLNEKGNRHKINQKIITEFAEQAEETENHRIIARLPIASLWTTNYDDLIEKTYARYNRVCDVKTTPESLTNNIHKRDVVLYKMHGDYRNPNQAIITREQYETYSRTHLPFINMLMAELTAKTFLFIGFSFEDPNLQYVLSRLYAQYGEGQRNHYCIMRRVQLGDSGSEDQASCDYNSRKQGLMINDLRRYGIQTLLVDDYRQITDLLYAIETQFKKSTVFISGSADNYQPYAREESIQFIHRLARLLIRKQYRIVNGFGWGVGTAVINGALEAIYDSQGKISESQLVLRPFPQFASGGITLPALWHEYRQNMISLSGIAIFLFGNKRNAEGEYVLADGLLKEYQIATEQGCVCIPIGCTGSASAEIYRKIKEEMKETLYYRNPAAMNLLDQLNEPGSLAEKKKSLLALIDIITKDNPR

SEQ ID NO: 14178 - protein, 163 aa, Serratia marcescens
MTRKCFYSFHYEPDNWRASQVREMGSLEGNRPATDNDWEEVKKGGDAAIAAWIKGQLDNRSCAVILAGKDTADRKWINFEICEAWKKGMGVLVVYIHNLKDSAGDQTTKGKNPLDYIKLGDAKLSTIAKAYDPPYSTSTNVYNHIKDNLAEWVEEAIRIRKNY

SEQ ID NO: 14179 - protein, 484 aa, Serratia marcescens; identical to SEQ ID NO: 14131

SEQ ID NO: 14180 - protein, 163 aa, Serratia marcescens; identical to SEQ ID NO: 14132

SEQ ID NO: 14181 - protein, 484 aa, Serratia marcescens; identical to SEQ ID NO: 14125

SEQ ID NO: 14182 - protein, 163 aa, Serratia marcescens; identical to SEQ ID NO: 14126

SEQ ID NO: 14183 - protein, 484 aa, Serratia marcescens; identical to SEQ ID NO: 14133

SEQ ID NO: 14184 - protein, 163 aa, Serratia marcescens; identical to SEQ ID NO: 13318

SEQ ID NO: 14185 - protein, 484 aa, Serratia marcescens; identical to SEQ ID NO: 14129

SEQ ID NO: 14186 - protein, 163 aa, Serratia marcescens; identical to SEQ ID NO: 14126

SEQ ID NO: 14187 - protein, 484 aa, Serratia marcescens; identical to SEQ ID NO: 14123

SEQ ID NO: 14188 - protein, 163 aa, Serratia marcescens; identical to SEQ ID NO: 13318

SEQ ID NO: 14189 - protein, 484 aa, Serratia marcescens; identical to SEQ ID NO: 14133

SEQ ID NO: 14190 - protein, 163 aa, Serratia marcescens; identical to SEQ ID NO: 14124

SEQ ID NO: 14191 - protein, 484 aa, Serratia marcescens; identical to SEQ ID NO: 14127

SEQ ID NO: 14192 - protein, 163 aa, Serratia marcescens; identical to SEQ ID NO: 14126

SEQ ID NO: 14193 - protein, 484 aa, Serratia marcescens; identical to SEQ ID NO: 14127

SEQ ID NO: 14194 - protein, 163 aa, Serratia marcescens; identical to SEQ ID NO: 14126

SEQ ID NO: 14195 - protein, 484 aa, Serratia marcescens; identical to SEQ ID NO: 14125

SEQ ID NO: 14196 - protein, 163 aa, Serratia marcescens; identical to SEQ ID NO: 14126

SEQ ID NO: 14197 - protein, 484 aa, Serratia marcescens; identical to SEQ ID NO: 14129

SEQ ID NO: 14198 - protein, 163 aa, Serratia marcescens; identical to SEQ ID NO: 14126

SEQ ID NO: 14199 - protein, 306 aa, Serratia marcescens; identical to SEQ ID NO: 14173

SEQ ID NO: 14200 - protein, 163 aa, Serratia marcescens; identical to SEQ ID NO: 14124

SEQ ID NO: 14201 - protein, 484 aa, Serratia marcescens; identical to SEQ ID NO: 14129

SEQ ID NO: 14202 - protein, 163 aa, Serratia marcescens; identical to SEQ ID NO: 14126

SEQ ID NO: 14203 - protein, 484 aa, Serratia marcescens; identical to SEQ ID NO: 14133

SEQ ID NO: 14204 - protein, 163 aa, Serratia marcescens; identical to SEQ ID NO: 14124

SEQ ID NO: 14205 - protein, 306 aa, Serratia marcescens; identical to SEQ ID NO: 14173

SEQ ID NO: 14206 - protein, 163 aa, Serratia marcescens; identical to SEQ ID NO: 14124

SEQ ID NO: 14207 - protein, 484 aa, Serratia marcescens; identical to SEQ ID NO: 14123

SEQ ID NO: 14208 - protein, 163 aa, Serratia marcescens; identical to SEQ ID NO: 14124

SEQ ID NO: 14209 - protein, 484 aa, Serratia marcescens; identical to SEQ ID NO: 14131

SEQ ID NO: 14210 - protein, 163 aa, Serratia marcescens; identical to SEQ ID NO: 14132

SEQ ID NO: 14211 - protein, 484 aa, Serratia marcescens; identical to SEQ ID NO: 14127

SEQ ID NO: 14212 - protein, 163 aa, Serratia marcescens; identical to SEQ ID NO: 14126

SEQ ID NO: 14213 - protein, 484 aa, Serratia marcescens; identical to SEQ ID NO: 14133

SEQ ID NO: 14214 - protein, 163 aa, Serratia marcescens; identical to SEQ ID NO: 14124

SEQ ID NO: 14215 - protein, 484 aa, Serratia marcescens; identical to SEQ ID NO: 14133

SEQ ID NO: 14216 - protein, 163 aa, Serratia marcescens; identical to SEQ ID NO: 14124

SEQ ID NO: 14217 - protein, 484 aa, Serratia marcescens; identical to SEQ ID NO: 14133

SEQ ID NO: 14218 - protein, 163 aa, Serratia marcescens; identical to SEQ ID NO: 13318

SEQ ID NO: 14219 - protein, 484 aa, Serratia marcescens; identical to SEQ ID NO: 14133

SEQ ID NO: 14220 - protein, 163 aa, Serratia marcescens; identical to SEQ ID NO: 13318

SEQ ID NO: 14221 - protein, 484 aa, Serratia marcescens; identical to SEQ ID NO: 14133

SEQ ID NO: 14222 - protein, 163 aa, Serratia marcescens; identical to SEQ ID NO: 13318

SEQ ID NO: 14223 - protein, 484 aa, Serratia marcescens; identical to SEQ ID NO: 14133

SEQ ID NO: 14224 - protein, 163 aa, Serratia marcescens; identical to SEQ ID NO: 13318

SEQ ID NO: 14225 - protein, 484 aa, Serratia marcescens; identical to SEQ ID NO: 14133

SEQ ID NO: 14226 - protein, 163 aa, Serratia marcescens; identical to SEQ ID NO: 13318

SEQ ID NO: 14227 - protein, 484 aa, Serratia marcescens; identical to SEQ ID NO: 14127

SEQ ID NO: 14228 - protein, 163 aa, Serratia marcescens; identical to SEQ ID NO: 14126

SEQ ID NO: 14229 - protein, 484 aa, Serratia marcescens; identical to SEQ ID NO: 14127

SEQ ID NO: 14230 - protein, 163 aa, Serratia marcescens; identical to SEQ ID NO: 14126

SEQ ID NO: 14231 - protein, 484 aa, Serratia marcescens; identical to SEQ ID NO: 14125

SEQ ID NO: 14232 - protein, 163 aa, Serratia marcescens; identical to SEQ ID NO: 14126

SEQ ID NO: 14233 - protein, 484 aa, Serratia marcescens; identical to SEQ ID NO: 14125

SEQ ID NO: 14234 - protein, 163 aa, Serratia marcescens; identical to SEQ ID NO: 14126

SEQ ID NO: 14235 - protein, 306 aa, Serratia marcescens; identical to SEQ ID NO: 14173

SEQ ID NO: 14236 - protein, 163 aa, Serratia marcescens; identical to SEQ ID NO: 14124

SEQ ID NO: 14237 - protein, 484 aa, Serratia marcescens; identical to SEQ ID NO: 14125

SEQ ID NO: 14238 - protein, 163 aa, Serratia marcescens; identical to SEQ ID NO: 14126

SEQ ID NO: 14239 - protein, 484 aa, Serratia marcescens; identical to SEQ ID NO: 14125

SEQ ID NO: 14240 - protein, 163 aa, Serratia marcescens; identical to SEQ ID NO: 14126

SEQ ID NO: 14241 - protein, 306 aa, Serratia marcescens; identical to SEQ ID NO: 14173

SEQ ID NO: 14242 - protein, 163 aa, Serratia marcescens; identical to SEQ ID NO: 14124

SEQ ID NO: 14243 - protein, 306 aa, Serratia marcescens; identical to SEQ ID NO: 14173

SEQ ID NO: 14244 - protein, 163 aa, Serratia marcescens; identical to SEQ ID NO: 14124

SEQ ID NO: 14245 - protein, 484 aa, Serratia marcescens; identical to SEQ ID NO: 14125

SEQ ID NO: 14246 - protein, 163 aa, Serratia marcescens; identical to SEQ ID NO: 14126

SEQ ID NO: 14247 - protein, 484 aa, Serratia marcescens; identical to SEQ ID NO: 14125

SEQ ID NO: 14248 - protein, 163 aa, Serratia marcescens; identical to SEQ ID NO: 14126

SEQ ID NO: 14249 - protein, 484 aa, Serratia marcescens; identical to SEQ ID NO: 14123

SEQ ID NO: 14250 - protein, 163 aa, Serratia marcescens; identical to SEQ ID NO: 14124

SEQ ID NO: 14251 - protein, 484 aa, Serratia marcescens; identical to SEQ ID NO: 14133

SEQ ID NO: 14252 - protein, 163 aa, Serratia marcescens; identical to SEQ ID NO: 13318

SEQ ID NO: 14253 - protein, 484 aa, Serratia marcescens; identical to SEQ ID NO: 14133

SEQ ID NO: 14254 - protein, 163 aa, Serratia marcescens; identical to SEQ ID NO: 13318

SEQ ID NO: 14255 - protein, 484 aa, Serratia marcescens; identical to SEQ ID NO: 14133

SEQ ID NO: 14256 - protein, 163 aa, Serratia marcescens; identical to SEQ ID NO: 13318

SEQ ID NO: 14257 - protein, 484 aa, Serratia marcescens; identical to SEQ ID NO: 14133

SEQ ID NO: 14258 - protein, 163 aa, Serratia marcescens; identical to SEQ ID NO: 13318

SEQ ID NO: 14259 - protein, 484 aa, Serratia marcescens; identical to SEQ ID NO: 14133

SEQ ID NO: 14260 - protein, 163 aa, Serratia marcescens; identical to SEQ ID NO: 13318

SEQ ID NO: 14261 - protein, 484 aa, Serratia marcescens; identical to SEQ ID NO: 14125

SEQ ID NO: 14262 - protein, 163 aa, Serratia marcescens; identical to SEQ ID NO: 14126

SEQ ID NO: 14263 - protein, 484 aa, Serratia marcescens; identical to SEQ ID NO: 14129

SEQ ID NO: 14264 - protein, 163 aa, Serratia marcescens; identical to SEQ ID NO: 14126

SEQ ID NO: 14265 - protein, 484 aa, Serratia marcescens; identical to SEQ ID NO: 14133

SEQ ID NO: 14266 - protein, 163 aa, Serratia marcescens; identical to SEQ ID NO: 13318

SEQ ID NO: 14267 - protein, 484 aa, Serratia marcescens; identical to SEQ ID NO: 14131

SEQ ID NO: 14268 - protein, 163 aa, Serratia marcescens; identical to SEQ ID NO: 14132

SEQ ID NO: 14269 - protein, 484 aa, Serratia marcescens; identical to SEQ ID NO: 14127

SEQ ID NO: 14270 - protein, 163 aa, Serratia marcescens; identical to SEQ ID NO: 14126

SEQ ID NO: 14271 - protein, 484 aa, Serratia marcescens; identical to SEQ ID NO: 14133

SEQ ID NO: 14272 - protein, 163 aa, Serratia marcescens; identical to SEQ ID NO: 13318

SEQ ID NO: 14273 - protein, 484 aa, Serratia marcescens; identical to SEQ ID NO: 14125

SEQ ID NO: 14274 - protein, 163 aa, Serratia marcescens; identical to SEQ ID NO: 14126

SEQ ID NO: 14275 - protein, 306 aa, Serratia marcescens; identical to SEQ ID NO: 14173

SEQ ID NO: 14276 - protein, 163 aa, Serratia marcescens; identical to SEQ ID NO: 14124

SEQ ID NO: 14277 - protein, 484 aa, Serratia marcescens; identical to SEQ ID NO: 14125

SEQ ID NO: 14278 - protein, 163 aa, Serratia marcescens; identical to SEQ ID NO: 14126

SEQ ID NO: 14279 - protein, 484 aa, Serratia marcescens; identical to SEQ ID NO: 14125

SEQ ID NO: 14280 - protein, 163 aa, Serratia marcescens; identical to SEQ ID NO: 14126

SEQ ID NO: 14281 - protein, 484 aa, Serratia marcescens; identical to SEQ ID NO: 14125

SEQ ID NO: 14282 - protein, 163 aa, Serratia marcescens; identical to SEQ ID NO: 14126

SEQ ID NO: 14283 - protein, 484 aa, Serratia marcescens; identical to SEQ ID NO: 14125

SEQ ID NO: 14284 - protein, 163 aa, Serratia marcescens; identical to SEQ ID NO: 14126

SEQ ID NO: 14285 - protein, 484 aa, Serratia marcescens; identical to SEQ ID NO: 14133

SEQ ID NO: 14286 - protein, 163 aa, Serratia marcescens; identical to SEQ ID NO: 14124

SEQ ID NO: 14287 - protein, 484 aa, Serratia marcescens; identical to SEQ ID NO: 14133

SEQ ID NO: 14288 - protein, 163 aa, Serratia marcescens; identical to SEQ ID NO: 13318

SEQ ID NO: 14289 - protein, 484 aa, Serratia marcescens; identical to SEQ ID NO: 14133

SEQ ID NO: 14290 - protein, 163 aa, Serratia marcescens; identical to SEQ ID NO: 14124

SEQ ID NO: 14291 - protein, 306 aa, Serratia marcescens; identical to SEQ ID NO: 14173

SEQ ID NO: 14292 - protein, 163 aa, Serratia marcescens; identical to SEQ ID NO: 14124

SEQ ID NO: 14293 - protein, 484 aa, Serratia marcescens; identical to SEQ ID NO: 14133

SEQ ID NO: 14294 - protein, 163 aa, Serratia marcescens; identical to SEQ ID NO: 13318

SEQ ID NO: 14295 - protein, 484 aa, Serratia marcescens; identical to SEQ ID NO: 14125

SEQ ID NO: 14296 - protein, 163 aa, Serratia marcescens; identical to SEQ ID NO: 14126

SEQ ID NO: 14297 - protein, 484 aa, Serratia marcescens; identical to SEQ ID NO: 14133

SEQ ID NO: 14298 - protein, 163 aa, Serratia marcescens; identical to SEQ ID NO: 13318

SEQ ID NO: 14299 - protein, 484 aa, Serratia marcescens; identical to SEQ ID NO: 14129

SEQ ID NO: 14300 - protein, 163 aa, Serratia marcescens; identical to SEQ ID NO: 14126

SEQ ID NO: 14301 - protein, 484 aa, Serratia marcescens; identical to SEQ ID NO: 14129

SEQ ID NO: 14302 - protein, 163 aa, Serratia marcescens; identical to SEQ ID NO: 14126

SEQ ID NO: 14303 - protein, 484 aa, Serratia marcescens; identical to SEQ ID NO: 14127

SEQ ID NO: 14304 - protein, 163 aa, Serratia marcescens; identical to SEQ ID NO: 14126

SEQ ID NO: 14305 - protein, 484 aa, Serratia marcescens; identical to SEQ ID NO: 14133

SEQ ID NO: 14306 - protein, 163 aa, Serratia marcescens; identical to SEQ ID NO: 13318

SEQ ID NO: 14307 - protein, 484 aa, Serratia marcescens; identical to SEQ ID NO: 14133

SEQ ID NO: 14308 - protein, 163 aa, Serratia marcescens; identical to SEQ ID NO: 13318

SEQ ID NO: 14309 - protein, 484 aa, Serratia marcescens; identical to SEQ ID NO: 14133

SEQ ID NO: 14310 - protein, 163 aa, Serratia marcescens; identical to SEQ ID NO: 13318

SEQ ID NO: 14311 - protein, 484 aa, Serratia marcescens; identical to SEQ ID NO: 14133

SEQ ID NO: 14312 - protein, 163 aa, Serratia marcescens; identical to SEQ ID NO: 13318

SEQ ID NO: 14313 - protein, 484 aa, Serratia marcescens; identical to SEQ ID NO: 14125

SEQ ID NO: 14314 - protein, 163 aa, Serratia marcescens; identical to SEQ ID NO: 14126

SEQ ID NO: 14315 - protein, 484 aa, Serratia marcescens; identical to SEQ ID NO: 14125

SEQ ID NO: 14316 - protein, 163 aa, Serratia marcescens; identical to SEQ ID NO: 14126

SEQ ID NO: 14317 - protein, 484 aa, Serratia marcescens; identical to SEQ ID NO: 14133

SEQ ID NO: 14318 - protein, 163 aa, Serratia marcescens; identical to SEQ ID NO: 13318

SEQ ID NO: 14319 - protein, 484 aa, Serratia marcescens; identical to SEQ ID NO: 14133

SEQ ID NO: 14320 - protein, 163 aa, Serratia marcescens; identical to SEQ ID NO: 13318

SEQ ID NO: 14321 - protein, 306 aa, Serratia marcescens; identical to SEQ ID NO: 14173

SEQ ID NO: 14322 - protein, 163 aa, Serratia marcescens; identical to SEQ ID NO: 14124

SEQ ID NO: 14323 - protein, 484 aa, Serratia sp. 2880STDY5682894; identical to SEQ ID NO: 14131

SEQ ID NO: 14324 - protein, 163 aa, Serratia sp. 2880STDY5682894; identical to SEQ ID NO: 14132

SEQ ID NO: 14325 - protein, 484 aa, Serratia marcescens; identical to SEQ ID NO: 14133

SEQ ID NO: 14326 - protein, 163 aa, Serratia marcescens; identical to SEQ ID NO: 13318

SEQ ID NO: 14327 - protein, 484 aa, Serratia marcescens; identical to SEQ ID NO: 14125

SEQ ID NO: 14328 - protein, 163 aa, Serratia marcescens; identical to SEQ ID NO: 14126

SEQ ID NO: 14329 - protein, 484 aa, Serratia marcescens; identical to SEQ ID NO: 14133

SEQ ID NO: 14330 - protein, 163 aa, Serratia marcescens; identical to SEQ ID NO: 13318

SEQ ID NO: 14331 - protein, 484 aa, Serratia marcescens; identical to SEQ ID NO: 14125

SEQ ID NO: 14332 - protein, 163 aa, Serratia marcescens; identical to SEQ ID NO: 14126

SEQ ID NO: 14333 - protein, 306 aa, Serratia marcescens; identical to SEQ ID NO: 14173

SEQ ID NO: 14334 - protein, 163 aa, Serratia marcescens; identical to SEQ ID NO: 14124

SEQ ID NO: 14335 - protein, 484 aa, Serratia marcescens; identical to SEQ ID NO: 14125

SEQ ID NO: 14336 - protein, 163 aa, Serratia marcescens; identical to SEQ ID NO: 14126

SEQ ID NO: 14337 - protein, 484 aa, Serratia marcescens; identical to SEQ ID NO: 14125

SEQ ID NO: 14338 - protein, 163 aa, Serratia marcescens; identical to SEQ ID NO: 14126

SEQ ID NO: 14339 - protein, 306 aa, Serratia marcescens; identical to SEQ ID NO: 14173

SEQ ID NO: 14340 - protein, 163 aa, Serratia marcescens; identical to SEQ ID NO: 14124

SEQ ID NO: 14341 - protein, 306 aa, Serratia marcescens; identical to SEQ ID NO: 14173

SEQ ID NO: 14342 - protein, 163 aa, Serratia marcescens; identical to SEQ ID NO: 14124

SEQ ID NO: 14343 - protein, 484 aa, Serratia marcescens; identical to SEQ ID NO: 14133

SEQ ID NO: 14344 - protein, 163 aa, Serratia marcescens; identical to SEQ ID NO: 13318

SEQ ID NO: 14345 - protein, 306 aa, Serratia sp. 2880STDY5682895; identical to SEQ ID NO: 14173

SEQ ID NO: 14346 - protein, 163 aa, Serratia sp. 2880STDY5682895; identical to SEQ ID NO: 14124

SEQ ID NO: 14347 - protein, 484 aa, Serratia marcescens; identical to SEQ ID NO: 14127

SEQ ID NO: 14348 - protein, 163 aa, Serratia marcescens; identical to SEQ ID NO: 14126

SEQ ID NO: 14349 - protein, 484 aa, Serratia marcescens; identical to SEQ ID NO: 14133

SEQ ID NO: 14350 - protein, 163 aa, Serratia marcescens; identical to SEQ ID NO: 13318

SEQ ID NO: 14351 - protein, 484 aa, Serratia marcescens; identical to SEQ ID NO: 14127

SEQ ID NO: 14352 - protein, 163 aa, Serratia marcescens; identical to SEQ ID NO: 14126

SEQ ID NO: 14353 - protein, 484 aa, Serratia marcescens; identical to SEQ ID NO: 14133

SEQ ID NO: 14354 - protein, 163 aa, Serratia marcescens; identical to SEQ ID NO: 14124

SEQ ID NO: 14355 - protein, 484 aa, Serratia marcescens; identical to SEQ ID NO: 14127

SEQ ID NO: 14356 - protein, 163 aa, Serratia marcescens; identical to SEQ ID NO: 14126

SEQ ID NO: 14357 - protein, 484 aa, Serratia marcescens; identical to SEQ ID NO: 14123

SEQ ID NO: 14358 - protein, 163 aa, Serratia marcescens; identical to SEQ ID NO: 14124

SEQ ID NO: 14359 - protein, 484 aa, Serratia marcescens; identical to SEQ ID NO: 14133

SEQ ID NO: 14360 - protein, 163 aa, Serratia marcescens; identical to SEQ ID NO: 13318

SEQ ID NO: 14361 - protein, 484 aa, Serratia marcescens; identical to SEQ ID NO: 14133

SEQ ID NO: 14362 - protein, 163 aa, Serratia marcescens; identical to SEQ ID NO: 14124

SEQ ID NO: 14363 - protein, 484 aa, Serratia marcescens; identical to SEQ ID NO: 14131

SEQ ID NO: 14364 - protein, 163 aa, Serratia marcescens; identical to SEQ ID NO: 14132

SEQ ID NO: 14365 - protein, 484 aa, Serratia marcescens; identical to SEQ ID NO: 14127

SEQ ID NO: 14366 - protein, 163 aa, Serratia marcescens; identical to SEQ ID NO: 14126

SEQ ID NO: 14367 - protein, 306 aa, Serratia marcescens; identical to SEQ ID NO: 14173

SEQ ID NO: 14368 - protein, 163 aa, Serratia marcescens; identical to SEQ ID NO: 14124

SEQ ID NO: 14369 - protein, 484 aa, Serratia marcescens; identical to SEQ ID NO: 14125

SEQ ID NO: 14370 - protein, 163 aa, Serratia marcescens; identical to SEQ ID NO: 14126

SEQ ID NO: 14371 - protein, 484 aa, Serratia marcescens; identical to SEQ ID NO: 14125

SEQ ID NO: 14372 - protein, 163 aa, Serratia marcescens; identical to SEQ ID NO: 14126

SEQ ID NO: 14373 - protein, 484 aa, Serratia marcescens; identical to SEQ ID NO: 14125

SEQ ID NO: 14374 - protein, 163 aa, Serratia marcescens; identical to SEQ ID NO: 14126

SEQ ID NO: 14375 - protein, 484 aa, Serratia marcescens; identical to SEQ ID NO: 14125

SEQ ID NO: 14376 - protein, 163 aa, Serratia marcescens; identical to SEQ ID NO: 14126

SEQ ID NO: 14377 - protein, 484 aa, Serratia marcescens; identical to SEQ ID NO: 14125

SEQ ID NO: 14378 - protein, 163 aa, Serratia marcescens; identical to SEQ ID NO: 14126

SEQ ID NO: 14379 - protein, 484 aa, Serratia marcescens; identical to SEQ ID NO: 14133

SEQ ID NO: 14380 - protein, 163 aa, Serratia marcescens; identical to SEQ ID NO: 13318

SEQ ID NO: 14381 - protein, 484 aa, Serratia marcescens; identical to SEQ ID NO: 14133

SEQ ID NO: 14382 - protein, 163 aa, Serratia marcescens; identical to SEQ ID NO: 13318

SEQ ID NO: 14383 - protein, 484 aa, Serratia marcescens; identical to SEQ ID NO: 14125

SEQ ID NO: 14384 - protein, 163 aa, Serratia marcescens; identical to SEQ ID NO: 14126

SEQ ID NO: 14385 - protein, 484 aa, Serratia marcescens; identical to SEQ ID NO: 14127

SEQ ID NO: 14386 - protein, 163 aa, Serratia marcescens; identical to SEQ ID NO: 14126

SEQ ID NO: 14387 - protein, 484 aa, Serratia marcescens; identical to SEQ ID NO: 14127

SEQ ID NO: 14388 - protein, 163 aa, Serratia marcescens; identical to SEQ ID NO: 14126

SEQ ID NO: 14389 - protein, 484 aa, Serratia marcescens; identical to SEQ ID NO: 14123

SEQ ID NO: 14390 - protein, 163 aa, Serratia marcescens; identical to SEQ ID NO: 14124

SEQ ID NO: 14391 - protein, 484 aa, Serratia marcescens
MPERDIELFIRDYVNDIKAGSAALFAGAGLSIPAGFVSWKELIGDIAYELGLDIEKESDLISLAQYHLNEKGNRHKINQKIITEFAEQAEETENHRIIARLPIASLWTTNYDDLIEKTYARYNRVCDVKTTPESLTNNIHKRDVVLYKMHGDYRTPNQAIITREQYETYSRTHLPFINMLMAELTAKTFLFIGFSFEDPNLQYVLSRLYAQYGEGKRNHFCIMRRVQPGDSGCEDQASYDYNSRKQSLMINDLRRYGIQTLLVEDYRQITDLLYAIETQFKKSTVFISGSADNYHPYAREESIQFIHRLARLLIRKQYRIVNGFGWGVGTAVINGALEAIYASGGKISESQLVLRPFPQFASGSITLPALWHEYRQNMISLSGIAVFLFGNKRNAEGECVLADGLLKEFHIAAEQGCVCIPIGCTGGASAEIYRKIKEEMKDTLYHRHPVAMNLLDQLNEPGSLAEKKTCLLALIDIITKDNPR

SEQ ID NO: 14392 - protein, 163 aa, Serratia marcescens; identical to SEQ ID NO: 13318

SEQ ID NO: 14393 - protein, 484 aa, Serratia marcescens; identical to SEQ ID NO: 14129

SEQ ID NO: 14394 - protein, 163 aa, Serratia marcescens; identical to SEQ ID NO: 14126

SEQ ID NO: 14395 - protein, 306 aa, Serratia marcescens; identical to SEQ ID NO: 14173

SEQ ID NO: 14396 - protein, 163 aa, Serratia marcescens; identical to SEQ ID NO: 14124

SEQ ID NO: 14397 - protein, 484 aa, Serratia marcescens; identical to SEQ ID NO: 14133

SEQ ID NO: 14398 - protein, 163 aa, Serratia marcescens; identical to SEQ ID NO: 14124

SEQ ID NO: 14399 - protein, 484 aa, Serratia marcescens; identical to SEQ ID NO: 14125

SEQ ID NO: 14400 - protein, 163 aa, Serratia marcescens; identical to SEQ ID NO: 14126

SEQ ID NO: 14401 - protein, 484 aa, Serratia marcescens; identical to SEQ ID NO: 14125

SEQ ID NO: 14402 - protein, 163 aa, Serratia marcescens; identical to SEQ ID NO: 14126

SEQ ID NO: 14403 - protein, 484 aa, Serratia marcescens; identical to SEQ ID NO: 14125

SEQ ID NO: 14404 - protein, 163 aa, Serratia marcescens; identical to SEQ ID NO: 14126

SEQ ID NO: 14405 - protein, 484 aa, Serratia marcescens; identical to SEQ ID NO: 14125

SEQ ID NO: 14406 - protein, 163 aa, Serratia marcescens; identical to SEQ ID NO: 14126

SEQ ID NO: 14407 - protein, 484 aa, Serratia marcescens
MFNRDIELFIRDYVNDIKAGSAALFAGAGLSIPAGFVSWKELIGDIAYELELDIEKESDLISLAQYHLNEKGNRHKINQKIITEFAEQAEETENHRIIARLPIASLWTTNYDDLIEKTYARYNRVCDVKTTPESLTNNIHKRDVVLYKMHGDYRNPNQAIITREQYETYSRTHLPFINMLMAELTAKTFLFIGFSFEDPNLQYVLSRLYAQYGEGQRNHYCIMRRVQLGDSGSEDQASCDYNSRKQGLMINDLRRYGIQTLLVDDYRQITDLLYAIETQFKKSTVFISGSADNYQPYAREESIQFIHRLARLLIHKQYRIVNGFGWGVGTAVINGALEAIYDSQGKISESQLVLRPFPQFASGGITLPALWHEYRQNMISLSGIAIFLFGNKRNAEGEYVLADGLLKEFQIATEQGCVCIPIGCTGSASAEIYRKIKEEMKETLYYRNPAAMNLLDQLNEPGSLAEKKKSLLALIDIITKDNPR

SEQ ID NO: 14408 - protein, 163 aa, Serratia marcescens
MTRKCFYSFHYEPDNWRASQVREMGSLEGNRPATDNDWEEVKKGGDAAIAAWIKGQLDNRSCAVILAGKDTADRKWINFEICEAWKKGMGVLVVYIHNLKDSAGDQTTKGKNPLDHIKLGDAKLSTIAKAYDPPYSTSTNVYNHIKDNLAEWVEEAIRIRKNY

SEQ ID NO: 14409 - protein, 484 aa, Serratia marcescens; identical to SEQ ID NO: 14129

SEQ ID NO: 14410 - protein, 163 aa, Serratia marcescens; identical to SEQ ID NO: 14126

SEQ ID NO: 14411 - protein, 484 aa, Serratia marcescens; identical to SEQ ID NO: 14125

SEQ ID NO: 14412 - protein, 163 aa, Serratia marcescens; identical to SEQ ID NO: 14126

SEQ ID NO: 14413 - protein, 484 aa, Serratia marcescens; identical to SEQ ID NO: 14129

SEQ ID NO: 14414 - protein, 163 aa, Serratia marcescens; identical to SEQ ID NO: 14126

SEQ ID NO: 14415 - protein, 484 aa, Serratia marcescens; identical to SEQ ID NO: 14133

SEQ ID NO: 14416 - protein, 163 aa, Serratia marcescens; identical to SEQ ID NO: 14124

SEQ ID NO: 14417 - protein, 484 aa, Serratia marcescens; identical to SEQ ID NO: 14127

SEQ ID NO: 14418 - protein, 163 aa, Serratia marcescens; identical to SEQ ID NO: 14126

SEQ ID NO: 14419 - protein, 484 aa, Serratia marcescens; identical to SEQ ID NO: 14127

SEQ ID NO: 14420 - protein, 163 aa, Serratia marcescens; identical to SEQ ID NO: 14126

SEQ ID NO: 14421 - protein, 484 aa, Serratia marcescens
MPERDIELFIRDYVNDIKAGSAALFAGAGLSIPAGFVSWKELIGDIAYELGLDIEKESDLISLAQYHLNEKGNRHKINQKIITEFAEQAEETENHRIIARLPIASLWTTNYDDLIEKTYARYNRVCDVKTTPESLTNNIHKRDVVLYKMHGDYRTPNQAIITREQYETYSRTHLPFINMLMAELTAKTFLFIGFSFEDPNLQYVLSRLYAQYGEGKRNHYCIMRRVQPGDSGSEDQASYDYNSRKQSLMINDLRRYGIQTLLVEDYRQITDLLYAIETQFKKSTVFISGSADNYHPYAREESIQFIHRLARLLIRKQYRIVNGFGWGVGTAVINGALEAIYASGGKISESQLVLRPFPQFASGGITLPALWHEYRQNMISLSGIAVFLFGNKRNAEGECVLADGLLKEFHIAAEQGCVCIPIGCTGGASAEIYRKIKEEMKDTLYHRHSVAMNLLDQLNEPGSLAEKKTCLLALIDIITKDNPR

SEQ ID NO: 14422 - protein, 163 aa, Serratia marcescens; identical to SEQ ID NO: 14126

SEQ ID NO: 14423 - protein, 484 aa, Serratia marcescens; identical to SEQ ID NO: 14125

SEQ ID NO: 14424 - protein, 163 aa, Serratia marcescens; identical to SEQ ID NO: 14126

SEQ ID NO: 14425 - protein, 484 aa, Serratia marcescens; identical to SEQ ID NO: 14391

SEQ ID NO: 14426 - protein, 163 aa, Serratia marcescens; identical to SEQ ID NO: 13318

SEQ ID NO: 14427 - protein, 484 aa, Serratia marcescens; identical to SEQ ID NO: 14129

SEQ ID NO: 14428 - protein, 163 aa, Serratia marcescens; identical to SEQ ID NO: 14126

SEQ ID NO: 14429 - protein, 484 aa, Serratia marcescens; identical to SEQ ID NO: 14133

SEQ ID NO: 14430 - protein, 163 aa, Serratia marcescens; identical to SEQ ID NO: 13318

SEQ ID NO: 14431 - protein, 484 aa, Serratia marcescens; identical to SEQ ID NO: 14131

SEQ ID NO: 14432 - protein, 163 aa, Serratia marcescens; identical to SEQ ID NO: 14132

SEQ ID NO: 14433 - protein, 484 aa, Serratia marcescens; identical to SEQ ID NO: 14133

SEQ ID NO: 14434 - protein, 163 aa, Serratia marcescens; identical to SEQ ID NO: 13318

SEQ ID NO: 14435 - protein, 484 aa, Serratia marcescens; identical to SEQ ID NO: 14133

SEQ ID NO: 14436 - protein, 163 aa, Serratia marcescens; identical to SEQ ID NO: 13318

SEQ ID NO: 14437 - protein, 484 aa, Serratia marcescens; identical to SEQ ID NO: 14133

SEQ ID NO: 14438 - protein, 163 aa, Serratia marcescens; identical to SEQ ID NO: 13318

SEQ ID NO: 14439 - protein, 484 aa, Serratia marcescens; identical to SEQ ID NO: 14133

SEQ ID NO: 14440 - protein, 163 aa, Serratia marcescens; identical to SEQ ID NO: 13318

SEQ ID NO: 14441 - protein, 306 aa, Serratia marcescens; identical to SEQ ID NO: 14173

SEQ ID NO: 14442 - protein, 163 aa, Serratia marcescens; identical to SEQ ID NO: 14124

SEQ ID NO: 14443 - protein, 484 aa, Serratia marcescens; identical to SEQ ID NO: 14125

SEQ ID NO: 14444 - protein, 163 aa, Serratia marcescens; identical to SEQ ID NO: 14126

SEQ ID NO: 14445 - protein, 484 aa, Serratia marcescens; identical to SEQ ID NO: 14125

SEQ ID NO: 14446 - protein, 163 aa, Serratia marcescens; identical to SEQ ID NO: 14126

SEQ ID NO: 14447 - protein, 306 aa, Serratia marcescens; identical to SEQ ID NO: 14173

SEQ ID NO: 14448 - protein, 163 aa, Serratia marcescens; identical to SEQ ID NO: 14124

SEQ ID NO: 14449 - protein, 484 aa, Serratia marcescens; identical to SEQ ID NO: 14133

SEQ ID NO: 14450 - protein, 163 aa, Serratia marcescens; identical to SEQ ID NO: 13318

SEQ ID NO: 14451 - protein, 484 aa, Serratia marcescens; identical to SEQ ID NO: 14133

SEQ ID NO: 14452 - protein, 163 aa, Serratia marcescens; identical to SEQ ID NO: 13318

SEQ ID NO: 14453 - protein, 484 aa, Serratia marcescens; identical to SEQ ID NO: 14133

SEQ ID NO: 14454 - protein, 163 aa, Serratia marcescens; identical to SEQ ID NO: 13318

SEQ ID NO: 14455 - protein, 484 aa, Serratia marcescens; identical to SEQ ID NO: 14125

SEQ ID NO: 14456 - protein, 163 aa, Serratia marcescens; identical to SEQ ID NO: 14126

SEQ ID NO: 14457 - protein, 484 aa, Serratia marcescens; identical to SEQ ID NO: 14129

SEQ ID NO: 14458 - protein, 163 aa, Serratia marcescens; identical to SEQ ID NO: 14126

SEQ ID NO: 14459 - protein, 484 aa, Serratia marcescens; identical to SEQ ID NO: 14123

SEQ ID NO: 14460 - protein, 163 aa, Serratia marcescens; identical to SEQ ID NO: 14124

SEQ ID NO: 14461 - protein, 484 aa, Serratia marcescens; identical to SEQ ID NO: 14133

SEQ ID NO: 14462 - protein, 163 aa, Serratia marcescens; identical to SEQ ID NO: 14124

SEQ ID NO: 14463 - protein, 484 aa, Serratia marcescens; identical to SEQ ID NO: 14129

SEQ ID NO: 14464 - protein, 163 aa, Serratia marcescens; identical to SEQ ID NO: 14126

SEQ ID NO: 14465 - protein, 484 aa, Serratia marcescens; identical to SEQ ID NO: 14127

SEQ ID NO: 14466 - protein, 163 aa, Serratia marcescens; identical to SEQ ID NO: 14126

SEQ ID NO: 14467 - protein, 484 aa, Serratia marcescens; identical to SEQ ID NO: 14129

SEQ ID NO: 14468 - protein, 163 aa, Serratia marcescens; identical to SEQ ID NO: 14126

SEQ ID NO: 14469 - protein, 484 aa, Serratia marcescens; identical to SEQ ID NO: 14125

SEQ ID NO: 14470 - protein, 163 aa, Serratia marcescens; identical to SEQ ID NO: 14126

SEQ ID NO: 14471 - protein, 484 aa, Serratia marcescens
MFNRDIELFIRDYVNDIKAGSAALFAGAGLSIPAGFVSWKELIGDIAYELELDIEKESNLISLAQYHLNEKGNRHKINQKIITEFAEQAEETENHRIIARLPIASLWTTNYDDLIEKTYARYNRVCDVKTTPESLTNNIHKRDVVLYKMHGDYRNPNQAIITREQYETYSRTHLPFINMLMAELTAKTFLFIGFSFEDPNLQYVLSRLYAQYGEGQRNHYCIMRRVQLGDSGSEDQASCDYNSRKQGLMINDLRRYGIQTLLVDDYRQITDLLYAIETQFKKSTVFISGSADNYQPYTREESIQFIHRLARLLIHKQYRIVNGFGWGVGTAVINGALEAIYDSQGKISESQLVLRPFPQFASGGITLPALWHEYRQNMISLSGIAIFLFGNKRNAEGEYVLADGLLKEFQIATEQGCVCIPIGCTGSASAEIYRKIKEEMKETLYYRNPAAMNLLDQLNEPGSLAEKKKSLLALIDIITKDNPR

SEQ ID NO: 14472 - protein, 163 aa, Serratia marcescens; identical to SEQ ID NO: 14408

SEQ ID NO: 14473 - protein, 484 aa, Serratia marcescens; identical to SEQ ID NO: 14131

SEQ ID NO: 14474 - protein, 163 aa, Serratia marcescens; identical to SEQ ID NO: 14132

SEQ ID NO: 14475 - protein, 484 aa, Serratia marcescens; identical to SEQ ID NO: 14133

SEQ ID NO: 14476 - protein, 163 aa, Serratia marcescens; identical to SEQ ID NO: 13318

SEQ ID NO: 14477 - protein, 484 aa, Serratia marcescens; identical to SEQ ID NO: 14131

SEQ ID NO: 14478 - protein, 163 aa, Serratia marcescens; identical to SEQ ID NO: 14132

SEQ ID NO: 14479 - protein, 484 aa, Serratia marcescens; identical to SEQ ID NO: 14125

SEQ ID NO: 14480 - protein, 163 aa, Serratia marcescens
MTRKCFYSFHYEPDNWRASQIREMGSLEGNRPATDNDWEEVKKGSDDAIAAWIKGQLDNRSCAVILAGKDTANRKWINFEICEAWKKGMGVLVVYIHNLKDSAGEQARKGNNPLDHIKLGDTKLSAIAKAYDPPYLTSTNVYNHIKENLAEWVEEAIRIRENY

SEQ ID NO: 14481 - protein, 484 aa, Serratia marcescens; identical to SEQ ID NO: 14125

SEQ ID NO: 14482 - protein, 163 aa, Serratia marcescens; identical to SEQ ID NO: 14126

SEQ ID NO: 14483 - protein, 465 aa, Serratia marcescens
MPERDIELFIRDYVNDIKAGSAALFAGAGLSIPAGFVSWKELIGDIAYELGLDIEKESDLISLAQYHLNEKGNRHKINQKIITEFAEQAEETENHRIIARLPIASLWTTNYDDLIEKTYARYNRVCDVKTTPESLTNNIHKRDVVLYKMHGDYRTPNQAIITREQYETYSRTHLPFINMLMAELTAKTFLFIGFSFEDPNLQYVLSRLYAQYGEGKRNHYCIMRRVQPGDSGSEDQASYDYNSRKQSLMINDLRRYGIQTLLVEDYRQITDLLYAIETQFKKSTVFISGSADNYQPYAREESIQFIHRLARLLIRKQYRIVNGFGWGVGTAVINGALEAIYASGGITLPALWHEYRQNMISLSGIAVFLFGNKRNAEGECVLADGLLKEFHIAAEQGCVCIPIGCTGGASAEIYRKIKEEMKDTLYHRHPVAMNLLDQLNEPGSLAEKKTCLLALIDIITKDNPR

SEQ ID NO: 14484 - protein, 163 aa, Serratia marcescens; identical to SEQ ID NO: 14126

SEQ ID NO: 14485 - protein, 484 aa, Serratia marcescens; identical to SEQ ID NO: 14125

SEQ ID NO: 14486 - protein, 163 aa, Serratia marcescens; identical to SEQ ID NO: 14126

SEQ ID NO: 14487 - protein, 484 aa, Serratia marcescens; identical to SEQ ID NO: 14129

SEQ ID NO: 14488 - protein, 163 aa, Serratia marcescens; identical to SEQ ID NO: 14126

SEQ ID NO: 14489 - protein, 484 aa, Serratia marcescens; identical to SEQ ID NO: 14127

SEQ ID NO: 14490 - protein, 163 aa, Serratia marcescens; identical to SEQ ID NO: 14126

SEQ ID NO: 14491 - protein, 484 aa, Serratia marcescens; identical to SEQ ID NO: 14131

SEQ ID NO: 14492 - protein, 163 aa, Serratia marcescens; identical to SEQ ID NO: 14132

SEQ ID NO: 14493 - protein, 484 aa, Serratia marcescens; identical to SEQ ID NO: 14127

SEQ ID NO: 14494 - protein, 163 aa, Serratia marcescens; identical to SEQ ID NO: 14126

SEQ ID NO: 14495 - protein, 484 aa, Serratia marcescens; identical to SEQ ID NO: 14125

SEQ ID NO: 14496 - protein, 163 aa, Serratia marcescens; identical to SEQ ID NO: 14126

SEQ ID NO: 14497 - protein, 484 aa, Serratia marcescens
MPERDIELFIRDYVNDIKAGSAALFAGAGLSIPAGFVSWKELIGDIAYELGLDIEKESDLISLAQYHLNEKGNRHKINQKIITEFAEQAEETENHRIIARLPIASLWTTNYDDLIEKTYARYNRVCDVKTTPESLTNNLHKRDVVLYKMHGDYRTPNQAIITREQYETYSRTHLPFINMLMAELTAKTFLFIGFSFEDPNLQYVLSRLYAQYGEGKRNHYCIMRRVQPGDSGSEDQASYDYNSRKQRLMINDLRRYGIQTLLVEDYRQITDLLYAIETQFKKSTVFISGSADNYHPYAREESIQFIHRLARLLIRKQYRIVNGFGWGVGTAVINGALEAIYASGGKISESQLVLRPFPQFASGGITLPALWHEYRQNMISLSGIAVFLFGNKRNAEGECVLADGLLKEFHIAAEQGCVCIPIGCTGGASAEIYRKIKEEMKDTLYHRHPVAMNLLDQLNEPGSLAEKKTCLLALIDIITKDNPR

SEQ ID NO: 14498 - protein, 163 aa, Serratia marcescens; identical to SEQ ID NO: 13318

SEQ ID NO: 14499 - protein, 484 aa, Serratia marcescens; identical to SEQ ID NO: 14133

SEQ ID NO: 14500 - protein, 163 aa, Serratia marcescens; identical to SEQ ID NO: 14124

SEQ ID NO: 14501 - protein, 484 aa, Serratia marcescens; identical to SEQ ID NO: 14133

SEQ ID NO: 14502 - protein, 163 aa, Serratia marcescens; identical to SEQ ID NO: 13318

SEQ ID NO: 14503 - protein, 484 aa, Serratia marcescens; identical to SEQ ID NO: 14125

SEQ ID NO: 14504 - protein, 163 aa, Serratia marcescens; identical to SEQ ID NO: 14126

SEQ ID NO: 14505 - protein, 484 aa, Serratia marcescens; identical to SEQ ID NO: 14125

SEQ ID NO: 14506 - protein, 163 aa, Serratia marcescens; identical to SEQ ID NO: 14126

SEQ ID NO: 14507 - protein, 484 aa, Serratia marcescens; identical to SEQ ID NO: 14133

SEQ ID NO: 14508 - protein, 163 aa, Serratia marcescens; identical to SEQ ID NO: 14124

SEQ ID NO: 14509 - protein, 484 aa, Serratia marcescens; identical to SEQ ID NO: 14127

SEQ ID NO: 14510 - protein, 163 aa, Serratia marcescens; identical to SEQ ID NO: 14126

SEQ ID NO: 14511 - protein, 484 aa, Serratia marcescens; identical to SEQ ID NO: 14133

SEQ ID NO: 14512 - protein, 163 aa, Serratia marcescens; identical to SEQ ID NO: 14124

SEQ ID NO: 14513 - protein, 484 aa, Serratia marcescens; identical to SEQ ID NO: 14125

SEQ ID NO: 14514 - protein, 163 aa, Serratia marcescens; identical to SEQ ID NO: 14126

SEQ ID NO: 14515 - protein, 484 aa, Serratia marcescens; identical to SEQ ID NO: 14133

SEQ ID NO: 14516 - protein, 163 aa, Serratia marcescens; identical to SEQ ID NO: 13318

SEQ ID NO: 14517 - protein, 484 aa, Serratia marcescens; identical to SEQ ID NO: 14133

SEQ ID NO: 14518 - protein, 163 aa, Serratia marcescens; identical to SEQ ID NO: 14124

SEQ ID NO: 14519 - protein, 484 aa, Serratia marcescens; identical to SEQ ID NO: 14133

SEQ ID NO: 14520 - protein, 163 aa, Serratia marcescens; identical to SEQ ID NO: 13318

SEQ ID NO: 14521 - protein, 484 aa, Serratia marcescens; identical to SEQ ID NO: 14133

SEQ ID NO: 14522 - protein, 163 aa, Serratia marcescens; identical to SEQ ID NO: 13318

SEQ ID NO: 14523 - protein, 484 aa, Serratia marcescens; identical to SEQ ID NO: 14133

SEQ ID NO: 14524 - protein, 163 aa, Serratia marcescens; identical to SEQ ID NO: 13318

SEQ ID NO: 14525 - protein, 593 aa, Burkholderia cordobensis
MPMSEIKEIDFRQQVIQNGQQLMWFLGAGASRSSGLPTATDLIWDLKLRYYCAQENQDVVAHDVSNRAVQARIQAYMDSKSFPPLWDPAEYSFYFELLFGGDYSSQQKYLNKALATEKISSTIGQRALAALMQMGLARIIFTTNFDEVVESTYASIAGKNLTTFHLEGSYAALEALNSERFPFLAKVHGDFRYQTVKNLAADLLSNDREIQKCFVAASVRFGMVVSGYSGRDRNVMAMFGEAIEQNNSFPHGLYWTVPRISHVEASVRQLMDYANSKGVKGGIVETGTFDEMLAKIWRLVSDKNPAVDAKVRSATAKQVRIPLPPAGSGYPILRTNALQIKRVPVSCGAIDYDGAVDLAQLKSVLFEKRPQCSVCYTDRILFWGNGKELVKIYEPDRVKSVSSFEIDDLVVAINTSTYFKSMVEETVANALIYEKPLVLRKQRKTWYAITDHKEASSDTLKPLREALSWKDRDGKMHNGVVNGQVAGLKDVYWAEAVSLRVEERNGQIWLLLKPDIWISPNKMREQATDFVYKKKIRRYNKQASEILSAWIKILLGSIGKGEAIVTAYKGTDHPAQFQIITRSAFSKRSGTND

SEQ ID NO: 14526 - protein, 505 aa, Burkholderia cordobensis
MRNRSGRCRTGVIDRFVGVSMAKNRLLYLHRRHFGLDGPDAIMGKLLYEALKADLDAAVTSHMIIPDSVSEGLPESILDDVITQSEFHRSGVNVVYLEGGLDSHCLTGFDGSDWKMSAPMIEEFARRGGIVVVADLDINIARSIDEDRFGRLFKAWFRREDGRQGNPIEIVDPGRCENSYWSEIWVDCEAARTHCAEWLQPIYNGLSTILVGGPLDLGNSQSWLANIVSHTMGTMCQDCWWEPPETGFDQHRLRYHPQSPMGGGSFGPFASVCQLGRGYLVAIAARVSSNYVTKKSHGNIEWIINIIRHLRAAVENHERLGSISRFRGVCLFLSHRSVDKPVVEAISDNLFKTGISTWLDKERMLPSDSLGLSLNAGLTESSHFTIFWSRHCKDAPWVHFELGSAISACIERRKPILVVALDDTPPPDSLAQFIRINGKGTPQETSRLIYDALAALVDRESLNRAKEASAVEQTDVGNAIASGKLNRRASTEVVGPFRRRRRKPR

SEQ ID NO: 14527 - protein, 479 aa, Paraburkholderia sordidicola
MSTNDLEAFVNEYVKELHEGTAAVFLGAGMSAPAGFVDWVKLLEPLAKQLGLDAKMEADHLVALAQYHVNDNGQNRSGLTKRLIQEFPTYAKPPENHKLLARLPISTYWTTNYDKLIERALEDAGKIVDVKFRTPHLASTKPRRDAIVFKMHGDVEHADEAVITKDDYERYSLDRGAFVNALTGDLVSKTFLFLGFSFKDPNLDYILSRIRITFQQHSRQHYCIFKKVMKEAGESLADFEYKQQKQRHLIEDLKRFNVRTLLVSDYPEITAILQQIYRTYRRRTIFISGSADELNGWDEKDVHEFLFSLGRILIQKGYRLVSGFGLGISNELLSGAIEQIYAQRQGHIQDHLVVRPFPRAIADDNKRKAFWHEFRTDLISQAGIALFLFGNTRLDGKIVHADGVDKEFRIAQSLDLVMLPVGATGYSAKSLAEEMSPAVESTTENPEFKDAFRRLQEVVTKPQELLDKISSALDSLSKH

SEQ ID NO: 14528 - protein, 166 aa, Paraburkholderia sordidicola
MARKCFFSFHYKPDCVRAARVRNIGVVEGNEPAKDNDWEKVTGGGDRAIEKWISDQMAGKTCMVLLVGENTANRKWINHEIIKAWNDGLGVVAIRIHGLVNFEGHTANQGANPLDYISLKNGTKKLSEVAKCYNPPGVDSRARYNWIADNMAAMVEQAITIRKDYR

SEQ ID NO: 14529 - protein, 257 aa, Paraburkholderia sordidicola
MFKGFNLKFDDASDFSTRLITQYGALSERFRTRKLDARSHISSYLKNGAVDARKLQSDWFAAVKADVFISHSHADEALAMALGAALEYKFDLRCFIDSCVWGNSDELLKEIDNEFCLRPSKETYDYDKRNRSTSHVHMMLQGALTKMIDHTECVIFLNTPQSMVTGTGLTQESQTASPWIYAEVLATKVIRKQQPKREIEGHRKSAMESEAAVYDSVPAFYHDLDLQHLTLLRSHEVERWLRSGERGLKALDYLYLM

SEQ ID NO: 14530 - protein, 335 aa, Paraburkholderia choica
MLTQPDYQGFNERNAYLAAKLITIFVEHPVIFMGYSLNDGNIISLLRAICACIGQDKLQQLNNNLIFVQRARDAEPESVSQTIIALETVQIPITLVKANSFTGIFEAIESTKRKIPARVLRYCKEQLYELVKTTEPHGKLVVVDVDQVNGRRDIEFVVGVGVAAEREEEERRRLGDVGYRGITPLDLFHDLVFRDKGYEAPRVLAEAMPRLSRGLTYLPVFFLLRAVGITSAAQYAASGIDVDKYVDLPPNAFQLKSLKKGFMRNYRDMTVTEMIQRNTPEIVAQYLPFTKWTLDDYGTIHAFLVAHADRFSNSNYSTAFRKLACLYDRAAYGWE

SEQ ID NO: 14531 - protein, 293 aa, Paraburkholderia choica
MIDRQPYRMDTRWPLCFFSYSHVDERLRDQLEIHLAQLKRDGLIEAWHDRRILAGSNLDDSINEQLQAADIVLLLVSPDFINSDYCYSREMALALERQARKEAHVLAVILRACDWTSSPLGKLLAFPTDARAVTSWPNQDEAFTDVAKAIRKVVNSLASKNAVAATTIRPAPVASAAAPAGASAVPAPEPLPRSSNLRLKKEFSDLDRDVFIKDSFDFMARFFEGSLQELEARHLISKVGLSELTRANLRPASTKAGRPSRNALSPSARSGGRLAESRTPTKSRLTRTATTKR

SEQ ID NO: 14532 - protein, 486 aa, Listeria monocytogenes; identical to SEQ ID NO: 14113

SEQ ID NO: 14533 - protein, 202 aa, Listeria monocytogenes; identical to SEQ ID NO: 14114

SEQ ID NO: 14534 - protein, 486 aa, Listeria monocytogenes; identical to SEQ ID NO: 14113

SEQ ID NO: 14535 - protein, 202 aa, Listeria monocytogenes; identical to SEQ ID NO: 14114

SEQ ID NO: 14536 - protein, 469 aa, Streptococcus pneumoniae; identical to SEQ ID NO: 13257

SEQ ID NO: 14537 - protein, 206 aa, Streptococcus pneumoniae; identical to SEQ ID NO: 13258

SEQ ID NO: 14538 - protein, 388 aa, Streptococcus pneumoniae
MGKVMRQYNEFYIKLQKEFKLAHNMTIEAMPAKFSNKDYVKKFIYMFPDKISRLIIERNYWYGKRIIKKNLVKIQSKRMSLETNDFILETSKYIRRRVRKNILSIEERKTQADEIRKKSLVKLKLQTIKRKKSLDYIQEINPSYLEHYRKRFFKTHDLHERFEIIRELSKYDSKEVHNFFYAINGHVRNQSLKKEVQSYFQSLSLPFRLSRKKKGKTNFIDNEIVTNRKGPEELKKRLYIDDLEKIKKFDIFLSHNSQDEEKIITFYKNLNKNGQVVYIDWVNDKYDLKREWCNTSTVDIIKERIKQSDVFVLYFSSKTLNSQWCAWELGYADGIGKKICIYFSEKIDRTIIPKFYSIYPELHLSENITIEVDKQSSIIFNDWKNRSS

SEQ ID NO: 14539 - protein, 468 aa, Streptococcus suis
MFIIKGEVSRKDLIREIEKAIKSDELGAFIGAGLSIPAGFCSWKELLREPAEEIGLDVEKESDLVNLAQYYSNSKKRTSIDDLIKGQFAQLVKPTENHKLLSQLPISTFWTTNYDKLIEKALENNMKKPYVKTKDEQLRGTNHNFDAIVYKLHGDVETPEDAVITRSDYEEFGYNKRKLFREVLEGDLLTKTFLFLGFSFEDPNFNYVIGRLRVLLDEKNTRKHYCIMKRVQDTVENSEYEKAKQELQIEDLNRYGIFTCLVNDYNEITEILSTLLDRYRRKTIFISGSADNYGDFSDEEGKIFLHTLSMRLSEKGYHIVNGYGRGVGEYLLSGVAEYCLISGKNILDYLTVMPFPQSNISHIDIGKLYKENRKQMIEKCGIAIFVFGNKNGKIANGVLDEFSISKEKGLVCLPIGYTEGAAKEIFESLYSDDNSEAMITANEKVEGDISLTVENIIKAVNLMNKEDN

SEQ ID NO: 14540 - protein, 156 aa, Streptococcus suis
MARRVFFSFHYDNDVWRANTVRNSWVTQGKEAAGFIDKAEFEKVRRTGDRAVKNWIDEQLIGTSVTVVLIGSETLDRPFVQYEIEASRRRGNAIIGVTIGGIKDQYQSTSHSQSKYTQINGVWFDEIIDGFYDYVSEDGYSNMGTWIESAARKKGK

SEQ ID NO: 14541 - protein, 469 aa, Streptococcus suis
MRQEVFIKKFSKTIQEGNAAVFAGAGTSVDAGFVNWKKLVAPFATEIGLDIEKETDLIGLTQYYINYKSGNRGPVNQEIISQFSSPGAETEVMNLLTRLPITTYWTTNYDKVIENGLIKNNRRGDIKRKIDDLAVSRPDSDAVVYKMHGDVDSPDEAVISKDDYERYSDKNSLFVTALRGDLVSKTFLFVGFSFEDPNLESILGKVKILLGERTREHYCIQKQVLEQDYDDQDDYLYDKIKQDLKIRDLMRYGIDTVLVDDYSEIPKLISKIEEEYFKNTIFISGSISDYNENWSEEKVKQFCYNLSRSLVSKNYKIISGFGLGVGSSVINGALDEIYNTKYRHVSEHLGLFPFPQHDDGEKSLVERWTENREQMISEAGVCIFIFGNKLDNGEVVIANGMLEEFQIAKERGKIIIPIGSTGFAAKEIFDAMKESGDYSYLNDYWEILETEEDVIKVVNTINEIIEGVR

SEQ ID NO: 14542 - protein, 206 aa, Streptococcus suis
MATKVFISFRFSDGKEIKDELVDLFDESTEVINRSEDVDRSQMSEDTIQEYLYEKLKDTSVTIVLLTPEAVSYKKNWIGNYDDWLYDELRYSLEDRNNNRTNGVVAVYTDDAKDMILESSSHYCAHCQETKSCRTLKSFDNLARKNMLNIKQSYKKNPCNDLYDDSHDSYISLVSLEEFKQNYTKYIDNAKDKRDRLDEFSIYKRM

SEQ ID NO: 14543 - protein, 382 aa, Streptococcus suis
MRQYNNFYIKFQRQFKKAHGQVIETMPLEFSNKEYIERFKYMFPDKILLIERERNYWYGKRIIRKNLSKIRCKGMSLETDSFILSTSKHIRKIKRESLASNEEMVKKVNTARTISLEKLKAESLRRKRKLNYIQEVEPPYLRNYRNRFFKTHDLHERLEIIRELSKYDSKEVRKFFYAINGHIRNQSLKIEVQLYFQSLSLPFRLSRKKKGKKNFIDNEIIKNKKGPDELKKRLYINDLEKIKKFDVFLSHNSRDEEKIIEFYKKFNKKGQVVYIDWINDKYDLRREWCNASTVDIIKERIKQSDVFVLYFSGETLNSQWCTWELGYADALGKKICVYFSEEINRKGIPKFYVAYPELQMSKNIYVKIKGNEDILLEEWKKL

SEQ ID NO: 14544 - protein, 469 aa, Streptococcus suis; identical to SEQ ID NO: 14541

SEQ ID NO: 14545 - protein, 206 aa, Streptococcus suis; identical to SEQ ID NO: 14542

SEQ ID NO: 14546 - protein, 382 aa, Streptococcus suis; identical to SEQ ID NO: 14543

SEQ ID NO: 14547 - protein, 125 aa, Streptococcus pneumoniae
MAKHLGLFPFPQNANGEKSLKERWTENREQMISESGVCIFLFGNKLVDGKVELASGMMEEFQIAKEKGKIIIPIAFTGFAAKEIFDDMKQSGEYSYLDNYWETLETEKDFTKVFSMIDKIVNEVR

SEQ ID NO: 14548 - protein, 184 aa, Streptococcus pneumoniae
MATKIFISFRFSDGKEIKDELVDLFDESTEVIDRSEDVDRSQMSENIIQEYLYEKLKDISVTIVLLIPEAVSYRKNWTGNYDDWLYDELRYSLEDRKNNRTNGVIAVYTDEAKDKVLDDSTHYCQHCQQTKSCRSLKYFDNLARKNMLNIKSAYKKNPCNDFYDDEHDSYISLVSLSDFKEDYS

SEQ ID NO: 14549 - protein, 125 aa, Streptococcus pneumoniae; identical to SEQ ID NO: 14547

SEQ ID NO: 14550 - protein, 184 aa, Streptococcus pneumoniae; identical to SEQ ID NO: 14548

SEQ ID NO: 14551 - protein, 125 aa, Streptococcus pneumoniae; identical to SEQ ID NO: 14547

SEQ ID NO: 14552 - protein, 184 aa, Streptococcus pneumoniae; identical to SEQ ID NO: 14548

SEQ ID NO: 14553 - protein, 125 aa, Streptococcus pneumoniae; identical to SEQ ID NO: 14547

SEQ ID NO: 14554 - protein, 184 aa, Streptococcus pneumoniae; identical to SEQ ID NO: 14548

SEQ ID NO: 14555 - protein, 473 aa, Streptococcus equi subsp. equi 4047; identical to SEQ ID NO: 13651

SEQ ID NO: 14556 - protein, 165 aa, Streptococcus equi subsp. equi 4047; identical to SEQ ID NO: 13652

SEQ ID NO: 14557 - protein, 345 aa, Eubacterium rectale M104/1
MTIESLATNLSGNDAVVYKMHGDYLDPSSCVILKDDYEIYNDKRQLFTTTLQGDLVSKTFLFIGFSFEDPNLKYILSRIRILLDKNRRTHYLFLKKIQKNDYKKRSKNYYYDLNKQELQIHDLKRYGIETVLIDSYDQIPAILKEIKTASKCKNIFISGAAHEYGKDWETTAPLFIKKLVSSLCQKDYRIITGHARGIGSYVISSVIEECQSNIGKLEKHLMIKAFPYEDKNRPDYIQLKREYREGIYKYAGIAIFMFGNKESDAGTILADGVYEEYKIALESGAYIIPIGSTGYMAKKIWDEVSLHIYDFPYLKEAEDILQNCTNPNKVIDAVLSVVNIIQTKY

SEQ ID NO: 14558 - protein, 260 aa, Eubacterium rectale M104/1
MNNTKENFDFFISHSKETKQLIVIPLAQCLKSIGIDVWIDRKEILVGNHIYSEIQDAITRSKFCIAVIDQSFLKRTWPMKELELFNKKNNMRIIPIFVDLEKAIVYNEIPWLDGIAFEKMHTEPFDLNVHMSIFCRIISRLFKDNNTNKNSIEKTFESITKYDFPCKETLSSLIYFSKYNSSNLRLATIDLCNIGGIIYAISKTYSIPNNVITQMFLFSNILRDYCFNVNFIPDYNIYIGMYNAIVASLTQLDLLIQTIV

SEQ ID NO: 14559 - protein, 483 aa, Staphylococcus argenteus
MTIDKKKFIEKYVKALESNTAAIFAGAGLSCGAGYVNWKTLLNEAAEELELNIDKEEHDLVGLAQHYINKKRSRGNLNTVIMEQFSRRAELTKNHMLLAKLPIDTYWTTNYDCMIEKALDSEGRIVDVKRNQNQLTVSVADKDATVYKMHGDIDSIDKIILTRDDYEKYNLTHPKFREILEGDLLSKTFLFIGFSFTDPNISYILSRIRLVLEDNTRPHYCILKEVEEKEYDNTEEFMYAKIKQQLHIEDLSRFSIETLLVKNYSEITEILESIYKRYRRKTIFISGSATEYLPFNSETGKYFLHQLSKKLVENDFKLVTGFGLGVGSYVINGVADYINSNKKSKLQNHLSILPFSQDSSGDLDLKEVWKKNRLEMISECGMALFLFGNKEKDGKIVLADGLEEEYKIAKRQELVRLPINVTGYKTKNLSEQYNEEINKQFKEKILKMYNEINEYKCDFSNKQSIDEFVQKIVNLVIEIKKTK

SEQ ID NO: 14560 - protein, 202 aa, Staphylococcus argenteus
MARKTFISYKYSEAKDLRDKIVESLGEDAKYYQGETSDSPDMSDRITEYIKEELKNKIYSTSVTIVVISPNMKESNWIDWEIEYSVKQMKRGDRTSSTNGVVGVVMKHNGDYSWLRNSVTNSDGHTAIHTDNSYLYDIIVKNRFNQEPIEYTCDECKNIDALTGSFISLVEEDEFLGNPTKYIENAYEKSKKATNYNICRRK

SEQ ID NO: 14561 - protein, 362 aa, Staphylococcus argenteus
FGKVKRKHDHEEVYFNKSLKYPIRQVAEILPEKYTRYILLKEFQRLFPYQWNIIVERQQTYKEKAQHLYKVKKIKNRYNTKSAEEYFFSIPQVKYILSAGRMKKHKENYIASEIKIKKAALEKSRKNKNWKIEERLIKAKRYTQKVDPEYLNIYMKAYHKKDITTEEKLEILTELKKFDTENIVRFFRKLNDAEQNKMIRNLAFKYLQDYGHYVKLRENFKGKKKVYQTERASLDTKKPEDLYNDLTNKNIQSQKVYDIFISHSTKDKKTVEDIIRVFNEQNKTCYCDWTMDQDYLKRKYVGEYTKQVLKARMEQSKMLVLLRTENSVQSDWVSFEIEYFENLKKPIYIVESLEELLEAFSD

SEQ ID NO: 14562 - protein, 472 aa, Ruminococcus sp. CAG:9
MNSEINAFINKYVKEIRNNNAAFFAGAGFSKESGYVDWKTLLESIASELGLEVEKEHDLVALAQYCYNKHQNRGIINDVIFEEFSKQKEPTQNHRILARLPIGVIWTTNYDDLIEKAFDNVQKIVDVKSRNEHLSNTLANRECILYKMHGDKNNPNDAILIKDDYERYYKAHKQFLSALTGDLISKTFLFVGFSFQDPNLDYILSRIRVDYEENPRQHYAIMKSIDRKDYESDADYDYAKRRNDLFLEDLKRYRISALVIDDFSEITEILQEIERRLNQNNIFISGSAEEYGVFTKEEAENLIKLLSARLIQDEFNIISGFGVGVGSAVITGALEEIYMHNTRINNQRLLLRPFPQGKEARVLWQQYREDMISRAGISLYIFGNKKQDDNIVEANGVKTEFDIAIDAKHIVIPVGCTGYMAQKLWEQINLNIEEYYGKVNDEVRKTFQSLNTKMSNDEIVSNIVKLIKLLRR

SEQ ID NO: 14563 - protein, 166 aa, Ruminococcus sp. CAG:9
MAKRQVFFSFEYNKDAWRASQVRNMGKVDNSSTFSDNDWEEVKEKTDAKIREWIDNQMAKRSCLVVLIGATTSGRKWINYEIEKAYELNKGIVGIYIHGLKDKNGNQTTKGSNPFYNILIGKNKERLSKYVECYESFHLTSTYVYDDIKNNIEQLIEDAISNAGTY

SEQ ID NO: 14564 - protein, 196 aa, Ruminococcus sp. CAG:9
MAKDIFDKTIFDGYRVESLTESAQDIIPKYNFDGSTKTTVFISHKHDDLDETKGLIGLLERKYNIKAYIDSLDKSMPKKTSGETASKIKQRINRCNKFILLATNGAVESKWCNWELGYGDAQKFDTDNIALFPIKPDKTNDYDYKGNEYMRIYPHIAYYYGSERYSNGTVIKEGFYVCTDTENGRTIVPLEKWLKK

SEQ ID NO: 14565 - protein, 472 aa, Clostridium hylemonae DSM 15053
MATKKQFLRDYIKAIRDGNAAVFAGAGLSRSSGFVVWKELLRPLAEDIGLNIDDEYDLTAVAQYVRNKSGNRAAINSTILDAYGKDVARNENVSILTRLPIYTYWTTNYDHLIEEGLHDANRNSDVKIDYKQLSNTKRDRDAVVYKMHGDVDHAADAVLTKDDYAQYERNYPFFRSVLQGDLISKTFVFIGFSFEDPNLDSILGQIRLLLDENIRNHYCFVKRVNRTDTMDDESFGYQKARQDLREEDLKRYGIQTVFIDDYSEITEILRELESAVLANNIFISGSADFFEGVWEKTKVEELAYKLANQLVKEEFRITSGFGLGIGSAVINGALDEIYSSRYKHISEHLCLRPFPQGIVDAEECKSKWKKYRENIIKENGVVIFMLGNKKADGKKSIADGCLQEYEIAKKNKCVIIPIGSTGDAAEIIYHEMKENKADFPYLEKYLDILGTETDIDKILGAVTEILKAKRIV

SEQ ID NO: 14566 - protein, 203 aa, Clostridium hylemonae DSM 15053
MAHKTFISYKYDEAQRLRDDIIEALDDDATYYKGETSDSPDLTDTSTENIKKNLRDMMYDTSVTIVIISPNMKNSKWIDWEIEYCLKDNTRKGRTSHTNGVVGVIMKYNSGYSWFKSTHINDDGCSSTTYEESKVYDIINNNRFNQNPKKYSCDVCKTVNALTGSYIAYVDEETFLSNPTKYINNAYDKSENDAEGYDLTKKR

SEQ ID NO: 14567 - protein, 424 aa, Shuttleworthia satelles DSM 14600
MGFYDVFKFKNKRSAINELLSESFPSNKKPTENHRILSQLPISTYWTTNFDTLIEDALKKNNKNVSVRKDDKDLQLSYKNYDAVVYKMHGDIQCPSEAVITRDDYEEYGVNSRKLFRDVLEGTLLTKTFLFLGFSFSDPNFNFVLSKMRVLLGDDNRPHYYILKKITEPNRDNFEDEEYKKALEEYKYDLIKQELQIADLDRYGIKICLIDSYEEITEILEIILNRYKRKTVFLSGSAETYAPLDIQVAKDFIRKLSFELVKNGYKVVNGYGLGVGTYVINGITEYCYDHRNIKIEDSLKLMPFPLSAINSEQLRTTWEKYREEMISQCGIAIYMFGNKQKDGEIIKADGVKREFNIAESYQLVNIPLAFTGSMAQELYSENGDMVENVLNNDEIEYIANFHDIDTNVDKIIKMINRLNNKEEC

SEQ ID NO: 14568 - protein, 163 aa, Shuttleworthia satelles DSM 14600
MARRVFFSFHYDEDINRSMTVRNSWVTQGKEAAGFIDKAEFEKVKRNGENAVYKWIDKQLEGTSVTVVLIGKETLKRPFVQYEIRKSIERGNAIIGIYIHNIRDMRTQRTSVKGNSHTVIGYYNDDTPAYFDSICDGLYDYSQDNGYYNLGSWIEKAARKKGK

SEQ ID NO: 14569 - protein, 189 aa, Shuttleworthia satelles DSM 14600
MKEIFEQGEFSEYRINNLQKSRGVINESFAFFEEKVPVFISHKHDDLDDLKGIIGFLEKNFNVIAYIDSRDLSMPKITSGETAEKIKDRIKKCKRFILLATDGAVESKWCNWELGFADAIKGKKAVLFPMKEKGSNYKGNEYMEIYSYITYFDGREEYDSGKKVEAGYYVMTKSKDKKSIIPLSSWLKE

SEQ ID NO: 14570 - protein, 376 aa, Shuttleworthia satelles DSM 14600
MGKTARQFNKIYIDYKKKFKKPIQQVLMLMPYTFSDDDIVNTFKELYPHMWDDLNKQYNFWHNKNMVLIKYGKKSRYNFRKPYNFILDCAFHSVNKLRKDKNRIILGKDEVGNLKNEIKQLSKSKFDKRKQKVDGTLRFIQEIEPSYTSFFIDRYFNTYDLHQKLEIMRELSKYKSSNITEFFYKVNSCTRNFSLKIEAQNYIQSIGLPFMLRRKKKGKKNYIDNEIVKNNSGPEVLKQRLYVDDLEKVKRFDVFISHNSSDMNQIVELYKNLNTKGYVAYIDWVNDKYDLKREWCNASTSEIIKLRIQQSKIFIIFLTESTFKSQWCPWELGYADALNKKIYVYISPNFKNVDIPIFYRSYTEIKSVDEIIIENN

SEQ ID NO: 14571 - protein, 475 aa, Anaerococcus tetradius ATCC 35098
MKIGISKMELLDELEKAISINEFSVFIGAGLSKGAGYFDWKGLLRAPAMKLDLDVDEEHDLVSLAQYYCNKEGRPEINKLIRDTFPTSLPLNENYRLLSYLPIDTYWTTNYDILIEKSLRQNSREPLVITEDKNMHLQSKKYDAVVYKMHGDVENPNDAVLTRDDYERYGITERALFKDVLEGHLITNTFLFLGFSFTDPNFNFILGKLNALTDRNTRKHYCVIKKVLAEDFTKEVDGKKVFDEEKYKYNQVKQKLFIEDLKSRYKIETYLIESYDEITEVLSDLYSRYKKKTVFISGSADDYDPLDEQDAQRLISRLSYRMAEEGYHIVSGYGKGIGSYIIDGVTEYCYSKHNKKISDYLTLMPFPLNSVSNKDLKDTWSQYRDEMIQSAGIALFMFGNKLKDGNLETADGMIEEFEISKKYKLDIISLEYTGNTSKQISELNREKSNNFKTFKDVNSSVEEIIEKLAVMSRRR

SEQ ID NO: 14572 - protein, 205 aa, Anaerococcus tetradius ATCC 35098
MARNVFVSFRFSDGEKYKNELCEKFKSEDVIDYSENEDRSSMSDESIQKYLYNKLKRTSITIIILTPDAVNHKKNFFCQYDDWMYDEIRYSLEDRSENRTNGLIALYTSEAESLLYTNSTHTCDKCKVEKCVKSINDFDNLVRKNMMNVKSYYKENACEGLYDSLKDSYCSLVSFDSFLNNMDFYLDKTIEKRERKDEFNLCKRM

SEQ ID NO: 14573 - protein, 478 aa, Enterococcus faecium 1,231,502; identical to SEQ ID NO: 13220

SEQ ID NO: 14574 - protein, 161 aa, Enterococcus faecium 1,231,502; identical to SEQ ID NO: 13221

SEQ ID NO: 14575 - protein, 283 aa, Enterococcus faecium 1,231,502; identical to SEQ ID NO: 13222

SEQ ID NO: 14576 - protein, 485 aa, Paenibacillus sp. oral taxon 786 str. D14
MSTDKEVLIREFLKALHEENAAIFAGAGLSAASGYVNWKGLLKEVAEELHLDIEKETDLISLAQYFYNKNGRQRLSQLVIDNFSAQAQINENHRILAKLPIDTYWTTNYDRLIEMSLIEAGKNPDVKIKQTDFALLKPRRDAIVYKMHGDIERADETVLIKDEYETFYEKNQLFAMGLKGDLISKTFLFIGYSFEDPDLEYILSRIRVLMGQDGRTHYCFFRKVSRNDYCHLPQEEGDEMFRYNSVKQELKCADLERYHIKPVLVDEYEDITEILNTIYQRYIRSNILISGSAAEYAQFDSDEKVAQMFIHQLSHEIVKADFKIASGFGLGVGSAVINGSLDFIYSTNKRKISDYLILRPFPQFATNGMDLKDLWDKYRRDLISDVGCAVFIFGNKDENGQVVDADGVRKEFDIAVSKGVKVIPIGATGYVSKALWEEVIADFDKYYFDFPALKPDFEFIGDAKNDHQEIIRRVIKIIRVLRDGR

SEQ ID NO: 14577 - protein, 227 aa, Paenibacillus sp. oral taxon 786 str. D14
MNKMGRKIFISYKYSDSNVYPLNNDYSTTVRHYVDELQDKLKEDDHINKGEADGEDLSEFKDETIWTKLKDKIFDSSITIVFISKNMKSAFVSEEDQWIPWEISYSLKELTRNGRTSSANAMLAVVLPDKNNSYEYFIQDNSCPYCNCRTLKTYTLFTILRENMFNIKSPTYNDCSNHSELNKVYTGEASYIRSVKWVDFINNIDYYLQIAYDINKNIDSYNIRKSV

SEQ ID NO: 14578 - protein, 471 aa, Acinetobacter junii SH205
MVTKASLIRNLVKELQADNLAIFAGAGLSKPAGFVDWKNLLREVAEELDLDIEKESDLVTLAQYHVNSKRNNRAKINQVIIDEFSKDISITENHRILARLPISTYWTTNYDNLIEKSLSEIRKVVDIKHEPIQLLTSLRKRDVVIYKMHGDYLHPTKAIIIKDDYEKYLLNNGEFYTALRGDLLTKKFLFLGFSFADPNIDYILGKIRASYSEHHQTHYCILKRVQRLENEELADFEYRERKQKYFIDDLQRVGVETLLVKEYSEITDILIAVEREFKRKTIFISGAAHDFSPFSKENVEKFIFELSKEIIKLDFRIVTGFGLGIGSSVIAGAIEELLLSGKRITEDELILRPFPQTTSGEKNLGELWSAYRKDMISFAGISLFLFGNKYDQKTEKVIDSSGMIEEFEIAKANNCVLLPIGATGSMAQKLADKVLEQNLQPSISLDSVNEKITDLEVLKERILEILKSLKK

SEQ ID NO: 14579 - protein, 231 aa, Acinetobacter junii SH205
MSRKIFVSYKYADTNVLSLTDNIWETTKSRDYVTALQDLLNENDEIYKGENDGEDLSDFADSTIETKLKKKIFDSSITLVIISPNMKNLLESEKDQWIPWEISYSLRNKTIGDRVSRPNGMLMVVLPDKNGKYDYYIEDNTCSYCNCRTLKTNFLFPVLRKNTFNHKKKVESDCDQHSSSPVYTGDHSYIESVKWQDFIKNPSIYLDNATRKREIIENFDISKMLCDDFVF

SEQ ID NO: 14580 - protein, 194 aa, Acinetobacter junii SH205
MAFFTKDFISKYSDKTRRYSFESYNDLLNESIKEQSALRNYDVFLSHSVKDAKIVLGVKNWLEANGMYVYVDWIDDKQLDRSQVTSRTAETLRNRMRQSSCLLYIATDNSSQSKWMPWELGYFDGYSIGKVAILPILNSEDDYFYGQEYLGLYPSVKNWTHRDIGIYGIDKGYIPINGKLVDLSKFIKESPYQW

SEQ ID NO: 14581 - protein, 478 aa, Enterococcus faecium TX0082; identical to SEQ ID NO: 13220

SEQ ID NO: 14582 - protein, 161 aa, Enterococcus faecium TX0082; identical to SEQ ID NO: 13221

SEQ ID NO: 14583 - protein, 283 aa, Enterococcus faecium TX0082; identical to SEQ ID NO: 13222

SEQ ID NO: 14584 - protein, 478 aa, Streptococcus sanguinis SK408
MIGKIGVVNMEKELFIKKYTEVIQEGNAAVFAGAGTSVDAGFVNWKELVRPFSEEINLDIDKETDLIGVAQYYINSKMGNRGTVNQKIINQFSSSDAETDVMNILTRLPISTYWTTNYDEVIENGLEKNNRRGDIKRKVDDLAINIYDSDAIVYKMHGDIRSPQDAVISKDDYERYGEKNSLFVTALRGDLVSKTFLFVGFSFEDPNLESILGKVNVLLGDNKREHYCIQRTVLRKDYKTKKEYDYAKIKQGLKIIDLKRYGIETVLVNDYTEIPQLLLEIEREYFKNTIFISGSISDYNENWSEEKVNQYCYDLSSFLISKDYKIISGFGLGIGSSVINGALDQIYKTKYRHVAEHLGLFPFPQNANGEKSLKECWTENREQMISESGVCIFLFGNKLVDGKVELASGMMEEFQIAKEKGKIIIPIASTGFAAKEIYDEMKQSGEYSYLDNYWETLETEKDFTKVFSTIDKIVNEVR

SEQ ID NO: 14585 - protein, 206 aa, Streptococcus sanguinis SK408
MATKIFISFRFSDGKEIKDELVDLFDESTEVINRSEDVDRGQMSENIIKEYLYEKLKDTSVTIVLLTPEAVSYRKNWIGNYDDWLYDELRYSLEDRKNNRTNGVIAVYTDEAKDKVLDDSTHYCQHCQQTKSCRSLKYFDNLARKNMLNIKSVYKKNPCNDLYDDEHDSYISLVSLNDFKEDYSRYIQNAQDKRERLDEFNIAKRM

SEQ ID NO: 14586 - protein, 388 aa, Streptococcus sanguinis SK408
MGKVMRQYNEFYIKLQKEFKLAHNMTIEAMPAKFSNKDYVKKFIYMFPDKISRLIIERNYWYGKRIIKKNLVKIQSKRMSLETNDFILETSKYIRRQVRKNILSIEERKTQADEIRKKSLAKLKLQTIKRKKSLDYIQEINPSYLEHYRKRFFKTHDLHERLEIIRELSKYDSKEVHNFFYAINGHVRNQSLKKEVQSYFQSLSLPFRLSRKKKGKTNFIDNEIVTNRKGPEELKKRLYIDDLEKIKKFDIFLSHNSQDEEKIITFYKKLNKNGQVVYIDWVNDKYDLKREWCNTSTVDIIKERIKQSDVFVLYFSSKTLNSQWCAWELGYADGIGKKICIYFSEKIDRTIIPKFYSIYPELHLSENITIEVDKQSSIIFNDWKNRSS

SEQ ID NO: 14587 - protein, 476 aa, Dysgonomonas gadei ATCC BAA-286
MFTKEQEEFIENYVKALREKNAVVFAGAGMSIPCGFLNWKKLLDPIAKSMDLDIDEEHDLTALAQLYVDNNSGVRGRLNQLLQDSYGKIGIKESTNHEILARLPIEIYWTTNYDNLIESALIKAGKTPDVKSKHNDLTVNKSKRDAIVYKMHGDIGDVAETVLTKHEYEDYNEKREYFSNAFKNDLISRTFLFIGFSFTDPNLDYLISRIRTAYKQNIRGDDYYFIEKETDAKKINKQRLKIVSLKRYGLNPVVVDSYEKDIPRILREIEIRYLRNTVLISGSAEEYGHYVEKKAGEFLHNLSKEFSKNSYKILSGFGWGVGSAVINGVLDNMELEKVQRLDDYLLLRPFPQFETGKKELKELWTDYRKNFIPLAGIAIFVFGNKKKVDTGEIVKADGMIEEFNIAIENGLKVIPIGATGYVAEDLWQKVMSDFDKYYPKETGVTKEDFQLIGNKDLSDQELISATIKIINKLNKN

SEQ ID NO: 14588 - protein, 203 aa, Dysgonomonas gadei ATCC BAA-286
MARKTFISYKYSEARGLRDTIIKRLGEDAKYYQGETSASPDLTDASTERIKEHLKDMIYDTSVTIVVISPNLKESDWIDWEIEYSLKEVKRGDRCSKSNGVVGVIMKYNGGYDWLVSQNRNNDGCVSRQIDSSKLYGIINNNRYNLNTDNKYACSTCKTFNQLDGSYIALINEENFLSDVDYYIENAYQKSQCIDDYDIIKKK

SEQ ID NO: 14589 - protein, 191 aa, Dysgonomonas gadei ATCC BAA-286
MGIINKSQLFEYRNANRYINENLRYFSAESKVGKVSVFLSHKHDELKELDGAISFLKKQGVSVYVDWLDDEMPKSTSGVTAQRIKTKIKENSKFILLATEGAINSKWCNWELGYGDYCKYLNNIAILPVRDDYSDFSGSEYLQIYPRIEYVGYMSVPRKIGGYFDEGYYVIMPTNNEGVSTYTKLSEWLRR

SEQ ID NO: 14590 - protein, 1379 aa, Saccharothrix espanaensis DSM 44229
MSNKTFIKQLKRDSETNKIALILGAGVSSAATKGALVATWQGLLLDGLEFLADIDSDPGPAKIFHTALSTATDADALVAVAQWVRSRFNRVPGEFSDWLNRTVGDLEIKDTTLLSTLPNVERIVTTNYDILVERHLGRQSLNWTDDNASNEYRRNPKPYVFHAHGLYKDPRSIILSGEDYGRLEEDNGVHRMLTDLASSYSLLFIGFGQGFEDPNFRRLVNWLRNEQGTSPYRHYLLLLDSERTSVDFYRNLSGRITPIFYGADHSNLPNFLADLTRSNTRPADELLSVVAEPPAEQKLTYAQLLPSEMALIIGDVERELGAALQLSPFQLSALKLCRSAVVDGKSGLLSAVTGTGKTTIARIAVNMAVALGKSGIELLPTKALVAQERSEWDRWIDAWTTNSHKKMRVYGSSRDYPENDRPVSRGRYEVALAIYEKLGVYLVSGRTPLANTRIAVVDELQMLVENSQRAAKLEAILTSIRLMPEALRPAILGLSATLPADATESLRRWLGVNEDMIAMSNQRPIPLDTYVMDAIGWKVQPDAHLFNIPGQAPPPPSDYRKHDLNGRLQQNRETLSGKIPHLATGELAATLIDHVLEKDENRRIICFVPSRTSALELASAVHALLKNRTGAPTKGSPWSHGRFATEQTAENSEERYNALRYSDLPQADVVVRGLREGVAAHSASFPAPLRRLLEDEFRREDGLLRVLIATDTLAVGVNLPADTVIATSISGYTGTPRRRHLLTPSDLDNKAGRAGRRGKTQRSRGEFYLIASAFDLENIEGLSAPDLQTLSTVEGIYNEFVATDTRTSKIASCYRTTPELSSLVLHILCQDGFAREESAWLRRVEEILSCVLLAHEKDAPALPSAQEVLDELVTRKLVVKRHNGKLTLSGIGVALARSSLDLDAANTLERLARLVSANAGDIDLLWNTCRSQSIQTTTDWVSLPPVATKHYPSLKEAVIRLGNAYCAESELLRRDAARRCGANNYPVREALVERGSSVVSTELRELLLSDGETASDSDVTALLRALVSYEWSRGLPFGEIKARFSTVVKSEESQPGEAPITIKIHYSDVEQLCEQIAGVISSAAEICVAMDGLDYSGRAMRLGQEVETGLPAWLAPIAKMRIPALHRERLAFLWDAKPPADSIVEVLERPEFVEHPGIRRSDLQSAAQTISLREQEDQTFRNRIAQRWAATFIPGGEGEVFEDISDRLDAAQDAKDYLGVLCDLANSLRVDVGLIEREKQFVSVLWQAGQRIARIYVPSGPLTQAGVEWVGKRKGMVILSTRMVPGAITASDQPTQARFVQPEHLLSMLARLIDTRETGLHPEEVVDGVSRIMVSSFSSESWYLYEPDSVGAPPPFPGDELPSLERAVAVPSADDSMLD

SEQ ID NO: 14591 - protein, 404 aa, Saccharothrix espanaensis DSM 44229
MDSTPGVTIELAVLDQDSKRFGVASSPIRTGSVQVHGWQVHPIRVAPGQFDDAKAYLVKLNYELETTPSTPELNWFEFGVELRAGSVVDAVPHHTQPTQTSLSYVVNDHLNLVPATNGTTSAAHLPAAGETIHTFGVGSNGVRWQHRAEPDAGVRPGSRVVWLVTLVEQGSTHLDLTVVARFDQRPTLDWNVLPALTPADLRIDLPTAPNLRPAVTTQPANATTVTLLPSGPRVFISYAHDNDAHKQQVRDFANLLMGCGSDVRLDQFAGPGRKDWFLWAIDNIDNADFVIVVASPKCMAVGEGKADRNENPGMHCELGVIRDRLQGDRELWERKLLPVVLPGESVDNLPVFLQPQAMNRYEIDELTEDALSDLLAAIHHGIEDDGRSPVVLTVTTTGRALADS

SEQ ID NO: 14592 - protein, 473 aa, Bordetella bronchiseptica Bbr77
MSPQHVINGFIKEFVQDLHNGSAAIFAGAGMSKGSGYVDWPELLRDIANELGLDVAKEHDLISLAQFHVNNKRTADGLSKKILREFSEQAEPSEVHDIVARLPIYSFWTTNYDTLIEDSLRRAYRVPDIKSQVDQLSLSRPKRDAIVYKMHGDVQMAQDAVIYKEQYEKYYLTHAPFIRALSGDLVSKTFLFIGFSFTDPNLDYVLSRLHGGATKRTHYCFMREAQRDVGDDDELFRYKVRKQELRIEDLKRFGIQTLLVDNYSDINDILKKVEALYRKRTVFFSGSAEDYGEWARQDAQNFIHDVAANCVRANCRVVNGFGWGVGSAVINGALEAIYGDPQKYSEAQLIVRPFPQHGSNLKDLWEQYRQRMISLAGVALFFFGNKRDGDKVVNANGVRREFEIALEHHLLPIPVGATGFMAEELWNEISADLAKYYGGYKWVIPMVQKLVDPKTPPNEMVKVITEIIKQLNK

SEQ ID NO: 14593 - protein, 146 aa, Bordetella bronchiseptica Bbr77
MARKVFFSFKYDDVHRAMNVRNSNVIGGIMKSGFIDKADFEKVEREGNRAIQTWIDNQLNGTSVTVVLVGANTHKSKWVKYEIDQSIARGNGVLTIDISKIADMQGVTTNCCSLRVPGYKHYYWNNDNGRANLGAWVDAAAKAAGK

SEQ ID NO: 14594 - protein, 484 aa, Serratia marcescens subsp. marcescens Db11
MPERDIELFIRDYVNDIKSGSAALFAGAGLSIPAGFVSWKELISDIAYELGLDIEKESDLISLAQYHLNEKGNRHKINQKIITEFAEQAEETENHRIIARLPIASLWTTNYDDLIEKTYARYNRVCDVKTTPESLTNNIHKRDVVLYKMHGDYRNPNQAIITREQYETYSRTHLPFINMLMAELTAKTFLFIGFSFEDPNLQYVLSRLYAQYGEGQRNHYCIMRRVQLGDSGSEDQASCDYNSRKQGLMINDLRRYGIQTLLVDDYRQITDLLYAIETQFKKSTVFISGSADNYQPYTREESIQFIHRLARLLIHKQYRIVNGFGWGVGTAVINGALEAIYDSQGKISESQLVLRPFPQFASGGITLPALWHEYRQNMISLSGIAIFLFGNKRNAEGEYVLADGLLKEFQIATEQGCVCIPIGCTGSASAEIYRKIKEEMKETLYYRNPAAMNLLDQLNEPGSLAEKKKSLLALIDIITKDNPR

SEQ ID NO: 14595 - protein, 144 aa, Serratia marcescens subsp. marcescens Db11
MTRKCFYSFHYEPDNWRASQVREMGSLEGNRPATDNDWEEVKKGGDAVIAAWIKGQLDNRSCAVILAGKDTADRKWINFEICEAWKKGMGVLVVYIHNLKDSAGDQTTKGKNPLDHIKLGDAKLSTIAKAYDPPYSTSTMSITI

SEQ ID NO: 14596 - protein, 485 aa, Xenorhabdus bovienii str. kraussei Becker Underwood
MASLNNQPIDLFIRDFVKELNENNTAIFAGAGLSVPAGYVNWKRLLTPLAEELGIDIEREHDLVSLAQYHNNANGRGKLNQQLMDEIGVSREPTINHNILARLPISTYWTTNYDKLIEKALEQAGKIPDVKYTTNQLAITKKKRDAVVYKMHGDIDHPDKAVITKDDYERYQMSFGPFINALSGDLISKTFLFLGFSFTDPNLDYVMSRIRIHFNEHQRQHYCIFKTCSRTDYDNDEDFNHAEIKQQLVINDLKRFQVKVLLIDSYDQIATILRRIEMTYRCNTIFLSGSAHVFEPWTRTKVEGFLCRLGHILIEKGYRISSGIGLGIGNALITGAIQKVYQNHGDSIADHLIMRPFPQYIKEVDERQRIWRQYRQEVIGYAGIAIFFMGNKSEGGKVVVADGCIKEFEIAHNLGLVVIPVGASGHAAQDIFESIKADYTKYYPQADAAFLEYIEQLNNTTDDPETLLSSLLAVIDFASKFQKQT

SEQ ID NO: 14597 - protein, 196 aa, Xenorhabdus bovienii str. kraussei Becker Underwood
MAKRVFFSFHYQDVIDFRANVVRNHWRTKPNREQAGYFDASIWEEARKKGDIGLKRLINGGLTNTSTTCVLIGSQTYLRPWVRYEIFKSFKRENHLLGVHINSIKGKDSATKELGKNPFDYLAVEWSESGKTVTMFELKNGKWNPYTQIDGSASYRLENLAPVEYRGKFIQISKLKAVYDWVENDGYNNFSDWMEG

SEQ ID NO: 14598 - protein, 478 aa, Enterococcus faecium VSE1036; identical to SEQ ID NO: 13220

SEQ ID NO: 14599 - protein, 161 aa, Enterococcus faecium VSE1036; identical to SEQ ID NO: 13221

SEQ ID NO: 14600 - protein, 283 aa, Enterococcus faecium VSE1036; identical to SEQ ID NO: 13222

SEQ ID NO: 14601 - protein, 478 aa, Enterococcus faecium VRE0576; identical to SEQ ID NO: 13220

SEQ ID NO: 14602 - protein, 161 aa, Enterococcus faecium VRE0576; identical to SEQ ID NO: 13221

SEQ ID NO: 14603 - protein, 283 aa, Enterococcus faecium VRE0576; identical to SEQ ID NO: 13222

SEQ ID NO: 14604 - protein, 478 aa, Enterococcus faecium VRE1044; identical to SEQ ID NO: 13220

SEQ ID NO: 14605 - protein, 161 aa, Enterococcus faecium VRE1044; identical to SEQ ID NO: 13221

SEQ ID NO: 14606 - protein, 283 aa, Enterococcus faecium VRE1044; identical to SEQ ID NO: 13222

SEQ ID NO: 14607 - protein, 479 aa, Vibrio parahaemolyticus M0605
MKLRKQAFLRDLQKELAEENVAVFAGAGMSAGSGFVNWAELLRPIAEELGLDVDKENDLVALAQFHCNDNANNRSQLNQRLIEEFSRKSIETENHRILCRLPIRTYWTTNYDKLIENALEKSGKIADVKHTKEHLSTTKPKRDAVVYKMHGDVEHASQAVLTKDDYERYHVKMEQYLANLKSDLISKTFIFIGFSFTDPNLDYILSRVRVAYENNQRRHYCFIRNIKKYKNEEIVDFEYRQRKQDFFVKDLERFNIKTIIIDEYEEITELLRKLEIKYKSRTIFISGAACEYGDLKENEALRFVYDLSKRLVKNNLRVVSGFGVGIGSTVISSVLEETFNTKLAKIEDHLVLRPFPQSTEGVEPLGTLWTKYREDMINYAGIALFLFGNKKSDSDVILSNGMREEYEIAKKQGLLLLPIGSTGYMARELWSELNDEIQNSSTASSKMKRLYERLGTEQFESDSVIELIMEIIELMDNEQ

SEQ ID NO: 14608 - protein, 163 aa, Vibrio parahaemolyticus M0605
MTKDIKKNVFISHHHKDDASVDGVARLAAAKGYQLRNSSVRMKPENQRRVDEKKVSDRTIARLLRMKMRWASQVIVVIGKETHTRPWVNWEIQAAHQLGRPIIGVYENGLTGDVKLPENLEKYATSIVSWRSDAIINALEGKTSFQKTDGTERDKVKGGNVVC

SEQ ID NO: 14609 - protein, 480 aa, Sphingobium lucknowense F2; identical to SEQ ID NO: 13329

SEQ ID NO: 14610 - protein, 155 aa, Sphingobium lucknowense F2; identical to SEQ ID NO: 13330

SEQ ID NO: 14611 - protein, 245 aa, Atopobium sp. ICM42b
MNNIVNKKELIGIIEQALYNNELAVFAGAGLSIDAGYYSWEKLLEEPAKKLELDISKEKHDLISLAQFYCNKNKRSAINELLLDSFPSNKKPTENHKILSQLPISTYWTTNFDTLIEDALKENNKNVSVRKADKDLQLSYKNYDAVVYKMHGDIQSPSEAVITRDDYEEYGINSRKLFRDVLEGALLTKTFLFLGFSFSDPNFNFVLSKMRVLLGDDNRSHYYILKKLLNLIRISLKKKKNIKKH

SEQ ID NO: 14612 - protein, 376 aa, Atopobium sp. ICM42b
MGKTARQFNKIYIDYKKKFKKPIQQVLMLMPYTFSDNDIVNTFKELYPHMWDDLNKKYNFWYNKNMVLIKYGKKSRYNFRKPYNFILDCASPSVNKLRKDKNRIILGKDEVANLKNEIKQLSKSKFDKRKQKIDDTLRFIQEIEPSYTSFFIDRYFNTYDLHQKLEIMRELSKYKSSNITEFFYKVNSCTRNFSLKIEAQNYIQSIGLPFMLRRKKKGKKNYIDNEIVKNNSGPEVLKQRLYVDDLEKVKRFDVFISHNSSDMNQIVELYKDLNTKGYVAYIDWVNDKYDLKREWCNASTSEIIKLRIHQSKIFIIFLTESTFKSQWCPWELGYADALNKKIYVYISPNFKSVDIPIFYRGYTEIKSVDEIIIENN

SEQ ID NO: 14613 - protein, 503 aa, Sorangium cellulosum
MSTLMDNANTTSAEVDAAVIEELREAFESGELVLFVGGGISAAAGLPTWRQLVDLLVERVREQVGDDVVTAEVASLARSQRYSEALGAAEHALGAAEFNAFVEDALDDEGLDPPRIALAIAALRGKLRAVLTTNLNHLLERAFGHEWETMWRVTDDVAWRRRFILKLHGTLKEPGSWVFARERFLASIAAPDVRRSLTAVLSNCPVLFIGFGRADGNFDEMLSDIHALSGSSPPPRFVIVPSASLTPYRRTMLVDMGFLLLSYETPDGSHDRALEILERMSEPRARAATTTSRPSRSILPPPIPDLELPPSSSPLGFPAYELPPDSAGYDDTVTVPGALGAPRRDRASEPPASPIEVFFSYSESNRELRDKLETHLAILKRKGVIRGWHDGEIGAGEERDRALAEHLETAKVILLLISADFLASDFCYDVEMQKAIERHERGEARVIPVILDACDWEGAPFGRLTSLPRGGRPVTSWVNQSEAFTDIAKGIRKQVEQLTQNPP

SEQ ID NO: 14614 - protein, 956 aa, Sorangium cellulosum
MVALATSPADVFFSYSPRDEDLRPKLETHLDALKRQGVIRTYQGFALGGGKERREVIAARLREARVVLLLVSADFLSADGWLTPEIRDALARHDAGECRVIPVILRPCAWEKTLLGRLQPLPNRARPVTSYPNQSEAFTEIAKGIRSAVRETEPPTLRPVTRRPSSSPDAEPHIKKLPPRNPGFTGRDRLLDELRSALTTGGPAALTQAISGLGGIGKTQLAAEYAHRYASQYNVVWWVRAEEPATAAEDFARLAAALDLPEQNEADQRIAIEAVRSWLSRNDRWLLVFDNVNDPKDVAPYLPHPRAGHILITSRNPSFRGIATPLTVPALDRADSVKFLLGRTGQSDERAAERLAETLGDLPLALVQAAATIKETRSSIATYHAVFGDHQRELLLRGVPMDYPTPVATTWGLAFQEAQRFSPVAVDLLSLCAFLAPDDIPREGLADAAPHLPPALAEALSDPLMLDEAVAALRRYSFIDVHEGALSVHRLVQAVVRDRLAPEDRRMWAEAAVRLVDHAFPESSDDVETWPFCARWLPHALAAASQAEAHDVAKEVRGRLLARFAVYLQGRAAYAEAKGYLERALALHEAVFGPDEPKVAAVLRSLGSVLHDLGDLGGARAHLERALAIDIASVGPDHPDVARDVNDLGSVLMDQGDLPGARKHLERALAIDEATYGPDDPSVAIRLNNLGALFRDLGDFAGARVHLERALAIDIRAYGPDHPTVAIGRTNLGRLLHDLGDLKGAREQFEEALKIDEHSYGCYHPRFALALNNRGRVLRDLGDLAGARADFERALAIVEDTYGPDHPDVARDINNLGSVLRDLGDLEGARANFARVLRIAEATYGPDHPAVAIGCNNLGSVLQALGELPGAREQLERALGIAQATYGPDHPVVASIVNNLGRVLQALGDLSGAWQQIERAVAIATKALGPTHPSVQIFSRNLARLGDALGGGAEAT

SEQ ID NO: 14615 - protein, 1686 aa, Sorangium cellulosum
MSSGTARAIVAPMTTSQEPASSDTEVPSDPVLQDLRKAYESGQLVVFAGAGVSAAAGLPGWRRLTEQLAERLRARGAGEGTLAEIEELAQKHQYIEALSAVKLALGAPEFCAAVERALDDSDRDVPDVACVIASMRPRLRAVLTTSLDRLLDRAFEGEWDVLARAPADIASRRRYILKLHGALRERDTWVFTREQYDRAIFASPGLQAAVRALFHACPILFVGFGFADDNLDQALGEIRALAGEQPPPHFALLVGDTLTPFRRRKLEAAGVRIIAYENPDGAHARVPAILRWVARGADGGRDGAAIGSRGTEQIEQSDFLARVERVCRLKEPEDATIERLPAPAPFGALLRVSARRGRIVRTYPVAAIEQRVTDEILRMFLERVDAPYRRDDPGLISTLVYRGSSAPEALVRAAERARVSVESFIEYQGLLDFTHYLERQTQRLASDLVYPPSLYVDQRLGFKVGVDEAEEGDALSTVSEWLDSPRGRFIVILGDFGTGKTFLLHELARRLGSAGGPLVPVLVEMRSLEKGRTLEELLAQHFARARFERFQMESFLYMLSEGRIVLLFDGFDELALRVSFDRAEEHFDTLIQAASGNAKVVVTSRTQHFLSDRRVETALAKRAGSIPGYRIAKLSPFTEDQIRRFLVNRLGGEADAERRFSLLGGVKDLLGLSRNPRMLGFIAGIDEGRLQEVAASDGEVTSAELYRLLLDQWLRKEDERAHPRGAQVGLTLEQRWRAVTELAVQLWQRGERTVDVSALPSEILAAAQELAKNKLDPGAIAHEVGAGTLLVRDEEGSFSFIHQSVPEWLVARRAAEEVAGGGEPVSLGLREMSELMADFFSALAGTDTAVTWARAALASGSKESAKKNALLVLKRLGVEAHVGVNLAGQDLRGRDLSRQDLRGADLTGADLTGARLVEADLRDASLERAVLLRADLSRARLEGANLRDAELSFARLLGADLRDASLAGARLRVAELVGAQLSPGALDGCLTTGAAMPEPAHVEPMIAPVSDSTAVAFSPDGVFLASGHVNGSVRIWDLATGVVRVVLVGHKGVVHSLAWSADSGTLASGSSAATVRLWDVASGAVRFIRRRHRDSVTSIAFSPDGSMLASGSKDATIQLWDAVSGAVRYVIICHPGAVHDIAWSPDGTTLASAHEDGSVRLWDAMSGAERGVLAGHHRRVQSVAWSPDGATLASGSYDSTIRLWDVATGSTRLVLEEHQSWVVTLAWRPDGSTLASGSYDSTVRLWDASTGVAPLVLRGHGGFVAGVAWSVDGATLASTSLDGTIRLWDGSTGAIRLTLKNLSDVVWCVALDRAGTMLAAGSQVSGIRLFDPVTGTIRRKIEVPTRVWSLAFSPDGATIASRSEAAAVRLWDVASGAARLTLDGSGSVALSLAFSPDGATLAAGWQRSDLWLWDAVTGDRRLVFKGHKAEIWSVAFSPDGATLASGSGDATIRLWDTATAVVRHVLKGHDGLVRSVAFSPGGAMLASGSFDATVRLWDATTGACLLVIKKHRGWIMSIAWSPDGTMLASGSGDSTVRLWDPSTGACRLVLKGHQSGVTSVAFNADGRILVSGSGDSTVRLWDVATGACLAVLLCLPEGWVAFTGDGRYKLGGDIGRAFWYAIGLCRFEPGELDPYLRSLSRLGEDDPLYEPVRRHRFFDHDSATLEDDSATLPSTVGDRLTRGGDP

SEQ ID NO: 14616 - protein, 953 aa, Sorangium cellulosum
MAATGGNPVASWTGLLRDGVSRCEHVVPGLPRGWASRVRQEIESGDIDDLLSAAEKISSKLNPQSGEYRRWLRETIGALRVTDPSVIEALQALRVPIATTNYDGLIEDVTGLAAVTWRHGSEVERVLRGDDPGVVHLHGHWRESESVVLGIRSYDAVLGDAHAQTMLRALRATRTFLFVGFGAGLADPNFGALLRWSRGVFAGSDYRHFRLALAEDVARFQAEHQPEERVFVLPYGTTRTDLASFLRSLVPGAPATRPATSHAPPPAIATAPMSAPRAAAAGVITPPARRPLRVVFGYSRRDDEYRDRLHVHLTPLRRQGLIDTWHDALMDPGVNVRAAVNDRFDAADIVLLLISASFLASDFSYGDVMQRVLARHNAGETRVVPILLSPCDWQGSPYGELQALPRNARPITSWTDHDEAFLDVVRSIRLLVEELAAKLTMVTSTSTVPQATPERAYQLFDVFMKSGMPTVTFVATKRFQDLKLALAQPGRGVVIEGPSGIGKTTALRQAIKQLREEGHLVAGGSAPEILSARKQADVARLATIEQWHRGTVAIDDFHRLPRELLQRMADYLKSLADEDAADRKLVVVGIPKTGQALIDLAFDLANRIEVITFNRVDSALVQKMIVQGERALNVRFDRRAEIILASDGSLNIAQFLCFYLCQAESVFTTRSKTATVRCDIGDAIRNVLTALSPKFREPMRRFARMAGPQDRVCVRLLEELRRSDEGSVSLLMLKDTAPALATPLRRFEEEQWMQTLQASYPELEMFLFYDPSMHRITIDDPQLAFYLRSVHLEEIAREAGVLKQQGGSRIFISYVLSDLRWLERLQVHLGPLTKRGLVLDIWEESRLTRHAGAYSELRQVIEAAAMSIVLVSADYLVSEFSGNPDRGGIDVLLGVAAENGASVRPVVLKPCLLTGSGLDRFPVLNPDAALSEMGESAVESTLVRLAEEIARLL

SEQ ID NO: 14617 - protein, 482 aa, Acinetobacter baumannii 532279
MFEHEQKIMIDRIVKELEENNFAIFAGAGLSAPAGYVNWKELLRPLSIELNLDIDKETDLVSLAQYYVNENHGRNRLTERLIDEVGVAREPTPNHKILAKLPISTYWTTNYDDLIEKALDNEGKIADKKFTKNHLSQTKKGRSAVVYKMHGDASLPDQAIITKDQYESYPLHFAPFVTALSGDLVSKTFLFLGFSFNDPNLDYILSRIRIHFEQNQRQHYCIFRKVNRADYSNDEDFSYNLLKQQFVIKDLARFSIKVVLIDAWNDLTRILEEITKRFRCKNVFLSGSAHEFGSWGQTATELFLSKLGEVLIQEGFKITSGLGLGIGNAFISGAIKEIYNRKYTKIDDYLTMKVFPQFVADPTERKNIWTAWRKDLLSQTGIALFFMGNKIIKDPESGKQTIVLADGMDEEFHIAHELGLKLIPIGASGYKAKELFNQIISDFDHYYPNSSPKFREAFEKLNEEVDEPVKLLSKIHDVIKLI

SEQ ID NO: 14618 - protein, 199 aa, Acinetobacter baumannii 532279
MARRAFFSFHYQNDIWRVWNVKNSWVVSGSREAYGFFDGSVIEKKKRESDDSLKRFLREGLDNTSVTCILAGQYTHQRRWVRYEIAQSIIKGNGLLSVFIHQLKDKNGYISRKGINPLDEMGIYLANGSYYLAEWHDNKWIKYRDFLNPITLNSRFTPKPNSNSVVRLSSFFKTYDFISNNGRLLLSSWIENAANQMGK

SEQ ID NO: 14619 - protein, 165 aa, Acinetobacter baumannii 532279
MARKVFFSFHYQPDNWRVSQVRNIGVIEGNQPAKDNDWETVVGGGDTQIKQWISNQMAGRTCTVILAGKDTANRKWINHEIVESWNQGKGVVVIYIHNLKNSQGEQSNKGQNPLDYITHNPTGKKLSEIAKAYDPPYSTSQFVYEYIKDNIDSWIEEAIKIRSVN

SEQ ID NO: 14620 - protein, 166 aa, Acinetobacter baumannii 532279
MAISLDTLTYNSTRFSRSANSYTFNQRSKKAFLCHSHIDAQYVKGFIQLLKDENIDVYVDWQDSSMPETTNRETAVKIQQKIQEADYFFFLATPNSVKSRWCPWEIGYADGVKKYESIFIIPTVDRHGIYYGNEYLQLYQKIDRSTTGNLCFWKPHEQYGKFVSSL

SEQ ID NO: 14621 - protein, 405 aa, Acinetobacter baumannii 532279
MDRKCCKSNGKIILSENYYQIILLGKVDERLTSIQKSLTDRFIDLKINPRFIKFIHSDNYSSIDPKYPTIAIYFGGNKSDILHLSNLIEDSIVIIPIVQSNELVPKELPKIISHINALPINQTNNNTERLVSIICENFRFLRKERKVFISYRRIDSQGAANKLYDILDANGFDVFLDTRSVPPAYNFQDQLWHRMTDSDAIILLDTPQFRTSRWTKDELMFANENNIHILHVLWPQQKEEDVASFNEFITLTPRDFKMKSLGRKGIPYTGKKITEKTLRNIVIKTEQLRARAISLRYKYLIDNFCDAARDAGYNPNVQIDQWISIADWKDKGLAVIPAIGVPTADRINDIYNAVSNSKFKNSEKWIIYDNRGILKQWLDHLDWLDEHLPIKAVNMTKASSLLENK

SEQ ID NO: 14622 - protein, 261 aa, Acinetobacter baumannii 532279
MYKSIQIEDFDFSIFPYITDRKVNTYKERNKNTLINIQDYLLNKKNTLSVEKIYEKLFVNVKPDIFLSHSHADEDDVIRLAILIEEELNLKVFIDSCIWGDAFKLLREIDKSYCLNGSNFNYRKRNYTTSNIFMILNSALNRVIYNCEAFIFLGTDNSIPINEVFENKKYLSSPWIYSELQFAKLVRRTPKPRQISIESRDQALAESLAFDNDLNFAYPLPETDATLSNQKLKKWIEAYQYSSTNRNIHPLDILYKAISYR

SEQ ID NO: 14623 - protein, 434 aa, Vibrio fortis
MDHFYELSFALESNSLCFFVGTGFSMHVTDGNAPNWLSLLKDATLGVEGGNELIEQLFPENKPIMSLEECASVIQAKMHTQDKCLHAEIAKIINSLKITDNKLKAFDFIRKYTNVKYITTNYDGLIETQILKGIPSTSFSIGYPIHRQSKGVHVYHVHGSIKYPKKMVVTADDYFRFINSPDYFSHKVETLFQENSVVIIGYSLGDINFKSILNKHRSNRHHDINRQHLFYLSRSPIDQHIKDYYDRVYGLRVIDNLGIDEFFQCLEDTYNVVKPDVNLFKDFLYPVLNGDASLTESYLKKNDSFFEIIAMLTANGIIVSHPTIVEFLADVLERKRVLTTANGAWGQYVHLAGWLIHIGSIMDIKDTPLEETYLSAVKRSFNTMSKGMVMGCSWHAFNKWKSGWYHLTYDNRVMVSKYMRNNDVDEDGLEVINQ

SEQ ID NO: 14624 - protein, 271 aa, Vibrio fortis
MEHKSYLIALDYGDRAKERVFVGDVLDKFDNDTLVGAMLYVNNNIYALSCHLFLNFEKDSEVFEEWINIHYPEKHRIYNLFSRDLMKAIGKRSCNGMGLLDSDMLEYQMPSSTNEIFLHPDRSIYDETFPPVLKEMTNYSVFLSHSSVDKALVDTFFNELQKSEVEAWFDRYEISPGDSITDKINDGLDKSKVGLLFLSKSFISGKSGWTMNEANYFFQKRMRHSDKNFIVINIDLEHDEMPPLLQDYLYLNYDDPECVTKIVNELRKLNT

SEQ ID NO: 14625 - protein, 482 aa, Sinorhizobium americanum CCGM7
MVGNGRTRFLREFPASLHEGTGAIFVGAGVSMAAGYPSWSKLLTEIGEEIGVNSRDIQDLAALAQWHIRETGNATGVRNVIKREIGFDRPLPETVRTLARLPVRHIWTTNYDRLIERAFAEISRPLDPVAGAKDLALKVTPGATRLYKMHGSVDRLDDIVISTDDYELFRTKRGAFLPLLQAHLSSMSMLFVGLSLTDPNVRHVLSLIRESFTDAPPEHFAILKPPKAEDFTNDDEFNARLAQHKLWAKDLSRYGLVAVEVDDYDEVPELLREVERRVAAKRVWVSGSWPLEDGNSFTPRVYAVAEEIGRLIGKTHRDLVTGTGLLVGPAVVSGFMDALREGGGWDIDRRLIARPFPQGVSGRAVDRAQWTALRTEMARLAGVTIFLGGLKTNKGSPVVADGVMEEFALAQTAGSFVLPVGAFGGAAEQIAKKMIGASAPPDGPKASRPKDDELIALLNPSASDKQILATVRAILDRLAKVA

SEQ ID NO: 14626 - protein, 158 aa, Sinorhizobium americanum CCGM7
MARKVFFSFHYDRDVHRVMQVRNSWIFRPEGEASPFFDKAEFEQVKKRAGGIEKWIEEQLAGTSVTVVLYGAETYHRPWVRHEIKRSYELRKGLLAIDIHNIKHPQNGADVQGLNPLSYFNVNQTPLNTMYRQYNWVTDNGYANISSWIEAAANAVGR

SEQ ID NO: 14627 - protein, 161 aa, Sinorhizobium americanum CCGM7
MWYTPEQVQALMPVRENVENLAASQPDLRDVFLCHAWDDRQGSAKELHDLLEARGVRVWFSEKDLGLGVPMMRAIDKGLVNSRVGIVLVTPAMLRRLPAEGIADKELSALLRRERLVPVVHGTTYEELERVSLLLASRAGLNTAEESMAEVATKIAELVAT

SEQ ID NO: 14628 - protein, 473 aa, Bordetella bronchiseptica MBORD675; identical to SEQ ID NO: 14592

SEQ ID NO: 14629 - protein, 146 aa, Bordetella bronchiseptica MBORD675; identical to SEQ ID NO: 14593

SEQ ID NO: 14630 - protein, 476 aa, Peptoniphilus indolicus ATCC 29427
MREVFFIKGEVSKKDLIREIEKAIKSDELGAFIGAGLSIPAGFCSWKELLREPAEEIGLDVEKENDLVNLAQYYSNSKKRTSIDDLIKGQFSQLVKPTENHKLLSQLPISTFWTTNYDKLIEKALETNMKKPYVKTKDEQLRGTNYNFDAIVYKLHGDVESPEDAVLTRSDYEEFGYNKRKLFREVLEGDLLTKTFLFLGFSFEDPNFNYVIGRLRVLLDEKNTRKHYCIMKRVQDTDEDYEYKKVRQELQIEDINRYGIFTYLVDDYNEITDILSILVDRYRRKTIFVSGSAYCYPGYSHETGKNFIHKLSFELSKNGYRIVNGYGKGVGEFILNGVADYCLNHNSKISDFLTLMPFPQNSSLGIDLDKLYKENREQMIDNCGIAIFIFGNKETENIASGVIDEFELCKKHGLVCLPIEHTGGSAKEIFNKITREITDKNTISAIEQANKQCDGDIDMSVKNIVQAVKILNKEEL

SEQ ID NO: 14631 - protein, 99 aa, Peptoniphilus indolicus ATCC 29427
MIGEKTANRKWINYEIKKAYELNKGIVGIYIHKLKNAKGEQDSKGSNPFDYYNISGVSMSKYVKCFESNWSASDNVYNDIKDNIEDLIEYGIEHKPSTW

SEQ ID NO: 14632 - protein, 508 aa, Rhodococcus opacus PD630
MKESREPSEPTGGNSGHVFVVRGRIELVAWDAVIVPTSNLFWPREIWWPALGITRFDASAVSGAGRVRSFATDDGRPAWLLDVARYKNSSVGWLIDGLCAALSAIAAHRPTPGGGRVKPLVALPTLGVGQGGYGGVRGEVVQTLLATTGAFAAENDIDVVFVVADAADYAAFQSLRRERAQTGATETLIDDLATKIRRGEVSLLLGAGVSIPAGLPTWSQLLGTLKAEMLQDISHDDFESLSVLDRAQLLSKSASPGTLGERVAKVAGAALRPTLAHCLLASLKTAKVVTTNYDTLYEDAFKAAHGDDAISVLPREDADAERSWVLKMHGDVADPASIVLSRRDFVRYDAERRPLGSIVQSLMATGHLLVIGASMTDDNVLRLAHEVLALNERNNRHRTLGTVITLRSDEIRSALWRHDFDYVGVSTSLDDATAARDLEIFLDRIAMSASDEAPFLLDARYRELLDDEEVDLAATLRASAQKVRALSSKGRDRWRMLETILEGLGAGQ

SEQ ID NO: 14633 - protein, 377 aa, Rhodococcus opacus PD630; identical to SEQ ID NO: 13516

SEQ ID NO: 14634 - protein, 487 aa, Hungatella hathewayi WAL-18680
MAEVYLSNKMEELEKFLNIVSEAILQGNMSLFLGAGSSMQYQAPSWNELIDNIDGNYNAGSNIDKAQYAELKGVDIKTEISKKTALIKFDKQNKNTYLNYLLNFDYKSLWTTNYDLIIEKVLEQKAKAYKVIYKYSHFQDLSYPGGCFLFKINGSCDDPKTIIVTKEDFINYRKSHEAYLILLKRELLCQNFLFLGCSFEDDILRICIKDILNCIENSEENYVSEHYAIIVEEKAEKLEYISKDLSIHYSIKCLTVQNVNQAYKIAYGISCKVKYGSVFVSGAKKYERHSDEENYGKIVCQNIVNAFMQFKDFPFKFISGMGMSIGHFICGTIKQNCKEKNLNLNRYLQMEPFPFTSKNDNDKHRENIINKAGIFLFVFGDLDEASDGIQNSGIWREYILAKKNKENILIPLPCGIDSISYRIFEEEKKEEDSFSAKYCDLLQNFDYKATNTDFYDALVDKIILTVREKMDNILDDIESSLKIVEAL

SEQ ID NO: 14635 - protein, 239 aa, Hungatella hathewayi WAL-18680
MNLFLSFSGEARETFAVKFLNFFNNYGIHCWYDQHELFLGDNLKNSIIKEGVETANYCIIIINKSFLSRPWPCEEAKRLYESLESRKHNAIFPILLDIEKEEVRNSELDFLLNIKYQFLHTGESIDKIGLQILNRIFHDIAMQTKFATLNDALNYFKRLTLTNSIDIYNALNVVNNFDHTNYKERTIILICLTNLFFNNPYKKALNRISYTIYDNKDVSFDMYKIVESIFLINASIFSC

SEQ ID NO: 14636 - protein, 481 aa, Odoribacter laneus YIT 12061
MKAEFESFVRDFVNHLRDNNVAIFAGAGLSKAAGYVNWKELLEEIAEDVGLKIELEDDLISLAQYHVNQNNRHKINQKILDEFVEGSNPTENHVILSRLPIATYWTTNYDKLLEDSLAKNHKRYDVKIRETDFHHSIHRRDAVIYKMHGDVSNPSEAVITKEDYERYYLYHNSFLTALNGDLTTKTFLFLGFSFTDPNITYIISRLNNVIDKKSSRQHYLFLKRPIIGDSNITNEAELDYAKTKQRLLIDDLKIRYNIKALLIDEFSEITDVLKEIERRYKKQTIFISGSSCGEYGRFGEKRATDFIHNLTKQIIQKSYTIVNGFGVGVGSAVINGALDAIDSEPQKFSDSQLVMKPFPQFVPEGKNIQELWEAYRKRIIPIAGIAIFVFGNKKDTTGNVVLADGVKKEFNIAIENGVIPIPIAATGYMSKEIFDIISEDSSKYLAPYNWLWKELCQMDSDVISEDEIIDKVINIILKLNK

SEQ ID NO: 14637 - protein, 163 aa, Odoribacter laneus YIT 12061
MGRRVFTSFHYIPDNWRASQIRNMGKIEGNGIVSANKWEEVTKGGNKAIEKWIDDNMSGKSCVIVFVGENTANRKWIDYEIKKAWEEGRGIFGIYIHNLKDRDGNQANKGDNPFDGFTINGKSMSSIVKCYNPPYKTSTNVYEYIENNIEDWIEEAIEIRNKY

SEQ ID NO: 14638 - protein, 181 aa, Odoribacter laneus YIT 12061
MAIITKNRLSEISNNKSGGYTQKSIILNESRSYSRGFYKTSIFLSHSHLDRDYITDTVVFLRKMGVNVYIDWMDDNMPKETSGKTADILKQKIKENDKFIFLATNNSISSKWCNWEIGFGDAHKYIDRIALLPLADNYTEWKGNEYLQIYPHIVESDYTNDYYKVIFPSGKEMSLYEWLNR

SEQ ID NO: 14639 - protein, 410 aa, Helcococcus kunzii ATCC 51366
MVSLAQYYANSKKRTSIDDLIKVQFSQLLKPTDNHKLLSQLPISTFWTTNYDKLIEKALEDNMKKPYVKTTDEQLRGTNHDFDAIVYKLHGDVETPEDAVLTRSDYEEFGYNKRKLFREVLEGDLLTETFLFLGFSFEDPNFNYVIGRLRVLLDEKNTRKHYCIMKRIQDTDEDYEYKKARQELQIEDLNRYGIFTYLVNKYDEITEILSTLVDRFRRKTIFISGSAYSYSTYSQEIGENFIHKLSFELSKNGYHIVNGYGKGVGEFVLNGVADYCLAHKSKINDFLTLMPFPQNSSLDIDLDKLYIENREQMIENCGIAIFIFGNKETEDIAHGVMDEFELCKKHGLVCLPIEHTGGAAKEIYNKTTQEISDENIISAIEQANKQCDGDIDMSIKNIVQAVKILNKEEF

SEQ ID NO: 14640 - protein, 165 aa, Helcococcus kunzii ATCC 51366
MAKRQVFFSFHYDNDNWRAGQVRNMGKVDSSSTFSDNDWEEVKEKTESKIKEWIDEQLNKRSCLVVLIGEETANRKWINYEIKKAYELNKGIVGIYIHKLENALGEQDDKGNNPFDYLTLEGEKLSKYVKCFDSVYLSSKNVYSDIKDNIEDLIEYGIEHKPSTW

SEQ ID NO: 14641 - protein, 471 aa, Bacteroides dorei CL02T00C15
MPIQKDVFIKNYLKALNNGDAAVFAGAGLSASSGCVNWKQLLKEIAEELELDIEKESDLVAVAQYYYNRSGNNRARLNEIIKDAFQTGKLPNDNHHILARLPISTYWTTNYDKLIEKSLENNGKICDVKVCCANLTTTLKGRDAVVYKMHGDIDRPEESVLIRDDYESYHHEKTPFINALSGDLMTKTFMFIGFSFTDPNFSYICAHLRAHLKGNMREHYCFLKDVSETDYPDRDQFEYEKRKLSYFIDDLKRFNIKTVLIKEYSEITEILQSIKRRYNSRTVYISGAAAEYEPDGKEAYEEFISKLSGLLIHKGFKIVSGYGLGVGSAVISGALSEIYHNQKKSLTDQLILRPFPQGDDAKAMWEAYRQDMISYSGISIFLLGNKKENGITVLSNGMWSEYEISKKQGNFLIPIGRTGYISKELWRELLDEKQDDHTFDIYRCDIESLGDDTKTLDEVMEIVIELIKKVK

SEQ ID NO: 14642 - protein, 203 aa, Bacteroides dorei CL02T00C15
MAHKTFISYKYSEAQELRDRIIKAFGDDASYYQGETSASPDLTDTSTENIKKNLKDMMYDTSVTIVIVSPHIKESKWIDWEIEYCLKNITRKNRTSHTNGIVGVIMKVNGGYDWFKYTSTKSDGCSVSNYYDSKVYDIINNNRYNQNPKVYSCNQCKCVSALTGSYIAFVEEDEFLSNPKKYIDNAYDKSENDADGYDLTKQR

SEQ ID NO: 14643 - protein, 182 aa, Bacteroides dorei CL02T00C15
MTKRQVFYSFHFKNDSWRAGQVRNIGVVEGNTPVSSNDWEEVKRKGNVAVKRWINSHMEYRSCIIVLIGSETSSREWCRYEIEHAWKEGKGIVGIYVHHLKDFNGEQSIKGNNPFKLFYIDRTYNYIAERNYPVDGNEINLSEICKTYNPPYKISTNVYDYIKEHINEWVEEAIRIRNQYPK

SEQ ID NO: 14644 - protein, 398 aa, Bacteroides dorei CL02T00C15
MSGVTKHIFEHELDDILSMWNTEIKSVTPLLPRKYTKADIIALLKYYYPHEWQSVESKYKYYRTKDKYLKRRFGKSRYNMSEPELLIQRVSAFKKIFSESYKYAHWNAYSERNRVDSSVKLWEARKYKIDRINSKIEIALSKTQQVTPSFINQLIGLYERKNTTQKDKVYILLELKKYYCEKTIQFFFKLNDTELNKQLREEAFFHLQSFNFNPRLRKQRFMRIHAKTKKRKCYLREVYPNERYDIPRNPDELEYRIENSKEQKLKSYDYFISHSSKDSKEVQKLIYVENQQGKNVFCDWINDIDYLKRHLLCDATLKVLEERMKQSKALIFVQSENSLKSIWCKYELNYFLALNRPIYVVDRESIVNNLFSLSQLDDNWFVDPNYKKTALITGEEIN

SEQ ID NO: 14645 - protein, 471 aa, Bacteroides dorei CL02T12C06; identical to SEQ ID NO: 14641

SEQ ID NO: 14646 - protein, 203 aa, Bacteroides dorei CL02T12C06; identical to SEQ ID NO: 14642

SEQ ID NO: 14647 - protein, 182 aa, Bacteroides dorei CL02T12C06; identical to SEQ ID NO: 14643

SEQ ID NO: 14648 - protein, 398 aa, Bacteroides dorei CL02T12C06; identical to SEQ ID NO: 14644

SEQ ID NO: 14649 - protein, 477 aa, Bacteroides fragilis CL05T00C42
MKITTEINGFIEDYVKELREGNASLFVGAGISRGAGYVDWKGLLCDIANSLGLDINKEYDLLSIAQYHVNKHGRTRINKTILEEFTEELEETENHNIIARLPFQTIWTTNYDTLIEDACKKYNKIVDVKSSVKQLFYNKPKRDLVLYKMHGSIEYPDDAVLTKEDYEGYFTTHEAFITALSGELISKTLLFIGFSFSDPNIDYILSRLNFKYKHKEKEHYCLLKKYSLNDFDNCQADLEYNLRKQQLLIMELKRYGITTILIEQYSDITLILYEIERRFRKKSIFISGSAEEYTPFSNLQAQKFVHLLAKSIIQKGYVIINGFGWGIGSAVINGALEAIYKNPKKYSENQLVLKPFPQFETGSKKLPELWEEYRYNMISQSGVSIIIFGNKKDNDGNIINADGVYREFEIANEKGVIPIPIFYTGYMANEIFEKIKEDPLKYYNSNETFEKIEKLKIDFDDIETSVKLIMDIINCLN

SEQ ID NO: 14650 - protein, 163 aa, Bacteroides fragilis CL05T00C42
MIRKVFYSFHFDNDNWRAGQVRNIGAVEGDKQVNGNKWEDIKSSSETKIKAWIDDNLKDKSCLIVLIGSQTSQRHWVDYEIKKAWELGKAVCGVYIHNLKDVYGNQSKKGKNPFENYTIGGKSMANIAPVFDSKYSTSTYVYDDIKDNIADLVEKAIQIRNQY

SEQ ID NO: 14651 - protein, 477 aa, Bacteroides fragilis CL05T00C42; identical to SEQ ID NO: 14649

SEQ ID NO: 14652 - protein, 163 aa, Bacteroides fragilis CL05T00C42; identical to SEQ ID NO: 14650

SEQ ID NO: 14653 - protein, 477 aa, Bacteroides fragilis CL05T00C42; identical to SEQ ID NO: 14649

SEQ ID NO: 14654 - protein, 163 aa, Bacteroides fragilis CL05T00C42; identical to SEQ ID NO: 14650

SEQ ID NO: 14655 - protein, 477 aa, Bacteroides fragilis CL05T12C13; identical to SEQ ID NO: 14649

SEQ ID NO: 14656 - protein, 163 aa, Bacteroides fragilis CL05T12C13; identical to SEQ ID NO: 14650

SEQ ID NO: 14657 - protein, 477 aa, Bacteroides fragilis CL05T12C13; identical to SEQ ID NO: 14649

SEQ ID NO: 14658 - protein, 163 aa, Bacteroides fragilis CL05T12C13; identical to SEQ ID NO: 14650

SEQ ID NO: 14659 - protein, 477 aa, Bacteroides fragilis CL05T12C13; identical to SEQ ID NO: 14649

SEQ ID NO: 14660 - protein, 163 aa, Bacteroides fragilis CL05T12C13; identical to SEQ ID NO: 14650

SEQ ID NO: 14661 - protein, 477 aa, Bacteroides fragilis CL05T12C13; identical to SEQ ID NO: 14649

SEQ ID NO: 14662 - protein, 163 aa, Bacteroides fragilis CL05T12C13; identical to SEQ ID NO: 14650

SEQ ID NO: 14663 - protein, 489 aa, Bacillus cereus VDM062
MEFTPEIESFISEYVKALKADSASIFAGAGLSIPAGAVPWKELLRQPARELQLDVDREHDLVILAQYFYNKHQSRQKLSQLIIDHFHQNGRITDNHHLLARLPINSYWTTNYDRLIENALEQNGKTPDTKRRIEDFSIIRPRRDAIVYKMHGDVDLADKVTLTKDDYETYQENNHLFTLSLKGELVSKTFLFIGFSFEDPNLEYILSRIRGLVDGHTRTHYCFFKKINRSSYPKGKKGTDQYRYDTVKQDLKCADLIRYHIQPILVDDYPDITEILSVIYGQYRRQKVFVSGSAAQYDGFELEDMKPTEFIHKLSHRLNEEGCKIVTGFGNGVGSAVINGVLERIYQTTERKLDNHLLMRPFPQFITHDQSKDELWDKYRRMLIPEAGIAIFIFGNKEVDGKIIDGDGVQKEFAIAEEQGLKVIPIGITGYVSKSLWQEVMTNFEKYYKDYRSLKSEFNKLGNNKLSANEIIETVITIVKRINGGDING

SEQ ID NO: 14664 - protein, 164 aa, Bacillus cereus VDM062
MGRKVFYSFHYTKDNARAAQVRNMGVIEGNNPIKDNEWEKVKQTDASIKKWIDEQLTGRSCTVVLVGEETADRKWINYEIKKSWELGKGIVGIRIHNLKNLDGEQSKEGKNPFDGFTLGGKSLSKTVKLYNSPYKISTNVYSHIKENIESWIEEAIEIRKNYKN

SEQ ID NO: 14665 - protein, 494 aa, Bacillus cereus VDM022
MGYKREKMIHTFIKNYTEDLLDSKVAVFGGAGLSVGAGAVSWKELLREAADDIGVDVDKEYDLVSVAQYIYNESNSRNKITKLIKNHIQKKGEVTENHRILANLPIKTFWTTNYDEYIEKSFEQNSKLYDVKKSVQDLSSEVKNSEVTVYKMHGDINRAHDAVLIKDDYEIYGKKNELFTQALKGDLISKTFLFIGFSFDDPNLENILSRVRIMLEGNTRTHYCFFKEINKNDYEFRKIKKKKEAAWKYAENKQYLKIKDLERYGIKAILVEEYSDITNILKKIESIYLSKNIFISGSFDDFEKYCVRGKVESFVENLSKKLHEEDYKITSGYGMGIGSSVITGVLRGSKTTGKENLDRILSLKPFPFHIEDGIEREKIWHKYRQDMLKNCGTAIFLLGNKKKEGGIQLADGVRKEFAIAKTQGMNLIPIGATGYVSKECFKDMCNNFEQYYPNSDKNLNKAFQKLGSKNVSEKKMIGNIIDFLKLLRKYHMEM

SEQ ID NO: 14666 - protein, 202 aa, Bacillus cereus VDM022
MAYKTFISYKYSEAKELRERILDALGADAKYYQGETSESPDMSDRTTEYIKEKLKDMIYSTSVTIVIISPNMKKSKWIDWEIEYSLKQIKRGDKKSNTNGIVGVVMKYNGDYSWLRTMITNSDGHTAIRINNNYLYDIIINNRFNQEPKEYTCEICKDIDSFTGSFIALIKEEDFLENPNKYINNAYEKSKKLDNYNISRKK

SEQ ID NO: 14667 - protein, 474 aa, Bacillus cereus MSX-D12
MNPIVELFIKDFTKEVMEENAAIFAGAGLSMSVGYVSWAKLLEPIAQEIGLDVNKENDLVSLAQYYCNENQGNRGRINQIILDEFSRKVDLTENHKILARLPIHTYWTTNYDRLIEKALEEENKIADVKYTVKQLATTKVKRDAVVYKMHGDVEHPSEAVLIKDDYEKYSIKMDPYIKALSGDLVSKTFLFVGFSFTDPNLDYILSRVRSAYERDQRRHYCLIKKEERRPDELEADFEYRVRKQELFISDLSRFNIKTIVLNNYNEITEILQRIENNIKTKTVFLSGSAVEYNHWETEHAEQFIHQLSKELIRKDFNIVSGFGLGVGSFVINGVLEELYMNQGTIDDDRLILRPFPQGKKGEEQWDKYRRDMITRTGVSIFLYGNKIDKGQVVKAKGVQSEFNISFEQNNYVVPVGATGYIAKDLWNKVNEEFETYYPGADARMKKLFGELNNEALSIEELINTIIEFVEILSN

SEQ ID NO: 14668 - protein, 192 aa, Bacillus cereus MSX-D12; identical to SEQ ID NO: 13419

SEQ ID NO: 14669 - protein, 193 aa, Bacillus cereus MSX-D12
MTLFTENDLLNNSYKSIQKSYHFSENQAAKNILEQAYKNYDKNKIYDIFLSHSFLDARKILGLKNYIEGLGYSVYVDWIEDKQLDRSKVSKETAGILRERMQSCKSLFFAISENSDHSLWMPWELGYFDGIKQKVAILPVLKSSYDDSYNGQEYLGLYPYVAKGTIINSTQEEIWIHSSQKQYVRFRNWLQQN

SEQ ID NO: 14670 - protein, 480 aa, Bacillus cereus HuA2-1
MKYNSSIQEFLRTYVKAIQSSNAAVFAGAGLSRPAGHVDWKELLREVAEDLQLDIDQEVDLIALAQYHVNDNGRSKINQILIDEFTKSVTTTDNHKILSQLPIETYWTTNYDQLIESNLVASGKKVDKKITPENLSYSVPGSDAVVYKMHGDSSLPHDAVLTKDDYEGYNQKRKLFSTALRGDLVSKTFLFIGFSFDDPNLSQILSKIRILLNENARTHYCFMKRVDKNDYKNNEQEFRYATIKQDLKIKDLKRYSIKVLLVDDYPEITEILQYIASLVIRKNIFVSGSASDYGEWGEKKSFEFSTSLSKALIKNNNNIVSGFGLGIGSCIISGALEELYSSQNNNVEERLKCRPFPQVTTGQIAITELWTKYRREMLSNVGVAVFIFGNKIDTETTKVIDANGMIEEFDISVENDAVPIPVGATGFTAKVLWEKVMNDFNHYVGIETLKPLYTDLGNESKTPEELIEIVVKIIKQLEKR

SEQ ID NO: 14671 - protein, 201 aa, Bacillus cereus HuA2-1
MAYKTFISYKYSEAKDLRDRIVKALGDDAKYYQGETSESPDMSDKTTDYIKDKLKDMIYSTSVTIVIISPNIKLSNWIDWEIEYSLKQIKRNDRTSGTNGVLGVVMKYNGGYSWLRPSRTNSDGHTSIQTNNEYLYDIIHKNRFNQDPPEYTCDECEIVNSLTGSYISLINEEDFLKNPNKYIDNAYDKSKNTSNYTISKK

SEQ ID NO: 14672 - protein, 476 aa, Enterococcus faecalis 599
MEEKMNKQYFIKNYAKAIQEGYAAVFAGAGISVGAGYVDWKGLVAPFADEMGLDIDKEYDLTRVIQYYINYKRRRNGVSQTIINKFISHEESTKTIDLLTQLPVQTYWTTNYDKLLEKNLEKQNKKVDVKVTDKNLTTNVYDRDVVIYKMHGDVSNPDEIVLSKDDYELYNDTHSLFTTALRGDLVTKTFLFIGFSFEDPNLDNILSRIRVLLGNETREHYCFLEKITKEKYDDDDEFKNDSRKQELRIEDLKRYGIETILLDSYKEISDILLQIKKVYLSRNIFISGSISSYENTWDMEKVNKFSYLLSNNLVKKNNKIISGFGLGIGSNIINGALDEIYTSKFKHTSEHLSLHPFPQYDVNPNNLKERWTKLRVNMISEAGICIFIFGNKIEDKLVKDANGMIEEYKIAKKLNKFIIPVGATGYAAKSIFDDMKAEQDNYPYLDGFWDILEKEDDQKISETVMKIIENIQQKGV

SEQ ID NO: 14673 - protein, 207 aa, Enterococcus faecalis 599
MASNVFISFRFKDGIELKDELVELFSNSREVFNRSEDVDRTHMSEDTIQKYLYDKLKNTSITIVILTPEAVNYKKDIFGVYDDWLYDELRYSLEDRQSNRTNGVIALYTEESKHLVKEKSIHTCSVCNKERTSNTILNFDNLVRKNMMNVKESYKCNKCSNLFDGDYDSYISLVHFDDFKSNIKKYIEIAKEKRDRKEQFNIVKRMS

SEQ ID NO: 14674 - protein, 308 aa, Enterococcus faecalis 599
MTGRNPKVFISYSWENKENKEWARELADKLLENGIDAYIDQYDLSLGDRLPQFMEQQISDSDYVLIICTPEYKRRANNRTSGVGYEGHIISAELLSGKNERKFIPIIKEGRASEVLPTFLAGKLGIDLSDSQHYDENLDDLITTIFGVKRKPALGDIPGHIKVSPLLPIEHNENKDIEILGIITDKVTVPKMDGSRGSALYKIPFRLNRVPSQLWKELFVRNWNSPPRYTTMHRPGIASVVGDEILLNGTTIEEVREYHRETLKLCIEKSNTQEKKILLEEEQKKERENDRVRSHKESVRKLADELEF

SEQ ID NO: 14675 - protein, 478 aa, Enterococcus faecium S447; identical to SEQ ID NO: 13220

SEQ ID NO: 14676 - protein, 161 aa, Enterococcus faecium S447; identical to SEQ ID NO: 13221

SEQ ID NO: 14677 - protein, 283 aa, Enterococcus faecium S447; identical to SEQ ID NO: 13222

SEQ ID NO: 14678 - protein, 478 aa, Enterococcus faecium R446; identical to SEQ ID NO: 13220

SEQ ID NO: 14679 - protein, 161 aa, Enterococcus faecium R446; identical to SEQ ID NO: 13221

SEQ ID NO: 14680 - protein, 283 aa, Enterococcus faecium R446; identical to SEQ ID NO: 13222

SEQ ID NO: 14681 - protein, 478 aa, Enterococcus faecium P1986; identical to SEQ ID NO: 13220

SEQ ID NO: 14682 - protein, 161 aa, Enterococcus faecium P1986; identical to SEQ ID NO: 13221

SEQ ID NO: 14683 - protein, 283 aa, Enterococcus faecium P1986; identical to SEQ ID NO: 13222

SEQ ID NO: 14684 - protein, 478 aa, Enterococcus faecium R496; identical to SEQ ID NO: 13220

SEQ ID NO: 14685 - protein, 161 aa, Enterococcus faecium R496
MVRRVFFSFHYADVTRAMVVRNSWTLRGTKEAGFVDKAEFEKVKRNGDIAIKNWIDNQLIGTSVTVVLIGKETLDREYVKYEIQESYKRGNAILAVNIGKIKDFNQMTITSQSVIKIIGQKPDGEYLWFDEIIDGQYDYISDDGYNNLGTWIDSAAYKKGK

SEQ ID NO: 14686 - protein, 283 aa, Enterococcus faecium R496; identical to SEQ ID NO: 13222

SEQ ID NO: 14687 - protein, 478 aa, Enterococcus faecium P1140; identical to SEQ ID NO: 13220

SEQ ID NO: 14688 - protein, 161 aa, Enterococcus faecium P1140; identical to SEQ ID NO: 13221

SEQ ID NO: 14689 - protein, 283 aa, Enterococcus faecium P1140; identical to SEQ ID NO: 13222

SEQ ID NO: 14690 - protein, 478 aa, Enterococcus faecium ERV168; identical to SEQ ID NO: 13220

SEQ ID NO: 14691 - protein, 161 aa, Enterococcus faecium ERV168; identical to SEQ ID NO: 13221

SEQ ID NO: 14692 - protein, 283 aa, Enterococcus faecium ERV168; identical to SEQ ID NO: 13222

SEQ ID NO: 14693 - protein, 478 aa, Enterococcus faecium ERV165; identical to SEQ ID NO: 13220

SEQ ID NO: 14694 - protein, 161 aa, Enterococcus faecium ERV165; identical to SEQ ID NO: 13221

SEQ ID NO: 14695 - protein, 283 aa, Enterococcus faecium ERV165; identical to SEQ ID NO: 13222

SEQ ID NO: 14696 - protein, 478 aa, Enterococcus faecium ERV161; identical to SEQ ID NO: 13220

SEQ ID NO: 14697 - protein, 161 aa, Enterococcus faecium ERV161; identical to SEQ ID NO: 13221

SEQ ID NO: 14698 - protein, 283 aa, Enterococcus faecium ERV161; identical to SEQ ID NO: 13222

SEQ ID NO: 14699 - protein, 478 aa, Enterococcus faecium ERV102; identical to SEQ ID NO: 13220

SEQ ID NO: 14700 - protein, 161 aa, Enterococcus faecium ERV102; identical to SEQ ID NO: 13221

SEQ ID NO: 14701 - protein, 283 aa, Enterococcus faecium ERV102; identical to SEQ ID NO: 13222

SEQ ID NO: 14702 - protein, 478 aa, Enterococcus faecium C621; identical to SEQ ID NO: 13220

SEQ ID NO: 14703 - protein, 161 aa, Enterococcus faecium C621; identical to SEQ ID NO: 13221

SEQ ID NO: 14704 - protein, 283 aa, Enterococcus faecium C621; identical to SEQ ID NO: 13222

SEQ ID NO: 14705 - protein, 478 aa, Enterococcus faecium E422; identical to SEQ ID NO: 13220

SEQ ID NO: 14706 - protein, 161 aa, Enterococcus faecium E422; identical to SEQ ID NO: 13221

SEQ ID NO: 14707 - protein, 283 aa, Enterococcus faecium E422; identical to SEQ ID NO: 13222

SEQ ID NO: 14708 - protein, 214 aa, Aeromonas veronii AMC35
MTFERETEIFIRDYVKDINEGNAAVFAGAGLSIPAGYVNWAELLSEIAYDLGLDIDKESDLVSLAQFHVNENRTKSKVCRKVLEEFVECTEVTENHKILSRLPISSVWTTNYDDLLERSFLSEGKNPDIKHNIKQLLTNKPKRDVVIYKMHGDVSCPIDAIITKEQYERYHQTHEPFINALTGELTTKTFLFLGFSFTDPNLDYVLSRLNFRFS

SEQ ID NO: 14709 - protein, 164 aa, Aeromonas veronii AMC35
MSRRVFFSFHYTGDVNRIGIVRNSWVTKTTRSDAGFWDAAEWEQVQKDTDLAIKRWINKQLEYTSVTVVLIGEKTSQRPWVNYEIEKSIERGNGLLGVYIHNINGLGKGTSSKGKNPFDNHSIKCTDGNYYNASRIYKTYDWVSDDGYNNLGAWIEEAAKIAGK

SEQ ID NO: 14710 - protein, 181 aa, Aeromonas veronii AMC35
MVSFTTFNDLKYFNSNLTLNEQAQLRSRVASKNSKNTFLSHSSKDAEYLPGVIKILENHGASVYCDLGDDRLPENPNPETAFIIKDQIKRSKKFVLFVTTNSKDSKWVPWELGIGDSSLLTSNVALLPAAVSEHDQSWARQEYLGLYRHIVWGNLQGEHKPLWMVYDHRNNTATKLSDWLK

SEQ ID NO: 14711 - protein, 494 aa, Pseudomonas syringae pv. avellanae str. ISPaVe013
MDFFALEERVASYGSGGYLFLEAFLTKLLQIEAAHYGQEVNILDTHTSLFEAVAPQGIGDLSTPIVIEYIFTATKDKVKLLLDAFRMHGEPGFGLLIIAPKMPESTLIYMLHAPDAHGRAPVVIWGEKKINDLMRKHKEEVGKLTDSLFSLRLKMAVTRPTKPWLEERDQLIKLVAEQYRSGSFSLVLGAGVSSSAGLPDWNTLLNSLFVSMLAQENIGGDKSDTAQVSQIVSRLMEVDGPSALMLARYIRKGLSVGSQTEQQSFIEAITHQLYSLRNEVFQIESELITAIARLCTPTRTGAKVKSILTYNFDDFIERALSGRGLVHKSIFEEFETPSAEELPIYHVHGFLPEVREKYSNLDRCTLVFSEEGYHLIYRDSYHWSNLVQLNGFKETSCLMIGLSLTDPNLRRLLEIASKSIEKPKHFAFMRRLTSKKFKSGDRGHQLKIPSSVIDRFLDRHHSTNEELMRELGVTVIWYEEYGDIPKILNRIREG

SEQ ID NO: 14712 - protein, 325 aa, Pseudomonas syringae pv. avellanae str. ISPaVe013
MLIICHHQNARMDMSPKVFVSHASEDKDRFVLDFAKQLRANGVDAWLDKWEMLPGDSLITKIFEEGIKDAQAVIVVLSKNSVEKPWVKHELDAACVKRINTGSKLIPIVIDDCKVPEVLKATLWESISDTASYQSSLERIVASIFGASDKPALGKPPAYVSRFGAGVAGHNNVDSLICKLACEFVLETGSRHVSISAFCKDGELIIPEHQLRESVEVLGEHGTFDLQHRLGEGFPSISVTDSGFELYARDHVGNYDEVFRSVVSAIVNNGFTTLSQMRRELNLRPFLVEHVLRILASGNKISVSWYLGGDCSINSISPSLRRSLS

SEQ ID NO: 14713 - protein, 481 aa, Escherichia coli 1-176-05_S1_C1; identical to SEQ ID NO: 14099

SEQ ID NO: 14714 - protein, 155 aa, Escherichia coli 1-176-05_S1_C1; identical to SEQ ID NO: 13289

SEQ ID NO: 14715 - protein, 491 aa, Staphylococcus aureus ZTA11/03130-3ST
MTIDKKKFIEKYVKALESNTAAIFAGAGLSCGAGYVNWKTLLNEAAEELELNIDKEEHDLVGLAQHYINKKRSRGNLNTVIMEQFSTRAELTENHKLLAKLPIDTYWTTNYDCMIEKALDSEGRIVDVKRNQNQLTVSVADKDATVYKMHGDIDSIDKIILTRDDYEKYNLTHPKFREILEGDLLSKTFLFIGFSFTDPNISYILSRIRLVLEDNTRPHYCILKEVEEKEYDNTEEFMYAKIKQQLHIEDLSRFSIETLLVKDYIEITEILESIYKRYRRKTIFISGSATEYLPFNSETGKYFLHQLSKKLVENDFKLVTGFGLGVGSYVINGVADYINSNKKSKLQNHLNILPFSQDSSGDLDLKEVWKKNRLEMISECGMALFLFGNKEKDGKIVLADGLEEEYKIAERQELVRLPINVTGYKTKNLSEQYNEEINIQFKEKILKMYNEINEYKCDFSNKQSIDELVQKIVNLVIEIKKNKIIHGVLML

SEQ ID NO: 14716 - protein, 202 aa, Staphylococcus aureus ZTA11/03130-3ST; identical to SEQ ID NO: 13267

SEQ ID NO: 14717 - protein, 308 aa, Staphylococcus aureus ZTA11/03130-3ST; identical to SEQ ID NO: 13262

SEQ ID NO: 14718 - protein, 483 aa, Staphylococcus aureus ZTA09/03739-9HSA; identical to SEQ ID NO: 13296

SEQ ID NO: 14719 - protein, 202 aa, Staphylococcus aureus ZTA09/03739-9HSA; identical to SEQ ID NO: 13267

SEQ ID NO: 14720 - protein, 72 aa, Staphylococcus aureus ZTA09/03739-9HSA
MDQDYLKRKYVGEYTKQVLKARMEQSKMLVLLRTENSVQSDWVSFEIEYFENLKKPIYIVESLEELLEAFSD

SEQ ID NO: 14721 - protein, 483 aa, Staphylococcus aureus ZTA09/03576-9HST; identical to SEQ ID NO: 13296

SEQ ID NO: 14722 - protein, 202 aa, Staphylococcus aureus ZTA09/03576-9HST; identical to SEQ ID NO: 13267

SEQ ID NO: 14723 - protein, 308 aa, Staphylococcus aureus ZTA09/03576-9HST; identical to SEQ ID NO: 13262

SEQ ID NO: 14724 - protein, 483 aa, Staphylococcus aureus VET1918S; identical to SEQ ID NO: 13296

SEQ ID NO: 14725 - protein, 202 aa, Staphylococcus aureus VET1918S; identical to SEQ ID NO: 13267

SEQ ID NO: 14726 - protein, 308 aa, Staphylococcus aureus VET1918S; identical to SEQ ID NO: 13262

SEQ ID NO: 14727 - protein, 483 aa, Staphylococcus aureus VET1915R; identical to SEQ ID NO: 13296

SEQ ID NO: 14728 - protein, 202 aa, Staphylococcus aureus VET1915R; identical to SEQ ID NO: 13267

SEQ ID NO: 14729 - protein, 308 aa, Staphylococcus aureus VET1915R; identical to SEQ ID NO: 13262

SEQ ID NO: 14730 - protein, 483 aa, Staphylococcus aureus VET1910R; identical to SEQ ID NO: 13296

SEQ ID NO: 14731 - protein, 202 aa, Staphylococcus aureus VET1910R; identical to SEQ ID NO: 13267

SEQ ID NO: 14732 - protein, 308 aa, Staphylococcus aureus VET1910R; identical to SEQ ID NO: 13262

SEQ ID NO: 14733 - protein, 483 aa, Staphylococcus aureus VET1907R
MTIDKKKFIEKYVKALESNTAAIFAGAGLSCGAGYVNWKTLLNEAAEELELNIDKEEHDLVGLAQHYINKKRSRGNLNTVIMEQFSTRAELTENHKLLAKLPIDTYWTTNYDCMIEKALDSEGRIVDVKRNQNQLTVSVADKDATVYKMHGDIDSIDKIILTRDDYEKYNLTHPKFREILEGDLLSKTFLFIGFSFTDPNISYILSRIRLVLEDNTRPHYCILKEVEEKEYDNTEEFMYAKIKQQLHIEDLSRFSIETLLVKDYIEITEILESIYKRYRRKTIFISGSATEYLPFNSETGKYFLHQLSKKLVENDFKLVTGFGLGVGSYVINGVADYINSNKKSKLQNHLNILPFSQDSSGDLDLKEVWKKNRLEMISECGMALFLFGNKEKDGKIVLADGLEEEYKIAERQELVRLPINVTGYKTKNLSKQYNEEINIQFKEKILKMYNEINEYKCDFSNKQSIDELVQKIVNLVIEIKKTK

SEQ ID NO: 14734 - protein, 202 aa, Staphylococcus aureus VET1907R; identical to SEQ ID NO: 13267

SEQ ID NO: 14735 - protein, 308 aa, Staphylococcus aureus VET1907R; identical to SEQ ID NO: 13262

SEQ ID NO: 14736 - protein, 483 aa, Staphylococcus aureus VET1898R; identical to SEQ ID NO: 13296

SEQ ID NO: 14737 - protein, 202 aa, Staphylococcus aureus VET1898R; identical to SEQ ID NO: 13267

SEQ ID NO: 14738 - protein, 308 aa, Staphylococcus aureus VET1898R; identical to SEQ ID NO: 13262

SEQ ID NO: 14739 - protein, 483 aa, Staphylococcus aureus VET1896R; identical to SEQ ID NO: 13296

SEQ ID NO: 14740 - protein, 202 aa, Staphylococcus aureus VET1896R; identical to SEQ ID NO: 13267

SEQ ID NO: 14741 - protein, 308 aa, Staphylococcus aureus VET1896R; identical to SEQ ID NO: 13262

SEQ ID NO: 14742 - protein, 483 aa, Staphylococcus aureus VET1876R; identical to SEQ ID NO: 13296

SEQ ID NO: 14743 - protein, 202 aa, Staphylococcus aureus VET1876R; identical to SEQ ID NO: 13267

SEQ ID NO: 14744 - protein, 308 aa, Staphylococcus aureus VET1876R; identical to SEQ ID NO: 13262

SEQ ID NO: 14745 - protein, 131 aa, Staphylococcus aureus VET1869R
MPFSQDSSGDLDLKEVWKKNRLEMISECGMALFLFGNKEKDGKIVLADGLEEEYKIAERQELVRLPINVTGYKTKNLSEQYNEEINIQFKEKILKMYNEINEYKCDFSNKQSIDELVQKIVNLVIEIKKTK

SEQ ID NO: 14746 - protein, 202 aa, Staphylococcus aureus VET1869R; identical to SEQ ID NO: 13267

SEQ ID NO: 14747 - protein, 308 aa, Staphylococcus aureus VET1869R; identical to SEQ ID NO: 13262

SEQ ID NO: 14748 - protein, 483 aa, Staphylococcus aureus VET1858R; identical to SEQ ID NO: 13296

SEQ ID NO: 14749 - protein, 202 aa, Staphylococcus aureus VET1858R; identical to SEQ ID NO: 13267

SEQ ID NO: 14750 - protein, 308 aa, Staphylococcus aureus VET1858R; identical to SEQ ID NO: 13262

SEQ ID NO: 14751 - protein, 483 aa, Staphylococcus aureus VET1842R; identical to SEQ ID NO: 13296

SEQ ID NO: 14752 - protein, 202 aa, Staphylococcus aureus VET1842R; identical to SEQ ID NO: 13267

SEQ ID NO: 14753 - protein, 308 aa, Staphylococcus aureus VET1842R; identical to SEQ ID NO: 13262

SEQ ID NO: 14754 - protein, 483 aa, Staphylococcus aureus VET1833R; identical to SEQ ID NO: 13296

SEQ ID NO: 14755 - protein, 202 aa, Staphylococcus aureus VET1833R; identical to SEQ ID NO: 13267

SEQ ID NO: 14756 - protein, 308 aa, Staphylococcus aureus VET1833R; identical to SEQ ID NO: 13262

SEQ ID NO: 14757 - protein, 483 aa, Staphylococcus aureus VET1515S; identical to SEQ ID NO: 13296

SEQ ID NO: 14758 - protein, 202 aa, Staphylococcus aureus VET1515S; identical to SEQ ID NO: 13267

SEQ ID NO: 14759 - protein, 308 aa, Staphylococcus aureus VET1515S; identical to SEQ ID NO: 13262

SEQ ID NO: 14760 - protein, 483 aa, Staphylococcus aureus VET1422S; identical to SEQ ID NO: 13296

SEQ ID NO: 14761 - protein, 202 aa, Staphylococcus aureus VET1422S; identical to SEQ ID NO: 13267

SEQ ID NO: 14762 - protein, 308 aa, Staphylococcus aureus VET1422S; identical to SEQ ID NO: 13262

SEQ ID NO: 14763 - protein, 483 aa, Staphylococcus aureus VET1419S; identical to SEQ ID NO: 13296

SEQ ID NO: 14764 - protein, 202 aa, Staphylococcus aureus VET1419S; identical to SEQ ID NO: 13267

SEQ ID NO: 14765 - protein, 308 aa, Staphylococcus aureus VET1419S; identical to SEQ ID NO: 13262

SEQ ID NO: 14766 - protein, 483 aa, Staphylococcus aureus VET1103S; identical to SEQ ID NO: 13296

SEQ ID NO: 14767 - protein, 202 aa, Staphylococcus aureus VET1103S; identical to SEQ ID NO: 13267

SEQ ID NO: 14768 - protein, 308 aa, Staphylococcus aureus VET1103S; identical to SEQ ID NO: 13262

SEQ ID NO: 14769 - protein, 483 aa, Staphylococcus aureus VET0798S; identical to SEQ ID NO: 13296

SEQ ID NO: 14770 - protein, 202 aa, Staphylococcus aureus VET0798S; identical to SEQ ID NO: 13267

SEQ ID NO: 14771 - protein, 308 aa, Staphylococcus aureus VET0798S; identical to SEQ ID NO: 13262

SEQ ID NO: 14772 - protein, 483 aa, Staphylococcus aureus VET0765S; identical to SEQ ID NO: 13296

SEQ ID NO: 14773 - protein, 202 aa, Staphylococcus aureus VET0765S; identical to SEQ ID NO: 13267

SEQ ID NO: 14774 - protein, 308 aa, Staphylococcus aureus VET0765S; identical to SEQ ID NO: 13262

SEQ ID NO: 14775 - protein, 483 aa, Staphylococcus aureus VET0612S; identical to SEQ ID NO: 13296

SEQ ID NO: 14776 - protein, 202 aa, Staphylococcus aureus VET0612S; identical to SEQ ID NO: 13267

SEQ ID NO: 14777 - protein, 308 aa, Staphylococcus aureus VET0612S; identical to SEQ ID NO: 13262

SEQ ID NO: 14778 - protein, 483 aa, Staphylococcus aureus VET0489R; identical to SEQ ID NO: 13296

SEQ ID NO: 14779 - protein, 202 aa, Staphylococcus aureus VET0489R; identical to SEQ ID NO: 13267

SEQ ID NO: 14780 - protein, 308 aa, Staphylococcus aureus VET0489R; identical to SEQ ID NO: 13262

SEQ ID NO: 14781 - protein, 375 aa, Staphylococcus aureus VET0473R; identical to SEQ ID NO: 13260

SEQ ID NO: 14782 - protein, 202 aa, Staphylococcus aureus VET0473R; identical to SEQ ID NO: 13267

SEQ ID NO: 14783 - protein, 308 aa, Staphylococcus aureus VET0473R; identical to SEQ ID NO: 13262

SEQ ID NO: 14784 - protein, 483 aa, Staphylococcus aureus VET0472R; identical to SEQ ID NO: 13296

SEQ ID NO: 14785 - protein, 202 aa, Staphylococcus aureus VET0472R; identical to SEQ ID NO: 13267

SEQ ID NO: 14786 - protein, 308 aa, Staphylococcus aureus VET0472R; identical to SEQ ID NO: 13262

SEQ ID NO: 14787 - protein, 483 aa, Staphylococcus aureus VET0471R; identical to SEQ ID NO: 13296

SEQ ID NO: 14788 - protein, 202 aa, Staphylococcus aureus VET0471R; identical to SEQ ID NO: 13267

SEQ ID NO: 14789 - protein, 308 aa, Staphylococcus aureus VET0471R; identical to SEQ ID NO: 13262

SEQ ID NO: 14790 - protein, 483 aa, Staphylococcus aureus VET0469R; identical to SEQ ID NO: 13296

SEQ ID NO: 14791 - protein, 202 aa, Staphylococcus aureus VET0469R; identical to SEQ ID NO: 13267

SEQ ID NO: 14792 - protein, 308 aa, Staphylococcus aureus VET0469R; identical to SEQ ID NO: 13262

SEQ ID NO: 14793 - protein, 483 aa, Staphylococcus aureus VET0467R; identical to SEQ ID NO: 13296

SEQ ID NO: 14794 - protein, 202 aa, Staphylococcus aureus VET0467R; identical to SEQ ID NO: 13267

SEQ ID NO: 14795 - protein, 308 aa, Staphylococcus aureus VET0467R; identical to SEQ ID NO: 13262

SEQ ID NO: 14796 - protein, 483 aa, Staphylococcus aureus VET0437R; identical to SEQ ID NO: 13296

SEQ ID NO: 14797 - protein, 202 aa, Staphylococcus aureus VET0437R; identical to SEQ ID NO: 13267

SEQ ID NO: 14798 - protein, 308 aa, Staphylococcus aureus VET0437R; identical to SEQ ID NO: 13262

SEQ ID NO: 14799 - protein, 483 aa, Staphylococcus aureus VET0436R; identical to SEQ ID NO: 13296

SEQ ID NO: 14800 - protein, 202 aa, Staphylococcus aureus VET0436R; identical to SEQ ID NO: 13267

SEQ ID NO: 14801 - protein, 308 aa, Staphylococcus aureus VET0436R; identical to SEQ ID NO: 13262

SEQ ID NO: 14802 - protein, 483 aa, Staphylococcus aureus VET0426R; identical to SEQ ID NO: 13296

SEQ ID NO: 14803 - protein, 202 aa, Staphylococcus aureus VET0426R; identical to SEQ ID NO: 13267

SEQ ID NO: 14804 - protein, 308 aa, Staphylococcus aureus VET0426R; identical to SEQ ID NO: 13262

SEQ ID NO: 14805 - protein, 483 aa, Staphylococcus aureus VET0424R; identical to SEQ ID NO: 13296

SEQ ID NO: 14806 - protein, 202 aa, Staphylococcus aureus VET0424R; identical to SEQ ID NO: 13267

SEQ ID NO: 14807 - protein, 308 aa, Staphylococcus aureus VET0424R; identical to SEQ ID NO: 13262

SEQ ID NO: 14808 - protein, 483 aa, Staphylococcus aureus VET0422R; identical to SEQ ID NO: 13296

SEQ ID NO: 14809 - protein, 202 aa, Staphylococcus aureus VET0422R; identical to SEQ ID NO: 13267

SEQ ID NO: 14810 - protein, 308 aa, Staphylococcus aureus VET0422R; identical to SEQ ID NO: 13262

SEQ ID NO: 14811 - protein, 483 aa, Staphylococcus aureus VET0414R; identical to SEQ ID NO: 13296

SEQ ID NO: 14812 - protein, 202 aa, Staphylococcus aureus VET0414R; identical to SEQ ID NO: 13267

SEQ ID NO: 14813 - protein, 308 aa, Staphylococcus aureus VET0414R; identical to SEQ ID NO: 13262

SEQ ID NO: 14814 - protein, 483 aa, Staphylococcus aureus VET0400R; identical to SEQ ID NO: 13296

SEQ ID NO: 14815 - protein, 202 aa, Staphylococcus aureus VET0400R; identical to SEQ ID NO: 13267

SEQ ID NO: 14816 - protein, 308 aa, Staphylococcus aureus VET0400R; identical to SEQ ID NO: 13262

SEQ ID NO: 14817 - protein, 483 aa, Staphylococcus aureus VET0368R; identical to SEQ ID NO: 13296

SEQ ID NO: 14818 - protein, 202 aa, Staphylococcus aureus VET0368R; identical to SEQ ID NO: 13267

SEQ ID NO: 14819 - protein, 308 aa, Staphylococcus aureus VET0368R; identical to SEQ ID NO: 13262

SEQ ID NO: 14820 - protein, 483 aa, Staphylococcus aureus VET0361R; identical to SEQ ID NO: 13296

SEQ ID NO: 14821 - protein, 202 aa, Staphylococcus aureus VET0361R; identical to SEQ ID NO: 13267

SEQ ID NO: 14822 - protein, 308 aa, Staphylococcus aureus VET0361R; identical to SEQ ID NO: 13262

SEQ ID NO: 14823 - protein, 483 aa, Staphylococcus aureus VET0358R; identical to SEQ ID NO: 13296

SEQ ID NO: 14824 - protein, 202 aa, Staphylococcus aureus VET0358R; identical to SEQ ID NO: 13267

SEQ ID NO: 14825 - protein, 308 aa, Staphylococcus aureus VET0358R; identical to SEQ ID NO: 13262

SEQ ID NO: 14826 - protein, 483 aa, Staphylococcus aureus VET0353R; identical to SEQ ID NO: 13296

SEQ ID NO: 14827 - protein, 202 aa, Staphylococcus aureus VET0353R; identical to SEQ ID NO: 13267

SEQ ID NO: 14828 - protein, 308 aa, Staphylococcus aureus VET0353R; identical to SEQ ID NO: 13262

SEQ ID NO: 14829 - protein, 483 aa, Staphylococcus aureus VET0343R; identical to SEQ ID NO: 13296

SEQ ID NO: 14830 - protein, 202 aa, Staphylococcus aureus VET0343R; identical to SEQ ID NO: 13267

SEQ ID NO: 14831 - protein, 308 aa, Staphylococcus aureus VET0343R; identical to SEQ ID NO: 13262

SEQ ID NO: 14832 - protein, 483 aa, Staphylococcus aureus VET0342R; identical to SEQ ID NO: 13296

SEQ ID NO: 14833 - protein, 202 aa, Staphylococcus aureus VET0342R; identical to SEQ ID NO: 13267

SEQ ID NO: 14834 - protein, 308 aa, Staphylococcus aureus VET0342R; identical to SEQ ID NO: 13262

SEQ ID NO: 14835 - protein, 483 aa, Staphylococcus aureus VET0332R
MTIDKKKFIEKYVKALESNTAAIFAGAGLSCGAGYVNWKTLLNEAAEELELNIDKEEHDLVGLAQHYINKKRSRGNLNTVIMEQFSTRAELTENHKLLAKLPIDTYWTTNYDCMIEKALDSEGRIVDVKRNQNQLTVSVADKDATVYKMHGDIDSIDKIILTRDDYEKYNLTHPKFREILEGDLLSKTFLFIGFSFTDPNISYILSRIRLVLEDNTRPHYCILKEVEEKEYDNTEEFMYAKIKQQLHIEDLSRFSIETLLVKDYIEITEILESIYKRYRRKTIFISGSATEYLPFNSEAGKYFLHQLSKKLVENDFKLVTGFGLGVGSYVINGVADYINSNKKSKLQNHLNILPFSQDSSGDLDLKEVWKKNRLEMISECGMALFLFGNKEKDGKIVLADGLEEEYKIAERQELVRLPINVTGYKTKNLSEQYNEEINIQFKEKILKMYNEINEYKCDFSNKQSIDELVQKIVNLVIEIKKTK

SEQ ID NO: 14836 - protein, 202 aa, Staphylococcus aureus VET0332R; identical to SEQ ID NO: 13267

SEQ ID NO: 14837 - protein, 308 aa, Staphylococcus aureus VET0332R; identical to SEQ ID NO: 13262

SEQ ID NO: 14838 - protein, 483 aa, Staphylococcus aureus VET0319R; identical to SEQ ID NO: 13296

SEQ ID NO: 14839 - protein, 202 aa, Staphylococcus aureus VET0319R; identical to SEQ ID NO: 13267

SEQ ID NO: 14840 - protein, 308 aa, Staphylococcus aureus VET0319R; identical to SEQ ID NO: 13262

SEQ ID NO: 14841 - protein, 483 aa, Staphylococcus aureus VET0306R; identical to SEQ ID NO: 13296

SEQ ID NO: 14842 - protein, 202 aa, Staphylococcus aureus VET0306R; identical to SEQ ID NO: 13267

SEQ ID NO: 14843 - protein, 308 aa, Staphylococcus aureus VET0306R; identical to SEQ ID NO: 13262

SEQ ID NO: 14844 - protein, 483 aa, Staphylococcus aureus VET0301R; identical to SEQ ID NO: 13296

SEQ ID NO: 14845 - protein, 202 aa, Staphylococcus aureus VET0301R; identical to SEQ ID NO: 13267

SEQ ID NO: 14846 - protein, 308 aa, Staphylococcus aureus VET0301R; identical to SEQ ID NO: 13262

SEQ ID NO: 14847 - protein, 483 aa, Staphylococcus aureus VET0298R; identical to SEQ ID NO: 13296

SEQ ID NO: 14848 - protein, 202 aa, Staphylococcus aureus VET0298R; identical to SEQ ID NO: 13267

SEQ ID NO: 14849 - protein, 308 aa, Staphylococcus aureus VET0298R; identical to SEQ ID NO: 13262

SEQ ID NO: 14850 - protein, 483 aa, Staphylococcus aureus VET0293R; identical to SEQ ID NO: 13296

SEQ ID NO: 14851 - protein, 202 aa, Staphylococcus aureus VET0293R; identical to SEQ ID NO: 13267

SEQ ID NO: 14852 - protein, 308 aa, Staphylococcus aureus VET0293R; identical to SEQ ID NO: 13262

SEQ ID NO: 14853 - protein, 483 aa, Staphylococcus aureus VET0251R; identical to SEQ ID NO: 13296

SEQ ID NO: 14854 - protein, 202 aa, Staphylococcus aureus VET0251R; identical to SEQ ID NO: 13267

SEQ ID NO: 14855 - protein, 308 aa, Staphylococcus aureus VET0251R; identical to SEQ ID NO: 13262

SEQ ID NO: 14856 - protein, 483 aa, Staphylococcus aureus VET0244R; identical to SEQ ID NO: 13296

SEQ ID NO: 14857 - protein, 202 aa, Staphylococcus aureus VET0244R; identical to SEQ ID NO: 13267

SEQ ID NO: 14858 - protein, 308 aa, Staphylococcus aureus VET0244R; identical to SEQ ID NO: 13262

SEQ ID NO: 14859 - protein, 483 aa, Staphylococcus aureus VET0235R; identical to SEQ ID NO: 13296

SEQ ID NO: 14860 - protein, 202 aa, Staphylococcus aureus VET0235R; identical to SEQ ID NO: 13267

SEQ ID NO: 14861 - protein, 308 aa, Staphylococcus aureus VET0235R; identical to SEQ ID NO: 13262

SEQ ID NO: 14862 - protein, 483 aa, Staphylococcus aureus VET0232R; identical to SEQ ID NO: 13296

SEQ ID NO: 14863 - protein, 202 aa, Staphylococcus aureus VET0232R; identical to SEQ ID NO: 13267

SEQ ID NO: 14864 - protein, 308 aa, Staphylococcus aureus VET0232R; identical to SEQ ID NO: 13262

SEQ ID NO: 14865 - protein, 483 aa, Staphylococcus aureus VET0229R; identical to SEQ ID NO: 13296

SEQ ID NO: 14866 - protein, 202 aa, Staphylococcus aureus VET0229R; identical to SEQ ID NO: 13267

SEQ ID NO: 14867 - protein, 308 aa, Staphylococcus aureus VET0229R; identical to SEQ ID NO: 13262

SEQ ID NO: 14868 - protein, 483 aa, Staphylococcus aureus VET0219R; identical to SEQ ID NO: 13296

SEQ ID NO: 14869 - protein, 202 aa, Staphylococcus aureus VET0219R; identical to SEQ ID NO: 13267

SEQ ID NO: 14870 - protein, 308 aa, Staphylococcus aureus VET0219R; identical to SEQ ID NO: 13262

SEQ ID NO: 14871 - protein, 483 aa, Staphylococcus aureus VET0203R; identical to SEQ ID NO: 13296

SEQ ID NO: 14872 - protein, 202 aa, Staphylococcus aureus VET0203R; identical to SEQ ID NO: 13267

SEQ ID NO: 14873 - protein, 308 aa, Staphylococcus aureus VET0203R
MERQQTYKEKAQHLYKVKKIKNRYNTKSAEEYFFSIPQVKYILSAGRMKKHKENYNASEIKIKKAALEKSRKNKNWKIEERLIKAKIYTQKVDPEYLNIYMKAYHKKDITTEEKLEILTELKKFDTENIVRFFRKLNDAEQNKMIRNLAFKYLQDYGHYVKLRKNFKGKKKVYQTERASLDTKKPEDLYNDLTNKNIQSQKVYDIFISHSTKDKKTVEDIIRVFNEQNKTCYCDWTMDQDYLKRKYVGEYTKQVLKARMEQSKMLVLLRTENSVQSDWVSFEIEYFENLKKPIYIVESLEELLEAFSD

SEQ ID NO: 14874 - protein, 483 aa, Staphylococcus aureus VET0197R; identical to SEQ ID NO: 13296

SEQ ID NO: 14875 - protein, 202 aa, Staphylococcus aureus VET0197R; identical to SEQ ID NO: 13267

SEQ ID NO: 14876 - protein, 308 aa, Staphylococcus aureus VET0197R; identical to SEQ ID NO: 13262

SEQ ID NO: 14877 - protein, 483 aa, Staphylococcus aureus VET0191R; identical to SEQ ID NO: 13296

SEQ ID NO: 14878 - protein, 202 aa, Staphylococcus aureus VET0191R; identical to SEQ ID NO: 13267

SEQ ID NO: 14879 - protein, 308 aa, Staphylococcus aureus VET0191R; identical to SEQ ID NO: 13262

SEQ ID NO: 14880 - protein, 483 aa, Staphylococcus aureus VET0184R; identical to SEQ ID NO: 13296

SEQ ID NO: 14881 - protein, 202 aa, Staphylococcus aureus VET0184R; identical to SEQ ID NO: 13267

SEQ ID NO: 14882 - protein, 308 aa, Staphylococcus aureus VET0184R; identical to SEQ ID NO: 13262

SEQ ID NO: 14883 - protein, 483 aa, Staphylococcus aureus VET0183R; identical to SEQ ID NO: 13296

SEQ ID NO: 14884 - protein, 202 aa, Staphylococcus aureus VET0183R; identical to SEQ ID NO: 13267

SEQ ID NO: 14885 - protein, 308 aa, Staphylococcus aureus VET0183R; identical to SEQ ID NO: 13262

SEQ ID NO: 14886 - protein, 483 aa, Staphylococcus aureus VET0159R; identical to SEQ ID NO: 13296

SEQ ID NO: 14887 - protein, 202 aa, Staphylococcus aureus VET0159R; identical to SEQ ID NO: 13267

SEQ ID NO: 14888 - protein, 308 aa, Staphylococcus aureus VET0159R; identical to SEQ ID NO: 13262

SEQ ID NO: 14889 - protein, 483 aa, Staphylococcus aureus VET0158R; identical to SEQ ID NO: 13296

SEQ ID NO: 14890 - protein, 202 aa, Staphylococcus aureus VET0158R; identical to SEQ ID NO: 13267

SEQ ID NO: 14891 - protein, 308 aa, Staphylococcus aureus VET0158R; identical to SEQ ID NO: 13262

SEQ ID NO: 14892 - protein, 483 aa, Staphylococcus aureus VET0157R; identical to SEQ ID NO: 13296

SEQ ID NO: 14893 - protein, 202 aa, Staphylococcus aureus VET0157R; identical to SEQ ID NO: 13267

SEQ ID NO: 14894 - protein, 308 aa, Staphylococcus aureus VET0157R; identical to SEQ ID NO: 13262

SEQ ID NO: 14895 - protein, 483 aa, Staphylococcus aureus VET0154R; identical to SEQ ID NO: 13296

SEQ ID NO: 14896 - protein, 202 aa, Staphylococcus aureus VET0154R; identical to SEQ ID NO: 13267

SEQ ID NO: 14897 - protein, 308 aa, Staphylococcus aureus VET0154R; identical to SEQ ID NO: 13262

SEQ ID NO: 14898 - protein, 483 aa, Staphylococcus aureus VET0150R; identical to SEQ ID NO: 13296

SEQ ID NO: 14899 - protein, 202 aa, Staphylococcus aureus VET0150R; identical to SEQ ID NO: 13267

SEQ ID NO: 14900 - protein, 308 aa, Staphylococcus aureus VET0150R; identical to SEQ ID NO: 13262

SEQ ID NO: 14901 - protein, 483 aa, Staphylococcus aureus VET0141R; identical to SEQ ID NO: 13296

SEQ ID NO: 14902 - protein, 202 aa, Staphylococcus aureus VET0141R; identical to SEQ ID NO: 13267

SEQ ID NO: 14903 - protein, 308 aa, Staphylococcus aureus VET0141R; identical to SEQ ID NO: 13262

SEQ ID NO: 14904 - protein, 483 aa, Staphylococcus aureus VET0136R; identical to SEQ ID NO: 13296

SEQ ID NO: 14905 - protein, 202 aa, Staphylococcus aureus VET0136R; identical to SEQ ID NO: 13267

SEQ ID NO: 14906 - protein, 308 aa, Staphylococcus aureus VET0136R; identical to SEQ ID NO: 13262

SEQ ID NO: 14907 - protein, 483 aa, Staphylococcus aureus VET0125R; identical to SEQ ID NO: 13296

SEQ ID NO: 14908 - protein, 202 aa, Staphylococcus aureus VET0125R; identical to SEQ ID NO: 13267

SEQ ID NO: 14909 - protein, 308 aa, Staphylococcus aureus VET0125R; identical to SEQ ID NO: 13262

SEQ ID NO: 14910 - protein, 483 aa, Staphylococcus aureus VET0120R; identical to SEQ ID NO: 13296

SEQ ID NO: 14911 - protein, 202 aa, Staphylococcus aureus VET0120R; identical to SEQ ID NO: 13267

SEQ ID NO: 14912 - protein, 308 aa, Staphylococcus aureus VET0120R; identical to SEQ ID NO: 13262

SEQ ID NO: 14913 - protein, 483 aa, Staphylococcus aureus VET0113R; identical to SEQ ID NO: 13296

SEQ ID NO: 14914 - protein, 202 aa, Staphylococcus aureus VET0113R; identical to SEQ ID NO: 13267

SEQ ID NO: 14915 - protein, 308 aa, Staphylococcus aureus VET0113R; identical to SEQ ID NO: 13262

SEQ ID NO: 14916 - protein, 483 aa, Staphylococcus aureus VET0111R; identical to SEQ ID NO: 13296

SEQ ID NO: 14917 - protein, 202 aa, Staphylococcus aureus VET0111R; identical to SEQ ID NO: 13267

SEQ ID NO: 14918 - protein, 308 aa, Staphylococcus aureus VET0111R; identical to SEQ ID NO: 13262

SEQ ID NO: 14919 - protein, 483 aa, Staphylococcus aureus VET0102R; identical to SEQ ID NO: 13296

SEQ ID NO: 14920 - protein, 202 aa, Staphylococcus aureus VET0102R; identical to SEQ ID NO: 13267

SEQ ID NO: 14921 - protein, 308 aa, Staphylococcus aureus VET0102R; identical to SEQ ID NO: 13262

SEQ ID NO: 14922 - protein, 483 aa, Staphylococcus aureus VET0081R; identical to SEQ ID NO: 13296

SEQ ID NO: 14923 - protein, 202 aa, Staphylococcus aureus VET0081R; identical to SEQ ID NO: 13267

SEQ ID NO: 14924 - protein, 308 aa, Staphylococcus aureus VET0081R; identical to SEQ ID NO: 13262

SEQ ID NO: 14925 - protein, 483 aa, Staphylococcus aureus VET0078R; identical to SEQ ID NO: 13296

SEQ ID NO: 14926 - protein, 202 aa, Staphylococcus aureus VET0078R; identical to SEQ ID NO: 13267

SEQ ID NO: 14927 - protein, 308 aa, Staphylococcus aureus VET0078R; identical to SEQ ID NO: 13262

SEQ ID NO: 14928 - protein, 483 aa, Staphylococcus aureus VET0058R; identical to SEQ ID NO: 13296

SEQ ID NO: 14929 - protein, 202 aa, Staphylococcus aureus VET0058R; identical to SEQ ID NO: 13267

SEQ ID NO: 14930 - protein, 308 aa, Staphylococcus aureus VET0058R; identical to SEQ ID NO: 14873

SEQ ID NO: 14931 - protein, 483 aa, Staphylococcus aureus VET0050R; identical to SEQ ID NO: 13296

SEQ ID NO: 14932 - protein, 202 aa, Staphylococcus aureus VET0050R; identical to SEQ ID NO: 13267

SEQ ID NO: 14933 - protein, 308 aa, Staphylococcus aureus VET0050R; identical to SEQ ID NO: 13262

SEQ ID NO: 14934 - protein, 483 aa, Staphylococcus aureus VE08/02242ST1; identical to SEQ ID NO: 13296

SEQ ID NO: 14935 - protein, 202 aa, Staphylococcus aureus VE08/02242ST1; identical to SEQ ID NO: 13267

SEQ ID NO: 14936 - protein, 308 aa, Staphylococcus aureus VE08/02242ST1; identical to SEQ ID NO: 13262

SEQ ID NO: 14937 - protein, 375 aa, Staphylococcus aureus USA_6; identical to SEQ ID NO: 13260

SEQ ID NO: 14938 - protein, 202 aa, Staphylococcus aureus USA_6; identical to SEQ ID NO: 13267

SEQ ID NO: 14939 - protein, 308 aa, Staphylococcus aureus USA_6; identical to SEQ ID NO: 13262

SEQ ID NO: 14940 - protein, 483 aa, Staphylococcus aureus Tur-5; identical to SEQ ID NO: 13296

SEQ ID NO: 14941 - protein, 202 aa, Staphylococcus aureus Tur-5; identical to SEQ ID NO: 13267

SEQ ID NO: 14942 - protein, 308 aa, Staphylococcus aureus Tur-5; identical to SEQ ID NO: 13262

SEQ ID NO: 14943 - protein, 483 aa, Staphylococcus aureus Tur-4; identical to SEQ ID NO: 13296

SEQ ID NO: 14944 - protein, 202 aa, Staphylococcus aureus Tur-4; identical to SEQ ID NO: 13267

SEQ ID NO: 14945 - protein, 308 aa, Staphylococcus aureus Tur-4; identical to SEQ ID NO: 13262

SEQ ID NO: 14946 - protein, 483 aa, Staphylococcus aureus S64_POEL; identical to SEQ ID NO: 13296

SEQ ID NO: 14947 - protein, 202 aa, Staphylococcus aureus S64_POEL; identical to SEQ ID NO: 13267

SEQ ID NO: 14948 - protein, 308 aa, Staphylococcus aureus S64_POEL; identical to SEQ ID NO: 13262

SEQ ID NO: 14949 - protein, 483 aa, Staphylococcus aureus S63_POEL; identical to SEQ ID NO: 13296

SEQ ID NO: 14950 - protein, 202 aa, Staphylococcus aureus S63_POEL; identical to SEQ ID NO: 13267

SEQ ID NO: 14951 - protein, 308 aa, Staphylococcus aureus S63_POEL; identical to SEQ ID NO: 13262

SEQ ID NO: 14952 - protein, 483 aa, Staphylococcus aureus Rd.290; identical to SEQ ID NO: 13296

SEQ ID NO: 14953 - protein, 202 aa, Staphylococcus aureus Rd.290; identical to SEQ ID NO: 13267

SEQ ID NO: 14954 - protein, 308 aa, Staphylococcus aureus Rd.290; identical to SEQ ID NO: 13262

SEQ ID NO: 14955 - protein, 483 aa, Staphylococcus aureus MSSA-47; identical to SEQ ID NO: 13296

SEQ ID NO: 14956 - protein, 202 aa, Staphylococcus aureus MSSA-47; identical to SEQ ID NO: 13267

SEQ ID NO: 14957 - protein, 308 aa, Staphylococcus aureus MSSA-47; identical to SEQ ID NO: 13262

SEQ ID NO: 14958 - protein, 375 aa, Staphylococcus aureus MSSA-37; identical to SEQ ID NO: 13260

SEQ ID NO: 14959 - protein, 202 aa, Staphylococcus aureus MSSA-37; identical to SEQ ID NO: 13267

SEQ ID NO: 14960 - protein, 308 aa, Staphylococcus aureus MSSA-37; identical to SEQ ID NO: 13262

SEQ ID NO: 14961 - protein, 375 aa, Staphylococcus aureus MSSA-123; identical to SEQ ID NO: 13260

SEQ ID NO: 14962 - protein, 202 aa, Staphylococcus aureus MSSA-123; identical to SEQ ID NO: 13267

SEQ ID NO: 14963 - protein, 308 aa, Staphylococcus aureus MSSA-123; identical to SEQ ID NO: 13262

SEQ ID NO: 14964 - protein, 483 aa, Staphylococcus aureus GD2010-169; identical to SEQ ID NO: 13296

SEQ ID NO: 14965 - protein, 202 aa, Staphylococcus aureus GD2010-169; identical to SEQ ID NO: 13267

SEQ ID NO: 14966 - protein, 308 aa, Staphylococcus aureus GD2010-169; identical to SEQ ID NO: 13262

SEQ ID NO: 14967 - protein, 483 aa, Staphylococcus aureus GD2010-159; identical to SEQ ID NO: 13296

SEQ ID NO: 14968 - protein, 202 aa, Staphylococcus aureus GD2010-159; identical to SEQ ID NO: 13267

SEQ ID NO: 14969 - protein, 308 aa, Staphylococcus aureus GD2010-159; identical to SEQ ID NO: 13262

SEQ ID NO: 14970 - protein, 483 aa, Staphylococcus aureus C3452; identical to SEQ ID NO: 13296

SEQ ID NO: 14971 - protein, 202 aa, Staphylococcus aureus C3452; identical to SEQ ID NO: 13267

SEQ ID NO: 14972 - protein, 308 aa, Staphylococcus aureus C3452; identical to SEQ ID NO: 13262

SEQ ID NO: 14973 - protein, 483 aa, Staphylococcus aureus C0676; identical to SEQ ID NO: 13296

SEQ ID NO: 14974 - protein, 202 aa, Staphylococcus aureus C0676; identical to SEQ ID NO: 13267

SEQ ID NO: 14975 - protein, 308 aa, Staphylococcus aureus C0676; identical to SEQ ID NO: 13262

SEQ ID NO: 14976 - protein, 483 aa, Staphylococcus aureus C0626; identical to SEQ ID NO: 13296

SEQ ID NO: 14977 - protein, 202 aa, Staphylococcus aureus C0626; identical to SEQ ID NO: 13267

SEQ ID NO: 14978 - protein, 308 aa, Staphylococcus aureus C0626
MERQQTYKEKAQHLYKVKKIKNRYNTKSAEEYFFSIPQVKYILSAGRMKKHKENYNASEIKIKKAALEKSRKNKNWKIEERLIKAKRYTQKVDPEYLNIYMKAYHKKDITTEEKLEILTELKKFDTENIVRFFRKLNDAEQNKMIRNLAFKYLQDYGHYVKLRKNFKGKKKVYQTERASLDTKKPEDLYNDLTNKNIQSQKVYDIFISHSTKDKKTVEDIIRVFNEQNKTCYCDWTMDQDYLKRKYVGEYTKQVLKARMEQSKMLVLLSTENSVQSDWVSFEIEYFENLKKPIYIVESLEELLEAFSD

SEQ ID NO: 14979 - protein, 483 aa, Staphylococcus aureus 81629; identical to SEQ ID NO: 13296

SEQ ID NO: 14980 - protein, 202 aa, Staphylococcus aureus 81629; identical to SEQ ID NO: 13267

SEQ ID NO: 14981 - protein, 308 aa, Staphylococcus aureus 81629; identical to SEQ ID NO: 13262

SEQ ID NO: 14982 - protein, 483 aa, Staphylococcus aureus 63-D10; identical to SEQ ID NO: 13296

SEQ ID NO: 14983 - protein, 202 aa, Staphylococcus aureus 63-D10; identical to SEQ ID NO: 13267

SEQ ID NO: 14984 - protein, 308 aa, Staphylococcus aureus 63-D10; identical to SEQ ID NO: 13262

SEQ ID NO: 14985 - protein, 483 aa, Staphylococcus aureus 53180-1; identical to SEQ ID NO: 13296

SEQ ID NO: 14986 - protein, 202 aa, Staphylococcus aureus 53180-1; identical to SEQ ID NO: 13267

SEQ ID NO: 14987 - protein, 308 aa, Staphylococcus aureus 53180-1; identical to SEQ ID NO: 13262

SEQ ID NO: 14988 - protein, 483 aa, Staphylococcus aureus 45(2607); identical to SEQ ID NO: 13296

SEQ ID NO: 14989 - protein, 202 aa, Staphylococcus aureus 45(2607); identical to SEQ ID NO: 13267

SEQ ID NO: 14990 - protein, 308 aa, Staphylococcus aureus 45(2607); identical to SEQ ID NO: 13262

SEQ ID NO: 14991 - protein, 483 aa, Staphylococcus aureus 28(3K2-5); identical to SEQ ID NO: 13296

SEQ ID NO: 14992 - protein, 202 aa, Staphylococcus aureus 28(3K2-5); identical to SEQ ID NO: 13267

SEQ ID NO: 14993 - protein, 308 aa, Staphylococcus aureus 28(3K2-5); identical to SEQ ID NO: 13262

SEQ ID NO: 14994 - protein, 483 aa, Staphylococcus aureus 22(2K81-5); identical to SEQ ID NO: 13296

SEQ ID NO: 14995 - protein, 202 aa, Staphylococcus aureus 22(2K81-5); identical to SEQ ID NO: 13267

SEQ ID NO: 14996 - protein, 308 aa, Staphylococcus aureus 22(2K81-5); identical to SEQ ID NO: 13262

SEQ ID NO: 14997 - protein, 483 aa, Staphylococcus aureus 2011-60-2275-7; identical to SEQ ID NO: 13296

SEQ ID NO: 14998 - protein, 202 aa, Staphylococcus aureus 2011-60-2275-7; identical to SEQ ID NO: 13267

SEQ ID NO: 14999 - protein, 308 aa, Staphylococcus aureus 2011-60-2275-7; identical to SEQ ID NO: 13262

SEQ ID NO: 15000 - protein, 483 aa, Staphylococcus aureus 1484-9; identical to SEQ ID NO: 13296

SEQ ID NO: 15001 - protein, 202 aa, Staphylococcus aureus 1484-9; identical to SEQ ID NO: 13267

SEQ ID NO: 15002 - protein, 308 aa, Staphylococcus aureus 1484-9; identical to SEQ ID NO: 13262

SEQ ID NO: 15003 - protein, 483 aa, Staphylococcus aureus 1111001578; identical to SEQ ID NO: 13296

SEQ ID NO: 15004 - protein, 202 aa, Staphylococcus aureus 1111001578; identical to SEQ ID NO: 13267

SEQ ID NO: 15005 - protein, 308 aa, Staphylococcus aureus 1111001578; identical to SEQ ID NO: 13262

SEQ ID NO: 15006 - protein, 483 aa, Staphylococcus aureus 10S00488; identical to SEQ ID NO: 13296

SEQ ID NO: 15007 - protein, 202 aa, Staphylococcus aureus 10S00488; identical to SEQ ID NO: 13267

SEQ ID NO: 15008 - protein, 308 aa, Staphylococcus aureus 10S00488; identical to SEQ ID NO: 13262

SEQ ID NO: 15009 - protein, 483 aa, Staphylococcus aureus 1(04GN_04-02-52-07); identical to SEQ ID NO: 13296

SEQ ID NO: 15010 - protein, 202 aa, Staphylococcus aureus 1(04GN_04-02-52-07); identical to SEQ ID NO: 13267

SEQ ID NO: 15011 - protein, 308 aa, Staphylococcus aureus 1(04GN_04-02-52-07); identical to SEQ ID NO: 13262

SEQ ID NO: 15012 - protein, 483 aa, Staphylococcus aureus 09S01694; identical to SEQ ID NO: 13296

SEQ ID NO: 15013 - protein, 202 aa, Staphylococcus aureus 09S01694; identical to SEQ ID NO: 13267

SEQ ID NO: 15014 - protein, 308 aa, Staphylococcus aureus 09S01694; identical to SEQ ID NO: 13262

SEQ ID NO: 15015 - protein, 483 aa, Staphylococcus aureus 09-00736; identical to SEQ ID NO: 13296

SEQ ID NO: 15016 - protein, 202 aa, Staphylococcus aureus 09-00736; identical to SEQ ID NO: 13267

SEQ ID NO: 15017 - protein, 308 aa, Staphylococcus aureus 09-00736; identical to SEQ ID NO: 13262

SEQ ID NO: 15018 - protein, 483 aa, Staphylococcus aureus 08-01229; identical to SEQ ID NO: 13296

SEQ ID NO: 15019 - protein, 202 aa, Staphylococcus aureus 08-01229; identical to SEQ ID NO: 13267

SEQ ID NO: 15020 - protein, 308 aa, Staphylococcus aureus 08-01229; identical to SEQ ID NO: 13262

SEQ ID NO: 15021 - protein, 483 aa, Staphylococcus aureus 08-01062; identical to SEQ ID NO: 13296

SEQ ID NO: 15022 - protein, 202 aa, Staphylococcus aureus 08-01062; identical to SEQ ID NO: 13267

SEQ ID NO: 15023 - protein, 308 aa, Staphylococcus aureus 08-01062; identical to SEQ ID NO: 13262

SEQ ID NO: 15024 - protein, 483 aa, Staphylococcus aureus 08-01059; identical to SEQ ID NO: 13296

SEQ ID NO: 15025 - protein, 202 aa, Staphylococcus aureus 08-01059; identical to SEQ ID NO: 13267

SEQ ID NO: 15026 - protein, 308 aa, Staphylococcus aureus 08-01059; identical to SEQ ID NO: 13262

SEQ ID NO: 15027 - protein, 481 aa, Escherichia coli 1-176-05_S1_C3; identical to SEQ ID NO: 14099

SEQ ID NO: 15028 - protein, 155 aa, Escherichia coli 1-176-05_S1_C3; identical to SEQ ID NO: 13289

SEQ ID NO: 15029 - protein, 481 aa, Escherichia coli 1-176-05_S1_C2; identical to SEQ ID NO: 14099

SEQ ID NO: 15030 - protein, 155 aa, Escherichia coli 1-176-05_S1_C2; identical to SEQ ID NO: 13289

SEQ ID NO: 15031 - protein, 483 aa, Burkholderia cenocepacia
MVAATTKRFLKDYTEALIGGGGAVFVGAGVSMGAGYPSWASLLTEVGEELGVKSGELHDLAALAQWSIQENGSATQVRNVIKAQIGVEHPIPPTLEIISRLPVKYIWTTNYDRLVERAFGAVNRPIDTVSGAADLALRATPGASRLFKMHGSVERLDDVVISTDDYELYRSKRGAFLPLLHAHLSSMSMLFLGISFTDPNIRHVLSLIRESFTSAPPEHFAIVRPPQRDDYKSEAEFEARSTQHRLWSRDLKRYGLVVVEIDDYAEVPELLRQVERRVAARRVWVSGSWPPEASADIAKVYGVAHAIGQLVGARGCDLVSGTGVVVGSASIAGFLDALRSDGGWDLERRLIARPFPQPISGAAPDRGQWAALRAELARIAGVVVFVGGMKIDSDTGATVMADGVLDEFEAAMAADSFVIPIGTTGGAAAHISDRLIGSGVDASGRNAMRPTDEELRELARPDICIGEIVNLVSAILARIDKRV

SEQ ID NO: 15032 - protein, 165 aa, Burkholderia cenocepacia
MTRRVFFSFHFDNDYWRTQQIRNMGALEGQSLCTPNAWEEVKRKGNAAIEKWIADNMDGKSCVVVLVGSQTANRPWVQHEIVKAWNDKRGVLGIRVDRLLDRNSQTSAAGANPFDAITFRNSSRKLSSVVPLITPKGNDSKAVYASISNGIEKWIEEAIAIRNRN

SEQ ID NO: 15033 - protein, 184 aa, Burkholderia cenocepacia
MAQYITRGELRSFAAELGGFEAARLRRNAASRSLAGATFLSHSSKDDELVAGAIRVLENHGAKVYVDEIDPEMPPYTSEETAALLKTRIRDTSRFVLLASKNSRDSKWVPWELGIADGTKTPSQIALFPASDSSFDQAWASWEYLGLYDRIVWGKLDGYQKEVWMVIDEKRNTGVELSKWLRGY

SEQ ID NO: 15034 - protein, 132 aa, Vibrio navarrensis
MTDRNAPKYAPQTEVGTRPIAQVWHDYRTDMISFSGIAIFLFGNKLKDGEVVVADGLIKEFKIAKSNGLLLIPVGATEYASREIYCELLKEGYFDSDAFPESARKFIDKICDKESELTTIQSEIIDLLKSLK

SEQ ID NO: 15035 - protein, 166 aa, Vibrio navarrensis
MPKRNCFYSFHYLPDNWRAGTVRNIGAIDGNKPTSDNNWETVKKGGDAAIKKWIANEMSGKSCVVVLVGSNTADRKWINHEIVKGWDDGKGVVGIYVHGLKDSGGNTSSKGSNPFDYIGYGNTGKKLSSIVKCYNPTGTTSQEKYDWISKHLANAVEEAIEIRKNN

SEQ ID NO: 15036 - protein, 479 aa, Flavobacterium seoulense
MNQEIEIFIKDFVKDLNEGTASIFAGAGLSVNAGFVNWAELMSEIAHDLGLNIENEKDLVSLAQFHVNENQTRSKINRKILEEFTEDAKETENHKLIARLPLSSIWTTNYDQLLETTFKNENKVVDIKYRNNQLLTTKPKRDIVIFKMHGDVNHADEAIITKQQYEQYHSTHEPFINALAGELTTKTFLFIGFSFTDPNLDYILSRLNFRYDKQQRQHYCFVKKHKLGDSQNPDEATLYYNSRKQYLTINDLKRYGIKSLLIDEYEDITEILKEIEYRYKKKTIFISGSAETYEPFDKNEAIGFVHNLSKVIIENDYRIVNGFGWGIGSSIINGALEAIYKNPIKYSESQLILKPFPQFETGDKPLKIMWEEYRQKMISQCGISLFIFGNKKNDDNEIIDADGVLREFEISKNNGNICIPIGLTGYATYQIYERISNDPKKYFESPESLMPIINLLAKEPTNLDAVIIEIDKLLKQLKK

SEQ ID NO: 15037 - protein, 203 aa, Flavobacterium seoulense
MARETFISYKYSEAQELRDLIIEKLGKDASYYKGETGESPDLTGSSIENIKENLKNMIFGTSVTIVIISPNIKKSKWIDWEIEYSLKEYKRGSTTSKTNGIVGVVMKINGNYNWLISSYQNSDGCTSRSIDNSYLHDIKVKNRFNLITNNKYSCPNCKTFDQLTGSYISLIEEDRFLKNPQYFIENAFQKSQNIKNYELSKNR

SEQ ID NO: 15038 - protein, 182 aa, Flavobacterium seoulense
MAILTKSRLTALTENKLGTRMFSQTLNEAKFQNKSTATVTVFLSHCHDDLEQIEVNKVIVLLRNSGVSVYIDSLDSSLPPFTSAITAQRIKDQIKQNRKFILVATNKAIQSKWCNWELGFGDAHKYIDHIAIIPLADSSQVWNGNEYLQIYPRIEESELTSEYIKVIYPNKTYKSLSEWLKS

SEQ ID NO: 15039 - protein, 471 aa, Bacteroides vulgatus str. 3975 RP4; identical to SEQ ID NO: 13235

SEQ ID NO: 15040 - protein, 203 aa, Bacteroides vulgatus str. 3975 RP4; identical to SEQ ID NO: 13237

SEQ ID NO: 15041 - protein, 182 aa, Bacteroides vulgatus str. 3975 RP4; identical to SEQ ID NO: 13236

SEQ ID NO: 15042 - protein, 481 aa, Escherichia coli 4-203-08_S1_C1; identical to SEQ ID NO: 14099

SEQ ID NO: 15043 - protein, 155 aa, Escherichia coli 4-203-08_S1_C1; identical to SEQ ID NO: 13289

SEQ ID NO: 15044 - protein, 529 aa, Escherichia coli 2-222-05_S1_C2
MNFKKKLEEHFKQFEASPVLFVGSGVSRRYLGVPCWQDLLKHFAEAIGENHIKLKTKSNGDLPEYAQLLVSAYAEKWWDTKEGQLALSEKEQEKIFINEQSPLKLSISKYIENAHKNIIENDELKHEISLFAKANIDGVITTNWDVFLESLFPKFTTFIGQDGLITGRSHGIAEIYKIHGCCTEPNSLILTSSDYDKYRKKNPYLSSKLLTMFIERPVIFLGYSLTDEHIAEILEDIVSCFPDASLDFLQNKLLFVEWKPELEEADISDSVIHKKIPVKYVQAPSYKEIFEVLSETKKRIPAHLFRMIKDELYELVLTDDPKGKLYVRDSEKIEEGANTTEFVVGYGAISMVKKSESMAAKGLVGLERVDLIREVVFENGHYDWECVVNDVLPNICKGNARIPIFHFLNHANLINPDGSIINEPELAGGVLSRLDITPVSFQSQGWDKRRSENVPEVRVGVNELYLAYDFGFFLRMMPYMEPGLINRDMNELHKILKKHIDEAMSIQALSSNFCRLVCLYDFIKNSNKF

SEQ ID NO: 15045 - protein, 323 aa, Escherichia coli 2-222-05_S1_C2
MTTLVFSYSHADEAQRNELEKHLSPLKRMGKITTWHDRRIVPGQEFEHQIDHYFSQADIILLLISSDFIASDYCYQIEMTNALERHKKGEAVVIPVILRECAWHQLPFGSIMAATIDGKAISRFASHDEGYVQVADAVSRAIANLEAKKPQQIVHAPAPANPMLQATDTVFTPRSSNLSLPKSFTDLDKDRARREGFEYVARYFANSLDELKKRHAGLDVDFHRPDNDSFTCAVYINGGKVGQCGVWCGRRNMGFGDICYSQSGVTRNSCNESLSVADNGQTLGFRTLMGLGYSNSRDSLLTNEGMAEHLWDMFFSPIQQRNR

SEQ ID NO: 15046 - protein, 529 aa, Escherichia coli 2-222-05_S1_C3; identical to SEQ ID NO: 15044

SEQ ID NO: 15047 - protein, 323 aa, Escherichia coli 2-222-05_S1_C3; identical to SEQ ID NO: 15045

SEQ ID NO: 15048 - protein, 481 aa, Escherichia coli 2-427-07_S3_C3; identical to SEQ ID NO: 14099

SEQ ID NO: 15049 - protein, 155 aa, Escherichia coli 2-427-07_S3_C3; identical to SEQ ID NO: 13289

SEQ ID NO: 15050 - protein, 481 aa, Vibrio parahaemolyticus; identical to SEQ ID NO: 13362

SEQ ID NO: 15051 - protein, 191 aa, Vibrio parahaemolyticus; identical to SEQ ID NO: 13364

SEQ ID NO: 15052 - protein, 481 aa, Vibrio parahaemolyticus; identical to SEQ ID NO: 13362

SEQ ID NO: 15053 - protein, 191 aa, Vibrio parahaemolyticus; identical to SEQ ID NO: 13364

SEQ ID NO: 15054 - protein, 481 aa, Vibrio parahaemolyticus; identical to SEQ ID NO: 13362

SEQ ID NO: 15055 - protein, 200 aa, Vibrio parahaemolyticus
MSRKTFFSFHYTSDVWRVWNVRNCWVVKPEEQVAEGFFDSSVFEASKKESVDNLKTFLRNGLKNTSVTCVLAGKETYQRRWVRYEIVRSVLKGNGLLTVHIHNLKDKNGYTTSKGIDPLSCIGVYKSGENIYFAEKNGAKWEKYGDYQSPIPAKDLWFSEPKDNGVLPLSRFYSNYDFVNNKGRENISKWIDSAAKQVGR

SEQ ID NO: 15056 - protein, 191 aa, Vibrio parahaemolyticus; identical to SEQ ID NO: 13364

SEQ ID NO: 15057 - protein, 481 aa, Vibrio parahaemolyticus; identical to SEQ ID NO: 13362

SEQ ID NO: 15058 - protein, 200 aa, Vibrio parahaemolyticus; identical to SEQ ID NO: 15055

SEQ ID NO: 15059 - protein, 191 aa, Vibrio parahaemolyticus; identical to SEQ ID NO: 13364

SEQ ID NO: 15060 - protein, 481 aa, Vibrio parahaemolyticus; identical to SEQ ID NO: 13362

SEQ ID NO: 15061 - protein, 200 aa, Vibrio parahaemolyticus; identical to SEQ ID NO: 15055

SEQ ID NO: 15062 - protein, 191 aa, Vibrio parahaemolyticus; identical to SEQ ID NO: 13364

SEQ ID NO: 15063 - protein, 481 aa, Vibrio parahaemolyticus; identical to SEQ ID NO: 13362

SEQ ID NO: 15064 - protein, 200 aa, Vibrio parahaemolyticus; identical to SEQ ID NO: 15055

SEQ ID NO: 15065 - protein, 475 aa, Vibrio parahaemolyticus
MEKQHFITNFLREIQDGNAAVFAGAGLSIGAGFVDWRNLLKPLADELNLDITHEQDLVSVAQYFCNGHNRNRITQQLIDELGVAAKPTKSHEILAALPIDTYWTTNYDRLIEKALENENKVYDSKYRKEHLANTKRGRDVTLYKMHGDIENSHETILTKDEYEKYPYTHAPFITALSGDLVSKTFLFLGFSFSDPNLDYILSRVRIHFKDNQRNHYCIFKRCALDEFDNEEEFRNASVKQNLVALDLKRFHINVVFIDNYSEVEELLALIYKKYIRKTVFMSGSADDFGAWNKKDVEEALFRLGSTIVDKNFRIASGIGLGIGNALISGAISRTYQSQYSHLDDHVLMRPFPQYIENEVERKSVWKRYREEIIGKAGIAIFFMGNKVVDNNIVIADGVIEEFNIAVEKGVLVIPVGCSGFAAKQLWEKVISSPDTYYSNINEKFIEKLQELGKDIDNPKEVISLIIEILELSITE

SEQ ID NO: 15066 - protein, 228 aa, Vibrio parahaemolyticus
MARKVFVSYKYGDTQVKSLTDDWFVSTKVRDYVTELQDLLKENSEIYKGEDDGEDLSDFKDSTIESKLRNKIFDSSVTIVMISKGMKEWFTPEKDQWIPWEVSYSLKELTKNGRTSLANGVLMVVLPDENNDYDYYIKENTCPHCNCRTLMTDFLFGILKRNVFNNKSLSESSCGHHEYNPVYVGDHSYITSVKWSDFIKSPTEYLDECVRLRGKIDDFNISKVIHND

SEQ ID NO: 15067 - protein, 474 aa, Pseudomonas plecoglossicida
MKFNGEINSFIRDFVKDLSENNAAIFAGAGLSKSSGYVNWKELLTDIAEELELKIDLESDLISLAQYHVNKTKGPAKLTRKIVEEFSHQAEPSENHKILARLPIRTFWTTNYDTLIEDSLKQAYKVADVKHKLSQLNITRPKRDAVVYKMHGCVSDATHAILYKNQYETYHRDYAPFVTALSGDLVSKTFLFIGFSFSDPNLDYVLSRLHTSTIKTHYCFVKREDAEPGDDEEMHQYKRRKQEFRVEDLRRYGIQPIMVDKYSDITDILREIERRYLKKTVFISGSAEVYGEWGRDKSLKFIHALASELVLKDRRVVNGFGWGVGSAVINGALDAIYKYPEKYSEDQLVMRPFPQFPSAGQDLKQLWEEYRQRMIGLSGVSIFIFGNKIDNEQLVIANGVVREAEIAIEQGRIVIPVAATGFAAAEVYNMIKAKPELYDAHKWLLVVIDELADPALSCEEIVKKIADAIVKLDK

SEQ ID NO: 15068 - protein, 163 aa, Pseudomonas plecoglossicida; identical to SEQ ID NO: 13543

SEQ ID NO: 15069 - protein, 171 aa, Pseudomonas plecoglossicida
MLISTDSLRNAAYRRSQFNGQARSIQQAKSLGQSTIFLSHSHKDHTLALGFAQLLQDAGCRVYIDWLDGEMPERPNKETAARIQLKIKENDYFVYLATENSSKSRWCPWEIGYADGVKITDRIVIAPTRDRSATYGQEYLGLYRHIDLASDGQLAVFDPNMSNGRYAKTIW

SEQ ID NO: 15070 - protein, 481 aa, Escherichia coli 4-203-08_S1_C2; identical to SEQ ID NO: 14099

SEQ ID NO: 15071 - protein, 155 aa, Escherichia coli 4-203-08_S1_C2; identical to SEQ ID NO: 13289

SEQ ID NO: 15072 - protein, 481 aa, Escherichia coli 4-203-08_S1_C3; identical to SEQ ID NO: 14099

SEQ ID NO: 15073 - protein, 155 aa, Escherichia coli 4-203-08_S1_C3; identical to SEQ ID NO: 13289

SEQ ID NO: 15074 - protein, 299 aa, Escherichia coli 4-203-08_S1_C3
MSGDLISKTFLFIGFSFTDPNLDYILSRLHVPEKHRRRHYCFLRKEPSLPQGNEDEAGAMYRQRRQEHHIRDLLRFGIQAVLVNEYDDIPLILKEIESRFLKKTIFISGSAEEYGAWDKQEALNFVHILSSSLVKNGYRVVNGFGWGIGSAVINGALEAIYSKPDKYSEEQLIMRPFPQHSSNDKALSELWDEYRQRMIGLSGIAIFLFGNKLHDGRIVNADGVRREFQIAQETGVVVLPLGVTGYMAKELADEMLTDPSKHFVRYPWLEKEVAQLADLSANRANIEMKVLEILKKLGG

SEQ ID NO: 15075 - protein, 155 aa, Escherichia coli 4-203-08_S1_C3; identical to SEQ ID NO: 13289

SEQ ID NO: 15076 - protein, 311 aa, Escherichia coli 4-203-08_S1_C3
QYYKTHEGFVTALSGDLISKTFLFIGFSFTDPNLDYILSRLHVPEKHRRRHYCFLRKEPSLPQGNEDEAGAMYRQRRQEHHIRDLLRFGIQAVLVNEYDDIPLILKEIESRFLKKTIFISGSAEEYGAWDKQEALNFVHILSSSLVKNGYRVVNGFGWGIGSAVINGALEAIYSKPDKYSEEQLIMRPFPQHSSNDKALSELWDEYRQRMIGLSGIAIFLFGNKLHDGRIVNADGVRREFQIAQETGVVVLPLGVTGYMAKELADEMLTDPSKHFVRYPWLEKEVAQLADLSANRANIEMKVLEILKKLGG

SEQ ID NO: 15077 - protein, 155 aa, Escherichia coli 4-203-08_S1_C3; identical to SEQ ID NO: 13289

SEQ ID NO: 15078 - protein, 294 aa, Streptococcus mitis
MRKEQFIKKFTKAVQDSNAAVFAGAGTSVDAGFVNWKKLVKPFADEIDLDIDKESDLVGLTQYYINSKMGNRGSVNQEIVYQFSSQEAETKVTNLLTRLPISTYWTTNYDNVIENGLKKNNRRGDIKRKIDDLAISIRDSDAIVYKMHGDVDSPNDAVISKDDYERYSDKNSLFVTALRGDLVSKTFLFVGFGFEDPNLESILGKVNVLLGDNKREHYCIQKQVLERDYDADIEGYNYDKIKQDLKIKDLQRYGIETVLVDDYSEISDLIQKIEEEYLKNTIFISGSISDYNEN

SEQ ID NO: 15079 - protein, 206 aa, Streptococcus mitis
MVTKIFISFRFSDGKEIKDELVDLFDESTEVINRSEDVDRSQMSENIIQEYLYEKLKDTSVTIVLLTPEAVSYRKNWLGNYDDWLYDELRYSLEDRKNNRTNGVIAVYTDEAKYKVLDDSTHYCQHCQQTKSCRSLKYFDNLARKNMLNIKSAYKKNPCNDLYDDEHDSYISLVSLSDFKENYSQYIQNAKDKRERLDEFNIAKRM

SEQ ID NO: 15080 - protein, 180 aa, Streptococcus mitis
MSRKKKGKTNFIDNEIVTNRKGPEELKKRLYIDDLEKIKKFDIFLSHNSKDEEKIITFYKKLNKNGQVVYIDWVNDKYDLKREWCNTSTVDIIKERIKQSDVFVLYFSSKTLNSQWCAWELGYADAIGKKICIYFSEKIDRTIIPKFYFKYPKLLFSEDFMVKNHGQSDIPFTKWKENKK

SEQ ID NO: 15081 - protein, 469 aa, Streptococcus mitis
MEKELFIKKYTEVIQEGNAAVFAGAGTSVDAGFVNWKELVRPFSEEINLDIDKETDLIGVAQYYINSKMGNRGTVNQKIINQFSSSDAETDVMNILTRLPISTYWTTNYDEVIENGLEKNNRRGDIKRKVDDLAINIYDSDAIVYKMHGDIRSPQDAVISKDDYERYGEKNSLFVTALRGDLVSKTFLFVGFSFEDPNLESILGKVNVLLGDNKREHYCIQRTVLRKDYKTKKEYDYAKIKQGLKIIDLKRYGIETVLVNDYTEIPQLLLEIEREYFKNTIFISGSISDYNENWSEEKVNQYCYDLSSFLISKDYKIISGFGLGIGSSVINGALDQIYKTKYRHVAEHLGLFPFPQNANGEKSLKECWTENREQMISESGVCIFLFGNKLVDGKVELASGMMEEFQIAKEKGKIIIPIASTGFAAKEIYDEMKQSGEYSYLDNYWETLETEKDFTKVFSTIDKIVNEVR

SEQ ID NO: 15082 - protein, 206 aa, Streptococcus mitis
MATKIFISFRFSDGKEIKDELVDLFDESTEVINRSEDVDRGQMSENIIKEYLYEKLKDTSVTIVLLTPEAVSYRKNWIGNYDDWLYDELRYSLEDRKNNRTNGVIAVYTDEAKDKVLDDSTHYCQHCQQTKSCRSLKYFDNLARKNMLNIKSVYKKNPCNDLYDDEHDSYISLVSLNDFKEDYSRYIQNAKDKRERLDEFNIAMRM

SEQ ID NO: 15083 - protein, 310 aa, Streptococcus mitis
MSLETNDFILETSKYIRRQVRKNILSIEERKTQADEIRKKSLAKLKLQTIKRKKSLDYIQEINPSYLEHYRKRFFKTHDLHERLEIIRELSKYDSKEVHNFFYAINGHVRNQSLKKEVQSYFQSLSLPFRLSRKKKGKTNFIDNEIVTNRKGPEELKKRLYIDDLEKIKKFDIFLSHNSQDEEKIITFYKKLNKNGQVVYIDWVNDKYDLKREWCNTSTVDIIKERIKQSDVFVLYFSSKTLNSQWCAWELGYADGIGKKICIYFSEKIDRTIIPKFYSIYPELHLSENITIEVDKQSSIIFNDWKNRSS

SEQ ID NO: 15084 - protein, 484 aa, Serratia marcescens
MPERDIELFIRDYVNDIKAGSAALFAGAGLSIPAGFVSWKELIGDIAYELGLDIEKESDLISLAQYHLNEKGNRHKINQKIITEFAEQAEETENHRIIARLPIASLWTTNYDDLIEKTYARYNRVCDVKTTPESLTNNIHKRDVVLYKMHGDYRTPNQAIITREQYETYSRTHLPFINMLMAELTAKTFLFIGFSFEDPNLQYVLSRLYAQYGEGKRNHYCIMRRVQPGDSGSEDQASYDYNSRKQSLMINDLRRYGIQTLLVEDYRQITDLLYAIETQFKKSTVFISGSADNYHPYAREESIQFIHRLARLLIRKQYRIVNGFGWGVGTAVINGALEAIYASGGKISESQLVLRPFPQFASGSITLPALWHEYRQNMISLSGIAVFLFGNKRDAEGECVLADGLLKEFHIAAEQGCVCIPIGCTGGASAEIYRKIKEEMKDTLYHRHPVAMNLLDQLNEPGSLAEKKTCLLALIDIITKDNPR

SEQ ID NO: 15085 - protein, 163 aa, Serratia marcescens; identical to SEQ ID NO: 14124

SEQ ID NO: 15086 - protein, 484 aa, Serratia marcescens
MFNRDIELFIRDYVNDIKAGSAALFAGAGLSIPAGFVSWKELIGDIAYELELDIEKESDLISLAQYHLNEKGNRHKINQKIITEFAEQAEETENHRIIARLPIASLWTTNYDDLIEKTYARYNRVCDVKTTPESLTNNIHKRDVVLYKMHGDYRNPNQAIITREQYETYSRTHLPFINMLMAELTAKTFLFIGFSFEDPNLQYVLSRLYAQYGEGQRNHYCIMRRVQLGDSGSEDQTSCDYNSRKQGLMINDLRRYGIQTLLVDDYRQITDLLYAIETQFKKSTVFISGSADNYQPYTREESIQFIHRLARLLIHKQYRIVNGFGWGVGTAVINGALEAIYDSQGKISESQLVLRPFPQFASGGITLPALWHEYRQNMISLSGIAIFLFGNKRNAEGEYVLADGLLKEFQIATEQGCVCIPIGCTGSASAEIYRKIKEEMKETLYYRNPAAMNLLDQLNEPGSLAEKKKSLLALIDIITKDNPR

SEQ ID NO: 15087 - protein, 163 aa, Serratia marcescens
MTRKCFYSFHYEPDNWRASQVREMGSLEGNRPATDNDWEEVKKGGDAAIAAWIKGQLDNRSCAVILAGKDTADRKWINFEICEAWKKGMGVLVVYIHNLKDSAGDQTTKGKNPVDHIKLGDAKLSTIAKAYDPPYSTSTNVYNHIKANLAEWVEEAIRIRKNY

SEQ ID NO: 15088 - protein, 475 aa, Pectobacterium carotovorum subsp. brasiliense
MPFSNEIEAFIKDYVKDLSEDSAAIFAGAGMSKSQGFVDWPELLSDIADELGLSIDKEKDLISLAQFHVNTKKNANKLTRKIIEEFSEQADASETHCILSRLPIRTYWTTNYDSLIEDSLEKSYKIPDVKYNIEQLNNSRPKRDAVIYKMHGDVKEATKAVLYKEQYERYYQTHAPFITALSGDLISKTFLFIGFSFTDPNLDYILSRLYTTNTLNKRTHYCFMKEETDKDQEILNYKKRKQNFRIDDLKRFGIETLLINDYGEIPKILSEIEFRYLKKTVFISGSAEEFGKYSRQDAQNFIHDLASSLVKNNYRVVNGFGWGVGSAVINGALEAVYSNPKKYSEEQLVMKPFPQSSSKNHDLKNLWEEYRQRMISLAGIALFIFGNKCSNEKIINAPGVRREFEIAKNKGLILIPIAPTGYMSQELYSEMEKNPSEYYGDNEWIFAMVKDICSEDNKPSDIINKITVLINRLNK

SEQ ID NO: 15089 - protein, 205 aa, Pectobacterium carotovorum subsp. brasiliense
MARKTFISYKYSEAQDLRDDILKKLGDAAKFYRGETADSPDISNTTVENIKKKLKDMIFGTSVTILIVSPEMINSKWIDWEIKYSMREVTRDETTSRCNGIVGVIMKINDGYDWLVSKETNEDGCTARSINNKRLLKILNENRYNLITENHFSCPNCKTYSQLDGSFISLIDEDDFLKNPEKYIENAFNKAKKIKDYKIVKVDVE

SEQ ID NO: 15090 - protein, 200 aa, Pectobacterium carotovorum subsp. brasiliense
MPRRTFFSFHYKPDIWRAWNVRNSWVVKEDNEIDQGFFDSNVFEASKKENDYALKTFLRKGLENTSVTCVLAGTQTWTRRWVRYEIARSVIKGNGLLTVYIHGVQNNDKETSIKGANTLDQMGLYRTEHGIFLAEWKGEKWVKYTDYTLAIPERNLWFTAPKTNDVVQLLTHCLSYDFAGQDGRKNIGGWIEIAAGMAGR

SEQ ID NO: 15091 - protein, 395 aa, Pectobacterium carotovorum subsp. brasiliense
MSNASRIRSPYQLIVLGAVNGHDNRLRHNIDLALEGLGIPTSVIKYLSAHSAYGRCLKSPTMAVYFGSPANTADIALVAELIDDSIVIAPVVSDLSQVPVEIPPQLRHVNAIVLGTDDEGIARLVTLVLETFHLLRRERRLFISYKRTGSQPLADRLYDALDARGFDVFIDVRSVPPAADFQSQLWHRMSDSDVVVLIDTPGFREGRWTAEELARANATNIQILHLLWPGQKEDPASSFSHFMKLRLRDFVGFIPMRGRWAKKALVKRICDEVERLRAPAIAARYRYLVDNFCDAARDVGLDPSVQIEGWISLKVNSKRGLAIVPAVGIPTSDRINEVFEAITDHADETREIWVIYDNRGVLKTWLSHLDWLDSYLPIRAVQMSKAAQLLQESIK

SEQ ID NO: 15092 - protein, 278 aa, Pectobacterium carotovorum subsp. brasiliense
MFADVGIRNFNASSLSFNEDEVSAYREDNRRHFDTRKLEEYLLDWNNVLDVEKISKDFFPKVEADVFLSHSHYDENDVIKLAIELERKGLKVFVDSCVWGWADNLLKKIDDKYCLKDDGYYNYKSRNRTTSNIYMILNSALHSTISQSELFLFLHTESSISMSSIYTGDEHIASPWIFSELNFAKLCQRTPRKQHICIRESLAGMEKRACDFADVQFAYPNPGTRYEIDSHDFFQWLDMPVEQFYDNNELSALYHLDKLYEKIEVPHILLEEPRYIVR

SEQ ID NO: 15093 - protein, 486 aa, Listeria monocytogenes; identical to SEQ ID NO: 14113

SEQ ID NO: 15094 - protein, 202 aa, Listeria monocytogenes; identical to SEQ ID NO: 14114

SEQ ID NO: 15095 - protein, 466 aa, Aggregatibacter actinomycetemcomitans RhAA1; identical to SEQ ID NO: 13243

SEQ ID NO: 15096 - protein, 214 aa, Aggregatibacter actinomycetemcomitans RhAA1; identical to SEQ ID NO: 13265

SEQ ID NO: 15097 - protein, 477 aa, Vibrio vulnificus
MTRDQDLFIQRFVSELEESNVAIFAGAGLSSSAGYVNWKELLRPLANEINLDIDEEKDLVGVAQFYLNENGRNRISQQLMDEIATAKQPTENHNILSRLPIKTFWTTNYDKLIEKSLENINKIVDVKYTNNHLAITKKKRDAILYKMHGDCDHPDSAVLTKDDYERYPLKMKPYITALSGDLVSKTFLFLGFSFTDPNLDYIMSRVRAYFEEHQRQHYCIFKECCETDFDTPQLFENAKVKQALLIKDLSRFQVKTVLVKSYAEITEILYKIERQFRRKTVFLSGSAHDFTPFNQSDVESFLCRLGNILIEKNYKISSGIGLGIGNAFITGAIQGVYEYHNGHINDYINMKPFPQYIENKVERDATWEKYRFEIIGSAGVAIFFMGNKLVNGETLSADGVRKEFEIAHKLGLALIPIGCSGFMAKELWEEVMANVSKYYDESNGKLIEAINELGVVVEKPEQLISKIINVIDLMSKE

SEQ ID NO: 15098 - protein, 165 aa, Vibrio vulnificus
MARRVFYSFHYVPDVMRVSQVRNIGALEANKPASDNDWETVKSGKDAAIKKWIAEQMKGRTCTVVLVGEETANRKWINHEIVESWNNGMGVVGIYIHGLKNMAGNIANKGENPFDYISYGDSGKKLSSIVKCYNPQGTNSKDRYAWIAEHLENAVEEAIQIRKQN

SEQ ID NO: 15099 - protein, 225 aa, Vibrio vulnificus
MGKKIFVSYKYGDKNVKALTSILDDTKVRDYIDLLQDMLSEEDHINKGEADGEDMSDFKDSTIESKLRDKIYDSSITISVISKGMKEFLVSEDDQWIPWEISYSLKEHSRNGRKSQTNGILALVLPDENGSYSYFIEDESCTHCKCRTLKTDFLFKIQRENMFNIKSPTYNDCENHGSGGKVYLGYSSYIYSVKWCDFENNVQYYLDIASEINEKIDDYDITKAV

SEQ ID NO: 15100 - protein, 482 aa, Pectobacterium carotovorum subsp. brasiliense
MFSHEQNTMIDRIVKELEEHNFAIFAGAGLSAPAGYLNWKELLRPLSVELKLNIDKETDLVSLAQYYVNENHSRSRLTERLIDEIGISQKVTINHQILAKLPISTYWTTNYDDLIERSLEDEGKLPDKKFTKNHLSQTKKGRSAIVYKMHGDASLPEQAIITKDQYESYSLHFAPFVTALSGDLVSKTFLFLGFSFTDPNLDYILSRIRIHFETNQRQHFCIFREVNRDDYHNDDEFSYNQLKQQFVIKDLARFSIKVILISAWTDLTSILKEITKRFRCKNVFLSGSAHEFGNWEQNATEIFLSKLGEILIQEGFKITSGLGLGIGNAFISGAIKEIYDKKHAKIDDYLTMKVFPQFVEDKNTRKRIWSLWRKDLLIQAGIAIFFMGNKSTKDINSEKSNITLADGMEEEFQIAKNFGLKIIPIGASGYKAKELFDRVMADFNTYYPNATPEFHDAFTKLDESVDEPIKLLSKIHNIIKLI

SEQ ID NO: 15101 - protein, 200 aa, Pectobacterium carotovorum subsp. brasiliense
MSKKVFFSFHYQDVIDFRANIVRNHWVLKEEKDDAGFFDKSIWEEAKKTSPIALKKLINKALVGTSVTCVLIGTNTYQRPWVRYEIFRSIYKGNDCLGVNINTITGKNGQKKPVGQNPFSYTGVYFNDDGSKYSFATRELISDNWSYWEEIESKREHDNDYFDKEYAKINAGKFIPLIEFFSTYDWVKDDGYNKFSEWIG

SEQ ID NO: 15102 - protein, 602 aa, Porphyromonas sp. COT-108 OH2963
MNPNEAIKILAPELKKKSLVPFCGAGISIPSGLPSAKSFINENGFDRLPFPTAMSIAHFHPNFNKNFNKVFDNNNIKPNILHQLITRLNANIYITTNYDQLIEKSFKNSALNNNDELIIVRTASDIPKINQGKNILIKLHGDTEIRDLLILTKEDYIERIKTPNLVDEFVRIIFASNTILFIGYSLQDDNIFRILEGEKKLNSGALPDKYIVLPRRDEEFEKYLKHINVIPIYLDCQDDKITEQLSDFLFKLWCQYDFFEDLTNKTEIKSENSIEVSIQKALMYRNDNKPEEAKKILDKIIKESDWENNIEIIPRILWLYVGIFDSTEDWDSLETIQDSKLSIILNKLSKSLPIQISNLMKGVHESSLALLRYHSLNIIKAQRSYIKADQNIVIDDTSPSSIRILKANNLTIGAIIEYYNYIATNSDESLKKALTNLKNAESIFKPIESEREPFHHLGRFWGAKALIHLNLVNETDIDNILDWARKAHSGPFRTENGKIAGRYCHAYCCYFLSKICEERKDELLRQAIKLLQENNIKINKNTQRIAAYKNSLLYNHVNYDLNKKTYFLRSDLKELSKNINEKFASNIKNSLSIKKWLKLPIN

SEQ ID NO: 15103 - protein, 391 aa, Porphyromonas sp. COT-108 OH2963
MKYKYQLILLGSIENPIIKGIKGQIISGIIDLKLPQDIINIIDRNNWKDEYVGNQPAFCIYLGNDNGPFEDLAIVEKLIKDGTMILPVFFNDFSKEIPEELKKQNGIKYDDNQRSRIANVVLQAFELLRSTRKVFISYKRSESTSVAIQMYEALESHHFDVFLDTHSIEKGELFQEELWHRMTDCDVILLLNTPGFLESYWCKEELAEAGSKQIGIVQLVWPKHKINAISHLSFPLNLESTDFVDTIYDDKDKSKLKNDKVEEIVQFVESVRARNLASRQDNLITEFMSIAKQCGRSITVQPERFLTEELSGKKIIYIPTIGIPQSTDCQSAEIRHEFEKIPNNTCIRLIYDDLRIRDKWLKHLDWLNDNFKKDIHTLKKQDFEKWLQQKK

SEQ ID NO: 15104 - protein, 478 aa, Enterococcus faecium; identical to SEQ ID NO: 13220

SEQ ID NO: 15105 - protein, 161 aa, Enterococcus faecium; identical to SEQ ID NO: 13221

SEQ ID NO: 15106 - protein, 283 aa, Enterococcus faecium; identical to SEQ ID NO: 13222

SEQ ID NO: 15107 - protein, 471 aa, Prevotella bivia DNF00650
MAISREDFVNKYLEALNEGDAAIFAGAGLSASSGCVNWKELLCDIAKELSLDIDKEQDLVSLAQYYFNKNRNRTKFNDIIVNAFGNEKRPNDNHKILSDLPIATFWTTNYDKLIEESLRQKGKRYDVKATCSSLTRRVKGVDAVIYKMHGDVDNPDSIILIRDDYENYSHKNHPFIDALKGDLMNKTFLFIGFSFTDPNFSYISSQLRVQLEGNQREHYCILRDISIDNYPDESDYRYEKVKLQYFIDDLKRFNIKTVLVEQYSEITDMLREIKFKYNSKTVYISGAAAEFEPDGRQAYEYFISKLSGALINKNYRIVSGYGLGVGSSVISGALTEIYQNQKKSLTNQIILRPFPQGDDEIKKLWQQYREDMISYSGISIFILGNKLENDKIVLSDGMRAEFDISRKQGNFLIPVGRTGYISKELWKEYMDEISSKEEFALYKQSFQKIGDESTPLNELINEVLTIIQNIK

SEQ ID NO: 15108 - protein, 203 aa, Prevotella bivia DNF00650
MAHKTFISYKYSEAQSLRDKIIGALGDDAKYYQGETSDSPDLTDTSTENIKKNLKNMMFDTSVTIVIISPNMKESHWIDWEIEYCLKKISRKDRTSQRDGVVGVIMKSNGGYDWFKQIQTNSDGCRVRTYKTEKVFDIINNNRFNQNPQQYSCNVCKCIDALTGSYIAFVEEDDFLKNPQLYIDNAYDKSENDASGYDISPTR

SEQ ID NO: 15109 - protein, 182 aa, Prevotella bivia DNF00650
MAKHQVFYSFHFANDAWRAGQVRNMGVLESNPPVSSNKWEEVKREGNISIKRWINNNMNYRLCVIVLIGSETSKRQWCKYEIERAWKEGKGIVGVYIHNLKDVFGFQSLQGVNPFSLFCIDKTINYIVERNIPADKDEINLSKICKAYNPPFSSSTSVYDYINCHIDEWVDEAIVIRNQYPK

SEQ ID NO: 15110 - protein, 473 aa, Streptococcus uberis
MFIIKGEITKQQLIDELMKSIEGEELGAFIGAGLSIPAGYSDWKKLLKEPAKKIGLDVEKESDLVNLAQYYSNSRNRSAIDNLIRESFSKKAIPTTNHKLLAKLPITTYWTTNYDKLIEKSLEDNMKLPFMKTKDEHLRALNSNFDVIVYKLHGDIDSPEDAVITRSDYEEFGYKKRKLFRDVLEGDLLTKTFLFLGFSFSDPNFNYVIGKLRVLLDDNNTRNHYCIIKKVSPLSDNYAYEKVKQELQIEDLNRYGILTCLVDEYDEITDILKEVVNRFCRKTIFISGSAENYQPFSIDGGREFIHKLAYKLIENGYQIVNGYGKGIGEFVLNGVSEYCLANGLKIKDNLTLIPFPQQSSSDINLEELYEKNRNQMIENCGIALFLFGNKKDNEIAEGVLKEFEIANSHGLVCLPLGYTGGASKYIFDNNKPNKQEEDICIAFNDINVYQEEKLDDTIDYIIKIINNLNNGGR

SEQ ID NO: 15111 - protein, 166 aa, Streptococcus uberis
MSKRQVFFSFSYKNDNWRASQVRNMGKVEQNSTFSDNEWEEVKEKSDDKIKEWIDNQLRKRSCLVVLIGQNTANRKWINYEIKKAYELDKGIVGIYINKLENSVGKQDQRGENPFDYLKLRNQKISKYVKCFESKYVTSRFVYGDIKDNIEELIEYGITHKPSSWK

SEQ ID NO: 15112 - protein, 478 aa, Enterococcus faecium; identical to SEQ ID NO: 13220

SEQ ID NO: 15113 - protein, 161 aa, Enterococcus faecium; identical to SEQ ID NO: 13221

SEQ ID NO: 15114 - protein, 283 aa, Enterococcus faecium; identical to SEQ ID NO: 13222

SEQ ID NO: 15115 - protein, 211 aa, Actinobacillus pleuropneumoniae
MARLPIDTFWTTNYDPVIETALKEAGKVVDVKHNVEQLPVSIHKRDAVVYKMHGDYTLPNQAVLIKDDYEKYHLTRNDFFTALRGDLLTKRFLFLGFSFADPNIDYILSRIRASYSENQKEHYCILRKVQKFDNEDQADFEYRQRKQQLFISDLERVGVNTLLIDEYSEITEILREVELAQKRRTVFISGAAEDYAPYSQEDVEKFVSSLA

SEQ ID NO: 15116 - protein, 165 aa, Actinobacillus pleuropneumoniae; identical to SEQ ID NO: 13444

SEQ ID NO: 15117 - protein, 214 aa, Actinobacillus pleuropneumoniae; identical to SEQ ID NO: 13445

SEQ ID NO: 15118 - protein, 307 aa, Actinobacillus pleuropneumoniae
MDKKQFIKELVNELSANNLAIFAGAGLSVSAGFVNWKELLTDLAKELSLDINKEENDLVSLAQYYVNSKCGKRSKINYLILNEFSRKAEITENHRILARLPIDTFWTTNYDPVIETALKEAGKVVDVKHNVEQLPVSIHKRDAVVYKMHGDYTLPNQAVLIKDDYEKYHLTRNDFFTALRGDLLTKRFLFLGFSFADPNIDYILSRIRASYSENQKEHYCILRKVQKFDNEDQADFEYRQRKQQLFISDLERVGVNTLLIDEYSEITEILREVELAQKRRTVFISGAAEDYAPYSQEDVEKFVSSLA

SEQ ID NO: 15119 - protein, 165 aa, Actinobacillus pleuropneumoniae; identical to SEQ ID NO: 13444

SEQ ID NO: 15120 - protein, 214 aa, Actinobacillus pleuropneumoniae; identical to SEQ ID NO: 13445

SEQ ID NO: 15121 - protein, 307 aa, Actinobacillus pleuropneumoniae; identical to SEQ ID NO: 15118

SEQ ID NO: 15122 - protein, 165 aa, Actinobacillus pleuropneumoniae; identical to SEQ ID NO: 13444

SEQ ID NO: 15123 - protein, 214 aa, Actinobacillus pleuropneumoniae; identical to SEQ ID NO: 13445

SEQ ID NO: 15124 - protein, 307 aa, Actinobacillus pleuropneumoniae; identical to SEQ ID NO: 15118

SEQ ID NO: 15125 - protein, 165 aa, Actinobacillus pleuropneumoniae; identical to SEQ ID NO: 13444

SEQ ID NO: 15126 - protein, 214 aa, Actinobacillus pleuropneumoniae; identical to SEQ ID NO: 13445

SEQ ID NO: 15127 - protein, 307 aa, Actinobacillus pleuropneumoniae; identical to SEQ ID NO: 15118

SEQ ID NO: 15128 - protein, 165 aa, Actinobacillus pleuropneumoniae; identical to SEQ ID NO: 13444

SEQ ID NO: 15129 - protein, 214 aa, Actinobacillus pleuropneumoniae; identical to SEQ ID NO: 13445

SEQ ID NO: 15130 - protein, 307 aa, Actinobacillus pleuropneumoniae; identical to SEQ ID NO: 15118

SEQ ID NO: 15131 - protein, 165 aa, Actinobacillus pleuropneumoniae; identical to SEQ ID NO: 13444

SEQ ID NO: 15132 - protein, 214 aa, Actinobacillus pleuropneumoniae; identical to SEQ ID NO: 13445

SEQ ID NO: 15133 - protein, 487 aa, Pectobacterium carotovorum
MTKAAMNRFLKEYPNALNDGTGAIFIGAGVSMAAGYPSWFELLGEIGEELGISSKNVHDLAALAQWSIQATGGATRVREVIKKEISPDRPIPDTVEVIARLPIRHIWTTNYDRLIERAFQAINRPLEPISGVDNLALKATPGATRLYKMHGSVDRLDDIVISTDDYELFRSKRGAYLPLFQAHLTSMSMLFVGISFTDPNIRHVLSLIRESFKDAPPEHFAIVRPPQRADFSSDDEYNARSTQHDLWAKDLKRYGLLVVEIDNYDEVPELLRKVERRVAAKRVWVSGSWPIEHGGAEASNIHAFAESIGRQIGESNRDLVTGAGVLIGSASISGFLAALRNGGGWDLDRRLVARPFPQPLQGSVPNEREWKALRNELARQAGIVIFVGGVKLLDGALISADGVLQEFECAKVSGAFLIPIAATGGAAKDICEQLIGSPLSTEGAMAQRPSDKELRALADPSLLLDQKSRDRLVTVLFELIDRIAKIS

SEQ ID NO: 15134 - protein, 195 aa, Pectobacterium carotovorum
MAKKVFFSFHYQDVIDFRANVVRNHWVSKPDRAAAGYFDKSIWEEAKKNGDIALKRMINSALENTSNTVVLAGSKTYERPWVRYEILKSFLRGNHILSVNINNYKDKNRIVKPKGPNPLDYVAASLSSDGKSVTLMEYQNGSWVNYNEIDSKSTHPRPSGLPSGRQGTSVKLSQLFPEYDWIKNDGYNNFSAWLK

SEQ ID NO: 15135 - protein, 165 aa, Pectobacterium carotovorum
MTRKCFYSFHYTPDNWRVSQVRNIGSLEDNKPATDNEWEEVEGGGEKAIQDWIQGQLKGRSCAVILAGENTAGRKWINYEISEAWNKGMGVLVVYINNLKNADEDQSLKGNNPLDYVTIPGGDAKLSTVAKDYDPPYLTSKYVYDYIAKNLEDWVEDAIEIRKNY

SEQ ID NO: 15136 - protein, 167 aa, Pectobacterium carotovorum
MARKVFFSFHFDNDFWRTQQVRNIGVIEGQTLYKPNAWEEVKRKGNAAIEKWIDENLSGKSCVVVLVGAETANRPWVIEEIVKGWNSGKGVLGIRINGLLNSEQKTSTAGANPFDSVTLKSGTIKLSTYARLKTPTGSDSKAIYASIQNNIEAWIEEAIQIRKDYKP

SEQ ID NO: 15137 - protein, 183 aa, Pectobacterium carotovorum
MARNVTTSELRSFSANLAPADLQKSLITASISQSASAFLSHSSKDKDLVIGAMQVIQNHGGIVYVDEIDPEMPPYTTDETAALLKQRIIQTKRFVLLTSSNSKDSRWVPWELGIADGAKGLGKIAIFPASDTEGQDSWTSWEYLGLYRRIVWGKLEGHPNNLWMVLDHKANTAVTLRSWLSGY

SEQ ID NO: 15138 - protein, 483 aa, Staphylococcus aureus; identical to SEQ ID NO: 13296

SEQ ID NO: 15139 - protein, 202 aa, Staphylococcus aureus; identical to SEQ ID NO: 13267

SEQ ID NO: 15140 - protein, 308 aa, Staphylococcus aureus
MERQQTYKEKAQHLYKVKKIKNRYNTKSAEEYFFSIPQVKYILSAGRMKKHKENYNASEIKIKKAALEKSRKNENWKIEERLIKAKRYTQKVDPEYLNIYMKAYHKKDITTEEKLEILTELKKFDTENIVRFFRKLNDAEQNKMIRNLAFKYLQDYGHYVKLRKNFKGKKKVYQTERASLDTKKPEDLYNDLTNKNIQSQKVYDIFISHSTKDKKTVEDIIRVFNEQNKTCYCDWTMDQDYLKRKYVGEYTKQVLKARMEQSKMLVLLRTENSVQSDWVSFEIEYFENLKKPIYIVESLEELLEAFSD

SEQ ID NO: 15141 - protein, 478 aa, Escherichia coli; identical to SEQ ID NO: 13308

SEQ ID NO: 15142 - protein, 203 aa, Escherichia coli; identical to SEQ ID NO: 13309

SEQ ID NO: 15143 - protein, 103 aa, Aeromonas hydrophila
MIGLSGIALFLFGNKLNEDSNVINAGGVRKEFEIAQGTGVAVLPIGVTGYMAKELAEEMLREPGKSFTRYPWLEKEVARLLDPATDRTSINKEILAILKKLGG

SEQ ID NO: 15144 - protein, 192 aa, Aeromonas hydrophila; identical to SEQ ID NO: 13600

SEQ ID NO: 15145 - protein, 484 aa, Serratia marcescens
MPERDIELFIRDYVNDIKAGSAALFAGAGLSIPAGFVSWKELIGDIAYELGLDIEKESDLISLAQYHLNEKGNRHKINQKIITEFAEQAEETENHRIIARLPIASLWTTNYDDLIEKTYARYNRVCDVKTTPESLTNNIHKRDVVLYKMHGDYRTPNQAIITREQYETYSRTHLPFINMLMAELTAKTFLFIGFSFEDPNLQYVLSRLYAQYGEGKRNHYCIMRRVQPGDSGSEDQASYDYNSRKQSLMINDLRRYGIQTLLVEDYRQITDLLYAIETQFKKSTVFISGSADNYHPYTREESIQFIHRLARLLIRKQYRIVNGFGWGVGTAVINGALEAIYASGGKISESQLVLRPFPQFASGSITLPALWHEYRQNMISLSGIAVFLFGNKRNAEGECVLADGLLKEFHIAAEQGCVCIPIGCTGGASAEIYRKIKEEMKDTLYHRHPVAMNLLDQLNEPGSLAEKKTCLLALIDIITKDNPR

SEQ ID NO: 15146 - protein, 163 aa, Serratia marcescens; identical to SEQ ID NO: 13318

SEQ ID NO: 15147 - protein, 480 aa, Pseudoalteromonas flavipulchra NCIMB 2033 = ATCC BAA-314
MKFEHEIEIFIRDYVKDLNEGTASIFAGAGLSIPAGFVNWSELMQEIAHDLGLVIDRENDLVSLAQFHVNENRTRSKINRKIIEEFTENSEETLNHNIIARLPISSVWTTNYDNLIEQAFTKENKVADVKHTNKQLLTNRPKRDVVVYKMHGDANHSSDAILTKEDYEQYHQTHEPFIHALSGELTTKTFLFIGFSFTDPNLDYVLSRLNFRFSKDKKQHYCLIKKHCLNDALNPDQATLDYNSRKQQLVINDLKRYGIKSLVLDDYAQITSILVEIEKRFKKKTIFISGSAEIYDPYEKNEALGFIHLLSKKIIEKNFRIVNGFGWGVGSSVINGSLEAISSNPMKFSESQLILKPFPQFESGKKKLPELWEEYRQKMISLSGISIFLFGNKRDGDEIVEANGLIREFEISRDLGNICIPIGCTGYAAESILKRILAKPSDYYENSDDVVPLLETLLDSDKPLSEKVDVVIAVINEVIQ

SEQ ID NO: 15148 - protein, 166 aa, Pseudoalteromonas flavipulchra NCIMB 2033 = ATCC BAA-314
MARKCFFSFHYQPDNWRVSKIRNIGAIEGNQAAKDNDWETVTGGGDKKIKEWIDKQMEGRTCTVILAGSKTADRKWINHEIVQSWNKGKGVLVIHIHNITDSFDNQSSKGANPLYYVTHGTTNKRLSTIAKSYDPPYITSKGVYNYIANNIDSWIEESIQIRKDNP

SEQ ID NO: 15149 - protein, 480 aa, Pseudoalteromonas distincta; identical to SEQ ID NO: 15147

SEQ ID NO: 15150 - protein, 166 aa, Pseudoalteromonas distincta; identical to SEQ ID NO: 15148

SEQ ID NO: 15151 - protein, 484 aa, Serratia marcescens; identical to SEQ ID NO: 14127

SEQ ID NO: 15152 - protein, 163 aa, Serratia marcescens; identical to SEQ ID NO: 14126

SEQ ID NO: 15153 - protein, 493 aa, Mycoplasma capricolum subsp. capricolum
MKFNLYSCIKLHYSLSYLAFVEVFFIKGKISKKELIKEIGKSIKNEELAAFIGAGLSVDAGFLTWSDLLREPASEIRLDIEKEIDLVNVAQFYSNVKLRSSIDNLIKQNFSRLYKPTKCHKLLAQLPISTYWTTNYDKLIEKALENNNKVPFTKTKDEDLRAINRNFDAIVYKLHGDVDSPSDAVITRTDYEEFGYNKRKLFREVLEGDLLTRTFIFLGFSFSDPNFNYVIGRLRVLLGESKTRKHYCIMKKISMCDKDYEYKKIKQELQIEDLNRYGIFTYLVDDYNEITRILQIIVNNYRRKTIFISGSADDYGDFTNEQGKTFLHLLSKKLAEKDYHIVNGYGKGIGDLLLSGVSEYCLARNKKILDCLTIMPFPQSISKEMYQLYNKNRIQMIEKCGIAIFVFGNKKGKGAEGVMEEFNISKKMNLSILPISCTGSAAMKISNEILSARSIDKDNLKAIQIANRNVKNNVKQLVENIIKAIEFLNKEED

SEQ ID NO: 15154 - protein, 156 aa, Mycoplasma capricolum subsp. capricolum
MARKVFFSFHFENDVWRANQVRNSWVTQGTQAAGYIDAAEFEEIKRSGDRAVKKWIDEQLFGTSVTVVLIGSETLDRPYVRYEIEESIKRGNAIIGIAIGDLLDQNKKTSFSKISSYAINGKSFLDIANGFYNYKRDDGYSNMGIWIENAARSKGK

SEQ ID NO: 15155 - protein, 591 aa, Pseudomonas taetrolens
MTAAISDSTAQIAFSMFENKGVYAVLLGSGVSRSAGIPTGWEITMELVKRWGIASGAGEQEDWLAWYVGQTGEQPNYSTLLERLATTQTERRAIIQGFLEPSEGELEDGLKLPTPAHRAIAAMVKAGYVRVIITTNFDRLMENALRDVGVEPTVVSSEDTLAGAEPLTHASCYILKIHGDYKDARILNTDGELGKYPPAFNTLLDRIIDEFGLIVAGWSGEWDHALRAAFLRAPSRRYPTYWLSRGKLSERGQELITQRRANVVTGLDADTFFDGLNLKLETIQQSRLQNPAGIELTLAMAKRFMARPEHRIQLDDLVTSQAHQAISHLAPLFAERPQGSTSKDFTDLVEIYEAAIEPLARLCAVLGRWGAGVEHTIVLDAIKGLHAASQVEQSGWVAGLALKSYPIALVTYAYGMGLVRANRLSELNELFNTTLINRREMPFPVGLDLSPFYVEGANGLFELWKSFEDQSRALTPLCNRLHDRLTPRWAPDFAGLQDHGLLYERFEFFSFLFFCEQRGVSEESLADAVKNHGFKKIALGRLSWHSETINRFAHEYATEEYRAPLLAAGFALGSQSYLEQMLEGLKRLSRY

SEQ ID NO: 15156 - protein, 322 aa, Pseudomonas taetrolens
MPNVFFSYCHADEALRDQLEKQLSMLKRQGVIETWHDRRIGAGQEIDAAIDDHINSDEIILLLVSPDFIASDYCYNIEMARAMERHAAKEATVIPVILRPCDWHHAPFGKLLGTPQDGKPVTLWPDRDEAFLQVAKEVRKAAERRSRGQQNTAPRAERNDFNGGSAPSLIAPDGPRSSNLRMAKSFTQLDKDRFLLDSFEYIARYFENSLLELQARNSGYEGVFRRIDANRFSANIYKDGHDVAKAAVFTGGQMGAGIYYSHGDSFGGGSYNEALTVNTDDQSMYLKTFGMAFQTRQDQKLSQEGGAETLWGLLIAPLQRNR

SEQ ID NO: 15157 - protein, 478 aa, Enterococcus faecium EnGen0011; identical to SEQ ID NO: 13220

SEQ ID NO: 15158 - protein, 161 aa, Enterococcus faecium EnGen0011; identical to SEQ ID NO: 13221

SEQ ID NO: 15159 - protein, 283 aa, Enterococcus faecium EnGen0011; identical to SEQ ID NO: 13222

SEQ ID NO: 15160 - protein, 478 aa, Enterococcus faecium EnGen0051; identical to SEQ ID NO: 13220

SEQ ID NO: 15161 - protein, 161 aa, Enterococcus faecium EnGen0051; identical to SEQ ID NO: 13221

SEQ ID NO: 15162 - protein, 283 aa, Enterococcus faecium EnGen0051; identical to SEQ ID NO: 13222

SEQ ID NO: 15163 - protein, 478 aa, Enterococcus faecium EnGen0050; identical to SEQ ID NO: 13220

SEQ ID NO: 15164 - protein, 161 aa, Enterococcus faecium EnGen0050; identical to SEQ ID NO: 13221

SEQ ID NO: 15165 - protein, 283 aa, Enterococcus faecium EnGen0050; identical to SEQ ID NO: 13222

SEQ ID NO: 15166 - protein, 478 aa, Enterococcus faecium EnGen0046; identical to SEQ ID NO: 13220

SEQ ID NO: 15167 - protein, 161 aa, Enterococcus faecium EnGen0046; identical to SEQ ID NO: 13221

SEQ ID NO: 15168 - protein, 283 aa, Enterococcus faecium EnGen0046; identical to SEQ ID NO: 13222

SEQ ID NO: 15169 - protein, 478 aa, Enterococcus faecium EnGen0049; identical to SEQ ID NO: 13220

SEQ ID NO: 15170 - protein, 161 aa, Enterococcus faecium EnGen0049; identical to SEQ ID NO: 13221

SEQ ID NO: 15171 - protein, 283 aa, Enterococcus faecium EnGen0049; identical to SEQ ID NO: 13222

SEQ ID NO: 15172 - protein, 478 aa, Enterococcus faecium EnGen0045; identical to SEQ ID NO: 13220

SEQ ID NO: 15173 - protein, 161 aa, Enterococcus faecium EnGen0045; identical to SEQ ID NO: 13221

SEQ ID NO: 15174 - protein, 283 aa, Enterococcus faecium EnGen0045; identical to SEQ ID NO: 13222

SEQ ID NO: 15175 - protein, 596 aa, Afipia broomeae ATCC 49717
MSILSSDPITQLAFSMFESKGVYALLLGSGLSRAAGIPTGWEITLDLVRRVALAQGVKNQSDWATWYRKTYGAEPDYSAILAGLAASPAERRSILHSYIEPDEDDRAEGKKLPTAAHHAIAGLVRDGYVRVILTTNFDRLLENALREVGVEPTVVTSVDSLSGAEPLTHSPCYVLKLHGDYKDARILNTDEELGVYPPQYDALLDRILDEHGLIVCGWSGEWDDALRAALLRAPNRRYPTFWSIRGKVGSGAEPIISQRKAVTIPVADADSFFLKLAELVKTLAETRKQSPLTIDILVGSIKRYVARPEFRIRLDEVITQEVNKLFDRLDAKELSPQGVWSVEEFRRRLKLYEATTEPLAKAFGVLGRWGDDAELALIADTIRGVVARANKVGSGLNIWLDLRTYPAVLLMTAYGLGLARAERWKTLHDLFSLSMPRDERDPKRLVNSLFLWDWRGSDDNLWNNVEGFTTGNNRRKTPLSDHLFDVSFEWGTAFLGVPTDNALLFDRFEALGALVHLEENSERALKDQLENGDRKARMSVGRIGWRSEGRRSIEHELKSTPTRQQLLKAGFALGSEAYLDLFLENLSRVARWMEWR

SEQ ID NO: 15176 - protein, 370 aa, Afipia broomeae ATCC 49717
MKRVLTVGLTYTGDKIDGVEIENLGLCQPDVDRERAAYPLYEYDTIIINPESYTHFLFGKAGEFSNELYELGKLKGQNDRYDLDSAFDGEDRRKEMEAAIAGGATVVWCLSEPKRVNFFGYRETHLGYVAPKVASFVKRSELLIKKGRRMGPVDLDSPFARYFEVLSRTGGWTLCLSDPGEGYGSIAATPEGYSLGGQLMLGTPTGWLLTPPTSQEAQNQLVRDSLALEKADPAHEKYHGIFLSHTGVDKPFVRQLRKDLLAHGVEHVWLDEAEIDIGDSLIAKIEEGMKLSRYIAVVLSKKSIGAPWVKKELDVAMNREIASGEVVVLPLLYEECELPEFLKGKLYADFSKPEEYEAVLGKLLRRLRIS

SEQ ID NO: 15177 - protein, 478 aa, Escherichia coli KTE16; identical to SEQ ID NO: 13308

SEQ ID NO: 15178 - protein, 203 aa, Escherichia coli KTE16; identical to SEQ ID NO: 13309

SEQ ID NO: 15179 - protein, 478 aa, Escherichia coli KTE224; identical to SEQ ID NO: 13308

SEQ ID NO: 15180 - protein, 203 aa, Escherichia coli KTE224; identical to SEQ ID NO: 13309

SEQ ID NO: 15181 - protein, 478 aa, Escherichia coli KTE169; identical to SEQ ID NO: 13308

SEQ ID NO: 15182 - protein, 203 aa, Escherichia coli KTE169; identical to SEQ ID NO: 13309

SEQ ID NO: 15183 - protein, 126 aa, Escherichia coli KTE42
MRPFPQHSSNDKALSELWDEYRQRMIGLSGIAIFLFGNKLHDGRIVNADGVRREFQIAQETGVVVLPLGVTGYMAKELADEMLTDPSKHFVRYPWLEKEVAQLADLSANRANIEMKVLEILKKLGG

SEQ ID NO: 15184 - protein, 155 aa, Escherichia coli KTE42; identical to SEQ ID NO: 13289

SEQ ID NO: 15185 - protein, 478 aa, Escherichia coli KTE194; identical to SEQ ID NO: 13308

SEQ ID NO: 15186 - protein, 203 aa, Escherichia coli KTE194; identical to SEQ ID NO: 13309

SEQ ID NO: 15187 - protein, 478 aa, Escherichia coli KTE43; identical to SEQ ID NO: 13308

SEQ ID NO: 15188 - protein, 203 aa, Escherichia coli KTE43; identical to SEQ ID NO: 13309

SEQ ID NO: 15189 - protein, 329 aa, Acinetobacter lwoffii NIPH 715
MVYVALQVLLCPVLTKNDYEDYHDSRELFSTVLRGDLLSKVFLFIGFSFDDPNIDYILSRIRILLKDNTPKHYCFFKEIDKNSFSDDQDYLYAKIRQDLKIEDLMRYGIHAVLVEDYPVITKILKVIENRVKRKNIFISGAAENYEPFGKEKAEKLIFKLSYKLAEKNYKIISGYGLGIGSLVINGALDFKLNSAYRNLDDLLILRPFPQINPTAEKNTKYREEMISQAGIALFFFGNKKNDVSDTIVDSKGMIEEFDLCVKNNVIPIPIGITGFVSKKLWEKVNKDFSQYYPENSDFIDTLKEINNADVSSDDLISNILKAISLLQKV

SEQ ID NO: 15190 - protein, 160 aa, Acinetobacter lwoffii NIPH 715
MKRQVFYSFHYDNDAMRVQQVRNIGALEGNTPVSANDWETLKRNGDTAIKNWIDNQLKYKNCLIVLIGSQTANRPWVKYEIQRAWELGKAVLGIHIHNIKCPRNGISVKGKNPFSEFTLNNNNFADYVDCYDPNPSDAYNNIRLNIESWIERAIQRRKTA

SEQ ID NO: 15191 - protein, 179 aa, Acinetobacter lwoffii NIPH 715
MFTKNRFKTVARNQSGMLDSVFLNESRKFSKASSTTSIFLSHSHKDKEFVQIAKVFFENLGMSIYVDWADETMPEQTNGITATRIKHQIISLNDKFILLATNEALASRWCNWEIGIADPFKLPKDKIALLPLTESPSSWNGNEYLQIYPYIRESLYSSGEYYIWYPNGECQNLKTWLIG

SEQ ID NO: 15192 - protein, 476 aa, Acinetobacter sp. NIPH 1867
MKFSNDQHHMIERLVTELDEGNLAIFAGAGLSIAAGYVDWKNLLKPLMLEIGIDVNKESDLVTLAQYYFNENGRSRLTDHILDNISGLREPTRNHQILASLPISTYWTTNYDNLIEKSLENENKLADVKHRVPHLAQTKKRRSAIVYKMHGDISASDEAIITKDEYELYPFKYAPFVTALSGDLISKTFLFLGFSFSDPNLDYILSRIRIHFSENQRQHYCLVKEIEKNGISDEEYDYQKLKLNLMIKDLKRFHIKAVLIKDWKDITEILEEIKTRYKKKSVFLSGSACVFNIWKQEETEKFLSKLGEMLIHKNYKIVSGLGLGIGNAFVSGGIKEVYSSKYGKIDDLMIMKPFPHHVEDKKMRDDIWHKYRLDLLSKSGIAIFFMGNKNESGSVVPAIGMRKEFAIAKEMKLKIVPIGCSGHVAKEIFDEIVNNFDEYYPDASSQFLEKFKELDIHVDSPEQLLSKILDVINFFN

SEQ ID NO: 15193 - protein, 145 aa, Acinetobacter sp. NIPH 1867
MARKVFFSFKYDDVARAMIVRNSSVTKNFAGFIDKAEFEEVERKGNAAIKKWIDEQLEGTTVTVVLVGENTNKSKWVQYEIDQSIKRGNGLIEINISQINALGKGTSDFCGWILPNKYKGYRWIIDDGYNNLPTWIEAAAIAVGK

SEQ ID NO: 15194 - protein, 269 aa, Acinetobacter sp. NIPH 1867
MEKNNNILYDLEKYLLIKDNVFCATEIQKHLFPETSAEIFLSHAHVDEDKVIALAVHLEDLGFNVFVDSCVWGNAFTLLRKIDKKYCKYIDSDTGKEFHSYKNRNFSTANIYMILNAALHKMIDRFELFIFLGTENSMTIEESIEKQQKIISPWIFSELTFVNQVRRYDKRYDMRSKQITESASVSLENNMAMDREFSFHYSKPCLDFTLSNQQFENWLLDEISFDIVSENRDFDHCERHIQSLERLYEIMRKYGESREDRLYQQRLFL

SEQ ID NO: 15195 - protein, 515 aa, Acinetobacter sp. CIP 102136
MYLNEFFQQIKNHPILFLGTGFSLRYLKKSYTWEGLLQRVADDLFYDEDNTSWQREYLRLKSRCFINDNISFELVAQELEKIFNATVIDNDKKIFNGVREQYFNSIDKNKKFSAFKAYIAELLSNHEIREDKTSEIEELIKARKNLSAVITTNYDLLTEKTFEFFTPLIGNNILLSNPYGSIYKIHGCVTDSRNIIITAEDYEKFDKKYELIKAQMLSLFMHNPVIFIGYSITDENIRSILKTIFSYVDTNSEMAQKIRNNFLLVEYEPDSQSIEVAAHDIDIKDIGIIRINKIKTDNFSELFRNISNLVLPISAMDIRKVQNIYHDIVKGSEGVKVTITVDPSKLHNNQTVLAIGTEKNLQVQFRNFNEIISDYFNIIAESNESLANLINKQENLQQRIIPIFGLSNVSNKINNLEQLKEIQIDRLKKIYSSIPQTAKIIRSFDEIEECDAKVSNKYNQIYWNIFNEKISIDEIAVHLKTGKCLGKNSDDSLFKNLLSLYDYLKYGGTIDSLIS

SEQ ID NO: 15196 - protein, 778 aa, Acinetobacter sp. CIP 102136
MEHSTKIFISYCHANDIHFNALMSHLGAIAKFNNIEIFTDQQVDIGQDLDGTIQEHLQSADIVVCLVSTEYLNSDYCIRKELEVAIEKQVIDNSKIFPIIAEDCLWKRTYFGKIKCAPEDGGPVSKYENISSVYLTVVDQLMSQIERNRTVDIEKKKDHLASALIFDQSEKFHNYIHDLGISIKHPHKDHVILDDVFIYPDLEHINSNDVINYKQISSESILEKYNYCYFIGSDKSGKTALLKKYSHDLFKKGYQVVTLKSTDIKHYSAEQLLKICSNKYNIEYDKNLENFVLLIDDFHNLQISEKYENDFLKSITSFFKKIYFFVDKQYFFGDRSKHLNVNFEIFEIKNLGHVKRNELYSKWYGIGIETPYVQNDADFLRKIDTVTNHFDLLLRKNVMDAKPMYILTIIQTLDNLNVSRDFSLTSYGHCYNTLILSLLHKSNVNHHDFDSILNFLSHLSYNMFENRAKSISNERLDNLIKDYHKDYVINLDIKKTLIESNILYLDENLDYIFSQKYIYYFSCSKYIATNQNTLTSLIKELCDTIHTEESANILIFLVHHSNSTDFIDNILDYSSNLLINSTPHYLTLDQNQDLNLKFKQILNQEIKQIRLENKNIYDERSKQLTLKDNRPESEDVLESAINSLDNKENNSEIKDSLDQNIELNEINEAHTIFRCLEVLGQIAKNKYGSFNRSRLENLLDSSYSLGLKSLSFFLDVLMKSDNDLKEFMISIIQEKEKSSNEEAVAMAEKMIFEMCKSVCRYLINFISKATASPQLEEM

SEQ ID NO: 15197 - protein, 257 aa, Acinetobacter sp. CIP 101966
MSFTKPQEKFINEYVKAIQDGNAAIFAGAGLSASLGFVNWKELLRDLADDLNLDIDKETDLVSIAQYHSNKFNRTRINEKIINEFTTLEKGSENHQILSRLDIDTYWTTNYDQLIEKTLENNGKKVDKKVTNEDFSRYIKKKDATVYKMHGDKDAPHNAVLTKNDYEDYHDSRELFSTVLRGDLLSKVFLFIGFSFDDPNIDYILSRIRILLKDNTPKHYCFFKEIDKNSFSDDQDYLYAKIRQDLKIEDLMRYGAE

SEQ ID NO: 15198 - protein, 160 aa, Acinetobacter sp. CIP 101966; identical to SEQ ID NO: 15190

SEQ ID NO: 15199 - protein, 179 aa, Acinetobacter sp. CIP 101966; identical to SEQ ID NO: 15191

SEQ ID NO: 15200 - protein, 495 aa, Clostridium colicanis 209318
MKFKREVYAFIEDYIEQLKQGSAAIFAGAGLSAGVGFVDWKGLLEKPARRIGLDVQKEDDLVTLAQYIFNEDGSRQPLTEVIRNNFISSNKINENHKILSLLPIKTYWTTNYDSLIEDSLIKYGKNPDVKKTLADLSTIISMRDAVIYKMHGDINDANNAVLIKDDYEVYETKNHLFTLNLKADLISKTFLFIGFSFEDPNLEYILSKVRILLEGNGRKHYCFLKKVNIKDFEKCQNPDEEFKYAELKQRLKCADLKRYCIHPVLVDEYEDITEILRYIDRMYRRNNVLISGSADEFENFNIKLKGKDEMIQPLDFIHDLCREISKSGFKIVTGYGKGIGSAVINGVLENVYQTNTRNLDDHMIIRPFPLYATKNITDEEFNLVRESYRKSLVEQAGITIFVLGNKIVNGEVVVADGVLKEFEESLLIGSKVIPIGLTGYASKELWEKVNTNFEKYYSEHRNLKAYFEVLGDENSNNEDIINSVCSIIKDLREVF

SEQ ID NO: 15201 - protein, 160 aa, Clostridium colicanis 209318
MRKVFFSFHFGRDAWRAGQVRNSGRFTGDDSGFIDKAEWEKVKLKGKAHICNWIDEQMKGTSVTVVLIGAETSTREYVEYEIKKSFAKGNGVIGIYIHNVKNQYGQTDYKGKNPFENIYYEYQGRRVYLSEIYKTYDWVCDNGRENMSKWIEEAAQRASR

SEQ ID NO: 15202 - protein, 193 aa, Clostridium colicanis 209318
MFFNIQDLEKRANSKSLTESFASYELSSLNKSFDASKTYDIFLSHSYLDAKHIKLIRDDLISLGYSVYVDWIEDKSLDRTQVTSETAEQLRIRMKQSKCLFYATTENYQKSNWMPWELGYFDALKDKVAILPVKSRPDSSEQYNGTEYLGLYSYITLTEDTKQNECLWVNNNKDEYVKFDEWLEGKKPFIRNN

SEQ ID NO: 15203 - protein, 481 aa, Clostridium colicanis 209318
MKMQIKSFIKKFSKEIREQNAAIFAGAGFSMEAGYVNWSKLLEPLAEEIGIDISKESDLVSLAQYYKNEKSNRTEISKRIIEEFSKEAEPDENHLILSRLPIRTYWTTNYDSLIEDALKISGKIVDVKYTVEQLTNTKPNRDAVIYKMHGDKEHSSKAIIIKEDYELYNTKYAPFITALSGDLISKTFLFIGFSFTDPNLDYILSRVRVNYGENQKTHYSFVKKIKREECDSDADFEYLDRKQQLFINDLKRYNIEALIIDEYSQITNILKMIEKSINEDSIFISGSAHSYNPWDEKEAQKFINNLSKRLIADNKKVISGFGLGVGSFIITGALEQMYMKQEKINNNQLILRPFPQKALPNQKIEELWDKYRNDMISLAGISIFIFGNKINKEGNIIDANGVYLEFEIAKAKDNIIIPVGSTGNVAKKIWKEVKDKFDEFYPKANSKLKELFEDLNNEKDSEKLIDVIINFVNESKKLNLN

SEQ ID NO: 15204 - protein, 227 aa, Clostridium colicanis 209318
MGHKIFVSYKYADDSVYNLKYNSNSTVRDYVDEFEAKLDETDDIYKGESDGEDLSQLSEDVIWEKLKDRIYDSSLTIVFISPNMKVSGETDKRQWIPWEISYSLKEVSRRNKKGDSITSKTNAMIAVVLPNINNSYSYYLEEKSCCTSKCIMHHTNKLFDILRKNKFNYKNPNINECDNKDTIWHGKCSYIKAVKWCDFIQNIDKYVDEAYERQKDILNYNIYKEVE

SEQ ID NO: 15205 - protein, 394 aa, Clostridium colicanis 209318
MSGYTKHMYEMDIHQIKVEFSKYIKTLLSILPKDYDINTIISLLIEYYPYEWQILNEKYEYYCKKDKKLKSVGQKIRYSMREPIKIIQNLKITTKIMSESYRNSYKLQYDEYIQLKNIEIFQNKRLPKIKHIKDKIDKAKLKTQQVEPFYLDALIGLYDKKKTSQKDRVYIMLELKKYYCPKVISFFKKKANSEYNIQLREMAFYHLQEFKHYVILRKQKYMRIPSKNKRRRKYLKEVYAKQKYNIKKIPEELEYRIKNSKEQKLKEYDFFISHSSLDHKAIQILIKELNKNSKNIYCDWINDTDYLKRNLVGDATKAIIEKRLEQSKNLLFVRSENSEQSNWVKYELNYFNSLNKRIYVIDKANILNGNFSYYLIHEKWFLDENYKNICLFKI

SEQ ID NO: 15206 - protein, 478 aa, Enterococcus faecium EnGen0265; identical to SEQ ID NO: 13220

SEQ ID NO: 15207 - protein, 161 aa, Enterococcus faecium EnGen0265; identical to SEQ ID NO: 13221

SEQ ID NO: 15208 - protein, 283 aa, Enterococcus faecium EnGen0265; identical to SEQ ID NO: 13222

SEQ ID NO: 15209 - protein, 478 aa, Enterococcus faecium EnGen0320; identical to SEQ ID NO: 13220

SEQ ID NO: 15210 - protein, 161 aa, Enterococcus faecium EnGen0320; identical to SEQ ID NO: 13221

SEQ ID NO: 15211 - protein, 283 aa, Enterococcus faecium EnGen0320; identical to SEQ ID NO: 13222

SEQ ID NO: 15212 - protein, 478 aa, Enterococcus faecium EnGen0322; identical to SEQ ID NO: 13220

SEQ ID NO: 15213 - protein, 161 aa, Enterococcus faecium EnGen0322; identical to SEQ ID NO: 13221

SEQ ID NO: 15214 - protein, 283 aa, Enterococcus faecium EnGen0322; identical to SEQ ID NO: 13222

SEQ ID NO: 15215 - protein, 478 aa, Enterococcus faecium EnGen0168; identical to SEQ ID NO: 13220

SEQ ID NO: 15216 - protein, 161 aa, Enterococcus faecium EnGen0168; identical to SEQ ID NO: 13221

SEQ ID NO: 15217 - protein, 283 aa, Enterococcus faecium EnGen0168; identical to SEQ ID NO: 13222

SEQ ID NO: 15218 - protein, 478 aa, Enterococcus faecium EnGen0169; identical to SEQ ID NO: 13220

SEQ ID NO: 15219 - protein, 161 aa, Enterococcus faecium EnGen0169; identical to SEQ ID NO: 13221

SEQ ID NO: 15220 - protein, 283 aa, Enterococcus faecium EnGen0169; identical to SEQ ID NO: 13222

SEQ ID NO: 15221 - protein, 478 aa, Enterococcus faecium EnGen0177; identical to SEQ ID NO: 13220

SEQ ID NO: 15222 - protein, 161 aa, Enterococcus faecium EnGen0177; identical to SEQ ID NO: 13221

SEQ ID NO: 15223 - protein, 283 aa, Enterococcus faecium EnGen0177; identical to SEQ ID NO: 13222

SEQ ID NO: 15224 - protein, 478 aa, Enterococcus faecium EnGen0179; identical to SEQ ID NO: 13220

SEQ ID NO: 15225 - protein, 161 aa, Enterococcus faecium EnGen0179; identical to SEQ ID NO: 13221

SEQ ID NO: 15226 - protein, 283 aa, Enterococcus faecium EnGen0179; identical to SEQ ID NO: 13222

SEQ ID NO: 15227 - protein, 478 aa, Enterococcus faecium EnGen0180; identical to SEQ ID NO: 13220

SEQ ID NO: 15228 - protein, 161 aa, Enterococcus faecium EnGen0180; identical to SEQ ID NO: 13221

SEQ ID NO: 15229 - protein, 283 aa, Enterococcus faecium EnGen0180; identical to SEQ ID NO: 13222

SEQ ID NO: 15230 - protein, 478 aa, Enterococcus faecium EnGen0255; identical to SEQ ID NO: 13220

SEQ ID NO: 15231 - protein, 161 aa, Enterococcus faecium EnGen0255; identical to SEQ ID NO: 13221

SEQ ID NO: 15232 - protein, 283 aa, Enterococcus faecium EnGen0255; identical to SEQ ID NO: 13222

SEQ ID NO: 15233 - protein, 491 aa, Bacillus cereus VD140
MFIILKKEVDRMSREVDEFLRTYTKAIEESTAAVFAGAGLSKPAGFVNWKELLRDIADEIGLDVDKETDLIGVAQYHVNENGGNRGRINQVLIEEFTKDTYVTENHKILAKLPIRTFWTTNYDQLIEDSLKSEHKRSDAKITPENFATTMPNCDAVIYKMHGDITQAHQAVLTKDDYENYNLTRQIFTTALQGDLVSKTFLFIGFSFDDPNLEYILSRIRILLGNNQRPHYCFMKKVQRSEYEKESDFLYAEIRQELKIKDLKRFNIKVLLVEKYSEINDVLRVLEVKSKQKNIFISGSASNYGAWGEKRSFEFASSLSKQLIRNGNNIVTGFGLGVGSCVLSGALEEIYKVRTKRVEERLISKPFPQAAAAEVDLRKLWTIHRNNIIDNIGISIFMFGNKINESNGEVLDAEGVIEEFNISVDKGSMPIPIGVTGFTSKKLWETVMGDFNKYIPDQKLEKYYRVIGDDECKDEEVIRNVIHIINHLKRSK

SEQ ID NO: 15234 - protein, 202 aa, Bacillus cereus VD140
MARKTFISYKYSEARDLRDDILDALGEDAQYYKGETSDSPDLTDTTTENIKKNLRDMIYETSVSIVIISPSMIDSEWIDWEIEYSLKEITRADRKSRTNGIVGVIMKHNGGYGWIETNQKNTDGCTSRVISNSKLYSIISNNRFNLKTPEYTCGKCKTVNSLTGSYISIINEDDFLANPSEYIENAFEKSQGIDKFNITKSR

SEQ ID NO: 15235 - protein, 473 aa, Enterococcus columbae DSM 7374 = ATCC 51263
MLIIKGEVSKKDLIREIEKAIKSDELGAFIGAGLSIPAGFCSWKELLKEPAEEIGLDVEKENDLVNLAQYYSNSKKRTSIDDLIKGQFSQLVKPTENHKLLSQLPIYTFWTTNYDKLIEKALEDNMKKPYIKTKDEQLRGTNHDFDAIVYKLHGDVESPEDAVLTRSDYEEFGYNKRKLFREVLEGDLLTKTFLFLGFSFEDPNFNYVIGRLRVLLDEKNTRKHYCIMKRVQNTDEDYEYKKAKQELQIEDLNRYGIFTYLVNRYDEITELLSTLVDRFRRKTIFISGSAYNYPGYSHETAQNFIHKLSFELSKNGYRIVNGYGKGVGEFILNGVADFCLNHKAKINDFLTFMPFPQNSSLGIDLDQLYKENREQMIENCGIAIFLFGNKEAEDIASGVMDEYELSKEHGLVCLPIERTGGAAKEIYDKITQEILDKNTISAIDQANKQCDGDIDISVKNIVQAVKILNKEDF

SEQ ID NO: 15236 - protein, 165 aa, Enterococcus columbae DSM 7374 = ATCC 51263; identical to SEQ ID NO: 13355

SEQ ID NO: 15237 - protein, 473 aa, Enterococcus columbae DSM 7374 = ATCC 51263; identical to SEQ ID NO: 15235

SEQ ID NO: 15238 - protein, 165 aa, Enterococcus columbae DSM 7374 = ATCC 51263; identical to SEQ ID NO: 13355

SEQ ID NO: 15239 - protein, 482 aa, Capnocytophaga granulosa ATCC 51502
MNNMNFTSEQNKFINDFVIEIRNGDAAIFAGAGLSASSGFVNWKDLLRDLADELDLDIDKEHDLIGVAQYYFNRHKRSKINNKIKNEFSTLTKGSENHKLLSRIGIETFWTTNYDQLIEKTLESDGKIVDKKVRNKDFSCNIKRKDAIIYKMHGDKDSPDEAILIKDDYETYQDKKELFSTALRGDLLSKTFLFIGFSFDDPNLEYILGRIKVLLKDNTPTHYCFFKEVNKKDYQEEKDYLYAKIKQELKIEDLRRYGINAIMVKEYSDITLILSEIERKLKLNNIFISGAAHSYEPFEKKEAIEFIHHLSYDLAKEGNKIISGYGLGIGSIVINGALEYKYNSEYKSLDDLLVLRPFPQIESGNKSIKERWTDYRDEITSKAGIAIFIFGNKWDEKGNKVIDSDGMKEEFDLCIKNKVIPIPIGITGYISKLLWDEVTNNLDEYYPDNEELRKTITALGDSKEKEKIVENVIKIVKILQEK

SEQ ID NO: 15240 - protein, 217 aa, Capnocytophaga granulosa ATCC 51502
MKRKVFVSYKYSDNKVLRIKGYPTTARNYVDELSVILEKDNHIYKGENDGETLEHFKDATIGSKLADKIFDSSVTIVLISKGMKDPSVPEKDQWIPWEISYSLKEQTREYGRSKTNGVLAVVLPDENGSYEYYISENYNCNSRQLKTDILFQILRDNMFNAKNPSIRICNGAKIYENSSYIQSVKWEDFIKNPSKYIDKSIELRDRKNDFNIAKNVK

SEQ ID NO: 15241 - protein, 167 aa, Capnocytophaga granulosa ATCC 51502
MARKVFFSFHYEKDNWRVSQVRNIGKIEENEILLDNKWEEVKKKGDVAIRNWIDTNLKNRSCTIVLVGEETANRKWINYEIKESWNNGKAVLGIYIHKLKDRWGNQSKKGMNPFDFFTMGETKTKFSSIVKCYNPPFQRSTDVYNYIKKNIEEWVEEAIKIRNLYKL

SEQ ID NO: 15242 - protein, 187 aa, Capnocytophaga granulosa ATCC 51502
MSFITESQLAAYRTQTKTFSAESLESSFGNKAKVFLSHKHDEGKILQDVVALLKKEGVDVYLDWLDDEMPAFTNAKTAHKLKEKIEIADKFILLATEKAINSKWCNWELGLGDAAKYMKNNIALFPITKNNENFQGTEYLTIYPRIEYENGNNKYSDGAYIPEGFYVKFPDRTIYLLRIWLQKIFRK

SEQ ID NO: 15243 - protein, 482 aa, Enterococcus faecium LA4B-2
MSEISKDIFLKRFSKAVNEGYAAIFVGAGFSRPMGYVDWKTLLKPFAEELELDIEQETDLARLAQFYRNEKGSKSRINQEIIDQFSKNVKLNENVKIITRLPIYTYWTTNYDHLLEEGLKLNNRKADVKITQDQLSLQKRDRDALVYKMHGDVDFASEAVLTKEDYEVYNEKRSLYTTVLQGDLISKTFLFIGFSFEDPNLDNILSRTRNLLGENVGESYWLEKNVAEPNLQDIESEKEIEEVKEKYRIDKVKLSLKINELKRYGISTVLINDYDEITSILLEVEKRYLRTNVFISGSIKSYDEIWEENKVNNFCSILSEKLVNNNYKVHSGFGLGVGSSVINGALKEIYSTKYRHVDEHLLLRPFPQVFENDEEKKLKWRQYREELISKVGVSIFIFGNKISKEGEVELSEGMFEEFEIAKKFNNLIIPVGSTGGMAKKIYDMVEQDIEEYPYLKNDLETLKSSHDIQELTDCILDILEKN

SEQ ID NO: 15244 - protein, 217 aa, Enterococcus faecium LA4B-2
MKKWLIIKTKKVIDLARKTFISYKYSEAKDLRDNIINAMGEDATYYTGETSSSPNMSDKTTEYIKNKLKDMIYNTSVTIVIISPNMKASQWIDWEIEYSLKQVKRGDKYSGVNGIVGVVMEHNGGYSWLRPTTTNLDGCTSISTNDEYLFDIIKKNRYNQNPKEYSCNQCKTINALTGSYIALVNEEDFLKKPDFYIENAYEKSKNIDNYDICKKVD

SEQ ID NO: 15245 - protein, 478 aa, Escherichia coli HVH 9 (4-6942539)
MTFSNEIEVFIKDFVKDLENDCAAIFSGAGMSKSQGYVDWKELLSDIAEELSLDINKEDDLISLAQFHVNEKKGATKLTRKIIEEFSEQAEPSEVHNIIARLPIKTFWTTNYDTLIEDSLRKVYKIADVKRNIDDLNTTRPKRDAIVYKMHGDISSPSKAILYKEQYEKYYRTHASFITALSGDLISKTFLFIGFSFTDPNLDYILSRLYTHSGDKRTHYCFMKNEANNSLDDEETVNYKIRKQKLRIDDLKRFGIQVLLIDEYSDIPKILAKIEQSFKKKTIFISGSAEKYGDLERPKALDFIHTLAYEIIKNNYRIVNGFGWGVGSSVINGALDAIYSRPDKLSEEQLIVRPFPQTVSKGKDIQELWEEYRQRMIPLGGIALFIFGNKQEENNDIVNARGVFREFEIAVQHGLVPIPLPNTGYMSKYIFEQISQDPKKYYGSNVWIYNDLSEITEKDFSVKKTIEVVIKIINKLNK

SEQ ID NO: 15246 - protein, 203 aa, Escherichia coli HVH 9 (4-6942539); identical to SEQ ID NO: 13309

SEQ ID NO: 15247 - protein, 478 aa, Escherichia coli HVH 38 (4-2774682); identical to SEQ ID NO: 13308

SEQ ID NO: 15248 - protein, 203 aa, Escherichia coli HVH 38 (4-2774682); identical to SEQ ID NO: 13309

SEQ ID NO: 15249 - protein, 482 aa, Escherichia coli HVH 46 (4-2758776)
MNKEKEIFIKHICKELQDENIAIFAGAGMSAGAGFVSWSELLRPIADELELDIDKEHDLVALAQYHCNANGNNRSQLNQRLIEEFSRDAVETETHRILARLPISTYWTTNYDKLIENSLIKAGKIPDVKYTKEQLAITKLKRDAIVYKMHGDIDHANDAVLTKDDYEKYYIKMEQFLSALKGDLISKTFIFIGFSFTDPNLDYILSRVRVAYEGNQRRHYCFIRATQKGPNESEADYQYNCRKQELFISDLSRFNVKTIIIKDYDEIKKLLGLIEFNYKKKTLFISGAAHEYEPWGESASQKFVAKLSAALINKNYKIVSGFGLGIGSSVICGALEEIYMKQNNRIDDRLLLRPFPQHSSKQSLSALWTQYRDDMISHAGFSIFLFGNKQSNDEIVLSNGMREEYEISKNKKNIILPIGATGYMARELWEEEVNRLHSLPNKDDEFCKLFTLLGDQDKSLDEILDNIINIIDYSVKKGDLHG

SEQ ID NO: 15250 - protein, 166 aa, Escherichia coli HVH 46 (4-2758776)
MARKCFFSFHYTPDNWRVSQVRNIGAIEGNKPAKDNDWETVVGGGDKKIKEWISEQMEGRICTVILAGTNTADRKWINHEIVESWNRGMGVVAIHIHGLKNKDGEQSAKGKNPLSYITHGPTGKKLSDIAKCYDPPYSVSTNVYNYIAENIDSWIEEAIKIRKENK

SEQ ID NO: 15251 - protein, 482 aa, Escherichia coli HVH 153 (3-9344314); identical to SEQ ID NO: 15249

SEQ ID NO: 15252 - protein, 166 aa, Escherichia coli HVH 153 (3-9344314); identical to SEQ ID NO: 15250

SEQ ID NO: 15253 - protein, 482 aa, Escherichia coli UMEA 3160-1; identical to SEQ ID NO: 15249

SEQ ID NO: 15254 - protein, 166 aa, Escherichia coli UMEA 3160-1; identical to SEQ ID NO: 15250

SEQ ID NO: 15255 - protein, 488 aa, Leptotrichia wadei F0279
MGNILKKKELIKVIEQALESGELAIFAGAGLSIDAGYCSWQDLLSEAAKEIDLDIERESHDLISLAQFYCNVKKRNAIDELLTTKFPTNVKPTENHKLLSQLPISTYWTTNYDTLIEDALKNNNKKVSVRKSDKDLQLSFKNYDSIVYKMHGDIHSPAKAVITKDDYEEYGINSRKLFRDVLEGNLLTKTFLFLGFSFSDPNFNFVISKMRVLLGDSSRAHYCILKKISKPNRDDYSEQEKYKIAIRDYEYSLIKQDLQINDLNRYGIKVYLIDNYSEITDILRTLLNKYRRKTVFISGSAEKYIPMDEKKAQDFIRKLSFELVKNGYKIVNGYGLGVGTYVINGITEYCYDHREINIENRLKLMPFPLSAIDNKNLKDTWEKYRKEMISQCGIAIYIFGNKKKNGKILNADGVEKEYAIAESYEIVNIPLAFTGYMAEELYFKNSDKINSVIGKEKTKYITEFFDGDTNVEEIIKIINKLNNKEEIN

SEQ ID NO: 15256 - protein, 167 aa, Leptotrichia wadei F0279
MSKRQVFFSFHYTNDNWRAGQIRNMGKVDRSSTFSDNDWEEVKEKTDNKIKEWIDKQLNLRSCLVVLIGQKTANRKWINYEIKRAYELNKGIVGIYIHKLENSSGIQDKKGNNPFDYIPLNKNDEKLSKYVKCFDSIYPFSKDVYNDIKNNIENLIEDCIKNKPSTW

SEQ ID NO: 15257 - protein, 487 aa, Pseudomonas aeruginosa BWHPSA014; identical to SEQ ID NO: 13379

SEQ ID NO: 15258 - protein, 167 aa, Pseudomonas aeruginosa BWHPSA014; identical to SEQ ID NO: 13380

SEQ ID NO: 15259 - protein, 304 aa, Pseudomonas aeruginosa BWHPSA014
MSADLFISYAWTSTAHRDWVRLLASQLHLLGYVVKIDEAVDYGSSLHGFMREVTESTHVLLIVDENYVDRANNKPNSGVGIETEWVSRAFMGKPANWLSVIFVRNPERILPNWLNDHNPKGFDFNSSPENNEFPGSIQIDELWRWIEGLPADKTHAVPLSLVRKRAARLERVDALRDPALYANPALNGRVTFRYRNHAHYTVGHGEFEFKINFSGHSNNSIQVYIDSGLKAVGLIVGPDFDPLTVESFLTPGRIVNPVLGQKAVLLNSYGVLCIITIDEVQREVNAQEYVPEHVTFTYEILVRN

SEQ ID NO: 15260 - protein, 487 aa, Pseudomonas aeruginosa BWHPSA004; identical to SEQ ID NO: 13379

SEQ ID NO: 15261 - protein, 167 aa, Pseudomonas aeruginosa BWHPSA004; identical to SEQ ID NO: 13380

SEQ ID NO: 15262 - protein, 304 aa, Pseudomonas aeruginosa BWHPSA004; identical to SEQ ID NO: 15259

SEQ ID NO: 15263 - protein, 469 aa, Streptococcus sanguinis CC94A; identical to SEQ ID NO: 15081

SEQ ID NO: 15264 - protein, 206 aa, Streptococcus sanguinis CC94A; identical to SEQ ID NO: 14585

SEQ ID NO: 15265 - protein, 388 aa, Streptococcus sanguinis CC94A; identical to SEQ ID NO: 14586

SEQ ID NO: 15266 - protein, 478 aa, Enterococcus faecalis EnGen0409; identical to SEQ ID NO: 13220

SEQ ID NO: 15267 - protein, 161 aa, Enterococcus faecalis EnGen0409; identical to SEQ ID NO: 13221

SEQ ID NO: 15268 - protein, 283 aa, Enterococcus faecalis EnGen0409; identical to SEQ ID NO: 13222

SEQ ID NO: 15269 - protein, 484 aa, Serratia marcescens BIDMC 44; identical to SEQ ID NO: 14127

SEQ ID NO: 15270 - protein, 163 aa, Serratia marcescens BIDMC 44; identical to SEQ ID NO: 13318

SEQ ID NO: 15271 - protein, 475 aa, Salmonella enterica subsp. enterica serovar Namur str. 05-2929
MDKEYFIKNYLKEIQDGNAAIFAGAGLSIGAGFVDWRNLLKPLADELHLDITHEQDLVSVAQYFCNGYNRSRITQTLIDELGVSPTPTKNHKILASLPIDTYWTTNYDRLIENALNQENKIYDSKYRKDQLAYTKRGRDVLLYKMHGDIEDPSNTILTKDEYEKYSFTHAPFITALSGDLVSKTFLFLGFSFSDPNLDYILSRVRVNFQDNQRNHYCIFKRCAKNDFDDESEFLNASVKQDLVAQDLKRFHINVVFVEEYNEIEQMLEKIYRLFKRKTIFISGSADSFGEWDKKDVEDSLFKLGSAMVDKGFRVASGIGLGIGNALVSGAIAKAYKSQQSHLDDHVLMRPFPQYIEDVGERRRVWRRYREEIISKSGIAIFLMGNKTVDGEVVDADGMQQEFEIAVEQGVFVLPIGCTGFMSKKLWDLVIGNIDKYYSEQSQEFYEKFNELGETIDNPREVISMIIDILDLIVKE

SEQ ID NO: 15272 - protein, 228 aa, Salmonella enterica subsp. enterica serovar Namur str. 05-2929
MARKIFVSYKYGDTKVEPLEEIFFEATKARDYVTKLQELLSDNDQINKGEKDGEDLSNFQDSTIESKLRDKIFDSSITIAIVSKGMKEYLTAEKDQWMPWEIAYSLRTISKGDRTSNPNGVIMVVLPDNNGSYDYYIKDNTCPYCDCSTLYTDFLFGILKRNTFNNKSLTQSDCEHHNVNPAYTGDHSYIMSVKWDDFIKTPNLYLDECARLRDNIDDFNISKTISGD

SEQ ID NO: 15273 - protein, 484 aa, Serratia marcescens BIDMC 80; identical to SEQ ID NO: 14127

SEQ ID NO: 15274 - protein, 163 aa, Serratia marcescens BIDMC 80; identical to SEQ ID NO: 14126

SEQ ID NO: 15275 - protein, 483 aa, Staphylococcus aureus 08-01084; identical to SEQ ID NO: 13296

SEQ ID NO: 15276 - protein, 202 aa, Staphylococcus aureus 08-01084; identical to SEQ ID NO: 13267

SEQ ID NO: 15277 - protein, 308 aa, Staphylococcus aureus 08-01084; identical to SEQ ID NO: 13262

SEQ ID NO: 15278 - protein, 483 aa, Staphylococcus aureus 08-01085; identical to SEQ ID NO: 13296

SEQ ID NO: 15279 - protein, 202 aa, Staphylococcus aureus 08-01085; identical to SEQ ID NO: 13267

SEQ ID NO: 15280 - protein, 308 aa, Staphylococcus aureus 08-01085; identical to SEQ ID NO: 13262

SEQ ID NO: 15281 - protein, 483 aa, Staphylococcus aureus 08-01728; identical to SEQ ID NO: 13296

SEQ ID NO: 15282 - protein, 202 aa, Staphylococcus aureus 08-01728; identical to SEQ ID NO: 13267

SEQ ID NO: 15283 - protein, 308 aa, Staphylococcus aureus 08-01728; identical to SEQ ID NO: 13262

SEQ ID NO: 15284 - protein, 483 aa, Staphylococcus aureus 08134-6; identical to SEQ ID NO: 13296

SEQ ID NO: 15285 - protein, 202 aa, Staphylococcus aureus 08134-6; identical to SEQ ID NO: 13267

SEQ ID NO: 15286 - protein, 308 aa, Staphylococcus aureus 08134-6; identical to SEQ ID NO: 13262

SEQ ID NO: 15287 - protein, 483 aa, Staphylococcus aureus 08139-6; identical to SEQ ID NO: 13296

SEQ ID NO: 15288 - protein, 202 aa, Staphylococcus aureus 08139-6; identical to SEQ ID NO: 13267

SEQ ID NO: 15289 - protein, 308 aa, Staphylococcus aureus 08139-6; identical to SEQ ID NO: 13262

SEQ ID NO: 15290 - protein, 483 aa, Staphylococcus aureus 08142-8; identical to SEQ ID NO: 13296

SEQ ID NO: 15291 - protein, 202 aa, Staphylococcus aureus 08142-8; identical to SEQ ID NO: 13267

SEQ ID NO: 15292 - protein, 308 aa, Staphylococcus aureus 08142-8; identical to SEQ ID NO: 13262

SEQ ID NO: 15293 - protein, 483 aa, Staphylococcus aureus 08143-5; identical to SEQ ID NO: 13296

SEQ ID NO: 15294 - protein, 202 aa, Staphylococcus aureus 08143-5; identical to SEQ ID NO: 13267

SEQ ID NO: 15295 - protein, 308 aa, Staphylococcus aureus 08143-5; identical to SEQ ID NO: 13262

SEQ ID NO: 15296 - protein, 483 aa, Staphylococcus aureus 09S00475; identical to SEQ ID NO: 13296

SEQ ID NO: 15297 - protein, 202 aa, Staphylococcus aureus 09S00475; identical to SEQ ID NO: 13267

SEQ ID NO: 15298 - protein, 308 aa, Staphylococcus aureus 09S00475; identical to SEQ ID NO: 13262

SEQ ID NO: 15299 - protein, 483 aa, Staphylococcus aureus 10S01493; identical to SEQ ID NO: 13296

SEQ ID NO: 15300 - protein, 202 aa, Staphylococcus aureus 10S01493; identical to SEQ ID NO: 13267

SEQ ID NO: 15301 - protein, 308 aa, Staphylococcus aureus 10S01493; identical to SEQ ID NO: 13262

SEQ ID NO: 15302 - protein, 483 aa, Staphylococcus aureus 110802495; identical to SEQ ID NO: 13296

SEQ ID NO: 15303 - protein, 202 aa, Staphylococcus aureus 110802495; identical to SEQ ID NO: 13267

SEQ ID NO: 15304 - protein, 308 aa, Staphylococcus aureus 110802495; identical to SEQ ID NO: 13262

SEQ ID NO: 15305 - protein, 483 aa, Staphylococcus aureus 1110601704; identical to SEQ ID NO: 13296

SEQ ID NO: 15306 - protein, 202 aa, Staphylococcus aureus 1110601704; identical to SEQ ID NO: 13267

SEQ ID NO: 15307 - protein, 308 aa, Staphylococcus aureus 1110601704; identical to SEQ ID NO: 13262

SEQ ID NO: 15308 - protein, 483 aa, Staphylococcus aureus 1110601896; identical to SEQ ID NO: 13296

SEQ ID NO: 15309 - protein, 202 aa, Staphylococcus aureus 1110601896; identical to SEQ ID NO: 13267

SEQ ID NO: 15310 - protein, 308 aa, Staphylococcus aureus 1110601896; identical to SEQ ID NO: 13262

SEQ ID NO: 15311 - protein, 483 aa, Staphylococcus aureus 1110700562; identical to SEQ ID NO: 13296

SEQ ID NO: 15312 - protein, 202 aa, Staphylococcus aureus 1110700562; identical to SEQ ID NO: 13267

SEQ ID NO: 15313 - protein, 308 aa, Staphylococcus aureus 1110700562; identical to SEQ ID NO: 13262

SEQ ID NO: 15314 - protein, 483 aa, Staphylococcus aureus 1110700610; identical to SEQ ID NO: 13296

SEQ ID NO: 15315 - protein, 202 aa, Staphylococcus aureus 1110700610; identical to SEQ ID NO: 13267

SEQ ID NO: 15316 - protein, 308 aa, Staphylococcus aureus 1110700610; identical to SEQ ID NO: 13262

SEQ ID NO: 15317 - protein, 483 aa, Staphylococcus aureus 1110701127; identical to SEQ ID NO: 13296

SEQ ID NO: 15318 - protein, 202 aa, Staphylococcus aureus 1110701127; identical to SEQ ID NO: 13267

SEQ ID NO: 15319 - protein, 308 aa, Staphylococcus aureus 1110701127; identical to SEQ ID NO: 13262

SEQ ID NO: 15320 - protein, 483 aa, Staphylococcus aureus 1110802883; identical to SEQ ID NO: 13296

SEQ ID NO: 15321 - protein, 202 aa, Staphylococcus aureus 1110802883; identical to SEQ ID NO: 13267

SEQ ID NO: 15322 - protein, 308 aa, Staphylococcus aureus 1110802883; identical to SEQ ID NO: 13262

SEQ ID NO: 15323 - protein, 483 aa, Staphylococcus aureus 1110807699; identical to SEQ ID NO: 13296

SEQ ID NO: 15324 - protein, 202 aa, Staphylococcus aureus 1110807699; identical to SEQ ID NO: 13267

SEQ ID NO: 15325 - protein, 308 aa, Staphylococcus aureus 1110807699; identical to SEQ ID NO: 13262

SEQ ID NO: 15326 - protein, 483 aa, Staphylococcus aureus 1110904178; identical to SEQ ID NO: 13296

SEQ ID NO: 15327 - protein, 202 aa, Staphylococcus aureus 1110904178; identical to SEQ ID NO: 13267

SEQ ID NO: 15328 - protein, 308 aa, Staphylococcus aureus 1110904178; identical to SEQ ID NO: 13262

SEQ ID NO: 15329 - protein, 483 aa, Staphylococcus aureus 1111101949; identical to SEQ ID NO: 13296

SEQ ID NO: 15330 - protein, 202 aa, Staphylococcus aureus 1111101949; identical to SEQ ID NO: 13267

SEQ ID NO: 15331 - protein, 308 aa, Staphylococcus aureus 1111101949; identical to SEQ ID NO: 13262

SEQ ID NO: 15332 - protein, 483 aa, Staphylococcus aureus 1111102620; identical to SEQ ID NO: 13296

SEQ ID NO: 15333 - protein, 202 aa, Staphylococcus aureus 1111102620; identical to SEQ ID NO: 13267

SEQ ID NO: 15334 - protein, 308 aa, Staphylococcus aureus 1111102620; identical to SEQ ID NO: 13262

SEQ ID NO: 15335 - protein, 483 aa, Staphylococcus aureus 1111200013; identical to SEQ ID NO: 13296

SEQ ID NO: 15336 - protein, 202 aa, Staphylococcus aureus 1111200013; identical to SEQ ID NO: 13267

SEQ ID NO: 15337 - protein, 308 aa, Staphylococcus aureus 1111200013; identical to SEQ ID NO: 13262

SEQ ID NO: 15338 - protein, 483 aa, Staphylococcus aureus 1111203374; identical to SEQ ID NO: 13296

SEQ ID NO: 15339 - protein, 202 aa, Staphylococcus aureus 1111203374; identical to SEQ ID NO: 13267

SEQ ID NO: 15340 - protein, 308 aa, Staphylococcus aureus 1111203374; identical to SEQ ID NO: 13262

SEQ ID NO: 15341 - protein, 483 aa, Staphylococcus aureus 1111205429; identical to SEQ ID NO: 13296

SEQ ID NO: 15342 - protein, 202 aa, Staphylococcus aureus 1111205429; identical to SEQ ID NO: 13267

SEQ ID NO: 15343 - protein, 308 aa, Staphylococcus aureus 1111205429; identical to SEQ ID NO: 13262

SEQ ID NO: 15344 - protein, 483 aa, Staphylococcus aureus 1111206270; identical to SEQ ID NO: 13296

SEQ ID NO: 15345 - protein, 202 aa, Staphylococcus aureus 1111206270; identical to SEQ ID NO: 13267

SEQ ID NO: 15346 - protein, 308 aa, Staphylococcus aureus 1111206270; identical to SEQ ID NO: 13262

SEQ ID NO: 15347 - protein, 483 aa, Staphylococcus aureus 11P4; identical to SEQ ID NO: 13296

SEQ ID NO: 15348 - protein, 202 aa, Staphylococcus aureus 11P4; identical to SEQ ID NO: 13267

SEQ ID NO: 15349 - protein, 308 aa, Staphylococcus aureus 11P4; identical to SEQ ID NO: 13262

SEQ ID NO: 15350 - protein, 483 aa, Staphylococcus aureus 11P8; identical to SEQ ID NO: 13296

SEQ ID NO: 15351 - protein, 202 aa, Staphylococcus aureus 11P8; identical to SEQ ID NO: 13267

SEQ ID NO: 15352 - protein, 308 aa, Staphylococcus aureus 11P8; identical to SEQ ID NO: 13262

SEQ ID NO: 15353 - protein, 483 aa, Staphylococcus aureus 11S00627; identical to SEQ ID NO: 13296

SEQ ID NO: 15354 - protein, 202 aa, Staphylococcus aureus 11S00627; identical to SEQ ID NO: 13267

SEQ ID NO: 15355 - protein, 308 aa, Staphylococcus aureus 11S00627; identical to SEQ ID NO: 13262

SEQ ID NO: 15356 - protein, 483 aa, Staphylococcus aureus 11S01586; identical to SEQ ID NO: 13296

SEQ ID NO: 15357 - protein, 202 aa, Staphylococcus aureus 11S01586; identical to SEQ ID NO: 13267

SEQ ID NO: 15358 - protein, 308 aa, Staphylococcus aureus 11S01586; identical to SEQ ID NO: 13262

SEQ ID NO: 15359 - protein, 375 aa, Staphylococcus aureus 122; identical to SEQ ID NO: 13260

SEQ ID NO: 15360 - protein, 202 aa, Staphylococcus aureus 122; identical to SEQ ID NO: 13261

SEQ ID NO: 15361 - protein, 308 aa, Staphylococcus aureus 122; identical to SEQ ID NO: 13262

SEQ ID NO: 15362 - protein, 483 aa, Staphylococcus aureus 12464; identical to SEQ ID NO: 13296

SEQ ID NO: 15363 - protein, 202 aa, Staphylococcus aureus 12464; identical to SEQ ID NO: 13267

SEQ ID NO: 15364 - protein, 308 aa, Staphylococcus aureus 12464; identical to SEQ ID NO: 13262

SEQ ID NO: 15365 - protein, 483 aa, Staphylococcus aureus 12S00579; identical to SEQ ID NO: 13296

SEQ ID NO: 15366 - protein, 202 aa, Staphylococcus aureus 12S00579; identical to SEQ ID NO: 13267

SEQ ID NO: 15367 - protein, 308 aa, Staphylococcus aureus 12S00579; identical to SEQ ID NO: 13262

SEQ ID NO: 15368 - protein, 483 aa, Staphylococcus aureus 12S00881; identical to SEQ ID NO: 13296

SEQ ID NO: 15369 - protein, 202 aa, Staphylococcus aureus 12S00881; identical to SEQ ID NO: 13267

SEQ ID NO: 15370 - protein, 308 aa, Staphylococcus aureus 12S00881; identical to SEQ ID NO: 13262

SEQ ID NO: 15371 - protein, 483 aa, Staphylococcus aureus 12S01153; identical to SEQ ID NO: 13296

SEQ ID NO: 15372 - protein, 202 aa, Staphylococcus aureus 12S01153; identical to SEQ ID NO: 13267

SEQ ID NO: 15373 - protein, 308 aa, Staphylococcus aureus 12S01153; identical to SEQ ID NO: 13262

SEQ ID NO: 15374 - protein, 483 aa, Staphylococcus aureus 12S01399; identical to SEQ ID NO: 13296

SEQ ID NO: 15375 - protein, 202 aa, Staphylococcus aureus 12S01399; identical to SEQ ID NO: 13267

SEQ ID NO: 15376 - protein, 308 aa, Staphylococcus aureus 12S01399
MERQQTYKEKTQHLYKVKKIKNRYNTKSAEEYFFSIPQVKYILSAGRMKKHKENYNASEIKIKKAALEKSRKNKNWKIEERLIKAKRYTQKVDPEYLNIYMKAYHKKDITTEEKLEILTELKKFDTENIVRFFRKLNDAEQNKMIRNLAFKYLQDYGHYVKLRKNFKGKKKVYQTERASLDTKKPEDLYNDLTNKNIQSQKVYDIFISHSTKDKKTVEDIIRVFNEQNKTCYCDWTMDQDYLKRKYVGEYTKQVLKARMEQSKMLVLLRTENSVQSDWVSFEIEYFENLKKPIYIVESLEELLEAFSD

SEQ ID NO: 15377 - protein, 483 aa, Staphylococcus aureus 12-ST01988; identical to SEQ ID NO: 13296

SEQ ID NO: 15378 - protein, 202 aa, Staphylococcus aureus 12-ST01988; identical to SEQ ID NO: 13267

SEQ ID NO: 15379 - protein, 308 aa, Staphylococcus aureus 12-ST01988; identical to SEQ ID NO: 13262

SEQ ID NO: 15380 - protein, 483 aa, Staphylococcus aureus 14(11MN_17-08-66-05); identical to SEQ ID NO: 13296

SEQ ID NO: 15381 - protein, 202 aa, Staphylococcus aureus 14(11MN_17-08-66-05); identical to SEQ ID NO: 13267

SEQ ID NO: 15382 - protein, 308 aa, Staphylococcus aureus 14(11MN_17-08-66-05); identical to SEQ ID NO: 13262

SEQ ID NO: 15383 - protein, 483 aa, Staphylococcus aureus 150211/pool 1; identical to SEQ ID NO: 13296

SEQ ID NO: 15384 - protein, 202 aa, Staphylococcus aureus 150211/pool 1; identical to SEQ ID NO: 13267

SEQ ID NO: 15385 - protein, 308 aa, Staphylococcus aureus 150211/pool 1; identical to SEQ ID NO: 13262

SEQ ID NO: 15386 - protein, 483 aa, Staphylococcus aureus 16(11S1S4-09); identical to SEQ ID NO: 13296

SEQ ID NO: 15387 - protein, 202 aa, Staphylococcus aureus 16(11S1S4-09); identical to SEQ ID NO: 13267

SEQ ID NO: 15388 - protein, 308 aa, Staphylococcus aureus 16(11S1S4-09); identical to SEQ ID NO: 13262

SEQ ID NO: 15389 - protein, 483 aa, Staphylococcus aureus 18439-17; identical to SEQ ID NO: 13296

SEQ ID NO: 15390 - protein, 202 aa, Staphylococcus aureus 18439-17; identical to SEQ ID NO: 13267

SEQ ID NO: 15391 - protein, 308 aa, Staphylococcus aureus 18439-17; identical to SEQ ID NO: 13262

SEQ ID NO: 15392 - protein, 483 aa, Staphylococcus aureus 18439-62; identical to SEQ ID NO: 13296

SEQ ID NO: 15393 - protein, 202 aa, Staphylococcus aureus 18439-62; identical to SEQ ID NO: 13267

SEQ ID NO: 15394 - protein, 308 aa, Staphylococcus aureus 18439-62; identical to SEQ ID NO: 13262

SEQ ID NO: 15395 - protein, 483 aa, Staphylococcus aureus 19571; identical to SEQ ID NO: 13296

SEQ ID NO: 15396 - protein, 202 aa, Staphylococcus aureus 19571; identical to SEQ ID NO: 13267

SEQ ID NO: 15397 - protein, 308 aa, Staphylococcus aureus 19571; identical to SEQ ID NO: 13262

SEQ ID NO: 15398 - protein, 483 aa, Staphylococcus aureus 2(04HN_17-03-52-05); identical to SEQ ID NO: 13296

SEQ ID NO: 15399 - protein, 202 aa, Staphylococcus aureus 2(04HN_17-03-52-05); identical to SEQ ID NO: 13267

SEQ ID NO: 15400 - protein, 308 aa, Staphylococcus aureus 2(04HN_17-03-52-05); identical to SEQ ID NO: 13262

SEQ ID NO: 15401 - protein, 483 aa, Staphylococcus aureus 2009-60-561-1; identical to SEQ ID NO: 13296

SEQ ID NO: 15402 - protein, 202 aa, Staphylococcus aureus 2009-60-561-1; identical to SEQ ID NO: 13267

SEQ ID NO: 15403 - protein, 308 aa, Staphylococcus aureus 2009-60-561-1; identical to SEQ ID NO: 13262

SEQ ID NO: 15404 - protein, 483 aa, Staphylococcus aureus 2010-60-1240-1; identical to SEQ ID NO: 13296

SEQ ID NO: 15405 - protein, 202 aa, Staphylococcus aureus 2010-60-1240-1; identical to SEQ ID NO: 13267

SEQ ID NO: 15406 - protein, 308 aa, Staphylococcus aureus 2010-60-1240-1; identical to SEQ ID NO: 13262

SEQ ID NO: 15407 - protein, 483 aa, Staphylococcus aureus 2010-60-6063-29; identical to SEQ ID NO: 13296

SEQ ID NO: 15408 - protein, 202 aa, Staphylococcus aureus 2010-60-6063-29; identical to SEQ ID NO: 13267

SEQ ID NO: 15409 - protein, 308 aa, Staphylococcus aureus 2010-60-6063-29; identical to SEQ ID NO: 13262

SEQ ID NO: 15410 - protein, 483 aa, Staphylococcus aureus 2010-60-6063-39; identical to SEQ ID NO: 13296

SEQ ID NO: 15411 - protein, 202 aa, Staphylococcus aureus 2010-60-6063-39; identical to SEQ ID NO: 13267

SEQ ID NO: 15412 - protein, 308 aa, Staphylococcus aureus 2010-60-6063-39; identical to SEQ ID NO: 13262

SEQ ID NO: 15413 - protein, 375 aa, Staphylococcus aureus 2010-60-6511-39; identical to SEQ ID NO: 13260

SEQ ID NO: 15414 - protein, 202 aa, Staphylococcus aureus 2010-60-6511-39; identical to SEQ ID NO: 13267

SEQ ID NO: 15415 - protein, 308 aa, Staphylococcus aureus 2010-60-6511-39; identical to SEQ ID NO: 13262

SEQ ID NO: 15416 - protein, 483 aa, Staphylococcus aureus 2010-60-7626-19; identical to SEQ ID NO: 13296

SEQ ID NO: 15417 - protein, 202 aa, Staphylococcus aureus 2010-60-7626-19; identical to SEQ ID NO: 13267

SEQ ID NO: 15418 - protein, 308 aa, Staphylococcus aureus 2010-60-7626-19; identical to SEQ ID NO: 13262

SEQ ID NO: 15419 - protein, 483 aa, Staphylococcus aureus 2011-60-1490-31; identical to SEQ ID NO: 13296

SEQ ID NO: 15420 - protein, 202 aa, Staphylococcus aureus 2011-60-1490-31; identical to SEQ ID NO: 13267

SEQ ID NO: 15421 - protein, 308 aa, Staphylococcus aureus 2011-60-1490-31; identical to SEQ ID NO: 13262

SEQ ID NO: 15422 - protein, 483 aa, Staphylococcus aureus 2011-60-2078-5; identical to SEQ ID NO: 13296

SEQ ID NO: 15423 - protein, 202 aa, Staphylococcus aureus 2011-60-2078-5; identical to SEQ ID NO: 13267

SEQ ID NO: 15424 - protein, 308 aa, Staphylococcus aureus 2011-60-2078-5; identical to SEQ ID NO: 13262

SEQ ID NO: 15425 - protein, 483 aa, Staphylococcus aureus 2011-60-2256-5; identical to SEQ ID NO: 13296

SEQ ID NO: 15426 - protein, 202 aa, Staphylococcus aureus 2011-60-2256-5; identical to SEQ ID NO: 13267

SEQ ID NO: 15427 - protein, 308 aa, Staphylococcus aureus 2011-60-2256-5; identical to SEQ ID NO: 13262

SEQ ID NO: 15428 - protein, 483 aa, Staphylococcus aureus 2011-60-2275-1; identical to SEQ ID NO: 13296

SEQ ID NO: 15429 - protein, 202 aa, Staphylococcus aureus 2011-60-2275-1; identical to SEQ ID NO: 13267

SEQ ID NO: 15430 - protein, 308 aa, Staphylococcus aureus 2011-60-2275-1; identical to SEQ ID NO: 13262

SEQ ID NO: 15431 - protein, 483 aa, Staphylococcus aureus 22825; identical to SEQ ID NO: 13296

SEQ ID NO: 15432 - protein, 202 aa, Staphylococcus aureus 22825; identical to SEQ ID NO: 13267

SEQ ID NO: 15433 - protein, 308 aa, Staphylococcus aureus 22825; identical to SEQ ID NO: 13262

SEQ ID NO: 15434 - protein, 483 aa, Staphylococcus aureus 22835; identical to SEQ ID NO: 13296

SEQ ID NO: 15435 - protein, 202 aa, Staphylococcus aureus 22835; identical to SEQ ID NO: 13267

SEQ ID NO: 15436 - protein, 308 aa, Staphylococcus aureus 22835; identical to SEQ ID NO: 13262

SEQ ID NO: 15437 - protein, 483 aa, Staphylococcus aureus 22837; identical to SEQ ID NO: 13296

SEQ ID NO: 15438 - protein, 202 aa, Staphylococcus aureus 22837; identical to SEQ ID NO: 13267

SEQ ID NO: 15439 - protein, 308 aa, Staphylococcus aureus 22837; identical to SEQ ID NO: 13262

SEQ ID NO: 15440 - protein, 483 aa, Staphylococcus aureus 22838; identical to SEQ ID NO: 13296

SEQ ID NO: 15441 - protein, 202 aa, Staphylococcus aureus 22838; identical to SEQ ID NO: 13267

SEQ ID NO: 15442 - protein, 308 aa, Staphylococcus aureus 22838; identical to SEQ ID NO: 13262

SEQ ID NO: 15443 - protein, 483 aa, Staphylococcus aureus 22841; identical to SEQ ID NO: 13296

SEQ ID NO: 15444 - protein, 202 aa, Staphylococcus aureus 22841; identical to SEQ ID NO: 13267

SEQ ID NO: 15445 - protein, 308 aa, Staphylococcus aureus 22841; identical to SEQ ID NO: 13262

SEQ ID NO: 15446 - protein, 483 aa, Staphylococcus aureus 22843; identical to SEQ ID NO: 13296

SEQ ID NO: 15447 - protein, 202 aa, Staphylococcus aureus 22843; identical to SEQ ID NO: 13267

SEQ ID NO: 15448 - protein, 308 aa, Staphylococcus aureus 22843; identical to SEQ ID NO: 13262

SEQ ID NO: 15449 - protein, 483 aa, Staphylococcus aureus 22846; identical to SEQ ID NO: 13296

SEQ ID NO: 15450 - protein, 202 aa, Staphylococcus aureus 22846; identical to SEQ ID NO: 13267

SEQ ID NO: 15451 - protein, 308 aa, Staphylococcus aureus 22846; identical to SEQ ID NO: 13262

SEQ ID NO: 15452 - protein, 483 aa, Staphylococcus aureus 22P79; identical to SEQ ID NO: 13296

SEQ ID NO: 15453 - protein, 202 aa, Staphylococcus aureus 22P79; identical to SEQ ID NO: 13267

SEQ ID NO: 15454 - protein, 308 aa, Staphylococcus aureus 22P79; identical to SEQ ID NO: 13262

SEQ ID NO: 15455 - protein, 483 aa, Staphylococcus aureus 23237; identical to SEQ ID NO: 13296

SEQ ID NO: 15456 - protein, 202 aa, Staphylococcus aureus 23237; identical to SEQ ID NO: 13267

SEQ ID NO: 15457 - protein, 308 aa, Staphylococcus aureus 23237; identical to SEQ ID NO: 13262

SEQ ID NO: 15458 - protein, 483 aa, Staphylococcus aureus 2393-15; identical to SEQ ID NO: 13296

SEQ ID NO: 15459 - protein, 202 aa, Staphylococcus aureus 2393-15; identical to SEQ ID NO: 13267

SEQ ID NO: 15460 - protein, 308 aa, Staphylococcus aureus 2393-15; identical to SEQ ID NO: 13262

SEQ ID NO: 15461 - protein, 483 aa, Staphylococcus aureus 2393-19; identical to SEQ ID NO: 13296

SEQ ID NO: 15462 - protein, 202 aa, Staphylococcus aureus 2393-19; identical to SEQ ID NO: 13267

SEQ ID NO: 15463 - protein, 308 aa, Staphylococcus aureus 2393-19; identical to SEQ ID NO: 13262

SEQ ID NO: 15464 - protein, 483 aa, Staphylococcus aureus 25(2889); identical to SEQ ID NO: 13296

SEQ ID NO: 15465 - protein, 202 aa, Staphylococcus aureus 25(2889); identical to SEQ ID NO: 13267

SEQ ID NO: 15466 - protein, 308 aa, Staphylococcus aureus 25(2889); identical to SEQ ID NO: 13262

SEQ ID NO: 15467 - protein, 483 aa, Staphylococcus aureus 27999-3; identical to SEQ ID NO: 13296

SEQ ID NO: 15468 - protein, 202 aa, Staphylococcus aureus 27999-3; identical to SEQ ID NO: 13267

SEQ ID NO: 15469 - protein, 308 aa, Staphylococcus aureus 27999-3; identical to SEQ ID NO: 13262

SEQ ID NO: 15470 - protein, 483 aa, Staphylococcus aureus 36P1
MTIDKKKFIEKYVKALESNTAAIFAGAGLSCGAGYVNWKTLLNEAAEELELNIDKEEHDLVGLAQHYINKKRSRGNLNTVIMEQFSTRAELTENHKLLAKLPIDTYWTTNYDCMIEKALDSEGRIVDVKRNQNQLTVSVADKDATVYKMHGDIDSIDKIILTRDDYEKYNLTHPKFREILEGDLLSKTFLFIGFSFTDLNISYILSRIRLVLEDNTRPHYCILKEVEEKEYDNTEEFMYAKIKQQLHIEDLSRFSIETLLVKDYIEITEILESIYKRYRRKTIFISGSATEYLPFNSETGKYFLHQLSKKLVENDFKLVTGFGLGVGSYVINGVADYINSNKKSKLQNHLNILPFSQDSSGDLDLKEVWKKNRLEMISECGMALFLFGNKEKDGKIVLADGLEEEYKIAERQELVRLPINVTGYKTKNLSEQYNEEINIQFKEKILKMYNEINEYKCDFSNKQSIDELVQKIVNLVIEIKKTK

SEQ ID NO: 15471 - protein, 202 aa, Staphylococcus aureus 36P1; identical to SEQ ID NO: 13267

SEQ ID NO: 15472 - protein, 308 aa, Staphylococcus aureus 36P1; identical to SEQ ID NO: 13262

SEQ ID NO: 15473 - protein, 483 aa, Staphylococcus aureus 36P5; identical to SEQ ID NO: 15470

SEQ ID NO: 15474 - protein, 202 aa, Staphylococcus aureus 36P5; identical to SEQ ID NO: 13267

SEQ ID NO: 15475 - protein, 308 aa, Staphylococcus aureus 36P5; identical to SEQ ID NO: 13262

SEQ ID NO: 15476 - protein, 483 aa, Staphylococcus aureus 37(18S2S5-05); identical to SEQ ID NO: 13296

SEQ ID NO: 15477 - protein, 202 aa, Staphylococcus aureus 37(18S2S5-05); identical to SEQ ID NO: 13267

SEQ ID NO: 15478 - protein, 308 aa, Staphylococcus aureus 37(18S2S5-05); identical to SEQ ID NO: 13262

SEQ ID NO: 15479 - protein, 483 aa, Staphylococcus aureus 40P10; identical to SEQ ID NO: 13296

SEQ ID NO: 15480 - protein, 202 aa, Staphylococcus aureus 40P10; identical to SEQ ID NO: 13267

SEQ ID NO: 15481 - protein, 308 aa, Staphylococcus aureus 40P10; identical to SEQ ID NO: 13262

SEQ ID NO: 15482 - protein, 483 aa, Staphylococcus aureus 40P5 1_1; identical to SEQ ID NO: 13296

SEQ ID NO: 15483 - protein, 202 aa, Staphylococcus aureus 40P5 1_1; identical to SEQ ID NO: 13267

SEQ ID NO: 15484 - protein, 308 aa, Staphylococcus aureus 40P5 1_1; identical to SEQ ID NO: 13262

SEQ ID NO: 15485 - protein, 483 aa, Staphylococcus aureus 43P3; identical to SEQ ID NO: 13296

SEQ ID NO: 15486 - protein, 202 aa, Staphylococcus aureus 43P3; identical to SEQ ID NO: 13267

SEQ ID NO: 15487 - protein, 308 aa, Staphylococcus aureus 43P3; identical to SEQ ID NO: 13262

SEQ ID NO: 15488 - protein, 483 aa, Staphylococcus aureus 43P8; identical to SEQ ID NO: 13296

SEQ ID NO: 15489 - protein, 202 aa, Staphylococcus aureus 43P8; identical to SEQ ID NO: 13267

SEQ ID NO: 15490 - protein, 308 aa, Staphylococcus aureus 43P8; identical to SEQ ID NO: 13262

SEQ ID NO: 15491 - protein, 483 aa, Staphylococcus aureus 44(2608); identical to SEQ ID NO: 13296

SEQ ID NO: 15492 - protein, 202 aa, Staphylococcus aureus 44(2608); identical to SEQ ID NO: 13267

SEQ ID NO: 15493 - protein, 308 aa, Staphylococcus aureus 44(2608); identical to SEQ ID NO: 13262

SEQ ID NO: 15494 - protein, 483 aa, Staphylococcus aureus 47P5; identical to SEQ ID NO: 13296

SEQ ID NO: 15495 - protein, 202 aa, Staphylococcus aureus 47P5; identical to SEQ ID NO: 13267

SEQ ID NO: 15496 - protein, 308 aa, Staphylococcus aureus 47P5; identical to SEQ ID NO: 13262

SEQ ID NO: 15497 - protein, 483 aa, Staphylococcus aureus 47P9; identical to SEQ ID NO: 13296

SEQ ID NO: 15498 - protein, 202 aa, Staphylococcus aureus 47P9; identical to SEQ ID NO: 13267

SEQ ID NO: 15499 - protein, 308 aa, Staphylococcus aureus 47P9; identical to SEQ ID NO: 13262

SEQ ID NO: 15500 - protein, 483 aa, Staphylococcus aureus 5670-1; identical to SEQ ID NO: 13296

SEQ ID NO: 15501 - protein, 202 aa, Staphylococcus aureus 5670-1; identical to SEQ ID NO: 13267

SEQ ID NO: 15502 - protein, 308 aa, Staphylococcus aureus 5670-1; identical to SEQ ID NO: 13262

SEQ ID NO: 15503 - protein, 483 aa, Staphylococcus aureus 56824-10; identical to SEQ ID NO: 13296

SEQ ID NO: 15504 - protein, 202 aa, Staphylococcus aureus 56824-10; identical to SEQ ID NO: 13267

SEQ ID NO: 15505 - protein, 308 aa, Staphylococcus aureus 56824-10; identical to SEQ ID NO: 13262

SEQ ID NO: 15506 - protein, 483 aa, Staphylococcus aureus 56824-15; identical to SEQ ID NO: 13296

SEQ ID NO: 15507 - protein, 202 aa, Staphylococcus aureus 56824-15; identical to SEQ ID NO: 13267

SEQ ID NO: 15508 - protein, 308 aa, Staphylococcus aureus 56824-15; identical to SEQ ID NO: 13262

SEQ ID NO: 15509 - protein, 483 aa, Staphylococcus aureus 56824-2; identical to SEQ ID NO: 13296

SEQ ID NO: 15510 - protein, 202 aa, Staphylococcus aureus 56824-2; identical to SEQ ID NO: 13267

SEQ ID NO: 15511 - protein, 308 aa, Staphylococcus aureus 56824-2; identical to SEQ ID NO: 13262

SEQ ID NO: 15512 - protein, 483 aa, Staphylococcus aureus 56824-21; identical to SEQ ID NO: 13296

SEQ ID NO: 15513 - protein, 202 aa, Staphylococcus aureus 56824-21; identical to SEQ ID NO: 13267

SEQ ID NO: 15514 - protein, 308 aa, Staphylococcus aureus 56824-21; identical to SEQ ID NO: 13262

SEQ ID NO: 15515 - protein, 483 aa, Staphylococcus aureus 56824-5; identical to SEQ ID NO: 13296

SEQ ID NO: 15516 - protein, 202 aa, Staphylococcus aureus 56824-5; identical to SEQ ID NO: 13267

SEQ ID NO: 15517 - protein, 308 aa, Staphylococcus aureus 56824-5; identical to SEQ ID NO: 13262

SEQ ID NO: 15518 - protein, 483 aa, Staphylococcus aureus 56824-7; identical to SEQ ID NO: 13296

SEQ ID NO: 15519 - protein, 202 aa, Staphylococcus aureus 56824-7; identical to SEQ ID NO: 13267

SEQ ID NO: 15520 - protein, 308 aa, Staphylococcus aureus 56824-7; identical to SEQ ID NO: 13262

SEQ ID NO: 15521 - protein, 493 aa, Staphylococcus aureus 6665-5
MTIDKKKFIEKYVKALESNTAAIFAGAGLSCGAGYVNWKTLLNEAAEELELNIDKEEHDLVGLAQHYINKKRSRGNLNTVIMEQFSTRAELTENHKLLAKLPIDTYWTTNYDCMIEKALDSEGRIVDVKRNQNQLTVSVADKDATVYKMHGDIDSIDKIILTRDDYEKYNLTHPKFREILEGDLLSKTFLFIGFSFTDPNISYILSRIRLVLEDNTRPHYCILKEVEEKEYDNTEEFMYAKIKQQLHIEDLSRFSIETLLVKDYIEITEILESIYKRYRRKTIFISGSATEYLPFNSETGKYFLHQLSKKLVENDFKLVTGFGLGVGSYVINGVADYINSNKKSKLQNHLNILPFSQDSSGDLDLKEVWKKNRLEMISECGMALFLFGNKEKDGKIVLADGLEEEYKIAERQELVRLPINVTGYKTKNLSEQYNEEINIQFKEKILKMYNEINEYKCDFSNKQSIDELVQKIVNLVIEIKKQNNSWGFNALER

SEQ ID NO: 15522 - protein, 202 aa, Staphylococcus aureus 6665-5; identical to SEQ ID NO: 13267

SEQ ID NO: 15523 - protein, 308 aa, Staphylococcus aureus 6665-5; identical to SEQ ID NO: 13262

SEQ ID NO: 15524 - protein, 483 aa, Staphylococcus aureus 75495-3; identical to SEQ ID NO: 13296

SEQ ID NO: 15525 - protein, 202 aa, Staphylococcus aureus 75495-3; identical to SEQ ID NO: 13267

SEQ ID NO: 15526 - protein, 308 aa, Staphylococcus aureus 75495-3; identical to SEQ ID NO: 13262

SEQ ID NO: 15527 - protein, 483 aa, Staphylococcus aureus 76669-6; identical to SEQ ID NO: 13296

SEQ ID NO: 15528 - protein, 202 aa, Staphylococcus aureus 76669-6; identical to SEQ ID NO: 13267

SEQ ID NO: 15529 - protein, 308 aa, Staphylococcus aureus 76669-6; identical to SEQ ID NO: 13262

SEQ ID NO: 15530 - protein, 483 aa, Staphylococcus aureus 81070; identical to SEQ ID NO: 13296

SEQ ID NO: 15531 - protein, 202 aa, Staphylococcus aureus 81070; identical to SEQ ID NO: 13267

SEQ ID NO: 15532 - protein, 308 aa, Staphylococcus aureus 81070; identical to SEQ ID NO: 13262

SEQ ID NO: 15533 - protein, 483 aa, Staphylococcus aureus 84069-2; identical to SEQ ID NO: 13296

SEQ ID NO: 15534 - protein, 202 aa, Staphylococcus aureus 84069-2; identical to SEQ ID NO: 13267

SEQ ID NO: 15535 - protein, 308 aa, Staphylococcus aureus 84069-2; identical to SEQ ID NO: 13262

SEQ ID NO: 15536 - protein, 483 aa, Staphylococcus aureus 86770-7; identical to SEQ ID NO: 13296

SEQ ID NO: 15537 - protein, 202 aa, Staphylococcus aureus 86770-7; identical to SEQ ID NO: 13267

SEQ ID NO: 15538 - protein, 308 aa, Staphylococcus aureus 86770-7; identical to SEQ ID NO: 13262

SEQ ID NO: 15539 - protein, 483 aa, Staphylococcus aureus 87807-1; identical to SEQ ID NO: 13296

SEQ ID NO: 15540 - protein, 202 aa, Staphylococcus aureus 87807-1; identical to SEQ ID NO: 13267

SEQ ID NO: 15541 - protein, 308 aa, Staphylococcus aureus 87807-1; identical to SEQ ID NO: 13262

SEQ ID NO: 15542 - protein, 483 aa, Staphylococcus aureus 87807-11; identical to SEQ ID NO: 13296

SEQ ID NO: 15543 - protein, 202 aa, Staphylococcus aureus 87807-11; identical to SEQ ID NO: 13267

SEQ ID NO: 15544 - protein, 308 aa, Staphylococcus aureus 87807-11; identical to SEQ ID NO: 13262

SEQ ID NO: 15545 - protein, 483 aa, Staphylococcus aureus 87807-12; identical to SEQ ID NO: 13296

SEQ ID NO: 15546 - protein, 202 aa, Staphylococcus aureus 87807-12; identical to SEQ ID NO: 13267

SEQ ID NO: 15547 - protein, 308 aa, Staphylococcus aureus 87807-12; identical to SEQ ID NO: 13262

SEQ ID NO: 15548 - protein, 483 aa, Staphylococcus aureus 87807-16; identical to SEQ ID NO: 13296

SEQ ID NO: 15549 - protein, 202 aa, Staphylococcus aureus 87807-16; identical to SEQ ID NO: 13267

SEQ ID NO: 15550 - protein, 308 aa, Staphylococcus aureus 87807-16; identical to SEQ ID NO: 13262

SEQ ID NO: 15551 - protein, 483 aa, Staphylococcus aureus 87807-9
MTIDKKKFIEKYVKALESNTAAIFAGAGLSCGAGYVNWKTLLNEAAEELELNIDKEEHDLVGLAQHYINKKRSRGNLNTVIMEQFSTRAELTENHKLLAKLPIDTYWTTNYDCMIEKALDSEGRIVDVKRNQNQLTVSVADKDATVYKMHGDIDSIDKIILTRDDYEKYNLTHPKFREILEGDLLSKTFLFIAFSFTDPNISYILSRIRLVLEDNTRPHYCILKEVEEKEYDNTEEFMYAKIKQQLHIEDLSRFSIETLLVKDYIEITEILESIYKRYRRKTIFISGSATEYLPFNSETGKYFLHQLSKKLVENDFKLVTGFGLGVGSYVINGVADYINSNKKSKLQNHLNILPFSQDSSGDLDLKEVWKKNRLEMISECGMALFLFGNKEKDGKIVLADGLEEEYKIAERQELVRLPINVTGYKTKNLSEQYNEEINIQFKEKILKMYNEINEYKCDFSNKQSIDELVQKIVNLVIEIKKTK

SEQ ID NO: 15552 - protein, 202 aa, Staphylococcus aureus 87807-9; identical to SEQ ID NO: 13267

SEQ ID NO: 15553 - protein, 308 aa, Staphylococcus aureus 87807-9; identical to SEQ ID NO: 13262

SEQ ID NO: 15554 - protein, 483 aa, Staphylococcus aureus 88088-1; identical to SEQ ID NO: 13296

SEQ ID NO: 15555 - protein, 202 aa, Staphylococcus aureus 88088-1; identical to SEQ ID NO: 13267

SEQ ID NO: 15556 - protein, 308 aa, Staphylococcus aureus 88088-1; identical to SEQ ID NO: 13262

SEQ ID NO: 15557 - protein, 483 aa, Staphylococcus aureus 88088-2; identical to SEQ ID NO: 13296

SEQ ID NO: 15558 - protein, 202 aa, Staphylococcus aureus 88088-2; identical to SEQ ID NO: 13267

SEQ ID NO: 15559 - protein, 308 aa, Staphylococcus aureus 88088-2; identical to SEQ ID NO: 13262

SEQ ID NO: 15560 - protein, 483 aa, Staphylococcus aureus 9P9; identical to SEQ ID NO: 13296

SEQ ID NO: 15561 - protein, 202 aa, Staphylococcus aureus 9P9; identical to SEQ ID NO: 13267

SEQ ID NO: 15562 - protein, 308 aa, Staphylococcus aureus 9P9; identical to SEQ ID NO: 13262

SEQ ID NO: 15563 - protein, 483 aa, Staphylococcus aureus BG407; identical to SEQ ID NO: 13296

SEQ ID NO: 15564 - protein, 202 aa, Staphylococcus aureus BG407; identical to SEQ ID NO: 13267

SEQ ID NO: 15565 - protein, 308 aa, Staphylococcus aureus BG407; identical to SEQ ID NO: 13262

SEQ ID NO: 15566 - protein, 483 aa, Staphylococcus aureus C0637; identical to SEQ ID NO: 13296

SEQ ID NO: 15567 - protein, 202 aa, Staphylococcus aureus C0637; identical to SEQ ID NO: 13267

SEQ ID NO: 15568 - protein, 308 aa, Staphylococcus aureus C0637; identical to SEQ ID NO: 14978

SEQ ID NO: 15569 - protein, 483 aa, Staphylococcus aureus C1655; identical to SEQ ID NO: 13296

SEQ ID NO: 15570 - protein, 202 aa, Staphylococcus aureus C1655; identical to SEQ ID NO: 13267

SEQ ID NO: 15571 - protein, 308 aa, Staphylococcus aureus C1655; identical to SEQ ID NO: 13262

SEQ ID NO: 15572 - protein, 483 aa, Staphylococcus aureus C1673; identical to SEQ ID NO: 13296

SEQ ID NO: 15573 - protein, 202 aa, Staphylococcus aureus C1673; identical to SEQ ID NO: 13267

SEQ ID NO: 15574 - protein, 308 aa, Staphylococcus aureus C1673; identical to SEQ ID NO: 13262

SEQ ID NO: 15575 - protein, 483 aa, Staphylococcus aureus C1842; identical to SEQ ID NO: 13296

SEQ ID NO: 15576 - protein, 202 aa, Staphylococcus aureus C1842; identical to SEQ ID NO: 13267

SEQ ID NO: 15577 - protein, 308 aa, Staphylococcus aureus C1842; identical to SEQ ID NO: 13262

SEQ ID NO: 15578 - protein, 483 aa, Staphylococcus aureus C1891; identical to SEQ ID NO: 13296

SEQ ID NO: 15579 - protein, 202 aa, Staphylococcus aureus C1891; identical to SEQ ID NO: 13267

SEQ ID NO: 15580 - protein, 308 aa, Staphylococcus aureus C1891; identical to SEQ ID NO: 13262

SEQ ID NO: 15581 - protein, 483 aa, Staphylococcus aureus C1894; identical to SEQ ID NO: 13296

SEQ ID NO: 15582 - protein, 202 aa, Staphylococcus aureus C1894; identical to SEQ ID NO: 13267

SEQ ID NO: 15583 - protein, 308 aa, Staphylococcus aureus C1894; identical to SEQ ID NO: 13262

SEQ ID NO: 15584 - protein, 375 aa, Staphylococcus aureus C2549; identical to SEQ ID NO: 13260

SEQ ID NO: 15585 - protein, 202 aa, Staphylococcus aureus C2549; identical to SEQ ID NO: 13261

SEQ ID NO: 15586 - protein, 308 aa, Staphylococcus aureus C2549; identical to SEQ ID NO: 13262

SEQ ID NO: 15587 - protein, 375 aa, Staphylococcus aureus C2679; identical to SEQ ID NO: 13260

SEQ ID NO: 15588 - protein, 202 aa, Staphylococcus aureus C2679; identical to SEQ ID NO: 13261

SEQ ID NO: 15589 - protein, 308 aa, Staphylococcus aureus C2679; identical to SEQ ID NO: 13262

SEQ ID NO: 15590 - protein, 375 aa, Staphylococcus aureus C2706; identical to SEQ ID NO: 13260

SEQ ID NO: 15591 - protein, 202 aa, Staphylococcus aureus C2706; identical to SEQ ID NO: 13267

SEQ ID NO: 15592 - protein, 308 aa, Staphylococcus aureus C2706; identical to SEQ ID NO: 13262

SEQ ID NO: 15593 - protein, 483 aa, Staphylococcus aureus C2928; identical to SEQ ID NO: 13296

SEQ ID NO: 15594 - protein, 202 aa, Staphylococcus aureus C2928; identical to SEQ ID NO: 13267

SEQ ID NO: 15595 - protein, 308 aa, Staphylococcus aureus C2928; identical to SEQ ID NO: 13262

SEQ ID NO: 15596 - protein, 493 aa, Staphylococcus aureus C2930; identical to SEQ ID NO: 15521

SEQ ID NO: 15597 - protein, 202 aa, Staphylococcus aureus C2930; identical to SEQ ID NO: 13267

SEQ ID NO: 15598 - protein, 308 aa, Staphylococcus aureus C2930; identical to SEQ ID NO: 13262

SEQ ID NO: 15599 - protein, 493 aa, Staphylococcus aureus C2942; identical to SEQ ID NO: 15521

SEQ ID NO: 15600 - protein, 202 aa, Staphylococcus aureus C2942
MARKTFISYKYSEAKDLRDKIVESLGEDAKYYQGETSDSPDMSDRITEYIKKELKNKIYSTSVTIVVISPNMKESNWIDWEIEYSVKQMKRGDRTSSTNGIVGVVMKHNGDYSWLRNSVINSDGHTAIHTDNSYLYDIIVKNRFNQEPIEYTCDECKNIDALTGSFISLVEEDEFLGNPTKYIENAYEKSKKATNYNICRRK

SEQ ID NO: 15601 - protein, 308 aa, Staphylococcus aureus C2942; identical to SEQ ID NO: 13262

SEQ ID NO: 15602 - protein, 483 aa, Staphylococcus aureus C3489; identical to SEQ ID NO: 13296

SEQ ID NO: 15603 - protein, 202 aa, Staphylococcus aureus C3489; identical to SEQ ID NO: 13267

SEQ ID NO: 15604 - protein, 72 aa, Staphylococcus aureus C3489; identical to SEQ ID NO: 14720

SEQ ID NO: 15605 - protein, 483 aa, Staphylococcus aureus C3672; identical to SEQ ID NO: 13296

SEQ ID NO: 15606 - protein, 202 aa, Staphylococcus aureus C3672; identical to SEQ ID NO: 13267

SEQ ID NO: 15607 - protein, 308 aa, Staphylococcus aureus C3672; identical to SEQ ID NO: 13262

SEQ ID NO: 15608 - protein, 483 aa, Staphylococcus aureus C3865; identical to SEQ ID NO: 13296

SEQ ID NO: 15609 - protein, 202 aa, Staphylococcus aureus C3865; identical to SEQ ID NO: 13267

SEQ ID NO: 15610 - protein, 308 aa, Staphylococcus aureus C3865; identical to SEQ ID NO: 13262

SEQ ID NO: 15611 - protein, 375 aa, Staphylococcus aureus C3965; identical to SEQ ID NO: 13260

SEQ ID NO: 15612 - protein, 202 aa, Staphylococcus aureus C3965; identical to SEQ ID NO: 13261

SEQ ID NO: 15613 - protein, 308 aa, Staphylococcus aureus C3965; identical to SEQ ID NO: 13262

SEQ ID NO: 15614 - protein, 483 aa, Staphylococcus aureus C4151; identical to SEQ ID NO: 13296

SEQ ID NO: 15615 - protein, 202 aa, Staphylococcus aureus C4151; identical to SEQ ID NO: 13267

SEQ ID NO: 15616 - protein, 308 aa, Staphylococcus aureus C4151; identical to SEQ ID NO: 13262

SEQ ID NO: 15617 - protein, 483 aa, Staphylococcus aureus C4155; identical to SEQ ID NO: 13296

SEQ ID NO: 15618 - protein, 202 aa, Staphylococcus aureus C4155; identical to SEQ ID NO: 13267

SEQ ID NO: 15619 - protein, 308 aa, Staphylococcus aureus C4155; identical to SEQ ID NO: 13262

SEQ ID NO: 15620 - protein, 483 aa, Staphylococcus aureus C4668; identical to SEQ ID NO: 13296

SEQ ID NO: 15621 - protein, 202 aa, Staphylococcus aureus C4668; identical to SEQ ID NO: 13267

SEQ ID NO: 15622 - protein, 308 aa, Staphylococcus aureus C4668; identical to SEQ ID NO: 13262

SEQ ID NO: 15623 - protein, 375 aa, Staphylococcus aureus C5086; identical to SEQ ID NO: 13260

SEQ ID NO: 15624 - protein, 202 aa, Staphylococcus aureus C5086; identical to SEQ ID NO: 13261

SEQ ID NO: 15625 - protein, 308 aa, Staphylococcus aureus C5086; identical to SEQ ID NO: 13262

SEQ ID NO: 15626 - protein, 483 aa, Staphylococcus aureus C5453; identical to SEQ ID NO: 13296

SEQ ID NO: 15627 - protein, 202 aa, Staphylococcus aureus C5453; identical to SEQ ID NO: 13267

SEQ ID NO: 15628 - protein, 308 aa, Staphylococcus aureus C5453; identical to SEQ ID NO: 13262

SEQ ID NO: 15629 - protein, 483 aa, Staphylococcus aureus Chi-10; identical to SEQ ID NO: 13296

SEQ ID NO: 15630 - protein, 202 aa, Staphylococcus aureus Chi-10; identical to SEQ ID NO: 13267

SEQ ID NO: 15631 - protein, 308 aa, Staphylococcus aureus Chi-10; identical to SEQ ID NO: 13262

SEQ ID NO: 15632 - protein, 483 aa, Staphylococcus aureus Chi-4; identical to SEQ ID NO: 13296

SEQ ID NO: 15633 - protein, 202 aa, Staphylococcus aureus Chi-4; identical to SEQ ID NO: 13267

SEQ ID NO: 15634 - protein, 308 aa, Staphylococcus aureus Chi-4; identical to SEQ ID NO: 13262

SEQ ID NO: 15635 - protein, 483 aa, Staphylococcus aureus Chi-8; identical to SEQ ID NO: 13296

SEQ ID NO: 15636 - protein, 202 aa, Staphylococcus aureus Chi-8; identical to SEQ ID NO: 13267

SEQ ID NO: 15637 - protein, 308 aa, Staphylococcus aureus Chi-8; identical to SEQ ID NO: 13262

SEQ ID NO: 15638 - protein, 483 aa, Staphylococcus aureus DICM09/00997-9HST2; identical to SEQ ID NO: 13296

SEQ ID NO: 15639 - protein, 202 aa, Staphylococcus aureus DICM09/00997-9HST2; identical to SEQ ID NO: 13267

SEQ ID NO: 15640 - protein, 308 aa, Staphylococcus aureus DICM09/00997-9HST2; identical to SEQ ID NO: 13262

SEQ ID NO: 15641 - protein, 483 aa, Staphylococcus aureus DICM09/01587-13HST; identical to SEQ ID NO: 13296

SEQ ID NO: 15642 - protein, 202 aa, Staphylococcus aureus DICM09/01587-13HST; identical to SEQ ID NO: 13267

SEQ ID NO: 15643 - protein, 308 aa, Staphylococcus aureus DICM09/01587-13HST; identical to SEQ ID NO: 13262

SEQ ID NO: 15644 - protein, 483 aa, Staphylococcus aureus FP_N239; identical to SEQ ID NO: 13296

SEQ ID NO: 15645 - protein, 202 aa, Staphylococcus aureus FP_N239; identical to SEQ ID NO: 13267

SEQ ID NO: 15646 - protein, 308 aa, Staphylococcus aureus FP_N239; identical to SEQ ID NO: 13262

SEQ ID NO: 15647 - protein, 483 aa, Staphylococcus aureus FP_N5203 OX; identical to SEQ ID NO: 13296

SEQ ID NO: 15648 - protein, 202 aa, Staphylococcus aureus FP_N5203 OX; identical to SEQ ID NO: 13267

SEQ ID NO: 15649 - protein, 308 aa, Staphylococcus aureus FP_N5203 OX; identical to SEQ ID NO: 13262

SEQ ID NO: 15650 - protein, 483 aa, Staphylococcus aureus FP_N5208 OX; identical to SEQ ID NO: 13296

SEQ ID NO: 15651 - protein, 202 aa, Staphylococcus aureus FP_N5208 OX; identical to SEQ ID NO: 13267

SEQ ID NO: 15652 - protein, 308 aa, Staphylococcus aureus FP_N5208 OX; identical to SEQ ID NO: 13262

SEQ ID NO: 15653 - protein, 483 aa, Staphylococcus aureus GD2010-052; identical to SEQ ID NO: 13296

SEQ ID NO: 15654 - protein, 202 aa, Staphylococcus aureus GD2010-052; identical to SEQ ID NO: 13267

SEQ ID NO: 15655 - protein, 308 aa, Staphylococcus aureus GD2010-052; identical to SEQ ID NO: 13262

SEQ ID NO: 15656 - protein, 483 aa, Staphylococcus aureus GD2010-061; identical to SEQ ID NO: 13296

SEQ ID NO: 15657 - protein, 202 aa, Staphylococcus aureus GD2010-061; identical to SEQ ID NO: 13267

SEQ ID NO: 15658 - protein, 308 aa, Staphylococcus aureus GD2010-061; identical to SEQ ID NO: 13262

SEQ ID NO: 15659 - protein, 483 aa, Staphylococcus aureus GD2010-090; identical to SEQ ID NO: 13296

SEQ ID NO: 15660 - protein, 202 aa, Staphylococcus aureus GD2010-090; identical to SEQ ID NO: 13267

SEQ ID NO: 15661 - protein, 308 aa, Staphylococcus aureus GD2010-090; identical to SEQ ID NO: 13262

SEQ ID NO: 15662 - protein, 102 aa, Staphylococcus aureus GD2010-102
MALFLFGNKEKDGKIVLADGLEEEYKIAERQELVRLPINVTGYKTKNLSEQYNEEINIQFKEKILKMYNEINEYKCDFSNKQSIDELVQKIVNLVIEIKKTK

SEQ ID NO: 15663 - protein, 202 aa, Staphylococcus aureus GD2010-102; identical to SEQ ID NO: 13267

SEQ ID NO: 15664 - protein, 308 aa, Staphylococcus aureus GD2010-102; identical to SEQ ID NO: 13262

SEQ ID NO: 15665 - protein, 483 aa, Staphylococcus aureus GD2010-107; identical to SEQ ID NO: 13296

SEQ ID NO: 15666 - protein, 202 aa, Staphylococcus aureus GD2010-107; identical to SEQ ID NO: 13267

SEQ ID NO: 15667 - protein, 308 aa, Staphylococcus aureus GD2010-107; identical to SEQ ID NO: 13262

SEQ ID NO: 15668 - protein, 483 aa, Staphylococcus aureus GD2010-110; identical to SEQ ID NO: 13296

SEQ ID NO: 15669 - protein, 202 aa, Staphylococcus aureus GD2010-110; identical to SEQ ID NO: 13267

SEQ ID NO: 15670 - protein, 308 aa, Staphylococcus aureus GD2010-110; identical to SEQ ID NO: 13262

SEQ ID NO: 15671 - protein, 483 aa, Staphylococcus aureus GD2010-112; identical to SEQ ID NO: 13296

SEQ ID NO: 15672 - protein, 202 aa, Staphylococcus aureus GD2010-112; identical to SEQ ID NO: 13267

SEQ ID NO: 15673 - protein, 308 aa, Staphylococcus aureus GD2010-112; identical to SEQ ID NO: 13262

SEQ ID NO: 15674 - protein, 483 aa, Staphylococcus aureus GD2010-115; identical to SEQ ID NO: 13296

SEQ ID NO: 15675 - protein, 202 aa, Staphylococcus aureus GD2010-115; identical to SEQ ID NO: 13267

SEQ ID NO: 15676 - protein, 308 aa, Staphylococcus aureus GD2010-115; identical to SEQ ID NO: 13262

SEQ ID NO: 15677 - protein, 483 aa, Staphylococcus aureus GD2010-131; identical to SEQ ID NO: 13296

SEQ ID NO: 15678 - protein, 202 aa, Staphylococcus aureus GD2010-131; identical to SEQ ID NO: 13267

SEQ ID NO: 15679 - protein, 308 aa, Staphylococcus aureus GD2010-131; identical to SEQ ID NO: 13262

SEQ ID NO: 15680 - protein, 483 aa, Staphylococcus aureus GD2010-147; identical to SEQ ID NO: 13296

SEQ ID NO: 15681 - protein, 202 aa, Staphylococcus aureus GD2010-147; identical to SEQ ID NO: 13267

SEQ ID NO: 15682 - protein, 295 aa, Staphylococcus aureus GD2010-147
MERQQTYKEKAQHLYKVKKIKNRYNTKSAEEYFFSIPQVKYILSAGRMKKHKENYNASEIKIKKAALEKSRKNKNWKIEERLIKAKRYTQKVDPEYLNIYMKAYHKKDITTEEKLEILTELKKFDTENIVRFFRKLNDAEQNKMIRNLAFKYLQDYGHYVKLRKNFKGKKKVYQTERASLDTKKPEDLYNDLTNKNIQSQKVYDIFISHSTKDKKTVEDIIRVFNEQNKTCYCDWTMDQDYLKRKYVGEYTKQVLKARMEQSKMLVLLRTENSVQSDWVSFEIEYFENLKKPIYI

SEQ ID NO: 15683 - protein, 483 aa, Staphylococcus aureus GD2010-155; identical to SEQ ID NO: 13296

SEQ ID NO: 15684 - protein, 202 aa, Staphylococcus aureus GD2010-155; identical to SEQ ID NO: 13267

SEQ ID NO: 15685 - protein, 308 aa, Staphylococcus aureus GD2010-155; identical to SEQ ID NO: 13262

SEQ ID NO: 15686 - protein, 483 aa, Staphylococcus aureus GD2010-158; identical to SEQ ID NO: 13296

SEQ ID NO: 15687 - protein, 202 aa, Staphylococcus aureus GD2010-158; identical to SEQ ID NO: 13267

SEQ ID NO: 15688 - protein, 308 aa, Staphylococcus aureus GD2010-158; identical to SEQ ID NO: 13262

SEQ ID NO: 15689 - protein, 483 aa, Staphylococcus aureus GD2010-168; identical to SEQ ID NO: 13296

SEQ ID NO: 15690 - protein, 202 aa, Staphylococcus aureus GD2010-168; identical to SEQ ID NO: 13267

SEQ ID NO: 15691 - protein, 308 aa, Staphylococcus aureus GD2010-168; identical to SEQ ID NO: 13262

SEQ ID NO: 15692 - protein, 131 aa, Staphylococcus aureus GD2010-177; identical to SEQ ID NO: 14745

SEQ ID NO: 15693 - protein, 202 aa, Staphylococcus aureus GD2010-177; identical to SEQ ID NO: 13267

SEQ ID NO: 15694 - protein, 308 aa, Staphylococcus aureus GD2010-177; identical to SEQ ID NO: 13262

SEQ ID NO: 15695 - protein, 483 aa, Staphylococcus aureus M118-B; identical to SEQ ID NO: 13296

SEQ ID NO: 15696 - protein, 202 aa, Staphylococcus aureus M118-B; identical to SEQ ID NO: 13267

SEQ ID NO: 15697 - protein, 308 aa, Staphylococcus aureus M118-B; identical to SEQ ID NO: 13262

SEQ ID NO: 15698 - protein, 483 aa, Staphylococcus aureus M267-1; identical to SEQ ID NO: 13296

SEQ ID NO: 15699 - protein, 202 aa, Staphylococcus aureus M267-1; identical to SEQ ID NO: 13267

SEQ ID NO: 15700 - protein, 308 aa, Staphylococcus aureus M267-1; identical to SEQ ID NO: 13262

SEQ ID NO: 15701 - protein, 483 aa, Staphylococcus aureus M357; identical to SEQ ID NO: 13296

SEQ ID NO: 15702 - protein, 202 aa, Staphylococcus aureus M357; identical to SEQ ID NO: 13267

SEQ ID NO: 15703 - protein, 308 aa, Staphylococcus aureus M357; identical to SEQ ID NO: 13262

SEQ ID NO: 15704 - protein, 483 aa, Staphylococcus aureus M457-1; identical to SEQ ID NO: 13296

SEQ ID NO: 15705 - protein, 202 aa, Staphylococcus aureus M457-1; identical to SEQ ID NO: 13267

SEQ ID NO: 15706 - protein, 308 aa, Staphylococcus aureus M457-1; identical to SEQ ID NO: 13262

SEQ ID NO: 15707 - protein, 483 aa, Staphylococcus aureus M520-1; identical to SEQ ID NO: 13296

SEQ ID NO: 15708 - protein, 202 aa, Staphylococcus aureus M520-1; identical to SEQ ID NO: 13267

SEQ ID NO: 15709 - protein, 308 aa, Staphylococcus aureus M520-1; identical to SEQ ID NO: 13262

SEQ ID NO: 15710 - protein, 483 aa, Staphylococcus aureus MRSA-118; identical to SEQ ID NO: 13296

SEQ ID NO: 15711 - protein, 202 aa, Staphylococcus aureus MRSA-118; identical to SEQ ID NO: 13267

SEQ ID NO: 15712 - protein, 308 aa, Staphylococcus aureus MRSA-118; identical to SEQ ID NO: 13262

SEQ ID NO: 15713 - protein, 483 aa, Staphylococcus aureus MRSA-136
MTIDKKKFIEKYVKALESNTAAIFAGAGLSCGAGYVNWKTLLNEAAEELELNIDKEEHDLVGLAQHYINKKRSRGNLNTVIMEQFSTRAELTENHKLLAKLPIDTYWTTNYDCMIEKALDSEGRIVDVKRNQNQLTVSVADKDATVYKMHGDIDSIDKIILTRDDYEKYNLTHPKFREILEGDLLSKTFLFIGFSFTDPNISYILSRIRLVLEDNTRPHYCILKEVEEKEYDNTEEFMYAKIKQQLHIEDLSRFSIETLLVKDYIEITEILESIYKRYRRKTIFISGSATEYLPFNSETGKYFLHQLSKKLVENDFKLVTGFGLGVGSCVINGVADYINSNKKSKLQNHLNILPFSQDSSGDLDLKEVWKKNRLEMISECGMALFLFGNKEKDGKIVLADGLEEEYKIAERQELVRLPINVTGYKTKNLSEQYNEEINIQFKEKILKMYNEINEYKCDFSNKQSIDELVQKIVNLVIEIKKTK

SEQ ID NO: 15714 - protein, 202 aa, Staphylococcus aureus MRSA-136; identical to SEQ ID NO: 13267

SEQ ID NO: 15715 - protein, 308 aa, Staphylococcus aureus MRSA-136; identical to SEQ ID NO: 13262

SEQ ID NO: 15716 - protein, 375 aa, Staphylococcus aureus MSSA-93; identical to SEQ ID NO: 13260

SEQ ID NO: 15717 - protein, 202 aa, Staphylococcus aureus MSSA-93
MARKTFISYKYSEAKDLRDKIVESLGEDAKYYQGETSDSPDMSDRITEYIKKELKNKIYSTSVTIVVISPNMKESNWIDWEIEYSVKQMKRGDRTSSTNGVVGVIMKHNGDYSWLRNSVINSDGHTAIHTDNSYLYDIIVKNRFNQEPIEYTCDECKNIDALTGSFISLVEEDEFLGNPTKYIENAYEKSKKATNYNICRRK

SEQ ID NO: 15718 - protein, 308 aa, Staphylococcus aureus MSSA-93; identical to SEQ ID NO: 13262

SEQ ID NO: 15719 - protein, 483 aa, Staphylococcus aureus N0426; identical to SEQ ID NO: 13296

SEQ ID NO: 15720 - protein, 202 aa, Staphylococcus aureus N0426; identical to SEQ ID NO: 13267

SEQ ID NO: 15721 - protein, 308 aa, Staphylococcus aureus N0426; identical to SEQ ID NO: 13262

SEQ ID NO: 15722 - protein, 483 aa, Staphylococcus aureus N1343; identical to SEQ ID NO: 13296

SEQ ID NO: 15723 - protein, 202 aa, Staphylococcus aureus N1343; identical to SEQ ID NO: 13267

SEQ ID NO: 15724 - protein, 308 aa, Staphylococcus aureus N1343; identical to SEQ ID NO: 13262

SEQ ID NO: 15725 - protein, 375 aa, Staphylococcus aureus P0218
MTIDKKKFIEKYVKALESNTAAIFAGAGLSCGAGYVNWKTLLNEAAEELELNIDKEEHDLVGLAQHYINKKRSRGNLNTVIMEQFSTRAELTENHKLLAKLPIDTYWTTNYDCMIEKALDSEGRIVDVKRNQNQLTVSVADKDATVYKMHGDIDSIDKIILTRDDYEKYNLTHPKFREILEGDLLSKTFLFIGFSFTDPNISYILSRIRLVLEYNTRPHYCILKEVEEKEYDNTEEFMYAKIKQQLHIEDLSRFSIETLLVKDYIEITEILESIYKRYRRKTIFISGSATEYLPFNSETGKYFLHQLSKKLVENDFKLVTGFGLGVGSYVINGVADYINSNKKSKLQNHLNILPFSQDSSGDLDLKEVWKKIAWK

SEQ ID NO: 15726 - protein, 202 aa, Staphylococcus aureus P0218; identical to SEQ ID NO: 13267

SEQ ID NO: 15727 - protein, 308 aa, Staphylococcus aureus P0218; identical to SEQ ID NO: 14978

SEQ ID NO: 15728 - protein, 375 aa, Staphylococcus aureus PA11; identical to SEQ ID NO: 13260

SEQ ID NO: 15729 - protein, 202 aa, Staphylococcus aureus PA11; identical to SEQ ID NO: 13261

SEQ ID NO: 15730 - protein, 308 aa, Staphylococcus aureus PA11; identical to SEQ ID NO: 13262

SEQ ID NO: 15731 - protein, 375 aa, Staphylococcus aureus PA57; identical to SEQ ID NO: 13260

SEQ ID NO: 15732 - protein, 202 aa, Staphylococcus aureus PA57; identical to SEQ ID NO: 13261

SEQ ID NO: 15733 - protein, 308 aa, Staphylococcus aureus PA57; identical to SEQ ID NO: 13262

SEQ ID NO: 15734 - protein, 483 aa, Staphylococcus aureus R0353; identical to SEQ ID NO: 13296

SEQ ID NO: 15735 - protein, 202 aa, Staphylococcus aureus R0353; identical to SEQ ID NO: 13267

SEQ ID NO: 15736 - protein, 308 aa, Staphylococcus aureus R0353; identical to SEQ ID NO: 13262

SEQ ID NO: 15737 - protein, 483 aa, Staphylococcus aureus R0357; identical to SEQ ID NO: 13296

SEQ ID NO: 15738 - protein, 202 aa, Staphylococcus aureus R0357; identical to SEQ ID NO: 13267

SEQ ID NO: 15739 - protein, 308 aa, Staphylococcus aureus R0357; identical to SEQ ID NO: 13262

SEQ ID NO: 15740 - protein, 483 aa, Staphylococcus aureus R0487; identical to SEQ ID NO: 13296

SEQ ID NO: 15741 - protein, 202 aa, Staphylococcus aureus R0487; identical to SEQ ID NO: 13267

SEQ ID NO: 15742 - protein, 308 aa, Staphylococcus aureus R0487; identical to SEQ ID NO: 13262

SEQ ID NO: 15743 - protein, 483 aa, Staphylococcus aureus R0545; identical to SEQ ID NO: 13296

SEQ ID NO: 15744 - protein, 202 aa, Staphylococcus aureus R0545; identical to SEQ ID NO: 13267

SEQ ID NO: 15745 - protein, 308 aa, Staphylococcus aureus R0545; identical to SEQ ID NO: 13262

SEQ ID NO: 15746 - protein, 483 aa, Staphylococcus aureus R0611; identical to SEQ ID NO: 13296

SEQ ID NO: 15747 - protein, 202 aa, Staphylococcus aureus R0611; identical to SEQ ID NO: 13267

SEQ ID NO: 15748 - protein, 308 aa, Staphylococcus aureus R0611; identical to SEQ ID NO: 13262

SEQ ID NO: 15749 - protein, 483 aa, Staphylococcus aureus R0615; identical to SEQ ID NO: 13296

SEQ ID NO: 15750 - protein, 202 aa, Staphylococcus aureus R0615; identical to SEQ ID NO: 13267

SEQ ID NO: 15751 - protein, 308 aa, Staphylococcus aureus R0615; identical to SEQ ID NO: 13262

SEQ ID NO: 15752 - protein, 483 aa, Staphylococcus aureus Rd.3; identical to SEQ ID NO: 13296

SEQ ID NO: 15753 - protein, 202 aa, Staphylococcus aureus Rd.3; identical to SEQ ID NO: 13267

SEQ ID NO: 15754 - protein, 308 aa, Staphylococcus aureus Rd.3; identical to SEQ ID NO: 13262

SEQ ID NO: 15755 - protein, 483 aa, Staphylococcus aureus Rd.40; identical to SEQ ID NO: 13296

SEQ ID NO: 15756 - protein, 202 aa, Staphylococcus aureus Rd.40; identical to SEQ ID NO: 13267

SEQ ID NO: 15757 - protein, 308 aa, Staphylococcus aureus Rd.40; identical to SEQ ID NO: 13262

SEQ ID NO: 15758 - protein, 483 aa, Staphylococcus aureus Rd.51; identical to SEQ ID NO: 13296

SEQ ID NO: 15759 - protein, 202 aa, Staphylococcus aureus Rd.51; identical to SEQ ID NO: 13267

SEQ ID NO: 15760 - protein, 308 aa, Staphylococcus aureus Rd.51; identical to SEQ ID NO: 13262

SEQ ID NO: 15761 - protein, 483 aa, Staphylococcus aureus Rd.545; identical to SEQ ID NO: 13296

SEQ ID NO: 15762 - protein, 202 aa, Staphylococcus aureus Rd.545; identical to SEQ ID NO: 13267

SEQ ID NO: 15763 - protein, 308 aa, Staphylococcus aureus Rd.545; identical to SEQ ID NO: 13262

SEQ ID NO: 15764 - protein, 483 aa, Staphylococcus aureus Rd.60; identical to SEQ ID NO: 13296

SEQ ID NO: 15765 - protein, 202 aa, Staphylococcus aureus Rd.60; identical to SEQ ID NO: 13267

SEQ ID NO: 15766 - protein, 308 aa, Staphylococcus aureus Rd.60; identical to SEQ ID NO: 13262

SEQ ID NO: 15767 - protein, 483 aa, Staphylococcus aureus Rd.614; identical to SEQ ID NO: 13296

SEQ ID NO: 15768 - protein, 202 aa, Staphylococcus aureus Rd.614; identical to SEQ ID NO: 13267

SEQ ID NO: 15769 - protein, 308 aa, Staphylococcus aureus Rd.614; identical to SEQ ID NO: 13262

SEQ ID NO: 15770 - protein, 483 aa, Staphylococcus aureus Rd.9; identical to SEQ ID NO: 13296

SEQ ID NO: 15771 - protein, 202 aa, Staphylococcus aureus Rd.9; identical to SEQ ID NO: 13267

SEQ ID NO: 15772 - protein, 308 aa, Staphylococcus aureus Rd.9; identical to SEQ ID NO: 13262

SEQ ID NO: 15773 - protein, 232 aa, Staphylococcus aureus S56_POEL
LLGMFLSLKTLYRKRTVIWPFYFYTIIRTLSIFISGSATEYLPFNSETGKYFLHQLSKKLVENDFKLVTGFGLGVGSYVINGVADYINSNKKSKLQNHLNILPFSQDSSGDLDLKEVWKKNRLEMISECGMALFLFGNKEKDGKIVLADGLEEEYKIAERQELVRLPINVTGYKTKNLSEQYNEEINIQFKEKILKMYNEINEYKCDFSNKQSIDELVQKIVNLVIEIKKTK

SEQ ID NO: 15774 - protein, 202 aa, Staphylococcus aureus S56_POEL; identical to SEQ ID NO: 13267

SEQ ID NO: 15775 - protein, 308 aa, Staphylococcus aureus S56_POEL; identical to SEQ ID NO: 13262

SEQ ID NO: 15776 - protein, 483 aa, Staphylococcus aureus S62_POEL; identical to SEQ ID NO: 13296

SEQ ID NO: 15777 - protein, 202 aa, Staphylococcus aureus S62_POEL; identical to SEQ ID NO: 13267

SEQ ID NO: 15778 - protein, 308 aa, Staphylococcus aureus S62_POEL; identical to SEQ ID NO: 13262

SEQ ID NO: 15779 - protein, 232 aa, Staphylococcus aureus S69_POEL; identical to SEQ ID NO: 15773

SEQ ID NO: 15780 - protein, 202 aa, Staphylococcus aureus S69_POEL; identical to SEQ ID NO: 13267

SEQ ID NO: 15781 - protein, 308 aa, Staphylococcus aureus S69_POEL; identical to SEQ ID NO: 13262

SEQ ID NO: 15782 - protein, 483 aa, Staphylococcus aureus SARM C4155; identical to SEQ ID NO: 13296

SEQ ID NO: 15783 - protein, 202 aa, Staphylococcus aureus SARM C4155; identical to SEQ ID NO: 13267

SEQ ID NO: 15784 - protein, 308 aa, Staphylococcus aureus SARM C4155; identical to SEQ ID NO: 13262

SEQ ID NO: 15785 - protein, 375 aa, Staphylococcus aureus SARM C5621; identical to SEQ ID NO: 13260

SEQ ID NO: 15786 - protein, 202 aa, Staphylococcus aureus SARM C5621; identical to SEQ ID NO: 13267

SEQ ID NO: 15787 - protein, 308 aa, Staphylococcus aureus SARM C5621; identical to SEQ ID NO: 13262

SEQ ID NO: 15788 - protein, 483 aa, Staphylococcus aureus Sau 194; identical to SEQ ID NO: 13296

SEQ ID NO: 15789 - protein, 202 aa, Staphylococcus aureus Sau 194; identical to SEQ ID NO: 13267

SEQ ID NO: 15790 - protein, 308 aa, Staphylococcus aureus Sau 194; identical to SEQ ID NO: 13262

SEQ ID NO: 15791 - protein, 483 aa, Staphylococcus aureus Sau 44; identical to SEQ ID NO: 13296

SEQ ID NO: 15792 - protein, 202 aa, Staphylococcus aureus Sau 44; identical to SEQ ID NO: 13267

SEQ ID NO: 15793 - protein, 165 aa, Staphylococcus aureus Sau 44
MIRNLAFKYLQDYGHYVKLRKNFKGKKKVYQTERASLDTKKPEDLYNDLTNKNIQSQKVYDIFISHSTKDKKTVEDIIRVFNEQNKTCYCDWTMDQDYLKRKYVGEYTKQVLKARMEQSKMLVLLRTENSVQSDWVSFEIEYFENLKKPIYIVESLEELLEAFSD

SEQ ID NO: 15794 - protein, 483 aa, Staphylococcus aureus Sau 46; identical to SEQ ID NO: 13296

SEQ ID NO: 15795 - protein, 202 aa, Staphylococcus aureus Sau 46; identical to SEQ ID NO: 13267

SEQ ID NO: 15796 - protein, 308 aa, Staphylococcus aureus Sau 46; identical to SEQ ID NO: 13262

SEQ ID NO: 15797 - protein, 483 aa, Staphylococcus aureus Sau 47; identical to SEQ ID NO: 13296

SEQ ID NO: 15798 - protein, 202 aa, Staphylococcus aureus Sau 47; identical to SEQ ID NO: 13267

SEQ ID NO: 15799 - protein, 261 aa, Staphylococcus aureus Sau 47
MKKHKENYNASEIKIKKAALEKSRKNKNWKIEERLIKAKRYTQKVDPEYLNIYMKAYHKKDITTEEKLEILTELKKFDTENIVRFFRKLNDAEQNKMIRNLAFKYLQDYGHYVKLRKNFKGKKKVYQTERASLDTKKPEDLYNDLTNKNIQSQKVYDIFISHSTKDKKTVEDIIRVFNEQNKTCYCDWTMDQDYLKRKYVGEYTKQVLKARMEQSKMLVLLRTENSVQSDWVSFEIEYFENLKKPIYIVESLEELLEAFSD

SEQ ID NO: 15800 - protein, 483 aa, Staphylococcus aureus Sau 74; identical to SEQ ID NO: 13296

SEQ ID NO: 15801 - protein, 202 aa, Staphylococcus aureus Sau 74; identical to SEQ ID NO: 13267

SEQ ID NO: 15802 - protein, 308 aa, Staphylococcus aureus Sau 74; identical to SEQ ID NO: 13262

SEQ ID NO: 15803 - protein, 483 aa, Staphylococcus aureus Sau 93; identical to SEQ ID NO: 13296

SEQ ID NO: 15804 - protein, 202 aa, Staphylococcus aureus Sau 93; identical to SEQ ID NO: 13267

SEQ ID NO: 15805 - protein, 308 aa, Staphylococcus aureus Sau 93; identical to SEQ ID NO: 13262

SEQ ID NO: 15806 - protein, 483 aa, Staphylococcus aureus Sau 95; identical to SEQ ID NO: 13296

SEQ ID NO: 15807 - protein, 202 aa, Staphylococcus aureus Sau 95; identical to SEQ ID NO: 13267

SEQ ID NO: 15808 - protein, 308 aa, Staphylococcus aureus Sau 95; identical to SEQ ID NO: 13262

SEQ ID NO: 15809 - protein, 483 aa, Staphylococcus aureus Sau 98; identical to SEQ ID NO: 13296

SEQ ID NO: 15810 - protein, 202 aa, Staphylococcus aureus Sau 98; identical to SEQ ID NO: 13267

SEQ ID NO: 15811 - protein, 308 aa, Staphylococcus aureus Sau 98; identical to SEQ ID NO: 13262

SEQ ID NO: 15812 - protein, 483 aa, Staphylococcus aureus Tur-12; identical to SEQ ID NO: 13296

SEQ ID NO: 15813 - protein, 202 aa, Staphylococcus aureus Tur-12; identical to SEQ ID NO: 13267

SEQ ID NO: 15814 - protein, 308 aa, Staphylococcus aureus Tur-12; identical to SEQ ID NO: 13262

SEQ ID NO: 15815 - protein, 483 aa, Staphylococcus aureus Tur-15; identical to SEQ ID NO: 13296

SEQ ID NO: 15816 - protein, 202 aa, Staphylococcus aureus Tur-15; identical to SEQ ID NO: 13267

SEQ ID NO: 15817 - protein, 308 aa, Staphylococcus aureus Tur-15; identical to SEQ ID NO: 13262

SEQ ID NO: 15818 - protein, 483 aa, Staphylococcus aureus Tur-16; identical to SEQ ID NO: 13296

SEQ ID NO: 15819 - protein, 202 aa, Staphylococcus aureus Tur-16; identical to SEQ ID NO: 13267

SEQ ID NO: 15820 - protein, 308 aa, Staphylococcus aureus Tur-16; identical to SEQ ID NO: 13262

SEQ ID NO: 15821 - protein, 483 aa, Staphylococcus aureus Tur-20; identical to SEQ ID NO: 13296

SEQ ID NO: 15822 - protein, 202 aa, Staphylococcus aureus Tur-20; identical to SEQ ID NO: 13267

SEQ ID NO: 15823 - protein, 308 aa, Staphylococcus aureus Tur-20; identical to SEQ ID NO: 13262

SEQ ID NO: 15824 - protein, 483 aa, Staphylococcus aureus Tur-22; identical to SEQ ID NO: 13296

SEQ ID NO: 15825 - protein, 202 aa, Staphylococcus aureus Tur-22; identical to SEQ ID NO: 13267

SEQ ID NO: 15826 - protein, 308 aa, Staphylococcus aureus Tur-22; identical to SEQ ID NO: 13262

SEQ ID NO: 15827 - protein, 483 aa, Staphylococcus aureus Tur-6; identical to SEQ ID NO: 13296

SEQ ID NO: 15828 - protein, 202 aa, Staphylococcus aureus Tur-6; identical to SEQ ID NO: 13267

SEQ ID NO: 15829 - protein, 308 aa, Staphylococcus aureus Tur-6; identical to SEQ ID NO: 13262

SEQ ID NO: 15830 - protein, 483 aa, Staphylococcus aureus UB 08-116; identical to SEQ ID NO: 13296

SEQ ID NO: 15831 - protein, 202 aa, Staphylococcus aureus UB 08-116; identical to SEQ ID NO: 13267

SEQ ID NO: 15832 - protein, 308 aa, Staphylococcus aureus UB 08-116; identical to SEQ ID NO: 13262

SEQ ID NO: 15833 - protein, 483 aa, Staphylococcus aureus UB 08-172; identical to SEQ ID NO: 13296

SEQ ID NO: 15834 - protein, 202 aa, Staphylococcus aureus UB 08-172; identical to SEQ ID NO: 13267

SEQ ID NO: 15835 - protein, 308 aa, Staphylococcus aureus UB 08-172; identical to SEQ ID NO: 13262

SEQ ID NO: 15836 - protein, 483 aa, Staphylococcus aureus USA_1; identical to SEQ ID NO: 13296

SEQ ID NO: 15837 - protein, 202 aa, Staphylococcus aureus USA_1; identical to SEQ ID NO: 13267

SEQ ID NO: 15838 - protein, 308 aa, Staphylococcus aureus USA_1; identical to SEQ ID NO: 13262

SEQ ID NO: 15839 - protein, 483 aa, Staphylococcus aureus USA_11; identical to SEQ ID NO: 13296

SEQ ID NO: 15840 - protein, 202 aa, Staphylococcus aureus USA_11; identical to SEQ ID NO: 13267

SEQ ID NO: 15841 - protein, 308 aa, Staphylococcus aureus USA_11; identical to SEQ ID NO: 13262

SEQ ID NO: 15842 - protein, 483 aa, Staphylococcus aureus USA_12; identical to SEQ ID NO: 13296

SEQ ID NO: 15843 - protein, 202 aa, Staphylococcus aureus USA_12; identical to SEQ ID NO: 13267

SEQ ID NO: 15844 - protein, 308 aa, Staphylococcus aureus USA_12; identical to SEQ ID NO: 13262

SEQ ID NO: 15845 - protein, 483 aa, Staphylococcus aureus USA_15; identical to SEQ ID NO: 13296

SEQ ID NO: 15846 - protein, 202 aa, Staphylococcus aureus USA_15; identical to SEQ ID NO: 13267

SEQ ID NO: 15847 - protein, 308 aa, Staphylococcus aureus USA_15; identical to SEQ ID NO: 13262

SEQ ID NO: 15848 - protein, 375 aa, Staphylococcus aureus USA_8; identical to SEQ ID NO: 13260

SEQ ID NO: 15849 - protein, 202 aa, Staphylococcus aureus USA_8; identical to SEQ ID NO: 13267

SEQ ID NO: 15850 - protein, 308 aa, Staphylococcus aureus USA_8; identical to SEQ ID NO: 13262

SEQ ID NO: 15851 - protein, 483 aa, Staphylococcus aureus USA_9; identical to SEQ ID NO: 13296

SEQ ID NO: 15852 - protein, 202 aa, Staphylococcus aureus USA_9; identical to SEQ ID NO: 13267

SEQ ID NO: 15853 - protein, 308 aa, Staphylococcus aureus USA_9; identical to SEQ ID NO: 13262

SEQ ID NO: 15854 - protein, 483 aa, Staphylococcus aureus USA7; identical to SEQ ID NO: 13296

SEQ ID NO: 15855 - protein, 202 aa, Staphylococcus aureus USA7; identical to SEQ ID NO: 13267

SEQ ID NO: 15856 - protein, 308 aa, Staphylococcus aureus USA7; identical to SEQ ID NO: 13262

SEQ ID NO: 15857 - protein, 483 aa, Staphylococcus aureus VE07/03048STA; identical to SEQ ID NO: 13296

SEQ ID NO: 15858 - protein, 202 aa, Staphylococcus aureus VE07/03048STA; identical to SEQ ID NO: 13267

SEQ ID NO: 15859 - protein, 308 aa, Staphylococcus aureus VE07/03048STA; identical to SEQ ID NO: 13262

SEQ ID NO: 15860 - protein, 483 aa, Staphylococcus aureus VE08/02126ST1; identical to SEQ ID NO: 13296

SEQ ID NO: 15861 - protein, 202 aa, Staphylococcus aureus VE08/02126ST1; identical to SEQ ID NO: 13267

SEQ ID NO: 15862 - protein, 308 aa, Staphylococcus aureus VE08/02126ST1; identical to SEQ ID NO: 13262

SEQ ID NO: 15863 - protein, 483 aa, Staphylococcus aureus VE08/02244ST1; identical to SEQ ID NO: 13296

SEQ ID NO: 15864 - protein, 202 aa, Staphylococcus aureus VE08/02244ST1; identical to SEQ ID NO: 13267

SEQ ID NO: 15865 - protein, 308 aa, Staphylococcus aureus VE08/02244ST1; identical to SEQ ID NO: 13262

SEQ ID NO: 15866 - protein, 483 aa, Staphylococcus aureus VET0051R; identical to SEQ ID NO: 13296

SEQ ID NO: 15867 - protein, 202 aa, Staphylococcus aureus VET0051R; identical to SEQ ID NO: 13267

SEQ ID NO: 15868 - protein, 308 aa, Staphylococcus aureus VET0051R; identical to SEQ ID NO: 13262

SEQ ID NO: 15869 - protein, 483 aa, Staphylococcus aureus VET0052R; identical to SEQ ID NO: 13296

SEQ ID NO: 15870 - protein, 202 aa, Staphylococcus aureus VET0052R; identical to SEQ ID NO: 13267

SEQ ID NO: 15871 - protein, 308 aa, Staphylococcus aureus VET0052R; identical to SEQ ID NO: 13262

SEQ ID NO: 15872 - protein, 483 aa, Staphylococcus aureus VET0053R; identical to SEQ ID NO: 13296

SEQ ID NO: 15873 - protein, 202 aa, Staphylococcus aureus VET0053R; identical to SEQ ID NO: 13267

SEQ ID NO: 15874 - protein, 308 aa, Staphylococcus aureus VET0053R; identical to SEQ ID NO: 13262

SEQ ID NO: 15875 - protein, 483 aa, Staphylococcus aureus VET0054R; identical to SEQ ID NO: 13296

SEQ ID NO: 15876 - protein, 202 aa, Staphylococcus aureus VET0054R; identical to SEQ ID NO: 13267

SEQ ID NO: 15877 - protein, 308 aa, Staphylococcus aureus VET0054R; identical to SEQ ID NO: 13262

SEQ ID NO: 15878 - protein, 483 aa, Staphylococcus aureus VET0055R; identical to SEQ ID NO: 13296

SEQ ID NO: 15879 - protein, 202 aa, Staphylococcus aureus VET0055R; identical to SEQ ID NO: 13267

SEQ ID NO: 15880 - protein, 308 aa, Staphylococcus aureus VET0055R; identical to SEQ ID NO: 13262

SEQ ID NO: 15881 - protein, 483 aa, Staphylococcus aureus VET0057R; identical to SEQ ID NO: 13296

SEQ ID NO: 15882 - protein, 202 aa, Staphylococcus aureus VET0057R; identical to SEQ ID NO: 13267

SEQ ID NO: 15883 - protein, 308 aa, Staphylococcus aureus VET0057R; identical to SEQ ID NO: 13262

SEQ ID NO: 15884 - protein, 483 aa, Staphylococcus aureus VET0059R; identical to SEQ ID NO: 13296

SEQ ID NO: 15885 - protein, 202 aa, Staphylococcus aureus VET0059R; identical to SEQ ID NO: 13267

SEQ ID NO: 15886 - protein, 308 aa, Staphylococcus aureus VET0059R; identical to SEQ ID NO: 13262

SEQ ID NO: 15887 - protein, 483 aa, Staphylococcus aureus VET0060R; identical to SEQ ID NO: 13296

SEQ ID NO: 15888 - protein, 202 aa, Staphylococcus aureus VET0060R; identical to SEQ ID NO: 13267

SEQ ID NO: 15889 - protein, 308 aa, Staphylococcus aureus VET0060R; identical to SEQ ID NO: 13262

SEQ ID NO: 15890 - protein, 483 aa, Staphylococcus aureus VET0061R; identical to SEQ ID NO: 13296

SEQ ID NO: 15891 - protein, 202 aa, Staphylococcus aureus VET0061R; identical to SEQ ID NO: 13267

SEQ ID NO: 15892 - protein, 308 aa, Staphylococcus aureus VET0061R; identical to SEQ ID NO: 13262

SEQ ID NO: 15893 - protein, 483 aa, Staphylococcus aureus VET0062R; identical to SEQ ID NO: 13296

SEQ ID NO: 15894 - protein, 202 aa, Staphylococcus aureus VET0062R; identical to SEQ ID NO: 13267

SEQ ID NO: 15895 - protein, 308 aa, Staphylococcus aureus VET0062R; identical to SEQ ID NO: 13262

SEQ ID NO: 15896 - protein, 483 aa, Staphylococcus aureus VET0063R; identical to SEQ ID NO: 13296

SEQ ID NO: 15897 - protein, 202 aa, Staphylococcus aureus VET0063R; identical to SEQ ID NO: 13267

SEQ ID NO: 15898 - protein, 308 aa, Staphylococcus aureus VET0063R; identical to SEQ ID NO: 13262

SEQ ID NO: 15899 - protein, 483 aa, Staphylococcus aureus VET0065R; identical to SEQ ID NO: 13296

SEQ ID NO: 15900 - protein, 202 aa, Staphylococcus aureus VET0065R; identical to SEQ ID NO: 13267

SEQ ID NO: 15901 - protein, 308 aa, Staphylococcus aureus VET0065R; identical to SEQ ID NO: 13262

SEQ ID NO: 15902 - protein, 483 aa, Staphylococcus aureus VET0066R; identical to SEQ ID NO: 13296

SEQ ID NO: 15903 - protein, 202 aa, Staphylococcus aureus VET0066R; identical to SEQ ID NO: 13267

SEQ ID NO: 15904 - protein, 308 aa, Staphylococcus aureus VET0066R; identical to SEQ ID NO: 13262

SEQ ID NO: 15905 - protein, 483 aa, Staphylococcus aureus VET0067R; identical to SEQ ID NO: 13296

SEQ ID NO: 15906 - protein, 202 aa, Staphylococcus aureus VET0067R; identical to SEQ ID NO: 13267

SEQ ID NO: 15907 - protein, 308 aa, Staphylococcus aureus VET0067R; identical to SEQ ID NO: 13262

SEQ ID NO: 15908 - protein, 483 aa, Staphylococcus aureus VET0069R; identical to SEQ ID NO: 13296

SEQ ID NO: 15909 - protein, 202 aa, Staphylococcus aureus VET0069R; identical to SEQ ID NO: 13267

SEQ ID NO: 15910 - protein, 308 aa, Staphylococcus aureus VET0069R; identical to SEQ ID NO: 13262

SEQ ID NO: 15911 - protein, 483 aa, Staphylococcus aureus VET0070R; identical to SEQ ID NO: 13296

SEQ ID NO: 15912 - protein, 202 aa, Staphylococcus aureus VET0070R; identical to SEQ ID NO: 13267

SEQ ID NO: 15913 - protein, 308 aa, Staphylococcus aureus VET0070R; identical to SEQ ID NO: 13262

SEQ ID NO: 15914 - protein, 483 aa, Staphylococcus aureus VET0072R; identical to SEQ ID NO: 13296

SEQ ID NO: 15915 - protein, 202 aa, Staphylococcus aureus VET0072R; identical to SEQ ID NO: 13267

SEQ ID NO: 15916 - protein, 308 aa, Staphylococcus aureus VET0072R; identical to SEQ ID NO: 13262

SEQ ID NO: 15917 - protein, 483 aa, Staphylococcus aureus VET0073R; identical to SEQ ID NO: 13296

SEQ ID NO: 15918 - protein, 202 aa, Staphylococcus aureus VET0073R; identical to SEQ ID NO: 13267

SEQ ID NO: 15919 - protein, 308 aa, Staphylococcus aureus VET0073R; identical to SEQ ID NO: 13262

SEQ ID NO: 15920 - protein, 483 aa, Staphylococcus aureus VET0075R; identical to SEQ ID NO: 13296

SEQ ID NO: 15921 - protein, 202 aa, Staphylococcus aureus VET0075R; identical to SEQ ID NO: 13267

SEQ ID NO: 15922 - protein, 308 aa, Staphylococcus aureus VET0075R; identical to SEQ ID NO: 13262

SEQ ID NO: 15923 - protein, 483 aa, Staphylococcus aureus VET0076R; identical to SEQ ID NO: 13296

SEQ ID NO: 15924 - protein, 202 aa, Staphylococcus aureus VET0076R; identical to SEQ ID NO: 13267

SEQ ID NO: 15925 - protein, 308 aa, Staphylococcus aureus VET0076R; identical to SEQ ID NO: 13262

SEQ ID NO: 15926 - protein, 483 aa, Staphylococcus aureus VET0077R; identical to SEQ ID NO: 13296

SEQ ID NO: 15927 - protein, 202 aa, Staphylococcus aureus VET0077R; identical to SEQ ID NO: 13267

SEQ ID NO: 15928 - protein, 308 aa, Staphylococcus aureus VET0077R; identical to SEQ ID NO: 13262

SEQ ID NO: 15929 - protein, 483 aa, Staphylococcus aureus VET0080R; identical to SEQ ID NO: 13296

SEQ ID NO: 15930 - protein, 202 aa, Staphylococcus aureus VET0080R; identical to SEQ ID NO: 13267

SEQ ID NO: 15931 - protein, 308 aa, Staphylococcus aureus VET0080R; identical to SEQ ID NO: 13262

SEQ ID NO: 15932 - protein, 483 aa, Staphylococcus aureus VET0083R; identical to SEQ ID NO: 13296

SEQ ID NO: 15933 - protein, 202 aa, Staphylococcus aureus VET0083R; identical to SEQ ID NO: 13267

SEQ ID NO: 15934 - protein, 308 aa, Staphylococcus aureus VET0083R; identical to SEQ ID NO: 13262

SEQ ID NO: 15935 - protein, 483 aa, Staphylococcus aureus VET0084R; identical to SEQ ID NO: 13296

SEQ ID NO: 15936 - protein, 202 aa, Staphylococcus aureus VET0084R; identical to SEQ ID NO: 13267

SEQ ID NO: 15937 - protein, 308 aa, Staphylococcus aureus VET0084R; identical to SEQ ID NO: 13262

SEQ ID NO: 15938 - protein, 483 aa, Staphylococcus aureus VET0085R; identical to SEQ ID NO: 13296

SEQ ID NO: 15939 - protein, 202 aa, Staphylococcus aureus VET0085R; identical to SEQ ID NO: 13267

SEQ ID NO: 15940 - protein, 308 aa, Staphylococcus aureus VET0085R; identical to SEQ ID NO: 13262

SEQ ID NO: 15941 - protein, 483 aa, Staphylococcus aureus VET0086R; identical to SEQ ID NO: 13296

SEQ ID NO: 15942 - protein, 202 aa, Staphylococcus aureus VET0086R; identical to SEQ ID NO: 13267

SEQ ID NO: 15943 - protein, 308 aa, Staphylococcus aureus VET0086R; identical to SEQ ID NO: 13262

SEQ ID NO: 15944 - protein, 483 aa, Staphylococcus aureus VET0087R; identical to SEQ ID NO: 13296

SEQ ID NO: 15945 - protein, 202 aa, Staphylococcus aureus VET0087R; identical to SEQ ID NO: 13267

SEQ ID NO: 15946 - protein, 308 aa, Staphylococcus aureus VET0087R; identical to SEQ ID NO: 14873

SEQ ID NO: 15947 - protein, 483 aa, Staphylococcus aureus VET0088R; identical to SEQ ID NO: 13296

SEQ ID NO: 15948 - protein, 202 aa, Staphylococcus aureus VET0088R; identical to SEQ ID NO: 13267

SEQ ID NO: 15949 - protein, 308 aa, Staphylococcus aureus VET0088R; identical to SEQ ID NO: 13262

SEQ ID NO: 15950 - protein, 483 aa, Staphylococcus aureus VET0089R; identical to SEQ ID NO: 13296

SEQ ID NO: 15951 - protein, 202 aa, Staphylococcus aureus VET0089R; identical to SEQ ID NO: 13267

SEQ ID NO: 15952 - protein, 308 aa, Staphylococcus aureus VET0089R; identical to SEQ ID NO: 13262

SEQ ID NO: 15953 - protein, 483 aa, Staphylococcus aureus VET0090R; identical to SEQ ID NO: 13296

SEQ ID NO: 15954 - protein, 202 aa, Staphylococcus aureus VET0090R; identical to SEQ ID NO: 13267

SEQ ID NO: 15955 - protein, 308 aa, Staphylococcus aureus VET0090R; identical to SEQ ID NO: 13262

SEQ ID NO: 15956 - protein, 483 aa, Staphylococcus aureus VET0091R; identical to SEQ ID NO: 13296

SEQ ID NO: 15957 - protein, 202 aa, Staphylococcus aureus VET0091R; identical to SEQ ID NO: 13267

SEQ ID NO: 15958 - protein, 308 aa, Staphylococcus aureus VET0091R; identical to SEQ ID NO: 13262

SEQ ID NO: 15959 - protein, 483 aa, Staphylococcus aureus VET0092R; identical to SEQ ID NO: 13296

SEQ ID NO: 15960 - protein, 202 aa, Staphylococcus aureus VET0092R; identical to SEQ ID NO: 13267

SEQ ID NO: 15961 - protein, 308 aa, Staphylococcus aureus VET0092R; identical to SEQ ID NO: 13262

SEQ ID NO: 15962 - protein, 483 aa, Staphylococcus aureus VET0093R; identical to SEQ ID NO: 13296

SEQ ID NO: 15963 - protein, 202 aa, Staphylococcus aureus VET0093R; identical to SEQ ID NO: 13267

SEQ ID NO: 15964 - protein, 308 aa, Staphylococcus aureus VET0093R; identical to SEQ ID NO: 13262

SEQ ID NO: 15965 - protein, 483 aa, Staphylococcus aureus VET0094R; identical to SEQ ID NO: 13296

SEQ ID NO: 15966 - protein, 202 aa, Staphylococcus aureus VET0094R; identical to SEQ ID NO: 13267

SEQ ID NO: 15967 - protein, 308 aa, Staphylococcus aureus VET0094R; identical to SEQ ID NO: 13262

SEQ ID NO: 15968 - protein, 483 aa, Staphylococcus aureus VET0095R; identical to SEQ ID NO: 13296

SEQ ID NO: 15969 - protein, 202 aa, Staphylococcus aureus VET0095R; identical to SEQ ID NO: 13267

SEQ ID NO: 15970 - protein, 308 aa, Staphylococcus aureus VET0095R; identical to SEQ ID NO: 13262

SEQ ID NO: 15971 - protein, 483 aa, Staphylococcus aureus VET0097R; identical to SEQ ID NO: 13296

SEQ ID NO: 15972 - protein, 202 aa, Staphylococcus aureus VET0097R; identical to SEQ ID NO: 13267

SEQ ID NO: 15973 - protein, 308 aa, Staphylococcus aureus VET0097R; identical to SEQ ID NO: 13262

SEQ ID NO: 15974 - protein, 483 aa, Staphylococcus aureus VET0098R; identical to SEQ ID NO: 13296

SEQ ID NO: 15975 - protein, 202 aa, Staphylococcus aureus VET0098R; identical to SEQ ID NO: 13267

SEQ ID NO: 15976 - protein, 308 aa, Staphylococcus aureus VET0098R; identical to SEQ ID NO: 13262

SEQ ID NO: 15977 - protein, 483 aa, Staphylococcus aureus VET0099R; identical to SEQ ID NO: 13296

SEQ ID NO: 15978 - protein, 202 aa, Staphylococcus aureus VET0099R; identical to SEQ ID NO: 13267

SEQ ID NO: 15979 - protein, 308 aa, Staphylococcus aureus VET0099R; identical to SEQ ID NO: 13262

SEQ ID NO: 15980 - protein, 483 aa, Staphylococcus aureus VET0101R; identical to SEQ ID NO: 13296

SEQ ID NO: 15981 - protein, 202 aa, Staphylococcus aureus VET0101R; identical to SEQ ID NO: 13267

SEQ ID NO: 15982 - protein, 308 aa, Staphylococcus aureus VET0101R; identical to SEQ ID NO: 13262

SEQ ID NO: 15983 - protein, 483 aa, Staphylococcus aureus VET0103R; identical to SEQ ID NO: 13296

SEQ ID NO: 15984 - protein, 202 aa, Staphylococcus aureus VET0103R; identical to SEQ ID NO: 13267

SEQ ID NO: 15985 - protein, 308 aa, Staphylococcus aureus VET0103R; identical to SEQ ID NO: 13262

SEQ ID NO: 15986 - protein, 483 aa, Staphylococcus aureus VET0104R; identical to SEQ ID NO: 13296

SEQ ID NO: 15987 - protein, 202 aa, Staphylococcus aureus VET0104R; identical to SEQ ID NO: 13267

SEQ ID NO: 15988 - protein, 308 aa, Staphylococcus aureus VET0104R; identical to SEQ ID NO: 13262

SEQ ID NO: 15989 - protein, 483 aa, Staphylococcus aureus VET0105R; identical to SEQ ID NO: 13296

SEQ ID NO: 15990 - protein, 202 aa, Staphylococcus aureus VET0105R; identical to SEQ ID NO: 13267

SEQ ID NO: 15991 - protein, 308 aa, Staphylococcus aureus VET0105R; identical to SEQ ID NO: 13262

SEQ ID NO: 15992 - protein, 483 aa, Staphylococcus aureus VET0107R; identical to SEQ ID NO: 13296

SEQ ID NO: 15993 - protein, 202 aa, Staphylococcus aureus VET0107R; identical to SEQ ID NO: 13267

SEQ ID NO: 15994 - protein, 308 aa, Staphylococcus aureus VET0107R; identical to SEQ ID NO: 13262

SEQ ID NO: 15995 - protein, 483 aa, Staphylococcus aureus VET0110R; identical to SEQ ID NO: 13296

SEQ ID NO: 15996 - protein, 202 aa, Staphylococcus aureus VET0110R; identical to SEQ ID NO: 13267

SEQ ID NO: 15997 - protein, 308 aa, Staphylococcus aureus VET0110R; identical to SEQ ID NO: 13262

SEQ ID NO: 15998 - protein, 483 aa, Staphylococcus aureus VET0112R; identical to SEQ ID NO: 13296

SEQ ID NO: 15999 - protein, 202 aa, Staphylococcus aureus VET0112R; identical to SEQ ID NO: 13267

SEQ ID NO: 16000 - protein, 308 aa, Staphylococcus aureus VET0112R; identical to SEQ ID NO: 13262

SEQ ID NO: 16001 - protein, 483 aa, Staphylococcus aureus VET0114R; identical to SEQ ID NO: 13296

SEQ ID NO: 16002 - protein, 202 aa, Staphylococcus aureus VET0114R; identical to SEQ ID NO: 13267

SEQ ID NO: 16003 - protein, 308 aa, Staphylococcus aureus VET0114R; identical to SEQ ID NO: 13262

SEQ ID NO: 16004 - protein, 483 aa, Staphylococcus aureus VET0115R; identical to SEQ ID NO: 13296

SEQ ID NO: 16005 - protein, 202 aa, Staphylococcus aureus VET0115R; identical to SEQ ID NO: 13267

SEQ ID NO: 16006 - protein, 308 aa, Staphylococcus aureus VET0115R; identical to SEQ ID NO: 13262

SEQ ID NO: 16007 - protein, 483 aa, Staphylococcus aureus VET0116R; identical to SEQ ID NO: 13296

SEQ ID NO: 16008 - protein, 202 aa, Staphylococcus aureus VET0116R; identical to SEQ ID NO: 13267

SEQ ID NO: 16009 - protein, 308 aa, Staphylococcus aureus VET0116R; identical to SEQ ID NO: 13262

SEQ ID NO: 16010 - protein, 483 aa, Staphylococcus aureus VET0117R; identical to SEQ ID NO: 13296

SEQ ID NO: 16011 - protein, 202 aa, Staphylococcus aureus VET0117R; identical to SEQ ID NO: 13267

SEQ ID NO: 16012 - protein, 308 aa, Staphylococcus aureus VET0117R; identical to SEQ ID NO: 13262

SEQ ID NO: 16013 - protein, 483 aa, Staphylococcus aureus VET0119R; identical to SEQ ID NO: 13296

SEQ ID NO: 16014 - protein, 202 aa, Staphylococcus aureus VET0119R; identical to SEQ ID NO: 13267

SEQ ID NO: 16015 - protein, 308 aa, Staphylococcus aureus VET0119R; identical to SEQ ID NO: 13262

SEQ ID NO: 16016 - protein, 483 aa, Staphylococcus aureus VET0123R; identical to SEQ ID NO: 13296

SEQ ID NO: 16017 - protein, 202 aa, Staphylococcus aureus VET0123R; identical to SEQ ID NO: 13267

SEQ ID NO: 16018 - protein, 308 aa, Staphylococcus aureus VET0123R; identical to SEQ ID NO: 13262

SEQ ID NO: 16019 - protein, 483 aa, Staphylococcus aureus VET0124R; identical to SEQ ID NO: 13296

SEQ ID NO: 16020 - protein, 202 aa, Staphylococcus aureus VET0124R; identical to SEQ ID NO: 13267

SEQ ID NO: 16021 - protein, 308 aa, Staphylococcus aureus VET0124R; identical to SEQ ID NO: 13262

SEQ ID NO: 16022 - protein, 483 aa, Staphylococcus aureus VET0126R; identical to SEQ ID NO: 13296

SEQ ID NO: 16023 - protein, 202 aa, Staphylococcus aureus VET0126R; identical to SEQ ID NO: 13267

SEQ ID NO: 16024 - protein, 308 aa, Staphylococcus aureus VET0126R; identical to SEQ ID NO: 13262

SEQ ID NO: 16025 - protein, 483 aa, Staphylococcus aureus VET0127R; identical to SEQ ID NO: 13296

SEQ ID NO: 16026 - protein, 202 aa, Staphylococcus aureus VET0127R; identical to SEQ ID NO: 13267

SEQ ID NO: 16027 - protein, 308 aa, Staphylococcus aureus VET0127R; identical to SEQ ID NO: 13262

SEQ ID NO: 16028 - protein, 483 aa, Staphylococcus aureus VET0128R; identical to SEQ ID NO: 13296

SEQ ID NO: 16029 - protein, 202 aa, Staphylococcus aureus VET0128R; identical to SEQ ID NO: 13267

SEQ ID NO: 16030 - protein, 308 aa, Staphylococcus aureus VET0128R; identical to SEQ ID NO: 13262

SEQ ID NO: 16031 - protein, 483 aa, Staphylococcus aureus VET0129R; identical to SEQ ID NO: 13296

SEQ ID NO: 16032 - protein, 202 aa, Staphylococcus aureus VET0129R; identical to SEQ ID NO: 13267

SEQ ID NO: 16033 - protein, 308 aa, Staphylococcus aureus VET0129R; identical to SEQ ID NO: 13262

SEQ ID NO: 16034 - protein, 483 aa, Staphylococcus aureus VET0130R; identical to SEQ ID NO: 13296

SEQ ID NO: 16035 - protein, 202 aa, Staphylococcus aureus VET0130R; identical to SEQ ID NO: 13267

SEQ ID NO: 16036 - protein, 308 aa, Staphylococcus aureus VET0130R; identical to SEQ ID NO: 13262

SEQ ID NO: 16037 - protein, 483 aa, Staphylococcus aureus VET0132R; identical to SEQ ID NO: 13296

SEQ ID NO: 16038 - protein, 202 aa, Staphylococcus aureus VET0132R; identical to SEQ ID NO: 13267

SEQ ID NO: 16039 - protein, 308 aa, Staphylococcus aureus VET0132R; identical to SEQ ID NO: 13262

SEQ ID NO: 16040 - protein, 483 aa, Staphylococcus aureus VET0133R; identical to SEQ ID NO: 13296

SEQ ID NO: 16041 - protein, 202 aa, Staphylococcus aureus VET0133R; identical to SEQ ID NO: 13267

SEQ ID NO: 16042 - protein, 308 aa, Staphylococcus aureus VET0133R; identical to SEQ ID NO: 13262

SEQ ID NO: 16043 - protein, 483 aa, Staphylococcus aureus VET0134R; identical to SEQ ID NO: 13296

SEQ ID NO: 16044 - protein, 202 aa, Staphylococcus aureus VET0134R; identical to SEQ ID NO: 13267

SEQ ID NO: 16045 - protein, 308 aa, Staphylococcus aureus VET0134R; identical to SEQ ID NO: 13262

SEQ ID NO: 16046 - protein, 483 aa, Staphylococcus aureus VET0140R; identical to SEQ ID NO: 13296

SEQ ID NO: 16047 - protein, 202 aa, Staphylococcus aureus VET0140R; identical to SEQ ID NO: 13267

SEQ ID NO: 16048 - protein, 308 aa, Staphylococcus aureus VET0140R; identical to SEQ ID NO: 13262

SEQ ID NO: 16049 - protein, 483 aa, Staphylococcus aureus VET0148R; identical to SEQ ID NO: 13296

SEQ ID NO: 16050 - protein, 202 aa, Staphylococcus aureus VET0148R; identical to SEQ ID NO: 13267

SEQ ID NO: 16051 - protein, 308 aa, Staphylococcus aureus VET0148R; identical to SEQ ID NO: 13262

SEQ ID NO: 16052 - protein, 483 aa, Staphylococcus aureus VET0151R; identical to SEQ ID NO: 13296

SEQ ID NO: 16053 - protein, 202 aa, Staphylococcus aureus VET0151R; identical to SEQ ID NO: 13267

SEQ ID NO: 16054 - protein, 308 aa, Staphylococcus aureus VET0151R; identical to SEQ ID NO: 13262

SEQ ID NO: 16055 - protein, 483 aa, Staphylococcus aureus VET0152R; identical to SEQ ID NO: 13296

SEQ ID NO: 16056 - protein, 202 aa, Staphylococcus aureus VET0152R; identical to SEQ ID NO: 13267

SEQ ID NO: 16057 - protein, 308 aa, Staphylococcus aureus VET0152R; identical to SEQ ID NO: 13262

SEQ ID NO: 16058 - protein, 483 aa, Staphylococcus aureus VET0155R; identical to SEQ ID NO: 13296

SEQ ID NO: 16059 - protein, 202 aa, Staphylococcus aureus VET0155R; identical to SEQ ID NO: 13267

SEQ ID NO: 16060 - protein, 308 aa, Staphylococcus aureus VET0155R; identical to SEQ ID NO: 13262

SEQ ID NO: 16061 - protein, 483 aa, Staphylococcus aureus VET0156R; identical to SEQ ID NO: 13296

SEQ ID NO: 16062 - protein, 202 aa, Staphylococcus aureus VET0156R; identical to SEQ ID NO: 13267

SEQ ID NO: 16063 - protein, 308 aa, Staphylococcus aureus VET0156R; identical to SEQ ID NO: 13262

SEQ ID NO: 16064 - protein, 483 aa, Staphylococcus aureus VET0161R; identical to SEQ ID NO: 13296

SEQ ID NO: 16065 - protein, 202 aa, Staphylococcus aureus VET0161R; identical to SEQ ID NO: 13267

SEQ ID NO: 16066 - protein, 308 aa, Staphylococcus aureus VET0161R; identical to SEQ ID NO: 13262

SEQ ID NO: 16067 - protein, 483 aa, Staphylococcus aureus VET0162R; identical to SEQ ID NO: 13296

SEQ ID NO: 16068 - protein, 202 aa, Staphylococcus aureus VET0162R; identical to SEQ ID NO: 13267

SEQ ID NO: 16069 - protein, 308 aa, Staphylococcus aureus VET0162R; identical to SEQ ID NO: 13262

SEQ ID NO: 16070 - protein, 131 aa, Staphylococcus aureus VET0164R; identical to SEQ ID NO: 14745

SEQ ID NO: 16071 - protein, 202 aa, Staphylococcus aureus VET0164R; identical to SEQ ID NO: 13267

SEQ ID NO: 16072 - protein, 308 aa, Staphylococcus aureus VET0164R; identical to SEQ ID NO: 13262

SEQ ID NO: 16073 - protein, 483 aa, Staphylococcus aureus VET0165R; identical to SEQ ID NO: 13296

SEQ ID NO: 16074 - protein, 202 aa, Staphylococcus aureus VET0165R; identical to SEQ ID NO: 13267

SEQ ID NO: 16075 - protein, 308 aa, Staphylococcus aureus VET0165R; identical to SEQ ID NO: 13262

SEQ ID NO: 16076 - protein, 131 aa, Staphylococcus aureus VET0166R; identical to SEQ ID NO: 14745

SEQ ID NO: 16077 - protein, 202 aa, Staphylococcus aureus VET0166R; identical to SEQ ID NO: 13267

SEQ ID NO: 16078 - protein, 308 aa, Staphylococcus aureus VET0166R; identical to SEQ ID NO: 13262

SEQ ID NO: 16079 - protein, 483 aa, Staphylococcus aureus VET0167R; identical to SEQ ID NO: 13296

SEQ ID NO: 16080 - protein, 202 aa, Staphylococcus aureus VET0167R; identical to SEQ ID NO: 13267

SEQ ID NO: 16081 - protein, 308 aa, Staphylococcus aureus VET0167R; identical to SEQ ID NO: 13262

SEQ ID NO: 16082 - protein, 483 aa, Staphylococcus aureus VET0171R; identical to SEQ ID NO: 13296

SEQ ID NO: 16083 - protein, 202 aa, Staphylococcus aureus VET0171R; identical to SEQ ID NO: 13267

SEQ ID NO: 16084 - protein, 308 aa, Staphylococcus aureus VET0171R; identical to SEQ ID NO: 13262

SEQ ID NO: 16085 - protein, 483 aa, Staphylococcus aureus VET0176R; identical to SEQ ID NO: 13296

SEQ ID NO: 16086 - protein, 202 aa, Staphylococcus aureus VET0176R; identical to SEQ ID NO: 13267

SEQ ID NO: 16087 - protein, 308 aa, Staphylococcus aureus VET0176R; identical to SEQ ID NO: 13262

SEQ ID NO: 16088 - protein, 483 aa, Staphylococcus aureus VET0177R; identical to SEQ ID NO: 13296

SEQ ID NO: 16089 - protein, 202 aa, Staphylococcus aureus VET0177R; identical to SEQ ID NO: 13267

SEQ ID NO: 16090 - protein, 308 aa, Staphylococcus aureus VET0177R; identical to SEQ ID NO: 13262

SEQ ID NO: 16091 - protein, 483 aa, Staphylococcus aureus VET0178R; identical to SEQ ID NO: 13296

SEQ ID NO: 16092 - protein, 202 aa, Staphylococcus aureus VET0178R; identical to SEQ ID NO: 13267

SEQ ID NO: 16093 - protein, 308 aa, Staphylococcus aureus VET0178R; identical to SEQ ID NO: 13262

SEQ ID NO: 16094 - protein, 483 aa, Staphylococcus aureus VET0179R; identical to SEQ ID NO: 13296

SEQ ID NO: 16095 - protein, 202 aa, Staphylococcus aureus VET0179R; identical to SEQ ID NO: 13267

SEQ ID NO: 16096 - protein, 308 aa, Staphylococcus aureus VET0179R; identical to SEQ ID NO: 13262

SEQ ID NO: 16097 - protein, 483 aa, Staphylococcus aureus VET0180R; identical to SEQ ID NO: 13296

SEQ ID NO: 16098 - protein, 202 aa, Staphylococcus aureus VET0180R; identical to SEQ ID NO: 13267

SEQ ID NO: 16099 - protein, 308 aa, Staphylococcus aureus VET0180R; identical to SEQ ID NO: 13262

SEQ ID NO: 16100 - protein, 483 aa, Staphylococcus aureus VET0188R; identical to SEQ ID NO: 13296

SEQ ID NO: 16101 - protein, 202 aa, Staphylococcus aureus VET0188R; identical to SEQ ID NO: 13267

SEQ ID NO: 16102 - protein, 308 aa, Staphylococcus aureus VET0188R; identical to SEQ ID NO: 13262

SEQ ID NO: 16103 - protein, 483 aa, Staphylococcus aureus VET0189R; identical to SEQ ID NO: 13296

SEQ ID NO: 16104 - protein, 202 aa, Staphylococcus aureus VET0189R; identical to SEQ ID NO: 13267

SEQ ID NO: 16105 - protein, 308 aa, Staphylococcus aureus VET0189R; identical to SEQ ID NO: 13262

SEQ ID NO: 16106 - protein, 483 aa, Staphylococcus aureus VET0190R; identical to SEQ ID NO: 13296

SEQ ID NO: 16107 - protein, 202 aa, Staphylococcus aureus VET0190R; identical to SEQ ID NO: 13267

SEQ ID NO: 16108 - protein, 308 aa, Staphylococcus aureus VET0190R; identical to SEQ ID NO: 13262

SEQ ID NO: 16109 - protein, 483 aa, Staphylococcus aureus VET0192R; identical to SEQ ID NO: 13296

SEQ ID NO: 16110 - protein, 202 aa, Staphylococcus aureus VET0192R; identical to SEQ ID NO: 13267

SEQ ID NO: 16111 - protein, 308 aa, Staphylococcus aureus VET0192R; identical to SEQ ID NO: 13262

SEQ ID NO: 16112 - protein, 483 aa, Staphylococcus aureus VET0193R; identical to SEQ ID NO: 13296

SEQ ID NO: 16113 - protein, 202 aa, Staphylococcus aureus VET0193R; identical to SEQ ID NO: 13267

SEQ ID NO: 16114 - protein, 308 aa, Staphylococcus aureus VET0193R; identical to SEQ ID NO: 13262

SEQ ID NO: 16115 - protein, 483 aa, Staphylococcus aureus VET0194R; identical to SEQ ID NO: 13296

SEQ ID NO: 16116 - protein, 202 aa, Staphylococcus aureus VET0194R; identical to SEQ ID NO: 13267

SEQ ID NO: 16117 - protein, 308 aa, Staphylococcus aureus VET0194R; identical to SEQ ID NO: 13262

SEQ ID NO: 16118 - protein, 483 aa, Staphylococcus aureus VET0195R; identical to SEQ ID NO: 13296

SEQ ID NO: 16119 - protein, 202 aa, Staphylococcus aureus VET0195R; identical to SEQ ID NO: 13267

SEQ ID NO: 16120 - protein, 308 aa, Staphylococcus aureus VET0195R; identical to SEQ ID NO: 13262

SEQ ID NO: 16121 - protein, 483 aa, Staphylococcus aureus VET0198R; identical to SEQ ID NO: 13296

SEQ ID NO: 16122 - protein, 202 aa, Staphylococcus aureus VET0198R; identical to SEQ ID NO: 13267

SEQ ID NO: 16123 - protein, 308 aa, Staphylococcus aureus VET0198R; identical to SEQ ID NO: 13262

SEQ ID NO: 16124 - protein, 483 aa, Staphylococcus aureus VET0200R; identical to SEQ ID NO: 13296

SEQ ID NO: 16125 - protein, 202 aa, Staphylococcus aureus VET0200R; identical to SEQ ID NO: 13267

SEQ ID NO: 16126 - protein, 308 aa, Staphylococcus aureus VET0200R
MERQQTYKEKAQHLYKVKKIKNRYNTKSAEEYFFSIPQVKYILSAGRMKKHKENYNASEIKIKKAALEKSRKNKNWKIEERLIKAKRYTQKVDPEYLNIYMKAYHKKDITTEEKLEILTELKKFDTENIVRFFRKLNDAEQNKMIRNLAFKYLQDYGHYVKLRKNFKGKKKVCQTERASLDTKKPEDLYNDLTNKNIQSQKVYDIFISHSTKDKKTVEDIIRVFNEQNKTCYCDWTMDQDYLKRKYVGEYTKQVLKARMEQSKMLVLLRTENSVQSDWVSFEIEYFENLKKPIYIVESLEELLEAFSD

SEQ ID NO: 16127 - protein, 483 aa, Staphylococcus aureus VET0212R; identical to SEQ ID NO: 13296

SEQ ID NO: 16128 - protein, 202 aa, Staphylococcus aureus VET0212R; identical to SEQ ID NO: 13267

SEQ ID NO: 16129 - protein, 308 aa, Staphylococcus aureus VET0212R; identical to SEQ ID NO: 13262

SEQ ID NO: 16130 - protein, 483 aa, Staphylococcus aureus VET0213R; identical to SEQ ID NO: 13296

SEQ ID NO: 16131 - protein, 202 aa, Staphylococcus aureus VET0213R; identical to SEQ ID NO: 13267

SEQ ID NO: 16132 - protein, 308 aa, Staphylococcus aureus VET0213R; identical to SEQ ID NO: 13262

SEQ ID NO: 16133 - protein, 483 aa, Staphylococcus aureus VET0214R; identical to SEQ ID NO: 13296

SEQ ID NO: 16134 - protein, 202 aa, Staphylococcus aureus VET0214R; identical to SEQ ID NO: 13267

SEQ ID NO: 16135 - protein, 308 aa, Staphylococcus aureus VET0214R; identical to SEQ ID NO: 13262

SEQ ID NO: 16136 - protein, 131 aa, Staphylococcus aureus VET0215R; identical to SEQ ID NO: 14745

SEQ ID NO: 16137 - protein, 202 aa, Staphylococcus aureus VET0215R; identical to SEQ ID NO: 13267

SEQ ID NO: 16138 - protein, 308 aa, Staphylococcus aureus VET0215R; identical to SEQ ID NO: 13262

SEQ ID NO: 16139 - protein, 483 aa, Staphylococcus aureus VET0216R; identical to SEQ ID NO: 13296

SEQ ID NO: 16140 - protein, 202 aa, Staphylococcus aureus VET0216R; identical to SEQ ID NO: 13267

SEQ ID NO: 16141 - protein, 308 aa, Staphylococcus aureus VET0216R; identical to SEQ ID NO: 13262

SEQ ID NO: 16142 - protein, 483 aa, Staphylococcus aureus VET0217R; identical to SEQ ID NO: 13296

SEQ ID NO: 16143 - protein, 202 aa, Staphylococcus aureus VET0217R; identical to SEQ ID NO: 13267

SEQ ID NO: 16144 - protein, 308 aa, Staphylococcus aureus VET0217R; identical to SEQ ID NO: 13262

SEQ ID NO: 16145 - protein, 483 aa, Staphylococcus aureus VET0218R; identical to SEQ ID NO: 13296

SEQ ID NO: 16146 - protein, 202 aa, Staphylococcus aureus VET0218R; identical to SEQ ID NO: 13267

SEQ ID NO: 16147 - protein, 308 aa, Staphylococcus aureus VET0218R; identical to SEQ ID NO: 13262

SEQ ID NO: 16148 - protein, 483 aa, Staphylococcus aureus VET0221R; identical to SEQ ID NO: 13296

SEQ ID NO: 16149 - protein, 202 aa, Staphylococcus aureus VET0221R; identical to SEQ ID NO: 13267

SEQ ID NO: 16150 - protein, 308 aa, Staphylococcus aureus VET0221R; identical to SEQ ID NO: 13262

SEQ ID NO: 16151 - protein, 483 aa, Staphylococcus aureus VET0222R; identical to SEQ ID NO: 13296

SEQ ID NO: 16152 - protein, 202 aa, Staphylococcus aureus VET0222R; identical to SEQ ID NO: 13267

SEQ ID NO: 16153 - protein, 308 aa, Staphylococcus aureus VET0222R; identical to SEQ ID NO: 13262

SEQ ID NO: 16154 - protein, 131 aa, Staphylococcus aureus VET0224R; identical to SEQ ID NO: 14745

SEQ ID NO: 16155 - protein, 202 aa, Staphylococcus aureus VET0224R; identical to SEQ ID NO: 13267

SEQ ID NO: 16156 - protein, 308 aa, Staphylococcus aureus VET0224R; identical to SEQ ID NO: 13262

SEQ ID NO: 16157 - protein, 483 aa, Staphylococcus aureus VET0227R; identical to SEQ ID NO: 13296

SEQ ID NO: 16158 - protein, 202 aa, Staphylococcus aureus VET0227R; identical to SEQ ID NO: 13267

SEQ ID NO: 16159 - protein, 308 aa, Staphylococcus aureus VET0227R; identical to SEQ ID NO: 13262

SEQ ID NO: 16160 - protein, 131 aa, Staphylococcus aureus VET0228R; identical to SEQ ID NO: 14745

SEQ ID NO: 16161 - protein, 202 aa, Staphylococcus aureus VET0228R; identical to SEQ ID NO: 13267

SEQ ID NO: 16162 - protein, 308 aa, Staphylococcus aureus VET0228R; identical to SEQ ID NO: 13262

SEQ ID NO: 16163 - protein, 483 aa, Staphylococcus aureus VET0230R; identical to SEQ ID NO: 13296

SEQ ID NO: 16164 - protein, 202 aa, Staphylococcus aureus VET0230R; identical to SEQ ID NO: 13267

SEQ ID NO: 16165 - protein, 308 aa, Staphylococcus aureus VET0230R; identical to SEQ ID NO: 13262

SEQ ID NO: 16166 - protein, 483 aa, Staphylococcus aureus VET0236R; identical to SEQ ID NO: 13296

SEQ ID NO: 16167 - protein, 202 aa, Staphylococcus aureus VET0236R; identical to SEQ ID NO: 13267

SEQ ID NO: 16168 - protein, 308 aa, Staphylococcus aureus VET0236R; identical to SEQ ID NO: 13262

SEQ ID NO: 16169 - protein, 483 aa, Staphylococcus aureus VET0237R; identical to SEQ ID NO: 13296

SEQ ID NO: 16170 - protein, 202 aa, Staphylococcus aureus VET0237R; identical to SEQ ID NO: 13267

SEQ ID NO: 16171 - protein, 308 aa, Staphylococcus aureus VET0237R; identical to SEQ ID NO: 13262

SEQ ID NO: 16172 - protein, 483 aa, Staphylococcus aureus VET0241R; identical to SEQ ID NO: 13296

SEQ ID NO: 16173 - protein, 202 aa, Staphylococcus aureus VET0241R; identical to SEQ ID NO: 13267

SEQ ID NO: 16174 - protein, 308 aa, Staphylococcus aureus VET0241R; identical to SEQ ID NO: 13262

SEQ ID NO: 16175 - protein, 483 aa, Staphylococcus aureus VET0243R; identical to SEQ ID NO: 13296

SEQ ID NO: 16176 - protein, 202 aa, Staphylococcus aureus VET0243R; identical to SEQ ID NO: 13267

SEQ ID NO: 16177 - protein, 308 aa, Staphylococcus aureus VET0243R; identical to SEQ ID NO: 13262

SEQ ID NO: 16178 - protein, 483 aa, Staphylococcus aureus VET0247R; identical to SEQ ID NO: 13296

SEQ ID NO: 16179 - protein, 202 aa, Staphylococcus aureus VET0247R; identical to SEQ ID NO: 13267

SEQ ID NO: 16180 - protein, 308 aa, Staphylococcus aureus VET0247R; identical to SEQ ID NO: 13262

SEQ ID NO: 16181 - protein, 483 aa, Staphylococcus aureus VET0249R; identical to SEQ ID NO: 13296

SEQ ID NO: 16182 - protein, 202 aa, Staphylococcus aureus VET0249R; identical to SEQ ID NO: 13267

SEQ ID NO: 16183 - protein, 308 aa, Staphylococcus aureus VET0249R; identical to SEQ ID NO: 13262

SEQ ID NO: 16184 - protein, 483 aa, Staphylococcus aureus VET0252R; identical to SEQ ID NO: 13296

SEQ ID NO: 16185 - protein, 202 aa, Staphylococcus aureus VET0252R; identical to SEQ ID NO: 13267

SEQ ID NO: 16186 - protein, 308 aa, Staphylococcus aureus VET0252R; identical to SEQ ID NO: 13262

SEQ ID NO: 16187 - protein, 483 aa, Staphylococcus aureus VET0253R; identical to SEQ ID NO: 13296

SEQ ID NO: 16188 - protein, 202 aa, Staphylococcus aureus VET0253R; identical to SEQ ID NO: 13267

SEQ ID NO: 16189 - protein, 308 aa, Staphylococcus aureus VET0253R; identical to SEQ ID NO: 13262

SEQ ID NO: 16190 - protein, 483 aa, Staphylococcus aureus VET0254R; identical to SEQ ID NO: 13296

SEQ ID NO: 16191 - protein, 202 aa, Staphylococcus aureus VET0254R; identical to SEQ ID NO: 13267

SEQ ID NO: 16192 - protein, 308 aa, Staphylococcus aureus VET0254R; identical to SEQ ID NO: 13262

SEQ ID NO: 16193 - protein, 483 aa, Staphylococcus aureus VET0256R; identical to SEQ ID NO: 13296

SEQ ID NO: 16194 - protein, 202 aa, Staphylococcus aureus VET0256R; identical to SEQ ID NO: 13267

SEQ ID NO: 16195 - protein, 308 aa, Staphylococcus aureus VET0256R; identical to SEQ ID NO: 13262

SEQ ID NO: 16196 - protein, 483 aa, Staphylococcus aureus VET0259R; identical to SEQ ID NO: 13296

SEQ ID NO: 16197 - protein, 202 aa, Staphylococcus aureus VET0259R; identical to SEQ ID NO: 13267

SEQ ID NO: 16198 - protein, 308 aa, Staphylococcus aureus VET0259R; identical to SEQ ID NO: 13262

SEQ ID NO: 16199 - protein, 131 aa, Staphylococcus aureus VET0260R; identical to SEQ ID NO: 14745

SEQ ID NO: 16200 - protein, 202 aa, Staphylococcus aureus VET0260R; identical to SEQ ID NO: 13267

SEQ ID NO: 16201 - protein, 308 aa, Staphylococcus aureus VET0260R; identical to SEQ ID NO: 13262

SEQ ID NO: 16202 - protein, 131 aa, Staphylococcus aureus VET0261R; identical to SEQ ID NO: 14745

SEQ ID NO: 16203 - protein, 202 aa, Staphylococcus aureus VET0261R; identical to SEQ ID NO: 13267

SEQ ID NO: 16204 - protein, 308 aa, Staphylococcus aureus VET0261R; identical to SEQ ID NO: 13262

SEQ ID NO: 16205 - protein, 483 aa, Staphylococcus aureus VET0263R; identical to SEQ ID NO: 13296

SEQ ID NO: 16206 - protein, 202 aa, Staphylococcus aureus VET0263R; identical to SEQ ID NO: 13267

SEQ ID NO: 16207 - protein, 308 aa, Staphylococcus aureus VET0263R; identical to SEQ ID NO: 13262

SEQ ID NO: 16208 - protein, 483 aa, Staphylococcus aureus VET0267R; identical to SEQ ID NO: 13296

SEQ ID NO: 16209 - protein, 202 aa, Staphylococcus aureus VET0267R; identical to SEQ ID NO: 13267

SEQ ID NO: 16210 - protein, 308 aa, Staphylococcus aureus VET0267R; identical to SEQ ID NO: 13262

SEQ ID NO: 16211 - protein, 483 aa, Staphylococcus aureus VET0268R; identical to SEQ ID NO: 13296

SEQ ID NO: 16212 - protein, 202 aa, Staphylococcus aureus VET0268R; identical to SEQ ID NO: 13267

SEQ ID NO: 16213 - protein, 308 aa, Staphylococcus aureus VET0268R; identical to SEQ ID NO: 13262

SEQ ID NO: 16214 - protein, 483 aa, Staphylococcus aureus VET0269R; identical to SEQ ID NO: 13296

SEQ ID NO: 16215 - protein, 202 aa, Staphylococcus aureus VET0269R; identical to SEQ ID NO: 13267

SEQ ID NO: 16216 - protein, 308 aa, Staphylococcus aureus VET0269R; identical to SEQ ID NO: 13262

SEQ ID NO: 16217 - protein, 483 aa, Staphylococcus aureus VET0270R; identical to SEQ ID NO: 13296

SEQ ID NO: 16218 - protein, 202 aa, Staphylococcus aureus VET0270R; identical to SEQ ID NO: 13267

SEQ ID NO: 16219 - protein, 308 aa, Staphylococcus aureus VET0270R; identical to SEQ ID NO: 13262

SEQ ID NO: 16220 - protein, 483 aa, Staphylococcus aureus VET0271R; identical to SEQ ID NO: 13296

SEQ ID NO: 16221 - protein, 202 aa, Staphylococcus aureus VET0271R; identical to SEQ ID NO: 13267

SEQ ID NO: 16222 - protein, 308 aa, Staphylococcus aureus VET0271R; identical to SEQ ID NO: 13262

SEQ ID NO: 16223 - protein, 483 aa, Staphylococcus aureus VET0275R; identical to SEQ ID NO: 13296

SEQ ID NO: 16224 - protein, 202 aa, Staphylococcus aureus VET0275R; identical to SEQ ID NO: 13267

SEQ ID NO: 16225 - protein, 308 aa, Staphylococcus aureus VET0275R; identical to SEQ ID NO: 13262

SEQ ID NO: 16226 - protein, 483 aa, Staphylococcus aureus VET0278R; identical to SEQ ID NO: 13296

SEQ ID NO: 16227 - protein, 202 aa, Staphylococcus aureus VET0278R; identical to SEQ ID NO: 13267

SEQ ID NO: 16228 - protein, 308 aa, Staphylococcus aureus VET0278R; identical to SEQ ID NO: 13262

SEQ ID NO: 16229 - protein, 483 aa, Staphylococcus aureus VET0279R; identical to SEQ ID NO: 13296

SEQ ID NO: 16230 - protein, 202 aa, Staphylococcus aureus VET0279R; identical to SEQ ID NO: 13267

SEQ ID NO: 16231 - protein, 308 aa, Staphylococcus aureus VET0279R; identical to SEQ ID NO: 13262

SEQ ID NO: 16232 - protein, 483 aa, Staphylococcus aureus VET0280R; identical to SEQ ID NO: 13296

SEQ ID NO: 16233 - protein, 202 aa, Staphylococcus aureus VET0280R; identical to SEQ ID NO: 13267

SEQ ID NO: 16234 - protein, 308 aa, Staphylococcus aureus VET0280R; identical to SEQ ID NO: 13262

SEQ ID NO: 16235 - protein, 483 aa, Staphylococcus aureus VET0282R; identical to SEQ ID NO: 13296

SEQ ID NO: 16236 - protein, 202 aa, Staphylococcus aureus VET0282R; identical to SEQ ID NO: 13267

SEQ ID NO: 16237 - protein, 308 aa, Staphylococcus aureus VET0282R; identical to SEQ ID NO: 13262

SEQ ID NO: 16238 - protein, 483 aa, Staphylococcus aureus VET0283R; identical to SEQ ID NO: 13296

SEQ ID NO: 16239 - protein, 202 aa, Staphylococcus aureus VET0283R; identical to SEQ ID NO: 13267

SEQ ID NO: 16240 - protein, 308 aa, Staphylococcus aureus VET0283R; identical to SEQ ID NO: 13262

SEQ ID NO: 16241 - protein, 483 aa, Staphylococcus aureus VET0284R; identical to SEQ ID NO: 13296

SEQ ID NO: 16242 - protein, 202 aa, Staphylococcus aureus VET0284R; identical to SEQ ID NO: 13267

SEQ ID NO: 16243 - protein, 308 aa, Staphylococcus aureus VET0284R; identical to SEQ ID NO: 13262

SEQ ID NO: 16244 - protein, 483 aa, Staphylococcus aureus VET0286R; identical to SEQ ID NO: 13296

SEQ ID NO: 16245 - protein, 202 aa, Staphylococcus aureus VET0286R; identical to SEQ ID NO: 13267

SEQ ID NO: 16246 - protein, 308 aa, Staphylococcus aureus VET0286R; identical to SEQ ID NO: 13262

SEQ ID NO: 16247 - protein, 483 aa, Staphylococcus aureus VET0287R; identical to SEQ ID NO: 13296

SEQ ID NO: 16248 - protein, 202 aa, Staphylococcus aureus VET0287R; identical to SEQ ID NO: 13267

SEQ ID NO: 16249 - protein, 308 aa, Staphylococcus aureus VET0287R; identical to SEQ ID NO: 13262

SEQ ID NO: 16250 - protein, 483 aa, Staphylococcus aureus VET0288R; identical to SEQ ID NO: 13296

SEQ ID NO: 16251 - protein, 202 aa, Staphylococcus aureus VET0288R; identical to SEQ ID NO: 13267

SEQ ID NO: 16252 - protein, 308 aa, Staphylococcus aureus VET0288R; identical to SEQ ID NO: 13262

SEQ ID NO: 16253 - protein, 483 aa, Staphylococcus aureus VET0289R; identical to SEQ ID NO: 13296

SEQ ID NO: 16254 - protein, 202 aa, Staphylococcus aureus VET0289R; identical to SEQ ID NO: 13267

SEQ ID NO: 16255 - protein, 308 aa, Staphylococcus aureus VET0289R; identical to SEQ ID NO: 13262

SEQ ID NO: 16256 - protein, 483 aa, Staphylococcus aureus VET0290R; identical to SEQ ID NO: 13296

SEQ ID NO: 16257 - protein, 202 aa, Staphylococcus aureus VET0290R; identical to SEQ ID NO: 13267

SEQ ID NO: 16258 - protein, 308 aa, Staphylococcus aureus VET0290R; identical to SEQ ID NO: 13262

SEQ ID NO: 16259 - protein, 483 aa, Staphylococcus aureus VET0291R; identical to SEQ ID NO: 13296

SEQ ID NO: 16260 - protein, 202 aa, Staphylococcus aureus VET0291R; identical to SEQ ID NO: 13267

SEQ ID NO: 16261 - protein, 308 aa, Staphylococcus aureus VET0291R; identical to SEQ ID NO: 13262

SEQ ID NO: 16262 - protein, 483 aa, Staphylococcus aureus VET0292R; identical to SEQ ID NO: 13296

SEQ ID NO: 16263 - protein, 202 aa, Staphylococcus aureus VET0292R; identical to SEQ ID NO: 13267

SEQ ID NO: 16264 - protein, 308 aa, Staphylococcus aureus VET0292R; identical to SEQ ID NO: 13262

SEQ ID NO: 16265 - protein, 483 aa, Staphylococcus aureus VET0294R; identical to SEQ ID NO: 13296

SEQ ID NO: 16266 - protein, 202 aa, Staphylococcus aureus VET0294R; identical to SEQ ID NO: 13267

SEQ ID NO: 16267 - protein, 308 aa, Staphylococcus aureus VET0294R; identical to SEQ ID NO: 13262

SEQ ID NO: 16268 - protein, 483 aa, Staphylococcus aureus VET0295R; identical to SEQ ID NO: 13296

SEQ ID NO: 16269 - protein, 202 aa, Staphylococcus aureus VET0295R; identical to SEQ ID NO: 13267

SEQ ID NO: 16270 - protein, 308 aa, Staphylococcus aureus VET0295R; identical to SEQ ID NO: 14873

SEQ ID NO: 16271 - protein, 483 aa, Staphylococcus aureus VET0296R; identical to SEQ ID NO: 13296

SEQ ID NO: 16272 - protein, 202 aa, Staphylococcus aureus VET0296R; identical to SEQ ID NO: 13267

SEQ ID NO: 16273 - protein, 308 aa, Staphylococcus aureus VET0296R; identical to SEQ ID NO: 13262

SEQ ID NO: 16274 - protein, 483 aa, Staphylococcus aureus VET0297R; identical to SEQ ID NO: 13296

SEQ ID NO: 16275 - protein, 202 aa, Staphylococcus aureus VET0297R; identical to SEQ ID NO: 13267

SEQ ID NO: 16276 - protein, 308 aa, Staphylococcus aureus VET0297R; identical to SEQ ID NO: 13262

SEQ ID NO: 16277 - protein, 483 aa, Staphylococcus aureus VET0299R; identical to SEQ ID NO: 13296

SEQ ID NO: 16278 - protein, 202 aa, Staphylococcus aureus VET0299R; identical to SEQ ID NO: 13267

SEQ ID NO: 16279 - protein, 308 aa, Staphylococcus aureus VET0299R; identical to SEQ ID NO: 14873

SEQ ID NO: 16280 - protein, 483 aa, Staphylococcus aureus VET0300R; identical to SEQ ID NO: 13296

SEQ ID NO: 16281 - protein, 202 aa, Staphylococcus aureus VET0300R; identical to SEQ ID NO: 13267

SEQ ID NO: 16282 - protein, 308 aa, Staphylococcus aureus VET0300R; identical to SEQ ID NO: 13262

SEQ ID NO: 16283 - protein, 483 aa, Staphylococcus aureus VET0302R; identical to SEQ ID NO: 13296

SEQ ID NO: 16284 - protein, 202 aa, Staphylococcus aureus VET0302R; identical to SEQ ID NO: 13267

SEQ ID NO: 16285 - protein, 308 aa, Staphylococcus aureus VET0302R; identical to SEQ ID NO: 13262

SEQ ID NO: 16286 - protein, 483 aa, Staphylococcus aureus VET0303R; identical to SEQ ID NO: 13296

SEQ ID NO: 16287 - protein, 202 aa, Staphylococcus aureus VET0303R; identical to SEQ ID NO: 13267

SEQ ID NO: 16288 - protein, 308 aa, Staphylococcus aureus VET0303R; identical to SEQ ID NO: 13262

SEQ ID NO: 16289 - protein, 483 aa, Staphylococcus aureus VET0304R; identical to SEQ ID NO: 13296

SEQ ID NO: 16290 - protein, 202 aa, Staphylococcus aureus VET0304R; identical to SEQ ID NO: 13267

SEQ ID NO: 16291 - protein, 308 aa, Staphylococcus aureus VET0304R; identical to SEQ ID NO: 13262

SEQ ID NO: 16292 - protein, 483 aa, Staphylococcus aureus VET0305R; identical to SEQ ID NO: 13296

SEQ ID NO: 16293 - protein, 202 aa, Staphylococcus aureus VET0305R; identical to SEQ ID NO: 13267

SEQ ID NO: 16294 - protein, 308 aa, Staphylococcus aureus VET0305R; identical to SEQ ID NO: 13262

SEQ ID NO: 16295 - protein, 483 aa, Staphylococcus aureus VET0307R; identical to SEQ ID NO: 13296

SEQ ID NO: 16296 - protein, 202 aa, Staphylococcus aureus VET0307R; identical to SEQ ID NO: 13267

SEQ ID NO: 16297 - protein, 308 aa, Staphylococcus aureus VET0307R; identical to SEQ ID NO: 13262

SEQ ID NO: 16298 - protein, 483 aa, Staphylococcus aureus VET0308R; identical to SEQ ID NO: 13296

SEQ ID NO: 16299 - protein, 202 aa, Staphylococcus aureus VET0308R; identical to SEQ ID NO: 13267

SEQ ID NO: 16300 - protein, 308 aa, Staphylococcus aureus VET0308R; identical to SEQ ID NO: 13262

SEQ ID NO: 16301 - protein, 483 aa, Staphylococcus aureus VET0309R; identical to SEQ ID NO: 13296

SEQ ID NO: 16302 - protein, 202 aa, Staphylococcus aureus VET0309R; identical to SEQ ID NO: 13267

SEQ ID NO: 16303 - protein, 308 aa, Staphylococcus aureus VET0309R; identical to SEQ ID NO: 13262
